United States Patent Application Publication US 2014/0259212 A1 - sequence listing, part 16

SEQ ID NO: 51119 - protein, 300 aa, Ralstonia metallidurans CH34
MNQASQAVSTSSIPAVRPDSDAVRTRLQGSRRRMNMYALTASLAAMGFGLFWLAWILWTTISLGVGGLSLDLFTQMTPAPNTAGGGLANAIFGSFVLVGMATLVGTPLGILAGIYLAEYGKKSPLASLIRFINDILLSAPSIVIGLFVYAIVVTRMGHFSGWAGVCALALLQVPIVVRTTENMLNLVPNALREAAVALGTPKWKMVMSITIKSSYAGIVTGVLLAVARIAGETAPLLFTALSNQFWSADLNKPMANLPVTIFRFAMSPFTEWQQLAWAGVFLITIGVLALNIIARMLFKK

SEQ ID NO: 51120 - DNA, 882 bp, Acidobacteria bacterium Ellin345
  CDS (1)..(882): transl_table=11
atgcctaacggcgatatcggaattcgtccgcagtcagagttaagctggtcgcgcaaatcggcgaacatcatgtcgaatgtcgcggcagtcggtgcagcggcgctggtgctactaccgctcggcgcgatctttgtgtacctgctgatgaagggcattggctccatcaatatcgcgtttctcactcagactcccaagcccgtgggtgagccgggtggtggcatggcgaacgcgattgcgggcagcgcgatgatcctggcgatggccagttgcatcggcgtcccactgggcatcggatcgggaatttatctttctgagtttgggcgcaaccgttttggtgactcggttcgcttcgtggccgacgttttgaatggggttccgtcgatcgtgatcggcatcgcggtgtactcactggtggtggtcccgcagaagcacttctcggcgttttcgggtgcagtggcgttgggcatcatgatgatccctacgatcgcgcgcacgacggaagagatgctgctgatggtgcctcaatcgatccgcgaggccgcctatgggttgggtatttcgcaatggcgcacgacgatctcgatcgctttacgcaccgcaacctcgggcgtgattaccggcgtgatgctggcgtttgcgcgtgtggcgggtgagaccgcaccgctgctgttcacggcattcggcaaccagtactggagccacagcctgaaccagccgaccgcggcgctgccgctgcagatttttacctacgcgatttcgcccttcgaagagtggcaccggcaggcgtgggcgggcgcattgattctgatcgttctgatcgtcggcgcggtgactgcggtgcgcgtcgtagcgggacgcggcatggtgcgggcgtcgaattga

SEQ ID NO: 51121 - protein, 293 aa, Acidobacteria bacterium Ellin345
MPNGDIGIRPQSELSWSRKSANIMSNVAAVGAAALVLLPLGAIFVYLLMKGIGSINIAFLTQTPKPVGEPGGGMANAIAGSAMILAMASCIGVPLGIGSGIYLSEFGRNRFGDSVRFVADVLNGVPSIVIGIAVYSLVVVPQKHFSAFSGAVALGIMMIPTIARTTEEMLLMVPQSIREAAYGLGISQWRTTISIALRTATSGVITGVMLAFARVAGETAPLLFTAFGNQYWSHSLNQPTAALPLQIFTYAISPFEEWHRQAWAGALILIVLIVGAVTAVRVVAGRGMVRASN

SEQ ID NO: 51122 - DNA, 903 bp, Mycobacterium sp. MCS
  CDS (1)..(903): transl_table=11
atgacggccacactcgaccagccggtgaaggtcccgaccttccacccggtcagcaccagccgcaagctcaagaacggcattgcgacaacgttgttcacggcgtcgttcgtcatcgcgatgatcccgctggtgtggctgctgtacaccgttgtcgcaaaaggtgtccgggcgatcgtctcgtccacctggtggtcgcattcgctcgccggcgtactcccggaggaattcgccggcggggtttatcacgcgatctacggcacgcttatccaggccctcatcgccgccgcgctgtccgttccgctgggtgtcatggccgcggtctacctggtggagtacgggcggggcaagttcgccaaggtgacgaccttcatggtcgacatcctcgccggtgtgccctcaatcgtggccgcgcttttcatcttcgcattgtggatcgccacgatgggcttcgagcagagcgcctttgccgtgtcactggccctggtgttgttgatgttgcccgtcgtggtgcgcaataccgaggagatgctcaagctcgtacccgacgaactgcgggaagcgtcctatgcgttggggattccgaagtggaagaccatcatgcgggtcgtcgtgcccacagcactccccgggatgatcagcggcatcctgcttgcgctggcccgggtcatgggtgagacggctccggtcctcgtgctcgtcggttacagccgctcgatcaacttcgacgcgttcgaaggcaacatggcatcgctgccactgctcatctacaccgaactcgtcaacccggaatcggccggcgcactgcgggtctggggcgccgcgctgaccctgatcttgatcatcgcggcgttgtacctcggtgctgcattcatcaaccgatacctgacgcggaacagagtttag

SEQ ID NO: 51123 - protein, 300 aa, Mycobacterium sp. MCS
MTATLDQPVKVPTFHPVSTSRKLKNGIATTLFTASFVIAMIPLVWLLYTVVAKGVRAIVSSTWWSHSLAGVLPEEFAGGVYHAIYGTLIQALIAAALSVPLGVMAAVYLVEYGRGKFAKVTTFMVDILAGVPSIVAALFIFALWIATMGFEQSAFAVSLALVLLMLPVVVRNTEEMLKLVPDELREASYALGIPKWKTIMRVVVPTALPGMISGILLALARVMGETAPVLVLVGYSRSINFDAFEGNMASLPLLIYTELVNPESAGALRVWGAALTLILIIAALYLGAAFINRYLTRNRV

SEQ ID NO: 51124 - DNA, 876 bp, Rubrobacter xylanophilus DSM 9941
  CDS (1)..(876): transl_table=11
atgaaccgcaggccgctggccgaggcgacgacgcgctacaggcgcaggaagctcgtggaccgcgtcatgacggcgctggcctacctgtgcaccgcggccgccgtaattccgctgacctggatagtgatctacgtgatctaccggggcctcggggcctgggacgcggagttcttcaccgccctgccccagctctacggcgacggcgggggggtgcgcaacgggatcgtcggcaccctcctcatcgtggggatggccaccctcatgggggtgcccgtggggatcatggccggcatctacctcgccgagtacgggagcaaccgcctcgggggggtggtgcgctttatggccgacaccctcaccggcgtcccctccatcgtggtcggcctgttcgccttcggggtggtggtggtcagcatgggcgggttcaacgcgttcgccggggccttcgcgctggccatcatgatggtgcccgtcatcacccggacgaccgaggagatcctgcgcctggtccccaactccatccgggaggcctcgctggcgctcggcatcccgcgctggaagaccatcctgcgggtggtggtgcccacggcgctcagcggcatcgtgaccggcgttctgctcgcggtggcccgggtggcaggggagacggccccgctcatcctcaccatcctggggaccaacttccccataagcctcaaccccttcgaggggccctccacgacgctctcgctgcagatctaccagctcgccgggcagccctcgccgcaggtggtggaggtggcgtggggggcggcgctgttgctggtgctgatggtgctgggcctcagcgtggcggcgcgggtgatcttcaggggcaacgcgcacaccaggttctag

SEQ ID NO: 51125 - protein, 291 aa, Rubrobacter xylanophilus DSM 9941
MNRRPLAEATTRYRRRKLVDRVMTALAYLCTAAAVIPLTWIVIYVIYRGLGAWDAEFFTALPQLYGDGGGVRNGIVGTLLIVGMATLMGVPVGIMAGIYLAEYGSNRLGGVVRFMADTLTGVPSIVVGLFAFGVVVVSMGGFNAFAGAFALAIMMVPVITRTTEEILRLVPNSIREASLALGIPRWKTILRVVVPTALSGIVTGVLLAVARVAGETAPLILTILGTNFPISLNPFEGPSTTLSLQIYQLAGQPSPQVVEVAWGAALLLVLMVLGLSVAARVIFRGNAHTRF

SEQ ID NO: 51126 - DNA, 825 bp, Clostridium perfringens ATCC 13124
  CDS (1)..(825): transl_table=11
atgagaaaagttaaagataatatattaaatgggttagtttggttatcagccatctttacaataggaattcttgtaattattttaggattcatatttataaagggtataggaaaaataaatttaacattcttaacaagtaattattcagctggtggcggtggtggaatattgccaatgatagtaacaaccttatggactgttttactttccttagcagtggctactccaataggagttttgggagctgtatatttacaagaatatgctaaacaaggaaagatggttaagtttataagatttgctactgaaagtttagcaggtattccttcaattgtttatggattatttggaggtatattctttgtagtagctttaaaaatggggtattcaattttagcaggttcattaacagtatcaataataattttacctgtaataattagaactacagaagaagctttaaaaactgtgccagaatcatatagagaagcatccttaggattaggtgctacaaagtttcaaactttatataaagtaatattaccaagtgcaatgcctggaatactttcaggagtaatattatcaataggacgtataataggggaatcagcagctatattacttactgctggaactgttgcacaaatgccaaaaggaattttttcaagtgcaagaacacttacagttcaagcttaccttgtaacaaaggaaaaaggagatatagaaacagcagcggcagttggaatagttcttatagttataatactagcattaaatatttcagctaagttaatagctaaaaaatttaataaggcaaactattaa

SEQ ID NO: 51127 - protein, 274 aa, Clostridium perfringens ATCC 13124
MRKVKDNILNGLVWLSAIFTIGILVIILGFIFIKGIGKINLTFLTSNYSAGGGGGILPMIVTTLWTVLLSLAVATPIGVLGAVYLQEYAKQGKMVKFIRFATESLAGIPSIVYGLFGGIFFVVALKMGYSILAGSLTVSIIILPVIIRTTEEALKTVPESYREASLGLGATKFQTLYKVILPSAMPGILSGVILSIGRIIGESAAILLTAGTVAQMPKGIFSSARTLTVQAYLVTKEKGDIETAAAVGIVLIVIILALNISAKLIAKKFNKANY

SEQ ID NO: 51128 - DNA, 909 bp, Rhodococcus sp. RHA1
  CDS (1)..(909): transl_table=11
atgaccgcgacactcgacaagccggtcaaggcccccaccttccagggggtcggtgtccgccgacgcatcatcgatctgaccgccaccgtcctcgtgacgctggcagtgctcgtggcgctggtcccgctggtgtgggtcctggtcaccgcggtcatcaagggaatccctgccctgacgtcggccacgtggttcacccactcgctcagcggactgacgtcctcggcggcaggcggcggcatctatcacgcgctgatcggcacgattctgcagggaatcgtctgcgcggtgctgtccattcccctcggactgttcgtcgcgatctatctcgtcgagtacgccgaccggaagtcgcggctggcgaagctgaccacgttcatggtcgacatcctgagcggtgtcccgtccatcgtggccgccctgttcatctacgccctgtggatcgcgacgttcggtttccccaagtccggcttcgccgttgcgctcgccctggtgctgctgatggttcccgtcgtcgtccgcagcacggaggagatgctccgcatcgttccgcaggacctgcgcgaggcgtcgtacgcgctgggcgttccgaagtggaagacgatcgccaagatcgtgctgcccaccgcactgcccggcatcatcacgggcgtcatgctggcgctggcccgggtgatgggcgaaaccgcgccgctgctgatcctcgtgggttacgcacccttcatcaatttcaatctgttcggtggcgagatgggcacgctgcccggcgtcatggtcgccgagatgaacaacccgaccgatgccggtaccaaccgcatctggggcgcggcgctcacgctgattctcctcattgccatcctcaacatcctggccaaggtcatcggccacttctcacaggtgcgcagcaagtga

SEQ ID NO: 51129 - protein, 302 aa, Rhodococcus sp. RHA1
MTATLDKPVKAPTFQGVGVRRRIIDLTATVLVTLAVLVALVPLVWVLVTAVIKGIPALTSATWFTHSLSGLTSSAAGGGIYHALIGTILQGIVCAVLSIPLGLFVAIYLVEYADRKSRLAKLTTFMVDILSGVPSIVAALFIYALWIATFGFPKSGFAVALALVLLMVPVVVRSTEEMLRIVPQDLREASYALGVPKWKTIAKIVLPTALPGIITGVMLALARVMGETAPLLILVGYAPFINFNLFGGEMGTLPGVMVAEMNNPTDAGTNRIWGAALTLILLIAILNILAKVIGHFSQVRSK

SEQ ID NO: 51130 - DNA, 888 bp, Trichodesmium erythraeum IMS101
  CDS (1)..(888): transl_table=11
atggcagatattaccccaaaacattctgaatctatcgttaacctgaaaagaaatcctacaaggccaagggaaatatttaataaagtgatgacaggattatcaggtgcttgcatagttatcactcttatccctctatttgcagtattaacctatgtttttatcaaaggattagctcgtttaaacttagatttatttactaagttacctccaacagcaggtcaagaaacagggggtattgctaatgcaatactcggcacaattatggtagtagcaattgctagtttaattgctgtaccttttggtatcttaacagcagtttatttatcagaatttagtaacgaaagaaatgctcgtccaattcgatttgctactaatattttgagcggtgtcccatcaattattgctggggtatttgcctatagtttactagttttatctatgggtaagttttcagcctttgccgggggatttgctttatctgttttgatgttacctactattattaaagctactgatgaagctttgcaaatagttcctagagatattagagcagcatccctaggagttggtgcttctaattatcagactgttctacagatagttttacccactgcttttcccagtattatcacaggtataactctttctattgctcgtgctgctggagaaacagctccactactttttactgtgatttattctaataattggcctcgtagtccctttgctcccacgttaccatctttgtcatatctagtatatgactttgcccgcagttttgatgtggttttacaagaatttgcttgggcaggttccttggttttagttttattagttttaattaccagtattctttctcgttgggtaacgagtaaaaagcaattttga

SEQ ID NO: 51131 - protein, 295 aa, Trichodesmium erythraeum IMS101
MADITPKHSESIVNLKRNPTRPREIFNKVMTGLSGACIVITLIPLFAVLTYVFIKGLARLNLDLFTKLPPTAGQETGGIANAILGTIMVVAIASLIAVPFGILTAVYLSEFSNERNARPIRFATNILSGVPSIIAGVFAYSLLVLSMGKFSAFAGGFALSVLMLPTIIKATDEALQIVPRDIRAASLGVGASNYQTVLQIVLPTAFPSIITGITLSIARAAGETAPLLFTVIYSNNWPRSPFAPTLPSLSYLVYDFARSFDVVLQEFAWAGSLVLVLLVLITSILSRWVTSKKQF

SEQ ID NO: 51132 - DNA, 903 bp, Synechococcus sp. CC9311
  CDS (1)..(903): transl_table=11
atgaagtatccctcaatcgctaggtcggcagaaggaatccctgacctgaactataaaagctggagaaagcgcaatatcagtagtcgtcttttatctgtgttggctggtttttttgccatattggctgtgttgccacttatagctgttcttgtttatattctaataaagggagtagcaagtttaaatcttgatctattcacaaagcttcctccgcctccaggcggtgaaggcggaggtgtcggcaatgcaattattggaagtattgttgtcacatctattgccacaatgcttgcaattcccattggtgttggcggtggaatttacttagcggaatactctaccggtcgcagattttctcagtttattagatttggaaccaacgtacttgctggagttccatcgattattgctggtgtttttgtttatggagttattgtttccactcgaatcctctttggccatacattcagtgctatcgctggaggagccgctctctctgtcttgatgcttcccactgtggtcaagacaaccgatgaaggcttgaaactcgtctccaacgacctaaggcgtgcagctttcggagtcggcgcctctcagttcgtgaccgttagccaaatcactctccctaaggctttcaccccaattgcaactggagttgtgttatcgattgctagagcggctggtgaaactgcacctttgatttttaccgcacttttttcaccattttggccgaatgggatcttcgaaccaattgcaactttatccgtcttaatttacaatttttccgctcagccttatgaggttcaaaaccaactcgcctgggcagcctcctttattcttgttgtgttcattcttgtactcaacttgctagctcgttggctagggaggatagccagtcaatga

SEQ ID NO: 51133 - protein, 300 aa, Synechococcus sp. CC9311
MKYPSIARSAEGIPDLNYKSWRKRNISSRLLSVLAGFFAILAVLPLIAVLVYILIKGVASLNLDLFTKLPPPPGGEGGGVGNAIIGSIVVTSIATMLAIPIGVGGGIYLAEYSTGRRFSQFIRFGTNVLAGVPSIIAGVFVYGVIVSTRILFGHTFSAIAGGAALSVLMLPTVVKTTDEGLKLVSNDLRRAAFGVGASQFVTVSQITLPKAFTPIATGVVLSIARAAGETAPLIFTALFSPFWPNGIFEPIATLSVLIYNFSAQPYEVQNQLAWAASFILVVFILVLNLLARWLGRIASQ

SEQ ID NO: 51134 - DNA, 858 bp, Rhizobium leguminosarum bv. viciae 3841
  CDS (1)..(858): transl_table=11
atggccacccattcgggttccatttaccgccgccgccagatcggcagcatgatcgccctttcactctgcggcatcgcgaccgtggtcggcctggtctttctggtttggatcctctggacgacgctgatacacggactgtccgcgctcagccccagtctcgtcacggagatgacgccgccgcccggcgaagatggcggcggtctcgccaacgccttcatgggcagcctgctgatggtcgttctggcggtcatcatcggcacgccgatcggcgtgctggccggcacctttttgtcggagttcagccgcggcaagaagatcggcgaggcgatccgcttcgtcaacgatatcctgctttcggcgccgtcgatcatcatcggcttgtttgtctatgaactggtcgtccgcccgacgtcacgcttttccggctttgccggcggcatcgcgctcgccttcatcttcctgccggtcgtggtgcgcaccaccgacgaaatgttgcggctggttccggacgtcatgcgggaggcagcactttcgctcggcatcccgcgctggaaggtaacggtcaacgtactctaccgcgccgcctccgcaggcatcctgacgggtatcctgcttgcgatcgcccgcatttcgggcgaaaccgcgccactcctttttacggctctgaacaaccagtattggagcttggacatgtcgcagccgatggcgaatatccccgtcgtcatcttccagttcgctatgagcccctatgagcaatggcagaatcttgcctgggcaggcgccttcgtcatgacggcgatcgtgcttctcctcagcgtcggctcccgcgccatcctcaaccgcaggaatgcgaaatga

SEQ ID NO: 51135 - protein, 285 aa, Rhizobium leguminosarum bv. viciae 3841
MATHSGSIYRRRQIGSMIALSLCGIATVVGLVFLVWILWTTLIHGLSALSPSLVTEMTPPPGEDGGGLANAFMGSLLMVVLAVIIGTPIGVLAGTFLSEFSRGKKIGEAIRFVNDILLSAPSIIIGLFVYELVVRPTSRFSGFAGGIALAFIFLPVVVRTTDEMLRLVPDVMREAALSLGIPRWKVTVNVLYRAASAGILTGILLAIARISGETAPLLFTALNNQYWSLDMSQPMANIPVVIFQFAMSPYEQWQNLAWAGAFVMTAIVLLLSVGSRAILNRRNAK

SEQ ID NO: 51136 - DNA, 888 bp, Pediococcus pentosaceus ATCC 25745
  CDS (1)..(888): transl_table=11
atgaacgctaagagagttgataagattgctacagccgttatttatctattagttggaatcgttattttaattttagtggctctactaggttttatcttgattacggggttaccacacgtcacttggtcatttttaacctcaccagcatcggcatttaatgctggaggcgggattggtgatcagctctttaactccttttatctactatttctaaccttgttgatttcttttccaatttcacttggagctggaatttacttagcggaatatgcgaagaaaaatcgagtaactgaagctattcgaattaccattgaagttttaagttccttaccatcagtagtagtggggttatttggatttttactcttcgtagtgcaatttaaattaggattctccattatctcaggagcgattgctttaaccttcttcaacctaccgctgttaactcgaaatattgaaaattctttaaatggtgtttctaatttacaacgagaggcggggctttcattaggactttctcgttggaaaaccgttactaaagtggtcgtgcctgctgctctaccaggaatcataactggaattattttaagtgctggacgcgtttttggagaagccgccgctttgatttttaccgctggacagagtgctccagtattaaactacgcaaattggaatccttttagtggcgacagtcccttgaatattttccgtcctgccgaaaccttggcagtgcatatttggaagattaataccgaaggaatcatgcccgatgccagtcaagtttccgccggggcttctgcagttttaatcattgcagtattagtctttaatcttggggcccgttgggcaggaaattatgtttatcgtagaatcactgccagcaaatag

SEQ ID NO: 51137 - protein, 295 aa, Pediococcus pentosaceus ATCC 25745
MNAKRVDKIATAVIYLLVGIVILILVALLGFILITGLPHVTWSFLTSPASAFNAGGGIGDQLFNSFYLLFLTLLISFPISLGAGIYLAEYAKKNRVTEAIRITIEVLSSLPSVVVGLFGFLLFVVQFKLGFSIISGAIALTFFNLPLLTRNIENSLNGVSNLQREAGLSLGLSRWKTVTKVVVPAALPGIITGIILSAGRVFGEAAALIFTAGQSAPVLNYANWNPFSGDSPLNIFRPAETLAVHIWKINTEGIMPDASQVSAGASAVLIIAVLVFNLGARWAGNYVYRRITASK

SEQ ID NO: 51138 - DNA, 915 bp, Mycobacterium avium 104
  CDS (1)..(915): transl_table=11
atgacctcgatgctggaccgcccgctcaagtcgcggacgttctcgccgctgtcccgacgccgtcgagccgcgaattccgttgcgaccgtgctggtttcggtgtcgttgctggtcgcggtgaccccgctggtgatggtgctgtgctcggtggtcgtcaaggggttcagagcgatcacctcgaccgtgtggtggtcgcactcgcaggccgggatgaccgcgttcgtgaccgggggcggtgcctatcacgcgctggtcggcaccgtgctgcagggattggtgtgcgcggcgatctccatcccgatcggcctgatggtggccatctatctggtcgagtacggcggcggcaccccgctgggccggctggcctcgttcatggtggacatcctgagcggggtgccctcgatcgtggcggcgttgttcgtctatgcgctgtgcgtggccacgctggggctgccgcgctcggagttcgcggtgtcgctggcgctggtcctgctgatgctgccggtgatcgtgcgggccaccgaggagatgctgcggatcgtcccggtggatctgcgcgaggccagctacgcgctgggcatcaccaagtggaagaccatcgcccgggtggtcctgcccaccgggctgtccggcatcgtcaccggcatcttgctggcgatggcccgggtgatgggggagacggcgccgctgctgatcctggtcggctatgcacagtcgatgaacttcgacatcttcagcgggttcatggggacgctgcccggcatgatgtacaaccaggcgtcggccggcgcgggcatcaaccccatccccacggatcggttgtggggtgccgcgttgaccctcatcctggtgatcgccacgatcaatatcgtggcccgggtgataaccaagttccttggcgccagaaagtcatag

SEQ ID NO: 51139 - protein, 304 aa, Mycobacterium avium 104
MTSMLDRPLKSRTFSPLSRRRRAANSVATVLVSVSLLVAVTPLVMVLCSVVVKGFRAITSTVWWSHSQAGMTAFVTGGGAYHALVGTVLQGLVCAAISIPIGLMVAIYLVEYGGGTPLGRLASFMVDILSGVPSIVAALFVYALCVATLGLPRSEFAVSLALVLLMLPVIVRATEEMLRIVPVDLREASYALGITKWKTIARVVLPTGLSGIVTGILLAMARVMGETAPLLILVGYAQSMNFDIFSGFMGTLPGMMYNQASAGAGINPIPTDRLWGAALTLILVIATINIVARVITKFLGARKS

SEQ ID NO: 51140 - DNA, 927 bp, Mycobacterium smegmatis str. MC2 155
  CDS (1)..(927): transl_table=11
atgaccacgtcgatgacgtcaacactcgaacagccggtgaaggcaccggcattccaaggtgtgagcctgcggcgcaggctgaccgaccacaccgccacggtgctggtgaccacctcggtgctgatcgcgctgatcccgctgctgtgggtgctgtactcggtgatcaccaaggggattcacgccgtgacctcgccgacgtggttcaccaactcgcaggccgggatgacggcgttctcgccgggcggcggcgtctaccacgcgatcgtcggcacggtcctgcagggactcgtgtgctccctgatctcgatcccgatcggtgtcatggtcgcggtgtacctcgtcgagtacgcgggtggttcgcgtctgggcaagatcaccaccttcatggtggacatcctcaccggtgtgccgtccatcgtcgcggcgctgttcatctatgcgctgtgggtcgcgaccctgggcttccagcggtccggcttcgcggtgtcactgtcgttggtgctgctgatgatcccggtgatcgtgcgtgccaccgaggagatgctgcgcatcgtgccgatggacctgcgtgaggccagttacgcactgggcgtgcccaaatggaagacgatcgtccgcatcgtgatcccgacggcgctgtcgggcatcgtcaccggtgtgatgctgtcgctggcccgtgtgatgggcgagacggcgccgctgctggtcctcgtcggctacgcccaggcgatgaacttcgacatcttcagcggcttcatgggctcgctgcccggcatgatgtacgaccagatctcggcaggcgcgggcgccaaccccgtgcccacggaccggctgtggggtgcggcgctcacgctcatcctgctgatcgccctgctgaatgtcggcgcccgcttcgtcgcgaaaatctttgccccgaaaaaggtttag

SEQ ID NO: 51141 - protein, 308 aa, Mycobacterium smegmatis str. MC2 155
MTTSMTSTLEQPVKAPAFQGVSLRRRLTDHTATVLVTTSVLIALIPLLWVLYSVITKGIHAVTSPTWFTNSQAGMTAFSPGGGVYHAIVGTVLQGLVCSLISIPIGVMVAVYLVEYAGGSRLGKITTFMVDILTGVPSIVAALFIYALWVATLGFQRSGFAVSLSLVLLMIPVIVRATEEMLRIVPMDLREASYALGVPKWKTIVRIVIPTALSGIVTGVMLSLARVMGETAPLLVLVGYAQAMNFDIFSGFMGSLPGMMYDQISAGAGANPVPTDRLWGAALTLILLIALLNVGARFVAKIFAPKKV

SEQ ID NO: 51142 - DNA, 882 bp, Nostoc punctiforme PCC 73102
  CDS (1)..(882): transl_table=11
atgagtggttacatccagtcagaaacggatgaatctttggtggcagaattatgcagtcctctgccaacgaagcgattaatatttacatacgcaatgaatgcgatcgcttttggttttacaggtctagcactcattcctttattatcaattttatgggaaattttcatccggggaatatctggactcaaatctgaaatgtttgtcaaagcagtgattgataatggctttggcaatgccatcctcggaaccataattatggtgataattggtgctattttaagcattcccacagggattatgacaggaattttcttagcagaatttggacaaagcaacacaattgctagttttgttcgttttatcaccagcattcttacaggtgtgccttcaattgttgtaggtgtattcgcttatggcgtaatagttctagtaactaaaggatttagtgcgatcgcaggtggttttgctttagctgtgattatgctacctgtgattatactgacaacagaagaatccttaaaactgattcctgcatctcaacgcctcgcctctgctgctttaggtggaactcgcttccaaactacttttcgcattgtcgtcactactgcaatccccggaattactacaggtattttattagctgtagctcgtgctgctggtgaaacagcacccttaatttttaccgctttatttagtctagattggtcagaaggattgttaagtccaacagcttctttaccagtattgatttttaacctctacaacgaccccgacccagaaaaaagccaattggtatggactacttctatagttttactcggcttaattttatctgtcagcattatttcgcgcttagttattagacagagaagaataaaatga

SEQ ID NO: 51143 - protein, 293 aa, Nostoc punctiforme PCC 73102
MSGYIQSETDESLVAELCSPLPTKRLIFTYAMNAIAFGFTGLALIPLLSILWEIFIRGISGLKSEMFVKAVIDNGFGNAILGTIIMVIIGAILSIPTGIMTGIFLAEFGQSNTIASFVRFITSILTGVPSIVVGVFAYGVIVLVTKGFSAIAGGFALAVIMLPVIILTTEESLKLIPASQRLASAALGGTRFQTTFRIVVTTAIPGITTGILLAVARAAGETAPLIFTALFSLDWSEGLLSPTASLPVLIFNLYNDPDPEKSQLVWTTSIVLLGLILSVSIISRLVIRQRRIK

SEQ ID NO: 51144 - DNA, 852 bp, Actinobacillus pleuropneumoniae serovar 1 str. 4074
  CDS (1)..(852): transl_table=11
atgtatcgtaataaaaacgggcgtttttaccgccgtaaatgtgtaaacaaagttatgctctcgggttctttctttgcggtcgggttcgggctgttttggctagattggattttatttaccctaattcataaagggattccggaactctctttaagcctgtttaccttaccgacgccggcaccgaatgaaacgggcggtttaagtaatgcgattatgggttcctttatgatgttggttttcgccactttaatcggtacgccggtaggtattttagccggtacttacttagccgaatacggacgttacagtaagttggcaaaagttacccgcttccttaacgacattttactttcggcgccgtcgattattatcggtttatttatctatgcgatttacgtttcgcatgtgaagcattattcaggttgggcgggttcttttgcgctcgctattttagtgattccggtggtcgtacgtaccaccgacagtatgttgaatctgattccgaataacttacgtgaagctgctgtggcattaggttgtccgcaatggcgtatgattacgatggtttgttataaagcggctcgctcagggattattaccggggtgttattggcggtggcgcgtatttcgggggaaaccgcaccgttattgtttaccgcactttcaaaccaattcagctcgctggatatgaacgccccgatggcaaacttaccagtggtcatttatcaatatgcggcaagtccgttccaagattggaatagccttgcttgggcgggcgcaacattaattaccgggtttgtgttatgtataaatattctcacccgtatctttttcaaaccgaaacaacaatag

SEQ ID NO: 51145 - protein, 283 aa, Actinobacillus pleuropneumoniae serovar 1 str. 4074
MYRNKNGRFYRRKCVNKVMLSGSFFAVGFGLFWLDWILFTLIHKGIPELSLSLFTLPTPAPNETGGLSNAIMGSFMMLVFATLIGTPVGILAGTYLAEYGRYSKLAKVTRFLNDILLSAPSIIIGLFIYAIYVSHVKHYSGWAGSFALAILVIPVVVRTTDSMLNLIPNNLREAAVALGCPQWRMITMVCYKAARSGIITGVLLAVARISGETAPLLFTALSNQFSSLDMNAPMANLPVVIYQYAASPFQDWNSLAWAGATLITGFVLCINILTRIFFKPKQQ

SEQ ID NO: 51146 - DNA, 894 bp, Burkholderia vietnamiensis G4
  CDS (1)..(894): transl_table=11
atgagtcagcccatcatgaatttccccggcccggacggcgccgtgctcgaagcgatgcgcagccgcctgcagcgcaagcgcaaggcgatcaacgcgatcgcgctgaccgcgtcgctcggcgcgatggcgttcggcctgctgtggctcgtgtggattctgtacacgacggtgcacctcggtatcggcggcctgtcgctgcaactgttcaccgaatcgacgccggcgccgaacacgaccggcggcggtctcgccaacgcgatcgtcggcagcctgctgctgtgcggcttcggcacgctggtcggcacgccgatcggcatcctcgcgggcgtctatctcgccgaatacggccagaagaacctgctcgcgagcacgatccgcttcatcaacgacatcctgctgtcggcgccgtcgatcgtgatcggcctgttcgtgtatgcgatcgtcgtcgcgaagtccgggcgcttctcgggctgggccggcgtgatcgcgctcgcgctgctgcagattccgatcgtgatccgcacgaccgagaacatgctgaagctggtgccgaacgcgctgcgcgaagcagcggtcgcgctcggcacgccgaagtggcgcatggtgatgaagatcacgctgcgcgcctcggtgggcgggatcgtgaccggcgtgctgctcgcggtagcgcggatcgccggcgaaaccgcgccgctgctgttcaccgccctgtcgaaccagttcttctcgtgggacatgagccagccgatggccaacctgcccgtcacgatctacaagttcgcgatgagcccgttcgcggaatggcaatcgctcgcgtgggcgggcgtgttcctgattacgctcggtgtgctcggactcaacatcctggcgcgctcgatcttctcgaaaaagtaa

SEQ ID NO: 51147 - protein, 297 aa, Burkholderia vietnamiensis G4
MSQPIMNFPGPDGAVLEAMRSRLQRKRKAINAIALTASLGAMAFGLLWLVWILYTTVHLGIGGLSLQLFTESTPAPNTTGGGLANAIVGSLLLCGFGTLVGTPIGILAGVYLAEYGQKNLLASTIRFINDILLSAPSIVIGLFVYAIVVAKSGRFSGWAGVIALALLQIPIVIRTTENMLKLVPNALREAAVALGTPKWRMVMKITLRASVGGIVTGVLLAVARIAGETAPLLFTALSNQFFSWDMSQPMANLPVTIYKFAMSPFAEWQSLAWAGVFLITLGVLGLNILARSIFSKK

SEQ ID NO: 51148 - DNA, 909 bp, Exiguobacterium sibiricum 255-15
  CDS (1)..(909): transl_table=11
atggccttaccagaaaaacaacctgtacagaaaaagtttattgatcctgctgctgtgaaaaaatcaatcagccagcgtcttgtcgtaaacaatgtcacgaaagtcgtattcttaattggactgttattcggtttagtcgtacttggtattctgctctttggtgtcattcgtgacggagcggcctggttatcactcgacttcctacaaaatgcaccatcccgccggccggatcgtgccggaatctatcctgcgctgatgggatcgattttcctaatgctcctgatcattccgatgattttcatcttgggtgtcggagcagcgatttatttggaagaatatgcgaaaaaaggccgcatgacatcgttcatcgaagtcaatatctcaaacttggcgggtgttccgtcgattgttttcggattactcggcttaaccttttttgtccggaacatgggcttcggctcgacgttgatcgccggagcattaacgcttgcgctgatgagcttgccggtcgtcatcgtttcatcgcaagaagcaattcgtgcggtgccgcaagcgatgcgtcatgcgtcactcgccctcggagcctcgaaatggcaaacgacgtttaaagtcgttttaccggcgtcgcttccgggcgtcatcacgggaatcatccttgccgtctcgcgtgccatcggagaaacggcaccactcatcatggtcggagctgccatcttcatcgcccgtgcaccggaagggattttctcagagtttacagcgttaccgattcaaatctacaactggacaagccgtccgcaagctgacttccaaggtctggctgctgccggaatcatcatcctgatggtcatcctcttgacgatgaattcactggcgatttggatccgcaaccgtttttcaaaacgatactaa

SEQ ID NO: 51149 - protein, 302 aa, Exiguobacterium sibiricum 255-15
MALPEKQPVQKKFIDPAAVKKSISQRLVVNNVTKVVFLIGLLFGLVVLGILLFGVIRDGAAWLSLDFLQNAPSRRPDRAGIYPALMGSIFLMLLIIPMIFILGVGAAIYLEEYAKKGRMTSFIEVNISNLAGVPSIVFGLLGLTFFVRNMGFGSTLIAGALTLALMSLPVVIVSSQEAIRAVPQAMRHASLALGASKWQTTFKVVLPASLPGVITGIILAVSRAIGETAPLIMVGAAIFIARAPEGIFSEFTALPIQIYNWTSRPQADFQGLAAAGIIILMVILLTMNSLAIWIRNRFSKRY

SEQ ID NO: 51150 - DNA, 912 bp, Kineococcus radiotolerans SRS30216
  CDS (1)..(912): transl_table=11
atgagcgtcgtcgacacggctcccgagcgggaactgcccgccgcgctggaggactcccgcggacggggcgggcgcgtggtccgcaacaccgtcgcgacggtggtcatggtgctggccttcgtcatcgccctcatcccgctggtgtggatcctcgccaccgtcatccagaagggggcggcgctgctgcccgacccctcgtggtggctcaactcccagcgcggcatcaccccgcgcatcgagggcggcggcgcctaccacgccatcctcggcacgctgctgcaggcgctggccaccgcggtcatcgccgtcccgctggggatcatggccgcgatcctgctcgtcgagtacggcgcgagccggatcgcccgcgtcgtgagcttcaccgtcgacatcctctcggggctgccctcgatcgtcgcggcgctgttcatctacgccttctgggtgaccacgctcggcttcgcccgctccgggttcgccgtctccctggccctggtgctgctcatggtcccggtcgtggtccgctccaccgaggagatgctcaagctcgtcccgatggagctgcgcgaggcgtcctacgcgctgggcgtgccgaagtggaagacgatcgtgaggatcgtcctgccgaccgcgttctccggcatcgtcaccggcgtgctgctgggcctggcccgcgtcatgggtgagaccgcgcccctgctgatcctggtcggctactcgcagtcgatcaacaccaacctgttcagcggcaacatggcggcgctgccgctcatgatcaacaacgaccgtcagcaggcgctggctcccgcggtggagcgcgtctgggcggccgccctcacactggtgctcatcgtgctggtgctcaacatcgccggtcgggccatcgcccgcttcagcaggctcgagaagtag

SEQ ID NO: 51151 - protein, 303 aa, Kineococcus radiotolerans SRS30216
MSVVDTAPERELPAALEDSRGRGGRVVRNTVATVVMVLAFVIALIPLVWILATVIQKGAALLPDPSWWLNSQRGITPRIEGGGAYHAILGTLLQALATAVIAVPLGIMAAILLVEYGASRIARVVSFTVDILSGLPSIVAALFIYAFWVTTLGFARSGFAVSLALVLLMVPVVVRSTEEMLKLVPMELREASYALGVPKWKTIVRIVLPTAFSGIVTGVLLGLARVMGETAPLLILVGYSQSINTNLFSGNMAALPLMINNDRQQALAPAVERVWAAALTLVLIVLVLNIAGRAIARFSRLEK

SEQ ID NO: 51152 - DNA, 864 bp, Xylella fastidiosa Ann-1
  CDS (1)..(864): transl_table=11
atgtccgcaacatcgcaacatctgtacaagcgccgccgactgatcaatgctgccgccatcacgatctcttgtatcgccgcactgttcggccttttcttcctcatttggattttgtggactctcatcagtaaaggactccctgggatcgatctagatttattcactaaaataacaccgccacccatgcagaaaggcggcctagctaatgcgttcttaggtagtgcaatcatgtgcctgcttgcaatcgtcatcggtacacctgtaggcattgctgccggcacttggttggctgaatatggcaacacatcccaaataagcacagtcgtccgcttcgtaaacgacatcctactgtcagcgccatccatcgtgctcggcctgtttgtctacactctctacgtgatgcacaccggggggcacttctccgcattttcgggtgccctggcactagttttcatcgtacttccgatcgtcgtacgcaccaccgatgagatgctgcgtttggtaccaggacaaatgcgtgaagcagcactatcgctaggtatcccacagtggaagatgattatacaagtgttataccgcagcgcatcggccggcatcctcactggcattctgctagcactggcacgtatcagtggtgaaacagcacctctactctttacagcctttggcaatcaatattggaacagcaatatcttcaagcccattgcctcgttgcccttggtgatgaaccaattcgccagcagcccatacaaatcctggcaattattggcatggtctggtgcattagtactcacggtattcgttcttctggttagcctgggtgcacgtgcgctattgctgcgcaacaagatacccaacacatga

SEQ ID NO: 51153 - protein, 287 aa, Xylella fastidiosa Ann-1
MSATSQHLYKRRRLINAAAITISCIAALFGLFFLIWILWTLISKGLPGIDLDLFTKITPPPMQKGGLANAFLGSAIMCLLAIVIGTPVGIAAGTWLAEYGNTSQISTVVRFVNDILLSAPSIVLGLFVYTLYVMHTGGHFSAFSGALALVFIVLPIVVRTTDEMLRLVPGQMREAALSLGIPQWKMIIQVLYRSASAGILTGILLALARISGETAPLLFTAFGNQYWNSNIFKPIASLPLVMNQFASSPYKSWQLLAWSGALVLTVFVLLVSLGARALLLRNKIPNT

SEQ ID NO: 51154 - DNA, 894 bp, Synechococcus sp. RS9917
  CDS (1)..(894): transl_table=11
atgactgtttccagttccgcccgtccgattcccgatctcagctacaagccgggcttgcaacgcaacctgctgagtcgcctgctcaccttgattgccgggctgttttcggccatctgcgtgcttcccctcgtgctggtgttggcctacgtgctgatcatgggtggcggcaagatcagcctggcgttgttcacccaactgcccccgccgccgggactggaaggcggcggtatcggtaacgccatcatcggcacgatcatcgtgtcgatcatcgccgggctgattgccattccggtgggtgtgggcggaggcatcttcctggcggaatattccaagggcggatccttcgctcagttcatacgcttcggcaccaacgtgctctccggcgttccctcgatcatcgccggtgtgttcgtctacggcatcattgtttcgactcggatcttcttcggtaattcctacagcgccctcgccggtggtatcgccctctcgatcctgatgctgcccacggtgatcaaaaccaccgacgagggcctgaagctggtgtccgacgacctgcgcaggggtgcccttggcgtcggcgcctcccgattcgtcacgatcgtgcggatcacactgccgacggccttcaccccgatcgccacgggggtggtgctctcgatcgcccgtgcggccggtgaaacggcaccactgattttcaccgccctgttctctcccttctggccggagggaattttcaatccgatcgccagcctgtcggtgctgatctacaactttgcgatcatgccctaccaggcccagaacgaattggcctgggcagcctcgttcgttctggtgatgttcatcctcgccatgaacctcttcgcccgttggctcggtcgatttgctgccaagtaa

SEQ ID NO: 51155 - protein, 297 aa, Synechococcus sp. RS9917
MTVSSSARPIPDLSYKPGLQRNLLSRLLTLIAGLFSAICVLPLVLVLAYVLIMGGGKISLALFTQLPPPPGLEGGGIGNAIIGTIIVSIIAGLIAIPVGVGGGIFLAEYSKGGSFAQFIRFGTNVLSGVPSIIAGVFVYGIIVSTRIFFGNSYSALAGGIALSILMLPTVIKTTDEGLKLVSDDLRRGALGVGASRFVTIVRITLPTAFTPIATGVVLSIARAAGETAPLIFTALFSPFWPEGIFNPIASLSVLIYNFAIMPYQAQNELAWAASFVLVMFILAMNLFARWLGRFAAK

SEQ ID NO: 51156 - DNA, 894 bp, Synechococcus sp. WH 5701
  CDS (1)..(894): transl_table=11
atgacccttgccacaccagcccgtccagcccgctcgctgcacttcaatccggggctgaggcgcaaccgcaccgacaagctcttcaccttgattgccgggctgttcagtctgatcgcggtgctccctctcatcctggtgctgatctatgtgctgatccaggggggcaagctgatcagcgtcaacctcttcacccagcttcctccggcccctggccttgaaggaggcggcatcgccaacgccatcatcggcaccttcgtggtcaccctggtggcctccctgattgccattcctgtgggtgtgggaggaggggtttacctggcggaatacgccagcagtggctggttcgcccagttcatccgcgtcggcaacgacatcctggccggagtgccatcaatcatctgcggggtgttcgtgtacagcgcgatcgtggccacccgtctgttcttcggtcagtcctattccgccgctgccggtggtatcgccctggctgtattgatgctgcccacggtcatcaaaacaaccgatgaagccctcaaactggtgccccaggaactgagctggggagccatcgggatcggtgcctcgaagttcgtgacgatcacgcgcatcactctgcccagcgcgttcactccgatcgccaccggggtggtcctggccatcgcccgggccgccggcgaaacggctcccctgatcttcacggccttgttctcacccttctggcctgagggtctgttcaacccgatcgcgtcgatgtcggtgttgatcttcaacttcgccatcatgccctacgaggcacagaactccctggcctgggccgcgtcgtttgtgctcgtgatgctgattcttggcgcaaatctcctggcccgctggattcgccggttcgcctccagctag

SEQ ID NO: 51157 - protein, 297 aa, Synechococcus sp. WH 5701
MTLATPARPARSLHFNPGLRRNRTDKLFTLIAGLFSLIAVLPLILVLIYVLIQGGKLISVNLFTQLPPAPGLEGGGIANAIIGTFVVTLVASLIAIPVGVGGGVYLAEYASSGWFAQFIRVGNDILAGVPSIICGVFVYSAIVATRLFFGQSYSAAAGGIALAVLMLPTVIKTTDEALKLVPQELSWGAIGIGASKFVTITRITLPSAFTPIATGVVLAIARAAGETAPLIFTALFSPFWPEGLFNPIASMSVLIFNFAIMPYEAQNSLAWAASFVLVMLILGANLLARWIRRFASS

SEQ ID NO: 51158 - DNA, 834 bp, Xanthobacter autotrophicus Py2
  CDS (1)..(834): transl_table=11
atggcctccctcgccgcgcgtcgcgccaaggacaccaccgtcaaggcgatctcgacgggctttgccgtcctcgccatcttcctcctgggctggatcctgtggaccttggtgtcccgcgggctgcccgccctcggcctcaacgtgttcacgcaggtcaccaagccgccgggccagaacggcggccttctgaacgccatcgtcggctcactgatccagatcggcatcgccctcatcatcggcgggcccatcggcatcttctgcggcaccttcctcgccgagaacggcaagggcacgaagatcggctccgccgcccgcttcgtgaacgacatcctgttgtcggcgccctccatcctggtgggcctgttcatctacaccctgctggtggtgccgttcggcggcttctccggctgggccggctcgctggcgctggccatcctggtgatcccggtgatcgtgcggaccacggaggacatgctgaacctcgttcccgtgggcctgcgcgaggccgccttcgcgctgggcgcgccgcagtggaaggtggtcatgttcatcacctggcgggcggcgcgggcgggcatcgtcaccggcatcctgctcgccatcgcccgcgcggccggcgagacggcgccgctgctgttcacctcgctcggcaacaacgccctgtcgaccgacctgtcgaagcccatggcgagcctgcccatcgccatctaccagtttgccggcagcccgttcgacgactgggtctcgctcgcctgggccggggcgctgctcatcaccgtgggcgtgctcgtgctcaacgtggcgtcccgcctgttcctcgcgcggagccactag

SEQ ID NO: 51159 - protein, 277 aa, Xanthobacter autotrophicus Py2
MASLAARRAKDTTVKAISTGFAVLAIFLLGWILWTLVSRGLPALGLNVFTQVTKPPGQNGGLLNAIVGSLIQIGIALIIGGPIGIFCGTFLAENGKGTKIGSAARFVNDILLSAPSILVGLFIYTLLVVPFGGFSGWAGSLALAILVIPVIVRTTEDMLNLVPVGLREAAFALGAPQWKVVMFITWRAARAGIVTGILLAIARAAGETAPLLFTSLGNNALSTDLSKPMASLPIAIYQFAGSPFDDWVSLAWAGALLITVGVLVLNVASRLFLARSH

SEQ ID NO: 51160 - DNA, 936 bp, Xanthobacter autotrophicus Py2
  CDS (1)..(936): transl_table=11
gtgaagccgctcgccgctcaaccctcccgccgcctctccgacgcggaaatcgtcgctcgggcgcatcggtccgaccgcaatttcgcgatcctgggcctcagcgtgctcgtcatttccatgatcgttctgctgtcgctcatcgtggacttcatggtggacgggcttggccgcattgatcttgatttcctgacgagcttcccctcccgacgcgcttcggaggccggcattctgtccgcctgggtcggcaccacgctggtgatgctggtgacgacggcgctggcggtgccgctcggcgtcgcagcaggcctctatcttgaggaatatgcgccgcggaactggatcacccatctcatcgaaatcaatgtgaccaatctcgcgggcgtgccctccatcatctatgggctgctcgccctcggcctgttcgtgcagagcttcgccatgggccagacgattctagttgcgggcatcacgctggcgcttctcatcctgcccatcatcatagtcgccacacgcgaggcggtgcgctccatcccgctcgagatccgcgagggcgcctatgcgcttggcgccgacaaatggcagacggtgagcggctacatcctgcccaccgcgcgtcccggcatcctcacgggtgccatcgtcggtatgtcacgggccatcggcgagaccgcgcccatcatcaccatcggcgcgctcaccttcatcgccttcctgccgccttcaccggtccaggacacctttccgttcatcaatttcaactggctcaactcgccgttcacggtgatgccgatccagatgttcaactgggtttcacgtccccaggcggcgttccacgtgaacgcagcagcaaccggtctcattctgctgcttatgacgctgctgatgaatgcgatcgccatctggctgcgctacaagatccgccggagcatgcgctga

SEQ ID NO: 51161 - protein, 311 aa, Xanthobacter autotrophicus Py2
MKPLAAQPSRRLSDAEIVARAHRSDRNFAILGLSVLVISMIVLLSLIVDFMVDGLGRIDLDFLTSFPSRRASEAGILSAWVGTTLVMLVTTALAVPLGVAAGLYLEEYAPRNWITHLIEINVTNLAGVPSIIYGLLALGLFVQSFAMGQTILVAGITLALLILPIIIVATREAVRSIPLEIREGAYALGADKWQTVSGYILPTARPGILTGAIVGMSRAIGETAPIITIGALTFIAFLPPSPVQDTFPFINFNWLNSPFTVMPIQMFNWVSRPQAAFHVNAAATGLILLLMTLLMNAIAIWLRYKIRRSMR

SEQ ID NO: 51162 - DNA, 891 bp, delta proteobacterium MLMS-1
  CDS (1)..(891): transl_table=11
atgtctgagagatcaatggcacaccttgcggcggcccaacccatcagtttacggcggcgctatctgcgcgatcatctggtacgggggttgctggccaccgccaccatcctggttctggttccactgctgatcgtggtcggctatgtggtgatccacggtattggcgccttaaactgggacttttttacccaggagctgggttcgccttcccgcgcccagttggggcagcccaccggcctggtgcataccattatcggcaccctggtggtggactcgctggccctgatgatggccgtgccgctggggatcggagccggaatcatgctggccgagtacccggatcatcacttaaatccgctgttgcgactgctcaacgacaccttgaatgggatgccggccatcctcaagggtctgctggcctttgccctgatcgttaagcccatgggcagcttctccggactgtccggggcggtggccctgggttttgtgatgctgccgatcatcgcccgagccacggagagtgccctttccatcatcccctggtcgatccgcgaggccggcctggccctgggcctgccccgctggcgagtagtgctctcgaccatcgtgccggcggccaaagtcggactgatgaccggtatcctgatcgcctttgcccgggccatgggggaagcggcaccgctgctcttcacctcctttggcaataactacctgcccgggcgctggaccggctggctgttcgggccggtggataccctgccgcaacggctctacagcctggccatcagcccctacaagcagtggcacgagatgggctgggcggcgggcatcgtgttgctggggctggtgatcacagccttcctcgtcgcccgcctggcagtgcgccggtga

SEQ ID NO: 51163 - protein, 296 aa, delta proteobacterium MLMS-1
MSERSMAHLAAAQPISLRRRYLRDHLVRGLLATATILVLVPLLIVVGYVVIHGIGALNWDFFTQELGSPSRAQLGQPTGLVHTIIGTLVVDSLALMMAVPLGIGAGIMLAEYPDHHLNPLLRLLNDTLNGMPAILKGLLAFALIVKPMGSFSGLSGAVALGFVMLPIIARATESALSIIPWSIREAGLALGLPRWRVVLSTIVPAAKVGLMTGILIAFARAMGEAAPLLFTSFGNNYLPGRWTGWLFGPVDTLPQRLYSLAISPYKQWHEMGWAAGIVLLGLVITAFLVARLAVRR

SEQ ID NO: 51164 - DNA, 900 bp, Synechococcus sp. RS9916
  CDS (1)..(900): transl_table=11
atgacttcaacaatccgagagggattcaggccaatacccgatctagccctcaaaaaaagccatccacggaatatcacgggttccatcctgacaaccctggcgggactttttgctctcatcgccgttctgcctctggtgcttgtgctcggttacgtgctctacaaaggagcaagcaaactgagctttgaccttttctttctcgagcagcccgcaccgggtctcgactatggcggcatcggcaacgccattcaggggtcgttaatcgtcaccttgattgcgagtcttgttgccatcccgattggcatcggtggaggcgtgtttttagctgaatattcccgaggtggttggtttgctcaattcatccgttttggcaccaatgtgctctcgggagtgccttccatcattgccggtgtatttatctatagctccatcgtttcgacacgggtgctgttcggcaacgcctacagcgctatggccggcggcattgctttggctgtgctgatgcttcccacagtgatcaaaaccaccgatgagggcctgaagctggtctccgatgacctacgccgaggggctctgggcgtaggggcatcccggttcgtcacgattgtgagaatcaccttgccttcggcttcgcggtccatcgcaacaggcatcgtgctgtccattgctcgcgctgcaggcgaaacagctcctttgatcttcacggcgctgtattcgccctggtgggccgatgggatcttcaatccgatcggcaccttatcggtgttgatctacaaattcgccaccatgccttacgacgtgcagaacgaactggcctgggccgcttcctttgtgcttgtggtgttcatcctccttctcaacctcatggcacggtggatcaaccaattgacctcccgttaa

SEQ ID NO: 51165 - protein, 299 aa, Synechococcus sp. RS9916
MTSTIREGFRPIPDLALKKSHPRNITGSILTTLAGLFALIAVLPLVLVLGYVLYKGASKLSFDLFFLEQPAPGLDYGGIGNAIQGSLIVTLIASLVAIPIGIGGGVFLAEYSRGGWFAQFIRFGTNVLSGVPSIIAGVFIYSSIVSTRVLFGNAYSAMAGGIALAVLMLPTVIKTTDEGLKLVSDDLRRGALGVGASRFVTIVRITLPSASRSIATGIVLSIARAAGETAPLIFTALYSPWWADGIFNPIGTLSVLIYKFATMPYDVQNELAWAASFVLVVFILLLNLMARWINQLTSR

SEQ ID NO: 51166 - DNA, 894 bp, Pseudomonas putida GB-1
  CDS (1)..(894): transl_table=11
atgactgacttgacgacccctgtggccgcgttgcccagcctgcagcgcaagctggaaggccgtgccctgcgcagcctggtattgaccaccctggcctggctggcggcgctggtggccagcgtgccgctgatttccgtgctgtacatgctgatcactcgtggtggtgcacgccttaacctggaagtgttcaccgagttgccgcccaccggcttcgagatgggtggcggttttggcaacgccatggccggcacgttcgtcatggtcggtattgccgccgccatcgcggtaccggtcggtatcctggccgcggtgttcctggccgagctaggcccggacagcaagctggccaacgccgcgcgctttgccgccaagatgctcaccggcctgccgtcgatcctggccggcgtgtttgcctacgccctggtggtgatgaccaccggtacctactcggcaccggcaggcggtgtggccctggcggtgctgatgctgccgatcgtggtgctgaccgccgaagagtcgatgaagatggtgcccaagatcatgaaggacgctgcctacggcatgggctgcacccgcgcccaggtgatctggaagattgttttgcccaccggcctgccggccatcctcaccggcgtgatgctggccgtggcccgcgccgctggtgaaaccgcgccactgctgttcaccgcactgttcagtaactactggatctaccacgacggtagcctggcggtcatgaaccctacggcctcgctcgccgtgctgatttacaacttctccggcatgccgttcgacaaccagctcgagctcgcctgggcggcctcgctggtgctggtaatgatcgtgctggtcatcaacattctgagccgagtcttcggcaagcccaagtattga

SEQ ID NO: 51167 - protein, 297 aa, Pseudomonas putida GB-1
MTDLTTPVAALPSLQRKLEGRALRSLVLTTLAWLAALVASVPLISVLYMLITRGGARLNLEVFTELPPTGFEMGGGFGNAMAGTFVMVGIAAAIAVPVGILAAVFLAELGPDSKLANAARFAAKMLTGLPSILAGVFAYALVVMTTGTYSAPAGGVALAVLMLPIVVLTAEESMKMVPKIMKDAAYGMGCTRAQVIWKIVLPTGLPAILTGVMLAVARAAGETAPLLFTALFSNYWIYHDGSLAVMNPTASLAVLIYNFSGMPFDNQLELAWAASLVLVMIVLVINILSRVFGKPKY

SEQ ID NO: 51168 - DNA, 891 bp, Enterobacter cloacae
  CDS (1)..(891): transl_table=11
atggcaactctcgaaatgcaagctaccgctgaactggcggaatcccgccgcaaaatgcaggccagacgccgcatgaaaaaccgtattgccctgtcgctctctatggcgacaatggcgttcggcctgttctggctggtctggatcctcttctcgacggtcgttcgcgggattgacgggatgtcactgtcgcttttcaccgaaatgacgccaccgccgaacacggggggtggtggcctggccaatgccctggcgggcagcggcttgctgatcctctgggcgacggtcttcggcacgccgctgggcatcatggcgggtatctacctggctgaatacggtcgtaaatcctggctggccgaagtcattcgcttcatcaacgacattctgctgtctgcaccttctatcgtcgtgggtctgtttgtttacaccgtggtggtggcgcagatggaacacttctcgggctgggcgggtgtgattgccctggcgctgctgcaggtgccgattgttattcgtaccaccgagaacatgctgaaactggtgccggacagcctgcgcgaagcggcttatgcgctgggtacgccgaaatggaagatgatctctgcaattacgctgaaggcgtctgtttccgggatcatgaccggtatcctgctggcggttgcgcgtatcgcgggtgaaacggcgccgctgctgtttacgtctctctccaaccagttctggagcacggacatgatgcagccgatcgccaacctgccggtgacgatctttaaatttgcgatgagcccattcgcggaatggcagcagctggcctgggccggggtgctgatcattaccctttgcgtactgttgctgaacattctggcgcgcgtcattttcgcgaagaagaaacacggttaa

SEQ ID NO: 51169 - protein, 296 aa, Enterobacter cloacae
MATLEMQATAELAESRRKMQARRRMKNRIALSLSMATMAFGLFWLVWILFSTVVRGIDGMSLSLFTEMTPPPNTGGGGLANALAGSGLLILWATVFGTPLGIMAGIYLAEYGRKSWLAEVIRFINDILLSAPSIVVGLFVYTVVVAQMEHFSGWAGVIALALLQVPIVIRTTENMLKLVPDSLREAAYALGTPKWKMISAITLKASVSGIMTGILLAVARIAGETAPLLFTSLSNQFWSTDMMQPIANLPVTIFKFAMSPFAEWQQLAWAGVLIITLCVLLLNILARVIFAKKKHG

SEQ ID NO: 51170 - DNA, 888 bp, Erwinia amylovora
  CDS (1)..(888): transl_table=11
atgaatcccgttgatttacaggctgatgaccaactgcttgtctcgcgccgcaaaatgcaggcgtggcggcgaatgaaaaaccgcatggctctcactttgtcattactgacgatggccttcggtcttttctggctggtgtggatcctgttttctaccgtgacgcgcggtatggacggcatgtcgctggcgctgtttaccgaaaacaccccgccgccgaatacggcgggaggcggcctggccaatgctctcgcgggcagcggcctgctgatcttctgggccaccgtgttcggtacgccgctcggcattatggcgggcatctacctggccgaatacggacgtaaatcctggctggctgaagcgatccgctttatcaatgacattctgctgtcggcaccttcgattgtggtcgggctgtttgtttacaccgtggtagtggcgcagatgcagcatttttccggttgggccgggatggtggcgctggcgctgctacaaatcccgattgttgtccgtaccaccgaaaatatgttgaaactggtgccggacagcctgcgcgaagcggcttacgcgctggggacgccgaaatggaagatgatttcagccattactctgaaagcatcggtcaccggtattctgaccggcgtgctgctggcgatagcccgtattgccggggaaaccgctccgctgctgtttacctcgttgtcgaatcagttctggagtaccgacatgatgcagccgctggctaacctgccggtgaccatctttaagttcgccatgagcccgtttgccgaatggcagagcctggcctgggcaggcgtgctgatcattacgctgtgcgtgctgttactgaacattctggcacgcgttgtcttcgcgaagagcaaacattaa

SEQ ID NO: 51171 - protein, 295 aa, Erwinia amylovora
MNPVDLQADDQLLVSRRKMQAWRRMKNRMALTLSLLTMAFGLFWLVWILFSTVTRGMDGMSLALFTENTPPPNTAGGGLANALAGSGLLIFWATVFGTPLGIMAGIYLAEYGRKSWLAEAIRFINDILLSAPSIVVGLFVYTVVVAQMQHFSGWAGMVALALLQIPIVVRTTENMLKLVPDSLREAAYALGTPKWKMISAITLKASVTGILTGVLLAIARIAGETAPLLFTSLSNQFWSTDMMQPLANLPVTIFKFAMSPFAEWQSLAWAGVLIITLCVLLLNILARVVFAKSKH

SEQ ID NO: 51172 - DNA, 960 bp, Alcaligenes faecalis
  CDS (1)..(960): transl_table=11
atggctacgaattcacgaaaaaaagattactcggcgattaatatcgatgagaccaagagtattcagcttgtgcgctacgcaaagcgatccgatatagtgttctcgatcgctggcgtatttgttcttcttgtttcaatgggtttgctcgtcacagtattactggacctagcgcttgatggcgctgcacgcataagctttgattttttaaccagctttccgtcccgcaagcctgaggcagccggtattttatctgcgtgggtaggaacaacgctcgtaatgattgtgacggcatttcttgccatacctttgggcgtgcttgcaggtctctacctggaggagtacgcgccaaagaactggttcacaaccctgatagaggtgaatatcagcaaccttgcgggggtaccatcaattatttatggacttttggccttaggcctgttcgtctatatgtttgatctcggtcagaccgttttcgtcgctggtgccgttctcgctttgctcatacttcctgtaattatcgtgtcgacccgagaggccgttcgaagcatcccgcaggtcatcaaggagggggcttacggtatgggtgccgacaagtggcaaacgatgacgggctacattctgcctgcagcgcgccccgggattctgacaggagcaattgttggtctttcacgagcaattggggaaactgcgccggttattactatcggtgcgctgacctacattgcatttttacccacgtttccttttcaaggtgattttccgtatctgaattttgattggttgaactccccgtttactgtcatgcctatccagatgttcaactggctttctagacctcagacggaatttcacgtgaacgcagctgcaacaggcctgatcctgattggaatgacggtggtcatgaacttgatcgccatagtcatccggttcaaattgcgccgcaggaatgtcgctaattaa

SEQ ID NO: 51173 - protein, 319 aa, Alcaligenes faecalis
MATNSRKKDYSAINIDETKSIQLVRYAKRSDIVFSIAGVFVLLVSMGLLVTVLLDLALDGAARISFDFLTSFPSRKPEAAGILSAWVGTTLVMIVTAFLAIPLGVLAGLYLEEYAPKNWFTTLIEVNISNLAGVPSIIYGLLALGLFVYMFDLGQTVFVAGAVLALLILPVIIVSTREAVRSIPQVIKEGAYGMGADKWQTMTGYILPAARPGILTGAIVGLSRAIGETAPVITIGALTYIAFLPTFPFQGDFPYLNFDWLNSPFTVMPIQMFNWLSRPQTEFHVNAAATGLILIGMTVVMNLIAIVIRFKLRRRNVAN

SEQ ID NO: 51174 - DNA, 888 bp, Edwardsiella tarda
  CDS (1)..(888): transl_table=11
atggtaacgatggacgtacaaaatccgcagaagctggcggaatcccgtcgccgcatgcaggcctggcgccgccagaaaaatcgtattgcgctgtgcctgtcgatgggcacgatggcctttggcctgttttggctggtgtggatcctgctatccacctttactcgtggcctggacggcatgtcgctggcgctgtttaccgaaatgacgccgccgccgaataccgaaggcggcggtttggcaagcgccatcgttggctcggggctgctgatcctgtgggcgacggtgatcggtacgccgctggggatcatggcgggcatttatctggcggaatacggccgcaacggctggtttgccaacgtgacccgttttattaacgatattctgttatctgcgccctctatcgtggtcgggctgttcgtatacaccattgtggtgaccaagatgcagcacttttccggctgggccggggtgatcgtgctggcgctgctgcaggtgccgatcgttatccgcaccacggagaatatgttgaagctggtgccggacagcctgcgtgaggcggcctatgcgctggggacgcccaagtggaagatgatttcagcgattaccctgaaagcgtccgtgtcggggattattaccggggtactgctggccatcgcccgtatcgccggcgagacggcgcccctgctgtttacgtcgctctccaaccagttctggagcaccgacatgatgcagccgctggccaacctgccggtcaccatcttcaagtttgccatgagcccgtttgcggagtggcaacagttggcctgggccggcgtcctgctgatcacgctgtgcgttctgctgctgaatatcgtcgcccgcgtgatttttgccaagaaaaaacactaa

SEQ ID NO: 51175 - protein, 295 aa, Edwardsiella tarda
MVTMDVQNPQKLAESRRRMQAWRRQKNRIALCLSMGTMAFGLFWLVWILLSTFTRGLDGMSLALFTEMTPPPNTEGGGLASAIVGSGLLILWATVIGTPLGIMAGIYLAEYGRNGWFANVTRFINDILLSAPSIVVGLFVYTIVVTKMQHFSGWAGVIVLALLQVPIVIRTTENMLKLVPDSLREAAYALGTPKWKMISAITLKASVSGIITGVLLAIARIAGETAPLLFTSLSNQFWSTDMMQPLANLPVTIFKFAMSPFAEWQQLAWAGVLLITLCVLLLNIVARVIFAKKKH

SEQ ID NO: 51176 - DNA, 888 bp, Edwardsiella tarda
  CDS (1)..(888): transl_table=11
atggcaacgatggatgtgcaaaacccgcagcagctggcggagtctcgtcgccgcatgcaggcttggcgtcggcagaagaaccgcatcgccctgtgcctgtcgatgggcaccatggcctttggtctgttctggttggtatggatcctattctctaccttcacccgtggcatcgatggtatgtcgttggcgctgtttactgagatgacgccaccgccgaataccgaggggggcgggttggctaacgccatcgtcggctccgggttgttgatcctgtgggcaacggtgatcggcacgccgctgggcatcatggcggggatctacctggctgagtatggccgtaatagtctgttggctaacgtgactcgctttattaacgatatcttactgtctgcgccatcgatcgtcgtcggtctgttcgtctataccatcgtcgtggcgaagatgcagcacttctccggttgggctggcgtgattgcgctagcgctgttgcaggtgcccatcgttattcgtaccaccgagaatatgttgaagctggtgcctgatagcctacgtgaggccgcttatgcgctgggtacgccgaagtggaagatgatttcggcgatcaccctaaaagcgtcggtctcggggattattaccggggtactgttggccatcgcccgtatcgccggtgagaccgcgccgctgctgtttacgtcactctccaaccagttctggagcaccgacatgatgcagccgctggctaacctgccggtcaccatctttaagtttgccatgagtccgtttgcggagtggcaacagctggcttgggctggtgtactgctgatcacgctgtgtgtcttgctgctgaatatcgtggcccgcgtgattttcgccaagaaaaaatactaa

SEQ ID NO: 51177 - protein, 295 aa, Edwardsiella tarda
MATMDVQNPQQLAESRRRMQAWRRQKNRIALCLSMGTMAFGLFWLVWILFSTFTRGIDGMSLALFTEMTPPPNTEGGGLANAIVGSGLLILWATVIGTPLGIMAGIYLAEYGRNSLLANVTRFINDILLSAPSIVVGLFVYTIVVAKMQHFSGWAGVIALALLQVPIVIRTTENMLKLVPDSLREAAYALGTPKWKMISAITLKASVSGIITGVLLAIARIAGETAPLLFTSLSNQFWSTDMMQPLANLPVTIFKFAMSPFAEWQQLAWAGVLLITLCVLLLNIVARVIFAKKKY

SEQ ID NO: 51178 - DNA, 906 bp, Mycobacterium bovis
  CDS (1)..(906): transl_table=11
atgggcgaatcggctgagtccgggtcccggcagctaccggcgatgtccccgccgcggcgatcggtagcctatcggcgcaagatcgtcgatgccctgtggtgggcggcgtgcgtgtgttgtctggcggtggtgatcaccccgacgttgtggatgttgatcggagtcgtcagccgcgctgtaccggttttccactggagtgtgctggtgcaggactcccagggcaatggcggcggcttgcgcaacgccatcatcggtaccgcagtgttggccatcggggtgatcctggtgggtggcacggtgagtgtgttgaccgggatttatctgtccgaattcgccaccggcaaaacacggtccattctgcgcggcgcctacgaggtgttgtccggtattccgtcgatcgtgctcggctacgtcggctatttggccctggtggtgtacttcgattgggggttttcgctggcggccggggtgttggtgctgtcggtgatgagcattccctacatcgccaaggccaccgagtccgcgctggcccaggtgccgacgtcgtatcgggaagcggctgaggcactcgggttaccagccggctgggcgctgcgcaagatcgtgctgaagacggcgatgcccggaatcgtcaccgggatgttggtcgcgctggccctggcgatcggcgagacggcgccgctgctgtacacggcggggtggtcgaattcgccgccgaccggacaactcaccgactcgccggtcggctacctgacctacccaatttggacgttctacaaccagccatccaagtcggctcaggatctgtcctatgacgcggctctcttgctgatcgtgttcctgctgctattgatcttcattggccggttgatcaactggctgtcacggaggcgttgggacgtttga

SEQ ID NO: 51179 - protein, 301 aa, Mycobacterium bovis
MGESAESGSRQLPAMSPPRRSVAYRRKIVDALWWAACVCCLAVVITPTLWMLIGVVSRAVPVFHWSVLVQDSQGNGGGLRNAIIGTAVLAIGVILVGGTVSVLTGIYLSEFATGKTRSILRGAYEVLSGIPSIVLGYVGYLALVVYFDWGFSLAAGVLVLSVMSIPYIAKATESALAQVPTSYREAAEALGLPAGWALRKIVLKTAMPGIVTGMLVALALAIGETAPLLYTAGWSNSPPTGQLTDSPVGYLTYPIWTFYNQPSKSAQDLSYDAALLLIVFLLLLIFIGRLINWLSRRRWDV

SEQ ID NO: 51180 - DNA, 891 bp, Escherichia coli
  CDS (1)..(891): transl_table=11
atggctatggttgaaatgcaaaccactgcggcgctggctgaatctcgccgcaaaatgcaggcgcgtcgccgcctcaaaaaccgtattgcgctgacgctctcgatggcgacgatggccttcggcctgttctggctgatctggattttaatgtccaccatcactcgcggtatcgacggtatgtcgctggcgctgttcactgaaatgacgccgccgcccaatacggaaggtggtggtctggcgaacgctctggcgggtagcgggctgttaattttgtgggccacggtattcggtacgccgctgggcattatggcggggatttatctggcggaatatggtcgtaaatcctggctggcagaagtgattcgcttcattaacgacattctgctctctgcgccgtcgattgtggttggtctgtttgtttacaccattgtggtggcgcagatggagcacttctccggctgggcgggcgtgattgccctggcgttgttgcaggtgccgattgttatccgcaccaccgagaacatgctgaaactggtgccgtacagcctgcgtgaagcggcttatgcgctgggtacaccgaagtggaagatgatctctgcgattacgctgaaagcgtcggtgtccgggattatgaccggtatcctgctggcgattgcccgtattgctggtgaaaccgcgccgctgctgtttaccgcgctctccaaccagttctggagcacggacatgatgcagccgatcgccaacctgccggtgacgatctttaagtttgcgatgagcccgtttgcggaatggcagcaattggcctgggccggggtattgatcattaccctgtgcgtactgctgctgaacattctggcgcgcgttgtttttgcgaagaataaacacggttga

SEQ ID NO: 51181 - protein, 296 aa, Escherichia coli
MAMVEMQTTAALAESRRKMQARRRLKNRIALTLSMATMAFGLFWLIWILMSTITRGIDGMSLALFTEMTPPPNTEGGGLANALAGSGLLILWATVFGTPLGIMAGIYLAEYGRKSWLAEVIRFINDILLSAPSIVVGLFVYTIVVAQMEHFSGWAGVIALALLQVPIVIRTTENMLKLVPYSLREAAYALGTPKWKMISAITLKASVSGIMTGILLAIARIAGETAPLLFTALSNQFWSTDMMQPIANLPVTIFKFAMSPFAEWQQLAWAGVLIITLCVLLLNILARVVFAKNKHG

SEQ ID NO: 51182 - DNA, 843 bp, Pasteurella multocida
  CDS (1)..(843): transl_table=11
atgagtaacacccattttcactgtcgtaaacttaaaaataagctgatgctcaccctttcatttttagcggttttctttggcttattttggctatgttggattttgtttaccttaattacaaaaggtattcccgcgttatccttggaacttttcttagaaaaaacaccgggaccgggtgaaaaaggcggcttactgaatgccattattggttcaactctgatgattactgtcagtacgttaattggtaccccgattggtattcttgcggggacttacctcgcagaatacggacgttatagccaattaaccaaagtgacgcggtttttgaatgatgtattactttccgcgccatctatcgtgattggcttatttatctacgccatttatgtgtcacaagtgaagcattattctggttgggcgggtgcctttgctttagccatcatcattattcctgtcgtggtacggacaaccgataatatgctcaatcttgtgccgaataatttacgggaagccgccgcctccttaggctgcccacaatggcgcgtgattacgatgatttgttatcgctctgcgcgtgcggggattttaaccggagtattactgtcaattgcccgtatttcaggggaaacggcgccgttgctctttactgcgctatccaatcaattcacttcctttgatatgaatggaccaatggcaaatatcccgatcgtaatctatcaatttgcggcaagtccattccaagattggaacgagcttgcttgggctggtgcaaccttaattaccctatttgttttactacttaatatttttgcacgtattttctttccacagaaatccaaataa

SEQ ID NO: 51183 - protein, 280 aa, Pasteurella multocida
MSNTHFHCRKLKNKLMLTLSFLAVFFGLFWLCWILFTLITKGIPALSLELFLEKTPGPGEKGGLLNAIIGSTLMITVSTLIGTPIGILAGTYLAEYGRYSQLTKVTRFLNDVLLSAPSIVIGLFIYAIYVSQVKHYSGWAGAFALAIIIIPVVVRTTDNMLNLVPNNLREAAASLGCPQWRVITMICYRSARAGILTGVLLSIARISGETAPLLFTALSNQFTSFDMNGPMANIPIVIYQFAASPFQDWNELAWAGATLITLFVLLLNIFARIFFPQKSK

SEQ ID NO: 51184 - DNA, 852 bp, Rhizobium loti
  CDS (1)..(852): transl_table=11
atgtcgacagccgcatcgcttcaccagagccgcaagcgcaagaatggcgtgatgatgatgctgtgcgtcgtcgccgccggcatcggccttgcctggctggcgctgatccttggcgccttactctacaagggtctggccggcgtctcgctctcggtcttcacggaaatgacgccgccgcccggcgatgccggcggcctgctcaacgccatctacggcagcatcgtgatgaccatcatcggcatcatcgtcggcacgccgatcggcgtgctggccggtacctacatggccgaatatggccgcttctcgaagctcaccacggtggtgcgcttcatcaacgacatcctgctgtcggcgccgtcgatcatcatcggtctgttcgtctatgagctgatggtgcggccgatggggcatttctcggcgatcgccggtgccgtggcacttgccatcctggtcattcccgtcgtcgtgcgcaccaccgaggacatgctcaacctggtgccgaacgccttgcgcgaagccggcaccgcgatcggcgcgccgcgctgggtggtcatccgctcggtggcctatcgcgccgcgctttcgggcatcgtcaccggcatattgctggccatcgcccgtatctccggcgagaccgcaccgcttctgtttacggcgctgaacaaccagttctggtcgagcaatctcaacgcgccgatggccagcctgcctgtcaccatcttccagtttgctctcagtccctacgaggaatggcagcagctggcctggaccggcgcactcatcatcacattgacggttctcgcgctcagcatctttgcgcgcagcctgaccggacgcagagaggacaaatga

SEQ ID NO: 51185 - protein, 283 aa, Rhizobium loti
MSTAASLHQSRKRKNGVMMMLCVVAAGIGLAWLALILGALLYKGLAGVSLSVFTEMTPPPGDAGGLLNAIYGSIVMTIIGIIVGTPIGVLAGTYMAEYGRFSKLTTVVRFINDILLSAPSIIIGLFVYELMVRPMGHFSAIAGAVALAILVIPVVVRTTEDMLNLVPNALREAGTAIGAPRWVVIRSVAYRAALSGIVTGILLAIARISGETAPLLFTALNNQFWSSNLNAPMASLPVTIFQFALSPYEEWQQLAWTGALIITLTVLALSIFARSLTGRREDK

SEQ ID NO: 51186 - DNA, 864 bp, Xylella fastidiosa
  CDS (1)..(864): transl_table=11
atgtccacagcatcgcaacatctgtacaagcgccgccgactgatcaatgctgccgccatcacgatctcttgtatcgccgcactgttcggccttttcttccttatttggattttgtggactctcatcagtaaaggactccccgggatcgatctagatttattcactaaaataacaccgccacccatgcagaaaggtggcctagctaatgcgttcttaggtagtgcaatcatgtgcctgcttgcaatcgtcatcggtacacctgtaggcatcgctgccggcacttggttggctgaatatggcaacacatcccaaacaagcacagtcgttcgcttcgtaaacgacatcctactgtcagcgccatccatcgtgctcggcctgtttgtctacactctctacgtgatgcacaccggcgggcacttctccgcattttctggtgccctggcactagttttcatcgtacttccgatcgtcgtacgcaccaccgatgagatgctgcgtttggtaccaggacaaatgcgtgaagcagcactatcactaggtatcccacaatggaagatgatcacacaagtgttataccgcagcgcatcggccggcattctcactggcattctgctagcactggcacgtatcagtggtgaaaccgcacctctactctttacagcctttggcaatcaatattggagcagcaatatcttccagcccattgcctcgttacccctggtgatgaaccaattcgccagcagcccatacaaatcctggcaattattggcatggtctggtgcattggtactcacggtattcgttcttctggttagcctgggtgcacgtgcactattgctgcgcaacaagatacccaacacatga

SEQ ID NO: 51187 - protein, 287 aa, Xylella fastidiosa
MSTASQHLYKRRRLINAAAITISCIAALFGLFFLIWILWTLISKGLPGIDLDLFTKITPPPMQKGGLANAFLGSAIMCLLAIVIGTPVGIAAGTWLAEYGNTSQTSTVVRFVNDILLSAPSIVLGLFVYTLYVMHTGGHFSAFSGALALVFIVLPIVVRTTDEMLRLVPGQMREAALSLGIPQWKMITQVLYRSASAGILTGILLALARISGETAPLLFTAFGNQYWSSNIFQPIASLPLVMNQFASSPYKSWQLLAWSGALVLTVFVLLVSLGARALLLRNKIPNT

SEQ ID NO: 51188 - DNA, 888 bp, Yersinia pestis
  CDS (1)..(888): transl_table=11
atggtgaccatagatatgcgaaatgatgcgacgctgatggagagccgccgtaaaaagcaggcttggcgtcgccaaaagaaccggattgccttggtgctttcaatggcaacgatgctatttggtttgttctggttgatatggattttattctccaccgtcaccaaaggtatcgatgggatgtctctggcattgtttaccgagatgacaccaccaccaaatactgcgggcgggggcttagcgaatgctatcgctggtagtgggttattaattctgtgggcaacagttatcggtaccccgcttgggatcatggctgggatttatctggcggaatatggccgtaaatcgtggttggcagaagttacccgctttattaatgacatcttattatcggcaccgtctatcgttgttggcctgtttgtttacaccattgtggtcgccaagatggagcacttctctggttgggccggggtgattgcactggcgctgttacaagtgccgattgttatccgcaccacagagaacatgctgaaattagtacctgatagcctacgggaagcggcttatgcgttggggaccccaaaatggcggatgatctcggctatcacgttgaaagcctctgtttctggtattttgaccggtattttgctggcgattgcacgtattgctggtgaaacggcacctttgctgtttacctcgctctccaaccagttctggagtaccgatctgacacggcctattgctaacttaccggtcactatatttaagtttgctatgagcccgtttgctgaatggcagaatctggcttgggcaggggtgttattgatcaccttgtgtgtcctgttactgaatattctggcccgggttatttttgctaagaaaaagcactaa

SEQ ID NO: 51189 - protein, 295 aa, Yersinia pestis
MVTIDMRNDATLMESRRKKQAWRRQKNRIALVLSMATMLFGLFWLIWILFSTVTKGIDGMSLALFTEMTPPPNTAGGGLANAIAGSGLLILWATVIGTPLGIMAGIYLAEYGRKSWLAEVTRFINDILLSAPSIVVGLFVYTIVVAKMEHFSGWAGVIALALLQVPIVIRTTENMLKLVPDSLREAAYALGTPKWRMISAITLKASVSGILTGILLAIARIAGETAPLLFTSLSNQFWSTDLTRPIANLPVTIFKFAMSPFAEWQNLAWAGVLLITLCVLLLNILARVIFAKKKH

SEQ ID NO: 51190 - DNA, 885 bp, Bacillus subtilis
  CDS (1)..(885): transl_table=11
atgaaccgcaaaataacagataaactggcgaccggaatgtttggtttgtgtgcagccattatcgctgccattttagtaggtttgttttcctatattattataaacggtgtttctcagctcagttttcaatttattacaacaaagtcgagcgccattgcagctggaggaggcatacgagatcagctgtttaactccttttatattttgtttattacaatgctgattacaatcccgctcggtgtgggcggcggagtcttcatggctgaatacgcgcctaataacaaagtaactgacttcattagaacatgtatagaggtgctttcatctcttccgtctattgtcattgggatgtttggattattgatgtttgtcaacttaacaggctggggttatacgatcataggcggagcgcttgcgttaactgtttttaaccttcctgtcatggtgcgtgtgacagaagacgcgatccgttcagtccctaaagatctgaaggaagcctctctcgctttaggtgtatcacgctggcataccgtaaaaacagttttaattccaagtgcgattccttctatcatcacaggagcaattttagcgtcaggaagggtgttcggggaagcggccgcattattatttacggcaggcctgacaacaccgcgtcttaattttacggagtggaacccgttttcggaaacatcaccgcttaatattttcaggcccgctgaaacacttgcggtccacatttggaacgtcaatacacaaggaatgattccggatgctgaagcgattgccaacggtggttctcccgtgctggtgatttctgttcttgtgtttaatctcgcggcgagatggcttggcacgatgatctacaaaaagcttacggcaaattag

SEQ ID NO: 51191 - protein, 294 aa, Bacillus subtilis
MNRKITDKLATGMFGLCAAIIAAILVGLFSYIIINGVSQLSFQFITTKSSAIAAGGGIRDQLFNSFYILFITMLITIPLGVGGGVFMAEYAPNNKVTDFIRTCIEVLSSLPSIVIGMFGLLMFVNLTGWGYTIIGGALALTVFNLPVMVRVTEDAIRSVPKDLKEASLALGVSRWHTVKTVLIPSAIPSIITGAILASGRVFGEAAALLFTAGLTTPRLNFTEWNPFSETSPLNIFRPAETLAVHIWNVNTQGMIPDAEAIANGGSPVLVISVLVFNLAARWLGTMIYKKLTAN

SEQ ID NO: 51192 - DNA, 24 bp, Artificial sequence
  primer
atgaccgccgttaacctccaaaag

SEQ ID NO: 51193 - DNA, 20 bp, Artificial sequence
  primer
ttaataagccttcttccggg

SEQ ID NO: 51194 - protein, 264 aa, Artificial sequence
  consensus sequence
  Variant (2)..(7): Xaa in position 2 to 7 is any amino acid
  Variant (8)..(11): Xaa in position 8 to 11 is any or no amino acid
  Variant (13)..(35): Xaa in position 13 to 35 is any amino acid
  Variant (36)..(53): Xaa in position 36 to 53 is any or no amino acid
  Variant (55)..(67): Xaa in position 55 to 67 is any amino acid
  Variant (69)..(69): Xaa in position 69 is any amino acid
  Variant (71)..(76): Xaa in position 71 to 76 is any amino acid
  Variant (78)..(78): Xaa in position 78 is any amino acid
  Variant (81)..(95): Xaa in position 81 to 95 is any amino acid
  Variant (96)..(112): Xaa in position 96 to 112 is any or no amino acid
  Variant (114)..(116): Xaa in position 114 to 116 is any amino acid
  Variant (120)..(121): Xaa in position 120 to 121 is any amino acid
  Variant (123)..(123): Xaa in position 123 is any amino acid
  Variant (125)..(129): Xaa in position 125 to 129 is any amino acid
  Variant (131)..(135): Xaa in position 131 to 135 is any amino acid
  Variant (136)..(150): Xaa in position 136 to 150 is any or no amino acid
  Variant (152)..(154): Xaa in position 152 to 154 is any amino acid
  Variant (156)..(157): Xaa in position 156 to 157 is any amino acid
  Variant (158)..(158): Xaa in position 158 is any or no amino acid
  Variant (160)..(164): Xaa in position 160 to 164 is any amino acid
  Variant (166)..(170): Xaa in position 166 to 170 is any amino acid
  Variant (172)..(174): Xaa in position 172 to 174 is any amino acid
  Variant (176)..(177): Xaa in position 176 to 177 is any amino acid
  Variant (180)..(182): Xaa in position 180 to 182 is any amino acid
  Variant (184)..(188): Xaa in position 184 to 188 is any amino acid
  Variant (191)..(208): Xaa in position 191 to 208 is any amino acid
  Variant (210)..(210): Xaa in position 210 is any amino acid
  Variant (213)..(214): Xaa in position 213 to 214 is any amino acid
  Variant (216)..(218): Xaa in position 216 to 218 is any amino acid
  Variant (220)..(221): Xaa in position 220 to 221 is any amino acid
  Variant (226)..(246): Xaa in position 226 to 246 is any amino acid
  Variant (247)..(263): Xaa in position 247 to 263 is any or no amino acid
LXXXXXXXXXXGXXXXXXXXXXXXXXXXXXXXXXXXXXXXXXXXXXXXXXXXXGXXXXXXXXXXXXXPXGXXXXXXLXEYXXXXXXXXXXXXXXXXXXXXXXXXXXXXXXXXLXXXPSIXXGXFXXXXXVXXXXXXXXXXXXXXXXXXXXSXXXGXXXLXXXXXPXXXXXTXXXLXXVPXXXRXXXXXLGXXXXXXXXXXXXXXXXXXIXTGXXLXXXRXXGETAXXXXXXXXXXXXXXXXXXXXXXXXXXXXXXXXXXXXXXL

SEQ ID NO: 51195 - protein, 21 aa, Artificial sequence
  protein pattern
  Variant (2)..(5): Xaa in position 2 to 5 is any or no amino acid
  Variant (7)..(8): Xaa in position 7 to 8 is any amino acid
  Variant (10)..(10): Xaa in position 10 is Ala, Cys, Gly, Ser, Thr or Val
  Variant (11)..(11): Xaa in position 11 is any amino acid
  Variant (12)..(12): Xaa in position 12 is Ala, Gly or Ser
  Variant (14)..(14): Xaa in position 14 is Ala, Ile or Val
  Variant (15)..(15): Xaa in position 15 is any amino acid
  Variant (18)..(18): Xaa in position 18 is any amino acid
  Variant (20)..(20): Xaa in position 20 is Ala, Cys, Pro or Val
  Variant (21)..(21): Xaa in position 21 is Ile, Leu or Val
TXXXXGXXLXXXRXXGEXAXX

SEQ ID NO: 51196 - protein, 13 aa, Artificial sequence
  protein pattern
  Variant (2)..(2): Xaa in position 2 is any amino acid
  Variant (3)..(3): Xaa in position 3 is Gly or Ser
  Variant (4)..(4): Xaa in position 4 is any amino acid
  Variant (8)..(8): Xaa in position 8 is Ile, Leu or Val
  Variant (9)..(9): Xaa in position 9 is any amino acid
  Variant (10)..(10): Xaa in position 10 is Ala or Gly
  Variant (11)..(12): Xaa in position 11 to 12 is any amino acid
  Variant (13)..(13): Xaa in position 13 is Ala, Gly, Ile or Val
LXXXPSIXXXXXX

SEQ ID NO: 51197 - protein, 14 aa, Artificial sequence
  protein pattern
  Variant (2)..(2): Xaa in position 2 is Ile, Leu or Val
  Variant (3)..(3): Xaa in position 3 is Gly or Ser
  Variant (4)..(4): Xaa in position 4 is Phe, Ile, Leu, Met or Val
  Variant (5)..(5): Xaa in position 5 is any amino acid
  Variant (6)..(6): Xaa in position 6 is Ala, Cys, Gly, Ser, Thr or Val
  Variant (7)..(7): Xaa in position 7 is Ala, Gly or Ser
  Variant (8)..(9): Xaa in position 8 to 9 is any amino acid
  Variant (11)..(11): Xaa in position 11 is any amino acid
  Variant (13)..(13): Xaa in position 13 is any amino acid
  Variant (14)..(14): Xaa in position 14 is Ala, Gly, Pro or Ser
PXXXXXXXXLXEXX

SEQ ID NO: 51198 - DNA, 1116 bp, Synechocystis sp.
  CDS (1)..(1116): transl_table=11
atgactaaatccccaaacctaaccgtcgctgtcattggtaccggctttggccaagctgtgcatattcccgccctgcaatatcatcagcagacccaggcgatcgccatttaccatcgggatttggctaaagcccaggaggtggctaaatccaacgatctagcctatagctacaacaatctggaagaattgctggctaacccggaagttcaagcagttaccattgccagcccaccgtttctccattatgaaatggctaagcaggccattttggcggggaaacatgtgttgttggaaaagcccatgacattaagggtggaggaaaccattgaactataccatctggcccggcaacgggaagtgcaggtaataccggattttgaatttcgttttgtccctgcttggcaatatgtggcggaacttttggggcagggaattttagggcagttgaaactgatcaaagtggattggttggtgggtagtagggccaaccccaaccgggcttggaattggtatgcccaaagggaaaaggggggcggtgctttgggggcgttggcttcccatacctttgactatctccattggctatttggcccggctcagagtttagcagctaatttaagtgtggcgatcgccgaacggcctgatcccctggacaataatcgtttgaagccagtgacggcggaagatacggcgctaatcagtttaactttggccaatgacgttccctgccaaataaatattacctctgtagcccatggtggtcgcggccattggttggagatttatggtgaaaaggggagtttagtactaggcagtgacaatcttaaagattacgtccatggctttagaattttccaccatcctgtggggcaacccatgcaggaattgacggtgccgacccgtttagatttccccaaagtatttgccgatggccgccttgctcccgttgtccgggtagtagatgagtgggtgcaaagtattaaccaaaaaagaacccccacaccatctttgcgccatggggtttactcccaactattaatggatttgaccaagcaagcccatcaagaaaagcactgggtggctgtgccggatctcgatcgccttttggcccagtaa

SEQ ID NO: 51199 - protein, 371 aa, Synechocystis sp.
MTKSPNLTVAVIGTGFGQAVHIPALQYHQQTQAIAIYHRDLAKAQEVAKSNDLAYSYNNLEELLANPEVQAVTIASPPFLHYEMAKQAILAGKHVLLEKPMTLRVEETIELYHLARQREVQVIPDFEFRFVPAWQYVAELLGQGILGQLKLIKVDWLVGSRANPNRAWNWYAQREKGGGALGALASHTFDYLHWLFGPAQSLAANLSVAIAERPDPLDNNRLKPVTAEDTALISLTLANDVPCQINITSVAHGGRGHWLEIYGEKGSLVLGSDNLKDYVHGFRIFHHPVGQPMQELTVPTRLDFPKVFADGRLAPVVRVVDEWVQSINQKRTPTPSLRHGVYSQLLMDLTKQAHQEKHWVAVPDLDRLLAQ

SEQ ID NO: 51200 - DNA, 1125 bp, Nostoc sp. PCC 7120
  CDS (1)..(1125): transl_table=11
atggtgtctggattacaagcaaatcagggtaaaattggagtagcgatcgccgggactggttttggtcaaaaagttcacatacctgcctttcaagcccatcatcgcactgatatagttgcgatttatcaccgcgatattcataaagctaaagcaattgccgaagcaaacaatattccccatgcctttgacactatagctgataccgttaatctgccggaagtacaagcagtcagtatcgctacaccacctttcctgcattatgaaatggggaaaacagtattgcaagcaggaaaacatttactactagaaaagcctgtcaccctaaatgtagctgaagcacaagaattgtatcaattagcaaaaaagcaaggtgttattgccactgtagattttgagtttcgttttgtccctgcatggcaactattcgctgaacttctatcatcaggttatgtaggaactcctcgcctgattagaattgattggttaggttcttctcgtgccgatacttcccgtccttggaactggtattcttctaaggaaaagggtggtggtgcgttaggttcattaggttcccacgctttcgattatatttattggctatttggttcagtccgccgattaaatgcccatttgactacagctattcctcaacggattgactctattagtggtgaattaaaagcagtagagacagacgatacttgtctgctgtcactagaattagcaaatggtacgccctgccaagtgactatcagcgctgctgttcatgcttctagaacacactggatggaagtatatggcgatcgcggtactctagtaattggtagtgaaaatcaaaaagattacatccacggttttcgcgtttggggttcccaaccaggtcaacctcttcaagaaatcgaaatcccacccaaattactatttccccaacattacaccgacggacgcatttgtgcattcttgcgggtagtagaccaatgggtacaaggcattgatcagcaaaagccaatagtaccatctttaaaagaaggtatttattcccagttattaatggatttatctcatcaatcttatataactgctagctgggtagatgtgccaaatgtggaagattatctaatttaa

SEQ ID NO: 51201 - protein, 374 aa, Nostoc sp. PCC 7120
MVSGLQANQGKIGVAIAGTGFGQKVHIPAFQAHHRTDIVAIYHRDIHKAKAIAEANNIPHAFDTIADTVNLPEVQAVSIATPPFLHYEMGKTVLQAGKHLLLEKPVTLNVAEAQELYQLAKKQGVIATVDFEFRFVPAWQLFAELLSSGYVGTPRLIRIDWLGSSRADTSRPWNWYSSKEKGGGALGSLGSHAFDYIYWLFGSVRRLNAHLTTAIPQRIDSISGELKAVETDDTCLLSLELANGTPCQVTISAAVHASRTHWMEVYGDRGTLVIGSENQKDYIHGFRVWGSQPGQPLQEIEIPPKLLFPQHYTDGRICAFLRVVDQWVQGIDQQKPIVPSLKEGIYSQLLMDLSHQSYITASWVDVPNVEDYLI

SEQ ID NO: 51202 - DNA, 1293 bp, Streptomyces coelicolor A3(2); identical to SEQ ID NO: 33485
  CDS (1)..(1293): transl_table=11

SEQ ID NO: 51203 - protein, 430 aa, Streptomyces coelicolor A3(2); identical to SEQ ID NO: 33486

SEQ ID NO: 51204 - DNA, 1146 bp, Chlorobium tepidum TLS
  CDS (1)..(1146): transl_table=11
atgaaacaaaagatcaggatcggatttatcggcagtggatgggcgcaggtggcgcaggctccggccttttcgctgatggaagatgttgaactggcagcggttgcaagtccgactgaacggcggcggcagaagtttcaggatcgcttcggcattccggaaggctacgctgactggcgcgagatgctcgacgagtgcccgctcgatctggtatgcgtcactacgccgacctttctgcacgatccgatggtgacgggcgcgctcgaaaagggtgttggtgtgctctgcgaaaagccgtttgccctgaccgtcgaggaggccgagcgcatgaacgcgcttgcctcgaaatcgccgggcctttcgctgatcgatcaccagctccggttccatccgtcggtcaggagcatgaagcagatgatcgacagcggcgaaattggcaaggtgtatgaagttcgcgccgtagtgaacctcgcctcgcgtaaccgcatcgacatgccgtggtcgtggtggagcgacgcctcgaagggcggcggcgcgcttcgggcgcttggctcgcacctgatcgatttgaaccgttttctcgtcggcgagatttcagaagtgtgctgcaacctttcgacctcgattccgcagcgccccgatgcctcgacgtccggcaaaagcctgccggttacgtcggacgacagcttcgccatgttcatgaagttcggcccttcgtcggtggcgctcggcgcgtcgtcgctcatgcacgtcaccacggttggctcctacacctggttttcgcttgaagtggttggaagcctcaaaaccattcggctcgacggtgcgggtcgtctctgggagatcgtcaacagcgaggtcaaaggagggcgcagcctcatcgacgcgccgcgctggaagcagttggagccgatgctgccgtgggacgagctggtgcttcaggagaagatcaagcagtcctcactcgccgtgcacggtatcttcgccgtcggctttgcttttcttgcacatcgcatcgtcaaagcgttgaagagcggcgacccggtcattttgcaggacgcagcaagcttccgcgacggccttgccatccagaaggtgatgcaggccgggctcgattctgaccgtgagaagcgctgggtgaaagtgtag

SEQ ID NO: 51205 - protein, 381 aa, Chlorobium tepidum TLS
MKQKIRIGFIGSGWAQVAQAPAFSLMEDVELAAVASPTERRRQKFQDRFGIPEGYADWREMLDECPLDLVCVTTPTFLHDPMVTGALEKGVGVLCEKPFALTVEEAERMNALASKSPGLSLIDHQLRFHPSVRSMKQMIDSGEIGKVYEVRAVVNLASRNRIDMPWSWWSDASKGGGALRALGSHLIDLNRFLVGEISEVCCNLSTSIPQRPDASTSGKSLPVTSDDSFAMFMKFGPSSVALGASSLMHVTTVGSYTWFSLEVVGSLKTIRLDGAGRLWEIVNSEVKGGRSLIDAPRWKQLEPMLPWDELVLQEKIKQSSLAVHGIFAVGFAFLAHRIVKALKSGDPVILQDAASFRDGLAIQKVMQAGLDSDREKRWVKV

SEQ ID NO: 51206 - DNA, 1185 bp, Streptomyces avermitilis MA-4680
  CDS (1)..(1185): transl_table=11
atggagaacgagggcagtggagccgcacgccgtcccctcggcgtcgcggtcgtcggtttcggctggatggggcgcgtgcacacccaggcgtacgcccgggtgctgcaccatttcccgcagctggccgtgcgcccggagctggtgacggtcgccgaggaggtgccgggccgggccgaggaggccgccgcgcagttcgggttcgcgcgtaccgcccgggactggcgcgaggtggccgcggatccgcgggtgcacgcggtgagcatcaccgcgccgaacttcctgcaccgcgagatcggcgtcgcgatggcggaggcgggcaagcacatctggatcgagaagccggtgggtctcacgctggaggacgcccgcgcggtgtcggacgcggtgaccaaggccggcgtccagggcacggtcggcttcaactaccgcaacgcacctgccgtcgagaccgcccgcgagctcatcgcctccggcgagatcggcacggtcacccatgtccgcatccggctcttcagcgactacgccgcccacccccatggcgccctgacctggcgctacgagcgcgagcgcggcggcagcggcgtgctcggcgacctcgcctcgcacggagtcgacctggcccggttcctgctcggcgacatcgcgtcgctcaccgccgacaccgcggtcttcgtacccgagcgggcccgccccacgggggcgaccgccggccacaccctcgccacggggggcgagcctggtccggtggagaacgaggactacgtctcctgtctgctgcgcttcgcctccggcgcccgcggtgtcctggaggcgtgccgcgtctcggtcggcgagcagaacaactacggcttcgaggtgcacggcaccaggggcgcggtcttctgggacttccgccgtatgaacgagctgggcgtcagccgcggcacctcctaccaggaccagcccctcaccaccgtccacgtcggcccgggccatggcgagtacggcgcgttccagcccggagcggcgaccagcatgggctacgacgacctgaaggtcatcgaggcgtaccgcttcctgcgctcgatcgcggaggagacaccgtacggggccacgctgccggacgccgtgcacagtgccgcggtgctggaggccatggccgcgtccgcggagagccgcgcctgggtggacgtgccgacgccctga

SEQ ID NO: 51207 - protein, 394 aa, Streptomyces avermitilis MA-4680
MENEGSGAARRPLGVAVVGFGWMGRVHTQAYARVLHHFPQLAVRPELVTVAEEVPGRAEEAAAQFGFARTARDWREVAADPRVHAVSITAPNFLHREIGVAMAEAGKHIWIEKPVGLTLEDARAVSDAVTKAGVQGTVGFNYRNAPAVETARELIASGEIGTVTHVRIRLFSDYAAHPHGALTWRYERERGGSGVLGDLASHGVDLARFLLGDIASLTADTAVFVPERARPTGATAGHTLATGGEPGPVENEDYVSCLLRFASGARGVLEACRVSVGEQNNYGFEVHGTRGAVFWDFRRMNELGVSRGTSYQDQPLTTVHVGPGHGEYGAFQPGAATSMGYDDLKVIEAYRFLRSIAEETPYGATLPDAVHSAAVLEAMAASAESRAWVDVPTP

SEQ ID NO: 51208 - DNA, 1113 bp, Prochlorococcus marinus subsp. marinus str. CCMP1375
  CDS (1)..(1113): transl_table=11
atgcaatctacaaacataaataaaaaatcaaaaataggtgttggattggcagggttaggttttggagaaaaagtacatttaccaggattattttcaagtcaagatctggaaccaattgcactatggcatccacgaccagatcgtttaaatgacgcttgtaaaactcatgatcttaagggatacgacaattggtcagccctacttaataatgccgatatagatgcagtaataattgccactcctccagaacctcgttttaaacttgcgtatgacgcacttcaagcagggaaacatcttctactagaaaaaccagttgctttaaatagcgaagagatattagagctccagagcttatcaattaaaaaaaagctttctgtagctgttgactttgaatacagagctgtacctcttttcatgcaagcaaagcaaatgatagatgatgaccttataggaacaccttggttaataaaacttgactggcttatgagtagtcgtgctgatgaaagtagagcttggaattggtattccgaaaaacaaagcggaggaggcgtcattggtgctcttggaactcatgcttttgacttattacattggttttttggtcctactaaaaacataaacggactaacatcaacatctatccaaaaaagaccttctatcaaaagcaaaaaactagaaaatgtgacaagtgaagatatctgcttggctcaattagaactttctaatttcaaatcacagcaaccaattcctgcacaagttacactttcagccgtttcaaggtatggaagaggattctggcttgagatttatggaaacaaaggcactttaatactcggtagcgataatcaaaaagattatgttcatgggtttggattatggtttggtgaaaaaggtaaaaaggtttgtcccattacaccagtaagtaatcttgcttttgataggacttgggaagatggacgtattgctccagttgcaagaattcaaaattggtgggctgaaagtataaataaagggaatccagtaattcctggcttaacggaaggtttattaagccaaagagtatgtgaaaaggttgatcaatcatacaaatctggaatgagactaactatctaa

SEQ ID NO: 51209 - protein, 370 aa, Prochlorococcus marinus subsp. marinus str. CCMP1375
MQSTNINKKSKIGVGLAGLGFGEKVHLPGLFSSQDLEPIALWHPRPDRLNDACKTHDLKGYDNWSALLNNADIDAVIIATPPEPRFKLAYDALQAGKHLLLEKPVALNSEEILELQSLSIKKKLSVAVDFEYRAVPLFMQAKQMIDDDLIGTPWLIKLDWLMSSRADESRAWNWYSEKQSGGGVIGALGTHAFDLLHWFFGPTKNINGLTSTSIQKRPSIKSKKLENVTSEDICLAQLELSNFKSQQPIPAQVTLSAVSRYGRGFWLEIYGNKGTLILGSDNQKDYVHGFGLWFGEKGKKVCPITPVSNLAFDRTWEDGRIAPVARIQNWWAESINKGNPVIPGLTEGLLSQRVCEKVDQSYKSGMRLTI

SEQ ID NO: 51210 - DNA, 1104 bp, Prochlorococcus marinus subsp. pastoris str. CCMP1986
  CDS (1)..(1104): transl_table=11
atgactaacattaatatttcacgaaaattaagaatcgcaattgctggcttaggatttggaaaaaaaattcatttagaagctttaaaagaatcagattacttaattccaactacaatttatcactataaaaaagaaaaaggaccatcattagagaaagaaaccggtttaaatttttatcatgattggggaaaattagttaaatctaaagatatcgacggtataataattgctacatctcctgaatcaagatttaaattagcaaaggaagcactagagaataataaacatctcttattagaaaaacctgttgccttaacttccgaagaaattgaagaactccaaagaatatccttaattaataatttgagtgtttgcgtagattttgaatatagagcagtacctctttttctacaaaccaagaaaataattgatgagaatattttaggtaaaatttatttaattaaacttgattggttaatgggcagcagatctgatcccaagagagcatggaactggtattcattaagagaaaaagggggaggagtaattggagctttgggaactcatgcattcgatatgttgaactggttttttggagaatcgataaaagtatctggaaaaatatcaacatcaattaatgaaagatcattgtctaattcctccaagatattggaagtaacaagtgaagatatttgtatagctaaccttgaaataactaattacgatagcgctctcataccatgtcaggtttcattatcctcgatttcaaaaaatggaagaggatttagtttggaagtgtacggaagtgaaggttcacttttcctaagcagtgagaatcaaaaagattacgtacatggttttaatttaaaattttcaaacaaagaggataaaacatataatttgcctgcggatcctctctacaattttgaaaaaacctggtctgatggaagaattgcacctgttaagagaattcacaatttatgggctgagagtatcaataatcaaacacctgtaatccctggattgtctgagggacttactagtcaaagagtttgtgaagcaataagaagatcctctgagagtggtatttctataaaaatttag

SEQ ID NO: 51211 - protein, 367 aa, Prochlorococcus marinus subsp. pastoris str. CCMP1986
MTNINISRKLRIAIAGLGFGKKIHLEALKESDYLIPTTIYHYKKEKGPSLEKETGLNFYHDWGKLVKSKDIDGIIIATSPESRFKLAKEALENNKHLLLEKPVALTSEEIEELQRISLINNLSVCVDFEYRAVPLFLQTKKIIDENILGKIYLIKLDWLMGSRSDPKRAWNWYSLREKGGGVIGALGTHAFDMLNWFFGESIKVSGKISTSINERSLSNSSKILEVTSEDICIANLEITNYDSALIPCQVSLSSISKNGRGFSLEVYGSEGSLFLSSENQKDYVHGFNLKFSNKEDKTYNLPADPLYNFEKTWSDGRIAPVKRIHNLWAESINNQTPVIPGLSEGLTSQRVCEAIRRSSESGISIKI

SEQ ID NO: 51212 - DNA, 1110 bp, Prochlorococcus marinus str. MIT 9313
  CDS (1)..(1110): transl_table=11
atgaatccaattcgtccaccaattggtgttgctattgccggccttggcttcggtgaaagcgttcatcttccggcactaaaagccaatccagacctacagcctgttgccctatggcatccacgcagagagcgactagaaaaagcttctaaccagcatgaacttatcggctatagcgattggtcagccctattgactgatccaaagatcgaggccgtgattctggcaacaccaccaggcccgcgttttgaattggcgctcgaagcattgaaagctggaaaacatttgcttctggagaaacccgtggcgttgcatgccgatcaagtcgctgaactgcaacgactggccatcaagcaaagattgagcgtggccgtggactttgaataccgtgctgtgccgttgtttatgcaagccaagcgtttgcttgatcaagggatcgtgggaacgccatggctggtgaaacttgactggttaatgagtagtcgcgccaatgcttcaagaccatggaactggtattcccaatccgaggcaggtggcggcgtgattggggcgctaggcactcatgccatggacatgctgcattggttgtgtgggccaactcgccaggtgagtgctctgctatccacctcgattcaaacaaggcctgatccatttagtggcgaactgcgtgatgtgagcagtgaagacgtcaccctggctcagttaaagctgggtggaaatgagaggcctgaaatacctgcacaggtgagcctcacggcaattgccctccagggaagagggtgctggctggagatctacggcagcaacggcagcctcttgcttggcagtgacaaccagaaagactatgtgcatggctttggcctctgggcagcagctgccggtgagccacttcgcagcattagcgctgatttggatctagcgttccctaccacatggactgatggtcgcatcgcccctgtagcgaggcttcaaggctggtgggccgagagcatgcgcagtggccagccaatgctgccaggccttgcggaaggatgggccagccaacacgtatgcgacaaaataagggattcagctagatcaggacagcgacttgaaatccaatcgacactctga

SEQ ID NO: 51213 - protein, 369 aa, Prochlorococcus marinus str. MIT 9313
MNPIRPPIGVAIAGLGFGESVHLPALKANPDLQPVALWHPRRERLEKASNQHELIGYSDWSALLTDPKIEAVILATPPGPRFELALEALKAGKHLLLEKPVALHADQVAELQRLAIKQRLSVAVDFEYRAVPLFMQAKRLLDQGIVGTPWLVKLDWLMSSRANASRPWNWYSQSEAGGGVIGALGTHAMDMLHWLCGPTRQVSALLSTSIQTRPDPFSGELRDVSSEDVTLAQLKLGGNERPEIPAQVSLTAIALQGRGCWLEIYGSNGSLLLGSDNQKDYVHGFGLWAAAAGEPLRSISADLDLAFPTTWTDGRIAPVARLQGWWAESMRSGQPMLPGLAEGWASQHVCDKIRDSARSGQRLEIQSTL

SEQ ID NO: 51214 - DNA, 1083 bp, Synechococcus sp. WH 8102
  CDS (1)..(1083): transl_table=11
atgagccttcaaccgatcggcgtggccgtagcaggcctgggttttggcgagaaggtgcacttgccggcacttcaggccaaccccgatctgtgcccagtggcgttgtggcacccgcgccaggagcgcctggatgccgccacggctgcccatggcttgaagggattcagcgactgggacgcgctgctggccgatccagcggtcgaggccgtgatcattgccacccctccggaaccgcgttttgcgctggcccgccaagcactggaggccggcaagcatctgctgctggagaagccgatcgccctgcacgcggatcaggcccgggaattgcagcgactggcgatcgcaaggggggtgtcggtcgcggtggattacgaatatcgggcggtgccgctgttcatgcaggccgaacgcctgctgcgggctggggtgatcgggactccctggctggtgaagctggactggttgatgagcagccgagctgaccccagtcgcggctggaactggtactcccaggcgtccaaggggggcggagtgatcggtgccctggggacccatgcctttgacatgctcgcctggctggtgggtccggtggcttcggtgacggcactcaatggcgtctccatctgcaagcgtcccgacccccagggaggaatggcacccgtggatgctgaggacgttgcgttgatccaaacccgattgcagtggcaggggagcgcggagacatcggtgccagcgcagatcaacctcgcgtcggtggccaggaacggacgcggctgctggctggagatctacgggtcggatggaagtcttgtgctcggcagtgcaaatcagaaggactacgtgcatggatttgaactgtgttgttcacgggctggtgagcaaccacagctgatcgagccggatcccgatctcgcctttgcaaccacctggagcgatggtcgtatagctccggtggcgaggcttcagagctggtgggccgagagcattcgttctggcatgccgatgattcccggcctggcggagggagttgccagccgattggcttgcgatcaagcagcccagacggcgtctggtctcgcgtaa

SEQ ID NO: 51215 - protein, 360 aa, Synechococcus sp. WH 8102
MSLQPIGVAVAGLGFGEKVHLPALQANPDLCPVALWHPRQERLDAATAAHGLKGFSDWDALLADPAVEAVIIATPPEPRFALARQALEAGKHLLLEKPIALHADQARELQRLAIARGVSVAVDYEYRAVPLFMQAERLLRAGVIGTPWLVKLDWLMSSRADPSRGWNWYSQASKGGGVIGALGTHAFDMLAWLVGPVASVTALNGVSICKRPDPQGGMAPVDAEDVALIQTRLQWQGSAETSVPAQINLASVARNGRGCWLEIYGSDGSLVLGSANQKDYVHGFELCCSRAGEQPQLIEPDPDLAFATTWSDGRIAPVARLQSWWAESIRSGMPMIPGLAEGVASRLACDQAAQTASGLA

SEQ ID NO: 51216 - DNA, 1152 bp, Gloeobacter violaceus PCC 7421
  CDS (1)..(1152): transl_table=11
gtgatacactctgcgccaggacgcggtttcaccatggcacgcatcggcatcggcatcatcggcacgggattcggacaaaaaattcatctgccgggctttcaagcgcttgcagaagcaatggatctgcaggtgctggccgtcctgggccgtgacggcgaccgcatcgcccaggtggcccgtcagttcgatgtgccctacccctgcacgagcatcgagcaactattggaaataccgggcctaggagcagtgagtatcgcctcgccgccctttttgcactacgagcaggcgatggcgacgatcgccgcgggcaagcacctgctgtgcgaaaaaccggtggctctggcgggttttgaagcctaccggcttttggaagccgccaccgcccgctccctgatccatgcggtcgattttgagtttcgctgcattcccgagtggcaactgctccacgagttgctgatggaaggcgcggtcggagcgctgcacctggtcaccgtcgactggctggtggagggacgagctgacccccggcggccctggagctggtatgccgagcgcgaacggggcggcggcgcgctcggatcgctgggctcccatctcttcgactatctggggtggctatttggtccccttacccgcctcaatgcccgcctcgacacgctcatccacagccgccccgacccggtgagcggcgattggctgccggttgacagtgacgacagttgccaactgtggctcgaactcaccgacggcaccccggtgaacgcgcgactgtgcaccgctacctggcagggtaccggccatcgtctcgcagtctacggcgagcggggcagcctggtgctcgccaacgacaaccagaaagattacgtccacggtttcaagctccagcgcgccaatgcagggggcgttctggagcccgtcgaggtgcccgagcgactgcgcttcgagcgtacctacccggacgggcggctcgcgccgtttatcgccattgcccgccgctttctagaaggcatccgcgagggcgagacggtagtgccgtcgctgcgcgagggcgcctacgcgcaactgttgatggatctggcccaacgctcccaccgggagcaagtctggctggaggtgccggtcgaagcgtttccgggcgaaacgtcagcttaa

SEQ ID NO: 51217 - protein, 383 aa, Gloeobacter violaceus PCC 7421
MIHSAPGRGFTMARIGIGIIGTGFGQKIHLPGFQALAEAMDLQVLAVLGRDGDRIAQVARQFDVPYPCTSIEQLLEIPGLGAVSIASPPFLHYEQAMATIAAGKHLLCEKPVALAGFEAYRLLEAATARSLIHAVDFEFRCIPEWQLLHELLMEGAVGALHLVTVDWLVEGRADPRRPWSWYAERERGGGALGSLGSHLFDYLGWLFGPLTRLNARLDTLIHSRPDPVSGDWLPVDSDDSCQLWLELTDGTPVNARLCTATWQGTGHRLAVYGERGSLVLANDNQKDYVHGFKLQRANAGGVLEPVEVPERLRFERTYPDGRLAPFIAIARRFLEGIREGETVVPSLREGAYAQLLMDLAQRSHREQVWLEVPVEAFPGETSA

SEQ ID NO: 51218 - DNA, 1152 bp, Nasonia vitripennis
  CDS (1)..(1152)
atgttacctggcataggagtttttggaactggaagtgtggttcgaatatttattccctttctaagggagaagggcttcaagattgaagccatctggggtcgaactattgctgaagcctctgaagtggcttcggatctggaaatacccttttacacaagcaggatcgacgatgtcctcttgaggcgagatgtggatcttatattcatcatgtgctcaccaaatttgcatgcacagattgctgtcaaagctttaggaataggaaaacatgttgtatgtgataagccagcaggattgagtcaaagtgaagcattgaaaatggttaaggctgctcagtattatccttcactaataagtattgtcaatcatagtctacgtttccttcctgcttttataaaaatgaaaagagaaattgaggaagggtatcttggaggacctgtttctataatcgatgttcgggtgcagatgggaagtcttgtaagagatgggtatgactggttatgtgatgaaataatgggcggtggaatcttggctctagttggcagtcatgtgatagacctaatttcctatgttacaaatcaaagagcagtgagagttcatgctgttgtgagaacttttactcaaacaacaaaacacatcaatggcattaggcagataacatctccagatttttgttgtttccaaatggaattaaatgaaggtacattggtaacagccactttaagtaaccatttgcaaggccaattatcccaggaagttttgatctgtggtcctaatggtcatcttgtggtgaagagtggtgacttacatggctgtagaggacaacaggaagaagctttgcatttagatgtagaaaatgttcaagagtcatctatagcagattttattcctcgtccatatatcaagggtttacataaaatgatagatgcattgcgtgaagcatttcaacctgtagaagataagcgaggatggataaaggaaccagtatccagagctgcgacatttgaagatggtttgtatgtccaggctgtaattgatgcactgaaaagaagtagcaaacacagggagtgggttaaagttaccatcatgacagaggagccagatccaaatcctttactcagtgcagctgttagagccactgccatttctatttaa

SEQ ID NO: 51219 - protein, 383 aa, Nasonia vitripennis
MLPGIGVFGTGSVVRIFIPFLREKGFKIEAIWGRTIAEASEVASDLEIPFYTSRIDDVLLRRDVDLIFIMCSPNLHAQIAVKALGIGKHVVCDKPAGLSQSEALKMVKAAQYYPSLISIVNHSLRFLPAFIKMKREIEEGYLGGPVSIIDVRVQMGSLVRDGYDWLCDEIMGGGILALVGSHVIDLISYVTNQRAVRVHAVVRTFTQTTKHINGIRQITSPDFCCFQMELNEGTLVTATLSNHLQGQLSQEVLICGPNGHLVVKSGDLHGCRGQQEEALHLDVENVQESSIADFIPRPYIKGLHKMIDALREAFQPVEDKRGWIKEPVSRAATFEDGLYVQAVIDALKRSSKHREWVKVTIMTEEPDPNPLLSAAVRATAISI

SEQ ID NO: 51220 - DNA, 1098 bp, Prochlorococcus marinus str. AS9601
  CDS (1)..(1098): transl_table=11
atgaatactaaaaataaaaaattaaaaatagcaatcgctggactagggtttgggaaaaaagttcatttagaggcattaaaagagtctgatcacttaactcctgtagcaatttatcattacgataaaaagcaaaaatcgatattagaaaaagaaacgggcttagatttttttcataattgggaagacttagttaaatctccaaaaattgatggaattattattgccactcctcctgaatcaagatttaagttagcaaaacaagctcttgagaataataaaaatctgctcctagaaaaacccgtttcaatatcctcctcagaaattgaagagcttcagagaatatctttgattaataatttaagcgtatgtgttgattttgaatatagagcagtacctcttttccttcagacaaaaaaacttattgatgaaaatatcttaggagatatatatttagtcaaattagattggttaatgggcagtagatccgaccccaaaagattctggaattggtattcattggaagaaaaaggtggaggagttattggtgctttaggtactcatgcattcgatatgttgaattggttttttggagaagcaataaacgtatctggcaagttagcaacatcaataaaaaaaagacctttacctaattcatctgatttaaatgctgttacgagtgaggatgtatgtttagccaatatagaaataacaaactacagctcgaatcttattccatgtcaggtatctttatcatcaatttctaaaaatggtagaggattttgtttagaaatatatggaagcgaaggttcactaattcttaaaagcgaaaaccaaaaagattatgtacatggttttaatttgaaatattcaaacaacgaaaataaaatacaaaatctaactgcagattcaagttttaattttgaaaaaacatggactgatgggagaatagctccagttttgagaattcaaaatttatgggctcagagtataattaacggaacacctgtaatcccaggcttatgcgagggacttgctagtcataaagtttgcgaagccataagagaatcttccaaaagtggattaagtatcaaaatttaa

SEQ ID NO: 51221 - protein, 365 aa, Prochlorococcus marinus str. AS9601
MNTKNKKLKIAIAGLGFGKKVHLEALKESDHLTPVAIYHYDKKQKSILEKETGLDFFHNWEDLVKSPKIDGIIIATPPESRFKLAKQALENNKNLLLEKPVSISSSEIEELQRISLINNLSVCVDFEYRAVPLFLQTKKLIDENILGDIYLVKLDWLMGSRSDPKRFWNWYSLEEKGGGVIGALGTHAFDMLNWFFGEAINVSGKLATSIKKRPLPNSSDLNAVTSEDVCLANIEITNYSSNLIPCQVSLSSISKNGRGFCLEIYGSEGSLILKSENQKDYVHGFNLKYSNNENKIQNLTADSSFNFEKTWTDGRIAPVLRIQNLWAQSIINGTPVIPGLCEGLASHKVCEAIRESSKSGLSIKI

SEQ ID NO: 51222 - DNA, 1104 bp, Prochlorococcus marinus str. MIT 9515
  CDS (1)..(1104): transl_table=11
atgaattttagtaatgctactgacaaattaagagtcgcaattgctggtttgggatttggaaaaaaaattcatttggaagcattaaaagaatcagattatttaattccaactgcaatttttcactacaagaaagaaaaaggaccatctttagagaaggaaactgggttaaatttttatcatgattggggagaattagttaaatccaaagatatagacggaatcataattgctacatctcccgaatcaagatttgaattggcaaaggaagctcttgagaataataaacatcttttattagagaaacctgtagccttaacctccgaggaaattaaagaacttcaaagaatatcattagttaataatttgagtgtttgtgtagattttgaatatagagcagtaccacttttcctacaaaccaagaaaatgatagatgagaatattttaggaaaaatatatttaattaagcttgattggttgatgggtagccggtcagatcccaatagggcttggaattggtattcattaaaagaaaaaggtggtggggttgttggagctttaggtactcatgcatttgatatgttgaactggttttttggagaatcgattgtagtatccgggaaattatcaacatcaatcaagaaaagatccttacctaattcctctaagtttttgaaagtaacaagtgaggatatttgcatagctaaccttgaaataaaaactttcgatgacatcatagttccatgtcaggtttctttatcctcgatttcaaagtgtggaagaggatttagtttggaagtatatggaagtgaaggctcacttttccttaagagtgagaatcaaaaagattatgttcatggttttaatttaaagatttcaaatcgagaagataagacatacaatttatccgctgatccacgctatgattttgaaaaaacctggactgatggaagaattgcacctgtccagagaattcaaagtttatgggctcatagtatcaagaatcaaactccagtaatcccaggactgtctgagggacttaatagtcaaagagtttgtgaagctataagaaaatctgcagagagcggtttaaatgtaagaatttag

SEQ ID NO: 51223 - protein, 367 aa, Prochlorococcus marinus str. MIT 9515
MNFSNATDKLRVAIAGLGFGKKIHLEALKESDYLIPTAIFHYKKEKGPSLEKETGLNFYHDWGELVKSKDIDGIIIATSPESRFELAKEALENNKHLLLEKPVALTSEEIKELQRISLVNNLSVCVDFEYRAVPLFLQTKKMIDENILGKIYLIKLDWLMGSRSDPNRAWNWYSLKEKGGGVVGALGTHAFDMLNWFFGESIVVSGKLSTSIKKRSLPNSSKFLKVTSEDICIANLEIKTFDDIIVPCQVSLSSISKCGRGFSLEVYGSEGSLFLKSENQKDYVHGFNLKISNREDKTYNLSADPRYDFEKTWTDGRIAPVQRIQSLWAHSIKNQTPVIPGLSEGLNSQRVCEAIRKSAESGLNVRI

SEQ ID NO: 51224 - DNA, 1110 bp, Prochlorococcus marinus str. MIT 9303
  CDS (1)..(1110): transl_table=11
atgaatccaatccgccctccaattggtgttgctattgccggccttggcttcggtgaaagcgttcatcttccggcactaaaagccaacccagacctacagcctgttgccctatggcatccacgcagagagcgactagaaaaagcctctaaccagcatgaacttgtcggctatagcgactggtctgccctattgacggatccaaagatcgaggccgtgattctggcaacaccaccaggcccgcgttttgaattggcgctcgaagcactgaaagctggaaaacatttgcttctggagaaacccgtggcgttgcacgccgatcaagtcgctgaactgcaacgactggccatcaagaaaagattgagcgtggccgtggactttgaataccgtgctgtgccgttgtttatgcaagccaagcgtttgcttgatcaaggcatcgtgggaacaccatggctggtgaaacttgactggttaatgagtagtcgcgccaatgcttcaagaccatggaactggtattcccaatccgaggcaggtggcggcgtgattggggcgctaggtactcatgccatcgacatgctgcattggttgtgtgggccaactcgccaggtgagtgctctgctatccacctcgattcaaacaaggcctgatccaagtagtggcgatccgtgtgatgtgagcagtgaagacgtcaccttggctcagttaaagctgggtggaaatgagaggcctgaaattcctgcacaggtgagcctcacggcaattgccctccagggaagaggctgctggctggagatctacggcagcaacggcagcctcttgcttggcagtgacaaccagaaagactatgtgcatggctttggcctctgggcagccgctgccggtgagccactacgcagcattagcgctgatttggatctagcattcccaaccacatggactgatggtcgcatcgcccctgtggcgaggcttcaaggctggtgggccgagagcatgcgcagtggacagccaatgctgccaggccttgcggaaggatgggccagccaacaggtatgcgacaaaataagggattcggctagatcaggacagcgacttgaaatccaatcgacactctga

SEQ ID NO: 51225 - protein, 369 aa, Prochlorococcus marinus str. MIT 9303
MNPIRPPIGVAIAGLGFGESVHLPALKANPDLQPVALWHPRRERLEKASNQHELVGYSDWSALLTDPKIEAVILATPPGPRFELALEALKAGKHLLLEKPVALHADQVAELQRLAIKKRLSVAVDFEYRAVPLFMQAKRLLDQGIVGTPWLVKLDWLMSSRANASRPWNWYSQSEAGGGVIGALGTHAIDMLHWLCGPTRQVSALLSTSIQTRPDPSSGDPCDVSSEDVTLAQLKLGGNERPEIPAQVSLTAIALQGRGCWLEIYGSNGSLLLGSDNQKDYVHGFGLWAAAAGEPLRSISADLDLAFPTTWTDGRIAPVARLQGWWAESMRSGQPMLPGLAEGWASQQVCDKIRDSARSGQRLEIQSTL

SEQ ID NO: 51226 - DNA, 1134 bp, Erwinia carotovora subsp. atroseptica SCRI1043
  CDS (1)..(1134): transl_table=11
atgaaggatgtacgcattgggttaatcggcactggctatattgggcgtgcgcatgccatcgcctacgcgcaggcaccgacggtcttcccgctgaaagggaatctggtgaaagccatgctggcggaagtgtcgccagaactggcagctaaacgggcgcaggagttcggctttcagcgctcaactgcggactggcgtgagctggtggctgaccctgacattgatgtggtggatatctgcgcgccgaactttctgcataagacgatggcgatggcggccatccagcacggtaagcatgtttactcggaaaaaccgctggcgctgaacgcacgtgacgccagagaaatggttgatgccgcgcagcgagcgggcgtgaaaacgctggtgggcttcaattatatgaagaacccgacttcacaacttgccaaagaaattatcgccaacggcgaaattggcgaggtggtgcatttttacggtacgcacaatgaggattatctggccgatccgaacaaacacgcagactggcactgctttaaagaaacggcagggctgggggcgttgggggatctggcggcgcacatcgtcaacatggcgcagtatctggttggtgatatcgccagcgtttgcggcgatctgcaaacggtgattacgcagcgtccgacggcattgggcagcagcgagtgggtacaggtggagaatgaggatcaggcgcatgccatggtgcgttttgccagcggcgcgcgcggcgtgattgaaacctcgcgcattgcctgcgggcgaaaaatgggccttacctacgtggtgaccggcaccacaggcacgctgagtttcacgcaggaacgcatggccgagttgaaactgtatcggcatgacgagccggaaaatcggcagggatttaaaacgctgctgaccgggccacagcatcctgattacgcggccttctgtgccagcgccggacacggtattggatttaacgatcagaaaacagtggaagtgcgcgatctgatcgacggtattgcggctgacgtacccatgtggccggatttcgaagagggctggaaagtatcgcgagttctggatgcgatagtgcagtcacacgaaacggcacgctgggtgaacgtggacgaggtgggctaa

SEQ ID NO: 51227 - protein, 377 aa, Erwinia carotovora subsp. atroseptica SCRI1043
MKDVRIGLIGTGYIGRAHAIAYAQAPTVFPLKGNLVKAMLAEVSPELAAKRAQEFGFQRSTADWRELVADPDIDVVDICAPNFLHKTMAMAAIQHGKHVYSEKPLALNARDAREMVDAAQRAGVKTLVGFNYMKNPTSQLAKEIIANGEIGEVVHFYGTHNEDYLADPNKHADWHCFKETAGLGALGDLAAHIVNMAQYLVGDIASVCGDLQTVITQRPTALGSSEWVQVENEDQAHAMVRFASGARGVIETSRIACGRKMGLTYVVTGTTGTLSFTQERMAELKLYRHDEPENRQGFKTLLTGPQHPDYAAFCASAGHGIGFNDQKTVEVRDLIDGIAADVPMWPDFEEGWKVSRVLDAIVQSHETARWVNVDEVG

SEQ ID NO: 51228 - DNA, 1101 bp, Prochlorococcus marinus str. NATL2A
  CDS (1)..(1101): transl_table=11
atgatcaatacagatcatccgattcgcatagcaattgcagggctaggtttcggtgaaagtgttcatattcctgcatcattatctaataagaatattgagcttgtgggattgtggcatcctcggccagaaaggcttaaagaagcctgcaataagcacaatcttcgtgcctacgagacctgggaggatttagtaaatgattccaaagtagatggaataatcatagctactccgccagcacccagatacgagcttgcactagaggcaattaaaggaggaaaacatcttttacttgaaaagccaacttgtttaaatgcttatgaggtgatggagcttcaaagaaacgctctcaaaagaaatttaaaaatagctgttgattacgaatatcgtgccgttccgctattcatgcaagcaaagcgaataattaccgagaagaaactagatgaaccatattttgtaaagcttgattggctaatgagtagcagggctaatccagataggccatggaattggtattcagatgaaaattctggtggaggggtactgggagccttgggaacccatgcttttgacatgattcattggctaattggtcctactcattctttgagcgcaataaattcaacttcaattgaagaaagagagtgtccacaatcaaaaaccattaaaaaagtgacaagtgaagatgtaagtatttctcaactacaaataaaaagcattaacaacaatttaattccagcccaagtaaatttatctgcagtaacaaaacaaagcaggggttttagtctggaaatctatggaagcaatggaactcttgttcttagcagcgagaaccagaacgattatgttcacggatttgggctttggtactcaaacaaaggagacgttcttaaaaatatccaacctgactctgacctatctttttcaaaaatatggacagatggtcgaatagctccagtagcaagaatacaaaactggtgggctcaaagtattgcagatggaaccccagtaattccaggcttagtagagggattagctagccaaatagtttgcgataaggtaaaggaatcaaactcaataggtatgaagatagaaatcaattga

SEQ ID NO: 51229 - protein, 366 aa, Prochlorococcus marinus str. NATL2A
MINTDHPIRIAIAGLGFGESVHIPASLSNKNIELVGLWHPRPERLKEACNKHNLRAYETWEDLVNDSKVDGIIIATPPAPRYELALEAIKGGKHLLLEKPTCLNAYEVMELQRNALKRNLKIAVDYEYRAVPLFMQAKRIITEKKLDEPYFVKLDWLMSSRANPDRPWNWYSDENSGGGVLGALGTHAFDMIHWLIGPTHSLSAINSTSIEERECPQSKTIKKVTSEDVSISQLQIKSINNNLIPAQVNLSAVTKQSRGFSLEIYGSNGTLVLSSENQNDYVHGFGLWYSNKGDVLKNIQPDSDLSFSKIWTDGRIAPVARIQNWWAQSIADGTPVIPGLVEGLASQIVCDKVKESNSIGMKIEIN

SEQ ID NO: 51230 - DNA, 1125 bp, Anabaena variabilis ATCC 29413
  CDS (1)..(1125): transl_table=11
atggtgtctggattacaagcaaatcagggtaaaattggaatagcgatcgctgggactggttttggtcaaaaagttcacatacccgcctttcaagcccatcatcgtactgatatagttgcgatttatcaccgtgatattcataaagctaaagcaattgccgaagcaaacaatattccccatgcctttgacactatagttgatattgttaatctgccagaagtacaagcagtcagtatcgctacaccacctttcctgcattatgaaatggggaaaacagtattgcaagcaggaaaacatttactgctagaaaagcctgtcaccctgaatgtggctgaagcacaagaattgtatcaattagcgcaaaagcaaggtgtgattgccactgtagattttgagtttcgttttgtccctgcatggcaactattcgctgaacttttatcatcaggttatgtaggaacccctcgcctgattagaattgattggttgggttcttctcgtgccgatacttcccgcccttggaactggtattcttctaaggaaaagggtggtggtgcgttaggttccttaggttcccacgcttttgattatatttattggctatttgggtcagtccgcagattaaatgcccatttgactacagccattcctcaacgggttgaccctgctagcggtgaattaaaagcagtggagacagatgatacttgtctgctgtcactagaattagcaaatggtacgccttgccaagtgactatcagtgctgctgttcatgcttctagaacacactggatagaagtatatggcgatcgcggtactttagtaattggtagtgaaaatcaaaaagactacatccacggttttcgcgtttggggttcccaaccaggtcaacctcttcaagaaatcgaaatcccgcccaaattactattcccccaacattacactgacggacgcatttgtgcattcttgcgggtagtagaccaatgggtacaaggaattgatcagcaaaagccagtagtaccatctttaaaagaaggtatttattcccagttattaatggatttatctcatcaatctcatacaactggtagctgggtagatgtgccaaatgttgaagattatcttatttaa

SEQ ID NO: 51231 - protein, 374 aa, Anabaena variabilis ATCC 29413
MVSGLQANQGKIGIAIAGTGFGQKVHIPAFQAHHRTDIVAIYHRDIHKAKAIAEANNIPHAFDTIVDIVNLPEVQAVSIATPPFLHYEMGKTVLQAGKHLLLEKPVTLNVAEAQELYQLAQKQGVIATVDFEFRFVPAWQLFAELLSSGYVGTPRLIRIDWLGSSRADTSRPWNWYSSKEKGGGALGSLGSHAFDYIYWLFGSVRRLNAHLTTAIPQRVDPASGELKAVETDDTCLLSLELANGTPCQVTISAAVHASRTHWIEVYGDRGTLVIGSENQKDYIHGFRVWGSQPGQPLQEIEIPPKLLFPQHYTDGRICAFLRVVDQWVQGIDQQKPVVPSLKEGIYSQLLMDLSHQSHTTGSWVDVPNVEDYLI

SEQ ID NO: 51232 - DNA, 1083 bp, Synechococcus sp. CC9605
  CDS (1)..(1083): transl_table=11
atgtctccacagccccttggtgttgcagtagccggtctcggcttcggggagaaggtgcacctgccggcccttgcggcagcgactgatcttgaggcggtggccctctggcacccgcgtcagaagcgcctggatgccgccacagccgcccatggcttgaggggattcagcgattgggatgccctgctggccgatcccgcggtggacgcggtgatcatcgccactccccccgcacctcgctttgatctggcccgccgggccttggaggcgggcaagcacctgctgctggaaaagcccatcgcgctgcatgccgatcaagcccgggagctacagcggctggccctggcccggggactgtcggtggctgtggattacgagtaccgggctgttcccctgttcatgcaggccgcacgcctgctgcaggccggcgctgtcggcacaccctggcttgtgaagctcgactggttgatgggcagccgtgccgatccccagcgcggctggaactggtatgcccaggcggatcagggcggcggcgtgatcggagccctgggaacccatgccgtggacatgctggcctggctgatcggccccctgggggctgttcaggccctcaacggcgtttcgatcaagcaacgccctcacccagatggtggtctggccaccgtggatgcccccgatgtgtcgctgctgcaggccgttgcccaatggcagggcaggcaggacctgccggtgccggcacaggtcagcctcagttccgtgtcgcgcaacggctgcggtttctgccttgatgtggtgggctcctcgggatcgctgctgctcagcagcaccaatcagaaggactacgtccatggctttgagttgcagcacgccccgctcggtgagcccttccgcgccgtggaaaccgatgccgacctcgtcttcccgcaaacctggacggatggtcgcatcgcccctgtggtgcgggtgctgggctggtgggccgaaagcattcgcagtgggcaaccgatgctgcctggactggccgagggcgtggccagtcgtgtggcctgcgatcaagcagcaggcggcacattagttcttgcgtaa

SEQ ID NO: 51233 - protein, 360 aa, Synechococcus sp. CC9605
MSPQPLGVAVAGLGFGEKVHLPALAAATDLEAVALWHPRQKRLDAATAAHGLRGFSDWDALLADPAVDAVIIATPPAPRFDLARRALEAGKHLLLEKPIALHADQARELQRLALARGLSVAVDYEYRAVPLFMQAARLLQAGAVGTPWLVKLDWLMGSRADPQRGWNWYAQADQGGGVIGALGTHAVDMLAWLIGPLGAVQALNGVSIKQRPHPDGGLATVDAPDVSLLQAVAQWQGRQDLPVPAQVSLSSVSRNGCGFCLDVVGSSGSLLLSSTNQKDYVHGFELQHAPLGEPFRAVETDADLVFPQTWTDGRIAPVVRVLGWWAESIRSGQPMLPGLAEGVASRVACDQAAGGTLVLA

SEQ ID NO: 51234 - DNA, 1098 bp, Prochlorococcus marinus str. MIT 9312
  CDS (1)..(1098): transl_table=11
atgaatactaaaaataaaaaattaaaaatagctatagctggactaggttttgggaaaaaagttcatttagaagcattaaaagagtcagattatttaacgcctgtagctatttatcattatgagaaaaagcaaaaatcgattttagaaaaagaaacgggattagagttttttcataattgggaagatttagttaaatctccagatattgatgggattattgttgctacccctcctgaatcaagatttaaattagcaaaacaagctcttgagaataataaaaatttgctattagaaaaaccggtttcaatatcgtcctctgaaattgaagagcttcagagaatatctttgatcaataacttaagtgtatgtgttgatttcgaatacagggcagtaccacttttccttcagacaaaaaaacttattgatgaaaatattttaggcgatatatatttagtcaaattagattggttaatgggaagcagatcagaccctaaaagagcctggaattggtattctttagaagaaaaaggtggaggagttattggtgccttaggtactcacgcattcgatatgttgaattggttttttggagaatcaataaacgtatctggcaagttagcaacatcaataaaaaaaagacccttacctaattcatctgatttaaattacgttactagcgaggatatttgtctagctaatatagaactatcaaattacagtacgaatctaattccatgtcaggtttctttatcatcgatttctaaaaacggtagaggctttagtttagaaatatatggaagcgaaggttcacttattcttaaaagcgagaaccaaaaagattatgtacatggttttaatttgaaatactcaaacaacgaaaataaaatacaaaatctgactgcagattcaatttttaattttgagaaaacatggactgatggaaggatagctccagttttaagaattcaaaatttatgggctgagagtatttttaataaaacacccatcattccaggcctatgcgagggacttgcaagtcataaagtttgtgaagcgataagagaatcgtcgaagagtgggttaaatataaaaatatag

SEQ ID NO: 51235 - protein, 365 aa, Prochlorococcus marinus str. MIT 9312
MNTKNKKLKIAIAGLGFGKKVHLEALKESDYLTPVAIYHYEKKQKSILEKETGLEFFHNWEDLVKSPDIDGIIVATPPESRFKLAKQALENNKNLLLEKPVSISSSEIEELQRISLINNLSVCVDFEYRAVPLFLQTKKLIDENILGDIYLVKLDWLMGSRSDPKRAWNWYSLEEKGGGVIGALGTHAFDMLNWFFGESINVSGKLATSIKKRPLPNSSDLNYVTSEDICLANIELSNYSTNLIPCQVSLSSISKNGRGFSLEIYGSEGSLILKSENQKDYVHGFNLKYSNNENKIQNLTADSIFNFEKTWTDGRIAPVLRIQNLWAESIFNKTPIIPGLCEGLASHKVCEAIRESSKSGLNIKI

SEQ ID NO: 51236 - DNA, 1116 bp, Synechococcus elongatus PCC 7942
  CDS (1)..(1116): transl_table=11
atgcgccactttgatgccagtcagccgctgcgagttgcggtgctggggacggggtttggctcaaaagttcatattcccgccctacagcaccattccgagacgacggtgcaagcggtctaccatcgtcagcccgatcgcgctgcggcgatcgcggtgcaattcggcattcccaatgcctacagcgatctcgatcagcttcttgctgatcccgcgatcgaagccgttacgatcgccagtccgccctttctgcactaccccatggcttgggcggctctctcggcgggcaaatcggtgctgctggaaaaaccgacaaccctcaatgttgaggaagcgcgggcgctgtggaagctagcgagtagtcagggcttaactgtcaccctcgactttgaatatcgcttcgtcccagcttggcagtacgtcgctgagttgctggctgaaggcgtgatcgggcagccatggctagtcaaactcgattggttgatgtcgagtcgtgccgatgccagtcgcccttggaattggtacgccctgcgatcgcaggggggtggcgcactgggtgccttgggtagtcatagttttgactatttggcttggctgtttggcccggcccggcgactgcaagctcgcttgtttaccgccattcaagaacgtcctgatgcgaccacaggtgaactgaagcccgtcgactccgatgacaccgatctgattcaactggaattggcggagggtgtgccctgtcagatcagccttagctctgtctgtcgtcaagggcgcgggcactggctggaggtctatggcgatcgcggcacgctgattctcggcagcagcaatcaaaaggactacgtccacggctttcaggtctggttcgcatcagcaggccaagcccttcaggagctaaccgttcctcagcgcttggcattccgtcaggagtttgccgatggtcgtttggcccccttcctgcgggtcgtcgatcactggcttgccgatctgcgccacggtcagatgacggcgccgagtctcaaggaaggcctgtactcgcagttgctgattgatctctgctggcagtcacagcgcagcggtgaatggcaaaccgttcctgaactgaatcgctttctctag

SEQ ID NO: 51237 - protein, 371 aa, Synechococcus elongatus PCC 7942
MRHFDASQPLRVAVLGTGFGSKVHIPALQHHSETTVQAVYHRQPDRAAAIAVQFGIPNAYSDLDQLLADPAIEAVTIASPPFLHYPMAWAALSAGKSVLLEKPTTLNVEEARALWKLASSQGLTVTLDFEYRFVPAWQYVAELLAEGVIGQPWLVKLDWLMSSRADASRPWNWYALRSQGGGALGALGSHSFDYLAWLFGPARRLQARLFTAIQERPDATTGELKPVDSDDTDLIQLELAEGVPCQISLSSVCRQGRGHWLEVYGDRGTLILGSSNQKDYVHGFQVWFASAGQALQELTVPQRLAFRQEFADGRLAPFLRVVDHWLADLRHGQMTAPSLKEGLYSQLLIDLCWQSQRSGEWQTVPELNRFL

SEQ ID NO: 51238 - DNA, 1086 bp, Myxococcus xanthus DK 1622
  CDS (1)..(1086): transl_table=11
atgtccactgcacgcacggttcgaatgggtgtcattggcgcgggcttcgcgcgcaccacgcaaatccccgcgctgcgcgcattgccgggcgtggaggtggtgagcctggccagtgcgcggcgcgagaaggtggaggaggcgggccggcagttgggcgtgtcacatgtgacgacggattggcgtgaggtggtgtcacggccggatgtgacgtgcgtgtgcatctccacgccgcccgcgctgcaccgggacatcaccctggccgcgctggaggcgggcaaggcggtgctgtgtgagaagcccaccgcgttggatgcgagggaagcggaggccatgtggcacgcggcccgtgagcggcgtgtcctggcgctgctggaccatgagctgcgcttcctccctgcgcggcagcggatgcgagcgctgctgcgttccggtgagctgggcgcggtgcgcggcgcgcgtgtcttctatcgcaacgacaaccgcgcctcgccggagcggccgtgggactggtggtcggacgcgtcgcaaggaggcggcctcctgggcgccatcggctcgcacgcggtggacacgctgcgcttcatgctgggcgccgagcccgacgaggtgctgggcgagctggccacgcacacgcccgagcggcccgatgcgctcacgggacagtcgcgcccggtgacgagcgacgacgaggcgcggctgctgctccgcttcggtgcgacgacagccgcaatcgagatgtcgatggtgtcctccggcaagcccgtgcacggcgtcgaggtgtcctgcgcgcgcgggggcctgcgcgtggagggccgcgagctgtggcgctccacggtgggggcacgtgcctgggagcgggtagcgcttcccgaggaaccgccgcttccacccggcctgccagacaacgagtgggcgcgcggcttcctgctgttggccggtgcgctgacgcaggccctgcgcgaaggccgcgcctcggtggaggacgcggccacgctggaggacggctggcgcaaccaacgggtgttggatgcggctcggcgctcacatgcggagcgccagtggattcgcctgtcctccgggccgtaa

SEQ ID NO: 51239 - protein, 361 aa, Myxococcus xanthus DK 1622
MSTARTVRMGVIGAGFARTTQIPALRALPGVEVVSLASARREKVEEAGRQLGVSHVTTDWREVVSRPDVTCVCISTPPALHRDITLAALEAGKAVLCEKPTALDAREAEAMWHAARERRVLALLDHELRFLPARQRMRALLRSGELGAVRGARVFYRNDNRASPERPWDWWSDASQGGGLLGAIGSHAVDTLRFMLGAEPDEVLGELATHTPERPDALTGQSRPVTSDDEARLLLRFGATTAAIEMSMVSSGKPVHGVEVSCARGGLRVEGRELWRSTVGARAWERVALPEEPPLPPGLPDNEWARGFLLLAGALTQALREGRASVEDAATLEDGWRNQRVLDAARRSHAERQWIRLSSGP

SEQ ID NO: 51240 - DNA, 1164 bp, Rubrobacter xylanophilus DSM 9941
  CDS (1)..(1164): transl_table=11
atgactgagcggcccgacgctaggtcggaggtcggggtcggcctcgtgggctacggttttatgggccgggcccactcgaacgcctaccggcaggtcgcacgcttcttcgaggtggaccctgctccccggatggccgccctctgcggcaggaacgagccgcgcgtgcgggaggccgcgcgcaggctcggctgggagggctacgagacgagctacgagcggctgctcgagcgcgaggatgtgcagctcatcgacatctcctcctccggagatacgcaccgggagtttgcggtggcggcgctcgaggccgggaagcacgtcctctgcgagaagccgctcgccaacacgctcgatgaggcccgggagatggtcgaggcggcccgggaggccggcacggtgaacatggtctgccacaactaccggcgtgccccggcggtgcagctcgcgaagaggctcgtggacgaggggaggatcggcgagatccggcactggcgcgccgtctacctgcaggactggctcctggacccccgaacccccctgacgtggcggctgaggagggagacggggggagcggggccgcccgcggatctgggctcgcacctcgtggacctcgcgcacttcctcgtcggccccatagcggaggtgataggcaccgccgagacgttcataaaggagcgcccgctcgaagggacggatgaaatgggcgaggtgacggtgagcgacgcggcggcgtttctggcccggttcgagaacggggccatcgggacgttcgaggtttcgccgctggtgccggggcgcaaggcgcacgagcgcttcgagatcaacggctcgaacgggagcctggtcttcgacctcgagaggatgaacgagctggaggtgtatttcgaggacgaggggccgcggtcggccggttttcaccgcgttttggtgaccgagcccgagcacccgtacatggagggctggtggccgccggggcacatcatcggctacgagcacaccttcgtgcacacggtgaaggacctgctggagggcgtgagggagggcaggagccccgccccgagcttcgaggacgggctccgctgccaggcggtgctcgacgccgtggagaggagcgtggaggagcgcgagtgggtgagcccgcaattctacaaacccggtgccgggtaa

SEQ ID NO: 51241 - protein, 387 aa, Rubrobacter xylanophilus DSM 9941
MTERPDARSEVGVGLVGYGFMGRAHSNAYRQVARFFEVDPAPRMAALCGRNEPRVREAARRLGWEGYETSYERLLEREDVQLIDISSSGDTHREFAVAALEAGKHVLCEKPLANTLDEAREMVEAAREAGTVNMVCHNYRRAPAVQLAKRLVDEGRIGEIRHWRAVYLQDWLLDPRTPLTWRLRRETGGAGPPADLGSHLVDLAHFLVGPIAEVIGTAETFIKERPLEGTDEMGEVTVSDAAAFLARFENGAIGTFEVSPLVPGRKAHERFEINGSNGSLVFDLERMNELEVYFEDEGPRSAGFHRVLVTEPEHPYMEGWWPPGHIIGYEHTFVHTVKDLLEGVREGRSPAPSFEDGLRCQAVLDAVERSVEEREWVSPQFYKPGAG

SEQ ID NO: 51242 - DNA, 1137 bp, Haemophilus somnus 129PT
  CDS (1)..(1137): transl_table=11
atgaaaaaagtccgagtcggtttaatcggaacaggttatattggtcgttgtcatgcgattgcttatgcacaagcaccgacagtttttcctcttgaggctgaattggttttggaatatttagctgaaatcacaccagaactggcacaacaaaaagcacaagaatttggttttaatcgttcgacaggtgactggcgagatgtagtatccgatccaaatatagatgttgttgatatttgtacacccaatttcttgcacaaagaaattgctttagccgctattgctaatggtaaacatgtttattctgaaaaacccttagcattaaccgcagttgatgcaaaaatcatgtatgaggcggcaaaaaaagcaggtgtcagaacccttgtgggatttaattatattaaaaatccgactacacaacttgctcgtgaaattattgagcgtggtgaaattggtgaagtaatccatttctatggtacgcataatgaagactatttagcatcagatacgacacccttagactggcattgtgttcgtgaaaaagcaggacttggtgcattaggtgatttggcagcacacattgtgcaaatgtcacaatatttagtaggtagcgatattgaaaaagtgatcggtgatatggagacggtagttaaagaacgcccaaatccccaaaatcttgcagagcgtttaccggtagaaaacgaagatcaagcaactgctatggtgcgttttacaaacggttgtatgggaaccattgaaacgtctcgtattgcttgtggacgtaaaatgggattgacttatgtaattaccggaacaaaaggtacaattacctacacacaagaacgtatggcagagttaaaactctatcttcacgatgaagatcctgctcgtcaaggctttaaaacaattttgacaggtccgttacacgcagattataaaaatttctgtgtaagtgcgggtcatggtattggttttaatgatcaaaaaacggttgaaattcgtgatttagtgaatggaatagcgaataatcataatatgtatcctgactttgaagaaggttttaaagtttctcgtgtattagatgctattgcacaatcttgccaagaaagacgttgggttaacgtgaaagaaattgcgtaa

SEQ ID NO: 51243 - protein, 378 aa, Haemophilus somnus 129PT
MKKVRVGLIGTGYIGRCHAIAYAQAPTVFPLEAELVLEYLAEITPELAQQKAQEFGFNRSTGDWRDVVSDPNIDVVDICTPNFLHKEIALAAIANGKHVYSEKPLALTAVDAKIMYEAAKKAGVRTLVGFNYIKNPTTQLAREIIERGEIGEVIHFYGTHNEDYLASDTTPLDWHCVREKAGLGALGDLAAHIVQMSQYLVGSDIEKVIGDMETVVKERPNPQNLAERLPVENEDQATAMVRFTNGCMGTIETSRIACGRKMGLTYVITGTKGTITYTQERMAELKLYLHDEDPARQGFKTILTGPLHADYKNFCVSAGHGIGFNDQKTVEIRDLVNGIANNHNMYPDFEEGFKVSRVLDAIAQSCQERRWVNVKEIA

SEQ ID NO: 51244 - DNA, 1116 bp, Trichodesmium erythraeum IMS101
  CDS (1)..(1116): transl_table=11
atgaaaaatcaaactattggcgtagcagttatcggtacaggatttggtcaaaaggtacatataccaggtttacaagcacatcacaaaactgaagtcttagcagtttataatcgagattatacaaaagctaaatcaattgcatcaagccataatattccttatgcttttaacactattgaagagataattgacttgcctgaagttactgccgtaaccatttcaactcctccatttctacactatgaaatggcaaagcaaatattatccgctgggaaacatttattgttagaaaaacccacaactttaaaagcagaagaagctcaagaattatatcatcttgctgctactaataaatgtttagtaactatggattttgagtttcgttatattcctgcttggcaactatttgccaaaattttagcagatggatatgtgggggataaacgcctaattaaaattgattggttagcatcaagtcgtgctctcccaagccgtccttggaattggtattctcaaaaagataaaggaggtggtgcattaggagcgatcgcttcccatacttttgattatattaactggttatttggtcctgctaaaaaactttggggacaacttaatacatccattaaaactcgtcctgaccctgctacaggaaatgaattaaaacaagttgatgcagatgatacttgtaacattatgttggagttggcagatggtactccctgtcaaatttgtattagctcagtcacctatcaagggcgtggtcattgggtagaagtttatggtagtaaaggtactttaattgttggtagcgataatcaaaaagattatgtacatgggtttaaagtttggggttctcaaaatggggaatctttaggagaaataaacattcctaaaaatttagattttccgaaggtttattctgatggtagaattgcaccttttattcgagtagttgataattgggtacaggctatagttgcaggaaaatctctagttccatctttgaaagagggtgtttattctcagttattaatggatttaacccatgaatctaatttaactggtacttgggtaaacgtaccagatttagataaatttattcagaataggtag

SEQ ID NO: 51245 - protein, 371 aa, Trichodesmium erythraeum IMS101
MKNQTIGVAVIGTGFGQKVHIPGLQAHHKTEVLAVYNRDYTKAKSIASSHNIPYAFNTIEEIIDLPEVTAVTISTPPFLHYEMAKQILSAGKHLLLEKPTTLKAEEAQELYHLAATNKCLVTMDFEFRYIPAWQLFAKILADGYVGDKRLIKIDWLASSRALPSRPWNWYSQKDKGGGALGAIASHTFDYINWLFGPAKKLWGQLNTSIKTRPDPATGNELKQVDADDTCNIMLELADGTPCQICISSVTYQGRGHWVEVYGSKGTLIVGSDNQKDYVHGFKVWGSQNGESLGEINIPKNLDFPKVYSDGRIAPFIRVVDNWVQAIVAGKSLVPSLKEGVYSQLLMDLTHESNLTGTWVNVPDLDKFIQNR

SEQ ID NO: 51246 - DNA, 1089 bp, Synechococcus sp. CC9311
  CDS (1)..(1089): transl_table=11
atggcgctcccatcttcaagccattcccccattggagtggcgattgcgggtcttggctttggtgaatcggttcatctgaaagcccttgccgctcaatctgatctggaaggagtagcgctctggcatccccgccgtgaacgcctagatcaggcctgccttgagcacaatctccctggttatcacgattgggagtctttgctcagcgaccctcgcgtgcaggcggtgatcattgccactcctcctgagcctcgctttgcgttagcccttcaagcgctaaaagcaggcaaacacttgttgcttgaaaagcctgttgctctcaaggctgaatcggtggcagagctgcaacgcatcgccatccagaaccggctcagtgttgcggtggattatgagtatcgggctgtgcctctgttcatgcaggctgcgaggatgctggaggcaggagccgtaggcactccgtggctggtgaaactcgactggttgatgagcagccgtgcggatgcgtctcgaccatggagctggtattcacaacgggaagccggtggaggtgtgctcggtgcccttggtacccatgctttcgacatgttggcttggttgatcggaccgattcgatccgttcaaggtctcaatagcgtgtcgattaaggagcgtccccatcccagtgggggcatggctccagtggatgctgaagatgtctcgctgattcagatgcagctcgattggcagggccgctctgatcagagggttccagcccaggtcaatttggcgtctgtggcccgcaatggtcgaggttgctggctggagatctatggatctcatggaagcctcacgctcggtagctcaaaccaaaaggattatgtccatggcttcgggctgtggcacacgccgatgggagaggccactcgcaatatcgaggcggatgctgagttcatgttccccaccacttggagtgatggtcgtgtggcgccggtggcccgcatccagagctggtgggcgcacagcattcaaaccggtgctcccatggtgcctggcctgtcagaggggctgatcagtcagcaagcatgtgatcaatcactcgcgggaaccgattga

SEQ ID NO: 51247 - protein, 362 aa, Synechococcus sp. CC9311
MALPSSSHSPIGVAIAGLGFGESVHLKALAAQSDLEGVALWHPRRERLDQACLEHNLPGYHDWESLLSDPRVQAVIIATPPEPRFALALQALKAGKHLLLEKPVALKAESVAELQRIAIQNRLSVAVDYEYRAVPLFMQAARMLEAGAVGTPWLVKLDWLMSSRADASRPWSWYSQREAGGGVLGALGTHAFDMLAWLIGPIRSVQGLNSVSIKERPHPSGGMAPVDAEDVSLIQMQLDWQGRSDQRVPAQVNLASVARNGRGCWLEIYGSHGSLTLGSSNQKDYVHGFGLWHTPMGEATRNIEADAEFMFPTTWSDGRVAPVARIQSWWAHSIQTGAPMVPGLSEGLISQQACDQSLAGTD

SEQ ID NO: 51248 - DNA, 1098 bp, Nostoc punctiforme PCC 73102
  CDS (1)..(1098): transl_table=11
atgattggaattgcgatcgcaggcactggatttggtcaaaaagtccacatccctggattccaagcacatcctcaaactgaggtagttgctgtctatcatcgagatataaataaagccaaagccatagcagaatcccataatattccacacgcctctgattctctggctgatattgtggcgttaccagaagtgcaagcagtcagtatctctacgccgccatttttgcactatgaaatggcaaaaactgtactacaagctgggaaacatttattactagaaaaaccgacaactttaaatgcagtcgaagctaaagaactttatcaattagcgaaagcaaaaggtgtaattgcgactgtagattttgaatttcgttttgtaccagcatggcagttatttgctgaattactatcagaagattatgtgggtgagttgcgcctaatcaaaattgattggttaggttcttctcgtgctgatatttcacgcccttggaattggtattctgacaaagacaaaggaggtggtgcattaggatctttaggttcccacgccttcgattacattcactggttattcgggccagtccagagattaaacgcccatttaagtactgcgattcctgcaagagttgaccctgttagtggagaatctaagctagtaaatacagatgacaactgtatattaaccctggaattagcgaatggtacaccttgccaactctctatcagcgcggttgttcatgcagcaagaactcattgggtagaagtatatggcgatcgcggtacattaattgtaggcagtgaaaatcaaaaagattatatacacggctttcgtgtttggggttcccagccaggtaaacctctaacggaaatagaaataccaaatcggttaatttttcccaaaaattatgctgatgggcggatttcggcatttatccgtgtagtagaccaatgggtgcagggaattgaacgcaatcaggaaattacaccatcactgcgggaaggaatttattctcagttgttgatggatttatcccatgaatctcatacaaaagcaagttgggtagatgtacctagcttggaaagatttcttagcaactag

SEQ ID NO: 51249 - protein, 365 aa, Nostoc punctiforme PCC 73102
MIGIAIAGTGFGQKVHIPGFQAHPQTEVVAVYHRDINKAKAIAESHNIPHASDSLADIVALPEVQAVSISTPPFLHYEMAKTVLQAGKHLLLEKPTTLNAVEAKELYQLAKAKGVIATVDFEFRFVPAWQLFAELLSEDYVGELRLIKIDWLGSSRADISRPWNWYSDKDKGGGALGSLGSHAFDYIHWLFGPVQRLNAHLSTAIPARVDPVSGESKLVNTDDNCILTLELANGTPCQLSISAVVHAARTHWVEVYGDRGTLIVGSENQKDYIHGFRVWGSQPGKPLTEIEIPNRLIFPKNYADGRISAFIRVVDQWVQGIERNQEITPSLREGIYSQLLMDLSHESHTKASWVDVPSLERFLSN

SEQ ID NO: 51250 - DNA, 1137 bp, Haemophilus somnus 2336
  CDS (1)..(1137): transl_table=11
atgaaaaaagtccgagtcggtttaatcggaacaggttatattggtcgttgtcatgcgattgcttatgcacaagcaccgacagtttttcctcttgaggctgaattggttttggaatatttagctgaaatcacaccagaactggcacaacaaaaagcacaagaatttggttttaatcgttcgacaggtgactggcgagatgtagtatccgatccaaatatagatgttgttgatatttgtacacccaatttcttgcacaaagaaattgctttagccgctattgctaatggtaaacatgtttattctgaaaaacccttagcattaaccgcagttgatgcaaaaatcatgtatgaggcggcaaaaaaagcaggtgtcagaacccttgtgggatttaattatattaaaaatccgactacacaacttgctcgtgaaattattgagcgtggtgaaattggtgaagtaatccatttctatggtacgcataatgaagactatttagcatcagatacgacacccttagactggcattgtgttcgtgaaaaagcaggacttggtgcattaggtgatttggcagcacacattgtgcaaatgtcacaatatttagtaggtagcgatattgaaaaagtgatcggtgatatggagacggtagttaaagaacgcccaaatccccaaaatcttgcagagcgtttaccggtagaaaacgaagatcaagcaactgctatggtgcgttttgcaaacggttgtatgggaaccattgaaacgtctcgtattgcttgtggacgtaaaatgggattgacttatgtaattaccggaacaaaaggtacaattacctacacacaagaacgtatggcagagttaaaactctatcttcacgatgaagatccagctcgtcaaggctttaaaacaattttgacaggtccgttacacgcagattataaaaatttctgtgtaagtgcgggtcatggtattggttttaatgatcaaaaaacggttgaaattcgtgatttagtgaatggaatagcgaataatcataatatgtatcctgactttgaagaaggttttaaagtttctcgtgtattagatgctattgcacaatcttgccaagaaagacgttgggttaacgtgaaagaaattgcgtaa

SEQ ID NO: 51251 - protein, 378 aa, Haemophilus somnus 2336
MKKVRVGLIGTGYIGRCHAIAYAQAPTVFPLEAELVLEYLAEITPELAQQKAQEFGFNRSTGDWRDVVSDPNIDVVDICTPNFLHKEIALAAIANGKHVYSEKPLALTAVDAKIMYEAAKKAGVRTLVGFNYIKNPTTQLAREIIERGEIGEVIHFYGTHNEDYLASDTTPLDWHCVREKAGLGALGDLAAHIVQMSQYLVGSDIEKVIGDMETVVKERPNPQNLAERLPVENEDQATAMVRFANGCMGTIETSRIACGRKMGLTYVITGTKGTITYTQERMAELKLYLHDEDPARQGFKTILTGPLHADYKNFCVSAGHGIGFNDQKTVEIRDLVNGIANNHNMYPDFEEGFKVSRVLDAIAQSCQERRWVNVKEIA

SEQ ID NO: 51252 - DNA, 1110 bp, Crocosphaera watsonii WH 8501
  CDS (1)..(1110): transl_table=11
atgaattctaagtctccccttcgtgttgccgtagttggaaccggttttggccaagctattcatattcctgggttacaacatcaccctcgcactgagttggttgcggtttacaatagagacttaggtaaggcaaaagcgatcgccgataagaataatattccctatgctttccataacttggacaaactcttagctatgtccgatcttgacgcagttactttatccactcccccttttttacactacgagatggggaaacaaatattaaaggcagggaaacaccttcttttagagaaacccatggctatgtctgcacaggaaaccagggaattatatcatttagcaacaaaaaataatctagttgctacaacggactttgagtttcgttatgttcctgcttggcaacttttaagggaaaaattagaagaaggttacatagggcaacccagactaattaaaattgattggttagtggccagtcgtgctaacccagaacaaggttggaactggtacgctcttaaggataagggtgggggtgttttgggtgctgtgggttcccatgcttttgattatatccattggttatttggtccagtgaaacggttatgcgctaggttggtatgtgctatcaaacaacggccagatcccctggaaaatgccaaactaaagccagttgatgcagatgatacctgtttaatcatgttggagttaacggacggtacaccggtgcaattaaccattagttctgtcacctataatggtcgaggacattggttagaagtttacggagatcggggtactttggtcttaggtagcgataatttaaaagattatgttcacgggttccatttacaagctggcctcgccggaaaacccttaacagaggttgaaatacccaaaaggttagcctttcctcaagtgtttaccgatggacgtttggccccatttattcgtattgtcgatcgctgggtagaaagcatagatcaaaagcaatctttagccccatctttatatgaaggtgtttattctcaattattaatggatttgacccatcaatccagtgaaacgggatcttgggttaatgttcctgatttgaattcattcctttag

SEQ ID NO: 51253 - protein, 369 aa, Crocosphaera watsonii WH 8501
MNSKSPLRVAVVGTGFGQAIHIPGLQHHPRTELVAVYNRDLGKAKAIADKNNIPYAFHNLDKLLAMSDLDAVTLSTPPFLHYEMGKQILKAGKHLLLEKPMAMSAQETRELYHLATKNNLVATTDFEFRYVPAWQLLREKLEEGYIGQPRLIKIDWLVASRANPEQGWNWYALKDKGGGVLGAVGSHAFDYIHWLFGPVKRLCARLVCAIKQRPDPLENAKLKPVDADDTCLIMLELTDGTPVQLTISSVTYNGRGHWLEVYGDRGTLVLGSDNLKDYVHGFHLQAGLAGKPLTEVEIPKRLAFPQVFTDGRLAPFIRIVDRWVESIDQKQSLAPSLYEGVYSQLLMDLTHQSSETGSWVNVPDLNSFL

SEQ ID NO: 51254 - DNA, 1122 bp, Prochlorococcus marinus str. MIT 9211
  CDS (1)..(1122): transl_table=11
atgattatagaagaatccacgaagaataagattaaggttgcaattgctggcttagggtttggtgagaaagttcacttaaaggctttaaatgaaagtgatttaatgctgccagttgcgctatggcaccctaggcttgatcgcttaactattgcaagcgaacagtatggtatcccaggctacactgattgggatttacttcttgaagataaaaatatagaagcaataataattgcaacaccacccgagccacgctatgggctggctatcaaagctctaaatgctggtaaacatttgtttttagaaaagccaatagcactaaacagttcacagataataaaccttcaaaaattagctatatctaaaggacttactgttgctgttgactttgaatatagggcagtaccacatttccaacaagcaaaagaactcctttctaacaatacaataggaacaccctggcttataaaattagattggttaatgggtagtcgagcaaacaagaaaagagagtggaattggtattcagaaagagaaaaaggaggaggtgtaattggagccctaggaacacatgcttttgacattcttcattggttctttgggccaacgacgtctgtaaccagtctattatcaacatctataaaagagaggccagctagcaatagttctgaactaaaacctgtaactagcgaggatatctgtcttgctcagttgcaactcaaatctaattctattcagtccataattcctgcacaagtaactctgtcagcagtttctaaagaaggaagagggttttggctagaagtttacggaagcgaagggacactaatacttggcagtgacaatcagaaagactacgttcatggttttggcctctggttatcaaacaatgaaacgaaactccaatcagtccaacctaaaaaaaagttctgcttttcgaaaacatgggatgatgggcgtatagcaccagttaaaaggatacatgaccggtggtgtgaaagtattaaaatgaaaactccagttataccaggccttatggaaggactagagagccaaaaagtatgtgacaagataatagaatccaacctaaattctattgatatgagtatgaatagcctgatctaa

SEQ ID NO: 51255 - protein, 373 aa, Prochlorococcus marinus str. MIT 9211
MIIEESTKNKIKVAIAGLGFGEKVHLKALNESDLMLPVALWHPRLDRLTIASEQYGIPGYTDWDLLLEDKNIEAIIIATPPEPRYGLAIKALNAGKHLFLEKPIALNSSQIINLQKLAISKGLTVAVDFEYRAVPHFQQAKELLSNNTIGTPWLIKLDWLMGSRANKKREWNWYSEREKGGGVIGALGTHAFDILHWFFGPTTSVTSLLSTSIKERPASNSSELKPVTSEDICLAQLQLKSNSIQSIIPAQVTLSAVSKEGRGFWLEVYGSEGTLILGSDNQKDYVHGFGLWLSNNETKLQSVQPKKKFCFSKTWDDGRIAPVKRIHDRWCESIKMKTPVIPGLMEGLESQKVCDKIIESNLNSIDMSMNSLI

SEQ ID NO: 51256 - DNA, 1143 bp, Synechococcus sp. RS9917
  CDS (1)..(1143): transl_table=11
atgccactctctgcctcgacgtccccctcgaatgccccagtgccgatcggcgtcgccatcgccggcctcggcttcggcgaagccgtgcatctcccagccctgcgcagcctggcggatgcccaacctgtggcgctctggcatccccgcgccgaacggcttgatcaggcctgcgcccagcatgggctgaaggggtaccaccactgggatgccctcatggccgatccggccgttgaggccatcgtgatcgccaccccaccgcagccacggtttgatctggctcgccgcgcccttgaggcgggcaagcacctgctgctggaaaaaccggtcgccctcgaggctgaccgggtggccgaactgcagcgactcgcgatccggcaggggtgcagcgtggcggtggattttgaatatcgggccgtgccgctgttcatgcaggcggaacgcctgctggcggcgggggcgatcggcaccccctggctggtgaagctggattggctgatgagcagccgcgccaaccccgagcggccctggacctggtattcctcagccgagcaggggggcggtgtgatcggcgccctgggcacccatgccttcgacatgctcgcctggttggtgggcgagatcgaccaactccaggcgttgcaccacacggccatcacgaaacgccccctgcccggtggcggccaggcctcagtcgatgcggaggatgtggccctgatccaggcccgcctgctcagccatggaggcactgggcctgtgcccgcccaggtgagccttgcctccgtggcgcgcaacggacgcggctgttggctggagatctacggctccgagggaagcctggtgctgggcagcgacaaccagaaggattacgtgcacggcttcggactctggctggcccagaacggggagtcgccccgcagccttcaggcggatgcggatctgcgcttcgccaccacctggagcgacgggcgggtggctcccgtggcgcgcatccagcagtggtggatcgacagcatccgctccggccgccccatgctgccggggctgagcgaagggctacgcagccagcaggcctgtgaccgctgcagactgatgccttgggactcgcccggaacaacacggaatcgggcgaatgagatccggtag

SEQ ID NO: 51257 - protein, 380 aa, Synechococcus sp. RS9917
MPLSASTSPSNAPVPIGVAIAGLGFGEAVHLPALRSLADAQPVALWHPRAERLDQACAQHGLKGYHHWDALMADPAVEAIVIATPPQPRFDLARRALEAGKHLLLEKPVALEADRVAELQRLAIRQGCSVAVDFEYRAVPLFMQAERLLAAGAIGTPWLVKLDWLMSSRANPERPWTWYSSAEQGGGVIGALGTHAFDMLAWLVGEIDQLQALHHTAITKRPLPGGGQASVDAEDVALIQARLLSHGGTGPVPAQVSLASVARNGRGCWLEIYGSEGSLVLGSDNQKDYVHGFGLWLAQNGESPRSLQADADLRFATTWSDGRVAPVARIQQWWIDSIRSGRPMLPGLSEGLRSQQACDRCRLMPWDSPGTTRNRANEIR

SEQ ID NO: 51258 - DNA, 1098 bp, Synechococcus sp. WH 5701
  CDS (1)..(1098): transl_table=11
atgagtcaacccctccaggtcgccgtggccggcctcggcttcggtgagaaggtgcacctgagcgccctgcgggcctgcccgggcaccgagccggtggccctctggcaccccagagccgagcgcctggaggccgcctgccgcgccgctgagttgccgggccacagcgactttgcagcgctgctggccgatccgaccgtggaggcggtggtgatcgccaccccgccaggcccccgcttcgagctggccctcgccgccctcaaagccggcaagcacctgctgctggagaaacccgtcgccctggaagtggcccaggtgagggagctgaggcggctggcgattgagcggggcctgagcgtggcggtggattttgagtaccgggcggtgccggtgttccagcagctgcgggcgctgctgagccagggagtgctgggggagccttggctggtgcgcttcgattggctgatgagcagccgtgccgatcccagcaggccgttcagctgggcctcgcagcgctcgcaagggggcggtgtgctcggctcgctcggcacccatgccttcgacagcctggagtggctggtggggccggtgcgccagctgagcgcaagcctctccaccgccatcacccagcggcccctgcctggacgcacggggcacttcggagtcgtggatgccgacgatgtggccctgcttcaactggagctggaatcagcctccggggcgtcggtgccggcccagctcagcctctcgtcggtgacccgcgcgggccggggctgctggctggagttccacggcagcgaggccagcctgatcctgggcagcgacaaccaggctgactatgtgcacggcttccacctctggctggcccggccgggggagccgccccaaccggtgccgcccgatccggccctggcctttggccgcacctgggccgacggccgcatcgccccggtggcgcggctgcagggctggtggagcgacagcgtgcgcgagggccggccgatgctgccgggcctggccgaaggagagcgcagtcagctctgctgcgacctggcccttgaggccgccgccagcggcctgcgccagagcctcggccgctga

SEQ ID NO: 51259 - protein, 365 aa, Synechococcus sp. WH 5701
MSQPLQVAVAGLGFGEKVHLSALRACPGTEPVALWHPRAERLEAACRAAELPGHSDFAALLADPTVEAVVIATPPGPRFELALAALKAGKHLLLEKPVALEVAQVRELRRLAIERGLSVAVDFEYRAVPVFQQLRALLSQGVLGEPWLVRFDWLMSSRADPSRPFSWASQRSQGGGVLGSLGTHAFDSLEWLVGPVRQLSASLSTAITQRPLPGRTGHFGVVDADDVALLQLELESASGASVPAQLSLSSVTRAGRGCWLEFHGSEASLILGSDNQADYVHGFHLWLARPGEPPQPVPPDPALAFGRTWADGRIAPVARLQGWWSDSVREGRPMLPGLAEGERSQLCCDLALEAAASGLRQSLGR

SEQ ID NO: 51260 - DNA, 1086 bp, Synechococcus sp. WH 7805
  CDS (1)..(1086): transl_table=11
atggctttgagctccaaccgagatccaattggtgtcgccgttgccggtcttggtttcggggcatccgttcaccttcctgcactggaagcgaaccctgatctcaaggccgtagcgctgtggcacccacgcagcgagcgcctggatcaagtgggccgagacaccagcttgaagggttatgaggcgttcgacgccttgctcgaggatcccagtgtggaggcagtcatcatcgccacaccaccgggaccgcgttatgacctcgctctacgcgctctggccgccgggaagcatcttctgcttgaaaagccagttgccctgaatgctgatcaggtggctgacctgcagcggacagcctcgagcgcaggtctcagcgtggctgtggattttgaatatcgggcagtgccgctctttcagcagacagaaaagcttctgagcaacggcgcaatcggcacaccctggcttgcaaggctcgactggctgatgagcagccgggccaatccaaaacgcccttggaactggtatgccaaagccgacgaaggcggcggtgtgctgggtgccctcggcacccatgccttcgacatgctggcctggctgatcggtccggtgcagaccctgcaatcaatcacgcaaaccgccatcgcgcacaggccggatgcaagtggtgacagtcaggccgtcacagcggaggacatcgccctgatcaacacaacgctcacgacccatcagggagcaccactggccgcacaggtggctctggcatcggtggcgcgcaatggcaggggttgctggctggagatctacggatcggagggaagtttgaagctgggcagtgagaaccaaaaggactacgtgcacgggttctctctcacccttcaacgggacggcgaaccccctcgcagcattcaggcggatgaggagttccgctttgcgaaaacctggagtgacgggcgcgttgcccctgtcgctcggctgcaaggttggtgggcggagagcatgcgcagcggccggccgatggtgccaggtctgttggaagggcttgccagtcagaaggcatgcgaccgctgccttgagatggccttgggacagtga

SEQ ID NO: 51261 - protein, 361 aa, Synechococcus sp. WH 7805
MALSSNRDPIGVAVAGLGFGASVHLPALEANPDLKAVALWHPRSERLDQVGRDTSLKGYEAFDALLEDPSVEAVIIATPPGPRYDLALRALAAGKHLLLEKPVALNADQVADLQRTASSAGLSVAVDFEYRAVPLFQQTEKLLSNGAIGTPWLARLDWLMSSRANPKRPWNWYAKADEGGGVLGALGTHAFDMLAWLIGPVQTLQSITQTAIAHRPDASGDSQAVTAEDIALINTTLTTHQGAPLAAQVALASVARNGRGCWLEIYGSEGSLKLGSENQKDYVHGFSLTLQRDGEPPRSIQADEEFRFAKTWSDGRVAPVARLQGWWAESMRSGRPMVPGLLEGLASQKACDRCLEMALGQ

SEQ ID NO: 51262 - DNA, 1098 bp, Synechococcus sp. RS9916
  CDS (1)..(1098): transl_table=11
atgcactctcaatcctcccagcaaccacccatcggcgtcgccatcgccggcctggggttcggggaggcggtccacctgccagcactccaggccaaccctgggctcaaacccgtcgccctttggcatccacgccaggaacgactggatcaggcttgcatgagccatgggctgaagggcttcaccgaatgggatgccgtgctctcggatcctgcagtggacgccgtgatcgttaccacccctccagcgccgagacatgacctagcccgacgcgctctcgaagcaggaaaacatctgttgctcgagaaaccggtcgcgctccatgccgatcaggtcgcggatcttcagaggctggccgtgcaaaagcgcctcagcgtcgccgtggatttcgaataccgggccgttcccctgttcatgcaggccgcccgactgcttcaagcgggtgccattggcacaccgtggctggtgaaatacgactggctaatgagcagtcgtgccaatgcgcagcgcccctggagctggtactccgatgcagcccaaggcggaggcgtgatcggtgcactgggaacccatgcttttgacactctccattggctgatcggccccagcaccgacctgcgagcccttcatcacaccgccattggccaacggcccacacccagcggcgagatgcgttctgttgatgcagaggatgtagccctcattcaggcccaacttcaggcccctgatgggcagaccatggttcctgcccagatcagcctggcctcagtcgcccgcaacggccggggctgctggattgaggtctacggctccgaaggcagcctcaccctcggaagcgacaaccagaaggactacgtccatgggttcagtctctgcctcagcaaggacggggacagtccaagggtgatccaaccggatgccgacctcaacttccccaccacttggagcgatggtcgaatcgcacccgtggcacggcttcaagggtggtgggctgacagcatccgcacgggtcgacccatggttcctggcctgagtgaaggcctgctgagccagaccgcttgcgaccaatcccaggcctcacatcgctcctggtgccactga

SEQ ID NO: 51263 - protein, 365 aa, Synechococcus sp. RS9916
MHSQSSQQPPIGVAIAGLGFGEAVHLPALQANPGLKPVALWHPRQERLDQACMSHGLKGFTEWDAVLSDPAVDAVIVTTPPAPRHDLARRALEAGKHLLLEKPVALHADQVADLQRLAVQKRLSVAVDFEYRAVPLFMQAARLLQAGAIGTPWLVKYDWLMSSRANAQRPWSWYSDAAQGGGVIGALGTHAFDTLHWLIGPSTDLRALHHTAIGQRPTPSGEMRSVDAEDVALIQAQLQAPDGQTMVPAQISLASVARNGRGCWIEVYGSEGSLTLGSDNQKDYVHGFSLCLSKDGDSPRVIQPDADLNFPTTWSDGRIAPVARLQGWWADSIRTGRPMVPGLSEGLLSQTACDQSQASHRSWCH

SEQ ID NO: 51264 - DNA, 23 bp, Artificial sequence
  primer
atgactaaatccccaaacctaac

SEQ ID NO: 51265 - DNA, 21 bp, Artificial sequence
  primer
ttactgggccaaaaggcgatc

SEQ ID NO: 51266 - protein, 394 aa, Artificial sequence
  consensus sequence
  Variant (2)..(2): Xaa in position 2 is any amino acid
  Variant (5)..(8): Xaa in position 5 to 8 is any amino acid
  Variant (10)..(60): Xaa in position 10 to 60 is any amino acid
  Variant (61)..(69): Xaa in position 61 to 69 is any or no amino acid
  Variant (71)..(72): Xaa in position 71 to 72 is any amino acid
  Variant (74)..(80): Xaa in position 74 to 80 is any amino acid
  Variant (82)..(87): Xaa in position 82 to 87 is any amino acid
  Variant (91)..(91): Xaa in position 91 is any amino acid
  Variant (93)..(93): Xaa in position 93 is any amino acid
  Variant (97)..(98): Xaa in position 97 to 98 is any amino acid
  Variant (100)..(110): Xaa in position 100 to 110 is any amino acid
  Variant (112)..(119): Xaa in position 112 to 119 is any amino acid
  Variant (120)..(122): Xaa in position 120 to 122 is any or no amino acid
  Variant (124)..(127): Xaa in position 124 to 127 is any amino acid
  Variant (129)..(130): Xaa in position 129 to 130 is any amino acid
  Variant (132)..(145): Xaa in position 132 to 145 is any amino acid
  Variant (147)..(167): Xaa in position 147 to 167 is any amino acid
  Variant (168)..(168): Xaa in position 168 is any or no amino acid
  Variant (170)..(175): Xaa in position 170 to 175 is any amino acid
  Variant (178)..(178): Xaa in position 178 is any amino acid
  Variant (180)..(181): Xaa in position 180 to 181 is any amino acid
  Variant (183)..(183): Xaa in position 183 is any amino acid
  Variant (186)..(186): Xaa in position 186 is any amino acid
  Variant (188)..(189): Xaa in position 188 to 189 is any amino acid
  Variant (191)..(196): Xaa in position 191 to 196 is any amino acid
  Variant (198)..(207): Xaa in position 198 to 207 is any amino acid
  Variant (208)..(208): Xaa in position 208 is any or no amino acid
  Variant (210)..(210): Xaa in position 210 is any amino acid
  Variant (212)..(213): Xaa in position 212 to 213 is any amino acid
  Variant (215)..(222): Xaa in position 215 to 222 is any amino acid
  Variant (223)..(235): Xaa in position 223 to 235 is any or no amino acid
  Variant (237)..(239): Xaa in position 237 to 239 is any amino acid
  Variant (241)..(268): Xaa in position 241 to 268 is any amino acid
  Variant (269)..(279): Xaa in position 269 to 279 is any or no amino acid
  Variant (281)..(282): Xaa in position 281 to 282 is any amino acid
  Variant (284)..(284): Xaa in position 284 is any amino acid
  Variant (285)..(299): Xaa in position 285 to 299 is any or no amino acid
  Variant (301)..(342): Xaa in position 301 to 342 is any amino acid
  Variant (343)..(347): Xaa in position 343 to 347 is any or no amino acid
  Variant (349)..(370): Xaa in position 349 to 370 is any amino acid
  Variant (371)..(371): Xaa in position 371 is any or no amino acid
  Variant (373)..(376): Xaa in position 373 to 376 is any amino acid
  Variant (378)..(386): Xaa in position 378 to 386 is any amino acid
  Variant (387)..(393): Xaa in position 387 to 393 is any or no amino acid
GXGFXXXXHXXXXXXXXXXXXXXXXXXXXXXXXXXXXXXXXXXXXXXXXXXXXXXXXXXXXXXXXXXXXIXXPXXXXXXXAXXXXXXGKHXLXEKPXXLXXXXXXXXXXXAXXXXXXXXXXXVXXXXRXXPXXXXXXXXXXXXXXGXXXXXXXXXXXXXXXXXXXXXXWXXXXXXGGXGXXGXLGXHXXDXXXXXXGXXXXXXXXXXXTXIXXRXXXXXXXXXXXXXXXXXXXXXVXXXDXXXXXXXXXXXXXXXXXXXXXXXXXXXXXXXXXXXXXXXGXXGXXXXXXXXXXXXXXXXLXXXXXXXXXXXXXXXXXXXXXXXXXXXXXXXXXXXXXXXXXXXXXXXGXXXXXXXXXXXXXXXXXXXXXXXPXXXXGXXXXXXXXXXXXXXXXS

SEQ ID NO: 51267 - protein, 21 aa, Artificial sequence
  protein pattern
  Variant (4)..(4): Xaa in position 4 is Ala, Ile, Leu or Val
  Variant (5)..(5): Xaa in position 5 is Ile, Leu or Val
  Variant (6)..(7): Xaa in position 6 to 7 is any amino acid
  Variant (8)..(8): Xaa in position 8 is Ile, Leu or Val
  Variant (9)..(9): Xaa in position 9 is Ala or Gly
  Variant (10)..(10): Xaa in position 10 is Ser or Thr
  Variant (12)..(12): Xaa in position 12 is any amino acid
  Variant (13)..(13): Xaa in position 13 is Phe, Ile, Met or Val
  Variant (15)..(17): Xaa in position 15 to 17 is any amino acid
  Variant (18)..(18): Xaa in position 18 is Phe, Trp or Tyr
  Variant (19)..(19): Xaa in position 19 is Phe, Leu, Met or Val
  Variant (20)..(20): Xaa in position 20 is any amino acid
  Variant (21)..(21): Xaa in position 21 is Gly or Asn
GGGXXXXXXXHXXDXXXXXXX

SEQ ID NO: 51268 - DNA, 975 bp, Synechocystis sp.
  CDS (1)..(975): transl_table=11
atgaatattttggagtatgctccgatcgcctgtcagtcctggcaggttaccgtggtcggcgctggcaatgtggggcggacccttgcccagaggttagtgcagcaaaatgtcgccaacgtagttttgttggacattgtgccaggcttaccccagggcattgccttggatttgatggccgcccagagcgtggaggaatacgacagcaaaatcattggcaccaatgaatacgaggccaccgccggctccgatgtggtggtaattaccgctggtctaccccgcaggcccggcatgagtcgggatgatttgttgggcaaaaacgccaacattgtggcccagggggcccgggaagcattgcgttattcccccaacgccattttgattgtggtcaccaatcccctggatgtaatgacctatttggcctggaaagtaactggtttaccttcccaacgggttatgggcatggcgggggtgttggactcggctcggctcaaggccttcattgcgatgaaattaggggcctgtccttctgatatcaacaccttagtgctgggcgggcacggagatttgatgctgcccttgccacgatactgcaccgtcagcggggttcccattaccgaattaatacccccccaaaccattgaagagttggtggagcgtacccgtaacggtggggctgaaattgccgccttactacaaacgggcacagcctattatgcgccggcctcttccgctgcggtgatggtggagtccattttacgcaatcagtctagaattctccccgccgccacctaccttgatggtgcctatggattgaaggacattttccttggagtgccctgccgtttggggtgtcgaggagtggaagatattctcgaagtgcaattaacccctgaagaaaaagctgccctccatctttctgcagaagcagttcgccttaatattgatgtggcgttggccatggttagcgacggttaa

SEQ ID NO: 51269 - protein, 324 aa, Synechocystis sp.
MNILEYAPIACQSWQVTVVGAGNVGRTLAQRLVQQNVANVVLLDIVPGLPQGIALDLMAAQSVEEYDSKIIGTNEYEATAGSDVVVITAGLPRRPGMSRDDLLGKNANIVAQGAREALRYSPNAILIVVTNPLDVMTYLAWKVTGLPSQRVMGMAGVLDSARLKAFIAMKLGACPSDINTLVLGGHGDLMLPLPRYCTVSGVPITELIPPQTIEELVERTRNGGAEIAALLQTGTAYYAPASSAAVMVESILRNQSRILPAATYLDGAYGLKDIFLGVPCRLGCRGVEDILEVQLTPEEKAALHLSAEAVRLNIDVALAMVSDG

SEQ ID NO: 51270 - DNA, 1505 bp, Nicotiana tabacum
  CDS (148)..(1224)
ctaatacgactcactatagggcaagcagtggtatcaacgcagagtacgcgggggggaaacaaaattcaattacttaccttgatttctactacctctctttctcatcataattcaaacacacaaattctcaagcccaagtcttagaatatgcagaacggtgcagagacctatcgacgaatggccaccatctcagctcaccttaacccctctccttcttctcatcagatggagggaggtgtgggtttgagccgagctaattgcagggcgaaagggggttctccaggattcaaagtcgcgatcttgggtgctgcaggaggtattggtcagccacttgctatgcttatgaaaacgaatccactggtttcagttctgcatctttatgatgttgccaatactcctggtgtaactgctgacattagccacatggacactggtgccgtggtacgtggttttctagggcctcaacaattggaagatgctctcactggcatggaccttgtaataatccctgctggtgttcctagaaaaccaggcatgacaagagatgatcttttcaacatcaatgcaggaattgtgaggactttatgtgaaggaattgccaagtgctgtcctaaggccattgttaacataattagtaatcctgttaactctacagtaccaattgctgcagaggttttcaagaaggctggcacctttgatccgaggagactgttgggcgtgacaatgcttgatattgtcagagccaatacatttgtggctgaagttttggggcttgatcctagggaagtggatgttccagttgtggggggtcatgctggcgttacaattctacctcttctttcccaggttaaacctccttgttcttttacgccagaggaaactgaatatttaacatctcgtatacaaaatgggggaactgaagttgttgaggcaaaagctggtgctggttcggcaactctctctatggcatatgctgcggttaaatttgccgacgcatgtttgcatggattgagaggagatgctggcattgtagaatgtgcctttgtgtcttctcaggtgactgaacttccatttttcgcatcaaaagtacggcttggccgcaacggagttgaagaaatatacccccttggtcccctaaatgaatacgagaggtctgggcttgagaaggcaaagaaagagctggcaacaagtgttcagaagggtgtcaactttgtaaagaaatgagcagacagctacatgacttccaaaagatgcttttatgtgggctatatatctcaaatccgcagttccagaaaataagagtagtttctttcttgtattaaagggcaaatcctgttctaattttctatagattgatgccttggtgcagaaaataaatgtactatttggtcatctaaaataacaacagtccccagtgcatgttggacttgcaaagtattacatcctttgaagcaagggcttgttatggactttttgacagtatggatatttaaagggcttggaga

SEQ ID NO: 51271 - protein, 358 aa, Nicotiana tabacum
MQNGAETYRRMATISAHLNPSPSSHQMEGGVGLSRANCRAKGGSPGFKVAILGAAGGIGQPLAMLMKTNPLVSVLHLYDVANTPGVTADISHMDTGAVVRGFLGPQQLEDALTGMDLVIIPAGVPRKPGMTRDDLFNINAGIVRTLCEGIAKCCPKAIVNIISNPVNSTVPIAAEVFKKAGTFDPRRLLGVTMLDIVRANTFVAEVLGLDPREVDVPVVGGHAGVTILPLLSQVKPPCSFTPEETEYLTSRIQNGGTEVVEAKAGAGSATLSMAYAAVKFADACLHGLRGDAGIVECAFVSSQVTELPFFASKVRLGRNGVEEIYPLGPLNEYERSGLEKAKKELATSVQKGVNFVKK

SEQ ID NO: 51272 - DNA, 1062 bp, Oryza sativa
  CDS (1)..(1062)
atgaagaaggcttcgtctctgtcggagctggggttcgacgcggagggcgcgtcgtcggggttcttccgtccggtggcggacggcgggtcgacgccgacgtcgcaccggcgtcggctgacgaagatatcggtgatcggcgcgggcaacgtggggatggcgatcgcgcagaccatcctgacccgggacatggcggacgagatcgcgctggtggacgcggtgccggacaagctgcgcggggagatgctggacctgcagcacgcggcggcgttcctcccccgcgtccgcctcgtctccgacaccgacctggccgtcacgcgcggctccgacctggccatcgtcacggccggcgcgcgccagatccccggggagagccgcctgaacctgctgcagcggaacgtggcgctgttccggaagatcgtgccggcgctggcggagcactcgccggaggcgctgctgctgatcgtctccaaccccgtcgacgtgctgacgtacgtggcgtggaagctgtcggggttcccggcgagccgcgtcatcggctccggcaccaacctcgactcctccaggttccgcttcctcctcgccgagcacctccaggtcaacgcccaggatgtccaggcgtacatggtgggagagcacggggacagctcggtggcgatatggtcgagcatgagcgtggccgggatgccggtgctcaagtcgctgcgggagagccaccagagcttcgacgaggaggccctggagggaatccggcgagcggtggtggacagcgcgtacgaggtgatcagcctcaagggctacacctcctgggccatcggctactccgtcgccagcctcgccgcctccctcctccgcgaccagcaccgcatccaccccgtctccgtcctcgcctccggcttccacggcatcccccaagaccacgaggtcttcctcagcctccccgcccgcctcggccgcgccggcgtcctcggcgtcgccgagatggagctcaccgaggaggaggcccgccgcctccgccgctccgccaagacgctctgggagaactgccagctgctcgacctctaa

SEQ ID NO: 51273 - protein, 353 aa, Oryza sativa
MKKASSLSELGFDAEGASSGFFRPVADGGSTPTSHRRRLTKISVIGAGNVGMAIAQTILTRDMADEIALVDAVPDKLRGEMLDLQHAAAFLPRVRLVSDTDLAVTRGSDLAIVTAGARQIPGESRLNLLQRNVALFRKIVPALAEHSPEALLLIVSNPVDVLTYVAWKLSGFPASRVIGSGTNLDSSRFRFLLAEHLQVNAQDVQAYMVGEHGDSSVAIWSSMSVAGMPVLKSLRESHQSFDEEALEGIRRAVVDSAYEVISLKGYTSWAIGYSVASLAASLLRDQHRIHPVSVLASGFHGIPQDHEVFLSLPARLGRAGVLGVAEMELTEEEARRLRRSAKTLWENCQLLDL

SEQ ID NO: 51274 - DNA, 1179 bp, Oryza sativa (japonica cultivar-group)
  CDS (1)..(1179)
atgagccacaaaaccaccatcgatcatttccatttccattttcaggagagatccacatcgccgttggcctttcatccagtgagtgagggagggagatctcgatctcggtctcgcgacatgaagaaggcttcgtctctgtcggagctggggttcgacgcggagggcgcgtcgtcggggttcttccgtccggtggcggacggcgggtcgacgccgacgtcgcaccggcgtcggctgacgaagatatcggtgatcggcgcgggcaacgtggggatggcgatcgcgcagaccatcctgacccgggacatggcggacgagatcgcgctggtggacgcggtgccggacaagctgcgcggggagatgctggacctgcagcacgcggcggcgttcctcccccgcgtccgcctcgtctccgacaccgacctggccgtcacgcgcggctccgacctggccatcgtcacggccggcgcgcgccagatccccggggagagccgcctgaacctgctgcagcggaacgtggcgctgttccggaagatcgtgccggcgctggcggagcactcgccggaggcgctgctgctgatcgtctccaaccccgtcgacgtgctgacgtacgtggcgtggaagctgtcggggttcccggcgagccgcgtcatcggctccggcaccaacctcgactcctccaggttccgcttcctcctcgccgagcacctccaggtcaacgcccaggatgtccaggcgtacatggtgggagagcacggggacagctcggtggcgatatggtcgagcatgagcgtggccgggatgccggtgctcaagtcgctgcgggagagccaccagagcttcgacgaggaggccctggagggaatccggcgagcggtggtggacagcgcgtacgaggtgatcagcctcaagggctacacctcctgggccatcggctactccgtcgccagcctcgccgcctccctcctccgcgaccagcaccgcatccaccccgtctccgtcctcgcctccggcttccacggcatcccccaagaccacgaggtcttcctcagcctccccgcccgcctcggccgcgccggcgtcctcggcgtcgccgagatggagctcaccgaggaggaggcccgccgcctccgccgctccgccaagacgctctgggagaactgccagctgctcgacctctaa

SEQ ID NO: 51275 - protein, 392 aa, Oryza sativa (japonica cultivar-group)
MSHKTTIDHFHFHFQERSTSPLAFHPVSEGGRSRSRSRDMKKASSLSELGFDAEGASSGFFRPVADGGSTPTSHRRRLTKISVIGAGNVGMAIAQTILTRDMADEIALVDAVPDKLRGEMLDLQHAAAFLPRVRLVSDTDLAVTRGSDLAIVTAGARQIPGESRLNLLQRNVALFRKIVPALAEHSPEALLLIVSNPVDVLTYVAWKLSGFPASRVIGSGTNLDSSRFRFLLAEHLQVNAQDVQAYMVGEHGDSSVAIWSSMSVAGMPVLKSLRESHQSFDEEALEGIRRAVVDSAYEVISLKGYTSWAIGYSVASLAASLLRDQHRIHPVSVLASGFHGIPQDHEVFLSLPARLGRAGVLGVAEMELTEEEARRLRRSAKTLWENCQLLDL

SEQ ID NO: 51276 - DNA, 1065 bp, Oryza sativa (japonica cultivar-group)
  CDS (1)..(1065)
atgcagcccgactccgcctcccaccgcatcgcccgcgtcgccgcccacctcagcccgtcgccgcgcccccagatggaggagggggtgaggccggcgccatgcagggccaagggcggcgcgccggggttcaaggtggccgtgctgggcgcggcgggagggatcgggcagccgctgtcgctgctcatgaagttgaacccgctcgtctctgtgctccacctctatgatgtcgtcaacacgcccggtgtcaccgccgatgtcagccacatggacaccaccgccgtggtccgtggtttccttgggcccaaccagcttgaggcagcacttacaggaatggatcttgtcattatccctgctggtctcccaaggaaaccaggaatgacaagggatgatttgttcaacaaaaacgctgggattgttcgctcactttgtgaaggcgttgccaagtgctgtccaaatgcaattgtgaacttgatcagcaacccagtgaactcaaccgtccccattgcagcagaggttttcaagaaagctggaacttatgatcccaaacgtctccttggagttacaacactggatgtagcaagggcaaacacctttgtggctgaagtacttggaattgacccaaaagatgtcaatgttccagttgttggtgggcatgctggagtgactatattacccctcctctcccaggtccaccccccatgctcatttaccccagatgaaatcagctatttgactaaacgcatacagaatggtggcacagaagttgttgaggcaaaggcaggagcaggctctgcaactttgtcaatggcttttgctgcagcaaaatttggtgatgcatgcttgcgagcaatgcgtggtgatgctggcgttgtggaatgttcatatgttgcatctgcggtgaccgagttgccgttctttgcaacaaaagtgaggttaggtcgtgctggagccgaagaggttctccctctggggccgttgaatgattttgagagagctggcttggagatggcaaagaaagagctgatggagagcattcagaagggcatcgatttcatgaacaagtga

SEQ ID NO: 51277 - protein, 354 aa, Oryza sativa (japonica cultivar-group)
MQPDSASHRIARVAAHLSPSPRPQMEEGVRPAPCRAKGGAPGFKVAVLGAAGGIGQPLSLLMKLNPLVSVLHLYDVVNTPGVTADVSHMDTTAVVRGFLGPNQLEAALTGMDLVIIPAGLPRKPGMTRDDLFNKNAGIVRSLCEGVAKCCPNAIVNLISNPVNSTVPIAAEVFKKAGTYDPKRLLGVTTLDVARANTFVAEVLGIDPKDVNVPVVGGHAGVTILPLLSQVHPPCSFTPDEISYLTKRIQNGGTEVVEAKAGAGSATLSMAFAAAKFGDACLRAMRGDAGVVECSYVASAVTELPFFATKVRLGRAGAEEVLPLGPLNDFERAGLEMAKKELMESIQKGIDFMNK

SEQ ID NO: 51278 - DNA, 1083 bp, Oryza sativa (japonica cultivar-group)
  CDS (1)..(1083)
atgaagaaggcgtcgtcgctgtctgagctggggttcgacgccgatggcccgtcattcttccggcacctgacgctgaccgatggcgacgacggcacgctgccccggcggcggctgatcaagatctcggtgatcggcgcgggcaacgtgggcatggccatcgcgcagacgatcctgacgcaggacctcgccgacgagatcgtgctgatcgacgcggtggcggacaaggtgcggggcgagatgctggacctgcagcacgcggcggcgttcctcccccgcgtgaacatcgtgtccggcacggaggtgtcgctgacgaggagctcggacctggtgatcgtgacggcgggggctcggcagatcccgggggagacgcggctgaacctgctgcagcggaacgtgtcgctgttccggaagatcgtgccggcggcggcggaggcgtcgccggagtcggtgctggtgatcgtgtcgaacccggtggacgtgctgacgtacgtggcgtggaagctgtcggggttcccggcgagcagggtgatcgggtcggggacgaacctggactcgtctcggttcaggttcctcctcgccgagcacctggaggtgagcgcgcaggacgtgcaggcgtacatggtgggggagcacggggacagctcggtggcgctgtggtcgagcatcagcgtgggggggatgccggtgctggcgcacctgcagaagaaccaccggtcggcggcgacggcgaagaagttcgacgaggcggcgctggaggggatccggcgggcggtggtggggagcgcgtacgaggtgatcaagctcaaggggtacacgtcgtgggccatcggctactccgtcgccagcatcgcctggtcgctgctccgtgaccagcgccgcatccacccggtctccgtcctcgccaagggccttgtccgtggcgtccccgccgaccgcgagctcttcctcagcctgcccgctcgcctcggccgcgccggcgtgcttggcgtcgccgccgagctggtgctcaccgacgaggaggagaggaggcttcgcatctccgccgaaaccctctggggatactgccacgccctcggcctctaa

SEQ ID NO: 51279 - protein, 360 aa, Oryza sativa (japonica cultivar-group)
MKKASSLSELGFDADGPSFFRHLTLTDGDDGTLPRRRLIKISVIGAGNVGMAIAQTILTQDLADEIVLIDAVADKVRGEMLDLQHAAAFLPRVNIVSGTEVSLTRSSDLVIVTAGARQIPGETRLNLLQRNVSLFRKIVPAAAEASPESVLVIVSNPVDVLTYVAWKLSGFPASRVIGSGTNLDSSRFRFLLAEHLEVSAQDVQAYMVGEHGDSSVALWSSISVGGMPVLAHLQKNHRSAATAKKFDEAALEGIRRAVVGSAYEVIKLKGYTSWAIGYSVASIAWSLLRDQRRIHPVSVLAKGLVRGVPADRELFLSLPARLGRAGVLGVAAELVLTDEEERRLRISAETLWGYCHALGL

SEQ ID NO: 51280 - DNA, 996 bp, Bombyx mori
  CDS (1)..(996)
atggagtccctgaagaagctgttccagcccgtgcacgagaaggtggacgaaacttggagcaaggtgaccattgtcggggtcggtcaggttgggatggccgcagctttctctatgctgacgcagaatgttacgaataacatcgctctagtagacatgatggctgacaaattgaaaggagagatgatggacctgcagcacggatcagcattcatgaggaacgccaagatccaatctagtacggattattctataacagctggctcgaagatctgcgtggttactgctggtgttcgacaacgcgaaggtgaatctcgtctcgatctcgtgcagagaaacaccgatgttcttaaacaaataatcccgcagctgataaagtacagtccggacacaatattggtgatcgccagtaaccccgtggatattctgacgtatgttacgtggaagattagcgggctgcccaagcaccgcgtcatcgggtccggcactaacttggactcggcacggttccgttacctgctgtcggacaggctcggtatcgctaccacgtcctgccacggctacatcatcggcgaacacggagacagcagcgttccagtatggtctgcagtaaacatagcgggagtacgcctcagtgatctcaacaatcagatcggaaccgacgacgatcctgagaactggaaggagcttcacgagaatgtcgtgaaaagtgcttacgaagtcatcaaactgaaggggtacacttcctgggctatcggactgtcgctggctcagatcgtgagggctatactcacgaacgctaacagcgttcacgcggtctctacttatctcaagggcgagcacggcatcgaagacgaagtattcttgtcgctgccgtgcgtgttgagtcactgtggagtctctgacgtcatccgccagcctctaaccgaacttgaagtggcacagcttcggaaatctgctaaagtcatggctaaagtgcagaacgacattaaattctaa

SEQ ID NO: 51281 - protein, 331 aa, Bombyx mori
MESLKKLFQPVHEKVDETWSKVTIVGVGQVGMAAAFSMLTQNVTNNIALVDMMADKLKGEMMDLQHGSAFMRNAKIQSSTDYSITAGSKICVVTAGVRQREGESRLDLVQRNTDVLKQIIPQLIKYSPDTILVIASNPVDILTYVTWKISGLPKHRVIGSGTNLDSARFRYLLSDRLGIATTSCHGYIIGEHGDSSVPVWSAVNIAGVRLSDLNNQIGTDDDPENWKELHENVVKSAYEVIKLKGYTSWAIGLSLAQIVRAILTNANSVHAVSTYLKGEHGIEDEVFLSLPCVLSHCGVSDVIRQPLTELEVAQLRKSAKVMAKVQNDIKF

SEQ ID NO: 51282 - DNA, 1062 bp, Arabidopsis thaliana
  CDS (1)..(1062)
atggagaagaacgcatcgacttcgtcgttgaaggacttgggtccgagtggtctagatctaaccagcgcctttttcaaaccgatccacaactccgatccttctctcccttcaaaccgacgtaccaaagtctccgtcgtcggagtcggaaacgtcggaatggccatagctcaaaccatcctcactcaagatctcgcagacgagatcgctctcgttgacgccaaacccgataagcttcgtggcgaaatgcttgatctccaacacgccgctgctttcctccctcgaactaagatcaccgcttctgttgattacgaagtcaccgctggatctgatctttgtatcgtcactgctggtgctagacagaatccaggcgagtctagactcaatttgcttcagaggaacgtcgctctcttccgtcatatcattcctccactcgctaaagcttctcctgattctatattgatcattgtttctaatcccgttgatgttttgacttacgttgcttggaaactctctggctttccggtgaatcgggtgcttggatctggtactaatctcgattcttctcggttccgattcttaatcgcagatcatctcgacgttaatgctcaggatgtacaggcatttattgtgggagagcatggagacagctcagtggcattgtggtcaagcattagtgttggaggcattcctgtcttaagctttttggagaagaaccagatagcttacgagaaacaaactcttgaggatatccaccaagctgttgttggtagcgcctatgaagtgattggactcaagggttacacttcttgggccattggctactcagttgctaatctggctcgtactatcctccgtgaccagcgcaagatccacccggttactgttcttgctcgtggattttatggtgttgatggtggtgatgttttcctcagtcttccggctttgcttggaaggaatggtgtggttgctgtgaccaatgtgcatatgactgatgaagaggctgagaagctgcagaaatcggcaaagactatattggagatgcagagccaattgggactttga

SEQ ID NO: 51283 - protein, 353 aa, Arabidopsis thaliana
MEKNASTSSLKDLGPSGLDLTSAFFKPIHNSDPSLPSNRRTKVSVVGVGNVGMAIAQTILTQDLADEIALVDAKPDKLRGEMLDLQHAAAFLPRTKITASVDYEVTAGSDLCIVTAGARQNPGESRLNLLQRNVALFRHIIPPLAKASPDSILIIVSNPVDVLTYVAWKLSGFPVNRVLGSGTNLDSSRFRFLIADHLDVNAQDVQAFIVGEHGDSSVALWSSISVGGIPVLSFLEKNQIAYEKQTLEDIHQAVVGSAYEVIGLKGYTSWAIGYSVANLARTILRDQRKIHPVTVLARGFYGVDGGDVFLSLPALLGRNGVVAVTNVHMTDEEAEKLQKSAKTILEMQSQLGL

SEQ ID NO: 51284 - DNA, 1059 bp, Agrobacterium tumefaciens str. C58
  CDS (1)..(1059): transl_table=11
ttgccaattttggccaatggggctaatcgaagtgcgacaatttggctgccggtttggcgcggtaaaattgaattgaagctcaagaggaagcattcgatggctcgcaaaaaaattgcacttattggttctggcatgatcggcggcacgctggcgcatctcgccagcctgaaggaactgggcgatatcgtcctcttcgacatcgccgacggcatcccgcagggcaagggtctggatattgcccagtccggcccggttgaaggcttcaatgcaaagctctccggcgcttccgattacgccgccatcgaaggcgcagacgtctgcatcgtcaccgcaggtgtcgcccgcaagcccggcatgagccgcgatgatcttcttggcatcaacctcaaggtcatggaacaggtcggcgccggcatcaagaaatatgctccgaacgctttcgtgatctgcatcaccaacccgctcgacgccatggtctgggcgctgcagaagttctccggcctgccgaagaacaaggtcgtcggcatggctggcgttctcgacagcgcacgcttccgcctgttccttgccgaagaattcaacgtttcggtccaggacgtcaccgccttcgttctcggcggtcatggcgacaccatggtgccgctcgcccgttattccaccgttggcggcgttccgcttaccgatctcgtcaagatgggctggttgaccgccgaacgtcttgagcagatcatccagcgcacccgtgacggcggcgcggaaatcgtcggcctcttgaagaccggctcggcctattacgcgccggccgcttcggctatcgaaatggccgaatcctacctcaaggacaagaagcgcgttctgcccgctgctgcccacctttcgggccagtatggcgtagacgacatgtatgtcggcgtgcccaccatcatcggtgccggcggtatcgagcgcgtcatcgagatcgaactgaacaaggaagaagaagccgccttccagaaatccgtcggcgctgtcgctggtctttgcgaagcctgcatcaacatcgctccgtcgctgaagtaa

SEQ ID NO: 51285 - protein, 352 aa, Agrobacterium tumefaciens str. C58
MPILANGANRSATIWLPVWRGKIELKLKRKHSMARKKIALIGSGMIGGTLAHLASLKELGDIVLFDIADGIPQGKGLDIAQSGPVEGFNAKLSGASDYAAIEGADVCIVTAGVARKPGMSRDDLLGINLKVMEQVGAGIKKYAPNAFVICITNPLDAMVWALQKFSGLPKNKVVGMAGVLDSARFRLFLAEEFNVSVQDVTAFVLGGHGDTMVPLARYSTVGGVPLTDLVKMGWLTAERLEQIIQRTRDGGAEIVGLLKTGSAYYAPAASAIEMAESYLKDKKRVLPAAAHLSGQYGVDDMYVGVPTIIGAGGIERVIEIELNKEEEAAFQKSVGAVAGLCEACINIAPSLK

SEQ ID NO: 51286 - DNA, 981 bp, Brucella melitensis 16M
  CDS (1)..(981): transl_table=11
ttgaggaaagaaacaatcatggcacgcaacaagattgccctcatcggctccggcatgatcggcggtacgctcgctcacctggccggtctgaaggaactcggtgacgtcgtccttttcgacattgcggaaggcaccccgcagggcaaggggctggatatcgccgaatcttctccggtcgatggtttcgatgcgaagttcactggcgcgaacgattacgccgccattgaaggcgcagacgtcgtcatcgtcaccgcaggggtgccgcgcaagccgggcatgagccgcgacgatctcctgggcatcaacctgaaggtgatggaacaggtgggcgcgggcatcaagaaatatgcgccggaagctttcgtcatctgcatcaccaacccgctcgacgccatggtctgggcgctgcagaagttctccggccttccggcccacaaggttgtcggcatggctggcgttctcgacagcgcccgcttccgttatttcctctcggaagaattcaacgtttcggtcgaggacgtcacggcattcgtgctgggtggccacggcgattcgatggttccgctggcgcgctactcgaccgttgccggcattccgctgtctgatctcgtcaagatgggctggaccagccaggacaagctcgacaagatcatccagcgcacccgtgacggcggcgcggaaatcgtgggccttctcaagaccggctcggctttctacgctccggcggcatcggccatccagatggctgaatcctacctcaaggacaagaagcgcgtcctgccggtcgcagcccagctttcgggccagtatggcgtgaaggacatgtatgtgggcgttccgaccgtgatcggcgccaatggcgtggagcgcatcatcgagatcgatctcgacaaggacgagaaggcgcagttcgacaagtcggtggcctccgtcgccggtctgtgcgaagcctgcatcggtattgctccgtcgctgaaataa

SEQ ID NO: 51287 - protein, 326 aa, Brucella melitensis 16M
MRKETIMARNKIALIGSGMIGGTLAHLAGLKELGDVVLFDIAEGTPQGKGLDIAESSPVDGFDAKFTGANDYAAIEGADVVIVTAGVPRKPGMSRDDLLGINLKVMEQVGAGIKKYAPEAFVICITNPLDAMVWALQKFSGLPAHKVVGMAGVLDSARFRYFLSEEFNVSVEDVTAFVLGGHGDSMVPLARYSTVAGIPLSDLVKMGWTSQDKLDKIIQRTRDGGAEIVGLLKTGSAFYAPAASAIQMAESYLKDKKRVLPVAAQLSGQYGVKDMYVGVPTVIGANGVERIIEIDLDKDEKAQFDKSVASVAGLCEACIGIAPSLK

SEQ ID NO: 51288 - DNA, 1050 bp, Drosophila melanogaster
  CDS (1)..(1050)
atgttgttactgacaagtcttaaaagcctggcaaaaccagctacatggggagttgtggtccgcactttaaaggtcgccgttgtcggtgccggaggaggaattggacaaccgctatcgcttctgctccgtcgctgtcctggaatcgatgagctggctctacatgatctcagcgaaatgaagggaattgctacggatctatcccatataagccaaacgggaaaggtgataggttttaccggtgaaaaggaactggagtcggcggtgagtggagctgatgtggtggttgtggcggcagggatgccacgtctgccaggaatgcaaagggatcacctgatggccgccaatggaaatgttgcagtgaaagttgccactgccattagcaatgcctctccacgagctcatcttgcctttattaccaatccggtcaatatgattgtgcccgccgcagctgaggttcttatggcccatggaacttttgattctcgtcggctcttcggtattacgactttggatgtggtgcgatcgaaaaagttcattggtgattctatgaacatatcaccggatgacgtaaacattccagttattggtggccatgcggggattacaattctaccgctcatttcgcagtgtcagccgatatatagatgtgatctccaggagatccagaatctaactcatcgcattcaggaggcgggcacagaggtggtgaatgccaaagctggaaaaggatctgccaccctatcgatggcttatgctggcgcaactttcgtgaactccctgctgcgtggaattgctggacaggatggtctaatcgagtgcgcttttgtcgcctccaaactaaccgacgccccattctttgctagtccattggaattgggaaaggatggtatcaagcgctatataccacttccccagatgagtgactacgaaaaggaggctttggaaaagctactacctattctacgacagaatgctgatgagggtgtcaattttgcaaaaatgattttgagtggacaatcacattctcccattccagcggccttgccgtaa

SEQ ID NO: 51289 - protein, 349 aa, Drosophila melanogaster
MLLLTSLKSLAKPATWGVVVRTLKVAVVGAGGGIGQPLSLLLRRCPGIDELALHDLSEMKGIATDLSHISQTGKVIGFTGEKELESAVSGADVVVVAAGMPRLPGMQRDHLMAANGNVAVKVATAISNASPRAHLAFITNPVNMIVPAAAEVLMAHGTFDSRRLFGITTLDVVRSKKFIGDSMNISPDDVNIPVIGGHAGITILPLISQCQPIYRCDLQEIQNLTHRIQEAGTEVVNAKAGKGSATLSMAYAGATFVNSLLRGIAGQDGLIECAFVASKLTDAPFFASPLELGKDGIKRYIPLPQMSDYEKEALEKLLPILRQNADEGVNFAKMILSGQSHSPIPAALP

SEQ ID NO: 51290 - DNA, 1026 bp, Nasonia vitripennis
  CDS (1)..(1026)
atgctgccgagatttctaaggccgaccatcgccgtcgctcagaacggcgccaagcagctctccaccagctcccagaacaatgctaaggtggcagttatgggtgcgagcggtggcattggccagccactgtctcttctgctcaaggagtccccactggtcaccgaactctccctttacgatattgtgaacactcctggagttgctgccgatctctcccacatcaacactgcctccaaagtcaaaggattcactggaccagaccagctgagagattccctcaagggcgttcaggttgtagtcattcccgctggtgtaccacgtaaaccaggaatgacccgtgatgatcttttcaacacaaacgcatcgattgttcgtgatcttgcccaagctgttgctgaggttgcaccaaaggcctttgtcgctatcatttccaaccccgtcaacagcactgtgccaatcgccagtgaagtcatgcagaaggctggagtttatgaccctaacagaatttttggagttaccacacttgatattgtcagatctaatgcctttgttggagaagccaagggcttggacccccagaaggtcaatgtacctgtcatcggaggacacagtggaatcaccatcattcccttgatctcccaagctacaccatctgtggctttccctccagaccagctgaaggctctcactgaaagaatccaggaggctggtacagaagtagtcaaggctaaggctggtactggctctgcaactctgtccatggcatacgctggagctcgttttgccttctccctgattagggcattgaacggcgaatcaaacgttgttgagtgctcttacgttaggtctaatgtaactgaagccaaatacttctctacacctattttactgggtaaaaatggagttgaaaagaacctaggtcttggaaaactcaacgaattcgaatcgaaacttcttgctgcagccatcccagaactcaagaagaacatccaaaagggagaagactttgtaaataagaagaagtaa

SEQ ID NO: 51291 - protein, 341 aa, Nasonia vitripennis
MLPRFLRPTIAVAQNGAKQLSTSSQNNAKVAVMGASGGIGQPLSLLLKESPLVTELSLYDIVNTPGVAADLSHINTASKVKGFTGPDQLRDSLKGVQVVVIPAGVPRKPGMTRDDLFNTNASIVRDLAQAVAEVAPKAFVAIISNPVNSTVPIASEVMQKAGVYDPNRIFGVTTLDIVRSNAFVGEAKGLDPQKVNVPVIGGHSGITIIPLISQATPSVAFPPDQLKALTERIQEAGTEVVKAKAGTGSATLSMAYAGARFAFSLIRALNGESNVVECSYVRSNVTEAKYFSTPILLGKNGVEKNLGLGKLNEFESKLLAAAIPELKKNIQKGEDFVNKKK

SEQ ID NO: 51292 - DNA, 999 bp, Anopheles gambiae str. PEST
  CDS (1)..(999)
atgtctgaagtgaaagctaagctgcttacccagattgccgaaccgatgacctcgtctggcaacaaggtcaccgttgtcggtattggccaagtcggcatggcctgtgcattcagtattctaacccagaatgtgtccagtgaggttgctctcattgatgtcaacgcagacaaactgcagggtgaaatgatggatctgcagcatggctctgccttcatgaagaacgctcacgtcagtgcaggcaccgacttttctgtctctgctggctctcgtttgatcgtcattacggccggcgtgcgtcagaaggagggcgaaagccgactagacctcgtccagcgtaataccgacatcctgaagggtattatccccaagctggtcgcccaaagcccggactgcattctgttggtcgtctccaacccggtcgatatccttacctacgtcgcatggaaattgagtggactacccaagaaccgtgtcattggttccggcaccaaccttgactcgtcccgcttccgcttcctgatgtcgcaaaagctgggcgtcgctcccacctcgtgccacggttggatcatcggcgagcacggtgacagcagcgtgccagtgtggtccggtgtgaacgtggccggtgttcgtttggccgaaattaacccaagcatcggtaccgatgccgatacagaaaagtggggtgatctgcatcatcaagttgttaacagcgcgtacgaagtcattcgtctgaagggctatacatcctgggctattgggcttagcgtagcttccctagcgtctgctattttgcggaacacttacaacgtccatgccgtttcgacgctggttaagggtgagcacggaattgatgacgaagtctatctatcgctgccatgcgtgctgggccgtaacggcgttagccacgtggtgaagcaaattcttacgccagaagaaacaaagaagctgcaggcatccgccaccctgatggcgcaagttcagtctggaatcaaattctaa

SEQ ID NO: 51293 - protein, 332 aa, Anopheles gambiae str. PEST
MSEVKAKLLTQIAEPMTSSGNKVTVVGIGQVGMACAFSILTQNVSSEVALIDVNADKLQGEMMDLQHGSAFMKNAHVSAGTDFSVSAGSRLIVITAGVRQKEGESRLDLVQRNTDILKGIIPKLVAQSPDCILLVVSNPVDILTYVAWKLSGLPKNRVIGSGTNLDSSRFRFLMSQKLGVAPTSCHGWIIGEHGDSSVPVWSGVNVAGVRLAEINPSIGTDADTEKWGDLHHQVVNSAYEVIRLKGYTSWAIGLSVASLASAILRNTYNVHAVSTLVKGEHGIDDEVYLSLPCVLGRNGVSHVVKQILTPEETKKLQASATLMAQVQSGIKF

SEQ ID NO: 51294 - DNA, 993 bp, Magnaporthe grisea 70-15
  CDS (1)..(993)
atggtcaaggccgttgttgctggtgccgccggtggcattggacagcccctttcgctgctcctgaagctctgccctttggtcgatgagcttgccctttacgatgtcgtcaatacccccggtgttgccgctgatctctctcacatctcctctaacgcgaaaatcgccggttaccttcccaaggacgatggtggcaagaaggccctcaaggatgccgacctgattgtcattcctgctggcgttccccgcaagcctggaatgacccgtgatgatctcttcaacatcaacgccggcatcgtgaagggacttatcgagatcgctgccgaggtcgcccccaaggccttcatcctggttatttctaaccccgtcaactcaacggttcccatctcggccgaggttctcaaggccaagggtgtcttcaacccgcagcgcctctttggtgtcaccaccctggacattgtccgcgccgagaccttcgtcgctgagatcgccggcaagtccaacccccaggagttgaccgtccccgtcattggcggtcactcgggcgagaccatcgtgccccttttcagccaagtcaagcctgccgtcaccatccctgacgacaagtacgacgctctcgtcaaccgtgttcagtttggcggtgacgaggtcgtcaaggccaaggatggcgctggctcggcaaccctcagcatggcatatgctggctaccgatttgccgagaagctgctcaaggccatcaagggtgccaagggtctcgttgagcccagctatgtctatctccccggtgtccccggtggcgaggcaattgccaagaagaccggttgcgactttttctcggttcccatcgagctcggtcccaacggagctgagaaggcacatgacgtgctcggcgagctgaccagcaaggagcagacgcttctggaggcagccgtcaacggactcaagggcaacatccagaagggtgttcagttcgtcaacagccctcctcaaaagtaa

SEQ ID NO: 51295 - protein, 330 aa, Magnaporthe grisea 70-15
MVKAVVAGAAGGIGQPLSLLLKLCPLVDELALYDVVNTPGVAADLSHISSNAKIAGYLPKDDGGKKALKDADLIVIPAGVPRKPGMTRDDLFNINAGIVKGLIEIAAEVAPKAFILVISNPVNSTVPISAEVLKAKGVFNPQRLFGVTTLDIVRAETFVAEIAGKSNPQELTVPVIGGHSGETIVPLFSQVKPAVTIPDDKYDALVNRVQFGGDEVVKAKDGAGSATLSMAYAGYRFAEKLLKAIKGAKGLVEPSYVYLPGVPGGEAIAKKTGCDFFSVPIELGPNGAEKAHDVLGELTSKEQTLLEAAVNGLKGNIQKGVQFVNSPPQK

SEQ ID NO: 51296 - DNA, 1011 bp, Magnaporthe grisea 70-15
  CDS (1)..(1011)
atgtttgctgcatcaaggatccagacccgtgccttttcggctgcggcgcgcaacctctccaaggttaccgttctcggcgccgccggtggcatcggtcagcctctctccctcctcctcaagctcaaccccagggttactgagcttgcgctgtacgacattcgtggaggccccggtgtcgctgccgacatctcgcacatcaacaccaagtcaaacgtcaagggctacgaccccacgccctccggccttgctgccgccctcaagggctccgaggttgtcctcatccccgccggtgtcccccgcaagcccggcatgacccgtgacgacctcttcaacaccaacgcctccatcgtccgcgacctggccaaggcctgcgccgagtcttgccccgaggccaacatcctggtcatcagcaaccccgtcaactcgaccgtccctatctgcgccgaggtcttcaaggcccgtggtgtctacaaccccaagcgcctctttggtgtcaccaccctcgacgtcgtccgtgcctcgcgcttcgtctccgagatcaagggctccgaccccaaggacgagaacatcaccgtcgtgggcggccactctggtgtgaccatcgttcccctcttcagccagagcaaccaccccgacctgtctgccaacgaccagctcgtcaaccgcgtccagttcggtggtgacgaggtcgtcaaggccaaggacggtgccggttccgccaccctctccatggccatggccggtgcccgcatggccgagtcggtcctgcgcgccgctcagggcgagaagggcgtcatcgagcccacctttgtcgactcgcccctctacaaggaccagggcatcgagttcttcagctcaaaggtcgagctcggccccaacggtgtcgagaagatcctgcccattggcgagattgacgccaacgagcagaagctgctcgacgcctgcgtgggcgacctgaagaagaacattgagaagggtgttgcctttgttgcctccaaccccggcaaataa

SEQ ID NO: 51297 - protein, 336 aa, Magnaporthe grisea 70-15
MFAASRIQTRAFSAAARNLSKVTVLGAAGGIGQPLSLLLKLNPRVTELALYDIRGGPGVAADISHINTKSNVKGYDPTPSGLAAALKGSEVVLIPAGVPRKPGMTRDDLFNTNASIVRDLAKACAESCPEANILVISNPVNSTVPICAEVFKARGVYNPKRLFGVTTLDVVRASRFVSEIKGSDPKDENITVVGGHSGVTIVPLFSQSNHPDLSANDQLVNRVQFGGDEVVKAKDGAGSATLSMAMAGARMAESVLRAAQGEKGVIEPTFVDSPLYKDQGIEFFSSKVELGPNGVEKILPIGEIDANEQKLLDACVGDLKKNIEKGVAFVASNPGK

SEQ ID NO: 51298 - DNA, 972 bp, Magnaporthe grisea 70-15
  CDS (1)..(972)
atggccgacggagacaagacgcaggcgagcaagcccgtcaaggtggtcatcgtgggcgctggctacgtcggctccacgacggcctacaccctcctgatgaaccgggccgccgccgagatcgtcctgatcgacgtggacaaggacaagaccgaaggtgaggtgatggatctcgtccacgccgcgcccttcctgcaccagactcgcatctgggccggcgactacgaggactgcaagggcgcctcggtgatcatcctgaccgcgggcgcgaaccaaaagcccggccagtcgcgcatggagctggcgcagagcaactggggcatcttcaaggagatcgtgcccaaggtggtgcagcacgcatctcccgacgccctgcttctcgtttcggccaaccccgtcgacgtcatgacctacgccgcggtcaagttctcgggcttccccgcgcacagtgtcatcgggtccggcacgtcgctcgactcggcgcggttcgccggcgagctgggcaagcacctgaacatagacccgcgcagcctgcacgccgtcgtcattggcgaacacggcgagtcggagctgcccgtgtggtccctggccaccgtctcgggcatgcgcgtcgaggactactgcaggcagacgggcacgccgtgggacgaggaaaccaagaagcagtgttttgcaaacgtcaaggatgcggcggctgccatcattgagaagaagggagtcacgggctacggcattgcgagcgcgctgttgaggattgtggagtgcgtgcggcgagatgagaatacgctgatgcccgtgtcgtgcgtcggctcgtatgccggggtggacgatgtcgctttgagcgtgccgcgcaagctgaacaggtacggctgcatggagtatgtgccgatgatgctcagcaaggaagaggagggcagcctgagggcttcggcggaaaaggtcaaggagacgattcagtcgctggagaagtcgtga

SEQ ID NO: 51299 - protein, 323 aa, Magnaporthe grisea 70-15
MADGDKTQASKPVKVVIVGAGYVGSTTAYTLLMNRAAAEIVLIDVDKDKTEGEVMDLVHAAPFLHQTRIWAGDYEDCKGASVIILTAGANQKPGQSRMELAQSNWGIFKEIVPKVVQHASPDALLLVSANPVDVMTYAAVKFSGFPAHSVIGSGTSLDSARFAGELGKHLNIDPRSLHAVVIGEHGESELPVWSLATVSGMRVEDYCRQTGTPWDEETKKQCFANVKDAAAAIIEKKGVTGYGIASALLRIVECVRRDENTLMPVSCVGSYAGVDDVALSVPRKLNRYGCMEYVPMMLSKEEEGSLRASAEKVKETIQSLEKS

SEQ ID NO: 51300 - DNA, 1011 bp, Gibberella zeae PH-1
  CDS (1)..(1011)
atgttcgccgcttctcgcatccagcgccgtgctttctccgccaccgcccgggacctttccaaggtcaccgttctcggtgctgctggtggtatcggccagcctctctctctcctcctcaagatgaacccccgcgtcactgacctcgccctctacgatatccgtggcggacccggtgttgctgctgacatctcccacgtcaacaccaagtccagcgtcaagggatacgagcccaacgcggctggtctcaaggaggctctctccggcgctgaggtcgtcctcatccccgctggtgtcccccgcaagcccggtatgacccgtgacgatcttttcaacaccaacgcctctatcgtccgcgacctcgccaaggccgccgctgaggctgcccccaaggccaagctcctgatcatctccaaccccgtcaactccaccgtccccatcgtcaaggaggtttacaaggctgccggtgtctacaaccccaagaccctcttcggtgtcaccaccctcgacgttgtccgtgcctcccgattcgtttccgagatcaagggcaccgaccccaaggacgagaacatcaccgtcgttggtggccactccggtgtcaccatcgtccctctcttctctcagtccaaccaccccgacctctcctccaacgctgagctcgtcaagcgtgtccagttcggtggtgacgaggttgtcaaggccaaggacggtgctggctctgccactctctccatggccatggctggtgcccgcatggctgactccgtcctccgcgccgtccagggcgagaagggtgtcaaggagcccgctttcgtcgagtctcctctctacaaggaccagggtattgagttcttcagctctcaggtcgagctcggccccgagggtgttgagaagatccaccctctcggcaagctcgacgccaacgaggagaagctcgttgacgccgctctcgtcgacctcaagaagaacattgagaagggtgttgccttcgttgcctccaaccctcccaaataa

SEQ ID NO: 51301 - protein, 336 aa, Gibberella zeae PH-1
MFAASRIQRRAFSATARDLSKVTVLGAAGGIGQPLSLLLKMNPRVTDLALYDIRGGPGVAADISHVNTKSSVKGYEPNAAGLKEALSGAEVVLIPAGVPRKPGMTRDDLFNTNASIVRDLAKAAAEAAPKAKLLIISNPVNSTVPIVKEVYKAAGVYNPKTLFGVTTLDVVRASRFVSEIKGTDPKDENITVVGGHSGVTIVPLFSQSNHPDLSSNAELVKRVQFGGDEVVKAKDGAGSATLSMAMAGARMADSVLRAVQGEKGVKEPAFVESPLYKDQGIEFFSSQVELGPEGVEKIHPLGKLDANEEKLVDAALVDLKKNIEKGVAFVASNPPK

SEQ ID NO: 51302 - DNA, 993 bp, Gibberella zeae PH-1
  CDS (1)..(993)
atggtcaaggctgttgttgctggcgcctctggtggcattggccagcccctctctctcctcctcaagacctctcctcacattgacgagctcgccctgtacgatgtcgtcaacacccccggtgtcgctaccgatctctctcacatctcctcccgtgccaagaccactggctaccttcccgccaacgatggcgctaaggctgccttcaaggacgctgacattattgtcatccccgctggcattcctcgcaagcctggaatgacccgtgatgatctcttcaatatcaatgctggcattgtcaagggtctcatcgaggtcgctgctgaggtcgcccccaaggctttcatcctcgtcatctccaacccagtcaactcgactgtccccatctctgccgaggtcctcaaggccaagggggttttcaaccctcagcgtctctttggtgtcaccaccctcgacatcgtccgtgccgagaccttcgttgctgagatcactggcaaggccaacccccaggagctgaccatccccgtcattggtggtcactctggcgagactattgttcccctcttcagcaaggcctctccttcagttcagatccccgacgacaagtacgatgctctcgtaaaccgcattcagttcggcggtgacgaagttgtcaaggccaaggacggtgctggttccgccaccctgtccatggcctatgccggtttccgattcgccgagaaggttctccgtgccgtcaagggcgagaagggccttgttgagcccagctacgtctaccttcccggtgttcccggaggcgaggccattgctaaggaaactggctgcgacttcttctctgtccccatcgagcttggccccaacggtgctgagaaggccaccaaccccttcgagggcattaccgagaaggagaaggctctgctagccaaggccaccgagggcctcaagggcaacatcaccaagggtgtcagctttgtccacaaccctccccaaaagtga

SEQ ID NO: 51303 - protein, 330 aa, Gibberella zeae PH-1
MVKAVVAGASGGIGQPLSLLLKTSPHIDELALYDVVNTPGVATDLSHISSRAKTTGYLPANDGAKAAFKDADIIVIPAGIPRKPGMTRDDLFNINAGIVKGLIEVAAEVAPKAFILVISNPVNSTVPISAEVLKAKGVFNPQRLFGVTTLDIVRAETFVAEITGKANPQELTIPVIGGHSGETIVPLFSKASPSVQIPDDKYDALVNRIQFGGDEVVKAKDGAGSATLSMAYAGFRFAEKVLRAVKGEKGLVEPSYVYLPGVPGGEAIAKETGCDFFSVPIELGPNGAEKATNPFEGITEKEKALLAKATEGLKGNITKGVSFVHNPPQK

SEQ ID NO: 51304 - DNA, 1017 bp, Apis mellifera
  CDS (1)..(1017)
atgttgccacaatatttgaaacctattttgaatgttactcaacaaggagcgaaacgactatctaccagcgccaaatgcaatgccaaggttgcaattctcggagcaagcggaggaattggccaaccgctctcattacttatgaaacaatctcctcttgtaaccgaattatcattatatgatgtcgtaaatacaccaggtgtcgctgctgatctgtcgcacatggatacaccggcaaaagtaaaagcgtatactggtccggaagaattaaaagatgcacttaaaggaacgcaggtagtcataattcctgccggtgttccacgtaaaccaggaatgactagagatgatcttttttctacaaacgcctcgatagtaagagatcttacacaggctatagcagaagcatcaccaaaagcttttattgccattatttcaaatccagttaatagtaccgtgccaattgccagtgaagtgttgaaaaaagctggcgtttacgaccccaatagagtatttggtgtaacaactctcgatattgtcagagcaaatacattcattgccgaagccaaaggcttgaatccacaaaatgtctcagtgccagttatcggtggtcatagtggtgtcactattattcctttaatttcacaaactaaaccttcagtttcttttccagaggataaagtgaaagctcttactatgagaattcaagaggctggtacagaagttgttaaagccaaggctggcacaggttctgccactctttcaatggcatatgctggtgcacgatttggtttttccttgatcaaagcacttaatggagaacgtattacagaatactgttatgtcaaatctgatgtttgtgacaccaaatatttctcaacagccgttgttttgggtaaagcaggaattgagaagaatcttggtattggaaacctcaatgcatatgaaaaagaactattaaatgcagcgatcccagagctcaagaagaatgttgaaaagggagaaaaatttatgaataagtga

SEQ ID NO: 51305 - protein, 338 aa, Apis mellifera
MLPQYLKPILNVTQQGAKRLSTSAKCNAKVAILGASGGIGQPLSLLMKQSPLVTELSLYDVVNTPGVAADLSHMDTPAKVKAYTGPEELKDALKGTQVVIIPAGVPRKPGMTRDDLFSTNASIVRDLTQAIAEASPKAFIAIISNPVNSTVPIASEVLKKAGVYDPNRVFGVTTLDIVRANTFIAEAKGLNPQNVSVPVIGGHSGVTIIPLISQTKPSVSFPEDKVKALTMRIQEAGTEVVKAKAGTGSATLSMAYAGARFGFSLIKALNGERITEYCYVKSDVCDTKYFSTAVVLGKAGIEKNLGIGNLNAYEKELLNAAIPELKKNVEKGEKFMNK

SEQ ID NO: 51306 - DNA, 999 bp, Apis mellifera
  CDS (1)..(999)
atggcatcgttgagaagtaaactgttgaacacagtgatggaccctgttcccacgagtacgcacaaagtcaccgtggtcggtgtaggtaacgtcggtatggcttgtaccatcagtcttttggcgaaaaatatttcgagcgacttggcgctggtcgatatgatggaggataaattaaagggagagatgttggacctacaacacggcagctcgttcttgaggaacgcgaaaatcaacgcgagcacggattactctataactgcgaattcgagcgtgtgcatagtgacagccggtgctcgtcaaaaggagggcgagacgaggctcgatctcgttcagagaaatacggatattttcaaaaagattattcccgagttggtgaaatacagtccgaacacgatcctccttatcgtctcgaatccggtcgacattctcacctacgtcgcgtggaaactttccggtcttccaaagaatcaagtgatcggaagtggcacgaatttggactcggcccgattccgtttcctcttgtcggagaaattgaaagtcgcccctacgtcgtgccacggttggatgatcggggagcacggagactcgtgtgtaccggtatggtcgggagtgaacatagctggagtgagattgcgcgatctggacgaaactgttggcacggaggatgacaaggaaaattggaacgagatatataaaaaggtcattggatccgcctacgaagttatcaagctaaagggttacacatcgtgggccattggcctgagcgctgcccaaatcgtctcctccatattgcgaaactcgcaacaagttcacgccgtggctaccctggttaccggtatacacgggatcaaagatgacgtgttcctgtctttgccctgctcattgggcgaaaacggtgtcaacactattatccaacaaagcttaacggaggaggagacgcaccttttgcaaaaatcggctcagacgatatacgaagtccaaaaagatttgaaattataa

SEQ ID NO: 51307 - protein, 332 aa, Apis mellifera
MASLRSKLLNTVMDPVPTSTHKVTVVGVGNVGMACTISLLAKNISSDLALVDMMEDKLKGEMLDLQHGSSFLRNAKINASTDYSITANSSVCIVTAGARQKEGETRLDLVQRNTDIFKKIIPELVKYSPNTILLIVSNPVDILTYVAWKLSGLPKNQVIGSGTNLDSARFRFLLSEKLKVAPTSCHGWMIGEHGDSCVPVWSGVNIAGVRLRDLDETVGTEDDKENWNEIYKKVIGSAYEVIKLKGYTSWAIGLSAAQIVSSILRNSQQVHAVATLVTGIHGIKDDVFLSLPCSLGENGVNTIIQQSLTEEETHLLQKSAQTIYEVQKDLKL

SEQ ID NO: 51308 - DNA, 1011 bp, Candida glabrata CBS 138
  CDS (1)..(1011)
atgttgtctagaattagcagaagggcattttcctctacacgtatcaatccatacaaggttacagttctcggtgccaatggtggtattgggcagccattgtcgttgctgttgaagttgaaccagaaggttactgatctgaggttgtacgatcttagaggtgctcctggtgttgccagtgacttgtcgcacatcccaacgaactctactgtgaagggtttcactcccgaggaggccgatggtttgaagaatgctttgaaggacaccgacctggtgttgattcctgctggtgtgcctagaaagccaggtatgactcgtgatgacttgtttgccatcaatgccggtatcgtgcgtgacttggccaccgctgctgccgagtctgctccaaacgctgccatcctggtgatctctaacccagttaactctaccgtgccaattgtcgccgaggtcttgcaaaagaaaggtgtgtacaaccctaagaagttgttcggtgtcaccacattggactccatcagagcttccagattcatctccgaagttgtcggcactgacccaacccaggagaaagtaaacgttgttggtggtcactctggtatcacaattatcccacttctatctcagaccaagtacggtgataaattggacaaggaccaaaaggacgccttgatcaagagaatccagttcggtggtgacgaagtcgtcaaggccaagaacggtgctggttccgctactctatccatggcccaggccggtgctttgttcgccaacgctgtcctatccggtttcgccggtgaacaaaacgtcgtcgaaccatctttcgtcgactcccctctatacaagggcgaaggtatcgagttctttgcttccccagttactctaggaaaggaaggtgttgttaagatccacccaattggtaccatctccgctgaagaggaagagatgttggccacttgtaaggagaccttgaagaagaacatcgaaaagggtatcaacttcgtcaagtccagcaattaa

SEQ ID NO: 51309 - protein, 336 aa, Candida glabrata CBS 138
MLSRISRRAFSSTRINPYKVTVLGANGGIGQPLSLLLKLNQKVTDLRLYDLRGAPGVASDLSHIPTNSTVKGFTPEEADGLKNALKDTDLVLIPAGVPRKPGMTRDDLFAINAGIVRDLATAAAESAPNAAILVISNPVNSTVPIVAEVLQKKGVYNPKKLFGVTTLDSIRASRFISEVVGTDPTQEKVNVVGGHSGITIIPLLSQTKYGDKLDKDQKDALIKRIQFGGDEVVKAKNGAGSATLSMAQAGALFANAVLSGFAGEQNVVEPSFVDSPLYKGEGIEFFASPVTLGKEGVVKIHPIGTISAEEEEMLATCKETLKKNIEKGINFVKSSN

SEQ ID NO: 51310 - DNA, 1017 bp, Kluyveromyces lactis NRRL Y-1140
  CDS (1)..(1017)
atgcttagaagcatcgctcgtcgtcaattttcatccaccgcattcaatccatacaaagttaccgttttaggtgctggtggtggtattggtcaacctttgtctttactattgaagttgaaccacaaggtcactgatttgagactatatgatttgaagggcgctaagggtgttgccgctgatttgtcccacattccaaccaattctaccgtgactggtttcactccagaatctaaggaatcccaagctgaactagcagctgctttgaaggataccgaagttgtcttgattccagcaggtgttccaagaaagccaggtatgacacgtgacgacttgttctctatcaatgctggtattgttcgtgatttggctggtgccattgccaagaatgctccaaacgctgccatcttggtcatctctaacccagttaactctacagttccaattgttgccgaagtgttgaaacaaaacggtgtttacaacccaaagaagttgttcggtgtcaccacattggatgtgatccgttcctccagatttatttctgagataaggaacaccgatccaaccaccgaacgtgtcaccgttgtcggtggtcactctggtattaccattctaccattgatctctcaaactaaacacaagtcgatgattcaaggtgaaactttggacaaattggtccacagaatccaattcggtggtgatgaagttgtccaagccaagaacggtgccggttctgctactctatctatggctgaagctggtgctcgtttcgccaacagcgtgttggctggtttcgaaggtgaaagagacgttgtcgaatccactttcgtggactctcctctatacaagagcgaaggtatcgaattctttgcttccccagtgactttgggtccagaaggtgttgaaaagattcacggaattggcgctttgtctgaaaaggaagaagaaatgttggccaaatgtaaggaaactttgaagaagaacattgaaaagggtcaaaaattcgtcaccggtaactaa

SEQ ID NO: 51311 - protein, 338 aa, Kluyveromyces lactis NRRL Y-1140
MLRSIARRQFSSTAFNPYKVTVLGAGGGIGQPLSLLLKLNHKVTDLRLYDLKGAKGVAADLSHIPTNSTVTGFTPESKESQAELAAALKDTEVVLIPAGVPRKPGMTRDDLFSINAGIVRDLAGAIAKNAPNAAILVISNPVNSTVPIVAEVLKQNGVYNPKKLFGVTTLDVIRSSRFISEIRNTDPTTERVTVVGGHSGITILPLISQTKHKSMIQGETLDKLVHRIQFGGDEVVQAKNGAGSATLSMAEAGARFANSVLAGFEGERDVVESTFVDSPLYKSEGIEFFASPVTLGPEGVEKIHGIGALSEKEEEMLAKCKETLKKNIEKGQKFVTGN

SEQ ID NO: 51312 - DNA, 1017 bp, Debaryomyces hansenii CBS767
  CDS (1)..(1017)
atggttaaagttacagtttgcggtgctgccggtggtattggtcaaccattatcattattattaaagttaaacccaaagatcgatgaattgtcattgttcgatgttgtcaatgttccaggtgtcggagctgatttatctcacatttgctccaattcatccacatcttctcacttaccatcttccagggaagacaaatcagcattggctgaatccttgaagggtagtgacttagttatcatcccagctggtgtcccaagaaagccaggtatgaccagagatgatttattcaacatcaatgcctctattgttagagacttggcccaaggaattgctgaaaacgcgccaaaggctttcgttttgatcatttcaaatccagtcaactccactgttccgattgttgccgaaaccttaaagaagaacggtgtttacaacccacaaagattattcggtgttactaccttggatatcgtcagagccaacactttcatctcccaaaagtacgctaaggaaaccaaggctactgacttcaacatcaacgtcattggtggtcactccggtgaaaccattgttccattgtactctatcggtaactccaaatcgtactacgacaagttatcggaagaagacaagaaggctttgattaacagagtccaattcggtggtgatgaagtcgtcaaggccaaggacggtgctggttccgccactttgtccatggcttacgccggttacaagttagccgaatccatcttgaaggcattgacctctaagggtgaagaagttgtcgaatgtaccttcttgaacttggacgactccatcaagggtgccgctgaagccaagaagttggtcaaaaacttggatttcttctccttgccagtcagattaggtgctaacggtatcgaggaagtcaagtacgacatcttaaacaacatcagtgctgatgaaaagaaattattagaagttgccatcgaacaattgtctggtaacatcgacaagggtgttgcattcatcaagaaatag

SEQ ID NO: 51313 - protein, 338 aa, Debaryomyces hansenii CBS767
MVKVTVCGAAGGIGQPLSLLLKLNPKIDELSLFDVVNVPGVGADLSHICSNSSTSSHLPSSREDKSALAESLKGSDLVIIPAGVPRKPGMTRDDLFNINASIVRDLAQGIAENAPKAFVLIISNPVNSTVPIVAETLKKNGVYNPQRLFGVTTLDIVRANTFISQKYAKETKATDFNINVIGGHSGETIVPLYSIGNSKSYYDKLSEEDKKALINRVQFGGDEVVKAKDGAGSATLSMAYAGYKLAESILKALTSKGEEVVECTFLNLDDSIKGAAEAKKLVKNLDFFSLPVRLGANGIEEVKYDILNNISADEKKLLEVAIEQLSGNIDKGVAFIKK

SEQ ID NO: 51314 - DNA, 1029 bp, Candida albicans SC5314
  CDS (1)..(1029): transl_table=12
atggtcaaagttactgttgcaggtgctgctgggggtattggtcaaccattatccttgcttttaaaattaaatccaaatgttgatgaattggcgttatttgatattgtaaatgccaagggtgtggctgcagatttatctcacattaatactccagctgtcgttactggtcatcagccagcaaacaaggaagataaaactgcaattactgaagctttgcaaggaactgatttagttattattcccgctggtgtcccaagaaaaccaggtatgactagagcagatttgtttaacattaatgcttccattattagagacttggttgctaacattgctagagttgctccaacagctgctattttgataatctcgaatccggtcaacgccactgtgccaattgcagctgaagtgttgaagaaattgggtgttttcaatccacgtaaattatttggtgtcactactttggatagtgtcagagcagaaacctttttgggtgagttgaccaataccgatccaaccaaattgaagggtaaaatttcagttattggtggtcattctggagatactattgtgccattgatcaattatgatgctggtgttggtgtattgagtgactctgattacaaaaactttgtgcatagagttcaatttggtggtgatgaagttgttaaagctaagaatggtgcaggttccgccactttgtctatggcctatgctggttataggtttgccgattatgtgattagctcactaactggtggtgctactcctgctggcagaattccagactcatcgtatatttatttaccaggagtctcaggtggtaaagaattttcagcaaaatatgttgatggagttgatttcttttcagttccagtcgtgttgtcacaaggtgagatcagatcatttgtaaatccttttgaggaattaactgtaactaaagaagagaaaaagttggttgaagttgcattgaaagggttgaaaggctcaatcactcaaggtacagaattcgtcaatgcttctaaattgtaa

SEQ ID NO: 51315 - protein, 342 aa, Candida albicans SC5314
MVKVTVAGAAGGIGQPLSLLLKLNPNVDELALFDIVNAKGVAADLSHINTPAVVTGHQPANKEDKTAITEALQGTDLVIIPAGVPRKPGMTRADLFNINASIIRDLVANIARVAPTAAILIISNPVNATVPIAAEVLKKLGVFNPRKLFGVTTLDSVRAETFLGELTNTDPTKLKGKISVIGGHSGDTIVPLINYDAGVGVLSDSDYKNFVHRVQFGGDEVVKAKNGAGSATLSMAYAGYRFADYVISSLTGGATPAGRIPDSSYIYLPGVSGGKEFSAKYVDGVDFFSVPVVLSQGEIRSFVNPFEELTVTKEEKKLVEVALKGLKGSITQGTEFVNASKL

SEQ ID NO: 51316 - DNA, 1014 bp, Candida albicans SC5314
  CDS (1)..(1014): transl_table=12
atggtcaaagtcgctattttaggagctgctggtggtattggtcaaccattatctttattgaccaaattaaacccaaatgttgatgaattggcattatttgatgtcgtcaatgttccaggagttggtgctgatttatctcatatcaattctgattctaaaactcaatcatatttaccaaaagataaagaagataaaactgcattagctgctgcattaaaaggttctgatttagtcattatcccagctggtgttccaagaaaaccaggtatgaccagagatgatttattcaatattaatgcatcaatcgttcaaggtttagctgaaggtattgctgccaattctccaaaagcttttgtcttggtgatttctaatccagtcaattctactgtaccaattgttgccgaaactttacaagctaaaggtgtttatgatccagctagattatttggtgttactactttggatattgttagagccaatacttttatttctcaattattcctagatcaaactaaaccatctgatttcaatattaatgttgttggtggccattctggtgaaaccattgttccattatattcattaggtaactctaaacaatattatgatatattatctgaagaacaaaagaaggaattaatcaaaagagttcaatttggtggcgatgaagttgttcaagccaagaatggtgctggttccgccactttatccatggcttatgccggttatagattagccgaatcaattttagctgctgttaatggtaaaactgatattgttgaatgtactttcttgaacttggattcttcaattaaaggtgcttctgaagctagaaaattggttaaagatttagatttcttttcattaccagttcaattaggtaaaaacggtattactgaagttaaatatgatatcttaaatcaaatttctgatgatgaaaagaaattgttagaagttgccattgaacaattacaaaagaatattgaaaaaggtgtttcatttgctaagaaataa

SEQ ID NO: 51317 - protein, 337 aa, Candida albicans SC5314
MVKVAILGAAGGIGQPLSLLTKLNPNVDELALFDVVNVPGVGADLSHINSDSKTQSYLPKDKEDKTALAAALKGSDLVIIPAGVPRKPGMTRDDLFNINASIVQGLAEGIAANSPKAFVLVISNPVNSTVPIVAETLQAKGVYDPARLFGVTTLDIVRANTFISQLFLDQTKPSDFNINVVGGHSGETIVPLYSLGNSKQYYDILSEEQKKELIKRVQFGGDEVVQAKNGAGSATLSMAYAGYRLAESILAAVNGKTDIVECTFLNLDSSIKGASEARKLVKDLDFFSLPVQLGKNGITEVKYDILNQISDDEKKLLEVAIEQLQKNIEKGVSFAKK

SEQ ID NO: 51318 - DNA, 1035 bp, Ustilago maydis 521
  CDS (1)..(1035)
atgttcgctcgtcaggctcttcgcttggctgtgcccaaggccgccgcgcctcgtttcttctcgtcatcgaccgccaacaaccgcgccgtcgccgttctcggtgcttctggcggtatcggacagccgctttctcttctgctcaagcagaaccctttggtctcggacctgcgcctgtacgatgttcgtctcgctcccggtgtcgccgccgacatttcgcacgtcaacaccccctccaccaccaccggttaccaggctgaccagctcggtgaggcgctcaaggatgtcgaggtcatcgtcatccctgctggtgtcccccgtaagcccggaatgactcgtgacgaccttttcaacaccaacgcctcgatcgtccgtgatctcgccaagaaggccgccgaagtcgcccccaaggctcacctcctgatcatctcgaaccctgttaactcgactgtccccatcgtcgccgaggtgttcaagaaggccggtgtctacgaccccaagaagctgtacggtgtcaccaccctcgatgtcactcgtgcttccaccttcctttcgggcatctcgggcaagaagccctcggagaccattgtgcctgtcgtcggtggtcactcgggtgtcacgattgtacccttgctctcgcaggccaacggcggtgacgccgttgccaagggcgagcagtacgagaagctcgtccaccgcatccagttcggtggtgacgaggtcgtcaaggccaaggacggtgccggttcggctaccctctcgatggcttatgctgccgccgtattctccgactcgctcctcaaggctctcaacggtgagaagggcatcaaggagtgcgcctacgtcgagtcgcccctgtacaaggaccagggcgccaccttcttcgccagccccgtcacgctcggcaaggatggtgttgaggagatccactcggtcggcaaggtctcggctgaggaggagaagctcctcgaggctgctatccccgagcttgccaagaacatcaagaagggtgtcgactggtacgccgcctcgccctaa

SEQ ID NO: 51319 - protein, 344 aa, Ustilago maydis 521
MFARQALRLAVPKAAAPRFFSSSTANNRAVAVLGASGGIGQPLSLLLKQNPLVSDLRLYDVRLAPGVAADISHVNTPSTTTGYQADQLGEALKDVEVIVIPAGVPRKPGMTRDDLFNTNASIVRDLAKKAAEVAPKAHLLIISNPVNSTVPIVAEVFKKAGVYDPKKLYGVTTLDVTRASTFLSGISGKKPSETIVPVVGGHSGVTIVPLLSQANGGDAVAKGEQYEKLVHRIQFGGDEVVKAKDGAGSATLSMAYAAAVFSDSLLKALNGEKGIKECAYVESPLYKDQGATFFASPVTLGKDGVEEIHSVGKVSAEEEKLLEAAIPELAKNIKKGVDWYAASP

SEQ ID NO: 51320 - DNA, 999 bp, Tribolium castaneum
  CDS (1)..(999)
atggccggaaccaaagatctcctcctttccgaaatttcgtcaccagtgaaagacagtgaatcgaaagtcactgtcgttggtgttggccaagtcggaatggcttgtgttttcagtattttggcacaaaatgtatcacacgatgttgtgcttattgactgcgtggaggacaaactcaagggagagctgttggatcttcaacacggttcactttttctcaaaaatccaagaatcaatgctagttcagactatgcagcctctgctggttctcgcctttgcattgtaacagctggagtccgccaacgtgagggcgaatcccgtctggatttagtccaacgcaacactgacgtcctcaaaaatattatcccgaaactagtcaaatactcgccaaacacagttttactcatcgtaagcaaccctgtcgatatcctcacctacgtcgcttggagacttagcggattaccaaagcacagggttctgggttcaggaaccaatctggattcgtccagattcagatttttgatgtcgcaaaagctgggagtggctccgagcagttgccatggctggattataggcgaacatggcgattccagcgtggcggtgtggtccggtgtgaatgtagccggtgtccgcttacgcgaaattaatccgagtatggggacgcaacaggatccggaacgttgggaccaggtgcacaaggaagtggttaacagtgcctatgagattatcaggctgaagggttacaccaattgggcgattggactgagtgttgcctcattggcgcaaagtatactcaacaattcgcacaatgttcatgctgtttctgttaatgttaagggccttcacggcattactcaggaagtctacttatcgcttccatcagttttgggcgaaaacggtgttcggtcaattgtaaatcaatgtttgaccgaagatgagaaacaacgcttgttaaaatcagcgacaacacttgacgatattcaaaaaaccattaatttgtag

SEQ ID NO: 51321 - protein, 332 aa, Tribolium castaneum
MAGTKDLLLSEISSPVKDSESKVTVVGVGQVGMACVFSILAQNVSHDVVLIDCVEDKLKGELLDLQHGSLFLKNPRINASSDYAASAGSRLCIVTAGVRQREGESRLDLVQRNTDVLKNIIPKLVKYSPNTVLLIVSNPVDILTYVAWRLSGLPKHRVLGSGTNLDSSRFRFLMSQKLGVAPSSCHGWIIGEHGDSSVAVWSGVNVAGVRLREINPSMGTQQDPERWDQVHKEVVNSAYEIIRLKGYTNWAIGLSVASLAQSILNNSHNVHAVSVNVKGLHGITQEVYLSLPSVLGENGVRSIVNQCLTEDEKQRLLKSATTLDDIQKTINL

SEQ ID NO: 51322 - DNA, 1011 bp, Tribolium castaneum
  CDS (1)..(1011)
atgttctcgcgagtggtgcgtccaagccttgccagtgcccgcagttttagcacgtccaaacagaacaatgtgaaagtggccgttgccggcgcctccgggggcatcggccagcccctgtcgctcctcctcaaacagagccccctagtcaccgaactgtccctctacgatatcgtccataccccaggagtcgccgccgacctgtcccacattgagacccccgccaaagtcaaaggcttcaacggccccgaaaacctcaaaaaggccttcgagggggccgaagtgatcataatcccggcgggggttccccgaaagcctggcatgactcgcgacgacttgttcaacacaaacgcctcgatcgtgcaaactctggccgaagccgccgccgagagcgcccccaaagccctaatcggcatcatctcgaaccccgtcaactccaccgtccccatcgcggccgaggttttgaaaaaagcggggaagtacgaccccaagcgcctcttcggggtctcaaccctcgacgtggtgcgcgccaacaccttcgtggccgagctcaaagggctgaaccccttggaggtcaaagtgccagtgattggggggcactcgggggttaccataatcccactcatttcgcaagccaccccttcggtgaccttccccccagatcagctcaaagcgttaacggagcggatccaggaggctggcacggaagttgtcaaggccaaggcaggagcgggctcagccaccctgtcaatggcgtacgccggggcccgatttgcaatctccctaatccgggccctcaagggcgaacaaaacatcatcgagtgtgcctacgttgaatctaacttaaccgaagccaaatatttctcgactccgttgcttttgggcaaaaacgggctcgagaagaacttgggattgggaaaattgagcgattttgagcaagacttgctcaaaaaggccatcccagagttgaagaaaaatatccaaaagggcgaagattttgttaataagaagtaa

SEQ ID NO: 51323 - protein, 336 aa, Tribolium castaneum
MFSRVVRPSLASARSFSTSKQNNVKVAVAGASGGIGQPLSLLLKQSPLVTELSLYDIVHTPGVAADLSHIETPAKVKGFNGPENLKKAFEGAEVIIIPAGVPRKPGMTRDDLFNTNASIVQTLAEAAAESAPKALIGIISNPVNSTVPIAAEVLKKAGKYDPKRLFGVSTLDVVRANTFVAELKGLNPLEVKVPVIGGHSGVTIIPLISQATPSVTFPPDQLKALTERIQEAGTEVVKAKAGAGSATLSMAYAGARFAISLIRALKGEQNIIECAYVESNLTEAKYFSTPLLLGKNGLEKNLGLGKLSDFEQDLLKKAIPELKKNIQKGEDFVNKK

SEQ ID NO: 51324 - DNA, 945 bp, Ehrlichia ruminantium str. Welgevonden
  CDS (1)..(945): transl_table=11
atgatgattcagagtaaaaaaattgctcttattggttcaggtaatattggtggcatgatagcatatctaattagattaaaaaatttgggagatgttgttttattagatattaatgatggtatggctaaaggcaaagcacttgatatagctgagtcttcacctataggcaaatataatggtgaaatatttggaactaataactatgcagatattgaaaatgctgatgctattattgttactgctggaataactagaaaacctggtatgagtcgtgatgatcttattagtactaacgttaatataataaaagaaatagcaactaatattgcaaaatatgctccaaatgcgtttgttattgtagtaactaatccacttgatgttatggtattggcaatgtatagatattcacatctgcctagtaatatgattgttggaatggcaggtgttttagattcagcaagattttcatattttattgcaaaagaattaaatgtttcagtagaaagtgtggattctttagtattaggtggtcatggagatataatgttacctttgattagatattcatcagtttctggtgtttctattgctgacttaataaaacttggaatgattacacatgataaggttacagaaatcgtagagagaactagaaaaggaggtgaagaaatagtaagtttattaaagacagggtcagcttactatgcgcctgctgaatctgctgtattaatgcttgactcatatttgaatgataaaaagttgatgttaccttgctcagcttatttaaaaggagaatatggagttcacgatttatttgtaggtgttcctataattattggaaaaaatggagtagaaaaaatagtagaacttcaattaactgaggaagaaaatagcatatttaataattctgttgcattaatacagaatttggtagctaatatataa

SEQ ID NO: 51325 - protein, 314 aa, Ehrlichia ruminantium str. Welgevonden
MMIQSKKIALIGSGNIGGMIAYLIRLKNLGDVVLLDINDGMAKGKALDIAESSPIGKYNGEIFGTNNYADIENADAIIVTAGITRKPGMSRDDLISTNVNIIKEIATNIAKYAPNAFVIVVTNPLDVMVLAMYRYSHLPSNMIVGMAGVLDSARFSYFIAKELNVSVESVDSLVLGGHGDIMLPLIRYSSVSGVSIADLIKLGMITHDKVTEIVERTRKGGEEIVSLLKTGSAYYAPAESAVLMLDSYLNDKKLMLPCSAYLKGEYGVHDLFVGVPIIIGKNGVEKIVELQLTEEENSIFNNSVALIQNLVANI

SEQ ID NO: 51326 - DNA, 1017 bp, Rhodobacter sphaeroides 2.4.1
  CDS (1)..(1017): transl_table=11
atgaaaacgaaggtctacccatcgccgcgacaattcctcacgggagatccactcatggccagacccaagattgcgctgatcggtgcggggcagatcggcggcacgctcgcccatctcgccgcgatcaaggaactgggcgacgtcgtcctgttcgacatcgccgaaggcacccctcagggcaaggctctggacatcgcgcaatcgggcccctcggaaggcttcgacgccgtgatgaagggcgcgaacagctacgaagagatcgcgggcgccgacgtctgcatcgtgaccgcgggcgtgccgcgcaagcccggcatgagccgcgacgacctgatcggcatcaacctcaaggtgatgaaatcggtcggcgagggcatcaaggcccatgcgccgaacgccttcgtgatctgcatcaccaacccgctcgacgcgatggtctgggcgctgcagcaattctcgggcctgccggccgagaaggtggtgggcatggcgggcgtgctcgactcggcgcgcttccggcatttcctgtcggtcgagttcaacgtctcgatgcgcgacgtgacggcgttcgttctgggcggccatggcgacacgatggtgccgctcgtccgctactcgacggtggccggcatcccgctgcccgatctcgtgcagatgggctggaccacgcaggagaagctcgaccagatcgtgcagcgcacccgtgacggcggcgccgagatcgtgggcctgctgaagaccggctcggccttctacgcgcccgccacctcggccatcgagatggcggaagcctatctcaaggaccagaagcgtctgctgccctgcgcggcctatgtggacggcgccttcggcctgaacggcatgtatgtgggcgtgcccaccatcatcggcgcgggcgggatcgagaagatcgtcgacatcaagctcaacgacgacgagcaggcgatgttcgacaagtcggtcaatgcggtgaagggcctcgtcgaggcctgcaagggcatcgactcctcgctcgcctga

SEQ ID NO: 51327 - protein, 338 aa, Rhodobacter sphaeroides 2.4.1
MKTKVYPSPRQFLTGDPLMARPKIALIGAGQIGGTLAHLAAIKELGDVVLFDIAEGTPQGKALDIAQSGPSEGFDAVMKGANSYEEIAGADVCIVTAGVPRKPGMSRDDLIGINLKVMKSVGEGIKAHAPNAFVICITNPLDAMVWALQQFSGLPAEKVVGMAGVLDSARFRHFLSVEFNVSMRDVTAFVLGGHGDTMVPLVRYSTVAGIPLPDLVQMGWTTQEKLDQIVQRTRDGGAEIVGLLKTGSAFYAPATSAIEMAEAYLKDQKRLLPCAAYVDGAFGLNGMYVGVPTIIGAGGIEKIVDIKLNDDEQAMFDKSVNAVKGLVEACKGIDSSLA

SEQ ID NO: 51328 - DNA, 960 bp, Francisella tularensis subsp. holarctica
  CDS (1)..(960): transl_table=11
atggctagaaaaaaaataacacttgttggtgctggtaatattggtggtacactagctcacttagcacttataaaacaattaggtgatgtagtcctttttgatatagctcagggcatgcctaatggcaaagcacttgatttactacaaacttgccctatcgagggagttgattttaaagtcaggggtacaaatgattacaaagatttagaaaattctgatgttgttattgtaactgctggtgttccgagaaagcctggcatgtctcgtgatgacctacttggtattaatatcaaagtaatgcaaacagtcggagaaggtatcaaacataactgtcctaatgctttcgtaatatgtatcacaaatccactagatattatggtaaatatgttacaaaaattctcaggcgtaccagataacaaaatcgttggtatggctggtgttttagattctgctagatttagaacatttttagcagatgaactaaatgtatcagtacaacaagtacaagcatatgtaatgggcggtcatggcgatactatggtccctctaactaaaatgtcaaatgttgcaggtgtgtcgttagagcagctagttaaagaaggtaaacttaaacaagagcgtttagatgctatagtatcgagaactagaagtggtggtggcgaaattgttgctttacttaaaacaggttcagcatattatgcaccagctgctgcaggtattcaaatggctgaaagcttcttaaaagataaaaagatgattttaccttgtgctgcaaaagtaaaagctggtatgtatggccttgatgaagatctatttgttggtgtaccaactgagatttctgcaaatggtgtcagacctattgaagtagagatttctgataaagaaagagaacaattacaagtatctataaacgctgtaaaagatcttaataaagcagctgctgaaattttagcaaaataa

SEQ ID NO: 51329 - protein, 319 aa, Francisella tularensis subsp. holarctica
MARKKITLVGAGNIGGTLAHLALIKQLGDVVLFDIAQGMPNGKALDLLQTCPIEGVDFKVRGTNDYKDLENSDVVIVTAGVPRKPGMSRDDLLGINIKVMQTVGEGIKHNCPNAFVICITNPLDIMVNMLQKFSGVPDNKIVGMAGVLDSARFRTFLADELNVSVQQVQAYVMGGHGDTMVPLTKMSNVAGVSLEQLVKEGKLKQERLDAIVSRTRSGGGEIVALLKTGSAYYAPAAAGIQMAESFLKDKKMILPCAAKVKAGMYGLDEDLFVGVPTEISANGVRPIEVEISDKEREQLQVSINAVKDLNKAAAEILAK

SEQ ID NO: 51330 - DNA, 963 bp, Desulfitobacterium hafniense Y51
  CDS (1)..(963): transl_table=11
atggcaaaaatatcagtgatcggatccggattcacaggtacaacaactgcttttatgctggctatgaaagggttgggagatattgttttactggatacccaggcaaacgaaaatccgacgaaagggaaagctctggatatcatggaagccggtcctttgactcgttccagtgtccgcgtaacgggtacctcagattatcaggatacacttgattcggatgttgtggtgatcacggccggtatcgcccgtaagccgggaatgtcgcgcaacgaactatgcgatatcaatgctggaatcgtcacccatgtcgtccggcaggttgttcaacattcgcccaatagtactctgatcattttaagcaatcccgtggatattatgacctacgttgctttcaaagagtcggggtttaaacggaacaggattattggacaatcgggagttcttgattcagcacgtttccgctattttgtagccagcgagcttaaggtatctgccgaagatgtaacaggatttgttctgggggttcatggggacgatatggtaccgctggtacgctattgttctgtccatggtatacccattcagcagctattgccggaagctgaaattgaaaaaattatggaacggacacgtcaggccggttcggaaatcgtcaatttgttaggcaatggcagtgcttattatgctcccgctgccgccttaacagaaatgatcgagtctatcctgctggataagcatcgggtcatgccttgtatagttcacttggaaggtgaactgggctatcaagacctggtgctgaatgttcccgctgtgattgggcggcagggagtggaaaagatattgcccatcgatttactgccggaagaggaggacttgatcgaacgctctgttgcatccataagacgtggtattgatgcagttttagaggggaagacaaataagcgatgcagtttaatcagttag

SEQ ID NO: 51331 - protein, 320 aa, Desulfitobacterium hafniense Y51
MAKISVIGSGFTGTTTAFMLAMKGLGDIVLLDTQANENPTKGKALDIMEAGPLTRSSVRVTGTSDYQDTLDSDVVVITAGIARKPGMSRNELCDINAGIVTHVVRQVVQHSPNSTLIILSNPVDIMTYVAFKESGFKRNRIIGQSGVLDSARFRYFVASELKVSAEDVTGFVLGVHGDDMVPLVRYCSVHGIPIQQLLPEAEIEKIMERTRQAGSEIVNLLGNGSAYYAPAAALTEMIESILLDKHRVMPCIVHLEGELGYQDLVLNVPAVIGRQGVEKILPIDLLPEEEDLIERSVASIRRGIDAVLEGKTNKRCSLIS

SEQ ID NO: 51332 - DNA, 927 bp, Acidobacteria bacterium Ellin345
  CDS (1)..(927): transl_table=11
atgcgtcataaagttacggtagtgggatcgggcaatgtgggcgccacggcggcgcactggatcgcctcgaaggaattggccgacgttgtgctgattgacatcatcgagggcgtgccgcagggcaagggcctcgacctgctggaagcgatgccgatcgagaagtgcgattcgcatgtcctgggcaccaatgattacgccgacaccgcgaattcggacatcgtggtgatcactgctggtattccgcgcaagccgggcatgagccgcgatgacttgctcaacacgaattacaagatcatgaaggacgtggtcggcaaggtgcttcagtactcgccgaattgcatcctgatcgtcgtttcgaacccgctggacgcgatggcacagaccgcgttcaagctctccggcttctcgcgcaatcgcgtgatcggcatggcaggcgtcctcgatagcgcccgcttccgcacgttcatcgcggaagagctgaaggtctcggtggagaacgtgacggctttcgtactcggcggccacggcgacaccatggttcctctggcgcggtactcgaccgtcgcgggcattccgatcaccgaactgatcgagcccacgcgcctggagcagttgatccagcgtacccgcgatggcggcgccgagatcgtgaagtatctgaagaccggcagcgcattctatgcgccttcggcggctgcgacggagatggtggaagcgatcctgaaggacaagaagaaaatcctgccctgcgctgcgtatctcgaaggcgagtacggcatcaacggactgtacgtcggcgtgccatgcaagctgggatcgaaaggcattgagcagatcgtggagatcaagctgactgccgacgagcaggctgcgttgcagaagagcgcagactcagtgaaggaactggtcggcgtcatcggcgtttag

SEQ ID NO: 51333 - protein, 308 aa, Acidobacteria bacterium Ellin345
MRHKVTVVGSGNVGATAAHWIASKELADVVLIDIIEGVPQGKGLDLLEAMPIEKCDSHVLGTNDYADTANSDIVVITAGIPRKPGMSRDDLLNTNYKIMKDVVGKVLQYSPNCILIVVSNPLDAMAQTAFKLSGFSRNRVIGMAGVLDSARFRTFIAEELKVSVENVTAFVLGGHGDTMVPLARYSTVAGIPITELIEPTRLEQLIQRTRDGGAEIVKYLKTGSAFYAPSAAATEMVEAILKDKKKILPCAAYLEGEYGINGLYVGVPCKLGSKGIEQIVEIKLTADEQAALQKSADSVKELVGVIGV

SEQ ID NO: 51334 - DNA, 966 bp, Mesorhizobium sp. BNC1
  CDS (1)..(966): transl_table=11
atggctcgccacaaaatcgctctcatcggctcaggcatgatcggcggcactcttgcccatctcgtcggccttaaggaacttggtgacgtagttctcttcgacatcgccgaaggcattccgcagggcaaagggctcgacatcgcggaatccgcgccggtcgaaggctttgacgccaagtttcttggcaccaacgactacgccgcgatcgagggggcggatgtctgcatcgtcaccgctggcgtgccgcgcaagcctggcatgagccgtgacgacctcctggggatcaacctcaaggtgatggagcaggtcggggccgggatcaagaaatacgcgccgaacgcattcgtgatctgcatcaccaatccgctcgacgccatggtctgggcgctgcagaagttctccggcctgccgaaaagccatgtggtgggtatggcgggtgtgctcgactccgcccgcttccgttatttcctggcggaggagttcaaggtctcggtcgaggacgtgaccggtttcgtcttgggcggacacggcgattccatggtgccgctcatccgctattccaccgtcgccggtatcccaattccggatctcgtgaagatgggctggacgacgcaggagaaaatcgaccagatcgtgcagcgcacgcgcgacggcggcgcggaaattgtcggccttttgaagagcggctcggcgttctacgctccagcctcctcggcgatcgcaatggcggaagcctatctgaaagacaagaagcgcgttctgccctgcgctgcccatgtgtctggtcaatatggcgtgaaggacctctatgtgggcgtaccgacggtgatcggcgccggcggcgtggagcgcatcatcgaaatcgacctgaacaagaccgagcagaagatgttcgaaaactcggtggcctctgtcgaggggctgtgcaaagcgtgtggcgatatcgccccgagcttgaagaactag

SEQ ID NO: 51335 - protein, 321 aa, Mesorhizobium sp. BNC1
MARHKIALIGSGMIGGTLAHLVGLKELGDVVLFDIAEGIPQGKGLDIAESAPVEGFDAKFLGTNDYAAIEGADVCIVTAGVPRKPGMSRDDLLGINLKVMEQVGAGIKKYAPNAFVICITNPLDAMVWALQKFSGLPKSHVVGMAGVLDSARFRYFLAEEFKVSVEDVTGFVLGGHGDSMVPLIRYSTVAGIPIPDLVKMGWTTQEKIDQIVQRTRDGGAEIVGLLKSGSAFYAPASSAIAMAEAYLKDKKRVLPCAAHVSGQYGVKDLYVGVPTVIGAGGVERIIEIDLNKTEQKMFENSVASVEGLCKACGDIAPSLKN

SEQ ID NO: 51336 - DNA, 939 bp, Cytophaga hutchinsonii ATCC 33406
  CDS (1)..(939): transl_table=11
atgaaagtaacagtagttggtgctggtaatgttggtgctacttgcgcagacgtattagcatacagagaaattgtaaatgaagtaattctacttgatattaaagaaggtgtagcagaaggcaaagctttggatatctggcagaaagctccaatcacacagtacgacactaaaacaacaggtgtaacaaatgattattctaaaacagctaattcagatgtagtcgtgatcacttcaggtttaccacgtaagccaggtatgacacgtgatgatttgatctctacaaacgctggtattgttagagctgtaactgaaagcgttgttaagtattctccgaatgcgatcattattgtggtatcaaacccgttagacgtaatgacgtattgcgcgcacatcacatcaaaattaccaagaaataaagttatcggcatggcgggtgttcttgacacagcccgttaccgtgcattccttgcagacgaaatcggctgttctccaaaagagattcagggtatgttattaggtggccatggtgatacaatggttccgcttccccgttacacaacggttggtggtattccggtaactgaattggtagaagcagataaattaaacgcaatcatcgaacgcactaaaaatggtggtggtgaattagtaaaattaatgggtacttctgcatggtatgcaccgggtgcagcggcagcccagatggttgaagcgatcgtaaaagatcagaaaaaaatcatcccggtttgtatcaagcttgaaggtgaatacggcatagacgactgttatttaggtgttcctgcagtaatcggtaaaaacggtattgaaaaagtaattgaattgaaattgaatgccgaagaaaaagcattgatggaaacttcaagaaaacacgttaaagaagtaatgaatgtactggatggtttaccgcaacaagcgtaa

SEQ ID NO: 51337 - protein, 312 aa, Cytophaga hutchinsonii ATCC 33406
MKVTVVGAGNVGATCADVLAYREIVNEVILLDIKEGVAEGKALDIWQKAPITQYDTKTTGVTNDYSKTANSDVVVITSGLPRKPGMTRDDLISTNAGIVRAVTESVVKYSPNAIIIVVSNPLDVMTYCAHITSKLPRNKVIGMAGVLDTARYRAFLADEIGCSPKEIQGMLLGGHGDTMVPLPRYTTVGGIPVTELVEADKLNAIIERTKNGGGELVKLMGTSAWYAPGAAAAQMVEAIVKDQKKIIPVCIKLEGEYGIDDCYLGVPAVIGKNGIEKVIELKLNAEEKALMETSRKHVKEVMNVLDGLPQQA

SEQ ID NO: 51338 - DNA, 963 bp, Hyphomonas neptunium ATCC 15444
  CDS (1)..(963): transl_table=11
atggcccgcaataaaatcgcgctgatcggctccggcatgatcggcggtactctcgcccacgttgctgcccgcgaagaacttggggatgtcatcctgttcgacatcgccgagggcctgcctcagggcaaaggtctcgacattgccgagtccacgcctgtctatggcgcgtccgtcaatctcaagggcgtgaacgactatgccggcatcgcgggcgccgatgtctgcatcgtcacggccggcgtgccgcgcaagccgggcatgagccgcgacgatcttctcggcatcaacctgaaagtcatgaaagccgtcggcgaaggcatcaaggcccacgctccgaacgctttcgttatctgcatcaccaacccgctcgacgcgatggtctgggcgctgcagaaattctccggcctgccgactgaaaaagtcgtgggtatggcaggcgtgctcgacagctcgcgtttcgcctacttcctctccgagaaaaccggtgtctccgtagcagacatccatgcctggacgctgggcggccacggcgacgacatggtgccgatggtgcgccactccaccgtgggcggcctgccgctgacgcagctcgtcgcgcagggctggatgagccaggcggagctggatgcgattgtcgagcgtacccgcaaaggcggcggtgagatcgtcaacctcctgaaaaccggctcggcctattacgcgcctgccgagtccgccattgcgatggccaagtcctacctcgccgaccagaagcgcgtgcttccggtggcttcgtattgctcgggccagtacggtctgaaggacatgtatgtcggcgtgccaacgctgatcggcgccggcggcgccgagaagatcgtcgagttcgacttcaacgcagacgaaaaagccatgttcgacaagtccgttgcttcggtgaacggtctgatcgaagcctgtaagggcattgatccttcgctggcctaa

SEQ ID NO: 51339 - protein, 320 aa, Hyphomonas neptunium ATCC 15444
MARNKIALIGSGMIGGTLAHVAAREELGDVILFDIAEGLPQGKGLDIAESTPVYGASVNLKGVNDYAGIAGADVCIVTAGVPRKPGMSRDDLLGINLKVMKAVGEGIKAHAPNAFVICITNPLDAMVWALQKFSGLPTEKVVGMAGVLDSSRFAYFLSEKTGVSVADIHAWTLGGHGDDMVPMVRHSTVGGLPLTQLVAQGWMSQAELDAIVERTRKGGGEIVNLLKTGSAYYAPAESAIAMAKSYLADQKRVLPVASYCSGQYGLKDMYVGVPTLIGAGGAEKIVEFDFNADEKAMFDKSVASVNGLIEACKGIDPSLA

SEQ ID NO: 51340 - DNA, 933 bp, Solibacter usitatus Ellin6076
  CDS (1)..(933): transl_table=11
ttgcgaaagaaagtcacagttgtgggcgccggaaacgtcggcgcgaactgcgcggtgcgcattgccgataaggaactcgccgatgtcgtcctcgtggacgtggtggagggtgttcctcagggtaaggggctcgatctgcttcagtccggtcccgtacagggctacgatgtgaacatcacgggcgcgaacgactacgagcccaccgcgaattccgatatcgcgatcattacggcgggcttcccgcgcaaaccgggaatgagccgcgacgatttgctgctcgccaacttcgaggtcattaagacggcgaccgagcaggtggcgaagtattcaccgaactgcatcatcatcgtggtaacgaatccgctggacgccatggcgcaggcggcgttccacgtttccaagttcagcaagaaccgcgtgatcggcatggcgggcgtgctggatagcgcccgattccgcactttcatcgcgcaggaactgaatgtctccgtggagaatgtggtcggcgtggtcatgggcggacatggcgacaccatggtgccgctggtgcggctctgcaacgtctccggcatcccgctcaccgaactgatggatcaggccaccatcgataagatcgtggatcgcacggccaacggcggcgcagagatcgtcaagcacctcaagacgggcagcgcctactatgccccttcggcggccgcggtcgaaatggccgagtcgatcattaaggataagaagaaggtcctgccgtgcgccgcgtacctcgaaggcgagtacggcatcaacggtctctacgtcggcgtgccggtgaaactcggcgcgcgcggcatcgagaagatttacgagatcaagttgacggcggacgaacaggcgaaactcaagaagagcgccgattccgtacaggaactggtgaacgttctcaagcccaagatgtaa

SEQ ID NO: 51341 - protein, 310 aa, Solibacter usitatus Ellin6076
MRKKVTVVGAGNVGANCAVRIADKELADVVLVDVVEGVPQGKGLDLLQSGPVQGYDVNITGANDYEPTANSDIAIITAGFPRKPGMSRDDLLLANFEVIKTATEQVAKYSPNCIIIVVTNPLDAMAQAAFHVSKFSKNRVIGMAGVLDSARFRTFIAQELNVSVENVVGVVMGGHGDTMVPLVRLCNVSGIPLTELMDQATIDKIVDRTANGGAEIVKHLKTGSAYYAPSAAAVEMAESIIKDKKKVLPCAAYLEGEYGINGLYVGVPVKLGARGIEKIYEIKLTADEQAKLKKSADSVQELVNVLKPKM

SEQ ID NO: 51342 - DNA, 960 bp, Magnetospirillum magnetotacticum MS-1
  CDS (1)..(960): transl_table=11
atggcacgcaagaagatcgctctcgtagggtccggcaatatcggcggcacgctcgcccatctgatcggcctcaaggaactgggtgatgtcgtcatgttcgacatcgccgagggcatcccccagggcaagggtctcgacatcctcgagtccaccccggtcgagggcgtggactgccgctattccggtgccaacgactactccgccatcaagggcgccgatgtggtcatcgtcaccgctggcgtgcccaggaagcccggcatgagccgcgacgatctggtcggcatcaacctcaaggtcatggccgccgtcggcgagggcatcaagaagaactgccccggcgctttcgtgatctgcatcaccaatccgctggacgtgatggtctgggcgctgcagcactattccggcgtgcccgccaacatgatcgtcggcatggctggcgtgctggattcggcccgtttccgcaccttcctgtgtgaagagttcaacgtctcggtcgaggacgtcaccgccttcgtgctgggcggccacggcgacaccatggtcccgctggtccgttactccaccgtcgccggcatcccgctgcccgacctggtgaagatgggctggaccacgcaggagaagctggaccagatcgtgcagcgcacccgtgacggcggcgccgagatcgtcaacctgctgaagaccggctcggcctactacgccccggccgcttcgggcgtcgccatggccgaagccttcctcaaggacaagaagcgcgtcctgcccgtcgccaccctggtcaagggcggcacctacggccagcccgacgacgtgttcgtcggcgtgccggtggtcatcggcgaaggcggcgtggagcgcatcgtcgagatcgagctgaacgccgccgagcaggccgagttcaacaagtcggccgacgccgtccgcggcctggtcaaggtcgccaagggcctgatgggctaa

SEQ ID NO: 51343 - protein, 319 aa, Magnetospirillum magnetotacticum MS-1
MARKKIALVGSGNIGGTLAHLIGLKELGDVVMFDIAEGIPQGKGLDILESTPVEGVDCRYSGANDYSAIKGADVVIVTAGVPRKPGMSRDDLVGINLKVMAAVGEGIKKNCPGAFVICITNPLDVMVWALQHYSGVPANMIVGMAGVLDSARFRTFLCEEFNVSVEDVTAFVLGGHGDTMVPLVRYSTVAGIPLPDLVKMGWTTQEKLDQIVQRTRDGGAEIVNLLKTGSAYYAPAASGVAMAEAFLKDKKRVLPVATLVKGGTYGQPDDVFVGVPVVIGEGGVERIVEIELNAAEQAEFNKSADAVRGLVKVAKGLMG

SEQ ID NO: 51344 - DNA, 984 bp, Nostoc punctiforme PCC 73102
  CDS (1)..(984): transl_table=11
atgtcttcttcccctaactccccaattgcttgtaatttaccccgtgtcactatcgtaggtgcgggtagggttggtagtactttagctcaacgtgttgcagagaaaaatctggcagatgtagttttactagatattattgcgggaatgcctcaaggtttggcgctggatttgatggaagccaggggaattgaaatacataatcgccagattatcggcacaaataattatgctgatacatctggttctcaaattgtggtgattaccgcaggacttccccgcaaaccagggatgagtcgggatgatttgctgaaaactaatgccaagattgtggtggaagcggcaaaaaatgcgatcgctcattctcccaatgctatttttattgtcgtcaccaatccgttggatgtgatgacttatttagcttggcaagctacaggtttaccacgcgatcgcattatgggtatggctggcgtgttagattctgcccgttttgaagccttcattgccctagaattgggcgttttgcctgccgatgtcaaagcgatggtattgggtagccacggcgatttaatggtgcctttatctcgttatgctaccgtcaacggcattcccatcacggaattgctggatgcagccacaattgaacgcttgatagaaagaacccgcaatggtggcgcagaaattgtggaattgatgcagacgggtggtgctttttttgctccggcatcagctactagcgtgatggtagagtcgattttattaaatcaatcgcggttgttgcctgtggcggcctatctgcaaggtgaatacggtttagaagatgttgtgattggtgttccttgtcggttgggatgcggtggaattgagagtgtattggaattgatactcagcgatgaagaaagagagggcttgcatacttcggctcaatctgtgcgtcaaaatattgagcgatcgcaggaaattttggctaacaaaaataattcgtaa

SEQ ID NO: 51345 - protein, 327 aa, Nostoc punctiforme PCC 73102
MSSSPNSPIACNLPRVTIVGAGRVGSTLAQRVAEKNLADVVLLDIIAGMPQGLALDLMEARGIEIHNRQIIGTNNYADTSGSQIVVITAGLPRKPGMSRDDLLKTNAKIVVEAAKNAIAHSPNAIFIVVTNPLDVMTYLAWQATGLPRDRIMGMAGVLDSARFEAFIALELGVLPADVKAMVLGSHGDLMVPLSRYATVNGIPITELLDAATIERLIERTRNGGAEIVELMQTGGAFFAPASATSVMVESILLNQSRLLPVAAYLQGEYGLEDVVIGVPCRLGCGGIESVLELILSDEEREGLHTSAQSVRQNIERSQEILANKNNS

SEQ ID NO: 51346 - DNA, 945 bp, Rickettsia rickettsii
  CDS (1)..(945): transl_table=11
atgaaacaacatccaaaaatctcattaataggtagcggtaacataggtggtacacttgctcacttaattagccttagagaactcggcaatatcgtgttatttgatgtgactgaaggagtaccgcaaggaaaagcattggatctcatgcaagccgttacaatagccgggtctgatatcaaaataaaaggcacaaacgactataaagatattaaaggatctgatgccataattattactgccggtttaccaagaaaaccaggaatgagtagagacgatttaattagcattaacaccggtattatgaaaacggttgcagcaaatgttaaaaaatacgctcctgatgcctttgtaatagtaattaccaatccacttgatgttatggtatatgtcatgcttaaagaaagcggattgcctcacaataaagtaatcggtatggcaggagtacttgactcatcaagatttaatctttttcttgctgaagagtttaaagtatcggttagcaatgttaatagcatggttctcggcggtcacggcgatgctatggtacctcttgcaagatattctacaatatcaggcgtgccgatacctgacttgataaaaatgggcttatcaagtaatgaaaatattgaaaaaataattgatcgtactagaaacggcggcggtgagattgttgcattacttaaaacaggttctgcttattatgctcctgcagcctcagcaatagaaatgcttgagtcatatttaaaagataaacgtcagattctaacttgtgccgcttatttacaaggtgagtacggggtacatgatttatatgtcggagtgcctattatgatcggtaaagaaggtgtgctaaaagtaatagaactgcagttaaccacagaggaaaaagcactatttgataaatcagtcgaaggcgttaaaaaactcattgagacgataaaataa

SEQ ID NO: 51347 - protein, 314 aa, Rickettsia rickettsii
MKQHPKISLIGSGNIGGTLAHLISLRELGNIVLFDVTEGVPQGKALDLMQAVTIAGSDIKIKGTNDYKDIKGSDAIIITAGLPRKPGMSRDDLISINTGIMKTVAANVKKYAPDAFVIVITNPLDVMVYVMLKESGLPHNKVIGMAGVLDSSRFNLFLAEEFKVSVSNVNSMVLGGHGDAMVPLARYSTISGVPIPDLIKMGLSSNENIEKIIDRTRNGGGEIVALLKTGSAYYAPAASAIEMLESYLKDKRQILTCAAYLQGEYGVHDLYVGVPIMIGKEGVLKVIELQLTTEEKALFDKSVEGVKKLIETIK

SEQ ID NO: 51348 - DNA, 945 bp, Rickettsia akari str. Hartford
  CDS (1)..(945): transl_table=11
atgaaaaaaaatccaaaaatctcattaataggtagcggtaacataggtggtacgcttgctcacctaattagccttagagaactcggtgatatcgtattatttgatgttgctgaaggagtaccgcaaggaaaagcattggatctcatgcaagccagtacaatagccgggtctgatatcaaaataacaggtacaaacgactataaagatattgaagggtctgatgcaataattattactgccggtttaccaaggaaaccagggatgagtagagacgatttaattagtattaataccggtattatgaaaaatgttgcagagaacgttaaaaaatacgctcctgatgcttttgtaatagtaattaccaatccgcttgatgttatggtatatgtcatgcttaaagcaagcggattacctcataatcaagtcataggtatggcaggcgtacttgactcatcaagatttaatctttttcttgccgaagagtttaaagtatcggtgagcaatgttaatagcacggttctcggcggtcatggtgatgctatggtacctcttgcaagatattctacaatatcaggcataccgatacctgacttgataaaaatgggcttatcaagtaatgaaaatattgaaaaaataatcgatcgtactaggaacggcggcggcgatattgttgcattacttaaaacaggttctgcttattatgcacccgcagcctcagcaatagaaatgcttgaagcatatttaaaagataaacgtcaaatgctaacttgtgccgcttatctacaaggtgaatatggggttcatgatttatatgtcggagtacctattattataggtaaagaaggtgtcataaaagtagtagaactacaattaactaaagaagaaaaaacattattcgacaaatcagttgagggagttaaaacactcattgagacgatacaataa

SEQ ID NO: 51349 - protein, 314 aa, Rickettsia akari str. Hartford
MKKNPKISLIGSGNIGGTLAHLISLRELGDIVLFDVAEGVPQGKALDLMQASTIAGSDIKITGTNDYKDIEGSDAIIITAGLPRKPGMSRDDLISINTGIMKNVAENVKKYAPDAFVIVITNPLDVMVYVMLKASGLPHNQVIGMAGVLDSSRFNLFLAEEFKVSVSNVNSTVLGGHGDAMVPLARYSTISGIPIPDLIKMGLSSNENIEKIIDRTRNGGGDIVALLKTGSAYYAPAASAIEMLEAYLKDKRQMLTCAAYLQGEYGVHDLYVGVPIIIGKEGVIKVVELQLTKEEKTLFDKSVEGVKTLIETIQ

SEQ ID NO: 51350 - DNA, 972 bp, Crocosphaera watsonii WH 8501
  CDS (1)..(972): transl_table=11
atgactgtcccttatgacccccttcttctttgtcaatctctccgtgtagctatcatcggcgcaggtaatgtggggcgaactttagcccaacggatcgttgaaaaagacttagctgatgttgtcctcttggatgtaatagagggactcccccaaggagtggccctagatttaatggaggctcaggggctagaatatcataactgtgagatagtggggacaaacaactatgaagatacagctaacgctgatttagtcgtcattaccgcaggccgagccagaacccctggtatcagtagagatgaccttttggcgattaatgctaaaattgtggctgacgtggctgaaaaagcctttaaatactctcctaatgccattttcatagtcattgccaaccccctcgatgtgatgacctatttaacccgcaaagtgatcggtttaccgccacaaagggtgatggggatggctggtgtcttggactcttctcgtctgcaaacttttatcgctatggagttgggcatttctactgccaatgtgacggccatggtattgggtggccacggggatttaatggtgcctttagcccgttattgcaccgtcaacggcattcctattactgaattattagactcccaaactatcgatcgcttaatggagagaacccgtaaaggaggggcagaggtggttaaattattgaaaacaggaggggcttattatgcaccagcttctgcggcttatgtcatggtggaaagcatagtcagggatcaatctcgtttattgccaacggcggcttatttacaaggtgaatatggattaaatgatatttatatcggggttccctgctttttgggttgtcgtggagttaagaaaatattagaagtacaattaacatctgaggaaaaagaagccctacacatttctgctaactctgtcagggaaaatgtcaagcttgctttagaaagtgttggcatttaa

SEQ ID NO: 51351 - protein, 323 aa, Crocosphaera watsonii WH 8501
MTVPYDPLLLCQSLRVAIIGAGNVGRTLAQRIVEKDLADVVLLDVIEGLPQGVALDLMEAQGLEYHNCEIVGTNNYEDTANADLVVITAGRARTPGISRDDLLAINAKIVADVAEKAFKYSPNAIFIVIANPLDVMTYLTRKVIGLPPQRVMGMAGVLDSSRLQTFIAMELGISTANVTAMVLGGHGDLMVPLARYCTVNGIPITELLDSQTIDRLMERTRKGGAEVVKLLKTGGAYYAPASAAYVMVESIVRDQSRLLPTAAYLQGEYGLNDIYIGVPCFLGCRGVKKILEVQLTSEEKEALHISANSVRENVKLALESVGI

SEQ ID NO: 51352 - DNA, 933 bp, Exiguobacterium sibiricum 255-15
  CDS (1)..(933): transl_table=11
atgaatcgacggaaaaagatttcggtgattggtagcggatttactggagcgacgacggcactgtatctcgctcaaaaagagttaggggatatcgtgctcgtcgatatgccgcaacaggaaaacgcaaccaaaggaaaagcacttgatatgcaggaaacagcaccgattcaaagttttgacgcctggatcaacggaacatctgattatcaagacattcaaggttctgacatcgtcgtcattacggcggggattgccagaaaaccggggatgagtcgtgaagatcttgtcagcacgaatgcaaacgtcatgaaagccgtcacgaaagaaatcgtgacccatgcaccggaatcgatcatcatcgtgttgacgaaccctgtcgatgcgatgacgtataccgtctttcaagcatccggttttccgaaagaacgcgtcatcggtcagtccggtgtgctcgatacagcacgtttccggacgttcgtcgcaatggaactgaatgtctccgttaaggatatctccggattcgtgctcggtgggcatggcgacgatatggtaccgttgttacgttattcctacgcgggcggaattccgctggagaaactgctgacaccggaacgattagctgccatcgtcgaacggacacgcaaaggcggcggtgaaatcgttcagttactcgggaatggttcggcctattacgcaccggcagcggccatcgtcgagatggtggaagcgattctaaaagatcagcggcgcattttgccggcgattgcctatctcgaaggagaatacgggtatgaggacttgtatctcggtgttccgaccattcttggtgggaacggcgtagaacaggtacttgagttggacttgacgtcagaagaaaagcaagggctggatcgatctgtttcaacggtccgttctgtgttggaaatgctctga

SEQ ID NO: 51353 - protein, 310 aa, Exiguobacterium sibiricum 255-15
MNRRKKISVIGSGFTGATTALYLAQKELGDIVLVDMPQQENATKGKALDMQETAPIQSFDAWINGTSDYQDIQGSDIVVITAGIARKPGMSREDLVSTNANVMKAVTKEIVTHAPESIIIVLTNPVDAMTYTVFQASGFPKERVIGQSGVLDTARFRTFVAMELNVSVKDISGFVLGGHGDDMVPLLRYSYAGGIPLEKLLTPERLAAIVERTRKGGGEIVQLLGNGSAYYAPAAAIVEMVEAILKDQRRILPAIAYLEGEYGYEDLYLGVPTILGGNGVEQVLELDLTSEEKQGLDRSVSTVRSVLEML

SEQ ID NO: 51354 - DNA, 933 bp, Prosthecochloris aestuarii DSM 271
  CDS (1)..(933): transl_table=11
atgaaaataaccgttattggcgctggccatgtaggagctactgctgcccaccggatcgctgaaatgcagctcgctaaagaggtcgttctcctcgatatcgttgagggcatccctcaaggcaaagctcttgacatgtacgaatcaggcccgataggtctctttgattcaaaaatatacgggacaaacgattaccaggatacggcagactcggacatcattcttatcactgctggaatggcccgcaaaccaggaatgtcgagagaagatctcctgttgaaaaatgcgacaatcgtcaaagaggtcacggatcggattatgcagtattcaagcaacccgatcattatcatggtttcaaatccacttgatatcatgacctatgtgagctatgtccgcagcaagctccccaaagagcgggtcattggcatggcaggagtcctggattcagctcgtttccgctcctttatcgctgaagaactcaatgtatcgatgaaggacatcaacgcctttgtcctgggcggtcatggagactcaatggtccctgtcgttaaatacacaaacatcgccggtatacctctgactgaactgctttctcaggaaaaaatagattctctggtcgacagaacccgcaaagggggcgctgaaatcgtcaattatctgaaagacggctcagcatactatgccccagcagcttcagctgttgaaatgattgatgcgattgtccacgaccgcaaacgcatcctcccttgctcaacacttgttaccggccaatatggcatggataatgtctttatcggtgtcccggtaaaaataggcaaaaacggtattgaggaagttcttgagatcaatctggacaccgccgaacttgaagccctgcgtcaatcggcatccattgttgaatcaaactgcagcaatctcgccgatctgctttcgtaa

SEQ ID NO: 51355 - protein, 310 aa, Prosthecochloris aestuarii DSM 271
MKITVIGAGHVGATAAHRIAEMQLAKEVVLLDIVEGIPQGKALDMYESGPIGLFDSKIYGTNDYQDTADSDIILITAGMARKPGMSREDLLLKNATIVKEVTDRIMQYSSNPIIIMVSNPLDIMTYVSYVRSKLPKERVIGMAGVLDSARFRSFIAEELNVSMKDINAFVLGGHGDSMVPVVKYTNIAGIPLTELLSQEKIDSLVDRTRKGGAEIVNYLKDGSAYYAPAASAVEMIDAIVHDRKRILPCSTLVTGQYGMDNVFIGVPVKIGKNGIEEVLEINLDTAELEALRQSASIVESNCSNLADLLS

SEQ ID NO: 51356 - DNA, 927 bp, Croceibacter atlanticus HTCC2559
  CDS (1)..(927): transl_table=11
atgaaagttaccgtagtaggtgcaggagcagtaggtgcaagttgtgccgagtatattgctataaaagattttgctagtgaagttgtccttttagatattaaagaaggttacgcagaaggaaaagcgatggatttgatgcaaacagcatctttaaaccattttgataccaagataacaggatctacaagtgactatagtaaaactgcaaatagtgatatagctgtaattactagtggtattcctcgtaagccaggtatgactcgtgaagagttaattggtataaatgctggtattgttaaagatgtatcttctaacatcataaaacattcaccaaacgtaattatcattgtggttagtaacccaatggatacgatgacatatttagtacacaaaactacagacctaccaaagaacagaattattggtatgggtggcgcattagatagtgcacgttttaagtatcgcctagcagaagctttagaagcaccaattagtgatgtagatggtatggtaataggtggtcatagtgataaaggtatggtgcctttaactcgtttggcaacacgtaactctgtattagcttcagaatttttatctgaagaccgcttaaatcaagttatggaagacactaaagttggtggagcaacattaacaggtcttttaggtacatctgcttggtacgcgccaggagcagcagtatctgctttagtacaagcaattgcttgcgaccaacaaaaaatgtttccttgttctgcattgttagaaggagaatataatttaaatgatatcgctatcggtgttccagttatattaggtagaaatggtattgagaagattgtagagatagatttaagtgacgctgaaaaaacgaaacttacagaaagcgcagaagctgttaagaaaacaaatggcacattagaattttaa

SEQ ID NO: 51357 - protein, 308 aa, Croceibacter atlanticus HTCC2559
MKVTVVGAGAVGASCAEYIAIKDFASEVVLLDIKEGYAEGKAMDLMQTASLNHFDTKITGSTSDYSKTANSDIAVITSGIPRKPGMTREELIGINAGIVKDVSSNIIKHSPNVIIIVVSNPMDTMTYLVHKTTDLPKNRIIGMGGALDSARFKYRLAEALEAPISDVDGMVIGGHSDKGMVPLTRLATRNSVLASEFLSEDRLNQVMEDTKVGGATLTGLLGTSAWYAPGAAVSALVQAIACDQQKMFPCSALLEGEYNLNDIAIGVPVILGRNGIEKIVEIDLSDAEKTKLTESAEAVKKTNGTLEF

SEQ ID NO: 51358 - DNA, 963 bp, Roseovarius nubinhibens ISM
  CDS (1)..(963): transl_table=11
atggccagacccaagatcgccctgatcggcgccggtatgatcggcggcacgctcgcccatatggcggcgatgaaggaactcggcgacgtcgtcctgttcgacattgccgaaggcatgcccgagggcaaagccctcgacatcgcggaatccggcccctccgaaggcttcgacgcctcgctcaagggcacccaatcctatgccgatatcgccggggccgacgtctgcatcgtcaccgccggtgtgccgcgcaaaccggggatgagccgcgacgacctgctgggcatcaacctcaaggtcatgaaatccgtcggcgaaggcatcaaggaacacgcgcccaacgcctttgtgatctgcatcaccaacccgctcgacgccatggtctgggccctgcgcgaattctccggcctgccccacaacatggtctgcggcatggccggcgtgctcgacagcgcccgcttccgtcacttcctgagcctcgaattcggcgtctcgatgcgcgatgtcaccgccttcgtgctcggcggccatggcgacacgatggtgccgctggcccgctactcgaccgtcgctggcatcccgctccccgacctggtggacatgggctggaccacccaggacaagctcgaccagatcattcagcgcacccgtgacggcggcgccgagatcgtcggcctgctgaaaaccggttcggcctattacgccccggccaccagcgccatcgaaatggccgaagcctatctcaaggaccagaaacgcgtcctgccctgcgccgcccatgtcgacggggccctcggcctcaatggcatgtatgtgggcgtgcccaccgtcatcggcgccggcggtgtcgagcgggtcatcgacatcaagatgacctccgacgaacaggcgatgttcgacaaatcggtcgacgcggtcaaaggtctcgtcgaggcctgcaaaggcatcgacagcacgctggcctga

SEQ ID NO: 51359 - protein, 320 aa, Roseovarius nubinhibens ISM
MARPKIALIGAGMIGGTLAHMAAMKELGDVVLFDIAEGMPEGKALDIAESGPSEGFDASLKGTQSYADIAGADVCIVTAGVPRKPGMSRDDLLGINLKVMKSVGEGIKEHAPNAFVICITNPLDAMVWALREFSGLPHNMVCGMAGVLDSARFRHFLSLEFGVSMRDVTAFVLGGHGDTMVPLARYSTVAGIPLPDLVDMGWTTQDKLDQIIQRTRDGGAEIVGLLKTGSAYYAPATSAIEMAEAYLKDQKRVLPCAAHVDGALGLNGMYVGVPTVIGAGGVERVIDIKMTSDEQAMFDKSVDAVKGLVEACKGIDSTLA

SEQ ID NO: 51360 - DNA, 963 bp, Oceanicola batsensis HTCC2597
  CDS (1)..(963): transl_table=11
atggcacgacccaagatcgccctgatcggcgctggtcagatcggcggcacgctcgcacacctcgcggcactgaaagaactgggcgacgtcgtcctcttcgacatcgccgaaggcacgcccgagggcaaggccctcgacatcgcggaatccggcccgtccgaaggcttcgacgcgcatctcaagggcacgcaggattatgccgacatcgcgggcgccgacgtctgcatcgtcaccgccggtgtcccgcgcaagccgggcatgtcccgcgacgacctgctgggcatcaacctgaaggtcatgaaagccgtgggcgagggcatcaagaccaacgcccccgacgccttcgtcatctgcatcaccaacccgctcgacgcgatggtctgggcgctgcagaagttctccggcctcccggccgaaaaggtctgcggcatggccggcgtgctcgacagcgcccgcttccgccatttcctcagcctcgaattcggcgtgtccatgaaggacgtcaccgccttcgtcctcggcggacacggcgacacgatggtgccctgtgcccgctattcgaccgtcgccggcattccgctgcccgatctggtcaagatgggctggaccacgcaggaaaagctcgacgcgatcatccagcgcacccgtgacggcggcgccgagatcgttggcctgctcaagaccgggtcggccttctacgcaccggccacctcggcgatcgagatggccgaggcctatctcaaggaccagaagcgcgtcctgccctctgccgcctattgctcgggcgaactgggggtcaaggacatgtacgtgggcgttcccaccgtcatcggcgccggtgggatcgagcggatcgtgaacatcaagctgaacaaggacgagcaggagatgttcgacaagtcggtcgaggccgtgaagggcctggtcgaagcctgcaagggcatcgacgagtcgctggcctaa

SEQ ID NO: 51361 - protein, 320 aa, Oceanicola batsensis HTCC2597
MARPKIALIGAGQIGGTLAHLAALKELGDVVLFDIAEGTPEGKALDIAESGPSEGFDAHLKGTQDYADIAGADVCIVTAGVPRKPGMSRDDLLGINLKVMKAVGEGIKTNAPDAFVICITNPLDAMVWALQKFSGLPAEKVCGMAGVLDSARFRHFLSLEFGVSMKDVTAFVLGGHGDTMVPCARYSTVAGIPLPDLVKMGWTTQEKLDAIIQRTRDGGAEIVGLLKTGSAFYAPATSAIEMAEAYLKDQKRVLPSAAYCSGELGVKDMYVGVPTVIGAGGIERIVNIKLNKDEQEMFDKSVEAVKGLVEACKGIDESLA

SEQ ID NO: 51362 - DNA, 963 bp, Erythrobacter sp. NAP1
  CDS (1)..(963): transl_table=11
atggcccgcaagaagatcgcgcttatcggctccggcatgattggcggcacgctcgcccacctcgcagcgaaaaaagaaatgggcgacatcgtcctcttcgacatcgccgaaggtatgccgcagggcaaggcgctggaccttagccagtgcggcccgatcgaaggctttgacgccaagatcactggatcgaacgactatgctgacattgccggttccgacgtcgtgatcgtcacggcgggcgtcccgcgcaagcccggcatgagccgcgacgatctgctcggcatcaacctcaaggtgatgaaggctgttggcgaaggcatcaagaacaactgccccgacgcttttgtgatctgcatcacaaacccattggacgcgatggtgtgggcgctgcgtgaattctcgggccttccccacaacaaggtggtcggcatggccggcgttctcgacagcgcgcgctttgcgaccttccttgcatgggaattcgattgctcggtcaaggacgtcaacgccttcgtcctcggtggccacggcgacacgatggttccggtcaagagctacaccacgatcaacggtatcccggttgacgactacgccaagatcaagggcgttccggcagagcgtctcgacgaaatcgttgaccgcacccgcaagggcggcggcgagatcgtcggcctgctcggcaacggctcggcctattacgctcccgccaccagcgcgatcagcatggccgaagcctatctgggtgaccagaagcgcatcctgccgtgtgcctcctacgtcgaaggcaagtacggcctcgacgggctttatgttggcgtcccgaccgtgatcggcgcgggcggcaccgaggaagtggtcgagatcgaactgtcggacgaggaaaagtccaacctcaaggtttcgaccgacgcggtcgaagaactgctcgaagcgtgtaaggggctggatagcagccttgcttaa

SEQ ID NO: 51363 - protein, 320 aa, Erythrobacter sp. NAP1
MARKKIALIGSGMIGGTLAHLAAKKEMGDIVLFDIAEGMPQGKALDLSQCGPIEGFDAKITGSNDYADIAGSDVVIVTAGVPRKPGMSRDDLLGINLKVMKAVGEGIKNNCPDAFVICITNPLDAMVWALREFSGLPHNKVVGMAGVLDSARFATFLAWEFDCSVKDVNAFVLGGHGDTMVPVKSYTTINGIPVDDYAKIKGVPAERLDEIVDRTRKGGGEIVGLLGNGSAYYAPATSAISMAEAYLGDQKRILPCASYVEGKYGLDGLYVGVPTVIGAGGTEEVVEIELSDEEKSNLKVSTDAVEELLEACKGLDSSLA

SEQ ID NO: 51364 - DNA, 924 bp, Dehalococcoides sp. BAV1
  CDS (1)..(924): transl_table=11
atgcccaagattagtgtaataggtgccggcaatgtgggtgctactctggcccaacgccttatagaaaaagactttgcagatgtggtcatgctggacgtggtggagggtattccccagggcaaagctctggatatctcccagtccgctagtgttttaggttttcgccacgccattaccggcagtaatgactatgccgaaacagctggctcggagatagtggtgataaccgccggcattgcccgcaaaccgggcatgacccgtgaagaactgctggccataaaccagaagattatgactgatgtggtttcaaactgccttaaatattcccccgaagcaacgctggtggtcgtttcaaatccggtggataccatgacctatttggcatggaaactttccggtttgccccggaagcgggtagtgggtctttcgggggtgctggacggagggcgtctggctaccttcgtagcccgtgagcttggggtaaacccttcggctgtcagcccttgcgtaatgggtgaacacggcggcagcatggtggtgatgccccgctttacactggtaaacggtaaacccctgtctgaactagtctcgcctgaaaaggcggatgaactggccaaacgggcggttaacggcggtgccgagattgtggctttccttaaaacaggcagtgctttttatgccccgtctgcttcagtagccgccatggtagaggctatttttctaggcagcggcaaggttatgaactgtgctgcggtgctggacggagagtatggcctgagaaatattgtactgggtgtgccggtaaagttgggcaaaggcggtataaaggaaattatcaccctgccgctggacgggcaggaaaatgcccgccttcaggtttctgccgaaatggtaaaggcgcagatagcctctctttcactttaa

SEQ ID NO: 51365 - protein, 307 aa, Dehalococcoides sp. BAV1
MPKISVIGAGNVGATLAQRLIEKDFADVVMLDVVEGIPQGKALDISQSASVLGFRHAITGSNDYAETAGSEIVVITAGIARKPGMTREELLAINQKIMTDVVSNCLKYSPEATLVVVSNPVDTMTYLAWKLSGLPRKRVVGLSGVLDGGRLATFVARELGVNPSAVSPCVMGEHGGSMVVMPRFTLVNGKPLSELVSPEKADELAKRAVNGGAEIVAFLKTGSAFYAPSASVAAMVEAIFLGSGKVMNCAAVLDGEYGLRNIVLGVPVKLGKGGIKEIITLPLDGQENARLQVSAEMVKAQIASLSL

SEQ ID NO: 51366 - DNA, 966 bp, Xanthobacter autotrophicus Py2
  CDS (1)..(966): transl_table=11
atggcccgcaacaagatcgccctcatcggggccggccagatcggcggtacgctcgcccttctcgccgggatgaaggcgttgggcgacatcgtcctgttcgacgtcgccgagggcgtgcccgagggcaaggccctcgaccttgcggaactgacccccgtcgaaggctttgatgccgcctatgccggcgcgtcgagctatgatgccatctccggtgccgacgtggtgatcgtcaccgccggggtggcgcgcaagccgggcatgagccgcgacgacctcctcgccatcaacctcaaggtgatggagcaggtgggcgccggcatccgcaaatatgcccctgacgctttcgtcatctgcatcaccaatccgctcgatgccatggtgtgggcgctccagcgctccagcggcctgccgccggaaaaggtggtgggcatggccggcgtgctggattccgcgcgcctgcgctatttcctcgccgaggagttcggcgtctcggtggaggacgtgaccgccttcgtcatgggcgggcacggcgacaccatggtgccgctggtacgctactccaccgtgggcggcatcccggtgccggatctcatccgcatgggctggaccagcgaggagcgcatcgccgccatcgtccagcgcacccgcgacggcggggcggagatcgtcaacctgctcaagagcggctcggccttttatgcgccggcggcgtccgccatcgccatggcagaaagctacctgcgggacaagaagcgcgtcctccccgtcgcagcactgctcgacggggaatacgggctcagggacatctatgtgggcgtgccggcggtgatcggcgcgcgtggcgtggagcgcatcgtggaggtcgagctcgaccgctccgagcgcgccatgttcgacagatcggtcgctgccgtcgaaggactggtggaggcctgcctgaagatcgcacccggactcgggaagtga

SEQ ID NO: 51367 - protein, 321 aa, Xanthobacter autotrophicus Py2
MARNKIALIGAGQIGGTLALLAGMKALGDIVLFDVAEGVPEGKALDLAELTPVEGFDAAYAGASSYDAISGADVVIVTAGVARKPGMSRDDLLAINLKVMEQVGAGIRKYAPDAFVICITNPLDAMVWALQRSSGLPPEKVVGMAGVLDSARLRYFLAEEFGVSVEDVTAFVMGGHGDTMVPLVRYSTVGGIPVPDLIRMGWTSEERIAAIVQRTRDGGAEIVNLLKSGSAFYAPAASAIAMAESYLRDKKRVLPVAALLDGEYGLRDIYVGVPAVIGARGVERIVEVELDRSERAMFDRSVAAVEGLVEACLKIAPGLGK

SEQ ID NO: 51368 - DNA, 921 bp, Flavobacteria bacterium BBFL7
  CDS (1)..(921): transl_table=11
atgaaagtaaccgtagtaggagcaggcgcagtaggcgcaagttgtgcagagtatatcgcgattaaagactttgcaagtgaagtagtcatcttagatattaaagaaggatttgcagaaggtaaagccatggatttaatgcaaactgcttcattaaacggttttgatactaaaattactggttctactagtgattattctaaaactgcaggtagtgatatcgcggttattacttccggtatacctcgtaagcctggtatgacacgtgaagaattgataggtattaacgcaggtattgttaagtctgttgcagcaagtctagttgagcattctcctaatgtaatccttatagtggtttctaatcctatggatacaatgacatatctagctcataaagtaactggattacctaaaaatagaatcataggaatgggtggtgctttagatagtgcacgtttcaagtatcgtctagcagaagctcttgaggctcctatctcagacgtagatggaatggttatcggtggtcacagtgataaaggtatggtgccattaacacgtctggctactcgcaattcagttccagctagtgaatttttaagtgaagatagacttaatcaagttttagaagatactaaggtaggtggagcaacacttacaaaattattaggtactagtgcatggtatgctccaggtgcagctgtatcaggattagtacaagcgattgcatgtgaccagaaaaaaatctttccatgtagtgtaatgctagatggtgagtacggactttctgatctttgcataggtgtgccagtcgtgttaggacgcaatggtattgagaaaattgttgagattaacttaagtgatgcagaaaaagcaaaacttcaagaaagtgcagaaggagtaaaggcaactaacggtcttatctaa

SEQ ID NO: 51369 - protein, 306 aa, Flavobacteria bacterium BBFL7
MKVTVVGAGAVGASCAEYIAIKDFASEVVILDIKEGFAEGKAMDLMQTASLNGFDTKITGSTSDYSKTAGSDIAVITSGIPRKPGMTREELIGINAGIVKSVAASLVEHSPNVILIVVSNPMDTMTYLAHKVTGLPKNRIIGMGGALDSARFKYRLAEALEAPISDVDGMVIGGHSDKGMVPLTRLATRNSVPASEFLSEDRLNQVLEDTKVGGATLTKLLGTSAWYAPGAAVSGLVQAIACDQKKIFPCSVMLDGEYGLSDLCIGVPVVLGRNGIEKIVEINLSDAEKAKLQESAEGVKATNGLI

SEQ ID NO: 51370 - DNA, 933 bp, delta proteobacterium MLMS-1
  CDS (1)..(933): transl_table=11
atgaaaagatctaaaattaccattatcggggccggcaacgtcggtgccaccgccgcccattgggccttgaaccgtaacctggccgacgtggtgctgctggatgtcatggagggagttccccagggcaaggccctggatctgctgcaggccgggccggtggatcagtttgaccgccgggtcatgggcagcaacgattaccgggattcggttaattccgaggtggtgatcatcaccgccggcctggcccgcaagccggggatgagccgtgatgatctgctggccaagaatgtcgagatcgtcaagagttgtgccgaacaggcggtgagctactcccccgactgcgtgctgattgtggtgaccaaccccatcgacgccatggtttataccgctttcaaggtctcgggtttgccccgccagcgggtgatcgggatggccggggtgctggattcggcccgctaccgcgcttttctggccgaagccctgcaagtggcgccccgtgatgtggttgccatggtaatggggatccacggcgataatatgctgcccctggtgcgcctggccaacctggccggggtgccggttactgaactgctggacgccgagaccattgccgggatcgtccatcgtacccagcatgggggggccgagatcgtcaatcacctcaagaccggcagcgccttttataccccggggctggccgccgtcgagatggccgaggcggtgattaccgattccaaacgggtcatgccctgcgccgcctggctggaaggggagttcggtattgccggttgcttcctcggagtgccggtggtgctgggtgaaggcggagtggaaaggatcatcgagtttgagctcaccgatgaggaaaaggccgccatggcccaatcggaggaggtggtgcgcggccagatggcggccaccgggctggcctga

SEQ ID NO: 51371 - protein, 310 aa, delta proteobacterium MLMS-1
MKRSKITIIGAGNVGATAAHWALNRNLADVVLLDVMEGVPQGKALDLLQAGPVDQFDRRVMGSNDYRDSVNSEVVIITAGLARKPGMSRDDLLAKNVEIVKSCAEQAVSYSPDCVLIVVTNPIDAMVYTAFKVSGLPRQRVIGMAGVLDSARYRAFLAEALQVAPRDVVAMVMGIHGDNMLPLVRLANLAGVPVTELLDAETIAGIVHRTQHGGAEIVNHLKTGSAFYTPGLAAVEMAEAVITDSKRVMPCAAWLEGEFGIAGCFLGVPVVLGEGGVERIIEFELTDEEKAAMAQSEEVVRGQMAATGLA

SEQ ID NO: 51372 - DNA, 1023 bp, Aspergillus niger
  CDS (1)..(1023)
atgttcgctgctcgtcagtccctcaacctcctccagaagcgtagcttctccgcttctgctagccaggcctccaaggttgccgttctcggtgccgccggtggcattggccagcctctgtccctgctcatgaagcagaacccccttgtcactgacctcgccctctacgacatccgcggtggacctggtgtcgctgctgatatcagccacatcaacaccaacagcaccgtcaagggctacgagcctactccctctggcctccgcgatgccctcaagggctccgagatcatcctcatccctgccggtgttccccgcaagcccggcatgacccgtgatgacctcttcaacaccaacgcctccatcgtccgcgacctcgccaaggccgccgctgaggctgctcccgaggctaacatcctcgtcatctccaaccccgtcaactccaccgtccccatcgtctccgaggtctacaagtccaagggtgtctacaaccccaagcgcctcttcggtgtcaccaccctggacgttgtccgtgcctcccgcttcatctcccaggtcaagggcaccaaccccgccaacgaggccgtcaccgtcatcggtggccactccggtgtgaccatcgttcccctcctctcccagtccaaccaccccgacatctctggcaccgtccgtgacgagctggtcaaccgcatccagttcggtggtgacgaggtcgtcaaggccaaggacggtgctggttccgccaccctctccatggccatggccggtgctcgcttcgccgactccctcctcagggccgccaacggcgagaagggcatcgtcgagcccaccttcgttgagagccctctcttcaaggaccagggtgttaacttcttcgcctccaaggtcgagctcggccccaacggtgttgagaagatccacgaggttggccccgtcaacgagtacgagcagggtctcatccagaccgccctcggtgacctcaagaagaacatccagaagggtgttgacttcgtcaagcagaacccttaa

SEQ ID NO: 51373 - protein, 340 aa, Aspergillus niger
MFAARQSLNLLQKRSFSASASQASKVAVLGAAGGIGQPLSLLMKQNPLVTDLALYDIRGGPGVAADISHINTNSTVKGYEPTPSGLRDALKGSEIILIPAGVPRKPGMTRDDLFNTNASIVRDLAKAAAEAAPEANILVISNPVNSTVPIVSEVYKSKGVYNPKRLFGVTTLDVVRASRFISQVKGTNPANEAVTVIGGHSGVTIVPLLSQSNHPDISGTVRDELVNRIQFGGDEVVKAKDGAGSATLSMAMAGARFADSLLRAANGEKGIVEPTFVESPLFKDQGVNFFASKVELGPNGVEKIHEVGPVNEYEQGLIQTALGDLKKNIQKGVDFVKQNP

SEQ ID NO: 51374 - DNA, 1017 bp, Styela plicata
  CDS (1)..(1017)
atggctgatctgaagggattcgatataatgtccgagttattcacggaagtctgtccagacattccaaaatctggaccatccaaagtcactgtagttggagttgggatggtggggatggcgtgtgggatgagtgtggtgttgaagggactatgtacagatcttgtactagtcgatgttgttcaggacaaacttcaaggtgaagtaatggacttgcaacatggtagtttgtttctagagaatattaaagtctatggagacaaagattactccgtatcggccaacagtcggattgtcatagtaactgctggtgctcgtcaacaacctggggaatctagattgagtcttgttcaacgaaacgtcaacattttcaaacatattattccacaaattgcgaaatatagtccaagtgctattcttgttattgtttcaaatccagttgacttaatgacatatgttgcctggaaattgtcaaactttcctcgtaatcgtgtgattggttctggaacgaatcttgattctgcaagatttcgacatcttatcgcggaaaaattgaatttgtcacctgtcagtgttcatggatggatcatcggcgaacatggcgattcaagtgttccaatgtggagtggtgttaacgtgagtgggaaatgtttgaattcgattcatccaagaataggatatccggatggaccagaaggttgggataaaatacataaacaagttgtcgatggggcatacgatgtaataagattaaaaggatacacaaactgggctattggtctgagctgtgcagaattgcttgcaactattttacatcacagacatagaatccatccagttacttgttttgtgaagggccgatatggaatcactgatgatgtatgcctatctctaccttgtgttttgaactgtaatggagtcaactctattgtaaatgttgatttgactgctgaagaagaagcaatgataaagaaaagtgcaatgactattgctgatgtgcaaaaaggcctgaaatggtaa

SEQ ID NO: 51375 - protein, 338 aa, Styela plicata
MADLKGFDIMSELFTEVCPDIPKSGPSKVTVVGVGMVGMACGMSVVLKGLCTDLVLVDVVQDKLQGEVMDLQHGSLFLENIKVYGDKDYSVSANSRIVIVTAGARQQPGESRLSLVQRNVNIFKHIIPQIAKYSPSAILVIVSNPVDLMTYVAWKLSNFPRNRVIGSGTNLDSARFRHLIAEKLNLSPVSVHGWIIGEHGDSSVPMWSGVNVSGKCLNSIHPRIGYPDGPEGWDKIHKQVVDGAYDVIRLKGYTNWAIGLSCAELLATILHHRHRIHPVTCFVKGRYGITDDVCLSLPCVLNCNGVNSIVNVDLTAEEEAMIKKSAMTIADVQKGLKW

SEQ ID NO: 51376 - DNA, 1289 bp, Medicago sativa
  CDS (20)..(1096)
cgcactaaagcacgaaattatggagccaaattcatatgcaaattcacgaatcacaagaatcgccagccacctcaatcctcccaatctcaagatgaatgaacatggtggttcttctttgacgaatgttcattgccgtgccaaagggggtacaccaggattcaaagttgcgattttgggtgctgctggtggcataggacaacctctttctatgttgatgaagatgaatctcttggtttctgttcttcatctttatgatgtcgttaatactcctggtgttacttctgatatcagtcacatggatacttctgctgttgttcgaggattcttggggcaaaatcagcttgaggatgcacttacaggtatggatttggtaatcattcctgctggggttccccgtaaacctggaatgacaagagatgatctcttcaatattaatgctgggattgttaagacgctttgtgaagcgattgcaaagcgatgtcctaaggcgattgtaaacttgataagcaatccagttaactccactgttcctattgcggctgaggttttcaaaagagctggtacttatgatcccaagagactgttgggagtgacaatgcttgacgtggttagggccaatacgtttgtggctgaagttatgggtcttgatccaagggatgtggatgttcctgttgtcgggggacatgccggaatcacgattttacctcttctttctcaggttaaaccaccttcctctttcaccccaaaggaaattgagtacttgacagatcgcatacaaaatgggggaacagaagttgttgaggccaaagctggagctggatctgcaacactatcaatggcatatgctgctgttaaatttgcagatgcatgtcttcgtgcgttgaaaggagaggctgatatcattcaatgtgcatatgttgattcacaggtaactgaattgccattctttgcatcaaaagtacgacttggccgtaacggagttgaggaatttcttcctcttggtcccctaagtgattatgagagggcaagtttggaaaaggccaagaaagagttagcaacaagcgtggagaagggagtttctttcatcagaaaatgagtttgatatcacatcctgaaaataagtggtgggatttgagccctgtcagctgtgagatcgaaatttacaaataagttatgtcgtagaaaatcaatataccatcaaatagcgaacctgtattagataagtgtaataattattcattttcattccaataataaaagtgtttatttcatttaaaaaaaaaaaaaaa

SEQ ID NO: 51377 - protein, 358 aa, Medicago sativa
MEPNSYANSRITRIASHLNPPNLKMNEHGGSSLTNVHCRAKGGTPGFKVAILGAAGGIGQPLSMLMKMNLLVSVLHLYDVVNTPGVTSDISHMDTSAVVRGFLGQNQLEDALTGMDLVIIPAGVPRKPGMTRDDLFNINAGIVKTLCEAIAKRCPKAIVNLISNPVNSTVPIAAEVFKRAGTYDPKRLLGVTMLDVVRANTFVAEVMGLDPRDVDVPVVGGHAGITILPLLSQVKPPSSFTPKEIEYLTDRIQNGGTEVVEAKAGAGSATLSMAYAAVKFADACLRALKGEADIIQCAYVDSQVTELPFFASKVRLGRNGVEEFLPLGPLSDYERASLEKAKKELATSVEKGVSFIRK

SEQ ID NO: 51378 - DNA, 1645 bp, Medicago sativa
  CDS (36)..(1262)
caattcccattaccattctcttctcagaagttaagatggcggcagcagcatcagctacttttactattggaaccacccaaacagggaggtcacttcctcaatctagtccttttggtttgaaattcaattcccaggttaatttcaacaccttctctggcctcaaagccatgccatctctcagatgtgactctgaatcatctttctccggcaaagaaacttgtgccgctctgcgtgcaacttttgcacccaaagctcaaaaggaaaaccgaaacctcacccgcaacttgcagcctcaggcatcctacaaagtagcggttcttggtgctgcaggagggattggtcagccactggcacttctcatcaagatgtcgcctttggtttccgacctgcatctctatgatatcgcgaatgttaagggagttgctgctgatatcagtcattgcaacaccccttcgaaagttttggatttcacaggtgcttctgagttagcaaattgtttgaaaggtgtggatgttgttgttatccctgctggtgttcctaggaagcccggcatgactcgtgacgaccttttcaacatcaatgctggtatagtcagggacttggtcactgccgttgcagataattgccccaatgcttttattcatattatcagtaatccagtgaactctacagttcctattgccgctgaaattctaaaacagaagggtgtctatgatcctaagaagctctttggtgtttctacacttgatgttgtgagggcaaacacatttgttgctcagaagaagaacctgaggttgattgatgtggatgttccagttgttggaggtcatgccgggattacaattcttcctctcttgtcaaagacaaaaccctcagtgagtttcactgatgaagaaattgaggagctaactgtcaggattcaaaacgctggaactgaggttgttgaggcgaaggctggtgcagggtctgctactttgtcaatggcttatgcagcagcaagatttgttgaatcgtctcttcgtgcacttgacggagacgctgatgtgtatgagtgctcattcgtacagtcagatctgaccgaccttccgttttttgcttcaagggtgaagattggtaggaaaggagtcgaggctttaattccaactgatctccaaggattgagtgagtatgagcagaaggctttggaagcacttaagccagaacttaaggccagcatcgagaagggggttgcttttgctcaaaagcaaactgttactgcttagtttattttgtgaaagcatttattctataatctctaacgtctttatgagagaatgtcaactggtgatttcttaggttatggatttatttgagcatgaacattacttagagaacttaggttgcagatttactgtagcatcatttactgcttccagaacttagggatttgaattttccatggtatcaattctacttccagattggttcagcagaacaggagggggcttccatttctgttctctatattgagctttagtttttttgatcagaaatctcaataaatttttactatcatgtactactagattgaataaatgtaaaagttgcttgcattctgaacattttaatcaactattgaagatacagtgaaagtgtgaaaaaaaaa

SEQ ID NO: 51379 - protein, 408 aa, Medicago sativa
MAAAASATFTIGTTQTGRSLPQSSPFGLKFNSQVNFNTFSGLKAMPSLRCDSESSFSGKETCAALRATFAPKAQKENRNLTRNLQPQASYKVAVLGAAGGIGQPLALLIKMSPLVSDLHLYDIANVKGVAADISHCNTPSKVLDFTGASELANCLKGVDVVVIPAGVPRKPGMTRDDLFNINAGIVRDLVTAVADNCPNAFIHIISNPVNSTVPIAAEILKQKGVYDPKKLFGVSTLDVVRANTFVAQKKNLRLIDVDVPVVGGHAGITILPLLSKTKPSVSFTDEEIEELTVRIQNAGTEVVEAKAGAGSATLSMAYAAARFVESSLRALDGDADVYECSFVQSDLTDLPFFASRVKIGRKGVEALIPTDLQGLSEYEQKALEALKPELKASIEKGVAFAQKQTVTA

SEQ ID NO: 51380 - DNA, 1062 bp, Arabidopsis thaliana
  CDS (1)..(1062)
atggagaagaacgcatcgacttcgtcgttgaaggacttgggtccgagtggtctagatctaaccagcgcctttttcaaaccgatccacaactccgatccttctctcccttcaaaccgacgtaccaaagtctccgtcgtcggagtcggaaacgtcggaatggccatagctcaaaccatcctcactcaagatctcgcagacgagatcgctctcgttgacgccaaacccgataagcttcgtggcgaaatgcttgatctccaacacgccgctgctttcctccctcgaactaagatcaccgcttctgttgattacgaagtcaccgctggatctgatctttgtatcgtcactgctggtgctagacagaatccaggcgagtctagactcaatttgcttcagagaaacgtcgctctcttccgtcatatcattcctccactcgctaaagcttctcctgattctatattgatcgttgtttctaatcctgttgatgttttgacttacgttgcttggaaactctctggctttccggtgaatcgggtgcttggatctggtactaatctcgattcttctcggttccggttcttaatcgcagatcatctcgatgttaatgctcaggatgtacaggcatttattgtgggagagcatggagacagctcagtggcattgtggtcaagcattagtgttggaggcattcctgtcttaagctttttggagaagaaccagatagcttacgagaaacaaactcttgaggacatccaccaagctgttgttggtagtgcctatgaagtgattggactcaagggttacacttcttgggccattggctactcagttgctaatctggctcgtaccatcctccgtgaccagcggaagatccacccggttactgttcttgctcgtggattttatggtgttgatggtggtgatgttttcctcagtctgccggctttgcttggacggaatggtgtagttgctgtgaccaatgtgcatatgactgatgaagaggctgagaagctgcagaaatcggcaaagactatattggagatgcagagccaattgggactttga

SEQ ID NO: 51381 - protein, 353 aa, Arabidopsis thaliana
MEKNASTSSLKDLGPSGLDLTSAFFKPIHNSDPSLPSNRRTKVSVVGVGNVGMAIAQTILTQDLADEIALVDAKPDKLRGEMLDLQHAAAFLPRTKITASVDYEVTAGSDLCIVTAGARQNPGESRLNLLQRNVALFRHIIPPLAKASPDSILIVVSNPVDVLTYVAWKLSGFPVNRVLGSGTNLDSSRFRFLIADHLDVNAQDVQAFIVGEHGDSSVALWSSISVGGIPVLSFLEKNQIAYEKQTLEDIHQAVVGSAYEVIGLKGYTSWAIGYSVANLARTILRDQRKIHPVTVLARGFYGVDGGDVFLSLPALLGRNGVVAVTNVHMTDEEAEKLQKSAKTILEMQSQLGL

SEQ ID NO: 51382 - DNA, 1462 bp, Solanum tuberosum
  CDS (26)..(1066)
ccaacaacacattttttgatcaactatgtcatcatcatctccattaagccttgatggtctagacctaaaccaagttttcttcaaatcaatctccaacgctgatccgccatcacagacgaaccaccacacgaagatctccgtgatcggcgtcggcaatgtcgggatggccatcgcccaaacaatccttactcaggatcttgtcgacgagctagcactcgtcgacgtaaattctgataaattacgcggcgagatgttggatctccaacatgccgccgcgttccttccgagaactaaaatcgttgcttcggttgactatacagttacggccgggtcggatctgtgtattgtcacggcgggtgctaggcagaacccgggggagagcaggttgaatttgttgcagaggaatttggcgatgtataaaagtattgtgccggagctggtgaagtattcgccggagtgtatattgttgattgtgtcgaatccggtggatgttttgacctatgttgcttggaagtctgggttcccagtgaatcgggttatcgggtcgggtacgaacttggattcgtccaggtttcggtttttgattgccgatcaccttgatgttaatgcccaggatgtgcaggcatacattgtaggtgagcatggtgacagctctgtggcactgtggtctagtataagcgttggagggattccggttcttagctttctggagaggcaacaaattgcgtttgagaaggatacattggaaaaaatccacaaacaagttgtgcagagtgcatatgaagtgatcaatctcaaaggctacacatcgtgggcaatcggatactctgtggctaacttggctttttcaattattcgagatcagagaaggattcaccccgtctcaatccttgtgaaggggttctatggtattgatggcggcgatgttttcttgagcttgcctgcacagcttggtagaagtggagttttaggtgtgactaatgtgcatcttactgatgaggaaattcagcaacttaggaactctgctgagactatcttagaagtgcaaaaccagttgggaatttaacttggttaaagttaataacttccccttctatgttgctcgaatccttcaaaaatgtcattggaagcgtgttggatctttcaaaagtaatgcagttttggagaattcgacattggtgcaacatcaatttttggagaatcccagcgacatagcttccctttgttaccactacctagtagtattgttgttttaccatctatgtatttgaattttcttttttttgcaagatgttatatcttaggaggaaaaaaaatgagatgacttgtgttgcatcagttggtccttggcatgatggctgcttacttgtgctgtgttgtactaattttggaacatacagtaaatgtaaaatttgatgccagctcttgtaaaaatggaatttcatgtgtaaaaaaaaaaaaa

SEQ ID NO: 51383 - protein, 346 aa, Solanum tuberosum
MSSSSPLSLDGLDLNQVFFKSISNADPPSQTNHHTKISVIGVGNVGMAIAQTILTQDLVDELALVDVNSDKLRGEMLDLQHAAAFLPRTKIVASVDYTVTAGSDLCIVTAGARQNPGESRLNLLQRNLAMYKSIVPELVKYSPECILLIVSNPVDVLTYVAWKSGFPVNRVIGSGTNLDSSRFRFLIADHLDVNAQDVQAYIVGEHGDSSVALWSSISVGGIPVLSFLERQQIAFEKDTLEKIHKQVVQSAYEVINLKGYTSWAIGYSVANLAFSIIRDQRRIHPVSILVKGFYGIDGGDVFLSLPAQLGRSGVLGVTNVHLTDEEIQQLRNSAETILEVQNQLGI

SEQ ID NO: 51384 - DNA, 1368 bp, Citrus junos
  CDS (48)..(1286)
atgcatcttcttcagattcacgcaaatctcaagtgtcagagtgtgaaatggccgctacatcagctacaaccttttcaattacatcaactattgcctttggccccaaggcaggccaacttccacagtcaaaaccctctggtgtgaggttcaactccaagaaatcacttgtgagtttcagtggcctcaaggcagtgacatcagttatctgtgaatcagatacctctttcttgaacaaggagagttgttcagctcttcgaagcacttttgcaagaaaagcccaaagttcagagcagaggcctcagaatgccctacagcctcaggcttcttttaaagtagcagttcttggagctgctggtggaataggtcaacccttagcacttctaatcaagatgtccccactagtatcagcccttcacctctatgatgtaatgaatgtcaagggagttgctgctgacctcagtcactgcaacactccctctcaagttctggatttcacaggacctgaagaattagccagtgctttgaaaggggtgaatgacgtcgtcatacctgctggagttccaagaaagcctgggatgacccgtgatgacctcttcaacatcaacgccaatatagtaaagaccttggttgaggctgttgctgataactgccctgatgccttcatccatattatcagcaatccagttaattcaacagtgccaattgctgcagaagttctgaagcagaagggtgtttatgatccgaagaagctttttggtgttaccacactggatgtcgtgagagcaaacacctttgttgctcaaaagaagaaccttaaactaattgatgtggatgtccctgttattggaggacatgctggcattaccattttacccctgctgtcgaagacaatgccctctgttagttttactgatgaagaagtgggagacctaactgttagaatccaaaatgctggtacagaagttgtggaggcaaaggcaggtgcaggatctgctaccctctcaatggcatatgcagcagcaagatttgtcgagtcttcacttcgtactcttgatggagatggggacgtgtacgaatgcgttttcgtggagtccaatctgactgagcttccgttctttgcatcgagggttaagcttggaaggaatggtgttgaatctttgatttcatctgatctccaagggttgactgagtatgaacaaaaggctttggaagcccttaaacccgagctgaaggccagtattgaaaagggggttgcatttgcgcagaagcaagcagtagctgcatagggttgaaagttatttgaaaccctaacctcatgaaattaacatcccctagagaagaatggatgaatctggaagaagatgcata

SEQ ID NO: 51385 - protein, 412 aa, Citrus junos
MAATSATTFSITSTIAFGPKAGQLPQSKPSGVRFNSKKSLVSFSGLKAVTSVICESDTSFLNKESCSALRSTFARKAQSSEQRPQNALQPQASFKVAVLGAAGGIGQPLALLIKMSPLVSALHLYDVMNVKGVAADLSHCNTPSQVLDFTGPEELASALKGVNDVVIPAGVPRKPGMTRDDLFNINANIVKTLVEAVADNCPDAFIHIISNPVNSTVPIAAEVLKQKGVYDPKKLFGVTTLDVVRANTFVAQKKNLKLIDVDVPVIGGHAGITILPLLSKTMPSVSFTDEEVGDLTVRIQNAGTEVVEAKAGAGSATLSMAYAAARFVESSLRTLDGDGDVYECVFVESNLTELPFFASRVKLGRNGVESLISSDLQGLTEYEQKALEALKPELKASIEKGVAFAQKQAVAA

SEQ ID NO: 51386 - DNA, 942 bp, Aeropyrum pernix
  CDS (1)..(942): transl_table=11
atggtgggacagcccttgataacaatacttggcgctggcaaggtcggtatggccacggcggtcatgcttatgatgaggggttacgacgacctcctcctcatagccaggacccctgggaagccccagggcgaggcgctcgacctggctcacgccgccgccgagctcggagtcgacataaggatcagtgggagcaacagctacgaggacatgagggggagcgacatagttctggttaccgcaggtataggcaggaagcccggcatgacgagggagcagctcctcgaggcaaacgccaacaccatggccgacctggccgagaagatcaaagcctacgctaaggacgccatagtggttataaccactaaccccgtcgacgcgatgacctacgtaatgtacaagaagaccgggttcccgagggagagggttatagggttcagcggcatactcgactccgccaggatggcctactacatctcccagaagcttggagtcagcttcaaaagcgtcaacgccatagtgctaggtatgcacggccagaagatgctcccggtgccaaggctatccagcgtaggcggcgtcccgctggagcacctcatgtccaaggaggagatagaggaggttgtctcagagacggtgaacgcgggggcgaagataaccgagctaagagggtacagcagcaactacggccccgcagcagggctagtgctcacagttgaggcgataaagagggactccaagaggatatacccctacagcctctacctccagggcgagtacgggtacaacgacgtagtggctgaagtgccagcggtcataggcaagagcggtatagagaggataatagagctgccgttaaccgaggatgagaagagaaagttcgacgaggcagttcaggctgtgaagaagctagtcgaaacactacccccacagctcagagagtaa

SEQ ID NO: 51387 - protein, 313 aa, Aeropyrum pernix
MVGQPLITILGAGKVGMATAVMLMMRGYDDLLLIARTPGKPQGEALDLAHAAAELGVDIRISGSNSYEDMRGSDIVLVTAGIGRKPGMTREQLLEANANTMADLAEKIKAYAKDAIVVITTNPVDAMTYVMYKKTGFPRERVIGFSGILDSARMAYYISQKLGVSFKSVNAIVLGMHGQKMLPVPRLSSVGGVPLEHLMSKEEIEEVVSETVNAGAKITELRGYSSNYGPAAGLVLTVEAIKRDSKRIYPYSLYLQGEYGYNDVVAEVPAVIGKSGIERIIELPLTEDEKRKFDEAVQAVKKLVETLPPQLRE

SEQ ID NO: 51388 - DNA, 942 bp, Aeropyrum pernix
  CDS (1)..(942): transl_table=11
atggtgggacagcccttgataacaatacttggcgctggcaaggtcggtatggccacggcggtcatgcttatgatgaggggttacgacgacctcctcctcatagccaggacgcctgggaagccccagggcgaggcgctcgacctggcccacgccgccgccgagctcggagtcgacataaggatcagtgggagcaacagctacgaggacatgagggggagcgacatagttctggttaccgcgggtataggcaggaagcccggcatgactagggagcagctcctcgaggccaacgccaacaccatggccgacctggccgagaagatcaaggcctatgccaaggacgccatagtggttataaccactaaccctgtcgacgcaatgacctacgtaatgtacaagaagaccggtttcccgagggagagggttatagggttcagcggcatactcgactccgccaggatggcctactacatctcccagaagcttggagtcagcttcaatagcgtcaacgccatagtgctaggtatgcacggccagaagatgttcccggtgcccaggctatccagcgtaggcggcgtcccgctggagcacctcatgtcaaaggaggagatagaggaggttgtctcagagacggtgaatgcgggggcgaagataaccgagctaagggggtacagcagcaactacggccccgcagcagggctagtgctcacagttgaggcgataaagagggactccaagaggatatacccctacagcctctacctccagggcgagtacggctacaacgacgtagtggctgaagtgcctgcggtcataggcaagagcggtatagagaggataatagagctgccgttaaccgaggatgagaagagaaagttcgacgaggcagtgcaagctgtgaagaagctagtcgaaacactacccccacagctcagagagtaa

SEQ ID NO: 51389 - protein, 313 aa, Aeropyrum pernix
MVGQPLITILGAGKVGMATAVMLMMRGYDDLLLIARTPGKPQGEALDLAHAAAELGVDIRISGSNSYEDMRGSDIVLVTAGIGRKPGMTREQLLEANANTMADLAEKIKAYAKDAIVVITTNPVDAMTYVMYKKTGFPRERVIGFSGILDSARMAYYISQKLGVSFNSVNAIVLGMHGQKMFPVPRLSSVGGVPLEHLMSKEEIEEVVSETVNAGAKITELRGYSSNYGPAAGLVLTVEAIKRDSKRIYPYSLYLQGEYGYNDVVAEVPAVIGKSGIERIIELPLTEDEKRKFDEAVQAVKKLVETLPPQLRE

SEQ ID NO: 51390 - DNA, 1053 bp, Medicago truncatula
  CDS (1)..(1053)
atgcacaagagcggttctggttcgacgttaggcccagacggcctagatttaacccaagctttcttcaaacccatctcaaacgcagcaccaccatcacccactaagcgtcacaacaagatctccgtcatcggcgccggcaacgtcggcatggccattgctcagaccatcctaactcaagacctcacagacgagctcgtcatcgtcgacaacaaacccgacaaactccgcggcgaaatgcttgatcttcaacacgctgctgctttcctcccccgcgttaagatcaactcctccgttgaatattctgtcactgctggctccgatctctgtattgtcaccgccggtgcaagacagatcggtggcgagtctaggcttaatcttcttcagaggaatctttctctgttcaaggcgattatacctcctttggctcgttactcgccggaaacggttctgatcatcgtgtctaaccccgttgatgttcttacctatatcgcatggaagctttctgggtttccttctaatcgggtcatcgggtcgggtaccaatttggattcatctcggttttgcttcctcattgctgatcacctccaggtcaacgctcaggatgttcaggcatgcatagtaggggagcatggggatagttcagtagcattgtggtctagtatcagcattggtggtattcccgtgctgagttttttggagaaacaacagattgcatatgagaaagaaacactggagaatatacacaagactgtgataaacagcgcttatgaagtcatcagtctaaaaggctacacttcatgggccattgggtactcggttgctagcttggcgcggtccattatcagggatcaaaggaagattcaccctgtgtctgttttagctaagggcttttatggcataggtgatgttgaagtgtttttgagcttgccagcacagcttggaagaggaggggtgcttggtgtaacgaatgtgcacatgaataaagaggaggaacaaaggcttagggattctgctaaaactatcttagaggttcagactcagttgggtatttaa

SEQ ID NO: 51391 - protein, 350 aa, Medicago truncatula
MHKSGSGSTLGPDGLDLTQAFFKPISNAAPPSPTKRHNKISVIGAGNVGMAIAQTILTQDLTDELVIVDNKPDKLRGEMLDLQHAAAFLPRVKINSSVEYSVTAGSDLCIVTAGARQIGGESRLNLLQRNLSLFKAIIPPLARYSPETVLIIVSNPVDVLTYIAWKLSGFPSNRVIGSGTNLDSSRFCFLIADHLQVNAQDVQACIVGEHGDSSVALWSSISIGGIPVLSFLEKQQIAYEKETLENIHKTVINSAYEVISLKGYTSWAIGYSVASLARSIIRDQRKIHPVSVLAKGFYGIGDVEVFLSLPAQLGRGGVLGVTNVHMNKEEEQRLRDSAKTILEVQTQLGI

SEQ ID NO: 51392 - DNA, 1071 bp, Medicago truncatula
  CDS (1)..(1071)
atggaagcacatgcaggagccaaccaaaggattgcaagaatctctgctcatcttcacccttcaaatttccaggaaggaggtgatgttgtaattgacagagctaactgcagagccaaaggtggggcacctggattcaaagtagcagtattgggggctgctggtggaattggtcaatccctttctttgctgttgaagatgaacccactggtttcagttcttcatctttacgatgttgtcaacacccctggtgtcacagctgatgttagtcacatggacactggtgctgtggttcgtggctttttggggcaaccacaacttgagaatgcactcacaggcatggacttggtagttatacctgctggtgtgccaaggaaacctggaatgaccagggacgacttatttaagataaatgctggaattgtgagaaccctttgcgaaggaattgccaaatgttgccccaatgcgattgtcaacttgattagcaatccagtgaattccactgtgccaattgctgctgaggtcttcaagaaagctggtacatatgatccaaagcgacttttaggagttacagccctcgatgttgtgagggcaaatacttttgtggcagaggtacttggtgttgatccaagagacgttgatgttccagttgtaggaggtcatgcaggagtcacaatattgcctcttttgtcacaggttaagcctcccagtagcttcactgcagaagaaaccgaatacctgacaaatcgcattcaaaatggtggaacagaagttgttgaggctaaagctggggctggttctgcaacactatcaatggcatatgcagctgctaagtttgctaactcatgcctccatggtttgaaaggagaagctggagtgattgagtgtgcttatgttgattctcaggttacggaacttcctttctttgcaaccaaggttcgtcttggtcgtgctggagcagaagaaatatttccactgggtcccctcaatgagtatgagaggattgggttggaaaaagctaagagagagttggcaggaagcatccagaagggagtagagttcattaaaaaataa

SEQ ID NO: 51393 - protein, 356 aa, Medicago truncatula
MEAHAGANQRIARISAHLHPSNFQEGGDVVIDRANCRAKGGAPGFKVAVLGAAGGIGQSLSLLLKMNPLVSVLHLYDVVNTPGVTADVSHMDTGAVVRGFLGQPQLENALTGMDLVVIPAGVPRKPGMTRDDLFKINAGIVRTLCEGIAKCCPNAIVNLISNPVNSTVPIAAEVFKKAGTYDPKRLLGVTALDVVRANTFVAEVLGVDPRDVDVPVVGGHAGVTILPLLSQVKPPSSFTAEETEYLTNRIQNGGTEVVEAKAGAGSATLSMAYAAAKFANSCLHGLKGEAGVIECAYVDSQVTELPFFATKVRLGRAGAEEIFPLGPLNEYERIGLEKAKRELAGSIQKGVEFIKK

SEQ ID NO: 51394 - DNA, 993 bp, Aspergillus oryzae
  CDS (1)..(993)
atggtcaaagctgcggtacttggagcttctggtggcattggccagccactgtctctcctgttgaagacctgtcccttagttgaagagcttgctctctacgatgttgtgaacacccctggtgttgctgctgatctatcccacatctcgtctatcgctaaaatctctggttttctgcccaaagatgatgggctgaagcaggcccttactggtgctaatattgttgtcatcccggctggtattccccgcaagcctggtatgacccgtgacgacctcttcaagatcaacgccggcatagtgcgagacttggtcaagggtatcgccgagttctgccccaaggcctttgttctggttatctcaaaccccgttaattctactgttcctattgctgcagaggtgctcaaagccgctggcgtctttgacccgaagcgcctctttggtgtcaccacactggacgtcgttcgtgcagagactttcacccaagagttctcgggccagaaggatccttctgctgttcaaatcccagttgttggtggccactctggagagaccattgtccccctcttcagcaagactacccccgcaattcagatacccgaggagaagtatgacgcactgatccaccgcgtccaatttggtggagatgaggtggtccaagctaaggacggtgctggttccgccaccttgtctatggcctatgccggttacaggttcgctgagagtgtaatcaaagcttcaaagggtcaaacgggtattgtcgagcctaccttcgtctacctgcctggaattcccggcggtgatgagatcgttaaggcaactggcgtggaattcttctctactcttgtaaccttaggaactaatggcgcagagaaggctagcaacgttcttgagggcgtgaccgagaaggaaaagaagcttctcgaggcttgcacgaaaggccttaagggtaatatcgagaaaggcatcgacttcgttaagaacccaccaccaaagtaa

SEQ ID NO: 51395 - protein, 330 aa, Aspergillus oryzae
MVKAAVLGASGGIGQPLSLLLKTCPLVEELALYDVVNTPGVAADLSHISSIAKISGFLPKDDGLKQALTGANIVVIPAGIPRKPGMTRDDLFKINAGIVRDLVKGIAEFCPKAFVLVISNPVNSTVPIAAEVLKAAGVFDPKRLFGVTTLDVVRAETFTQEFSGQKDPSAVQIPVVGGHSGETIVPLFSKTTPAIQIPEEKYDALIHRVQFGGDEVVQAKDGAGSATLSMAYAGYRFAESVIKASKGQTGIVEPTFVYLPGIPGGDEIVKATGVEFFSTLVTLGTNGAEKASNVLEGVTEKEKKLLEACTKGLKGNIEKGIDFVKNPPPK

SEQ ID NO: 51396 - DNA, 1023 bp, Aspergillus oryzae
  CDS (1)..(1023)
atgttcgctgctcgccagtctttcaacctcctccagaagcgcgccttctccgcctctgccagccaggcttccaaggttgccgttcttggtgccgctggtggcattggccagcctctctcccttctcctcaagctcaacccccgtgtttctgagcttgccctctacgatatccgcggtggccctggtgttgccgctgacctgagccacatcaacaccaacagcaccgtctctggctacgaggctaccccctctggcctccgtgatgctctcaagggctccgagatcgtcctcatccctgccggtgttcctcgcaagcccggcatgacccgtgacgacctgttcaacaccaacgcctccattgtccgcgaccttgctaaggccgccgccgaggcttcccccgaggccaacatcctcgtcatctccaaccctgtcaactccaccgtccccatcgtctctgaggtcttcaagtccaagggtgtctacaaccccaagcgtctcttcggtgtcactacccttgacgttgtccgtgcctctcgcttcatctcccaggtccagaagaccgacccctccaacgaggccgtcactgtcgtcggtggtcactccggtgtgaccattgtccctcttctctcccagtccagccaccccagcattgagggtaagacccgcgatgagctcgtcaaccgcatccagttcggtggtgatgaggttgtcaaggccaaggatggtgctggctctgccaccctctccatggccatggctggtgctcgcatggctgagtccctcctgaaggccgcccagggtgagaagggtgtcgttgagcccactttcgtcgacagccctctctacaaggaccagggtgttgacttcttcgcctccaaggtcgagctcggccccaacggtgttgagaagatcctccccgttggccaggtcaacgcctacgaggagaagctcctcgaggcctgccttggtgacctcaagaagaacatccagaagggtattgacttcgtcaaggccaacccttaa

SEQ ID NO: 51397 - protein, 340 aa, Aspergillus oryzae
MFAARQSFNLLQKRAFSASASQASKVAVLGAAGGIGQPLSLLLKLNPRVSELALYDIRGGPGVAADLSHINTNSTVSGYEATPSGLRDALKGSEIVLIPAGVPRKPGMTRDDLFNTNASIVRDLAKAAAEASPEANILVISNPVNSTVPIVSEVFKSKGVYNPKRLFGVTTLDVVRASRFISQVQKTDPSNEAVTVVGGHSGVTIVPLLSQSSHPSIEGKTRDELVNRIQFGGDEVVKAKDGAGSATLSMAMAGARMAESLLKAAQGEKGVVEPTFVDSPLYKDQGVDFFASKVELGPNGVEKILPVGQVNAYEEKLLEACLGDLKKNIQKGIDFVKANP

SEQ ID NO: 51398 - DNA, 1023 bp, Lysiphlebus testaceipes
  CDS (1)..(1023)
atgtttccacgtattgtaaaaccaactatctcaattgctaatcaaactgtcaagcaattgtcaaccagtacacagcgcaatgccaaggttgctgttatgggagcaagtggtggcattggacaacctttgtcattacttttgaaacaatcacctcttgttactgaattgtcattatatgacattgttaatacaccaggtgttgctgctgatttatctcatattgattcaaattcaaaagtaactggttttactggaccagaacaattgagagattcattaaaaggtgcacaaattgtcattattccagctggtgtaccacgtaaacctggtatgacacgtgatgatttatttaatacaaatgcatcaattgtacgtgacttggcacaaggtattgctgaagtatgtccaaaagcatttgttgcaataatatcaaacccagttaatagtactgtgccaattgcaagtgaagtattgcaaaaagctggtgtttatgaccccaacagaatatttggtgtaacaacacttgatattgtcagatcaaatgccttcattggtgaggccaagggtcttgatccacaaaaagttgctgtaccagttattggaggtcacagtggaataacaattattccattgatcagtcaagctaaaccaagtgttacattcccagatgataaactcaaagcattgactgaaagaattcaagaagctggaactgaagttgttaaagctaaagctggtactggatcagctacattatcaatggcatatgctggtgctagatttggtttttcattgatcagagcactcaatggtgaaccaaatattgttgaatgttcttacgtcagatcaaatttaaatgatgccaaatatttctcaacacctgttttttttggtaaaaatggtatcgagaaaaattttggtattggaaaattgaccccatttgagcaaaaattattggaaggtgcaattcctgaattaaagaaaaatattcaaaaaggggaggactttgtcaacaaaaagtaa

SEQ ID NO: 51399 - protein, 340 aa, Lysiphlebus testaceipes
MFPRIVKPTISIANQTVKQLSTSTQRNAKVAVMGASGGIGQPLSLLLKQSPLVTELSLYDIVNTPGVAADLSHIDSNSKVTGFTGPEQLRDSLKGAQIVIIPAGVPRKPGMTRDDLFNTNASIVRDLAQGIAEVCPKAFVAIISNPVNSTVPIASEVLQKAGVYDPNRIFGVTTLDIVRSNAFIGEAKGLDPQKVAVPVIGGHSGITIIPLISQAKPSVTFPDDKLKALTERIQEAGTEVVKAKAGTGSATLSMAYAGARFGFSLIRALNGEPNIVECSYVRSNLNDAKYFSTPVFFGKNGIEKNFGIGKLTPFEQKLLEGAIPELKKNIQKGEDFVNKK

SEQ ID NO: 51400 - DNA, 1249 bp, Pisum sativum
  CDS (51)..(1121)
gtaactcttcaacttccactacacaatactacttctccctctgtctctcaatggaagcacaggcaggagccaaccagaggattgcaagaatctctgctcatctccacccttcaaatttccaggaaggaggtgatgttgcaattaacaaggctaactgcagagcaaaaggtggagcacctggattcaaagtagcaatcttaggggctgctggtggaattggtcaacccctttctttgttgttgaagatgaatccattggtttcagttcttcatctttatgatgttgtcaacactcctggtgtcactgctgatgttagtcacatggacactggtgctgtggtccgtggctttctagggcagccacaacttgagaatgcactcacaggaatggacttggtagttatacctgctggtgtgccgagaaaacctggaatgacgagggacgatttatttaagataaatgctggaattgtgaggactctttgtgaaggagttgccaaaagctgtcccaatgcaattgtcaacttgattagcaatccagtgaattctactgtgccaattgctgctgaggtcttcaaaaaagctggtacatatgatccaaagcgacttttaggagttacaacccttgatgttgtgagggcaaatacttttgtggcagaggtacttggagttgatccaagagaggttgatgttccagtggtaggaggtcacgcaggagtcacaatattgcctcttttgtcacaggttaagccccccagtagcttcagtgcagaagaagccgaatacctgacaaatcgcattcaaaatggtgggacagaagttgttgaggcaaaagctggggctggttctgcaacactatcaatggcatatgcagctgccaagtttgctaactcgtgcctccatggcttgaaaggagaagccggggtggtggagtgtgcttttgtcgattctcaggttacggatcttcctttctttgcaaccaaggttcgtcttggtcgtggtggagcagaagagatatatcaactcggtcccctgaacgagtatgagagggccgggttggaaaaagcgaagacagagttagcaggaagcatccagaagggagtagaattcatcaaaaaataagtcagttaaaacaaaaatagtttgttttgtctctttactatatctaaaaagaacttttgtaataattccgtctgttcataatatatctttcttacaaatagcaaaaaaaaaaaaaaaaaaaaaaaaaa

SEQ ID NO: 51401 - protein, 356 aa, Pisum sativum
MEAQAGANQRIARISAHLHPSNFQEGGDVAINKANCRAKGGAPGFKVAILGAAGGIGQPLSLLLKMNPLVSVLHLYDVVNTPGVTADVSHMDTGAVVRGFLGQPQLENALTGMDLVVIPAGVPRKPGMTRDDLFKINAGIVRTLCEGVAKSCPNAIVNLISNPVNSTVPIAAEVFKKAGTYDPKRLLGVTTLDVVRANTFVAEVLGVDPREVDVPVVGGHAGVTILPLLSQVKPPSSFSAEEAEYLTNRIQNGGTEVVEAKAGAGSATLSMAYAAAKFANSCLHGLKGEAGVVECAFVDSQVTDLPFFATKVRLGRGGAEEIYQLGPLNEYERAGLEKAKTELAGSIQKGVEFIKK

SEQ ID NO: 51402 - DNA, 909 bp, Rhizopus oryzae
  CDS (1)..(909)
atggtactacattcaaaggttgccatcattggagctggggcagtaggggcctccactgcttatgcacttatgtttaaaaacatttgtacagaaatcattattgttgatattaatcccgacatcgttcaagctcaagtccttgaccttgcagacgcagccagtgtaagcaacacgcccatccgagcaggcagtgcagaggaggcagggcagtcagatattattgtcatcacggccggtgcgaaacaaaaggaaggtgagcctcggacaaagctcattgaacgaaattacagagtgttgaaaaatatcattggtggcatgcaacctattcgatcagacgcaatcatcttggtggtagtaaatccagtcgatatcttgacacacattgctcagacactctctggactggcaccaaaccaggtgattggctccggtacctaccttgacacgacccgccttcgtgtccatcttggtgatatctttgatgtcaatcctcaatcgatccatgcttttgtcttgggtgagcacggggattcacagatgatcgcttgggaggctgcttcgattggtgggcagccgttgacatgttttccagaattcgcagagctggataaaaacgcaatttcaaaagcgatatcaggcaaagcgatggagatcattcgtttgaaaggagccacgttttatggaattggtgcctgtgcagcgcatttagtgcatactatcatgttgaataggaaatcagtacatccagtttctgtttatgttgaaaaatatggagacactttttctatgccagctaaacttggatggagaggtgttgaaaagatatatgaggtaccactgacggaagaagaggaagcgctgcttttaaaatctgtagaggcactgaaagcagttgaatatttatcataa

SEQ ID NO: 51403 - protein, 302 aa, Rhizopus oryzae
MVLHSKVAIIGAGAVGASTAYALMFKNICTEIIIVDINPDIVQAQVLDLADAASVSNTPIRAGSAEEAGQSDIIVITAGAKQKEGEPRTKLIERNYRVLKNIIGGMQPIRSDAIILVVVNPVDILTHIAQTLSGLAPNQVIGSGTYLDTTRLRVHLGDIFDVNPQSIHAFVLGEHGDSQMIAWEAASIGGQPLTCFPEFAELDKNAISKAISGKAMEIIRLKGATFYGIGACAAHLVHTIMLNRKSVHPVSVYVEKYGDTFSMPAKLGWRGVEKIYEVPLTEEEEALLLKSVEALKAVEYLS

SEQ ID NO: 51404 - DNA, 963 bp, Rhizopus oryzae
  CDS (1)..(963)
atggtattacactcaaaggtcgccatcgttggagctggtgcagtaggagcctccactgcttatgcacttatgtttaaaaacatttgtacagaaatcattattgttgatgttaatcctgacatcgttcaagctcaagtccttgaccttgcagatgctgccagtataagtcacacgcccatccgagcaggtagcgcagaggaggcagggcagtcagatattgttgtcatcacggccggtgcgaaacaaagggaaggtgagcctcggacaaagctcattgaacgaaacttcagagtgttgcaaagtaccattggtggcatgcaacccattcgaccagacgcagtcatcttggtggtagcaaatccagtcgatatcttgacacacattgcaaagaccctctctggactgcctccaaaccaggtcattggctccggtacctaccttgacacgacccgtcttcgcgtccatcttggcgatgtctttgatgtcaatcctcaatcggtccatgcttttgtcttgggtgaacacggggattcccagatgatcgcttgggaggctgcttcgattggtgggcagccgttgacaagtttcccggaattcgcaaagctggataaaacagcaatttcaaaagcgatatcaggtaaagcgatggagatcattcgtttgaaaggagccacgttttatggaattggtgcctgtgcagcggatttagtgcacactatcatgttgaataggaaatcagtacatccagtttctgtttatgttgaaaagtatggagccactttttctatgcctgctaaacttggatggagaggtgttgaacagatctatgaagtaccactgacggaagaagaagaagcgctgcttgtaaaatctgtagaggcattgaaatcagttgaatattcatctacaaaagttccagaaaaaaaggttcatgctacttccttttctaaaagtagctgttga

SEQ ID NO: 51405 - protein, 320 aa, Rhizopus oryzae
MVLHSKVAIVGAGAVGASTAYALMFKNICTEIIIVDVNPDIVQAQVLDLADAASISHTPIRAGSAEEAGQSDIVVITAGAKQREGEPRTKLIERNFRVLQSTIGGMQPIRPDAVILVVANPVDILTHIAKTLSGLPPNQVIGSGTYLDTTRLRVHLGDVFDVNPQSVHAFVLGEHGDSQMIAWEAASIGGQPLTSFPEFAKLDKTAISKAISGKAMEIIRLKGATFYGIGACAADLVHTIMLNRKSVHPVSVYVEKYGATFSMPAKLGWRGVEQIYEVPLTEEEEALLVKSVEALKSVEYSSTKVPEKKVHATSFSKSSC

SEQ ID NO: 51406 - DNA, 1023 bp, Branchiostoma belcheri tsingtauense
  CDS (1)..(1023)
atgttttccaggctagctcgcccccaaaacctcgccgccctggcaggggcactgaggaacttctctaccaccacagcatgtaacaacaaagttgcagtgctcggtgcctctggtggaatcggccaaccgctgagcctcttgctgaagcacaatgcagccatcacccagttggctctgtacgatatcgcacacacgcccggcgtggcctgcgatctcagccacatcgagaccgggtcagaggtcaagggttacctgggagatgcggagctgggggcgtgtctggaaggatgcgacgttgtggtgattcctgctggagtccccaggaagcctggtatgaccagagatgacctgttcaacaccaatgcctccatcgtacgagacctggtgaaggcctgtacccagcactgtcctactgccttcctcctcctcgtcactaaccctgtaaactccacagtgcccatcgcctccgaggtgtgcaaggctgctggtacctacgaccccggcagggtcattggggtcacgaccttggatgtggtcagagctaacacctttgtggctaacctgaagggtctgaacccagcagaggttaatgttccagtggtcggaggtcatgctggcaagaccatcatccctctcatttcacaggctactccatctgtggagtttgatccagagacactggacaacctgaccaagagaatccaggatgccggcactgaggtcgtcaatgctaaggctggagctgggtcagctacactgtccatggcatatgctggggccaggtttaccaactcactccttgctgcattgaatgggaaggaaggagtgattgaatgtggtttcatcaagtcctcggagactgagtcttcctacttctccactcctcttctcctcgggaaaaatggcattgagaagaatctgggtctggggaagctgagcgactttgagacgaagctggtggaagacgccatggatgaactcaagggttccatcgctaagggagagaaatttgcctcacaataa

SEQ ID NO: 51407 - protein, 340 aa, Branchiostoma belcheri tsingtauense
MFSRLARPQNLAALAGALRNFSTTTACNNKVAVLGASGGIGQPLSLLLKHNAAITQLALYDIAHTPGVACDLSHIETGSEVKGYLGDAELGACLEGCDVVVIPAGVPRKPGMTRDDLFNTNASIVRDLVKACTQHCPTAFLLLVTNPVNSTVPIASEVCKAAGTYDPGRVIGVTTLDVVRANTFVANLKGLNPAEVNVPVVGGHAGKTIIPLISQATPSVEFDPETLDNLTKRIQDAGTEVVNAKAGAGSATLSMAYAGARFTNSLLAALNGKEGVIECGFIKSSETESSYFSTPLLLGKNGIEKNLGLGKLSDFETKLVEDAMDELKGSIAKGEKFASQ

SEQ ID NO: 51408 - DNA, 1735 bp, Paracoccidioides brasiliensis
  CDS (283)..(1305)
ggcacgaggcttgaagggataaggtgcttatataatctgccgagctgtgatgactcagccgcgtttacggagaaacccggccctgagcgatttccgaaaggggactagcgtgtccggtctcgggtgaaacccatcgcatttttaaaccacggtcaaaccataacaatcgtcaattgttagaagcaatcttcaatccttcaatcccttcacttctccatttctttcttcgtttcccttcattgccatctttcttgataccctgtattttcttaagccaccaacatgtttgccgcccgcagagctttcggctttgcccagcgacgggccttctccgtctctgcgccccagtcttccaaagtggccattctaggtgccgcaggtggtattgggcagtcattgtctctgctgatgaagctcagtcctcgtgtcactcagctggctctgtacgatatccggggtggcccaggtgttgccgccgatcttagccatatcaacaccaacagcactgttacgggctatgatcctaccccctccggtctccgggacgctctcaaggactctgaaattgtcctcattcctgctggtgtgcctcgcaagcctggcatgacccgtgacgatctttttaacaccaacgcttcaattgtccgtgacttggcaaaggctgctgccgatgcctctcctaacgccaacatcctcgtcatcgccaaccccgtcaactccaccgtcccaattgtcgcagaggtcttcaagtccaagaatgtctacaaccccaagcgccttttcggtgtcaccaccctggacgtcatccgtgcctcccgcttcatctcccaagtcaaaggcaccgatccaaaggatgagaaagtcaccgtcgttggcggccactccggcgtcaccatcgtacccctgatctcccaatccaaccaccctgacatctccggcgagaaactcgaaaccctcgtcaaccgcatccagttcggtggtgacgaagtcgtcaaggccaaggacggtgctggttccgccaccctctccatggccatggctggtgcccggttcgctgagagccttctgaaggcctcccagggtgagaagggagtcatcgagcccactttcgttgacagtcccctctacaaggaccagggcatcgacttcttcgcgtcccgtgtcgagcttggacccaatggtgtcgagaagatcctccccgtcggcaaggtctctgagtacgagcagaagctcctcgatgcctgcctcgttgatctgaagaagaacatcgccaagggtgtcgagttcgtcaagacgaacccatgagtgatatgcacattcatgaatatcaagacatatcctccatccatcaccgtctttacttttctcctctacaaccctttaccatctaccataccgcccacacactccaattataatctcataaaaccaaacaaatactataaaataagtctgttcattaaataatttctcatatgatgtttggtttgaaacactgcacacctagaacaggaatccatccttgagcaagctctttttcctgtcatcttagtcatcttgtggtcggcaagcgagtttttttgcaggatgctttggcgggacactgccgctctttcaagtcatgtaagagtttattttccccttaatatagaaagatatggaggttttctgtcagtgaagaagggtttgatattatatcatctcctgttgagtgcgtgtgttgtatcataagatc

SEQ ID NO: 51409 - protein, 340 aa, Paracoccidioides brasiliensis
MFAARRAFGFAQRRAFSVSAPQSSKVAILGAAGGIGQSLSLLMKLSPRVTQLALYDIRGGPGVAADLSHINTNSTVTGYDPTPSGLRDALKDSEIVLIPAGVPRKPGMTRDDLFNTNASIVRDLAKAAADASPNANILVIANPVNSTVPIVAEVFKSKNVYNPKRLFGVTTLDVIRASRFISQVKGTDPKDEKVTVVGGHSGVTIVPLISQSNHPDISGEKLETLVNRIQFGGDEVVKAKDGAGSATLSMAMAGARFAESLLKASQGEKGVIEPTFVDSPLYKDQGIDFFASRVELGPNGVEKILPVGKVSEYEQKLLDACLVDLKKNIAKGVEFVKTNP

SEQ ID NO: 51410 - DNA, 1044 bp, Drosophila melanogaster
  CDS (1)..(1044)
atgtttttggcctctagattgttaagccatgttggcaacttgcctcccaaggtccagcagcttggatatatcagccgaggtctcaaggtcgccgttgtgggatcggtgggtggaatcggtcagccgctgtcccttcttctcaagcataatccgcaaatctcgaccctgtcgctgtacgacattaagaatacaaccggtgtaggagtagacttatctcatatcaacacccgtgcttcagtgtgcccattcgagggtaagaatggtttaaaaaaagctatggataaggctgatatagtggtgataccggcgggtttgccacgtaagcccggaatgaagcgcgaagatttggtggacgtgaatgccagcgttgcctgcgaagtggcttttgcggctagcgaagtttgtcccggtgccatgcttgccttcataacgaaccccatcaatgtgatagtacccatcgtggccacgatccttaaagcaaagggtacatacgatccgaatcgactatttggtgtcaccactctggatgtggtacgagcccagacctttgtagcggacattctcaacgttgatccacagaaagtgaatatacccgtaatcggtggccatacaggtcggaccatcctgcccatactgtcgcagtgtgatcccccctttaagggtaccgataaggagcgcgaagcgttgatccaacgcatccaaaatgcgggcacagaagtggttaatgccaaggatggcctgggctcggccaccctatcgatggcctttgcagccactcagtttgtaaactcgttgataaagggtatcaagggttcaaaggacgagtgcattgtggaatgtgcctatgtggagtctgatgtcacggaggcccagttcttcgccaccccactgatactgggaccccagggtgtcaaggaaaacacaggattgcccgatttggacgatgaggaaaggaaggctctaaatggtatgctacccattttgaaggagagtatcgcaaagggcatcaaattgggcgagggtatgatatgcagttgtgcataa

SEQ ID NO: 51411 - protein, 347 aa, Drosophila melanogaster
MFLASRLLSHVGNLPPKVQQLGYISRGLKVAVVGSVGGIGQPLSLLLKHNPQISTLSLYDIKNTTGVGVDLSHINTRASVCPFEGKNGLKKAMDKADIVVIPAGLPRKPGMKREDLVDVNASVACEVAFAASEVCPGAMLAFITNPINVIVPIVATILKAKGTYDPNRLFGVTTLDVVRAQTFVADILNVDPQKVNIPVIGGHTGRTILPILSQCDPPFKGTDKEREALIQRIQNAGTEVVNAKDGLGSATLSMAFAATQFVNSLIKGIKGSKDECIVECAYVESDVTEAQFFATPLILGPQGVKENTGLPDLDDEERKALNGMLPILKESIAKGIKLGEGMICSCA

SEQ ID NO: 51412 - DNA, 1050 bp, Drosophila melanogaster
  CDS (1)..(1050)
atgttgttactgacaagtcttaaaagcctggcaaaaccagctacatggggagttgtggtccgcactttaaaggtcgccgttgtcggtgccggaggaggaattggacaaccgctatcgcttctgctccgtcgctgtcctggaatcgatgagctggctctacatgatctcagcgaaatgaagggaattgctacggatctatcccatataagccaaacgggaaaggtgataggttttaccggtgaaaaggaactggagtcggcggtgagtggagctgatgtggtggttgtggcggcaggaatgccacgtctgccaggaatgcaaagggatcacctgatggccgccaatggaaatgttgcagtgaaagttgccactgccattagcaatgcctctccacgagctcatcttgcctttattaccaatccggtcaatatgattgtgcccgccgcagctgaggttcttatggcccatggaacttttgattctcgtcggctcttcggtattacgactttggatgtggtgcgatcgaaaaagttcattggtgattctatgaacatatcaccggatgacgtaaacattccagttattggtggccatgcggggattacaattctaccgctcatttcgcagtgtcagccgatatatagatgtgatctccaggagatccagaatctaactcatcgcattcaggaggcgggcacagaggtggtgaatgccaaagctggaaaaggatctgccaccctatcgatggcttatgctggcgcaactttcgtgaactccctgctgcgtggaattgctggacaggatggtctaatcgagtgcgcttttgtcgcctccaaactaaccgacgccccattctttgctagtccattggaattgggaaaggatggtatcaagcgctatataccacttccccagatgagtgactacgaaaaggaggctttggaaaagctgctacctattctacgacagaatgctgatgagggtatcaattttgcaaaaatgattttgagtggacaatcacattctcccattccagcggccttgccgtaa

SEQ ID NO: 51413 - protein, 349 aa, Drosophila melanogaster
MLLLTSLKSLAKPATWGVVVRTLKVAVVGAGGGIGQPLSLLLRRCPGIDELALHDLSEMKGIATDLSHISQTGKVIGFTGEKELESAVSGADVVVVAAGMPRLPGMQRDHLMAANGNVAVKVATAISNASPRAHLAFITNPVNMIVPAAAEVLMAHGTFDSRRLFGITTLDVVRSKKFIGDSMNISPDDVNIPVIGGHAGITILPLISQCQPIYRCDLQEIQNLTHRIQEAGTEVVNAKAGKGSATLSMAYAGATFVNSLLRGIAGQDGLIECAFVASKLTDAPFFASPLELGKDGIKRYIPLPQMSDYEKEALEKLLPILRQNADEGINFAKMILSGQSHSPIPAALP

SEQ ID NO: 51414 - DNA, 1020 bp, Talaromyces emersonii
  CDS (1)..(1020)
atgttcgctactcgccaggccttcaacctcttccagaagcgggctttctccgcctctgctcgccagtcctccaaggtcgccatccttggtgccgctggtggcattggccagcccctttctctcttgatgaagctcaaccctcgcgtcaccgagctcgctctctacgacatccgcggaggccctggtgtcgctgctgacctgagccacatcaacaccaacagcaccgtcactggctaccagcccactcctgagggccttcgtgatgctctcaagggctctgagatcgtcctcattcccgccggtgttcctcgcaagcgtggcatgacccgtgacgacctcttcaacaccaacgcttctattgtccgtgacctcgccaaggctgctgctgatgcctgccctaacgccaacatcctggtgatctccaaccctgtcaactccactgtccccattgtcgccgaggtcttcaagtccaagggtgtctacaaccccaagcgcctcttcggtgtcacgaccctggacgttgtccgtgcctcgcgcttcatctccgaggtcaagaacaccgacccggccaacgaggaggtgaccgttgttggtggccactccggtgtcaccattgttcctctgatctcccagtccaaccaccccgatattgagggcgagactcgcgacaagctggtcaaccgcattcaatttggtggtgacgagggtgtcaaagcaaaggacggtgctggttctgccgccctctccatggcgttcgccggtgcccgttcgccgagtctttgctcaagcggccagggggtcaagggggttgtcaagcccagctttgtcgacagccctctgtacaaggaccagggcattgacttcttcgcctcccgtgttgagcttggccctaacggtgccgagaaggtcttgccggttggcaaggtctccccatacgaggagaagctgctggaggctgcctttgcggacctcaagaagaacatccagaagggtatcgactttgtcaagaacaacccctaa

SEQ ID NO: 51415 - protein, 339 aa, Talaromyces emersonii
MFATRQAFNLFQKRAFSASARQSSKVAILGAAGGIGQPLSLLMKLNPRVTELALYDIRGGPGVAADLSHINTNSTVTGYQPTPEGLRDALKGSEIVLIPAGVPRKRGMTRDDLFNTNASIVRDLAKAAADACPNANILVISNPVNSTVPIVAEVFKSKGVYNPKRLFGVTTLDVVRASRFISEVKNTDPANEEVTVVGGHSGVTIVPLISQSNHPDIEGETRDKLVNRIQFGGDEGVKAKDGAGSAALSMAFAGARSPSLCSSGQGVKGVVKPSFVDSPLYKDQGIDFFASRVELGPNGAEKVLPVGKVSPYEEKLLEAAFADLKKNIQKGIDFVKNNP

SEQ ID NO: 51416 - DNA, 1396 bp, Solanum lycopersicum
  CDS (80)..(1132)
gacaattacaagcttaatttctctgctatcacagaacaaaacaaatcttttcttgttacacaagcaaatctaattaatcatgcaaaacagtagttcatcttcatcactcggtcctggtggtctagacttaacccaagctttcttcaagtcaatttccaatgctgcccctccttcacccacaaaacgccacaccaaaatctccgtcatcggcgtcggaaacgtcggtatggcaattgcacaaacaatcctaacacaagacctagtcgacgagcttgcactcgtcgacgcaaaatccgacaagctccgaggagaaatgctggatcttcagcacgcggcagcgtttctgccgcgtacgaagatccacgcatcgattgattactcggttactgccgggtcggatctttgtattgtaactgcaggtgcccgacagaatccgggggagagtaggttgaatttgttgcagagaaatatggctctgtttaggagtattattccgccgttggtgaagtattcgccggagactacgcttctagtagtttcgaatccggtggatgtgctgacgtatgttgcttggaaattgtctgggtttccggcgaatcgggttatcgggtcgggaacgaatttggattcttctagatttcggtttttgattgcggatcatcttgatgttaatgcccaagatgtccaggcatacattgttggagagcatggtgatagctcagtggcactttggtcaggcattagtgtaggaggtgtaccagtcctcagtttccttgagaggcaacaaattgctttggaaaaagagacgctggaaaaaatccaccaagaagttgtgcacagtgcatatgaagtgattagtctgaaaggttacacatcatgggcaattggctactctgttgctaacttggctcgaacaatccttcgcgatcaaagaaggattcaccctgtttcggttcttgcaaaagggttctatggcattgatggtggcgatgtgttcttgagcttgcctgcacagcttggtagaagtggagttttgggcgtgacgaatgtgcatcttactgatgaagaaattgaacagcttaggaattcagctaagactattttggaagtgcagagtcagttgggaatttgaaaaaaatagtactactagagtctagaaactgttcatttaccaatgttactatactactactatatgttgtttcttattatacagtttgttgaattttgtttacgaaaaaaatagtgagtagcacaagtgttgtagcaattggtcataggacatattggctgcttgctagtgtgctccgtggtgctaactttgaaataaattgtaacacaactttttatgtccttataaagaaatttaattttattgaaaaaaaaaaaaaaaaaa

SEQ ID NO: 51417 - protein, 350 aa, Solanum lycopersicum
MQNSSSSSSLGPGGLDLTQAFFKSISNAAPPSPTKRHTKISVIGVGNVGMAIAQTILTQDLVDELALVDAKSDKLRGEMLDLQHAAAFLPRTKIHASIDYSVTAGSDLCIVTAGARQNPGESRLNLLQRNMALFRSIIPPLVKYSPETTLLVVSNPVDVLTYVAWKLSGFPANRVIGSGTNLDSSRFRFLIADHLDVNAQDVQAYIVGEHGDSSVALWSGISVGGVPVLSFLERQQIALEKETLEKIHQEVVHSAYEVISLKGYTSWAIGYSVANLARTILRDQRRIHPVSVLAKGFYGIDGGDVFLSLPAQLGRSGVLGVTNVHLTDEEIEQLRNSAKTILEVQSQLGI

SEQ ID NO: 51418 - DNA, 1449 bp, Solanum lycopersicum
  CDS (46)..(1089)
ttttcagtttcacagaaaaatcaactacacattttttgatcaactatgtcatcatcatcttcattaagccttgatggtctagaactaaaccaagttttcttcaaatcaatcgccaacagtaacccgccatctcagacgaatcaccacacgaagatctccgtcatcggcgtcggcaacgtcggaatggccatcgctcaaacaatccttactcaggatctcgtcgacgagctagcactcgtcgacgcaaattctgataaattacgcggcgagatgttggatctccaacatgccgccgcgttccttccgagaactaaaatcgttgcttcggctgactatacggttacggccgggtcggatctctgtattgtcacggcgggtgctcggcagaacccgggggagagcaggttgaatttgttgcagaggaatttggcgatgtataaaagtattgtgccggagctggtgaagtattcgccggagtgtatattgttgattgtatcgaatccggtggatcttttgacctatgttgcttggaagttgtctgggtttccagtgaatcgggtgatcgggtcgggtacgaacttggattcgtctaggttccggtttttgattgctgatcaccttgatgttaatgcgcaggatgtgcaggcatacattgttggtgaacatggtgatagctctgttgcactgtggtctagtattagcgttggagggattccggttcttagctttctggagaatcaacaaattgcttttgagaaggatacattggaaaaaatccataaacaggttgtgcagagtgcatatgaagtgatcaatctcaaaggctacacatcgtgggcaatcggttactctgtggctaacttggctttttcaatcattcgagatcagagaaggattcaccctgtctcaatcctagcaaaggggttctatggtattgatggcggcgatgttttcttgagcttgcctgcacagcttggtagaaatggagttttaggtgtgactaatgtgcatcttactgatgaggaaattcagcaacttaggaactctgctgagactatcttagaagtgcaaaaccagttggggatttaacttggttaagttaataactttcccttctgtgttgcccgaatccttcaaaaacatcactgggtgtgtataaatcctccgaaagtagaggatttgacatgggtgcaagcaagcaacaatttttggagagtccgagctacatagtttcctttggttaccactacttagtagtattgttgttataccatgtaatttaattagaattttctttttttgcaagatatgacctgtgttacatcatttggtccttagcatgatggctgtttacttatgctgttgtagtaaaattttggaacatactgtgactgtaaaatttgatgccagctcttgtaaaaatggagtttcatgtgtaaaaaaaaaaaa

SEQ ID NO: 51419 - protein, 347 aa, Solanum lycopersicum
MSSSSSLSLDGLELNQVFFKSIANSNPPSQTNHHTKISVIGVGNVGMAIAQTILTQDLVDELALVDANSDKLRGEMLDLQHAAAFLPRTKIVASADYTVTAGSDLCIVTAGARQNPGESRLNLLQRNLAMYKSIVPELVKYSPECILLIVSNPVDLLTYVAWKLSGFPVNRVIGSGTNLDSSRFRFLIADHLDVNAQDVQAYIVGEHGDSSVALWSSISVGGIPVLSFLENQQIAFEKDTLEKIHKQVVQSAYEVINLKGYTSWAIGYSVANLAFSIIRDQRRIHPVSILAKGFYGIDGGDVFLSLPAQLGRNGVLGVTNVHLTDEEIQQLRNSAETILEVQNQLGI

SEQ ID NO: 51420 - DNA, 1029 bp, Nucella lapillus
  CDS (1)..(1029)
atgttgtctcgggttgctcgtccttcacggttactctgcgtcgtcagggaacagttttctccaaaacgaaacctgacgaaggaggcgcgcgtggcagtgttgggggcggcggggggcatagggcagcccctgtccctgttgctgaagcagatgcccatcgtgtcccacctcaacctctacgacatcgcgcacgtcatgggcgtggcctcggacctgagccacatcgagtcacgcgccaaggtgcaggggttcctgggcccagacaacctgcggccctgtctggacggcgccgacatcgtcctcatacctgccggcgtgcccaggaaaccaggcatgacccgggatgacctgttcaacaccaacgcggccatcgtgcgtgacctgacggcagctgtggcagagtcgtgccccaaagctatgttgggcatcatcaccaacccagtgaactcgacggcgccaatagcgtccgaggtgctgaagaagcatggagtgtacgatccacgccgcgcgtttggcgtgacaacgctggacgtggttcgatccaacactttcatcgccgaggccaaggggctggatgtgagcaagacgaacgtgccggtgatcgggggtcacagcggcatcaccatcatccccctcatctcccagtgcacgccccctgtgtccttccccccggaggagcgggtcaagctgtccatgcgtatccagaatgcaggcacagaggtggtggatgccaaggcgggggctgggtcggccactctgtccatggcattcgcagcagcagagttctgcaagagtctgattgaggcgctgaatggacaggagggcaaagtgcagtgcgcatacgtgcgatcggaggagaccgaggccaagtactttgccactcccgtcttgttgggcaaagagggcatcgagaagaacctgggcatgggcaagctgctggacgttgaggtgaacctgctgaaggcggccatgccagagctgatcgccaacatccagaagggcgagcagtttgtcggcgactccaagtaa

SEQ ID NO: 51421 - protein, 342 aa, Nucella lapillus
MLSRVARPSRLLCVVREQFSPKRNLTKEARVAVLGAAGGIGQPLSLLLKQMPIVSHLNLYDIAHVMGVASDLSHIESRAKVQGFLGPDNLRPCLDGADIVLIPAGVPRKPGMTRDDLFNTNAAIVRDLTAAVAESCPKAMLGIITNPVNSTAPIASEVLKKHGVYDPRRAFGVTTLDVVRSNTFIAEAKGLDVSKTNVPVIGGHSGITIIPLISQCTPPVSFPPEERVKLSMRIQNAGTEVVDAKAGAGSATLSMAFAAAEFCKSLIEALNGQEGKVQCAYVRSEETEAKYFATPVLLGKEGIEKNLGMGKLLDVEVNLLKAAMPELIANIQKGEQFVGDSK

SEQ ID NO: 51422 - DNA, 1026 bp, Nucella lapillus
  CDS (1)..(1026)
atgttttcaagaattgctcgtccgtcacaaactctgtgcctattcaggcatcacttttcgacaagcagcaaggtcgggaaggatgtgaaggtggctgtgctgggggcggcggggggcatcggccagcccctgtccctgctgctgaaggagatcccgctcatctcccacctcaacctgtacgacatcgcccacacgcccggggtggccgctgacctcagccacatcgagacccgcgccaaggtggccggcttcctggggcctgaggagctggacaagtgcctggagggggccaacatcgtgctcatccccgccggcgtgcccagaaagccaggtatgacgagagatgatctgttcaacaccaacgcgggcatcgtgagagatctgacagaaagggtggcccacgtctgcccaacagccatgctgggaatcatcacaaaccctgtgaactcgacagtgcccattgcctcagaagtgctgaagaagcacggcgtgtacgacccgaagcgagtgtttggcgtcaccacactggatgtggtccggtccaacaccttcatcgcagaggccaaggctttggatgtgagcaagacaaacgtgccggtgatcggaggtcacagcggggtcaccattatccccctcatctcccagtgcactccccctgtctcctttcctgagaatgagcgcgagaagctgtcggtgcgaatccagaatgcaggcactgaagtggtggaggcgaaggccggggcgggctcagcaacgttgtccatggcctatgccgctgcccagttctgcaagagtctgatcgatgccctcaacggcaagaatgaagtggtgcagtgtgcctttgtcaggtcggatgtcacggacgccacctacttttccacccctctcttgctcgggaaaaacggggtggagaagaacctgggcatgggcaagctgttggactacgaggtgaacctgctgaaggccgccttgcctgagctgattgccaacatcaagaagggagaggagtttgtggctaagagctag

SEQ ID NO: 51423 - protein, 341 aa, Nucella lapillus
MFSRIARPSQTLCLFRHHFSTSSKVGKDVKVAVLGAAGGIGQPLSLLLKEIPLISHLNLYDIAHTPGVAADLSHIETRAKVAGFLGPEELDKCLEGANIVLIPAGVPRKPGMTRDDLFNTNAGIVRDLTERVAHVCPTAMLGIITNPVNSTVPIASEVLKKHGVYDPKRVFGVTTLDVVRSNTFIAEAKALDVSKTNVPVIGGHSGVTIIPLISQCTPPVSFPENEREKLSVRIQNAGTEVVEAKAGAGSATLSMAYAAAQFCKSLIDALNGKNEVVQCAFVRSDVTDATYFSTPLLLGKNGVEKNLGMGKLLDYEVNLLKAALPELIANIKKGEEFVAKS

SEQ ID NO: 51424 - DNA, 1476 bp, Nicotiana tabacum
  CDS (13)..(1251)
gcggccgccggaatggcagcaacatcagcaactactttctcagttggctcagccacatctcttggctgcaaaggaagctcagtatctcaatcaaaagcctttagtgtgaaattctactccaaaaacagccttaaaagtttcagcggtttgaaggctgccacagatgtaagctgtgaatcagaatcgtcctttttaggaaaagaaagtgttgctgtccttaaacaatcttttactccaaaggctcaaaaagaaaacaagggatatgggaactgtgttcagcctcaagcatcttacaaagtggctgttcttggagccagcggcggtataggccagccactgtctcttctggtcaagatgtcaccattagtttcagagctgaacctttatgatatagctaatgttaaaggagttgcggctgatctaagtcactgcaacactccctccaaggtttcagatttcactggagcttctgaattggccaactgtttgaaaggtgtaaatgtggtggtcatacctgctggtgttccgagaaagccaggtatgacacgtgatgatctgttcaacattaatgcaaacattgtgaagacattggtcgaggctgttgctgataattgccctgatgcgtttatccacatcattagcaatccagtcaactccacagtgccaattgcagcagaggtgttgaagcgaaagggtgtttatgatcctaaaaaactttttggtgttaccaccctagatgtagtcagggcaaacacatttgtcgcgcagaagaaaagtttgaggcttattgacgtagatgtcccagttgtgggtggccatgctggtatcaccattttgcctttgctatcaaagacaaaaccatccactactttcactgacgaagaagtacaggagctaactgtgaggattcaaaatgctggcacagaagttgtggaggcaaaggctggtgcagggtctgctacactttccatggcgtacgcagcagcaagatttgttgagtcctcactccgcgcacttgatggagatagtgatgtgtatgagtgtgcttttgtccagtctgacctaacagagcttccattctttgcttcaagggttaaactaggaaagaacggggttgaggctttgattccatctgaccttcaaggtttgactgagtatgaacagaaagctctggatgctttaaagccagaactgaaatctagcatcgagaagggtataggtttcgttcagaaggaacctgtagctgcttagaatatattacagtctgaagaaatgatgacaggaataaagtaatttagcggaattcatgtatgagcaattccagttttgcaggtgagctgaaaagtgcttctgtgaccgagaaaaaaaacagcagtattgtaaaattgtttcctcctctgcggtatgtaactctaattgacgttgttgaggcactcttgtcgtgttctttctttcttgttaaaccaaggcggccgc

SEQ ID NO: 51425 - protein, 412 aa, Nicotiana tabacum
MAATSATTFSVGSATSLGCKGSSVSQSKAFSVKFYSKNSLKSFSGLKAATDVSCESESSFLGKESVAVLKQSFTPKAQKENKGYGNCVQPQASYKVAVLGASGGIGQPLSLLVKMSPLVSELNLYDIANVKGVAADLSHCNTPSKVSDFTGASELANCLKGVNVVVIPAGVPRKPGMTRDDLFNINANIVKTLVEAVADNCPDAFIHIISNPVNSTVPIAAEVLKRKGVYDPKKLFGVTTLDVVRANTFVAQKKSLRLIDVDVPVVGGHAGITILPLLSKTKPSTTFTDEEVQELTVRIQNAGTEVVEAKAGAGSATLSMAYAAARFVESSLRALDGDSDVYECAFVQSDLTELPFFASRVKLGKNGVEALIPSDLQGLTEYEQKALDALKPELKSSIEKGIGFVQKEPVAA

SEQ ID NO: 51426 - DNA, 1298 bp, Hordeum vulgare
  CDS (54)..(1124)
ccgcatttgatcggaccagcgtcccattccacccccttcccaccccgtcgaggatgcacaaggcgtcgtcgctgtcggagctcggcttcgacgccgggggcgcctcgtcgggcttcttccggccggtggccgacggctgcccggccaccccgacctcctccgccgtcccgcaccgccgcctcaccaagatctccgtcatcggggccggcaacgtgggcatggccatcgcgcagaccatcctcacccagaacctggccgacgagatcgcgctcgtcgacgcgctccccgacaagctccgcggcgaggcgctcgacctgcagcacgccgccgccttcctcccgcgcgtccgcatctccggcaccgacgccgccgtcaccaagaactccgacctcgtcatcgtcacggccggggccaggcagatcccgggcgagaccaggctcaacctgctgcagaggaacgtcgccctctaccgcaagatcgtgccgcccgtcgccgagcactccccggacgcgctgctgctcgtcgtctccaaccccgtcgacgtcctcacctacgtcgcctggaagctctccggcttcccggccagccgcgtcatcggctccggcaccaacctcgactcctcccgcttcaggttcctcatcgccgagcacctcgacgtcaacgcgcaggacgtgcaggcatacatggtgggtgagcacggtgacagctcggtggcgatctggtcgagcatcagcgtgggcgggatgccggcgttcaagtcgctgcgcgacagccaccggagcttcgacgaggcggcgctggagggcatccggcgcgccgtggtgggcggcgcctacgaggtgatcggcctcaaggggtacacctcttgggccattggctactctgtcgctagcctcgccgcttccctcctccgcgaccagcgccgcgtgcaccctgtctctgtccttgcctcgggcttccatggcatctcagacggccacgaggtgttcctcagcctgcctgcccgcctaggccgtggcggcatcctcggtgttgccgagatggacctcaccgaggctgaggccgcccagctccggcgctccgccaagacgctctgggagaactgccagcttctcgacctctgagcgaggaacgccagttgatctacttgctgtaaaatcatgaagcatttgcaagaactctagtactatatgttgttctgttcctgctcccacacgaatttgggagtgttttcttagggatgatgtagtaatgtaacgcctcttaatttcatgaaataaaatgcgatttgtgccgac

SEQ ID NO: 51427 - protein, 356 aa, Hordeum vulgare
MHKASSLSELGFDAGGASSGFFRPVADGCPATPTSSAVPHRRLTKISVIGAGNVGMAIAQTILTQNLADEIALVDALPDKLRGEALDLQHAAAFLPRVRISGTDAAVTKNSDLVIVTAGARQIPGETRLNLLQRNVALYRKIVPPVAEHSPDALLLVVSNPVDVLTYVAWKLSGFPASRVIGSGTNLDSSRFRFLIAEHLDVNAQDVQAYMVGEHGDSSVAIWSSISVGGMPAFKSLRDSHRSFDEAALEGIRRAVVGGAYEVIGLKGYTSWAIGYSVASLAASLLRDQRRVHPVSVLASGFHGISDGHEVFLSLPARLGRGGILGVAEMDLTEAEAAQLRRSAKTLWENCQLLDL

SEQ ID NO: 51428 - DNA, 1274 bp, Lactobacillus reuteri
  CDS (161)..(1132): transl_table=11
gcacaccgttggttctgttaaggctctttcacttggtgaagttcaaggtgccatggccggtgtttctgttctgattatttcattagcaatggatatcttggttccaatctacgcccacttattcatgtaatttaatttatcattaaggagaaactgaattatgtcaaaaaatcatcaaaaagttgttcttgttggtgacggacaagttggttcagcttatgcttatgcattagttcaacaagggttggctgaggaattagcaattgttaacttgtcaaaggaacaagctgaaggtgacgccctcgatttagaagacgcaactgttttcactgccccaaagcaagtttatcaagctgatcaccatgcttgcgcagatgcagacctagttgtaatttgtgctggggctgctcaaaagccaggtgaaactcgccttgacttagttggaaagaaccttgaaatcatgaagcaaattactaagagtattatggctactggtttcgatggaattctcttacttgcaacaaacccagttgatgttttaacctatgcagttcaaaagatttcaggattacctgctagccgggttatttcatccggtacttcgcttgattcagcacgtttacgtattgcgttagcaaagaagttgggagttagtccacttgatattagtgctaatgtgatggcagaacacggtgattcagaatttgctgcatattctagtgcaacagttggtgggaagccacttcttcaaatctgtgaagaacaaggcatcagtaatgatgaattgctaaagattgaagatgacgtacgtcacaaggcttacgaaatcatcaaccgcaaaggctttactgcatatggtgttgcaacttgcttaatgagaattacgcgggcaattctacgggatgaaaatgctgtattaccagttggtgcttacattgatggtgaatacggtattaaggataactatcttggaaccccagctgttattaatgcatctggtatttcgaaggttatcgaagttccattaaatgaacgtgaaagtgaagcaatgactaagtcagctgaagctttgaagaaaattgctactgacgggatgactaaggttggtttagttaattacctgattaagtagtaataaaaaagatgtgatgaaaaattcatcacatctttttctttttaaagaattgctttaagctcggttaaacggtggatttcaaaggttggctttaagcgggttgaattatgcaatgaatgggggttgaaccagactgtat

SEQ ID NO: 51429 - protein, 323 aa, Lactobacillus reuteri
MSKNHQKVVLVGDGQVGSAYAYALVQQGLAEELAIVNLSKEQAEGDALDLEDATVFTAPKQVYQADHHACADADLVVICAGAAQKPGETRLDLVGKNLEIMKQITKSIMATGFDGILLLATNPVDVLTYAVQKISGLPASRVISSGTSLDSARLRIALAKKLGVSPLDISANVMAEHGDSEFAAYSSATVGGKPLLQICEEQGISNDELLKIEDDVRHKAYEIINRKGFTAYGVATCLMRITRAILRDENAVLPVGAYIDGEYGIKDNYLGTPAVINASGISKVIEVPLNERESEAMTKSAEALKKIATDGMTKVGLVNYLIK

SEQ ID NO: 51430 - DNA, 978 bp, Lactobacillus sakei
  CDS (1)..(978): transl_table=11
atggcaaacattgaaaaagatcaccaaaaagttatcctcgtcggcgacggcgctgttggttcctactacgcttatgctttaacattacaaggtattgcacaagaagttggtatcgtagatatctttaaagaaaaaacacaaggtgatgcaatcgatttatctgatgcattagctttcacttctcctaagaaaatctatgctgctgaatactcagatgcaaaagatgctgacgttgttgttatcactgctggtgcaccacaaaagccaggtgaaacacgtttagacttagtaagcaaaaaccttaaaatcttgaagacaatcgttgatcctattgttgaatcaggctttaacggtatcttcttagttgctgctaacccagttgatatcttaacttacgctacatggaaattatcaggtttccctaaggaacgcgttatcggttcaggtacatcacttgactcagctcgtttccgtaaagatatcgctgaaatggttaacgttgacgcacgttcggtccatgcttacatcatgggtgaacatggtgatacagaattccctgtatggtcacatgctaacatcggtggcatcaagatttctgaatgggttaaagctcatccagaagttaaagaagaagaactcgttaagatcttcgaaagtgttcgcgacgctgcttacacaatcattaacttaaaaggtgctacattctacggtatcggtactgcattagctcgtattactaaggctatcttagatgacgaaaatgctgtcttaccattatcagtattcatggatggccaatacggcttgaacgatatctttatcggttcacctgctgttatcaaccgttcaggtattactaacatccttgaaattccattgacagaccacgaaatggaaagcatgcacaaatctgcaaaacaattaaaagatatcgttacaaaagcttttgaagaattagatatcgaaactcgccaataa

SEQ ID NO: 51431 - protein, 325 aa, Lactobacillus sakei
MANIEKDHQKVILVGDGAVGSYYAYALTLQGIAQEVGIVDIFKEKTQGDAIDLSDALAFTSPKKIYAAEYSDAKDADVVVITAGAPQKPGETRLDLVSKNLKILKTIVDPIVESGFNGIFLVAANPVDILTYATWKLSGFPKERVIGSGTSLDSARFRKDIAEMVNVDARSVHAYIMGEHGDTEFPVWSHANIGGIKISEWVKAHPEVKEEELVKIFESVRDAAYTIINLKGATFYGIGTALARITKAILDDENAVLPLSVFMDGQYGLNDIFIGSPAVINRSGITNILEIPLTDHEMESMHKSAKQLKDIVTKAFEELDIETRQ

SEQ ID NO: 51432 - DNA, 1065 bp, Zea mays
  CDS (1)..(1065)
atgaagaaggccacttcgctctccgagctgggcttcgacgccggcgacgcgtcgtcgggcttcttccgccctgtgtccggcgactcgtcgacgccgacgtcgcagcaccaccggcggaggctgaccaaggtgtcggtcatcggcgcgggcaacgtggggatggccatcgcgcagaccatcctcacgcgcgacctggccgacgagatcgcgctggtggacgcggtcccggacaagctccgcggggagatgctggacctgcagcacgcggcggcgttcctgccgcgcacgcgcctcgtgtccggcaccgacatgtccgtgaccaggggctcggacctggtcatcgtgacggccggggcgcggcagatccagggcgagacgaggctcgacctgctccagcggaacgtggcgctgttccgcaagatcgtgccgccgctggcggagcagtcccacgacgcgctgctgctcgtcgtgtccaaccccgtggacgtgctcacctacgtcgcctggaagctttcgggcttcccggccagccgcgtcatcggatccggcaccaacctcgactcgtccaggttcaggttccttctcgccgagcacctcgacgtcaacgcccaggacgtacaggcgtacatggtcggcgagcacggcgacagctcggtggcggtgtggtcgagcgtgagcgtggcggggatgccggtgctcaagtcgctgcaggagagccaccgctgcttcgacgaggaggcgctggagggcatccgccgcgccgtcgtcgacagcgcctacgaggtcatcagcctcaagggctacacctcctgggccatcggctactccgtcgccagcctcgccgcgtcgctgctccgggaccagcgccgcatccacccggtctccgtcctcgccagggggttccacggcatccccgacggaacgacgtcttcctcagcctgcccgccacgtcggccgcgccggcgtccagggcgtcgcgagatggagctcaccgaggaggaggccaaacgactgcgccgctccgccaagaccatctgggagaactgccagctcctcggcctctga

SEQ ID NO: 51433 - protein, 354 aa, Zea mays
MKKATSLSELGFDAGDASSGFFRPVSGDSSTPTSQHHRRRLTKVSVIGAGNVGMAIAQTILTRDLADEIALVDAVPDKLRGEMLDLQHAAAFLPRTRLVSGTDMSVTRGSDLVIVTAGARQIQGETRLDLLQRNVALFRKIVPPLAEQSHDALLLVVSNPVDVLTYVAWKLSGFPASRVIGSGTNLDSSRFRFLLAEHLDVNAQDVQAYMVGEHGDSSVAVWSSVSVAGMPVLKSLQESHRCFDEEALEGIRRAVVDSAYEVISLKGYTSWAIGYSVASLAASLLRDQRRIHPVSVLARGFHGIPDGTTSSSACPPRRPRRRPGRREMELTEEEAKRLRRSAKTIWENCQLLGL

SEQ ID NO: 51434 - DNA, 993 bp, Schizosaccharomyces pombe
  CDS (1)..(993)
atgaccgctggttctaaagtgtttagcaacgattctgttcgttcatcaagtttcaagtcaattaaaattgtgattgttggtgctggaaatgtgggttcaactactgcttttacactactactaagtggattagctgctgaaatcgtaatcattgacttgaacaaaaagaaagcagaaggtgaagctatggacttgaatcatgcagctccactttcccatgagactcgcgtatatttgggtgactataaagattgtaaggacgcaacggcagttgtaattacagctggaaagaatcaaaagccaggtgaaacaagaatggatctacttaaagcaaatatttccatctttaaggaaatccttagagaagtcactaaatatacaaaagatgccatcctcttagttgcaaccaaccctgtggatgtacttacttacgctacattaaaactcacaggattcccagctgaacgagtcataggatccggaacaattattgatactgcacgattccaatatcttatcggaaagttatatggccttgatcctcaaagtgtaaatgccgatatcattggagagcatggggattccgaattggctgtatggtcccacgccagtattgcaggactttcacttgcagatttctgtgaagaatctgagacgaagtatgatgaacaagcattgaatgaatgctttaaagaaacaaaaaatgccgcttatgatattattcaaagaaaaggatccacggaatatggcgttgctgcaggtctcgttcgtattctagctgcaattatacgggatgaaaatgcactattgacagtatctggattagattcttactcaaacattggtgatgtttgctttagtatgccaagaaagctaaacaaagatggtgctcatcgcataattaatgcaaagctttccaaagacgaggatgccaagcttgtagaatccgtgaaaagcatcaagcatgctattgaatcgattggtttaaattga

SEQ ID NO: 51435 - protein, 330 aa, Schizosaccharomyces pombe
MTAGSKVFSNDSVRSSSFKSIKIVIVGAGNVGSTTAFTLLLSGLAAEIVIIDLNKKKAEGEAMDLNHAAPLSHETRVYLGDYKDCKDATAVVITAGKNQKPGETRMDLLKANISIFKEILREVTKYTKDAILLVATNPVDVLTYATLKLTGFPAERVIGSGTIIDTARFQYLIGKLYGLDPQSVNADIIGEHGDSELAVWSHASIAGLSLADFCEESETKYDEQALNECFKETKNAAYDIIQRKGSTEYGVAAGLVRILAAIIRDENALLTVSGLDSYSNIGDVCFSMPRKLNKDGAHRIINAKLSKDEDAKLVESVKSIKHAIESIGLN

SEQ ID NO: 51436 - DNA, 1130 bp, Thermotoga maritima
  CDS (116)..(1075): transl_table=11
taaaaagaaggatgatataattaaaaagaaggctaaactaattgaaagtgacagaaagattttcttcaacacgatatcaccctgactgtattctatcaccggggaggtgattctgatgaaaataggtatcgtaggactcggaagggttggttccagcacggcttttgcactcctgatgaaaggttttgcgagggaaatggttctgatagacgtcgataagaaaagagcagaaggagacgctctcgatctcattcacggaacacctttcacgagaagagcgaacatctacgctggagactatgcggatctgaaaggatcagatgtggtgatcgtcgctgcgggagtacctcagaaaccaggagagacgaggcttcagcttcttgggagaaatgcaagagtgatgaaagaaatagcgcgaaacgtctccaaatacgctcctgattcgattgtcatcgtggtcacgaatcccgtcgatgtcctcacgtatttcttcctcaaagagtccggaatggatcccaggaaggtgttcggttccggaacggttctcgacacagcaaggctcagaactttgatagcgcaacactgcggcttttctccaagaagtgtgcacgtgtacgtgataggagaacatggagattcagaggttcctgtgtggagcggtgccatgataggaggtatccccctacagaacatgtgtcagatttgtcagaagtgcgattcgaagatactggaaaacttcgctgaaaaaaccaaaagagccgcgtacgagatcatagagagaaagggagccacccattacgccatagctctcgccgtggccgacatagtggagagcatcttcttcgacgaaaagagagtgcttacgctttccgtttatctcgaagattacctcggtgtaaaagatctctgtatcagtgttcctgttacccttggaaagcacggagtggaaagaatcctcgaactgaacctgaacgaagaagaactggaagccttcagaaagtcagcttccatattgaaaaacgccatcaacgaaataacggccgaagagaacaagcaccagaacaccagcggttaataggacgtagagtgtgtccatcggtttccactttatgtctttgaaccgtgttttt

SEQ ID NO: 51437 - protein, 319 aa, Thermotoga maritima
MKIGIVGLGRVGSSTAFALLMKGFAREMVLIDVDKKRAEGDALDLIHGTPFTRRANIYAGDYADLKGSDVVIVAAGVPQKPGETRLQLLGRNARVMKEIARNVSKYAPDSIVIVVTNPVDVLTYFFLKESGMDPRKVFGSGTVLDTARLRTLIAQHCGFSPRSVHVYVIGEHGDSEVPVWSGAMIGGIPLQNMCQICQKCDSKILENFAEKTKRAAYEIIERKGATHYAIALAVADIVESIFFDEKRVLTLSVYLEDYLGVKDLCISVPVTLGKHGVERILELNLNEEELEAFRKSASILKNAINEITAEENKHQNTSG

SEQ ID NO: 51438 - DNA, 1008 bp, Aquifex aeolicus
  CDS (1)..(1008): transl_table=11
atgagaatgaaaaaaaccgttgctgtaatcggtgcggggaacgtgggggagcacgtcgcctccctcatccttttaaaaaacctcgcaaacgttaaaatgttcgaccttcccagaaaaacggaagagaaagtttttgagccagttaaagggaaggccctcgacatgaagcagatgctcgcagctatggacatagatgcgagggtagagggctatactgtgacacctgagggcgaaggctacgaacccttagaaggttccgacatagtggtaattaccgcgggttttcccagaagaccgggaatgagcagagaggaccttcttgaggcaaacataaggataatctcggttatagcggacaggattaagaggtacgcaccagacgcaatagtaattgttgttacgaatcccgtggacgtcatgacctacgtagcctacaagctccttaactttcctaagaaccgcgtaatggggatggcgggagtgcttgattccgcgaggttcaaaacttttatttccgaagaactcatggtttctccgaaagacatccacgcttacgtgataggcgggcacggtgatgagatggttcctcttatttcaatttctaacgtgggaggaatacctttaaaggatttacttccaaaggaaaagcttgaaaagattatagaaagaacacgctttggtggcggtgagatagtaaacctcatgggaacttccgcttattacgctcctgcggcggcaattgtggacatgatagaggctctcgtccagaacagcaagaggatactcccctgcagtgtttaccttgacggagaagcaggtgagtactacggagttcagggcttttgcgtgggagttcccgtgaaacttggttctaacggggttgaagaaataataaaagtgcctatgatagaagaagaaagggaaatgtggagacgttccgtcgagtctgttaagaaaaccgttgaagttgcggagggtatactaagtgcgggaagttcacgtcaatga

SEQ ID NO: 51439 - protein, 335 aa, Aquifex aeolicus
MRMKKTVAVIGAGNVGEHVASLILLKNLANVKMFDLPRKTEEKVFEPVKGKALDMKQMLAAMDIDARVEGYTVTPEGEGYEPLEGSDIVVITAGFPRRPGMSREDLLEANIRIISVIADRIKRYAPDAIVIVVTNPVDVMTYVAYKLLNFPKNRVMGMAGVLDSARFKTFISEELMVSPKDIHAYVIGGHGDEMVPLISISNVGGIPLKDLLPKEKLEKIIERTRFGGGEIVNLMGTSAYYAPAAAIVDMIEALVQNSKRILPCSVYLDGEAGEYYGVQGFCVGVPVKLGSNGVEEIIKVPMIEEEREMWRRSVESVKKTVEVAEGILSAGSSRQ

SEQ ID NO: 51440 - DNA, 1299 bp, Oryza sativa
  CDS (46)..(1116)
aaaccaactcttcgtcgtcgcgccgcttccgttcttccggcggccatggaggacgcagcagcagcagcaaggcggatggagaggcttgcctcccacctccgcccgcccgcttctcagatggaggaatcacccctcctgaggggctccaattgccgggcaaaaggtgccgctccgggtttcaaggtcgccatcttgggagcgtctggtgggattggccagcctcttgcattgctcatgaagatgaaccctcttgtttctgtgctccatctgtacgatgttgtcaacactcccggtgtcacagctgacattagccacatgaacactggtgctgtggtgcgtggtttcttgggccagccacagttggaaaatgcccttactggaatggatcttgtgatcattcctgctggtgttcctcgtaagcctgggatgacaagggatgatttgttcaacatcaatgccggaatcgtccggactctttgtgaaggaatcgcaaaatgctgccccaatgcaattgtgaatgtgatcagcaaccctgtcaattctactgttccgattgctgctgaggtttttaagaaagctgggacatatgaccctaagcgccttttgggggtgacgacacttgatgtagtgagagccaatacttttgtggcagaagttcttgggcttgaccccagagatgtaaatgtccctgtcattggtgggcatgcaggagtaacaatattaccactcctttcacaggtgaatcctccctgctcattcacctcagaagaaattagttatcttaccactcgcatacagaatggtgggacagaagtagtcgaggctaaagctggagcggggtctgcaaccctttcaatggcgtatgcagcttctaaatttgcagatgcttgcttgagaggattgcgtggcgacgctgggatagtggagtgctcttttgtagcttctcaggtgacagagctgcctttctttgcatccaaagtgcggttaggtcgctgtggcatcgaggagatcttatcacttggtccattgaatgaattcgaaagagctggactggagaaggctaagaaggagctggccgagagtatccaaaagggggtcgctttcatcaacaagtgaggccatcttggaatgccccaatttagttcaacatggaaatacacaggctgtgtctttgcttcctggggagtgggaagaacacttgtatcatcttgtctcaaatgtaaaagctgcctacacgatgtttatacagctgtagcagatgcaaaaacacaagtctgctaataaaagttgcttctgaat

SEQ ID NO: 51441 - protein, 356 aa, Oryza sativa
MEDAAAAARRMERLASHLRPPASQMEESPLLRGSNCRAKGAAPGFKVAILGASGGIGQPLALLMKMNPLVSVLHLYDVVNTPGVTADISHMNTGAVVRGFLGQPQLENALTGMDLVIIPAGVPRKPGMTRDDLFNINAGIVRTLCEGIAKCCPNAIVNVISNPVNSTVPIAAEVFKKAGTYDPKRLLGVTTLDVVRANTFVAEVLGLDPRDVNVPVIGGHAGVTILPLLSQVNPPCSFTSEEISYLTTRIQNGGTEVVEAKAGAGSATLSMAYAASKFADACLRGLRGDAGIVECSFVASQVTELPFFASKVRLGRCGIEEILSLGPLNEFERAGLEKAKKELAESIQKGVAFINK

SEQ ID NO: 51442 - DNA, 1414 bp, Citrullus lanatus
  CDS (88)..(1131)
ggaagaacccctcatttccgcaaaaccctttcttcttattctctccgttgctttctcggctacgtcgctattcttctgcgtggaacaatgaaggcctcaattctcagatccgttcgttccgccgtttccagatcctcatcgtcgaatcgcctcttgagccgtagctttgcgaccgaatcggtgccggaaaggaaagtggccgttctcggtgccgccggtgggattggacagccattggcgcttctcatgaagcttaacccacttgtctctaagcttgccctctacgatattgccggtacccctggtgttgctgctgatgtcggccatgttaacactagatccgaggttactggctacgtgggtgaggagcaactcggcaaagctttggagggatccgatgttgtcatcattcctgctggcgttccaagaaagccgggcatgactcgtgatgatctcttcaacattaatgctggcattgttaaatcactttgcaccgccattgctaagtactgccccaatgcactcattaacatgatcagtaaccccgtcaactcaactgtcccaattgctgctgaggttttcaagaaagctggtacttacgatgagaagaaattgtttggtgttactactctagatgttgtcagagctaagaccttctacgctgggaaagcaaatgttccagtagccgaggttaatgtgcctgttattggtggccatgctggcattaccattcttccactattttctcaggctacccccagagctaatttgtcagatgatactattgtggctctcaccaagcgaacacaagatggaggaacagaagttgtggaagcaaaggcaggaaagggttctgctacattatcaatggcctatgctggagccctttttgccgatgcttgtcttaagggactaaatggagttccagatgttgtggaatgttcatttgtgcaatcaactgtcaccgaacttccattctttgcttcaaaggtgaagcttggaaagaatggggtagagtctgttttggatttgggtcctctctcagacttcgagaaagaaggtttggaaaagctcaagcccgagctcaaagcttctattgagaagggaatccagtttgcaaatgcaaattagaatgtttgtattatttacaatcgggacaggtacctctgctgcccgcattttaccataaaactcaatccattttttgcttttcccaacccaattgtaactgatgatgctgcttacgagcaaccggctttactgtttttgttagagtagattattttctctcgtataaagtttatcaataattcccatggcacgttttctgagggatttgtggttggttagctttgtatctgtgatactttttagaatcttcaatattgataatcgtccgaccatttgaactgga

SEQ ID NO: 51443 - protein, 347 aa, Citrullus lanatus
MKASILRSVRSAVSRSSSSNRLLSRSFATESVPERKVAVLGAAGGIGQPLALLMKLNPLVSKLALYDIAGTPGVAADVGHVNTRSEVTGYVGEEQLGKALEGSDVVIIPAGVPRKPGMTRDDLFNINAGIVKSLCTAIAKYCPNALINMISNPVNSTVPIAAEVFKKAGTYDEKKLFGVTTLDVVRAKTFYAGKANVPVAEVNVPVIGGHAGITILPLFSQATPRANLSDDTIVALTKRTQDGGTEVVEAKAGKGSATLSMAYAGALFADACLKGLNGVPDVVECSFVQSTVTELPFFASKVKLGKNGVESVLDLGPLSDFEKEGLEKLKPELKASIEKGIQFANAN

SEQ ID NO: 51444 - DNA, 1608 bp, Spinacia oleracea
  CDS (79)..(1386)
agaaattagaggcgatttttgttatccaagacgtacaagtcctatgagtcttccctgctttcttaaatattgtctggcatggctgtggcagagctttctccttgttatcaaactcaaattgttaaacctccccatctttcgtggttgtcgaataaccataaattgaatcttctagggcttcctaaagcatcaaggattaccgagatttgttgctctcttgctcccaatcaagttcaaactccggttgctgttcctactggtgcccagagcatcaagcctgaatgctatggagttttctgctggacttacgatttgaaaaaggaggaggagaccagatcatggaagaaaatgatcacaattgccatttcaggtgcagctgggacaatatcaaaccatttgctattcaaacttgcttctggtgtggtattcggaccagatcaaccaattgctttgaaattactaggatctgaaaagtcatttcatgctctagaaggagtagcaatggaacttgaggactcattatatccattgctaagggaagttagcattggcattgatccttatgaggtattcgaagatgctgaatgggcccttctaattggagccaagcctcgtgggcctggtatggaacgagctgacttgttggacattaatggaaagatttatgctgagcaaggaaaagccctcaatgctgtagcatcacctaatgtcaaagttattgtggttggaaatccctgcaacaccaatgcactaatctgcttgaaaaatcctccaaatatacccgcaaagaattttcattccttgactagattagatgaaaaccgagctaaatgtcagcttgcactaaaagctggtgtgttctatgacaaggtatctaatgtgaccatttggggaaaccactcaaccactcaggttccagattttgtaaatgcccaaattggtggggttcctgtcaaagaagttataaaggcccagaagtggttagaagaggagtttactgagaaagttcggaagagaggtggagtgctaattcagaaatggggtagatcttctgctgcgtcaactgctgtatcaattgttgacgctataaacccccttataaccccaactccacccggtgactggtttccttctggggtttataccaatggaaatccttatggtatagctgaggatcttatttatagtatgccttgcagatcaaagggagatggtgattatgagcttgtcaaggatgtgatatttgatgattatcttcgtaagagaataaaaacgtctgaagaggaattattggctgaaaagcgatgcacagcacaccttactggagagggtattgctgtttgtgatcttccagcaggagacacgatgcttcctggagaaatgtagatttagtataaactgagatccaactgcccattctgggaatttctttcatgtaatcatctcatatttaaagccaaagcattcacacgctataattgggaataatgtgatttagaatttaggcttgctcgtttcttgtcatcttgtttgttgtgctcttttatgatgagcaaataataagttaaggccctcgatttatgagaaaaaaaaaaaaaaaaaaaaaaa

SEQ ID NO: 51445 - protein, 435 aa, Spinacia oleracea
MAVAELSPCYQTQIVKPPHLSWLSNNHKLNLLGLPKASRITEICCSLAPNQVQTPVAVPTGAQSIKPECYGVFCWTYDLKKEEETRSWKKMITIAISGAAGTISNHLLFKLASGVVFGPDQPIALKLLGSEKSFHALEGVAMELEDSLYPLLREVSIGIDPYEVFEDAEWALLIGAKPRGPGMERADLLDINGKIYAEQGKALNAVASPNVKVIVVGNPCNTNALICLKNPPNIPAKNFHSLTRLDENRAKCQLALKAGVFYDKVSNVTIWGNHSTTQVPDFVNAQIGGVPVKEVIKAQKWLEEEFTEKVRKRGGVLIQKWGRSSAASTAVSIVDAINPLITPTPPGDWFPSGVYTNGNPYGIAEDLIYSMPCRSKGDGDYELVKDVIFDDYLRKRIKTSEEELLAEKRCTAHLTGEGIAVCDLPAGDTMLPGEM

SEQ ID NO: 51446 - DNA, 963 bp, Agrobacterium tumefaciens
  CDS (1)..(963): transl_table=11
atggctcgcaaaaaaattgcacttattggttctggcatgatcggcggcacgctggcgcatctcgccagcctgaaggaactgggcgatatcgtcctcttcgacatcgccgacggcatcccgcagggcaagggtctggatattgcccagtccggcccggttgaaggcttcaatgcaaagctctccggcgcttccgattacgccgccatcgaaggcgcagacgtctgcatcgtcaccgcaggtgtcgcccgcaagcccggcatgagccgcgatgatcttcttggcatcaacctcaaggtcatggaacaggtcggcgccggcatcaagaaatatgctccgaacgctttcgtgatctgcatcaccaacccgctcgacgccatggtctgggcgctgcagaagttctccggcctgccgaagaacaaggtcgtcggcatggctggcgttctcgacagcgcacgcttccgcctgttccttgccgaagaattcaacgtttcggtccaggacgtcaccgccttcgttctcggcggtcatggcgacaccatggtgccgctcgcccgttattccaccgttggcggcgttccgcttaccgatctcgtcaagatgggctggttgaccgccgaacgtcttgagcagatcatccagcgcacccgtgacggcggcgcggaaatcgtcggcctcttgaagaccggctcggcctattacgcgccggccgcttcggctatcgaaatggccgaatcctacctcaaggacaagaagcgcgttctgcccgctgctgcccacctttcgggccagtatggcgtagacgacatgtatgtcggcgtgcccaccatcatcggtgccggcggtatcgagcgcgtcatcgagatcgaactgaacaaggaagaagaagccgccttccagaaatccgtcggcgctgtcgctggtctttgcgaagcctgcatcaacatcgctccgtcgctgaagtaa

SEQ ID NO: 51447 - protein, 320 aa, Agrobacterium tumefaciens
MARKKIALIGSGMIGGTLAHLASLKELGDIVLFDIADGIPQGKGLDIAQSGPVEGFNAKLSGASDYAAIEGADVCIVTAGVARKPGMSRDDLLGINLKVMEQVGAGIKKYAPNAFVICITNPLDAMVWALQKFSGLPKNKVVGMAGVLDSARFRLFLAEEFNVSVQDVTAFVLGGHGDTMVPLARYSTVGGVPLTDLVKMGWLTAERLEQIIQRTRDGGAEIVGLLKTGSAYYAPAASAIEMAESYLKDKKRVLPAAAHLSGQYGVDDMYVGVPTIIGAGGIERVIEIELNKEEEAAFQKSVGAVAGLCEACINIAPSLK

SEQ ID NO: 51448 - DNA, 954 bp, Anaplasma marginale
  CDS (1)..(954): transl_table=11
atgcgtagttcccggtctgcaaaagtgtcgctcgttggtgctggtaacattggaggggcgctggcgcatatgcttggtgcatcacaggtggtgaaggagttggtacttgttgatgttgcgggagggatgacggaaggtaaggttctcgatgtagggcaggcattggccttattaggttctgatgtttatatcacaggtggctcagattacgctgcgatagagcactctgacgccgtggtagtgactgctgggattcccaggaaagaggggatgagccgtgaggatttgctgaacacaaatgctgcagttgtgcggaatattgccgagaatattgccaagtattctcccggagcccttgtgattgttgtcaccaatccgctagatgctatggtgtggtgcatgtacaaatactccggtctgccggcgaatagggtagtaggcatggctggggtcttggattccgcccgcttttcctttttcttagctcggcatatgaacgtttcggtgagcagcgtctcggcgatggttctaggcgggcacggggatcttatgttgccgctgcttaggtattccactgtgggcggagtgccggttgagagcttaatagaaagcggtcgtttgaatcgggacgatattgctgcaatcgtggagagaacccgcaagggtggagaggagattgtcaaactgctgaaaactggttccgcgtactgtgcacccgcggcttcgtgtgcacacatgcttgagtcttacgttcgagataagcgctcgatcatgccgtgttctgcgtatctagatggccaatatggggtgcgcgatctgtttgttggtgtaccggtgattataggtgagaaaggagtggaagaggtcgtcgagtttcccttgaccgcggaggagcaggccgtattcgaccagtccgtggagctcatacgtggttctgttagcgcgatatcttga

SEQ ID NO: 51449 - protein, 317 aa, Anaplasma marginale
MRSSRSAKVSLVGAGNIGGALAHMLGASQVVKELVLVDVAGGMTEGKVLDVGQALALLGSDVYITGGSDYAAIEHSDAVVVTAGIPRKEGMSREDLLNTNAAVVRNIAENIAKYSPGALVIVVTNPLDAMVWCMYKYSGLPANRVVGMAGVLDSARFSFFLARHMNVSVSSVSAMVLGGHGDLMLPLLRYSTVGGVPVESLIESGRLNRDDIAAIVERTRKGGEEIVKLLKTGSAYCAPAASCAHMLESYVRDKRSIMPCSAYLDGQYGVRDLFVGVPVIIGEKGVEEVVEFPLTAEEQAVFDQSVELIRGSVSAIS

SEQ ID NO: 51450 - DNA, 966 bp, Anaplasma phagocytophilum
  CDS (1)..(966): transl_table=11
atgcggtctcatcgttcagtaaaagtttcattagtaggtgctgggaatataggtggtactctagcctatatgctgggtgttgcgggtatctgtcaggagctggtattcgtagatgtgatggacggtgtgccacgggggaagttattggatattgggcatgcgctagcaatatcgggtgtggatataacagcagttggtggttcagactatgcagctattgagggatctgatgcgattgtggttactgcaggccttcctagaaaggaagggatgagtcgtgaagatttgctcatggctaatgcagcagtgataaaaggtgtggccgaaaatattaggaaatattctcccgatgcttttgttatagttgtgactaatcctcttgatgctatggtgtggtatatgcatcaatgttcaggattgcctgtgaacaaagtagttggcatggcgggcgttctggattcagcgaggttttcttttttccttgctaagcacatgagtgtttcggttagtagcgtgtcatctgttgtcttaggtgggcacggtgaccttatgttgcctttgttgaagtattctactgttggaggtgtttctgtttcagaccttataagctgtggtcgtctgagttctgaggatgtgcatgcaattatagaaaggactcgcaagggaggagaggagattgttaaattgctaaagagtggttcagcgtattatgctccggctgcttcttgtatgaatatgctagaatcatacttattcgataagcgctgtgtgatcccttgttcagtagggctggatggtaaatatggggtgaatggcggtctgtttgtgggggttccagcggttatagggaagaatggcgtagaagaggtgatagaatacgttctttcacaagaagagcgggaaattttcgaaaaatcagtgggattaatcagtaattcagtgaagattatttctgagcaaaagtag

SEQ ID NO: 51451 - protein, 321 aa, Anaplasma phagocytophilum
MRSHRSVKVSLVGAGNIGGTLAYMLGVAGICQELVFVDVMDGVPRGKLLDIGHALAISGVDITAVGGSDYAAIEGSDAIVVTAGLPRKEGMSREDLLMANAAVIKGVAENIRKYSPDAFVIVVTNPLDAMVWYMHQCSGLPVNKVVGMAGVLDSARFSFFLAKHMSVSVSSVSSVVLGGHGDLMLPLLKYSTVGGVSVSDLISCGRLSSEDVHAIIERTRKGGEEIVKLLKSGSAYYAPAASCMNMLESYLFDKRCVIPCSVGLDGKYGVNGGLFVGVPAVIGKNGVEEVIEYVLSQEEREIFEKSVGLISNSVKIISEQK

SEQ ID NO: 51452 - DNA, 975 bp, Anabaena variabilis
  CDS (1)..(975): transl_table=11
atgtcttcttctccagactcccccccaattttgcatcgtctacctcgtgtcgccattattggtgctggtagggttggtagcactttagctcaacgtattgctgaaaaaaatctagcagatgtggtgctattagatattgttgagggtatgcctcaaggattggcactagatttattagaagctaggggtattgaactgcataatcgtcagattatcggcacaaataattatgctgatacctctggttcacaaattgtcgttataacagccggatttccccgcaagccagggatgagtcgggatgacttgttgagaactaacgccaaaattgttgtggaagcagcaaagcaagcgatcgcctactctccctgtgctatttttatcgtagtcactaatcctctggatgtaatgacctatttagcttgggaagctacaggtttaccccgtaaccgcatcatgggtatggctggggtgttagactcggcaagatttgaaacttttatagccttggaattaggagtattacctgcggatgtcaaagcgatggtattgggtagtcatggggatttgatggttcccctgtctcgtcatgccacagttaatggtatcccgattacagaattgttagatgcagccacaatagaaaggttggtggagagaacccgtaatggtggtgcggaaattgtggaacttatgcagactggtggcgcattttttgcacctgcatcagctacaagtttgatggtggaatcgattttattgaatcagtcgcgcctgttacctgtgtctgtatatctgcaaggcgaatatggtttaaaagatgtagtgattggtgttccttgtcgcctgggattaaatggaattgagagtgtaatcgaattaaatctcagtgatagtgaaagagaagctttacaaacttcggctcaatcggtgcagaaaaatattgagcgatggcattctacccagcatagctga

SEQ ID NO: 51453 - protein, 324 aa, Anabaena variabilis
MSSSPDSPPILHRLPRVAIIGAGRVGSTLAQRIAEKNLADVVLLDIVEGMPQGLALDLLEARGIELHNRQIIGTNNYADTSGSQIVVITAGFPRKPGMSRDDLLRTNAKIVVEAAKQAIAYSPCAIFIVVTNPLDVMTYLAWEATGLPRNRIMGMAGVLDSARFETFIALELGVLPADVKAMVLGSHGDLMVPLSRHATVNGIPITELLDAATIERLVERTRNGGAEIVELMQTGGAFFAPASATSLMVESILLNQSRLLPVSVYLQGEYGLKDVVIGVPCRLGLNGIESVIELNLSDSEREALQTSAQSVQKNIERWHSTQHS

SEQ ID NO: 51454 - DNA, 1260 bp, Archaeoglobus fulgidus
  CDS (266)..(1150): transl_table=11
cgggttgaggctgtccattgaggggagcttcattgccggcaaacttgccaagaaaaacgtaatcgagcttgatgaggagagcttcggcagatggatgaggggagaggatattgaggcggatgttaaaggttagtcgatagtgaaacacgggagctacttcgccggatgcgggaaggggaacgggagagtgctcaggaactcgtgccgaaggacagaagggtaatcgattaaggaaaccttataaatttagcatcaaattttcttcatgaaactcggttttgttggtgcgggaagggttggaagcacttcagcattcacgtgtttgctaaaccttgacgttgacgagatagcacttgtggatatagccgaagacctcgcagttggggaggcaatggatttggctcacgcagcggcgggaatagacaagtacccgaaaatagttggtggggcggactactcactgcttaagggtagtgaaatcatcgtcgtcactgcaggcctcgcaagaaagccggggatgacccgcttagacttggcgcacaaaaatgcgggaataatcaaggacattgctaaaaagatcgtcgaaaacgctcctgagagcaagattctggtcgtgacaaacccgatggacgttatgacttacataatgtggaaggagagcggaaagccgagaaatgaggttttcggcatgggcaaccagctcgattcgcagagattgaaggagaggctttacaatgccggggcgagaaacatcaggagggcatggataattggagagcacggagacagcatgttcgttgccaaaagccttgccgacttcgacggagaggtggactgggaagctgtggagaatgacgtcagatttgtagctgctgaagtaataaagaggaagggagctacaattttcggtcccgccgtagcaatttaccgcatggttaaagccgttgttgaggataccggcgaaatcatcccgacaagcatgattctgcagggcgaatacggaattgagaacgtggctgtgggagttcccgcaaagctcggaaagaatggggcggaggttgcggacatcaagcttagtgacgaggaaattgagaagctaagaaactccgccaagattttaagggagaggcttgaggaactcggatattagacacaaaccttttattttttaatgcaaaagactttcatggttacgtattcagacccgatggcatcgctaagcgggctgttctggatactgctcttcctttatctgatctt

SEQ ID NO: 51455 - protein, 294 aa, Archaeoglobus fulgidus
MKLGFVGAGRVGSTSAFTCLLNLDVDEIALVDIAEDLAVGEAMDLAHAAAGIDKYPKIVGGADYSLLKGSEIIVVTAGLARKPGMTRLDLAHKNAGIIKDIAKKIVENAPESKILVVTNPMDVMTYIMWKESGKPRNEVFGMGNQLDSQRLKERLYNAGARNIRRAWIIGEHGDSMFVAKSLADFDGEVDWEAVENDVRFVAAEVIKRKGATIFGPAVAIYRMVKAVVEDTGEIIPTSMILQGEYGIENVAVGVPAKLGKNGAEVADIKLSDEEIEKLRNSAKILRERLEELGY

SEQ ID NO: 51456 - DNA, 939 bp, Bacillus anthracis
  CDS (1)..(939): transl_table=11
atgacaatcaaacgcaagaaagtttcagtcatcggtgcaggatttacaggagcaacaacagcattcttattagcacaaaaagaacttgcagatgttgtattagtggacattccgcagctggaaaatccaacaaaagggaaagcgttagatatgttagaagcgagcccagtacaaggttttgatgctaacattattggaacatctgattacgcagatactgctgattctgacgttgttgtgattacagcaggtattgcgcgtaagcctggtatgagccgtgatgatttagtagcaacaaactccaaaattatgaaaagtattacgcgcgacattgcaaaacattcaccaaatgcgattattgttgtattaacaaatccagttgatgcaatgacatattctgtatttaaagaagcaggattcccgaaagagcgtgttatcggtcaatcgggcgtattagatacagctcgtttccgtacattcatcgcacaagaattaaatctttctgtgaaagacattacaggatttgttcttggtggacacggtgacgatatggtacctcttgtacgttattcatatgcaggtggcattccgttagaaacgttaattccgaaagagcgtttagaagcaatcgtagaacgtacccgtaaaggtggcggcgagattgtaggcttattaggaaacggtagtgcatattacgcaccagctgcttctttagttgaaatgacagaagcaatcttaaaagatcaacgccgtgtattaccggctattgcgtaccttgaaggtgaatacggttatagtgacctttacttaggggtaccagtaattctaggtggtaacggaattgaaaaaattattgaattagaacttcttgcagatgaaaaagaagcgttagatcgctctgtagaatctgtacgtaatgttatgaaggttcttgtttaa

SEQ ID NO: 51457 - protein, 312 aa, Bacillus anthracis
MTIKRKKVSVIGAGFTGATTAFLLAQKELADVVLVDIPQLENPTKGKALDMLEASPVQGFDANIIGTSDYADTADSDVVVITAGIARKPGMSRDDLVATNSKIMKSITRDIAKHSPNAIIVVLTNPVDAMTYSVFKEAGFPKERVIGQSGVLDTARFRTFIAQELNLSVKDITGFVLGGHGDDMVPLVRYSYAGGIPLETLIPKERLEAIVERTRKGGGEIVGLLGNGSAYYAPAASLVEMTEAILKDQRRVLPAIAYLEGEYGYSDLYLGVPVILGGNGIEKIIELELLADEKEALDRSVESVRNVMKVLV

SEQ ID NO: 51458 - DNA, 939 bp, Bacillus cereus
  CDS (1)..(939): transl_table=11
atgacaatcaaacgcaagaaggtttcagtcatcggtgcaggatttacaggagcaacaacggcattcttattagcacaaaaagaacttgcagatgttgtattagtggacattccacaactggaaaatccaacaaaagggaaagcgttagatatgttagaagcgagcccagtacaaggttttgatgctaacattattggaacatctgattacgcagatactgctgattctgacgttgtcgttattacagcaggtattgcacgtaagcctggtatgagccgtgatgacttagtagcaacaaactctaaaattatgaaaagtattacgcgcgacattgcaaaacattcaccaaatgcaattattgttgtgttaacaaatccagttgatgcaatgacatattctgtatttaaagaagcaggattcccgaaagagcgtgtaatcggccaatcgggtgtattagatacagctcgtttccgtacattcatcgcacaagaattaaatctttctgtaaaagacattacaggatttgttcttggcggacacggtgacgacatggtacctcttgtgcgttattcttatgcaggcggtattccgttagaaacgttaattccgaaagagcgtttagaagcaatcgtagaacgtacacgtaaaggtggcggtgagattgtaggcttattaggaaacggtagtgcatattacgcaccagcagcttctttagttgaaatgacagaagcaatcttaaaagatcaacgccgtatattaccagctattgcgtaccttgaaggtgagtatggttatagtgacctttacttaggggtaccagtaattctaggtggtaacggaattgaaaaaattattgaattagaacttcttgcagatgaaaaagaagcgttagatcgctctgtagaatctgtacgtaatgtaatgaaagttcttgtttaa

SEQ ID NO: 51459 - protein, 312 aa, Bacillus cereus
MTIKRKKVSVIGAGFTGATTAFLLAQKELADVVLVDIPQLENPTKGKALDMLEASPVQGFDANIIGTSDYADTADSDVVVITAGIARKPGMSRDDLVATNSKIMKSITRDIAKHSPNAIIVVLTNPVDAMTYSVFKEAGFPKERVIGQSGVLDTARFRTFIAQELNLSVKDITGFVLGGHGDDMVPLVRYSYAGGIPLETLIPKERLEAIVERTRKGGGEIVGLLGNGSAYYAPAASLVEMTEAILKDQRRILPAIAYLEGEYGYSDLYLGVPVILGGNGIEKIIELELLADEKEALDRSVESVRNVMKVLV

SEQ ID NO: 51460 - DNA, 939 bp, Bacillus cereus
  CDS (1)..(939): transl_table=11
atgacaatcaaacgcaagaaagtttcagtcatcggtgcaggatttacaggagcaacaacagcattcttattagcacaaaaagaacttgcagatgttgtattagtggacattccacagctggaaaatccaacaaaagggaaagcgttagatatgttagaagcgagcccagtacaaggttttgatgctaacattattggaacatctgattacgcagatactgctgattctgacgttgttgtgattacagcaggtattgcgcgtaagcctggtatgagccgtgatgatttagtagcaacaaactccaaaattatgaaaagtattacgcgcgacattgcaaaacattcaccaaatgcgattattgttgtattaacaaatccagttgatgcaatgacatattctgtatttaaagaagcaggattcccgaaagagcgtgttatcggtcaatcgggcgtattagatacagctcgtttccgtacattcatcgcacaagaattaaatttttctgtgaaagacattacaggatttgttcttggtggacacggtgacgatatggtacctcttgtacgttattcatatgcaggtggcattccgttagaaacgttaattccgaaagagcgtttagaagcaatcgtagaacgtacccgtaaaggtggcggcgagattgtaggcttattaggaaacggtagtgcatattacgcaccagctgcttctttagttgaaatgacagaagcaatcttaaaagatcaacgccgtgtattaccggctattgcgtaccttgaaggtgaatacggttatagtgacctttacttaggggtaccagtaattctaggtggtaacggaattgaaaaaattattgaattagaacttcttgcagatgaaaaagaagcgttagatcgctctgtagaatctgtacgtaatgttatgaaggttcttgtttaa

SEQ ID NO: 51461 - protein, 312 aa, Bacillus cereus
MTIKRKKVSVIGAGFTGATTAFLLAQKELADVVLVDIPQLENPTKGKALDMLEASPVQGFDANIIGTSDYADTADSDVVVITAGIARKPGMSRDDLVATNSKIMKSITRDIAKHSPNAIIVVLTNPVDAMTYSVFKEAGFPKERVIGQSGVLDTARFRTFIAQELNFSVKDITGFVLGGHGDDMVPLVRYSYAGGIPLETLIPKERLEAIVERTRKGGGEIVGLLGNGSAYYAPAASLVEMTEAILKDQRRVLPAIAYLEGEYGYSDLYLGVPVILGGNGIEKIIELELLADEKEALDRSVESVRNVMKVLV

SEQ ID NO: 51462 - DNA, 942 bp, Bacteroides fragilis
  CDS (1)..(942): transl_table=11
atgtcaaaagtaaccgtagtaggcgcaggtaacgtaggtgctacatgtgcaaatgtactggccttcaatgaagtggcagacgaagtagtaatgctggacgtaaaagaaggcgtttcagaaggtaaagcaatggatatgatgcagactgctcagttgttgggtttcgacacaacaatcgttggttgcacaaatgattatgctcaaactgctaactctgacgtggttgtgatcacttctggtattcctcgtaaaccgggcatgactcgtgaagaactgatcggtgtaaatgctggtatcgtaaaatcagtagcagaaaatcttttgaaatactctccgaacgcaatcatcgtagttatctctaacccgatggatacaatgacttacttggcattgaaatcactcggattgccgaaaaaccgtgtaatcggtatgggcggtgctttggatagctcacgtttcaaatatttcttgtctcaggctttaggttgcaacgcaaacgaagtagaaggtatggtgatcggtggtcacggtgatactactatgattccgttggctcgtctggctacttacaaaggacagccggttagcacattgctgagcgaagaaaaactgaacgaagtagttgcttctactatggtaggtggtgctactctgactaagttgctgggtacttctgcatggtatgcaccgggtgcagcaggagcttatgtagtagaatctatcatccacaaccagaaaaagatggttccttgctcagtaatgcttgaaggcgaatatggcgaatctgatctttgcatcggtgttcctgtaattctgggtaaaaacggtatcgaaaaaatcgttgaactggaactgaatgctgatgaaaaagctaaatttgctgccagtgccgctgctgttcacaaaacaaatgctgctttgaaagaagttggcgctctctaa

SEQ ID NO: 51463 - protein, 313 aa, Bacteroides fragilis
MSKVTVVGAGNVGATCANVLAFNEVADEVVMLDVKEGVSEGKAMDMMQTAQLLGFDTTIVGCTNDYAQTANSDVVVITSGIPRKPGMTREELIGVNAGIVKSVAENLLKYSPNAIIVVISNPMDTMTYLALKSLGLPKNRVIGMGGALDSSRFKYFLSQALGCNANEVEGMVIGGHGDTTMIPLARLATYKGQPVSTLLSEEKLNEVVASTMVGGATLTKLLGTSAWYAPGAAGAYVVESIIHNQKKMVPCSVMLEGEYGESDLCIGVPVILGKNGIEKIVELELNADEKAKFAASAAAVHKTNAALKEVGAL

SEQ ID NO: 51464 - DNA, 945 bp, Bacillus halodurans
  CDS (1)..(945): transl_table=11
atggcaattaaacgcagaaaggtctccgttattggggcgggtttcacaggtgctacgacagcgctaatggttgctcaaaaggaattaggtgatgtcgttcttgtggatattccgcaaatggaaggtccgactaaaggaaaagcgttagatatgctcgagtcaacgccggttcaaggggttgatgtgaacatcacaggtacgtctagctatgaatatacgaaggattctgatgtggttgtcattacggctggaattgctcgtaagcctggtatgagccgcgatgatctcgtatcaacaaatgcgggaattatgaaggctgttacgaaagaagtggtgaaacattcaccaaacgcctacattattgttttaacgaacccagcagatgcgatgacctataccgtttataaagaatctggtttcccgaaaaaccgcgtcatcggtcaatcgggcgttctagatacggcacgcttccgtacgttcgtcgcccaagagcttaacctatctgttgaagatattacaggttttgttcttggggggcacggggatgacatggtgccattgattcgttactcctatgcaggtgggattccgcttgaaaagctccttccacaagagcgcatcgatgcgattgtggaacgtacgcgcaaaggcggcggtgaaattgtcggcttgcttggaaatggcagtgcttattatgcaccagccgcttcacttgcagagatggtcgaagccattctgaaagataagaaacgcgtccttccaacgattgcttaccttgaaggtgagtatggatatgaagatatctatgttggagttccgacgattcttggcggagacggcattgaaaaggttattgagcttgatctaaccgatgaagagaaagcgacctttgctaagtccattgaatctgttcgcaacgtcatgtcggcactaccaaaagaataa

SEQ ID NO: 51465 - protein, 314 aa, Bacillus halodurans
MAIKRRKVSVIGAGFTGATTALMVAQKELGDVVLVDIPQMEGPTKGKALDMLESTPVQGVDVNITGTSSYEYTKDSDVVVITAGIARKPGMSRDDLVSTNAGIMKAVTKEVVKHSPNAYIIVLTNPADAMTYTVYKESGFPKNRVIGQSGVLDTARFRTFVAQELNLSVEDITGFVLGGHGDDMVPLIRYSYAGGIPLEKLLPQERIDAIVERTRKGGGEIVGLLGNGSAYYAPAASLAEMVEAILKDKKRVLPTIAYLEGEYGYEDIYVGVPTILGGDGIEKVIELDLTDEEKATFAKSIESVRNVMSALPKE

SEQ ID NO: 51466 - DNA, 1413 bp, Bacillus israeli
  CDS (291)..(1229): transl_table=11
cacccagcttacattatgcttccggctcgtatgttgtgtgaattgtgagcgataacaatttacacacgaaacagctatgaccatgattacgccaagcttgcatgcctgcaggtcgactctagaggatctatcgatgcatgccatggtacccgggagctcgaattcggcaatgaattgattaaaaacatgggttaaacaaagaactgagagctgcttctttacgaagtagctctccatttagattcatttttgaaaaatcacttacataaaagagaggatggatgcttgaaatggcgattaaaagaaagaaaatttctgtcattggtgctggatttactggtgcgacaacagcttttttgctggcaaaaaaagagctgggagatgttgtgctcgttgacattccgcaagcagagaatccgacaaaagggaaagcgttggacatgcttgaatcaagccctgttcttggatttgatgcgaacattatcggaacatcaaactatgaggaaacggctgattccgatattgttgtgatcacggcaggaattgcaagaaaacctggaatgagtcgagacgatttagtgcagaccaaccaaaaagtaatgaaaagcgtcacaaaagaagttgtaaaatattccccaaattccattatcattgtgctgacaaatccggttgatgcaatgacttacactgtttataaagaatccggatttccaaaacaccgcgtcatcggtcaatctggagttttagataccgcaagattccgcacatttgttgctcaagaattgaatttatcagtcaaagacattacaggatttgtgttaggcggccacggagatgatatggtgccattagttcgctattcatacgcagggggcattccgttagaaaaattaatcccgaaagagcgcttggaagcgattgttgaaagaactagaaaaggcgggggagaaattgttaacctgcttggaaacggaagcgcatactacgcaccagccgcatctcttgtagagatggtggaagcgattgttaaagatcagcgccgcgtattgcctgccattgcatatttagaaggagaatacggttttgaaggtatttatttaggcgttccaacaattcttggaggcaatggcttagagcaaattattgagcttgaactgacggatgaagaaaaagcagctttggaaaaatctgcggaatctgtaagaaatgttatgaaagcattaatatagtgcatggtagaaaaaggaggacatgttatgttcctcctttttgttataaaagaaaaaagagagtttgccatagaattcgtccgctttcaattccgcttcaaccgctccatcatgttctatcgatcttaaatctctgaagacgcttctgatgtcttctgctcggacatatatatagatatagacg

SEQ ID NO: 51467 - protein, 312 aa, Bacillus israeli
MAIKRKKISVIGAGFTGATTAFLLAKKELGDVVLVDIPQAENPTKGKALDMLESSPVLGFDANIIGTSNYEETADSDIVVITAGIARKPGMSRDDLVQTNQKVMKSVTKEVVKYSPNSIIIVLTNPVDAMTYTVYKESGFPKHRVIGQSGVLDTARFRTFVAQELNLSVKDITGFVLGGHGDDMVPLVRYSYAGGIPLEKLIPKERLEAIVERTRKGGGEIVNLLGNGSAYYAPAASLVEMVEAIVKDQRRVLPAIAYLEGEYGFEGIYLGVPTILGGNGLEQIIELELTDEEKAALEKSAESVRNVMKALI

SEQ ID NO: 51468 - DNA, 939 bp, Bacillus licheniformis
  CDS (1)..(939): transl_table=11
atgggaaagaagcgaaataaagtatctgtcatcggagcgggttttacaggtgcaacaactgcgtttttaacggctcaaaaagaattggctgatgtcgtgctagtcgacattccgcagcttgaaaaccctacaaaagggaaagcgctcgatatgctggaagcgagccctgtccaaggatttgacgcgaatattacaggaacggcaaactatgaagatacggctggttcagatatcgtcgtcatcacggcggggatcgcaagaaagccgggaatgagccgggacgacctcgtggctacaaatgaaaagatcatgaggagcgtaacgaaggaagttgttaaatactcacctgattgtatcatcatcgttctgacaaaccctgtagatgcgatgacatacgccgtctataaagaatcgggcttcccgaaagagcgggtcatcggccagtcgggaattttggatacggcaagattcagaacgtttgtcgctcaggagctcaacctttccgtcaaagacattacaggttttgtactgggcggacacggggacgatatggttccgctcgttcgctactcttatgcaggcggcattccgcttgaaacgcttcttccgaaagaccggatcgatgcgattgttgaaagaacgagaaaaggcgggggagaaattgtcaacctgttaggaaacggaagcgcgtactatgcgcctgccgcttccctgacagaaatggttgaagcaatcttaaaagaccagcgccgcgtgctgccgaccattgcctaccttgaaggcgaatacggctatgaaggcatttatctcggcgttccgacgattatcggcggaaacggtcttgaacagatcattgaacttgaactgactgaaaccgaaaaaagtcagctcgataaatccgttgaatcagtcaaaaacgtcatgaaagtattatcataa

SEQ ID NO: 51469 - protein, 312 aa, Bacillus licheniformis
MGKKRNKVSVIGAGFTGATTAFLTAQKELADVVLVDIPQLENPTKGKALDMLEASPVQGFDANITGTANYEDTAGSDIVVITAGIARKPGMSRDDLVATNEKIMRSVTKEVVKYSPDCIIIVLTNPVDAMTYAVYKESGFPKERVIGQSGILDTARFRTFVAQELNLSVKDITGFVLGGHGDDMVPLVRYSYAGGIPLETLLPKDRIDAIVERTRKGGGEIVNLLGNGSAYYAPAASLTEMVEAILKDQRRVLPTIAYLEGEYGYEGIYLGVPTIIGGNGLEQIIELELTETEKSQLDKSVESVKNVMKVLS

SEQ ID NO: 51470 - DNA, 945 bp, Bacillus clausii
  CDS (1)..(945): transl_table=11
atggcaattaaacgaagaaaaatttctgtaatcggcagtggctttacaggagctaccactgcgcttatggttgcccaaaaagagctaggggatgttgttttattggacattccaaacatggaaggtcctacgaaaggaaaggcccttgatatgcttgaatcgacacctgtccaaggcgtcgattcaacgatcacgggtacctctagctacgaagatacgaaagattcggatgtcgttgtcattacggctggcattgcccgcaaaccgggaatgagccgtgatgatcttgtagccacaaatgcaaaaatcatgaagtctgtcacaaaagaagttgttaagtattcgcctaacagctacattatcgttttgaccaaccctgctgacgcgatgacgtatacggtttataaagaatcaggctttccgaaaaaccgtgtcatcggccagtctggcgttcttgacacagcacgtttccgcacgtttgtcgcccaagaactaaatgtatccgtagaggatgtcactggttttgtcttaggcggccatggagatgatatggttccgcttatccgttattcagcagcaggcggtgtgccgttaacaaaactgatcgctccagaacggattgaagaaattgttgaacgcacgcgcaaaggcggcggcgaaatcgttggcttattaggcaatggcagcgcctattacgcaccagctgcttcgcttacacaaatggtcgaagcgatcttgaaagacaaaaaacgcattatcccaacaattgcctacctcgaaggcgagtatgggcagcatgacctgtacttaggcgtaccgaccattcttggtggtgacggcattgagaaagtcattgagcttgacttgacagaggaagaaaaggcacaattggacaaatcagtacaatccgtgcgcaatgtaatggcagcattgccagcggagtaa

SEQ ID NO: 51471 - protein, 314 aa, Bacillus clausii
MAIKRRKISVIGSGFTGATTALMVAQKELGDVVLLDIPNMEGPTKGKALDMLESTPVQGVDSTITGTSSYEDTKDSDVVVITAGIARKPGMSRDDLVATNAKIMKSVTKEVVKYSPNSYIIVLTNPADAMTYTVYKESGFPKNRVIGQSGVLDTARFRTFVAQELNVSVEDVTGFVLGGHGDDMVPLIRYSAAGGVPLTKLIAPERIEEIVERTRKGGGEIVGLLGNGSAYYAPAASLTQMVEAILKDKKRIIPTIAYLEGEYGQHDLYLGVPTILGGDGIEKVIELDLTEEEKAQLDKSVQSVRNVMAALPAE

SEQ ID NO: 51472 - DNA, 939 bp, Bacillus subtilis
  CDS (1)..(939): transl_table=11
atgggaaatactcgtaaaaaagtttctgttatcggagcaggttttaccggagctacaactgcatttttaatcgctcaaaaagagctggcagacgttgttcttgttgacattccgcaattggagaacccgacaaagggaaaagcgcttgatatgcttgaagcaagcccggttcaaggctttgacgcaaaaattacgggaacatccaattacgaggatacagccggctctgacattgttgtcattacagccggtatcgcaagaaaacctggtatgagcagagatgatctggtctctacaaacgaaaagattatgagaagcgttacgcaggaaatcgtgaaatattctcctgactctattattgtggtgctgacaaatcctgttgatgcaatgacatacgcggtgtacaaagaatcaggcttccctaaagagcgtgtaatcggccagtcaggtgtgcttgatacggcaagattcagaacatttgtggcagaggaattaaacctgtcagtgaaagatgtgactggtttcgtactcggcggacacggtgacgatatggttccgcttgtgcgttattcttatgctggcggtatcccgcttgaaactcttattccgaaagaacggattgacgcaattgtggagcgcactagaaaaggcggaggcgaaatcgtgaatcttcttggaaacggaagcgcgtattatgcgcctgcggcttctctgacagaaatggtcgaagcgatcttgaaagatcagcgccgcgtccttcctacaattgcttatcttgaaggggaatacggctatgaaggcatctaccttggtgttcctacaattgtaggcggcaacggtcttgagcaaatcattgaacttgaactgacagactatgaaagagcgcagctgaataaatcagttgaatctgtcaaaaatgtcatgaaagtattatcctaa

SEQ ID NO: 51473 - protein, 312 aa, Bacillus subtilis
MGNTRKKVSVIGAGFTGATTAFLIAQKELADVVLVDIPQLENPTKGKALDMLEASPVQGFDAKITGTSNYEDTAGSDIVVITAGIARKPGMSRDDLVSTNEKIMRSVTQEIVKYSPDSIIVVLTNPVDAMTYAVYKESGFPKERVIGQSGVLDTARFRTFVAEELNLSVKDVTGFVLGGHGDDMVPLVRYSYAGGIPLETLIPKERIDAIVERTRKGGGEIVNLLGNGSAYYAPAASLTEMVEAILKDQRRVLPTIAYLEGEYGYEGIYLGVPTIVGGNGLEQIIELELTDYERAQLNKSVESVKNVMKVLS

SEQ ID NO: 51474 - DNA, 942 bp, Bacteroides thetaiotaomicron
  CDS (1)..(942): transl_table=11
atgtcaaaagtaaccgtagtaggcgcaggtaacgtaggtgctacatgtgcaaatgtacttgctttcaatgaagtagcagacgaagtagtaatgctggacgttaaagaaggcgtttcagaaggtaaagcaatggatatgatgcagacagctcaactgttgggtttcgacacaactgtagtaggctgcactaacgactatgctcagactgctaactctgacgttgttgtaattacttcaggtattcctcgtaaaccgggtatgactcgcgaagaactgatcggtgtaaacgctggtatcgttaaatcagtggcagaaaacatcttgaaatattctcccaatgcaatccttgttgttatctctaacccgatggatacaatgacttacctgtcattgaaagctctgggcttgccgaagaaccgcatcatcggtatgggtggcgcactggacagctctcgtttcaaatatttcttgtctcaggctttgggctgcaacgccaacgaagtagaaggtatggttatcggtggtcacggtgatactactatgattcctttgactcgcttcgctacttacaaaggtatgcctgtaactaacttcatctctgaagaaaaactgaacgaagtggctgctgctactatggtaggtggtgctactctgactaagttactgggcacttctgcatggtatgcaccgggtgcagcaggagcattcgtagttgaatctatccttcacgaccaaaagaagatgatcccttgttcagtatatctggaaggagaatacggtgaatcagacatttgcatcggtgttcctgtaatccttggcaagaacggtatcgaaaagatcgtcgaactggatctgaacgctgacgaaaaagctaagttcgctgccagcgcaaaagctgttcacggaacaaacgctgctttgaaagaagtaggtgctctgtaa

SEQ ID NO: 51475 - protein, 313 aa, Bacteroides thetaiotaomicron
MSKVTVVGAGNVGATCANVLAFNEVADEVVMLDVKEGVSEGKAMDMMQTAQLLGFDTTVVGCTNDYAQTANSDVVVITSGIPRKPGMTREELIGVNAGIVKSVAENILKYSPNAILVVISNPMDTMTYLSLKALGLPKNRIIGMGGALDSSRFKYFLSQALGCNANEVEGMVIGGHGDTTMIPLTRFATYKGMPVTNFISEEKLNEVAAATMVGGATLTKLLGTSAWYAPGAAGAFVVESILHDQKKMIPCSVYLEGEYGESDICIGVPVILGKNGIEKIVELDLNADEKAKFAASAKAVHGTNAALKEVGAL

SEQ ID NO: 51476 - DNA, 963 bp, Bartonella henselae
  CDS (1)..(963): transl_table=11
atggcacgaaagaaaatagctcttattggttcgggtatgattgggggtactttagcacatataattggacttaaagaacttggtgatgtcgtcttatttgatattgcagaaggtataccacaaggtaaagctcttgatatcgccgaatcttcaccagttgacggttttgatgtcagtttaaccggtgctaattcctatgatgtgattgaaggtgccgatgttgttattgtaacagcaggtgttgcaagaaaacccggtatgagccgtgatgaccttttgggcattaatttaaaggtaatggaacaagttggtgcggggattaaaaaatatgcatcttcagcattcgttatttgtattacaaatcctcttgatgcaatggtctgggctttgcaaaaattttcaggtcttccaacacaaaaagtggttggtatggctggtattctcgattcagcacgttttcgtcatttcttatcagaggaatttaagatctctgttaaagatgtgactgcattcgttttaggaggacacggtgattcaatggtgcctttggtgcgttattcaacagttggtggtatttctctacccgatcttgtgaaaatgggctggacgacgcaagaaaagattgatcaaattattcaacgtacccgtgatggtggtgcagaaattgttagtttgttaaaaacaggttctgctttttatgcaccagcagcttctgctgtctctatggctgaagcctatttgaaagacaccaagcgtgttgttcctgtcgcagcttatctttcagggcaatatggggtcaaagatacctatgttggtgttccggttgtcattggtgctgggggcgttgagcgcgtgattgaaatcgatcttgataaagaggagaaagctgcttttgaaaaatcagtgagtgcagtgcaaaaactttgtgaagcttgtattgctgttgcaccaggactcaaataa

SEQ ID NO: 51477 - protein, 320 aa, Bartonella henselae
MARKKIALIGSGMIGGTLAHIIGLKELGDVVLFDIAEGIPQGKALDIAESSPVDGFDVSLTGANSYDVIEGADVVIVTAGVARKPGMSRDDLLGINLKVMEQVGAGIKKYASSAFVICITNPLDAMVWALQKFSGLPTQKVVGMAGILDSARFRHFLSEEFKISVKDVTAFVLGGHGDSMVPLVRYSTVGGISLPDLVKMGWTTQEKIDQIIQRTRDGGAEIVSLLKTGSAFYAPAASAVSMAEAYLKDTKRVVPVAAYLSGQYGVKDTYVGVPVVIGAGGVERVIEIDLDKEEKAAFEKSVSAVQKLCEACIAVAPGLK

SEQ ID NO: 51478 - DNA, 963 bp, Bartonella quintana
  CDS (1)..(963): transl_table=11
atggcacgaaagaaaatagctctcattggttcgggtatgattgggggtacgttagcacatatgatagggcttaaagaacttggtgatgttgtcttatttgatattgaagaaggcatgccacaaggtaaggctcttgatattgccgaatcttcaccagttgatggttttgatgtgagtttaacaggtgctaatgtttatgaggcaattgaaggtgctgatgttgtgattgtaacggcaggcgttgcacgaaaacctggtatgagccgtgatgatcttctgggcattaatttgaaagtgatggaacaagttggtgctgggattaaaaaatacgcatcttcagcattcgttatttgtattacgaaccctcttgatgcaatggtatgggcattgcaaaaattttcaggtcttcccaaacaaaaagtagttggtatggctggtgttcttgattcggcacgttttcgttatttcttatctaaggaatttaaggtctctgttaaagacgtgacagcgtttgttttaggaggacacggcgattcaatggtgcctttggtgcgttattcaacagttggtggtatttctttgcccgatcttgtgaaaatgggctggacgacacaagaaaagattgatcaaattatccaacgtgtccgtaatggtggtgcggaaattgtcggtttgttaaaaactggttctgctttttatgcacctgcagcctctgctatttctatggctgaagcttatttgaaggatattaagcgtgttgttcctgttgcaacctatctttcaggtgaatatggggtcaaagacacatatgttggtgttcctgttgttcttggtgcgggcggcgttgagcgggtcattgaaatcgatcttgataaaaaggaaagaagtgcttttgagcaatcagtaaatgcggtaaaaaaactttgtgaagcttgtatcgctattgcaccttgtctcaaataa

SEQ ID NO: 51479 - protein, 320 aa, Bartonella quintana
MARKKIALIGSGMIGGTLAHMIGLKELGDVVLFDIEEGMPQGKALDIAESSPVDGFDVSLTGANVYEAIEGADVVIVTAGVARKPGMSRDDLLGINLKVMEQVGAGIKKYASSAFVICITNPLDAMVWALQKFSGLPKQKVVGMAGVLDSARFRYFLSKEFKVSVKDVTAFVLGGHGDSMVPLVRYSTVGGISLPDLVKMGWTTQEKIDQIIQRVRNGGAEIVGLLKTGSAFYAPAASAISMAEAYLKDIKRVVPVATYLSGEYGVKDTYVGVPVVLGAGGVERVIEIDLDKKERSAFEQSVNAVKKLCEACIAIAPCLK

SEQ ID NO: 51480 - DNA, 969 bp, Bradyrhizobium japonicum
  CDS (1)..(969): transl_table=11
atggcgcgcgacaagattgctttgattggctccggtcagatcggcggaacgctggctcacctcatcggcctgaaagaactgggcgacgtcgtgatgttcgacatcgccgagggcgtgccgcagggcaaggcgctcgacattgcgcagtcctcgccggtcgacggcttcgacgcccactacaccggcgcgaactcctacgaggcgctcgacaacgccaaggtctgcatcgtcaccgccggcgtgccgcgcaagcccggcatgagccgcgacgatctcctctccatcaacctcaaggtcatggagcaggtcggcgccggcatcaagaagtatgcccccgacgccttcgtcatctgcatcaccaacccgctcgacgccatggtgtgggcgctccagaaggcctcgggcctgccgcacaagaaggtcgtcggcatggccggcgtgctggactcggcgcgcttccgctacttcctggccgacgaattcaacgtctccgttgaagacgtcaccgccttcgtgctcggcggccacggcgacaccatggtgccgctggtgaagtactccaccgtcgccggcatcccgctgcccgacctcgtcaagatgggctggacctcgcaggcgcgcctcgacgagatcgtcgaccgcacccgcaacggcggcgctgagatcgtcaacctgctcaagaccggctcggccttctacgccccggccgcttccgcgatcgcgatggccgagagctatctgcgtgacaagaagcgcgtgctgcccagcgccgcctacctcaacggcgaatacggcgtgaaggacatgtatgtcggcgtgcccgtcgtgatcggctccaagggtgtcgagcgcgtcgtcgagatcgagctcgccggcaaggaccgcgaggccttcgacaagtcggtcggcgcggtgcagggcttggtcgacgcctgcaagaagattgcccccgatcttctcggccgctaa

SEQ ID NO: 51481 - protein, 322 aa, Bradyrhizobium japonicum
MARDKIALIGSGQIGGTLAHLIGLKELGDVVMFDIAEGVPQGKALDIAQSSPVDGFDAHYTGANSYEALDNAKVCIVTAGVPRKPGMSRDDLLSINLKVMEQVGAGIKKYAPDAFVICITNPLDAMVWALQKASGLPHKKVVGMAGVLDSARFRYFLADEFNVSVEDVTAFVLGGHGDTMVPLVKYSTVAGIPLPDLVKMGWTSQARLDEIVDRTRNGGAEIVNLLKTGSAFYAPAASAIAMAESYLRDKKRVLPSAAYLNGEYGVKDMYVGVPVVIGSKGVERVVEIELAGKDREAFDKSVGAVQGLVDACKKIAPDLLGR

SEQ ID NO: 51482 - DNA, 963 bp, Brucella suis
  CDS (1)..(963): transl_table=11
atggcacgcaacaagattgccctcatcggctccggcatgatcggcggtacgctcgctcacctggccggtctgaaggaactcggtgacgtcgtccttttcgacattgcggaaggcaccccgcagggcaaggggctggatatcgccgaatcttctccggtcgatggtttcgatgcgaagttcactggcgcgaacgattacgccgccattgaaggcgcagacgtcgtcatcgtcaccgcaggcgtgccgcgcaagccgggcatgagccgcgacgatctcctgggcatcaacctgaaggtgatggaacaggtgggcgcgggcatcaagaaatatgcgccggaagctttcgtcatctgcatcaccaacccgctcgacgccatggtctgggcgctgcagaagttctccggccttccggcccacaaggttgtcggcatggctggcgttctcgacagcgcccgcttccgttatttcctctcggaagaattcaacgtttcggtcgaggacgtcacggcattcgtgctgggtggccacggcgattcgatggttccgctggcgcgctactcgaccgttgccggcattccgctgcctgatctcgtcaagatgggctggaccagccgggacaagctcgacaagatcatccagcgcacccgtgacggcggcgcggaaatcgtgggccttctcaagaccggctcggctttctacgctccggcggcatcggccatccaggtggctgaatcctacctcaaggacaagaagcgcgtcctgccggtcgcagcccagctttcgggccagtatggcgtgaaggacatgtatgtgggcgttccgaccgtgatcggcgccaatggcgtggagcgcatcatcgagatcgatctcgacaaggacgagaaggcgcagttcgacaagtcggtggcctccgtcgccggtctgtgcgaagcctgcatcggtattgctccgtcgctgaaataa

SEQ ID NO: 51483 - protein, 320 aa, Brucella suis
MARNKIALIGSGMIGGTLAHLAGLKELGDVVLFDIAEGTPQGKGLDIAESSPVDGFDAKFTGANDYAAIEGADVVIVTAGVPRKPGMSRDDLLGINLKVMEQVGAGIKKYAPEAFVICITNPLDAMVWALQKFSGLPAHKVVGMAGVLDSARFRYFLSEEFNVSVEDVTAFVLGGHGDSMVPLARYSTVAGIPLPDLVKMGWTSRDKLDKIIQRTRDGGAEIVGLLKTGSAFYAPAASAIQVAESYLKDKKRVLPVAAQLSGQYGVKDMYVGVPTVIGANGVERIIEIDLDKDEKAQFDKSVASVAGLCEACIGIAPSLK

SEQ ID NO: 51484 - DNA, 963 bp, Caulobacter crescentus
  CDS (1)..(963): transl_table=11
atggctcgcgcgaagatcgcccttatcggcgccggcatgatcggcggcaccctggcccacatcgccgctcgcgaagagctgggcgacgtgatcctgttcgacatcgccgaaggcaccccgcaggggaaggccctcgacatcgccgaagcctcggccgtgttcggcaaggacgtggccctgaagggcgccaacgactacgccgacatcgccggcgctgacgtctgcatcgtcaccgccggcgtgccgcgcaagccgggcatgagccgcgacgacctgctgggcatcaacctgaaggtcatgaaggccgtcggcgaaggcatcaaggctcacgcccccaacgccttcgtcatctgcatcaccaacccgctggacgcgatggtctgggccctgcagcagttctcgggcctgccgaaggaaaaggtcatcggcatggccggcgtcctcgactcggcccgcttcgcctacttcctggctgaagccaccggcgtctcggtggaagacatccacgcctggaccctgggcggccacggcgacgacatggtgccgatggtccgtcactcgaccgtcggcggcctgccgctgccggaactggtcaagcaaggctggctgtcgcaggacaagctggacgccatcgtcgagcgcacccgcaagggcggcggcgagatcgtcgccctcctgaagaccggctcggccttctacgccccggccgagagcgcgatcgccatggcgacctcgtacctgaaggacaagaagcgcgtcctgccgtgcgccacctacctgaccggccagtacggcctgaacgacctctatgtcggcgtgccggtggtcatcggcgccggcggcgccgagaagatcgtcgagttcgaaaccaacgacgacgagaaggcgatgttcgccaagtcggtcgagtcggtgaagggcctgatggaagcctgcaaggccatcgacagctcgctggtctaa

SEQ ID NO: 51485 - protein, 320 aa, Caulobacter crescentus
MARAKIALIGAGMIGGTLAHIAAREELGDVILFDIAEGTPQGKALDIAEASAVFGKDVALKGANDYADIAGADVCIVTAGVPRKPGMSRDDLLGINLKVMKAVGEGIKAHAPNAFVICITNPLDAMVWALQQFSGLPKEKVIGMAGVLDSARFAYFLAEATGVSVEDIHAWTLGGHGDDMVPMVRHSTVGGLPLPELVKQGWLSQDKLDAIVERTRKGGGEIVALLKTGSAFYAPAESAIAMATSYLKDKKRVLPCATYLTGQYGLNDLYVGVPVVIGAGGAEKIVEFETNDDEKAMFAKSVESVKGLMEACKAIDSSLV

SEQ ID NO: 51486 - DNA, 930 bp, Chloroflexus aurantiacus
  CDS (1)..(930): transl_table=11
atgcgcaagaagattagtattatcggggcaggatttgtcggttcgacgacagctcactggctggccgctaaagaattaggtgacattgttctgcttgatattgtcgagggtgtgcctcaaggcaaggctctcgatctctacgaggcatcaccaattgaagggtttgatgttcgggtgaccggcacgaacaactacgccgatactgccaactcggatgtcatcgttgttacgtcaggtgctccgcgcaagccgggcatgagccgtgaggatttgatcaaggtcaacgccgacatcacccgtgcctgtatcagtcaggctgccccgctctcgccgaatgccgtgattatcatggtcaataatcctctggatgcgatgacctatctggcggcggaggttagtggcttccccaaagagcgtgtcattggtcaggccggcgtcctcgatgcggcccgctatcgcaccttcattgccatggaggcgggtgtttcggttgaagatgttcaggcgatgctgatgggtggtcacggcgatgagatggtaccgctgccccggttttcaaccattagcggtattccggtgagcgagttcattgcgcctgatcgtctggctcagattgttgagcgcacccggaagggtggtggcgagattgtgaatctgctgaagaccggcagtgcgtattatgctcccgccgccgccacagcgcagatggtcgaagcggtgctcaaagacaagaagcgggtcatgccggtggcagcctacctgaccggtcagtacggcctgaatgatatttactttggtgtaccggtgatcctcggtgccggtggagtagagaaaattctcgaattgccgctcaacgaagaggagatggcactgctgaacgcatcggcgaaagcggtacgtgccaccctcgacacgctgaagtctctctaa

SEQ ID NO: 51487 - protein, 309 aa, Chloroflexus aurantiacus
MRKKISIIGAGFVGSTTAHWLAAKELGDIVLLDIVEGVPQGKALDLYEASPIEGFDVRVTGTNNYADTANSDVIVVTSGAPRKPGMSREDLIKVNADITRACISQAAPLSPNAVIIMVNNPLDAMTYLAAEVSGFPKERVIGQAGVLDAARYRTFIAMEAGVSVEDVQAMLMGGHGDEMVPLPRFSTISGIPVSEFIAPDRLAQIVERTRKGGGEIVNLLKTGSAYYAPAAATAQMVEAVLKDKKRVMPVAAYLTGQYGLNDIYFGVPVILGAGGVEKILELPLNEEEMALLNASAKAVRATLDTLKSL

SEQ ID NO: 51488 - DNA, 933 bp, Chlorobium tepidum
  CDS (1)..(933): transl_table=11
atgaaaatcaccgttattggcgcaggcaacgttggggcaaccacggctttccgtcttgcagaaaaacagcttgcaagagagctcgtgttgctcgatgtcgtcgaaggcatacctcagggaaaagcacttgacatgtacgaaagcggcccggtcggcctgttcgacacgaaggtaaccggctcaaacgactatgccgacactgcaaattccgatatcgtcgtcatcaccgccggtctgccgagaaaaccaggcatgactcgcgaggatctgctttcgatgaatgccggtatcgtcagggaggtgaccggacggatcatggagcactcgaaaaatccgatcatcgtggtggtttccaacccgctcgatatcatgacgcacgtggcctggcagaaaagcggattaccgaaagagcgggtcatcggcatggccggtgtgcttgactcggcgcgcttccgctccttcatcgccatggaacttggcgtttcgatgcaggatgtgaccgcatgcgtgctcggcggccacggcgacgcaatggtgccggtagtcaaatacaccacggtggcaggcattccggttgccgacctcatttccgcagaaaggatcgcggagctggtcgagcgcacccgcaccggcggcgcagagatcgtcaaccacctcaagcagggttcggcattttacgctccggcaacatcggtggtcgaaatggtagagtcgatcgtgctggatcgcaagcgcgtgctgacctgcgctgtaagcctcgacgggcagtacggcatcgacggcaccttcgttggcgtcccggtcaagctcggcaaaaacggcgtcgagcacatctacgaaatcaagctcgaccagagtgacctcgacctgttgcagaaatcggcaaagatcgtcgatgaaaactgcaaaatgctcgatgcatcgcagggctga

SEQ ID NO: 51489 - protein, 310 aa, Chlorobium tepidum
MKITVIGAGNVGATTAFRLAEKQLARELVLLDVVEGIPQGKALDMYESGPVGLFDTKVTGSNDYADTANSDIVVITAGLPRKPGMTREDLLSMNAGIVREVTGRIMEHSKNPIIVVVSNPLDIMTHVAWQKSGLPKERVIGMAGVLDSARFRSFIAMELGVSMQDVTACVLGGHGDAMVPVVKYTTVAGIPVADLISAERIAELVERTRTGGAEIVNHLKQGSAFYAPATSVVEMVESIVLDRKRVLTCAVSLDGQYGIDGTFVGVPVKLGKNGVEHIYEIKLDQSDLDLLQKSAKIVDENCKMLDASQG

SEQ ID NO: 51490 - DNA, 924 bp, Dehalococcoides ethenogenes
  CDS (1)..(924): transl_table=11
atgcccaaaattagtgtcataggtgccggcaatgtgggggcaacacttgcccagcgccttatagaaaaagactttgcagatgtggtcatgctggacgtggtggagggtattccccagggtaaggctctggacatttcccagtctgccaatgtacttggtttcagccataccattaccggcagcaatgattatgccgaaacagccggctctgaaatagtggtgataaccgccggtattgcccgcaaaccgggcatgacccgtgaggaactgctggctataaaccagaagattatgaccgatgtggtttcaaactgccttaaatactcccccgaagccaccttggtggtcgtctccaacccggtggataccatgacctatctggcctggaaactttcaggcctgccccggaaacgggtggtgggtctttcaggcgtgctggacggagggcgtctggctacctttgtagcccgtgagcttggggtaaaaccttcggctgttacgccctgcgtaatgggcgaacacggcggcagcatggtggtcatgccccgttttaccctggtaagcggcaaacccctgtccgaactggtttcggctgaaaaagcagatgaactggccaaacgggcagtcaacggcggtgccgagatagtggctttccttaaaaccggcagcgctttttatgccccgtctgcttccatagctgccatggcggaggctatttttacgggcagcggaaaggttatgaactgtgccgcggtgctggatggcgaatacggcctgaaaaatattgtgctgggcgtgccggtaaagctgggcaaaggcggcctacaggaaattatcaccttgccgctggatgggacggaaaacgcccgccttttagcatctgccgaagtagtgaaagggcagatagccgccctttcgctttaa

SEQ ID NO: 51491 - protein, 307 aa, Dehalococcoides ethenogenes
MPKISVIGAGNVGATLAQRLIEKDFADVVMLDVVEGIPQGKALDISQSANVLGFSHTITGSNDYAETAGSEIVVITAGIARKPGMTREELLAINQKIMTDVVSNCLKYSPEATLVVVSNPVDTMTYLAWKLSGLPRKRVVGLSGVLDGGRLATFVARELGVKPSAVTPCVMGEHGGSMVVMPRFTLVSGKPLSELVSAEKADELAKRAVNGGAEIVAFLKTGSAFYAPSASIAAMAEAIFTGSGKVMNCAAVLDGEYGLKNIVLGVPVKLGKGGLQEIITLPLDGTENARLLASAEVVKGQIAALSL

SEQ ID NO: 51492 - DNA, 942 bp, Ehrlichia canis
  CDS (1)..(942): transl_table=11
atgattaagcgtaaaaaaattgctcttattggtgctggtaatattggtggtatgatagcctatttgattaggctgaaaaatttaggagatgtagttttattagacgttaatgatggcatagctaagggaaaagcacttgatatggctgaatcttctccagtaggaaaatataatggtgaaatattagggactaataattatgctgatattgaaggtgctgatgccattgtcgttacagctggcattactagaaaacctggaatgagtcgtgaagatttgattaatactaatgtaaatatcataaaagaagtagcagacaatataggtaaatatgcacctaatgcatttgtggttgtagttactaatccacttgatgtaatggtttttgctatgcataagtattcgaaattatcaagtaacatggttgttggtatggctggtatacttgattcggcgagattttcttattttattgcaaaggaattgaacgtatcggttgataatgttaattctttggtattaggtggccatggagacctaatgcttcctttagtaaaatattcttcagttgctggaatatctatagctgatttgataaaaattgatttgattactcaagataaagttgatgcaattatagaaagaactagaaaaggtggagaagaaatagtaagtttactaaaaataggttcagcttattatgctcctgctgagtctgcattattaatgatagattcttatttaaatgatagaaggctaatattaccttgttctgtttatttaaaaggtgaatatggcgtaagcaatttatttgtgggtgttcctgttattattggaagaaatggagtggaaaaaataatcgagttggaattaaccgaacaagaaaaaaacatatttgataattctgtaaaattaatcaaaaatttagtaagtaatgtttaa

SEQ ID NO: 51493 - protein, 313 aa, Ehrlichia canis
MIKRKKIALIGAGNIGGMIAYLIRLKNLGDVVLLDVNDGIAKGKALDMAESSPVGKYNGEILGTNNYADIEGADAIVVTAGITRKPGMSREDLINTNVNIIKEVADNIGKYAPNAFVVVVTNPLDVMVFAMHKYSKLSSNMVVGMAGILDSARFSYFIAKELNVSVDNVNSLVLGGHGDLMLPLVKYSSVAGISIADLIKIDLITQDKVDAIIERTRKGGEEIVSLLKIGSAYYAPAESALLMIDSYLNDRRLILPCSVYLKGEYGVSNLFVGVPVIIGRNGVEKIIELELTEQEKNIFDNSVKLIKNLVSNV

SEQ ID NO: 51494 - DNA, 942 bp, Ehrlichia chaffeensis
  CDS (1)..(942): transl_table=11
atgataaaacgtaaaaagattgctcttattggtgcaggtagtataggtggcatgatagcatatttagttaggtcacgaaatttaggagatgtcgttttattagatgtcaatggtggtatagccaaaggtaaagcattagatattgctgaatcttcaccagtagcaaaacataatggagagatattaggtactaacaattatgctgatatcgaaggtgctgatgcaatcattgttactgctggaatatctagaaagcccggaatgagccgtgatgatctgattaatactaatgtgcatgttataaaagaagtagcagaaaatattgctaaatatgctcctaatgcatttgttgtagtagtcactaatccacttgatataatggttttagctatgcataaatattctcatttgccaagtaatatggttgttggtatggctggggtacttgatgcagcaaggttctcttattttattgcaaaagaattgaatgtatcagtagatagtgtgagttctatagtattgggtggccacggagattttatgcttcctttagttaagtactcatcagttggtgggatatctattgctgatctggtgaaaatgaatttaattacacaagatagggttaatgagattatagaaaaaactagaaaaggtggagaagaaatagtaaatttattaaaggtaggttcagcttattatgcacctgctgagtctgctttattgatggttgactcttatttgaatgatagaagattaatgttatcttgctctgtttatttaaagggagagtatggagttcatgatctatttgtaggtgttcctgtaattattggtaaaaatggagtggaaaaagtaatagaacttcaactaactgaggaggaaaagaatgtatttaatgactctgttatgtcaattagaaagttagtaagtaatatttaa

SEQ ID NO: 51495 - protein, 313 aa, Ehrlichia chaffeensis
MIKRKKIALIGAGSIGGMIAYLVRSRNLGDVVLLDVNGGIAKGKALDIAESSPVAKHNGEILGTNNYADIEGADAIIVTAGISRKPGMSRDDLINTNVHVIKEVAENIAKYAPNAFVVVVTNPLDIMVLAMHKYSHLPSNMVVGMAGVLDAARFSYFIAKELNVSVDSVSSIVLGGHGDFMLPLVKYSSVGGISIADLVKMNLITQDRVNEIIEKTRKGGEEIVNLLKVGSAYYAPAESALLMVDSYLNDRRLMLSCSVYLKGEYGVHDLFVGVPVIIGKNGVEKVIELQLTEEEKNVFNDSVMSIRKLVSNI

SEQ ID NO: 51496 - DNA, 960 bp, Francisella novicida
  CDS (1)..(960): transl_table=11
atggctagaaaaaaaatagcacttgttggtgctggtaatattggtggtacactagctcacttagcacttttaaaacaattaggtgatgtagtcctttttgatatagctcagggcatgcctaatggcaaagcacttgatttactacaaacttgtcctatcgagggagttgattttaaagtcaggggtacaaatgattacaaagatttagaaaattctgatgttgttattgtaactgctggtgttccgagaaagcctggcatgtctcgtgatgacttacttggtattaatatcaaagtaatgcaaacagttggagaaggtatcaaacataactgtcctaatgcttttgtaatatgtatcacaaatccactagatattatggtaaatatgttacaaaaattctcaggcgtaccagataacaaaatcgttggtatggctggtgttttagattctgctagatttagaacatttttagcagatgaactaaatgtatcagtacaacaagtacaagcatatgtaatgggtggtcatggcgatactatggtccctttaactaaaatgtcaaatgttgcaggtgtgtcgttagagcagctagttaaagaaggtaaacttaaacaagagcgtttagatgctatagtatcgagaactagaagtggtggtggcgaaattgttgctttacttaaaacaggttcagcatattatgcaccagctgctgcaggtattcaaatggctgaaagcttcttaaaagataaaaagatgattttaccttgtgctgcaaaagtaaaagctggtatgtatggtcttgatgaagatctatttgttggtgtaccaactgagatttctgcaaatggtgtcagacctattgaagtagagatttctgataaagaaagagaacaattacaagtatctataaacgctgtaaaagatcttaataaagcagctgctgaaattttagcaaaataa

SEQ ID NO: 51497 - protein, 319 aa, Francisella novicida
MARKKIALVGAGNIGGTLAHLALLKQLGDVVLFDIAQGMPNGKALDLLQTCPIEGVDFKVRGTNDYKDLENSDVVIVTAGVPRKPGMSRDDLLGINIKVMQTVGEGIKHNCPNAFVICITNPLDIMVNMLQKFSGVPDNKIVGMAGVLDSARFRTFLADELNVSVQQVQAYVMGGHGDTMVPLTKMSNVAGVSLEQLVKEGKLKQERLDAIVSRTRSGGGEIVALLKTGSAYYAPAAAGIQMAESFLKDKKMILPCAAKVKAGMYGLDEDLFVGVPTEISANGVRPIEVEISDKEREQLQVSINAVKDLNKAAAEILAK

SEQ ID NO: 51498 - DNA, 939 bp, Geobacillus kaustophilus
  CDS (1)..(939): transl_table=11
atggcgatgaaacggaaaaaaatctcggtgatcggcgccggattcacgggggcgacgacggcgttccttttggcgcaaaaagagctcggcgacgtcgtgttggtcgatattccgcagcttgagaacccaacgaaagggaaggcgctcgatatgctcgaggcaagcccggtgctcggctttgacgcgaatatcatcggcacatcggattacgctgacacagccgattccgacatcgtcgtcatcacagcaggcatcgcccgcaagccgggcatgagccgcgacgatttggtgacgacgaaccaaaaaattatgaagcaagtgacgaaggaagtcgtcaaatactcgccgaactgctacatcatcgtcttgacgaacccggtcgatgccatgacatacacggtgtttcaagagtccgggtttccgaaaaaccgcgtcatcggccagtcgggcgtcttggatacggcgcgcttccgcacgttcgtcgccgaggagctgaacatttcggtaaaagatgtcactgggtttgttttaggcggccatggcgatgacatggtgccgctcgtccgctactcgtacgccggcggcattccgctcgaaaaactcattccgaaagatcgtttggacgccatcgttgagcggacgcgcaaaggcggcggtgaaatcgtcaacctgctcggcaacggcagcgcctactacgcaccggccgcctcgcttgtcgaaatggtcgaagcgattttgaaagaccagcgccgcattttgccggcgatcgcctaccttgaaggcgaatacggctatgaaggcatttatttgggcgtgccgacgatcctcggcggcaacggcatcgagaaagtgatcgagctcgagctgaccgaagaggaaaaagcggcgctcgccaaatccgtcgaatccgttaaaaatgtcatgcgcatgctggaatag

SEQ ID NO: 51499 - protein, 312 aa, Geobacillus kaustophilus
MAMKRKKISVIGAGFTGATTAFLLAQKELGDVVLVDIPQLENPTKGKALDMLEASPVLGFDANIIGTSDYADTADSDIVVITAGIARKPGMSRDDLVTTNQKIMKQVTKEVVKYSPNCYIIVLTNPVDAMTYTVFQESGFPKNRVIGQSGVLDTARFRTFVAEELNISVKDVTGFVLGGHGDDMVPLVRYSYAGGIPLEKLIPKDRLDAIVERTRKGGGEIVNLLGNGSAYYAPAASLVEMVEAILKDQRRILPAIAYLEGEYGYEGIYLGVPTILGGNGIEKVIELELTEEEKAALAKSVESVKNVMRMLE

SEQ ID NO: 51500 - DNA, 954 bp, Geobacter metallireducens
  CDS (1)..(954): transl_table=11
atggcacgtaagaaaatctctctcatcggtggtggtcagattggtggcgttcttgctcaactttgcgccctgcgcgaacttggcgatgtagtgatgtttgatattgtcgaaggtcttcctcaggggaagatgcttgatatcgctgaggttggtccggttgacggttttgatgtatgcctcaagggtaccaacagctacgcggatatagctggctccgatgttgtcatcgtaaccgctggtcttccccgcaagccgggcatgagccgtgacgatctcatcgaagtcaactccaagatcatgacccaggttgctgagggtattaagcaatatgcccccaattctttcgtaatcgttatctccaacccgctggacgccatggttaccctttgccagaaaatcaccggcttcccctacaacagggttatcggccaggcaggcgttctcgactcctcccgttttgcagccttcatcgcctgggaactgggcgtttccgtgaaggatgtcgttgccgtaaccctcggtggccatggtgatgacatggtgcctctggttcgttatactagtgtttgtggcatcccggtcatggaacttcttgagcgtaagtataaggataaggctaaggccaaggaagtcatggaggcaatggttaagcgtactcgcggtgcgggtggtgaggtcgtcgctctcctcaagaccggttctgcattctactctccggcctctgccgcaatcgccatgaccgagtcgatcctcaaggaccagaagcgggttcttccgacctgctgcttcctccagggcgagttcggcgtgaatggatactacgtcggtgttcctgcagtgctgggcgagaacggtgttgagcagatcattcagttcaacctcgacgccgaagagcaggcaatgatggataagtcggttgccgcggtgaagagtctcgtcgacagccttaagtaa

SEQ ID NO: 51501 - protein, 317 aa, Geobacter metallireducens
MARKKISLIGGGQIGGVLAQLCALRELGDVVMFDIVEGLPQGKMLDIAEVGPVDGFDVCLKGTNSYADIAGSDVVIVTAGLPRKPGMSRDDLIEVNSKIMTQVAEGIKQYAPNSFVIVISNPLDAMVTLCQKITGFPYNRVIGQAGVLDSSRFAAFIAWELGVSVKDVVAVTLGGHGDDMVPLVRYTSVCGIPVMELLERKYKDKAKAKEVMEAMVKRTRGAGGEVVALLKTGSAFYSPASAAIAMTESILKDQKRVLPTCCFLQGEFGVNGYYVGVPAVLGENGVEQIIQFNLDAEEQAMMDKSVAAVKSLVDSLK

SEQ ID NO: 51502 - DNA, 954 bp, Geobacter sulfurreducens
  CDS (1)..(954): transl_table=11
atggcacgtaagaagattgctctcattggtggtggccagatcggtggtgtgcttgctcaactctgcgctctccgtgaacttggcgacgtcgtcctgttcgatatcgtagaaggccttccccaggggaaatgcctggatatcgccgaagcttctcctgttgacggctttgacgtctgcctgaagggtaccaacagctacgaggatatcgctggcgccgacgttgtcatcgtgactgcgggccttccccgtaagcccggcatgagccgtgacgacctcatcgaggtcaactccaagatcatgacgtcggttgccgaggggatcaagcagtacgcacccaattccttcgtgattgtaatttccaaccctctggacgccatggttaccctctgccagaaggtcaccggtttcccctacaaccgcgtcatcggtcaggccggagttctcgactccgcccgttttgccaccttcatcgcctgggaacttggcgtgtccgtaaaggacgtcaccgccatgactcttggcggccacggcgacgacatggtgccgctggttcgctacgccagcgtcaaaggtatcccggtcatggaactccttgagcgcaagtacggcagtaaggagaaggcgaaggaagtcatggacgccatggtcaaccgtacccgtctggcgggcggcgaagtcgttgccctcctcaagaccggttccgccttctacagccctgcgtccagcgccattgccatggccgagtctatcctcaaggatcagaagcgggttcttccgacctgtgcctacctccagggagagttcggtgtcaacggctactatgtgggcgtaccctgcgtgctcggcgagaagggtatcgagaatatcattgagttctctctcgacgcagaagaacaagcgatgatggacaagtcggtcgcagcggtaaagagcctcgtcgacagcctcaagtaa

SEQ ID NO: 51503 - protein, 317 aa, Geobacter sulfurreducens
MARKKIALIGGGQIGGVLAQLCALRELGDVVLFDIVEGLPQGKCLDIAEASPVDGFDVCLKGTNSYEDIAGADVVIVTAGLPRKPGMSRDDLIEVNSKIMTSVAEGIKQYAPNSFVIVISNPLDAMVTLCQKVTGFPYNRVIGQAGVLDSARFATFIAWELGVSVKDVTAMTLGGHGDDMVPLVRYASVKGIPVMELLERKYGSKEKAKEVMDAMVNRTRLAGGEVVALLKTGSAFYSPASSAIAMAESILKDQKRVLPTCAYLQGEFGVNGYYVGVPCVLGEKGIENIIEFSLDAEEQAMMDKSVAAVKSLVDSLK

SEQ ID NO: 51504 - DNA, 978 bp, Gloeobacter violaceus
  CDS (1)..(978): transl_table=11
atggccgctcgttcctgccgggaaagcaaagtgtcgatcctgggtgcgggcaatgtcggaagcgcccttgcccaaaggctcatccagggcaacgttgccgatgtagtgttgcttgatatcgtcgaaggccgtccccaggggatcaccctcgacctgcttgaagcctgcggcgtcgagggacacacttgtcggatcaccggcaccaacgactacgcccagaccgccgggtcggatgtgctggtggtggcggccggatttgcccgccagcccggcatgagccgcgacgacctgctgctgaccaacacccgcatcgtttttgaggtgacgcaaaaggcggttgcccactccccggaggcaaccgtggtggtggttaccaatcccctcgacgcgatgagccatgtcgcctggcgggcgagtggtcttgtccctgaacgggtaatgggcatggcgggggtgctcgatgccgcccgcttcgaaacatttattgcctgggaactgggattttcggtgcgcgatatccgggcgatggtgttgggcggacatggagatctgatggtgccgctgcctcgttacaccaccatctcgggcgttcctctgacacaactgttgagttccgcccggatcgacgcactgatcgagcgcacccgcaccggcggagctgagattgttcatctgctcaagcgcggcggcgcttactatgccccggccgccgccgccgcccggatgatcgagactttgttgggcgacgaacggcgtctgctgccggtcgccgcctacctgagcggcgagtacggtttgaggaacatccacatgggtgtgccggtcatcctcagccgccacggtgtcgagcgggtggtcgaactgactctggagacggaggaaaaagctgcactgtaccgctccgcccatacgatccgcgccagcctcgatcagattgctcacctgatgcctgcaaaccagccgccatcggcggtgtaa

SEQ ID NO: 51505 - protein, 325 aa, Gloeobacter violaceus
MAARSCRESKVSILGAGNVGSALAQRLIQGNVADVVLLDIVEGRPQGITLDLLEACGVEGHTCRITGTNDYAQTAGSDVLVVAAGFARQPGMSRDDLLLTNTRIVFEVTQKAVAHSPEATVVVVTNPLDAMSHVAWRASGLVPERVMGMAGVLDAARFETFIAWELGFSVRDIRAMVLGGHGDLMVPLPRYTTISGVPLTQLLSSARIDALIERTRTGGAEIVHLLKRGGAYYAPAAAAARMIETLLGDERRLLPVAAYLSGEYGLRNIHMGVPVILSRHGVERVVELTLETEEKAALYRSAHTIRASLDQIAHLMPANQPPSAV

SEQ ID NO: 51506 - DNA, 948 bp, Helicobacter hepaticus
  CDS (1)..(948): transl_table=11
atgtttgagaaaattgctatcataggcggctctggcaatgtcggttctcatattgcattcttaggtgctatgcgacatattgcaaaagagattctcctttttagcaatgatattcctcgttgcaaaggtgtagggcttgatatttcccaagctgcagctatttttgatattcctattcttattaagggttgtaatagctatgaagaaatagctgaaagtgaagtggttattatcaccgctggatttccacgcacaccaaatatgacgcgtaatgatttgcttcttaaaaatgcaagtattatacaagaaatcagctcaaatgtcgctagaatcgctcctcaatccttactaattgttgtttcaaatccacttgatgcaatgtgtcttgtagcaaagcagtggagtaagtttgaaaaagaacgtgtcatcggtatggcagggattcttgatagtgcacgacttacctatgaaagcaaagtaatgcttggagattttaacaaacatatacaatcgtatgtaataggctctcatagcgatgatatgttacccttgctacgtcattgcctatgtgagggcaaagtttttactgatattttcactcctaaaatgcaagaggagctcatcaaggaaacaaaggggggtggagctaaaattgtaaattattatcagaaaggctcagcgtattttgctcctgcaagcggggtgataaaaatacttgaagctattagcactctaaatgaggaaatactcgtatgtagcgtatttacagagggtgaatatggaataaaagatatttatcttggacttccaattaaacttggcaaaaaaggagtagaacacattgtagaattaccactaaatcagcaagagcaggaaatgttaaatatttccacacaaggtatcaaagaacaagttgagattcttaaagataacaagttgttgtattaa

SEQ ID NO: 51507 - protein, 315 aa, Helicobacter hepaticus
MFEKIAIIGGSGNVGSHIAFLGAMRHIAKEILLFSNDIPRCKGVGLDISQAAAIFDIPILIKGCNSYEEIAESEVVIITAGFPRTPNMTRNDLLLKNASIIQEISSNVARIAPQSLLIVVSNPLDAMCLVAKQWSKFEKERVIGMAGILDSARLTYESKVMLGDFNKHIQSYVIGSHSDDMLPLLRHCLCEGKVFTDIFTPKMQEELIKETKGGGAKIVNYYQKGSAYFAPASGVIKILEAISTLNEEILVCSVFTEGEYGIKDIYLGLPIKLGKKGVEHIVELPLNQQEQEMLNISTQGIKEQVEILKDNKLLY

SEQ ID NO: 51508 - DNA, 924 bp, Methanosarcina acetivorans
  CDS (1)..(924): transl_table=11
atggctaaaatctctgtaattggtgcaggaaatgtaggtgcgaccacagttcagcggctggccgaactggaacctggcgaaattgtcatgacagatattgtggaagggttaccgcagggaaaagcccttgacctcatgcaggcaggggcaataaatggttatgatacgcaggtaacgggtactaacgattatgcagacattacagattctgacctggtgatcattacagccggaattgccagaaaacccggaatgaccagggaagatctgatgaaaaccaattcaaaaataataggggaggtctcccgaaacattgcagagtatgctccgaactctattgttataaatgtcacaaacccgcttgatgttataacttatgtggctatgaaaacaacaggctttgagacaaaaaaagtcttcggaatgagtggagtgcttgatgcagggcgttttgcaagctttatagcagaagaactgaattgttcgaaaaaagacatcgaggcaatggtaataggagggcacggagaccttatggtccccctcccccagtataccaccgtatcgggaattccgcttccggaactgctcccggaggagacaattgccaggcttgtagaaaggacggtgaacggaggagccgaaatagtagggcttctcaaacaggggagtgctttttatgccccgtctgcggccattgtgagcgttgcagaagccgtgcttaaggattcaaagcgcatccttccgacgtctgcatatcttgaagggcagtacgggcaagaaggaatttatttcggagtgctggcgaaactgggagcaaacggggtagaagaagtcctcgagctcaaacttgaggaaaaccagtacgagatcctcaggaagtcttcagaaacgatcaaaaggggaatctcaaaactgggaatatga

SEQ ID NO: 51509 - protein, 307 aa, Methanosarcina acetivorans
MAKISVIGAGNVGATTVQRLAELEPGEIVMTDIVEGLPQGKALDLMQAGAINGYDTQVTGTNDYADITDSDLVIITAGIARKPGMTREDLMKTNSKIIGEVSRNIAEYAPNSIVINVTNPLDVITYVAMKTTGFETKKVFGMSGVLDAGRFASFIAEELNCSKKDIEAMVIGGHGDLMVPLPQYTTVSGIPLPELLPEETIARLVERTVNGGAEIVGLLKQGSAFYAPSAAIVSVAEAVLKDSKRILPTSAYLEGQYGQEGIYFGVLAKLGANGVEEVLELKLEENQYEILRKSSETIKRGISKLGI

SEQ ID NO: 51510 - DNA, 924 bp, Methanosarcina barkeri
  CDS (1)..(924): transl_table=11
atggctaaaatttccgtgattggtgcaggaaacgtaggggcaactacagtccagcgactagctgaacttgaacttggcgaaattgtcatgacggatattgtggaaggactaccacaaggaaaagcactcgaccttatacaggcaggggcaataaaaggttatgatacgtcaataattgggaccaacgattatgcagaaatcgtagactctgatcttgtaataattacagcagggattgcaagaaaacctgggatgactcgggaagatctgattaaaacgaattctaaaataatagcagaggtttccagaaatattgcaaagtatgctccagactccatagtaattaatgtcacaaatccgcttgacattataacgtacatagctatgaaatcaacaggatttgagacaaagaaagtattcggaatgagcggagttctggattcgggacgttttgcaagctttattgcagaagaactgaagtgttcaaaaaaagatgttcaggcaatggttataggtggtcatggagatctgatggtgcctcttcctcaatatacaacagtgtcaggagttccactcacggacctgcttccgggggatagaattgccaggctggtagagaggacagtaaacggaggagcagagatcgtagagctccttaaacagggcagtgctttttatgcaccgtccgcggctattgtctcaatggcggaagccgttattaaaaattcaaagagaattttgcctgcttcggcttatcttgaaggacattacggacaggaaggtatttacttcggtgtacccgtaaagcttggggcatcaggagtagaagaaatccttgaactcaagctcgatgaaagccagtacgagactctcagaaaatcctcggaaactattcgaaacacgatttcacagctagaaatataa

SEQ ID NO: 51511 - protein, 307 aa, Methanosarcina barkeri
MAKISVIGAGNVGATTVQRLAELELGEIVMTDIVEGLPQGKALDLIQAGAIKGYDTSIIGTNDYAEIVDSDLVIITAGIARKPGMTREDLIKTNSKIIAEVSRNIAKYAPDSIVINVTNPLDIITYIAMKSTGFETKKVFGMSGVLDSGRFASFIAEELKCSKKDVQAMVIGGHGDLMVPLPQYTTVSGVPLTDLLPGDRIARLVERTVNGGAEIVELLKQGSAFYAPSAAIVSMAEAVIKNSKRILPASAYLEGHYGQEGIYFGVPVKLGASGVEEILELKLDESQYETLRKSSETIRNTISQLEI

SEQ ID NO: 51512 - DNA, 963 bp, Methylobacterium extorquens
  CDS (1)..(963): transl_table=11
atggcacgcagcaagatcgcgctcatcggcgccggacagatcggcggcacgctggcccatctcgccggcctcaaggaactcggtgacgtggtgttgttcgacatcgtcgacggcgtgccgcagggcaaggcgctcgacatcgccgaatccgctcccgtcgacggcttcgatgccaagtattcgggcgccagcgactattccgcgatcgccggggccgacgtggtgatcgtgaccgcgggcgtgccgcgcaagcccggcatgagccgtgacgacctcatcggcatcaacctgaaggtgatggaggcggtcggcgccggcatcaagaagcacgcgcccgacgccttcgtgatctgcatcgccaacccgctcgatgcgatggtgtgggcgctgcagaagttctcggggctgcccaccaacaaggtcgtcggcatggccggcgtgctcgactccgcccgcttccgccacttcctggccgaagagttcggcgtctcggtcgaggacgtgaccgccttcgtgctcggcggccacggcgacgacatggtgccgctgacccgctactcgacggtggccggcgtgccgctgaccgatctggtcaagctcggctggaccacccaggagaagctcgacgccatggtcgagcgcacccgcaagggtggcggcgagatcgtcaacctcctgaagaccggctcggccttctacgcgcccgccgcctccgccatcgccatggccgagagctacctgcgcgacaagaagcgggttctgccctgcgccgcctacctcgacggccagtacggcatcgacggcctctatgtcggcgtgccggtggtgatcggcgagaacggcgtcgagcgtgtgctcgaagtgaccttcaacgacgacgagaaggcgatgttcgagaagtcggtcaattcggtgaagggcttgatcgaggcctgcaagagcgtcaacgacaagctcgcgtaa

SEQ ID NO: 51513 - protein, 320 aa, Methylobacterium extorquens
MARSKIALIGAGQIGGTLAHLAGLKELGDVVLFDIVDGVPQGKALDIAESAPVDGFDAKYSGASDYSAIAGADVVIVTAGVPRKPGMSRDDLIGINLKVMEAVGAGIKKHAPDAFVICIANPLDAMVWALQKFSGLPTNKVVGMAGVLDSARFRHFLAEEFGVSVEDVTAFVLGGHGDDMVPLTRYSTVAGVPLTDLVKLGWTTQEKLDAMVERTRKGGGEIVNLLKTGSAFYAPAASAIAMAESYLRDKKRVLPCAAYLDGQYGIDGLYVGVPVVIGENGVERVLEVTFNDDEKAMFEKSVNSVKGLIEACKSVNDKLA

SEQ ID NO: 51514 - DNA, 924 bp, Methanosarcina mazei
  CDS (1)..(924): transl_table=11
atggttaaaatttccgtaattggtgcaggaaatgtaggttcgacaacagtccagcggctggcagaactggagcctggcgaaattgtcatgacagatattgtggaagggatgccgcagggaaaagctcttgaccttatgcaggccggggcaattaacggttatgacactaggataacaggtactaacgattatgcagatatcgcaaattccgacctggtaattattacggcaggaatcgccagaaagcccggaatgagcagggaagacctgattaaaacgaattcaaaaataataggggatgtagcaggaaacattgcgaaatacgctccgaactctattgttataaacgtcacaaatccgcttgatatcataacatatgtagctatgaaggcaacgggctttgatccagaaaaagtcttcgggatgagtggagttcttgatgcaggacgttttgcaagctttatagcagaggaacttaagtgttcaaaaagggacgttgaggcaatggtcataggagggcatggagaccttatggttccgctcccgcagtacaccacagtatcgggaatcccgcttccggaactgcttccggaaaaaacaattgacaggcttgtggaaaggacagtaaatggaggagcagaaatagtagagcttctcaaacagggaagtgctttttatgctccctcagcagctatcgtacgcatggcagaagctgtaattaaggactccaggcgcgtacttccggcgtctgcatatcttgaaggacagtacgggcagaaaggaatttactttggagtgccagtaaaactgggagcaaatggcatagaagaaattcttgaactcaaacttgaagacagccagtgcgagatactcaaaaaatcctcagagactatccggaaagggatttcaaagctggaaatctaa

SEQ ID NO: 51515 - protein, 307 aa, Methanosarcina mazei
MVKISVIGAGNVGSTTVQRLAELEPGEIVMTDIVEGMPQGKALDLMQAGAINGYDTRITGTNDYADIANSDLVIITAGIARKPGMSREDLIKTNSKIIGDVAGNIAKYAPNSIVINVTNPLDIITYVAMKATGFDPEKVFGMSGVLDAGRFASFIAEELKCSKRDVEAMVIGGHGDLMVPLPQYTTVSGIPLPELLPEKTIDRLVERTVNGGAEIVELLKQGSAFYAPSAAIVRMAEAVIKDSRRVLPASAYLEGQYGQKGIYFGVPVKLGANGIEEILELKLEDSQCEILKKSSETIRKGISKLEI

SEQ ID NO: 51516 - DNA, 945 bp, Myxococcus xanthus
  CDS (1)..(945): transl_table=11
atggctcagaatggcaagaagaagatcggcctcatcggcggcggtcagatcggcggcaacctggcgctgctcgccgtgcagaagtcgctcggtgacgtggtgctgtacgacatcccggcggccgagggtctggtcaagggcaaggcgctggacatcaaccagctggccgcggtcgacggttacgactgccgcgtgaagggcaccacggactggaaggacgtggctggctcggacgtgatcatcatcacggccggcatgccccgcaagccgggcatgtcccgcgaggacctgctcgagatcaacctgaagatcatgacggacgtggcgggcaacatcaagcagcacgcccccaacgccttcgtcatcaacgtggccaacccgctggacgcgatggtgttcgcgctccacaagatcgccggtctgcccaagcacatggtcgcgggcatggcgggcgtgctggacaccagccgcttcaagtgcttcgtcgccgaggcgctgggctgctccatccgcgacgtggaggccctggtgctgggcggccacggcgacgacatggtcccgctcgtccgccacagcacggtgggcggcgtgcccctgacggagctgatcgccaaggacaagctggacgccatcatcaagcgcacccgtgagggcggcgcggagctggtcggtctgtacaagacgggcagcgcctacttcggccccgcggcgtccgccatcgccatggcggagagcttcctgcaggaccgcaagcgcgtgctgccggccgccgccctcctggagggccagtacggcatcaacggctacttcttcggcgtccccgtgcagatcggcgcgggcggcgtggagaagatccacaccgtcgagctgaacgatggtgagaaggccgagctggagaagtccttccagtcggtgaagaagacggtcgactccgtcaagctgtag

SEQ ID NO: 51517 - protein, 314 aa, Myxococcus xanthus
MAQNGKKKIGLIGGGQIGGNLALLAVQKSLGDVVLYDIPAAEGLVKGKALDINQLAAVDGYDCRVKGTTDWKDVAGSDVIIITAGMPRKPGMSREDLLEINLKIMTDVAGNIKQHAPNAFVINVANPLDAMVFALHKIAGLPKHMVAGMAGVLDTSRFKCFVAEALGCSIRDVEALVLGGHGDDMVPLVRHSTVGGVPLTELIAKDKLDAIIKRTREGGAELVGLYKTGSAYFGPAASAIAMAESFLQDRKRVLPAAALLEGQYGINGYFFGVPVQIGAGGVEKIHTVELNDGEKAELEKSFQSVKKTVDSVKL

SEQ ID NO: 51518 - DNA, 948 bp, Neorickettsia sennetsu
  CDS (1)..(948): transl_table=11
atgaaagtaagtttaattggtgctggcaatattggtgggaccttggcgtatttaatagcctcgaagaagttggcttcagaggtcgaattaattgacgttaacggagatcttgcaagaggcaaagcattagatgtttcacaaactcttccactcattggttatacaatgaagatcaatggtagcgccaatatggagagaatcaaaggctcttcggtaattatcataactgccggtattccacgaaagcctggcatgacacgtgaggaactcattgatgtgaatgctgttgttatgaaagaagtaggggaaaaaataaaaaagtttgccccgaaagcgtttgtgatagttgtgactaacccgctagatgtaatggtttgggtcctttacaaggcagccgaaatcagccctgacaagattgttggtatggcaggtgtactcgatgcaagcagaatgaatctttttcttgcacaagagctaggtgtttcagtagcggatgttaaatcgctggtattgggtagtcacggtgactctatggttcccttgtttaggcactctacggtttctggtatgagcctacctgagttggttagtgtgggtttaataacgaaggataaggtggactcaattattgaacgtactcgtagtggtggtgccgagatagttgccctcttgaaaactggttcagcctactacactcctgctgcgtctgtgctggaaatggctgaggcatatctgttggatcagaaaaaaacgctcgtgtgctccgtgatgatgaggggtcggtatggagtggaggatgatatcttttctggtataccagttatcatgggatcaggtggtgtggagcgtgtaattgaacttgatctgactcctgatgagaggaggatgtttgaaaattctgttgctgcaacgagaaaattagtgctggaagcgcgaaaatacttttag

SEQ ID NO: 51519 - protein, 315 aa, Neorickettsia sennetsu
MKVSLIGAGNIGGTLAYLIASKKLASEVELIDVNGDLARGKALDVSQTLPLIGYTMKINGSANMERIKGSSVIIITAGIPRKPGMTREELIDVNAVVMKEVGEKIKKFAPKAFVIVVTNPLDVMVWVLYKAAEISPDKIVGMAGVLDASRMNLFLAQELGVSVADVKSLVLGSHGDSMVPLFRHSTVSGMSLPELVSVGLITKDKVDSIIERTRSGGAEIVALLKTGSAYYTPAASVLEMAEAYLLDQKKTLVCSVMMRGRYGVEDDIFSGIPVIMGSGGVERVIELDLTPDERRMFENSVAATRKLVLEARKYF

SEQ ID NO: 51520 - DNA, 963 bp, Novosphingobium aromaticivorans
  CDS (1)..(963): transl_table=11
atggcacgcaagaagatcgcgctgatcggcgcgggcaacatcggtggcactcttgcccacctcgccgcccagaaggaacttggcgacatcgtcctgttcgacgtcgttgaaggcgtgccccagggcaaggcgctcgacctttcgcagtgcggtccggtcgaaggcttcgacgccaacatcatcggcaccaacgactacaagggcatcgcaggcgcggacgtgatcatcgtcaccgccggcgtcgcccgcaagcccggcatgagccgcgacgacctgctcggcatcaacctcaaggtgatgaaggccgtcggcgaaggcatccgcgacaacgcgcccgacgcgttcgtgatctgcatcaccaacccgctcgacgcgatggtctgggcgctgcgcgagttctcgggcctgcccgcgaacaaggtcgtcggcatggccggcgtgctcgactcggcgcgcttcagcacgttcctggcatgggaattcggcgtctcgatccgcgacgtgaacacgttcgttctcggcggccacggcgacaccatggttccggtcacccagtactcgaccgtcaacggcatcccggtgcccgacctcgtcaagatgggcctgtccacccaggaaaagatcgacgcgatcgtgcagcgcacccgttcgggcggcggcgagatcgtcgggctgctcaagaccggttcggcgttctacgcgcctgccgcatcgggcatcgcgatggccgaagcctatctcaacgaccagaagcgcatcctgccctgcgccgcctacgttgacggcgaatacggcgtgaacggtctttacgtcggcgtgccggtgctgatcggcgcgaacggcgtcgagaaggtgatcgagatcgaactcgacgacgaagccaagggcaacctccaggtctccgtcgacgcggtcaaggaactgctggaagcctgcaagggcatcgaccccagcctcgcctga

SEQ ID NO: 51521 - protein, 320 aa, Novosphingobium aromaticivorans
MARKKIALIGAGNIGGTLAHLAAQKELGDIVLFDVVEGVPQGKALDLSQCGPVEGFDANIIGTNDYKGIAGADVIIVTAGVARKPGMSRDDLLGINLKVMKAVGEGIRDNAPDAFVICITNPLDAMVWALREFSGLPANKVVGMAGVLDSARFSTFLAWEFGVSIRDVNTFVLGGHGDTMVPVTQYSTVNGIPVPDLVKMGLSTQEKIDAIVQRTRSGGGEIVGLLKTGSAFYAPAASGIAMAEAYLNDQKRILPCAAYVDGEYGVNGLYVGVPVLIGANGVEKVIEIELDDEAKGNLQVSVDAVKELLEACKGIDPSLA

SEQ ID NO: 51522 - DNA, 939 bp, Oceanobacillus iheyensis
  CDS (1)..(939): transl_table=11
atgggtttaaaacgtaaaaaaatatcagtaattggttcaggtttcactggtgcaactactgctttaatggtggcgcaaaaagaattaggcgatgttgtattagttgatatacctgacatggaagaccctacaaaaggtaaagctctggatatggcagaagcagctcctgttcaagggtttgatgcaaaaattactggtacatctaattatgctgatacagaaggttctgatctcgttatcattacggctggaatcgctcgtaagccaggaatgagtcgtgatgatttagttaatacgaatgctaatataatgaaatccgttaccaaagaaattgtacattactcaccaaatacaacaattgttgtattaactaatccagtggatgcgatgacatatacagtatttaaagagtctgggttaccaaaagagcgtgtgattggacaatctggaattttagatactgcacgtttccgtacatttgtagcagaggagcttaatctttctgtcaaagatgtaactggctttgttttaggtggtcatggagacgatatggttccacttattcgttattcttatgctggtggaattccattagaaaaattaattcctcaagaacgtttagatgcaattgtccaacgtactcgtactggtggaggagaaattgttaatctattaggtaatggtagtgcctattatgcacctgcagcttctttaactgttatggctgaagcaattctaaaagatcaacgccgcgtgttacctactattgcatatcttgaaggtgaatatggatatcaagatatctatttaggcgttccaactatcttaggcggagaaggaattgaagaaattattgagttagacttaacgaaagaagaaaaggcacaacttgataagtctgctgactctgttaaaaatgtactaaatgtacttcaataa

SEQ ID NO: 51523 - protein, 312 aa, Oceanobacillus iheyensis
MGLKRKKISVIGSGFTGATTALMVAQKELGDVVLVDIPDMEDPTKGKALDMAEAAPVQGFDAKITGTSNYADTEGSDLVIITAGIARKPGMSRDDLVNTNANIMKSVTKEIVHYSPNTTIVVLTNPVDAMTYTVFKESGLPKERVIGQSGILDTARFRTFVAEELNLSVKDVTGFVLGGHGDDMVPLIRYSYAGGIPLEKLIPQERLDAIVQRTRTGGGEIVNLLGNGSAYYAPAASLTVMAEAILKDQRRVLPTIAYLEGEYGYQDIYLGVPTILGGEGIEEIIELDLTKEEKAQLDKSADSVKNVLNVLQ

SEQ ID NO: 51524 - DNA, 975 bp, Picrophilus torridus
  CDS (1)..(975): transl_table=11
atggcaagaagcaaaatctcagttataggtgcaggcgctgttggtgctactgttgcacagacgcttgctatcaggcagacaggtgatatatacattttcgatattgttgatggccttgcagagggcaaggcacttgatatccttgaaggtgcaccccattggggctatgatcttgatataaagggattctgcactgcagatgaatcaaagtatgctgagatgaagggctcagacgtcatagttgttacggcaggccttgcaagaaagcccggaatgagcagggatgacctgcttttaaagaacataggcataatgaaatctgtgggagaggccataaaaaaatactcaccggaatcaaagatcgttgttgtaacaaaccctgctgatatcatggcatatgcaatatacaaggcatcaggaataagccctgaaagaataattggccttggtggctcactggacagcacaaggttcagaacattccttgcacaggagctaaacgtatcgtttgaggatgtaaatgcattcgttataggcggccatggggatgacatggtaccatttataagatattcaaatgtctctggaataccaatagaggatcttttgccaagggaaaaaatagatgagatagtaaaaaggacaagattcggcggcggtgagattgtcaacctttacaagaccggatccgcattctatgcaccgggcatatcaatagcggtaatggttgaatcaatagtaaatgaccgcaagcgcgtgataccgtgcgcggcttacataacaggcgagcattcaaagacatatctggtaaataatctcttcataggcgttccaattaagattggcaaaaatggtgttgaaaagatatacgatctaaaattcaatgaagatgagctcgaggcatggaagaaaagcgttgaatctgttaaaaagaacagtgcaatagccgatgattattttgcaaaaaatcaataa

SEQ ID NO: 51525 - protein, 324 aa, Picrophilus torridus
MARSKISVIGAGAVGATVAQTLAIRQTGDIYIFDIVDGLAEGKALDILEGAPHWGYDLDIKGFCTADESKYAEMKGSDVIVVTAGLARKPGMSRDDLLLKNIGIMKSVGEAIKKYSPESKIVVVTNPADIMAYAIYKASGISPERIIGLGGSLDSTRFRTFLAQELNVSFEDVNAFVIGGHGDDMVPFIRYSNVSGIPIEDLLPREKIDEIVKRTRFGGGEIVNLYKTGSAFYAPGISIAVMVESIVNDRKRVIPCAAYITGEHSKTYLVNNLFIGVPIKIGKNGVEKIYDLKFNEDELEAWKKSVESVKKNSAIADDYFAKNQ

SEQ ID NO: 51526 - DNA, 930 bp, Pyrobaculum aerophilum
  CDS (1)..(930): transl_table=11
atgataacgataattggaagcggcagagtcggaacagcggcggccgtgatcatggggcttatgaaactggataataaaattttactaatagatattgtaaaaggcttgccacaaggcgaggccctcgatatgaatcacatgagctcaatattaggcctagacgtggagtatgtgggttcaaatgagtataaggatatagaggggagcgacttaattatagtcaccgccggcttgcccagaaagccgggtatgacgcgagaacagctcttggaagcaaacgccaaaattgtcgcagaaataggcagagagataaagaaatacgcgcctgactctattgttattttaacaacaaaccccctagacgccatgacgtatgtcatgtggaaagccacgggctttccaagggagcgggttataggcttcagcggcgttttagacgccgggagattggccttctacgccgccaagaaacttggcatatcccccgcgtctatacttccaattgtcttgggccaacacggggagagcatgttcccagtgccgagtaaaagctacgtccacggcgtacctctaagcaagctgttaacggaggaacagctaaaagaggtcgtggaggagaccgtcaaggcgggcgccagaattacggagttaagaggcttttcctccaactgggggcccggcgccgggcttgcaataatggccgaggctgttaaacgagacgctaagagggccttaattgcctcagtagtgttacaaggcgaatacggagtgcgagacgtgccggtggaagtgccaataatactcgggaggagcggcgtcgtaaaagtcttggaagtagagctcactgaggaggagaggcaaaaattcatgcaaagcgttgaggctgttaaaaaactcgtcgcctctgtcccgccgtcttatttacaatag

SEQ ID NO: 51527 - protein, 309 aa, Pyrobaculum aerophilum
MITIIGSGRVGTAAAVIMGLMKLDNKILLIDIVKGLPQGEALDMNHMSSILGLDVEYVGSNEYKDIEGSDLIIVTAGLPRKPGMTREQLLEANAKIVAEIGREIKKYAPDSIVILTTNPLDAMTYVMWKATGFPRERVIGFSGVLDAGRLAFYAAKKLGISPASILPIVLGQHGESMFPVPSKSYVHGVPLSKLLTEEQLKEVVEETVKAGARITELRGFSSNWGPGAGLAIMAEAVKRDAKRALIASVVLQGEYGVRDVPVEVPIILGRSGVVKVLEVELTEEERQKFMQSVEAVKKLVASVPPSYLQ

SEQ ID NO: 51528 - DNA, 969 bp, Rhizobium loti
  CDS (1)..(969): transl_table=11
atggcacgcaacaagatagcgcttatcggctcgggcatgatcggcggcacgctggcccacatgatcggcctcaaggacctcggcgacgtggtgctgttcgatattgccgagggtattccgcaaggcaaggggctcgatatcgcgcagtcgtcgccggtcgatggtttcgattcccggctgaccggcgtcaacgactatgccggcatcgagggtgccgacgtctgcatcgttacagccggcgtgccgcgcaagcctggcatgagccgcgacgatctgctgggcatcaacctcaaggtcatggaacaggtcggcgccggtctgaagaagtatgcgcccaaggccttcgtcatctgcatcaccaatccgctcgacgccatggtgtgggcgctgcagaagttttccggcctgcccaagacccatgtcgtcggcatggccggcgtgctcgacagcgcgcgcttccgctatttcctggccgaggaattcaaggtctcggtcgaggacgtcaccgccttcgtgctcggcggccacggcgattccatggtgccgatgatccgctactcgacggtatcgggcatcccgctgcccgacctcgtcaagatgggctggacctcgaaggagaagctcgaccagatcgtccagcgcacccgtgatggcggcgccgagatcgtcggcctgctcaagaccggctcggcctattacgcgccggcggcctcggcgattgccatggccgaatcctacctcaaggacaagaagcgcgtgctgccctgcgctgcccacctttccggccagtatggcgtcaagggcacctatgtcggcgtccccgtggtgatcggcgccggcggcgtcgagcgcatcatcgagatcgacctcaacaagagcgaacagaaaatgttcgagagttcggtggcgaccgtgcagggcctgaccgaggcctgcgtcaagatcgcgccgcagctcgcttcgaagtga

SEQ ID NO: 51529 - protein, 322 aa, Rhizobium loti
MARNKIALIGSGMIGGTLAHMIGLKDLGDVVLFDIAEGIPQGKGLDIAQSSPVDGFDSRLTGVNDYAGIEGADVCIVTAGVPRKPGMSRDDLLGINLKVMEQVGAGLKKYAPKAFVICITNPLDAMVWALQKFSGLPKTHVVGMAGVLDSARFRYFLAEEFKVSVEDVTAFVLGGHGDSMVPMIRYSTVSGIPLPDLVKMGWTSKEKLDQIVQRTRDGGAEIVGLLKTGSAYYAPAASAIAMAESYLKDKKRVLPCAAHLSGQYGVKGTYVGVPVVIGAGGVERIIEIDLNKSEQKMFESSVATVQGLTEACVKIAPQLASK

SEQ ID NO: 51530 - DNA, 963 bp, Rhizobium meliloti
  CDS (1)..(963): transl_table=11
atggcgcgcaacaagatcgcacttatcggttcggggatgattggtggcacgctggcgcatctcgccggcctgaaggaactgggcgacatcgtcctcttcgacattgccgacggcattccccagggcaagggtctcgacatcgcgcagtcctccccggtcgagggcttcgatgcatcgctgaccggtgcgagcgactattccgcgatcgagggcgccgacgtctgcatcgtcaccgccggcgtgccgcgcaagcccggcatgagccgcgacgatctgctcggcatcaacctcaaggtcatggaacaggtcggcgccggcatcaagaaatacgctccgaacgccttcgtcatctgcatcaccaacccgctcgacgccatggtctgggcgctgcagaagttctccggcctgccgaagaacaaggtcgtcggcatggccggcgtgctcgactcttcgcgcttccggctcttcctcgccgaagagttcaacgtctctgtcaaggacatcaccgctttcgtgctcggcggccatggcgacaccatggtgccgctcgcgcgttattcgacggttgccggcatcccgctgcccgacctgatccagatgggttggaccaccaaggaaaagctcgaccagatcattcagcgcacccgtgacggcggcgccgagatcgtcggcttgctcaagaccggctcggcctattatgcgccggccgcctcggcgatcgaaatggccgaagcctatctcaaggacaagaagcgcgtgctgccctgcgccgctcatctctccggccagtatggcgtcaaggacatgtatgtcggcgtgcccaccgtgatcggtgccggcggcatcgagcgcatcatcgagatcgacctcaacaagggcgagaaggaagccttcgacaagtcggttgcggccgtcgccggcctttgcgaagcctgcatcaacatcgcacccagcctgaagtaa

SEQ ID NO: 51531 - protein, 320 aa, Rhizobium meliloti
MARNKIALIGSGMIGGTLAHLAGLKELGDIVLFDIADGIPQGKGLDIAQSSPVEGFDASLTGASDYSAIEGADVCIVTAGVPRKPGMSRDDLLGINLKVMEQVGAGIKKYAPNAFVICITNPLDAMVWALQKFSGLPKNKVVGMAGVLDSSRFRLFLAEEFNVSVKDITAFVLGGHGDTMVPLARYSTVAGIPLPDLIQMGWTTKEKLDQIIQRTRDGGAEIVGLLKTGSAYYAPAASAIEMAEAYLKDKKRVLPCAAHLSGQYGVKDMYVGVPTVIGAGGIERIIEIDLNKGEKEAFDKSVAAVAGLCEACINIAPSLK

SEQ ID NO: 51532 - DNA, 948 bp, Rhodopirellula baltica
  CDS (1)..(948): transl_table=11
atgcgtcgcgcaaagatcaccattgtcggagccggaaatgttggtgccacctgtgctcactggtgtgcggccgcagaactcggcgatgttgtcctgctggacattccccgaaccgaagacatgcctcgcggcaaggcactggacctaatgcaagcctcgccaatcatggggtttgactcgaacatcgtcggtaccaccgactacgccgacacggccgacagtgatgtgatcgtcgtcaccgctggattgccacgcaaacctggcatgagccgcgacgacttgctggccaccaacgcgaaaattgtgaccagcgttgcggaagaaatcaaagccaccagccctaacgctgtgatcattgttgtcagcaatccgctcgacgcgatggttcagcagatgttcaaagtcaccggcttcgaacctgccaaagtcatcggccaagccggcgttttggacaccgctcgctaccgcacattcctggcaatggaattgggcgtcagtgtcgaagacatcagcgctttgttgatgggcggacacggcgacacgatggtgcctgtcccaagctgcaccagcgttggcggcatccctgtcacccaactgatctccaaggaacgcttggacgaaatcgttgaccggactcgcaagggcggagccgaaatcgtttcgctgctgaagaccggcagcgcttactatgctcccgctgcggcttgtgcccaaatggtcgaagcgatcgtcaaagacaaaaagcgagtcatccctgtcgccgcatactgcgattccgaatacggcgtcggcggttactacgtcggcgtccctgttgtcctgggcagcggcggtgtagaacgcatcatcgaattgtcgctgaccgacgaagaaaccaaggcgttccagaacagcgtcgacgcggtcaaatcgctcgtttcgaccatggacgggctgctcgcggagtga

SEQ ID NO: 51533 - protein, 315 aa, Rhodopirellula baltica
MRRAKITIVGAGNVGATCAHWCAAAELGDVVLLDIPRTEDMPRGKALDLMQASPIMGFDSNIVGTTDYADTADSDVIVVTAGLPRKPGMSRDDLLATNAKIVTSVAEEIKATSPNAVIIVVSNPLDAMVQQMFKVTGFEPAKVIGQAGVLDTARYRTFLAMELGVSVEDISALLMGGHGDTMVPVPSCTSVGGIPVTQLISKERLDEIVDRTRKGGAEIVSLLKTGSAYYAPAAACAQMVEAIVKDKKRVIPVAAYCDSEYGVGGYYVGVPVVLGSGGVERIIELSLTDEETKAFQNSVDAVKSLVSTMDGLLAE

SEQ ID NO: 51534 - DNA, 969 bp, Rhodopseudomonas palustris
  CDS (1)..(969): transl_table=11
atggcgcgcgataaaattgctttgattggctccggccagatcggcggtacgctggcacatttggtcgggttgaaagagctcggcgacgtggtgctgttcgacattgccgagggcgtgccgcagggcaaggcgctcgacatcgcggagtcctcgccggtcgacggtttcgactccaagctgaccggtgccaactcctacgaggcgatcgaaggcgcccgcgtggtgatcgtcaccgccggcgtgccgcgcaagccgggcatgagccgtgacgatctgctcagcatcaacctcaaggtgatggagcaggtcggcgctggcatcaagaagtacgcgcccgacgcgttcgtgatctgcatcaccaacccgctcgacgcgatggtctgggcgctgcagaaggcctcgggcctgccggccaagaaggttgtcggcatggccggcgtgctcgactcggcgcggttccgttacttcctggccgacgagttcaacgtgtcggtcgaagacgtcaccgccttcgtgctcggcggccacggtgataccatggtgccgctggtgaagtactcgaccgtcgccggaattccgctgcccgacctggtcaagatgggctggacctcgcaggcgcgcctcgatgagatcgtcgaccgcacccgcaacggcggcgccgagatcgtcaacctgctgaagaccggctcggcgttctacgccccggcgtcgtcggcgatcgcgatggccgagagctatctgaaggacaagaagcgggtggtgccggtcgcggcccacctcaacggcgaatacggcgtcaaggacatgtatgtcggcgttccggtggtgatcggcgacaagggcgtcgagcgcatcgtcgagatcgagctggccggcaaggacaaggaagcgttcgacaggtcggtcgctgccgttcagggcctggtcgaggcctgcaagaagattgcgcccgatctgctcggtcgctga

SEQ ID NO: 51535 - protein, 322 aa, Rhodopseudomonas palustris
MARDKIALIGSGQIGGTLAHLVGLKELGDVVLFDIAEGVPQGKALDIAESSPVDGFDSKLTGANSYEAIEGARVVIVTAGVPRKPGMSRDDLLSINLKVMEQVGAGIKKYAPDAFVICITNPLDAMVWALQKASGLPAKKVVGMAGVLDSARFRYFLADEFNVSVEDVTAFVLGGHGDTMVPLVKYSTVAGIPLPDLVKMGWTSQARLDEIVDRTRNGGAEIVNLLKTGSAFYAPASSAIAMAESYLKDKKRVVPVAAHLNGEYGVKDMYVGVPVVIGDKGVERIVEIELAGKDKEAFDRSVAAVQGLVEACKKIAPDLLGR

SEQ ID NO: 51536 - DNA, 957 bp, Rhodospirillum rubrum
  CDS (1)..(957): transl_table=11
atggcacgcaagaagatcgcccttgtcggcgccggcaatatcggtggcacgcttgcccatctcatcggtctcaaggaattgggcgatgtggtgctcttcgacatcgccgaggggactcctcagggcaaggctctggatatcgccgaatccaccccgatcgaaggggtcgacgccagctactcggggtccaacgattacgccgcgatcaaggacgccgatgtggtgatcgtcaccgccggcgtgccgcgcaagccgggcatgagccgcgacgacctgatcggcatcaacgccaaggtgatgtcggccgtcggccagggcatccgcgccaattgccccaacgccttcgtcatctgcatcaccaacccgctcgacgccatggtctgggtgttgcgcgaggtttcggggctgccccacaacaaggtggtcggcatggccggcgtgctcgacagcgcccgcttccgctatttcctgtccgaggaattcaatgtctcggtcaaggacgtcaacgccttcgtgctcggcggccacggcgacaccatggttccgctgccgcgctattcgaccgtcgccggtattccgctgcccgatctggtgaagatgggctggaccacccaggagaagctcgaccagatcatccagcgcacccgcgacggtggcgccgagatcgtcggcctgctcaagaccggatcggccttctatgccccggccgccgccgccgtgcagatggccgaagcctatctcaaggaccagaagcgcgttctgccctgcgccgcctgggttgagggccagtatggtctggacggcatctatgtcggcgtccccaccatcatcggcgccggcggcatcgagaaggtgatcgagatcgaactgaacgccgacgaaaaggcggcgttcgccaaatccgtcgacagcgtgcgcgggctgatcgccgcgtcgaaggaactgatgccgaaataa

SEQ ID NO: 51537 - protein, 318 aa, Rhodospirillum rubrum
MARKKIALVGAGNIGGTLAHLIGLKELGDVVLFDIAEGTPQGKALDIAESTPIEGVDASYSGSNDYAAIKDADVVIVTAGVPRKPGMSRDDLIGINAKVMSAVGQGIRANCPNAFVICITNPLDAMVWVLREVSGLPHNKVVGMAGVLDSARFRYFLSEEFNVSVKDVNAFVLGGHGDTMVPLPRYSTVAGIPLPDLVKMGWTTQEKLDQIIQRTRDGGAEIVGLLKTGSAFYAPAAAAVQMAEAYLKDQKRVLPCAAWVEGQYGLDGIYVGVPTIIGAGGIEKVIEIELNADEKAAFAKSVDSVRGLIAASKELMPK

SEQ ID NO: 51538 - DNA, 945 bp, Rickettsia conorii
  CDS (1)..(945): transl_table=11
atgaaacaaaacgcaaaaatctcattaataggtagcggtaacataggtggtacacttgctcacttaattagccttagagaactcggcgatatcgtgttatttgatgtgactgaaggagtaccgcaaggaaaagcattggatctcatgcaagccggtacaatagccgggtctgatatcaaaataaaaggcacaaacgactataaagatattgaaggatctgatgccataattattactgccggtttaccaagaaaaccagggatgagtagagaagatttaattagcattaacaccggtattatgaaaacggttgcagcaaatgttaaaaaatacgctcctgatgcctttgtaatagtaattaccaatccacttgatgttatggtatatgtcatgcttaaagaaagcggattgcctcacaataaagtaatcggtatggcaggagtacttgactcatcaagatttaatctttttcttgctgaagagtttaaagtatcggttaacaatgttaatagcatggttctcggcggtcacggcgatgctatggtacctcttgcaagatattctacaatatcaggcgtaccgatacctgacttgataaaaatgggcttatcaagtaatgaaaatattgaaaaaataatcgatcgtactagaaacggcggcggtgagattgttgcattacttaaaacaggttctgcttattatgctcccgcagcctcagcaatagaaatgcttgagtcatatttaaaagataaacgtcagattctaacttgtgccgctcatttacaaggtgagtacggcgtacatgatttatatgtcggagtgcctattatgatcggtaaagaaggtgttctaagagtaatagaactgcagttaaccgcagaggaaaaagcactatttgataaatcagtcgagggagttaaaaaactcattgagacgataaaataa

SEQ ID NO: 51539 - protein, 314 aa, Rickettsia conorii
MKQNAKISLIGSGNIGGTLAHLISLRELGDIVLFDVTEGVPQGKALDLMQAGTIAGSDIKIKGTNDYKDIEGSDAIIITAGLPRKPGMSREDLISINTGIMKTVAANVKKYAPDAFVIVITNPLDVMVYVMLKESGLPHNKVIGMAGVLDSSRFNLFLAEEFKVSVNNVNSMVLGGHGDAMVPLARYSTISGVPIPDLIKMGLSSNENIEKIIDRTRNGGGEIVALLKTGSAYYAPAASAIEMLESYLKDKRQILTCAAHLQGEYGVHDLYVGVPIMIGKEGVLRVIELQLTAEEKALFDKSVEGVKKLIETIK

SEQ ID NO: 51540 - DNA, 945 bp, Rickettsia felis
  CDS (1)..(945): transl_table=11
atgaaaaaaaatccaaaaatctcattaataggtagcggtaacataggtggtacgcttgctcacttaattagccttagaaacttaggtgatatcgtgttatttgatgtggctgaaggagtaccgcaaggaaaagcattggatctcatgcaagccggtacaatagccgggtctgatatcaaaataaaaggcacaaatgactataaagatattgaaggatctgatgcaataattattactgccggtttaccaagaaaaccaggaataagtagagatgatttaattagcattaataccggtattatgaaaaatgttgcagagaatgttaaaaaatacgctcctgatgcctttgtaatagtaattaccaacccgcttgacgttatggtatatgtcatgcttaaagaaagcggactacctcataataaagtaatagggatggcaggcgtacttgactcatcaagatttaatctttttcttgctgaagaatttaaagtatcggttagcaatgttaatagcacggttctcggcggtcatggtgatgctatggtacctcttgcaagatattctacaatatcaggagtgccgatacctgacttgataaaaatgggcttatcaagtaataagaatattgaaaaaataatcgatcgtactaggaacggcggcggtgagattgttgcattacttaaaacaggttctgcttattatgcccctgcagcctcagcaatagaaatgcttgaagcatatttaaaagataaacgtcaaattctaacttgtgccgcttatctacaaggtgaatatggggttaatgatttatatgtcggagtacctattattataggtaaagaaggcgtcataaaagtagtagaactacagctaactaaagaagaaaaagcattattcgacaaatcagttgaaggagttaaaaaactccttgacacgataaaataa

SEQ ID NO: 51541 - protein, 314 aa, Rickettsia felis
MKKNPKISLIGSGNIGGTLAHLISLRNLGDIVLFDVAEGVPQGKALDLMQAGTIAGSDIKIKGTNDYKDIEGSDAIIITAGLPRKPGISRDDLISINTGIMKNVAENVKKYAPDAFVIVITNPLDVMVYVMLKESGLPHNKVIGMAGVLDSSRFNLFLAEEFKVSVSNVNSTVLGGHGDAMVPLARYSTISGVPIPDLIKMGLSSNKNIEKIIDRTRNGGGEIVALLKTGSAYYAPAASAIEMLEAYLKDKRQILTCAAYLQGEYGVNDLYVGVPIIIGKEGVIKVVELQLTKEEKALFDKSVEGVKKLLDTIK

SEQ ID NO: 51542 - DNA, 945 bp, Rickettsia prowazekii
  CDS (1)..(945): transl_table=11
atgaaaaaaaatccaaaaatctcattaataggtagtggtaacataggtggtacactcgctcacttaattagtcttaaaaaactcggtgatattgtattatttgacgtatctgaaggtctaccgcaaggaaaggcattagacctcatgcaagccgctacaatagaagggtctgatattaaaataaaaggtacaaacgattatagagatattgaaggctctgacgcagtaattattactgcaggtttaccaagaaaaccaggcatgagtagagatgatttaattagcgttaatacaaaaattatgaaagacgtagcacaaaatataaaaaaatatgctcagaatgcttttgtaatagtgattactaatccactagatattatggtatatgtcatgcttaaagaaagcggattacctcataataaagtaattggtatggcaggggtactcgactcctcaagatttaatctgtttcttgctaaagagtttaaagtatcagttaaaaatgttaatagtatagttctcggtggtcacggtgacactatggtaccactcttacgatattctacaatatcaggagtgccgatacctgacttaataaaaatgggcttatcaagtaataaaaatattgaaaaaataattgatcgtacaaaaaatggaggcggagagattgttaaattgcttaaaacaggttctgcttattatgctcctgcagcatcagcaattgcaatgcttgaatcatatttaaaagataaacgtcagattctaacttgtgccgcttatttacaaggtgaatatgacatacatgatttatatatcggagtcccgattattataggtaaagaaggtgtgataaaagtaatagaactacagttaacagaagaggaaaaaatactattttataaatcagtcacagaagtaaaaaaactcattgatacaatacaataa

SEQ ID NO: 51543 - protein, 314 aa, Rickettsia prowazekii
MKKNPKISLIGSGNIGGTLAHLISLKKLGDIVLFDVSEGLPQGKALDLMQAATIEGSDIKIKGTNDYRDIEGSDAVIITAGLPRKPGMSRDDLISVNTKIMKDVAQNIKKYAQNAFVIVITNPLDIMVYVMLKESGLPHNKVIGMAGVLDSSRFNLFLAKEFKVSVKNVNSIVLGGHGDTMVPLLRYSTISGVPIPDLIKMGLSSNKNIEKIIDRTKNGGGEIVKLLKTGSAYYAPAASAIAMLESYLKDKRQILTCAAYLQGEYDIHDLYIGVPIIIGKEGVIKVIELQLTEEEKILFYKSVTEVKKLIDTIQ

SEQ ID NO: 51544 - DNA, 945 bp, Rickettsia typhi
  CDS (1)..(945): transl_table=11
atgacaaaaaatccaaaaatctcattaataggtagcggtaatataggtggtacactcgctcacttaattagtcttaaaaaactcggtgatattgtattatttgacgtagctgaaggtgtaccacaaggcaaagcattagatatcatgcaagctgctacaatagcaggggctgatattaaaataaaaggtacaaacaactataaagatattgaaggctctgatgcagtaattattactgccggtttgccaagaaaaccaggcatgagcagagatgatttaattagcgttaatactaaaattatgcaagatgtagcacaaaatataaaaaaatatgctcggaatgcttttgtaatagtgattactaacccactagatattatggtatatgtaatgcttaaagaaagcggattacctcataataaagtaattggtatggcaggggtactcgactcatcaagatttaatctgtttcttgctgaagagtttaaagtatcagttagaaatgttaatagtatagttctcggtggtcacggtgatgctatggtaccgctcgtacgatattctacaatatcaggagtgccgatacctgatttaataaaaatgggtttatcaagtaataaaaatattgaaaaaataattgatcgtacaagaaatggaggcggtgagattgttgcattacttaaaacaggttctgcttattatgctcctgcagcatcagcaatcgcaatgcttgaatcatatttaaaagataaacgtcaaattctaacttgtgctgcttatttacaaggtgaatatgatgtacatgatttatatatcggagtccctattattataggtaaagaaggtgtgataaaagtaatagaactacaattaacagaagaggaaaaaatactatttgataaatcagtcgtaggagtaaaaaaactcattgatgcaatacaataa

SEQ ID NO: 51545 - protein, 314 aa, Rickettsia typhi
MTKNPKISLIGSGNIGGTLAHLISLKKLGDIVLFDVAEGVPQGKALDIMQAATIAGADIKIKGTNNYKDIEGSDAVIITAGLPRKPGMSRDDLISVNTKIMQDVAQNIKKYARNAFVIVITNPLDIMVYVMLKESGLPHNKVIGMAGVLDSSRFNLFLAEEFKVSVRNVNSIVLGGHGDAMVPLVRYSTISGVPIPDLIKMGLSSNKNIEKIIDRTRNGGGEIVALLKTGSAYYAPAASAIAMLESYLKDKRQILTCAAYLQGEYDVHDLYIGVPIIIGKEGVIKVIELQLTEEEKILFDKSVVGVKKLIDAIQ

SEQ ID NO: 51546 - DNA, 963 bp, Silicibacter pomeroyi
  CDS (1)..(963): transl_table=11
atggccagacccaagatcgcgcttatcggcgcaggtcagatcggcggcacgctcgcccacctcgtcgcgctgaaggaactgggcgatgttgtcctgttcgacatcgccgaaggcacgcccgagggcaaggcgctcgacatcgcggaatccggcccctccgaagggttcgacgccaagctcaagggcacccagtcctatgccgatatcgctggcgccgatgtctgcatcgtcaccgccggtgtgccgcgcaagccgggcatgagccgcgacgacctgctgggcatcaacctcaaggtcatgaagtcggtcggcgaaggcatccgcgacaacgcgcctgacgcgttcgtcatctgcatcaccaacccgctcgacgcgatggtctgggcgctgcagcagttctcgggcctgcccgcgaacaaggtctgcggcatggcaggcgtgctcgactcggcccgtttccgccacttcctggccgaagagttcaacgtgtcaatgaaagacgtcaccgcattcgtgctgggcggccatggcgacaccatggtgccttcggtgcggtattcgaccgttgccggcatcccgctgcccgacctgatcaagatgggctggaccagccaggagaagctggacgccatcgtgcagcgcacccgtgacggcggcgccgagatcgttggcttgctgaagaccggttcggcctattacgcacccgccaccagcgccatcgagatggccgaggcctatctgaaagaccagaagcgcgtcctgccctgcgccgcctattgcaacggcgaactgggcgtaaagggcatgtatgtgggcgtgcccaccgtgatcggcgccggcggcatcgaacgcatcatcgacgtgtcgctgaccaaggaagagcaggacatgttcgacaattcggtcaacgcggtcaaaggcctggtcgaggcttgcaaaggcatcgacggctcgctggcctga

SEQ ID NO: 51547 - protein, 320 aa, Silicibacter pomeroyi
MARPKIALIGAGQIGGTLAHLVALKELGDVVLFDIAEGTPEGKALDIAESGPSEGFDAKLKGTQSYADIAGADVCIVTAGVPRKPGMSRDDLLGINLKVMKSVGEGIRDNAPDAFVICITNPLDAMVWALQQFSGLPANKVCGMAGVLDSARFRHFLAEEFNVSMKDVTAFVLGGHGDTMVPSVRYSTVAGIPLPDLIKMGWTSQEKLDAIVQRTRDGGAEIVGLLKTGSAYYAPATSAIEMAEAYLKDQKRVLPCAAYCNGELGVKGMYVGVPTVIGAGGIERIIDVSLTKEEQDMFDNSVNAVKGLVEACKGIDGSLA

SEQ ID NO: 51548 - DNA, 948 bp, Symbiobacterium thermophilum
  CDS (1)..(948): transl_table=11
atgaagcgcaagaagatcgcgattgtgggctccgggttcaccggccagggaaccgccctgtttgcggccgcccgcgacctgggcgacatcgtgctcgtcgacctgcccgcccgggagaactacgccaagggcgtggccctggacatgatggaggccatgcccgtctacggcagtgacacccgcctggtcggcacctcggactacgccgagatcgccggcgctgacgtggtcgtgatcaccgccggcgtcccccgcaagcccggcatgagccgggaggacctggtcaacaccaacgccggcatcgtcaaggatgtcgcggagaaggtggcccggtacgcccccgactcggtgatcatcgtcctgaccaaccccgtcgactccatgacctacgtggccctgaaggcctcgggcttccccaagaaccgggtgatcggccagtccggcgtgctggacaccgcccgcttccgcaccttcctggccaatgcgatcggctgctcgttccaggacgtcgtcggctgcgtgctcggcggccacggcgatgacatggtgccgctggttcggtacacctctgccggcggcatccccgtggagaagctgctgcccaaggagaccatcgacgccatcgtcgaacggacccgcaagggcggcggcgagatcgtcaacctcatgggcacctcggccggctacgccccgggcatggccctggtggagatgatcgacgccattctgaacgaccgcaagcgcatcctgccctcgatcgcctacctggagggcgagtacgggtacaccgacatgtgcctgggcgtgatgaccgtcctgggcgggggcggcctcgagaaggtcatcgagctcgacctcaccgacgaggagaaggtggcgctggacaagggcgcccagggcgtcaggaacctgatcgagatgctgaaggccggcatcctggcgcagtag

SEQ ID NO: 51549 - protein, 315 aa, Symbiobacterium thermophilum
MKRKKIAIVGSGFTGQGTALFAAARDLGDIVLVDLPARENYAKGVALDMMEAMPVYGSDTRLVGTSDYAEIAGADVVVITAGVPRKPGMSREDLVNTNAGIVKDVAEKVARYAPDSVIIVLTNPVDSMTYVALKASGFPKNRVIGQSGVLDTARFRTFLANAIGCSFQDVVGCVLGGHGDDMVPLVRYTSAGGIPVEKLLPKETIDAIVERTRKGGGEIVNLMGTSAGYAPGMALVEMIDAILNDRKRILPSIAYLEGEYGYTDMCLGVMTVLGGGGLEKVIELDLTDEEKVALDKGAQGVRNLIEMLKAGILAQ

SEQ ID NO: 51550 - DNA, 1095 bp, Thermoplasma acidophilum
  CDS (20)..(997): transl_table=11
agagtagcattatccactcatggcaaggaagaagatttctgtcattggtgctgggaatgttggtgccacagtcgcacagttcttggccgcaaaacagctcggcgatgtttatctgtttgatgttgtagatggaattcctgagggaaaggctctggatattcaggagggagctccacactggagatacgatcttgatgtggtgggtttcagtacgagtgatgaaaccaagtacaagaacatggagggcagcgacgtcatagtcgttacggctggactggcaaggaagccagggatgagcagggacgatctctttgacaagaacgtggagataatatctgacgtttcgagaaacataaagaaatactcgccagattcaataatagtggtggtatcaaacccagccgatataatggcctatgcattgcagaagtttaccggcatagatccatcgaagataatgggtctcggcggatctctggacagttcaaggttcagaacctttctcgcaaaggaattgaatgtgtctgttgaagacgttaacgcattcgtcattgggggacacggagatgatatggtgccgttcatacgatactccagcgttgccggcatacccatagagaacctgctttcaaaggagaagatcgatgagatagtgaagaggacgaggtttggcggcggagagatcgtgaactatctgaagacaggcagcgctttctacgcacctggcatatccataaccgcgatggtggaatctgtgatcatggacaagaaacgcgtcataccgtgcgcagcttacataaccggcaagcatgcggaccactacggaataagggacaagttcataggcgtgccgataaagatcggagagaagggtgtagaacagatatacgacatagacttcaagccggatgaacttgagctctggaagaagagtgtggcttcagttgaggccagctcaaagaaagtggacgagtggatcgcaaagcacgcccactgatccatctatttttttcttttttcaatgtagtctttatagaaggtagggtatttttcgtattccagcggatcttctgaaccacctccatgaatcccttg

SEQ ID NO: 51551 - protein, 325 aa, Thermoplasma acidophilum
MARKKISVIGAGNVGATVAQFLAAKQLGDVYLFDVVDGIPEGKALDIQEGAPHWRYDLDVVGFSTSDETKYKNMEGSDVIVVTAGLARKPGMSRDDLFDKNVEIISDVSRNIKKYSPDSIIVVVSNPADIMAYALQKFTGIDPSKIMGLGGSLDSSRFRTFLAKELNVSVEDVNAFVIGGHGDDMVPFIRYSSVAGIPIENLLSKEKIDEIVKRTRFGGGEIVNYLKTGSAFYAPGISITAMVESVIMDKKRVIPCAAYITGKHADHYGIRDKFIGVPIKIGEKGVEQIYDIDFKPDELELWKKSVASVEASSKKVDEWIAKHAH

SEQ ID NO: 51552 - DNA, 927 bp, Thermoproteus tenax
  CDS (1)..(927): transl_table=11
atgataacggtcgtcggaagcggcagagtcggcgcaactaccgctgcgatgctcggagttctcggcgtagataacaaaatcgtgttgatagatataataaaagggctcccccagggcgaggcgctcgacttgaaccacatgtcctccatcttgggactggacgtctattacactggctccaacgactacgccgatatgaaggggagcgacttggtcatagttacggcgggtcttgcgaggaagcccgggatgactagggagcagttgcttgagcagaacgcccagatagtggccaacatagggaaagagatagccaagtatgccccagactcggtggtcatattgaccacaaatccgctggacgccatgacatatgtgatgtggagggcgactggattttcaagagagagagtggttggattcagcggagtcttggacggaggcagactcgccttttatgcggggcagaagttagggatatcgccggcatcgataataccgatagtgttagggcaacatggggagagcatgttccctgtgcccagcaagagctttgtattcggcgtgccgttggataaactgctgaagccggaggagataaaggaggcggtggaggagaccgtcaaggcgggcgccagaatcacggagctgaggggcttctcctccaactgggcgcccggcgccggcgtggccataatggccaaggcagttaaacgggatgagaggagggcgcttatagcgtccgtggtcctcgacggcgagtacggcgtgaggggcatacctgttgaagttcccgtggtcctagggagaggcggcgccataaaggtcttggaagtcgagttgtcgcctgaggagaaacaaaggttccagcaaagcgtggaagcgattagtaaactattaaactctcttccagcccaatataagtga

SEQ ID NO: 51553 - protein, 308 aa, Thermoproteus tenax
MITVVGSGRVGATTAAMLGVLGVDNKIVLIDIIKGLPQGEALDLNHMSSILGLDVYYTGSNDYADMKGSDLVIVTAGLARKPGMTREQLLEQNAQIVANIGKEIAKYAPDSVVILTTNPLDAMTYVMWRATGFSRERVVGFSGVLDGGRLAFYAGQKLGISPASIIPIVLGQHGESMFPVPSKSFVFGVPLDKLLKPEEIKEAVEETVKAGARITELRGFSSNWAPGAGVAIMAKAVKRDERRALIASVVLDGEYGVRGIPVEVPVVLGRGGAIKVLEVELSPEEKQRFQQSVEAISKLLNSLPAQYK

SEQ ID NO: 51554 - DNA, 978 bp, Thermoplasma volcanium
  CDS (1)..(978): transl_table=11
atggcaagaaaaaagatttctgtaataggcgccggcaatgtaggcgcaacagttgcccagtttttagcaacaaaagagcttggcgatgtatacttattcgatgttgttgatgggattccagaaggaaaagctctagatattcaggaaggagcaccacactggggatatgatcttgacgttgtaggctttagtacatcagattcctcgaattacaaaaatatggagggatcagacgttatagtagtaactgccggaatggcaagaaaaccaggaatgagcagagaggacctatttgacaaaaatgtagagataattgcagatgtatctaagaacataaagaagtattcacctgattctataatagttgttgtttctaaccctgccgacataatggcatatgcccttcagaagatttccggtgttgatccgcaaagaataatgggtttaggcggttcattggatagttccaggttcaggacatttcttgctaaggagctcgacgtttcagtagaagacgtaaacgcttttgttattggaggccacggagatgatatggtgccatttataaggtactctagcgttgctggaattccaatagagaagctgcttcccaaagaaaagatagacgcaatcgtaaagaggaccaggtttggcggtggggaaatagtgaattacctcaaggcaggaagtgcttactatgcgcctgggatatccataacggctatggttgaatccgtcatcaaggataagaagagagtcataccatgcgcagcctatataacgggaaaacatgctgagcactacggaataaacaacaagttcataggtgttccaattaaaatcggtgaaagaggagttgaagagatctacgacatagacttcctgccagaggagcttgaactctggaagaagagtgtggcctctgttgaggcaagctcgaagaatgttgacgagtggttgaagaagcatccccagtag

SEQ ID NO: 51555 - protein, 325 aa, Thermoplasma volcanium
MARKKISVIGAGNVGATVAQFLATKELGDVYLFDVVDGIPEGKALDIQEGAPHWGYDLDVVGFSTSDSSNYKNMEGSDVIVVTAGMARKPGMSREDLFDKNVEIIADVSKNIKKYSPDSIIVVVSNPADIMAYALQKISGVDPQRIMGLGGSLDSSRFRTFLAKELDVSVEDVNAFVIGGHGDDMVPFIRYSSVAGIPIEKLLPKEKIDAIVKRTRFGGGEIVNYLKAGSAYYAPGISITAMVESVIKDKKRVIPCAAYITGKHAEHYGINNKFIGVPIKIGERGVEEIYDIDFLPEELELWKKSVASVEASSKNVDEWLKKHPQ

SEQ ID NO: 51556 - DNA, 951 bp, Wolbachia pipientis wMel
  CDS (1)..(951): transl_table=11
atgacagtacaaagaaaaaaaatatctttaatcggtgcaggaaatatcggtggaactctcacccatatgattgcactaagggaactcggtgatgttgttttacttgatattagtgatggaataccacaaggtaaagcactcgacatagcagaatcatcccctattgatggatttaatgtcaatattactggcacaaataggtatgaagatataaaaaactccgatgcaattataataaccgctggcatcgctagaaaacctggaatgagcagggatgacctcctgcaaaccaatgctaaagtaatgaaggaggttggcgaaaatattaaaaaatattctccaaacgcgtttgtaatagtggttaccaaccctttggatgccatggtttcagtggtgcataaattttcaaaccttccaactaatatgattgttggcatggcaggagtgcttgattcttcccgttttcgttactttcttgcaagtgagttaaatatctcagttgaagatatatctgcttttgtgcttggaggacatggcgacactatggtaccactaatcaattgtgcttcagttgctggagttccacttactcaaattatcgatatgggtcttatcacacagaaaaaagtcgatgaaatagttgaacgcactcgcaatggcggtaaagaaatagttgatctgcttaagtctggatctgcatactacgctcctgcatcttcagctatatgcatgttagaatcatatttaaaagataagaggcgcatattaccatgtgctgcttaccttaatggtgaatatggtgtagaagagttgtttattggtgttcctgtaattattggaaaaaacggaattgaaaagatcctagaagttaaaatgaatgatagtgaacaagaaatgtttaataagtctgtaaactcggtgagagagctggtgaaatctttaggttcataa

SEQ ID NO: 51557 - protein, 316 aa, Wolbachia pipientis wMel
MTVQRKKISLIGAGNIGGTLTHMIALRELGDVVLLDISDGIPQGKALDIAESSPIDGFNVNITGTNRYEDIKNSDAIIITAGIARKPGMSRDDLLQTNAKVMKEVGENIKKYSPNAFVIVVTNPLDAMVSVVHKFSNLPTNMIVGMAGVLDSSRFRYFLASELNISVEDISAFVLGGHGDTMVPLINCASVAGVPLTQIIDMGLITQKKVDEIVERTRNGGKEIVDLLKSGSAYYAPASSAICMLESYLKDKRRILPCAAYLNGEYGVEELFIGVPVIIGKNGIEKILEVKMNDSEQEMFNKSVNSVRELVKSLGS

SEQ ID NO: 51558 - DNA, 1023 bp, Oryza sativa
  CDS (1)..(1023)
atgaggccgtcgctgatgagatccgcctcgcaggtcctccgccgccgccgcggctactcctccgcctccggccagccggagcggaaggtcgccatcctcggcgcggccggcggcatcgggcagccgctctccctcctcatgaagctgaacccgctcgtctcctccctctccctctacgatatcgccggcacccccggcgtcgccgccgacgtctcccacatcaacgccccggcccaggtgaaggggttcatgggggatgaccagctcggggaggcgttggaggggtcggacatcgtgatcatcccggccggcgtgccgaggaagcccggcatgaccagggacgacctcttcaacatcaacgccggcatcgttaagaacctctgcaccgccattgccaagtactgcccgaatgctcttgtcaacatgatcagcaacccagtgaattcaacggtcccaattgctgccgaggttttcaagaaggctgggacttacgatgagaagaagttgtttggtgtgactactcttgatgttgttcgtgctaagactttctatgctggaaaggccaatgtaccagttactgatgtgaatgtcccagttgttggtggtcatgcgggtatcaccatcctgccactgttctcacaggcaactcctgcaactaatgcgttgtctgatgaagacatcaaggctcttaccaagagaacacaggatggtgggactgaagttgttgaagcaaaggctggaaagggctctgcaaccttgtccatggcgtatgctggtgctgttttcgcaaatgcttgcttaaagggtctgaatggagtgccggacgttgttgaatgctcttttgtgcaatcaactgtaacagagctgccattctttgcctccaaggtgaagcttgggaagaatggagttgaggaagttcttgggttgggccagctgtcagactttgagaaggaaggactggagaatcttaagggcgagctcaaggcttcaattgagaagggtatcaaatttgcaaatgcgtag

SEQ ID NO: 51559 - protein, 340 aa, Oryza sativa
MRPSLMRSASQVLRRRRGYSSASGQPERKVAILGAAGGIGQPLSLLMKLNPLVSSLSLYDIAGTPGVAADVSHINAPAQVKGFMGDDQLGEALEGSDIVIIPAGVPRKPGMTRDDLFNINAGIVKNLCTAIAKYCPNALVNMISNPVNSTVPIAAEVFKKAGTYDEKKLFGVTTLDVVRAKTFYAGKANVPVTDVNVPVVGGHAGITILPLFSQATPATNALSDEDIKALTKRTQDGGTEVVEAKAGKGSATLSMAYAGAVFANACLKGLNGVPDVVECSFVQSTVTELPFFASKVKLGKNGVEEVLGLGQLSDFEKEGLENLKGELKASIEKGIKFANA

SEQ ID NO: 51560 - DNA, 1191 bp, Oryza sativa
  CDS (1)..(1191)
atggcatcaactgttgccatcaatttgattggtgctcaggctggcattatctcaaagttaaggaattgcgacatcacaagctacagtggcttaaaggcaagatcatctattagttttgagtcaaggtcatcattcctgggtcagaatgcatctcttcgatcatctatctctccaaggattgtaccaaaggcaaactctggatctcacatttctcctgaggcatcttacaaagtggcagttctcggtgctgctggtggcattggtcaaccgttgggcttgttaattaagatgtctcctctggtctctgcactacatctgtatgatattgcaaatgtcaaaggagttgctgctgatctgagccactgcaacacaccttctcaggttctggactttactgggccctcggaattagccaactgcttgaaaggtgtggatgttgttgtcatccctgctggagtcccaaggaagccaggaatgactcgtgatgatctttttaacatcaatgcgagcattgtcaagacacttgttgaggctgttgcagacaattgtccagaagcctttatccatatcattagcaacccagtaaactcaacagtgcccattgctgctgaggttctgaaacagaagggtgtctataaccccaagaagcttttcggagttaccaccctagatgttgtcagagctaacacatttatagctcagaagaagaacctgaagctcattgatgttgatgtcccagttgttggtggtcatgctgggattactatcctaccattgctgtcaaaaaccagaccatctgtcaccttcacaaatgaggaaactgaagagctgacaaggaggatacagaatgctgggacagaggtggtggaggcgaaagctggtgctggatctgctaccctgtcgatggcctatgcagctgccagatttgttgagtcatccctccgtgcattggctggtgatccagatgtttacgagtgcacatttgttcaatctgaattaactgagctgctgttctttgcatctagggttaagcttggtaagaatggtgttgagtccatcatttcttccgaccttgagggagtgactgaatatgaggccaaggcccttgagtcattgaagcctgagttgaaggccagcattgagaagggcatcgagttcgtccacaaacagcaggctgccgctacttcttga

SEQ ID NO: 51561 - protein, 396 aa, Oryza sativa
MASTVAINLIGAQAGIISKLRNCDITSYSGLKARSSISFESRSSFLGQNASLRSSISPRIVPKANSGSHISPEASYKVAVLGAAGGIGQPLGLLIKMSPLVSALHLYDIANVKGVAADLSHCNTPSQVLDFTGPSELANCLKGVDVVVIPAGVPRKPGMTRDDLFNINASIVKTLVEAVADNCPEAFIHIISNPVNSTVPIAAEVLKQKGVYNPKKLFGVTTLDVVRANTFIAQKKNLKLIDVDVPVVGGHAGITILPLLSKTRPSVTFTNEETEELTRRIQNAGTEVVEAKAGAGSATLSMAYAAARFVESSLRALAGDPDVYECTFVQSELTELLFFASRVKLGKNGVESIISSDLEGVTEYEAKALESLKPELKASIEKGIEFVHKQQAAATS

SEQ ID NO: 51562 - DNA, 1023 bp, Oryza sativa
  CDS (1)..(1023)
atgaggccgtcgctgctgagatacgccgcgcaggcgctccgccgccgcgactactcctccgccgccgcggccgctgagcggaaggtggccatcctcggggcggcgggcgggatcggccagccgctcgcgctcctcatgaagctcaacccgctcgtctcgtccctctccctctacgatatcgccggaacccccggcgtcgccgccgatgtctcccacatcaactcgccggcgctggtgaaaggcttcgtcggggaggagcagctcggggaggcgttggagggttcggacgtcgtaatcatcccggccggtgtgccgaggaagcccggcatgaccagggacgacctcttcaacatcaacgccggcattgttaagggcctctgcactgccatctccaagtactgccccaacgctcttgtcaatatgatcagcaaccctgtcaactcgactgtccccatcgcagcggaggtgttcaagaaggctggtacttacgatgagaagaaactgtttggtgtgaccacgcttgatgttgtgcgcgctaaaactttctatgctggaaaggctaatgtgccagttactgaagtgaatgtccctgtggttggtggccatgctggtattactatcctgccactgttctcgcaggcaacccctgcaagtaatgcattgtcgcatgaggacattaaggctctgaccaagaggacacaagatggtgggacggaagttgttgaagcaaaggctggaaagggttctgcaacattgtctatggcatatgctggtgcggtatttgcagatgcgtgcttgaaggggcttaatggagttcctgatgttgtagagtgctcttttgtgcaatcaacagtaacagagctgccattcttcgcctcaaaggtaaggcttggcaagaacggagtggaggaagtacttgggctgggccagctttccgagtttgagaaggagggtctggagaacctgaagggtgagctcaagtcttcgattgagaagggcatcaagtttgctcacgcgaactag

SEQ ID NO: 51563 - protein, 340 aa, Oryza sativa
MRPSLLRYAAQALRRRDYSSAAAAAERKVAILGAAGGIGQPLALLMKLNPLVSSLSLYDIAGTPGVAADVSHINSPALVKGFVGEEQLGEALEGSDVVIIPAGVPRKPGMTRDDLFNINAGIVKGLCTAISKYCPNALVNMISNPVNSTVPIAAEVFKKAGTYDEKKLFGVTTLDVVRAKTFYAGKANVPVTEVNVPVVGGHAGITILPLFSQATPASNALSHEDIKALTKRTQDGGTEVVEAKAGKGSATLSMAYAGAVFADACLKGLNGVPDVVECSFVQSTVTELPFFASKVRLGKNGVEEVLGLGQLSEFEKEGLENLKGELKSSIEKGIKFAHAN

SEQ ID NO: 51564 - DNA, 1215 bp, Oryza sativa
  CDS (1)..(1215)
atggcatcagcagcaatgtctactctgaacctgagttcatctcctctgaccaagcagcagctccgatttggagccagcacactcagtgcagaacacgtcagtggcttcagctctgcaaggccagctccatcgttgtgctgctccagctctcactggcgagcggtcaagctgagaccgagacggcggccatggcggcgcgccgggaaccgggtcgtcgcgcaggccggcggctacaaggtcgccatcctcggcgccgccggtgggatcgggcagccgctctcgctcctcgtcaagatgtcgccgctcgtctcggcgctgcacctgtacgacattgcgaacgtcgatggtgtcaccgccgatcttggacactgcaacacgccggcgaaggtcgccgggttcaccggaaaggaggagctcgccggttgtcttgccggcgtggacgtcgtcgtcatccccgccggcgtgccgaggaagccagggatgacgcgggatgacctgttcggcatcaacgccggcatcgtgagggagctcgtcgaggccgtggcggaccacgcgccggcggcgctggtgcacgtcatctccaacccggtgaactccaccgtgccgatcgccgccgaggtgctgaagcggaagggcgtgtacgacccgcggaagctgttcggcgtcacgacgctggacgtcgtgcgcgccaacacgttcgtcgcggagatgaagggcctcccgctcgccgacgtcgacgtcccggtggtcggcggccacgcggcggccaccatcctcccgctgctgtccaaggcgaggcccaagacggcgttcaccgatgaggaggtggaggcgctgacgaggcggatccagaacgccgggaccgaggtggtggaggccaaggcgaaggccggcggcgggtccgcgacgctgtcgatggcgtacgcggcggcgaggttcctggaggcgtcgctgcgcgggctcgacggcgacgccgacgtgtacgagtgctcgtacgtgcagtgccaggcggtgccggagctgccgttcttcgcgtgccgggtgaagctgggcagggacggcgtcgaggaggtggcggcggcgggggcggagctccgggggctcacggagttcgaggcgcgcgcgctggaggcgctcaagccgcagctcaagaagagcatcgacaagggcgtcgcctacgcgcagcagcagccagcgacggtggcgatgggttga

SEQ ID NO: 51565 - protein, 404 aa, Oryza sativa
MASAAMSTLNLSSSPLTKQQLRFGASTLSAEHVSGFSSARPAPSLCCSSSHWRAVKLRPRRRPWRRAGNRVVAQAGGYKVAILGAAGGIGQPLSLLVKMSPLVSALHLYDIANVDGVTADLGHCNTPAKVAGFTGKEELAGCLAGVDVVVIPAGVPRKPGMTRDDLFGINAGIVRELVEAVADHAPAALVHVISNPVNSTVPIAAEVLKRKGVYDPRKLFGVTTLDVVRANTFVAEMKGLPLADVDVPVVGGHAAATILPLLSKARPKTAFTDEEVEALTRRIQNAGTEVVEAKAKAGGGSATLSMAYAAARFLEASLRGLDGDADVYECSYVQCQAVPELPFFACRVKLGRDGVEEVAAAGAELRGLTEFEARALEALKPQLKKSIDKGVAYAQQQPATVAMG

SEQ ID NO: 51566 - DNA, 1194 bp, Oryza sativa
  CDS (1)..(1194)
atggcatcagctgttaccatcagttcggttggcgctcaggctggcatgatctcaaagccaaggaatcatggcttcacaagctacagtggcctgaaggcagcatcatccgttagctttgaatcagggtcgtcattcctgggtaggaatgcatctctccgggcatctgttgctccaaggattgtaccaaaggcgaagtctggttctcaaatttctcctgaggcttcgtacaaagtggcagtgctcggtgctgctggtggtattggccaaccattgggccttttgattaagatgtctcctctggtctcagagctgcatctgtatgatattgcaaatgttaagggagttgctgctgatctcagccactgcaacacaccttctcaagttctggacttcactgggccctcggaactagccaactgcttgaaaggtgtggacgttgttgtcatccctgctggggtcccaaggaagccaggcatgactcgcgatgacctttttaacatcaatgcgagcattgtcaagtcgcttgttgaggctgttgcagacaattgtccagaggccttcatccatattatcagcaacccagtaaactccacggtgccaattgctgccgaggttctgaaacaaaagggtgtgtacaatcccaagaagctctttggagttaccaccctagatgttgttagagctaacacatttgtagctcagaagaagaacctcaagctcatcgatgttgatgttccagttgtcggtggtcatgctgggatcacaattctaccactgctgtcaaagaccatgccatctgtcaccttcacagatgaagaaactgaacagctgacaaagaggatacagaatgctggaacagaggtggtggaggcgaaagctggtgctggctccgctaccctctccatggcctacgctgctgccagattcgtcgagtcatctctgcgtgcacttgctggcgaccctgatgtttatgagtgcacattcgttcagtctgagttaaccgagctgccgttctttgcatccagagttaagcttggaaagaacggtgtcgagtccatcatttctgctgaccttgagggagtgaccgagtacgaggccaaggcacttgaggcattgaagtctgagttgaaggccagtatcgagaagggcatcgagttcgtccacaaacagcagacagcagcggcatctgtttga

SEQ ID NO: 51567 - protein, 397 aa, Oryza sativa
MASAVTISSVGAQAGMISKPRNHGFTSYSGLKAASSVSFESGSSFLGRNASLRASVAPRIVPKAKSGSQISPEASYKVAVLGAAGGIGQPLGLLIKMSPLVSELHLYDIANVKGVAADLSHCNTPSQVLDFTGPSELANCLKGVDVVVIPAGVPRKPGMTRDDLFNINASIVKSLVEAVADNCPEAFIHIISNPVNSTVPIAAEVLKQKGVYNPKKLFGVTTLDVVRANTFVAQKKNLKLIDVDVPVVGGHAGITILPLLSKTMPSVTFTDEETEQLTKRIQNAGTEVVEAKAGAGSATLSMAYAAARFVESSLRALAGDPDVYECTFVQSELTELPFFASRVKLGKNGVESIISADLEGVTEYEAKALEALKSELKASIEKGIEFVHKQQTAAASV

SEQ ID NO: 51568 - DNA, 1026 bp, Brassica napus
  CDS (1)..(1026)
atgttcagatccgcgcttgtccgatcctccgcctcggcgaagcagtcgcttctccgccgcagcttctcttccggatccgtccccgagcgtaaagtcgccatcttgggagccgccggtggaatcggtcagcctctggctctcctcatgaaactcaatcccctcgtctcaagcctctccctttacgatatcgccaacacacccggagtcgccgctgacgtcggtcacatcaacaccagatctcaggtggttgggtacatgggagatgataacttggcgaaagctcttgaaggagctgacctcgttatcattccagctggtgtccccaggaagcctggtatgacccgtgatgatcttttcaacatcaatgctggcattgtcaagaacctttgctctgccatcgccaagtactgccctcatgcacttgttaatatgattagcaacccggtcaactctactgttccgattgcagcagagattttcaagaaggctggtatgtacgatgaaaagaagctgtttggtgttaccactcttgacgttgttagggccaagactttctatgctggaaaggctaatgtccctgttgcagaagttaatgttccggtgattggtggtcatgctggggttacaatcctcccactcttctctcaggccactccccaagctaacttgtcaggtgacgtgctcactgccctcaccaagcgtactcaagatggaggtacagaagttgtggaggctaaagcagggaaaggttcagctacattgtcaatggcgtatgctggagcactattcgctgacgcatgcttgaagggactcaatggtgttccagatgtagtcgaatgctcatacgtgcagtccacaatcactgagcttcctttctttgcctcaaaggtgaggttggggaagaacggtgttgaggaggttcttgatttggggccactctctgactttgagaaggaaggcttggaagcattgaaaccggaactcaagtcttccattgagaagggagttaagtttgccaaccaatga

SEQ ID NO: 51569 - protein, 341 aa, Brassica napus
MFRSALVRSSASAKQSLLRRSFSSGSVPERKVAILGAAGGIGQPLALLMKLNPLVSSLSLYDIANTPGVAADVGHINTRSQVVGYMGDDNLAKALEGADLVIIPAGVPRKPGMTRDDLFNINAGIVKNLCSAIAKYCPHALVNMISNPVNSTVPIAAEIFKKAGMYDEKKLFGVTTLDVVRAKTFYAGKANVPVAEVNVPVIGGHAGVTILPLFSQATPQANLSGDVLTALTKRTQDGGTEVVEAKAGKGSATLSMAYAGALFADACLKGLNGVPDVVECSYVQSTITELPFFASKVRLGKNGVEEVLDLGPLSDFEKEGLEALKPELKSSIEKGVKFANQ

SEQ ID NO: 51570 - DNA, 1023 bp, Brassica napus
  CDS (1)..(1023)
atgttcagatccgtcgtcgtccgttcctcttcatcggcgaagcaatcgcttctccaccgcagcttctcctcctccgtccccgagcgcaaagtcgccatcctcggggccgccggtggaatcgggcagcctctcgctctcctcatgaagctcaaccccctcgtctcaagcctctccctcttcgatatcgcaaacacccctggagtcgccgctgatgtcggtcacatcaacaccagatctgaggtggttggatacatgggagatgatgaattggcgaaagctcttgcaggagctgacctcgttatcatccctgctggtgtccccaggaagcctggcatgactcgtgatgatcttttcaacatcaacgctggtattgtcaagaacctttgctctgccatcgccaagtactgccctcatgcacttgttaacatgatcagcaacccagtgaactccactgttccaattgcagctgagatattcaagaaggctggtatgtacgatgagaagaagttgtttggtgtcaccactcttgacgttgttagggccaagactttctacgctggaaaggctaatgtccctgttgctgaagttaatgttccggtgattggtggtcatgctggggttacaattctcccactcttctctcaggccactcctcaggccaacttgtctaatgatgtactcaccgctctcaccaagcgtacccaagatggaggtaccgaagtcgtggaggctaaagcaggaaaaggttcagctacattgtcaatggcctatgctggagcactatttgctgatgcatgcttgaaaggactcaacggagttccagacgttgtggaatgttcatacgtgcagtccaccatcactgagcttcctttctttgcctcaaaggtgaggttggggaagaacggtgtggaggaggttcttgatttggggccactctcagactttgagaaacaagggttggaagcactgaagccagaactcaagtcttccatcgagaagggtgttaagtttgcaaaccaatga

SEQ ID NO: 51571 - protein, 340 aa, Brassica napus
MFRSVVVRSSSSAKQSLLHRSFSSSVPERKVAILGAAGGIGQPLALLMKLNPLVSSLSLFDIANTPGVAADVGHINTRSEVVGYMGDDELAKALAGADLVIIPAGVPRKPGMTRDDLFNINAGIVKNLCSAIAKYCPHALVNMISNPVNSTVPIAAEIFKKAGMYDEKKLFGVTTLDVVRAKTFYAGKANVPVAEVNVPVIGGHAGVTILPLFSQATPQANLSNDVLTALTKRTQDGGTEVVEAKAGKGSATLSMAYAGALFADACLKGLNGVPDVVECSYVQSTITELPFFASKVRLGKNGVEEVLDLGPLSDFEKQGLEALKPELKSSIEKGVKFANQ

SEQ ID NO: 51572 - DNA, 1032 bp, Brassica napus
  CDS (1)..(1032)
atgttcagatccgttatcgtccgttcttcttcatcggcgaagcaatcgcttctccgccgcagcttctcctcctcctcctcctccgtgcccgagcgcaaagtcgccatcctcggcgccgccggtggaatcgggcagcctctcgctctcctcatgaagctcaaccccctcgtctctagcctctcactcttcgatatcgctaacacccctggagtcgccgccgatgtcggtcacatcaacaccagatctgaggtggttggatacatgggagatgatgaattggcgaaagctcttgaaggagctgacctcgttatcattcctgctggtgttcccaggaagcctggtatgacccgtgatgatcttttcaacatcaatgctggtattgtcaagaacctctgctctgccatcgccaagtactgccctcatgcacttgttaacatgatcagcaaccctgtgaactctactgttccaattgcagctgagatcttcaagaaggctggtatgtacgatgagaagaagttgtttggtgtcaccactcttgacgttgttagggccaagactttctacgctggaaaggctaatgttcctgttgcagaagttaacgttcctgtcattggtggtcatgctggggttacaattctcccactcttctctcaggccactcctcaagccaacttgtcgagtgacgtactcaccgctctcaccaagcgtacccaagatggaggtaccgaagtcgtggaggcaaaggcaggaaaaggttcagctactttgtcaatggcctatgctggagcactattcgctgatgcatgcttgaaaggactcaacggagttccagatgttgtggaatgctcatacgtgcagtccaccatcactgagcttcctttctttgcctcaaaggtgaggttggggaagaacggtgtggaggaggttcttgatttggggccactctcagacttcgagaaagaagggttggaagcactgaagccagaactcaagtcttccatcgagaagggtgttaagtttgccaaccaatga

SEQ ID NO: 51573 - protein, 343 aa, Brassica napus
MFRSVIVRSSSSAKQSLLRRSFSSSSSSVPERKVAILGAAGGIGQPLALLMKLNPLVSSLSLFDIANTPGVAADVGHINTRSEVVGYMGDDELAKALEGADLVIIPAGVPRKPGMTRDDLFNINAGIVKNLCSAIAKYCPHALVNMISNPVNSTVPIAAEIFKKAGMYDEKKLFGVTTLDVVRAKTFYAGKANVPVAEVNVPVIGGHAGVTILPLFSQATPQANLSSDVLTALTKRTQDGGTEVVEAKAGKGSATLSMAYAGALFADACLKGLNGVPDVVECSYVQSTITELPFFASKVRLGKNGVEEVLDLGPLSDFEKEGLEALKPELKSSIEKGVKFANQ

SEQ ID NO: 51574 - DNA, 1197 bp, Brassica napus
  CDS (1)..(1197)
atggcagcaacatcagcagcttcttcgatttcaattggatcaaacctttccagagccaccagctcctcctcaagggcacaagctgttaactttaactactctctccctcgtttcaccgctctgagatcatccactctcctctctggaccagaatcctcatctttcgccaagtctctccgcggttccgtaatgaaatcccaatcaaccgacacgaagccgtacggattgaacatcaacgcatcgtacaaagtggcggtcctcggtgctgccggagggatcggtcagcctctgtcacttctcatcaaaatgtctcctctcgtctccaccctccacctctacgatatcgccaacgtcaagggagtcgccgctgatttgagccactgcaacactccctctcaggttcgtgatttcaccggaccggctgagctggctgattgtttgaaagatgtcaacgtcgttgtcatccctgctggtgtgccgagaaagcccggtatgacccgtgacgatctcttcaacatcaacgccggtatagtgaagacgcttgttgaggctgtcgctgataactgtcctaacgcgttcatccacatcatcagcaaccctgttaactccaccgtccccattgctgctgaggtgttgaagaagaaaggtgtctatgatcccaagaagctctttggtgtcaccactttggatgttgtgagggctaacacctttgtttctcagaaaaagaacttgaagctcatcgatgtcgatgttcccgtcatcggtggccacgctggaatcaccattctgcctcttctatccaagaccaagccttctgtcagcttcactgacgaagagatcgagaaactcactctgaggattcagaacgctggaaccgaggttgtggatgctaaggcgggtgctggctcggctactttgtcgatggcctatgccgcagcgagatttgtggagtcgtctcttcgtgctcttgacggagatggagatgtttacgagtgctcgttcgtggactccactctcactgatcttcctttctttgcatcacggatcaagattgggaggaacggagttgaagctgtgattgagtctgacctccaagggctgactgagtacgagcagaaggcactagaagctcttaagccagaactgaaagctagcatcgaaaagggtgttgcattcgcaaacaaacctgctaactaa

SEQ ID NO: 51575 - protein, 398 aa, Brassica napus
MAATSAASSISIGSNLSRATSSSSRAQAVNFNYSLPRFTALRSSTLLSGPESSSFAKSLRGSVMKSQSTDTKPYGLNINASYKVAVLGAAGGIGQPLSLLIKMSPLVSTLHLYDIANVKGVAADLSHCNTPSQVRDFTGPAELADCLKDVNVVVIPAGVPRKPGMTRDDLFNINAGIVKTLVEAVADNCPNAFIHIISNPVNSTVPIAAEVLKKKGVYDPKKLFGVTTLDVVRANTFVSQKKNLKLIDVDVPVIGGHAGITILPLLSKTKPSVSFTDEEIEKLTLRIQNAGTEVVDAKAGAGSATLSMAYAAARFVESSLRALDGDGDVYECSFVDSTLTDLPFFASRIKIGRNGVEAVIESDLQGLTEYEQKALEALKPELKASIEKGVAFANKPAN

SEQ ID NO: 51576 - DNA, 1062 bp, Brassica napus
  CDS (1)..(1062)
atggatgcaaaccagcgtatcgctagaatctctgctcatctcaaccctcccaatctcgatcagattggttccgggtcgggtcttgaaggggtgggttgccgggcgaaaggcgggtctccaggattcaaagtggcgatactgggagcagcgggagggatagggcagcctctggcgatgttaatgaagatgaatccgttggtgtcgcttcttcatctctacgacgttgctaatgctcctggtgtcaccgctgatattagtcacatggacactagtgccatcgttcgtggatttctcggtcagtcgcaattagaggaagcacttacgggtatggatctagtgatcataccagctggtgttccgaggaagccagggatgaccagggatgatcttttcaaaatcaacgctggcatcgtgaggacactctctgaagctatagccaagtgctgtcccaaagcgattgtgaatatcatcagtaatcctgtgaactctaccgtgccaatcgcagctgaggttttcaagaaagctggcacttttgatccaaagaaactcatgggagtcaccatgcttgatgttgttagagctaatacttttgtggcggaagtaatgagtcttgatcctcgagaagttgatgttccagtcgttggaggacacgcaggagttacaatcttgcctctgctttctcaggtgaaacctccttgctctttcactcaaaatgagattgaatatctcacagaccgtatccaaaatggtggcactgaagttgtcgaggcaaaagctggtgcaggttctgcaacactatccatggcttacgcagcagtgaagtttgcagatgcttgcctcaagggtctacgtggcgatgcaaacatcgtcgagtgtgcatttgtggcatctcatgtgactgagcttcccttcttcgcatcaaaggtgcgtctaggaagatgtggggtcgatgaagtgtacggtctcggaccattgaatgaatacgagaggatgggactggagaaggcaaagaaagagcttgaagggagtattgcgaaaggtgttacctttgtgaagaagtaa

SEQ ID NO: 51577 - protein, 353 aa, Brassica napus
MDANQRIARISAHLNPPNLDQIGSGSGLEGVGCRAKGGSPGFKVAILGAAGGIGQPLAMLMKMNPLVSLLHLYDVANAPGVTADISHMDTSAIVRGFLGQSQLEEALTGMDLVIIPAGVPRKPGMTRDDLFKINAGIVRTLSEAIAKCCPKAIVNIISNPVNSTVPIAAEVFKKAGTFDPKKLMGVTMLDVVRANTFVAEVMSLDPREVDVPVVGGHAGVTILPLLSQVKPPCSFTQNEIEYLTDRIQNGGTEVVEAKAGAGSATLSMAYAAVKFADACLKGLRGDANIVECAFVASHVTELPFFASKVRLGRCGVDEVYGLGPLNEYERMGLEKAKKELEGSIAKGVTFVKK

SEQ ID NO: 51578 - DNA, 1038 bp, Glycine max
  CDS (1)..(1038)
atgatgaagccatcgatgctcagatctcttcactctgccgccacccgcggcgcctcccacctctcccgccgtggctacgcctccgagccggtgccggagcgcaaggtggccgttctaggtgccgccggcgggatcgggcaacccctctcccttctcatgaagctcaaccccctcgtttccagcctctccctctacgatatcgccggaactcccggtgtcgccgccgatgtcagccacatcaacaccggatctgaggtagtggggtaccaaggtgacgaagagctcggaaaagctttggagggtgcagatgttgttataattcctgctggtgtgcccagaaagcctggaatgactcgtgatgatctttttaacatcaatgctggcattgttaagacactgtgtactgctattgctaagtactgccctcatgcccttgttaacatgataagcaatcctgtgaactccactgttcctattgctgctgaagttttcaagaaggcaggaacgtatgatgagaagagattgtttggtgttaccacccttgatgttgttagggcaaaaactttctatgctgggaaagccaatgttccagttgctggtgttaatgtacctgttgtgggtggccatgcaggcattactattctgccattattttctcaagccacaccaaaagccaatcttgatgatgatgtcattaaggctcttacaaagaggacacaagatggaggaacagaagttgtagaagctaaggctggaaagggttctgcaactttgtcaatggcctatgctggtgccctatttgctgatgcttgccttaagggcctcaatggagtcccagatgttgtggagtgctcattcgtgcaatccactgttactgaacttccctactttgcttccaaggtgaggcttgggaagaatggagtggaggaagttctgggcttaggacctctctcagattttgagcaacaaggcctcgaaagccttaagcctgaactcaaatcatcaattgagaagggaatcaaatttgccaaccagtaa

SEQ ID NO: 51579 - protein, 345 aa, Glycine max
MMKPSMLRSLHSAATRGASHLSRRGYASEPVPERKVAVLGAAGGIGQPLSLLMKLNPLVSSLSLYDIAGTPGVAADVSHINTGSEVVGYQGDEELGKALEGADVVIIPAGVPRKPGMTRDDLFNINAGIVKTLCTAIAKYCPHALVNMISNPVNSTVPIAAEVFKKAGTYDEKRLFGVTTLDVVRAKTFYAGKANVPVAGVNVPVVGGHAGITILPLFSQATPKANLDDDVIKALTKRTQDGGTEVVEAKAGKGSATLSMAYAGALFADACLKGLNGVPDVVECSFVQSTVTELPYFASKVRLGKNGVEEVLGLGPLSDFEQQGLESLKPELKSSIEKGIKFANQ

SEQ ID NO: 51580 - DNA, 1077 bp, Brassica napus
  CDS (1)..(1077)
atggagtttcgtggagatgccacccagagaattgctatgatatcagctcatcttcaaccttctttcacttctcagatggaggggaagaacactgtgatgggaagagaaaactgcagagggaaaggagggaaagcaggattcaaagtagcaatacttggagctgcaggtgggataggacaatcactatcgttgctaatgaagatgaaccctctcgtctctttacttcatctctacgatgttgtcaatgctcccggagtcactgctgacgtcagccatatggacactggagctgttgttagaggattcttgggagccaagcaacttgcggatgccctaacgggtatggatcttgtgatcataccagctggtgtgccgaggaaaccagggatgacacgcgatgatctcttcaaaatcaatgctgggattgttaagacgctatgtgagggagtagcgaaatgctgtcctaatgctatagtcaacttgattagtaaccctgtgaactccactgtggccattgccgctgaggttttcaagaaagctggaacttatgatcctaagaagctccttggagttactacactcgatgttgctcgtgccaacacatttgtggctgaagttcttggacttgatccaagagaagtcgatgtaccagtagttggaggacacgctggagttacaatattgccactattgtcacaggttaaaccacctagtagttttacaccttcagaaacagagtaccttacgaacaggattcaaaacggtgggactgaagtagtggaggcgaaagctggagctggatcagcaacactttcaatggcatatgctgcagccaagtttgcggatgcttgccttcgcgggttaagaggagatgcgaatgtcgttgagtgctcctttgttgcttcacaggtgaccgagttacctttctttgcaacgaaagtgcgtcttggacgtacaggagcagaggaagtgtttcagcttggacccttgaacgaatacgaaagggttggtctggagaaagcaaaagaggagttagcaggaagtattcagaaaggtgtcgacttcatcaggaaatga

SEQ ID NO: 51581 - protein, 358 aa, Brassica napus
MEFRGDATQRIAMISAHLQPSFTSQMEGKNTVMGRENCRGKGGKAGFKVAILGAAGGIGQSLSLLMKMNPLVSLLHLYDVVNAPGVTADVSHMDTGAVVRGFLGAKQLADALTGMDLVIIPAGVPRKPGMTRDDLFKINAGIVKTLCEGVAKCCPNAIVNLISNPVNSTVAIAAEVFKKAGTYDPKKLLGVTTLDVARANTFVAEVLGLDPREVDVPVVGGHAGVTILPLLSQVKPPSSFTPSETEYLTNRIQNGGTEVVEAKAGAGSATLSMAYAAAKFADACLRGLRGDANVVECSFVASQVTELPFFATKVRLGRTGAEEVFQLGPLNEYERVGLEKAKEELAGSIQKGVDFIRK

SEQ ID NO: 51582 - DNA, 1185 bp, Triticum aestivum
  CDS (1)..(1185)
atggcatcatctgctaccatcagttcagttggcgctcaggctgctctggtttcaaagccaaggaatcatggcatcggtggcttaaaggcgtcctcatcaattaacttcgaattgggatcctcgttcctgggcaagaccgggtctcttcgggcatctgttaccacaagggttgtgcccaaggcgaagtctggggctcggatactaccggaggcatcttacaaagtggcggtacttggtgctgctgggggcatcggccaaccattgggcctgctgatcaagatgtctcctctggtctcggagctgcgactgtacgatattgcaaatgtcaagggagtcgctgctgatctcagccactgcaacacaccttctcaggtcatggacttcactggcccagcggaattagccagctgcttgaaaggtgtggatgttgttgtcatccccgccggggtccctagaaagcctgggatgactcgtgatgatcttttcaacatcaatgcgggcatcgtcaagtcacttatcgaggctgttgcagacaattgccctgatgcctttatccatattatcagcaacccagtcaactccacagtgccgattgctgctgagattctgaaacagaagggtgtctacaatcccaagaagctttttggggtttccaccctagatgttgtccgagctaacacattcgtagctcagaagaagggcctcaagctcattgatgttgatgtcccagttgttggtggtcatgctggaattacaatcctgcctttgttgtcaaagacgaggccatctgtcaccttcacggatgaggaaactgaacagctgacgaagaggatacagaacgctgggacagaggtggtggaggcgaaagcgggtgctggatctgctaccctgtccatggcttatgctgctgccagatttgttgagtcttcactccgtgcactggctggtgatccagatgtttatgagtgcacgtatgttcagtctgagttaactgagctgccattctttgcgtccagagttaagattggcaagaatggtgttgagtccatcatttctttggacctggagggaataactgagtacgaggccaatgcactcgaggcattgaagcctgagctgaaggccagcatcgagaagggcatcgagtttgcgcacaaacagcagggagccgccgcatctgtttga

SEQ ID NO: 51583 - protein, 394 aa, Triticum aestivum
MASSATISSVGAQAALVSKPRNHGIGGLKASSSINFELGSSFLGKTGSLRASVTTRVVPKAKSGARILPEASYKVAVLGAAGGIGQPLGLLIKMSPLVSELRLYDIANVKGVAADLSHCNTPSQVMDFTGPAELASCLKGVDVVVIPAGVPRKPGMTRDDLFNINAGIVKSLIEAVADNCPDAFIHIISNPVNSTVPIAAEILKQKGVYNPKKLFGVSTLDVVRANTFVAQKKGLKLIDVDVPVVGGHAGITILPLLSKTRPSVTFTDEETEQLTKRIQNAGTEVVEAKAGAGSATLSMAYAAARFVESSLRALAGDPDVYECTYVQSELTELPFFASRVKIGKNGVESIISLDLEGITEYEANALEALKPELKASIEKGIEFAHKQQGAAASV

SEQ ID NO: 51584 - DNA, 1185 bp, Zea mays
  CDS (1)..(1185)
atggcgtcaaccgttaccttcagcccagttagcacccaagctgggttgatccataagccaaggaaccttggagccacaagctacgctggcttaaaggtgccgagctttggctctgagtcatcattcttgggtaggaacgcatcccttcgggcggctgttactacaaggattgtgcccaaggcaaagtctggatctcagatatcgccacaggcatcttacaaggtggcgctgctcggtgctgctggtggcatcggtcaacccttgggcctattgattaagatgtctcccctggtgtccgagctgcatctgtatgatattgctaatgtcaagggagtcgctgcagatctcagccactgcaacacgcccgctcaggtacttgacttcactgggccctcagagttagccagctgcttgaaaggcgtggatgttgttgtcatccctgccggggtcccaaggaagccgggcatgactcgtgatgacctttttaacatcaacgcgagcatcgtcaagtcacttgttgaggctgtcgcggacaattgccccgaggcgttcatccatatcatcagcaacccggtgaattccaccgtgccaatcgcagcagaggttttgaagcagaagggcgtctacaatcccaagaagctttttggggttaccaccctggatgttgtcagggctaacacatttgtggcgcagaagaagaaccttaatctcatcgatgttgatgtcccagttgttggtggccatgctgggatcacaattctgccgttgctatcaaagaccaggccgtccgtcaccttcacagatgaggaagctgaggagctgacaaagaggatacagaatgccgggacagaggtggtggaggcaaaggctggtgctgggtctgctaccctgtccatggcctacgctgctgccagattcgtcgagtcgtctctccgcgccctggccggcgaccccgatgtttacgagtgcacatttattcagtccgaggcaaccgatctgccattcttcgcatcaagagtcaagctcggcaagagtggtgtcgaatccatcgtttctgccgacctcgagggagtgaccgagtgcgaggccaaggcgcttgacgcgcttaaggccgagttgaagggaagcattgagaagggtgtcgccttcgccagcaaacagcaggaggctgctgcatctgtttga

SEQ ID NO: 51585 - protein, 394 aa, Zea mays
MASTVTFSPVSTQAGLIHKPRNLGATSYAGLKVPSFGSESSFLGRNASLRAAVTTRIVPKAKSGSQISPQASYKVALLGAAGGIGQPLGLLIKMSPLVSELHLYDIANVKGVAADLSHCNTPAQVLDFTGPSELASCLKGVDVVVIPAGVPRKPGMTRDDLFNINASIVKSLVEAVADNCPEAFIHIISNPVNSTVPIAAEVLKQKGVYNPKKLFGVTTLDVVRANTFVAQKKNLNLIDVDVPVVGGHAGITILPLLSKTRPSVTFTDEEAEELTKRIQNAGTEVVEAKAGAGSATLSMAYAAARFVESSLRALAGDPDVYECTFIQSEATDLPFFASRVKLGKSGVESIVSADLEGVTECEAKALDALKAELKGSIEKGVAFASKQQEAAASV

SEQ ID NO: 51586 - DNA, 1071 bp, Glycine max
  CDS (1)..(1071)
atggaagcgcgtgcaggagccaatcagcgtattgcaagaatctctgctcatcttcagcctccaaatttccaggaagggagtgatgttcttcttaagagtgctgagtgcagagcaaagggtggggcacctggattcaaagttgcaattttgggggctgctgggggaattggtcaacccctttctttgctgatgaagatgaacccattggtttcagttcttcatctttatgatgttgtcaacacccctggtgtcactgctgatgttagccacatggacactggtgctgtggttcgtggctttctggggcagcaacaacttgagagtgcactcactggcatggacttggtaatcatacctgctggggtaccaaggaaacctgggatgacaagagatgatttatttaaaataaatgctggaattgtgaggaccctttgtgaaggaattgccaagagctgccccaatgcaattgtcaacttgattagtaatccagtgaattccacagttgctattgctgcagaggttttcaagaaagccggtacatatgatccaaagcgactactgggtgttacgacccttgatgttgtgagggcaaatacttttgtggcagaggtacttggagttgatccaagagaggttgatgttccagtggttggaggtcatgctggtgtcacaattttgcctcttttgtcacaggttaagcctcgcagtagcttcactgcagaagaaactgaatacctgacaaatcgcatccaaaatagtggaactgaagttgttgaggcaaaagctgggacaggttctgcaacactatcaatggcatatgcagctgccaagtttgctggtgcatgcctccgtggcttaaaaggagaagctggggtagtggagtgtgcttttgttgattctcaggttacggaacttcccttctttgcaaccaaggtacgtctaggtcgtgctggagcagaagaggtttatcaactgggtcccctgaatgagtatgaaaggattggattggaaaaggcaaagagagagttagcaggaagcatccagaagggtgtagagttcatcagaaaataa

SEQ ID NO: 51587 - protein, 356 aa, Glycine max
MEARAGANQRIARISAHLQPPNFQEGSDVLLKSAECRAKGGAPGFKVAILGAAGGIGQPLSLLMKMNPLVSVLHLYDVVNTPGVTADVSHMDTGAVVRGFLGQQQLESALTGMDLVIIPAGVPRKPGMTRDDLFKINAGIVRTLCEGIAKSCPNAIVNLISNPVNSTVAIAAEVFKKAGTYDPKRLLGVTTLDVVRANTFVAEVLGVDPREVDVPVVGGHAGVTILPLLSQVKPRSSFTAEETEYLTNRIQNSGTEVVEAKAGTGSATLSMAYAAAKFAGACLRGLKGEAGVVECAFVDSQVTELPFFATKVRLGRAGAEEVYQLGPLNEYERIGLEKAKRELAGSIQKGVEFIRK

SEQ ID NO: 51588 - DNA, 1230 bp, Glycine max
  CDS (1)..(1230)
atggcagcagcaccagcagctaccttcgctattggaaccaccggttccctcggccaaagaggaagctcgcttcctcaatcaaagtcctttgggttgaaattcaactctctgaatcatttgaagagcttctgtggcctcaaggccatgtcatccgtgagatgtgagtcggaatcctccttcttcggtaacaaaaccggtgctgctctacgggcgtcttttgcatccaaagctcaaaaggaaaacaaccacaactcgcagcctcaggcttcgtacaaagttgcggttcttggtgctgctggagggataggtcagccgctctcgcttctcatcaagatgtcgcctttagtttccaacctgcatctctatgatattgcgaatgtcaagggagttgctgctgatatcagtcactgcaacacaccctcacaggtcagggatttcactggagcttctgagttgccgaattgtttgaaggatgtgaatgttgttgtcatacccgccggtgttccaaggaagcctggcatgactcgtgacgaccttttcaacatcaatgctggcattgtcagggacttggtttctgctgttgcggattactgccctgatgcttttgttcaaattatcagtaaccctgtgaactctaccgtgcctattgccgcagaagttttgaaacagaagggtgtgtatgatcctaagaagctctttggggttaccacactggatgttgtgcgggcaaacacgtttgttgctcagaggaagaacctgaagctgattgacgttgatgtcccagttgttggtggccatgccgggattaccattcttcctctgttgtcaaagacaagaccctcggcgagtttcactgatgaagaaattgatgagttgactgtcaggattcaaagcgctggaactgaagttgttgtagcaaaggcaggcacagggtctgctaccttgtcgatggcatatgctgctgctagatttgttgaatcgtctcttcgcgcacttgatggagatggggatgtgtatgagtgctcatttgtggaatcaaacttgactgaccttccattctttgcttcaagggtgaaacttggtaggacaggagttgaggctttaattccatctgacctccaagggttgactggctatgagcagaaggctttggaagcacttaagcctgaactcaaggccagcatagagaaggggattgcttttgctcagaagcaaactgttgctgcttaa

SEQ ID NO: 51589 - protein, 409 aa, Glycine max
MAAAPAATFAIGTTGSLGQRGSSLPQSKSFGLKFNSLNHLKSFCGLKAMSSVRCESESSFFGNKTGAALRASFASKAQKENNHNSQPQASYKVAVLGAAGGIGQPLSLLIKMSPLVSNLHLYDIANVKGVAADISHCNTPSQVRDFTGASELPNCLKDVNVVVIPAGVPRKPGMTRDDLFNINAGIVRDLVSAVADYCPDAFVQIISNPVNSTVPIAAEVLKQKGVYDPKKLFGVTTLDVVRANTFVAQRKNLKLIDVDVPVVGGHAGITILPLLSKTRPSASFTDEEIDELTVRIQSAGTEVVVAKAGTGSATLSMAYAAARFVESSLRALDGDGDVYECSFVESNLTDLPFFASRVKLGRTGVEALIPSDLQGLTGYEQKALEALKPELKASIEKGIAFAQKQTVAA

SEQ ID NO: 51590 - DNA, 1077 bp, Triticum aestivum
  CDS (1)..(1077)
atggagcaaggcgccgactccgcggcggccaggcggatggccagggtcgcctcccacctccgcccgcccacctcgcaggaggaggaggtggccatcttgaagggctctaattgccgtgcaaaaggtgcagcaccagggttcaaggttgcagtcctgggtgcatctggtgggatcggccagcccctctcgctgcttatgaagatgaaccctcttgtttcggtgctccatttgtatgatgttgtcaacacacctggtgttacagctgacattagccatatgaacaccggtgctgtggtgcgtggcttcttgggtcagccacaattggaaagtgctcttactggaatggatcttgtcatcattcctgctggcattcctcggaaacctgggatgacaagggatgatttgttcaacatcaatgctggaattgttcggactctttgcgggggaattgcaaaatgctgcccaaatgcgattgtgaatgtgatcagtaaccctgtaaattccactgttccgattgctgctgaagtatttaaaaaagctggaacatatgatcctaagcgcctattgggggtgacaacacttgatgtagtgagagccaatacctttgtgggagaggttcttggacttgaccccagagatgtcaatgttcctgttgttggtgggcatgcaggagttacaatattaccactcctttcacaggtgaatcctccctgttcgtttacctcagaagaaattagttatctcacttcccgcatacagaatggtgggacagaagtagttgaggcgaaagcaggagcgggatccgcgactctttccatggcctacgcagcagccaggttcgcggacgcgtgcctgagagggctgcgcggcgacgccgggatagtggagtgctcctacatagcctctcaggtgacggagctggccttcttcgcgtccaaggtgcggctgggccgggccggcgtcgaggaggtcctgccgctcggcccgctgaacgagtttgagagggccgggctggagaaggccaagggcgagctcgccgagagcatccgcaagggcgtcgccttcgccaacaagtga

SEQ ID NO: 51591 - protein, 358 aa, Triticum aestivum
MEQGADSAAARRMARVASHLRPPTSQEEEVAILKGSNCRAKGAAPGFKVAVLGASGGIGQPLSLLMKMNPLVSVLHLYDVVNTPGVTADISHMNTGAVVRGFLGQPQLESALTGMDLVIIPAGIPRKPGMTRDDLFNINAGIVRTLCGGIAKCCPNAIVNVISNPVNSTVPIAAEVFKKAGTYDPKRLLGVTTLDVVRANTFVGEVLGLDPRDVNVPVVGGHAGVTILPLLSQVNPPCSFTSEEISYLTSRIQNGGTEVVEAKAGAGSATLSMAYAAARFADACLRGLRGDAGIVECSYIASQVTELAFFASKVRLGRAGVEEVLPLGPLNEFERAGLEKAKGELAESIRKGVAFANK

SEQ ID NO: 51592 - DNA, 1194 bp, Zea mays
  CDS (1)..(1194)
atggcatcaaccgttaccttcaacccagtgagcgcccaagctgcgctgatccaaaagccaaggaaccttggagccataagctatgctggcttaaagatgccggcatctgttagctctggctcagagtcgtcattcctgggctggaatgcatcccttcgggcagctgttactccaaggattgtgcccaagacaaagtctggatctcagatatctccacaggcatcttacaaggtggcagtgctgggtgctgccggtggcatcggtcaacccttgggcctgttggttaagatgtctcctctggtgtccgagctgcatctgtatgatattgctaatgtcaagggagttgctgcagatctcagccactgcaacacgcctgctcaggttcttgacttcactggaccctcagagttagccaactgcttgaaaggtgtggatgtcgttgtcatccctgccggggtcccaaggaagcctgggatgactcgcgatgacctttttaacatcaacgcaagcatcgtcaagacacttgttgaggctgttgcagacagttgcccagaggcgttcatccatatcatcagcaacccggtgaattccacggtgccaattgcagctgaggttctgaagcagaagggtgtctacaatcccaagaagcttttcggggttaccaccctggatgttgtcagggccaacacatttgtggcgcagaagaagaaccttaagctcatcgatgttgatgtcccagttgttggtggccatgctggaatcacaattctgccactgttatcgaagaccaggccatctgtcaccttcacagatgaggaaactgaggagctgacaaagaggatacagaatgccgggacagaggtggtggatgccaaggctggtgctgggtctgctaccctgtccatggcctatgccgctgccagattcgttgagtcttctctccgtgcgctggctggcgatccggatgtttatgagtgcacatttgttcagtctgagataactgacctgccattcttcgcatcaagagtcaagttgggcaagaatggtgttgagtccgtcatttctgccgacctccagggaatgactgagtatgaggccaaggcacttgaggcgctgaaggccgagttgaaggcaagcattgagaagggtattgctttcgtgaacaaacagcgggaagctgctgcatctgtttga

SEQ ID NO: 51593 - protein, 397 aa, Zea mays
MASTVTFNPVSAQAALIQKPRNLGAISYAGLKMPASVSSGSESSFLGWNASLRAAVTPRIVPKTKSGSQISPQASYKVAVLGAAGGIGQPLGLLVKMSPLVSELHLYDIANVKGVAADLSHCNTPAQVLDFTGPSELANCLKGVDVVVIPAGVPRKPGMTRDDLFNINASIVKTLVEAVADSCPEAFIHIISNPVNSTVPIAAEVLKQKGVYNPKKLFGVTTLDVVRANTFVAQKKNLKLIDVDVPVVGGHAGITILPLLSKTRPSVTFTDEETEELTKRIQNAGTEVVDAKAGAGSATLSMAYAAARFVESSLRALAGDPDVYECTFVQSEITDLPFFASRVKLGKNGVESVISADLQGMTEYEAKALEALKAELKASIEKGIAFVNKQREAAASV

SEQ ID NO: 51594 - DNA, 1038 bp, Hordeum vulgare
  CDS (1)..(1038)
atgaggatgtcgctgctgagatccgcgtcgcagcacctgcgccgccaccgctgcgactactcctcctcctcctccgccaccgcctcgccggagcggaaggtggccatcctcggcgcggcgggcggcatcggccagccgctggcgctgctcatgaagctcaacccgctcgtctcctccctctccctctacgacatcgccgccacgcccggcgtcgccgccgacgtctcccacatcaacacccgcgccctcgtcaaggggttcgtcggggacgaccagctcggggaggcgctggagggcgccgacctcgtcatcatccccgccggggtgccccggaagcccggcatgaccagggacgacctcttcaagatcaacgccgggatcgtcaagggcctctgcaccgccatcgccaggcactgccccaacgctctcgtcaatatgatcagcaaccctgtcaactcgacagtcccgattgcggcagaggtgtttaagaaggctggtacttatgatgagaagaagctgtttggtgtgaccactcttgatgttgttcgtgctaaaacattctacgctggaaaggcaaacgtgccagttactggggtgaatgttcctgttgttggtggccatgctggtatcactatcctgccactgttctcacaggctactcctgcaagtaatgcattgtcccatgaggaccttgtggccctcacgaagaggacacaggatggtgggacggaagttgttgaagcaaaagctggaaagggctcagcaacattgtcgatggcatatgctggtgcagttttcggagacgcatgcttgaaggggctcaatggagttcctgacatcatagagtgctcttttgtccaatcaactgtaacagagttgccattctttgcctccaaggtaaggctgggcaagagcggagtggaggaagtgcttgggctgggcgagctatcggccttggagaaggaggggctggaaagcctcaagggcgagctgctgtcttccatcgagaagggtgtcaagtttgcgcaggagagctag

SEQ ID NO: 51595 - protein, 345 aa, Hordeum vulgare
MRMSLLRSASQHLRRHRCDYSSSSSATASPERKVAILGAAGGIGQPLALLMKLNPLVSSLSLYDIAATPGVAADVSHINTRALVKGFVGDDQLGEALEGADLVIIPAGVPRKPGMTRDDLFKINAGIVKGLCTAIARHCPNALVNMISNPVNSTVPIAAEVFKKAGTYDEKKLFGVTTLDVVRAKTFYAGKANVPVTGVNVPVVGGHAGITILPLFSQATPASNALSHEDLVALTKRTQDGGTEVVEAKAGKGSATLSMAYAGAVFGDACLKGLNGVPDIIECSFVQSTVTELPFFASKVRLGKSGVEEVLGLGELSALEKEGLESLKGELLSSIEKGVKFAQES

SEQ ID NO: 51596 - DNA, 1188 bp, Hordeum vulgare
  CDS (1)..(1188)
atggcatcatcatctgctaccatcagttcacttggcgctcaggccgctctggtttcaaagccaaagaatcatggcatcagtggcacaaaggcatcctcatcaattagcttcggattggggtcctcattcctgggcaagacggcgtctcttcgggcatctgtaaccacaaggtttgcgccaaaggcaaagccggtggctcggatactaccggaggcatcttacaaagtggcggtacttggtgctgctgggggcatcggccaaccattgggcctgttgatcaagatgtctcctttggtctcagaactgcgcctgtacgatattgcaaatgtcaagggagtcgccgctgatctcagccactgcaacacgccttcccaggttatggacttcactggccccgcggaattggccagctgcctgaaaggtgtggatgttgttgtcatccccgccggtgtcccaagaaagccagggatgacccgtgatgaccttttcaacatcaacgccggcattgtcaagtcacttatagaggctgttgctgacaattgccctgaggccttcatctatattatcagcaacccagtcaactccacagtgccgattgctgctgaaattctgaaacagaagggtgtatacaaccccaagaagcttttcggagtttccaccctagatgttgtcagagctaacacatttgtagcgcagaagaagggcctcaagctcattgacgttgatgtcccagttgttggtggtcatgctggaattacaatcctgcctttgttgtcgaagaccaggccatctgtcaccttcacggacgaggaaactgaagagctgaggaagaggatacagaacgccgggacagaggtggtggaggcgaaagcgggcgctggatctgctaccctgtccatggcttatgccgctgccagatttgtcgagtcttcactccgcgcactggctggtgatccagatgtttacgagtgcacatatgttcagtctgagttaactgagttgccattctttgcttccagagttaagcttgggaagaatggcgttgagtccatcatttcttccgacctggagggactgaccgagtatgaggccaatgcactcgaggcattgaagcctgagctgaaggccagcatcgagaagggcattgagtttgcgcacaaacagcagggagccgcggcgtctgtttga

SEQ ID NO: 51597 - protein, 395 aa, Hordeum vulgare
MASSSATISSLGAQAALVSKPKNHGISGTKASSSISFGLGSSFLGKTASLRASVTTRFAPKAKPVARILPEASYKVAVLGAAGGIGQPLGLLIKMSPLVSELRLYDIANVKGVAADLSHCNTPSQVMDFTGPAELASCLKGVDVVVIPAGVPRKPGMTRDDLFNINAGIVKSLIEAVADNCPEAFIYIISNPVNSTVPIAAEILKQKGVYNPKKLFGVSTLDVVRANTFVAQKKGLKLIDVDVPVVGGHAGITILPLLSKTRPSVTFTDEETEELRKRIQNAGTEVVEAKAGAGSATLSMAYAAARFVESSLRALAGDPDVYECTYVQSELTELPFFASRVKLGKNGVESIISSDLEGLTEYEANALEALKPELKASIEKGIEFAHKQQGAAASV

SEQ ID NO: 51598 - DNA, 1077 bp, Hordeum vulgare
  CDS (1)..(1077)
atggagcaaggcgccgactcaccggcggcgaggcggatggcgagggtcgcgtcccacctccgcccgcccacctcgcagatggaggaggtggccatcttgaagggctctaattgccgtgcgaaaggtgcggcgccagggttcaaggtcgctgtcctgggtgcatctggtgggattggccagccactctcgctgcttatgaagatgaaccctcttgtttcggtgctccatttatacgatgttgtcaacacacctggtgtcacagctgacattagccacatgaacactggtgctgtggtgcgtggctttttgggtcagccacaattggagagtgctcttactggaatggatcttgtgatcattcctgctggcattcctcggaaacctgggatgacaagggatgatttgttcaacatcaatgctgggatcgttcggactctttgcgagggaattgcaaaatgctgcccaaatgcgattgtgaacgtgatcagtaaccctgtaaattccacagttccgattgctgctgaagtatttaaaaaagctggaacatatgatcctaagcgcctattgggggtgacaactcttgatgtagtgagagccaatacctttgtgggagaggttcttggacttgatcccagagatgtcaatgttcctgttgttggcgggcatgcaggagttacgatattaccactcctttcacaggtgaatcctccctgttcgtttacctcagaagaaattagttatctcacttctcgcatacagaatggtgggacagaagtagttgaggcgaaagcgggggcaggatccgcaactctttccatggcctacgcagcagccaaattcgcggacgcctgcctgagagggctgcgcggcgacgccgggatagtcgagtgctcgtacatagcctctcaggtgacggagctgcccttcttcgcgtccaaggtgcggctgggccgggccggcgtcgaggaggtcctgccgctcggcccgctcaacgagtttgagagggccgggctggagaaggcccagggcgagctggccgagagcatccgcaagggcgtcgcgttcgccaacaagtga

SEQ ID NO: 51599 - protein, 358 aa, Hordeum vulgare
MEQGADSPAARRMARVASHLRPPTSQMEEVAILKGSNCRAKGAAPGFKVAVLGASGGIGQPLSLLMKMNPLVSVLHLYDVVNTPGVTADISHMNTGAVVRGFLGQPQLESALTGMDLVIIPAGIPRKPGMTRDDLFNINAGIVRTLCEGIAKCCPNAIVNVISNPVNSTVPIAAEVFKKAGTYDPKRLLGVTTLDVVRANTFVGEVLGLDPRDVNVPVVGGHAGVTILPLLSQVNPPCSFTSEEISYLTSRIQNGGTEVVEAKAGAGSATLSMAYAAAKFADACLRGLRGDAGIVECSYIASQVTELPFFASKVRLGRAGVEEVLPLGPLNEFERAGLEKAQGELAESIRKGVAFANK

SEQ ID NO: 51600 - DNA, 1209 bp, Brassica napus
  CDS (1)..(1209)
atggcagcagcttcttcgatttcaattggatcaaccgttcccagagcctcctcctcctcctcctcctcctccttaccgcagtcaagggcacaagctgtcaacttcaactactccctccctcgtttcaccgctctgagatcatccactctcctctctggaccagaatcctcatctttcgccaagtctctccgcggttccgtaatgaaatcccaatcaaccgacacgaagccgtacggattgaacatcaacgcatcgtacaaagtggcggtcctcggtgctgccggagggatcggtcagcctctgtcacttctcatcaaaatgtctcctctcgtctccaccctccacctctacgatatcgccaacgtcaagggagtcgccgctgatttgagccactgcaacactccctctcaggttcgtgatttcaccggaccggctgagctggctgattgtttgaaagatgtcaacgtcgttgtcatccctgctggtgtgccgagaaagcccggtatgacccgtgacgatctcttcaacatcaacgccggtatagtgaagacgcttgttgaggctgtcgctgataactgtcctaacgcgttcatccacatcatcagcaaccctgttaactccaccgtccccattgctgctgaggtgttgaagaagaaaggtgtctatgatcccaagaagctcttcggtgtcaccactttggatgttgtgagggctaacacctttgtttctcacaaaaagaacttgaagctcatcgatgtcgatgttcccgtcatcggtggccacgctggaatcaccattctgcctcttctatccaagaccaagccttcggtcagcttcactgacgaagagatcgagaaactcactctgaggattcagaacgctggaaccgaggtggtggatgctaaggcgggtgctggctcggctactttgtcgatggcctatgccgcagcgagatttgtggagtcgtctcttcgtgctcttgacggagatggagatgtttacgagtgctcgttcgtggactccactctcactgatcttcctttctttgcatcacggatcaagattgggaggaacggagttgaagctgtgattgagtctgacctccaagggctgactgagtacgagcacaaggcactagaagctcttaagccagaactgaaagctagcatcgaaaagggtgttgcattcgcaaacaaacctgctaactaa

SEQ ID NO: 51601 - protein, 402 aa, Brassica napus
MAAASSISIGSTVPRASSSSSSSSLPQSRAQAVNFNYSLPRFTALRSSTLLSGPESSSFAKSLRGSVMKSQSTDTKPYGLNINASYKVAVLGAAGGIGQPLSLLIKMSPLVSTLHLYDIANVKGVAADLSHCNTPSQVRDFTGPAELADCLKDVNVVVIPAGVPRKPGMTRDDLFNINAGIVKTLVEAVADNCPNAFIHIISNPVNSTVPIAAEVLKKKGVYDPKKLFGVTTLDVVRANTFVSHKKNLKLIDVDVPVIGGHAGITILPLLSKTKPSVSFTDEEIEKLTLRIQNAGTEVVDAKAGAGSATLSMAYAAARFVESSLRALDGDGDVYECSFVDSTLTDLPFFASRIKIGRNGVEAVIESDLQGLTEYEHKALEALKPELKASIEKGVAFANKPAN

SEQ ID NO: 51602 - DNA, 1077 bp, Brassica napus
  CDS (1)..(1077)
atggagttccgtggagatgccaacaagaggattgctatgatatcagctcatcttcaaccttctttcactcctcagatggaggccaagaactctgtgatgggacgagaaaactgcagagcgaaaggagggaatccaggattcaaagtagccattcttggagctgcaggtggaataggacaatcactatccttgttaatgaagatgaaccctctcgtctctttacttcatctctacgatgttgtcaatgctcctggagtcactgctgacgttagccatatggacactggagctgttgttagaggattcttgggagccaagcaactcgaggacgccctaaccggtatggatcttgtgatcataccagctggtgtgccgaggaaaccagggatgacacgtgatgatctctttaaaatcaatgctgggattgttaagacactatgtgaaggagtagcgaaatgctgtcctaatgctatagtcaacttgattagtaaccctgtgaactctactgttgctattgctgctgaggttttcaagaaagctggaacttatgatcctaagaagctccttggtgttactacacttgatgttgctcgtgccaacacatttgtggctgaagttcttggccttgatccaagagaagtcgatgtaccagtcgttggaggacatgctggagtcacaatcttgccactattgtcacaggttaaaccacctagcagcttcacaccatcagagattgagtacctcacaaacaggattcaaaacggtggaactgaagttgtggaggcaaaagctggagctggatctgcaacactttcaatggcatatgctgcagccaagtttgcagatgcttgccttcgcgggttaagaggagatgcgaatgtcattgaatgctcttttgttgcttcacaggtgacagagttagcattctttgcaaccaaagtgcgtcttggacgtacaggagcagaggaagtgttccagcttgggcccttgaacgaatatgaaagggttggtctggagaaagcaaaagaagaattagctggaagcattcagaaaggtgtcgacttcatcaggaaatga

SEQ ID NO: 51603 - protein, 358 aa, Brassica napus
MEFRGDANKRIAMISAHLQPSFTPQMEAKNSVMGRENCRAKGGNPGFKVAILGAAGGIGQSLSLLMKMNPLVSLLHLYDVVNAPGVTADVSHMDTGAVVRGFLGAKQLEDALTGMDLVIIPAGVPRKPGMTRDDLFKINAGIVKTLCEGVAKCCPNAIVNLISNPVNSTVAIAAEVFKKAGTYDPKKLLGVTTLDVARANTFVAEVLGLDPREVDVPVVGGHAGVTILPLLSQVKPPSSFTPSEIEYLTNRIQNGGTEVVEAKAGAGSATLSMAYAAAKFADACLRGLRGDANVIECSFVASQVTELAFFATKVRLGRTGAEEVFQLGPLNEYERVGLEKAKEELAGSIQKGVDFIRK

SEQ ID NO: 51604 - DNA, 1080 bp, Brassica napus
  CDS (1)..(1080)
atggagtttcgtggagatgccacccagagaattgctatgatatcagctcatcttcaaccttctttcacttctcagatggaggggaagaacactgtgatgggaagagaaaactgcagagggaaaggagggaaagcaggattcaaagtagcaatacttggagctgcaggtgggataggacaatcactatcgttgctaatgaagatgaaccctctcgtctctttacttcatctctacgatgttgtcaatgctcccggagtcactgctgacgtcagccatatggacactggagctgttgttagaggattcttgggagccaagcaacttgcggatgccctaacgggtatggatcttgtgatcataccagctggtgtgccgaggaaaccagggatgacacgcgatgatctcttcaaaatcaatgctgggattgttaagacgctatgtgagggagtagcgaaatgctgtcctaatgctatagtcaacttgattagtaaccctgtgaactccactgtggccattgccgctgaggttttcaagaaagctggaacttatgatcctaagaagctccttggagttactacactcgatgttgctcgtgccaacacatttgtggctgaagttcttggacttgatccaagagaagtcgatgtaccagtagttgggggacacgccggagtcacgatcttgccactattgtcacaggtgaaaccacctagtagttttacaccttcggaaacagagtatctcacgaacaggattcaaaacggtgggactgaagtagtggaggcaaaagctggagctggatcagcaacactttcaatggcatatgctgcagccaagtttgcggatgcttgccttcgcgggttaagaggagatgcgaatgtggttgaatgctctttcgttgcttcacaggtgacagagttacctttctttgcaacgaaagtgcgtcttggacgtacaggagcagaggaagtgtatcagcttggacccttgaacgaatacgaaagggttggtctggagaaagcaaaagaagagttagcaggaagtattcagaaaggtgtcgacccgggaaatgataactga

SEQ ID NO: 51605 - protein, 359 aa, Brassica napus
MEFRGDATQRIAMISAHLQPSFTSQMEGKNTVMGRENCRGKGGKAGFKVAILGAAGGIGQSLSLLMKMNPLVSLLHLYDVVNAPGVTADVSHMDTGAVVRGFLGAKQLADALTGMDLVIIPAGVPRKPGMTRDDLFKINAGIVKTLCEGVAKCCPNAIVNLISNPVNSTVAIAAEVFKKAGTYDPKKLLGVTTLDVARANTFVAEVLGLDPREVDVPVVGGHAGVTILPLLSQVKPPSSFTPSETEYLTNRIQNGGTEVVEAKAGAGSATLSMAYAAAKFADACLRGLRGDANVVECSFVASQVTELPFFATKVRLGRTGAEEVYQLGPLNEYERVGLEKAKEELAGSIQKGVDPGNDN

SEQ ID NO: 51606 - DNA, 1209 bp, Brassica napus
  CDS (1)..(1209)
atggcagcagcttcttcgatttcaattggatcaaccgttcccagagcctcctcctcctcctcctcctcctccttaccgcagtcaagggcacaagctgtcaacttcaactactccctccctcgtttcaccgctctgaggtcatccactctcctctctggaccagattcctcttctttcgccaagtctctccgcggctccgtaacgaaacctcaatcaacagacacgaagccctacggattgaacatcaacgcttcgtacaaagtggcggtcctcggtgctgccggagggatcggccagcctctgtcccttctcatcaaaatgtctcctctcgtctccaccctccacctctacgatatcgccaacgtcaagggagtcgccgctgatctgagccactgcaacactccctctcaggtccgtgatttcaccggaccggctgagctggccgattgtttgaaagatgtcaacgtcgttgtcatccccgctggtgtgccgagaaagcccggtatgacccgtgacgatctcttcaacatcaacgccggtatagtgaagacgcttgttgaggctgtcgctgataactgtcctaacgccttcatccacatcatcagcaaccctgttaactccaccgtccccattgctgctgaggtgttgaggaagaaaggtgtctatgatcccaagaagctcttcggtgtcaccactttggatgttgtgagggctaacacctttgtttctcacaaaaagaacttgaagctcatcgatgtcgatgttccggtcatcggtggccacgctggaatcaccattctgcctcttttatcgaagaccaagccttcggtcagcttcactgacgaagagatcgagaaactcactgtgaggattcagaacgctggaaccgaggtggtggatgctaaggcgggtgctggctcggctactttgtcgatggcgtatgccgcagcgagatttgtggagtcgtctcttcgtgctcttgacggagatggagatgtttacgagtgctctttcgtggactctactctcactgatcttcctttctttgcatcacggatcaagattgggaggaacggagttgaagctgtgattgagtctgacctccaagggctgactgagtatgagcacaaggcgttagaagctcttaagcctgaactgaaagctagcatcgaaaagggtgttgcattcgcaaacaaacctgctaactaa

SEQ ID NO: 51607 - protein, 402 aa, Brassica napus
MAAASSISIGSTVPRASSSSSSSSLPQSRAQAVNFNYSLPRFTALRSSTLLSGPDSSSFAKSLRGSVTKPQSTDTKPYGLNINASYKVAVLGAAGGIGQPLSLLIKMSPLVSTLHLYDIANVKGVAADLSHCNTPSQVRDFTGPAELADCLKDVNVVVIPAGVPRKPGMTRDDLFNINAGIVKTLVEAVADNCPNAFIHIISNPVNSTVPIAAEVLRKKGVYDPKKLFGVTTLDVVRANTFVSHKKNLKLIDVDVPVIGGHAGITILPLLSKTKPSVSFTDEEIEKLTVRIQNAGTEVVDAKAGAGSATLSMAYAAARFVESSLRALDGDGDVYECSFVDSTLTDLPFFASRIKIGRNGVEAVIESDLQGLTEYEHKALEALKPELKASIEKGVAFANKPAN

SEQ ID NO: 51608 - DNA, 1026 bp, Brassica napus
  CDS (1)..(1026)
atgttcagatccatgcttgtccgatcctcctcgtcggcgaagcagtcgcttatccgccgtaacttgtcttccggatcggtcccggagcgtaaagtcgccatcttgggagccgccggtggaatcggtcagcctctggctctcctcatgaaactcaaccccctcgtctctagcctctcactctacgatatcgcaaacacacctggagttgccgctgatgttggtcacatcaacaccagatctgaggtagttggatacatgggagatgataacttggcgaaagctcttgaaggagctgacctcgttatcatccctgctggtgttcccaggaagcctggtatgacccgtgatgatcttttcaacatcaatgctggcattgtcaagaacctttgctctgccatcgccaagtactgccctcatgcacttgttaatatgatcagcaacccagtgaactctactgttccaattgcagcagagatcttcaagaaggctggtatgtacgatgaaaagaagctgtttggtgttaccactcttgacgttgttagggccaagactttctatgctggaaaagctaatgtccctgttgcagaagtgaacgttcctgtgattggtggtcatgctggggttactattctcccactcttctcccaggccactcctcaagccaacttgtcaggtgatgtactcacagccctcaccaagcgtactcaagatggaggtacagaagttgtggaggctaaagcaggaaaaggttcagctacattgtctatggcctatgctggagcactctttgctgatgcatgcttgaagggactcaacggagttcccgatgttgtagaatgctcatacgtgcaatccacaatcactgagcttcctttctttgcctcaaaggtgaggttggggaagaacggtgtggaggaggttcttgatttggggccactctcagactttgagaaagaagggttggaagcactgaagccagaactcaagtcttctatcgagaagggagttaagtttgccaaccaatga

SEQ ID NO: 51609 - protein, 341 aa, Brassica napus
MFRSMLVRSSSSAKQSLIRRNLSSGSVPERKVAILGAAGGIGQPLALLMKLNPLVSSLSLYDIANTPGVAADVGHINTRSEVVGYMGDDNLAKALEGADLVIIPAGVPRKPGMTRDDLFNINAGIVKNLCSAIAKYCPHALVNMISNPVNSTVPIAAEIFKKAGMYDEKKLFGVTTLDVVRAKTFYAGKANVPVAEVNVPVIGGHAGVTILPLFSQATPQANLSGDVLTALTKRTQDGGTEVVEAKAGKGSATLSMAYAGALFADACLKGLNGVPDVVECSYVQSTITELPFFASKVRLGKNGVEEVLDLGPLSDFEKEGLEALKPELKSSIEKGVKFANQ

SEQ ID NO: 51610 - DNA, 1077 bp, Brassica napus
  CDS (1)..(1077)
atggagttccgtggagatgcctacaagaggattgctatgatatcagctcatcttcaaccttctttcactcctcagatggaggccaagaactctgtgatgggactagaaagctgtagagcgaaaggagggaacccaggattcaaagtagccattcttggagctgcaggtggaataggacagtctctatccttgttaatgaaaatgaaccctctcgtctctttacttcatctctacgatgttgtcaatgctcctggagtcactgctgatgttagccatatggacactggagctgttgttagaggattcttgggagccaagcaactcgaggacgccctaaccggtatggatcttgtgatcataccagctggtgtgccgaggaaaccagggatgacacgtgatgatctctttaaaatcaatgctgggattgttaagacactatgtgaaggagtagcgaaatgctgtcctaatgctatagttaacttgattagcaaccctgtgaactctactgtcgctattgctgctgaggttttcaagaaagctggaacttatgatcctaagaagcttcttggtgttactacacttgatgttgctcgtgccaacacatttgtggctgaagttcttggccttgatccaagagaagtcgatgtaccagtcgttggaggacatgctggagtcacaatcttgccactattgtcacaggttaaaccacctagcagcttcacaccatcagagattgagtacctcacaaaccggattcaaaacggtggaactgaagttgtggaggcaaaagctggagctggatctgcaacactttcaatggcatatgctgcagccaagttcgcagatgcttgccttcgcgggttaagaggagatgcgaatgtcattgaatgctcttttgttgcttcacaggtgacagagttagctttctttgcaaccaaagtgcgtcttggacgtacaggagcagaggaagtgttccagcttgggcccctgaacgaatatgaaagggttggtctggagaaagcaaaagaagaattagctggaagcattcagaaaggtgttgacttcatcaggaaatga

SEQ ID NO: 51611 - protein, 358 aa, Brassica napus
MEFRGDAYKRIAMISAHLQPSFTPQMEAKNSVMGLESCRAKGGNPGFKVAILGAAGGIGQSLSLLMKMNPLVSLLHLYDVVNAPGVTADVSHMDTGAVVRGFLGAKQLEDALTGMDLVIIPAGVPRKPGMTRDDLFKINAGIVKTLCEGVAKCCPNAIVNLISNPVNSTVAIAAEVFKKAGTYDPKKLLGVTTLDVARANTFVAEVLGLDPREVDVPVVGGHAGVTILPLLSQVKPPSSFTPSEIEYLTNRIQNGGTEVVEAKAGAGSATLSMAYAAAKFADACLRGLRGDANVIECSFVASQVTELAFFATKVRLGRTGAEEVFQLGPLNEYERVGLEKAKEELAGSIQKGVDFIRK

SEQ ID NO: 51612 - DNA, 1062 bp, Glycine max
  CDS (1)..(1062)
atggaggcaaattcaggtgccagcgaccgaatttcgagaatcgccggccacctccgcccccagagagaggatgatgtttgtttgaagcgtagcgattgccgtgcaaaaggtggggtctccggattcaaggtggccatattgggtgccgcaggaggcatagggcaacctctggcgatgttgatgaagatgaatccactcgtttcacttctccacctctacgatgttgttaacacccctggcgtcacttctgatataagtcacatggacaccggcgctgttgttcgaggatttttggggcagcagcagcttgaggatgcacttataggcatggacttggtgatcatccctgctggtgttcctcgtaaacctggaatgacaagagatgatctcttcaatataaatgctggaattgttaaaacattgtgtgaagcaattgcaaagtgctgtcctaaagccattgtcaatgtgataagcaatccagttaactccacagtcccgattgcagccgaagttttcaaaagagctggtacttacgatcccaagagacttttgggagtcactatgcttgatgttgttagagccaatacgtttgtggcagaagttctgggtgttgatccaagggatgtggatgtcccagttgttgggggacatgctggaatcacaattttacctcttctttctcagattaaacctccttgctctttcaccccaaaagaaattgagtacctgactggtcgcatacaaaacggtggaactgaagttgttgaggccaaagctggagctggttctgcaacactatcaatggcatatgctgctgttaaatttgcagatgcatgccttcatgccctgagaggagatgctggcatcattgaatgtgcatatgttgcttcacaggtgactgaactcccattctttgcatcaaaagtacgacttggccgagttggggtggaggaaattcttcctcttggtcccctgaatgattatgagagggagagtttggaaaaggccaagaaagagttagcagcaagcattgagaagggcatttctttcatcagaaaatga

SEQ ID NO: 51613 - protein, 353 aa, Glycine max
MEANSGASDRISRIAGHLRPQREDDVCLKRSDCRAKGGVSGFKVAILGAAGGIGQPLAMLMKMNPLVSLLHLYDVVNTPGVTSDISHMDTGAVVRGFLGQQQLEDALIGMDLVIIPAGVPRKPGMTRDDLFNINAGIVKTLCEAIAKCCPKAIVNVISNPVNSTVPIAAEVFKRAGTYDPKRLLGVTMLDVVRANTFVAEVLGVDPRDVDVPVVGGHAGITILPLLSQIKPPCSFTPKEIEYLTGRIQNGGTEVVEAKAGAGSATLSMAYAAVKFADACLHALRGDAGIIECAYVASQVTELPFFASKVRLGRVGVEEILPLGPLNDYERESLEKAKKELAASIEKGISFIRK

SEQ ID NO: 51614 - DNA, 1023 bp, Zea mays
  CDS (1)..(1023)
atgaggccgtcgctgatgagatccacctcccagctcctccgccgccggagctactcctccgcatccgggcagcccgagcggaaggtggccatcctcggggcggcggggggcatcgggcagccgctgtcgctgctcatgaagctcaacccactcgtctcctccctctcgctctacgatatcgccggcaccccaggtgtcgcggccgacgtctcccacatcaactcccccgccctggtgaagggtttcatgggtgatgagcagcttggggaagcgctagagggctcggacgtggtgatcataccggccggcgtcccgaggaagcccggcatgaccagggacgacctattcaatatcaacgctggcatcgttaagaacctcagcaccgccatcgccaagtactgccccaatgcccttgtcaacatgatcagcaaccctgtgaattcaactgtaccgattgctgctgaggttttcaagaaggctgggacatatgatgagaagaagttgtttggcgtgaccacccttgatgttgttcgtgctaagactttctatgctgggaaggctaatttaccagttaccgatgtgaatgtccctgttgttggtggtcatgcgggtatcactatcctgccgttgttctcacaggccacccctgcaaccaacgcattgtctgatgaagacatcaaggctctcaccaagaggacacaggatggtggaactgaagttgtcgaggcaaaggctgggaagggctctgcaaccttgtccatggcgtatgctggtgctgtttttgcagatgcatgcttgaagggtctcaatggagttccggatattgttgagtgctcttttgttcaatcaactgtaacagagcttccattctttgcatctaaggtaaggcttgggaagaatggagttgaggaagtgcttggattaggtgagctgtcggactttgagaaagaagggttggagaagctcaagagcgagctcaagtcttcgattgagaagggtatcaagtttgcaaatgataactag

SEQ ID NO: 51615 - protein, 340 aa, Zea mays
MRPSLMRSTSQLLRRRSYSSASGQPERKVAILGAAGGIGQPLSLLMKLNPLVSSLSLYDIAGTPGVAADVSHINSPALVKGFMGDEQLGEALEGSDVVIIPAGVPRKPGMTRDDLFNINAGIVKNLSTAIAKYCPNALVNMISNPVNSTVPIAAEVFKKAGTYDEKKLFGVTTLDVVRAKTFYAGKANLPVTDVNVPVVGGHAGITILPLFSQATPATNALSDEDIKALTKRTQDGGTEVVEAKAGKGSATLSMAYAGAVFADACLKGLNGVPDIVECSFVQSTVTELPFFASKVRLGKNGVEEVLGLGELSDFEKEGLEKLKSELKSSIEKGIKFANDN

SEQ ID NO: 51616 - DNA, 1182 bp, Zea mays
  CDS (1)..(1182)
atgtcacaatgtgatatactctacttccaaaaaatcaatcgaaagttccaaatcctttgttctcgtcgcataccgcaccgagctcactccccctttcgccttcgtcccagatctcaagcccgccgcagagaacgacaggacccaaaccccaactccacaatgaggccgtcgctgatcagatccacctcccagctcctccgccgccggaactactcctccgcatccgggcagcccgagcggaaggtggccatcctcggggcggcggggggcatcgggcagccgctgtcgctgctcatgaagctcaacccactcgtctcctccctctcgctctacgatatcgccggcaccccaggtgtcgcggccgacgtctcccacatcaactcccccgccctggtgaagggtttcatgggtgatgagcagcttggggaagcgctagagggctcggacgtggtgatcataccggccggcgtcccgaggaagcccggcatgaccagggacgacctattcaatatcaacgctggcatcgttaagaacctcagcaccgccatcgccaagtactgccccaatgcccttgtcaacatgatcagcaaccctgtgaattcaactgtaccgattgctgctgaggttttcaagaaggctgggacatatgatgagaagaagttgtttggcgtgaccacccttgatgttgttcgtgctaagactttctatgctgggaaggctaatttaccagttaccgatgtgaatgtccctgttgttggtggtcatgcgggtatcactatcctgccgttgttctcacaggccacccctgcaaccaacgcattgtctgatgaagacatcaaggctctcaccaagaggacacaggatggtggaactgaagttgtcgaggcaaaggctgggaagggctctgcaaccttgtccatggcgtatgctggtgctgtttttgcagatgcatgcttgaagggtctcaatggagttccggatattgttgagtgctcttttgttcaatcaactgtaacagagcttccattctttgcatctaaggtaaggcttgggaagaatggagttgaggaagtgcttggattaggtgagctgtcggactttgagaaagaagggttggagaagctcaagagcgagctcaagtcttcgattgagaagggtatcaagtttgcaaatgataactag

SEQ ID NO: 51617 - protein, 393 aa, Zea mays
MSQCDILYFQKINRKFQILCSRRIPHRAHSPFRLRPRSQARRRERQDPNPNSTMRPSLIRSTSQLLRRRNYSSASGQPERKVAILGAAGGIGQPLSLLMKLNPLVSSLSLYDIAGTPGVAADVSHINSPALVKGFMGDEQLGEALEGSDVVIIPAGVPRKPGMTRDDLFNINAGIVKNLSTAIAKYCPNALVNMISNPVNSTVPIAAEVFKKAGTYDEKKLFGVTTLDVVRAKTFYAGKANLPVTDVNVPVVGGHAGITILPLFSQATPATNALSDEDIKALTKRTQDGGTEVVEAKAGKGSATLSMAYAGAVFADACLKGLNGVPDIVECSFVQSTVTELPFFASKVRLGKNGVEEVLGLGELSDFEKEGLEKLKSELKSSIEKGIKFANDN

SEQ ID NO: 51618 - DNA, 1194 bp, Zea mays
  CDS (1)..(1194)
atggcatcaaccgttaccttcaacccagtgagcgcccaagctgcgctgatccaaaagccaaggaaccttggagccataagctatgctggcttaaagatgccggcatctgttagctctggctcagagtcgtcattcctgggctggaatgcatcccttcgggcagctgttactccaaggattgtgcccaaggcaaagtctggatctcagatatctccacaggcatcttacaaggtggcagtgctgggtgctgccggtggcatcggtcaacccttgggcctgttggttaagatgtctcctctggtgtccgagctgcatctgtatgatattgctaatgtcaagggagttgctgcagatctcagccactgcaacacgcctgctcaggttcttgacttcactggaccctcagagttagccaactgcttgaaaggtgtggatgtcgttgtcatccctgccggggtcccaaggaagcctgggatgactcgcgatgacctttttaacatcaacgcaagcatcgtcaagacacttgttgaggctgttgcagacagttgcccagaggcgttcatccatatcatcagcaacccggtgaattccacggtgccaattgcagctgaggttctgaagcagaagggtgtctacaatcccaagaagcttttcggggttaccaccctggatgttgtcagggccaacacatttgtggcgcagaagaagaaccttaagctcatcgatgttgatgtcccagttgttggtggccatgctggaatcacaattctgccactgttatcgaagaccaggccatctgtcaccttcacagatgaggaaactgaggagctgacaaagaggatacagaatgccgggacagaggtggtggatgccaaggctggtgctgggtctgctaccctgtccatggcctatgccgctgccagattcgttgagtcttctctccgtgcgctggctggcgatccggatgtttatgagtgcacatttgttcagtctgagataactgacctgccattcttcgcatcaagagtcaagttgggcaagaatggtgttgagtccgtcatttctgccgacctccagggaatgactgagtatgaggccaaggcacttgaggcgctgaaggccgagttgaaggcaagcattgagaagggtattgctttcgtgaacaaacagcgggaagctgctgcatctgtttga

SEQ ID NO: 51619 - protein, 397 aa, Zea mays
MASTVTFNPVSAQAALIQKPRNLGAISYAGLKMPASVSSGSESSFLGWNASLRAAVTPRIVPKAKSGSQISPQASYKVAVLGAAGGIGQPLGLLVKMSPLVSELHLYDIANVKGVAADLSHCNTPAQVLDFTGPSELANCLKGVDVVVIPAGVPRKPGMTRDDLFNINASIVKTLVEAVADSCPEAFIHIISNPVNSTVPIAAEVLKQKGVYNPKKLFGVTTLDVVRANTFVAQKKNLKLIDVDVPVVGGHAGITILPLLSKTRPSVTFTDEETEELTKRIQNAGTEVVDAKAGAGSATLSMAYAAARFVESSLRALAGDPDVYECTFVQSEITDLPFFASRVKLGKNGVESVISADLQGMTEYEAKALEALKAELKASIEKGIAFVNKQREAAASV

SEQ ID NO: 51620 - DNA, 1023 bp, Zea mays
  CDS (1)..(1023)
atgaggccggcgctgctcaagtccacggccgagctcctccgccgcagccgcggctacgcctcctcggccaacccggagcggaaggtggccatcctgggcgctgcgggcggcatcgggcagccgctctccctcctcatgaagctcaacccgctcgtctcctccctctccctctatgatatcgccgggacccccggcgtcgcggccgacgtctcccacatcaactcccccgccctggtgaaggggttcatgggggacgaccagctcggggaggcgctcgagggctccgacgtcgtcatcatcccagccggggtgcccaggaagcccggcatgactagggacgacctcttcaacatcaacgccggcatcgttaaggggctctgcactgccatcgccaagcactgccccaacgctcttgtcaatatgatcagcaaccctgtcaactccactgtcccgattgcggcggaggttttcaagaaggctggtacttatgatgagaagaagctgtttggtgtgactactcttgatgttgttcgtgctaaaactttttatgctggaaaagcgggtgtgccagttactgaggtgaatgttcctgttgttggaggccatgcgggtattactattctgccactcttctcgcaggccactcctgcaagcaattcgttgtcccaagaagacattgaggccctcaccaagaggacacaagatggtgggacagaggtggttgaagcaaaggcgggaaaaggctctgcaacgttgtccatggcatatgctggtgctgtttttgcagatgcatgtttgaagggtctgaatggagttccagacattgtagagtgctcttttgtgcaatcaactgtgacagagttgccattctttgcctccaaggttcggctcggcaagaatggagtggaggaagtgcttggtctgggtgagctcaacgagttcgagaagaaggggctggaaaacctcaagggcgagctcaagtcttccatcgacaagggtatcaagtttgcccacgggaactag

SEQ ID NO: 51621 - protein, 340 aa, Zea mays
MRPALLKSTAELLRRSRGYASSANPERKVAILGAAGGIGQPLSLLMKLNPLVSSLSLYDIAGTPGVAADVSHINSPALVKGFMGDDQLGEALEGSDVVIIPAGVPRKPGMTRDDLFNINAGIVKGLCTAIAKHCPNALVNMISNPVNSTVPIAAEVFKKAGTYDEKKLFGVTTLDVVRAKTFYAGKAGVPVTEVNVPVVGGHAGITILPLFSQATPASNSLSQEDIEALTKRTQDGGTEVVEAKAGKGSATLSMAYAGAVFADACLKGLNGVPDIVECSFVQSTVTELPFFASKVRLGKNGVEEVLGLGELNEFEKKGLENLKGELKSSIDKGIKFAHGN

SEQ ID NO: 51622 - DNA, 1083 bp, Zea mays
  CDS (1)..(1083)
atgggtcagcagcagcaagggccggcggccaggcggatggccacgctcgcctcccacctgcgccatccctccgtctctcaccctcagatggaagatgttcccctcttgaggggatccaattgccgtgcaaaaggtgcggcgccaggcttcaaagtcgcgatcttgggtgcagcaggtgggattgggcagccacttgcgctattgatgaagatgaaccctcttgtttcggtgctccatctatacgatgtcgtcaacgcacctggtgtcacagccgacatcagccacatgaacactggtgctgtggtacgtggcttcttgggccagccacagttggaaaatgccctggctggaatggatcttgtaataattcctgctggtgtccctcggaaacctgggatgacaagggatgatttgttcaacataaatgctggaatagtccgtaccctgtgtgaaggaattgcaaaatgctgccctaatgcaattgtgaatgtgatcagtaatcctgtcaactctaccgtcccaattgctgctgaagttttcaagaaagctggaacttatgaccctaagcggcttttaggtgtgaccacacttgacgtagtgagagcaaatacgtttgtgggagaggttcttggacttgaccccagagaggtaaatgttccagtcattggtgggcatgcaggaattacgatactaccactcctttcacaggtgaatccttcctgctcattcacctcggaagaggttaaatacctcacttctcgcatacagaatggtgggacagaagtagtcgaggctaaagctggagcaggatcagcaactctttcaatggcctatgcagctgccaaatttgcagatgcttgcctgagaggattgcgtggtgatgctgggataatagagtgctcttatgtggcttctcaggtcacagagttgcctttctttgcatccaaagtgcggctagggcgatgtggcattgaggagatcctaccacttggaccattaaatgagttcgagagatctggtctggagaaggcaaagaaagagctggcggagagtatccagaagggcgtctctttcatcaagtga

SEQ ID NO: 51623 - protein, 360 aa, Zea mays
MGQQQQGPAARRMATLASHLRHPSVSHPQMEDVPLLRGSNCRAKGAAPGFKVAILGAAGGIGQPLALLMKMNPLVSVLHLYDVVNAPGVTADISHMNTGAVVRGFLGQPQLENALAGMDLVIIPAGVPRKPGMTRDDLFNINAGIVRTLCEGIAKCCPNAIVNVISNPVNSTVPIAAEVFKKAGTYDPKRLLGVTTLDVVRANTFVGEVLGLDPREVNVPVIGGHAGITILPLLSQVNPSCSFTSEEVKYLTSRIQNGGTEVVEAKAGAGSATLSMAYAAAKFADACLRGLRGDAGIIECSYVASQVTELPFFASKVRLGRCGIEEILPLGPLNEFERSGLEKAKKELAESIQKGVSFIK

SEQ ID NO: 51624 - DNA, 1023 bp, Zea mays
  CDS (1)..(1023)
atgaggccgtcgctgctgaagtccacggccgagctcctccgccgcagccgcggctacgcgtcctcggccaatccggagcggaaggtggccatcctgggcgcggcgggtggcatcgggcagccgctctcgctcctcatgaagctcaacccgctcgtttcctccctctccctctacgatatcgccggcacccccggcgtcgcggccgacgtctcccacatcaactcccccgccctggtgaaggggttcatgggggacgaccagctcggggaggcgctggagggctccgacatcgtcatcatccccgcaggagtgcctaggaagcccggcatgaccagggacgacctcttcaacatcaacgccggcatcgttaaggcgctgtgcactgccatcgccaagcactgccccaacgctcttgtcaatatgatcagtaaccctgtcaactctactgtcccgattgctgcggaggttttcaagaaggctggtacttatgatgagaagaagctgtttggtgtgactactcttgatgttgttcgtgctaaaacgttttatgctggaaaggctggcgtgccagttactgaggtgaatgttcctgttgtcgggggccatgcgggtattactattctgccactcttctcacaggccactccagcaagcaattcgttgtcccaagaagacattgaggccctcaccaagaggacacaagatggtgggacagaggttgttgaagcaaaggctggaaagggctctgcaacattgtccatggcatatgctggtgctgtttttgcagatgcatgcttgaagggtctgaatggagttccggacattgtagagtgctcttttgtgcaatcaactgtgacagagttgccgttctttgcctccaaggttcggctcggcaagaatggagtggaggaagtgcttggtctgggtgagctcaacgacttcgagaagaaggggctggaaagcctcaaggtcgagctcaagtcttccattgacaagggtatcaagttcgcccacgggagctag

SEQ ID NO: 51625 - protein, 340 aa, Zea mays
MRPSLLKSTAELLRRSRGYASSANPERKVAILGAAGGIGQPLSLLMKLNPLVSSLSLYDIAGTPGVAADVSHINSPALVKGFMGDDQLGEALEGSDIVIIPAGVPRKPGMTRDDLFNINAGIVKALCTAIAKHCPNALVNMISNPVNSTVPIAAEVFKKAGTYDEKKLFGVTTLDVVRAKTFYAGKAGVPVTEVNVPVVGGHAGITILPLFSQATPASNSLSQEDIEALTKRTQDGGTEVVEAKAGKGSATLSMAYAGAVFADACLKGLNGVPDIVECSFVQSTVTELPFFASKVRLGKNGVEEVLGLGELNDFEKKGLESLKVELKSSIDKGIKFAHGS

SEQ ID NO: 51626 - DNA, 1023 bp, Zea mays
  CDS (1)..(1023)
atgaggccggcgctgctcaagtccacggccgagctcctccgccgcagccgcggctacgcctcctcggccaacccggagcggaaggtggccatcctgggcgctgcgggcggcatcgggcagccgctctccctcctcatgaagctcaacccgctcgtctcctccctctccctctatgatatcgccgggacccccggcgtcgcggccgacgtctcccacatcaactcccccgccctggtgaaggggttcatgggggacgaccagctcggggaggcgctcgagggctccgacgtcgtcatcatcccagccggggtgcccaggaagcccggcatgactagggacgacctcttcaacatcaacgccggcatcgttaaggggctctgcactgccatcgccaagcactgccccaacgctcttgtcaatatgatcagcaaccctgtcaactccactgtcccgattgcggcggaggttttcaagaaggctggtacttatgatgagaagaagctgtttggtgtgactactcttgatgttgttcgtgctaaaactttttatgctggaaaagcgggtgtgccagttactggggtgaatgttcctgttgtcggaggccatgcgggtattactattctgccactcttctcgcaggccactcctgcaagcaattcattgtcccaagaagacattgaggccctcaccaagaggacacaagatggtgggacagaggtggttgaagcaaaggcgggaaaaggctctgcaacgttgtccatggcatatgctggtgctgtttttgcagatgcatgtttgaagggtctgaatggagttccagacattgtagagtgctcttttgtgcaatcaactgtgacagagttgccattctttgcctccaaggttcggctcggcaagaatggagtggaggaagtgcttggtctgggtgagctcaacgagttcgagaagaaggggctggaaaacctcaagggcgagctcaagtcttccatcgacaagggtatcaagtttgcccacgggaactag

SEQ ID NO: 51627 - protein, 340 aa, Zea mays
MRPALLKSTAELLRRSRGYASSANPERKVAILGAAGGIGQPLSLLMKLNPLVSSLSLYDIAGTPGVAADVSHINSPALVKGFMGDDQLGEALEGSDVVIIPAGVPRKPGMTRDDLFNINAGIVKGLCTAIAKHCPNALVNMISNPVNSTVPIAAEVFKKAGTYDEKKLFGVTTLDVVRAKTFYAGKAGVPVTGVNVPVVGGHAGITILPLFSQATPASNSLSQEDIEALTKRTQDGGTEVVEAKAGKGSATLSMAYAGAVFADACLKGLNGVPDIVECSFVQSTVTELPFFASKVRLGKNGVEEVLGLGELNEFEKKGLENLKGELKSSIDKGIKFAHGN

SEQ ID NO: 51628 - DNA, 20 bp, Artificial sequence
  primer
atgaatattttggagtatgc

SEQ ID NO: 51629 - DNA, 20 bp, Artificial sequence
  primer
ttaaccgtcgctaaccatgg

SEQ ID NO: 51630 - protein, 327 aa, Artificial sequence
  consensus sequence
  Variant (2)..(5): Xaa in position 2 to 5 is any amino acid
  Variant (7)..(7): Xaa in position 7 is any amino acid
  Variant (8)..(8): Xaa in position 8 is any or no amino acid
  Variant (10)..(11): Xaa in position 10 to 11 is any amino acid
  Variant (13)..(28): Xaa in position 13 to 28 is any amino acid
  Variant (29)..(29): Xaa in position 29 is any or no amino acid
  Variant (31)..(31): Xaa in position 31 is any amino acid
  Variant (33)..(37): Xaa in position 33 to 37 is any amino acid
  Variant (38)..(46): Xaa in position 38 to 46 is any or no amino acid
  Variant (48)..(50): Xaa in position 48 to 50 is any amino acid
  Variant (52)..(80): Xaa in position 52 to 80 is any amino acid
  Variant (81)..(89): Xaa in position 81 to 89 is any or no amino acid
  Variant (92)..(93): Xaa in position 92 to 93 is any amino acid
  Variant (99)..(99): Xaa in position 99 is any amino acid
  Variant (101)..(101): Xaa in position 101 is any amino acid
  Variant (104)..(106): Xaa in position 104 to 106 is any amino acid
  Variant (108)..(122): Xaa in position 108 to 122 is any amino acid
  Variant (124)..(131): Xaa in position 124 to 131 is any amino acid
  Variant (132)..(132): Xaa in position 132 is any or no amino acid
  Variant (135)..(143): Xaa in position 135 to 143 is any amino acid
  Variant (144)..(146): Xaa in position 144 to 146 is any or no amino acid
  Variant (148)..(148): Xaa in position 148 is any amino acid
  Variant (149)..(149): Xaa in position 149 is any or no amino acid
  Variant (151)..(162): Xaa in position 151 to 162 is any amino acid
  Variant (165)..(166): Xaa in position 165 to 166 is any amino acid
  Variant (168)..(170): Xaa in position 168 to 170 is any amino acid
  Variant (172)..(184): Xaa in position 172 to 184 is any amino acid
  Variant (185)..(188): Xaa in position 185 to 188 is any or no amino acid
  Variant (190)..(190): Xaa in position 190 is any amino acid
  Variant (194)..(198): Xaa in position 194 to 198 is any amino acid
  Variant (199)..(199): Xaa in position 199 is any or no amino acid
  Variant (201)..(218): Xaa in position 201 to 218 is any amino acid
  Variant (219)..(239): Xaa in position 219 to 239 is any or no amino acid
  Variant (241)..(244): Xaa in position 241 to 244 is any amino acid
  Variant (246)..(246): Xaa in position 246 is any amino acid
  Variant (248)..(248): Xaa in position 248 is any amino acid
  Variant (250)..(254): Xaa in position 250 to 254 is any amino acid
  Variant (255)..(259): Xaa in position 255 to 259 is any or no amino acid
  Variant (261)..(302): Xaa in position 261 to 302 is any amino acid
  Variant (303)..(323): Xaa in position 303 to 323 is any or no amino acid
  Variant (325)..(325): Xaa in position 325 is any amino acid
  Variant (326)..(326): Xaa in position 326 is any or no amino acid
KXXXXGXXGXXGXXXXXXXXXXXXXXXXXLXDXXXXXXXXXXXXXXGXXXDXXXXXXXXXXXXXXXXXXXXXXXXXXXXXXXXXXXXXXAGXXRKPGMXRXDLXXXNXXXXXXXXXXXXXXXPXXXXXXXXXNPXXXXXXXXXXXXKXXGXXXXXXXXXXXXLDXXRXXXFXXXXXXXXXXXXXXXXXVXGGHXXXXXXPXXXXXXXXXXXXXXXXXXXXXXXXXXXXXXXXXXXXXXXRXXXXGXEXVXXXXXXXXXXAXXXXXXXXXXXXXXXXXXXXXXXXXXXXXXXXXXXXXXXXXXXXXXXXXXXXXXXXXXXXXXXGXXG

SEQ ID NO: 51631 - protein, 17 aa, Artificial sequence
  protein pattern
  Variant (2)..(2): Xaa in position 2 is any amino acid
  Variant (3)..(3): Xaa in position 3 is any or no amino acid
  Variant (5)..(5): Xaa in position 5 is any amino acid
  Variant (9)..(9): Xaa in position 9 is Ser or Thr
  Variant (11)..(11): Xaa in position 11 is Asp or Glu
  Variant (12)..(12): Xaa in position 12 is Asp, Glu or Gln
  Variant (14)..(14): Xaa in position 14 is Phe, Ile, Leu, Met or Val
  Variant (15)..(16): Xaa in position 15 to 16 is any amino acid
GXXRXPGMXRXXLXXXN

SEQ ID NO: 51632 - DNA, 531 bp, Synechocystis sp.
  CDS (1)..(531): transl_table=11
atgacttccccctctcccctggtcggcatcatcatgggaagcgattccgatctccccaccatggcagcggcgatcgccgtctgtgaagaatttgccgtaccaacggaggtggccattatctctgcccatcgcaccccggaaagaatggtggagtatgcccaaactgcccaccagcggggcttgcggataattattgccggggctgggggagcggcccatttaccgggcatggtggcggccctgacccctttaccagtcatcggtgtgccggtgcagactaaaaccttacagggagtggattccctctattccattgtgcaaatgccggggggaatacctgtagctaccgtggcgatcggtaatgccaaaaatgcggggttattggcggtgcaaatactggctagccataatcccgtgctgttggaaaaagtacagcaatatcgccaaagtctagaaaccatggttttggacaaacaagcggagttggagcgactgggctacagggcctatctggaccagcaaaatcagtaa

SEQ ID NO: 51633 - protein, 176 aa, Synechocystis sp.
MTSPSPLVGIIMGSDSDLPTMAAAIAVCEEFAVPTEVAIISAHRTPERMVEYAQTAHQRGLRIIIAGAGGAAHLPGMVAALTPLPVIGVPVQTKTLQGVDSLYSIVQMPGGIPVATVAIGNAKNAGLLAVQILASHNPVLLEKVQQYRQSLETMVLDKQAELERLGYRAYLDQQNQ

SEQ ID NO: 51634 - DNA, 2199 bp, Zea mays
  CDS (103)..(2007)
gcacgaggcacgagcggcacgagctagacacccatcgtctcccgttcccggctaaaccctgcttgagccctagacaccgcccgcctccgggaggtagagagcatgcacgccaggttcctcagcgcgccgtcccctgcctccgccgccccctccccgtacgttcgcttggccttcacgggcgcccgcccgcgccgcgcgtgttggaagccgcgaggccccgcgtccgcgtccgcgccgccgcctcggcctctccactcgctgtgcgcccgggcctccatgcagcccgcctctcccgcgcacgacgggcatggtggtccgccggtgcacggcgtctccaacaccgtcatcggggtcctggggggcggtcagctcgggaagatgctctgccatgcagcgagtcaaatggggattagaattgtcatcctcgaccctcttcccggctgccccgcgagctcggtttgcgatgagcacgtaatcgggagcttcaacgatagggacacggtccgggagttcgccaagaggtgtggggtcctaacagtggagattgagcatgttgatgccgccacactggagaagctggaaaaacagggcgttgactgcgagcctaaagcctccacaatcacgattattcaggacaagtacaggcagaaaaagcatttctcaagatgcgagatcccattgcctgactttatggaagtagatactttacgcagtatagaggaggctggggaaaagtttggctatcccctaatggtcaaaagcaagagattagcatatgatggtcgaggaaatgctgtagccaagaacagagaggagctaccttctgttgttgcttcactgggtgggtttgagcggggcttgtatgttgagagatggactcctttcgtaaaggagctttctgtaattgtggcaaggagcagagacaactctactgtctgctatcctgttgtggaaacagttcacaaggaaaatatatgccatgttgttgaagctcctgctgatttatctaacaaaataaagaagttagctactagcgtggctgaaaaagctatcaaatcattagaaggagctggtgtctttgctgtagagttgtttttaacagaagatgatcagattttattgaatgaggtagcccctaggcctcacaatagtgggcatcacacaatagagtcatgctacacctcacaatatgagcagcatatacgcgctattcttggccttcctcttggtgatccctcaatgaaagcacctgcagcaataatgtacaacatcctgggcgaggatgagggtgaagcagggttctttctggctcatcagcttatcagtagggcactaaccattccaggcacatcggtccattggtacgcaaagccagagatgcggaagcaaaggaagatgggtcatattacaattgtggggccttctaagataagtgtaaaatcacgcttggacaacttgctgcaaagaaactcgtctgatcccaaggaagttagccctcgtgttgctattataatggggtcccaatctgatcttcctgtgatgaaagatgctgagagggttttgaaagagttcgacataccttgtgaggtaactattgtttctgcacatcgtacaccagagcggatgtatgattatgcgaagtctgctaaagacaggggtttcgaggtcataattgcaggtgcaggcggagcagctcatttaccagggatggtggcttcattgactcctcttcctgtaatcggagttcccattaagacttcaacactatcaggatttgattccctcctatctattgtgcaaatgccaaaaggtattcctgttgcgactgttgctatcgggaatgcagaaaatgcaggtttgctggcagctaggattctggctgcaagagatcctgagctccaggacagggtaactaagtaccaggatgatctgagggacatggttttggagacggcagaaaggctggaggaccaaggcccggaggaatttctgaagggaatggattgaccccttttgaagccctggctctggggcctgggagaggaatacgagtgtatgggtcggcgataactcactgtccactcgattatggtttaagatggggagtcatcaagaagatactttaataggctcggctgcattcgattttccttacaattcttttttgataaaaaaaaaaaaaaaaaaaaaaaaaaaaaa

SEQ ID NO: 51635 - protein, 634 aa, Zea mays
MHARFLSAPSPASAAPSPYVRLAFTGARPRRACWKPRGPASASAPPPRPLHSLCARASMQPASPAHDGHGGPPVHGVSNTVIGVLGGGQLGKMLCHAASQMGIRIVILDPLPGCPASSVCDEHVIGSFNDRDTVREFAKRCGVLTVEIEHVDAATLEKLEKQGVDCEPKASTITIIQDKYRQKKHFSRCEIPLPDFMEVDTLRSIEEAGEKFGYPLMVKSKRLAYDGRGNAVAKNREELPSVVASLGGFERGLYVERWTPFVKELSVIVARSRDNSTVCYPVVETVHKENICHVVEAPADLSNKIKKLATSVAEKAIKSLEGAGVFAVELFLTEDDQILLNEVAPRPHNSGHHTIESCYTSQYEQHIRAILGLPLGDPSMKAPAAIMYNILGEDEGEAGFFLAHQLISRALTIPGTSVHWYAKPEMRKQRKMGHITIVGPSKISVKSRLDNLLQRNSSDPKEVSPRVAIIMGSQSDLPVMKDAERVLKEFDIPCEVTIVSAHRTPERMYDYAKSAKDRGFEVIIAGAGGAAHLPGMVASLTPLPVIGVPIKTSTLSGFDSLLSIVQMPKGIPVATVAIGNAENAGLLAARILAARDPELQDRVTKYQDDLRDMVLETAERLEDQGPEEFLKGMD

SEQ ID NO: 51636 - DNA, 2434 bp, Zea mays
  CDS (231)..(2141)
gcaccagacaaatcgctttccgcgccgccgccgcgccgccgacctagacacccatcgtctcccgttcccggctaaaccctgcttgagccctagacaccgcccgcctccgggaggtagagagcatgcacgccaggttcctcagcgcgccgtcccctgcctcccggaggctgatgagccggctaaaccctgcttgagccctagacaccgcccgcctccgggaggtagagagcatgcacgccaggttcctcagcgcgccgtcccctgcctccgccgccccctccccgtacgttcgcttggccttcacgggcgcccgcccgcgccgcgcgtgttggaagccggggccgcgaggccccgcgtccgcgtccgcgccgccgcctcggcctctccactcgctgtgcgcccgggcctccatgcaggccgcctctcccgcgcacgacgggcatggtggtccgccggtgcacggcgtctccaacaccgtcatcggggtcctggggggcggtcagctcgggaagatgctctgccatgcagcgagtcagatggggattagaattgtcatcctcgaccctcttcccggatgccccgcgagctcggtttgcgatgagcacgtcatcgggagcttcaacgatggggacacggtccgggagttcgccaagaggtgtggggtcctaacagtggaaattgagcatgttgatgccgccacactggagaagctggaaaaacagggcgttgactgcgagcctaaagcctccacaatcacgattattcaggacaagtacaggcagaaaaagcatttctcaagatgcgagatcccattgcctgacttcatggaagtagatactttacgcattatagaggaggctggagaaaagtttggctatcccctaatggtcaaaagcaagagattagcatatgatggtcgaggaaatgctgtagccaagaacaaagaggagctaccttctgttgttgcttcactgggtgggtttgagcggggcttgtatgttgagagatggactcctttcgtaaaggagctttctgtaattgtggcaaggagcagagacaactctactgtctgctatcctgttgtggaaacagttcacaaggaaaatatatgccatgttgttgaagctccagctgatgtatctaacaaaataaataagttagctactagcgtggctgaaaaagctatcaaatcattagaaggagctggtgtctttgctgtagagttgtttttaacagaagatgatcagattttattgaatgaggtagcccctaggcctcacaatagtgggcatcacacaatagagtcatgctacacctcacaatatgagcagcatatacgcgctattcttggccttcctcttggtgatccctcaatgaaagcacctgcagcaataatgtacaacatcctgggcgaggatgagggtgaagcagggttctttctggctcatcagcttatcagtagggcactaaccattccaggcacatcggtccattggtacgcaaagccagagatgcggaagcaaaggaagatgggtcatattacaattgtggggccttctaagataagtgtaaaatcacgcttggacaacttgctgcaaagaaactcgtctgatcccaaggaagttagccctcgtgttgctattataatggggtcccaatctgatcttcctgtgatgaaagatgctgagagggttttgaaagagttcgacataccttgtgagttaactattgtttctgcacatcgtacaccagagcggatgtatgattatgcgaagtctgctaaagacaggggtttcgaggtcataattgcaggtgcaggcggagcagctcatttaccagggatggtggcttcattgactcctcttcctgtaatcggagttcccattaagacttcaacactatcaggatttgattccctcctatctattgtgcaaatgccaaaaggtattcctgttgcgactgttgctatcgggaatgcagaaaatgcaggtttgctggcagctaggattctggctgcaagagatcctgagctccaggacagggtaactaagtaccaggatgatctgagggacatggttttggagacggcagaaaggctggaggaccaaggcccggaggaatttctgaagggaatggattgaccccttttgaagccctggctctggggcctgggaggaatacgaatgtatgggtcggcgataactcactgtccactcgattatggtttaagatcgggagtcatcaagaagatactttaataggctcggctgcattcgattttccttacaattcttttttgataattgtgctatcttaacccatctcaacatgccctttttcccttctaatatagggtatgaattgggtttagagggggaaaaaagaatgggagtaaacgttgtacgtacgaaaaataaaacggttcgagtaacgt

SEQ ID NO: 51637 - protein, 636 aa, Zea mays
MHARFLSAPSPASAAPSPYVRLAFTGARPRRACWKPGPRGPASASAPPPRPLHSLCARASMQAASPAHDGHGGPPVHGVSNTVIGVLGGGQLGKMLCHAASQMGIRIVILDPLPGCPASSVCDEHVIGSFNDGDTVREFAKRCGVLTVEIEHVDAATLEKLEKQGVDCEPKASTITIIQDKYRQKKHFSRCEIPLPDFMEVDTLRIIEEAGEKFGYPLMVKSKRLAYDGRGNAVAKNKEELPSVVASLGGFERGLYVERWTPFVKELSVIVARSRDNSTVCYPVVETVHKENICHVVEAPADVSNKINKLATSVAEKAIKSLEGAGVFAVELFLTEDDQILLNEVAPRPHNSGHHTIESCYTSQYEQHIRAILGLPLGDPSMKAPAAIMYNILGEDEGEAGFFLAHQLISRALTIPGTSVHWYAKPEMRKQRKMGHITIVGPSKISVKSRLDNLLQRNSSDPKEVSPRVAIIMGSQSDLPVMKDAERVLKEFDIPCELTIVSAHRTPERMYDYAKSAKDRGFEVIIAGAGGAAHLPGMVASLTPLPVIGVPIKTSTLSGFDSLLSIVQMPKGIPVATVAIGNAENAGLLAARILAARDPELQDRVTKYQDDLRDMVLETAERLEDQGPEEFLKGMD

SEQ ID NO: 51638 - DNA, 2329 bp, Brassica sp
  CDS (112)..(2028)
gtgagttaatgggttttgtttccctcaaataaaaatcgaaccttcgaagcttaagttctcgcatcctctttctccttgtcaagccacagctcgaaaccagctatgttctagatgttgcttctgaaacagagctcagctgctgttcttgtctctgggaatccaagtcctgtcctttacactcctcgcttcacttccagagttggatctcttccagttagcaaaacgaactccttcaccatggcgaatcttcagaagggtcttacttattcttcttctgagaaattcaacccggtgttagcgtgtagctctcacgaggcttctcctatcagcgaggatacacatatcaagggagtctctgagatcattgtgggagtgttgggaggtggacagttaggtcgcatgctttgccaagctgcttctcaaatggccatcaaggttatgattctagatccttcaaagaactgttcagcaagctcattagcttatggccacatggttgatagctttgacgacagtgctacagttgaagagtttgcaaaaagatgtggagtcttgacagtagaaattgaacatgttgacgttgaaacactagagaagcttgagaaacaaggagtagatgtccaaccaaaagcctctactatcaggataatacaggataaatacatacaaaaagttcatttctctcggcatggcatcccacttccagagtttatggagataagcgatattgaaggagctgaaagagcaggtgaactttttggttaccctcttatgatcaagagcaagagattagcttatgatggacgaggaaatgcagttgctaatagccaagacgcgcttacttctgctgtaactgctcttggaggtttcagtcgtggtttgtacgttgagaaatgggcaccctttgtaaaggagttggctgttattgtggctaggggaagagatggttccatggtttgttatccagttgttgaaactgttcacagggataacatatgccatatagttaaagcaccagcagatgtgccttggaagattaacaaacttgccactgatgttgctcaaaaggctgttggttctttagaaggcgctggtgttttcgctgttgagctgttcttgacagaggatggtcagatcctgctgaatgaagttgcacctagaccacacaacagtggacatcagacgatcgagtcatgttacacttcacagtttgagcaacacttgcgagctgtggttggtcttccactcggtgatccgtctatgagaactcctgcctccattatgtacaatattctgggcgaagatgatggagaagctggtttcagattggcacatcggctcattgcaagagctctgagtgttccaggtgcatctgtgcattggtatgacaagccagaaatgagaaagcagcggaagatggggcacatcactcttgttggaaagtctattggtgttttggaacaaaggttgcattgtatattaagtgaacaaagccatcaactacatgacattgcagagatacctcgtgttggtatcatcatgggttcagactctgatcttcctgttatgaaagatgctgcaaaaattcttgacacgtttaatgtaacatatgaggtgaagatagtttcagcacatcggacaccagagatgatgttttcttatgcaacatcagctcatagtagaggaatccaagtgataattgcaggtgctggtggtgctgctcacttaccaggtatggttgcttcactcactcccttacctgtgattggtgtccctgtacgtgctacccgtttggatggagttgattcacttctctccattgttcagatgcctagaggtgttcctgtagccacagttgctataaacaactccaccaacgcagccttgcttgctatcaggatgctggggatctctgatactgatctcgtctcaaggataagtcagtaccaggaagacatgagagaagagaacatggttaaaggtgagaaacttgagcgtcaaggttgggaatcatacttgaaccagtgaatattacttgtcagaactcctcattggttaccgggaactccatagtgatcgattttgctgccagtaagatcttgttgagagttagtttcggatcttgagttgttgtcacggctaattccggtttagctttgtcaagttaagccacaattgtttgagactcaagctaagtcctggtgagggatctgatagttagcttcagttcttgagaaactattggatgagttatccacacgatgttttattttataatattatgtaactcccatagagacatgggatataacatgttcttacaaaaaaa

SEQ ID NO: 51639 - protein, 638 aa, Brassica sp
MLLLKQSSAAVLVSGNPSPVLYTPRFTSRVGSLPVSKTNSFTMANLQKGLTYSSSEKFNPVLACSSHEASPISEDTHIKGVSEIIVGVLGGGQLGRMLCQAASQMAIKVMILDPSKNCSASSLAYGHMVDSFDDSATVEEFAKRCGVLTVEIEHVDVETLEKLEKQGVDVQPKASTIRIIQDKYIQKVHFSRHGIPLPEFMEISDIEGAERAGELFGYPLMIKSKRLAYDGRGNAVANSQDALTSAVTALGGFSRGLYVEKWAPFVKELAVIVARGRDGSMVCYPVVETVHRDNICHIVKAPADVPWKINKLATDVAQKAVGSLEGAGVFAVELFLTEDGQILLNEVAPRPHNSGHQTIESCYTSQFEQHLRAVVGLPLGDPSMRTPASIMYNILGEDDGEAGFRLAHRLIARALSVPGASVHWYDKPEMRKQRKMGHITLVGKSIGVLEQRLHCILSEQSHQLHDIAEIPRVGIIMGSDSDLPVMKDAAKILDTFNVTYEVKIVSAHRTPEMMFSYATSAHSRGIQVIIAGAGGAAHLPGMVASLTPLPVIGVPVRATRLDGVDSLLSIVQMPRGVPVATVAINNSTNAALLAIRMLGISDTDLVSRISQYQEDMREENMVKGEKLERQGWESYLNQ

SEQ ID NO: 51640 - DNA, 510 bp, Klebsiella pneumoniae subsp. pneumoniae MGH 78578
  CDS (1)..(510): transl_table=11
atgtcttcccgcaataattcggcgcgtatcgccatcgtgatggggtccaaaagcgactgggctaccatgcaatttaccgcagaaatccttgatgccctgaacgttccgtaccatgtcgaagtggtctccgcccaccgcacgcccgataagctgttcagctttgctgaaagcgccgaaagccacggttatcaggtgattattgcaggagcaggcggcgcggcgcatctgccgggcatgattgcggcgaaaaccctggtgccggtgctcggcgtaccggttcagagcgcagccttaagcggtgtcgacagcctctactccattgtgcagatgccgcgcggcattccggtcggtaccctggccatcggcaaagctggcgctgcgaacgccggcctgctcgccgcgcagatccttgcccagcacgatgctgaactgcaccagcgcctgagcgcctggcgtcaggcgcaaaccgatgaagtgctggataatccggatccgcggggtgcggcatga

SEQ ID NO: 51641 - protein, 169 aa, Klebsiella pneumoniae subsp. pneumoniae MGH 78578
MSSRNNSARIAIVMGSKSDWATMQFTAEILDALNVPYHVEVVSAHRTPDKLFSFAESAESHGYQVIIAGAGGAAHLPGMIAAKTLVPVLGVPVQSAALSGVDSLYSIVQMPRGIPVGTLAIGKAGAANAGLLAAQILAQHDAELHQRLSAWRQAQTDEVLDNPDPRGAA

SEQ ID NO: 51642 - DNA, 483 bp, Xanthobacter autotrophicus Py2
  CDS (1)..(483): transl_table=11
atgagcacggctgacgttgccgtcatcatgggcagccagtccgattgggaaaccatgcgccacgcgtccgagacgctggaagcgctgaagatcccgcacgacagccgcatcgtctccgcccatcgcacgcccgagcgcatgtacgccttcgcccgcagcgcgaaggcggacggcttcaaggtgatcatcgccggcgccggcggggcggcccacctgccgggcatggtggcggcgctcaccaccctgcccgtgttcggcgtgccggtgcagtccaaggccctgtccggcctcgacagcctctattccatcgtccagatgccggccggcgttccggtagggacgctggccatcggcgtcgccggagcgaccaatgcggcgctgctggcggcttccgtgctggcgctctcggacccggccctgtcgcaacgcctcgaagcctggcgggcatcccgcaccgcggcggtggcggaacggccggcctga

SEQ ID NO: 51643 - protein, 160 aa, Xanthobacter autotrophicus Py2
MSTADVAVIMGSQSDWETMRHASETLEALKIPHDSRIVSAHRTPERMYAFARSAKADGFKVIIAGAGGAAHLPGMVAALTTLPVFGVPVQSKALSGLDSLYSIVQMPAGVPVGTLAIGVAGATNAALLAASVLALSDPALSQRLEAWRASRTAAVAERPA

SEQ ID NO: 51644 - DNA, 1896 bp, Oryza sativa (japonica cultivar-group)
  CDS (1)..(1896)
atgcactccaggctcctcagcgccccctcccacgcctccgccgcctcctcctcccccctccccttcgccgccgcccacccttgccgcgcctcctggacgccgcggcccacctccccgctgccgcctctatcgctgctgcgcgccaccgcctccatgcatccttctcctcctcccgaggggcatagcgaccagcctgtgcatggcgtcaccaacacggtcgtcggcgtgctggggggaggccagctggggaagatgctgtgccaggcggccagccagatgggggtcaggatggccatacttgatcccctcgaggactgcccggcgagctcggtttgccacgagcatgtcgtcgggagcttcaatgatggcgccacggttagcgagttcgcaaagaggtgcggggttttgacggtggaaattgagcatgtcgacgctgtaacactcgagaagcttgagaaacagggcatcgattgtgagcccaaagcctccaccatcatgattattcaagacaagtacaggcagaaaactcatttctcaaaatttggaattccgttacctgactttgtggaagtagatactttaagtagcatagagaaagctggggaaatgtttggttatcctctaatggtcaaaagcaagagattagcatatgatggccgtggaaatgctgttgctcacgacaaaaaagagctatcttctgttgttgcttctcttggtgggtttgagcatggcttgtatgttgagaggtggacatcttttgtaaaggagctttctgtcattgtggcaaggagcagagacggttctacggtgtgctatcctgttgttgaaaccatccacaaggataacatctgccatgttgttgaggctcctgccgaggtgcctgataaaataaagaagttggctactaatgtagctgaaaaggctatcaaatcattggaaggtgctggtgttttcgctgtagaattatttttaacacaagataatcaggttttattgaatgaagtagctccaaggcctcacaacagtgggcatcacacaattgagtcatgttatacctcgcaatatgagcaacatttacgtgctattcttggccttcctcttggtgatccttcaatgaaagcgcctgcatcaataatgtacaacatcctgggtgaggatgagggtgaggcaggatttactcaagctcatcagttgattgagagagctttggacatttcaggtgcatctgtccattggtatgcaaaaccagaaatacggaagcagagaaagatgggccatattacaattgtggggccttcaaagtacagtgtaaaagcacgcttagataagttgctgcaaagagacgcatatgaccccaagaaagttgcagttaaacctcgtgctgcaataataatgggttctgattctgatcttcctgtcatgaaagatgctgcagtagtattgaagaaattcaacataccttttgagcttacaattgtttcggctcatcgtacaccagagaggatgtaccattatgcattatctactaaagaaagaggcttagaggtcataattgcaggtgcaggtggagcggctcacttaccagggatggtggcttcattgacttctgtcccagtaataggagtacccatcatgacttcatctttacatggaactgattccctcctatctattgtccagatgccgaaaggtattcctgttgctactgttgcaattggaaatgcggaaaatgcaggtttattggcagttaggatgctggcctcaagagatcctgagttgggggacaaggcaactgaataccagcatgatctgagggatatggtgttggagaaagcaaaaaggctcgaggaactaggttgggaggaatataccgagctatacttgaagaagcattga

SEQ ID NO: 51645 - protein, 631 aa, Oryza sativa (japonica cultivar-group)
MHSRLLSAPSHASAASSSPLPFAAAHPCRASWTPRPTSPLPPLSLLRATASMHPSPPPEGHSDQPVHGVTNTVVGVLGGGQLGKMLCQAASQMGVRMAILDPLEDCPASSVCHEHVVGSFNDGATVSEFAKRCGVLTVEIEHVDAVTLEKLEKQGIDCEPKASTIMIIQDKYRQKTHFSKFGIPLPDFVEVDTLSSIEKAGEMFGYPLMVKSKRLAYDGRGNAVAHDKKELSSVVASLGGFEHGLYVERWTSFVKELSVIVARSRDGSTVCYPVVETIHKDNICHVVEAPAEVPDKIKKLATNVAEKAIKSLEGAGVFAVELFLTQDNQVLLNEVAPRPHNSGHHTIESCYTSQYEQHLRAILGLPLGDPSMKAPASIMYNILGEDEGEAGFTQAHQLIERALDISGASVHWYAKPEIRKQRKMGHITIVGPSKYSVKARLDKLLQRDAYDPKKVAVKPRAAIIMGSDSDLPVMKDAAVVLKKFNIPFELTIVSAHRTPERMYHYALSTKERGLEVIIAGAGGAAHLPGMVASLTSVPVIGVPIMTSSLHGTDSLLSIVQMPKGIPVATVAIGNAENAGLLAVRMLASRDPELGDKATEYQHDLRDMVLEKAKRLEELGWEEYTELYLKKH

SEQ ID NO: 51646 - DNA, 498 bp, Mesorhizobium loti MAFF303099
  CDS (1)..(498): transl_table=11
ttgaacgatcaacgcgccgacgtcgccatcatcatgggcagccagtccgactgggcgacgatgcgccaggcggccgaaacgctggaggcgctgggcgtcccgcacaaacggctgatcatctcggcgcatcgcacgcccgaccggctctatgaattcgccaagggcgcaaaggccgccggctacaaggtgatcatcgccggcgccggcggtgccgcgcacctgcccggcatgacggcggcgatgacgccgctgccggtgttcggcgtgccggtggaatcgaaggcgctgtcggggcaggattcgctgctctccatcgtccagatgccagccggcattcctgtcgggacattggccatcggcaaggcgggtgcggccaatgcggccctgttggcagccgccgtgctggcgctcaacgacgacaagcttgcccagcgcctcgacgcctggcgcgcctcgcagaccgccaaggtcgccgacgaaccgacggacacgccgtga

SEQ ID NO: 51647 - protein, 165 aa, Mesorhizobium loti MAFF303099
MNDQRADVAIIMGSQSDWATMRQAAETLEALGVPHKRLIISAHRTPDRLYEFAKGAKAAGYKVIIAGAGGAAHLPGMTAAMTPLPVFGVPVESKALSGQDSLLSIVQMPAGIPVGTLAIGKAGAANAALLAAAVLALNDDKLAQRLDAWRASQTAKVADEPTDTP

SEQ ID NO: 51648 - DNA, 471 bp, Thermoplasma volcanium GSS1
  CDS (1)..(471): transl_table=11
atgccaaaggttgcagtaatcatggggagttcaagcgattacgaagtaatgaaagccgccatagatacactcaacgagttcggtgtagatgtaatctcgaaagtggtctctgcacataggactccagagtttatgatgcagtttgcaaaggaggcagcttcctctggaatagaagctataatagctggagcaggcggagctgcacacctgcctggcatggttgctgcgatgactccattgccggtgattggagtgccagttcctacgaaaaacctaggagggatggattccctgctatcaatagtgcaaatgccttctggtgtgccagtagctactgttgctattggcaattcgaagaatgcagctctgttggcaattcgaatactgtcaataaaatatcccgatcttatggccaaaatgtctgaatttatggaatctgaaaaacagcgggttcttcaagaaaagatctga

SEQ ID NO: 51649 - protein, 156 aa, Thermoplasma volcanium GSS1
MPKVAVIMGSSSDYEVMKAAIDTLNEFGVDVISKVVSAHRTPEFMMQFAKEAASSGIEAIIAGAGGAAHLPGMVAAMTPLPVIGVPVPTKNLGGMDSLLSIVQMPSGVPVATVAIGNSKNAALLAIRILSIKYPDLMAKMSEFMESEKQRVLQEKI

SEQ ID NO: 51650 - DNA, 489 bp, Arabidopsis thaliana
  CDS (1)..(489)
atgggttcagacacggatcttcttgttatgaaggatgctgccaaaattctggacatgtttggtgtcacacatgaggtaaagatagtttctgctcatcgcaccccagagatgatgtatacatatgcaacctcagctcatagtcgaggcgttcaagtcatcattgcaggtgctggtggtgctgctcacttaccaggtatggttgcttcactcactcctttgcctgtgattggtgtccctgtccaagctacccgtttggatggagttgattcacttctctccatcgttcagatgcctagaggtgttcctgttgcgacagttgcaataaacaatgcgaccaacgcagccttgcttgcagtccggatgttgggaatctctgataatgatcttgtctcaaggatgagacagtaccaagaagacatgagagatgagaacctgaataaaggagagaaacttgagacacaaggttgggaatcatatttgaaccagtga

SEQ ID NO: 51651 - protein, 162 aa, Arabidopsis thaliana
MGSDTDLLVMKDAAKILDMFGVTHEVKIVSAHRTPEMMYTYATSAHSRGVQVIIAGAGGAAHLPGMVASLTPLPVIGVPVQATRLDGVDSLLSIVQMPRGVPVATVAINNATNAALLAVRMLGISDNDLVSRMRQYQEDMRDENLNKGEKLETQGWESYLNQ

SEQ ID NO: 51652 - DNA, 1929 bp, Arabidopsis thaliana
  CDS (1)..(1929)
atgttgcttttgaaacaaagctcagctgctgttcttgtcgttggaaatacaactccagtccttcacacttctcgctccacctacagagttggaccttttccagtgaccagaacgcagtcgttccagagtttgactatggcaaatttgcagaagcttcccacttcttcgtctgggaaattgaatacggcttcagctgtgccctgtagctctcacgatgcttctcctatcagtgagaatcgcgagaataaacatgtccatggagtttctgagaaaattgtgggagttcttgggggtggacaattgggtcgtatgctttgccaagctgcttctcagttggctatcaaagtgatgattttagatccttctaaaaattgttcagcaagtgcattgtcctacggtcacatggttgatagctttgacgacagtgctacagtagaagaatttgcaaaaagatgtggagtcttaactgtagaaattgaacatgttgacgtggacacactagagaagcttgagaaacaaggagtggattgccaacccaaagcttctactattaggataatacaggataaatacatgcaaaaggttcatttctctcagcatggcatcccacttccagaatttatggagataagcgatattgaaggagcaagaaaagcaggtgaacttttcggttaccctcttatgatcaagagcaaacgattggcttatgatggacgtggaaatgcagttgccaacaaccaagatgagctttcttctgctgtaacggctcttggaggtttcagtcgtggtttgtatattgagaaatgggcaccttttgttaaggagttagctgttattgtggctagggggagagatggttctatggtttgttatcccgttgttgaaaccattcacagggataacatatgccatatagttaaagcacctgcagatgtgccttggaagattaacaaacttgccaccgatgttgcccaaaaggctgtcggttctttagaaggtgctggtgtttttgcagttgaactgttcttgacagaggatagtcagattctgctaaacgaagttgcacctagaccacacaacagtggccatcaaacgatcgagtgctgttatacttcacagtttgaacaacacttgcgagctgtggttggtcttccacttggtgatccgtcaatgagaactccggcgtccattatgtacaatattctgggagaagatgatggagaagcaggtttcaaattggctcatcggcttattgcaagggctctgtgtattccaggtgcatctgttcattggtatgacaagccagaaatgagaaagcagagaaagatgggtcacatcactcttgttgggcagtctatgggcattttggaacaaaggttacaatgcatattaagtgagcaaagccaccaagtacacgagacacctcgtgttgctatcatcatgggttcagacacggatcttcctgttatgaaggatgctgccaaaattctggacctgtttggtgtgacacatgaggtaaagatagtttctgctcatcgcaccccagagatgatgtatacatatgcaacctcagctcatagtcgaggcgttcaagtcattattgcaggtgctggtggtgctgctcacttaccaggtatggttgcttcactcactcctttgcctgtgattggtgtccctgtccgtgctacccgtttggatggagttgattcacttctttccatcgttcagatgcctagaggtgttcctgttgcgacagttgcaataaacaatgcgaccaacgcagccttgcttgcagttcggatgttgggaatctctgatacggatcttgtctcaaggatgaggcagtaccaggaagacatgagagatgagaacctgaataaaggagagaaactggagacagaaggttgggaatcatatttgaaccagtga

SEQ ID NO: 51653 - protein, 642 aa, Arabidopsis thaliana
MLLLKQSSAAVLVVGNTTPVLHTSRSTYRVGPFPVTRTQSFQSLTMANLQKLPTSSSGKLNTASAVPCSSHDASPISENRENKHVHGVSEKIVGVLGGGQLGRMLCQAASQLAIKVMILDPSKNCSASALSYGHMVDSFDDSATVEEFAKRCGVLTVEIEHVDVDTLEKLEKQGVDCQPKASTIRIIQDKYMQKVHFSQHGIPLPEFMEISDIEGARKAGELFGYPLMIKSKRLAYDGRGNAVANNQDELSSAVTALGGFSRGLYIEKWAPFVKELAVIVARGRDGSMVCYPVVETIHRDNICHIVKAPADVPWKINKLATDVAQKAVGSLEGAGVFAVELFLTEDSQILLNEVAPRPHNSGHQTIECCYTSQFEQHLRAVVGLPLGDPSMRTPASIMYNILGEDDGEAGFKLAHRLIARALCIPGASVHWYDKPEMRKQRKMGHITLVGQSMGILEQRLQCILSEQSHQVHETPRVAIIMGSDTDLPVMKDAAKILDLFGVTHEVKIVSAHRTPEMMYTYATSAHSRGVQVIIAGAGGAAHLPGMVASLTPLPVIGVPVRATRLDGVDSLLSIVQMPRGVPVATVAINNATNAALLAVRMLGISDTDLVSRMRQYQEDMRDENLNKGEKLETEGWESYLNQ

SEQ ID NO: 51654 - DNA, 486 bp, Bacillus halodurans C-125
  CDS (1)..(486): transl_table=11
atggagccagtcgttggcgtcatcatgggaagtacatccgattgggagacgatgcagcacgcatgtgaaatactcgaagaattagaggtaccgtacgaaaaaaaagtcgtgtcagcccaccgtacacctgatttaatgtttcaatatgcagaaaccgcacaggaacgcgggttgaaggtgattatcgcaggtgctggaggagctgctcatcttccagggatggtagcggccaaaacggtcgttcctgtcattggggtgccggttcaatcaaaggcactgaacgggcttgactcattactttcaatcgtacaaatgccgggcggtgttccggttgcgaccgttgcgattggaaaagctggagccacaaacgcggggctactggcggcgcaaatgatcggtgcctttgatcatcaagtggctgagcgagttcgcctgcgccgtgaaaaagtggaacaagctgtgctggaaagtagtgaatcgctatga

SEQ ID NO: 51655 - protein, 161 aa, Bacillus halodurans C-125
MEPVVGVIMGSTSDWETMQHACEILEELEVPYEKKVVSAHRTPDLMFQYAETAQERGLKVIIAGAGGAAHLPGMVAAKTVVPVIGVPVQSKALNGLDSLLSIVQMPGGVPVATVAIGKAGATNAGLLAAQMIGAFDHQVAERVRLRREKVEQAVLESSESL

SEQ ID NO: 51656 - DNA, 501 bp, Pasteurella multocida subsp. multocida str. Pm70
  CDS (1)..(501): transl_table=11
atgtcaaattgcacacctcaaattgcgattgtaatgggctcaaaaagtgactgggcaaccatgcaagaagcaacccatattcttgatgaattacaaattccttaccacgttgaagtggtgtctgcacatcgtaccccagataaattatttacctttgcagaaacagcgagtgcgaaaggttacaaagtgattattgcaggtgccggcggtgctgcccatttaccgggtatgatcgcgtcaaaaactttagtccctgtattgggcgtaccggtcaaaagttcgatgttaagtggcgttgatagtttgtattcgattgtgcaaatgcctaaggggattcctgtcggaaccttagcgattggtcctgcaggagcggctaatgcaggcttattagcagctcaaatcttagcagcctttgacacttcgctcctgacaagattgacggcatttcgagaaaagcaaacaaatagcgtactagaaaatccagatccacggatgccatag

SEQ ID NO: 51657 - protein, 166 aa, Pasteurella multocida subsp. multocida str. Pm70
MSNCTPQIAIVMGSKSDWATMQEATHILDELQIPYHVEVVSAHRTPDKLFTFAETASAKGYKVIIAGAGGAAHLPGMIASKTLVPVLGVPVKSSMLSGVDSLYSIVQMPKGIPVGTLAIGPAGAANAGLLAAQILAAFDTSLLTRLTAFREKQTNSVLENPDPRMP

SEQ ID NO: 51658 - DNA, 486 bp, Lactococcus lactis subsp. lactis Il1403
  CDS (1)..(486): transl_table=11
atggcagaagtagcaattatcatgggttcgagctcagattgggcgacaatgaaagaaacagcaaaaattttagatgactttggtttagcttatgaaaaaaaggtcgtatcagcacaccgaacaccagctttgatggctgaattttcgagccaagcccgtgaggcaggttataaagttatcatcgcaggtgctggtggagccgctcatttgccaggaatggtatctgctcagactctcgttccagtcattggcgttccaataaaatcacgcgctttatctggtctggattcactttattcaattgttcaaatgccggcaggggttcctgtagcgacaatggcaattggagaggctggagcaaaaaatgctgctttatttgctttgcaacttttggcgaatacaaacgagaatttataccaaaaattgttggtctatcgggctgctgcgcaagaaatggttgaggaatcaaacaaagcattactttaa

SEQ ID NO: 51659 - protein, 161 aa, Lactococcus lactis subsp. lactis Il1403
MAEVAIIMGSSSDWATMKETAKILDDFGLAYEKKVVSAHRTPALMAEFSSQAREAGYKVIIAGAGGAAHLPGMVSAQTLVPVIGVPIKSRALSGLDSLYSIVQMPAGVPVATMAIGEAGAKNAALFALQLLANTNENLYQKLLVYRAAAQEMVEESNKALL

SEQ ID NO: 51660 - DNA, 492 bp, Streptococcus pyogenes M1 GAS
  CDS (1)..(492): transl_table=11
atgaaaactccaattatttctattatcatgggctccaaatctgactgggcaaccatgcaaaaaacggctgaagttctagacaactttggcattgcttacgagaagaaagtcgtctctgcccaccgtacgccagacctcatgttcaagcatgctgaggaagcacgtggtcgtggcatcaaaatcatcatcgcaggagcaggtggggcagctcacttgcctggtatggtggcagctaaaacaacgctgcctgttatcggtgtgcctgtcaaatcacgtgccctttcaggtttggattcgctatattccattgtgcagatgcctggcggtgtgcctgtggcaaccatggctatcggagaagcgggagcgactaacgctgccctgacagccctccgtatcctctctatcgaggaccaaaatctggctgatgcgctagctcatttccatgaggaacaaggaaaaatcgcagaggagtcaagtggtgaactcatttaa

SEQ ID NO: 51661 - protein, 163 aa, Streptococcus pyogenes M1 GAS
MKTPIISIIMGSKSDWATMQKTAEVLDNFGIAYEKKVVSAHRTPDLMFKHAEEARGRGIKIIIAGAGGAAHLPGMVAAKTTLPVIGVPVKSRALSGLDSLYSIVQMPGGVPVATMAIGEAGATNAALTALRILSIEDQNLADALAHFHEEQGKIAEESSGELI

SEQ ID NO: 51662 - DNA, 486 bp, Neisseria meningitidis MC58
  CDS (1)..(486): transl_table=11
atgatacaaatcggcatcatcatgggcagcaacagcgattggcccgttatgcggcaggcagcgcagtttcttgaagagttcggcgtagaatatgaggcgcgcgttgtttccgcacaccgcaccccggatttgatgttccaatacgccgaaaccgcacgggcgcgcggcatcaaagccatcatcgcgggtgcgggcggcgcggcgcatttacccggtatggttgccgccaagaccaccgtccccgttttgggcgtacccgtccccagcaaatacctgcgcggcgaagattcgcttttatcgattgtacaaatgcccaaaggcgtacccgtcgccacattcgccatcggcgaggcaggcgcggcaaatgccgcattgttcgccgtttccatgctcgccaacgaaacccccgaactggcgcaaaaactggcagacttccgagccaaacaggaacaggctgttttgaatatggaattggaacaaatttaa

SEQ ID NO: 51663 - protein, 161 aa, Neisseria meningitidis MC58
MIQIGIIMGSNSDWPVMRQAAQFLEEFGVEYEARVVSAHRTPDLMFQYAETARARGIKAIIAGAGGAAHLPGMVAAKTTVPVLGVPVPSKYLRGEDSLLSIVQMPKGVPVATFAIGEAGAANAALFAVSMLANETPELAQKLADFRAKQEQAVLNMELEQI

SEQ ID NO: 51664 - DNA, 1017 bp, Methanothermobacter thermautotrophicus str. Delta H
  CDS (1)..(1017): transl_table=11
gtgaatctccagatgaagcccagagtgatgatactccttggaagtgcatctgatttcaggatagccgaaaaggcaatggaaatctttgaggaactcaggataccctatgacctgagggttgcctcagcccacaggacacatgaaaaggtaaaggcaatagtctcagaggccgtgaaggcgggtgttgaggtattcataggaatagcaggactatcagcccatcttccaggcatgatatctgcaaacacccacagacccgtcataggggtccctgttgacgttaaacttggagggctcgacgccctctttgcatgttcacagatgcccttccctgcccccgtcgccactgtgggggtagacaggggagaaaacgccgcaatactcgctgcccagataatagggataggagatcccggggtaagggaaagggttgcagatctaaggagaggtttctatgaacgcgtgcggagagatgaatgtcaggtgctcaacagcatagaggggtcctactatgcacccctggaggttgaaatgcctcccattggtgataaggtcccgtcagattcccaggatgaccccatggtatctgtgatacctggcagctactctgacatgaagatagccaagaagaccaccatgttcctcgaaaggatgggtataagctatgatctgaacgtcatatcacccataaggtaccctgaaagatttgagaggtaccttgagaagatggagaacgtgaagctcttcatagccataagcggcctctctgcacatgttacgggtgctgttgttgccctcagcgacaggccggtgataggggttccctgccccctcaagatgaacggctgggactcactcctctcaatgatcaacatgccgccgggtgtacctgttggaacggtgggggtaggtaacggtggtaacgccgcaatactggctgctgaaatgcttggaatatacgatgaaaagatagaatcgaggataaagaggataaagagccgttccgttaagttctaa

SEQ ID NO: 51665 - protein, 338 aa, Methanothermobacter thermautotrophicus str. Delta H
MNLQMKPRVMILLGSASDFRIAEKAMEIFEELRIPYDLRVASAHRTHEKVKAIVSEAVKAGVEVFIGIAGLSAHLPGMISANTHRPVIGVPVDVKLGGLDALFACSQMPFPAPVATVGVDRGENAAILAAQIIGIGDPGVRERVADLRRGFYERVRRDECQVLNSIEGSYYAPLEVEMPPIGDKVPSDSQDDPMVSVIPGSYSDMKIAKKTTMFLERMGISYDLNVISPIRYPERFERYLEKMENVKLFIAISGLSAHVTGAVVALSDRPVIGVPCPLKMNGWDSLLSMINMPPGVPVGTVGVGNGGNAAILAAEMLGIYDEKIESRIKRIKSRSVKF

SEQ ID NO: 51666 - DNA, 495 bp, Campylobacter jejuni subsp. jejuni NCTC 11168
  CDS (1)..(495): transl_table=11
atgaattttgtttctattttaatgggaagcaagagtgattatgagactatgaaagaggctgctaaaactttagaaagttttggtgtaaagtatgaacttatcatctcatcagctcatcgtagtccaaaaagaacaaaagagtatattgcaaatgctgaagaaaaaggtgtgaaggtttttatagcagcagctggaatggcagcgcatttagctggagctgttgcagcttatacaacaaaacctgttttaggagtgcctatgtcaggaagcaatcttgcaagtatggattctttgttttctacggtgcaaatgcctagtggaattcctgtaggaactttagctattggtaaggctggagcaatcaatgctgcttatttggctatgcaaattttagctatttatgatgttgatttagcacaaaagcttaaagaagatcgtcttgaaaaagaaaaaaaacttgtatctgattcaaaagaagtagaagttttattataa

SEQ ID NO: 51667 - protein, 164 aa, Campylobacter jejuni subsp. jejuni NCTC 11168
MNFVSILMGSKSDYETMKEAAKTLESFGVKYELIISSAHRSPKRTKEYIANAEEKGVKVFIAAAGMAAHLAGAVAAYTTKPVLGVPMSGSNLASMDSLFSTVQMPSGIPVGTLAIGKAGAINAAYLAMQILAIYDVDLAQKLKEDRLEKEKKLVSDSKEVEVLL

SEQ ID NO: 51668 - DNA, 486 bp, Neisseria meningitidis Z2491
  CDS (1)..(486): transl_table=11
atgatacaaatcggcatcatcatgggcagcaacagcgattggcccgttatgcggcaggcagcgcagtttcttgaagagttcggcgtagaatatgaggcgcgcgttgtttccgcacaccgcaccccggatttgatgttccaatacgccgaaaccgcacgggcgcgcggcatcaaagccatcatcgcgggtgcgggcggcgcggcgcatttacccggtatggttgccgccaagaccaccgtccccgttttgggcgtacccgtccccagcaaatacctgcgcggcgaagattcgcttttatcgattgtacaaatgcccaaaggcgtacccgtcgccacattcgccatcggcgaggcaggcgcggcaaatgccgcattgttcgccgtttccatgctcgccaacgaaacccccgaactggcgcaaaaactggcagacttccgagccaaacaggaacaggctgttttgagtatggaattggaacagatttaa

SEQ ID NO: 51669 - protein, 161 aa, Neisseria meningitidis Z2491
MIQIGIIMGSNSDWPVMRQAAQFLEEFGVEYEARVVSAHRTPDLMFQYAETARARGIKAIIAGAGGAAHLPGMVAAKTTVPVLGVPVPSKYLRGEDSLLSIVQMPKGVPVATFAIGEAGAANAALFAVSMLANETPELAQKLADFRAKQEQAVLSMELEQI

SEQ ID NO: 51670 - DNA, 534 bp, Deinococcus radiodurans R1
  CDS (1)..(534): transl_table=11
atgagtgatctttctgctgactcggcgtccccccgcgtcggcgtggtgatgggcagccgcagcgactccgagacgatgcagggcgccttggacctcctgtcgcagcttgagattccctacgaggtgcgcgtgctctcggcccaccgtacgccggggctactgtcgacctacgcggcccgcgccgagcggctgggactcgcctgcatcattgccggggcggggggggccgcgcacctgccagggatgctggcggcctttacgcgggtgccggtgctcggcgtgccggtgcagtcgcgggccctcagcggtcaggacagcttgctgagcatcgtgcagatgcctgccggtgtccccgtcgccaccttcgccatcggacaggcgggggccaaaaacgctgcgctctttgccgccgccctgctcgccaccactgatgcgggggtgcggacccggctggaggccttccgcgctgctcaaactcaagccgtgctggatgacccctatttcgacggtcatccccaggcgggcaccgaatga

SEQ ID NO: 51671 - protein, 177 aa, Deinococcus radiodurans R1
MSDLSADSASPRVGVVMGSRSDSETMQGALDLLSQLEIPYEVRVLSAHRTPGLLSTYAARAERLGLACIIAGAGGAAHLPGMLAAFTRVPVLGVPVQSRALSGQDSLLSIVQMPAGVPVATFAIGQAGAKNAALFAAALLATTDAGVRTRLEAFRAAQTQAVLDDPYFDGHPQAGTE

SEQ ID NO: 51672 - DNA, 504 bp, Xylella fastidiosa 9a5c
  CDS (1)..(504): transl_table=11
atgatctccaatcaatcccccctgctggtcggtattgtcatgggttcctcttcggattggggagcgatgcagcacgccgcacaaaagcttgatgctctcggcgttgcgtatgaagtgaaggtcgtttcggcgcatcgtactccggataaattgtttgcttatgcggagcaggctgaagggcgtggtttgcgtgccatcattgctggggccggtggcgcagcgcaccttccaggtatgttggctgctaagacgatggtgccagtgttgggggtaccaatgcagtccaaggctctgaatggtttggattcgctgttatcgatcgtacagatgccggcgggtattccagtagccacgttcgcgattggggaagctggtgcagtcaatgccgccctgtttgccgcagcgctgttggtacccgaaaatccagcaatgcgtcggatgctgactgagttccgccaacgtcagacggatgaggtgaatgctgcggacgatccacgccaatga

SEQ ID NO: 51673 - protein, 167 aa, Xylella fastidiosa 9a5c
MISNQSPLLVGIVMGSSSDWGAMQHAAQKLDALGVAYEVKVVSAHRTPDKLFAYAEQAEGRGLRAIIAGAGGAAHLPGMLAAKTMVPVLGVPMQSKALNGLDSLLSIVQMPAGIPVATFAIGEAGAVNAALFAAALLVPENPAMRRMLTEFRQRQTDEVNAADDPRQ

SEQ ID NO: 51674 - DNA, 489 bp, Streptococcus pneumoniae TIGR4
  CDS (1)..(489): transl_table=11
atgaaaccagtaatttccatcatcatgggctcaaaatccgactgggcaaccatgcaaaaaacagcagaagtcctagaccgcttcggtgtagcctacgaaaagaaagttgtttccgcacaccgtacaccagacctcatgttcaaacatgcagaagaagcccgtagtcgtggcatcaagatcatcatcgcaggtgctggtggcgcagcgcatttgccaggcatggtagctgccaaaacaacccttccagtcattggtgtgccagtcaagtctcgtgctcttagtggagtggattcactctattctatcgttcagatgccgggtggggtgcctgttgcgaccatggctatcggtgaagctggagcgactaacgcagctctctttgccctccgtctcctctctgtagaagataagtccattgcggatgcacttgccaactttgctgaagaacaaggaaaaatcgcagaggagtcgtcaaatgagctcatctaa

SEQ ID NO: 51675 - protein, 162 aa, Streptococcus pneumoniae TIGR4
MKPVISIIMGSKSDWATMQKTAEVLDRFGVAYEKKVVSAHRTPDLMFKHAEEARSRGIKIIIAGAGGAAHLPGMVAAKTTLPVIGVPVKSRALSGVDSLYSIVQMPGGVPVATMAIGEAGATNAALFALRLLSVEDKSIADALANFAEEQGKIAEESSNELI

SEQ ID NO: 51676 - DNA, 480 bp, Clostridium acetobutylicum ATCC 824
  CDS (1)..(480): transl_table=11
atgaaagttgctattatatttggaagcaaatcagacactgaaaaaatgaagggtgcagctactgcgcttaaagaatttggagttgaatacaaagcttatgtattatcggctcacagagtaccagaaaaattaagtgaagttattaagagccttgaaaatgatggatttgaatgcataattgcaggtgctggtctagcagctcaccttccaggagttatagcttctcaaactacacttccagttataggagttcctataaatgcggcaattgacggacttgattctttgttttcaatagttcaaatgcccaaaaacataccggttgcaaccgtaggtatcaacaatagttataatgcaggaatgcttgcagcccaaatactttcgattaaatatcctgaaattaaagaaaagcttgttaaattcagacaagaaatgaaagagaattttataaaggataatgaagaaggagtgcaattataa

SEQ ID NO: 51677 - protein, 159 aa, Clostridium acetobutylicum ATCC 824
MKVAIIFGSKSDTEKMKGAATALKEFGVEYKAYVLSAHRVPEKLSEVIKSLENDGFECIIAGAGLAAHLPGVIASQTTLPVIGVPINAAIDGLDSLFSIVQMPKNIPVATVGINNSYNAGMLAAQILSIKYPEIKEKLVKFRQEMKENFIKDNEEGVQL

SEQ ID NO: 51678 - DNA, 501 bp, Agrobacterium tumefaciens str. C58
  CDS (1)..(501): transl_table=11
gtgacagcagaaacgccccccgtcgccatcatcatgggcagccagtccgactgggaaaccatgaagaacgccgccgatacgctggatgcgctcgacgtggaatatgaagcccgcatcatttccgcccaccgcaccccggaccggctttatgactttgccaatggcgcaaaggacgagggtttcaaggtcattatcgccggtgcgggcggggccgcccacctgcccggcatgacggccgccatgacgccgcttccggtcttcggggttcctgtgcagtcgaagaccatgtccggtcaggacagcctctattccatcgtgcagatgcccgccggcattcccgtcggcacgcttgccatcggcaaggccggtgccatcaatgccgcccttctggccgctgcggtcctggcgctcagcgacgaggacctggccgaccggctggatgcctggcgtgcccgccagtcggctgccgtcgcggaatatccgatggacagcgcccagtga

SEQ ID NO: 51679 - protein, 166 aa, Agrobacterium tumefaciens str. C58
MTAETPPVAIIMGSQSDWETMKNAADTLDALDVEYEARIISAHRTPDRLYDFANGAKDEGFKVIIAGAGGAAHLPGMTAAMTPLPVFGVPVQSKTMSGQDSLYSIVQMPAGIPVGTLAIGKAGAINAALLAAAVLALSDEDLADRLDAWRARQSAAVAEYPMDSAQ

SEQ ID NO: 51680 - DNA, 522 bp, Streptococcus pneumoniae R6
  CDS (1)..(522): transl_table=11
gtgattgttgaaaaagaggaaaaaggagaagaaatgaaaccagtaatttccatcatcatgggctcaaaatccgactgggcaaccatgcaaaaaacagcagaagtcctagaccgcttcggtgtagcctacgaaaagaaagttgtttccgcacaccgtacaccagacctcatgttcaaacatgcagaagaagcccgtagtcgtggcatcaagatcatcatcgcaggtgctggtggcgcagcgcatttgccaggcatggtagctgccaaaacaacccttccagtcattggtgtgccagtcaagtctcgtgctcttagtggagtggattcactctattctatcgttcagatgccgggtggggtgcctgttgcgaccatggctatcggtgaagctggagcgactaacgcagctctctttgccctccgtctcctctctgtagaagataagtccattgcggatgcacttgccaactttgctgaagaacaaggaaaaatcgcagaggagtcgtcaaatgagctcatctaa

SEQ ID NO: 51681 - protein, 173 aa, Streptococcus pneumoniae R6
MIVEKEEKGEEMKPVISIIMGSKSDWATMQKTAEVLDRFGVAYEKKVVSAHRTPDLMFKHAEEARSRGIKIIIAGAGGAAHLPGMVAAKTTLPVIGVPVKSRALSGVDSLYSIVQMPGGVPVATMAIGEAGATNAALFALRLLSVEDKSIADALANFAEEQGKIAEESSNELI

SEQ ID NO: 51682 - DNA, 474 bp, Sulfolobus tokodaii str. 7
  CDS (1)..(474): transl_table=11
atgcctaaagtagctgttattatgggtagtaaatcagactgggaatatatgaaagaagcagtagaacttttaaaacaatttggtgttgaagttgaggctagagtagtttcagcccacagaacaccagaatttatgatggaatttgctaaaaccgcatcagagaagggaatagaagttattatagctggtgcaggtggtgcggctcatttacctggtatgacagcatcattaactcatttgccagtaattggtgttccgattccttcaaagaatttgaatggcttagattctctcctctctattgttcaaatgccttatggtgtaccagtcgcgacagttgctattggtggggctaaaaatgctgcacttttggcattaagaattttaggactaaaatacccagatatagctgaaaaagttaaaaagtttatggaggatgtgaaaaatgaagtccttaacacaaaactcgattaa

SEQ ID NO: 51683 - protein, 157 aa, Sulfolobus tokodaii str. 7
MPKVAVIMGSKSDWEYMKEAVELLKQFGVEVEARVVSAHRTPEFMMEFAKTASEKGIEVIIAGAGGAAHLPGMTASLTHLPVIGVPIPSKNLNGLDSLLSIVQMPYGVPVATVAIGGAKNAALLALRILGLKYPDIAEKVKKFMEDVKNEVLNTKLD

SEQ ID NO: 51684 - DNA, 501 bp, Sinorhizobium meliloti 1021
  CDS (1)..(501): transl_table=11
gtgaccgatactacgcccccgcccgttgccatcatcatgggaagccagtcggactgggagacgatgaagaacgcggcagacacgctcgaggcgctcgacatcgcctacgaagcccggatcgtttccgcccatcgcacgcccgaccgcctggtccgcttcgccaagggcgcgcgcgacgaggggttccaggtgatcatcgccggcgcaggcggtgctgcgcatcttcccggcatgtgcgcggccatgacgccgcttccggtcttcggcgttccggtccagtcgaaagcgctttccggccaggacagcctgctgtcgatcgtgcagatgccggccggcattccggtcggcacgcttgcgatcggcaaggcgggggccatcaatgcggcacttctggccgccgccgtgctcgcgctcggtgacgaggatcttgccgaccgtctcgacgactggcgcgaacagcagaccgtatcggtcgcggaatatccggtagacgaggcatga

SEQ ID NO: 51685 - protein, 166 aa, Sinorhizobium meliloti 1021
MTDTTPPPVAIIMGSQSDWETMKNAADTLEALDIAYEARIVSAHRTPDRLVRFAKGARDEGFQVIIAGAGGAAHLPGMCAAMTPLPVFGVPVQSKALSGQDSLLSIVQMPAGIPVGTLAIGKAGAINAALLAAAVLALGDEDLADRLDDWREQQTVSVAEYPVDEA

SEQ ID NO: 51686 - DNA, 474 bp, Thermoplasma acidophilum DSM 1728
  CDS (1)..(474): transl_table=11
atgcctagggttgcggttataatgggcagttcaagcgactacgagaccatgaagcccgctgtggatttcctcagatccatgcacatagatgttgtgctcaagattgtctcagcgcacaggacacctgaatatatgtttcagttcgcgtccagcgccagagatcaaggcatagaggttataattgctggggcaggcggtgcagcgcatcttccgggtatggttgcatcgatgacaacgctgcctgttataggcgtccctgttccgagcaggaatttaaatgggctggattcgcttctttccatagtgcagatgccatccggaatacctgttgccacggtcgcgatagggaattcgaaaaatgccgccatactggcatgcaggatactctccataaagtatcctgagatcgagaaagccattaagaagtacatggatgacgagcgagacagggtgcttaacgaaaagcttgaatga

SEQ ID NO: 51687 - protein, 157 aa, Thermoplasma acidophilum DSM 1728
MPRVAVIMGSSSDYETMKPAVDFLRSMHIDVVLKIVSAHRTPEYMFQFASSARDQGIEVIIAGAGGAAHLPGMVASMTTLPVIGVPVPSRNLNGLDSLLSIVQMPSGIPVATVAIGNSKNAAILACRILSIKYPEIEKAIKKYMDDERDRVLNEKLE

SEQ ID NO: 51688 - DNA, 492 bp, Caulobacter crescentus CB15
  CDS (1)..(492): transl_table=11
atgccttcgaccacgcctcccgtcgctatcatcatgggcagccgctcggactggccgaccatgaagggcgccgccgacgcgctggacaatctgggcgtcgcctgggaggccaaggtggtctcggcgcaccggacgccccagcgcctgttcgacttcgcgacgggcgccgagaaggccggttacaaggtgatcatcgccggcgccggcggcgcggcgcacttgccgggcatggccgcctcgatgaccaacctgccggtgctgggcgtgccggtgcagtccaaggccctgtcgggcctcgatagcctgctttcgatcgtgcagatgccggggggcgttcctgtcgccaccctggcgatcggcgaggccggcgccaagaacgccggactgctcgcggcccagatcctggccctttccgatacagcgctggctggacgcctggcggccttccgcgccgcccaaaccgaaagcgtcgccgaaagcgtcgaggactga

SEQ ID NO: 51689 - protein, 163 aa, Caulobacter crescentus CB15
MPSTTPPVAIIMGSRSDWPTMKGAADALDNLGVAWEAKVVSAHRTPQRLFDFATGAEKAGYKVIIAGAGGAAHLPGMAASMTNLPVLGVPVQSKALSGLDSLLSIVQMPGGVPVATLAIGEAGAKNAGLLAAQILALSDTALAGRLAAFRAAQTESVAESVED

SEQ ID NO: 51690 - DNA, 510 bp, Salmonella enterica subsp. enterica serovar Typhi str. CT18
  CDS (1)..(510): transl_table=11
atgtcttcccgcaataatccggcgcgtgtcgccatcgtgatggggtccaaaagcgactgggctaccatgcaattcgccgccgaaatttttgaaattctggatgtcccgcaccatgtagaagtggtttccgcccatcgcacccccgataaactgttcagcttcgccgaaacggcggaagagaacggatatcaagtgattattgccggcgcgggcggcgcggcacacctgccgggaatgattgcggcaaaaacgctggtcccggtactcggcgtgccggtacaaagcgctgcgctcagcggcgtggatagcctctactccatcgtgcagatgccgcgcggcattccggtgggtacgctggcgatcggtaaagccggggcggcgaacgccgcactgctggcagcgcaaattttggctacgcatgatagcgcgctgcatcggcgcatcgccgactggcgcaaagcacaaaccgatgaggttctggaaaatcccgatccgcgggggacgctatga

SEQ ID NO: 51691 - protein, 169 aa, Salmonella enterica subsp. enterica serovar Typhi str. CT18
MSSRNNPARVAIVMGSKSDWATMQFAAEIFEILDVPHHVEVVSAHRTPDKLFSFAETAEENGYQVIIAGAGGAAHLPGMIAAKTLVPVLGVPVQSAALSGVDSLYSIVQMPRGIPVGTLAIGKAGAANAALLAAQILATHDSALHRRIADWRKAQTDEVLENPDPRGTL

SEQ ID NO: 51692 - DNA, 510 bp, Salmonella typhimurium LT2
  CDS (1)..(510): transl_table=11
atgtcttcccgcaataatccggcgcgtgtcgccatcgtgatggggtccaaaagcgactgggctaccatgcaattcgccgccgaaatttttgaaattctggatgtcccgcaccatgtagaagtggtttccgctcatcgcacccccgataaactgttcagcttcgccgaaacggcggaagagaacggatatcaagtgattattgccggcgcgggcggcgcggcgcacctgccgggaatgattgcggcaaaaacgctggtcccggtactcggcgtgccggtacaaagcgctgcgctaagcggcgtggatagcctctactccatcgtgcagatgccgcgcggcattccggtgggtacgctggcgatcggtaaagccggtgccgctaacgccgccctgctcgccgcgcagattctggcgcaacacgacgcggaactgcatcagcgcattgccgactggcgcaaagcgcaaaccgatgaagttctggaaaatcccgatccgcgggggacgctatga

SEQ ID NO: 51693 - protein, 169 aa, Salmonella typhimurium LT2
MSSRNNPARVAIVMGSKSDWATMQFAAEIFEILDVPHHVEVVSAHRTPDKLFSFAETAEENGYQVIIAGAGGAAHLPGMIAAKTLVPVLGVPVQSAALSGVDSLYSIVQMPRGIPVGTLAIGKAGAANAALLAAQILAQHDAELHQRIADWRKAQTDEVLENPDPRGTL

SEQ ID NO: 51694 - DNA, 489 bp, Listeria monocytogenes EGD-e
  CDS (1)..(489): transl_table=11
atgcctgctgtaattggtgtcattatggggagtacctcagattgggatacaatgaaaaaagcatgtgatgtattagatgaattagaaatagcttatgagaaaaaagtggtttctgctcatcgtacaccagatttaatgtttcaatatgcagaacaagcgcgggaacgtggtttgaaaattattattgctggtgctgggggcgcggcgcatttgccaggtatggttgcggcaaagacgactttgcctgttattggtgtgccaattaaatcaaaagcgttgaatggaatggattcattactttctattgtgcagatgcctggaggtgttccggtagcgacagttgctattggagaaagtggtgctgtaaatgctggacttctagccgcacaaattttatccataacagacgatgcaattactaacagattacaaaaaagacgtgctacactagaagaaacagttctagaaagtagtgattatcttggataa

SEQ ID NO: 51695 - protein, 162 aa, Listeria monocytogenes EGD-e
MPAVIGVIMGSTSDWDTMKKACDVLDELEIAYEKKVVSAHRTPDLMFQYAEQARERGLKIIIAGAGGAAHLPGMVAAKTTLPVIGVPIKSKALNGMDSLLSIVQMPGGVPVATVAIGESGAVNAGLLAAQILSITDDAITNRLQKRRATLEETVLESSDYLG

SEQ ID NO: 51696 - DNA, 489 bp, Listeria innocua Clip11262
  CDS (1)..(489): transl_table=11
atgcctgcggaaattggtgtcattatggggagtacctcagattgggatacaatgaaaaaagcatgtgatgtattggatgaacttgaaattgcttatgaaaaaaaagtcgtttctgctcatcgtacaccagatttaatgtttcaatatgcagaacaagcgcgggaacgtggtttgaaaattattattgcgggcgctggaggagcggcgcatttgccaggtatggttgctgctaaaacaactttgcctgttattggtgtgccaattaagtcaaaagcgttaagcggaatggattctctactgtccattgtacaaatgcctggtggtgttcctgttgctactgttgcaatcggtgaaagtggagcagtcaatgcgggtcttttagcggcgcaaattttatctattacaaacgatgcaattactaacagattacaaaaaagacgtgctacactagaagaaacagttctagaaagtagtgattctcttggataa

SEQ ID NO: 51697 - protein, 162 aa, Listeria innocua Clip11262
MPAEIGVIMGSTSDWDTMKKACDVLDELEIAYEKKVVSAHRTPDLMFQYAEQARERGLKIIIAGAGGAAHLPGMVAAKTTLPVIGVPIKSKALSGMDSLLSIVQMPGGVPVATVAIGESGAVNAGLLAAQILSITNDAITNRLQKRRATLEETVLESSDSLG

SEQ ID NO: 51698 - DNA, 528 bp, Nostoc sp. PCC 7120
  CDS (1)..(528): transl_table=11
atggctcccttggttggcattattatgggcagcgattcagatttgcccacaatgaaagaggcgatcgctatttgtgaggaatttggtgtagaaaatgaagtggcgatcgtttcagcccatcgcaccccagaacggatggtggaatatgcccaaacagcccatcatcggggtattaaggtgattattgctggtgctggtggtgccgcccatcttcccggcatggtagcatctttaactcctctaccagtgattggtgtgccagtcgctacacgaaacttacaaggtgtggattctttatattcaattgtacaaatgcctgggggtattcctgtggctacggtggcgatcggtaacgccaaaaatgctggactattagctgtgcaaatcctcgctactcaacagccagaattattaactaaagtccaagcataccgtcaaaacctatctgaatcagtaataacaaagcaagcaaagttagaacaactaggttacaagcagtatttggaacaggaaatatctggaaaatag

SEQ ID NO: 51699 - protein, 175 aa, Nostoc sp. PCC 7120
MAPLVGIIMGSDSDLPTMKEAIAICEEFGVENEVAIVSAHRTPERMVEYAQTAHHRGIKVIIAGAGGAAHLPGMVASLTPLPVIGVPVATRNLQGVDSLYSIVQMPGGIPVATVAIGNAKNAGLLAVQILATQQPELLTKVQAYRQNLSESVITKQAKLEQLGYKQYLEQEISGK

SEQ ID NO: 51700 - DNA, 510 bp, Ralstonia solanacearum GMI1000
  CDS (1)..(510): transl_table=11
atgaccgcatcgcaatccgcgccgctcgtcggcgtcgtcatgggttccagctccgactgggacgtcatgcagcacgccgtggtcctgctcaaggaattcgacattccgttcgaggcgcaggtggtctcggcgcaccgcatgccggacgacatgttccgctacgccgaggccgcacgcggccggggcctgcgcgccatcatcgccggtgccggcggcgcggcgcacctgccgggcatgatcgccgccaagaccatcgtgccggtgttcggcgtgccggtgccgtccaagtacctgcgcggcgaagactcgctgctgtccatcgtgcagatgcccaagggcattccggtggcgacctttgccatcggcgaggcgggcgcggccaacgcggcgctgtcggccatcgccatgctggcgaccaccgacgatgcgctggcggccaagctcgaagccttccgcgcccggcagaccgaagtggcgcgcggcatgacgctgcccgtgcacagtgcttaa

SEQ ID NO: 51701 - protein, 169 aa, Ralstonia solanacearum GMI1000
MTASQSAPLVGVVMGSSSDWDVMQHAVVLLKEFDIPFEAQVVSAHRMPDDMFRYAEAARGRGLRAIIAGAGGAAHLPGMIAAKTIVPVFGVPVPSKYLRGEDSLLSIVQMPKGIPVATFAIGEAGAANAALSAIAMLATTDDALAAKLEAFRARQTEVARGMTLPVHSA

SEQ ID NO: 51702 - DNA, 543 bp, Brucella melitensis 16M
  CDS (1)..(543): transl_table=11
ttgtcttttcaagaccttcctcatgccaaccgaaaagccaagcaggaaagaccgatgagcgttgatgtcgccattatcatgggaagccagtccgattgggaaaccatgcaccatgcagccgacacattggaggcgctcggcatctccttcgacgcacggatcgtttccgcccatcgcacccctgacaggctggtcgccttcgccaagggggcgaaagcggaaggcttcaaggtcatcatcgcaggcgccggcggcgcggcccacctgcccggcatggccgctgccatgacaccgcttcccgtctttggcgttccagttcaatccaaggcgctttcgggccaggattcgctactctccatcgtacagatgccagcgggtattcccgtcggcactctcgccatcggccgtgcaggcgcggtcaatgccgcccttctcgccgccgccgttctggcgctatatgatgaagcacttgccgcccgtcttgatgaatggcgcaaggcgcagaccgaaagcgttgcagaacgcccctcgaacgaagcctga

SEQ ID NO: 51703 - protein, 180 aa, Brucella melitensis 16M
MSFQDLPHANRKAKQERPMSVDVAIIMGSQSDWETMHHAADTLEALGISFDARIVSAHRTPDRLVAFAKGAKAEGFKVIIAGAGGAAHLPGMAAAMTPLPVFGVPVQSKALSGQDSLLSIVQMPAGIPVGTLAIGRAGAVNAALLAAAVLALYDEALAARLDEWRKAQTESVAERPSNEA

SEQ ID NO: 51704 - DNA, 489 bp, Pyrobaculum aerophilum str. IM2
  CDS (1)..(489): transl_table=11
atgaaggttgcggttataatggggtcgataaacgaccttgaggtcatgaaagaggcgcttgaggtcttggagcagctgggcattccctacgaggcgcgggtcgtcagcgcccacaggacgccggatttcatgtaccaattcgccaaggaggccgaggggaaattcgacgtgataatagccggcgccggcggggcggcccacctccccggcatgaccgcctccctaacgccgctgccggtcataggggtccccatccccacaaaacacttaggcgggctggactccctgttgtcaattgtacaaatgccccggggcactcccgtcgccacagtggccataggcaacgccgccaacgccgcctatctcgccgccaggatactgggcataaaatacccagaggtgaggcagaaggttaaagaacacatggaaaagatgagagaagaggtactgtccaagtccttcataaagtccttttcactagacgtttaa

SEQ ID NO: 51705 - protein, 162 aa, Pyrobaculum aerophilum str. IM2
MKVAVIMGSINDLEVMKEALEVLEQLGIPYEARVVSAHRTPDFMYQFAKEAEGKFDVIIAGAGGAAHLPGMTASLTPLPVIGVPIPTKHLGGLDSLLSIVQMPRGTPVATVAIGNAANAAYLAARILGIKYPEVRQKVKEHMEKMREEVLSKSFIKSFSLDV

SEQ ID NO: 51706 - DNA, 480 bp, Clostridium perfringens str. 13
  CDS (1)..(480): transl_table=11
atgaaggtagcaatattttttggaagtaaatcagatatagatgttatgaagggagcaggaaatgctcttaaagagtttggaattccttataatgcttatattttatcagctcatagggttccagaaaaacttattgaaactttagaaaaaattgagaaagaaggctgtgaagtaataatagctggagcaggattagctgctcatcttcctggagttatagcttctcatactatacttcctgtaataggagttccagtgagagcagcagtagagggaatggatgcattactatcaatagttcagatgccaaaatcaattcctgtagccactgttggaataaataatagttataatgcaggaatgttagcagtccaaatgctttcattaaaatatccagaactaagagaaaaattaattcaatttagaatcgacatgaaacataaattcatagcagaaaatggagaaggagtggaattataa

SEQ ID NO: 51707 - protein, 159 aa, Clostridium perfringens str. 13
MKVAIFFGSKSDIDVMKGAGNALKEFGIPYNAYILSAHRVPEKLIETLEKIEKEGCEVIIAGAGLAAHLPGVIASHTILPVIGVPVRAAVEGMDALLSIVQMPKSIPVATVGINNSYNAGMLAVQMLSLKYPELREKLIQFRIDMKHKFIAENGEGVEL

SEQ ID NO: 51708 - DNA, 513 bp, Pyrococcus furiosus DSM 3638
  CDS (1)..(513): transl_table=11
atgcctaaagttggaatcataatgggtagtgattcagatttgcccgtaatgaaggaagcagctaaagttctggaagagtttggagtagattatgaaataacaatagtctcggcacacagaacaccagagagaatgtacgagtatgcaaaaactgccagagagaggggaattgaagttattattgcaggtgctggaggtgcagcccatcttcctggaatgacggcctcgataacaactcttcctgtaataggagttccagttaaaagtagggccttgaatggactagattctctgctttccatagttcaaatgccagcaggtgttcctgttgctactgtagccataaacaatgctaagaatgctgctttacttgctctcagaattctttctataaagtatccagagattgccgaaaaactagaaaagtacaaagaagagatgagaaaaacagttgaggaaaaagctaaaaagctcgaagaggttggttggaaagaatatctgggagaggaatga

SEQ ID NO: 51709 - protein, 170 aa, Pyrococcus furiosus DSM 3638
MPKVGIIMGSDSDLPVMKEAAKVLEEFGVDYEITIVSAHRTPERMYEYAKTARERGIEVIIAGAGGAAHLPGMTASITTLPVIGVPVKSRALNGLDSLLSIVQMPAGVPVATVAINNAKNAALLALRILSIKYPEIAEKLEKYKEEMRKTVEEKAKKLEEVGWKEYLGEE

SEQ ID NO: 51710 - DNA, 498 bp, Corynebacterium glutamicum ATCC 13032
  CDS (1)..(498): transl_table=11
gtgggtcctctagttggtttgatcatgggttcggattcggattgggacactgtagcgccagctgcagaggtactcgctgagtttggcattccttttgaagtcggagttgtctctgcacaccgcaccccagagaagatgctcaactacgcaaagactgcacatgagcgcggcatcaagacgatcatcgcgtgtgctggcggcgctgcacacctgccaggcatggtggctgcagcaactccacttccagtcatcggtgttccacgcgcattgaaggatctcgacggtttggattccttgctgtccatcgtccagatgccaggcggcgttccagtcgccactgtctccatcggtggcgcgaagaatgcaggcctacttgccgttcgtattctcggtgctggtgatccttctttggtcacgaagatggccgattaccaagagaatatggcgaaggaagttgaagccaaggacgaagcactgaagaagcgcttgctcggctaa

SEQ ID NO: 51711 - protein, 165 aa, Corynebacterium glutamicum ATCC 13032
MGPLVGLIMGSDSDWDTVAPAAEVLAEFGIPFEVGVVSAHRTPEKMLNYAKTAHERGIKTIIACAGGAAHLPGMVAAATPLPVIGVPRALKDLDGLDSLLSIVQMPGGVPVATVSIGGAKNAGLLAVRILGAGDPSLVTKMADYQENMAKEVEAKDEALKKRLLG

SEQ ID NO: 51712 - DNA, 474 bp, Fusobacterium nucleatum subsp. nucleatum ATCC 25586
  CDS (1)..(474): transl_table=11
atgaaagtaggaattatatttggtagtaaatcagatgttgatgtaatgaagggagcagcagactgtttaaaaaagtttgggatagagtattctgcacatgttttatctgcacatagagttccagaacttttagaagaaactttggaaaaatttgaaaaagaagactatggagttatcattgctggagcaggacttgcagcacatttaccaggagttattgcttcaaaaactgttttacctgtgattggagtacctataaaagcagcagtagaaggtttagatgcactattttcaatagtacaaatgcctaaatcaattcctgttgcaactgtggcaattaataattcatataatgcaggaatgttagcagtagaaatattagcagttggaaataaagaattaagagcaaaacttttagagtttagaaaagaaatgaaagaagatttcaaaaaaaatatatatatggaattgtaa

SEQ ID NO: 51713 - protein, 157 aa, Fusobacterium nucleatum subsp. nucleatum ATCC 25586
MKVGIIFGSKSDVDVMKGAADCLKKFGIEYSAHVLSAHRVPELLEETLEKFEKEDYGVIIAGAGLAAHLPGVIASKTVLPVIGVPIKAAVEGLDALFSIVQMPKSIPVATVAINNSYNAGMLAVEILAVGNKELRAKLLEFRKEMKEDFKKNIYMEL

SEQ ID NO: 51714 - DNA, 612 bp, Streptococcus pyogenes MGAS8232
  CDS (1)..(612): transl_table=11
atgctaaagcacctagtcgccctgacgtgggttcatcttcgaaatcaaagatttcggacttaccgcatatttttctacggaaagtttcgacaagtcgaaacgcccctttatatcttaattatgaaaactccaattatttctattatcatgggctccaaatctgactgggcaaccatgcaaaaaacggctgaagttctagacaactttggcattgcttacgagaagaaagtcgtctctgctcaccgcacgcccgacctcatgttcaagcatgctgaggaagcacgtggtcgtggcatcaaaatcatcatcgcaggagcaggtggagcagctcacttgcctggtatggtagcagctaaaacaacgctgcctgttatcggtgtgcctgtcaaatcacgtgcccttttaggtttggattcactctattcgattgtgcagatgcctggcggtgtgcctgtggcaaccatggctatcggagaagcgggagcgactaacgctgccctgacggccctccgtattctctccatcgaggatcaaaatctggctgatgcgctagctcatttccatgaggaacaaggaaaaatcgcagaggagtcaagtggtgaactcatttaa

SEQ ID NO: 51715 - protein, 203 aa, Streptococcus pyogenes MGAS8232
MLKHLVALTWVHLRNQRFRTYRIFFYGKFRQVETPLYILIMKTPIISIIMGSKSDWATMQKTAEVLDNFGIAYEKKVVSAHRTPDLMFKHAEEARGRGIKIIIAGAGGAAHLPGMVAAKTTLPVIGVPVKSRALLGLDSLYSIVQMPGGVPVATMAIGEAGATNAALTALRILSIEDQNLADALAHFHEEQGKIAEESSGELI

SEQ ID NO: 51716 - DNA, 486 bp, Methanopyrus kandleri AV19
  CDS (1)..(486): transl_table=11
atggtcgacgttctgatcgttctgggaagtaggagcgatcgagacgtcgccgagaaggccgcgaaggtgctcgaccgagccggcgtcgactacaacgtgcgggtggcctccgcccaccggacgccggagcgtatcgacgagctgatcgaggagtacgagcccgacgtgaaggtgtacatcgcgatcgcgggtctggccgctcacctcccgggtgtgatcgccgccaagaccctgaagcccgtgatcgccgtgccggtggaggcgaagctgtgtggtctggacgcgctcctctcgaccgtgcagatgcccccgggtgtaccggtggcggttgtcggcgtggatcgcggggagaacgcggcgctcttggccttgcagatcctggcactggaggacgaggacgtccggtccttcctggaggagtaccgggaggagatgaagaagcaggtggcccgggacgacgacacgatcaaggagcgtttccggtga

SEQ ID NO: 51717 - protein, 161 aa, Methanopyrus kandleri AV19
MVDVLIVLGSRSDRDVAEKAAKVLDRAGVDYNVRVASAHRTPERIDELIEEYEPDVKVYIAIAGLAAHLPGVIAAKTLKPVIAVPVEAKLCGLDALLSTVQMPPGVPVAVVGVDRGENAALLALQILALEDEDVRSFLEEYREEMKKQVARDDDTIKERFR

SEQ ID NO: 51718 - DNA, 834 bp, Methanosarcina acetivorans C2A
  CDS (1)..(834): transl_table=11
atggatcttactgatatattaaagtctgtcaaagaaggaaaaatcgatcttgaatcggcagaacagcaggttcgaggtctgggttttgtttcctattcgcatatagctaaagtggatacccatagaaaaaacagaaccggagtagtcgaagctattcttgctgactgcaaggagcctgaagatgttgtcgagattgccagggttatggtagtaaaaagtaatagagccctgattacccgcgtctctgcctcgcatctggaagctttaatgaaggcttttggtgctgataaactcgagtggaacagccgtgcacgcacagtggttattcatgacgggactcctgctccgcttacaggaggggttgttggagtaatatccgcaggcacggcagacattcctgttgcagaagaagccagggtcgttgcttccgagatgggctgcgaaaccgtagctgtctacgatgtaggggttgcagggattcacaggctgatccccgaactacagaagctcaagattcggaatccgggggcaatagttgttgcagccggaagagaggggacgcttccgactatagtctcaggacttgtcgacgtgcctgtaatagggcttcccgtatctacgggttacggggctggcggcggaggaaaagcagctctgctatcaatgcttcagtcctgttcgacccttgcagtggtaaatattgacgcagggttcgttgcaggagcttatgcagccaggatcgcaaacatgattgctgcagcttctggaaaaaaagaaaatcccgaagaccttaagcaggaagaagaaccgagagaggaacaggaagaagcataa

SEQ ID NO: 51719 - protein, 277 aa, Methanosarcina acetivorans C2A
MDLTDILKSVKEGKIDLESAEQQVRGLGFVSYSHIAKVDTHRKNRTGVVEAILADCKEPEDVVEIARVMVVKSNRALITRVSASHLEALMKAFGADKLEWNSRARTVVIHDGTPAPLTGGVVGVISAGTADIPVAEEARVVASEMGCETVAVYDVGVAGIHRLIPELQKLKIRNPGAIVVAAGREGTLPTIVSGLVDVPVIGLPVSTGYGAGGGGKAALLSMLQSCSTLAVVNIDAGFVAGAYAARIANMIAAASGKKENPEDLKQEEEPREEQEEA

SEQ ID NO: 51720 - DNA, 396 bp, Methanosarcina acetivorans C2A
  CDS (1)..(396): transl_table=11
atggtcgacatctcactgattatgggctctgagtccgacagatcaatcgccaaccgcgcggtagctgtacttgaaaagagcaaatatacttacgaagtaatggttatctctgcccacagaaaccccgaagaacttgatagctatatttcaggctcggatgcaaaagtctttatcactatagccggtctatcggcagctctcccgggggttgttgcttccagaacaaaaaaacctgtaataggtgtacccgtaagcgcaaaactcggcgggcttgatgcccttctctccatagcccagatgcccccgggagtacctgttggaagcgtggggatcgacaatggagcaaacggcgcatatcttgccctgagaattctggatttaatcgaaaacccttaa

SEQ ID NO: 51721 - protein, 131 aa, Methanosarcina acetivorans C2A
MVDISLIMGSESDRSIANRAVAVLEKSKYTYEVMVISAHRNPEELDSYISGSDAKVFITIAGLSAALPGVVASRTKKPVIGVPVSAKLGGLDALLSIAQMPPGVPVGSVGIDNGANGAYLALRILDLIENP

SEQ ID NO: 51722 - DNA, 468 bp, Thermoanaerobacter tengcongensis MB4
  CDS (1)..(468): transl_table=11
ttgaaaatgccaaaaattgctgtggtagtgggtagcaagtcagacctccctgtaattgaaaggtgtacagatattttagatgaatttggaatttcatatgacgtaaaagttctgtctgcccatcgaactccttttgagacgcaggaatttgcagtagaagcagagaaatattacgaccttataatagcggcggcaggaaaagctgctcatctcccaggggtcattgcttcttacactttacttcctgtcattgggcttcccatcaagtcttccactctagatggactggattctctcctttcaattgtgcagatgccaaaaggagttccagtagctacggttgctatagatggagctgagaatgctgctcttttagcctgtcatattctctctttgaagtatccccatctaaaagaaaagcttgctaattacagggagaaaatggcggaggaagtgttaaataattaa

SEQ ID NO: 51723 - protein, 155 aa, Thermoanaerobacter tengcongensis MB4
MKMPKIAVVVGSKSDLPVIERCTDILDEFGISYDVKVLSAHRTPFETQEFAVEAEKYYDLIIAAAGKAAHLPGVIASYTLLPVIGLPIKSSTLDGLDSLLSIVQMPKGVPVATVAIDGAENAALLACHILSLKYPHLKEKLANYREKMAEEVLNN

SEQ ID NO: 51724 - DNA, 543 bp, Streptomyces coelicolor A3(2)
  CDS (1)..(543): transl_table=11
atgagccaggccagcccggtgaccccggtcgtgggcatcgtcatggggtcggactccgactggcccgtcatggaggccgccgccaaggccctcgacgagttcgaggtcccctacgaggtcgacgtcgtctccgcgcaccgcatgccgcacgagatgatcgcgtacggcgagcaggccgccggacgcggcctcaaggcgatcatcgcgggggccgggggcgccgcccacctgcccggcatgctcgcctcggtcacgccgctgccggtcatcggcgtcccggtgccgctgaagtacctggacggcatggacagcctgctgtccatcgtgcagatgccggccggcgtcccggtggccacggtctccgtcggcggcgcccgcaacgccggtctgctggccgcccgcatcctcgccgcccacgacgaggaactgctcggccggatgcgcgagttccagcaggacctcaacgaccaggccaccgagaagggcaagcggctgcgcaccaaggtcgagggctcagcggccggcttcggattcggaaagtga

SEQ ID NO: 51725 - protein, 180 aa, Streptomyces coelicolor A3(2)
MSQASPVTPVVGIVMGSDSDWPVMEAAAKALDEFEVPYEVDVVSAHRMPHEMIAYGEQAAGRGLKAIIAGAGGAAHLPGMLASVTPLPVIGVPVPLKYLDGMDSLLSIVQMPAGVPVATVSVGGARNAGLLAARILAAHDEELLGRMREFQQDLNDQATEKGKRLRTKVEGSAAGFGFGK

SEQ ID NO: 51726 - DNA, 813 bp, Methanosarcina mazei Go1
  CDS (1)..(813): transl_table=11
atggatcttaatgatatattgaaggctgttaaagaagggaaaatcgacctcgaaactgcggaacagcatgtccggagtctgggttttgtcagttattctaacatagctaaagtggatactcacaggaaaacaaggaccggtgtaatagaggcgattcttgctgactgcaaggagcctgaggatgttgtcgagattgccagggttatggtagaaaaaagtaaaagagccctggttacccgtgcgtctacatcacatgtggaagccttaatgaaagcttttggtgatgataaactcgaatggaacagccgggcacgtacggtggttgttcacgacgggactccggctccacgcacaggaggagttgttggagtcatatccgcaggcacggcagacatccctgctgcagaagaggcaaggactattgcttccgaaatgggctgcgaaaccattgctgtgtatgatgtaggcgttgccgggatccacaggctgatccctgaactccagaagctcaagctccggaaccccggcgcgattgttgttgcagccggaagagaaggaacacttccgaccatagtctcagggcttgttgatgtaccggtaatagggcttccggtatctacaggttacggggcaggcggcggtggaaaagcggctcttctgtcaatgcttcagtcctgctcgacccttgcagtggtaaatatcgatgctggattcgttgcaggggcttatgcggcaaggattgccaatatgattgctgctgccggagaagggaaaataactgaagaaacggaacaggaagaaaccggagagtaa

SEQ ID NO: 51727 - protein, 270 aa, Methanosarcina mazei Go1
MDLNDILKAVKEGKIDLETAEQHVRSLGFVSYSNIAKVDTHRKTRTGVIEAILADCKEPEDVVEIARVMVEKSKRALVTRASTSHVEALMKAFGDDKLEWNSRARTVVVHDGTPAPRTGGVVGVISAGTADIPAAEEARTIASEMGCETIAVYDVGVAGIHRLIPELQKLKLRNPGAIVVAAGREGTLPTIVSGLVDVPVIGLPVSTGYGAGGGGKAALLSMLQSCSTLAVVNIDAGFVAGAYAARIANMIAAAGEGKITEETEQEETGE

SEQ ID NO: 51728 - DNA, 510 bp, Methanosarcina mazei Go1
  CDS (1)..(510): transl_table=11
atgactgatgttgtaataatccttggcagcaaatccgataaagaagtagcaagaaaggcaaccgaagtctttgacaggtttggtattgaatataccatcactgttgcatccgcacacaggacccctgcgaggcttgctgaaataattgaaactgcgcataaaaccgacgtaaaggcatttattgctattgccgggctctcagcccatcttccaggagttgtggcttcaagcactataaaacctgtaatcggagtccctgtaaactcagcacttgatgggattgacgccctcctgtctattgcccagatgcctacgggaattccggttgcctgtgtgggaatcggaagaggggataatgctgcaattcttgccgttcagctgctggcagtggaaaacggggagcttgcggaaaagctttcgaattatcgaaaagagcttgtcgagatgattgagaaggacgcagaaagcttgatggatgagcttgtcactgaaggcagggcagcaagctga

SEQ ID NO: 51729 - protein, 169 aa, Methanosarcina mazei Go1
MTDVVIILGSKSDKEVARKATEVFDRFGIEYTITVASAHRTPARLAEIIETAHKTDVKAFIAIAGLSAHLPGVVASSTIKPVIGVPVNSALDGIDALLSIAQMPTGIPVACVGIGRGDNAAILAVQLLAVENGELAEKLSNYRKELVEMIEKDAESLMDELVTEGRAAS

SEQ ID NO: 51730 - DNA, 396 bp, Methanosarcina mazei Go1
  CDS (1)..(396): transl_table=11
atggttgatatttcactgattatgggttctgagtccgacagggcaatcgccaaccgtgcggtttcagtaattgaaaaaaccaggtacacttacgaagtaatggtcatttctgcccacagaaaccctgacgagcttgatatctatatatcaaatacggacgcaaaagtctttattaccatagcgggtttgtcagcagctcttcccggagtcgtggcctccaagactaaaaaacctgtcataggcgtgcctgtaagtgcaaaactcggcgggcttgacgcccttctttccatagcccagatgcctccgggagtgcctgtcggaagtgtaggaattgacaacggggcaaatggggcgtaccttgcccttaggatcctggatttaattgaaaatccctga

SEQ ID NO: 51731 - protein, 131 aa, Methanosarcina mazei Go1
MVDISLIMGSESDRAIANRAVSVIEKTRYTYEVMVISAHRNPDELDIYISNTDAKVFITIAGLSAALPGVVASKTKKPVIGVPVSAKLGGLDALLSIAQMPPGVPVGSVGIDNGANGAYLALRILDLIENP

SEQ ID NO: 51732 - DNA, 504 bp, Xanthomonas campestris pv. campestris str. ATCC 33913
  CDS (1)..(504): transl_table=11
atgacctccaaccactccgcgccgctggtcggcatcgtgatgggttcccgttcggactgggacaccatgcaacacgcagctcagaagctcgatgcactgggcgtgccgtacgaggtcaaggtggtctcggcccaccgcacaccggatgtgttgttcacctacgccgaacaggcaggcgagcgcggcctgcgcgcgatcatcgccggcgctggcggtgccgcgcatctgcccggcatgctggcggccaagaccgcagtgcccgtgctgggcgtgccggtgcagtccaaggcgctcaacggcatggattcgctgctgtcgatcgtgcagatgccagccggtattccggtggccaccttcgcgatcggcaatgcgggcgctgccaatgcggccctgtttgcagcagcgatgctgtcgccggagcagccgcagatcggtcaggcattggcgcagttccgcgccaagcagaccgacgatgtgatggccagcgacgatccccgccaatga

SEQ ID NO: 51733 - protein, 167 aa, Xanthomonas campestris pv. campestris str. ATCC 33913
MTSNHSAPLVGIVMGSRSDWDTMQHAAQKLDALGVPYEVKVVSAHRTPDVLFTYAEQAGERGLRAIIAGAGGAAHLPGMLAAKTAVPVLGVPVQSKALNGMDSLLSIVQMPAGIPVATFAIGNAGAANAALFAAAMLSPEQPQIGQALAQFRAKQTDDVMASDDPRQ

SEQ ID NO: 51734 - DNA, 504 bp, Xanthomonas axonopodis pv. citri str. 306
  CDS (1)..(504): transl_table=11
atgacctccaaccactccgcgccgctggtcggcatcgtgatgggttcccgttcggattgggagaccatgcaacacgcagctcagaagctcgacgcgctgggcgtgccgtacgaagtcaaggtggtctcggcgcaccgcaccccggacgtcttgttcgcctacgccgaacaggcgggcgcccgtggactgcgcgcgatcatcgccggcgccggcggcgcggcgcatctgccgggcatgctggctgccaagactgcagtgccggtgcttggtgtgccggtgcagtccaaggcgcttaacggcatggattcgctgctgtcgatcgtgcagatgccggccggcattccggtggccaccttcgccatcggcaatgcgggtgcggccaatgcggcgttgtttgcggcggccatgctggcgccggagcagacgcagatcggtcaggcgctggcgcagttccgcgccaagcagaccgacgatgtcatggccagcgacgacccgcgccaatga

SEQ ID NO: 51735 - protein, 167 aa, Xanthomonas axonopodis pv. citri str. 306
MTSNHSAPLVGIVMGSRSDWETMQHAAQKLDALGVPYEVKVVSAHRTPDVLFAYAEQAGARGLRAIIAGAGGAAHLPGMLAAKTAVPVLGVPVQSKALNGMDSLLSIVQMPAGIPVATFAIGNAGAANAALFAAAMLAPEQTQIGQALAQFRAKQTDDVMASDDPRQ

SEQ ID NO: 51736 - DNA, 528 bp, Chlorobium tepidum TLS
  CDS (1)..(528): transl_table=11
atgacacaagtttcctttgacgcacaggcgccgctggtcggcatcctgatgggttccgattccgatttcgacatcatgaaagaggccgccacggtgctcaacgagttcggcattccgtttgaaatatcggtcatctcggcgcaccgaacgccgggcgatctcgaagcctacgcctcctcggcagaggagcgcggcctgaaagcgatcatcgccggagctggcggtgcggcacatctgccgggcgtcacggcggccatgactcccctgccggtcatcggcgtgccgatctacagcaaaaagctcagcggccaggattcgctctacgccatcgtgcagatgcccgccggaattcccgtagccaccgtcggcatcgacaacgcccgcaacgccgcgctgctcgccgtgcagatgctcgccctgtgcgacgccagtctgatgcagaagctcagggagttccgacagaagcttgccgaagcctcgcgccagaagaccgccaaaatccgggaaaaactgcgtgcgaacggctga

SEQ ID NO: 51737 - protein, 175 aa, Chlorobium tepidum TLS
MTQVSFDAQAPLVGILMGSDSDFDIMKEAATVLNEFGIPFEISVISAHRTPGDLEAYASSAEERGLKAIIAGAGGAAHLPGVTAAMTPLPVIGVPIYSKKLSGQDSLYAIVQMPAGIPVATVGIDNARNAALLAVQMLALCDASLMQKLREFRQKLAEASRQKTAKIREKLRANG

SEQ ID NO: 51738 - DNA, 492 bp, Thermosynechococcus elongatus BP-1
  CDS (1)..(492): transl_table=11
atgggcagtgattccgatttgcccaccatgcagggggcgatcgccatctgtgaacgctttcgcattccccatgaagtcgctatcctctcagctcaccgcactcccctggcaatggcagaatttgctcagcatgcccatcagcggggcctaaaagtcattattgccggtgccggcggtgctgctcacttgccgggcatgatagcttccctgacccccctacccgtgattggcgtccccgtgccgagccgccatttgcagggggtggactccctctactcaattgtgcagatgccggctgggattcctgtcgcaacggttgccattggcaatgcccaaaatgcaggtctattggccgtccaactgttggccagtcatgatccaaccttgctggagcaagtgattgcctatcgtcaagaattagcagccaccgtgagcgccaagaatcaaaaactgcaaacactgggggctagcgcttatctgcaacagcagtaa

SEQ ID NO: 51739 - protein, 163 aa, Thermosynechococcus elongatus BP-1
MGSDSDLPTMQGAIAICERFRIPHEVAILSAHRTPLAMAEFAQHAHQRGLKVIIAGAGGAAHLPGMIASLTPLPVIGVPVPSRHLQGVDSLYSIVQMPAGIPVATVAIGNAQNAGLLAVQLLASHDPTLLEQVIAYRQELAATVSAKNQKLQTLGASAYLQQQ

SEQ ID NO: 51740 - DNA, 492 bp, Oceanobacillus iheyensis HTE831
  CDS (1)..(492): transl_table=11
atggctcaagtaggggttattatgggaagtatttccgactgggaaacgatgcagtatacttgtaatgtgcttgatgaattacagatctcttatgagaaagaagtgatatccgcacatcgtactccggatgacatgtttgcttactcgaaacaagctcgtagtaaagggctaaaggttattattgctggggcagggggagcagcacacttaccaggaatggtagcttcacaaacaacgttacccgttataggtgtaccagttgaaagtaaatcattacaaggcttagattccctgttatctattgtgcaaatgcctggtggagtaccaaccgctacagttgcaattgggaaagccggagccaaaaatgctggtattcttgcggcacagattattagcacttttgatgaaggtgcagagaaatctctagagaaatatcgggaagaaatgcgagaatctgtaaaagaaatgagggaaaatcttgcagactactaa

SEQ ID NO: 51741 - protein, 163 aa, Oceanobacillus iheyensis HTE831
MAQVGVIMGSISDWETMQYTCNVLDELQISYEKEVISAHRTPDDMFAYSKQARSKGLKVIIAGAGGAAHLPGMVASQTTLPVIGVPVESKSLQGLDSLLSIVQMPGGVPTATVAIGKAGAKNAGILAAQIISTFDEGAEKSLEKYREEMRESVKEMRENLADY

SEQ ID NO: 51742 - DNA, 507 bp, Bifidobacterium longum NCC2705
  CDS (1)..(507): transl_table=11
atgataatggcaaatgaatccaagcccgaagtcgcggtggtcatgggatcctccagcgactgggagaccatgaagcgtgcctgcgatattctcgaccagttcggtgtcgtctaccacaagcaggtcatttccgcgcaccgcacgcccgagctcatggccgagttcgcgcacaatgcccgcgccaatggcctgaaggccattatcgccggtgccggcggtgccgcccacctgccgggcatgatcgccgcgcagaccacgctgcccgtaatcggcgtgcccgtgcgctcccacgccctgtccggctgggattcgctgctgtccatcgtgcagatgcctggcggcatcccggtggccaccaccgccgtcggcaactccggtgccaccaacgccggcctgctcgccgtgcagatgctctccgccttcgagccggaactggccgacaagcttgaggattaccgtaacgaactgaaggaaaaggtggccgaatccaatgcccagcttgtctga

SEQ ID NO: 51743 - protein, 168 aa, Bifidobacterium longum NCC2705
MIMANESKPEVAVVMGSSSDWETMKRACDILDQFGVVYHKQVISAHRTPELMAEFAHNARANGLKAIIAGAGGAAHLPGMIAAQTTLPVIGVPVRSHALSGWDSLLSIVQMPGGIPVATTAVGNSGATNAGLLAVQMLSAFEPELADKLEDYRNELKEKVAESNAQLV

SEQ ID NO: 51744 - DNA, 510 bp, Shigella flexneri 2a str. 301
  CDS (1)..(510): transl_table=11
atgtcttcccgcaataatccggcgcgtgtcgccatcgtgatggggtccaaaagcgactgggctaccatgcagttcgccgtcgaaatcttcgaaatcctgaatgtcccgcaccacgttgaagtggtttctgctcaccgcacccccgataaactgttcagcttcgccgaaagcgccgaagagaacggttatcaggtgattattgcgggcgcaggcggcgcagcgcacctgccaggcatgattgccgccaaaacgctggtgccggtgctgggcgtgccagtacagagcgccgcactgagcggtgtcgatagcctctactccatcgtacaaatgccgcgcggcattccggtgggtacgctggcgattggtaaagctggcgcggcaaacgcggcattactggcagcacaaattctcgcgactcacgataaagagctacaccagcgtctgaatggctggcgcaaagcccagaccgacgaagtgctggaaaacccggacccgcgaggtgcggcatga

SEQ ID NO: 51745 - protein, 169 aa, Shigella flexneri 2a str. 301
MSSRNNPARVAIVMGSKSDWATMQFAVEIFEILNVPHHVEVVSAHRTPDKLFSFAESAEENGYQVIIAGAGGAAHLPGMIAAKTLVPVLGVPVQSAALSGVDSLYSIVQMPRGIPVGTLAIGKAGAANAALLAAQILATHDKELHQRLNGWRKAQTDEVLENPDPRGAA

SEQ ID NO: 51746 - DNA, 492 bp, Shewanella oneidensis MR-1
  CDS (1)..(492): transl_table=11
atgcaagcccttgttgctgttgttatgggttctaagagtgattggcccacaatggaagccgccgctgagatcatggataaactgcaagtgccttaccatgttgaagttgtatcagcccatagaacgccagataaactgatggagtttgcagccggtgccgctgaccgtggttttaaaattattatcggtggtgcgggcggtgccgcgcacttacccggtatgatcgcctctaaaactcgcttacccgtattaggtgtacccgtgcaaagtaaagcactctcaggcatggatagcttactgtctatcgtgcaaatgcccaaagggatcgctgtaggcaccttagcaattggtactgctggtgcctttaacgccggtttactcgcctgccaaattttagccaataacgatgtagcgcttgctgctcgtttagacgccttcagagaagaacaaactcgtgctgtgctggataatcccgatccgagggaagtctaa

SEQ ID NO: 51747 - protein, 163 aa, Shewanella oneidensis MR-1
MQALVAVVMGSKSDWPTMEAAAEIMDKLQVPYHVEVVSAHRTPDKLMEFAAGAADRGFKIIIGGAGGAAHLPGMIASKTRLPVLGVPVQSKALSGMDSLLSIVQMPKGIAVGTLAIGTAGAFNAGLLACQILANNDVALAARLDAFREEQTRAVLDNPDPREV

SEQ ID NO: 51748 - DNA, 489 bp, Streptococcus mutans UA159
  CDS (1)..(489): transl_table=11
atgaaaccacttatttccattatcatgggctccaaatccgactggagcactatgcaaaaaaccgctcaagttttggataacttcggcgtggcttatgaaaagaaagtcgtctcagcccaccgcacaccagacctcatgttcaaacatgcagaaaaagcccgcagccgcggcatcaaggtcatcattgcaggtgcaggcggtgccgcgcatttaccgggtatggtggcagctaaaacaacactgcctgttatcggtgtacctgttaaatcacgcgccctcagcggcttggattcgctctattccattgtgcagatgccgggtggtgtgcctgtggcaactatggccattggtgaagcgggagcgaccaacgctgccctgacagccctgcgtatcttggccattgaagaccaagacttggcagccgcgttagcagatttcgcagaggaacagggaaaaatcgcagaggagtcaacgaatgaactcaactaa

SEQ ID NO: 51749 - protein, 162 aa, Streptococcus mutans UA159
MKPLISIIMGSKSDWSTMQKTAQVLDNFGVAYEKKVVSAHRTPDLMFKHAEKARSRGIKVIIAGAGGAAHLPGMVAAKTTLPVIGVPVKSRALSGLDSLYSIVQMPGGVPVATMAIGEAGATNAALTALRILAIEDQDLAAALADFAEEQGKIAEESTNELN

SEQ ID NO: 51750 - DNA, 492 bp, Streptococcus agalactiae NEM316
  CDS (1)..(492): transl_table=11
atgaaaactccaattatttctattatcatgggctccaaatccgactggggaaccatgcaaaaaacggctgaagttctagataactttggcattgcttacgagaagaaagtcgtctctgcccaccgtgcgccagacctcatgttcaagcatgctgaggaagcacgtggccgtggtatcaaaatcatcatcgctggagcaggtggggcagctcacttgcctggtatggtggcagctaagacaacactacctgttattggtgtgccggtcaaaacacgtgccctttcaggtttggattcgctctactctattgtgcagatgcctggtggtgtgcctgtggcgaccatggctatcggagaagcgggagcgactaacgctgccttgacagccctccgtatcctctctattgaggaccaaaatctggctgatgcgctagctcatttccatgaggaacaaggaaaaatcgcggaggagtcaagcaatgaacttatttaa

SEQ ID NO: 51751 - protein, 163 aa, Streptococcus agalactiae NEM316
MKTPIISIIMGSKSDWGTMQKTAEVLDNFGIAYEKKVVSAHRAPDLMFKHAEEARGRGIKIIIAGAGGAAHLPGMVAAKTTLPVIGVPVKTRALSGLDSLYSIVQMPGGVPVATMAIGEAGATNAALTALRILSIEDQNLADALAHFHEEQGKIAEESSNELI

SEQ ID NO: 51752 - DNA, 501 bp, Corynebacterium efficiens YS-314
  CDS (1)..(501): transl_table=11
atgacaccactcgtcgggctcatcatgggatctgattcggactgggacaccgtcgccccggccgccgaggccctcgccgaattcggcatccccttcgaggtcggcgtgctctccgcccaccgcaccccggaacgcatgctggcctacgccaagtcagcccacgagcgtggcctcaaggtcatcatcgcctgcgccggcggggccgcccacctgcccggcatggtcgctgccgccaccccgctgcccgtcatcggcatcccgcgggcactgaaggacctcgacggcatggactccctgctgtccatcgtgcagatgcccgccggtgtgcccgtggcgaccgtctccatcggtggtgccaagaacgccggcctgctcgccgtgcggatcctcggtgcgggtgaccccgcactggtgcagaagatggccgactaccaggctgacatggcagcccaggtggaggccaaggacgaggcgctcaaacagcgcctcatgggcgaatag

SEQ ID NO: 51753 - protein, 166 aa, Corynebacterium efficiens YS-314
MTPLVGLIMGSDSDWDTVAPAAEALAEFGIPFEVGVLSAHRTPERMLAYAKSAHERGLKVIIACAGGAAHLPGMVAAATPLPVIGIPRALKDLDGMDSLLSIVQMPAGVPVATVSIGGAKNAGLLAVRILGAGDPALVQKMADYQADMAAQVEAKDEALKQRLMGE

SEQ ID NO: 51754 - DNA, 492 bp, Pseudomonas putida KT2440
  CDS (1)..(492): transl_table=11
atgagtgcactggttggcgtgatcatgggctccaagtccgattggtccacccttagccacaccgccgatatgctggaaaaactcggcattccctacgaagtgaaggtggtttccgcccaccgcaccccggatctgctgttccagtatgccgaggaggctgagggccgtggcatcgaggtgatcatcgccggtgccggtggcgcagcccacctgccaggcatgtgcgccgccaagacccacctgccggtgctgggcgtgccggtgcagtcgtcgatgctgtcgggcgtcgattcgctgctgtcgatcgtgcagatgccagccggtgtgccggttgccaccctggccatcggccgtgccggtgcggtcaacgctgccctgctgtcggccagcattctgggcgccaagtacccgcagtaccacgcggcgttgaagcagttccgcacggaacagaccgacaccgtgctggacaacccagacccgcgccaggcttga

SEQ ID NO: 51755 - protein, 163 aa, Pseudomonas putida KT2440
MSALVGVIMGSKSDWSTLSHTADMLEKLGIPYEVKVVSAHRTPDLLFQYAEEAEGRGIEVIIAGAGGAAHLPGMCAAKTHLPVLGVPVQSSMLSGVDSLLSIVQMPAGVPVATLAIGRAGAVNAALLSASILGAKYPQYHAALKQFRTEQTDTVLDNPDPRQA

SEQ ID NO: 51756 - DNA, 537 bp, Escherichia coli CFT073
  CDS (1)..(537): transl_table=11
ttgtgcaccacaggagttttaagacgcatgtcttcccgcaataatccggcgcgtgtcgccatcgtgatggggtccaaaagcgactgggctaccatgcagttcgccgccgaaatcttcgaaatcctgaatgtcccgcaccacgttgaagtggtttctgctcaccgcacccccgataaactgttcagcttcgccgaaagcgccgaagagaacggttatcaggtgattattgcgggcgcaggcggcgcagcgcacctgcctggcatgattgccgccaaaacgctggtgccggtgctgggcgtgccagtacagagcgccgcactgagcggtgtcgatagcctctactccatcgtacaaatgccgcgcggcattccggtgggtacgctagcgattggtaaagctggcgcggcaaacgcggcgttactggcagcacaaattcttgcgaatcatgataaagaactgcaccagcgtctgaatgactggcgcaaagcacaaactgatgaagtgctggaaaacccggacccgcgaggtgcggcatga

SEQ ID NO: 51757 - protein, 178 aa, Escherichia coli CFT073
MCTTGVLRRMSSRNNPARVAIVMGSKSDWATMQFAAEIFEILNVPHHVEVVSAHRTPDKLFSFAESAEENGYQVIIAGAGGAAHLPGMIAAKTLVPVLGVPVQSAALSGVDSLYSIVQMPRGIPVGTLAIGKAGAANAALLAAQILANHDKELHQRLNDWRKAQTDEVLENPDPRGAA

SEQ ID NO: 51758 - DNA, 483 bp, Staphylococcus epidermidis ATCC 12228
  CDS (1)..(483): transl_table=11
gtgaaagtagcagtcattatgggcagttcctcagattggaaaattatgaaagaaagttgttcgatgcttgaagaatttgaaataccgtacgaaaagaaagtcgtttcagctcatcgtacgcctcaaatgatgttcaatttcgctagtcaagcacgccaaaatggttttgatattatcattgccggtgcagggggagcagcacacttacctggaatggtagcttccatgacaacattacctgtgattggtgtgccaattgaatctaaaagtctaaaaggattagattcattactatctatcgtccaaatgcctggtggtatcccagttgcaaccacagcaattggaaaatcaggtgctaaaaatgctgggatattagcggcaagaatgttaggaataacaaatgaatcagttcaaaataatttggaaaattatgaaaaatctttagtcgcaaaagtggaggaaatgcaaaatgaacttcagtaa

SEQ ID NO: 51759 - protein, 160 aa, Staphylococcus epidermidis ATCC 12228
MKVAVIMGSSSDWKIMKESCSMLEEFEIPYEKKVVSAHRTPQMMFNFASQARQNGFDIIIAGAGGAAHLPGMVASMTTLPVIGVPIESKSLKGLDSLLSIVQMPGGIPVATTAIGKSGAKNAGILAARMLGITNESVQNNLENYEKSLVAKVEEMQNELQ

SEQ ID NO: 51760 - DNA, 489 bp, Bradyrhizobium japonicum USDA 110
  CDS (1)..(489): transl_table=11
atgaccgcgccgatcgccatcatcatgggaagccagtcggactgggacacgatgcggcatgccgccgacacgctcgaggcgctcggcgttgccgccgagacccgcatcgtttcggcacaccgcacccccgaccggctggtcgctttcgccaagggcgccaaggcggcgggttacaagatcatcatcgccggcgcgggcggcgctgcacatttgccgggcatggcggcggcactgacggagctcccggtcttcggtgttcccgtcgaatcgaagacgctcaagggcgtcgattcgctctattcgatcgtgcagatgcccgcgggcatcccggtcggcacccttgccatcggcaaggccggcgcgatcaatgcggcgctgcttgctgccgccgtgctggcgctgtccgacccagccttgtccgaccgcctcgccgcctggcgcaaggcacagaccgaggcggtcgctgagcgcccggaggacaaggcgtga

SEQ ID NO: 51761 - protein, 162 aa, Bradyrhizobium japonicum USDA 110
MTAPIAIIMGSQSDWDTMRHAADTLEALGVAAETRIVSAHRTPDRLVAFAKGAKAAGYKIIIAGAGGAAHLPGMAAALTELPVFGVPVESKTLKGVDSLYSIVQMPAGIPVGTLAIGKAGAINAALLAAAVLALSDPALSDRLAAWRKAQTEAVAERPEDKA

SEQ ID NO: 51762 - DNA, 480 bp, Clostridium tetani E88
  CDS (1)..(480): transl_table=11
atgaaagttgctataatatttggaagtaaatctgataaagaagtcatgagcggagctgcaaaagcactaaaagaatttgatattgaatataaggcatatatactttcagcccatagagtaccagaaaagttagaagaaactttaaaaaaattagaagaggataattatgaatgtataatagcaggtgcaggacttgctgcccatcttccaggagttatagcttctaaaactatagttccagtcataggagttcctattaatgcttcattaagtggtatggatgcattactttctatagttcagatgccaaaatctataccagttgctactgtaggtataaataatagttacaatgcaggtatgttagcagctcagattttatcactaaaatatgaggatttaaaaattaaaatgattgattatagaataaatataaaagaaaaatttattaatgaaaatgaacaaggtgtaatattatag

SEQ ID NO: 51763 - protein, 159 aa, Clostridium tetani E88
MKVAIIFGSKSDKEVMSGAAKALKEFDIEYKAYILSAHRVPEKLEETLKKLEEDNYECIIAGAGLAAHLPGVIASKTIVPVIGVPINASLSGMDALLSIVQMPKSIPVATVGINNSYNAGMLAAQILSLKYEDLKIKMIDYRINIKEKFINENEQGVIL

SEQ ID NO: 51764 - DNA, 486 bp, Lactobacillus plantarum WCFS1
  CDS (1)..(486): transl_table=11
atgatggcgaaagttggtttgattatggggtcaatttctgattggccaaccatgcaattagcggcagaacagttaacggcactgggagtctcttatgagcgtcacgttatttcggcccaccgaatgccccagacattacaatcctatggtgaagaagcagcgtcacggggaattcaagttattattgcgggtgcggggggcgctgcccatttacccgggatgctagctgccaatacactactcccggtaattggggtgcccattaagacccatacgttgaacggagttgattcgttattgtcaatcgtacagatgccagctggcgtacccgtggcgacgatggcgattggtgatgcgggggctaagaatggtgcgctaatggccgcccaaattatcggtttacgggaaccacaagtacaacatgcaattggagaatttcgtgctcgtcaacgtcaggaggctgaacaaagtgaacgccaattttaa

SEQ ID NO: 51765 - protein, 161 aa, Lactobacillus plantarum WCFS1
MMAKVGLIMGSISDWPTMQLAAEQLTALGVSYERHVISAHRMPQTLQSYGEEAASRGIQVIIAGAGGAAHLPGMLAANTLLPVIGVPIKTHTLNGVDSLLSIVQMPAGVPVATMAIGDAGAKNGALMAAQIIGLREPQVQHAIGEFRARQRQEAEQSERQF

SEQ ID NO: 51766 - DNA, 543 bp, Tropheryma whipplei TW08/27
  CDS (1)..(543): transl_table=11
atgactggtaaaaacatcaacgatgaaggtagcaaatgccccgctcttgtttggctcctaatgggttctgattcggattggcccgttatgtcaggcgccgcagatatcctgcagcagatgaatatatctttcagagtaaatgttgtttctgcccatcgccagccggaaaagatgattagctgcgccaaacgcgctcgtgacatgggattcaaagttctgatagctgctgccggtggagccgcacacttgcccggaatgcttgcaagtgtcacaactctccctgttatcggagttccggttgggcagaaaaatctgtcaggcctcgattctcttttatcgattgttcaaatgccctctggtgttccggtggcctgtgtcggcatagattctgctaaaaacgctgcccttctggccgcaaggattttgggggttcaatcagccgacatagaagcatccagaatagcagatagtttgtctgcatatcagcaaagcctgtttgatcaatcaaatgaaaaggacagaatgataaatgagccgaaatag

SEQ ID NO: 51767 - protein, 180 aa, Tropheryma whipplei TW08/27
MTGKNINDEGSKCPALVWLLMGSDSDWPVMSGAADILQQMNISFRVNVVSAHRQPEKMISCAKRARDMGFKVLIAAAGGAAHLPGMLASVTTLPVIGVPVGQKNLSGLDSLLSIVQMPSGVPVACVGIDSAKNAALLAARILGVQSADIEASRIADSLSAYQQSLFDQSNEKDRMINEPK

SEQ ID NO: 51768 - DNA, 507 bp, Pseudomonas syringae pv. tomato str. DC3000
  CDS (1)..(507): transl_table=11
atgagaggcacgacgatgagcgcactggttggcgtgatcatgggctccaagtccgattggtccacccttagccacaccgccgacatgctggaaaagctcggcattccttttgaagtcaaagtggtgtcagctcaccgcacgccggacctgctgttccagtacgccgacgaagccgaaggccgtggcattgaagtgatcatcgccggtgccggtggtgccgctcacttgccgggtatgtgcgctgccaagactcacctgcctgtattgggcgttccggtgcagtcctccatgctctcgggtgtcgactccctgctgtcgatcgtgcagatgcccgctggcattccggtcgcgacgctggccatcggcaaggccggtgcgatcaacgcagcgctgctgtcggcaagcattctcggcgccaagcacccgcaatttcacgcagcgctgaagaaatttcgcactgagcagacagacagcgtcctggacaatccagacccacgccacgcctga

SEQ ID NO: 51769 - protein, 168 aa, Pseudomonas syringae pv. tomato str. DC3000
MRGTTMSALVGVIMGSKSDWSTLSHTADMLEKLGIPFEVKVVSAHRTPDLLFQYADEAEGRGIEVIIAGAGGAAHLPGMCAAKTHLPVLGVPVQSSMLSGVDSLLSIVQMPAGIPVATLAIGKAGAINAALLSASILGAKHPQFHAALKKFRTEQTDSVLDNPDPRHA

SEQ ID NO: 51770 - DNA, 516 bp, Bacteroides thetaiotaomicron VPI-5482
  CDS (1)..(516): transl_table=11
atgaaaatgactccaattgtaagtatcatcatgggtagcacgtccgaccttcctgttatggagaaggctgcgcaactgctgaatgatatgcatgtaccgttcgaaatgaacgccctttctgctcaccgcacgccggaggctgtggaagagtttgccaaaaatgcccgtagccgtggcattaaagtaatcatcgctgctgccggaatggctgccgcccttccgggtgtcatcgcagccaacacaacacttccggtgatcggagtacctgtaaaaggctctgtgctcgacggtgtagacgctctgtactccatcattcagatgcctccgggcattcctgtggctacggttgctatcaatggagcgatgaatgcggctatccttgccattcagatgcttgcattgagcgatgccgcattggctgaggcttttgctgcttacaaagaaggactgaaaaagaaaatcgtaaaggcaaacgaagaactgaaagaagtgaagttcgaatataaaaccaattaa

SEQ ID NO: 51771 - protein, 171 aa, Bacteroides thetaiotaomicron VPI-5482
MKMTPIVSIIMGSTSDLPVMEKAAQLLNDMHVPFEMNALSAHRTPEAVEEFAKNARSRGIKVIIAAAGMAAALPGVIAANTTLPVIGVPVKGSVLDGVDALYSIIQMPPGIPVATVAINGAMNAAILAIQMLALSDAALAEAFAAYKEGLKKKIVKANEELKEVKFEYKTN

SEQ ID NO: 51772 - DNA, 489 bp, Enterococcus faecalis V583
  CDS (1)..(489): transl_table=11
atgaaaccattagtcgctgtgattatgggaagtacctcagactgggcaacgatgaaagctgcttgtcttgtgttggaagagttgaaaattccttatgaaaaacgagtgatatcagcacataggacccctgacttgatgtttcgttttgcagaggaatcacgaacaaaaggattgaaggttattatcgctggcgctggtggagcggcccatttaccagggatggtagctgcaaagacaaccttacctgtcattggtgttccagttaaaacacgaacgttaaacggtattgattcactgttgtctattgtgcagatgccagggggagttcctgtagcaacaactgcgattggctcagcaggtgctaccaatgctgggttattagctgcagaaatactaagtattgatgatttacagttagcagaaagaatccaagcaagacgacaatcattggaaaaagcggttatggaaagtggggaacaacttgaataa

SEQ ID NO: 51773 - protein, 162 aa, Enterococcus faecalis V583
MKPLVAVIMGSTSDWATMKAACLVLEELKIPYEKRVISAHRTPDLMFRFAEESRTKGLKVIIAGAGGAAHLPGMVAAKTTLPVIGVPVKTRTLNGIDSLLSIVQMPGGVPVATTAIGSAGATNAGLLAAEILSIDDLQLAERIQARRQSLEKAVMESGEQLE

SEQ ID NO: 51774 - DNA, 534 bp, Streptomyces avermitilis MA-4680
  CDS (1)..(534): transl_table=11
atgaccgcacccgtagttggcatcgtcatggggtcggactccgactggcccgtcatggaggccgcagcgcaggccctcgacgagttcgagatcccgtacgaggtggacgtcgtctccgcgcaccggatgccgcacgagatgatcgcgtacggcgagcaggcggcggagcgcgggctgaaggcgatcatcgcgggtgcgggcggcgccgcccatctgcccggcatgctggcgtccgtgaccccgctgcccgtcatcggcgtgcccgtcccgctgaagtacctcgacggcatggactcgctgctgtcgatcgtgcagatgccggccggtgtcccggtcgcgaccgtctccgtcggcggcgcgcgcaacgcgggcctgctggccgcgcggatgctggccgcgcacgacgcggaactcctcacccgcatgcgggagttccagcaggaactgaacgaccaggccaccgagaagggcaagcggctgcgcgccaaggtcgacggcgcgtcgggcggcttcggcttcggctcggggaagtga

SEQ ID NO: 51775 - protein, 177 aa, Streptomyces avermitilis MA-4680
MTAPVVGIVMGSDSDWPVMEAAAQALDEFEIPYEVDVVSAHRMPHEMIAYGEQAAERGLKAIIAGAGGAAHLPGMLASVTPLPVIGVPVPLKYLDGMDSLLSIVQMPAGVPVATVSVGGARNAGLLAARMLAAHDAELLTRMREFQQELNDQATEKGKRLRAKVDGASGGFGFGSGK

SEQ ID NO: 51776 - DNA, 486 bp, Bacillus cereus ATCC 14579
  CDS (1)..(486): transl_table=11
atgaaatcactagttggagtcataatgggaagtacgtcagactgggaaacaatgaaatatgcttgtgacattttagatgaattaaatataccgtatgagaaaaaagttgtatccgctcatcggactccggattatatgtttgaatatgcagagacggctcgtgaacgtggattgaaagttattattgctggagctggtggagcagcacatttaccaggaatggttgcagcgaagacaaatcttcctgtaattggagttccagttcaatcaaaagcattaaacggcttagattcattattatccatcgcccaaatgccaggaggtgttccagttgcaactgttgcaattggtaaagccggttcaacgaatgctggattacttgccgcacaaatacttggatcatttcatgatgatatacatgatgcattagaattgagacgagaagcgattgaaaaagatgtgcgtgaaggtagtgagctagtatga

SEQ ID NO: 51777 - protein, 161 aa, Bacillus cereus ATCC 14579
MKSLVGVIMGSTSDWETMKYACDILDELNIPYEKKVVSAHRTPDYMFEYAETARERGLKVIIAGAGGAAHLPGMVAAKTNLPVIGVPVQSKALNGLDSLLSIAQMPGGVPVATVAIGKAGSTNAGLLAAQILGSFHDDIHDALELRREAIEKDVREGSELV

SEQ ID NO: 51778 - DNA, 498 bp, Nitrosomonas europaea ATCC 19718
  CDS (1)..(498): transl_table=11
gtggatcatccggtagtcagcatcgtaatgggcagcagcagtgactggcaggtaatgcgacatgctgcaagcgttttgaaaaacttctgtattccgcatgaaaccatgattatctcggcacatcgcacgcctgacaggatgtttgaatatgccgaaacagctcatgaccgtggaatcaggtgtatcatcgccggtgcgggaggtgctgcccatctccccggcatgattgctgccaaaaccacactccccgttctgggggttccggttacatcaaaacatttacagggtgtggattcactgttatccatcgtacagatgcccaagggtgtgccagttgccacttttgccatcggagaagcaggtgcagccaacgccgcactgtttgctgctgccattctggccgggggagatatctcactggccgaaaaactcgatcaatttcgcaaggatcaggctgcctctgtcgctgcgatgacgctccccgaatcatgtacataa

SEQ ID NO: 51779 - protein, 165 aa, Nitrosomonas europaea ATCC 19718
MDHPVVSIVMGSSSDWQVMRHAASVLKNFCIPHETMIISAHRTPDRMFEYAETAHDRGIRCIIAGAGGAAHLPGMIAAKTTLPVLGVPVTSKHLQGVDSLLSIVQMPKGVPVATFAIGEAGAANAALFAAAILAGGDISLAEKLDQFRKDQAASVAAMTLPESCT

SEQ ID NO: 51780 - DNA, 495 bp, Helicobacter hepaticus ATCC 51449
  CDS (1)..(495): transl_table=11
atggattttgtaagcgtcattatgggaagtaaaagtgattggaatgtgatgagcgagtgcatagaagtgttaaagaaatttgatgtagcctatgaggtaataatcagttcggctcatcgctcaccagagcgcacaaaatcatacattaaagatgcacaatctcgtggtgcgcaggttttcattggagcagcaggtatggcagcacacttagccggggctatcgcctctcaaacttgtaagcccgttattggtgtgccacttaatggaggtgcattagatggacttgatgctcttctctcaacagtgcaaatgccaagctcaatgcctgtggcaacgacaagtattggtaaagccggggcgattaatgcagcatatttagcaatgcaaattttaagccttaaaaatgatgaacttgcgggcaaattaatagaagatagagtgatgaaagcaaaaaaggtagaactagattcagcagagattgaagtgagaatttaa

SEQ ID NO: 51781 - protein, 164 aa, Helicobacter hepaticus ATCC 51449
MDFVSVIMGSKSDWNVMSECIEVLKKFDVAYEVIISSAHRSPERTKSYIKDAQSRGAQVFIGAAGMAAHLAGAIASQTCKPVIGVPLNGGALDGLDALLSTVQMPSSMPVATTSIGKAGAINAAYLAMQILSLKNDELAGKLIEDRVMKAKKVELDSAEIEVRI

SEQ ID NO: 51782 - DNA, 519 bp, Rhodopirellula baltica SH 1
  CDS (1)..(519): transl_table=11
atgactgaccaagacgattccgcgaccgattcgcttttgcctcgtgttggtgtgatcatgggcagccgcaatgactgggacaccatgtcagcggcctgcgagatgctggatcttctcggcgtagagcatgagcgatccgtcgtttccgctcaccgtacacccgaacgcatgttcgaatacgctcgatcggccgcgtcccgaggattgaaagtcatcattgcgggagccggtggcgccgcccatctgccgggaatggtcgcttcggaaacggttttgccagtgatcggcgtgcccattcaaagccgggctttgcagggattggattcgttgctttccatcgtccagatgccaggtggaattccggtagcgacgatgtcgatcggtgtggcgggagcgaagaacgcaggggtgatggcagctcgtattttggcgacccacgacgaggcactccgcggtcgtctcgaggcattcgttgcaaaacaacgtgacgacgtgatcgcatcggcagagcttccatga

SEQ ID NO: 51783 - protein, 172 aa, Rhodopirellula baltica SH 1
MTDQDDSATDSLLPRVGVIMGSRNDWDTMSAACEMLDLLGVEHERSVVSAHRTPERMFEYARSAASRGLKVIIAGAGGAAHLPGMVASETVLPVIGVPIQSRALQGLDSLLSIVQMPGGIPVATMSIGVAGAKNAGVMAARILATHDEALRGRLEAFVAKQRDDVIASAELP

SEQ ID NO: 51784 - DNA, 495 bp, Wigglesworthia glossinidia endosymbiont of Glossina brevipalpis
  CDS (1)..(495): transl_table=11
atgaataaaaacaataaagtagcaattattatgggctctaaaagcgattggaatacattgaaacatgcatctaatgctctaaaagatttaaaaattaaatttactacacatattatttctgctcataggactccagataaattatttgaatttgctgaacaagctaaaaaaaatggttactgtgtgattattgctggagctggtggagcagctcatttaccaggaatgttagcatctaaaacattaataccagttttaggagttcctgtagaaaatagtcctttgaatggattagatagtttatattctatagtacaaatgccatctgaagttccagtaggaactttagctattggaaaatctggtgctattaattccgctatactagcttctcaaattttatcattaaatgattacgaattatatattagattaaaattgagaagaaaagaaaaagaaaatcaaatattaaattatgagaactcaattttataa

SEQ ID NO: 51785 - protein, 164 aa, Wigglesworthia glossinidia endosymbiont of Glossina brevipalpis
MNKNNKVAIIMGSKSDWNTLKHASNALKDLKIKFTTHIISAHRTPDKLFEFAEQAKKNGYCVIIAGAGGAAHLPGMLASKTLIPVLGVPVENSPLNGLDSLYSIVQMPSEVPVGTLAIGKSGAINSAILASQILSLNDYELYIRLKLRRKEKENQILNYENSIL

SEQ ID NO: 51786 - DNA, 489 bp, Haemophilus ducreyi 35000HP
  CDS (1)..(489): transl_table=11
atgttacaacaaaaagcagaaattgcggtcgtaatgggttcaaaaagtgactgggcaacaatttcagaagcaacacaaatcttagaacaatttgatcttgcctatcatgtcgaagtagtatcggcacatcggacccccgataaactattttcgtttgctgaatctgccgaacaaaatggctataaagtaattattgcaggtgcaggtggcgcggcgcatttgccgggtatgattgctgcaaaaacaattgtaccggtattaggtgttccggttaaaagctcaatgttaaatggcatggatagcttatattctatcgttcaaatgccaaaaggtattccagttggaacattagcgataggtgctgcaaatgctgcactattagcggttcagattttagctgtttttcaacctgaattggctaaaaaacttcatgcctttcggcaacaacaaactcaactagtattagataaccccgattcacgtgattaa

SEQ ID NO: 51787 - protein, 162 aa, Haemophilus ducreyi 35000HP
MLQQKAEIAVVMGSKSDWATISEATQILEQFDLAYHVEVVSAHRTPDKLFSFAESAEQNGYKVIIAGAGGAAHLPGMIAAKTIVPVLGVPVKSSMLNGMDSLYSIVQMPKGIPVGTLAIGAANAALLAVQILAVFQPELAKKLHAFRQQQTQLVLDNPDSRD

SEQ ID NO: 51788 - DNA, 492 bp, Prochlorococcus marinus subsp. marinus str. CCMP1375
  CDS (1)..(492): transl_table=11
atgggaagtgattccgatttacctttccttgagccagctattaaagttttagaggggtttaacctccaagtagagacaagagtactttcagcacatcgaacaccactaaaaatggtctcgtttgctcgtgaagccgaagggaaaggtttaaaagtcattattgcaggagctggtggatcggcgcatcttccagggatggttgcttcacttacaagtcttccagtaattggggtccctatacaaagcaaatgcttaaaaggcattgactctttatattccattgttcagatgcctgcagggatcccagtagcaacagtagcgatcaatggtggattaaatgctggtctattagcagctcagatattaagcacgattcagccagaattaaaaattaaaatttcccaatatagaaaagaactacataatcaagttatacataaagacaaaaagctaatcgaattaggtgcatcaaagtatttagaagaaatgtaa

SEQ ID NO: 51789 - protein, 163 aa, Prochlorococcus marinus subsp. marinus str. CCMP1375
MGSDSDLPFLEPAIKVLEGFNLQVETRVLSAHRTPLKMVSFAREAEGKGLKVIIAGAGGSAHLPGMVASLTSLPVIGVPIQSKCLKGIDSLYSIVQMPAGIPVATVAINGGLNAGLLAAQILSTIQPELKIKISQYRKELHNQVIHKDKKLIELGASKYLEEM

SEQ ID NO: 51790 - DNA, 480 bp, Bordetella pertussis Tohama I
  CDS (1)..(480): transl_table=11
gtgggcgtgatcatgggatcttccagcgactgggaggtcatgaaacacgccgtggccatgctgcaggatttcggcgtggcgcacgaggcgcgcgtgatttcggcgcaccgcatgccgcaggacatggccgagtatggcgcggcggcgcgcgcgcgcggcttgcgcgccatcattgccggcgccggcggcgcggcccacctgcctggcatgatggccgcgctgaccgaggtgccggtattcggcgtgccggttccgtccaggtacctgcgcggcgaggactcgctgctttccatcgtgcagatgcccaagggcgtgccggtggccacctttgccatcggcgaggccggcgcggccaacgcggcgctgcatgccatcgccacgctggccaccaccgacgacgccctgcacgcccggctggtcgcgttccgcgcgcggcagaccgatgcggcgcgcgccatgaaagtgcctcccgaagcctga

SEQ ID NO: 51791 - protein, 159 aa, Bordetella pertussis Tohama I
MGVIMGSSSDWEVMKHAVAMLQDFGVAHEARVISAHRMPQDMAEYGAAARARGLRAIIAGAGGAAHLPGMMAALTEVPVFGVPVPSRYLRGEDSLLSIVQMPKGVPVATFAIGEAGAANAALHAIATLATTDDALHARLVAFRARQTDAARAMKVPPEA

SEQ ID NO: 51792 - DNA, 492 bp, Prochlorococcus marinus subsp. pastoris str. CCMP1986
  CDS (1)..(492): transl_table=11
atgggaagtgattcagatctaaaaacattgaaacctgcaatagatatattgaacgaatttggaatagaaactgaggtttgtatactttctgcgcatagaacgccaatggaaatgatggaatatgcaaaaaaagcagaatcagaaaacataaaagttattatcgcaggagccggtggagctgctcacctgcctggcatgatagcttcgctaacatgcatacctgtcataggtgtaccggtggagagtaaaaccctgaaaggaattgactccctattatcaatagtgcaaatgcctgcgggtattcctgtagcaacagtagccataaacggtgcaaaaaatgctggtttattagcaattcaaatccttagtttatttgatgaagcattaagattaaaaatgaaaaaatttagagagaatctgcatacacaagtaagaactaaaaatagtaaattgtctgctctaggggctgataattatctgaaaactgactaa

SEQ ID NO: 51793 - protein, 163 aa, Prochlorococcus marinus subsp. pastoris str. CCMP1986
MGSDSDLKTLKPAIDILNEFGIETEVCILSAHRTPMEMMEYAKKAESENIKVIIAGAGGAAHLPGMIASLTCIPVIGVPVESKTLKGIDSLLSIVQMPAGIPVATVAINGAKNAGLLAIQILSLFDEALRLKMKKFRENLHTQVRTKNSKLSALGADNYLKTD

SEQ ID NO: 51794 - DNA, 492 bp, Prochlorococcus marinus str. MIT 9313
  CDS (1)..(492): transl_table=11
atgggtagtgattctgatttgccaaccctgcaaccggccgtcaccgtcttagaggagttcggtgtgaaggtggaggtgcgtgtgctttctgcgcaccgtacgccccttgagatggtggcctttgcaaaggaagctcatcagagaggtttgaaggtgatcgtggcaggtgccggcggtgctgctcatttgccgggcatggtggcgtcactcaccacgctgccagtgattggagtacctgtgcagagcagggctctttccggggtggattccttgcattcgattgtgcagatgcctgggggaatccctgtggcaacagtggcgattggtggagggcttaatgctggcttgctggcggctcagatcctggcgatctgtgatccacagcttgcagagcggttgagggcctaccgccaggatcttcacgatgctgtggtagccaaggatgctcgcttgttggagcttggcagtgaggcttatttggggcagatgtga

SEQ ID NO: 51795 - protein, 163 aa, Prochlorococcus marinus str. MIT 9313
MGSDSDLPTLQPAVTVLEEFGVKVEVRVLSAHRTPLEMVAFAKEAHQRGLKVIVAGAGGAAHLPGMVASLTTLPVIGVPVQSRALSGVDSLHSIVQMPGGIPVATVAIGGGLNAGLLAAQILAICDPQLAERLRAYRQDLHDAVVAKDARLLELGSEAYLGQM

SEQ ID NO: 51796 - DNA, 501 bp, Synechococcus sp. WH 8102
  CDS (1)..(501): transl_table=11
atgggcagtgattccgatctgccgaccatggaaccggccgcggcgatcctgcgggaactgggggttgaggtggaggtgcgggtgttgtcagcccaccgcacaccgctggaaatggtggcctttgcccaggcggcccgcactgagggattcggtgtgattgtggccggtgccggtggtgccgcccatctgccggggatggtggcggccctcaccaccctgccggtgatcggtgttcccgtccgaagccgttctctgtccggggtggattcgctgcactcgatcgtgcagatgcccggtggtattcccgttgccacggtggccatcggcggtggcctcaatgccggattgctggctgctcagatcctgtcggtggcagacgaggcactggcggcccgactggcggactaccgccgcaggttgcacgatgcagtggcagccaaggatgcccgtctgctcgatctcggcagtacggcctatctcgacggcatgtcgaccccttga

SEQ ID NO: 51797 - protein, 166 aa, Synechococcus sp. WH 8102
MGSDSDLPTMEPAAAILRELGVEVEVRVLSAHRTPLEMVAFAQAARTEGFGVIVAGAGGAAHLPGMVAALTTLPVIGVPVRSRSLSGVDSLHSIVQMPGGIPVATVAIGGGLNAGLLAAQILSVADEALAARLADYRRRLHDAVAAKDARLLDLGSTAYLDGMSTP

SEQ ID NO: 51798 - DNA, 489 bp, Chromobacterium violaceum ATCC 12472
  CDS (1)..(489): transl_table=11
atgattgaagtcggcatcgtgatgggtagcaacagcgactgggaagtgatgcagcacgccgcccgcgtgctgaaaaacttcggcgtcgcctgcgaaacccgcgtcgtctccgcccaccgcaccccggacctgctgttccagtacgccgaagaagccgcgccgcgcggcctgaaggccatcatcgccggcgccggcggggccgcccatctgccgggcatgctggccgccaagacccacgtgccggtgctgggcgtgccggtgccgtccaaatacctgcgcggcgaggattcgctgctgtccatcgtccagatgcccaagggcatcccggtggccaccttcgccatcggcgaggccggcgccgccaacgccgcgctgttcgcggtggcgatgctggcgaccacccggccggaactggccgagcaactgatcggcttccgcaagcaacaggaagcaaccgtgctggcgatgacattgccggaggtcgaataa

SEQ ID NO: 51799 - protein, 162 aa, Chromobacterium violaceum ATCC 12472
MIEVGIVMGSNSDWEVMQHAARVLKNFGVACETRVVSAHRTPDLLFQYAEEAAPRGLKAIIAGAGGAAHLPGMLAAKTHVPVLGVPVPSKYLRGEDSLLSIVQMPKGIPVATFAIGEAGAANAALFAVAMLATTRPELAEQLIGFRKQQEATVLAMTLPEVE

SEQ ID NO: 51800 - DNA, 507 bp, Porphyromonas gingivalis W83
  CDS (1)..(507): transl_table=11
atgcagcctttggtaagcatcatcatgggtagtacttccgatctgcccattatggagaaagccgccaaaatgctcgatgaaatgcagattccattcgagatgttggcgctttcggctcatcgtactccggctgaagtagagacttttgcacacgaggccagagctcgcggtatcaaggtaattatcgctgctgccggtatggcagctcatttgtgtggcgtaattgcttccatgacgtctattccggtaataggtgtacccatcaatgccactcttgacggaatggatgctctgttagccatcgttcaaatgcctccggggatccccgttgctactgtggggatcaatgctgcccagaatgcagcacttttggccgtccagatgatggctaccggcgacgaagctctctatgctcgactggaggcctataaggagtcgctcaaagaaaaagtcgttaaggccaatcgcgagctggcagaggtgaagtacaacttcaaaacgaattaa

SEQ ID NO: 51801 - protein, 168 aa, Porphyromonas gingivalis W83
MQPLVSIIMGSTSDLPIMEKAAKMLDEMQIPFEMLALSAHRTPAEVETFAHEARARGIKVIIAAAGMAAHLCGVIASMTSIPVIGVPINATLDGMDALLAIVQMPPGIPVATVGINAAQNAALLAVQMMATGDEALYARLEAYKESLKEKVVKANRELAEVKYNFKTN

SEQ ID NO: 51802 - DNA, 495 bp, Wolinella succinogenes DSM 1740
  CDS (1)..(495): transl_table=11
atgcagtttgtgtcgattctaatgggcagtaagtccgatgccgaggtgatgagagagtgtgcggagattttcaaaaaatttgatgttccctatgagatgatcatcagctccgcccaccgaagtcctgtgcgcaccaaagagtatgtgctggaagctgaggccaggggagcaaaagtctttatcgctgctgcgggcatggcggctcacttggcgggagccatctcctctatgaccaccaagcccgtgattggtgtgcccatgggcggagggacgcttggaggattggatgcgctactctccaccgtccaaatgccctcagggatgcccgtgggaacagtcgctattggaaagacaggagcagtgaatagtgcctatttggcgatgcagattttggcccttggcaatgatgagctagcgggcaaactcaaagaggatcgcgtgatgaaggccaaaaatgtggagcttgattccgcagagattgaggttttgctctag

SEQ ID NO: 51803 - protein, 164 aa, Wolinella succinogenes DSM 1740
MQFVSILMGSKSDAEVMRECAEIFKKFDVPYEMIISSAHRSPVRTKEYVLEAEARGAKVFIAAAGMAAHLAGAISSMTTKPVIGVPMGGGTLGGLDALLSTVQMPSGMPVGTVAIGKTGAVNSAYLAMQILALGNDELAGKLKEDRVMKAKNVELDSAEIEVLL

SEQ ID NO: 51804 - DNA, 516 bp, Gloeobacter violaceus PCC 7421
  CDS (1)..(516): transl_table=11
atgacccatcctgcgctggtggggatcatcatgggcagcgattcggatctgcccacgatgaaggcggcggccgaggtctgcaccgaattcgaggtgccctgttcggtggcgatcgtctcggcccaccgcacgccggagcgcatgtttgaatttgcggcgaccgcccactcccggggcttgaaggtgatcgtggccggggcgggcggggcggcccacctgccggggatggtggcggccctcacacccctgccggtgattggagtgccggtaccggtcaccgccctggggggcgtcgatgcgctctattcgattgtccagatgcccgcaggcattccggtggccaccgtggcgatcggcaacgcccgcaacgccggtctgctcgctgtgcagatcctggcgacggcggacccggtgttgcagcaaaaaatcgtcgcttatcgcgagcggctgcgcacggcggtcgagaaaaaacaggcccgcctcgaagagctgggttggcggaactacgagccttaa

SEQ ID NO: 51805 - protein, 171 aa, Gloeobacter violaceus PCC 7421
MTHPALVGIIMGSDSDLPTMKAAAEVCTEFEVPCSVAIVSAHRTPERMFEFAATAHSRGLKVIVAGAGGAAHLPGMVAALTPLPVIGVPVPVTALGGVDALYSIVQMPAGIPVATVAIGNARNAGLLAVQILATADPVLQQKIVAYRERLRTAVEKKQARLEELGWRNYEP

SEQ ID NO: 51806 - DNA, 531 bp, Photorhabdus luminescens subsp. laumondii TTO1
  CDS (1)..(531): transl_table=11
atgactgcccaacctgatttagcaggaacagctcaacacaatgccaaaatcgccattgtcatgggttctaaaagcgattggacgactatgcagcacgcggctgatatcctcacttctcttaatgtaccttttcatgttgaaattgtttctgctcaccgtacacccgataaactattcagttttgccgagcaagctgagcaaaatggttttgatgtcattatcgccggtgccggtggtgccgctcatttacccggcatgctggctgctaaaacgctggtaccggttctcggcgtacccgtacaaagtgctgcactaaatgggatagacagtctttactctattgtacagatgccaaaagggattcctgtcggcacacttgccattgggaaagctggcgcggcaaacgcagctctactggctgcacagattttggctcgtcataataaagatttactgaaacgcctcagccattggcgtgaaacacaaactcaggatgtactcgataatcccgatccgcgggaggaagcatga

SEQ ID NO: 51807 - protein, 176 aa, Photorhabdus luminescens subsp. laumondii TTO1
MTAQPDLAGTAQHNAKIAIVMGSKSDWTTMQHAADILTSLNVPFHVEIVSAHRTPDKLFSFAEQAEQNGFDVIIAGAGGAAHLPGMLAAKTLVPVLGVPVQSAALNGIDSLYSIVQMPKGIPVGTLAIGKAGAANAALLAAQILARHNKDLLKRLSHWRETQTQDVLDNPDPREEA

SEQ ID NO: 51808 - DNA, 501 bp, Corynebacterium diphtheriae NCTC 13129
  CDS (1)..(501): transl_table=11
atgacaccactcgtaggccttatcatgggctccgactccgactggcccaccgttgaaccagccgccgaggtactcgccgaattcggcatccccttcgaagtaggcgtagtttctgcacaccgtactccagagaaaatgctggcatacgcaaaaaccgcacatgagcgcggtctaaaatgtatcattgcctgcgccggcggtgccgcacacctacctggcatggtcgcagcagccaccccgctacccgtcatcggaatcccacgcgctctcaaagaactcgacggcatggattctctgctctccatcgtccaaatgccaggcggggttcccgttgctaccgtctccattggaggcgctaaaaacgcaggactgttggccgcacgaattcttggcgccggtgatccagaactagtaaccaagatggctgactaccaagaaaacatgcgccaagaagttgagcgcaaagatgccaacctcaagaagaaattgatgggcgagtaa

SEQ ID NO: 51809 - protein, 166 aa, Corynebacterium diphtheriae NCTC 13129
MTPLVGLIMGSDSDWPTVEPAAEVLAEFGIPFEVGVVSAHRTPEKMLAYAKTAHERGLKCIIACAGGAAHLPGMVAAATPLPVIGIPRALKELDGMDSLLSIVQMPGGVPVATVSIGGAKNAGLLAARILGAGDPELVTKMADYQENMRQEVERKDANLKKKLMGE

SEQ ID NO: 51810 - DNA, 489 bp, Rhodopseudomonas palustris CGA009
  CDS (1)..(489): transl_table=11
atgacagctcccgtcgcgatcatcatgggcagccagtcggactgggaaacgatgcggcacgccgccgacaccctgaccgccctcggcgtcgcccatgacacccagatcgtttccgcgcaccgcacccccgaccgcctttatgctttcgccaaaggcgcgaaggcagccggccaccgtatcgtcattgccggcgccggcggagccgcgcatctgccggggatgaccgcggcgctgacggagctgccggtgttcggcgtgccggtggaatccaagaccatgtcgggcctggattcgctgtattcgatcgtgcagatgccggccggcatcccggtcggcacgctggcgatcggcaaggccggcgcagtcaacgccgccctgctggctgcgagcgtgctggcgctgacagattccgatctggcgacccgactggcggcgtggcgcaaggcacagaccgattcggttgcggcccggccggagggcgcggcgtga

SEQ ID NO: 51811 - protein, 162 aa, Rhodopseudomonas palustris CGA009
MTAPVAIIMGSQSDWETMRHAADTLTALGVAHDTQIVSAHRTPDRLYAFAKGAKAAGHRIVIAGAGGAAHLPGMTAALTELPVFGVPVESKTMSGLDSLYSIVQMPAGIPVGTLAIGKAGAVNAALLAASVLALTDSDLATRLAAWRKAQTDSVAARPEGAA

SEQ ID NO: 51812 - DNA, 510 bp, Geobacter sulfurreducens PCA
  CDS (1)..(510): transl_table=11
atggaaaacccgcaggtactcatcattatgggaagtgattcggacgttcccgtcatggaagaagcggcaaaggcccttgatgctttcggcgtgacctgggaaatgcgagtggcgtcggcccaccgttcgccgaaaaaagcggcagatctcgcctcgaacgcggccgcgcgcggcgtgaaggcgatcatcgccggtgccggcgtggctgcccaccttgcgggggtcctcgccgccgagactattctgccggttatcgcggtaccaatgccgggaggggcgctcaacggcgttgatgccctgtactccatggtgcagatgcctggcgggattccggtggctactatggccatcggcaaggcaggagccaaaaatgccgggctgttcgcggtgcagatcctggccctcggggatgccgccatggccggcaggctcgtggaatacaaggcgagtatggcggaagaggtggaggccaaggatcgggcccttcaggtcaagttgggccgcgcgtag

SEQ ID NO: 51813 - protein, 169 aa, Geobacter sulfurreducens PCA
MENPQVLIIMGSDSDVPVMEEAAKALDAFGVTWEMRVASAHRSPKKAADLASNAAARGVKAIIAGAGVAAHLAGVLAAETILPVIAVPMPGGALNGVDALYSMVQMPGGIPVATMAIGKAGAKNAGLFAVQILALGDAAMAGRLVEYKASMAEEVEAKDRALQVKLGRA

SEQ ID NO: 51814 - DNA, 552 bp, Geobacter sulfurreducens PCA
  CDS (1)..(552): transl_table=11
atggaaaaagtcgaaacatcgagcgcacccggcactctcgccgaccgctcgccgctggtgggaatcctgaccgggagccccaatgatctgcccacggtggtgaaggtgcgcgacaccctgaccgagctcggcatcccgagcgagatcgtggtggcttcggcccaccggacccccgacaaggtcctcgcctacctggaccgggcccataaggaaggggtgcaggtactgatcggctgcgccggcgtggccgctcacctggcgggtgtaatcgccgggcacacgagattgccggtcatcggtttgccgctcggcaacggccccttgtcagggatggacagcctcctctcgaccgtgcagatgcccccgggcgtgccggttgccacggtggccatcgacgggagccgcaatgcggccatgctggcggcccgcattctggccctcaagtacccggagattgacaaggccctggaagaggcggctcggaaggagcgggagcgctacgacctgaccgccgatgaggccctggcaaaactcacctcgtgcgtcaagtaa

SEQ ID NO: 51815 - protein, 183 aa, Geobacter sulfurreducens PCA
MEKVETSSAPGTLADRSPLVGILTGSPNDLPTVVKVRDTLTELGIPSEIVVASAHRTPDKVLAYLDRAHKEGVQVLIGCAGVAAHLAGVIAGHTRLPVIGLPLGNGPLSGMDSLLSTVQMPPGVPVATVAIDGSRNAAMLAARILALKYPEIDKALEEAARKERERYDLTADEALAKLTSCVK

SEQ ID NO: 51816 - DNA, 522 bp, Mycobacterium avium subsp. paratuberculosis K-10
  CDS (1)..(522): transl_table=11
atgagcgtgaccgaagctcctcgcgtcgcggtgatcatgggcagcgacagcgactggtcggtgatggccgacgccgcggccgcgctggccgagttcgacgtgcccgccgaggtgcgggtggtctcggcgcaccgcacgccgggggtgatgttcgactacgcgcgcgacgccgccgggcggggcatcgaggtgatcatcgccggcgccggaggcgccgcccacctgcccggcatggtcgcctcggcgacgccgctgccggtgatcggggtcccggtgccgctgggccggctggacgggctggactcgctgctgtcgatcgtgcagatgcccgcgggggtgccggtggccaccgtctccatcggcggcgcccgcaacgccggcctgctggcggtgcgcatcctcggcgcctccgacccggggctgcgggcccgcatcgtcgagttccagacccagctggccgacagcgtgcgggccaaggatgaggcgctgcaaaggctgcacggtaaagttaccggtcagtag

SEQ ID NO: 51817 - protein, 173 aa, Mycobacterium avium subsp. paratuberculosis K-10
MSVTEAPRVAVIMGSDSDWSVMADAAAALAEFDVPAEVRVVSAHRTPGVMFDYARDAAGRGIEVIIAGAGGAAHLPGMVASATPLPVIGVPVPLGRLDGLDSLLSIVQMPAGVPVATVSIGGARNAGLLAVRILGASDPGLRARIVEFQTQLADSVRAKDEALQRLHGKVTGQ

SEQ ID NO: 51818 - DNA, 714 bp, Bdellovibrio bacteriovorus HD100
  CDS (1)..(714): transl_table=11
atgaaaattcaggttctttttggcagtgcgaatgatgaacgtgtgtacggtccgttgtgccgttcccttgaaaaatgcggtgacgtgaaaatggaagtggcttccgcccaccgtgatcccgcccgagtccacgagattgtaaaaacctgcggtgcggatgcttttgtcgccggcgcaggcttggctgcccatcttccaggtgtcgtggcgtctttaacagacaagccggtcttcggcgtggcggtgaatggggcctttgctggccttgatgccttcttgtcgattgttcagatgccgcgcggaattcccgtggcagccgtgacagaagaaaatgccaacaccatcggagacttcatcgttcgcctggcgaaagttccaaaagaccgcctgtgtctgcactggaatcgctgcctggaaagttattcacctattcaaaaagccctggatgaaattcagactcaaaccggtttgcagatcgaatggacggcggctcaggccgaaaactgtctgggcgaaatcgtcagtccttgggagcttccgcacacgcaagggttgaatctgttcctgtgtgaaaaagaacagctggccagctccaacctggcgttggacttttatgccaaggcccgccacggcggattctgggtgggggccaacaacgtggccaattttgtgaatcaatggaacaaactgaaagttttaggagcaagccgatga

SEQ ID NO: 51819 - protein, 237 aa, Bdellovibrio bacteriovorus HD100
MKIQVLFGSANDERVYGPLCRSLEKCGDVKMEVASAHRDPARVHEIVKTCGADAFVAGAGLAAHLPGVVASLTDKPVFGVAVNGAFAGLDAFLSIVQMPRGIPVAAVTEENANTIGDFIVRLAKVPKDRLCLHWNRCLESYSPIQKALDEIQTQTGLQIEWTAAQAENCLGEIVSPWELPHTQGLNLFLCEKEQLASSNLALDFYAKARHGGFWVGANNVANFVNQWNKLKVLGASR

SEQ ID NO: 51820 - DNA, 480 bp, Treponema denticola ATCC 35405
  CDS (1)..(480): transl_table=11
gtgagacctcttgtaataatacttatgggttcatcgtcggatatgggccacgcagaaaaaatagcttcggagttaaagacctttggaatcgagtatgctataagaataggctcggctcataaaactgcggagcatgttgtttctatgctaaaagaatatgaagcccttgataggccgaaactctatattactattgcaggaagaagcaatgctctttccggctttgtggatggttttgtaaagggggctacaattgcttgtcctcctccatccgacagctttgcaggagcagacatttattcttctcttaggatgccctcgggtatttcgccggccttggtgctggagcctaaaaatgcggctctccttgctgcaagaattttttcactttatgataaagaaatagcggattcggtcaaatcttatatggaatcaaatgctcaaaaaataattgaagacgattccaaattaaaaagatag

SEQ ID NO: 51821 - protein, 159 aa, Treponema denticola ATCC 35405
MRPLVIILMGSSSDMGHAEKIASELKTFGIEYAIRIGSAHKTAEHVVSMLKEYEALDRPKLYITIAGRSNALSGFVDGFVKGATIACPPPSDSFAGADIYSSLRMPSGISPALVLEPKNAALLAARIFSLYDKEIADSVKSYMESNAQKIIEDDSKLKR

SEQ ID NO: 51822 - DNA, 486 bp, Bacillus cereus ATCC 10987
  CDS (1)..(486): transl_table=11
atgaaatcactagttggagtcataatgggaagcacgtcagactgggaaacaatgaaatatgcttgtgacattttagatgaattaaatataccgtatgagaaaaaggttgtatccgctcatcggactccggattatatgtttgaatatgcagagacggctcgtgaacgtggattgaaagttattattgcgggagctggtggagcagcacatttaccaggaatggttgcagcgaagacgaatcttcctgtaatcggagttccagttcaatcaaaagcgttaaacggcttagattcattattatccatcgtccaaatgccaggaggggttccagttgcaactgttgcaattggtaaggctggttcaacaaatgctggtttacttgctgcacaaatacttggatcattccatgatgacatatatgatgcattagaattgagaagagaagcaattgaaaaagatgtgcgcgaaggtagtgagctagtatga

SEQ ID NO: 51823 - protein, 161 aa, Bacillus cereus ATCC 10987
MKSLVGVIMGSTSDWETMKYACDILDELNIPYEKKVVSAHRTPDYMFEYAETARERGLKVIIAGAGGAAHLPGMVAAKTNLPVIGVPVQSKALNGLDSLLSIVQMPGGVPVATVAIGKAGSTNAGLLAAQILGSFHDDIYDALELRREAIEKDVREGSELV

SEQ ID NO: 51824 - DNA, 477 bp, Methanococcus maripaludis S2
  CDS (1)..(477): transl_table=11
atgataaccataattatgggaagtaaaagcgatgtaaaaattgcagaaaaggcagtttctattttaaaagaatttaaaattgattatgaggtaagagtggcttcagcacacagaacccctgaattagtcgaagaaattgttaaaaattcaaaatcaaaagtatttatcgcaattgcaggacttgcagcgcatttaccgggagttgttgcagcaatgactacaaaaccagttattgcagttccggtcgaaagtaaattagatggacttgatgcattgctaagcgctgttcagatgcctccaggaattcctgcagcttgtgttggaatcgatagaggagaaaatgccgcaattttagctgctgaaatgctctccatttctgatgaaagaattgaaaaaaaattagctgaatttagagaaaatcaaaagaaaaaaatattttcagatgatgcagaagtttcctcactttttaaaaactaa

SEQ ID NO: 51825 - protein, 158 aa, Methanococcus maripaludis S2
MITIIMGSKSDVKIAEKAVSILKEFKIDYEVRVASAHRTPELVEEIVKNSKSKVFIAIAGLAAHLPGVVAAMTTKPVIAVPVESKLDGLDALLSAVQMPPGIPAACVGIDRGENAAILAAEMLSISDERIEKKLAEFRENQKKKIFSDDAEVSSLFKN

SEQ ID NO: 51826 - DNA, 1818 bp, Magnaporthe grisea 70-15
  CDS (1)..(1818)
atgtctcaagaaacagttgtaggcctcctcggaggaggccagctgggtcgcatgctttgcgaggcagcaggaccacttggctttcccatcgccatacttgacgagggaaacagtcctgccaagcaggccctccacggcccgcatgttgacggctccttcaaggatcctcaaaaaatccgcgagctcgccaggaagtgcgacgtgctcaccgtggagatcgagcacgttgacaccgaggtcctggaggagattgctactaaaggcgtcgaggtgcaagggtctatgaagaagatcccggtgcacccctcatgggagaccatccgccttatccaggataagttcctccagaaggagcactacaagaaacacaagctgccgatcgcggagcaggtggctattgagtcgggagacgccatgctgtcatcactcaaggatgcaggacgtaaatttggctaccccctgatgctcaaggcacgtaagggctcctacgatggtcgggggaactttaaaatctcaagcgaggcagatttggagcatgcggtaaaggaacttggctccctgtcgctgtatgctgagaagtggtgcaaattcgttcaggagctcgccgtcatggtcatcaggacagaggacgaccaaggaaacctgaagtccctggcagcataccctgccgttgagaccatccacgaggacagcatctgcaccaagactttcatgccgcccaggaatgtgtcggatgaaatctgcgagaaggctagagaaacagcacgtcaagtcatctcaaccatctccgggagaggtgtctttgccgtcgagatgtttttgctggaagacggctccatcttggtcaacgaggtcgcgccgaggcctcataactcgggccattacaccatcgaggctgtgccttatttttcgcaatacaaagcccagctatacgcccttctggatctgcctataccaaaacagctgaagcctcgggtggcttccgccatcatgataaatattcttggtggcgccgggcccgagtcccacaacgacctggtagagaccgcagcgcgctcgttcgaagacgacatcgacgtacatgttcacctttacggcaaggccagcaagcccggaaggaagattggccacatcaccatcacatcagagctgaggatcgcggagctacagaagaagtctgagcatttgttcgtcctggctgatgcgatgcgggcagagcgtctcaaggctgcgtcggcgcagttgaggccacaagaatcggttgtcaagtccagctccagtgcaccatccaagacagatgcactggtcctcgtgaccatggggtcagactcggatttgccagtgatgaaggcaggccttgacatcctgaagcagttcggagtgccctacgaagtcaggatcacgtctgcccacaggacgccgaacctgatgggagacgtggctgccgaggctgcaggtcgcggaatcaaggtagccattgctgcggccggcggcgctgcccatctgcctggcatgtttgcatcccactgccccatcccagtcattggtgtgcctgtcaaggcgactcacctggacggagaggacagtcttctcagcatcgtgcagatgcccaggggcgtccccgtggccacggttggcatcaacaactcgaccaacgctgcactccttgcaatccgcatgctcgggtccttcattcctaaataccaggaccaaatgaagagttaccagcaagaaatggaggatgccgttctggccaaggatgaggagctacgtggtatcgggtacgagtcttacctggccaaaatgggtaagaagtag

SEQ ID NO: 51827 - protein, 605 aa, Magnaporthe grisea 70-15
MSQETVVGLLGGGQLGRMLCEAAGPLGFPIAILDEGNSPAKQALHGPHVDGSFKDPQKIRELARKCDVLTVEIEHVDTEVLEEIATKGVEVQGSMKKIPVHPSWETIRLIQDKFLQKEHYKKHKLPIAEQVAIESGDAMLSSLKDAGRKFGYPLMLKARKGSYDGRGNFKISSEADLEHAVKELGSLSLYAEKWCKFVQELAVMVIRTEDDQGNLKSLAAYPAVETIHEDSICTKTFMPPRNVSDEICEKARETARQVISTISGRGVFAVEMFLLEDGSILVNEVAPRPHNSGHYTIEAVPYFSQYKAQLYALLDLPIPKQLKPRVASAIMINILGGAGPESHNDLVETAARSFEDDIDVHVHLYGKASKPGRKIGHITITSELRIAELQKKSEHLFVLADAMRAERLKAASAQLRPQESVVKSSSSAPSKTDALVLVTMGSDSDLPVMKAGLDILKQFGVPYEVRITSAHRTPNLMGDVAAEAAGRGIKVAIAAAGGAAHLPGMFASHCPIPVIGVPVKATHLDGEDSLLSIVQMPRGVPVATVGINNSTNAALLAIRMLGSFIPKYQDQMKSYQQEMEDAVLAKDEELRGIGYESYLAKMGKK

SEQ ID NO: 51828 - DNA, 1788 bp, Gibberella zeae PH-1
  CDS (1)..(1788)
atgagtggaaagccagagctcggactcctcggtggtggccaactcggccgaatgctatgcgaggccgcatcacccctcgaagttgaaatcgccatcctcgatgctcaagacgccccagccaaacaagtctcccgcagcaagtaccacgtcgacggatctttcaaggaccccgccaagatcagggaacttgcctcgcactgcaaggtcctcagtgtagagacggaacacatcgagactgccgttctcgaggagctgagcaaggagggcaaggttgtcgtctacccttcatggaagacattgcgtcttatccaggacaagtatgagcagaaggattatcttggcaagcagggcattcccatcgctgagcaggtcgctgtccaagcttcgggtagtgatgacatgcgcgctgctctcaaggacatttccaacaagtacggtctgcctttcatgctcaaatcgcgaaaggattcttacgatggacgtggaaacatcaagatcgccaatgataacgacatcgagacagccgtgaccgagtttggaaacctacaatgctatgccgaaaagtacgtccccttccagcgtgagctgtccgtcatcgtcatccgcacagaggacgccgatggtaagacaaagcgtctggtgccataccccgccgtggagactgtccatgaggacaatgtctgttcgcgcgtgtacatgcctccacgcgacacccccgatgctgtatccaagcgtgcccaggaggttgctgtcagtgtggttgagaagctctggggacgaggcgtttttgctgttgagatgtttgtcactgagaacaatgacattctcgtcaatgagattgctccccgacctcacaattctggacatctcacaatcgaagcagtgccctacatgtctcagtacaaggcccaacttacatccatcctcgacgaacccctccccgaaacgctcgagccccacgtctcgtccagcatcatgatcaacatcctcggcggtgcttcaccagaatctcatatccctctggtcaacaaggccaagtccatgtttgcccctaagattggtgtctatcctcatctttacggcaaacaatccaagcccgggcgcaagattggtcacatcactcttactggcctcgaggggaccatcaaggatctcgaaaagtttgcgcagccactcgtccagttggcggctgatatgcgccaagagagaattgaggcgaagagcaaggctatgagacctgagcaagctgttgtcaagactgcaaaggacccattggttcttgttaccatgggttctgactcagatctccctgttctcaaggctggtcttgatattctcacacagtttggtgtcccttgggaggttgatattacttctgcacaccgaacgcccgtcaagatgggggatgtcgctgttgctgctgctgatcgtggcatcaaagtgattattgctgctgctggaggagctgctcacttgccaggcatgatctcggcttacacgcctctgcccgtcatcggagttcccgtcaaggctactcatctcgacggaatggattcccttctcagcatcgtccaaatgcctcgaggtgttccaactgccaccgtgggtatcaacaactccactaacgctgcccttcttgccatccgcatcctcggtgctttcatccctgaatacctggagaagatgaagggatatcaaacagacatcggagagcaggtcaacggtaaggccactcgtctgagagaatcagatgtggaatcctatctcgcccaaatgaagaagggttag

SEQ ID NO: 51829 - protein, 595 aa, Gibberella zeae PH-1
MSGKPELGLLGGGQLGRMLCEAASPLEVEIAILDAQDAPAKQVSRSKYHVDGSFKDPAKIRELASHCKVLSVETEHIETAVLEELSKEGKVVVYPSWKTLRLIQDKYEQKDYLGKQGIPIAEQVAVQASGSDDMRAALKDISNKYGLPFMLKSRKDSYDGRGNIKIANDNDIETAVTEFGNLQCYAEKYVPFQRELSVIVIRTEDADGKTKRLVPYPAVETVHEDNVCSRVYMPPRDTPDAVSKRAQEVAVSVVEKLWGRGVFAVEMFVTENNDILVNEIAPRPHNSGHLTIEAVPYMSQYKAQLTSILDEPLPETLEPHVSSSIMINILGGASPESHIPLVNKAKSMFAPKIGVYPHLYGKQSKPGRKIGHITLTGLEGTIKDLEKFAQPLVQLAADMRQERIEAKSKAMRPEQAVVKTAKDPLVLVTMGSDSDLPVLKAGLDILTQFGVPWEVDITSAHRTPVKMGDVAVAAADRGIKVIIAAAGGAAHLPGMISAYTPLPVIGVPVKATHLDGMDSLLSIVQMPRGVPTATVGINNSTNAALLAIRILGAFIPEYLEKMKGYQTDIGEQVNGKATRLRESDVESYLAQMKKG

SEQ ID NO: 51830 - DNA, 1710 bp, Kluyveromyces lactis NRRL Y-1140
  CDS (1)..(1710)
atggatcaaagaactgtcggtattttaggcggtggccaattgggccgtatgattgttgaagctgctcatagactgaatgtgaaaactatcattttggatgcagaaaactctccggcaaagcagattaatgctttgagcgaacatgtcaatggttcctttgccaaaccggaagatatcaagaaaattgcatctctttgtgatgtcttaactgttgaaatcgaacacgtcgatgttccaactttgaaaagggttcaacaggatcaccctaacttgaagatctatcccgacccagagacgatcgctttgattcaagataaatttgttcaaaagcaatatttgattcagaataagatcagtgtggcaaagtccgttgctgttaacagcgatgaagaatcgttggctaaagttggttttgaatttggttacccattcatgcttaaatcaagaactttagcctacgatggcagagggaactttgtcgtgaaatccaaggagtctctttccgaagcacttgaggtattgaaagatcgtcccttgtatgccgagaaatgggctccattcgtcaaagagttggctgtaatggtcgtgagatctccagaaggtaaagtgttttcttacactactgttgaaactattcatcaggataatatttgccatttgtgctatgctccagctagagtcccagattccgtccaattgaaagctaagctcttggcagaacatgctattgcagcattcccaggcgctggtatctttggtgtggagatgttctatttagaagacggggaattactcataaatgaaattgctccaagacctcacaactctggccattatacaattgacgcatgtgttacctctcaattcgaagctcacataaggtcaatcttaaacctaccgttacctgaagggttcagtgccttgtctaccacaaacaccaacgctatcatgttaaacgtcttgggtgatcatgctgaaaagaataaagaactacaaatctgtgaaagagcactatctacacctggtgcctctgtatatctttacggtaaagaatcaagaccgcagagaaagatgggtcacattaatatcattggatcttcaatgagcgaatgcgaacgtaaactaaaatatatcatgtatgccgatgctgcttacgaacatatcgccaccagggaattcactctacccggcgcgtctatgagaccattgatcagtattattatgggatcagactctgatctaccggttatgtccaaggcctgcgatatcttgaatgattttaatattcaatatgaagtgaccatcgtctctgctcatagaactccacacagaatgtctaagtttgctatcgaagctgctaaccgtggtatcaaagccatcattgccggtgctggtggtgcagcccacttaccaggcatggtggctgctatgactccgttgccagtcatcggtgttccagtaaagggctccaccctagacggtgtcgattctctacattccattgtacaaatgccaagaggtgtacccgtggccacagttgcaattaacaatagtacaaatgctgctttgttagcaatcagaattttgggtgcgtatgatccagtatacttctctaagatgcaacaattcttacaaaaacaagaagaagaggtgttaacgaaagctgccaaattagaaactatcggatatcaagaatacttgaaaaaatag

SEQ ID NO: 51831 - protein, 569 aa, Kluyveromyces lactis NRRL Y-1140
MDQRTVGILGGGQLGRMIVEAAHRLNVKTIILDAENSPAKQINALSEHVNGSFAKPEDIKKIASLCDVLTVEIEHVDVPTLKRVQQDHPNLKIYPDPETIALIQDKFVQKQYLIQNKISVAKSVAVNSDEESLAKVGFEFGYPFMLKSRTLAYDGRGNFVVKSKESLSEALEVLKDRPLYAEKWAPFVKELAVMVVRSPEGKVFSYTTVETIHQDNICHLCYAPARVPDSVQLKAKLLAEHAIAAFPGAGIFGVEMFYLEDGELLINEIAPRPHNSGHYTIDACVTSQFEAHIRSILNLPLPEGFSALSTTNTNAIMLNVLGDHAEKNKELQICERALSTPGASVYLYGKESRPQRKMGHINIIGSSMSECERKLKYIMYADAAYEHIATREFTLPGASMRPLISIIMGSDSDLPVMSKACDILNDFNIQYEVTIVSAHRTPHRMSKFAIEAANRGIKAIIAGAGGAAHLPGMVAAMTPLPVIGVPVKGSTLDGVDSLHSIVQMPRGVPVATVAINNSTNAALLAIRILGAYDPVYFSKMQQFLQKQEEEVLTKAAKLETIGYQEYLKK

SEQ ID NO: 51832 - DNA, 1686 bp, Debaryomyces hansenii CBS767
  CDS (1)..(1686)
atggacggaaaaactataggtatattaggtggtggccaattaggtcgtatgattgttgaagcagcacatagattgaatattaaaaccattatcttagatgcgcctaactcaccagctaagcagattaatgcattggatgaacatgttaacggttcattttcagacgcaaagtctatcatggaattagccagaaaatgtgatattttaacagtagaaatagaacatgttgatgcccacgcattacaagaagctaaaaataaatatggtgtcgagatctacccattgccagagaccatcaagatgatccaagataaatattcgcagaaagaacacttgattgaacacggaattgatgttactgaatctattgatgttaaggaaaataacatcgaaacgttatcggaagttggtaacaagttccaatatccattcatgttgaagtcaagaactttagcatacgacggtaggggaaattacgtagtcaagagtaaggaccacttgtcagaagcattagaatatttaaaggatagaccattgtatgcggaaaaatggtgcaagttttccaaggaattagctgtcatggtcgtaagatctattgaaggggaggttttcgcgtaccccactgtggaaacagtccataagaataacatttgcgatgttgtctacgcgccagctagaatcactgatactttatctgtcaaggcatcgattttggctaagaatgccgtcaaatcattccctgggtgtggtattttcggggtcgagatgttcttattgtcaaatggtgaattattgattaatgaaatcgcaccaagacctcataactctggtcattatactatcgatgcttgtgtcacatcacaatttgaagctcatgttagagctgtcgttggattgccaatgcctaaggactttaccaagttttccaccactaacaccaacgccattatgttgaatgtgttaggtgacgatactgctaataaggaattagagatctgtcgtagagcattagaaactccaaatgcctcagtctatctctatggtaagagtactagaccccaaagaaaaatgggtcatattaacattgtttcatcatccatgaaagactgtgaaaacagattagcacacatcttaggtggcgaagaaggagtagccaaggaccttgatgtttctgcagaaaagccattagttggaataataatgggttctgattccgatttaccagtcatgtcagtgggtgcaaatatcttgaagactttcggggtaccatttgaagtgaccattgtaagtgcgcaccgtacgccccacagaatgactcaatatgctatcgaggccgccaagcgtggtatcaagtgtattattgccggtgccggtggtgctgctcacttgccaggaatggttgcagccatgaccccattgccagttattggtgttccagtcaagggatctaccttggacggagtcgattcgttacactcgattgtgcaaatgccaaggggtattccagtcgctaccgtggctattaacaacagtaccaacgccgcattattggcggtcagaatcttgggtgccatcgacaacaagtggttaaacaagatgtcacagtacatggactccatggagagtgaagttttggccaaggctgacaagttggagtcggtgggctacgaaaactacaaggcgtaa

SEQ ID NO: 51833 - protein, 561 aa, Debaryomyces hansenii CBS767
MDGKTIGILGGGQLGRMIVEAAHRLNIKTIILDAPNSPAKQINALDEHVNGSFSDAKSIMELARKCDILTVEIEHVDAHALQEAKNKYGVEIYPLPETIKMIQDKYSQKEHLIEHGIDVTESIDVKENNIETLSEVGNKFQYPFMLKSRTLAYDGRGNYVVKSKDHLSEALEYLKDRPLYAEKWCKFSKELAVMVVRSIEGEVFAYPTVETVHKNNICDVVYAPARITDTLSVKASILAKNAVKSFPGCGIFGVEMFLLSNGELLINEIAPRPHNSGHYTIDACVTSQFEAHVRAVVGLPMPKDFTKFSTTNTNAIMLNVLGDDTANKELEICRRALETPNASVYLYGKSTRPQRKMGHINIVSSSMKDCENRLAHILGGEEGVAKDLDVSAEKPLVGIIMGSDSDLPVMSVGANILKTFGVPFEVTIVSAHRTPHRMTQYAIEAAKRGIKCIIAGAGGAAHLPGMVAAMTPLPVIGVPVKGSTLDGVDSLHSIVQMPRGIPVATVAINNSTNAALLAVRILGAIDNKWLNKMSQYMDSMESEVLAKADKLESVGYENYKA

SEQ ID NO: 51834 - DNA, 1698 bp, Yarrowia lipolytica CLIB122
  CDS (1)..(1698)
atggactcgaaaacaattggtattcttggaggaggtcagctgggccgaatggtcgtggaggctgcccatcgactcaacgtcaagactgtcattctagacgcccccaactctcccgccaaacagattcatgctggagagcatgtcgatggctccttcaaggaccctgccgacattgctaagcttgcctccaagtgcgacgtcataaccgttgaaattgagcatgtgaacgccgacactctggccgatctccagaagactggtgtcgaggttcacccttctcctgagaccatccgaattatccaggacaagtaccgacagaaggagcacctgatctcccacggcattcccgttgccgaatcctacgaggtcaccgagtctactgaggctgcccttgtcgttgctgctgaaaaggtcggctatccttgtgttgtcaaggccaagactcttgcttacgatggtagaggcaacttcgttcttaagggtccagagaatgtcaaggaagctcttgagttcctctccgaccgacctttgtacgtagagaaatggtgtcccttcgtcaaggagctcgctgttatggttgtccgatctaccgacggaaccactgttgcttaccccaccgtcgagactgttcagaaaaacaacatctgccatactgtctacgcccccgctcgagacgtttctccttccaccctgtacgaggctcagctcgttgccgagaacgccattaagtccttcactggcgctggtatctttggtgtcgagatgttcctgctcgaaaacggcacgattgttctcaatgagattgctcctcgaccccacaactccggtcattacacaacagatgcctgctccacctcgcagtttgaggcccatgtccgagccattcttggtctgcctcttttccccgagatggcccagatgcgaacagcagacactcatgccattatgctgaacattctaggaggtgacaagcccgacagcgagcttgagtactgcaagcggtcactttccgtacctgggtccaccatccatctctacggcaagaccacgagacccgagcgaaagatgggacacatcaacattgttgctagcagcatggacgaatgcgagcgacggctggccaaaatatctggagaggacatcgaggaggcaccaaagactgtcgagggtgtagcaggaacctctaagacccccctcgtgtctatcattatgggctcggactccgatcttaaggtcatgtctgccggagccgacatcctgcggaaatttgacattcccttcgaactgaccattgtgtctgcccaccgaaccgcccaccgaatggctaaatttgccgctgaggttgccagccgaggtgtcaaggctgtcattgccggagctggaggagccgctcaccttcccggaatggttgcctcggaaaccactctgccagtcatcggtgtccccgttaagggctcctctctggacggagttgactctctctactccattgtgcagatgcctcgaggcatccccgtggccaccatgggtgtcaacaactccaccaatgctgctctgctggccatccgaattctggctgcttacgacgccaccctacacattcgactggccgagtacatcaagaacatggagaaggaggttcttgccaaggccgacaagctcgagaccattggatacgagcagtacctcaaccaatag

SEQ ID NO: 51835 - protein, 565 aa, Yarrowia lipolytica CLIB122
MDSKTIGILGGGQLGRMVVEAAHRLNVKTVILDAPNSPAKQIHAGEHVDGSFKDPADIAKLASKCDVITVEIEHVNADTLADLQKTGVEVHPSPETIRIIQDKYRQKEHLISHGIPVAESYEVTESTEAALVVAAEKVGYPCVVKAKTLAYDGRGNFVLKGPENVKEALEFLSDRPLYVEKWCPFVKELAVMVVRSTDGTTVAYPTVETVQKNNICHTVYAPARDVSPSTLYEAQLVAENAIKSFTGAGIFGVEMFLLENGTIVLNEIAPRPHNSGHYTTDACSTSQFEAHVRAILGLPLFPEMAQMRTADTHAIMLNILGGDKPDSELEYCKRSLSVPGSTIHLYGKTTRPERKMGHINIVASSMDECERRLAKISGEDIEEAPKTVEGVAGTSKTPLVSIIMGSDSDLKVMSAGADILRKFDIPFELTIVSAHRTAHRMAKFAAEVASRGVKAVIAGAGGAAHLPGMVASETTLPVIGVPVKGSSLDGVDSLYSIVQMPRGIPVATMGVNNSTNAALLAIRILAAYDATLHIRLAEYIKNMEKEVLAKADKLETIGYEQYLNQ

SEQ ID NO: 51836 - DNA, 1263 bp, Apis mellifera
  CDS (1)..(1263)
atggataaatataaatatggaaaactcattattgaaggaaagaccaaaaaggtatatgaagttctaaatgattctactttgtgtcttttacaaagtaaggattgtattactgctgaagatggtaaaaaatttcataatttaaaaggaaaagctgcaattagtacagctactacagctaaagtatttcaattattaaataaagctggaataaaaacagcttttgttgaattggtaaatgatactgtttttgttgcccaaaagtgtcaaatggtaccaattgaatgggttactcgaagattagccactggtagttttttaaaaagatatcaaggtgttcctgaaggttatagatttaatccacctttacaagaaacattttttaaagatgatattaatcatgatcctcaatggtcagaggaacaaattatttctgctggttttaaattgaatgaactcgtaatagggaaagatgaatttgatattatgcaacatattgcacttactgtatttgaaattttagaaagaacatgggctagtagagattgtgcacttatagatatgaaaatagaatttggtgtgaatgtaaataatgaaattatggtagcagatataattgatagtgattcttggagactttggccatttggtgataaaagattaatgaaagataaacaggtatatagaaatttagatattgttactgaagaagatttgaacactataaaatgtaattttaaatggatacaagaccaacttgatcatcttcttcctttatctagtagtcttgttgttattttaatgggatcactttctgatgaaagccattgtaaagaaatagcaaaacatgcaaaatctttaggtttaaaagttcaatttcgtgtatgtagtgctcataaaggtactcaagaaacattgcgtattcttgcagaatatgaaggtacttatgaaaagatagtgttaatagctgtagcagggagaagtaatggattaggtccagtcctttctggaaatacatctctgcctgttattaattgtccacctttcaaaccagaaaatatttcccaagatttatggtcatcgatcaatgttccatcaggaattggatgcaccacagtaatctatcctgaaagtgcagcattagcagctgctcaaattcatgcattgcataatcatttagtttgggcatgtttacgagtaaagcagttaaaaaattatattgctttaaaacaagctgatattaatttaaagaatcttattgtgtaa

SEQ ID NO: 51837 - protein, 420 aa, Apis mellifera
MDKYKYGKLIIEGKTKKVYEVLNDSTLCLLQSKDCITAEDGKKFHNLKGKAAISTATTAKVFQLLNKAGIKTAFVELVNDTVFVAQKCQMVPIEWVTRRLATGSFLKRYQGVPEGYRFNPPLQETFFKDDINHDPQWSEEQIISAGFKLNELVIGKDEFDIMQHIALTVFEILERTWASRDCALIDMKIEFGVNVNNEIMVADIIDSDSWRLWPFGDKRLMKDKQVYRNLDIVTEEDLNTIKCNFKWIQDQLDHLLPLSSSLVVILMGSLSDESHCKEIAKHAKSLGLKVQFRVCSAHKGTQETLRILAEYEGTYEKIVLIAVAGRSNGLGPVLSGNTSLPVINCPPFKPENISQDLWSSINVPSGIGCTTVIYPESAALAAAQIHALHNHLVWACLRVKQLKNYIALKQADINLKNLIV

SEQ ID NO: 51838 - DNA, 1719 bp, Aspergillus nidulans FGSC A4
  CDS (1)..(1719)
atgaatgtacctccgctattgaggatgtggaactcacgcaaagtcggcgtccttggcggcggccagctcggccgcatgttcgtcgaatctgccaacagactcaacattcaatgcaacatcctcgatgcggagaactccccagccaagcagatcagtgcccacgacgaccatgtcaccggctcattcaaggaacgcgaggccgttcgggaattggctaaaaagtgcgacgtcatcacggcggaaatcgagcacgttgacacctatgccctcgaggagattgcgtcgcaggtccaaattgagccgagttggcaggctattcgcacgattcaaaacaagttcaaccagaaggagcaccttgcaaaacatggaattcccatggcggagcatcgtgagcttgtggaaaacaccccggagcaattggctaaggctggtgaagagttgggatacccgttgatgttgaagtcaaagaccatggcttacgatggacgcggtaattaccgtgtcaactcgaaagacgatatccccgatgcgctggagttcctcaaaggccgcccattatcgcaggaactcgctgtaatggttatcaaaaccaaagacgccgttctctcctaccccaccgtcgaaactgtccaagaagactctatctgcaagctcgtctatgcgcccgcacgtaacgttccggaacacatcaaccaagccgcgcagaagctcgcgcgcaaggccgtcgcaaccttcgaaggcaagggcgcctttggcgtcgaaatgttcctcatgaacgataacagcctgctcctctgcgaactcgcttcccgcgtacacaactcaggtcactacaccatcgagggcaccgccctttcccaatttgatgcccatctccgcgcgatcctcgacctgcccatccccccagagagcctgcaactccgccaaccctcgatcatgctcaacataatcggtggctccgcgccggatacgcacctcaaagctgccgaggccgccctctctatacccaacgcttcaattcacctctacagcaagggcgatgccaaaccgggccgcaagatgggccacgtcaccgtcaccgcatcgacaatgcacaaggccgaggaatatattcaaccgctcattgacgtcgtcgacgaaatccgctcccagcgccaagacatcaaaacgaatcccgctccctcgggcgttactaagcctcccccgcaggtcgcagtgatgatgggctcggacagtgacctcaaaacccttgtgcctggtctgaagttgctccgggataaattcggcattgaacctgccgttgatatcacatccgcccaccgcacgcctaccttcatggcagaatactctgcctccgctgcggcccggggtatcaaagtcatcattgctgccgctggcggcgccgcgcatctacctggtatggctgcagcgcatacggcactccctgtcatcggtgtcccagttaagggctcatcgttggatggagtggatagcttgtacagtattgtgcagatgcctagaggtgtccccgttgcaacggtcggtatcaacaatagcatcaacgctgcgctcctggcagcgcggatcattggcgcgtttgacccggatgtccagcggaaggttgaggagtacgccgaggatgctcggaaggagaacatggatatgaaaaatgtaaagatgcaggatttggggtgggagaagtacttcaatcagatgtaa

SEQ ID NO: 51839 - protein, 572 aa, Aspergillus nidulans FGSC A4
MNVPPLLRMWNSRKVGVLGGGQLGRMFVESANRLNIQCNILDAENSPAKQISAHDDHVTGSFKEREAVRELAKKCDVITAEIEHVDTYALEEIASQVQIEPSWQAIRTIQNKFNQKEHLAKHGIPMAEHRELVENTPEQLAKAGEELGYPLMLKSKTMAYDGRGNYRVNSKDDIPDALEFLKGRPLSQELAVMVIKTKDAVLSYPTVETVQEDSICKLVYAPARNVPEHINQAAQKLARKAVATFEGKGAFGVEMFLMNDNSLLLCELASRVHNSGHYTIEGTALSQFDAHLRAILDLPIPPESLQLRQPSIMLNIIGGSAPDTHLKAAEAALSIPNASIHLYSKGDAKPGRKMGHVTVTASTMHKAEEYIQPLIDVVDEIRSQRQDIKTNPAPSGVTKPPPQVAVMMGSDSDLKTLVPGLKLLRDKFGIEPAVDITSAHRTPTFMAEYSASAAARGIKVIIAAAGGAAHLPGMAAAHTALPVIGVPVKGSSLDGVDSLYSIVQMPRGVPVATVGINNSINAALLAARIIGAFDPDVQRKVEEYAEDARKENMDMKNVKMQDLGWEKYFNQM

SEQ ID NO: 51840 - DNA, 1707 bp, Candida albicans SC5314
  CDS (1)..(1707): transl_table=12
atggatagcaaaactgttggtattttaggaggtggccaattaggtcgtatgattgttgaagcagcacatagattgaatatcaagaccgtaattttggacgcagccaaatcaccagctaaacagatcaatgctctagacgatcacgttgatggatcgttcacaaactatgattcgattgtgaaattagctgaaaaggcagacgtattaactgttgaaatcgaacatgttgatgttgatgctttaatcaaagttcaagagaaattccctaaagttgaaatatatccattacctgaaaccataagattgattcaagataaatatttacagaaaaatcatttaatcaaacacgatgttgcagttacagaatctgttgcagttgaaaccaacacagtcgatgacttgttacacattggggaaaagtttggatacccttatatgttaaaatcgagaactttggcgtatgatggtagaggtaactttgttgtcaaagacaagtcatactgtgagaaagctttagaatttttaaaagaccgtccattatatgctgaaaaatggtgtcctttcaccaaagaattggctgtgatggttgtcagatcattagaaggggaagtctttgcttacccaactgttgaaactattcatgaaaacaatatttgtcatttagtgtatgctcctgccaggatcccagatactttggccaaaaaggcatctatattagccaaaaatgcagttaagtcattcctcgggtgtggtattttcggtgttgaaatgttcttgttggaaaacaacgaattattgatcaatgaaattgcaccaagacctcacaactctggtcattataccattgatgcatgtgtcacttcacaatttgaagctcatgttcgtgctgtcacaggattacctatgccaaaggggttcactgaattctccacttccatcaccaatgctattatgttgaatgttttgggtgataaggcaactccaaataaagaattggagatttgtcgccgtgctttggaaactccacatgcgtcagtgtatctttatggtaaaactactagaccagagcgaaagatgggtcatatcaatgttgtcacatcttccatgcaagatgccgagagtagattaagttatatattgggtgataccactgaaattcctaaatctttagctaccgacaaggaatctccattggtgggaataataatgggttccgattcggatctaccagttatggcagttggtgctcgtattttgaaacaatttggtgtgccatttgaactcacaatcgtaagtgcacacagaactcctcatagaatgtctgagtatgctattgaagcaccaaagcgtggcttgaaatgtatcattgctggtgcaggtggtgctgctcatttgccaggtatggtggcggccatgaccccattgcctgtcattggtgttccagttaagggatctacattagatggggttgattcgttacactctatagtacagatgccaagaggtattcctgttgcaactgttgctattaacaatagtactaatgctgcattgttggcaatcagaatattaggcgcctatgactcaaaatggttgactgagatgaaccaatatatgttgaacatggaaactgaagtattaggtaaagcagaaactttagaagaaattggatatgaagactatttaactgataaattgaaaaaatag

SEQ ID NO: 51841 - protein, 568 aa, Candida albicans SC5314
MDSKTVGILGGGQLGRMIVEAAHRLNIKTVILDAAKSPAKQINALDDHVDGSFTNYDSIVKLAEKADVLTVEIEHVDVDALIKVQEKFPKVEIYPLPETIRLIQDKYLQKNHLIKHDVAVTESVAVETNTVDDLLHIGEKFGYPYMLKSRTLAYDGRGNFVVKDKSYCEKALEFLKDRPLYAEKWCPFTKELAVMVVRSLEGEVFAYPTVETIHENNICHLVYAPARIPDTLAKKASILAKNAVKSFLGCGIFGVEMFLLENNELLINEIAPRPHNSGHYTIDACVTSQFEAHVRAVTGLPMPKGFTEFSTSITNAIMLNVLGDKATPNKELEICRRALETPHASVYLYGKTTRPERKMGHINVVTSSMQDAESRLSYILGDTTEIPKSLATDKESPLVGIIMGSDSDLPVMAVGARILKQFGVPFELTIVSAHRTPHRMSEYAIEAPKRGLKCIIAGAGGAAHLPGMVAAMTPLPVIGVPVKGSTLDGVDSLHSIVQMPRGIPVATVAINNSTNAALLAIRILGAYDSKWLTEMNQYMLNMETEVLGKAETLEEIGYEDYLTDKLKK

SEQ ID NO: 51842 - DNA, 2247 bp, Ustilago maydis 521
  CDS (1)..(2247)
atggctcaacatctttggcgatgggaatctgatgtatgttaccttgcttcctcccgacaaccgcaagcgagccaaaatgaggaaacatacattcaaactgtggttcatgctccaccacctcctcacttgagcggggcccgttgcactttgaacgttgccaagttatccgagctcttactactgctcgagtcctcttctagctcccatctgaacgcgtgtacaatagcctactcgatccaccttgtcaacgtcggtcgtcctttccgccacttgcactcacagaggccacccttctacgttgacaaacacagacgacatcctttaaagccgatcggtatcaagatggaacagcgtgttgtgggtgtgctcggcgctggtcagcttggccgcatgtttgttgaagcagcggctcgactcaacgtgcaagtcaagctgctcgatgtcggcgacacggctccagccaagcagatcaactacctccctggccccgatggaaagtcgcaacacattgatggcagctttgccgatcccgaaaagatccgccagcttgcttcgcaggtagatgtgctcaccatcgagatcgagcacgtcgatgctaaccagcttcagaaggtgctcgacgacaagctcgtagatgccgtccatccgctcccctcgaccatcgctctgatccaggacaagtatcttcaaaaggttcatctagccaacaaaggactgccgctcgctgaatacgtcgctgtgggtccagaagacatggccaaggttgccgatgtagcacaggcgcgctcggctcagatccaagctgtggagaaaattggcaaggtgtttggattcccattcatgctcaagtcaaggacgcaggcatacgacggcaagggcaactatgtcgtccgatctgccgaccaggctgctgctgctgccgctgttgctgcgctaggcgatggcaagcgtggtttgtacgctgaaaagtgggcgccgttcgagcgtgaagtggcggtgatggtggtgcgtagcgtcacgggcgaagtacgagcgtatccggcggtggaaacggtgcacaagaacagcatctgccacacggtatttgctccgttgcgaaccgctgatccgggcgtcgaggcgcgcgcacgaaagattgccgagcaagctgtggccacgtttggtggagctggtgtttttggcgtcgagatgttcctcatgcccaacggcgagctgctcatcaacgagattgcaccgcgaccccacaactcggggcactataccatcgaagccgccgacacgagtcagtacgagaaccacgtgcgcgccatcctcggcttgccgttgggtagcacggcgctcaaggtcccctcggcggccatgatcaacattcttggtttggctgattcagacaaggatgcggaagcggtggccaagacgctggttcctgctgttgtcagtctcaacgttgctggcacgacgtgccacctgtacggcaaagcgggctgccgtcagggtaggaagatgggccacattaccattgtggggcagagcgatgctcaggtgcgagcacgtttgcgtgtggtagacgaggcgttggacaaggctacggagctcgccgagaagggcggcaagcttccttctgagctgacgcttgctggcgttgtggcactcaacgcttcggcatcgactggctcgtcaagctcacaagcgcttttggtagcgtcacccaagtcggcggctgacttttcgcatcctcagccattggtgggcattattatgggctcggatagcgatttgcccgtgatgatggcagcagccgagattctcaaaaagtttgacgtgccgtttgagctgaccattgtcagcgcgcaccgcacgccagatcgcatgcgcacgtatgcgcgcagtgcgcctgctcgcgggctgcgcgccatcattgcaggtgccggtggcgcggctcacctgccaggcatggtagctgcgcagacggcacttcccgtcatcggcgtgccggtcaagggcagcacactcgacggtgtcgattcgctgcacagcattgtgcagatgcctcgaggaatccctgttgccaccgtggctatcaacaacagcaccaatgcggcccttttggcgattcgcatcttgggcgctgctgacccgacgtatctggataagatgcaaaagtacatggaagagatggaaaacgaggtgaatggcaagatcgagcgtctggcccatgatgcatgggattacacgttgaacaagtag

SEQ ID NO: 51843 - protein, 748 aa, Ustilago maydis 521
MAQHLWRWESDVCYLASSRQPQASQNEETYIQTVVHAPPPPHLSGARCTLNVAKLSELLLLLESSSSSHLNACTIAYSIHLVNVGRPFRHLHSQRPPFYVDKHRRHPLKPIGIKMEQRVVGVLGAGQLGRMFVEAAARLNVQVKLLDVGDTAPAKQINYLPGPDGKSQHIDGSFADPEKIRQLASQVDVLTIEIEHVDANQLQKVLDDKLVDAVHPLPSTIALIQDKYLQKVHLANKGLPLAEYVAVGPEDMAKVADVAQARSAQIQAVEKIGKVFGFPFMLKSRTQAYDGKGNYVVRSADQAAAAAAVAALGDGKRGLYAEKWAPFEREVAVMVVRSVTGEVRAYPAVETVHKNSICHTVFAPLRTADPGVEARARKIAEQAVATFGGAGVFGVEMFLMPNGELLINEIAPRPHNSGHYTIEAADTSQYENHVRAILGLPLGSTALKVPSAAMINILGLADSDKDAEAVAKTLVPAVVSLNVAGTTCHLYGKAGCRQGRKMGHITIVGQSDAQVRARLRVVDEALDKATELAEKGGKLPSELTLAGVVALNASASTGSSSSQALLVASPKSAADFSHPQPLVGIIMGSDSDLPVMMAAAEILKKFDVPFELTIVSAHRTPDRMRTYARSAPARGLRAIIAGAGGAAHLPGMVAAQTALPVIGVPVKGSTLDGVDSLHSIVQMPRGIPVATVAINNSTNAALLAIRILGAADPTYLDKMQKYMEEMENEVNGKIERLAHDAWDYTLNK

SEQ ID NO: 51844 - DNA, 1749 bp, Cryptococcus neoformans var. neoformans B-3501A
  CDS (1)..(1749)
atggcccccagaaagactgtcggtatcctcggcggtggccagctcggccggatgcttacccaccctgcggcccttctcggcattcctctccttatcctcgactctggctcctacacgcccgccaaacagactcttcttcctcctcctcctcattctcaccctgatggtcctttcacttcggaaactcatattcgcaaacttgcctctgcgtgcgacatcctgacagtggagatcgagcacgttaacgccgatgtccttgaggctgtagaaaaggaaggtctttgtgaagtccagcccagtcccaaaactatcagattgatccagaacaagtacgaccaaaagaagtaccttgctgaaagaggtgtggctgttgcaccttttgaggagcttcccgcaaacccgacggaagaggattttaaggctatcgcaggtcgattgggtttgcctttgatgctcaaagctaagacccttgcctacgatggacgtgggaactctcctcttaaatccgcatcttcagaggacattcaggcttccttgaaattccttggtgacaggcctctttatgctgaaggatgggcgccctttgtcaaggaagttgcggttatggtcgttaggaataaggagggcgaagtccaaagttacgacgccgtcgagactattcacagggagagcattttgcgagtctgtttgactcccctcagaggtgaaaagggtgtgaatcagagggctagggaattagctgagaaggcggtcggacaccttgagggtgctggtatctttggggttgagatgttcctcatgcctgatggtgaacttcttctaaacgagattgctcctcgtcctcacaactctggtcatcacactattgaggcctgtcttacttcccaatttgagaaccaccttcgagccattctctccttgcctcttggctctactgctcttcgtgttccatccgctgccatggtcaacattctcggtgcctcgtcgactatggacgccatcgacaaaatggcagacaatgctctcactgttcctggtgctgccgtgcatctctacggcaaagctgagagccgaaaggcccgtaagatgggccacatcacggtgactgccgaaagcgatgctgagctcaatgagcgccttagagctctcttattcgcccagcctgatgctcatgccgactggatcgacctcatcgcccctccttcccctgctcccgctcattcccacgccaaaccccttgttggtatcatcatgggtagcgactctgacttgcccgttatgcaccctgctaccaagatcctcgaaaaattcggtgtcccctacgagctcaccataacttctgcccatcgcactcctgagcgaatggtgaagtatgcgaagactgctgcagaccgaggattgcgagccatcattgctggggctggcggtgctgcccatttaccaggtatggtcgccagcgagaccagtttgccagtcatcggtgtgcccgtcaaggccagtgtactggatggcgtggattcattgtatagtattgtgcaaatgccccgaggtattccatgcgccactgtgggtatcaacaactctacaaatgccgcgctacttgcagtccgtatccttggaacgtctgtacccgcccttaacaaggctactgaggaatattccaaggcgctagaggaagaagttttggctaaagtcgacattttggaggaggaaggctgggacaagtacatcgagaggctgaagaaataa

SEQ ID NO: 51845 - protein, 582 aa, Cryptococcus neoformans var. neoformans B-3501A
MAPRKTVGILGGGQLGRMLTHPAALLGIPLLILDSGSYTPAKQTLLPPPPHSHPDGPFTSETHIRKLASACDILTVEIEHVNADVLEAVEKEGLCEVQPSPKTIRLIQNKYDQKKYLAERGVAVAPFEELPANPTEEDFKAIAGRLGLPLMLKAKTLAYDGRGNSPLKSASSEDIQASLKFLGDRPLYAEGWAPFVKEVAVMVVRNKEGEVQSYDAVETIHRESILRVCLTPLRGEKGVNQRARELAEKAVGHLEGAGIFGVEMFLMPDGELLLNEIAPRPHNSGHHTIEACLTSQFENHLRAILSLPLGSTALRVPSAAMVNILGASSTMDAIDKMADNALTVPGAAVHLYGKAESRKARKMGHITVTAESDAELNERLRALLFAQPDAHADWIDLIAPPSPAPAHSHAKPLVGIIMGSDSDLPVMHPATKILEKFGVPYELTITSAHRTPERMVKYAKTAADRGLRAIIAGAGGAAHLPGMVASETSLPVIGVPVKASVLDGVDSLYSIVQMPRGIPCATVGINNSTNAALLAVRILGTSVPALNKATEEYSKALEEEVLAKVDILEEEGWDKYIERLKK

SEQ ID NO: 51846 - DNA, 492 bp, Prochlorococcus marinus str. AS9601
  CDS (1)..(492): transl_table=11
atgggtagtgattcagatctaaaaacattgaagccatccattgatattttaagagaatttggaataaaaactgaagtttgtatactttccgctcatcgaacacctattgaaatgatggaatatgcaaaaaatgcagaatcagaaaacataaaagtaataattgccggtgctgggggtgctgctcatcttccaggaatgctagcatctataacttgcattcctgtaattggtgtaccagtagagagtaagacacttaaggggattgactctcttttatcaatcgtacaaatgcccgctggaattccagttgcaacagttgcaattaatggaggtcaaaatgctggattattggcaatagagatgatcagtttatttgacgaatccataaagaaaaatttgaaagaattcagagaaaatctacatacaaaggtaagaactaaaaatagtaagttatcaaatattggacctgacaattatcttcaaaataaatga

SEQ ID NO: 51847 - protein, 163 aa, Prochlorococcus marinus str. AS9601
MGSDSDLKTLKPSIDILREFGIKTEVCILSAHRTPIEMMEYAKNAESENIKVIIAGAGGAAHLPGMLASITCIPVIGVPVESKTLKGIDSLLSIVQMPAGIPVATVAINGGQNAGLLAIEMISLFDESIKKNLKEFRENLHTKVRTKNSKLSNIGPDNYLQNK

SEQ ID NO: 51848 - DNA, 492 bp, Prochlorococcus marinus str. MIT 9515
  CDS (1)..(492): transl_table=11
atgggaagtgattcagatctaaaaactttgaaaccttcagttgatatattgcatgaatttggaatagaaacagaagtttgtatactttcagcacatcgaaccccaattgaaatgatggaatatgcaaaaaaggcagaatcaaaaaatataaaggttattgtagctggagctggtggggctgctcacttgcctgggatgttagcttcactaacatgtattcccgttataggggtgcccgtagaaagtaaaactctgaaaggaatcgactccctattatcaattgttcaaatgcctgcaggaattccagtagcaacagtagccataaacggagcaaaaaatgctgggcttttagcaattcaaatcctttgtttatttgacgaaggtttaaggataaaaatgaaaaaatttagagataatctgcatgcacaagtaagaactaaaaacagtaaattatttactttagggactgataattatctaaaaacttactaa

SEQ ID NO: 51849 - protein, 163 aa, Prochlorococcus marinus str. MIT 9515
MGSDSDLKTLKPSVDILHEFGIETEVCILSAHRTPIEMMEYAKKAESKNIKVIVAGAGGAAHLPGMLASLTCIPVIGVPVESKTLKGIDSLLSIVQMPAGIPVATVAINGAKNAGLLAIQILCLFDEGLRIKMKKFRDNLHAQVRTKNSKLFTLGTDNYLKTY

SEQ ID NO: 51850 - DNA, 537 bp, Prochlorococcus marinus str. NATL1A
  CDS (1)..(537): transl_table=11
ttgtctttaactgaagctaatacatttaagcaagtagctgtagtaatgggtagtgattcagatcttaaaactcttaagcctgcggtggcaattctagatcaatttggcatatctaatgaagtaaggattctgtctgctcataggactccaaaagaaatgatggattttgctcaaatggcagaatcaaatggttttggagtgataattgctggggctggcggggctgctcatctaccaggaatgatcgcatctcttacaacccttcctgtcataggcgttcccgtcaagagcaaggcactttcagggatagattcaatgtattcaatcttgcaaatgccctcaggcatccccgtagcaacagttgccatagaagggggcctaaatgctggccttttggctactcaaattttagccatcaacaatactgaattaaaaaataaattaaacgcctacagatgtgagctgcacgaccttgtcgttaaaaaagatcacacacttaaagagattggagctataacttatctagaaaaaatgtaa

SEQ ID NO: 51851 - protein, 178 aa, Prochlorococcus marinus str. NATL1A
MSLTEANTFKQVAVVMGSDSDLKTLKPAVAILDQFGISNEVRILSAHRTPKEMMDFAQMAESNGFGVIIAGAGGAAHLPGMIASLTTLPVIGVPVKSKALSGIDSMYSILQMPSGIPVATVAIEGGLNAGLLATQILAINNTELKNKLNAYRCELHDLVVKKDHTLKEIGAITYLEKM

SEQ ID NO: 51852 - DNA, 576 bp, Prochlorococcus marinus str. MIT 9303
  CDS (1)..(576): transl_table=11
ttgtcgtcattattcatcgtgacctctgcttctctgcctgtgcctttggcagctgctgaatcgccgccgcaggtggctgtggtgatgggtagtgattccgatttaccaaccctgcaaccggctgtcaccgtcttagaggagttcggtgtgaaggtggaggtgcgtgtgctttccgcgcaccgtacgccccttgagatggtggcctttgcaaaggaggctcatcagagaggtttgaaggtgatcgtggcaggtgccggcggtgctgctcatttgccgggcatggtggcgtcactgaccacgctgccagtgattggagtacctgtgcagagcagggctctttccggggtggattccctgcattcgattgtgcagatgcctgggggaatccctgtggcaacagtggcgattggtggagggcttaatgctggcttgctggcggctcagatcctggcgatctgtgatccacagcttgcagagcggttgagggcctaccgccaggatcttcacgatgctgtggtagccaaggatgctcgcttgttggagcttggcagtgaggcttatttggggcagatgtga

SEQ ID NO: 51853 - protein, 191 aa, Prochlorococcus marinus str. MIT 9303
MSSLFIVTSASLPVPLAAAESPPQVAVVMGSDSDLPTLQPAVTVLEEFGVKVEVRVLSAHRTPLEMVAFAKEAHQRGLKVIVAGAGGAAHLPGMVASLTTLPVIGVPVQSRALSGVDSLHSIVQMPGGIPVATVAIGGGLNAGLLAAQILAICDPQLAERLRAYRQDLHDAVVAKDARLLELGSEAYLGQM

SEQ ID NO: 51854 - DNA, 522 bp, Clostridium thermocellum ATCC 27405
  CDS (1)..(522): transl_table=11
atgggtgtgaccaatgttgaaaaaaaaccaaaagttgctgttgtaatggggagtgattccgatttttcagttttacagaactgcatcaaggtcttaaagcagtttgatgtggaggtttcggcaatagtttgctcggcccacaggacacccgacaaagcggctgagttcgctaaaggtgccgaagaaaacggttttgatgttataatagccggtgcgggaaaagcggctcatttgccgggagttctggcagcatttacgccccttccggttatcggtgtgccaattaaatcatctacaatggacgggcttgattcactgctgtctatagttcaaatgccttcaggaattccggttgccacggttgcgatagacggtgcggaaaatgctgctttgcttgcggttcagatattgtcaactgcttacaaggatctcagggacaaaatgaaggaatataaaaagcagcttgagaaaaaggttgaagagaagaacaaagctcttcaggaaaagataaaagaactttaa

SEQ ID NO: 51855 - protein, 173 aa, Clostridium thermocellum ATCC 27405
MGVTNVEKKPKVAVVMGSDSDFSVLQNCIKVLKQFDVEVSAIVCSAHRTPDKAAEFAKGAEENGFDVIIAGAGKAAHLPGVLAAFTPLPVIGVPIKSSTMDGLDSLLSIVQMPSGIPVATVAIDGAENAALLAVQILSTAYKDLRDKMKEYKKQLEKKVEEKNKALQEKIKEL

SEQ ID NO: 51856 - DNA, 477 bp, Clostridium difficile 630
  CDS (1)..(477): transl_table=11
atgaaagtagcagtagttatgggttcaaaatcagattatccaaaattagaagaagggataaaactgcttgaaaaatatggaatagaagttgtagcaagagcattatcagctcatagaacaccagaacaactttcaatattcctaaaagaaatagaagatgatactgatgtaataatagcagcagcaggaaaagcagcacacttaccaggtgtaatagcttcacaaacattaattcctgtaataggattacctattaaatcatcaactatggatggactagactcacttttatcaatagttcaaatgccaaaaggaatcccagttgcaacagttacaatagacttaggtttaaacgcagctttattggcattacaaataatgactttaaaatacccaaaattaaaagaggatttgaaatcatatagagaagagatggcacaaaaggtgttagaagacgacaagaatttaagggggtag

SEQ ID NO: 51857 - protein, 158 aa, Clostridium difficile 630
MKVAVVMGSKSDYPKLEEGIKLLEKYGIEVVARALSAHRTPEQLSIFLKEIEDDTDVIIAAAGKAAHLPGVIASQTLIPVIGLPIKSSTMDGLDSLLSIVQMPKGIPVATVTIDLGLNAALLALQIMTLKYPKLKEDLKSYREEMAQKVLEDDKNLRG

SEQ ID NO: 51858 - DNA, 492 bp, Prochlorococcus marinus str. MIT 9301
  CDS (1)..(492): transl_table=11
atgggtagtgattcagatcttaaaacattgaaaccagctatcaatattttaaaagaatttggaataaaaactgaagtttgtatactttctgctcatcgaactcctattgaaatgatggaatatgcaaaaaatgcagaatcagaaaacataaaagtaataattgccggtgctggtggtgctgctcatcttccaggaatgctggcatccataacttgtattcctattattggagtaccagtagaaagtaagacacttaaggggattgattctcttttatcaatagttcaaatgcccgctgggattccagttgcaacagttgcaattaatggagctcagaatgctggattattagcaatagagatgatcagtttatttgatgcatccataaagaaaactttaaaagaattcagagaaaatctacatacacaggtaagaactaaaaatagtaagttatcaactattggacctgacaattatcttcaaaataaatga

SEQ ID NO: 51859 - protein, 163 aa, Prochlorococcus marinus str. MIT 9301
MGSDSDLKTLKPAINILKEFGIKTEVCILSAHRTPIEMMEYAKNAESENIKVIIAGAGGAAHLPGMLASITCIPIIGVPVESKTLKGIDSLLSIVQMPAGIPVATVAINGAQNAGLLAIEMISLFDASIKKTLKEFRENLHTQVRTKNSKLSTIGPDNYLQNK

SEQ ID NO: 51860 - DNA, 492 bp, Herminiimonas arsenicoxydans
  CDS (1)..(492): transl_table=11
atggcgaatgcacctttgataggcgtggtgatgggctcttcatccgactgggatgtgatgcagcatgcagtcgcgatcctgaaagaattcggcgtcgcacatgaagcgcaggtaatttctgcgcatcggatgccggatcagatgtttgcctacgccgagtcggcgcgcgcgcgcggcgtgcgtgcgatcatcgccggcgccggcggtgcggcgcatctgccgggcatgctggcagccaaaaccatcgtgccgattctgggcgtgccggtaccgtccaaatatctgcgcggcgaagattcgctgttgtccatcgtgcaaatgccaaaaggcattccggtttccactttcgccatcggtgaagcgggtgcggcaaacgccgcgctggcagcgattgcgattctcgccaccaccgacgacaaactggctgccagtctcgaacaattccgcgtcaagcaaacgcaaatcgccgtagaaatgaaattacctgtatga

SEQ ID NO: 51861 - protein, 163 aa, Herminiimonas arsenicoxydans
MANAPLIGVVMGSSSDWDVMQHAVAILKEFGVAHEAQVISAHRMPDQMFAYAESARARGVRAIIAGAGGAAHLPGMLAAKTIVPILGVPVPSKYLRGEDSLLSIVQMPKGIPVSTFAIGEAGAANAALAAIAILATTDDKLAASLEQFRVKQTQIAVEMKLPV

SEQ ID NO: 51862 - DNA, 522 bp, Burkholderia vietnamiensis G4
  CDS (1)..(522): transl_table=11
atgactgaagtccagactgcccacacgcacagcgcgccgctcgtcggcgtgctgatgggttcgagttccgactgggacgtgatgaagaacgcggtcgcgatcctgcaggaattcggcgtgccgtacgaagcgaaggtcgtgtccgcgcaccggatgcccgacgagatgttcgactatgcggagaaggcgcgcgagcgcgggctgcgtgcgatcatcgcgggcgccggcggcgccgcgcatctgcccggcatgctggccgcgaaaaccacggtgccggtgctcggcgtgccggtcgccagcaagtacctgaagggcgtcgattcgctgcactcgatcgtgcagatgccgaagggcgtgccggtcgcgacgttcgcgatcggcgaggccggcgccgcgaacgccgcgctgttcgcggtgtcgatcctgtccggcacgtcggtcgactacgcgaaccggctcgccgcgttccgcgtgcgccagaacgaagccgcgcacgcgatggtgctgccgccgctcgcttga

SEQ ID NO: 51863 - protein, 173 aa, Burkholderia vietnamiensis G4
MTEVQTAHTHSAPLVGVLMGSSSDWDVMKNAVAILQEFGVPYEAKVVSAHRMPDEMFDYAEKARERGLRAIIAGAGGAAHLPGMLAAKTTVPVLGVPVASKYLKGVDSLHSIVQMPKGVPVATFAIGEAGAANAALFAVSILSGTSVDYANRLAAFRVRQNEAAHAMVLPPLA

SEQ ID NO: 51864 - DNA, 489 bp, Streptococcus pyogenes str. Manfredo
  CDS (1)..(489): transl_table=11
atgcaaccaattatttctattatcatgggctccaaatctgactgggcaaccatgcaaaaaacggctgaagttctagacaactttggcattgcttacgagaagaaagtcgtctctgctcaccgcacgcccgacctcatgttcaagtatgctgaggaagcacgtggtcgtggcatcaaaatcatcatcgcaggagcaggtggggcagctcacttgcctggtatggtggcagctaaaacaacgctgcctgttatcggtgtgcctgtcaaatcacgtgtcctttcaggtttggattcgctctattccattgtgcagatgcctggcggtgtgcctgtggcaaccatggctatcggagaagcgggagcgactaacgctgccctgacagccctccgtatcctttctatcgaggaccaaaatctggctgatgcgctagctcatttccatgaggaacaaggaaaaatcgcagaggagtcaagcaatgaactcatttaa

SEQ ID NO: 51865 - protein, 162 aa, Streptococcus pyogenes str. Manfredo
MQPIISIIMGSKSDWATMQKTAEVLDNFGIAYEKKVVSAHRTPDLMFKYAEEARGRGIKIIIAGAGGAAHLPGMVAAKTTLPVIGVPVKSRVLSGLDSLYSIVQMPGGVPVATMAIGEAGATNAALTALRILSIEDQNLADALAHFHEEQGKIAEESSNELI

SEQ ID NO: 51866 - DNA, 489 bp, Bradyrhizobium sp. ORS278
  CDS (1)..(489): transl_table=11
atgaccgccccgatcgccatcatcatgggaagccagtcggactgggataccatgcgccatgccgccgaaacactcggcgcgctgggcgtgagctatgacgcccgcatcgtctcggcccaccgcacgccggaccggctgtatgctttcgcgaaaggagccaaggcggccggattccaggtcgtgattgccggcgccggcggcgcagcccaccttcccggcatgacggcgtccctgaccgagctgcccgtgttcggcgttcccgtcgagtccaaggcgctgtccggggtcgattcgctgtattcgattgttcagatgcccgccggcattccggtcggcacgctcgccatcgggaagtccggcgcgatcaatgcggccctgctggcggcaagcgtcctggcgctgtcggacccggcgctggccgagcgtctctccgcctggcggcagtcgcagaccaacgccatcgccgaacgtccggagggcgcggcgtga

SEQ ID NO: 51867 - protein, 162 aa, Bradyrhizobium sp. ORS278
MTAPIAIIMGSQSDWDTMRHAAETLGALGVSYDARIVSAHRTPDRLYAFAKGAKAAGFQVVIAGAGGAAHLPGMTASLTELPVFGVPVESKALSGVDSLYSIVQMPAGIPVGTLAIGKSGAINAALLAASVLALSDPALAERLSAWRQSQTNAIAERPEGAA

SEQ ID NO: 51868 - DNA, 531 bp, Dichelobacter nodosus VCS1703A
  CDS (1)..(531): transl_table=11
atgactcaagcattagttggcattgtgatgggcagcgacagcgatttaaaaatcatggctgatgcggcaaaaatctgcaccacattccatattgattacgaattaaccattgtttccgcgcatcgcacgcccgaacgtttactcgattacggcaaaaccgctgccgaacgcggtttaaaagtgatcatcgccggcgccggcggcgcagcgcatttggcgggtatgttagcggcggtcacacctttgcccgttatcggcgtgccaattttgtcgcgcaattccattgacggctgggattcgattttatcaacgctacaaatgcctaacggcgtgcccgtggcaacggtagcgttaaatgcggcaaaaaatgcaggtttattggcggcaagaatgttagccgcacacgatgaacatttgttagctgccatgatcgcttatcaaaatcaaatgacggcagacgttttagaaaaagccgcgcgtttaaaagcggattatccctgcgcttacgcatcatcgccgcgcaatcgttaa

SEQ ID NO: 51869 - protein, 176 aa, Dichelobacter nodosus VCS1703A
MTQALVGIVMGSDSDLKIMADAAKICTTFHIDYELTIVSAHRTPERLLDYGKTAAERGLKVIIAGAGGAAHLAGMLAAVTPLPVIGVPILSRNSIDGWDSILSTLQMPNGVPVATVALNAAKNAGLLAARMLAAHDEHLLAAMIAYQNQMTADVLEKAARLKADYPCAYASSPRNR

SEQ ID NO: 51870 - DNA, 522 bp, Synechococcus sp. WH 7803
  CDS (1)..(522): transl_table=11
atgggcagtgattccgacctgccaacccttcacccagccgttgaggttctggaggggctccaggttgccgtggaggtgcgtgtgttgtcggcccatcgcacacctttggagatggtgaactttgcccgtgaggcccacaaccgcgggttgcaagtgatcgtggccggtgctggcggcgcggctcacttgccggggatggtggcgtctctgacgaccctgccggtgatcggcgtgccggtgcgcagcaccatgctctccggtgtggactccctgcattcgattgtgcagatgccgggtggtattcccgtggcgacggtcgccatcgggggcggactgaatgcaggactgctggcggcgcagattctggcgctccaagaccacgccttgatggagcgtctcggggcttatcgacgtcagctgcacgatgccgtgatcgcgaaggatcaacggctggtcgagctcggatcggcggcctatctggacaccacggccacaatgagagcaaaagacaacgccccatga

SEQ ID NO: 51871 - protein, 173 aa, Synechococcus sp. WH 7803
MGSDSDLPTLHPAVEVLEGLQVAVEVRVLSAHRTPLEMVNFAREAHNRGLQVIVAGAGGAAHLPGMVASLTTLPVIGVPVRSTMLSGVDSLHSIVQMPGGIPVATVAIGGGLNAGLLAAQILALQDHALMERLGAYRRQLHDAVIAKDQRLVELGSAAYLDTTATMRAKDNAP

SEQ ID NO: 51872 - DNA, 489 bp, Leptospira interrogans serovar Copenhageni str. Fiocruz L1-130
  CDS (1)..(489): transl_table=11
ttgaacacaaaagttgcaatcattatgggaagccattccgattgggaaacgatgaaagaagcggagatcattcttaaagaatttggcgtttctattcacaaagaaattgtttctgcacatagatctcctgagcttatgttagaattttctaaatctgcaaaagaaaaaggttactccgtaatcatcgcaggagcaggaggtgcggcccatcttcccggaatggttgcatcgatgactactcttcctgttttaggagttccaatacaaagtaaaactttaaacggattggatagtttattatccatcgttcaaatgccagggggagttccagtaggaactcttgcgatcggaactgcaggcgcaaaaaatgctggtttattggcagtcagaattcttgcacttcaagatcctatactttccgaaaaactagaacgatatcgtaatcaaattcgagaagacgcactttctaaaaataaggatttattgtga

SEQ ID NO: 51873 - protein, 162 aa, Leptospira interrogans serovar Copenhageni str. Fiocruz L1-130
MNTKVAIIMGSHSDWETMKEAEIILKEFGVSIHKEIVSAHRSPELMLEFSKSAKEKGYSVIIAGAGGAAHLPGMVASMTTLPVLGVPIQSKTLNGLDSLLSIVQMPGGVPVGTLAIGTAGAKNAGLLAVRILALQDPILSEKLERYRNQIREDALSKNKDLL

SEQ ID NO: 51874 - DNA, 495 bp, Thermus thermophilus HB27
  CDS (1)..(495): transl_table=11
atggcgccgttggtaggcctgatcatgggttcccgctccgactgggagaccatgcgccacgcggcggagaccctcgaggccctgggcatcccctacgaggtgcgcgtggtctccgcccaccgcaccccagacctcatggcggagtacgccaagaccgccgaggaacgggggatccaggtgatcatcgccggggccgggggggcggcccacctccccggcatgaccgcggcccacaccgccctgcccgtcctcggggtgccggtggaaagccgggccctagggggcctagactccctcctttccatcgtgcagatgcccgcgggcgtccccgtgggcaccctggccatcgggaaagcaggggcggtgaacgccgctttgcttgccgcaagcatcctgggcctcaagcaccccgagatcctaaagcgcctcaaggcctaccgcaaggcccagacggaggccgtcctcgcccaccccgaccccagggaggaggcgtga

SEQ ID NO: 51875 - protein, 164 aa, Thermus thermophilus HB27
MAPLVGLIMGSRSDWETMRHAAETLEALGIPYEVRVVSAHRTPDLMAEYAKTAEERGIQVIIAGAGGAAHLPGMTAAHTALPVLGVPVESRALGGLDSLLSIVQMPAGVPVGTLAIGKAGAVNAALLAASILGLKHPEILKRLKAYRKAQTEAVLAHPDPREEA

SEQ ID NO: 51876 - DNA, 501 bp, Desulfovibrio vulgaris subsp. vulgaris str. Hildenborough
  CDS (1)..(501): transl_table=11
atgcccaaggtagccatcttcattggcagcatctccgacgaggagaccatcaaaccctgtaccgacgtcctgcgcagcctcggtatcagcttccgcttcacggtgagttccgcgcaccgcacccccgaacgcaccgaacgcctcgtcgaggaacttgaaggctctggaacgcaggtgttcatctgcgcggctggcatggcggcacaccttgcgggggcggtcgccgcccgcaccaccaagcccgtcatcggcatcccggtcacggcctcggcactgggcggcatggacgccctgcttgccacggtgcagatgcctcccggattccccgtcgccaccgtcgccctcgacaaggccggggcacgcaacgcggcatggcttgccgcccagatgctggcacttgccgaccccgaccttgccaagcgcatcgccgatgcacgcgcaggcttccgcgaggatgccgccaaggccggtgccgaccttgaggcgcgctaccccggctag

SEQ ID NO: 51877 - protein, 166 aa, Desulfovibrio vulgaris subsp. vulgaris str. Hildenborough
MPKVAIFIGSISDEETIKPCTDVLRSLGISFRFTVSSAHRTPERTERLVEELEGSGTQVFICAAGMAAHLAGAVAARTTKPVIGIPVTASALGGMDALLATVQMPPGFPVATVALDKAGARNAAWLAAQMLALADPDLAKRIADARAGFREDAAKAGADLEARYPG

SEQ ID NO: 51878 - DNA, 489 bp, Listeria monocytogenes str. 4b F2365
  CDS (1)..(489): transl_table=11
atgcctgctgtaattggtgtcattatggggagtacctcagattgggatacaatgaaaaaagcatgtgatgtattagatgaattagaaatagcttatgagaaaaaagtggtttctgctcatcgtacaccagattttatgtttcaatatgcagaacaagcgcgggaacgtggtttgaaaattattattgccggtgctgggggcgcggcgcatttgccaggtatgattgcggcaaagacgactttgcctgttattggtgtgccaattaaatcaaaagcgttgaatggaatggattcgttactttctattgtacagatgcctggaggtgtcccggtagcgacagttgctattggagaaagtggtgctgtaaatgctggccttctagcggcgcaaattttatccataacggacgatgcaattactaacagattacaaaaaagacgtgctacactagaagaaacagttctagaaagtagtgattatcttggataa

SEQ ID NO: 51879 - protein, 162 aa, Listeria monocytogenes str. 4b F2365
MPAVIGVIMGSTSDWDTMKKACDVLDELEIAYEKKVVSAHRTPDFMFQYAEQARERGLKIIIAGAGGAAHLPGMIAAKTTLPVIGVPIKSKALNGMDSLLSIVQMPGGVPVATVAIGESGAVNAGLLAAQILSITDDAITNRLQKRRATLEETVLESSDYLG

SEQ ID NO: 51880 - DNA, 450 bp, Picrophilus torridus DSM 9790
  CDS (1)..(450): transl_table=11
atgggcagctcatctgatcttgaaaccatgaaacccgcaattgaaacccttgaatcatttggcgttgaggtcatatcaaaaatagtatcggcgcacagaaccccggattttatgtatgaatttgcaaaaggtgcattaaacaatggcatcgaggttattatagcaggtgcaggaggtgccgcgcatctgcccggaatggttgcatccatgacaacattgcctgtcataggcgttccggtgccatcgaggcatctaaacggcctcgattcattgctatcgatagtgcagatgccatcaggcgttccggttgcaaccgttgcaataggcaatgcaaaaaatgcggcattgctagcgctaagaatactgtcaataaagtatgataagataagatcgtatttagaaaaatataataatgatgaaagaaacagggttcttggtgaaaagatatga

SEQ ID NO: 51881 - protein, 149 aa, Picrophilus torridus DSM 9790
MGSSSDLETMKPAIETLESFGVEVISKIVSAHRTPDFMYEFAKGALNNGIEVIIAGAGGAAHLPGMVASMTTLPVIGVPVPSRHLNGLDSLLSIVQMPSGVPVATVAIGNAKNAALLALRILSIKYDKIRSYLEKYNNDERNRVLGEKI

SEQ ID NO: 51882 - DNA, 498 bp, Bartonella quintana str. Toulouse
  CDS (1)..(498): transl_table=11
atgacgaacgaatcatgtgacgtagcgattttaatgggtagccaatcggattggcaaacgatgcgccatagctcggatattttgacgtgtcttgatatttctcatagttcgcagattgtttcagcccaccgaacaccagaacgactttaccaatttgcaaaaggggcaaaagcagcaggttttaaagttttgatcgccggcgctggaggtgcagcccatcttcctggcatgctagcagcactgactccacttcctgtttttggagttccagtgcattcacaatttttatccggacaagattctttgctttcaattgtgcaaatgcctgcaggaataccggttggcacgctagcaattggcaaagcaggcgcaattaatgcagcgcttttagcagcagcagttatggcagtttatgatgatgatttggcacaacggttacaagattggcgtcagcaacaaacagccagtgtcgcgcaaatccccacaactgagatttaa

SEQ ID NO: 51883 - protein, 165 aa, Bartonella quintana str. Toulouse
MTNESCDVAILMGSQSDWQTMRHSSDILTCLDISHSSQIVSAHRTPERLYQFAKGAKAAGFKVLIAGAGGAAHLPGMLAALTPLPVFGVPVHSQFLSGQDSLLSIVQMPAGIPVGTLAIGKAGAINAALLAAAVMAVYDDDLAQRLQDWRQQQTASVAQIPTTEI

SEQ ID NO: 51884 - DNA, 498 bp, Bartonella henselae str. Houston-1
  CDS (1)..(498): transl_table=11
atgatgaaagaatcatgtgacgtagcgattttaatgggcagtcaatcggattggcaaacgatgcgccatagttcagatattttaacctgtcttggtatttctcatattgcacatattatctcagcccaccgaactcctgaacgactttaccaatttgcaaaaggagcaaaagcagcaggtttcaaagttttgattgccggagctggcggtgcagcgcatcttcctggtatgctagcagcactcacaccgcttcctgtttttggagttccagtgcactcacaatctctctctggtcaagattctttgctttcaattgtgcaaatgccggcaggaataccggttggcacgttagcaattggcaaagcaggagctattaatgcagcacttttagcagcagcagtaatggcagtttatgataatcatttggcacaacggttagacgattggcgtcagcaacaaacagccagtgtcgcgcaaacgcctgcaactgaggtttaa

SEQ ID NO: 51885 - protein, 165 aa, Bartonella henselae str. Houston-1
MMKESCDVAILMGSQSDWQTMRHSSDILTCLGISHIAHIISAHRTPERLYQFAKGAKAAGFKVLIAGAGGAAHLPGMLAALTPLPVFGVPVHSQSLSGQDSLLSIVQMPAGIPVGTLAIGKAGAINAALLAAAVMAVYDNHLAQRLDDWRQQQTASVAQTPATEV

SEQ ID NO: 51886 - DNA, 486 bp, Bacillus thuringiensis serovar konkukian str. 97-27
  CDS (1)..(486): transl_table=11
atgaaatcactagttggagtcataatgggaagcacgtcagactgggaaacaatgaaatatgcttgtgacattttagatgaattaaatataccgtatgagaaaaaggttgtatccgctcatcggactccagattatatgtttgaatatgcagagacggctcgtgaacgtggattgaaagttattattgctggagctggtggagcagcgcatttaccaggaatggttgcagcgaagacgaatcttcctgtaattggagttccagttcaatcaaaagcgttaaacggcttagattcattattatccatcgtccaaatgccaggaggggttccagttgcaactgttgcaattggtaaggctggttcaacaaatgctggtttacttgctgcacaaatacttggatcattccatgatgacatacatgatgcattagaattgagaagagaagcaattgaaaaagatgtgcgcgaaggtagtgagctagtatga

SEQ ID NO: 51887 - protein, 161 aa, Bacillus thuringiensis serovar konkukian str. 97-27
MKSLVGVIMGSTSDWETMKYACDILDELNIPYEKKVVSAHRTPDYMFEYAETARERGLKVIIAGAGGAAHLPGMVAAKTNLPVIGVPVQSKALNGLDSLLSIVQMPGGVPVATVAIGKAGSTNAGLLAAQILGSFHDDIHDALELRREAIEKDVREGSELV

SEQ ID NO: 51888 - DNA, 483 bp, Staphylococcus aureus subsp. aureus MRSA252
  CDS (1)..(483): transl_table=11
gtgaaagtagcagtcattatgggcagttcttccgattggaaaattatgcaagagagttgtaacatgttggattattttgaaattccgtacgaaaaacaagtagtatccgcacatcgtacgccaaaaacgatggttcaatttgcttctgaagcgagagaaagaggtatagacattatcattgcaggcgctggcggtgcggcacatttaccaggtatggttgcatcattaacgacgctaccagttattggagtgccgattgaaacaaaaagtttaaagggtatagattctttattatcaattgttcaaatgccaggaggtattccggttgcaacgactgcaattggtgcagcaggtgctaaaaatgcaggtatacttgcagcaagaatgttaagtattcaaaatccttctttagttgaaaaactaaatcagtatgaatcttcgttaattcaaaaagtggaggacatgcaaaatgaacttcaataa

SEQ ID NO: 51889 - protein, 160 aa, Staphylococcus aureus subsp. aureus MRSA252
MKVAVIMGSSSDWKIMQESCNMLDYFEIPYEKQVVSAHRTPKTMVQFASEARERGIDIIIAGAGGAAHLPGMVASLTTLPVIGVPIETKSLKGIDSLLSIVQMPGGIPVATTAIGAAGAKNAGILAARMLSIQNPSLVEKLNQYESSLIQKVEDMQNELQ

SEQ ID NO: 51890 - DNA, 516 bp, Acinetobacter sp. ADP1
  CDS (1)..(516): transl_table=11
atgaacgcggtcgcagcgaaagatgctcaacccttagtcggaattattatgggttctcaatcggattgggcaactctagaacatactgccaatatgttgaaacaacttggtgtaccttttgaagctgaagttgtttccgcacaccggacaccagaccgtttatttgaatacgcagaaactgcgcgtgaccgtggtattcaggtgatcattgcaggtgcaggtggtgccgcgcatttaccagggatgtgtgctgccaaaaccgatttacccgttttaggtgttcctgtgaaatcatcaattttaaatggtgtggattctttgctttcaattgtacaaatgcctgcaggtattgcagtgggtacattggcgataggccctgcgggtgcaaccaatgctgcgattatggcagcccagattcttggcttgacccgtccagagattgcaaaaaatgttgtagattttcgtgcggcccaaaccgacaaggttgctagcaataatattccaggccaagcgtga

SEQ ID NO: 51891 - protein, 171 aa, Acinetobacter sp. ADP1
MNAVAAKDAQPLVGIIMGSQSDWATLEHTANMLKQLGVPFEAEVVSAHRTPDRLFEYAETARDRGIQVIIAGAGGAAHLPGMCAAKTDLPVLGVPVKSSILNGVDSLLSIVQMPAGIAVGTLAIGPAGATNAAIMAAQILGLTRPEIAKNVVDFRAAQTDKVASNNIPGQA

SEQ ID NO: 51892 - DNA, 510 bp, Erwinia carotovora subsp. atroseptica SCRI1043
  CDS (1)..(510): transl_table=11
atgtcatccaacgttgccccggctaaaattgccatcgtcatgggttcaaagagtgactgggccactatgcagtttgctgcggaaatcctcaccacgctgaacattccttttcataccgaagtcgtttccgcacaccggacgccggataaactgttcagcttcgctgagcaggcggcacaaaatggttttgatgtgattatcgctggcgctggcggcgcagcacacctgccaggtatgctggcagcgaaaacgctggttcctgtgctcggcgtgccagtacaaagctcgacgctgagcggtgtcgacagcctgtattccatcgttcaaatgcctcgtggtatcccggtcggcacgttggcaatcggcaaggcaggcgcagcgaatgcggctctgctggccgcacaaattcttgccctgcatgacaatggaatagcctctcgactagccgactggcgtcaggcgcaaacggatgatgtgctgtctcatcccgatccgcgggaggaggcatga

SEQ ID NO: 51893 - protein, 169 aa, Erwinia carotovora subsp. atroseptica SCRI1043
MSSNVAPAKIAIVMGSKSDWATMQFAAEILTTLNIPFHTEVVSAHRTPDKLFSFAEQAAQNGFDVIIAGAGGAAHLPGMLAAKTLVPVLGVPVQSSTLSGVDSLYSIVQMPRGIPVGTLAIGKAGAANAALLAAQILALHDNGIASRLADWRQAQTDDVLSHPDPREEA

SEQ ID NO: 51894 - DNA, 591 bp, Propionibacterium acnes KPA171202
  CDS (1)..(591): transl_table=11
atgcctgagaccaccactgctagccgtaagccgcgccgaggtgagaaggtcaaaacaaccaccgggggagcacgccggctggcgtgcgacgccaatggccctcaagtgtcgatcatcatgggctcggactctgactggccgacgatggagcctgcggctcaggtgcttaccgacttcaatgtgggatttgaggctgacgtcgtgtcggcccaccgcatgcctgaggacatgatcgagttcggtcgaggcgcgcacaagcgcggtatcaaggtgatcatcgccggtgctggcggtgccgcccatctgccgggcatggtcgccgcgctgaccccgctgccggttatcggggttcccgtgccgctagcccacctcgacggtatggattccttgctatcgatcgttcagatgccaggtggtgtgccggtggcgacggtcggcgtcggtaatgccaagaacgccggcctgctagcggtacggattcttgccgcgtcgacccctgagctgtgcgaggccatggtcaagtaccagtccgatttgcacgatgtggctgcgggcaagggcgagaaagtgcgtcgtcactcctgtccctga

SEQ ID NO: 51895 - protein, 196 aa, Propionibacterium acnes KPA171202
MPETTTASRKPRRGEKVKTTTGGARRLACDANGPQVSIIMGSDSDWPTMEPAAQVLTDFNVGFEADVVSAHRMPEDMIEFGRGAHKRGIKVIIAGAGGAAHLPGMVAALTPLPVIGVPVPLAHLDGMDSLLSIVQMPGGVPVATVGVGNAKNAGLLAVRILAASTPELCEAMVKYQSDLHDVAAGKGEKVRRHSCP

SEQ ID NO: 51896 - DNA, 504 bp, Leifsonia xyli subsp. xyli str. CTCB07
  CDS (1)..(504): transl_table=11
atgtccgttccacccccgcccttggtgtccgtcgtgatgggttccgactcggactggccggtgatgcaggaagcctcgcggctgctcgccgaattcggtgtcgcgcacgaggtcgaggtcgtctccgcccaccgcacgccggagaggatgatcggcttcggcaaggtcgcggcctcccgcggtgtccgtgtgatcatcgccggagcggggggagccgcccacctgcccgggatgctcgccgccgtcaccacgctgcccgtggtgggcgttcctgtgccgctggcccgtctcgatgggctcgactcgctgctctcgatcgtgcagatgccggcgggcgtgccggtcgcgaccgtctccatcggcggtgcgcgcaacgcgggtcttctggccgtgaagatcctcgccacggccgatcccaggctcgcgagcatgcttgagcgcttcgccgccgaactggaggcgagcgtcgacgagaagaaccgcgcactgcaagcgaagctatga

SEQ ID NO: 51897 - protein, 167 aa, Leifsonia xyli subsp. xyli str. CTCB07
MSVPPPPLVSVVMGSDSDWPVMQEASRLLAEFGVAHEVEVVSAHRTPERMIGFGKVAASRGVRVIIAGAGGAAHLPGMLAAVTTLPVVGVPVPLARLDGLDSLLSIVQMPAGVPVATVSIGGARNAGLLAVKILATADPRLASMLERFAAELEASVDEKNRALQAKL

SEQ ID NO: 51898 - DNA, 1773 bp, Desulfotalea psychrophila LSv54
  CDS (1)..(1773): transl_table=11
atgaaggttcttgttgtgggttctggtgggcgtgagcatgcccttgtgtggaaaataaagcaaagtcagaaggttgaggaagttttttgtgcgcctggcaatgcagggattgaagaacttgctacctgcgtcaatatttcagcgaccgatataaagggtttgcttcattttgcccagaaagagaaaattgatcttaccgttgtagggccagaatcatctttggttgctggtatcgtggatctttttgaagaaaatggcctgcgtatatttggtcccagccaggctgccgcaatccttgagggaagtaaggtttttaccaaaaactttttgcaaaaatattctatcccgactgcagcctttggtgtctttaccgagcgagaggcggcaaaagagtacatcgagcaacagggtgcacccattgtagtaaaggcagatgggcttgccgcaggtaagggtgttgtggttgctaagaccatcgaggaagccaaaaaagccgtcgatgaaattatgcttgataaggcctttggtgaggctggtgatagtattgtcgtggagagttgtctcttgggtgaagaggcatcctttatcgcctttaccgatgggaaaacaattcttcccttgcctacctctcaggatcacaaggccgcatatgacggggataaggggcccaatacaggcggaatgggtgcctattcaccggcaccaatagtgaccgatgaaattacagaatatgtgatgacagaggttatgctaccaacgattaagggacttgccgctgagggacgtccctataagggtatgctctatgctggcctgatgatcgatggcgatgatattaaggtgcttgagtttaactgtcgatttggtgatccggaggcccagcctcttctcatgcgtcttaaaagtgatattattgatatctttgaagcatgcatagatggtacccttgatcgggtcgagatgaagattgatccacgccccacggtttgtgtggttatgtcctccggtggttaccccggagcatatgccagtggtgatattattaccggttttgagcaagccgataaggtggatggagtcgaagtgttccatgcaggaactgcgaaggagggtgaagctattgttagcaatggtggtcgagtattaggtattacctccattggtaaaactcttgagcaggcactggagagggcatataaggcaacagactgtattacttggaataagtgcttttatcgaaaagatataggtggcaaggccctggctaaaaagctggcgaagccgagtaagcctcttgtcggtattgtcatgggcagtgattcggatctgccaaccatgagggcagccagtgattttttacagagtgttggcattccctatgaaatgaccgttgcctcggcgcatagaactccggagagagcagctgaatatgccaaaactgcgtcggcacgtgggttgaaaatgattattgccggagcaggcatggcggctcaccttgcaggagttttagcatctcataccgatctgcctgtaattggcgttcctcttgacgcctcatccctgcagggaatggatgcactgctggcgacggtacagatgcctcctggtattcccgttgcaaccatgggtataggaaaatcaggagcaaaaaatgcggcagtattagccctacgaattttggccctgaacgatcatactcttgccaaagaacttgtcaatttccgggaaaacatggtgagggaagttgaggaaaaagcaaaacgaattcagtag

SEQ ID NO: 51899 - protein, 590 aa, Desulfotalea psychrophila LSv54
MKVLVVGSGGREHALVWKIKQSQKVEEVFCAPGNAGIEELATCVNISATDIKGLLHFAQKEKIDLTVVGPESSLVAGIVDLFEENGLRIFGPSQAAAILEGSKVFTKNFLQKYSIPTAAFGVFTEREAAKEYIEQQGAPIVVKADGLAAGKGVVVAKTIEEAKKAVDEIMLDKAFGEAGDSIVVESCLLGEEASFIAFTDGKTILPLPTSQDHKAAYDGDKGPNTGGMGAYSPAPIVTDEITEYVMTEVMLPTIKGLAAEGRPYKGMLYAGLMIDGDDIKVLEFNCRFGDPEAQPLLMRLKSDIIDIFEACIDGTLDRVEMKIDPRPTVCVVMSSGGYPGAYASGDIITGFEQADKVDGVEVFHAGTAKEGEAIVSNGGRVLGITSIGKTLEQALERAYKATDCITWNKCFYRKDIGGKALAKKLAKPSKPLVGIVMGSDSDLPTMRAASDFLQSVGIPYEMTVASAHRTPERAAEYAKTASARGLKMIIAGAGMAAHLAGVLASHTDLPVIGVPLDASSLQGMDALLATVQMPPGIPVATMGIGKSGAKNAAVLALRILALNDHTLAKELVNFRENMVREVEEKAKRIQ

SEQ ID NO: 51900 - DNA, 498 bp, Symbiobacterium thermophilum IAM 14863
  CDS (1)..(498): transl_table=11
atggcgcagacggagaggaccggaccgcttgtgggcatcatcatgggcagccgctcggacctggagaccatgcaggaggccgccgccgttctggacgagctcggcattccctacgagatgaaggtcgtctcggcccaccgcacacccgacgcgatgttcgcctacgccgagtcggccgcggcgcggggactgaaggtgatcatcgccggcgccggcggagccgcgcacctgccgggcatgaccgcgtccaagaccctccttccggtgatcggcgtgccggtgaagtcctcgaccctgaacgggatcgactcgctgctctccatcgtgcagatgcccgggggcgtgcctgtggcgaccatggccatcggcaaggccggcgcccgcaatgccgggctgctggcagcccagatcctcgccctggaggacccggggctgagggccatcctggaggagtaccgggcctacatgcggcagcaggtggaggagagccagccatga

SEQ ID NO: 51901 - protein, 165 aa, Symbiobacterium thermophilum IAM 14863
MAQTERTGPLVGIIMGSRSDLETMQEAAAVLDELGIPYEMKVVSAHRTPDAMFAYAESAAARGLKVIIAGAGGAAHLPGMTASKTLLPVIGVPVKSSTLNGIDSLLSIVQMPGGVPVATMAIGKAGARNAGLLAAQILALEDPGLRAILEEYRAYMRQQVEESQP

SEQ ID NO: 51902 - DNA, 498 bp, Mannheimia succiniciproducens MBEL55E
  CDS (1)..(498): transl_table=11
atgtcaaatactcatgctcaaattgcaattgttatgggttcgaaaagcgattggtcgaccatgcaggaagcgactggtatgcttgatcaactcaatgtgccttatcatgttgaaattgtttccgcacatcgcacgccggataaacttttcagctttgccgaaaatgcgcaagctaaaggatataaagtgattattgccggtgcaggcggcgccgcccatttaccgggcatgattgcggctaaaaccttagtacctgttttaggcgtgccggttaaaagctcaatgttaagcggtgttgacagtctctattctatcgtgcaaatgccgaaagggattcccgtagggacattagctatcggtcctgccggcgctgccaatgcaggcttacttgcggcgcagattttagccgcatgggacagtgaattgtccgctcgtctgcaaaaattccgcgaacagcaaaccaatgcggtgttaaacaatccggatccacgaaattaa

SEQ ID NO: 51903 - protein, 165 aa, Mannheimia succiniciproducens MBEL55E
MSNTHAQIAIVMGSKSDWSTMQEATGMLDQLNVPYHVEIVSAHRTPDKLFSFAENAQAKGYKVIIAGAGGAAHLPGMIAAKTLVPVLGVPVKSSMLSGVDSLYSIVQMPKGIPVGTLAIGPAGAANAGLLAAQILAAWDSELSARLQKFREQQTNAVLNNPDPRN

SEQ ID NO: 51904 - DNA, 489 bp, Bacillus licheniformis ATCC 14580
  CDS (1)..(489): transl_table=11
atgcagcctcttcttggtgttatcatgggaagcacatctgactgggaaacgatgaaacatgcctgcggcatactcgatgaactgggaattccgttcgaaaaaaaggtcgtttccgcacatcggacgcctgatttaatgtttgaatatgccgaaaaggctcgggaaagaggcttgaaagtcatcattgccggagcgggcggagccgctcacctgccgggaatggtcgcagccaaaacgacgctgcccgtcatcggtgtgccggttcagtcaaaagcgctgaacggtctcgattcgctgctttcaatcgttcaaatgccgggcggagtacccgttgcgaccgttgccatcggcaaagcgggagcggtcaacgcaggactgcttgcggcgcagattttgtcagcttttgacaaagagcttgccgaaagattggacgaacgaagggaaagcatcagacaaaccgtgttggaaagcagtgatcagcttgtataa

SEQ ID NO: 51905 - protein, 162 aa, Bacillus licheniformis ATCC 14580
MQPLLGVIMGSTSDWETMKHACGILDELGIPFEKKVVSAHRTPDLMFEYAEKARERGLKVIIAGAGGAAHLPGMVAAKTTLPVIGVPVQSKALNGLDSLLSIVQMPGGVPVATVAIGKAGAVNAGLLAAQILSAFDKELAERLDERRESIRQTVLESSDQLV

SEQ ID NO: 51906 - DNA, 501 bp, Legionella pneumophila subsp. pneumophila str. Philadelphia 1
  CDS (1)..(501): transl_table=11
atgaaacccattttaataggtctaattatgggttctcaaagtgattggcaaacattaatccatgccgcccacacactggatgcgctaaacattggctatgaggcagaaattgtctccgctcataggacaccggacaaacttttccggtatgccgaacaggctgaggcaagaggtttggaagtgattattgctggtgcaggaggagcggctcatctccctggcatggtagcagccaaaacatctttgcctgttttaggtgtcccagtcatgtcacaaactttaaacggcgtcgattccttgctatccattgtgcaaatgcctgcggggatacctgtaggcactttatcgataggtaaagcaggtgccatcaactccgcactgtttgcagccgcaattcttgctaataaatatcctgatattcgagctgccttaaaacactatagagaacaacaaacacaaaaagtgctcgacaatccaaaccctaaagaggaaaagtcatga

SEQ ID NO: 51907 - protein, 166 aa, Legionella pneumophila subsp. pneumophila str. Philadelphia 1
MKPILIGLIMGSQSDWQTLIHAAHTLDALNIGYEAEIVSAHRTPDKLFRYAEQAEARGLEVIIAGAGGAAHLPGMVAAKTSLPVLGVPVMSQTLNGVDSLLSIVQMPAGIPVGTLSIGKAGAINSALFAAAILANKYPDIRAALKHYREQQTQKVLDNPNPKEEKS

SEQ ID NO: 51908 - DNA, 489 bp, Methylococcus capsulatus str. Bath
  CDS (1)..(489): transl_table=11
atggttcaggtcggtatcgtgatggggagtaccagcgactgggaggtcatgcagcacgctgtccgcaagctcgaggagttcggtatcccctgcgaggccaaggtggtgtccgcccatcgtacgccggacctgttgttcgactatgcggaacgggcccggtcccgcggcctcaagtgcatcatcgccggtgcaggcggcgcggcccatctgcccggaatgatggcggccaagaccactgtgccggttttgggcgtaccggtgcccggcagacatctcggcgggcaggattcactgtattcgatcgtgcagatgcccaagggcgtgcccgtggcgacgtttgccatcggcgaggcgggagcggtcaacgccgcgctgttcgcggtggccctgctggcgaacggcgatccggccctgcagcttcgtctcgacgagttccgccggcatcaggccgaatccgtattggcggcacgattgccggaggtgccctga

SEQ ID NO: 51909 - protein, 162 aa, Methylococcus capsulatus str. Bath
MVQVGIVMGSTSDWEVMQHAVRKLEEFGIPCEAKVVSAHRTPDLLFDYAERARSRGLKCIIAGAGGAAHLPGMMAAKTTVPVLGVPVPGRHLGGQDSLYSIVQMPKGVPVATFAIGEAGAVNAALFAVALLANGDPALQLRLDEFRRHQAESVLAARLPEVP

SEQ ID NO: 51910 - DNA, 501 bp, Anaplasma marginale str. St. Maries
  CDS (1)..(501): transl_table=11
gtgagtaagagcggcgcgcgggtatcagtggtgatgggcagcaagtctgactttcccaccatgagcgctgcgacgtcggttttggatgagctgcgcattgaatttgaggtgatggtagtctcagcccacagaacaccagacaggctgtacgattttgcgaaaactgcgcacacgagaggaatcaaagttataatagccggcgcgggtggggcggcgcatttaccggggatggttgcctcgctaacgagcgttcctgtcataggtgtgcccgtaaagagcgagtgtttgaatggcctggatagcttgttgtctatagtacaaatgcctaaaggcaccccggtcgctactatgtctatcggagtagcgggggcggcaaatgccgccgtgtttgcggcatccatactagggctaagcgatgctggcgtgcagcacaggcttggggagtggaaggcgagtcttacagctgcggttgaggtgtcgccttttgagcggaagcattag

SEQ ID NO: 51911 - protein, 166 aa, Anaplasma marginale str. St. Maries
MSKSGARVSVVMGSKSDFPTMSAATSVLDELRIEFEVMVVSAHRTPDRLYDFAKTAHTRGIKVIIAGAGGAAHLPGMVASLTSVPVIGVPVKSECLNGLDSLLSIVQMPKGTPVATMSIGVAGAANAAVFAASILGLSDAGVQHRLGEWKASLTAAVEVSPFERKH

SEQ ID NO: 51912 - DNA, 495 bp, Azoarcus sp. EbN1
  CDS (1)..(495): transl_table=11
atgagcgacaagcccctcgtcgggatcatcatgggctcgaattccgactggccgacgatgcaggcggcggcgaagatgctcgccgaattcgacgtgccgtacgaggcccgcgtggtgtccgcccaccgcacgcccgacctgatgttcgtctatgctgacagcgcgcgcgaacgcggcctcaaggcgatcatcgccggcgcaggcggcgcggcccatctacccggcatggtcgcggcgaagacgacgctgcccgtgctcggcgtgccggtgcagtcgaaggcgctgtcggggcaggattcgctgctgtcgatcgtgcagatgccgaaaggcatcccggtcgcgactttcgcgatcggtgaagccggtgcggcaaatgcggcgcttttcgccatcgcgctgctcgccaacgaggataccgcgctcgccgaaaaactcgccgcgttccgcgcccgccagacgcaggcggtgctcgatatgaccctggacccgatatga

SEQ ID NO: 51913 - protein, 164 aa, Azoarcus sp. EbN1
MSDKPLVGIIMGSNSDWPTMQAAAKMLAEFDVPYEARVVSAHRTPDLMFVYADSARERGLKAIIAGAGGAAHLPGMVAAKTTLPVLGVPVQSKALSGQDSLLSIVQMPKGIPVATFAIGEAGAANAALFAIALLANEDTALAEKLAAFRARQTQAVLDMTLDPI

SEQ ID NO: 51914 - DNA, 489 bp, Silicibacter pomeroyi DSS-3
  CDS (1)..(489): transl_table=11
atggccggggtcaaggtagggatcatcatgggcagccagtcggactggccgaccatgaagggtgcagcggaaattctggatgagctgggcgtggcttacgaggcgcggatcgtctcggcgcatcgcaccccggaccggctgtgggactatggccgcgccgccgtggggcgcggcttgcaggtgatcatcgccggggccggcggggccgcgcatctgccgggcatgatggcgtccaagacgcgggtgccggtcattggcgtgccggtgcagacccgggcgctgtcgggggtcgattcgctttactccatcgtgcagatgcccaagggctatccggttgcgaccatggcgatcggcgcggcgggtgccgccaatgcggggctgatggcggccggcatcctcgccctgcaggacgcaggcctggccgaacggctggacgcctggcgcgcggcgctttctgcctcgatccccgaggagccggtcgatgagtga

SEQ ID NO: 51915 - protein, 162 aa, Silicibacter pomeroyi DSS-3
MAGVKVGIIMGSQSDWPTMKGAAEILDELGVAYEARIVSAHRTPDRLWDYGRAAVGRGLQVIIAGAGGAAHLPGMMASKTRVPVIGVPVQTRALSGVDSLYSIVQMPKGYPVATMAIGAAGAANAGLMAAGILALQDAGLAERLDAWRAALSASIPEEPVDE

SEQ ID NO: 51916 - DNA, 492 bp, Bacillus clausii KSM-K16
  CDS (1)..(492): transl_table=11
atgaaacagccgattgtcggcatcattatgggcagtacttctgattgggaaacgatgcgccatgccagtgagattttagacgaacttggcgttccttatgaaaaaaaagtcgtgtccgcccaccgtactcctgattatatgtttgaatacgcggaacaagcggaagagcgtgggcttcgtgtcattattgcaggggcagggggagcggcccatttgccaggaatggtcgcggcaaagacgcttcttccagtcattggcgttcctgttgaatcacgtgccttaaaagggttggactccttgttgtcgattgtgcaaatgccaggaggagtacctgtggctactgtggcaattggcaaagcaggtgcaaccaatgcagcgcttttggctgcgcaaatgattgcaacaacggacaaggtcttgcaacaacgattggcaacgcgccgtgaacgcattaaaaagaccgttctagaaagcagtggtgaactcgtatga

SEQ ID NO: 51917 - protein, 163 aa, Bacillus clausii KSM-K16
MKQPIVGIIMGSTSDWETMRHASEILDELGVPYEKKVVSAHRTPDYMFEYAEQAEERGLRVIIAGAGGAAHLPGMVAAKTLLPVIGVPVESRALKGLDSLLSIVQMPGGVPVATVAIGKAGATNAALLAAQMIATTDKVLQQRLATRRERIKKTVLESSGELV

SEQ ID NO: 51918 - DNA, 525 bp, Thermococcus kodakarensis KOD1
  CDS (1)..(525): transl_table=11
atgcccaaagtgggaataataatgggtagcgactccgacctcccggtcatgaaggccgcggccgaggtgctcgaggagttcggtgttgactacgagataaccatagtttcagcccacagaacccccgagaggatgttcgagtacgccaaaacggcagaagaaagggggatagaggtaataatagccggagctggaggtgccgcccaccttccgggcatgacggcatccataaccacgctccctgtgataggagtccccgtaaagacatccacgctgaacgggcttgactcgctcctctccatagtccagatgccgaggggagtgcccgttgcaaccgtcgccataaacaacgccaagaacgcggccctgctggccctctcaatcctcggggtgaagtacccggagataagggagaagctcaaggagtacaggaggaggatgagggaagaagtggaggagaaggcggagaggcttgaggagatgggctacgaggagtacctccaagtgacagggcaaggaaagtga

SEQ ID NO: 51919 - protein, 174 aa, Thermococcus kodakarensis KOD1
MPKVGIIMGSDSDLPVMKAAAEVLEEFGVDYEITIVSAHRTPERMFEYAKTAEERGIEVIIAGAGGAAHLPGMTASITTLPVIGVPVKTSTLNGLDSLLSIVQMPRGVPVATVAINNAKNAALLALSILGVKYPEIREKLKEYRRRMREEVEEKAERLEEMGYEEYLQVTGQGK

SEQ ID NO: 51920 - DNA, 483 bp, Staphylococcus epidermidis RP62A
  CDS (1)..(483): transl_table=11
gtgaaagtagcagtcattatgggcagttcctcagattggaaaattatgaaagaaagttgttcgatgcttgaagaatttgaaataccgtacgaaaagaaagtcgtttcagctcatcgtacgcctcaaatgatgttcaatttcgctagtcaagcacgccaaaatggttttgatattatcattgccggtgcagggggagcagcacacttacctggaatggtagcttccatgacaacattacctgtgattggtgtgccaattgaatctaaaagtctaaaaggattagattcattactatctatcgtccaaatgcctggtggtatcccagttgcaaccacagcaattggaaaatcaggtgctaaaaatgctgggatattagcggcaagaatgttaggaataacaaatgaatcagttcaaaataatttggaaaattatgaaaaatatttagtcgcaaaagtggaggaaatgcaaaatgaacttcagtaa

SEQ ID NO: 51921 - protein, 160 aa, Staphylococcus epidermidis RP62A
MKVAVIMGSSSDWKIMKESCSMLEEFEIPYEKKVVSAHRTPQMMFNFASQARQNGFDIIIAGAGGAAHLPGMVASMTTLPVIGVPIESKSLKGLDSLLSIVQMPGGIPVATTAIGKSGAKNAGILAARMLGITNESVQNNLENYEKYLVAKVEEMQNELQ

SEQ ID NO: 51922 - DNA, 513 bp, Ehrlichia ruminantium str. Welgevonden
  CDS (1)..(513): transl_table=11
atgtcgattaacgaagatattgccgatgttgcagtaattatgggaagccaatcagattttccaacaatgaataattcaatatcaatactggaagaattaaacatcagctataaaacaatgatcatatctgctcatagaacaccagaaagactctatacatttgcaaaatcagcagaaacaaatggattcaaaataattatcgctggagcaggaggcgcagctcatctaccaggattagtagcgtctttaacatatcttcccgtaataggagttccaataaaaagcagcaatcttaatggaatagatagtttactatcaatagtacagatgccaaaaggaatacctgtagcaacaatgtcaataggatcttcaggaggatataatgcagcaataatggcagcttctattctagctttatcgaataacataataaaaacaaacttacaaatatggagagataacttatctgcttctgtaaaactattaccagatacatctttgcagacttcataa

SEQ ID NO: 51923 - protein, 170 aa, Ehrlichia ruminantium str. Welgevonden
MSINEDIADVAVIMGSQSDFPTMNNSISILEELNISYKTMIISAHRTPERLYTFAKSAETNGFKIIIAGAGGAAHLPGLVASLTYLPVIGVPIKSSNLNGIDSLLSIVQMPKGIPVATMSIGSSGGYNAAIMAASILALSNNIIKTNLQIWRDNLSASVKLLPDTSLQTS

SEQ ID NO: 51924 - DNA, 486 bp, Neisseria gonorrhoeae FA 1090
  CDS (1)..(486): transl_table=11
atgatacaaatcggcatcatcatgggcagcaacagcgattggcccgttatgcggcaggcagcgcagtttcttgaagagttcggcgtagaatatgaggcgcgcgtcgtttccgcacaccgcactccggatttgatgtttgaatacgccgaaaccgcacgggcgcgcggcatcaaagccatcatcgcgggtgcgggcggcgcggcgcatttacccggcatggttgccgccaagaccaccgtccccgttttgggcgtacccgtcccaagcaaatacctgcgcggcgaagattcgcttttatcgattgtacaaatgcccaaaggcgtacccgtcgccacattcgccatcggcgaggcaggcgcggcaaatgccgcattgttcgccatctccatgctcgccaacgaaaaccccgaactggcgcaaaaactggcagacttccgagccaaacaggaacaaaccgttttaaacatggaattggaacagatttaa

SEQ ID NO: 51925 - protein, 161 aa, Neisseria gonorrhoeae FA 1090
MIQIGIIMGSNSDWPVMRQAAQFLEEFGVEYEARVVSAHRTPDLMFEYAETARARGIKAIIAGAGGAAHLPGMVAAKTTVPVLGVPVPSKYLRGEDSLLSIVQMPKGVPVATFAIGEAGAANAALFAISMLANENPELAQKLADFRAKQEQTVLNMELEQI

SEQ ID NO: 51926 - DNA, 507 bp, Bacteroides fragilis NCTC 9343
  CDS (1)..(507): transl_table=11
atgactccaatcgtaagcattatcatgggtagcacttccgaccttcctgtcatggaaaaggccgcacagttgctcaacgatctccatgtaccgttcgaaatgaacgccctctcggctcaccgcactcccgaagctgtggaagagtttgccaagaatgcccgctcacgcggcattaaagtaattattgctgctgccggtatggctgcccatctgccgggcgtgattgccgcatcgaccccgcttccggtcatcggtgtacccatcaaatcgtctcttgacggaatggacgcccttctggcgatcgtacagatgcctccggggattcctgtagcgactgtgggtatcaatggcgcactgaacgccgccatccttgccgtacaaatgctttcattggaagataaagaactcgaaacaaaattcatagcctataaagaaggactgaaaaagaaaatcgtaaaggctaacgaagaactgaaagaaattaagtacgagtttaaaacaaactaa

SEQ ID NO: 51927 - protein, 168 aa, Bacteroides fragilis NCTC 9343
MTPIVSIIMGSTSDLPVMEKAAQLLNDLHVPFEMNALSAHRTPEAVEEFAKNARSRGIKVIIAAAGMAAHLPGVIAASTPLPVIGVPIKSSLDGMDALLAIVQMPPGIPVATVGINGALNAAILAVQMLSLEDKELETKFIAYKEGLKKKIVKANEELKEIKYEFKTN

SEQ ID NO: 51928 - DNA, 492 bp, Pseudomonas syringae pv. syringae B728a
  CDS (1)..(492): transl_table=11
atgagcgcactggttggcgtgatcatgggctccaagtccgattggtccacccttagccacaccgccgatatgctggaaaagctcggcatcccttttgaagtcaaggtggtgtcagctcaccgcacaccggatctgctgtttcagtacgccgacgaagcggaaggccgtggcattgaagtgatcatcgccggtgccggcggtgccgctcacttgccgggcatgtgcgctgccaagacccacctgcctgtgctgggcgttccggtgcagtcttcgatgctttcgggggtcgattcgctgttgtcgatcgtgcagatgccggccggtatcccggtcgcgaccctggccatcggcaaggcgggtgcaatcaacgcagcgctgctttcagccagcatccttggcgcaaagcacccgcaattccacgcagcgctgaagaaatttcgcactgaacagacagacagcgtcctggataatccagacccacgccacgcctga

SEQ ID NO: 51929 - protein, 163 aa, Pseudomonas syringae pv. syringae B728a
MSALVGVIMGSKSDWSTLSHTADMLEKLGIPFEVKVVSAHRTPDLLFQYADEAEGRGIEVIIAGAGGAAHLPGMCAAKTHLPVLGVPVQSSMLSGVDSLLSIVQMPAGIPVATLAIGKAGAINAALLSASILGAKHPQFHAALKKFRTEQTDSVLDNPDPRHA

SEQ ID NO: 51930 - DNA, 495 bp, Haemophilus influenzae 86-028NP
  CDS (1)..(495): transl_table=11
atgtcaaaaactgcacaaattgctgttgtgatgggttccaaaagcgattgggctaccatgcaagaggcaactcagattttagatgaattaaaagtaccttatcatgtggaaatcgtctctgctcatcgtacgcctgataaactttttgaatttgctgaaaatgcacaaaaaaatggctataaagtaattattgctggggctggcggtgcggcacatttacccggcatgatcgcagccaaaacccttgtgcctgtgctgggtgtgccagtaaaaagttctatgttaagtggcgtagatagcctttattcaattgtgcaaatgccaaaaggaatcccagtcggaacattggctattggccctgcgggtgcggcaaatgctggattgttagccgcacaaattctagcaagttgggatgcagaattgctttcacgcttgcaatctttccgtgaaagccaaacgagtaatgtgcttgataatcccgatccacgcacataa

SEQ ID NO: 51931 - protein, 164 aa, Haemophilus influenzae 86-028NP
MSKTAQIAVVMGSKSDWATMQEATQILDELKVPYHVEIVSAHRTPDKLFEFAENAQKNGYKVIIAGAGGAAHLPGMIAAKTLVPVLGVPVKSSMLSGVDSLYSIVQMPKGIPVGTLAIGPAGAANAGLLAAQILASWDAELLSRLQSFRESQTSNVLDNPDPRT

SEQ ID NO: 51932 - DNA, 492 bp, Pseudomonas fluorescens Pf-5
  CDS (1)..(492): transl_table=11
atgagtgcactggttggcgtgatcatgggctccaagtccgattggtccacccttagccacaccgccgatatgctggaaaagctcggcatcccttacgaggtgaaggtggtttccgcacaccgcaccccggacctgctgttccagtacgccgatgaggctgaggcgcgaggcatcgaggtgatcatcgccggtgccggcggcgcggcgcacctgccgggcatgtgcgcggccaagacccacctgccggtgctgggcgtgccggtgcagtcgtcgatgctctcaggcgtggattcgctgctgtccatcgtgcagatgccggccggcatccccgtggccaccctggccatcggcaaggccggcgcgatcaacgcggcgctgctctcggcgagcatcctgggcgccaagcacccgcagttccatgcggtgctgaaaaaattccgtgctgaacagacagacagcgtcctggacaatccagacccgcgcgtcgcctga

SEQ ID NO: 51933 - protein, 163 aa, Pseudomonas fluorescens Pf-5
MSALVGVIMGSKSDWSTLSHTADMLEKLGIPYEVKVVSAHRTPDLLFQYADEAEARGIEVIIAGAGGAAHLPGMCAAKTHLPVLGVPVQSSMLSGVDSLLSIVQMPAGIPVATLAIGKAGAINAALLSASILGAKHPQFHAVLKKFRAEQTDSVLDNPDPRVA

SEQ ID NO: 51934 - DNA, 561 bp, Psychrobacter arcticus 273-4
  CDS (1)..(561): transl_table=11
atgagcaccacatcagcgactgttaacgctattgatcagaacggacctattacctcgcctgctggtcaaccaaaagttggtattatcatgggctcacaatctgactgggcgaccatgagcgcggcggcacaattgcttgcagactttgatatcgcctttgaatgtgaagtagtatcagcgcaccgtacgcctgatagattgtttgattatgccaaaagtgcaaaaggtaacggcttacaagtgattatcgctggtgccggtggtgccgcccacctacctggtatgtgcgccagtcaaacgccgctacctgtttttggtgtccccgtaaaatcttctatgctgagtggttgggacagcttactttctatcgttcagatgcctaaaggcgtggcagttggaacgttagcgattggatccgctggtgcttataatgctgcactgcttgccatccaagtgttggcattacatgatgaatcgattgcgactaagcttggccatctgcgtcatacccaaactaataccattcttgccagtccaatacccggtattatcaatccttaa

SEQ ID NO: 51935 - protein, 186 aa, Psychrobacter arcticus 273-4
MSTTSATVNAIDQNGPITSPAGQPKVGIIMGSQSDWATMSAAAQLLADFDIAFECEVVSAHRTPDRLFDYAKSAKGNGLQVIIAGAGGAAHLPGMCASQTPLPVFGVPVKSSMLSGWDSLLSIVQMPKGVAVGTLAIGSAGAYNAALLAIQVLALHDESIATKLGHLRHTQTNTILASPIPGIINP

SEQ ID NO: 51936 - DNA, 483 bp, Colwellia psychrerythraea 34H
  CDS (1)..(483): transl_table=11
atgacagtcggtatcatcatgggatcaaaatcagattggccaacaatgcagcatacagcagaaatgcttgattctttaggtgtacagtacgaaaccaaagtagtttctgcacaccgtactcctcacttacttgctgagtatgctgaaagtgcaaaagatagaggtattaaggtaattattgcaggcgctggtggtgcagctcatttaccaggtatggccgcagcttatacttctttacctgttttaggtgtgccagtgcaatctaaagcgcttaatggacaagattctttattatctattgtgcaaatgccaaaaggtattgcagtaggtacattggccatcggcaatgccggtgctgccaacgcaggtttacttgcagcacaaattattggcactcataacactgagatccaacaaaatatcgaagagtttcgtcgaaagcagacagaaaccatacttgctaacccaaacccggcagaataa

SEQ ID NO: 51937 - protein, 160 aa, Colwellia psychrerythraea 34H
MTVGIIMGSKSDWPTMQHTAEMLDSLGVQYETKVVSAHRTPHLLAEYAESAKDRGIKVIIAGAGGAAHLPGMAAAYTSLPVLGVPVQSKALNGQDSLLSIVQMPKGIAVGTLAIGNAGAANAGLLAAQIIGTHNTEIQQNIEEFRRKQTETILANPNPAE

SEQ ID NO: 51938 - DNA, 648 bp, Pseudomonas syringae pv. phaseolicola 1448A
  CDS (1)..(648): transl_table=11
gtgatcgcaggtgctttaaactcaccactttgcggtatactgcgcggcctttggccggctaaatcggtcactattcgtacaacaagccacgccggttcccctgcgtggcttgttgttttcagacgcgcctgcgggcgcccgatgagaggcacgacgatgagcgcactggttggcgtgatcatgggctccaagtccgattggtccacccttagccacactgccgacatgctggaaaagctcggcatcccttatgaagtcaaggtggtgtcagctcaccgcacgccggacctgctgttccagtacgccgacgaagcagagggccgtggcattgaagtgatcatcgccggtgctggcggtgctgctcacttgcctggcatgtgtgccgccaagacccacctgcctgtgctgggcgttccggtgcagtcgtcgatgctgtcgggggtcgactccctgctgtcgatcgtgcagatgcctgcgggtattccggtagcgaccctggccatcggcaaagcgggggcgatcaacgctgcgctgctttcggccagtatcctgggcgccaaacaccctcaattccacgcagcgctgaagaaattccgcgctgagcagacagacagcgtcctggacaatccagacccacgccacgcctga

SEQ ID NO: 51939 - protein, 215 aa, Pseudomonas syringae pv. phaseolicola 1448A
MIAGALNSPLCGILRGLWPAKSVTIRTTSHAGSPAWLVVFRRACGRPMRGTTMSALVGVIMGSKSDWSTLSHTADMLEKLGIPYEVKVVSAHRTPDLLFQYADEAEGRGIEVIIAGAGGAAHLPGMCAAKTHLPVLGVPVQSSMLSGVDSLLSIVQMPAGIPVATLAIGKAGAINAALLSASILGAKHPQFHAALKKFRAEQTDSVLDNPDPRHA

SEQ ID NO: 51940 - DNA, 501 bp, Dechloromonas aromatica RCB
  CDS (1)..(501): transl_table=11
atgaacgccgtgcaacaacccgtcgtcggtatcgtcatgggttccgattccgactggccgaccatgcaggccgccgccgtcatcctcaaggatttcggcgtgcccttcgaggcccgtgtcgtttccgctcaccgcaccccggatctgctattcgattacgccgccatggctggcgagcgtggcctcaaggcaatcattgccggggccggcggtgccgcccacctgccgggcatgctggccgccaagaccatcgtgccggtgctcggcgtgccggtgcaatcgaaagccctgtccggtgtcgattcgctgcattccatcgtccagatgccgaagggtattcccgtcgccaccttcgccatcggtgaagccggtgccgccaatgcagcactgtttgccgttgccatgctggccaacgagaacccggcgttgaatgccaagctgcaggccttccgccaggctcagaccgaaaaggtcctggccatgaaactccccggggtttaa

SEQ ID NO: 51941 - protein, 166 aa, Dechloromonas aromatica RCB
MNAVQQPVVGIVMGSDSDWPTMQAAAVILKDFGVPFEARVVSAHRTPDLLFDYAAMAGERGLKAIIAGAGGAAHLPGMLAAKTIVPVLGVPVQSKALSGVDSLHSIVQMPKGIPVATFAIGEAGAANAALFAVAMLANENPALNAKLQAFRQAQTEKVLAMKLPGV

SEQ ID NO: 51942 - DNA, 534 bp, Thermobifida fusca YX
  CDS (1)..(534): transl_table=11
gtgagccagagcccgcccgccgtcggcatcgtgatgggaagcgactccgactggccgttcatggaagaggcagccgaggcactggacgagttcagtgtcccctacgaggttgacgtggtctcggcgcaccggatgccgcacgagatgatcgcctacggctcccaggcagcggagcggggcctgaaagtcctcattgccggggccggcggggcagcccacctgccgggcatgctcgcctcggtcactccgctgccggtcatcggggtgccggtcccgctgaagtacctcgacgggctcgactcgctgctgtccatcgtgcagatgcccgcgggagtcccggtggccacggtggcggtgggcgcggcccgcaatgcgggcctgctggcagtgcggatcctcggcgcccacgacgaggagctgcgcgcgaagatggccgacttccaggacgacctcaaccagcaggccaaagccaagggggagcggctgcgccgcaaactcacggaaggctcctcgttcggcttcggcgcccgctga

SEQ ID NO: 51943 - protein, 177 aa, Thermobifida fusca YX
MSQSPPAVGIVMGSDSDWPFMEEAAEALDEFSVPYEVDVVSAHRMPHEMIAYGSQAAERGLKVLIAGAGGAAHLPGMLASVTPLPVIGVPVPLKYLDGLDSLLSIVQMPAGVPVATVAVGAARNAGLLAVRILGAHDEELRAKMADFQDDLNQQAKAKGERLRRKLTEGSSFGFGAR

SEQ ID NO: 51944 - DNA, 498 bp, Ralstonia eutropha JMP134
  CDS (1)..(498): transl_table=11
gtgagcaagcaagaaaagccggtcgtcggcgtcgtaatgggcagcagttccgactgggacgtgatgcagcacgccgtggccatgctgaaggatttcggcgtgccgttcgaggcacaggtcgtttcggcgcaccgcatggccgacgacatgttccgctatgcggagaccgcgcgcagccgtggcatccgcgcgatcatcgccggtgccggcggtgccgcgcatctgccgggcatgatcgccgccaagaccatcgtgccggtgttcggcgtgccggtgccgtccaagtacctgcgcggcgaggactcgctgctgtcgatcgtgcagatgcccaagggcgtgcccgtcgcgacgttcgcgatcggcgaagccggcgcggccaatgcggcgctgcatgcgatcgccacgctggccaccaccgacgacgcgctggccagcgcgctggaagcattccgcgccaggcagaccgaagccgcgcgcgcgatgacgctgccgctgtaa

SEQ ID NO: 51945 - protein, 165 aa, Ralstonia eutropha JMP134
MSKQEKPVVGVVMGSSSDWDVMQHAVAMLKDFGVPFEAQVVSAHRMADDMFRYAETARSRGIRAIIAGAGGAAHLPGMIAAKTIVPVFGVPVPSKYLRGEDSLLSIVQMPKGVPVATFAIGEAGAANAALHAIATLATTDDALASALEAFRARQTEAARAMTLPL

SEQ ID NO: 51946 - DNA, 504 bp, Ehrlichia canis str. Jake
  CDS (1)..(504): transl_table=11
atgtcaattaatcaaaacacagtagacgtcgcagtaatcatgggaagtcaatcagattttccaacaatgaataattcgatctcaatactaaaagaactcaatataacacacaaagtaatgattatatctgcacatagaacaccagacaggctttacacatttgcaaaatctgcagaagacaatgggtttaaagtaattatagcaggagcaggaggagcagcgcatttaccaggattagtagcatctttaacacatataccagttataggggtaccaataaaaagtagtaatttaaacggaatagatagcttgctatcaatagtacaaatgcccaaaggaatacctgttgcaacaatgtccataggatcatcaggagcatacaacgcagctatcatagcagcatctattttatctttagaaaatgatattatcaaagacaatctaaaaacatggagaaaaaatctatctgattcagtaaaactgataccagacacatcactataa

SEQ ID NO: 51947 - protein, 167 aa, Ehrlichia canis str. Jake
MSINQNTVDVAVIMGSQSDFPTMNNSISILKELNITHKVMIISAHRTPDRLYTFAKSAEDNGFKVIIAGAGGAAHLPGLVASLTHIPVIGVPIKSSNLNGIDSLLSIVQMPKGIPVATMSIGSSGAYNAAIIAASILSLENDIIKDNLKTWRKNLSDSVKLIPDTSL

SEQ ID NO: 51948 - DNA, 402 bp, Methanosarcina barkeri str. Fusaro
  CDS (1)..(402): transl_table=11
atggttgatatctcagtaattatgggttccgaatccgataggcctatcgccaaccgtgcgatatccgtacttgaaaagagcaaatacacttacgaagtaatggttatctctgctcacaggaaccctgaagaacttgaaagctacatatcaagtaccgacgcaaaagtctttattacaattgcaggtttatctgcagcccttcctggggttgtagcttccagaacaaaaagacctgtagtaggagtccctgtaagcgcgaagcttggtggactcgatgccctgctctctattgcccagatgcccccaggagtgcctgtcggaagcgtagggatcgataatggagcaaatggtgcacatcttgctctgagaattatggatttgattgacaccacgaagccttaa

SEQ ID NO: 51949 - protein, 133 aa, Methanosarcina barkeri str. Fusaro
MVDISVIMGSESDRPIANRAISVLEKSKYTYEVMVISAHRNPEELESYISSTDAKVFITIAGLSAALPGVVASRTKRPVVGVPVSAKLGGLDALLSIAQMPPGVPVGSVGIDNGANGAHLALRIMDLIDTTKP

SEQ ID NO: 51950 - DNA, 465 bp, Dehalococcoides sp. CBDB1
  CDS (1)..(465): transl_table=11
atgccattagttagtattgttatggggtccaagtctgacgccgagtttatgaagcccactgaagaaatactggagaaaatggctatttcttttgaaactctggttatgtctgcccatcgtactccggaaaaagtgcaggagttttgtttgaatgcacctgaccgggggattgaactgattatagctgctgccgggggcgcagcgcatctgccgggggtaattgccagctgggtaacactgccggttattggtgtccctattgcttccagtgaactcaaaggagttgacgccctgtactctatagtccagatgccggccggtataccggtagctacagtagctattggtgctgcgggtgctaaaaatgcggcttatctggcggccgaaattctgggtttaaaatatcaaaatatccgtcaggcttacgtaagctaccgtcaggaactaaaaggtgaaaacaaatga

SEQ ID NO: 51951 - protein, 154 aa, Dehalococcoides sp. CBDB1
MPLVSIVMGSKSDAEFMKPTEEILEKMAISFETLVMSAHRTPEKVQEFCLNAPDRGIELIIAAAGGAAHLPGVIASWVTLPVIGVPIASSELKGVDALYSIVQMPAGIPVATVAIGAAGAKNAAYLAAEILGLKYQNIRQAYVSYRQELKGENK

SEQ ID NO: 51952 - DNA, 498 bp, Thiobacillus denitrificans ATCC 25259
  CDS (1)..(498): transl_table=11
atgatgagcgcgcctgaggtaggggtggtgatgggatcttccagcgactgggaggtgatgaagcatgcggcgattctgctcaagcagctcggcatccacttcgaaaccaaggtggtgtcggcgcaccgtacccccgacctgctctacgaatacgcggcgagcgccgaggcgcgcggcatcaaggcgatcatcgcgggcgcgggcggcgcggcgcacctgccgggcatgatcgcggcgaagacgatcgttccggtgctcggcgtgccggtgccgtcgaaatatctcaagggcgtcgattcgctgctctcgatcgtgcagatgccgcgcggcatcccggtcgcgaccttcgcgatcggcgaggccggcgccgccaacgccgcgctcttcgcggcggcgctgatcgcgcgcgccgaccccggcctcgcggcgcagctcaacgaattccgccgcggccagtccgattcggtgctcgcgatggagctgcccgatgtcgaatga

SEQ ID NO: 51953 - protein, 165 aa, Thiobacillus denitrificans ATCC 25259
MMSAPEVGVVMGSSSDWEVMKHAAILLKQLGIHFETKVVSAHRTPDLLYEYAASAEARGIKAIIAGAGGAAHLPGMIAAKTIVPVLGVPVPSKYLKGVDSLLSIVQMPRGIPVATFAIGEAGAANAALFAAALIARADPGLAAQLNEFRRGQSDSVLAMELPDVE

SEQ ID NO: 51954 - DNA, 528 bp, Anabaena variabilis ATCC 29413
  CDS (1)..(528): transl_table=11
atggctcccttagttggcattattatgggtagcgattcagatttgcccacgatgaaagaggcgatcgctatttgtgaggaatttggtgtagaaaatgaagtggcgatcgtttctgcccatcgcaccccagaacgtatggtggaatatgcccaaacagcccaccatcggggtatcaaggtgattattgctggtgcaggcggtgcagcccatcttcccggcatggtagcatctttaactcctctaccagtaattggtgtgccagtcgctaccagaaacttacaaggtgtggattctttatattcaattgtacagatgcctgggggtattcctgtggctacggtggcgatcggtaacgccaaaaatgccggactattggctgtgcaaatcctcgctactcaacagccagaattattaactaaagtccaagcataccgtcaaaacctatctgactcagtaatgacaaagcaagcaaagttagaacaactaggttacaagcagtatttgcaacaggagatgcttggaaaataa

SEQ ID NO: 51955 - protein, 175 aa, Anabaena variabilis ATCC 29413
MAPLVGIIMGSDSDLPTMKEAIAICEEFGVENEVAIVSAHRTPERMVEYAQTAHHRGIKVIIAGAGGAAHLPGMVASLTPLPVIGVPVATRNLQGVDSLYSIVQMPGGIPVATVAIGNAKNAGLLAVQILATQQPELLTKVQAYRQNLSDSVMTKQAKLEQLGYKQYLQQEMLGK

SEQ ID NO: 51956 - DNA, 489 bp, Streptococcus agalactiae A909
  CDS (1)..(489): transl_table=11
atgcaaccaattatttctattatcatgggatccaaatctgactggacaaccatgcaaaaaacggctgaagttctagataactttggcattgcttacgagaagaaagtcgtctctgcccaccgcacaccagacctcatgttcaagcatgctgaggaagcacgtgaccgtggcatcaaaatcatcatcgctggtgcaggtggagcagctcacttgcctggtatggtggcagctaaaacaacgctacctgttatcggtgtgcctgtcaaatcacgtgctctttcaggtttggattcgctctattccattgtgcagatgcctggcggtgtgcctgtggcaaccatggctatcggagaagcgggagcgactaacgctgccctgacagccctccgtatcctctctatcgaagaccaaaatttggctgatgcgctagctcatttccatgaggaacaaggaaaaatcgcagaggagtcaagcaatgaactcatttaa

SEQ ID NO: 51957 - protein, 162 aa, Streptococcus agalactiae A909
MQPIISIIMGSKSDWTTMQKTAEVLDNFGIAYEKKVVSAHRTPDLMFKHAEEARDRGIKIIIAGAGGAAHLPGMVAAKTTLPVIGVPVKSRALSGLDSLYSIVQMPGGVPVATMAIGEAGATNAALTALRILSIEDQNLADALAHFHEEQGKIAEESSNELI

SEQ ID NO: 51958 - DNA, 492 bp, Pseudomonas fluorescens PfO-1
  CDS (1)..(492): transl_table=11
atgagtgcactggttggcgtgatcatgggctccaagtccgattggtccacccttagccacaccgccgatatgctggaaaagctcggcatcccttacgaggtcaaggtggtttccgcccaccgcaccccggatctgctgttccagtacgccgaagaggctgaaggccgcggcatcgaggtgatcatcgccggtgccggtggcgcagcccacctgccaggcatgtgtgcggccaaaacccacctgccggtgctgggcgtgccggtgcagtcagccatgctttcgggcgtcgactcgctgctttcgatcgtgcagatgccggccggtattccggttgccactctggccatcggcaaggccggtgcgatcaacgcagccctgctgtcggcgagcatcctgggcgccaagcatccgcaattccacgcggtactgaaaaccttccgtgccgagcagacagacagcgtcctggacaatccagacccacgtattgcctga

SEQ ID NO: 51959 - protein, 163 aa, Pseudomonas fluorescens PfO-1
MSALVGVIMGSKSDWSTLSHTADMLEKLGIPYEVKVVSAHRTPDLLFQYAEEAEGRGIEVIIAGAGGAAHLPGMCAAKTHLPVLGVPVQSAMLSGVDSLLSIVQMPAGIPVATLAIGKAGAINAALLSASILGAKHPQFHAVLKTFRAEQTDSVLDNPDPRIA

SEQ ID NO: 51960 - DNA, 486 bp, Rhodobacter sphaeroides 2.4.1
  CDS (1)..(486): transl_table=11
atgactgtggacgttgggatcatcatgggcagccagtcggactgggccacgatgaaggaggccgcggcgatcctcgacgagctcggcatctctcacgaggcgaggatcgtctcggcgcaccgcacgcccgaccggctctggaactacggcaagaccgccgtcgggcgcgggctcaaggtcatcatcgcgggcgcgggcggtgcggcgcaccttcccggcatgatggcctcgaaaacgcgggtgcccgtcatcggcgtgcccgtccagacccgcgcgctctcgggcgtcgacagcctctattccatcgtccagatgcccaagggttttccggtcgccaccatggcgatcggcagcgccggcgcggcgaacgcgggcctgatggccgcgggcatcctcgccctctccgatccggcgctcggccagcggctcgacgcctggcgcgcagccctctccgcctccatccccgaggagccctccgatgactga

SEQ ID NO: 51961 - protein, 161 aa, Rhodobacter sphaeroides 2.4.1
MTVDVGIIMGSQSDWATMKEAAAILDELGISHEARIVSAHRTPDRLWNYGKTAVGRGLKVIIAGAGGAAHLPGMMASKTRVPVIGVPVQTRALSGVDSLYSIVQMPKGFPVATMAIGSAGAANAGLMAAGILALSDPALGQRLDAWRAALSASIPEEPSDD

SEQ ID NO: 51962 - DNA, 489 bp, Carboxydothermus hydrogenoformans Z-2901
  CDS (1)..(489): transl_table=11
atgcacaaagttgcggtggttatgggaagcgactccgactgggagattgtaaaaaaggcggtagaggttttaaaagagtttggggtggagtatgaagttaaggtggcatcggcccaccgaactccggataaagctttaaattttgcccggacggcccgggaaaaaggttttggcgttataattgccgcggcggggatggcggcccacttgccgggagtgctggcagcggtgaccacgttaccggtgataggtttaccgattaaagcttccatagagggaattgacagcttactatccattgcccagatgccacccggcgttccggtggcaacggtagggataaatgcggctaaaaatgccgggcttttagcggtgcaaattctaagcttaaatgacaaaaaccttgcgggaaaacttcaagcttataaagaaaagctggcccgggaagtggaagaaaaggagcaaaaacttttagaaaaattgttttag

SEQ ID NO: 51963 - protein, 162 aa, Carboxydothermus hydrogenoformans Z-2901
MHKVAVVMGSDSDWEIVKKAVEVLKEFGVEYEVKVASAHRTPDKALNFARTAREKGFGVIIAAAGMAAHLPGVLAAVTTLPVIGLPIKASIEGIDSLLSIAQMPPGVPVATVGINAAKNAGLLAVQILSLNDKNLAGKLQAYKEKLAREVEEKEQKLLEKLF

SEQ ID NO: 51964 - DNA, 522 bp, Burkholderia sp. 383
  CDS (1)..(522): transl_table=11
atgagtgaaatccagactgcccacacgcacagcgcgccgctcgtcggcgtgctgatgggatcgagttccgattgggacgtgatgaagcacgcggttgccatcctgcaggaattcggcgtgccgtacgaagcgaaggtcgtgtccgcgcaccggatgcccgacgagatgttcgactatgcggagaaggcgcgcgagcgcgggctgcgcgcgatcatcgcgggggccggcggcgccgcgcacctgccgggcatgctggccgcgaagaccacggtgccggtgctcggcgtgccggtcgcgagcaagtacctgaagggcgtcgattcgctgcactcgatcgtgcagatgccgaagggcgtgcccgtcgcgacgttcgcgatcggcgaggccggcgctgcgaacgccgcgctgttcgcggtgtcgatcctgtccggcaactcggtcgactatgcgaaccgcctcgccgcgttccgcgtgcgccagaacgaagccgcgcacgcgatggtgctgccgccgctggaatga

SEQ ID NO: 51965 - protein, 173 aa, Burkholderia sp. 383
MSEIQTAHTHSAPLVGVLMGSSSDWDVMKHAVAILQEFGVPYEAKVVSAHRMPDEMFDYAEKARERGLRAIIAGAGGAAHLPGMLAAKTTVPVLGVPVASKYLKGVDSLHSIVQMPKGVPVATFAIGEAGAANAALFAVSILSGNSVDYANRLAAFRVRQNEAAHAMVLPPLE

SEQ ID NO: 51966 - DNA, 552 bp, Synechococcus sp. CC9605
  CDS (1)..(552): transl_table=11
atggcagtcttgcccctctgcgttgtgccgccagtgctcccccgtgttgccgttgtgatgggcagtgactctgacctgcccatcatggaacccgccgccgccatcctgcgcgagctgggattggaggtggaggttcgggtgctctcggctcaccgaacccctttggagatggtgaacttcgctcaagccgcccgggatcaggggtttggggtgatcgtcgccggcgccggtggggcggcccatctccccggcatggtggccgccctcaccacgctgcccgtgatcggcgtgccggtgaagagccgggcgctgtccggggtcgattccctccactcgatcgtgcagatgccgggggggattccggtggccaccgtcgccatcggtggaggcctcaatgccggcttgctggcagcccagatcctgtcagtggccgatgctggcttggcccagaaacttgaggcctaccgcagcagcctccacgatgctgtggtggccaaggatgcgcgcctggttgatctgggcagcacggactacctctcccagatgacttga

SEQ ID NO: 51967 - protein, 183 aa, Synechococcus sp. CC9605
MAVLPLCVVPPVLPRVAVVMGSDSDLPIMEPAAAILRELGLEVEVRVLSAHRTPLEMVNFAQAARDQGFGVIVAGAGGAAHLPGMVAALTTLPVIGVPVKSRALSGVDSLHSIVQMPGGIPVATVAIGGGLNAGLLAAQILSVADAGLAQKLEAYRSSLHDAVVAKDARLVDLGSTDYLSQMT

SEQ ID NO: 51968 - DNA, 510 bp, Geobacter metallireducens GS-15
  CDS (1)..(510): transl_table=11
atgggtaatccacaggttcttattgtcatggggagcgattcggacctctctatcatggaggaggccgcgaaggttctcgacgagttcggtgtggcgtgggagatgcgcgtcgcctcggcccaccgttcgccgaagaaggctgcggcactggctgcaggcgctgcggcaaggggggtcaaggcgatcatcgccggtgccggcatggctgcccacctggccggggtcatcgccgccgataccgttctgccggtgatcgccgtgccgatccccggcggagcccttaacggcgtcgatgccctctacgccatggtccagatgccgggcggaattcccgtggccaccatggccatcggcaaggctggggccaaaaacgcaggacttcttgcggtgcagatcattgccctcggcgacccggcgctcaccgcggagcttgttgcccacaagcaggccatggccgacgaggtggaggcgaaggacaacgctctccaggagcgattgcgcagatcctag

SEQ ID NO: 51969 - protein, 169 aa, Geobacter metallireducens GS-15
MGNPQVLIVMGSDSDLSIMEEAAKVLDEFGVAWEMRVASAHRSPKKAAALAAGAAARGVKAIIAGAGMAAHLAGVIAADTVLPVIAVPIPGGALNGVDALYAMVQMPGGIPVATMAIGKAGAKNAGLLAVQIIALGDPALTAELVAHKQAMADEVEAKDNALQERLRRS

SEQ ID NO: 51970 - DNA, 507 bp, Desulfovibrio desulfuricans G20
  CDS (1)..(507): transl_table=11
atgcctcaggtcggcattttcatcggaagcatctctgacgaggaaaccctgcgcccctgcaccgaggtgctggacaagctgggcatcagctatctgtttactgtcagttccgcgcaccgtacccctgaacgcacggaatcgctggtggatacgctggaaaaagacggctgtcaggtctttatctgtgccgcaggcatggccgcccatctggcgggcgccgtggccgcacgcactctgcgccctgtcatcggggtacctgtcaccgcctcaaaactgggcggcatggatgcgctgctggcaacggtgcagatgcctcccggatatccggtgggcaccgtggcactggacaaggcaggcgccaaaaacgcaggctggtttgccgcgcagataatcgccctgaacaacccggaactggcacagcgccttgccgcggcacgcaaggagttcaccgccgaggtgatacgcgccggagaagatctggaacgccgtatggcacagggcagataa

SEQ ID NO: 51971 - protein, 168 aa, Desulfovibrio desulfuricans G20
MPQVGIFIGSISDEETLRPCTEVLDKLGISYLFTVSSAHRTPERTESLVDTLEKDGCQVFICAAGMAAHLAGAVAARTLRPVIGVPVTASKLGGMDALLATVQMPPGYPVGTVALDKAGAKNAGWFAAQIIALNNPELAQRLAAARKEFTAEVIRAGEDLERRMAQGR

SEQ ID NO: 51972 - DNA, 537 bp, Prochlorococcus marinus str. MIT 9312
  CDS (1)..(537): transl_table=11
ttgtcagaattgaattctaaagatatttataaaatcgctgtcgtaatgggtagtgattcagatctaaaaacattgaaacctgctattgacattttaagagaatttggaatacaaactgaagtttgtatactttctgcccatagaacacctattgagatgatggaatatgcaaaaaatgcagaatcagaaaaaataaaagtaataattgccggtgctggtggtgccgctcatcttccaggaatgttggcatcgataacttgcattcctgtaattggtgtaccagtagagagtaaaacacttaaggggattgactctcttttatcaattgttcaaatgcctgctgggataccagtagcaacagttgcaattaatggaggtcaaaatgctggattattggcaatagagatgatcagtttatttgatgaatccataaagaaaaatttaaaagaattcagagaaaatcttcatacacaggtaagaactaaaaatagtaagttatcaaatattggagcggacaattatcttcaaaataaatga

SEQ ID NO: 51973 - protein, 178 aa, Prochlorococcus marinus str. MIT 9312
MSELNSKDIYKIAVVMGSDSDLKTLKPAIDILREFGIQTEVCILSAHRTPIEMMEYAKNAESEKIKVIIAGAGGAAHLPGMLASITCIPVIGVPVESKTLKGIDSLLSIVQMPAGIPVATVAINGGQNAGLLAIEMISLFDESIKKNLKEFRENLHTQVRTKNSKLSNIGADNYLQNK

SEQ ID NO: 51974 - DNA, 669 bp, Synechococcus elongatus PCC 7942
  CDS (1)..(669): transl_table=11
atgcgaatattcgtcagcagggtaggagcagcggtcatcatcggtctgcatgtaacggccgacccagcaactcaggccgatcgccccaatcttacgtcagtgaccatgtcttctcctgttcctgctgcaccctctgcgctcacccagcctgccgttggcatcatcatgggcagcgactctgatttacccaccatgcgtggcgcgatcgccatctgccagcagtttggcattgcccacgaggtcgaaattgtctccgctcaccgtactccggtgcggatggtggagtacgcccaaacagcccatcagcgcagcctcaaggtgatcattgccggcgcaggcggtgcggcccatttaccgggcatggtggctgccctaactcccctgccggtgattggcgtacctgtgcagacccgcacgttgcagggagtggactcgctctattcgatcgtgcaaatgccggctggcatcccagtagcaaccgtcgcgatcggtaatgccaccaatgcagggctcctagcagtgcaaatgctggctagccacaaccccgaactactccaagcggtgcagacctatcgccaagaattggcgcaaatggtgcaagataagcagactcgcctcagtgcgatcggtgttgaggcctacctcgaaaatgctggtggtcatcactag

SEQ ID NO: 51975 - protein, 222 aa, Synechococcus elongatus PCC 7942
MRIFVSRVGAAVIIGLHVTADPATQADRPNLTSVTMSSPVPAAPSALTQPAVGIIMGSDSDLPTMRGAIAICQQFGIAHEVEIVSAHRTPVRMVEYAQTAHQRSLKVIIAGAGGAAHLPGMVAALTPLPVIGVPVQTRTLQGVDSLYSIVQMPAGIPVATVAIGNATNAGLLAVQMLASHNPELLQAVQTYRQELAQMVQDKQTRLSAIGVEAYLENAGGHH

SEQ ID NO: 51976 - DNA, 504 bp, Rhodospirillum rubrum ATCC 11170
  CDS (1)..(504): transl_table=11
atgcataccccctcggaggcgccgctggtcggcgtcatcatgggcagccagtcggactgggctaccctgcgccatgcctgggacatcctggagatgctgggcgttccggcggaaaagcgcattatttccgcccatcggaccccggcgcggctggttgattacgcgacgacggcgcgggcgcgcggcctaagggcgatcgtcgccggcgccggcggcgcggcccatctaccgggcatggtggcggcgatgaccaccttgccggtctttggggttccggttgaaagcaaggcgctttcgggaatggacagcctgctgtcgatcgtgcagatgccgggcggcgtgccggtgggaaccctggccatcggcaaggccggggcgatcaacgccgggctgatcgccgcctcggtggtcgcgctgtcgcgacccgatatcgaggcgaagctgatctcctggcgcgaccgccagacggccgaggtcgccgaagaaccggtggatgagggttaa

SEQ ID NO: 51977 - protein, 167 aa, Rhodospirillum rubrum ATCC 11170
MHTPSEAPLVGVIMGSQSDWATLRHAWDILEMLGVPAEKRIISAHRTPARLVDYATTARARGLRAIVAGAGGAAHLPGMVAAMTTLPVFGVPVESKALSGMDSLLSIVQMPGGVPVGTLAIGKAGAINAGLIAASVVALSRPDIEAKLISWRDRQTAEVAEEPVDEG

SEQ ID NO: 51978 - DNA, 525 bp, Moorella thermoacetica ATCC 39073
  CDS (1)..(525): transl_table=11
atgaacctggcacatgttggtattgttatgggcagcgactccgacctgccaattatggcccgggcagcggccatgctggaccgtttccagattccttatgaagtaagaatcctctcggcccaccgttccccggacgccgccctggattacgcccgcaatgctgccggccgggggctcaaagtcattatcgccggcgccgggggcgcggcccacctggccggcgtcctggccgcagtcaccaccctaccggtaatcggcgtccccatccgcacggcggccctgggcggcgtcgattccctctatgccatggtccagatgccccggggcatcccggtggccacggtggccattgacggcgcaaccaacgccgccatactcgcggcccagatcctggccgtccacaatgacgcccttcaggagcggctggcggcctataagcaggaactggcccaggaagtggcggtcaaagatgcccggctggcgcaactgggtattgaaggttatctgggggaggagaaaaaatga

SEQ ID NO: 51979 - protein, 174 aa, Moorella thermoacetica ATCC 39073
MNLAHVGIVMGSDSDLPIMARAAAMLDRFQIPYEVRILSAHRSPDAALDYARNAAGRGLKVIIAGAGGAAHLAGVLAAVTTLPVIGVPIRTAALGGVDSLYAMVQMPRGIPVATVAIDGATNAAILAAQILAVHNDALQERLAAYKQELAQEVAVKDARLAQLGIEGYLGEEKK

SEQ ID NO: 51980 - DNA, 519 bp, Burkholderia thailandensis E264
  CDS (1)..(519): transl_table=11
atgagcgaagtccagaccgcccacacgcacagcgcgccgctcgtcggcgtgctgatgggttccagctccgactgggacgtgatgaagcatgccgtcgcgatcctgcaggaattcgacgtgccgtacgaggcgaaggtcgtgtccgcgcaccggatgcccgacgagatgttcgactacgcggagaaggcgcgcgagcgcggcctgcgcgcgatcatcgcgggcgcgggcggcgccgcgcacctgcccggcatgctcgcggcgaagacgaccgtgcccgtgctcggcgtgcccgtcgcgagcaagtatctgaaaggcgtcgattcgctgcactcgatcgtgcagatgccgaaaggcgtgcccgtggcgacgttcgcgatcggcgaggccggcgcggcgaacgcggcgctcttcgcggtgtcgatcctgtccggcacgtcggtcgactatgcgaaccggctcgccgcgttccgcgtgcggcagaacgaggccgcgcacgcgatgacgctgccgccgctgtga

SEQ ID NO: 51981 - protein, 172 aa, Burkholderia thailandensis E264
MSEVQTAHTHSAPLVGVLMGSSSDWDVMKHAVAILQEFDVPYEAKVVSAHRMPDEMFDYAEKARERGLRAIIAGAGGAAHLPGMLAAKTTVPVLGVPVASKYLKGVDSLHSIVQMPKGVPVATFAIGEAGAANAALFAVSILSGTSVDYANRLAAFRVRQNEAAHAMTLPPL

SEQ ID NO: 51982 - DNA, 516 bp, Syntrophus aciditrophicus SB
  CDS (1)..(516): transl_table=11
gtggaaaagaatatggatattgccgtcagcgttgtcatgggaagtgattccgactattcggtaatggaggaaaccgtcaaaattttaaagacttttcacgtttcccatgaaatctttctcacctcggcacaccgaagcccggaccgaacatctgatttttcccggaaagcggcggaaagaaacgtgaaagtgatcatcgtcggcgcaggcgcagccgctcatctcgccggggtcatcgcttcacagacaacactgcctgtcatcggagtgcctgttgattcgacagcactcaacggtctggatgcccttttttccactgttcagatgcccgggggcatcccggtagcaactatggccataggaaaagccggcgccaggaatgccgcgctgctcgccattcgcattttatctttgacggacgccgaacttcatcagaggcttaccgtttatattgacaatatggcccatgaagtcgagaaaaagcacgatgacctcatcctcaagagccgtttatga

SEQ ID NO: 51983 - protein, 171 aa, Syntrophus aciditrophicus SB
MEKNMDIAVSVVMGSDSDYSVMEETVKILKTFHVSHEIFLTSAHRSPDRTSDFSRKAAERNVKVIIVGAGAAAHLAGVIASQTTLPVIGVPVDSTALNGLDALFSTVQMPGGIPVATMAIGKAGARNAALLAIRILSLTDAELHQRLTVYIDNMAHEVEKKHDDLILKSRL

SEQ ID NO: 51984 - DNA, 525 bp, Frankia sp. CcI3
  CDS (1)..(525): transl_table=11
gtgtcgcagagcacccccgggccggatcatccccaggtggcgatcgtcttcggatcaccgtcggacacccagaccatgagcaaggccggcgccactctggaacgcttcggtgtgccctacgagcaggtgtcgctgtcggcgcaccgcgcgccgcgcaccctcgccgactacgtgggtcagctacgggcccgcgacatctcggtggtcatcgccggggcaggcctggccgccgcgctgcccggcaccattgcggccctcaccacgctgccggtaatcggcgtgccgatctccggcggggcgctggacggcatggactcgctgctcgccatcgcgcagatgccgccgggcgtcccggtcgcgaccgtgggtctgaacaactcgacgaacgcggcgatcctggcgatccagatcctggcgctggccgatcccgatctggggctgaagctggccgcgttcaaggacgagttcgagcaggccgcggcggacgggctgagcgcggcggccgcggccggcagccagccatga

SEQ ID NO: 51985 - protein, 174 aa, Frankia sp. CcI3
MSQSTPGPDHPQVAIVFGSPSDTQTMSKAGATLERFGVPYEQVSLSAHRAPRTLADYVGQLRARDISVVIAGAGLAAALPGTIAALTTLPVIGVPISGGALDGMDSLLAIAQMPPGVPVATVGLNNSTNAAILAIQILALADPDLGLKLAAFKDEFEQAAADGLSAAAAAGSQP

SEQ ID NO: 51986 - DNA, 486 bp, Novosphingobium aromaticivorans DSM 12444
  CDS (1)..(486): transl_table=11
atgacggatagacctttggttgccatcgtaatgggcagccagtccgattgggaaacgatgaagaatgccgctgccgtgctggaaaagctcggcgtcgcgcatgaatgccgcatcgtctctgcccaccgcacgccggatcgtctcgtcagctttgccaagggcgcccacgaggaaggcttcaaggtcgtgattgccggtgccggcggcgctgcgcacctgccgggcatggtcgcatcgatgacgcaccttcccgttcttggcgtgcctgttgaatccaaggcgctcaagggcatggattcgctgctctcgatcgtccagatgcccggcggcatcccggtcggcacgcttgccatcggcgtacccggcgcaaccaatgcaggcatcctcgccgcatcgatccttgccacctcggacgaggccctggcgaagcggttgatcgatttccgcaccgcgcagaccgaatcggtcgccgagcgcccctcctga

SEQ ID NO: 51987 - protein, 161 aa, Novosphingobium aromaticivorans DSM 12444
MTDRPLVAIVMGSQSDWETMKNAAAVLEKLGVAHECRIVSAHRTPDRLVSFAKGAHEEGFKVVIAGAGGAAHLPGMVASMTHLPVLGVPVESKALKGMDSLLSIVQMPGGIPVGTLAIGVPGATNAGILAASILATSDEALAKRLIDFRTAQTESVAERPS

SEQ ID NO: 51988 - DNA, 498 bp, Anaplasma phagocytophilum HZ
  CDS (1)..(498): transl_table=11
atgaatgaacctaaattgcctcctgtgcccgtggctgtgataatgggtagtaaatcagatcttcctactatgagtgcagcaatttctgtgctagatgagctcatgatagcccatgaggcgcttgttgtgtctgctcatagaacacctgaaaggttatttaatttcgccaagtcagctcatgaaacagggtttaaggtcattatcgccggagcaggtggagcagctcacttgcccggtatggtagcagcacttactcatattccagtaataggtgtgcctgtaatgagtgagtgtttgaaagggatggatagcctgctttctatagtgcaaatgcctaaggggacgcctgtggcaactatggctattggccccgcaggggcttttaatgctgcagtacttgccgcgtctattattggactgtgggatgaaaatgtctctttgcgactacaaaactggaagcagaaaattactgattctgtctcaataacaccttactag

SEQ ID NO: 51989 - protein, 165 aa, Anaplasma phagocytophilum HZ
MNEPKLPPVPVAVIMGSKSDLPTMSAAISVLDELMIAHEALVVSAHRTPERLFNFAKSAHETGFKVIIAGAGGAAHLPGMVAALTHIPVIGVPVMSECLKGMDSLLSIVQMPKGTPVATMAIGPAGAFNAAVLAASIIGLWDENVSLRLQNWKQKITDSVSITPY

SEQ ID NO: 51990 - DNA, 480 bp, Neorickettsia sennetsu str. Miyayama
  CDS (1)..(480): transl_table=11
atgggttctgaaaaagtagcgatagtaatgggcagtacgtctgattatcctactatgcagcatgcggagaaaatactagaacagctggtagtacactttgagacttatgtgatatcagcgcacagaactccagcaaggttatatgagttttcaaaaaacgcagcagacaaaggaattaggacaataatagcaggtgctggaggagcagctcatttaccaggaatgattgcagccataagcgatattccggtcctaggagtaccagtagaaagtaagacgctcaacggtttggatagcttactttcaatatgccagatgcctgcaggcacgccagtcggcactctttctataggaaaggccggcgcagaaaacgcagcactcctcgcctgtaggatactcgccctacaagataaggacctacaagacagactgcgaatctggatcagaaaacaaacagagactgtacctgaaagaccctaa

SEQ ID NO: 51991 - protein, 159 aa, Neorickettsia sennetsu str. Miyayama
MGSEKVAIVMGSTSDYPTMQHAEKILEQLVVHFETYVISAHRTPARLYEFSKNAADKGIRTIIAGAGGAAHLPGMIAAISDIPVLGVPVESKTLNGLDSLLSICQMPAGTPVGTLSIGKAGAENAALLACRILALQDKDLQDRLRIWIRKQTETVPERP

SEQ ID NO: 51992 - DNA, 504 bp, Ehrlichia chaffeensis str. Arkansas
  CDS (1)..(504): transl_table=11
atgtcaaccaataaaaacattgcagatgttgctgttattatgggaagtcaatcagatttttcaacaatgaacaactcaatatcaatactaaaagagctaaacataactcatgaagtaatgatcatatctgctcacagaacaccagaaaggctttatacatttgcaaaatctgcagaagacaatggttttaaagttattatagcaggagcaggaggagcagctcatttaccagggttagtagcatccttaacacacataccagtcataggagtacccgtaaaaagtagtaatttaaatggaatagatagtttactatcaatagtacaaatgcctaaaggtatacctgtagcaacaatgtccataggatcatcaggaggatacaatgcagccataatggcagcatctattctatccttagaaaatgatgaaatcagaaaaaacttaaaaatatggagaaagaacttgtctgattcagtaaaattaattccagatataccgctataa

SEQ ID NO: 51993 - protein, 167 aa, Ehrlichia chaffeensis str. Arkansas
MSTNKNIADVAVIMGSQSDFSTMNNSISILKELNITHEVMIISAHRTPERLYTFAKSAEDNGFKVIIAGAGGAAHLPGLVASLTHIPVIGVPVKSSNLNGIDSLLSIVQMPKGIPVATMSIGSSGGYNAAIMAASILSLENDEIRKNLKIWRKNLSDSVKLIPDIPL

SEQ ID NO: 51994 - DNA, 492 bp, Francisella tularensis subsp. holarctica
  CDS (1)..(492): transl_table=11
atgagtgtacaagttggtgtaataatgggctctaaatctgattggagtacaatgaaagaatgttgtgatatcttggataatttaggtattggttatgaatgtgaagtagtgtctgctcatcgaactccagataagatgtttgactatgccaaaactgctaaagaaagaggccttaaggttataatagcaggagctggcggtgctgcacatttacctggaatggttgcggcaaaaactgctttaccagtattaggtgtaccagttaaatcaagtacacttaatggccaagatagtttattatcaatagtacagatgccagcgggtattccagtagctacttttgcaattggtatggcaggagcaaaaaacgcggcgctttttgctgcaagtatcttgcaacatacagatataaatattgcaaaagcactagctgagtttagagctgagcaaacacgatttgttttggaaaatcctgatcctagggagcactaa

SEQ ID NO: 51995 - protein, 163 aa, Francisella tularensis subsp. holarctica
MSVQVGVIMGSKSDWSTMKECCDILDNLGIGYECEVVSAHRTPDKMFDYAKTAKERGLKVIIAGAGGAAHLPGMVAAKTALPVLGVPVKSSTLNGQDSLLSIVQMPAGIPVATFAIGMAGAKNAALFAASILQHTDINIAKALAEFRAEQTRFVLENPDPREH

SEQ ID NO: 51996 - DNA, 495 bp, Desulfitobacterium hafniense Y51
  CDS (1)..(495): transl_table=11
atgaatttggttggtatcgtcatgggcagtgattcggattttaacgtgatggaggatgctatcaaagtcctgaaggaattcggggtaagttttgaggtcaaggtgtcctctgctcatcgaactctggaaagaaccttgaattgggttaaggaatttgaaggacaggggggcaaggtgattattgcgggggcaggaatggctgcccacttgcccggtgtcgtggccggagcgacgactctgccggtgatcggggtgcctattcgcagcggcgccttggagggtgtggacgccctctatgccatcgtccagatgcctcccggcattcctgtggcaactgtagggatcaacgcggctaagaatgccggactcttaggggttcagatgctggccaatgctgatgatcagttgaaagaagctttgcataactaccgggtcaagatggcgcaaggggtggaagagaaggataaagctctgcaggagaaacttcagaagtaa

SEQ ID NO: 51997 - protein, 164 aa, Desulfitobacterium hafniense Y51
MNLVGIVMGSDSDFNVMEDAIKVLKEFGVSFEVKVSSAHRTLERTLNWVKEFEGQGGKVIIAGAGMAAHLPGVVAGATTLPVIGVPIRSGALEGVDALYAIVQMPPGIPVATVGINAAKNAGLLGVQMLANADDQLKEALHNYRVKMAQGVEEKDKALQEKLQK

SEQ ID NO: 51998 - DNA, 507 bp, Saccharophagus degradans 2-40
  CDS (1)..(507): transl_table=11
atgagtaatacgccaaacactcccattgtgggcgtgataatgggctccaagtccgattgggaaaccatgcagcacgctatcaatatattggagcagctaggtgttccatacgaaaccgaggttgtatcggctcatcgcaccccagataagctctttcaatacgctgaagccgcagatggtcgcggtattgaagtgatcatcgccggcgcaggtggcgcagcacacttacctggcatggttgccgcgaaaacccatttacctgtattgggcgtgccggtgcaatccaaagcattaaacggcatggattcgttgttatccattgcgcaaatgccagctggtattcctgtaggaacattggctattggtaaagctggggcggctaattccgcgttattgtcagcgagcatgctttctaataagtacccagctattaaagaagcgctgttagcgtttagaaaaaatcaaacagaaaccgttctagataatccagacccgcgagagcagtaa

SEQ ID NO: 51999 - protein, 168 aa, Saccharophagus degradans 2-40
MSNTPNTPIVGVIMGSKSDWETMQHAINILEQLGVPYETEVVSAHRTPDKLFQYAEAADGRGIEVIIAGAGGAAHLPGMVAAKTHLPVLGVPVQSKALNGMDSLLSIAQMPAGIPVGTLAIGKAGAANSALLSASMLSNKYPAIKEALLAFRKNQTETVLDNPDPREQ

SEQ ID NO: 52000 - DNA, 495 bp, Methylobacillus flagellatus KT
  CDS (1)..(495): transl_table=11
atgtccaaaccattggttggtatcatcatgggctcagacagcgactggcccgtcatgcgcgccgcggcgcagacgttggccgatttaggcattgtctacgaggcacgcgtggtctctgcgcaccgtacgcctgacctgatgtttgagtttgccgagcaagcggccgaacgcggcttgcgtgtcattattgctggcgctggcggcgccgcccacctgcctggcatggtggcggccaagacgacattgccggtactaggcgtgccggtgccatcacgccatctacaggggcaggattccctgctatccatcgtccagatgcctaaagggattccagtcgcgacgtttgcgatcggtgaggcaggggctgccaacgccggtttgtttgccgccgccatcctggcgacgacggatagcgcacttgcgcagcagctggcagattttcgtgccgcacaggcggcccgggtgctggacatgacattgccggaccagccctga

SEQ ID NO: 52001 - protein, 164 aa, Methylobacillus flagellatus KT
MSKPLVGIIMGSDSDWPVMRAAAQTLADLGIVYEARVVSAHRTPDLMFEFAEQAAERGLRVIIAGAGGAAHLPGMVAAKTTLPVLGVPVPSRHLQGQDSLLSIVQMPKGIPVATFAIGEAGAANAGLFAAAILATTDSALAQQLADFRAAQAARVLDMTLPDQP

SEQ ID NO: 52002 - DNA, 519 bp, Burkholderia xenovorans LB400
  CDS (1)..(519): transl_table=11
atgagtgaagctcaaaccgcccatacgcatggcgcgccggttgtcggcgtgctgatgggctccagttccgactgggaagtcatgaagaacgccgtggccattctgcaggaattcggcgtgccctacgaagcgaaggtcgtgtccgcgcaccgcatgcccgacgaaatgttcgcctatgctgaaagcgcgcgtgaacgcggcattcgcgcgatcatcgccggcgcgggcggcgcggcgcatctgccgggcatgctggcggccaagaccacggtgccggtgctcggcgtgccggtggcgagcaagtacctgaagggcgtcgattcgctgcattcgatcgtgcagatgcccaagggcgtgccggtcgccacgtttgcgattggcgaagccggcgcggcgaacgcggcactgttcgccgtgtcgctgctgagcggcacgagcaatgaatacgcggagaagctggctgcgttccgcgtgcgccagaacgaagcggctcacgctatggtgttgccggcgctataa

SEQ ID NO: 52003 - protein, 172 aa, Burkholderia xenovorans LB400
MSEAQTAHTHGAPVVGVLMGSSSDWEVMKNAVAILQEFGVPYEAKVVSAHRMPDEMFAYAESARERGIRAIIAGAGGAAHLPGMLAAKTTVPVLGVPVASKYLKGVDSLHSIVQMPKGVPVATFAIGEAGAANAALFAVSLLSGTSNEYAEKLAAFRVRQNEAAHAMVLPAL

SEQ ID NO: 52004 - DNA, 390 bp, Methanococcoides burtonii DSM 6242
  CDS (1)..(390): transl_table=11
atggtagatatttcaatattaatggggtctgaatcagatcatgcaatagcaacccgagttacgagtgtccttgaggataccgactactcctttgaagtgaaagttatctcagcacaccgtgatcctaaaaaacttgatgaatacattgctaagagcgatgcaaatgtcttcattgcgatcgcaggcctttctgcagcacttcctggagtcattgcctcaaagaccataaaacctgttattggtgtaccggttagtgcaaaactcggtggacttgatgcactcttatccatagttcagatgccaccaggagttcctgtcgcaagtgttggtatagataatggtgctaatgccgcaaaactagccataaggatacttgatcttcttaattaa

SEQ ID NO: 52005 - protein, 129 aa, Methanococcoides burtonii DSM 6242
MVDISILMGSESDHAIATRVTSVLEDTDYSFEVKVISAHRDPKKLDEYIAKSDANVFIAIAGLSAALPGVIASKTIKPVIGVPVSAKLGGLDALLSIVQMPPGVPVASVGIDNGANAAKLAIRILDLLN

SEQ ID NO: 52006 - DNA, 498 bp, Ralstonia metallidurans CH34
  CDS (1)..(498): transl_table=11
atgagcaacgaatcgaagcctgtggttggcgtggtaatgggcagcagttccgattgggacgtgatgcagcacgccgtggccatgctcaaggatttcaacgtgccgttcgaagcgcaggtggtgtcggcgcaccggatggccgatgacatgttccgctatgccgaagcggcgcgcggccgtggcatccgcgcgatcatcgccggcgccggcggtgccgcgcacctgccgggcatgatcgccgccaagaccatcgtgccggtgttcggcgtgccggtgccgtcgaagtacctgcgcggcgaggactcgctgctgtcgatcgtgcagatgccgaagggtgtgcccgtggccaccttcgccatcggcgaggccggcgccgccaacgcggcgctgcacgcgatcgccacgctggccaccactgacgacgcgctggccagcgcgctggaagcgttccgcgcaaagcagaccgaagccgcgcgcgcgatgacgctgcccgtataa

SEQ ID NO: 52007 - protein, 165 aa, Ralstonia metallidurans CH34
MSNESKPVVGVVMGSSSDWDVMQHAVAMLKDFNVPFEAQVVSAHRMADDMFRYAEAARGRGIRAIIAGAGGAAHLPGMIAAKTIVPVFGVPVPSKYLRGEDSLLSIVQMPKGVPVATFAIGEAGAANAALHAIATLATTDDALASALEAFRAKQTEAARAMTLPV

SEQ ID NO: 52008 - DNA, 510 bp, Acidobacteria bacterium Ellin345
  CDS (1)..(510): transl_table=11
atgtccgatacaccgcttgtgtccattgttatgggcagtgattccgatttggagatcatgaacgaagccgcgaaggcgctcgagggcttcgggattgcgtatgaaattgacatcacgtcggcgcaccgttcgccggcacgcaccagcgaatactcgcgcgcgctggtttcgcgtggcgtgaaggttgtgattgccggcgcaggtggcgcggcacaccttgcaggcgtgattgccgctgagacgaccctgccggtaattgccgtgccgattccatccacggcgctgctcggcctcgattcgctgttagcgatggtgcagatgcctgcgggcattccctgcgcgaccgtggcgatcggcaagccgggtgcgacgaatgccggcattctcgcggcacagatcatcgggacgcatgatgcgggcgttgcgaagaaactcgtggcgcacaaagagaagttggccaagggcgtggaagagaagtcgaagaagttgaaggaatcggcgaagaagtag

SEQ ID NO: 52009 - protein, 169 aa, Acidobacteria bacterium Ellin345
MSDTPLVSIVMGSDSDLEIMNEAAKALEGFGIAYEIDITSAHRSPARTSEYSRALVSRGVKVVIAGAGGAAHLAGVIAAETTLPVIAVPIPSTALLGLDSLLAMVQMPAGIPCATVAIGKPGATNAGILAAQIIGTHDAGVAKKLVAHKEKLAKGVEEKSKKLKESAKK

SEQ ID NO: 52010 - DNA, 489 bp, Silicibacter sp. TM1040
  CDS (1)..(489): transl_table=11
atggccgacatcaaagtagggatcatcatggggagccagtccgactggcccacgatgaaggaagcagccaacatccttgacgaactgggcgttgcctatgaaacgcggatcgtttcggctcaccgcacgccggaccggttgtgggactatggcaagaccgcagcagagcgcggcctgcatgtgattatcgcaggcgcgggcggcgcggcgcatttgcccggcatgatggcgtcaaagacccgtgtgcccgtggttggcgtgcccgtccagacccgtgccttgtccggtgtcgacagcctttattcgatcgtgcagatgcccaaaggatttccagttgccaccatggcgattggtgccgcgggcgctgccaacgcaggcctgatggccgccggcattctcgccaccagcgacgccgcgctggcagaacgtcttgacgcctggcgcgacgcgcttgccgcctccattcccgaggagcctaccgatgactga

SEQ ID NO: 52011 - protein, 162 aa, Silicibacter sp. TM1040
MADIKVGIIMGSQSDWPTMKEAANILDELGVAYETRIVSAHRTPDRLWDYGKTAAERGLHVIIAGAGGAAHLPGMMASKTRVPVVGVPVQTRALSGVDSLYSIVQMPKGFPVATMAIGAAGAANAGLMAAGILATSDAALAERLDAWRDALAASIPEEPTDD

SEQ ID NO: 52012 - DNA, 498 bp, Myxococcus xanthus DK 1622
  CDS (1)..(498): transl_table=11
atggcgagcacggtcaccccctgggtcggggtcatcatgggcggtaggagcgacctggagcacctgcagcccgcggtcgacattctcaaggaactgggcatcccgcacgaggtgcgcgtggtgtccgctcaccgcaccccggactggatgatggagtacgcgtccaccgcggagtcgcgggggctgtccgtcatcatcgccgccgcgggcggcgcggcgcacctgccgggcatggtgtcgagcaagacgctgctgcccgtcattggcgtgcccatgcccaccacgctgctcagcggcctggacgcgctgctgtccatcgtccagatgcccaagggcgtgccggtgggaacgcaggccattggcaagccgggcgccgccaacgcggccctgcacgccgcggccatcctctgcctcaagtaccccgagctgcgcgagcggctcgcggcctggcgcaaggcgcgtacggacgaagtgctggcgcaccgggagctgtcatga

SEQ ID NO: 52013 - protein, 165 aa, Myxococcus xanthus DK 1622
MASTVTPWVGVIMGGRSDLEHLQPAVDILKELGIPHEVRVVSAHRTPDWMMEYASTAESRGLSVIIAAAGGAAHLPGMVSSKTLLPVIGVPMPTTLLSGLDALLSIVQMPKGVPVGTQAIGKPGAANAALHAAAILCLKYPELRERLAAWRKARTDEVLAHRELS

SEQ ID NO: 52014 - DNA, 513 bp, Mycobacterium sp. MCS
  CDS (1)..(513): transl_table=11
gtgaacgcacccgccccgcgcgtcggggtcatcatgggcagcgacagcgactggtcggtgatggccgacgccgccgaagcgctcgccgagttcgaggtggccttcgaggtgggcgtggtatccgcgcaccgcacccccggccgcatgctcgattacgcgcgcaccgccgccgaccgggggatcgaggtcatcatcgccggtgccggcggggcggcccacctgccgggcatggtggcttcggcgacaccgttgccggtcatcggcgtgccggtgccgctggcccggctggacgggatggattcgctgctgtcgatcgtgcagatgcccgccggggtgccggtggccacggtgtcgatcggcggcgcgcgcaacgccggactgctggccgtgcggatcctcgcctcggccgaccgcgcgctgcgggcgcgcatggtccggttccaggcgggcctcgagcagatggtgctcgagaaggatgaagcgctgcggaaccggctactcggtgcggactga

SEQ ID NO: 52015 - protein, 170 aa, Mycobacterium sp. MCS
MNAPAPRVGVIMGSDSDWSVMADAAEALAEFEVAFEVGVVSAHRTPGRMLDYARTAADRGIEVIIAGAGGAAHLPGMVASATPLPVIGVPVPLARLDGMDSLLSIVQMPAGVPVATVSIGGARNAGLLAVRILASADRALRARMVRFQAGLEQMVLEKDEALRNRLLGAD

SEQ ID NO: 52016 - DNA, 486 bp, Rubrobacter xylanophilus DSM 9941
  CDS (1)..(486): transl_table=11
gtggcggcgcgtgtgggcgtgatcatgggcagcgcctcggactgggagacgatgaggcatgcctgcgaggtgctggaggagctgggcgtcccccacgagaagcgggtggtctcggcgcaccggacgccggatctcatgttcgagtacgcctccggcgcggcggagaggggcatcggggtgatcatcgccggcgccggcggcgcggcacacctgcccgggatggtggcctccaagacggtgctgccggtgatcggggtgccggtgaagtcctcgagcctcaacgggctggactccctgctctcgatcgtgcagatgccgggcggggtgccggtggccacggtggccatcggccgggcgggggcgacgaacgccggcctgctggcggcccagatcctcgccgttcgcgacccggagctccggcgcaggctcgaggagcgccgcgagcggatgcgccggtcggtcctcgaggggggcgacctctcgtga

SEQ ID NO: 52017 - protein, 161 aa, Rubrobacter xylanophilus DSM 9941
MAARVGVIMGSASDWETMRHACEVLEELGVPHEKRVVSAHRTPDLMFEYASGAAERGIGVIIAGAGGAAHLPGMVASKTVLPVIGVPVKSSSLNGLDSLLSIVQMPGGVPVATVAIGRAGATNAGLLAAQILAVRDPELRRRLEERRERMRRSVLEGGDLS

SEQ ID NO: 52018 - DNA, 762 bp, Rubrobacter xylanophilus DSM 9941
  CDS (1)..(762): transl_table=11
atgcggctcaaggagatactggaggctgttgcggagggtagcctcccgccggagaaggcggaggggctcctgcagagcggcgaggtacgctacctggacggcctcgcggtgctcgacgcgggccgggcggtccgcaagggcgtgccggaggtggtctacgcgggggcgaagaccccagagcaggtggcgcgcatctgcgccgccctggtggagccggggcggagggttatcgtgagcgccgcctcggaggagcacgaggcggcgctccgggaggcactccccggcataccggtgcggcgctcgggacgggcgctcgtggcgggcaccggggagccccagcccacgggggggcgcatcggggcggtctgcgcgggcacctcggacattcccgccctggaggaggccgtggccgtggcccgggagatgggcgccgagacgcggagcttctacgacgtgggggtggccgggctgcaccggctggagcagccgctgcgggagctgcgcgccttcgaccccgactgcctgatcgtggccgccggcatggagggggcgctccccacggtaatctccgcgctggtggacgtcccggtgatagggcttccgacctccgccggttacggcctcggcggcgacgggacggcggcgatcctgggcatgctccagacgtgctcgccggggctcgcggtggtgaacgtggacaacggcgtgggcgcgggggcgaccgcggccctcatcgccaaccgcgccgcccgccgggagtga

SEQ ID NO: 52019 - protein, 253 aa, Rubrobacter xylanophilus DSM 9941
MRLKEILEAVAEGSLPPEKAEGLLQSGEVRYLDGLAVLDAGRAVRKGVPEVVYAGAKTPEQVARICAALVEPGRRVIVSAASEEHEAALREALPGIPVRRSGRALVAGTGEPQPTGGRIGAVCAGTSDIPALEEAVAVAREMGAETRSFYDVGVAGLHRLEQPLRELRAFDPDCLIVAAGMEGALPTVISALVDVPVIGLPTSAGYGLGGDGTAAILGMLQTCSPGLAVVNVDNGVGAGATAALIANRAARRE

SEQ ID NO: 52020 - DNA, 498 bp, Mesorhizobium sp. BNC1
  CDS (1)..(498): transl_table=11
atggatcggcaaaaggctgatgtcgcaatcatcatggggagccagtcggactgggaaaccatgcggcatgcggcagatatccttgaaacgctcgaaatctcccatgacgtgcggattgtctcggcgcatcgcacgccagataggctctatgccttcgccaagggcgccaaggcggagggcattcgcgtgatcatcgccggcgcaggcggcgctgcgcatctgccgggcatgacggcggccctgacatcgcttcctgtcttcggcgtacctgtgcaatccaaggctttgtctggccaggactcgctcctctccatcgtccagatgccggccggcatcccggtagggaccttggccatcggccgctccggcgccgttaacgcggcattgctcgcagcggcggtgctggctctttccgatgaagcgcttgccgcgcggctcgacgcctggcgtgcacgccaggctgccgatgttgccgaacgccctgtggacgaggcatga

SEQ ID NO: 52021 - protein, 165 aa, Mesorhizobium sp. BNC1
MDRQKADVAIIMGSQSDWETMRHAADILETLEISHDVRIVSAHRTPDRLYAFAKGAKAEGIRVIIAGAGGAAHLPGMTAALTSLPVFGVPVQSKALSGQDSLLSIVQMPAGIPVGTLAIGRSGAVNAALLAAAVLALSDEALAARLDAWRARQAADVAERPVDEA

SEQ ID NO: 52022 - DNA, 516 bp, Cytophaga hutchinsonii ATCC 33406
  CDS (1)..(516): transl_table=11
atgagcaagccattagttggaatcattatgggcagccagtcagacttaaaaatcatgtcggctgccgcagatatgctggataaatttggaataccttttgaactgacgattgtatcagctcacagaacacccgaacgtatggttgagtacggacaggcagcggttgataaaggattgaaatgtatcattgccggagcaggcggtgcagcacatttgcctggaatggttgcagcattaacaacacttcctgtaataggagtgcctgttaaatcatccaattcgattgatggctgggattcagtattgtctattttgcagatgccatcaggcgtacctgttgcaacggtagcactggatggggcagcaaacgcaggcattattgctgcgcagatcatcggcgcatttgacgcagccgttcagaaaaaactgcaggcatataaaattgaattaaaaactaaagtagaggagtcggttgaagcaattgataaaaatggatttcggtctttattaaaataa

SEQ ID NO: 52023 - protein, 171 aa, Cytophaga hutchinsonii ATCC 33406
MSKPLVGIIMGSQSDLKIMSAAADMLDKFGIPFELTIVSAHRTPERMVEYGQAAVDKGLKCIIAGAGGAAHLPGMVAALTTLPVIGVPVKSSNSIDGWDSVLSILQMPSGVPVATVALDGAANAGIIAAQIIGAFDAAVQKKLQAYKIELKTKVEESVEAIDKNGFRSLLK

SEQ ID NO: 52024 - DNA, 519 bp, Rhodococcus sp. RHA1
  CDS (1)..(519): transl_table=11
gtgagtgacacggcagcacggcagggcgcacaggtcgggctcatcatgggcagcgactccgactggcccaccatggaggccgccgccgaggcgctcgccgagttcggggtgcgtttcgaggtcggtgtcgtgtccgcgcaccgcacaccgcagcgcatgctcgactacgcgaaggacgcggccggccgcggcatccaggtgatcatcgccggcgccgggggcgccgcacacctgccgggcatggtggcatcggccaccccactgcccgtcatcggtgtgcccgtcccgctgaaatacctcgacgggatggactcgctgctctcgatcgtgcagatgcccgcaggtgtccccgtcgcgaccgtgtccatcggtggcgcccgcaacgcgggcctgctcgccgtccgcatcctcggcgcctccgaccccgccctgcagcagcagatggtcgcgttccaggacgggctcgagaagatggtcctggacaaggacaaggcactccgcgacaagctgctgggctga

SEQ ID NO: 52025 - protein, 172 aa, Rhodococcus sp. RHA1
MSDTAARQGAQVGLIMGSDSDWPTMEAAAEALAEFGVRFEVGVVSAHRTPQRMLDYAKDAAGRGIQVIIAGAGGAAHLPGMVASATPLPVIGVPVPLKYLDGMDSLLSIVQMPAGVPVATVSIGGARNAGLLAVRILGASDPALQQQMVAFQDGLEKMVLDKDKALRDKLLG

SEQ ID NO: 52026 - DNA, 498 bp, Haemophilus somnus 129PT
  CDS (1)..(498): transl_table=11
atgcaagataataaacctcaaatagccattgtcatgggatcaaaaagtgactggtcgactatgcaagaaaccgctatcattttagatagcttggatttaccttaccatgttgaagttgtatcggcacatcgcactcccgataaactctttgagtttgcagaaaatgcagaagcaaaaggttataaagtgattattgctggtgccggtggtgccgcacatttacctggtatgattgcagcaaaaactatcttgcctgtattaggtgtaccagtaaaaagctcaatgttaaatggtgtagatagtttatattctattgtgcaaatgcccaaaggcattcctgtgggaaccttggctatcggatctgccggagctgcaaatgccgctttgttagcctcacaaattctcgctgctttcgatccgcacttagcacaaaaattgcaccaatttcgccaagctcaaactgacagtgttttgaataattccgatccgagagaataa

SEQ ID NO: 52027 - protein, 165 aa, Haemophilus somnus 129PT
MQDNKPQIAIVMGSKSDWSTMQETAIILDSLDLPYHVEVVSAHRTPDKLFEFAENAEAKGYKVIIAGAGGAAHLPGMIAAKTILPVLGVPVKSSMLNGVDSLYSIVQMPKGIPVGTLAIGSAGAANAALLASQILAAFDPHLAQKLHQFRQAQTDSVLNNSDPRE

SEQ ID NO: 52028 - DNA, 510 bp, Trichodesmium erythraeum IMS101
  CDS (1)..(510): transl_table=11
atgaatgccatagtcggaattataatgggcagtgactcagacttgcccacaatgaaagaagcgatcgctatttgcgaagaatttaacataccctcagaagtcgccatcctatcagctcaccgcacaccccaaagaatgtttgaatatgcccaaactgcccataaaagaggattaaaagtcatcattgccggagcaggaggggcagcacatctaccaggaatggtcgcatctttaacgccactccctgtaataggtgtaccagtacaaactcgaaccttacaaggagtagactcattatattctatagtgcaaatgccagggggaataccagtcgccacagtagccatcggcaatgccaaaaatgctggcttattggccattcaaatcttagcatcccaccaaccagaattattagaacaagtgcaaaagtaccgtcacaccttagctgagtcagtaatagataagcaaaataaactagatcaaattggatatcaagaatatttaatataa

SEQ ID NO: 52029 - protein, 169 aa, Trichodesmium erythraeum IMS101
MNAIVGIIMGSDSDLPTMKEAIAICEEFNIPSEVAILSAHRTPQRMFEYAQTAHKRGLKVIIAGAGGAAHLPGMVASLTPLPVIGVPVQTRTLQGVDSLYSIVQMPGGIPVATVAIGNAKNAGLLAIQILASHQPELLEQVQKYRHTLAESVIDKQNKLDQIGYQEYLI

SEQ ID NO: 52030 - DNA, 555 bp, Synechococcus sp. CC9311
  CDS (1)..(555): transl_table=11
gtgtccaagccatcggagcccacgatcgtcgcgactccccttgttgcagtgatcatgggaagtgattctgacttaccgaccctgacgccagcggtttcggctctcgaagaattaggcgtcagcgttgaggtgcgtgtgctttcggcccatcgcactccactggaaatggtggactttgcacgtcaggccaaacagctgggattccgggtgatcgttgctggtgccggtggcgctgctcatctcccaggaatggtcgcctcactcaccacgcttcccgtgatcggtgtccctgtgaagagtcgagctctctctggagtggactccttgcattccattgtgcagatgcctggtggaattcctgtggccacggttgcgattggcggaggtttaaacgctggtttgctggccgctcagattctggcgatcagtgattcgtccctgtctgaacgactggaggcgtaccgccagcaactccacgacatggtggttgccaaggatgcccgcctcaaagatctcggtgctgacgcgtatctggattcaatgtcgagtagctga

SEQ ID NO: 52031 - protein, 184 aa, Synechococcus sp. CC9311
MSKPSEPTIVATPLVAVIMGSDSDLPTLTPAVSALEELGVSVEVRVLSAHRTPLEMVDFARQAKQLGFRVIVAGAGGAAHLPGMVASLTTLPVIGVPVKSRALSGVDSLHSIVQMPGGIPVATVAIGGGLNAGLLAAQILAISDSSLSERLEAYRQQLHDMVVAKDARLKDLGADAYLDSMSSS

SEQ ID NO: 52032 - DNA, 492 bp, Shewanella sp. MR-4
  CDS (1)..(492): transl_table=11
atgcaagcccttgttgctgttgttatgggttctaagagtgattggcccacaatggaagccgccgctgagatcatggataaactgcaagtgccttaccatgttgaagtcgtatctgcccatagaacgccagataaactgatggagtttgcagccagtgcagctgaccgtggttttaaaattattatcggtggtgcgggcggtgctgctcacttacccggtatgattgcctcaaaaactcgcttacccgtattaggtgtaccagtacaaagcaaagcgctgtcgggcatggatagcttactgtctatcgtgcagatgccaaaaggcattgccgtaggcacactggccatcggaaccgctggagcctttaacgccggattactcgcctgccaaattcttgcgaataacgatgccgaacttgccacgcgtttagaagcctttagagaagaacaaacccgcgcagtgctggacaatcccgatccgagggaagcctaa

SEQ ID NO: 52033 - protein, 163 aa, Shewanella sp. MR-4
MQALVAVVMGSKSDWPTMEAAAEIMDKLQVPYHVEVVSAHRTPDKLMEFAASAADRGFKIIIGGAGGAAHLPGMIASKTRLPVLGVPVQSKALSGMDSLLSIVQMPKGIAVGTLAIGTAGAFNAGLLACQILANNDAELATRLEAFREEQTRAVLDNPDPREA

SEQ ID NO: 52034 - DNA, 492 bp, Shewanella sp. MR-7
  CDS (1)..(492): transl_table=11
atgcaagcccttgttgctgttgttatgggttctaagagtgattggcccacaatggaagccgccgctgagatcatggataaactgcaagtgccttaccatgttgaagtcgtatctgcccatagaacgccagataaactgatggagtttgcagccggtgccgctgaccgtggttttaaaattattatcggtggtgcgggcggtgctgctcacttacccggtatgattgcctcaaaaactcgcttacccgtattaggtgttccagtacaaagcaaagcgctgtcaggtatggatagcttactgtctatcgtgcagatgccaaaaggcattgcggtaggcacactggccatcggaaccgctggagcctttaacgccggactactcgcctgccaaattcttgcgaataacgatgccgaacttgccgcacgtttagaagcctttagagaagaacaaacccgcgcagtgctggacaatcccgatccgagggaagcctaa

SEQ ID NO: 52035 - protein, 163 aa, Shewanella sp. MR-7
MQALVAVVMGSKSDWPTMEAAAEIMDKLQVPYHVEVVSAHRTPDKLMEFAAGAADRGFKIIIGGAGGAAHLPGMIASKTRLPVLGVPVQSKALSGMDSLLSIVQMPKGIAVGTLAIGTAGAFNAGLLACQILANNDAELAARLEAFREEQTRAVLDNPDPREA

SEQ ID NO: 52036 - DNA, 495 bp, Alkalilimnicola ehrlichei MLHE-1
  CDS (1)..(495): transl_table=11
atgagcgagtcgcagccgttggtgggcgtcatcatgggcagtcgctcggactgggagaccatgtcggaggcctgccaggttctggacgacttccaggtgccttatgaggcccggattgtgtccgcgcaccgcaccccggagttgatgcgtgactatgcgcaccaggccgaggagcgtggcctgaaggcgattatcgccggtgccggcggcgccgcccacctgccgggcatggtggcggccatgaccaccgtgccggtgctgggcgtgccggtacagagccgcgcgctgaaggggttggactcgctgctctccattgtgcagatgccgggcggcgtgccagtggctactctggccatcggcagcgccggggcacgcaatgccggcctgctggcctgcagtatcctggccaacgaggatgccggcctgcgcgagcggttgcgtgccttccgcgagcgccaggcacaaaaggttctggaggacgagctgccgcaatga

SEQ ID NO: 52037 - protein, 164 aa, Alkalilimnicola ehrlichei MLHE-1
MSESQPLVGVIMGSRSDWETMSEACQVLDDFQVPYEARIVSAHRTPELMRDYAHQAEERGLKAIIAGAGGAAHLPGMVAAMTTVPVLGVPVQSRALKGLDSLLSIVQMPGGVPVATLAIGSAGARNAGLLACSILANEDAGLRERLRAFRERQAQKVLEDELPQ

SEQ ID NO: 52038 - DNA, 495 bp, Hyphomonas neptunium ATCC 15444
  CDS (1)..(495): transl_table=11
atgaacaaggcgcgctctccggtcgtgggcatcatcatgggcagccagtcggactggccggtgatgcgcgaggccgcgaagatactcgaagatatgggcgtcgctttcgaagcgaagatcgtttcggcgcaccgcacgccccagcggctggtcgaatatgcgaccactgccaaggatcgcgggttgaaggtgatcatcgccggcgcgggcggggcagcccacctgccgggcatggccgcttcgatgacgcccctgcccgttctgggcgtgccggttcagtccaaggcgcttaaaggcctcgatagtcttctctctattgtgcagatgcccaagggcgttccggtgggcacgctggccattggcgaagcgggcgcggccaatgcgggcattctggcggcctcgatcattgcgctgcaggacgacgcggtggccgcaaagctggacgcgttccgcacggcgcagaccgagagcgtgaaagaggttcccgaggaatga

SEQ ID NO: 52039 - protein, 164 aa, Hyphomonas neptunium ATCC 15444
MNKARSPVVGIIMGSQSDWPVMREAAKILEDMGVAFEAKIVSAHRTPQRLVEYATTAKDRGLKVIIAGAGGAAHLPGMAASMTPLPVLGVPVQSKALKGLDSLLSIVQMPKGVPVGTLAIGEAGAANAGILAASIIALQDDAVAAKLDAFRTAQTESVKEVPEE

SEQ ID NO: 52040 - DNA, 495 bp, Rhizobium leguminosarum bv. viciae 3841
  CDS (1)..(495): transl_table=11
atgacagacagaccacccgtcgccatcatcatgggcagccagtccgactgggagaccatgaaaaacgccgccgacacgctggaggcgctggaaattccctatgacgcgcgcatcatttcggcgcaccgcacagtcgaccggctggtcaatttcgccaagggcgcacgcgcggagggcttcaaggtcatcatcgccggcgccggcggcgccgcccatctgccgggtatgaccgccgcgatgacgccgctgccggtcttcggcgtgccggtccagtcgaaagccctgtccggccaggacagcctcctttccatcgtgcagatgccggccggcattcctgtcggtacgctcgccataggcaaggccggcgcagtcaacgccgcccttctcgccgccgccgtgcttgccctttccgacgaagaaatcgccgaccggctcgacgaatggcgcgagcgccagagtgctgccgtcgccgaatacccgatggacgatctatga

SEQ ID NO: 52041 - protein, 164 aa, Rhizobium leguminosarum bv. viciae 3841
MTDRPPVAIIMGSQSDWETMKNAADTLEALEIPYDARIISAHRTVDRLVNFAKGARAEGFKVIIAGAGGAAHLPGMTAAMTPLPVFGVPVQSKALSGQDSLLSIVQMPAGIPVGTLAIGKAGAVNAALLAAAVLALSDEEIADRLDEWRERQSAAVAEYPMDDL

SEQ ID NO: 52042 - DNA, 483 bp, Pediococcus pentosaceus ATCC 25745
  CDS (1)..(483): transl_table=11
atgagaaaagtcgcagtagttatgggttcaatttctgattggtcaaccatgaaactggccacagatatacttgatgaatttgaagtcgattatgatcgtcatattatttcagcacatcggatgccgaaagtattacagaagtttggtgaacaagcacaagaaaatggatatgccgtgctgattgcaggagctggcggagcagctcatttaccgggaatgttagcagccaacacaatttcacctgtaattggggttcctattgaaagtcatgcattacacggaatggattcattactatcaattgtccaaatgcctagtggagtccccgttgcgactacggctattgggagtgcaggtgctaaaaatgccgctttattagcagctgaaattttagcgttaaccgataaaaaagttgctgaaaaattaattgaattccgtcaaaaacagactcaggaggctattgagagtgaaaagcaattctga

SEQ ID NO: 52043 - protein, 160 aa, Pediococcus pentosaceus ATCC 25745
MRKVAVVMGSISDWSTMKLATDILDEFEVDYDRHIISAHRMPKVLQKFGEQAQENGYAVLIAGAGGAAHLPGMLAANTISPVIGVPIESHALHGMDSLLSIVQMPSGVPVATTAIGSAGAKNAALLAAEILALTDKKVAEKLIEFRQKQTQEAIESEKQF

SEQ ID NO: 52044 - DNA, 495 bp, Oenococcus oeni PSU-1
  CDS (1)..(495): transl_table=11
atgtcaaacacgaagattgctgttgtaatgggatcagtttctgactgggaaacgatgaaaaatgcggtcaatattttgaaggattttggagttgagattgaaaaacatgttatttccgcacacagaatgcctgaccaactgagtgaattttccaaaggagctcgtcaacgaggtctgcagatgatgatcgctggtgctggtggtgcagctcatttacctggcatgctggctgccaacacaacccttccagtaattggcgttccgattcaatcgcatgctttaaatggtttggattctcttttgtcgattgtacagatgccggccgggattccggttgccacgacggcgatcggtaattccggcgctaaaaatgcagcttacttggctttatcgattcttagccggcaagaccaagaaattgaaaataaattaatcatgtttcgtcgggagcagacaaaaaaatcacttgaaagcgatgcacagctcaatgattaa

SEQ ID NO: 52045 - protein, 164 aa, Oenococcus oeni PSU-1
MSNTKIAVVMGSVSDWETMKNAVNILKDFGVEIEKHVISAHRMPDQLSEFSKGARQRGLQMMIAGAGGAAHLPGMLAANTTLPVIGVPIQSHALNGLDSLLSIVQMPAGIPVATTAIGNSGAKNAAYLALSILSRQDQEIENKLIMFRREQTKKSLESDAQLND

SEQ ID NO: 52046 - DNA, 486 bp, Leuconostoc mesenteroides subsp. mesenteroides ATCC 8293
  CDS (1)..(486): transl_table=11
atgcctcaagttgcagttgtcatgggatcaactagtgattggtccagcatgaaaaaaactacagaaattttggatatattaggtgttacttacgaaaaacacgtcatttcagcgcatcgcatgcctcaagaattacaagcatttggcacacaagcaagagacaataagcttcaagtaattattgctggtgccggcggcgcggctcatttgcctggtatgctggcagctaatacaacgctaccagtcatcggcgtgccgatgcaatcacgggcactaaatggactggattctttactctctattgttcaaatgccagcaggggtccccgttgctacagttgcaataggtgatgcaggtgcaaaaaatgcggcaattctagctgcacaaattattgctttaaatgataatgacgtattgcaggccttgaatgaatatcgagaacgccaaacaaagacttctattgaaagcgaggcagaattgatatga

SEQ ID NO: 52047 - protein, 161 aa, Leuconostoc mesenteroides subsp. mesenteroides ATCC 8293
MPQVAVVMGSTSDWSSMKKTTEILDILGVTYEKHVISAHRMPQELQAFGTQARDNKLQVIIAGAGGAAHLPGMLAANTTLPVIGVPMQSRALNGLDSLLSIVQMPAGVPVATVAIGDAGAKNAAILAAQIIALNDNDVLQALNEYRERQTKTSIESEAELI

SEQ ID NO: 52048 - DNA, 471 bp, Solibacter usitatus Ellin6076
  CDS (1)..(471): transl_table=11
atggtcggcataatcatgggcagcaaatccgattgggagaccatgcagcacgctgcgcagacgctgcaacaattcgacgtcgcacacgaatgccgtgttgtctccgcgcaccgcacgccgctgcgtatggccgagtacgccgccaccgcagaagagcgcggcgtccaggtgatcatcgccggagccggcggggccgcgcaccttcccggcatggtggccgcgcagactctcgttcccgtcctcggcgtcccggtggaatcccacgctttgaaaggcatggattcgctgctctccatcgtccagatgcccagcggcatcccggtcggtaccctcgccatcggcaaggccggcgccatcaacgccgcgctcctcgccgtcgccatcctcgccaacactcgccccgaactgcgcgaaaaactccgccgttatcgccaggagcagaccgcgcgcgtggagcgggagacgctatga

SEQ ID NO: 52049 - protein, 156 aa, Solibacter usitatus Ellin6076
MVGIIMGSKSDWETMQHAAQTLQQFDVAHECRVVSAHRTPLRMAEYAATAEERGVQVIIAGAGGAAHLPGMVAAQTLVPVLGVPVESHALKGMDSLLSIVQMPSGIPVGTLAIGKAGAINAALLAVAILANTRPELREKLRRYRQEQTARVERETL

SEQ ID NO: 52050 - DNA, 513 bp, Magnetococcus sp. MC-1
  CDS (1)..(513): transl_table=11
atgaataacaccccacagatcgccattttaatgggctctgactccgactgggatgtgatgtccgaagccggtaaggttctcaaagggtttgatattccctttgagatgctggttacttcagcccaccgtaccccagaacgaacccatgcctacgccaaatccgccgccgcacgaggcattctcgcctttattgtcggggcaggtgccgcggcccatttggctggggtgatcgcctcagaaagtaatctaccggtgattggcgtgcccttgtccgcgactgaactcaaagggatggatgccctgctcgcgaccgtgcaaatgccagggggcgttcctgtggcaaccatggccatcggtaaagctggggcgaaaaatgcgggtatcttcgccgcgcaaatactggcacttagcgatccccagttggcggcaaagttggtccgctatcgtgaagaaatggccgctgcggtgactaagaaaaatgaagccctacaggccaaactggccgatttttaa

SEQ ID NO: 52051 - protein, 170 aa, Magnetococcus sp. MC-1
MNNTPQIAILMGSDSDWDVMSEAGKVLKGFDIPFEMLVTSAHRTPERTHAYAKSAAARGILAFIVGAGAAAHLAGVIASESNLPVIGVPLSATELKGMDALLATVQMPGGVPVATMAIGKAGAKNAGIFAAQILALSDPQLAAKLVRYREEMAAAVTKKNEALQAKLADF

SEQ ID NO: 52052 - DNA, 522 bp, Mycobacterium avium 104
  CDS (1)..(522): transl_table=11
atgagcgtgaccgaagctcctcgcgtcgcggtgatcatgggcagcgacagcgactggtcggtgatggccgacgccgcggccgcgctggccgagttcgacgtgcccaccgaggtgcgggtggtctcggcgcaccgcacgccgggggtgatgttcgactacgcgcgcgacgcggccgggcggggcatcgaggtgatcatcgccggcgccggcggcgccgcccacctgcccggcatggtcgcctcggcgacgccgctgccggtgatcggggtcccggtgccgctgggccggctggacgggctggactcgctgctgtcgatcgtgcagatgcccgcgggggtgccggtggccaccgtctccatcggcggcgcccgcaacgccggcctgctggcggtgcgcatcctcggcgcctccgacccggggctgcgggcccgcatcgtcgagttccagacccagctggccgacagcgtgcgggccaaggatgaggcgctgcaaaggctgcacggtaaagttaccggtcagtag

SEQ ID NO: 52053 - protein, 173 aa, Mycobacterium avium 104
MSVTEAPRVAVIMGSDSDWSVMADAAAALAEFDVPTEVRVVSAHRTPGVMFDYARDAAGRGIEVIIAGAGGAAHLPGMVASATPLPVIGVPVPLGRLDGLDSLLSIVQMPAGVPVATVSIGGARNAGLLAVRILGASDPGLRARIVEFQTQLADSVRAKDEALQRLHGKVTGQ

SEQ ID NO: 52054 - DNA, 480 bp, Mycobacterium smegmatis str. MC2 155
  CDS (1)..(480): transl_table=11
atgggcagcgacagcgactggacggtgatggtcgacgccgcagaggcgctcgccgagttcgaggtgccgttcgaggtcggcgtggtctcggcgcaccgcacccccggtcgcatgctggactacgcgaagaacgccgccgaccgcggcatcgaggtgatcatcgccggcgcgggcggtgccgcgcacctgcccgggatggtcgcgtccgcgacgccgctgcccgtcatcggcgtccccgtcccgctggcccgattggacggattggattcgctgctgtcgatcgtgcagatgccggccggggtcccggtggcgacggtgtcgatcggcggggcgcgcaacgcgggcctgctcgcggtgcggatcctcggtgccacggacccgcagttgcggggcaggatggcgaagttccaggccgacctggaggccatggttctggaaaaggacgcagccctgcggtcgcgtctcctcggcgacgggtag

SEQ ID NO: 52055 - protein, 159 aa, Mycobacterium smegmatis str. MC2 155
MGSDSDWTVMVDAAEALAEFEVPFEVGVVSAHRTPGRMLDYAKNAADRGIEVIIAGAGGAAHLPGMVASATPLPVIGVPVPLARLDGLDSLLSIVQMPAGVPVATVSIGGARNAGLLAVRILGATDPQLRGRMAKFQADLEAMVLEKDAALRSRLLGDG

SEQ ID NO: 52056 - DNA, 540 bp, Nocardioides sp. JS614
  CDS (1)..(540): transl_table=11
gtgagtaaccccttggaaggacgggccgtggagccacgagtcggcatcgtgatggggtcggactccgactggccggtgatgaaggccgccgccgaggcgctggccgagttcgacatcggctacgaggcggacgtggtctcggcgcaccggatgcccgaggagatgctggcctacggcagggaggccgcggaccgcggcctgtccgtgatcgtggccggcgccggtggggccgcccacctgccgggcatgctcgctgcggtgacgccgctgcccgtgatcggcgtaccggtgccgctgaagaacctggacggtctggactccctcctctcgatcgtccagatgcccgcgggcgtcccggtcgccaccgtcgcggtcggcggcgcccgcaacgcgggcctgctcgccgtgcggatcctggccgccaccgaccccgagctccaggacaagatgcgcgccttccaggcggagctgcgaaccaccgcgcagcacaagggtgaggcggtccgcaacgaccggcccggccggcgcctcggcttctag

SEQ ID NO: 52057 - protein, 179 aa, Nocardioides sp. JS614
MSNPLEGRAVEPRVGIVMGSDSDWPVMKAAAEALAEFDIGYEADVVSAHRMPEEMLAYGREAADRGLSVIVAGAGGAAHLPGMLAAVTPLPVIGVPVPLKNLDGLDSLLSIVQMPAGVPVATVAVGGARNAGLLAVRILAATDPELQDKMRAFQAELRTTAQHKGEAVRNDRPGRRLGF

SEQ ID NO: 52058 - DNA, 513 bp, Azoarcus sp. BH72
  CDS (1)..(513): transl_table=11
atgagcgaacagcagacgtccgccgcgcccgtcgtcggaatcatcatgggctcgaactccgactggcccaccatgcaggcagccgccaagatcctcgccgacttcggcgtgccttacgaggcgcgggtcgtgtcggcgcaccgcaccccggacctgatgttcgagtacgcagccggcgcgcgtggccgcggcctcaaggccatcatcgcgggcgctggcggcgcggcacatctgccgggcatggtggcggccaagaccacgctgccggtgctgggcgttccggtccagtcgcgcgcgctgtccgggcaggattcgctgctctccatcgtgcagatgccgaagggcgtgccggttgccacctttgccatcggtgaagcgggggcggcaaacgccggcctcttcgcggtggcactgctcgcaaccggaaatcccgaactggcagagcggcttgaccgcttccgccaggtgcagaccgacaccgtgctggcgatggagttgccgccgcccgtctga

SEQ ID NO: 52059 - protein, 170 aa, Azoarcus sp. BH72
MSEQQTSAAPVVGIIMGSNSDWPTMQAAAKILADFGVPYEARVVSAHRTPDLMFEYAAGARGRGLKAIIAGAGGAAHLPGMVAAKTTLPVLGVPVQSRALSGQDSLLSIVQMPKGVPVATFAIGEAGAANAGLFAVALLATGNPELAERLDRFRQVQTDTVLAMELPPPV

SEQ ID NO: 52060 - DNA, 486 bp, Neisseria meningitidis FAM18
  CDS (1)..(486): transl_table=11
atgacacaaatcggcatcatcatgggcagcaacagcgattggcccgttatgcggcaggcagcgcagtttcttgaagagttcggcgtagaatatgaggcgcgcgtcgtttccgcacaccgcactccggatttaatgttccaatacgccgaaaccgcacgggcgcgcggcatcaaagccatcatcgcgggtgcgggcggcgcggcgcatttacccggcatggttgccgccaagaccaccgtccccgttttgggcgtacccgtccccagcaaatacctgcgcggcgaagattcgcttttatcgattgtacaaatgcccaaaggcgtacccgtcgccacattcgccatcggcgaggcaggcgcggcaaatgccgcattgttcgccgtttccatgctggccaacgaaaaccccgaactggcgcaaaaactggcagacttccgagccaaacaggaacaggctgttttgagtatggaattggaacagatttaa

SEQ ID NO: 52061 - protein, 161 aa, Neisseria meningitidis FAM18
MTQIGIIMGSNSDWPVMRQAAQFLEEFGVEYEARVVSAHRTPDLMFQYAETARARGIKAIIAGAGGAAHLPGMVAAKTTVPVLGVPVPSKYLRGEDSLLSIVQMPKGVPVATFAIGEAGAANAALFAVSMLANENPELAQKLADFRAKQEQAVLSMELEQI

SEQ ID NO: 52062 - DNA, 498 bp, Acidovorax sp. JS42
  CDS (1)..(498): transl_table=11
atgaaccccatccagatcggcgtggtcatgggctccagcagcgactgggagaccatgcagcacgcagttgccatcctccagcaattcggcatcgcgcacgaggcgcaggtggtctccgcccaccgcatgcccgacgacatgttccgctacgccgaggccgcggccggccggggcctgaaggccatcatcgcgggcgccggcggcgccgcgcacctgcccggcatgatcgccgccaagaccaccgtgccggtgctgggcgtgccggtcgccagccgccacctgcagggagtggactcgctgcactccatcgtgcagatgcccaagggcgtgcccgtggccacgttcgccatcggcgcggccggcgcggccaacgcggcgctgttcgccgtggcgctgctggcgggcgagaacccggcgctgcgcgagcagctggacgccttccgcgccgagcagaccgccgccgcgcgcgccatgacgctgccgccggtgtccgcatga

SEQ ID NO: 52063 - protein, 165 aa, Acidovorax sp. JS42
MNPIQIGVVMGSSSDWETMQHAVAILQQFGIAHEAQVVSAHRMPDDMFRYAEAAAGRGLKAIIAGAGGAAHLPGMIAAKTTVPVLGVPVASRHLQGVDSLHSIVQMPKGVPVATFAIGAAGAANAALFAVALLAGENPALREQLDAFRAEQTAAARAMTLPPVSA

SEQ ID NO: 52064 - DNA, 522 bp, Magnetospirillum magnetotacticum MS-1
  CDS (1)..(522): transl_table=11
atgggcaaagtagtgcctccccaggtcggcatcatcatgggcagccagtccgactgggaaaccatgcgtcacgcagcccaggtgctgagcgatctgggcatcgccttcgagaccagggttgtctcggccctccgcacgcccaagcgcctctacgactacgccacctcggccaagggccgcgtcctcaaggtcatcatcgccggggctggcggcgccgcccatctgcctggcatggccgccgccatgaccacgcttccggtcttcggcgtgcccgtggaaagcaaggcgctgaagggcatggactcgctgctgtccatcgtccagatgcccggcggcattcccgtgggaaccctggccatcggtaaagcgggcgccaccaatgccgccctgctggccggagcggtcatcgccctgatggagcccggtgtggacaaggctctggaagcctggcgcgcccgccagaccgaatccgtggccgaggcgcccgtagaccccgattctcccgacctgatccgcccgtga

SEQ ID NO: 52065 - protein, 173 aa, Magnetospirillum magnetotacticum MS-1
MGKVVPPQVGIIMGSQSDWETMRHAAQVLSDLGIAFETRVVSALRTPKRLYDYATSAKGRVLKVIIAGAGGAAHLPGMAAAMTTLPVFGVPVESKALKGMDSLLSIVQMPGGIPVGTLAIGKAGATNAALLAGAVIALMEPGVDKALEAWRARQTESVAEAPVDPDSPDLIRP

SEQ ID NO: 52066 - DNA, 519 bp, Nostoc punctiforme PCC 73102
  CDS (1)..(519): transl_table=11
atgactcccctagttggtattatcatgggcagcgattctgatttgcccaccatgaaagacgcgatcgcagtttgtgacgaatttggtgttgagagcgaagtggcgatcgtttctgctcaccgtaccccagaacggatggtgcaatatgctcaacttgcacaccaacgcggtattaaggtgattattgccggtgccggtggtgctgcccatctgcctggaatggtagcgtctttaacaccacttcctgttattggtgttcctgtagtcaccaggaacttacaaggtgtagattctttgtattctattttacaaatgcctgcgggtattcctgtagcaacagtggcgatcggtaatgccaaaaatgccggacttttagcagtacaaatactggcaactcaacaaccagaattgctagaaaaagtccaacaatatcgccaaaccctatgtgaatcagtaattgcaaagcaagaaaagctagaacaactaggctatgagcaatatttaaagcagatgttttag

SEQ ID NO: 52067 - protein, 172 aa, Nostoc punctiforme PCC 73102
MTPLVGIIMGSDSDLPTMKDAIAVCDEFGVESEVAIVSAHRTPERMVQYAQLAHQRGIKVIIAGAGGAAHLPGMVASLTPLPVIGVPVVTRNLQGVDSLYSILQMPAGIPVATVAIGNAKNAGLLAVQILATQQPELLEKVQQYRQTLCESVIAKQEKLEQLGYEQYLKQMF

SEQ ID NO: 52068 - DNA, 501 bp, Bifidobacterium longum DJO10A
  CDS (1)..(501): transl_table=11
atggcaaatgaatccaagcccgaagtcgcagtggtcatgggatcggccagcgactgggagaccatgaagcgcgcctgcgatattctcgaccagttcggcgtcgcctaccacaagcaggtcatctccgcgcaccgcacgcccgagctcatggccgagttcgcgcacaacgcccgcgccaatggcctgaaggtcattatcgccggtgccggcggtgccgcccacctgccgggcatgatcgccgcgcagaccacactgcccgtgatcggcgtgcccgtgcgctcccacgccctgtccggctgggattcgctgctgtccatcgtgcagatgcccggcggcattccggtggccaccaccgccgtcggcaactccggtgccaccaacgccggcctgctcgccgtgcagatgctctccgccttcgagcccgaactggccgacaagcttgaggattaccgtaacgaactgaaggaaaaggtggccgaatccaatgcccagcttgtctga

SEQ ID NO: 52069 - protein, 166 aa, Bifidobacterium longum DJO10A
MANESKPEVAVVMGSASDWETMKRACDILDQFGVAYHKQVISAHRTPELMAEFAHNARANGLKVIIAGAGGAAHLPGMIAAQTTLPVIGVPVRSHALSGWDSLLSIVQMPGGIPVATTAVGNSGATNAGLLAVQMLSAFEPELADKLEDYRNELKEKVAESNAQLV

SEQ ID NO: 52070 - DNA, 498 bp, Haemophilus somnus 2336
  CDS (1)..(498): transl_table=11
atgcaagataataaacctcaaatagccattgtcatgggatcaaaaagtgactggtcgactatgcaagaaaccgctatcattttagatagcttggatttaccttaccatgttgaagttgtatcggcacatcgcactcccgataaactctttgagtttgcagaaaatgcagaagcaaaaggttataaagtgattattgctggtgctggtggtgccgcacatttacccggtatgattgcagcaaaaactatcgtgcctgtattaggtgtgccagtaaaaagctcaacgttaaatggtgtagatagtttatattctattgtgcaaatgcccaaaggcattcctgtgggaaccttggctatcggatctgccggagctgcaaatgccgctttgttagcctcacaaattctcgctgctttcgatccgcacttagcacaaaaattgcaccaatttcgccaagctcaaactgacagtgttttgaataattccgatccgagagaataa

SEQ ID NO: 52071 - protein, 165 aa, Haemophilus somnus 2336
MQDNKPQIAIVMGSKSDWSTMQETAIILDSLDLPYHVEVVSAHRTPDKLFEFAENAEAKGYKVIIAGAGGAAHLPGMIAAKTIVPVLGVPVKSSTLNGVDSLYSIVQMPKGIPVGTLAIGSAGAANAALLASQILAAFDPHLAQKLHQFRQAQTDSVLNNSDPRE

SEQ ID NO: 52072 - DNA, 474 bp, Fusobacterium nucleatum subsp. vincentii ATCC 49256
  CDS (1)..(474): transl_table=11
atgaaagtaggaattatatttggaagtaagtcagatgttgatgtgatgaaaggagcagcagactgtttaaaaaagtttgggatagaatattctacacatgttttatcagcacatagagttcctgaacttttagaagaaacattagaaaagtttgagaaagaagattatggagttatcattgctggagcaggacttgcagcacatttaccaggagttattgcttctaaaacaattttacctgtgataggaatacctattaaggcagcagttgaaggtttggatgcactgttttcaatagtacaaatgcctaaatcaattcctgttgcaacagtagggataaataattcatataatgcaggaatgttagcagtggaaatattagcagttggaaacaaagaattaagagataaacttttagagtttagaaaagaaatgaaagaagattttaaaaaaaatatacatgtggaattatag

SEQ ID NO: 52073 - protein, 157 aa, Fusobacterium nucleatum subsp. vincentii ATCC 49256
MKVGIIFGSKSDVDVMKGAADCLKKFGIEYSTHVLSAHRVPELLEETLEKFEKEDYGVIIAGAGLAAHLPGVIASKTILPVIGIPIKAAVEGLDALFSIVQMPKSIPVATVGINNSYNAGMLAVEILAVGNKELRDKLLEFRKEMKEDFKKNIHVEL

SEQ ID NO: 52074 - DNA, 495 bp, Haemophilus influenzae R2846
  CDS (1)..(495): transl_table=11
atgtcaaacactgcacaaattgccgttgtaatgggttccaaaagcgattgggctaccatgcaagaggcaactcagattttagatgaattaaaagtaccttatcatgtggaagtcgtctctgctcatcgtacgcctgataaactttttgaatttgctgaaaatgcacaaaaaaatggatacaaagtaattattgctggggcaggcggtgcggcacatttaccaggtatgatcgcagcgaaaacccttgtgccagtgctgggcgtgccagtaaaaagttctatgttaagtggcgtagatagcctttattcaattgtgcaaatgccaaaagggattccagtcggaacattagcaattggccctgcgggtgccgcaaatgctggattgttagccgcacaaattctagcaagttgggatgcagaattattttcacgcttgcaatctttccgtgaaagccaaactcgtactgtactggacaatcccgatccacgcacataa

SEQ ID NO: 52075 - protein, 164 aa, Haemophilus influenzae R2846
MSNTAQIAVVMGSKSDWATMQEATQILDELKVPYHVEVVSAHRTPDKLFEFAENAQKNGYKVIIAGAGGAAHLPGMIAAKTLVPVLGVPVKSSMLSGVDSLYSIVQMPKGIPVGTLAIGPAGAANAGLLAAQILASWDAELFSRLQSFRESQTRTVLDNPDPRT

SEQ ID NO: 52076 - DNA, 489 bp, Listeria monocytogenes str. 4b H7858
  CDS (1)..(489): transl_table=11
atgcctgctgtaattggtgtcattatggggagtacctcagattgggatacaatgaaaaaagcatgtgatgtattagatgaattagaaatagcttatgagaaaaaagtggtttctgctcatcgtacaccagatttaatgtttcaatatgcagaacaagcgcgggaacgtggtttgaaaattattattgccggtgctgggggcgcggcgcatttgccaggtatgattgcggcaaagacgactttgcctgttattggtgtgccaattaaatcaaaagcgttgaatggaatggattcgttactttctattgtacagatgcctggaggtgttccggtagcgacagttgctattggagaaagtggtgctgtaaatgctggccttctagcggcgcaaattttatccataacggacgatgcaattactaacagattacaaaaaagacgtgctacactagaagaaacagttctagaaagtagtgattatcttggataa

SEQ ID NO: 52077 - protein, 162 aa, Listeria monocytogenes str. 4b H7858
MPAVIGVIMGSTSDWDTMKKACDVLDELEIAYEKKVVSAHRTPDLMFQYAEQARERGLKIIIAGAGGAAHLPGMIAAKTTLPVIGVPIKSKALNGMDSLLSIVQMPGGVPVATVAIGESGAVNAGLLAAQILSITDDAITNRLQKRRATLEETVLESSDYLG

SEQ ID NO: 52078 - DNA, 492 bp, Wolbachia endosymbiont of Drosophila simulans
  CDS (1)..(492): transl_table=11
atgacaaaaataaaaaaagatgttgctgttattatgggaagtgagtcagattacaccactatggtccatactgttgatatgttaaaagcattagaagtttcacatgatatattcataatatctgcacatagaacaccagaaaggctcttcaattttgctaaatctgcacaagaagaaggttttaaggttattatagctggtgcaggaggtgcagctcatttacctggtatggttgcgtcactaacttgtttaccagttatcggcgttcctgtgcatagtaaacaattaaatgggctggacagcctactctctatagttcaaatgccaaagggtgttccagttgcaaccatgtctataggagaaaatggagcatataatgctgccattactgccgtatctatattgtcaatttccaacagtgaaattgcaggtaggttaaaaaagtggagagagaaacagaccaaagaagtaaaagaaaaaccagtttcataa

SEQ ID NO: 52079 - protein, 163 aa, Wolbachia endosymbiont of Drosophila simulans
MTKIKKDVAVIMGSESDYTTMVHTVDMLKALEVSHDIFIISAHRTPERLFNFAKSAQEEGFKVIIAGAGGAAHLPGMVASLTCLPVIGVPVHSKQLNGLDSLLSIVQMPKGVPVATMSIGENGAYNAAITAVSILSISNSEIAGRLKKWREKQTKEVKEKPVS

SEQ ID NO: 52080 - DNA, 462 bp, Bacillus anthracis str. A2012
  CDS (1)..(462): transl_table=11
atgggaagcacgtcagactgggaaacaatgaaatatgcttgtgacattttagatgaattaaatataccgtatgagaaaaaggttgtatccgctcatcggactccggattatatgtttgaatatgcagagacggctcgtgaacgtggattgaaagttattattgctggagctggtggagcagcgcatttaccaggaatggttgcagcgaagacgaatcttcctgtaatcggagttccagttcaatcaaaagcgttaaacggcttagattcattattatccatcgtccaaatgccaggaggggttccagttgcaactgttgcaattggtaaggctggttcaacaaatgctggtttacttgctgcacaaatacttggatcattccatgatgacatacatgatgcattagaattgagaagagaagcaattgaaaaagatgtgcgcgaaggtagtgagctagtatga

SEQ ID NO: 52081 - protein, 153 aa, Bacillus anthracis str. A2012
MGSTSDWETMKYACDILDELNIPYEKKVVSAHRTPDYMFEYAETARERGLKVIIAGAGGAAHLPGMVAAKTNLPVIGVPVQSKALNGLDSLLSIVQMPGGVPVATVAIGKAGSTNAGLLAAQILGSFHDDIHDALELRREAIEKDVREGSELV

SEQ ID NO: 52082 - DNA, 567 bp, Crocosphaera watsonii WH 8501
  CDS (1)..(567): transl_table=11
atgatagcatcaaatggaagtctattctactatttaaccctgatgagttcttcttctcccctaatcggtattattatgggcagtgattcagatttgcccacaatggacaaagcgatcgccgtttgccaaaggtttgaagtaccctgggaagtggctattgtttcagcacatcgaaccccccaaaggatggttaactacgctcaaactgcccatgaaagaggattaaaggtaattattgcgggggcagggggggcggcacatcttccaggaatggtggcttctttgaccccattacctgtcatcggggttccggttgccactcgtcacctacaaggggtagattctctctattccattgtacagatgcccagaggtattcctgtggctacggtagctattggtaacgaccaaaatgcaggactattagccattcaaatgttagctgctcacgatcctattttattgaaaaaagtacaaaactatcgacaagaattagaacaaatggtgttagataaacaagaaaatctagataaattaggttatgaagcttatttaaaacagatgtaa

SEQ ID NO: 52083 - protein, 188 aa, Crocosphaera watsonii WH 8501
MIASNGSLFYYLTLMSSSSPLIGIIMGSDSDLPTMDKAIAVCQRFEVPWEVAIVSAHRTPQRMVNYAQTAHERGLKVIIAGAGGAAHLPGMVASLTPLPVIGVPVATRHLQGVDSLYSIVQMPRGIPVATVAIGNDQNAGLLAIQMLAAHDPILLKKVQNYRQELEQMVLDKQENLDKLGYEAYLKQM

SEQ ID NO: 52084 - DNA, 492 bp, Exiguobacterium sibiricum 255-15
  CDS (1)..(492): transl_table=11
atgagtaaggtagaaatcggagtcatcatgggcagccaatcggattgggtgaccatgcagaaaacgtgtgatgtactggatcaattggacattggttatgaaaagaaagttgtatcggcacaccggacacctgacttaatgtttcgatatgccgagtcagcccgggaacgagggctcaaggtcatcattgccggggcaggcggagccgctcatcttccgggaatggttgctgcgaagacgacattaccggtaatcggtgtcccaattcaaagcaaagcacttcaaggcatcgattccttactctccattgtccaaatgcccggtggtgttccagtcgcgacagttgcaattggtgacgccggagccaaaaatgcgggtttacttgctgctcagattcttggaacggttgacgaacggattgcccgagctcttgatcatatgcgtgtcgaactggaaggagacgtcatcgcttccgaggtgtatctgacatga

SEQ ID NO: 52085 - protein, 163 aa, Exiguobacterium sibiricum 255-15
MSKVEIGVIMGSQSDWVTMQKTCDVLDQLDIGYEKKVVSAHRTPDLMFRYAESARERGLKVIIAGAGGAAHLPGMVAAKTTLPVIGVPIQSKALQGIDSLLSIVQMPGGVPVATVAIGDAGAKNAGLLAAQILGTVDERIARALDHMRVELEGDVIASEVYLT

SEQ ID NO: 52086 - DNA, 525 bp, Prosthecochloris aestuarii DSM 271
  CDS (1)..(525): transl_table=11
atgacaaaacagaccaatgacgcaacgcctgttgtaggcatcatcatgggttcggattccgactttgaaataatgaaagaggccgccctggtccttgacgaattcaatatcgcctaccaggtatcggtcatatcggcacaccgcactcccaaagaactggagcagtatgctggaagtgcaaaagagcggggaatgaaaatcatcattgccggcgcaggcggtgcagctcaccttcccggcgtcactgcagctcttactgtcattccggttatcggtgtaccgatcttcagtaaaaaactcaatgggcaggattcgctctattctatcgtgcagatgccggcaggcattcctgtggcgactgtcgggatcgataacgcccgcaacgcagcgctgcttgccgtacagatccttgcgctgagcgataccgggatcatgaaggatattgaatcgttccgggaaaaacttgctgacgcatcgaaactgaaaaacaaaaaaatacaggaaaagcttcatgctgacagctga

SEQ ID NO: 52087 - protein, 174 aa, Prosthecochloris aestuarii DSM 271
MTKQTNDATPVVGIIMGSDSDFEIMKEAALVLDEFNIAYQVSVISAHRTPKELEQYAGSAKERGMKIIIAGAGGAAHLPGVTAALTVIPVIGVPIFSKKLNGQDSLYSIVQMPAGIPVATVGIDNARNAALLAVQILALSDTGIMKDIESFREKLADASKLKNKKIQEKLHADS

SEQ ID NO: 52088 - DNA, 504 bp, Xylella fastidiosa Ann-1
  CDS (1)..(504): transl_table=11
atgatctccaatcaatcccccccgctggtcggtattgtcatgggttcctcttcggattggggggcgatgcagcatgccgcacaaaagctcgatgctctcagcgtcgcgtatgaagtgaaggtcgtttcggcgcatcgtactccggataaattgtttgcttatgctgagcaggctgaaggacgtggtttgcgtgccatcattgccggggccggtggcgcagcgcaccttccaggtatgttggctgctaagacgatagttccagtgttgggggtgccaatgcagtccagggctctgaatggtttggattcgctgttatcgatcgtacagatgccggcgggtattccagtagccacgttcgcgattggggaagctggtgcagtcaatgccgccctgtttgccgccgcgctgttggtacccgaaaatccagtaatgcgtcggatgctgactgagttccgccaacgtcagacggatcaggtgaatgctgcggacgatccacgccaatga

SEQ ID NO: 52089 - protein, 167 aa, Xylella fastidiosa Ann-1
MISNQSPPLVGIVMGSSSDWGAMQHAAQKLDALSVAYEVKVVSAHRTPDKLFAYAEQAEGRGLRAIIAGAGGAAHLPGMLAAKTIVPVLGVPMQSRALNGLDSLLSIVQMPAGIPVATFAIGEAGAVNAALFAAALLVPENPVMRRMLTEFRQRQTDQVNAADDPRQ

SEQ ID NO: 52090 - DNA, 504 bp, Xylella fastidiosa Ann-1
  CDS (1)..(504): transl_table=11
atgatctccaatcaatcccccccgctggtcggtattgtcatgggttcctcttcggattggggagcgatgcagcacgccgcacaaaagctcgatgctctcagcgtcgcgtatgaagtgaaggtcgtttcggcgcatcgtactccggataaattgtttgcttatgctgagcaggctgaaggacgtggtttgcgtgccatcattgccggggccggtggtgcagcgcaccttccaggtatgttggcggctaagacgatggttccagtgttgggggtgccaatgcagtccagggctctgaatggtttggattcgctgttatcgatcgtacagatgccggcgggtattccagtagccacgttcgcgattggggaagctggtgcagtcaatgccgccctgtttgccgcagcgctgttggtacccgaaaatccagcaatgcgtcggatgctgactgagttccgccaacgtcagacggatcaggtgaatgctgcggacgatccacgccaatga

SEQ ID NO: 52091 - protein, 167 aa, Xylella fastidiosa Ann-1
MISNQSPPLVGIVMGSSSDWGAMQHAAQKLDALSVAYEVKVVSAHRTPDKLFAYAEQAEGRGLRAIIAGAGGAAHLPGMLAAKTMVPVLGVPMQSRALNGLDSLLSIVQMPAGIPVATFAIGEAGAVNAALFAAALLVPENPAMRRMLTEFRQRQTDQVNAADDPRQ

SEQ ID NO: 52092 - DNA, 489 bp, Streptococcus suis 89/1591
  CDS (1)..(489): transl_table=11
atgaatattccaatttccatcatcatgggctctagttccgactggaaaaccatgaaaaaagcagccgatgtgctggacaaatttggcgtagcctatgaaaagaaagtggtctctgcccaccgcaccccagacctcatgttccgtcatgccgaagaggcgcgtggtcgtggtattaaggttattatcgcgggagcgggtggtgcggctcatttgccaggtatggtagcagccaagaccaccctgcctgttatcggtgttcctgtccaatcccgtgccctcagcggtgtggattcgctctattctatcgtgcaaatgccaggcggcgtacctgtggcaacgatggcaattggagaagcgggagcaaccaatgcggctttgactgccctgcgtatcctgtccatcgaagatagcggtatagcagatcaactggccagctttgctattgaacaaggaaaaatcgcggaggctatgagcgatgaactcaactaa

SEQ ID NO: 52093 - protein, 162 aa, Streptococcus suis 89/1591
MNIPISIIMGSSSDWKTMKKAADVLDKFGVAYEKKVVSAHRTPDLMFRHAEEARGRGIKVIIAGAGGAAHLPGMVAAKTTLPVIGVPVQSRALSGVDSLYSIVQMPGGVPVATMAIGEAGATNAALTALRILSIEDSGIADQLASFAIEQGKIAEAMSDELN

SEQ ID NO: 52094 - DNA, 492 bp, Croceibacter atlanticus HTCC2559
  CDS (1)..(492): transl_table=11
atgccaaaagttggaattatcatgggaagtactagcgatatgccagttatgcaagacgctatagatattttaagggaatttaatatagatattgaagttgatattgtttctgctcacagaacaccagagaagttatttgattacagtaagaatgctcacaatcggggcataaatgtaattatagctggtgctggtggtgcagcacatttaccaggaatggttgcttcactttcacctttacctgttattggtgttcctgtaaaatcaagcaattcaattgatggttgggattctgttctttctattttacaaatgcctggaggcgtacctgtagcaacagtagctctcaacggagctaaaaatgcaggaatactcgccgctcaaattataggtagtagtaattctgaaatacttgaaacaattattgactataaagaaagtttgaaacaaaaggtaattgatggcgcaaaatccataagtactaataagtaa

SEQ ID NO: 52095 - protein, 163 aa, Croceibacter atlanticus HTCC2559
MPKVGIIMGSTSDMPVMQDAIDILREFNIDIEVDIVSAHRTPEKLFDYSKNAHNRGINVIIAGAGGAAHLPGMVASLSPLPVIGVPVKSSNSIDGWDSVLSILQMPGGVPVATVALNGAKNAGILAAQIIGSSNSEILETIIDYKESLKQKVIDGAKSISTNK

SEQ ID NO: 52096 - DNA, 489 bp, Sulfitobacter sp. EE-36
  CDS (1)..(489): transl_table=11
atggaaaatccacctgtcggcatcatcatgggctcgcagtccgattgggctacgatgcgtgaggcagcgacgctgctggatgaacttggtatcgcgtacgaagccaagatcgtatcggcacaccgcacccccgaccggttgtggagctatgggaaaaccgccgccgaccgtggcctgcaggtgatcatcgccggtgcgggcggtgctgcgcatttgcccggcatgatggcgtccaagacccgcgtgccggtgatcggcgtgccagtgcagaccaaggcgctatcgggtgtggattcgctctattctatcgtgcagatgccccggggctttccggtcgcgacgatggcgatcggtgcggcaggtgctgcgaatgccgcgttgatggcggcaggcattctagccctccaggatcctgcccttgccacccgccttgacgcttggcgcgatgcgcttagcgcgtctatcccagaggagccttcggatgactga

SEQ ID NO: 52097 - protein, 162 aa, Sulfitobacter sp. EE-36
MENPPVGIIMGSQSDWATMREAATLLDELGIAYEAKIVSAHRTPDRLWSYGKTAADRGLQVIIAGAGGAAHLPGMMASKTRVPVIGVPVQTKALSGVDSLYSIVQMPRGFPVATMAIGAAGAANAALMAAGILALQDPALATRLDAWRDALSASIPEEPSDD

SEQ ID NO: 52098 - DNA, 489 bp, Roseovarius nubinhibens ISM
  CDS (1)..(489): transl_table=11
atggccgaaatcaacgtgggcatcatcatgggcagtcaatcggactggccgaccatgaaaaaggcagccgaagttctcgacgaactgggcgtggcctatgaaaccaagatcgtctcggcgcatcgcacgcccgaccggctttgggactatggccgcgaggccgcaggccgtgggctcaaggtgatcatcgcgggcgctggcggtgccgcgcatctgccgggcatgatggcctcgaaaacccgcgtgcctgtcgtcggcgtgccggtgcagacccgcgccctgtcgggggtcgacagcctctattccatcgtgcagatgcccaaaggctatcccgtggccaccatggccattggcgaggcgggcgccgccaacgcgggcctcatggccgcgggcattctcgccacgtccgacgcggcgctggccgaacggctcgacgcctggcgcgcggcgctctcggcctcgatccccgaggagcccaaggatgactga

SEQ ID NO: 52099 - protein, 162 aa, Roseovarius nubinhibens ISM
MAEINVGIIMGSQSDWPTMKKAAEVLDELGVAYETKIVSAHRTPDRLWDYGREAAGRGLKVIIAGAGGAAHLPGMMASKTRVPVVGVPVQTRALSGVDSLYSIVQMPKGYPVATMAIGEAGAANAGLMAAGILATSDAALAERLDAWRAALSASIPEEPKDD

SEQ ID NO: 52100 - DNA, 489 bp, Oceanicola batsensis HTCC2597
  CDS (1)..(489): transl_table=11
atgagcgacacgaaggtaggcatcatcatgggcagccagtccgactggcccacgatgaaggaggcggcgaccatcctcgacgaactgggcgtggcctacgaggccaggatcgtctcggcgcaccgcacgcccgaccggctctggtcctacggcaaggcggcggccggccgcggccttcaggtgatcatcgcgggcgccggcggcgccgcccacctgcccggcatgatggcctcgaagacacgggtcccggtcatcggcgtgcccgtccagacccgggcgctgtcgggcgtggactcgctctattccatcgtccagatgcccaagggcttcccggtcgccaccatggccatcggcgcggcaggagccgccaatgcgggcctcatggccgccggcatcctcgcgctgaacgaccccgacctcgccgtccgcctcgacgcctggcgcgaggccctctccgcctccattcccgacgagcccgcagatgactga

SEQ ID NO: 52101 - protein, 162 aa, Oceanicola batsensis HTCC2597
MSDTKVGIIMGSQSDWPTMKEAATILDELGVAYEARIVSAHRTPDRLWSYGKAAAGRGLQVIIAGAGGAAHLPGMMASKTRVPVIGVPVQTRALSGVDSLYSIVQMPKGFPVATMAIGAAGAANAGLMAAGILALNDPDLAVRLDAWREALSASIPDEPADD

SEQ ID NO: 52102 - DNA, 558 bp, Prochlorococcus marinus str. MIT 9211
  CDS (1)..(558): transl_table=11
atgatccctgcttctagaaacttgccttcagcagatgctgaacaaacaccagttgtagctgttgtaatgggcagtgactctgatttacctactctaaagccagccatcgaagctttagaagatttccaaatcaaagtagaagtacgcgtgctctcggctcatagaacacctagagaaatgatttgcttcgcccaagaagccgaagcaaaatgtcttaaagtcattattgctggagcaggtggagcagcccacctaccagggatgattgcatcactaactactcttccagtaattggagtacctgtaaaaacaaaatctctttctggagttgattccctacactcaattgtgcaaatgcctggaggaattcccgtggcaactgtggccataggaggggggttaaatgcaggcttactagcagctcaaattttagctctatctgatcagaatcttcaaattcagctcgtaagttatagaaaaaaaatgcatgaccaagtcattaataaagatcaaaaacttaatgaaatgggggccaatgattatttatcaaaaatgtaa

SEQ ID NO: 52103 - protein, 185 aa, Prochlorococcus marinus str. MIT 9211
MIPASRNLPSADAEQTPVVAVVMGSDSDLPTLKPAIEALEDFQIKVEVRVLSAHRTPREMICFAQEAEAKCLKVIIAGAGGAAHLPGMIASLTTLPVIGVPVKTKSLSGVDSLHSIVQMPGGIPVATVAIGGGLNAGLLAAQILALSDQNLQIQLVSYRKKMHDQVINKDQKLNEMGANDYLSKM

SEQ ID NO: 52104 - DNA, 513 bp, Synechococcus sp. RS9917
  CDS (1)..(513): transl_table=11
gtggcggtgatcatgggcagtgattccgatctgcccaccctgcaacccgctgtggaggtgctggagcgtttgggtgtggcggtggaggtgcgcgtgttgtcggcccatcgcacaccgttggagatggtcgactttgctcagcaggccagggatcgcggtctgcgggtgatcgtggccggtgccggtggcgcggcccatctgcccggcatggtcgcttccctcactaccctgccggtgatcggcgtgccagtgcagagccgggcgctctccggtgtggattcactgcattcgatcgtgcagatgcccggcggaatacccgtggccacggtggcgatcggcggtggcctcaatgccggcctgctggcggcccagattctcgccaccaccgatggggagctgacgcaacgcctggccgactatcgccacgagttgcacgccacggtggtggccaaggatgcccgcctccagtcgatcggagccgcccggtatctcgaggcgatgcctggacgctga

SEQ ID NO: 52105 - protein, 170 aa, Synechococcus sp. RS9917
MAVIMGSDSDLPTLQPAVEVLERLGVAVEVRVLSAHRTPLEMVDFAQQARDRGLRVIVAGAGGAAHLPGMVASLTTLPVIGVPVQSRALSGVDSLHSIVQMPGGIPVATVAIGGGLNAGLLAAQILATTDGELTQRLADYRHELHATVVAKDARLQSIGAARYLEAMPGR

SEQ ID NO: 52106 - DNA, 678 bp, Synechococcus sp. WH 5701
  CDS (1)..(678): transl_table=11
ttgctgatccagcgcacggtcatcggctccggggcgaacgggcggggagaatgccatcctcgccgcacggcccctgccgcccctgccttgaccctcgaacccgtttccgctgccgccgccgttgagggagtcaacccgccggcgcccagctcaggggcggcgcccctggtggccgtggtgatgggcagcgattccgatctgccgaccatgcagccggcggtgaaggtgctccaggacttcggtgtggacgtggaggtgcgggtgctctcggcccatcgcaccccgcgggagatggtgaacttcgcggaagctgccgccggccgcggcctcaaggtgatcgtggcgggggcaggcggcgccgcccatctgccgggaatggtggcggcactcaccaccctgccggtgatcggtgtgccggtgttgagccgggccctgtcgggggtggattcgctccattcgatcgtgcagatgccggccggaatccccgtggccacggtggccatcggcaatggcaccaatgccggtctgctggcggtccagatcctggccacggccgatcctgccctggccgagcagctcaggcagcatcgcctggggctccatgatcaggtctgcgccaaggacgcccgcctgagtgagcttggcagcacggcctatctggccgccatggagggctga

SEQ ID NO: 52107 - protein, 225 aa, Synechococcus sp. WH 5701
MLIQRTVIGSGANGRGECHPRRTAPAAPALTLEPVSAAAAVEGVNPPAPSSGAAPLVAVVMGSDSDLPTMQPAVKVLQDFGVDVEVRVLSAHRTPREMVNFAEAAAGRGLKVIVAGAGGAAHLPGMVAALTTLPVIGVPVLSRALSGVDSLHSIVQMPAGIPVATVAIGNGTNAGLLAVQILATADPALAEQLRQHRLGLHDQVCAKDARLSELGSTAYLAAMEG

SEQ ID NO: 52108 - DNA, 558 bp, Synechococcus sp. WH 7805
  CDS (1)..(558): transl_table=11
atgacgccttccgatccagttcagtcaccgatgtcaccgcaggtggccgtgatcatgggcagtgattccgatctccccacccttcatccggcggttgaggttctggagacgctgaacgttgctgtggaggtgcgcgtgttgtcggcccatcgcacacccctggagatggtggactttgcccgtgaggcccgtaaccgcggtctgcaggtgatcgtggccggtgccggcggcgccgctcacttgccaggaatggtggcgtctctcaccaccttgccggtgatcggcgtgccggtgcgcagcagggccctgtccggtgtggactccctccattcgattgtgcagatgccgggtggcattcccgtggccacggttgccatcgggggcgggctgaatgctgggttgctggcggcgcagatcctggcgctccaagaccacgccttgtcggagcgtctcggggcttatcgacgtcagcttcacgacgccgtgaccgcgaaggatcaacgcctggtcgagctcgggtctgcggcctatctcgacgccatggccaccgatcgctga

SEQ ID NO: 52109 - protein, 185 aa, Synechococcus sp. WH 7805
MTPSDPVQSPMSPQVAVIMGSDSDLPTLHPAVEVLETLNVAVEVRVLSAHRTPLEMVDFAREARNRGLQVIVAGAGGAAHLPGMVASLTTLPVIGVPVRSRALSGVDSLHSIVQMPGGIPVATVAIGGGLNAGLLAAQILALQDHALSERLGAYRRQLHDAVTAKDQRLVELGSAAYLDAMATDR

SEQ ID NO: 52110 - DNA, 483 bp, Pseudoalteromonas tunicata D2
  CDS (1)..(483): transl_table=11
atgactgttggcataatcatgggatcaaaatctgactggcctaccatggaacatgcggcgcaaatgttagaacgttttggcatagcatacgaaactaaagtcgtttctgcacatcgcactcctcatttattagctgagtacgcatcaagcgcagcggaacgtggtatcaaagtgattatcgcaggcgctggcggcgcggcacatttaccaggcatggctgcagcatttactagcttacctgtgcttggcgtaccagttaaatcaaaagcacttaatggcatcgattcgctattatcaatttgccaaatgccaaaaggtgtagcggttggtactcttgcaattggtgagccgggtgcggcaaacgctggtttattagcggctcaaattctaggttgtcaacaacctgaaattttcgcaaaaatcgaagcatttcgtaaagaacaaactgattcagtattagcaaacccagatccagcgatttaa

SEQ ID NO: 52111 - protein, 160 aa, Pseudoalteromonas tunicata D2
MTVGIIMGSKSDWPTMEHAAQMLERFGIAYETKVVSAHRTPHLLAEYASSAAERGIKVIIAGAGGAAHLPGMAAAFTSLPVLGVPVKSKALNGIDSLLSICQMPKGVAVGTLAIGEPGAANAGLLAAQILGCQQPEIFAKIEAFRKEQTDSVLANPDPAI

SEQ ID NO: 52112 - DNA, 489 bp, Photobacterium sp. SKA34
  CDS (1)..(489): transl_table=11
atgaaagttggaattatcatgggttcaaaatctgattggccaaccatgcaacatgcggctgagatgcttgatcgtttcaatgttccttatgagacaaaggtcgtttcggctcaccgcacaccacatttattagccgaatacgctgaaagtgcacaagagcgtggcattaaagtgatcatcgcaggtgctggcggtgctgctcacttaccggggatgacagcggcttttactagcgtgcctgtattaggcgtaccagttcaatcacgtgcactaaaagggatggattcattgctttctattgttcaaatgcctaaaggtatagctgttggtaccttagcaattggtgatgcaggggctgccaatgcaggtctcttagccgcacaaattatcggcactcaagatgagcaagtactggccgctattgatactttccgaaaagagcaaacagaaacggtattaagcaacccaaatccagcagaggatgcataa

SEQ ID NO: 52113 - protein, 162 aa, Photobacterium sp. SKA34
MKVGIIMGSKSDWPTMQHAAEMLDRFNVPYETKVVSAHRTPHLLAEYAESAQERGIKVIIAGAGGAAHLPGMTAAFTSVPVLGVPVQSRALKGMDSLLSIVQMPKGIAVGTLAIGDAGAANAGLLAAQIIGTQDEQVLAAIDTFRKEQTETVLSNPNPAEDA

SEQ ID NO: 52114 - DNA, 483 bp, Oceanospirillum sp. MED92
  CDS (1)..(483): transl_table=11
atgagtaaagtatccgtcagtatcattatgggctcacgctctgactggccaaccatgcaagaagcaaccaaaccattggaagagctgggtgtagagtttgaagcaaaagttgtttctgctcaccgtacacctgagcgccttttcaagcatgcttctgaagcacacactcgtggagtcgaagtaattattgccggtgctggcggcgctgctcacctggcagggatggcagcatctatgactcaccttccggtaattgcggtacctgttgccagcaaaaacattaagggcctggatagcctgctatcgatggttcagatgccacgtggcgttgcagtcgcttgtcaggcgattggcggtgcaggcgcatacaatgcaggtctgatggcggcacagatgctagcccttaaagatgaagcactgagccagcgtctacaggagtggcgtaaagcacaaactgacagcgttcctgttgaggtagaataa

SEQ ID NO: 52115 - protein, 160 aa, Oceanospirillum sp. MED92
MSKVSVSIIMGSRSDWPTMQEATKPLEELGVEFEAKVVSAHRTPERLFKHASEAHTRGVEVIIAGAGGAAHLAGMAASMTHLPVIAVPVASKNIKGLDSLLSMVQMPRGVAVACQAIGGAGAYNAGLMAAQMLALKDEALSQRLQEWRKAQTDSVPVEVE

SEQ ID NO: 52116 - DNA, 495 bp, Flavobacteria bacterium BBFL7
  CDS (1)..(495): transl_table=11
atgaataaaaaagtagcaataataatgggctctactagtgacttgccagtgatgcaggacgctatagacgttttaaaagaattaggaataaagaccgatgtagatgttgtaagtgcacatcgtacaccagagaaaatgtatgattttggtaaaaacgcccataagaatgggattgctgtaatcatagctggtgctggtggcgctgctcatttaccaggtatggtagcaagtttatctcctttacctgtagtaggtgtccctgtaaaatcatcaaactctattgatggatgggatagtgttctttcaattttacaaatgcctggtggcgtacctgtcgcaacggttgcactaaatggtgcaaaaaacgcaggaattcttgcggcacaaatcataggtgctacccaagaagacgtacgtgaacgcattatcacttacaaagaaagccttaaagaaaaggtgactaaggccgcacaagagatgcgcaataatggctag

SEQ ID NO: 52117 - protein, 164 aa, Flavobacteria bacterium BBFL7
MNKKVAIIMGSTSDLPVMQDAIDVLKELGIKTDVDVVSAHRTPEKMYDFGKNAHKNGIAVIIAGAGGAAHLPGMVASLSPLPVVGVPVKSSNSIDGWDSVLSILQMPGGVPVATVALNGAKNAGILAAQIIGATQEDVRERIITYKESLKEKVTKAAQEMRNNG

SEQ ID NO: 52118 - DNA, 507 bp, delta proteobacterium MLMS-1
  CDS (1)..(507): transl_table=11
atggaccccgtggtcggagtaatcatgggctcccgcagtgactgggagaccatggaacatgctgtcaagatcctggaagaattcgccattgcccacgaggtgcgggtggtgtcggcccaccggaccccggagctgctcttcgactatgccggcagtgcccggcggcgggggcttaaagtaatcatcgccggggccgggggcgcggcccatctgcccggcatggtggcctcccgcagcagcttgccggtgctgggggtgccggtgcaatccagggccttaaacggcctggattcactgctctccattgtgcagatgccggccggggtgccggtggcaaccctggccatcggcccggccggggccaaaaatgccgccctgctggcggtttccatcctggccggcgatgatcccgccctggccactgccctggatgagcatcgccggcggcagaccgagagcgtgctggccgatcccgacccccggcaaccggcggggggcgtgtcatga

SEQ ID NO: 52119 - protein, 168 aa, delta proteobacterium MLMS-1
MDPVVGVIMGSRSDWETMEHAVKILEEFAIAHEVRVVSAHRTPELLFDYAGSARRRGLKVIIAGAGGAAHLPGMVASRSSLPVLGVPVQSRALNGLDSLLSIVQMPAGVPVATLAIGPAGAKNAALLAVSILAGDDPALATALDEHRRRQTESVLADPDPRQPAGGVS

SEQ ID NO: 52120 - DNA, 537 bp, Oceanobacter sp. RED65
  CDS (1)..(537): transl_table=11
atgatagaatccgccctccataatcaacaggccttatccgaaatgaaaaaccctcaagtcggtatcattatgggttccacttccgattgggataccatgaaaaaagctgaagaagttctgcagcagcttggtgttaacttcgaagtaaaagtggtttccgcgcatcgcaccccggatttgcttttcgagtattcggaaaccgccgcagaacgaggcattcaagttattattgctggcgcaggtggagctgcgcatttgccaggcatggttgcaagcaaaactcacttgcccgtctttggcgtgcccgtcaaaagtaaggccctcaacggcatagactcactgctttcgattgctcaaatgccagcgggcatctcggtaggtacacttgctattgggcctgccggtgccgccaacgccggcttactggcatcgcaggttatcgcccttcatgacgaggatgttcgcgcaaagcttatcgagtttcgtcgcaaacagactgaaaaagtattatcgatccccgatcctagagagatgtaa

SEQ ID NO: 52121 - protein, 178 aa, Oceanobacter sp. RED65
MIESALHNQQALSEMKNPQVGIIMGSTSDWDTMKKAEEVLQQLGVNFEVKVVSAHRTPDLLFEYSETAAERGIQVIIAGAGGAAHLPGMVASKTHLPVFGVPVKSKALNGIDSLLSIAQMPAGISVGTLAIGPAGAANAGLLASQVIALHDEDVRAKLIEFRRKQTEKVLSIPDPREM

SEQ ID NO: 52122 - DNA, 513 bp, Synechococcus sp. RS9916
  CDS (1)..(513): transl_table=11
gtggcggtgattatgggcagcgattccgacctgcccaccatgcacccggcggtgcaggccctgcaggatcttggggtggcggtggaggtgcgggtgctctccgcccatcgcactccgcttgagatggtggccttcgcccagcaggcccgcgatcagggctttggtgtgatcgtggcgggcgctggtggtgcggcccatctccccggcatggtcgcctccctcaccaccctgcccgtgatcggggtgccggtgaagagtcgggcactgtccggggtggattcactgcattccatcgtgcagatgcctggtggcatccctgtggccacggtggcgattgggggtggactcaatgccggtctgctggctgcccagatcctggcggtggcggatgcgtctctggcggcacggttggaggcctatcgccagaccctgcacgacacggtcgtggccaaggacgcgcggctggtggatcttggcgccactgcctatctggagcgcatgccggggcgctga

SEQ ID NO: 52123 - protein, 170 aa, Synechococcus sp. RS9916
MAVIMGSDSDLPTMHPAVQALQDLGVAVEVRVLSAHRTPLEMVAFAQQARDQGFGVIVAGAGGAAHLPGMVASLTTLPVIGVPVKSRALSGVDSLHSIVQMPGGIPVATVAIGGGLNAGLLAAQILAVADASLAARLEAYRQTLHDTVVAKDARLVDLGATAYLERMPGR

SEQ ID NO: 52124 - DNA, 483 bp, Alteromonadales bacterium TW-7
  CDS (1)..(483): transl_table=11
atgactgttggcattattatgggttctaagtcagattggccaaccatggaacacgctgcactgatgctagagcagtttggtattaagtacgaaaccaaagttgtatctgcacaccgcactcctcaattacttgctgattatgcaagctctgctgcagaacgtggcattaaagttattattgccggcgcaggtggcgcagcccatttaccgggtatggcagcggcttttacatctgttcctgttttaggcgttcctgtgaaatcaaaggcattaaatggtgttgattctctattgtcaatttgccaaatgccaaaaggggtagcagtaggtaccttagcaattggtgaaccaggcgctgcaaacgcaggcttattagccgcacaaattttagggtgccataaccccgacatttttgaaaaaatcgaagcgtttcgtaaaaatcaaacagacactatattagccaacccaaaccctgcagagtaa

SEQ ID NO: 52125 - protein, 160 aa, Alteromonadales bacterium TW-7
MTVGIIMGSKSDWPTMEHAALMLEQFGIKYETKVVSAHRTPQLLADYASSAAERGIKVIIAGAGGAAHLPGMAAAFTSVPVLGVPVKSKALNGVDSLLSICQMPKGVAVGTLAIGEPGAANAGLLAAQILGCHNPDIFEKIEAFRKNQTDTILANPNPAE

SEQ ID NO: 52126 - DNA, 504 bp, marine gamma proteobacterium HTCC2143
  CDS (1)..(504): transl_table=11
atgaccaaacctttcgtagccatcctgatgggctcagattccgacttgccacaaatggaagcggcatttggcgtattacaatcatttgatattgattttgaagtaaagattacgtcggcccatcgcaccccaaaggtgacccacgattttgttaccagcgctgatcagcgcggctgtggggcattcatttgtgccgcaggtatggcggctcacttggcaggtgctgttgccgcggcaacgttaaagccggtcatcggtgtacctattaacgcttcgctagatggcttggatgctctattatcgacggtacaaatgcccggtggtattcctgtcgcgactgttgcaattggtaaagcgggtgcaaaaaatgccgcttatctcgcggctcaaatactggcgacagctgacccgtcgctgcatcaaaaactgatagacgagcgtgagtcgaatgcccaagctatcattgctaaagatttggctttgcaggaaaaacttaaaggttaa

SEQ ID NO: 52127 - protein, 167 aa, marine gamma proteobacterium HTCC2143
MTKPFVAILMGSDSDLPQMEAAFGVLQSFDIDFEVKITSAHRTPKVTHDFVTSADQRGCGAFICAAGMAAHLAGAVAAATLKPVIGVPINASLDGLDALLSTVQMPGGIPVATVAIGKAGAKNAAYLAAQILATADPSLHQKLIDERESNAQAIIAKDLALQEKLKG

SEQ ID NO: 52128 - DNA, 483 bp, marine gamma proteobacterium HTCC2080
  CDS (1)..(483): transl_table=11
atggatatttcggtcggtatcattatgggatcgcgctcagattggagtgtgatggaagcggcggccaatatgctcgacgctcttggtattcgctatgagtgcaaagtcgtctcagcccacagaactccagatcgactttatgcctatgcgcgcgaagcgagaggtcggggcttaaaagcgattattgccggcgcggggggggcagctcacttacccggtatgtgtgccgcaatgactccggtgccagttcttggcgtgccggtcgctgccacggtactcaatggcgctgatgccatgctttccatcgctcagatgcctaaaggtgtgccagtggctacttttgccatagggcagcccggcgccgccaatgcagcgctgtttgctgcagccatgttggccaacaacgattcaacgattgctgcagccctcgatcgttttcgagaagagcaaacagcctctgttccagagagcgttaccgattga

SEQ ID NO: 52129 - protein, 160 aa, marine gamma proteobacterium HTCC2080
MDISVGIIMGSRSDWSVMEAAANMLDALGIRYECKVVSAHRTPDRLYAYAREARGRGLKAIIAGAGGAAHLPGMCAAMTPVPVLGVPVAATVLNGADAMLSIAQMPKGVPVATFAIGQPGAANAALFAAAMLANNDSTIAAALDRFREEQTASVPESVTD

SEQ ID NO: 52130 - DNA, 1776 bp, Candidatus Desulfococcus oleovorans Hxd3
  CDS (1)..(1776): transl_table=11
atgaaggtcctggtgatcggcagcggcggccgggaacacgctctggtctggaaaatcgcccagagccccaaagtagacaagattttctgcgctccgggcaacgcgggcatcgctccattggcggcgtctgtgcccatcaaggcggatgacgtggacgggctgctggagtttgccgccgaagagcagatcgacctgaccgttgtcggccccgaggcgcctctgtctcttggcattgtggaccggttcgaggcggcgggcctgaaggttttcggggccggccgggacgcggcccggctggagaccagcaagggttacgccaaggagatcctgctcaagtacaacattcccacggccagggggcgttgttttgatgattatgacgaggccctggcctacctgaaggaactgggcggcgccgtggtggtaaaggccgatggtctggccgcgggcaagggcgtttttgtgtgcaacagcgaaaagcaggccgcggatgccctcaggcagattatgaaagaccggcttttcggggacgccggaaaccgggtggtgatagaggaacgtctcgagggagaggaggcctcttttattgcgctcaccgacggggaaaccgtgttgccgatgccctgttcccaggatcacaaggccgtgggtgacggcgacaccggtcccaacaccggcggcatgggtgcctattccccggcgccggtggtggatgaataccttcacagaaagatcatggagaccgtcatggtggccacggtcaaggccatggccgctgagggggttcgctacaggggggtgctctatgccgggctgatgatctccggtggcaacgtgcgcgtgctggaattcaacgcccgtttcggcgatcccgaggcccagcccctgctgatgcgcgtgaaaaacgacattgttcccgtattggaggcggtgtgtgaaaaccggcttcatgagcataccctggaaattgacgaccgggccgccgtctgcgtggtcatggcatccggcgggtatcccggggcctataaaaaaggcatggccatttccgggctgtccaacgtcaaccgcatgaaggacgtggtggcctttcacgccggcacccgggccaaaggcaaaaaggtggtcaccgacggggggcgggtcctgggtgtcaccgcgctgggcaaaaccgtggaggacgccattcggcgggcctacgaggcagtggcgaaaatctcctgggaaggggcctatcaccggaatgacatcggccacaaggcccttaagcggctggtggaaaagcccagggtctccattctcatgggcagcgactcggacctgaaaatcatggaggaggcggccggtgtgcttcaaaaattcggggtggcctacgagatgaccgtggcgtcggcccaccggaccccggcccgggtggaaaagattgtttccacggccagagagcgcggcattcaggtgtttatcgccggtgccggcatggcggcccatctggccggcgtgattgcctctcacaccaccctgccggtgatcggcgtccccattgatgcttccccattaaacggcctggacgctctgctgtcaacggtccagatgccgccgggcgtgccggtggcaaccgtggccgtgggcaaggccggcgcaaaaaacgccggtttcctggccattcagattatggcggtgtcagacgagactttggcggcggcactgtcggcccacaagaaggacatggcggccgatgttgaaaaaaaggcccaacagcttggccgattacaggcataa

SEQ ID NO: 52131 - protein, 591 aa, Candidatus Desulfococcus oleovorans Hxd3
MKVLVIGSGGREHALVWKIAQSPKVDKIFCAPGNAGIAPLAASVPIKADDVDGLLEFAAEEQIDLTVVGPEAPLSLGIVDRFEAAGLKVFGAGRDAARLETSKGYAKEILLKYNIPTARGRCFDDYDEALAYLKELGGAVVVKADGLAAGKGVFVCNSEKQAADALRQIMKDRLFGDAGNRVVIEERLEGEEASFIALTDGETVLPMPCSQDHKAVGDGDTGPNTGGMGAYSPAPVVDEYLHRKIMETVMVATVKAMAAEGVRYRGVLYAGLMISGGNVRVLEFNARFGDPEAQPLLMRVKNDIVPVLEAVCENRLHEHTLEIDDRAAVCVVMASGGYPGAYKKGMAISGLSNVNRMKDVVAFHAGTRAKGKKVVTDGGRVLGVTALGKTVEDAIRRAYEAVAKISWEGAYHRNDIGHKALKRLVEKPRVSILMGSDSDLKIMEEAAGVLQKFGVAYEMTVASAHRTPARVEKIVSTARERGIQVFIAGAGMAAHLAGVIASHTTLPVIGVPIDASPLNGLDALLSTVQMPPGVPVATVAVGKAGAKNAGFLAIQIMAVSDETLAAALSAHKKDMAADVEKKAQQLGRLQA

SEQ ID NO: 52132 - DNA, 492 bp, Marinobacter sp. ELB17
  CDS (1)..(492): transl_table=11
atgcaaccgctggtaggactcatcatgggttccaaatccgactggcccaccatggaaaacgccgccaacatgctcgacaaacttggcgtggcctatgaaaccaaagtcgtttccgcccaccgcacccccgacctgctgttcgaatacgccaaaactgcagccgatcgcggcctgaaagttatcatagccggcgccggcggtgcagcccacctaccaggcatggtagcctcgcagacctccttacctgtgctaggcgttcccgttcagtccaaagccctgaacggactggattcactgctgtctatcgtgcagatgcccggcggcattgccgtgggcactctggccatcggcaacgcaggcgccactaatgccggtttgctggctgcacaaattattggcacctttgacccgaccgtgcgccaagctgttgaccaattccgcagcacgcaaacacaaacgattctggacaacccggacccggcggttccgtaa

SEQ ID NO: 52133 - protein, 163 aa, Marinobacter sp. ELB17
MQPLVGLIMGSKSDWPTMENAANMLDKLGVAYETKVVSAHRTPDLLFEYAKTAADRGLKVIIAGAGGAAHLPGMVASQTSLPVLGVPVQSKALNGLDSLLSIVQMPGGIAVGTLAIGNAGATNAGLLAAQIIGTFDPTVRQAVDQFRSTQTQTILDNPDPAVP

SEQ ID NO: 52134 - DNA, 489 bp, Bacillus sp. SG-1
  CDS (1)..(489): transl_table=11
atgcagccaaaagtgggagttgtcatgggaagtacttctgattggaaaacaatgaagcatgcatgtgatattcttgatgagtatggcatcatttacgagaaaaaagtggtctctgcccacagaacccctgacttgatgttcgactatgcagagagcgccaggggaagaggcttgaaagtaatcatcgccggtgccggcggagcagcacatctaccgggaatggttgccgccaagacgactcttccagtcatcggagttcctgtacagtctaaggcattgaatggcctggattcacttttatccatcgtccaaatgccgggcggtgtaccggttgcgacagtggccatcggtgaagcgggtgccaagaatgccgggctgcttgctgcgcagattctttcaacagaggatgatggaattgccaataaactggacagcagcagggaagccctgagacaaaaagtgatggaaagcagtgatgagcttgaataa

SEQ ID NO: 52135 - protein, 162 aa, Bacillus sp. SG-1
MQPKVGVVMGSTSDWKTMKHACDILDEYGIIYEKKVVSAHRTPDLMFDYAESARGRGLKVIIAGAGGAAHLPGMVAAKTTLPVIGVPVQSKALNGLDSLLSIVQMPGGVPVATVAIGEAGAKNAGLLAAQILSTEDDGIANKLDSSREALRQKVMESSDELE

SEQ ID NO: 52136 - DNA, 495 bp, Erythrobacter sp. SD-21
  CDS (1)..(495): transl_table=11
atggcgcaagggggaggagcaaagattgcaatcgtcatggggagccagtcggactggtcgaccatgaaatgcgccgccgacgtgctggaggagctgggcgtcgccaccgatgtgcgcatcgtttcggctcaccggacgcccgaaaggatgtacgatttcgcaaaggccgccgagaacgagggcttccatgtcatcatcgcgggcgcaggcggggcggcgcatctgccgggcatgatcgccgcgctgacgcatgtccccgtgctgggcgtcccggtccagtcgcgcgcgctttcggggcaggacagcctgctctccatcgtccagatgcccgccggcgtccccgtcggcacgctggccatcggcgaggccggcgcgaccaacgcgggcctgctggccgctgccatccttgccaataacgacgcggaactcgggcagcgcctgaaggactggcgcagcgcccggagcgccgccgtcaccgaaaggcctgccgactga

SEQ ID NO: 52137 - protein, 164 aa, Erythrobacter sp. SD-21
MAQGGGAKIAIVMGSQSDWSTMKCAADVLEELGVATDVRIVSAHRTPERMYDFAKAAENEGFHVIIAGAGGAAHLPGMIAALTHVPVLGVPVQSRALSGQDSLLSIVQMPAGVPVGTLAIGEAGATNAGLLAAAILANNDAELGQRLKDWRSARSAAVTERPAD

SEQ ID NO: 52138 - DNA, 492 bp, unidentified eubacterium SCB49
  CDS (1)..(492): transl_table=11
atgacagtagcaataataatgggaagcactagcgacatgccggtgatgcaagatgccatagacatcttaaaaggttttgacattgagattgaagtagacatcgtctctgctcacagaacgccagaaaagctatttgattttagtaaaaatgcgcatacacgtggcattaaagtaattattgcaggagcaggtggcgcagcacatttacctggaatggtagcttctctttctccgctacccgttattggtgttcccgtaaaatctagcaatagtattgacggatgggattctgttttatctatcttacaaatgccaggcggtgttcctgtagcaactgttgccttaaatggcgcaaaaaatgcaggtatattagctgcacaaatagtaagcacaggagaccaatgcgtacttgataaagtgattgcttacaaagaagggcttaagataaaagtagaagaaggtgccgagaaaattaaaaatataaaaggttaa

SEQ ID NO: 52139 - protein, 163 aa, unidentified eubacterium SCB49
MTVAIIMGSTSDMPVMQDAIDILKGFDIEIEVDIVSAHRTPEKLFDFSKNAHTRGIKVIIAGAGGAAHLPGMVASLSPLPVIGVPVKSSNSIDGWDSVLSILQMPGGVPVATVALNGAKNAGILAAQIVSTGDQCVLDKVIAYKEGLKIKVEEGAEKIKNIKG

SEQ ID NO: 52140 - DNA, 510 bp, Moritella sp. PE36
  CDS (1)..(510): transl_table=11
atgtctacaccatttgttgcagtattaatgggctcagattcagatttgccggttatgcagggtacactaaaggtacttaaatcatttgatattcagtacgaagtaaaagtaacttctgcgcatagaacgcctgcggcgacacatcagtatgtgacagatgcagagagccgtggttgtgctgtatttatctgtgctgctggcctagctgcacatttagctggcgcggttgcgggtataactactcatcctgttattggtgtgccaatcgacgcgggcccgttacaaggtatggacgctttattatcaacagtgcaaatgcctggtggtgtacctgttgcttccgttgcaatcgggagtgcgggtgctaaaaatgccggttaccttgctgcgcaaatgttagcaattggtaatccagaaatggcagctaaagttaaagctgagcgccaagcaaatgcagcaatcattattgctaaagacgaagcgttacaagctaaattaaaagaactgtaa

SEQ ID NO: 52141 - protein, 169 aa, Moritella sp. PE36
MSTPFVAVLMGSDSDLPVMQGTLKVLKSFDIQYEVKVTSAHRTPAATHQYVTDAESRGCAVFICAAGLAAHLAGAVAGITTHPVIGVPIDAGPLQGMDALLSTVQMPGGVPVASVAIGSAGAKNAGYLAAQMLAIGNPEMAAKVKAERQANAAIIIAKDEALQAKLKEL

SEQ ID NO: 52142 - DNA, 492 bp, Pseudomonas fluorescens
  CDS (1)..(492): transl_table=11
atgagtgcactggttggcgtgatcatgggctccaagtccgattggtccacccttagccacaccgccgatatgctggaaaagctcggcatcccgtacgaggtcaaggtggtttccgcccaccgcaccccggatctgctgttccagtacgccgaagaggctgagggccgtggcatcgaggtgatcatcgccggtgccggtggcgcagcccacctgccaggcatgtgtgcggccaagacccacctgccggtactgggcgttccggtgcagtcgtcgatgctctcgggtgtcgattcgctgctgtccatcgtgcagatgccagcgggcattccggtcgccaccctggccatcggcaaagcgggcgcgatcaacgcggccctgctctcggcgagcatcctcggcgccaagcatccacagttccacgcggtactgaaaaccttccgtgccgagcagacagacagcgtcctggacaatccagacccacgtattgcctga

SEQ ID NO: 52143 - protein, 163 aa, Pseudomonas fluorescens
MSALVGVIMGSKSDWSTLSHTADMLEKLGIPYEVKVVSAHRTPDLLFQYAEEAEGRGIEVIIAGAGGAAHLPGMCAAKTHLPVLGVPVQSSMLSGVDSLLSIVQMPAGIPVATLAIGKAGAINAALLSASILGAKHPQFHAVLKTFRAEQTDSVLDNPDPRIA

SEQ ID NO: 52144 - DNA, 522 bp, Magnetospirillum gryphiswaldense
  CDS (1)..(522): transl_table=11
atggatatgagccaaagcacccccgtcatcggcatcatcatgggtagccaatccgattgggagaccatgcgccacgccgtagaagtgctggtggacctcggcgtttcctacgaaacccgcgtggtatccgcccatcgcacgcccaagcggctgtacgactatgccaccggggccaaggctcgcggtctcaaggtcatcatcgccggtgccggcggcgctgcccacctgccgggcatggccgccgccatgaccaccttgccggtgctcggcgtgccggtggaaagccgggtgctgaagggtgtcgacagcttgcattccatcgttcagatgcccggcggcgtgccggtgggtaccttggccatcggcaaggccggagccaccaatgccggcctgctggcggcgtcgatcatcgccctgatggacccgggcctggcccagcggctggaagactggcgcacccgccaaaccgaatcggtggcggaaatgcccgtcgatgccgacaacccgcatctggtcgtctga

SEQ ID NO: 52145 - protein, 173 aa, Magnetospirillum gryphiswaldense
MDMSQSTPVIGIIMGSQSDWETMRHAVEVLVDLGVSYETRVVSAHRTPKRLYDYATGAKARGLKVIIAGAGGAAHLPGMAAAMTTLPVLGVPVESRVLKGVDSLHSIVQMPGGVPVGTLAIGKAGATNAGLLAASIIALMDPGLAQRLEDWRTRQTESVAEMPVDADNPHLVV

SEQ ID NO: 52146 - DNA, 2115 bp, Physcomitrella patens
  CDS (1)..(2115)
atgggtgtgttgtgtgcctcatcgcaaggagctgctctgaaaagtcttgtcgacgctcctgccaaggtcaccgcctcggcggcttcgtctgcactcccacttcccggttttgcatcggggaggactgcgaaggctttgaggtcaagtagggagtgcctgaccattgctttgaaaggagggcttagccagggtttagggaactcttgcgccggaattagcagaaagagagaattgcgcctcacacaaactgctatttcggccacaactgagtcctctgaaactgtggaggatcaccaggagcagggagacgtcgcggtcatgaactctagtgggtgcgaaacgttgtgcacaacgacatggggtctgtgtgatacggtaatcggggttctcggcggcgggcagctcggacggatgctctgccaagctgcctctcccatgggcattaaagtatctgttttggacccgcttgaggattgtccagctgggaacattgcgtaccattatcaagttgggagtttcaaagatatgcaggctgttcgggaattcgctaaaggatgtggcgctttgactgtggagattgagcatgtgaatgttgagacgctcgaggctcttgcacgcgagaatgtcgacattgagcccaaacctttcacaattcgcattattcaggacaagtatatgcagaagatgcacttcaagaaacacgacgtagcccttcccgagtttatgaagattgactctgcggaggaggcggaggaggctgggaagttgtttggctacccgctgatgttgaagagccggcgggacgcatatgatggacgcggtaacgcggtggttgaatccagggaagctctacccctagcgatttcgtccttagggggcattgaacggtgtctttacgctgagaagtgggcgccatttgtaaaggagttggccatcatggtggctagagggagggatggttccattcgctcctttccagtcgtcgaaaccacacatgttagcaacatttgtcatacagttgaagctccggcccgtatccctaaagaggtcgctgaattagccatgcaggttgcagagcgagcagtgggatctctatctggagctggcatgttcggtgttgagcttttccttctcaaggatggaaacgtattgctgaacgaagtcgcaccgagaccccataactgtggacattacacaatcgaatcatgcttcgtctcccagtatgagcagcacctgcggtgtgtcctcgggcttcctctcggcgacccctccatgaaggtccctgccgctttgatgtacaacattttaggtgaagcagatggagaggaggggttcaccatcgcgcacaacattatgcgtagagccatgtctgtgccaggggcgagtgtacactggtacgagaaaccagaaatccggaagcagaggaaaatggggcacatcacggttgtaggcccaacggctgaggttgtgcgagctcgtatgaattggatcatcaacacgaaaggcatacaagattaccccaagaaaaagccatccttcgtctctggtgttcttccttcgaatgtagccactgcgctggcaagctcttctgaagatgcaaaaccatcgggcccgcctgttggaattatcatgggatcggactcagacttgccagtaatgtctgctgctgcagagattttggactcattcggtattccatatgagttgacggtggtgtctgctcacaggactccagagaggatggtctcatacgcccagactgcacacaaacgtggtgtaaaggtgattatcgctggggcaggaggagctgctcacctccccgggatggttgcttctttgactccgcttcctgtgattggagtgcctgtgaaaggaagccatacagatgggctggactcgttgctgtctatcgtccagatgccacgaggaattcccgttgctacagtagcgattcagaatgcaacaaatgcaggtctcctggctgtgcggatgcttggtgtagagagtgatcagattgttgataagatggctgcctaccagaacagcttgaaggatatggtgctcgagaaagcagagaggctcgagactatcggctggaaagagtatttgaagtga

SEQ ID NO: 52147 - protein, 704 aa, Physcomitrella patens
MGVLCASSQGAALKSLVDAPAKVTASAASSALPLPGFASGRTAKALRSSRECLTIALKGGLSQGLGNSCAGISRKRELRLTQTAISATTESSETVEDHQEQGDVAVMNSSGCETLCTTTWGLCDTVIGVLGGGQLGRMLCQAASPMGIKVSVLDPLEDCPAGNIAYHYQVGSFKDMQAVREFAKGCGALTVEIEHVNVETLEALARENVDIEPKPFTIRIIQDKYMQKMHFKKHDVALPEFMKIDSAEEAEEAGKLFGYPLMLKSRRDAYDGRGNAVVESREALPLAISSLGGIERCLYAEKWAPFVKELAIMVARGRDGSIRSFPVVETTHVSNICHTVEAPARIPKEVAELAMQVAERAVGSLSGAGMFGVELFLLKDGNVLLNEVAPRPHNCGHYTIESCFVSQYEQHLRCVLGLPLGDPSMKVPAALMYNILGEADGEEGFTIAHNIMRRAMSVPGASVHWYEKPEIRKQRKMGHITVVGPTAEVVRARMNWIINTKGIQDYPKKKPSFVSGVLPSNVATALASSSEDAKPSGPPVGIIMGSDSDLPVMSAAAEILDSFGIPYELTVVSAHRTPERMVSYAQTAHKRGVKVIIAGAGGAAHLPGMVASLTPLPVIGVPVKGSHTDGLDSLLSIVQMPRGIPVATVAIQNATNAGLLAVRMLGVESDQIVDKMAAYQNSLKDMVLEKAERLETIGWKEYLK

SEQ ID NO: 52148 - DNA, 1815 bp, Vitis vinifera
  CDS (1)..(1815)
atggggaagattgcccgcatcccctatgattggccttttctcaaaaataattgtttttcttcatggtctcctcctcagttaaaacagagagttccaatatgtttaattgaattgaggtttttgtttcctcaggtcccagatgatttaccagtacatggactatcggaaacagtagttggtgttcttggtggagggcaattgggccgtatgttgtgtcaagcagcgtcacaaatggctatcaaagtcattgttttggacccacttgagaactgcccatcaagctcaatctccaattatcatatggttggaagctttgatgatagtgctactgtccaggaatttgcaaagagatgtggaatattgaccgtggaaattgaacatgttgatgtggcaactctcgagaagcttgagcaacaaggagtagattgccaacctaaggcatctactattcgaataatccaggataaatatctccaaaaagttcacttttctcggcatgcaattccacttcctgagtttatgcagatagatgatcttgaaagtgccaagagagctggagatctgtttggctatcctcttatgatcaagagcaaaaggcttgcttatgatgggcgtggaaatgcagttgctaagagtgaagtggagctttcttctgctgtgactgcgcttggaggatatgaacatggtttatatattgagaaatgggcaccttttgtaaaggagctggccgtcattgtggcaagaggaagagacaattctattttgtgctatcctgttgttgaaactattcacaaggagaacatctgtcacatagttaaggcacctgctgatgtgccttggaagatcagaagacttgccacggatgttgcatataaagctgttagttcattagaaggtgctggtgtgtttgcagtagagatgtttttgactatagatggtcagattttactaaatgaagtagcacctagacctcacaatagtggtcatcacactattgaatcttgctacacttcacaattcgaacaacatcttcgggcggttgtcggccttcctcttggtgatccatcaatgaaaaccccagctgctattatgtacaatttactgggtgaagatgagggagaggctggtttcagttttgccaataaactgattggaaaggcattaaggattccaggggcctccgttcattggtacgataaaccagaaatgcgaaagcaaagaaaaatgggtcatatcactattgtaggcccttctatgggaattgtggaagctcggctgcactcaatgttgggggaagaaagtgtggatgatcagtcttcagtaacacctcgtgttggaatcataatgggctctgattcagatcttcctgttatgaaggatgctgcagggattttgaatcactttggtgtgcctcatgaggtgagaatagtttcagcacacagaactcctgaaatgatgttttcttatgcaatgtctgctcgggagcgaggcgttcagatcatcattgctggtgctggtggtatggtagctgcattgactcccctaccagttattggtgtgcctgtgcgtgcctcttcattagatggacttgactccctcctatcaattgtgcagatgccaaggggtgttcctgttgctacagtggctataaataatgccacaaatgctggtttgctggcagtaagaatgttgggggttagtgatcctgacctacaggcgagaatgagccagtaccaagaagacacaaaggatgatgtcttggtaaaagccgagaagctagagaaagatggctgggagtcctatttgaatccttag

SEQ ID NO: 52149 - protein, 604 aa, Vitis vinifera
MGKIARIPYDWPFLKNNCFSSWSPPQLKQRVPICLIELRFLFPQVPDDLPVHGLSETVVGVLGGGQLGRMLCQAASQMAIKVIVLDPLENCPSSSISNYHMVGSFDDSATVQEFAKRCGILTVEIEHVDVATLEKLEQQGVDCQPKASTIRIIQDKYLQKVHFSRHAIPLPEFMQIDDLESAKRAGDLFGYPLMIKSKRLAYDGRGNAVAKSEVELSSAVTALGGYEHGLYIEKWAPFVKELAVIVARGRDNSILCYPVVETIHKENICHIVKAPADVPWKIRRLATDVAYKAVSSLEGAGVFAVEMFLTIDGQILLNEVAPRPHNSGHHTIESCYTSQFEQHLRAVVGLPLGDPSMKTPAAIMYNLLGEDEGEAGFSFANKLIGKALRIPGASVHWYDKPEMRKQRKMGHITIVGPSMGIVEARLHSMLGEESVDDQSSVTPRVGIIMGSDSDLPVMKDAAGILNHFGVPHEVRIVSAHRTPEMMFSYAMSARERGVQIIIAGAGGMVAALTPLPVIGVPVRASSLDGLDSLLSIVQMPRGVPVATVAINNATNAGLLAVRMLGVSDPDLQARMSQYQEDTKDDVLVKAEKLEKDGWESYLNP

SEQ ID NO: 52150 - DNA, 1938 bp, Arabidopsis thaliana
  CDS (1)..(1938)
atgttgcttttgaaacaaagctcagctgctgttcttgtcgttggaaatacaactccagtccttcacacttctcgctccacctacagagttggaccttttccagtgaccagaacgcagtcgttccagagtttgactatggcaaatttgcagaagcttcccacttcttcgtctgggaaattgaatacggcttcagctgtgccctgtagctctcacgatgcttctcctatcagtgagaatcgcgagaataaacatgtccatggagtttctgagaaaattgtgggagttcttgggggtggacaattgggtcgtatgctttgccaagctgcttctcagttggctatcaaagtgatgattttagatccttctaaaaattgttcagcaagtgcattgtcctacggtcacatggttgatagctttgacgacagtgctacagtagaagaatttgcaaaaagatgtggagtcttaactgtagaaattgaacatgttgacgtggacacactagagaagcttgagaaacaaggagtggattgccaacccaaagcttctactattaggataatacaggataaatacatgcaaaaggttcatttctctcagcatggcatcccacttccagaatttatggagataagcgatattgaaggagcaagaaaagcaggtgaacttttcggttaccctcttatgatcaagagcaaacgattggcttatgatggacgtggaaatgcagttgccaacaaccaagatgagctttcttctgctgtaacggctcttggaggtttcagtcgtggtttgtatattgagaaatgggcaccttttgttaaggagttagctgttattgtggctagggggagagatggttctatggtttgttatcccgttgttgaaaccattcacagggataacatatgccatatagttaaagcacctgcagatgtgccttggaagattaacaaacttgccaccgatgttgcccaaaaggctgtcggttctttagaaggtgctggtgtttttgcagttgaactgttcttgacagaggatagtcagattctgctaaacgaagttgcacctagaccacacaacagtggccatcaaacgatcgagtgctgttatacttcacagtttgaacaacacttgcgagctgtggttggtcttccacttggtgatccgtcaatgagaactccggcgtccattatgtacaatattctgggagaagatgatgtaattgatggagaagcaggtttcaaattggctcatcggcttattgcaagggctctgtgtattccaggtgcatctgttcattggtatgacaagccagaaatgagaaagcagagaaagatgggtcacatcactcttgttgggcagtctatgggcattttggaacaaaggttacaatgcatattaagtgagcaaagccaccaagtacacgagacacctcgtgttgctatcatcatgggttcagacacggatcttcctgttatgaaggatgctgccaaaattctggacctgtttggtgtgacacatgaggtaaagatagtttctgctcatcgcaccccagagatgatgtatacatatgcaacctcagctcatagtcgaggcgttcaagtcattattgcaggtgctggtggtgctgctcacttaccaggtatggttgcttcactcactcctttgcctgtgattggtgtccctgtccgtgctacccgtttggatggagttgattcacttctttccatcgttcagatgcctagaggtgttcctgttgcgacagttgcaataaacaatgcgaccaacgcagccttgcttgcagttcggatgttgggaatctctgatacggatcttgtctcaaggatgaggcagtaccaggaagacatgagagatgagaacctgaataaaggagagaaactggagacagaaggttgggaatcatatttgaaccagtga

SEQ ID NO: 52151 - protein, 645 aa, Arabidopsis thaliana
MLLLKQSSAAVLVVGNTTPVLHTSRSTYRVGPFPVTRTQSFQSLTMANLQKLPTSSSGKLNTASAVPCSSHDASPISENRENKHVHGVSEKIVGVLGGGQLGRMLCQAASQLAIKVMILDPSKNCSASALSYGHMVDSFDDSATVEEFAKRCGVLTVEIEHVDVDTLEKLEKQGVDCQPKASTIRIIQDKYMQKVHFSQHGIPLPEFMEISDIEGARKAGELFGYPLMIKSKRLAYDGRGNAVANNQDELSSAVTALGGFSRGLYIEKWAPFVKELAVIVARGRDGSMVCYPVVETIHRDNICHIVKAPADVPWKINKLATDVAQKAVGSLEGAGVFAVELFLTEDSQILLNEVAPRPHNSGHQTIECCYTSQFEQHLRAVVGLPLGDPSMRTPASIMYNILGEDDVIDGEAGFKLAHRLIARALCIPGASVHWYDKPEMRKQRKMGHITLVGQSMGILEQRLQCILSEQSHQVHETPRVAIIMGSDTDLPVMKDAAKILDLFGVTHEVKIVSAHRTPEMMYTYATSAHSRGVQVIIAGAGGAAHLPGMVASLTPLPVIGVPVRATRLDGVDSLLSIVQMPRGVPVATVAINNATNAALLAVRMLGISDTDLVSRMRQYQEDMRDENLNKGEKLETEGWESYLNQ

SEQ ID NO: 52152 - DNA, 1749 bp, Ostreococcus tauri
  CDS (1)..(1749)
atgacgacgtcgcgcgcgccgcggcgtcgcgcgcgcgcgcgcgggcgggcgcgcgcggtgaaggaggagaaatttcgcgtgcgggatgaggagacggcgctcggacgagacgcgcgggtggggatcctgggcggcggacagctcggacgcatgttggggatcgcggcgtcgccgatgggggtgcgattgaaggctttggacccgaccgagaactgcccggcgagcgtgtcgtcgacgcaggtcgtcgggagctttcgggataaagaggctgtgaaggctttcgcgcgggagtgcgacgtgctcacggttgaaatcgagcacatcgacgtggaggcgctgagggagctcgcggcggagggtgtggacgtgcagccgacgccggagacgctggcgacgattcaggataagtacgcgcaaaaagtgcacttctcgcaggcgggcgtgcctctgggaccgttcgcggactgcccggatgaggcggcgctgcaaaaggcggcgagtgaatttgggtttccgctcatgctcaagtcgaagcgtttggcgtacgatggtcgagggaacgcggtggcgaagactgccgccgatctgaacgacgccgtggtcaagctcggcgggtttgagcaaggtttatattgcgagaagtgggtgccgtttgcgaaggagctggcggtgatggtcgtgcgcgcgcgagacggcgagacgcgcgcataccccgtcgtggagacggttcacgaggataatatttgcgacatcaccacgactcccgcaccggttccgaacaaggtcgccgaggcggttcaagaggcggccaagaaggcgatcggttcgtttacgggtgcgggcattttcggcgtcgagttgttcctcttgcacgacggctccattctgctcaacgagtgcgcgccgaggccgcataacagcggacactacaccatcgagggctgcgcgtgctcgcaatacgagaaccatctgcgcgcgatcttgggctggcctctgggagacacctcgctgaaggttggcggagccgtgatgaagaacattttgggtgacgccgagggcgacgaggcaatgtctcgcgcacaccgcctcatgggcgcggcgttagaggtcccgggcgcgagcattcattggtacgaaaagccggatatgaaggctgcgcgtaagatgggtcacatcaccgtcgtcggaccgagtgcggcggtggccacggagcgcttggacacaatcctgcgcgccgccaagggcgaccatacgcccgccaagccggcgcctcaggtgggcatcatcatgggttcggatagcgacttgcctacgatgagcgccgccgcggaggtcttggaatcattcggcatcggttgcgaggtcacggtgatctctgctcatcgaacgcccgatcgcatgaacgattacgccaagagcgcgcacacgcgcggtattcgagccattatcgctggcgccggcggcgccgcgcatcttcccggaatggtggccgccatgactccgctccccgtcatcggtgttcctgtgccgctgaagtacctcgacggcatggactccctcctctccatcgttcaaatgcccaagggcgttcccgtggccaccgtcgccatcgggaacagcgccaacgccggactcatcgccgcccgcatcgtctccgcgtacgagcccaccgttctgtctaagatgttagcctatcaggaagacatggagaacaacctcggctaccgagcctacctcgaccaaatgtaa

SEQ ID NO: 52153 - protein, 582 aa, Ostreococcus tauri
MTTSRAPRRRARARGRARAVKEEKFRVRDEETALGRDARVGILGGGQLGRMLGIAASPMGVRLKALDPTENCPASVSSTQVVGSFRDKEAVKAFARECDVLTVEIEHIDVEALRELAAEGVDVQPTPETLATIQDKYAQKVHFSQAGVPLGPFADCPDEAALQKAASEFGFPLMLKSKRLAYDGRGNAVAKTAADLNDAVVKLGGFEQGLYCEKWVPFAKELAVMVVRARDGETRAYPVVETVHEDNICDITTTPAPVPNKVAEAVQEAAKKAIGSFTGAGIFGVELFLLHDGSILLNECAPRPHNSGHYTIEGCACSQYENHLRAILGWPLGDTSLKVGGAVMKNILGDAEGDEAMSRAHRLMGAALEVPGASIHWYEKPDMKAARKMGHITVVGPSAAVATERLDTILRAAKGDHTPAKPAPQVGIIMGSDSDLPTMSAAAEVLESFGIGCEVTVISAHRTPDRMNDYAKSAHTRGIRAIIAGAGGAAHLPGMVAAMTPLPVIGVPVPLKYLDGMDSLLSIVQMPKGVPVATVAIGNSANAGLIAARIVSAYEPTVLSKMLAYQEDMENNLGYRAYLDQM

SEQ ID NO: 52154 - DNA, 549 bp, Acetobacter aceti
  CDS (1)..(549): transl_table=11
gtgagcgaaaccgcccccctgccctctgcttccagtgctttagaagataaagcagcctctgcccccgttgtgggcattatcatgggcagccagtcagactgggaaaccatgcgccatgcagacgcattgctgacagagctggaaattccgcatgaaaccctcattgtttcagcacatcgtacgccagaccggttggcggattatgcgcgtacggcagccgaacgcggcctgaatgtgattattgctggggccggtggagctgcacatctgccgggtatgtgtgcggcatggacacgcctgcccgtgctgggtgttccagtagaatctcgcgctcttaaaggcatggacagcctgctttccattgtgcagatgcccggcggcgtgcctgtgggcactttggctattggggcatccggcgccaaaaatgccgccttgctggccgcctccattcttgcactgtataacccggcccttgccgcacgccttgaaacatggcgcgcattgcagacggcctctgtccccaactctcccattaccgaagataaatga

SEQ ID NO: 52155 - protein, 182 aa, Acetobacter aceti
MSETAPLPSASSALEDKAASAPVVGIIMGSQSDWETMRHADALLTELEIPHETLIVSAHRTPDRLADYARTAAERGLNVIIAGAGGAAHLPGMCAAWTRLPVLGVPVESRALKGMDSLLSIVQMPGGVPVGTLAIGASGAKNAALLAASILALYNPALAARLETWRALQTASVPNSPITEDK

SEQ ID NO: 52156 - DNA, 396 bp, uncultured archaeon GZfos32E7
  CDS (1)..(396): transl_table=11
atggacaaagtagctataatcatgggttctgagagtgatcgtgcggttgcggataaggcggttgcggtactggcagagtataatgtcccttacgaagtaaagatgatttccgcacataggaatcccgatgagctggatagatatctgaaggaaagcgaagatgtatcggtgataatagcgattgcaggtctatcggctgcgttaccgggtgtgatagcgtcaaaaacggaaaagcccgttattggcgtgcccgtgagtggtaagttgttaggcatggatgctctgctttctatggttcaaatgccccctggtgttccggtaggcgtagtgggtatagacagcgggaaaaatgcggctttgcttgcgcttcggatgctgaacgtgaaaaagcaatag

SEQ ID NO: 52157 - protein, 131 aa, uncultured archaeon GZfos32E7
MDKVAIIMGSESDRAVADKAVAVLAEYNVPYEVKMISAHRNPDELDRYLKESEDVSVIIAIAGLSAALPGVIASKTEKPVIGVPVSGKLLGMDALLSMVQMPPGVPVGVVGIDSGKNAALLALRMLNVKKQ

SEQ ID NO: 52158 - DNA, 405 bp, uncultured archaeon GZfos13E1
  CDS (1)..(405): transl_table=11
atggataaaatagcggtgatactgggctcggagagcgatagggcgatagcggacaaagtggtaaaggtgctgggtgagcataagatttcttatgacgtgaaggtgatttctgcacacaggaatcccgatgagctggatagatatttaaaagaaagcgaagaagaggtggaagtgataatagcaattgcagggttatcggcggcattgccgggggtaatagcgtcaaaaacgaaaaagcccgtgattggtgttcccgtgagtgggaagttgctcggtatggatgctctgctttccatggtgcagatgcctccgggtgttcctgtagcggtagtaggcatagacaacggcgaaaatgctgctttgcttgctttacgaattttagaacttacaatgaaatgcggatag

SEQ ID NO: 52159 - protein, 134 aa, uncultured archaeon GZfos13E1
MDKIAVILGSESDRAIADKVVKVLGEHKISYDVKVISAHRNPDELDRYLKESEEEVEVIIAIAGLSAALPGVIASKTKKPVIGVPVSGKLLGMDALLSMVQMPPGVPVAVVGIDNGENAALLALRILELTMKCG

SEQ ID NO: 52160 - DNA, 1758 bp, Hebeloma cylindrosporum
  CDS (1)..(1758)
atgtcagaacaggttgttggaatacttggaggaggccagcttggtcgcatgcttgcagcatcggcttccttgttaaaccagaaagttattattcttgatacgggagaacatggaccagccaagcagattatcgcaccgacggaacctcacttggcccatctcgatggatcgttcgcagatcctgtgaagattcgcgaactcgctagcaaagtagatgtgcttaccgtcgagatcgagcacgtcgatgcagccgccctcgaagaagtacgattggcgacgaaaggaaaagttctcgctatccatccgagtccatccaccatccagattatccaggacaaatttcggcagaagcaacacttgtcgtcccacggtctgccagtatcggaatttgtcgaggtcgagtcctctgtggattcgatatccgaagcggcccagaaacttggcctgcctctcatgttgaagagtcgtaccttagcctacgacggccgtggcaattttgtggtccgaaacttgcgacaggtcgaagaagcaattgctgccctgggagggcggcccctttacgctgaaaagtgggttcccttctccaacgaaattgccattatggtcgttaggactgtcgacggtgaggtccaatcttaccctgtggtagaaaccgttcacaaggacaatgtttgccaccttgtattggcacctttacggagtcgagacccttctcttccatcgaaagcgacatctatcgccgaaaatgccataaaatcgttcaccggcgcaggtgtcttcggcgttgaattgtttctgatggatgatgggaaaatatttatcaatgaaattgctccccgtccccataactctggccattacacgatcgaagcctgtgaaacttctcagtatgaaaatcatttacgcgccatcctctcgctcccccttgggtcaaccgcactaaaggtgccttccgctgccatgcttaacttgatcggccagtcgtcttccatgggtgagatcacgaaaaccaaggatgtcgccctcaccattcccggggcttcggtccacttgtatgggaagtcagaatgcaggaaaggtcgaaagatgggtcatatcaccattgtggccgattcggacgcccaactccgatcccgtctgcgcacccttctccaatccctccccgaaaactactgtccgcctggtgagatagacctgtacgcccccgctgccatggtccctggctctggtttctccgatcccaacccactagtgggggttatcatgggctcagactcggatctgcatgtcatgcttccagcagcccgaattcttgatcatttcaagatcccatacgagttgacgatcgtatcagcgcaccgaactcccgaccgcctcgtcgaatacgcccggtccgcatcgacgaggggcctgcgaaccatcattgcaggcgcaggtggtgcggcccatcttccaggaatggtggctgcgatgacggccctccctgtgatcggcgttcccgtgaaaggcagtaccctcgatggcgtagattctttgcacagtatcgttcagatgccgcgtggtatacctgtggcgaccgttgccattaataacggcacgaacgctggtctattagcggtgcggatattgtcagcgggtatcccacatctcattcactccatggagcattatatgagctccatggaaaatgaagttctgggtaaagtcgaaaaattgaaggaagtggggtgggagaactatcaggtgaaacgaagttga

SEQ ID NO: 52161 - protein, 585 aa, Hebeloma cylindrosporum
MSEQVVGILGGGQLGRMLAASASLLNQKVIILDTGEHGPAKQIIAPTEPHLAHLDGSFADPVKIRELASKVDVLTVEIEHVDAAALEEVRLATKGKVLAIHPSPSTIQIIQDKFRQKQHLSSHGLPVSEFVEVESSVDSISEAAQKLGLPLMLKSRTLAYDGRGNFVVRNLRQVEEAIAALGGRPLYAEKWVPFSNEIAIMVVRTVDGEVQSYPVVETVHKDNVCHLVLAPLRSRDPSLPSKATSIAENAIKSFTGAGVFGVELFLMDDGKIFINEIAPRPHNSGHYTIEACETSQYENHLRAILSLPLGSTALKVPSAAMLNLIGQSSSMGEITKTKDVALTIPGASVHLYGKSECRKGRKMGHITIVADSDAQLRSRLRTLLQSLPENYCPPGEIDLYAPAAMVPGSGFSDPNPLVGVIMGSDSDLHVMLPAARILDHFKIPYELTIVSAHRTPDRLVEYARSASTRGLRTIIAGAGGAAHLPGMVAAMTALPVIGVPVKGSTLDGVDSLHSIVQMPRGIPVATVAINNGTNAGLLAVRILSAGIPHLIHSMEHYMSSMENEVLGKVEKLKEVGWENYQVKRS

SEQ ID NO: 52162 - DNA, 1668 bp, Mucor circinelloides
  CDS (1)..(1668)
  misc_feature (917)..(917): y is t or c
atgaatagtcaaaaagtcggtattcttggaggcggtcagttgggtcgtatgatggtagaagctgcatccagactcaacctctctgtcaccattcttgatgctcccgtggacgcacccgccaagcaaattgaatccactcaaaaccacattcaaggcgctttcaacgatgccgccaagatcactgaattagcctctcaagtggatgtgttgactgtagagatcgagcatgtcaatgcggatgtgcttgcccagatcgagcaagaaggtcgtgtgcgtgtctgcccctctgccttcactgtcaagaccatccaagacaagtacaaccaaaagaagtacctagagtcacatggcattcccgttgccgagtaccgcgaaatcaaggatgccgatgctgtcaagcaagtcgccaaggagtttggctatccattgatgctcaagtccaagaccatggcctatgacggcaagggcaactacgtcgtcaagtcagaagctgatgtcgagaaggcagtagctgctctgtccaagacacccttgtacgcagaaaagtgggccccctttgtcaaggaactcgctgtcatggtcgtccgtcgtgccaacggcgaaattagatcatatcctgtagtggaaaccattcacaagaacagcatttgccacctcgtcattgctcctgctcaaatcgacggcagcgtcgctgtcaaggctcaaaagattgccgaaaacgccatcaaatccttccctggtgctggtatctttggcgtcgagatgtttgtcatggccgacggtgagattctgctcaacgaaattgctcctcgtccccacaactcgggccattacaccatcgaggcctgtgagacctctcaatacgaaaaccacatgcgcgccatcttggatttgcccttgggctccactgccagtgyaaggtgcctgcgttccatcatggtcaatatcttgggcgaaaacagcgacatggaagcttgttacaagccttgccaagctgctttattggcagagggcgctaccatccacttgtacggtaagaaggaatccagagctggccgtaagatgggccacattacgttggtgggtgaatccatgatgcaagtgcaaaagaacttgaagcccatcttggacgaaatcgagcctggtgtagagagacccttgacattgcgacctttggtgggtatgattatgggttctgacagcgatttgcctgtcatgaaggtgggtgctcagatcctcaaggactttggtattccctttgaattgtccattgtgtctgctcatcgcactcccttgcgtatggtggaatatgcaaagtctgctgctcagcgcggtctgatggccatcattgctggtgctggtggtgctgctcatttgcctggtatggtggctgccatgacacctttgcctgtcattggtgtgcctgtcaagggcagctctcttgacggcgtggactctctctacagtattgtgcaaatgcctcgcggtatccctgtggccaccgtcgctgtcaacaacagcaccaatgctgctctgcttgctattcgtatcttgggtgcttccattcccggcattcaaaagcaaatggctgcttacatggagaagatggagggagaagtcttgaccaaggtcgagaagcttgacaatgttggatgggaaaactactag

SEQ ID NO: 52163 - protein, 555 aa, Mucor circinelloides
  misc_feature (306)..(306): The Xaa at location 306 stands for Ala, or Val.
MNSQKVGILGGGQLGRMMVEAASRLNLSVTILDAPVDAPAKQIESTQNHIQGAFNDAAKITELASQVDVLTVEIEHVNADVLAQIEQEGRVRVCPSAFTVKTIQDKYNQKKYLESHGIPVAEYREIKDADAVKQVAKEFGYPLMLKSKTMAYDGKGNYVVKSEADVEKAVAALSKTPLYAEKWAPFVKELAVMVVRRANGEIRSYPVVETIHKNSICHLVIAPAQIDGSVAVKAQKIAENAIKSFPGAGIFGVEMFVMADGEILLNEIAPRPHNSGHYTIEACETSQYENHMRAILDLPLGSTASXRCLRSIMVNILGENSDMEACYKPCQAALLAEGATIHLYGKKESRAGRKMGHITLVGESMMQVQKNLKPILDEIEPGVERPLTLRPLVGMIMGSDSDLPVMKVGAQILKDFGIPFELSIVSAHRTPLRMVEYAKSAAQRGLMAIIAGAGGAAHLPGMVAAMTPLPVIGVPVKGSSLDGVDSLYSIVQMPRGIPVATVAVNNSTNAALLAIRILGASIPGIQKQMAAYMEKMEGEVLTKVEKLDNVGWENY

SEQ ID NO: 52164 - DNA, 1719 bp, Aspergillus oryzae
  CDS (1)..(1719)
atgtggaactctcctaaggtgggaatcctcggcggaggccaattgggccgcatgctggtcgagtccgccaaccgattgaacattcaatgcaacgtgctcgatgcggagaactccccggccaagcagatcagtagccacgatggccacgttaccggttcttttaaggagcgcgaggccgttcgggaactggccaagacctgcgacgttgtgacggcagagattgaacatgtcgatacctacgccctggaggagattgcctctcaggtcaagattgaacccagctggcaagcgattcggacgatccagaacaagttcaaccagaaggagcacctgcggaaatatggtattcccatggcggagcatcgcgagctggccgagaacactcccgaagaattggccaaggtcggcgaacagcttggatatcctatgatgttgaagtcgaagactatggcttacgacggacgtggaaactatcgtgttaactctaaggaggatatccccgaggcccttgaagcgcttaaggaccgcccattgtatgcagagaagtgggcttacttcaagatggaattggccgtcatggtcgtaaagaccaaggatgatgtcctgtcataccctaccgtcgagaccgtccaagaagactcgatatgcaaactcgtctatgcccccgcgcgcaacgtgtccgacgccatcaaccagaaagcccaggagttagcacgtaaggccgtcgcagccttcgacggaaagggtgtttttggtgtcgaaatgttcctcctcgaagacgacagtctgatcctgtgcgaaattgctagccgcattcacaactccggtcactacaccattgaaggttgccccctgtctcaattcgatacccatatccgcgccatcctcgatctccccatccctcctaagagcctcgagctccgtcaaccctccatcatgctcaacatcatcggcggtgccgcccccgacacacacctcaaggccgcagagcatgctctctccatccccaacgccagcatccatctctacagcaagggcgccgccaaaccaggccgcaagatgggccatatcactgtcaccgcgccgaccatgcacgaagccgagacacacatccagcccctgatcgacgtggtcgacgagatccgctcccagcgcagcgacatcaagacccagccccagaagtcgggcccctcgaagcctgcaccctccgtggccgtcatcatgggctcggacagcgatctcaagaccctcgttccaggactcaagctccttaaagagtacttcggcatcgaacccgcagtcgacatcacctccgctcaccgcaccccggagtacatggccgaatactccgccagtgccgctgcccgcggtatcaaggttatcatcgccgctgctggcggcgccgcccatctccccggtatggccgccgctcacaccgctcttcctgtgatcggtgtcccggtcaagggcagctccttggatggtgtcgacagtctgtacagcatcgtgcagatgcccagaggtgtccctgtcgccaccgtcggaatcaacaacagcattaacgccgctctcctggccgccagaatcctgggctcctttgatccagccattcagcgcaaggtggaggcgtatgctgagcaggctaagaccgagaatctcgacttcaagggcactaagatgcgcgaactcggttgggaaaagtactttgagcaaatgtga

SEQ ID NO: 52165 - protein, 572 aa, Aspergillus oryzae
MWNSPKVGILGGGQLGRMLVESANRLNIQCNVLDAENSPAKQISSHDGHVTGSFKEREAVRELAKTCDVVTAEIEHVDTYALEEIASQVKIEPSWQAIRTIQNKFNQKEHLRKYGIPMAEHRELAENTPEELAKVGEQLGYPMMLKSKTMAYDGRGNYRVNSKEDIPEALEALKDRPLYAEKWAYFKMELAVMVVKTKDDVLSYPTVETVQEDSICKLVYAPARNVSDAINQKAQELARKAVAAFDGKGVFGVEMFLLEDDSLILCEIASRIHNSGHYTIEGCPLSQFDTHIRAILDLPIPPKSLELRQPSIMLNIIGGAAPDTHLKAAEHALSIPNASIHLYSKGAAKPGRKMGHITVTAPTMHEAETHIQPLIDVVDEIRSQRSDIKTQPQKSGPSKPAPSVAVIMGSDSDLKTLVPGLKLLKEYFGIEPAVDITSAHRTPEYMAEYSASAAARGIKVIIAAAGGAAHLPGMAAAHTALPVIGVPVKGSSLDGVDSLYSIVQMPRGVPVATVGINNSINAALLAARILGSFDPAIQRKVEAYAEQAKTENLDFKGTKMRELGWEKYFEQM

SEQ ID NO: 52166 - DNA, 1905 bp, Vigna unguiculata
  CDS (1)..(1905)
atgcttcacagtgcacgcgtagtattgtcaggccactccaccatcccagcttttgccttcagaccctctaatccctgtattaagacaacctcttcacttggtttctacatggagcaatctccttctttaaagctaaaacagtgtcaccagccccatcttgcctgtcaagcgacatcacgggatgatgatgatgcttctctaaggaatgatgaaccacctgttcatggaatatctgaagtggttgttggggttctgggaggtgggcaacttggtcgtatgatgtgtcaagccgcttctcagatggccattaaagtcatggttttggatccgcaagaaaattgccctgctagttctctctcttatcatcatatggtcggaagctttgacgaaagcactaaagtggaggaatttgccaagagatgtggagtattgaccgttgaaattgaacatgttgatgttgatacattggaaaaacttgagaaacagggagttgactgccagcccaaagcctctacagtcagaattattcaggataagtatcaacaaaaggttcacttctccaagcatggcattccacttcctgaatttatgaagatagatgatcttgaaagtgctaagaaagttggggaactctttgggtatcctcttatgattaagagtaggagactagcttatgatgggcgaggaaattttgttgctaaaagtgaagaggaactttcatctgctgtggatgctctaggaggatttgatcgaggtttatatgctgaaaaatgggcaccttttgtcaaggaactagctgttattgtggcaagaggaagagacaattcaatttcatgttatcctgttgttgaaactattcacagggacaatatatgccacatagttaaggctccggctaatgtgaaatggaagacgagggagcttgccactgaagttgctgttaatgctgttaagtccctggaaggtgccggtgtgtttgcagttgaattgtttttgactaatgatggagagattttattaaatgaagtagcacctagacctcacaacagtgggcatcatacaatagaatcttgccatacctcgcaatttgagcaacatttgcgggctgttgttggtcttccccttggtgatccatcattgaaaactccagctgctatcatgtacaacatattaggtgaagaagagggggaacttggttttcaattagcacatgaattgatgaaaagggcactggccatccctggtgcttctgttcattggtatgataagccagaaatgagaaagcaacggaagatgggccatataactatcgttgggccctcccttaacaatattgaaagcaatcttgcaattctgctggaagggaaaagattacatgataagactgctgttgctccacgtgtggggattataatgggttctgattcagatctgcctgttatgaaaagtgctgctgaaatcttggagatgtttggtgtgcctcatgaggtaagaatagtttcagcccacaggactccagaattgatgttttcttatgcctcatctgctcatgaacgaggcatacaagtcattattgctggtgctggtggtgcagctcacttgcctggtatggttgctgccctcactcccttgcctgttgttggcgttcctgtgcgtgcttctaccttggatggacttgattcactcttgtcaattgtccagatgccgagaggtgttccagttgccactgttgcagttaataatgcaactaatgctggattgctggcagtgaggatattgggtgttgccaacgataatcttctgtcaaggatgagtcaatatcaagaggaccaaaaagaaatcgtcttgaacaaaggagataaattagaaaaacatggctgggaatcctacttaaaaaatagttag

SEQ ID NO: 52167 - protein, 634 aa, Vigna unguiculata
MLHSARVVLSGHSTIPAFAFRPSNPCIKTTSSLGFYMEQSPSLKLKQCHQPHLACQATSRDDDDASLRNDEPPVHGISEVVVGVLGGGQLGRMMCQAASQMAIKVMVLDPQENCPASSLSYHHMVGSFDESTKVEEFAKRCGVLTVEIEHVDVDTLEKLEKQGVDCQPKASTVRIIQDKYQQKVHFSKHGIPLPEFMKIDDLESAKKVGELFGYPLMIKSRRLAYDGRGNFVAKSEEELSSAVDALGGFDRGLYAEKWAPFVKELAVIVARGRDNSISCYPVVETIHRDNICHIVKAPANVKWKTRELATEVAVNAVKSLEGAGVFAVELFLTNDGEILLNEVAPRPHNSGHHTIESCHTSQFEQHLRAVVGLPLGDPSLKTPAAIMYNILGEEEGELGFQLAHELMKRALAIPGASVHWYDKPEMRKQRKMGHITIVGPSLNNIESNLAILLEGKRLHDKTAVAPRVGIIMGSDSDLPVMKSAAEILEMFGVPHEVRIVSAHRTPELMFSYASSAHERGIQVIIAGAGGAAHLPGMVAALTPLPVVGVPVRASTLDGLDSLLSIVQMPRGVPVATVAVNNATNAGLLAVRILGVANDNLLSRMSQYQEDQKEIVLNKGDKLEKHGWESYLKNS

SEQ ID NO: 52168 - DNA, 1752 bp, Dipodascus magnusii
  CDS (1)..(1752)
atggactctagaactgttggaattctcggtggtggccagctgggtcgtatgcttgttgaagcagccaacagattgaacatcacgaccgccattctggacgctgaaaactcaccagctactcagatcaactcggttggacctcacgtcagcggctctttcaaagatgctgtcagcattgccaagtttgctgaaaagtgcgacgtcttgactgtagagatcgagcacgtcaatgcagacattttacaagatcttttggaccagaagaaagtgaaggaaatccatccatctcctgccactatcaagttgattcaagacaagtatacccagaagcttcattatcttaaacacaaattaccgactcctgctgttttggacgttcctaatgccactcaggaatccgttgctgctgtcggtcaaaagtttggttatccatttgttctcaaggctagaactaatgcttatgatggtcgcggaaactatgttgtcaagaccgctgaggatattcctgaagccttaaaagcccttaaagatactcctttatatgccgaaaagtttgccagatttgaccgtgaattggctgttatggttatccgtactaaggatggtcaaactatttcataccctgctgttgaaaccgttcaagaaaacaatgtttgtcatactgtttatgctcctgccagactttctgattctattcaacaacaagccagaaacgttgccgaaaacgctgtcaagactttagatggtgctggtatttatggtgttgaaatgttccttatgaatggtgacaatgaagaaaccaattctgatttgattcttctcaacgaaattgctcctcgtcctcacaactctggtcattatactcaagacggttgtgccgtttctcaatttgatgctcatattcgtgcagttcttggcttacctattcctcctcttaccatgtctacacctagcacctacacaatcatgctcaacattttgggcgccaaagaagccaatggcgaacttgaagtgtgtaaaagagctcttgaagttccaggctgcactatccatttgtatggaaaaactactagacctggcagaaagatgggtcatatcaacatcactgctggaagcatgcgtgaagctgaagcaaaattagctgccatttcaggtgctacctctaaaaataccatcgaacaaactattcctaaagaagtcgctattgctggaacatcttctactcccaccgttggcatcattatgggttcagattccgatcttcccgtcatgagtgcagcttgcaaggttcttactgaattcaatgttccctacgaagtcaagatcgttagtgctcatcgtacacccagtcgtatgtacagctacgccatcaacggcgtgaaccgtggtttacgcgtcattattgcaggcgccggcggtgctgctcatcttcctggtatggtcgctgctcttactcctttacctgtaattggtgttcctgttaagggttctacactcgatggtgttgattctcttcatagtattgttcaaatgccccgtggcgttcctgtcgctactgttgctattaataatgccatgaacgccggtcttttggctgtcagaatcttggccactggtagcgaaaccaaagatgctgtcttgcttgctaagcttgaaaagtatattcaaaatatggaaaacgaagtgttggcaaagacggaaaagttggaaaccattggctatgaaaagtatttagaagaaaagaagaattaa

SEQ ID NO: 52169 - protein, 583 aa, Dipodascus magnusii
MDSRTVGILGGGQLGRMLVEAANRLNITTAILDAENSPATQINSVGPHVSGSFKDAVSIAKFAEKCDVLTVEIEHVNADILQDLLDQKKVKEIHPSPATIKLIQDKYTQKLHYLKHKLPTPAVLDVPNATQESVAAVGQKFGYPFVLKARTNAYDGRGNYVVKTAEDIPEALKALKDTPLYAEKFARFDRELAVMVIRTKDGQTISYPAVETVQENNVCHTVYAPARLSDSIQQQARNVAENAVKTLDGAGIYGVEMFLMNGDNEETNSDLILLNEIAPRPHNSGHYTQDGCAVSQFDAHIRAVLGLPIPPLTMSTPSTYTIMLNILGAKEANGELEVCKRALEVPGCTIHLYGKTTRPGRKMGHINITAGSMREAEAKLAAISGATSKNTIEQTIPKEVAIAGTSSTPTVGIIMGSDSDLPVMSAACKVLTEFNVPYEVKIVSAHRTPSRMYSYAINGVNRGLRVIIAGAGGAAHLPGMVAALTPLPVIGVPVKGSTLDGVDSLHSIVQMPRGVPVATVAINNAMNAGLLAVRILATGSETKDAVLLAKLEKYIQNMENEVLAKTEKLETIGYEKYLEEKKN

SEQ ID NO: 52170 - DNA, 1569 bp, Crypthecodinium cohnii
  CDS (1)..(1569)
atggctgttcctagcaagaccagtgtcgaggttgagaccaagagcaagattcgggaatacctggacatcgtccttcctgagtgctttatccctgagcttggtgagtctaagagtggcaaggtccgcgacatctatttcgccggcaagaacgtcgtgatggtcaccaacgatcgcgtttccgccttcgatttcatccttcccaatttgatcccattcaaggggcaggtcctatgcggcatcagtgaatgggcatttcaggagacaaaagacatcgttcctaatgctttgatcgagaacgtggactccagcgttgtcgtgcagaagaagatgacgaacttgaacgtggagttcatcgtccgaggctatttgtggggcagcatggccgcagcctatgagaagggcgacaggactttctgtggtttgaaggttcccgacggcttgaatcgattccagaagttcgatgagcccctgttcacaccaaccacgaaggctgaagtgggccacgacgagaacatgacctacgccgaggtcgagaagttgatcggcaaagacatggccaaaaaagccaaggacgtggccatgaagctctacgcccggggcgccgaactgatgaggaagcgaggattgatcctgatcgacacaaagtacgagttcggcctggacgaacatggcgtcctccacgtcatcgacgaggtgaacacgcccgattcctcaaggatgtgcaccgtcgaggagtgggagacgaagtacccgaagattgctgccgagatgaaaactggtaagcacaaggatgtctctgccttgatgaaggcgaagccggagttgaagttgaaggagttctcgaagcagtatgttcgcgatgctctcttggagatgggcttcgacccggccaaggacaacaaggctccgaagctttcggacgagcaggtggtggagtgtgcttaccgctacatccacatttacgagatggtgactggtaagcagttcgagttccctccgaaaatgtccccttcgaagcgcatcatcctgaacttgcagcgggcaggcatgctcgtcggcggcttcgtcatcatcgcggccggttcggattcggacatgccccacttggagaccttgaagaaggagcttgccaagttcaagatccccagccagatcaggatctgctctgcccacaagcagcctggccgcttggaacagctcatccaggcctacaacaagtccgtggagcccatcatgctcgtgggctgcgctggtggcaccgatgccctctctggtacagcttcttactcggcaactttccctgttgtttcctgccctcctgatggcatgaacagcacatgcttgacgaaccctcctggctcctcgaacgcgttcatcgtgaagcccgcgaacgtggggaagttcgcggcccagttcttcgcctcccattgcccgaaggtggcggccgagctcgaggccaacatccaggagaagatccgaaagttggagcaggccgacgagtcgctcgccaagagggctcgcttggccgagagcttcgccgagtccacgcccgccaagtccggggcttga

SEQ ID NO: 52171 - protein, 522 aa, Crypthecodinium cohnii
MAVPSKTSVEVETKSKIREYLDIVLPECFIPELGESKSGKVRDIYFAGKNVVMVTNDRVSAFDFILPNLIPFKGQVLCGISEWAFQETKDIVPNALIENVDSSVVVQKKMTNLNVEFIVRGYLWGSMAAAYEKGDRTFCGLKVPDGLNRFQKFDEPLFTPTTKAEVGHDENMTYAEVEKLIGKDMAKKAKDVAMKLYARGAELMRKRGLILIDTKYEFGLDEHGVLHVIDEVNTPDSSRMCTVEEWETKYPKIAAEMKTGKHKDVSALMKAKPELKLKEFSKQYVRDALLEMGFDPAKDNKAPKLSDEQVVECAYRYIHIYEMVTGKQFEFPPKMSPSKRIILNLQRAGMLVGGFVIIAAGSDSDMPHLETLKKELAKFKIPSQIRICSAHKQPGRLEQLIQAYNKSVEPIMLVGCAGGTDALSGTASYSATFPVVSCPPDGMNSTCLTNPPGSSNAFIVKPANVGKFAAQFFASHCPKVAAELEANIQEKIRKLEQADESLAKRARLAESFAESTPAKSGA

SEQ ID NO: 52172 - DNA, 480 bp, Thermoplasma volcanium
  CDS (1)..(480): transl_table=11
ttgcgattcatgccaaaggttgcagtaatcatggggagttcaagcgattacgaagtaatgaaagccgccatagatacactcaacgagttcggtgtagatgtaatctcgaaagtggtctctgcacataggactccagagtttatgatgcagtttgcaaaggaggcagcttcctctggaatagaagctataatagctggagcaggcggagctgcacacctgcctggcatggttgctgcgatgactccattgccggtgattggagtgccagttcctacgaaaaacctaggagggatggattccctgctatcaatagtgcaaatgccttctggtgtgccagtagctactgttgctattggcaattcgaagaatgcagctctgttggcaattcgaatactgtcaataaaatatcccgatcttatggccaaaatgtctgaatttatggaatctgaaaaacagcgggttcttcaagaaaagatctga

SEQ ID NO: 52173 - protein, 159 aa, Thermoplasma volcanium
MRFMPKVAVIMGSSSDYEVMKAAIDTLNEFGVDVISKVVSAHRTPEFMMQFAKEAASSGIEAIIAGAGGAAHLPGMVAAMTPLPVIGVPVPTKNLGGMDSLLSIVQMPSGVPVATVAIGNSKNAALLAIRILSIKYPDLMAKMSEFMESEKQRVLQEKI

SEQ ID NO: 52174 - DNA, 489 bp, Streptococcus suis
  CDS (1)..(489): transl_table=11
atgaatattccaatttccatcatcatgggctctagttccgactggaaaaccatgaaaaaagcagccgatgtgctggacaaatttggcgtagcctatgaaaagaaagtggtttttgcccaccgcaccccagacctcgtgttccgtcatgccgaagaggcgcgtggtcgtggtattaaggttattatcgcgggagcgggtggtgcggctcatttgccaggtatggtagcagccaagaccaccctgcctgttatcggtgttcctgtccaatcccgtgccctcagcggtgtggattcgctctattctatcgtgcaaatgccaggcggcgtacctgtggcaacgatggcaattggagaagcgggagcaaccaatgcggctttgactgccctgcgtatcctgtccatcgaagatagcggtatagcagatcaactggccagctttgctattgaacaaggaaaaatcgcggaggctatgagcgatgaactcaactaa

SEQ ID NO: 52175 - protein, 162 aa, Streptococcus suis
MNIPISIIMGSSSDWKTMKKAADVLDKFGVAYEKKVVFAHRTPDLVFRHAEEARGRGIKVIIAGAGGAAHLPGMVAAKTTLPVIGVPVQSRALSGVDSLYSIVQMPGGVPVATMAIGEAGATNAALTALRILSIEDSGIADQLASFAIEQGKIAEAMSDELN

SEQ ID NO: 52176 - DNA, 483 bp, Thermoplasma acidophilum
  CDS (1)..(483): transl_table=11
gtgagtcttatgcctagggttgcggttataatgggcagttcaagcgactacgagaccatgaagcccgctgtggatttcctcagatccatgcacatagatgttgtgctcaagattgtctcagcgcacaggacacctgaatatatgtttcagttcgcgtccagcgccagagatcaaggcatagaggttataattgctggggcaggcggtgcagcgcatcttccgggtatggttgcatcgatgacaacgctgcctgttataggcgtccctgttccgagcaggaatttaaatgggctggattcgcttctttccatagtgcagatgccatccggaatacctgttgccacggtcgcgatagggaattcgaaaaatgccgccatactggcatgcaggatactctccataaagtatcctgagatcgagaaagccattaagaagtacatggatgacgagcgagacagggtgcttaacgaaaagcttgaatga

SEQ ID NO: 52177 - protein, 160 aa, Thermoplasma acidophilum
MSLMPRVAVIMGSSSDYETMKPAVDFLRSMHIDVVLKIVSAHRTPEYMFQFASSARDQGIEVIIAGAGGAAHLPGMVASMTTLPVIGVPVPSRNLNGLDSLLSIVQMPSGIPVATVAIGNSKNAAILACRILSIKYPEIEKAIKKYMDDERDRVLNEKLE

SEQ ID NO: 52178 - DNA, 1719 bp, Candida boidinii
  CDS (1)..(1719)
atggattcaaagacaattggtatcttaggtggtggtcaacttggccgtatgttagttgaggctgctagtagattaaacatcaaaacagttattcttgaaaatggtgatcaatcaccagctaaacaaattaatgcttcttctactcacatagatggatctttcaatgatccagaagctattgctaaattagctgctgcttgtgatatcatgacagtagaaattgaacatgttaatacagaagccttacaaaaaatttcagattcaacaggtttaccaatttatccaactcctgctacattgtctgtcatcaaagataaatatttacaaaaagaacatttaataaaacatggtattgcagttgctgaatctgttgctgttgaatcaaatgaggaatcattattaaaagttggtgaacaatttggttaccctttcatgcttaaggctagaactttagcttatgacggaagaggtaattttgtcgttaaatctcaagataaaataaaagaagctatcgaattcttaggtgatagacctttatacgctgaaaaatgggctccatttactaaagaattagctgtcatggttgttagatccgttgatggtaacgtttactcttacccaacagttgaaacaatccatcgtgataatatctgtcatacagtctttgctccagctagagttcaagattctatcttaaagaaagctcaaatcttagctgataacgcagttaagtcatttgatggtgctggtatctttggtgttgaaatgttcttattaccttcaggtgatttattagttaatgaaattgccccaagaccacataactcaggtcattacacaattgacgcttgcgttacttcacaatttgaagctcttattagagctttagccggtttaccaatgccagataatttcactaaattctcaactccacaaacaaatgccattatgttaaacgttttaggtactgatatcccaaattctgaatttgaattatgtagacgtgctttagaaactccaaattcttctgtttatttatacggtaaaacaacaagacctaagagaaaaatgggtcacattaatattgtttcaggttctatgcaagattgtgaacgtcgtttaagatatatcgaaggtgaaacagatgaaaaacctgctgctgccaactcaaagaccaacgctgtcgctggtacttctgaaaaacctttggtcggtgttatcatgggttcagattctgatttacctgttatgtcattaggctgtaatatactgaaacaatttggtgtcccatttgaagtcactattgtatcagctcacagaaccccagaacgtatggctaaatacgcagctgacgctccagcaagaggtattaaagctataatagcaggtgctggtggtgctgctcacttaccaggtatggtcgctgccatgaccccattaccagtcattggtgtcccagttaaaggatcaactttagatggtgttgattctttacactcaattgttcaaatgccaagaggtatcccagttgctacagttgctattaataatgctacaaatgcggctttattagctattagaatattaggtgcttctgatagtaaatggtttacagaaatggatgcttatatgaaaggtatggaaaaagaagttttacaaaaagctgaaaaacttgaaaaaggcggttatgaagattacttatcaacctacaaaaaataa

SEQ ID NO: 52179 - protein, 572 aa, Candida boidinii
MDSKTIGILGGGQLGRMLVEAASRLNIKTVILENGDQSPAKQINASSTHIDGSFNDPEAIAKLAAACDIMTVEIEHVNTEALQKISDSTGLPIYPTPATLSVIKDKYLQKEHLIKHGIAVAESVAVESNEESLLKVGEQFGYPFMLKARTLAYDGRGNFVVKSQDKIKEAIEFLGDRPLYAEKWAPFTKELAVMVVRSVDGNVYSYPTVETIHRDNICHTVFAPARVQDSILKKAQILADNAVKSFDGAGIFGVEMFLLPSGDLLVNEIAPRPHNSGHYTIDACVTSQFEALIRALAGLPMPDNFTKFSTPQTNAIMLNVLGTDIPNSEFELCRRALETPNSSVYLYGKTTRPKRKMGHINIVSGSMQDCERRLRYIEGETDEKPAAANSKTNAVAGTSEKPLVGVIMGSDSDLPVMSLGCNILKQFGVPFEVTIVSAHRTPERMAKYAADAPARGIKAIIAGAGGAAHLPGMVAAMTPLPVIGVPVKGSTLDGVDSLHSIVQMPRGIPVATVAINNATNAALLAIRILGASDSKWFTEMDAYMKGMEKEVLQKAEKLEKGGYEDYLSTYKK

SEQ ID NO: 52180 - DNA, 1713 bp, Zygosaccharomyces rouxii
  CDS (1)..(1713)
atgaattcgcaaactgttggtatacttggtggtggccaattgggtcgtatggttgttgaagctgctaatagattaaacatcaagactattatattagatgcaccaaattccccagctaagcaaattaatgcgttaaatgaacatgtagatggttcattctcaaatccagctgatattgaaaaattagctgaaaaatgtgatgtcttgacagttgaaattgaacatgtcgatgtgcccactttgaagaaactacaatcaaaacatcctaacctaaaaatttatccatctccagaaaccattggtttaattcaagataagtatgtccaaaaaaaccatttagtggccaataatattgcagtagcagaatctatacccattgaatccacaactagtgaaggtttagctctagctggtagacaattgggatacccctacatgttaaaatcaagaacaatggcttacgatggtagaggaaattttgtagttaagagcgaggaatcaattccaaaagcccttgagtttttgaaagatagaccattatatgccgaaaaatgggctccatttactaaagaattggctgttatgattgtgcgttccattgatggtcgtgtgttttcatacccaaccgtagagacaattcataaggataacatctgtttcctatgttatgcaccagcaagagttcccgattccgttcaattaaaggccaaactattagcagaaaatgcagttagagcttttcccggttgtggtatctttggtgttgaaatgttctatttagaaacaggggaattgctcatcaacgaaattgcaccaagacctcataattctggtcactatacgattgatgcctgtattacttcacaatttgaagcacacctaagagctatcctagacttaccaatgcccaaggatttctcctctctttctacatcttgcaccaacgccattatgctcaacgtgcttggagaagatgtaaagaatcaagaattacagacttgcgaaagagcgttagagaccccaggtgcctctgtgtacctgtacggtaaggaatcaagacctaagcgcaaattaggtcacattaatgtggttacttcatccatggaggagtgtgaaagacgtctttcattcattactggcgagacttctgagccagttaagatcactgtagctcaaaagatagattcggaatccaatgggaaacctgttgtcggcattattatgggttccgattcagacctaccagtaatgtccaaggcatgtgctattcttgaagaatttgaggtcccattcgaagtgacaatcgtttctgctcacagaacccctcaaagaatgaacaaatatgcatcagaagcctcttctcgtggtctaaaggccatcattgcaggtgcaggtggtgctgcccatctacctggtatggttgccgctatgactcctctaccagttatcggtgtaccagtgaaaggctcctccctagatggtgtcgattccctacattccattgtacaaatgcctagaggggtgcctgtagctacagtggcaatcaacaatagcaccaacgcagccctgctggcagtcaggttcatcggtgctttcgaaccaaagtaccataagaaaatgcaacagtacctgttaaaacaagaggtagaagtgctagaaaaggctaaaaaattggaaaattctggttacaagaattacatgggccttgagtaa

SEQ ID NO: 52181 - protein, 570 aa, Zygosaccharomyces rouxii
MNSQTVGILGGGQLGRMVVEAANRLNIKTIILDAPNSPAKQINALNEHVDGSFSNPADIEKLAEKCDVLTVEIEHVDVPTLKKLQSKHPNLKIYPSPETIGLIQDKYVQKNHLVANNIAVAESIPIESTTSEGLALAGRQLGYPYMLKSRTMAYDGRGNFVVKSEESIPKALEFLKDRPLYAEKWAPFTKELAVMIVRSIDGRVFSYPTVETIHKDNICFLCYAPARVPDSVQLKAKLLAENAVRAFPGCGIFGVEMFYLETGELLINEIAPRPHNSGHYTIDACITSQFEAHLRAILDLPMPKDFSSLSTSCTNAIMLNVLGEDVKNQELQTCERALETPGASVYLYGKESRPKRKLGHINVVTSSMEECERRLSFITGETSEPVKITVAQKIDSESNGKPVVGIIMGSDSDLPVMSKACAILEEFEVPFEVTIVSAHRTPQRMNKYASEASSRGLKAIIAGAGGAAHLPGMVAAMTPLPVIGVPVKGSSLDGVDSLHSIVQMPRGVPVATVAINNSTNAALLAVRFIGAFEPKYHKKMQQYLLKQEVEVLEKAKKLENSGYKNYMGLE

SEQ ID NO: 52182 - DNA, 486 bp, Lactococcus lactis
  CDS (1)..(486): transl_table=11
atggcagaagtagcaattatcatgggttgcagctcagattgggcgacaatgaaagaaacagcaaaaattttagatgactttggtttagcttatgaaaaaaaggtcgtatcagcacaccgaacaccagctttgatggctgaattttcgagccaagcccgtgagcgaggttataaagttatcatcgcaggtgctggtggagccgctcatttgccaggaatggtatctgctcagactctcgttccagtcattggcgttccaataaaatcacgcgctttatctggtctggattcactttattcaattgttcaaatgccggcaggggttcctgtagcgacaatggcaattggagaggctggagcaaaaaatgctgctttatttgctttgcaacttttggcgaatacaaacgagaatttaatccaaaaattgttggtctatcgggctgctgcgcaagaaatggttgaggaatcaaacaaagcattactttaa

SEQ ID NO: 52183 - protein, 161 aa, Lactococcus lactis
MAEVAIIMGCSSDWATMKETAKILDDFGLAYEKKVVSAHRTPALMAEFSSQARERGYKVIIAGAGGAAHLPGMVSAQTLVPVIGVPIKSRALSGLDSLYSIVQMPAGVPVATMAIGEAGAKNAALFALQLLANTNENLIQKLLVYRAAAQEMVEESNKALL

SEQ ID NO: 52184 - DNA, 504 bp, Aquifex aeolicus
  CDS (1)..(504): transl_table=11
atgaaaccactcgttggcgtaataatgggaagtatttccgactgggagtatatgaaaaaggctgttgaagttttaaaggaattcggagttcctcacgaggttaaagtggtctccgcacacagaacgcccgaactcatgtatgaatacgcaaaaaccgcaagggagaggggaatagaggtgataatagcgggagcgggaggctccgcccatcttccgggaatgaccgcctctatgactacacttcccgttataggcgttcccatacccactaaaaacctcggaggagtggactcgttgtactcgatagtccagatgccagcgggtattcccgtggctacggtggctataggaaacgcaacaaatgccgggctcttagcggtaagaattctctcaataaagtaccccgagtatgctaagaaattggacgagtacacggaaaaactgaaggagaaagtggctaaaatgaacgaagaactgcaaaaggaggtggaaaatggaatttga

SEQ ID NO: 52185 - protein, 167 aa, Aquifex aeolicus
MKPLVGVIMGSISDWEYMKKAVEVLKEFGVPHEVKVVSAHRTPELMYEYAKTARERGIEVIIAGAGGSAHLPGMTASMTTLPVIGVPIPTKNLGGVDSLYSIVQMPAGIPVATVAIGNATNAGLLAVRILSIKYPEYAKKLDEYTEKLKEKVAKMNEELQKEVENGI

SEQ ID NO: 52186 - DNA, 543 bp, Archaeoglobus fulgidus
  CDS (1)..(543): transl_table=11
atgtctcaattcctgagcttaaggaactgcttgaggcttacgataaggttgttgaggcaatttcgaagaggtgaagggatgaaggcggtaataattatgggttcgaaatctgacctggattactcgaagaagatagcttcaaagctcgcagattttggcattgatgctgtaatgagaatcgcttcagcccacaaaactcccgagaaggttctggaaatcataaaggagtacgagaaggaggatgtggtcttcgtcaccgtagcgggaaggagcaacgctctgagcggttttgttgacgcaaacacctcaaagccggtaatagcgtctcccccctacagcgacaagtttggaggggcagacatcttctcaagcataaggatgccttcaggcgttgcgccaatgctcgttcttgaggctgagaacgctgccttagcggttgcaaagattttcgctcttaaggatgagggggtcagggagaaagttgtccagttccaggagaacaagaggagagaaatttataaagcggatgaggaactgaggtga

SEQ ID NO: 52187 - protein, 180 aa, Archaeoglobus fulgidus
MSQFLSLRNCLRLTIRLLRQFRRGEGMKAVIIMGSKSDLDYSKKIASKLADFGIDAVMRIASAHKTPEKVLEIIKEYEKEDVVFVTVAGRSNALSGFVDANTSKPVIASPPYSDKFGGADIFSSIRMPSGVAPMLVLEAENAALAVAKIFALKDEGVREKVVQFQENKRREIYKADEELR

SEQ ID NO: 52188 - DNA, 489 bp, Bacillus subtilis
  CDS (1)..(489): transl_table=11
atgcagccgctagtaggaatcatcatgggaagcacttccgattgggagacaatgaaacacgcatgcgacatacttgacgaactcaatgttccgtacgaaaaaaaggtcgtttccgctcaccggacgcctgatttcatgtttgaatatgctgaaactgctagagaaagaggcatcaaggtgattattgccggtgccggaggagcggcgcatctgccagggatgacggctgcgaaaacaacactgccagtcattggagttccggttcagtccaaggcgctgaacggaatggattcacttctttccatcgtccaaatgcctggaggcgtgcctgttgcgacaacatccatcggcaaagcgggtgctgtgaacgcaggcctgttagcggcgcaaattttgtcagcatttgacgaagaccttgcccgtaagctggatgagagaagagaaaatacaaaacagacagtgttagaaagcagtgatcagcttgtctaa

SEQ ID NO: 52189 - protein, 162 aa, Bacillus subtilis
MQPLVGIIMGSTSDWETMKHACDILDELNVPYEKKVVSAHRTPDFMFEYAETARERGIKVIIAGAGGAAHLPGMTAAKTTLPVIGVPVQSKALNGMDSLLSIVQMPGGVPVATTSIGKAGAVNAGLLAAQILSAFDEDLARKLDERRENTKQTVLESSDQLV

SEQ ID NO: 52190 - DNA, 1707 bp, Candida albicans
  CDS (1)..(1707): transl_table=12
atggatagcaaaactgttggtattttaggaggtggccaattaggtcgtatgattgttgaagcagcacatagattgaatatcaagaccgtaattttggacgcagccaaatcaccagctaaacagatcaatgctctagacgatcacgttgatggatcgttcacaaactatgattcgattgtgaaattagctgaaaaggcagacgtattaactgttgaaatcgaacatgttgatgttgatgctttaatcaaagttcaagagaaattccctaaagttgaaatatatccattacctgaaaccataagattgattcaagataaatatttacagaaaaatcatttaatcaaacacgatgttgcagttacagaatctgttgcagttgaaaccaacacagtcgatgacttgttacacattggggaaaagtttggatacccttatatgttaaaatcgagaactttggcgtatgatggtagaggtaactttgttgtcaaagacaagtcatactgtgagaaagctttagaatttttaaaagaccgtccattatatgctgaaaaatggtgtcctttcaccaaagaattggctgtgatggttgtcagatcattagaaggggaagtctttgcttacccaactgttgaaactattcatgaaaacaatatttggcatttagtgtatgctcctgccaggatcccagatactttgggccaaaaggcatctatattagccaaaaatgcagttaagtcattccccgggtgtggtattttcggtgttgaaatgttcttgttggaaaacaacgaattattgatcaatgaaattgcaccaagacctcacaactctggtcattataccattgatgcatgtgtcacttcacaatttgaagctcatgttcgtgctgtcacaggattacctatgccaaaggggttcactgaattctccacttccatcaccaatgctattatgttgaatgtcttgggtgataaggcaaccccaaataaagaactggagatttgtcgccgtgctttggaaactccacatgcgtcagtgtatctttatggtaaagctactagaccagagcgaaagatgggtcatatcaatgttgtcacatcttccatgcaagatgccgagagtagattaagttatatattgggtgataccactgaaattcctaaatctttagctaccgacaaggaatctccattggtgggaataataatgggttccgattcggatctaccagttatggcagttggtgctcgtattttgaaacaattcggtgtgccatttgaactcacaatcgtaagtgcacacagaactcctcatagaatgtctgagtatgctattgaagcaccaaagcgtggcttgaaatgtatcattgctggtgcaggtggtgctgctcatttgccaggtatggtggcggccatgaccccattgcctgtcattggtgttccagttaagggatctacattagatggggttgattcgttacactctatagtacagatgccaagaggtattcctgttgcaactgttgctattaacaatagtactaatgctgcattgttggcaatcagaatattaggcgcctatgactcaaaatggttgactgagatgaaccaatatatgttgaacatggaaactgaagtattaggtaaagcagaaactttagaagaaattggatatgaagactatttaactgataaattgaaaaaatag

SEQ ID NO: 52191 - protein, 568 aa, Candida albicans
MDSKTVGILGGGQLGRMIVEAAHRLNIKTVILDAAKSPAKQINALDDHVDGSFTNYDSIVKLAEKADVLTVEIEHVDVDALIKVQEKFPKVEIYPLPETIRLIQDKYLQKNHLIKHDVAVTESVAVETNTVDDLLHIGEKFGYPYMLKSRTLAYDGRGNFVVKDKSYCEKALEFLKDRPLYAEKWCPFTKELAVMVVRSLEGEVFAYPTVETIHENNIWHLVYAPARIPDTLGQKASILAKNAVKSFPGCGIFGVEMFLLENNELLINEIAPRPHNSGHYTIDACVTSQFEAHVRAVTGLPMPKGFTEFSTSITNAIMLNVLGDKATPNKESEICRRALETPHASVYLYGKATRPERKMGHINVVTSSMQDAESRLSYILGDTTEIPKSLATDKESPLVGIIMGSDSDLPVMAVGARILKQFGVPFELTIVSAHRTPHRMSEYAIEAPKRGLKCIIAGAGGAAHLPGMVAAMTPLPVIGVPVKGSTLDGVDSLHSIVQMPRGIPVATVAINNSTNAALLAIRILGAYDSKWLTEMNQYMLNMETEVLGKAETLEEIGYEDYLTDKLKK

SEQ ID NO: 52192 - DNA, 1713 bp, Candida glabrata
  CDS (1)..(1713)
atggactctagaactgtcggtattttgggtggaggccagttgggccgtatgattgtcgaggctgcaaaccgcttgaatatcaagactttgatacttgacgcaccaaattcacctgcgaagcaaattacgaatgcatctgatcatgtcgatggatcatttgcaaataaggaggatatcgaggccttggctgccaagtgtgatgttatgacagttgaaatcgagcatgtggatgttaatgcattgaaggaagtccaaaaacaattccccaaattggaaatctaccctacgcctgaaaccattggtttgatccaggataagtatgtgcaaaaacaacatttagttaagaatagaattcccgtagtaccgagcatcactgttgaaaattcgaaggaatccttaattaaaacaggatcctcattgggttacccatttgtcttgaaatcaagaacattagcctacgatggaagaggcaactttgttgttaaatctgaagaagacattgagaaaggacttgaatttttggcgaacagaccactatacgctgaaaaatgggcttcctttaagaaggaattatctgtaatgattatcagatcattggatggaagagtatattcataccctattgttgaaacaattcacaaaaacaatgtgtgccacttgtgctatgttccggctcgtgtaccagactcagtacaacacaaggccaaattaatggcggaaaatgcaatcaagtcattcccaggttgtggtatatttggtgtagaaatgtttttgttggatgatgactctatcgtcttgaatgaaattgcacccagacctcataactcaggtcattacaccattaatgcttgtgttgtatctcaatttgaagcacacttgagagccatattagatttacccatgcccaagaactttacttccttaagtactaactctacaaatgctataatgctaaacctattaggagatcctgaaactaaagacaaggaacttcaaatatgtgagagggccttgaatacgcctggcgcatctgtatacctatacggcaaagagtccaagcctaacagaaaggtcggtcatatcaatattgtatgttcgagtatgaaggaatgtgacaagagattacagtttattatgggtctaaaaaccgacccaattaagcattcagttatggaaattttaaatgcggaggaagtaagaaaacctttagttggtgttataatgggatccgattctgatttacccgtaatgtcagcagcttgtaaaatgttggagcaattcgaggtcccatttgaggtcactatagtctcagcacacagaactccttacagaatgaataaatatgcttcagaagcagtatcccgtggtattaaagttatcattgcaggtgcgggtggagcagcacatcttccaggtatggtagcagctatgacacctgtaccagttattggagtacctgtcaagggctctactttagatggtgtagactcactacattctattgttcaaatgccaagaggtgtaccagtagccacagtagccataaataacagcactaacgcaggtattctggctgttaggatgttaggaatacataattatgactatgttaagaaaatggaggaatttttgaacaaacaggaagaggaagtacttcagaaagcagccaaactcgaaagcattggatatgaaaagtacctagagtccaaatag

SEQ ID NO: 52193 - protein, 570 aa, Candida glabrata
MDSRTVGILGGGQLGRMIVEAANRLNIKTLILDAPNSPAKQITNASDHVDGSFANKEDIEALAAKCDVMTVEIEHVDVNALKEVQKQFPKLEIYPTPETIGLIQDKYVQKQHLVKNRIPVVPSITVENSKESLIKTGSSLGYPFVLKSRTLAYDGRGNFVVKSEEDIEKGLEFLANRPLYAEKWASFKKELSVMIIRSLDGRVYSYPIVETIHKNNVCHLCYVPARVPDSVQHKAKLMAENAIKSFPGCGIFGVEMFLLDDDSIVLNEIAPRPHNSGHYTINACVVSQFEAHLRAILDLPMPKNFTSLSTNSTNAIMLNLLGDPETKDKELQICERALNTPGASVYLYGKESKPNRKVGHINIVCSSMKECDKRLQFIMGLKTDPIKHSVMEILNAEEVRKPLVGVIMGSDSDLPVMSAACKMLEQFEVPFEVTIVSAHRTPYRMNKYASEAVSRGIKVIIAGAGGAAHLPGMVAAMTPVPVIGVPVKGSTLDGVDSLHSIVQMPRGVPVATVAINNSTNAGILAVRMLGIHNYDYVKKMEEFLNKQEEEVLQKAAKLESIGYEKYLESK

SEQ ID NO: 52194 - DNA, 534 bp, Corynebacterium ammoniagenes
  CDS (1)..(534): transl_table=11
atgactgcaccgctagttgggctcatcatgggctctgattctgattggccaaccgttgaaccagcagctgaggttctcgacgaattcggtgttccttttgaggtgggcgtggtctctgcgcaccgcacgccggaaaagatgctggattacgccaagcaagcccacactcgcggcatcaaggtgattgttgcttgtgccggtggggcagcgcacctaccaggcatggtggctgcagcaactcctttgccagttattggtattccacgtgccttgaaagatttggaaggtctggactctttgctgtctatcgtgcagatgccagctggggttccggttgcgaccgtgtctatcggcggcgctaagaatgctggcttgctcgccatccgtaccctgggcgtgcagtactcagaattggttgaacgcatggccgattaccaagaaaatatggccgattaccaaccgaaaatatggccaaggaagttgagcaaaaagacgccaatcttcgcgccaagctcatgggggactagaccttag

SEQ ID NO: 52195 - protein, 177 aa, Corynebacterium ammoniagenes
MTAPLVGLIMGSDSDWPTVEPAAEVLDEFGVPFEVGVVSAHRTPEKMLDYAKQAHTRGIKVIVACAGGAAHLPGMVAAATPLPVIGIPRALKDLEGLDSLLSIVQMPAGVPVATVSIGGAKNAGLLAIRTLGVQYSELVERMADYQENMADYQPKIWPRKLSKKTPIFAPSSWGTRP

SEQ ID NO: 52196 - DNA, 1749 bp, Cryptococcus neoformans
  CDS (1)..(1749)
atggcccccagaaagactgtcggtatcctcggcggtggccagctcggccggatgcttacccaccctgcggcccttctcggcattcctctccttatcctcgactctggctcctacacgcccgccaaacagactcttcttcctcctcctcctcattctcaccctgatggtcccttcacttcggaaactcatattcgcaaacttgcctctgcgtgcgacatcctgacagtggagatcgagcacgttaacgccgatgtccttgaggctgtagaaaaggaaggtctttgtgaagtccagcccagtccccaaactatcagattgatccagaacaagtacgaccaaaagaagtaccttgctgaaagaggtgtggctgttgcaccttttgaggagcttcccgcaaacccgacggaagaggattttaaggctatcgcaggtcgattgggtttgcctttgatgctcaaagctaagacccttgcctacgatggacgtgggaactcacctcttaaatccgcatcttcaggggacattcaggcttccttgaaattccttggtgacaggcctctttatgctgaaggatgggcgccctttgtcaaggaagttgcggttatggtcgttaggaataaggagggcgaagtccgaagttacgacgccgtcgagactattcacagggagagcattttacgagtctgtttggcccccctcagaggtgaaaagggtgtgaatcagagggctagggaattagctgagaaggcggttggacaccttgagggtgctggtatctttggggttgagatgttcctcatgcctgatggtgaacttcttctgaacgagattgctcctcgtcctcataactctggtcatcacactattgaggcctgtcttacttcccaatttgagaaccaccttcgagccattctctccttgcctcttggttctactgctcttcgtgttccctccgctgccatggtcaacattctcggtgcctcgtcgactatggacgccatcgacaaaatggcagacaatgctctcactgttcctggtgctgccgtgcatctctacggcaaagctgagagccgaaaggcccgtaagatgggccacatcacggtgactgccgaaagcgatgctgagctcaatgagcgccttagagccctcttattcgcccagcctgatgcccatgccgactggatcgacctcatcgcccctccttcccctgctcccgctcattcccacgccaaaccccttgttggtatcatcatgggtagcgactctgacttgcccgttatgcaccctgctaccaagatcctcgaaaaattcggtgtcccctacgagctcaccataacttctgcccatcgcactcctgagcgaatggtgaagtatgcgaagactgctgcagaccgaggattgcgagccatcattgctggggctggcggtgctgcccatttaccaggtatggtcgccagcgagaccagtttgccagtcatcggtgtgcccgtcaaggccagtgtactggatggcgtggattcattgtatagtattgtgcaaatgccccgaggtattccatgcgccactgtgggtatcaacaactctacaaatgccgcgctacttgcagtccgtatccttggaacatctgtacccgcccttaacaaggctactgaggaatattccaaggcgctagaggaagaagttttggctaaagccgacattttggaggaggaaggctgggacaagtacatcgagaggctgaagaaataa

SEQ ID NO: 52197 - protein, 582 aa, Cryptococcus neoformans
MAPRKTVGILGGGQLGRMLTHPAALLGIPLLILDSGSYTPAKQTLLPPPPHSHPDGPFTSETHIRKLASACDILTVEIEHVNADVLEAVEKEGLCEVQPSPQTIRLIQNKYDQKKYLAERGVAVAPFEELPANPTEEDFKAIAGRLGLPLMLKAKTLAYDGRGNSPLKSASSGDIQASLKFLGDRPLYAEGWAPFVKEVAVMVVRNKEGEVRSYDAVETIHRESILRVCLAPLRGEKGVNQRARELAEKAVGHLEGAGIFGVEMFLMPDGELLLNEIAPRPHNSGHHTIEACLTSQFENHLRAILSLPLGSTALRVPSAAMVNILGASSTMDAIDKMADNALTVPGAAVHLYGKAESRKARKMGHITVTAESDAELNERLRALLFAQPDAHADWIDLIAPPSPAPAHSHAKPLVGIIMGSDSDLPVMHPATKILEKFGVPYELTITSAHRTPERMVKYAKTAADRGLRAIIAGAGGAAHLPGMVASETSLPVIGVPVKASVLDGVDSLYSIVQMPRGIPCATVGINNSTNAALLAVRILGTSVPALNKATEEYSKALEEEVLAKADILEEEGWDKYIERLKK

SEQ ID NO: 52198 - DNA, 1674 bp, Debaryomyces occidentalis
  CDS (1)..(1674)
atggataacaagatagttgggattttaggcggtggccaattaggtcgtatgatagttgaagcagctaacaggctaaacatcaaaaccgtcgtattagatgtaccaaactcacctgcaaagcaaattaattcaaatgaacatgttgatggatcattcacagatttaaaatctattattcaattagctgaaaaatgtgacattttaaccgttgaaattgaacatgttgatgttgaagctttaaaatatgttaaggaaaaatttggcgttgaaatttatccattgccagacacaattaaattaattcaagataaatatttacagaaggagcatttgattcaacatggaatttctgtaactgaatcggtagcagtgccatccaatgatgaacaatccttaattgagatcggtaataaatttaattatcccttcatgttgaaatcgagaactttagcctatgatggaagaggtaactacgttgttaaaacaaaagaatcaattcctgaagctcttgagtttttaaaagacagacctttgtatgctgaaaaatggtgtccgtttaacaaagaattagcagtaatggttgttagatcaattgaaggtgaagtatttgcatatcctactgttgaaactatccataaaaataatatctgtcatgtagtgtatgctcctgcaagggtttcagactccatagcagtgaaagcttcagtattagctaaaaacgctgttaaatctttcccaggttgtggtatttttggtgttgaaatgttcttattaccaaacaatgaaatattaattaatgagattgctccaagacctcataactctggacattacactatcgatgcttgtgtcacatcacaatttgaagctcatgtcagagcagttgttggattaccaatgccaaagaactttaccagtctctctacaactacaacaaatgcaattatgttaaatgtgttaggtgacgaagaatcaaataaagaattagaaatttgtcgtagagctttggaaactccaaatgcttctgtttatctctacgggaagtcaactagaccaaacagaaaaatgggtcatattaacattgtctcatcttcaatggaagattgtgagagtagattggactatattataggcaaatcatcaaaaatcccagaaaatttaattccaaaagaaaaacccttagtcagtataataatgggttcagattcagacttgccagttatgtctgttggtgcaaacattttaaagaggtttggagttccatttgaattaactatcgttagtgcgcatagaacacctcatagaatgacacaatatgctattgaagcaccaaagagaggcttaaaagtcataattgctggtgcaggtggtgctgctcatttaccaggtatggttgctgccatgacaccattaccagttattggcgttcctgtgaaaggctcgactttagatggtgttgattcattgcattcaatcgttcaaatgccaaggggtattcctgttgcaactgtcgcaattaataacagtactaatgctgccttgttggcagtccgtattttgggagcctacgactacaagtggttaaatgagatgaaccagtatatgaataacatggaaaacgaagtgttagctaaagctgaaagattggaagaagttggttatgaaaaatattaa

SEQ ID NO: 52199 - protein, 557 aa, Debaryomyces occidentalis
MDNKIVGILGGGQLGRMIVEAANRLNIKTVVLDVPNSPAKQINSNEHVDGSFTDLKSIIQLAEKCDILTVEIEHVDVEALKYVKEKFGVEIYPLPDTIKLIQDKYLQKEHLIQHGISVTESVAVPSNDEQSLIEIGNKFNYPFMLKSRTLAYDGRGNYVVKTKESIPEALEFLKDRPLYAEKWCPFNKELAVMVVRSIEGEVFAYPTVETIHKNNICHVVYAPARVSDSIAVKASVLAKNAVKSFPGCGIFGVEMFLLPNNEILINEIAPRPHNSGHYTIDACVTSQFEAHVRAVVGLPMPKNFTSLSTTTTNAIMLNVLGDEESNKELEICRRALETPNASVYLYGKSTRPNRKMGHINIVSSSMEDCESRLDYIIGKSSKIPENLIPKEKPLVSIIMGSDSDLPVMSVGANILKRFGVPFELTIVSAHRTPHRMTQYAIEAPKRGLKVIIAGAGGAAHLPGMVAAMTPLPVIGVPVKGSTLDGVDSLHSIVQMPRGIPVATVAINNSTNAALLAVRILGAYDYKWLNEMNQYMNNMENEVLAKAERLEEVGYEKY

SEQ ID NO: 52200 - DNA, 1290 bp, Drosophila melanogaster
  CDS (1)..(1290)
atgtccaccaccacaaccgcatccattgagggctataagctcggcaaggtcatcatcgagggcaaaaccaaacaggtgtacgatctgccagagcagccaggactttgcctgctcctcagcaaggatcgcatcaccgccggcgatggtgtcaaagcacatgatctggccggcaaggcggagatctccaataccaccaacggtcaggtcttccggctgctcaacgaggcaggcattcgcaccgcctatgtgaagcagtgcggcgccaaggccttcatcgcccgcaagtgccagatgatacccattgagtgggtgacccgtcgcctggccaccggttcgttcctcaagcgcaatgtcggcgtccccgagggctacagattctcgccgcccaaacaggagacgttcttcaaggatgatgccaaccacgatccccagtggagcgaggagcaaattgtctccgccaagttcgagctaaatggcctggtgatcggccaagatgaggtggacattatgcgtagaaccacactgctggtcttcgagattctcgagagggcatggcagaccaagaattgcgccctgatcgacatgaaagtggagttcggtatctgcgacgatggcaacatagtgctggccgatatcattgattccgattcgtggcgcttgtggccagcgggtgacaaacgtttgatggtcgacaagcaggtgtatcgcaatctggcatcggtgacggccagcgatttggataccgtaaagaggaatttcatttgggtggccgaacaactggctgatattgtgcccaagaaggatcacctggttgtcattctgatgggcagtgcttccgatatatcgcacagcgagaagatagccaccagctgtcgatccctaggccttaatgtggaacttcgcgtgagttcggcccacaagggaccggaggaaacgttgcgcattgtccgcgaatatgaatcggtgatgagcaacttgatctttgtggccgtcgccgggcgatccaatggactgggtccagtcgtttccggcagcaccaactatccggtaatcaattgtccgcccgtcaaatcggacaacatgcaggtggacgtgtggtccagcttgaatctgccatcggggctgggctgtgccacagttctctatccagaggcagctgctctgcatgcggccaccattctggggctgggcaacttcatggtctggtcgaaattgcgtgtcaaggcgctcaacaactttatcactctcaagaaggccgacaaggagttgcgcggcgtgcgaaatgcttag

SEQ ID NO: 52201 - protein, 429 aa, Drosophila melanogaster
MSTTTTASIEGYKLGKVIIEGKTKQVYDLPEQPGLCLLLSKDRITAGDGVKAHDLAGKAEISNTTNGQVFRLLNEAGIRTAYVKQCGAKAFIARKCQMIPIEWVTRRLATGSFLKRNVGVPEGYRFSPPKQETFFKDDANHDPQWSEEQIVSAKFELNGLVIGQDEVDIMRRTTLLVFEILERAWQTKNCALIDMKVEFGICDDGNIVLADIIDSDSWRLWPAGDKRLMVDKQVYRNLASVTASDLDTVKRNFIWVAEQLADIVPKKDHLVVILMGSASDISHSEKIATSCRSLGLNVELRVSSAHKGPEETLRIVREYESVMSNLIFVAVAGRSNGLGPVVSGSTNYPVINCPPVKSDNMQVDVWSSLNLPSGLGCATVLYPEAAALHAATILGLGNFMVWSKLRVKALNNFITLKKADKELRGVRNA

SEQ ID NO: 52202 - DNA, 510 bp, Escherichia coli O157
  CDS (1)..(510): transl_table=11
atgtcttcccgcaataatccggcgcgtgtcgccatcgtgatggggtccaaaagcgactgggctaccatgcagttcgccgccgaaatcttcgaaatcctgaatgtcccgcaccacgttgaagtggtttctgctcaccgcacccccgataaactattcagcttcgccgaaagtgccgaagagaacggttatcaggtgattattgcgggcgcaggcggcgcagcgcacctgccaggcatgattgccgccaaaacgctggtgccagtgctgggcgtgccagtacagagcgccgcactgagcggtgtcgatagcctctactccatcgtacaaatgccacgcggcattccggtgggtacgctggcgattggtaaagctggcgcggcaaacgcggcattactggcagcacaaattcttgcgactcatgataaagaactgcaccagcgtctgaatgactggcgcaaagcacaaactgatgaagtgctggaaaacccggacccgcgaggtgcggcatga

SEQ ID NO: 52203 - protein, 169 aa, Escherichia coli O157
MSSRNNPARVAIVMGSKSDWATMQFAAEIFEILNVPHHVEVVSAHRTPDKLFSFAESAEENGYQVIIAGAGGAAHLPGMIAAKTLVPVLGVPVQSAALSGVDSLYSIVQMPRGIPVGTLAIGKAGAANAALLAAQILATHDKELHQRLNDWRKAQTDEVLENPDPRGAA

SEQ ID NO: 52204 - DNA, 495 bp, Haemophilus influenzae
  CDS (1)..(495): transl_table=11
atgtcaaaaactgcacaaattgccgttgtaatgggttccaaaagcgattgggctactatgcaagaggcaactcagattttagatgaattaaacgtgccttatcatgtggaagtcgtctcggctcatcgtacgcctgataaactttttgaatttgctgaaaatgcacaaaaaaatggctataaagtaattattgctggtgcagggggggcggcacatttacccggtatgatcgcagcgaaaacacttgtgccagtgctgggggtgccagtaaaaagttctatgttaagtggtgtggatagcctttattcaattgtgcaaatgccaaaagggattcctgtcggaacattagcgattggccctgcgggtgcggcaaatgctgggttgttagcagcccaaattctagcaggttgggatgatgcgttattcactcgcctacaagcattccgcgaaaatcaaaccaatatggtattggacaatcctgatccacgcacataa

SEQ ID NO: 52205 - protein, 164 aa, Haemophilus influenzae
MSKTAQIAVVMGSKSDWATMQEATQILDELNVPYHVEVVSAHRTPDKLFEFAENAQKNGYKVIIAGAGGAAHLPGMIAAKTLVPVLGVPVKSSMLSGVDSLYSIVQMPKGIPVGTLAIGPAGAANAGLLAAQILAGWDDALFTRLQAFRENQTNMVLDNPDPRT

SEQ ID NO: 52206 - DNA, 474 bp, Methanococcus jannaschii
  CDS (1)..(474): transl_table=11
atgatatgtataatcatgggtagtgaaagcgatttaaaaatagctgaaaaagcagttaatattttaaaagaatttggtgtagagtttgaggttagagttgcctctgcccatagaacaccagagttagttgaggagattgttaaaaattcaaaggctgatgtatttatagctatagctggattagccgctcatctaccgggagttgtagcaagcttaacaacaaaaccagttattgctgttcctgttgatgcaaagttagatggtttagacgctttacttagctcagtccagatgcctcctggaattcctgttgctactgttggaattgatagaggagaaaacgctgctatattagccttagaaatcttagctttaaaagatgaaaatattgcaaaaaaattgattgaatatagagagaagatgaagaagaaagtttatgcatcagatgaaaaagttaaggaaatgtttaaataa

SEQ ID NO: 52207 - protein, 157 aa, Methanococcus jannaschii
MICIIMGSESDLKIAEKAVNILKEFGVEFEVRVASAHRTPELVEEIVKNSKADVFIAIAGLAAHLPGVVASLTTKPVIAVPVDAKLDGLDALLSSVQMPPGIPVATVGIDRGENAAILALEILALKDENIAKKLIEYREKMKKKVYASDEKVKEMFK

SEQ ID NO: 52208 - DNA, 1020 bp, Methanobrevibacter smithii
  CDS (1)..(1020): transl_table=11
atgacaccaaaagtaatgataattctgggaagtgggtcagatattgctatcgctgaaaaaagtatgaagattttggaaaaacttgaaataccatatagtttgaaaatagcttcagcacatagaacacctgatcttgtaagagaacttgttgtacagggaaccaatgcaggtataaaagtatttattggaattgcaggattagctgctcatcttccaggagcaatagctgcatatactcacaaaccggttattggagttcctgtagatgttaaagttagcggactggatgcactatattcttcagttcaaatgccttatccctctcctgtagccactgttggaattgataggggagataatggagctattttagctgcacgaatcctagggctttatgacgaggaaatacgcaaaaaagtattggaatcaaaagaaggatatagacagaaagtcattaaaaacaatgaagaaattgtccaaaaaatagacaatccacatattaccaatgactttttaaggattaaaaacctcgaattaaatgaaactacagaagaatttaatggaagctacattaataaaaatgctgaggtagtcattattgttggaagacatactgatttaattactggaaaaaaagtaagtgttacactagacagacttaaaatacctcatgatatgcaagtaatttgcccgattagatcaggaaaaaaattcagagcatatgtaaacactatgaaaaatgctaaaatatttattggaattaattccaactcttcccaggtaagtggaggtcttgtaggtcttactgaaaagcctgttattggagttccatgtgaaaatgaacttggaaataattacctgctttcaactgtaaatatgccaccaggagtacctgtagctactgttggtgttaataatggtcgtaatgctgctgttttaagtggtgaaatactttctattaacaatcctgttcttttagagcttttagaaaaattaaaaaataaaaaaatcaacatataa

SEQ ID NO: 52209 - protein, 339 aa, Methanobrevibacter smithii
MTPKVMIILGSGSDIAIAEKSMKILEKLEIPYSLKIASAHRTPDLVRELVVQGTNAGIKVFIGIAGLAAHLPGAIAAYTHKPVIGVPVDVKVSGLDALYSSVQMPYPSPVATVGIDRGDNGAILAARILGLYDEEIRKKVLESKEGYRQKVIKNNEEIVQKIDNPHITNDFLRIKNLELNETTEEFNGSYINKNAEVVIIVGRHTDLITGKKVSVTLDRLKIPHDMQVICPIRSGKKFRAYVNTMKNAKIFIGINSNSSQVSGGLVGLTEKPVIGVPCENELGNNYLLSTVNMPPGVPVATVGVNNGRNAAVLSGEILSINNPVLLELLEKLKNKKINI

SEQ ID NO: 52210 - DNA, 1005 bp, Methanobacterium thermoautotrophicum
  CDS (1)..(1005): transl_table=11
atgaagcccagagtgatgatactccttggaagtgcatctgatttcaggatagccgaaaaggcaatggaaatctttgaggaactcaggataccctatgacctgagggttgcctcagcccacaggacacatgaaaaggtaaaggcaatagtctcagaggccgtgaaggcgggtgttgaggtattcataggaatagcaggactatcagcccatcttccaggcatgatatctgcaaacacccacagacccgtcataggggtccctgttgacgttaaacttggagggctcgacgccctctttgcatgttcacagatgcccttccctgcccccgtcgccactgtgggggtagacaggggagaaaacgccgcaatactcgctgcccagataatagggataggagatcccggggtaagggaaagggttgcagatctaaggagaggtttctatgaacgcgtgcggagagatgaatgtcaggtgctcaacagcatagaggggtcctactatgcacccctggaggttgaaatgcctcccattggtgataaggtcccgtcagattcccaggatgaccccatggtatctgtgatacctggcagctactctgacatgaagatagccaagaagaccaccatgttcctcgaaaggatgggtataagctatgatctgaacgtcatatcacccataaggtaccctgaaagatttgagaggtaccttgagaagatggagaacgtgaagctcttcatagccataagcggcctctctgcacatgttacgggtgctgttgttgccctcagcgacaggccggtgataggggttccctgccccctcaagatgaacggctgggactcactcctctcaatgatcaacatgccgccgggtgtacctgttggaacggtgggggtaggtaacggtggtaacgccgcaatactggctgctgaaatgcttggaatatacgatgaaaagatagaatcgaggataaagaggataaagagccgttccgttaagttctaa

SEQ ID NO: 52211 - protein, 334 aa, Methanobacterium thermoautotrophicum
MKPRVMILLGSASDFRIAEKAMEIFEELRIPYDLRVASAHRTHEKVKAIVSEAVKAGVEVFIGIAGLSAHLPGMISANTHRPVIGVPVDVKLGGLDALFACSQMPFPAPVATVGVDRGENAAILAAQIIGIGDPGVRERVADLRRGFYERVRRDECQVLNSIEGSYYAPLEVEMPPIGDKVPSDSQDDPMVSVIPGSYSDMKIAKKTTMFLERMGISYDLNVISPIRYPERFERYLEKMENVKLFIAISGLSAHVTGAVVALSDRPVIGVPCPLKMNGWDSLLSMINMPPGVPVGTVGVGNGGNAAILAAEMLGIYDEKIESRIKRIKSRSVKF

SEQ ID NO: 52212 - DNA, 516 bp, Mycobacterium leprae
  CDS (1)..(516): transl_table=11
atgaccaggcagccccgagtcggggtgatcatgggcagcgacagcgactggtcggtgatgcaagatgcggcccatgcactggcggagtttgacatcccgatcgaggttcgggtggtgtcggcgcatcgcacccctgctgagatgttcgactatgcgcgcaatgctgtcgaccgcagcatcgcggtgatcattgccggcgccggcggcgcagctcacctgcctggaatggtcgcttccgcgactccgctgccggtgatcggggtgccggtgccgctggccaggctcgacggcctggactcgctgctgtcgatcgtgcagatgccagcgggagttccggttgccacagtgtctatcggtggtgcccgcaacgcgggtttgttggcggtgcgtattttgggatcgtcggacctgcagcttcgagcgcagctggtcgcgttccaggaccggttggccgataccgtgcgggccaaggatgcggatttacagcggtttcgaggtaagttaatcggcgactaa

SEQ ID NO: 52213 - protein, 171 aa, Mycobacterium leprae
MTRQPRVGVIMGSDSDWSVMQDAAHALAEFDIPIEVRVVSAHRTPAEMFDYARNAVDRSIAVIIAGAGGAAHLPGMVASATPLPVIGVPVPLARLDGLDSLLSIVQMPAGVPVATVSIGGARNAGLLAVRILGSSDLQLRAQLVAFQDRLADTVRAKDADLQRFRGKLIGD

SEQ ID NO: 52214 - DNA, 525 bp, Mycobacterium tuberculosis
  CDS (1)..(525): transl_table=11
atgactcctgccggcgagcggccccgggtcggggtgatcatgggcagcgacagcgactggccggtgatggccgacgctgcggcggcgctggccgagttcgacattccggccgaggttcgggttgtttcggcccatcgcacccctgaggcgatgttcagttatgcgcgcggcgcggccgagcgcggtctcgaggtgatcatcgccggagcgggcggggccgcgcacttgcccggtatggtcgccgccgcgacgccgctgccggtgatcggggtgccggtaccgctgggcaggctggacggccttgactccctgctgtcgatcgtgcaaatgccggccggggttccggtggccacggtgtccatcgggggcgccggtaatgccggactgctggcggtgcggatgctgggagccgccaacccccagctgagggcccggatcgtcgcattccaggaccggctggccgacgtcgtggcggccaaggatgcggaactgcagcggcttgcgggtaagttaacccgcgactag

SEQ ID NO: 52215 - protein, 174 aa, Mycobacterium tuberculosis
MTPAGERPRVGVIMGSDSDWPVMADAAAALAEFDIPAEVRVVSAHRTPEAMFSYARGAAERGLEVIIAGAGGAAHLPGMVAAATPLPVIGVPVPLGRLDGLDSLLSIVQMPAGVPVATVSIGGAGNAGLLAVRMLGAANPQLRARIVAFQDRLADVVAAKDAELQRLAGKLTRD

SEQ ID NO: 52216 - DNA, 1632 bp, Pichia methanolica
  CDS (1)..(1632)
atggactcgcaaactgtcgggattttaggtggtggccaacttggtcgtatgatcgttgaagctgcacacagattgaatatcaaaactgtgattctcgaaaatggagaccaggctccagcaaagcaaatcaacgctttagatgaccatattgacggctcattcaatgatccaaaagcaattgccgaattggctgccaagtgtgatgttttaaccgttgagattgaacatgttgacactgatgcgttggttgaagttcaaaaggcaactggcatcaaaatcttcccatcaccagaaactatttcattgatcaaagataaatacttgcaaaaagagcatttgattaagaatggcattgctgttgccgaatcttgtagtgttgaaagtagcgcagcatctttagaagaagttggtgccaaatacggcttcccatacatgctaaaatctagaacaatggcctatgacggaagaggtaattttgttgtcaaagacaagtcatatatacctgaagctttgaaagttttagatgacaggccgttatacgccgagaaatgggctccattttcaaaggagttagctgttatggttgtgagatcaatcgatggccaagtttattcctacccaactgttgaaaccatccaccaaaacaacatctgtcacactgtctttgctccagctagagttaacgatactgtccaaaagaaggcccaaattttggctgacaacgctgtcaaatctttcccaggtgctggtatctttggtgttgaaatgtttttattacaaaatggtgacttattagtcaacgaaattgccccaagacctcacaattctggtcactataccatcgacgcttgtgtcacctcgcaatttgaagctcatgttagggccattactggtctacccatgccgaagaacttcacttgtttgtcgactccatctacccaagctattatgttgaacgttttaggtggcgatgagcaaaacggtgagttcaagatgtgtaaaagagcactagaaactcctcatgcttctgtttacttatacggtaagactacaagaccaggcagaaaaatgggtcacattaatatagtttctcaatcaatgactgactgtgagcgtagattacattacatagaaggtacgactaacagcatccctctcgaagaacagtacactacagattccattccgggcacttcaagcaagccattagtcggtgtcatcatgggttccgattcggacctaccagtcatgtctctaggttgtaatatattgaagcaatttaacgttccatttgaagtcactatcgtttccgctcatagaaccccacaaagaatggccaagtatgccattgatgctccaaagagagggttgaagtgcatcattgctggtgctggtggtgccgctcatttaccgggaatggttgcggcgatgacgccgctgcctgttattggtgtccctgttaaaggctctactttggatggtgttgattcactacactccatcgttcaaatgccaagaggtattcctgttgctactgtggctattaacaatgctactaacgctgccttgctagctatcacaatcttaggtgccggcgatccaaatacttgtctgcaatggaagtttatatga

SEQ ID NO: 52217 - protein, 543 aa, Pichia methanolica
MDSQTVGILGGGQLGRMIVEAAHRLNIKTVILENGDQAPAKQINALDDHIDGSFNDPKAIAELAAKCDVLTVEIEHVDTDALVEVQKATGIKIFPSPETISLIKDKYLQKEHLIKNGIAVAESCSVESSAASLEEVGAKYGFPYMLKSRTMAYDGRGNFVVKDKSYIPEALKVLDDRPLYAEKWAPFSKELAVMVVRSIDGQVYSYPTVETIHQNNICHTVFAPARVNDTVQKKAQILADNAVKSFPGAGIFGVEMFLLQNGDLLVNEIAPRPHNSGHYTIDACVTSQFEAHVRAITGLPMPKNFTCLSTPSTQAIMLNVLGGDEQNGEFKMCKRALETPHASVYLYGKTTRPGRKMGHINIVSQSMTDCERRLHYIEGTTNSIPLEEQYTTDSIPGTSSKPLVGVIMGSDSDLPVMSLGCNILKQFNVPFEVTIVSAHRTPQRMAKYAIDAPKRGLKCIIAGAGGAAHLPGMVAAMTPLPVIGVPVKGSTLDGVDSLHSIVQMPRGIPVATVAINNATNAALLAITILGAGDPNTCLQWKFI

SEQ ID NO: 52218 - DNA, 492 bp, Pseudomonas aeruginosa
  CDS (1)..(492): transl_table=11
atgagcgcactggttggcgtgatcatgggttccaaatcggactggagcaccctcagtcacaccgcggacatgctggacaagctgggcatcccctacgaagtgaaggtggtttccgcccaccgcaccccggacctgctcttccagtacgccgaggaagccgaaggccgcggcctcgaagtgatcatcgccggcgctggcggcgccgcccacctgccgggcatgtgcgcggccaagacccacctgccggtactcggcgtgccggtacagtcgtcgatgctgtcgggtgtcgactcgctgctctccatcgtgcagatgcccgccggcgtaccggtcgccaccctggccatcggcaaggccggcgcggtcaacgcggcgctgctctcggcgagcatcctcggcgccaagcacccgcagtaccacgaggcgctgaagcagttccgcgccaaccagaccgaaaccgtgctggacaatcccgacccgcgcgatgcgtga

SEQ ID NO: 52219 - protein, 163 aa, Pseudomonas aeruginosa
MSALVGVIMGSKSDWSTLSHTADMLDKLGIPYEVKVVSAHRTPDLLFQYAEEAEGRGLEVIIAGAGGAAHLPGMCAAKTHLPVLGVPVQSSMLSGVDSLLSIVQMPAGVPVATLAIGKAGAVNAALLSASILGAKHPQYHEALKQFRANQTETVLDNPDPRDA

SEQ ID NO: 52220 - DNA, 525 bp, Pyrococcus abyssi
  CDS (1)..(525): transl_table=11
ttggtgaaggttgggatgcctaaggtagggataataatgggtagcgattctgacctcccagtaatgaaagaggccgcaaaggttctcgaagactttgaagttgattacgagatgaaggtgatctcagcgcacagaacaccagaaaggttacacgagtacgcaagaacagcagaagagaggggaatagaagttataatcgcaggagctggaggcgctgcccatctcccaggagttttagctgcgctaacgatgattccagttataggggttcccataaaaagcaaagcactaaacggtcttgactcgctcctatcgatagtccaaatgcccccaggaattccagttgcaactgtaggaatagatggagcaaagaacgccgcactcttagctttggagattttatcaataaagtatcctgagataaaggagaagctgaagaagtacagagaagacatgaagagaaaggtagaagaaaaatccaaaaagttggaagagctaggatggaggaaatacttggagggctag

SEQ ID NO: 52221 - protein, 174 aa, Pyrococcus abyssi
MVKVGMPKVGIIMGSDSDLPVMKEAAKVLEDFEVDYEMKVISAHRTPERLHEYARTAEERGIEVIIAGAGGAAHLPGVLAALTMIPVIGVPIKSKALNGLDSLLSIVQMPPGIPVATVGIDGAKNAALLALEILSIKYPEIKEKLKKYREDMKRKVEEKSKKLEELGWRKYLEG

SEQ ID NO: 52222 - DNA, 534 bp, Pyrococcus horikoshii
  CDS (1)..(534): transl_table=11
gtggtgataagcatgaaaagtgaaaagccactcgttggaattataatgggtagtgactctgatttaccagtaatgaaagaggccgcaaggattttggaagagtttggggttccgtatgagataacgataatatcggcccataggactccagagagagcttatgaatacgcaaagaaagcggaggaaaggggaatagaagtaataatagctggagctggaggagcggcccacctcccagggattattgcatcactaacggttctacccgttattggagtgccaataaagagtaaagccttgaatggtctcgactccttgttatcgatagttcaaatgccaagtgggatcccggttgctaccgtagctatagataacgcgaagaacgctgcacttttagccctgaggatcctgggaataaaataccccgagatcaaagaaaagcttagaaggtacatgaaagatatgaaaaggaaagtcgaagaaaaggcaaaaagattagaagagatgggatgggaaaggtatctatcggagtaa

SEQ ID NO: 52223 - protein, 177 aa, Pyrococcus horikoshii
MVISMKSEKPLVGIIMGSDSDLPVMKEAARILEEFGVPYEITIISAHRTPERAYEYAKKAEERGIEVIIAGAGGAAHLPGIIASLTVLPVIGVPIKSKALNGLDSLLSIVQMPSGIPVATVAIDNAKNAALLALRILGIKYPEIKEKLRRYMKDMKRKVEEKAKRLEEMGWERYLSE

SEQ ID NO: 52224 - DNA, 1659 bp, Schizosaccharomyces pombe
  CDS (1)..(1659)
atgagcgaaaaacaggttgtagggatccttggaggtggtcaattgggccgaatgatggtagaggcagcccatcgcttaaacatcaaatgcatcatcttggatgcagcaaattctcctgccaaacaaattgatggaggacgtgagcacattgatgcatcatttactgaccccgatgcaattgttgaactgtctaagaagtgcacgttattaacaactgaaattgagcatattaacactgatgccttggcagccgttacgaaatctgttgctgttgaaccctctcctgcaactctgcgatgcattcaagacaaatatcttcaaaaacagcatttacaggtttttaagattgcacttcctgaattttgcgatgcacctgaccaggaaagtgttgaaaaagcaggccaagagtttggttatccttttgtactgaaaagtaaaacattggcttacgacggtcgtggaaattacgttgttcatcaaccatctgagattcctactgccatcaaagcacttggtgatcgtccgctttatgttgaaaagttcgttcctttctccatggaaattgcagtgatggtagtacggagtttagacggaaaagtttatgcttatcctacaactgagaccattcaaaaggataatgtttgtcatttagtatatgcccctgctcgtcttcccttctcaattcaacagcgtgctcaaacccttgccatggatgcggtgcgcacttttgaaggcgctggtatatatggtgtagagatgtttgttttgcaagatggtgagaccattttactcaacgaaattgctcctcggcctcacaattcaggtcactacaccattgaagcttgcccaacttctcagtttgaagctcacttacgggccatatgtggtcttcctttcagcgaaatcaacacccaactctcgacttccacaactcatgcgttgatggtaaatattttaggtactgatgatcctgattatgtttcaaagatcgctaaacgttctctgtccattcccggtgcaactttgcatctttatggtaaagctgaatctagaaagggtcgcaagatgggacacgttaccatcatttctgattcacctcaagaatgtgaacgtaggtatcagatgcttcttgacgtcaaagatcctgtcgaatcacctgttgttggtattatcatgggttcggattctgatttaagcaagatgaaagatgctgccgtcattttagatgaattcaaggtgccttacgaacttactattgtttcagctcaccgcacaccagatcgcatggttacttatgctcgtaccgcagcttcaagagggttgcgtgtgattattgctggtgctggtggtgccgctcatttgcctggtatggttgctgcaatgacacctcttccagtaatcggcgttcctgtaaaaggaagcactcttgacggagttgactctcttcactctattgttcagatgcctcgaggtgtccctgtcgccactgttgctatcaataatagccaaaatgccggtattttagcctgtcgtatacttgctacatttcaaccctcccttttggctgctatggagagctttatggacaatatgaaagagattgttttagaaaaggctgataaattagaaaaagttggttggaaaaattattctgcatag

SEQ ID NO: 52225 - protein, 552 aa, Schizosaccharomyces pombe
MSEKQVVGILGGGQLGRMMVEAAHRLNIKCIILDAANSPAKQIDGGREHIDASFTDPDAIVELSKKCTLLTTEIEHINTDALAAVTKSVAVEPSPATLRCIQDKYLQKQHLQVFKIALPEFCDAPDQESVEKAGQEFGYPFVLKSKTLAYDGRGNYVVHQPSEIPTAIKALGDRPLYVEKFVPFSMEIAVMVVRSLDGKVYAYPTTETIQKDNVCHLVYAPARLPFSIQQRAQTLAMDAVRTFEGAGIYGVEMFVLQDGETILLNEIAPRPHNSGHYTIEACPTSQFEAHLRAICGLPFSEINTQLSTSTTHALMVNILGTDDPDYVSKIAKRSLSIPGATLHLYGKAESRKGRKMGHVTIISDSPQECERRYQMLLDVKDPVESPVVGIIMGSDSDLSKMKDAAVILDEFKVPYELTIVSAHRTPDRMVTYARTAASRGLRVIIAGAGGAAHLPGMVAAMTPLPVIGVPVKGSTLDGVDSLHSIVQMPRGVPVATVAINNSQNAGILACRILATFQPSLLAAMESFMDNMKEIVLEKADKLEKVGWKNYSA

SEQ ID NO: 52226 - DNA, 477 bp, Sulfolobus solfataricus
  CDS (1)..(477): transl_table=11
gtgccaaaagtagctgtaattatgggaagtaaaaatgactgggaatatatgagagaagctgtagagattttgaaacaattcgggatagactatgaggctagagtggtttcagctcatagaacaccagaatttatgatgcaatacgctaaagaagcagaaaaaagaggaatagaagtaattattgctggggctggtggagcagctcatttgccaggcatggttgcttcacttacaagtcttccagttattggtgttcctattccctcaaagaatctaaatggtcttgactcgcttctttcaatagtgcaaatgccctatggagtcccagtagctactgtggcaataggtggtgccaaaaacgctgcgctactggcaattaggattttaggaataaaatataaggaattagcagataaaattaaaaaattctcagaggatatgaggaacgatgttctcagtactagactggaagcctaa

SEQ ID NO: 52227 - protein, 158 aa, Sulfolobus solfataricus
MPKVAVIMGSKNDWEYMREAVEILKQFGIDYEARVVSAHRTPEFMMQYAKEAEKRGIEVIIAGAGGAAHLPGMVASLTSLPVIGVPIPSKNLNGLDSLLSIVQMPYGVPVATVAIGGAKNAALLAIRILGIKYKELADKIKKFSEDMRNDVLSTRLEA

SEQ ID NO: 52228 - DNA, 516 bp, Thermotoga maritima
  CDS (1)..(516): transl_table=11
gtgccaagggtaggaatcatcatgggaagtgactccgatcttcctgtaatgaagcaggcagctgaaattttggaagaattcggaatagattacgagattacgatcgtttccgctcacaggacaccggatcgcatgttcgagtacgcaaagaacgccgaagaacggggaatagaagtgatcattgcgggagcggggggagcggctcaccttccaggaatggtggcaagcatcacccaccttcctgtgataggtgttcccgtgaaaacatccacactgaacggtctggattctcttttctccatagttcagatgccagggggtgtgcccgttgccaccgttgccataaacaacgcgaagaacgcgggaatccttgctgcgtctattctgggaatcaaatatccggagatcgcaaggaaggtaaaagagtataaagaaagaatgaaacgggaagttctggaaaaagcccaaagattagaacaaattggttacaaagaatatctgaaccagaaagagtaa

SEQ ID NO: 52229 - protein, 171 aa, Thermotoga maritima
MPRVGIIMGSDSDLPVMKQAAEILEEFGIDYEITIVSAHRTPDRMFEYAKNAEERGIEVIIAGAGGAAHLPGMVASITHLPVIGVPVKTSTLNGLDSLFSIVQMPGGVPVATVAINNAKNAGILAASILGIKYPEIARKVKEYKERMKREVLEKAQRLEQIGYKEYLNQKE

SEQ ID NO: 52230 - DNA, 486 bp, Vibrio cholerae
  CDS (1)..(486): transl_table=11
atgacagtcggtattatcatgggttccaagtcagactggccaaccatgaaacacgcagcagagatgcttgaccagtttggtgtggcttacgagactaaagtggtttctgcgcaccgaactcctcatcttttggccgactatgcctctagcgccaaagaacgcggtttacaagtgatcatcgctggagcgggcggcgctgcgcatcttcccggaatgaccgccgcattcactagcttgccagtgttaggcgtgcccgttcaatctcgcgctctgtctgggctcgactcgttatactccattgtgcagatgccaaaaggcattgcggtgggtacgctcgccattggtgaagctggtgccgctaatgcaggattacttgccgcacaaatcatcggcattcataacccagaagtgatgagtaaagtggaagctttccgcgctaagcagactcaatctgtgttggataacccaaatccggctgaggagtaa

SEQ ID NO: 52231 - protein, 161 aa, Vibrio cholerae
MTVGIIMGSKSDWPTMKHAAEMLDQFGVAYETKVVSAHRTPHLLADYASSAKERGLQVIIAGAGGAAHLPGMTAAFTSLPVLGVPVQSRALSGLDSLYSIVQMPKGIAVGTLAIGEAGAANAGLLAAQIIGIHNPEVMSKVEAFRAKQTQSVLDNPNPAEE

SEQ ID NO: 52232 - DNA, 486 bp, Vibrio parahaemolyticus
  CDS (1)..(486): transl_table=11
atgaaagtcggtatcatcatgggttctaaatccgattggccaaccatgaaactagcagcagacatgctggatcaatttggcgtgtcttacgaaacaaaggtggtgtcagctcaccgtactcctcaactattagccgattacgctagcagcgcgaaagaacgcggcatcaaagtgatcatcgcaggtgccggtggtgcagctcacctaccgggaatggcggcagccttcaccagtttgcctgtacttggtgttccggttcaatctcgcgctctaaaaggcatggactctttgctatctattgtacaaatgccaaaaggcattgcagtcggcacgttagcgattggcgaagcgggcgctgcaaacgcgggcatcttagcggcacaaatcctaggcactcatgacgaaagcatcatggcgaaggtagaagcgttccgcaatgaacagacggaaaccgtactggctaacccaaatccagctgaggattaa

SEQ ID NO: 52233 - protein, 161 aa, Vibrio parahaemolyticus
MKVGIIMGSKSDWPTMKLAADMLDQFGVSYETKVVSAHRTPQLLADYASSAKERGIKVIIAGAGGAAHLPGMAAAFTSLPVLGVPVQSRALKGMDSLLSIVQMPKGIAVGTLAIGEAGAANAGILAAQILGTHDESIMAKVEAFRNEQTETVLANPNPAED

SEQ ID NO: 52234 - DNA, 486 bp, Vibrio vulnificus
  CDS (1)..(486): transl_table=11
atgaaagtcggtatcatcatgggttctaaatcagattggccaaccatgaaactggcagcagaaatgctggacagatttggcgtggaatacgaaaccaaagtggtttcagcacatcgaactcctcatctcctcgctgaatatgcctcaaccgccaaagagcgtgggttgaaagtgattattgccggtgcaggtggcgcggcgcatttgccgggcatggcagcggcatttaccagcttgcccgttttgggcgtacccgtgcaatcacgtgctttatcagggctcgactctctctactctattgtgcaaatgccaaaaggcatcgcagtaggtacattggccattggtgaagccggtgccgcgaacgcgggtcttctcgctgcgcaaatccttggaactcacgacgaaaatatcatggccaaagttgaagccttccgcagtgagcaaactgaaagcgtcctcgctaacccaaatcctgcagaggactaa

SEQ ID NO: 52235 - protein, 161 aa, Vibrio vulnificus
MKVGIIMGSKSDWPTMKLAAEMLDRFGVEYETKVVSAHRTPHLLAEYASTAKERGLKVIIAGAGGAAHLPGMAAAFTSLPVLGVPVQSRALSGLDSLYSIVQMPKGIAVGTLAIGEAGAANAGLLAAQILGTHDENIMAKVEAFRSEQTESVLANPNPAED

SEQ ID NO: 52236 - DNA, 1716 bp, Saccharomyces cerevisiae
  CDS (1)..(1716)
atggattctagaacagttggtatattaggagggggacaattgggacgtatgattgttgaggcagcaaacaggctcaacattaagacggtaatactagatgctgaaaattctcctgccaaacaaataagcaactccaatgaccacgttaatggctccttttccaatcctcttgatatcgaaaaactagctgaaaaatgtgatgtgctaacgattgagattgagcatgttgatgttcctacactaaagaatcttcaagtaaaacatcccaaattaaaaatttacccttctccagaaacaatcagattgatacaagacaaatatattcaaaaagagcatttaatcaaaaatggtatagcagttacccaaagtgttcctgtggaacaagccagtgagacgtccctattgaatgttggaagagatttgggttttccattcgtcttgaagtcgaggactttggcatacgatggaagaggtaacttcgttgtaaagaataaggaaatgattccggaagctttggaagtactgaaggatcgtcctttgtacgccgaaaaatgggcaccatttactaaagaattagcagtcatgattgtgagatctgttaacggtttagtgttttcttacccaattgtagagactatccacaaggacaatatttgtgacttatgttatgcgcctgctagagttccggactccgttcaacttaaggcgaagttgttggcagaaaatgcaatcaaatcttttcccggttgtggtatatttggtgtggaaatgttctatttagaaacaggggaattgcttattaacgaaattgccccaaggcctcacaactctggacattataccattgatgcttgcgtcacttctcaatttgaagctcatttgagatcaatattggatttgccaatgccaaagaatttcacatctttctccaccattacaacgaacgccattatgctaaatgttcttggagacaaacatacaaaagataaagagctagaaacttgcgaaagagcattggcgactccaggttcctcagtgtacttatatggaaaagagtctagacctaacagaaaagtaggtcacataaatattattgcctccagtatggcggaatgtgaacaaaggctgaactacattacaggtagaactgatattccaatcaaaatctctgtcgctcaaaagttggacttggaagcaatggtcaaaccattggttggaatcatcatgggatcagactctgacttgccggtaatgtctgccgcatgtgcggttttaaaagattttggcgttccatttgaagtgacaatagtctctgctcatagaactccacataggatgtcagcatatgctatttccgcaagcaagcgtggaattaaaacaattatcgctggagctggtggggctgctcacttgccaggtatggtggctgcaatgacaccacttcctgtcatcggtgtgcccgtaaaaggttcttgtctagatggagtagattctttacattcaattgtgcaaatgcctagaggtgttccagtagctaccgtcgctattaataatagtacgaacgctgcgctgttggctgtcagactgcttggcgcttatgattcaagttatacaacgaaaatggaacagtttttattaaagcaagaagaagaagttcttgtcaaagcacaaaagttagaaactgtcggttacgaagcttatctagaaaacaagtaa

SEQ ID NO: 52237 - protein, 571 aa, Saccharomyces cerevisiae
MDSRTVGILGGGQLGRMIVEAANRLNIKTVILDAENSPAKQISNSNDHVNGSFSNPLDIEKLAEKCDVLTIEIEHVDVPTLKNLQVKHPKLKIYPSPETIRLIQDKYIQKEHLIKNGIAVTQSVPVEQASETSLLNVGRDLGFPFVLKSRTLAYDGRGNFVVKNKEMIPEALEVLKDRPLYAEKWAPFTKELAVMIVRSVNGLVFSYPIVETIHKDNICDLCYAPARVPDSVQLKAKLLAENAIKSFPGCGIFGVEMFYLETGELLINEIAPRPHNSGHYTIDACVTSQFEAHLRSILDLPMPKNFTSFSTITTNAIMLNVLGDKHTKDKELETCERALATPGSSVYLYGKESRPNRKVGHINIIASSMAECEQRLNYITGRTDIPIKISVAQKLDLEAMVKPLVGIIMGSDSDLPVMSAACAVLKDFGVPFEVTIVSAHRTPHRMSAYAISASKRGIKTIIAGAGGAAHLPGMVAAMTPLPVIGVPVKGSCLDGVDSLHSIVQMPRGVPVATVAINNSTNAALLAVRLLGAYDSSYTTKMEQFLLKQEEEVLVKAQKLETVGYEAYLENK

SEQ ID NO: 52238 - DNA, 1905 bp, Zea mays
  CDS (1)..(1905)
atgcacgccaggttcctcagcgcgccgtcccctgcctccgccgccccctccccgtacgttcgcttggccttcacgggcgcccgcccgcgccgcgcgtgttggaagccgcgaggccccgcgtccgcgtccgcgccgccgcctcggcctctccactcgctgtgcgcccgggcctccatgcagcccgcctctcccgcgcacgacgggcatggtggtccgccggtgcacggcgtctccaacaccgtcatcggggtcctggggggcggtcagctcgggaagatgctctgccatgcagcgagtcagatggggattagaattgtcatcctcgaccctcttcccggctgccccgcgagctcggtttgcgatgagcacgtcatcgggagcttcaacgatggggacacggtccgggagttcgccaagaggtgtggggtcctaacagtggagattgagcatgttgatgccgccacactggagaagctggaaaaacagggcgttgactgcgagcctaaagcctccacaatcacgattattcaggacaagtacaggcagaaaaagcatttctcaagatgcgagatcccattgcctgacttcatggaagtagatactttacgcagtatagaggaggctggagaaaagtttggctatcccctaatggtcaaaagcaagagattagcatatgatggtcgaggaaatgctgtagccaagaacaaagaggagctaccttctgttgttgcttcactgggtgggtttgagcggggcttgtatgttgagagatggactcctttcgtaaaggagctttctgtaattgtggcaaggagcagagacaactctactgtctgctatcctgttgtggaaacagttcacaaggaaaatatatgccatgttgttgaagctcctgctgatgtatctaacaaaataaagaagttagctactagcgtggctgaaaaagctatcaaatcattagaaggagctggtgtctttgctgtagagttgtttttaacagaagatgatcagattttattgaatgaggtagcccctaggcctcacaatagtgggcatcacacaatagagtcatgctacacctcacaatatgagcagcatatacgcgctattcttggccttcctcttggtgatccctcaatgaaagcacctgcagcaataatgtacaacatcctgggcgaggatgagggtgaagcagggttctttctggctcatcagcttatcagtagggcactaaccattccaggcacatcggtccattggtacgcaaagccagagatgcggaagcaaaggaagatgggtcatattacaattgtggggccttctaagataagtgtaaaatcacgcttggacaacttgctgcaaagaaactcgtctgatcccaaggaagttagccctcgtgttgctattataatggggtcccaatctgatcttcctgtgatgaaagatgctgagagggttttgaaagagttcgacataccttgtgagttaactattgtttctgcacatcgtacaccagagcggatgtatgattatgcgaagtctgctaaagacaggggtttcgaggtcataattgcaggtgcaggcggagcagctcatttaccagggatggtggcttcattgactcctcttcctgtaatcggagttcccattaagacttcaacactatcaggatttgattccctcctatctattgtgcaaatgccaaaaggtattcctgttgcgactgttgctatcgggaatgcagaaaatgcaggtttgctggcagctaggattctggctgcaagagatcctgagctccaggacagggtaactaagtaccaggatgatctgagggacatggttttggagacggcagaaaggctggaggaccaaggcccggaggaatttctgaagggaatggattga

SEQ ID NO: 52239 - protein, 634 aa, Zea mays
MHARFLSAPSPASAAPSPYVRLAFTGARPRRACWKPRGPASASAPPPRPLHSLCARASMQPASPAHDGHGGPPVHGVSNTVIGVLGGGQLGKMLCHAASQMGIRIVILDPLPGCPASSVCDEHVIGSFNDGDTVREFAKRCGVLTVEIEHVDAATLEKLEKQGVDCEPKASTITIIQDKYRQKKHFSRCEIPLPDFMEVDTLRSIEEAGEKFGYPLMVKSKRLAYDGRGNAVAKNKEELPSVVASLGGFERGLYVERWTPFVKELSVIVARSRDNSTVCYPVVETVHKENICHVVEAPADVSNKIKKLATSVAEKAIKSLEGAGVFAVELFLTEDDQILLNEVAPRPHNSGHHTIESCYTSQYEQHIRAILGLPLGDPSMKAPAAIMYNILGEDEGEAGFFLAHQLISRALTIPGTSVHWYAKPEMRKQRKMGHITIVGPSKISVKSRLDNLLQRNSSDPKEVSPRVAIIMGSQSDLPVMKDAERVLKEFDIPCELTIVSAHRTPERMYDYAKSAKDRGFEVIIAGAGGAAHLPGMVASLTPLPVIGVPIKTSTLSGFDSLLSIVQMPKGIPVATVAIGNAENAGLLAARILAARDPELQDRVTKYQDDLRDMVLETAERLEDQGPEEFLKGMD

SEQ ID NO: 52240 - DNA, 21 bp, Artificial sequence
  primer
atgacttccccctctcccctg

SEQ ID NO: 52241 - DNA, 21 bp, Artificial sequence
  primer
ttactgattttgctggtccag

SEQ ID NO: 52242 - protein, 134 aa, Artificial sequence
  consensus sequence
  Variant (4)..(4): Xaa in position 4 is any amino acid
  Variant (7)..(16): Xaa in position 7 to 16 is any amino acid
  Variant (18)..(28): Xaa in position 18 to 28 is any amino acid
  Variant (29)..(33): Xaa in position 29 to 33 is any or no amino acid
  Variant (40)..(44): Xaa in position 40 to 44 is any amino acid
  Variant (45)..(49): Xaa in position 45 to 49 is any or no amino acid
  Variant (51)..(51): Xaa in position 51 is any amino acid
  Variant (52)..(53): Xaa in position 52 to 53 is any or no amino acid
  Variant (55)..(56): Xaa in position 55 to 56 is any amino acid
  Variant (57)..(57): Xaa in position 57 is any or no amino acid
  Variant (72)..(72): Xaa in position 72 is any amino acid
  Variant (74)..(75): Xaa in position 74 to 75 is any amino acid
  Variant (77)..(78): Xaa in position 77 to 78 is any amino acid
  Variant (81)..(81): Xaa in position 81 is any amino acid
  Variant (85)..(88): Xaa in position 85 to 88 is any amino acid
  Variant (89)..(92): Xaa in position 89 to 92 is any or no amino acid
  Variant (94)..(94): Xaa in position 94 is any amino acid
  Variant (96)..(96): Xaa in position 96 is any amino acid
  Variant (98)..(98): Xaa in position 98 is any amino acid
  Variant (101)..(101): Xaa in position 101 is any amino acid
  Variant (108)..(108): Xaa in position 108 is any amino acid
  Variant (110)..(110): Xaa in position 110 is any amino acid
  Variant (111)..(111): Xaa in position 111 is any or no amino acid
  Variant (114)..(114): Xaa in position 114 is any amino acid
  Variant (116)..(117): Xaa in position 116 to 117 is any amino acid
  Variant (119)..(120): Xaa in position 119 to 120 is any amino acid
  Variant (121)..(124): Xaa in position 121 to 124 is any or no amino acid
  Variant (127)..(129): Xaa in position 127 to 129 is any amino acid
  Variant (131)..(133): Xaa in position 131 to 133 is any amino acid
MGSXSDXXXXXXXXXXLXXXXXXXXXXXXXXXXSAHRTPXXXXXXXXXXAXXXGXXXIIAGAGGAAHLPGMXAXXTXXPVXGVPXXXXXXXXLXGXDXSLXSIVQMPXGXXPVXTXXIXXXXXXNAXXXAXXXL

SEQ ID NO: 52243 - protein, 21 aa, Artificial sequence
  protein pattern
  Variant (2)..(2): Xaa in position 2 is any or no amino acid
  Variant (4)..(4): Xaa in position 4 is any or no amino acid
  Variant (7)..(7): Xaa in position 7 is any amino acid
  Variant (11)..(11): Xaa in position 11 is any amino acid
  Variant (13)..(13): Xaa in position 13 is any amino acid
  Variant (14)..(14): Xaa in position 14 is Ala or Pro
  Variant (15)..(15): Xaa in position 15 is Cys, Thr or Val
  Variant (16)..(16): Xaa in position 16 is Ala or Gly
  Variant (18)..(18): Xaa in position 18 is any amino acid
  Variant (19)..(19): Xaa in position 19 is Ala, Gly, Ser or Thr
  Variant (20)..(20): Xaa in position 20 is Ile, Leu or Val
  Variant (21)..(21): Xaa in position 21 is Asp, Gly, Asn or Gln
SXLXSIXQMPXGXXXXTXXXX

SEQ ID NO: 52244 - protein, 14 aa, Artificial sequence
  protein pattern
  Variant (2)..(2): Xaa in position 2 is Ala, Ile or Val
  Variant (4)..(4): Xaa in position 4 is Ala, Cys or Gly
  Variant (7)..(7): Xaa in position 7 is any or no amino acid
  Variant (14)..(14): Xaa in position 14 is Ile, Leu, Met or Val
IXAXAGXAAHLPGX

SEQ ID NO: 52245 - protein, 13 aa, Artificial sequence
  protein pattern
  Variant (2)..(2): Xaa in position 2 is Ala or Ser
  Variant (3)..(3): Xaa in position 3 is any amino acid
  Variant (5)..(5): Xaa in position 5 is any amino acid
  Variant (6)..(6): Xaa in position 6 is Ile, Leu or Val
  Variant (9)..(9): Xaa in position 9 is Phe, Ile, Leu or Val
  Variant (13)..(13): Xaa in position 13 is Ile, Leu, Met or Val
AXXTXXPVXGVPX

SEQ ID NO: 52246 - DNA, 1056 bp, Synechocystis sp.
  CDS (1)..(1056): transl_table=11
atgatcgtcgtcatgaaagtcggcaccccagaaatagaaattgagcgcattggtaaggagtttgccgaacggggcctcacccccgaaaagattgttggtaagcacaaagttgtgatggggttggtgggggaaacagccggacttgatcctttgcaaatccaagaggttagcccctggattgaagatgtattacgggtggaacaaccttttaaacgggctagtttgactttccgccatggggaatacagtgaagtaatcgtttctacccccgctggccccgtggcgatcggcaaaaaccatccggtggctgtggtagcaggcccctgttcggtggaaaatgaaaccatgattgtggaaacggcccgtcgagttaaggcggccggggcccagtttttacggggcggcgccttcaaaccccgtacctctccctacgctttccaaggtcatggggaaagtgctctaggtctgttggcagcagctaaggaagccactggtttgggcattatcaccgaagtgatggatgcggcggatttagaaatcattgcggaagtggcggatgtaatccaagtgggtgcccgcaatatgcagaatttctccatgctgaaaaaggtaggggcccaggataagccagtgctgttaaagcggggcatggcggccaccattgatgaatggttaatggcggcagaatacattctcgcggcgggtaatcccaacgtgattctttgtgagcggggcattcgcacctttgacggccattacacccgcaattgccttgatttgtcggtgttgcctgtcctgcgctcccttacgcacctgcccattatgatcgaccccagccacggcaccggtaaatccgagtatgtgccctccatggccatggcggcgatcgccgcggggacagactccttgatgattgaagtgcatcccaacccggctaaagctatgtccgatgggccccaatctttgacccccgaccgcttcgacgaaaccatgaagcaattggcggttattgggcaaactgtaggacgttggcctaaagtagcggccctggcctaa

SEQ ID NO: 52247 - protein, 351 aa, Synechocystis sp.
MIVVMKVGTPEIEIERIGKEFAERGLTPEKIVGKHKVVMGLVGETAGLDPLQIQEVSPWIEDVLRVEQPFKRASLTFRHGEYSEVIVSTPAGPVAIGKNHPVAVVAGPCSVENETMIVETARRVKAAGAQFLRGGAFKPRTSPYAFQGHGESALGLLAAAKEATGLGIITEVMDAADLEIIAEVADVIQVGARNMQNFSMLKKVGAQDKPVLLKRGMAATIDEWLMAAEYILAAGNPNVILCERGIRTFDGHYTRNCLDLSVLPVLRSLTHLPIMIDPSHGTGKSEYVPSMAMAAIAAGTDSLMIEVHPNPAKAMSDGPQSLTPDRFDETMKQLAVIGQTVGRWPKVAALA

SEQ ID NO: 52248 - DNA, 1023 bp, Dehalococcoides sp. BAV1
  CDS (1)..(1023): transl_table=11
atgttagtaataatgaaaaacaatgcaactcaggaacagatagataacgtcatccgtgagattacggatgcaggctaccggggcatacccataccgggtgaccaccgaaccgccgtctgcatagtgggcaatcagggtatggtggaggaaagcccttttctggcactggaaggtgtgaaagaagtattgcgggtgaccaagccctataaactggtcagccatgaaacctgccccaaaccgacagttatccgtctgggagatatagaaataggaaacggctgcaaaccggttatcattgccggaccttgctcggtggaaagtgaagtacagaccctccgcatagcccgtcaggtaaaagagggcggtgccaagctcttcaggggaggggcatttaaaccccgcacttcaccctacagctttcagggtttgggcaaagccggcctcaaaatactggaaaaagtacgctctgaaactgggttgcttattgttaccgaagccaccgactctgaaaacctgaagctggttgaagccagcacagatattatccagattggtgcccgaaacatgcaaaattactctctgttacgccgggcaggccagacaaaaaagccggtcattttaaaacggggactgtcagccactattgaagaactgctgatggcagccgaatatataatggccgaaggcaacactcaagttattttgtgcgaacggggtatccgcaccttttcggacaatacccgctttacactggacctaagcgccatcctgtccgtcaaggctgccagccatctgcccatcatagtagaccccagccatgccgccggacgccgtgattatgttatccccctgtccagagcagccattgcaacaggggcagacggactgatagtagaagtccattcagacccgcccagcgctctgtctgacggggcgcagtctttgtatccggaacagttttgccaattggttaaagaggtggaatatttaaatatgctgggagtagaaaaatgcctaaagtag

SEQ ID NO: 52249 - protein, 340 aa, Dehalococcoides sp. BAV1
MLVIMKNNATQEQIDNVIREITDAGYRGIPIPGDHRTAVCIVGNQGMVEESPFLALEGVKEVLRVTKPYKLVSHETCPKPTVIRLGDIEIGNGCKPVIIAGPCSVESEVQTLRIARQVKEGGAKLFRGGAFKPRTSPYSFQGLGKAGLKILEKVRSETGLLIVTEATDSENLKLVEASTDIIQIGARNMQNYSLLRRAGQTKKPVILKRGLSATIEELLMAAEYIMAEGNTQVILCERGIRTFSDNTRFTLDLSAILSVKAASHLPIIVDPSHAAGRRDYVIPLSRAAIATGADGLIVEVHSDPPSALSDGAQSLYPEQFCQLVKEVEYLNMLGVEKCLK

SEQ ID NO: 52250 - DNA, 1086 bp, Listeria monocytogenes EGD-e
  CDS (1)..(1086): transl_table=11
atggttaatacaaatttagaggaacttagaacacaggtggatcaattaaatattgatttgctagaattaattagcaaacgtgctaatttggtacaagaaattggcaaaattaaaggaactcaaggttctcttcgttttgatccattacgtgaaagagaaatgcttaacacgattcttgcagcaaatgaaggaccttttgaagatagtacggttcaaaaattatttaaagaaatttttaaagcgggattagagcttcaagaagaagatcactctaaagcattactcgtttctagaaaaaataaaaaagaagatacgatagttacagtaaaaggcttgccaattgggaatggcgaaccagtatttgttttcggtccatgttcagtggaatcttatgaacaagttgctgcggttgctgaatccattaaagcgaaaggcttaaaacttattcgtggtggcgcatttaaacctcgtactagcccatatgacttccaaggattaggtttagaaggactgaaaattttaaaacgtgtatctgatgaatacggtttaggtgttattagtgaaatcgttacgccggctgatattgaagttgcacttgattatgtagatgttattcaaattggcgcaagaaacatgcaaaacttcgaattactaaaagcagctggccgtgtggacaaaccaatcttactaaaacgtggtttatctgctacgattgaagaattcattggtgctgctgaatatatcatgtcacaaggaaatggcaaaatcatcttatgcgaacgtggtatccgcacatatgaaaaagcgacaagaaatacacttgatatttctgccgttccaattttgaaaaaagaaacccatttaccagttatggttgacgtgacgcattctactggccgaaaagatttattacttccatgtgcgaaagctgctctagctatcgaagcagacggtgtaatggctgaagttcatccagaccctgcagttgcattatcggattctgcacaacaaatggatattcctgaatttgaagaattctggaatgcaattttagcaagtaacttagtaccacataaaataaagtaa

SEQ ID NO: 52251 - protein, 361 aa, Listeria monocytogenes EGD-e
MVNTNLEELRTQVDQLNIDLLELISKRANLVQEIGKIKGTQGSLRFDPLREREMLNTILAANEGPFEDSTVQKLFKEIFKAGLELQEEDHSKALLVSRKNKKEDTIVTVKGLPIGNGEPVFVFGPCSVESYEQVAAVAESIKAKGLKLIRGGAFKPRTSPYDFQGLGLEGLKILKRVSDEYGLGVISEIVTPADIEVALDYVDVIQIGARNMQNFELLKAAGRVDKPILLKRGLSATIEEFIGAAEYIMSQGNGKIILCERGIRTYEKATRNTLDISAVPILKKETHLPVMVDVTHSTGRKDLLLPCAKAALAIEADGVMAEVHPDPAVALSDSAQQMDIPEFEEFWNAILASNLVPHKIK

SEQ ID NO: 52252 - DNA, 1065 bp, Nostoc sp. PCC 7120
  CDS (1)..(1065): transl_table=11
atgattgtcatacttaaaaatggtacacctgctgaagaaattactcgcatcagcgaaggtctaagtgaagtttgggaagtcaaagtagaaaagagcatcggcaaacataaagtgattctgggaatcatcggtgacaccgccactatcgacacattgcagattcaagagttcagcccttggattcaacaagtcatgcgagtgcagaaacctttcaagcgggtgagtcgagaatttcgttatggagaagccagcgaggtaattgtcaatacaccaaacgagcgtgtttactttggtgaacatcatccaatagttgtagtggctgggccttgttccgtggagaatgaggaaatgattgtggagacagccaagtgtgtaaaagcagctggcgctaagtttctcagaggtggagcctataaaccccggacttctccctatgctttccaaggacatggcgaaagtgcattaggtttgttagcggcggcgcgtgaggcgacaggtttaggtatcatcactgaagttatggatactgccgacttagcagccgtggcaagggtagccgatgtgattcaagtcggtgcgcggaatatgcagaacttcgccttgttgaaaaaagtcggcgctcaagataaaccagtgctactcaagcgggggatggctgcaactattgacgagtggttaatggctgctgaatatatcatggcttcgggcaattctaacgtgattttgtgtgaacggggaattagaacttttgatagtaaatatgcgcggaataccttggatttatctgtgattcccgtattgcgatcgctcactcatttacccattatgatagaccctagtcatggtacaggtaaatctgaatatgtgccaccaatggcagcagctgcgatcgcagccggtacagatgctttaatgatagaagttcatcccaatcctgccagagctttatctgatggtccccaatctttaactttcgagagatttgaccgattagctcaagaaatgtcagtcattggtaaagtagttggacgctggcctcaacctgttttagctagtgttatttag

SEQ ID NO: 52253 - protein, 354 aa, Nostoc sp. PCC 7120
MIVILKNGTPAEEITRISEGLSEVWEVKVEKSIGKHKVILGIIGDTATIDTLQIQEFSPWIQQVMRVQKPFKRVSREFRYGEASEVIVNTPNERVYFGEHHPIVVVAGPCSVENEEMIVETAKCVKAAGAKFLRGGAYKPRTSPYAFQGHGESALGLLAAAREATGLGIITEVMDTADLAAVARVADVIQVGARNMQNFALLKKVGAQDKPVLLKRGMAATIDEWLMAAEYIMASGNSNVILCERGIRTFDSKYARNTLDLSVIPVLRSLTHLPIMIDPSHGTGKSEYVPPMAAAAIAAGTDALMIEVHPNPARALSDGPQSLTFERFDRLAQEMSVIGKVVGRWPQPVLASVI

SEQ ID NO: 52254 - DNA, 1059 bp, Nostoc sp. PCC 7120
  CDS (1)..(1059): transl_table=11
atgatagtagtcatgaaagtcggttccccagaagtggaaatcaaccggattaatgatgaattaaccagttgggggctgacaccagaaaaaattatcggcaaacacaaagtagtaattggcttagtaggtgaaaccgccgacttagaccccttacaaattcaagaagttagcccttggattgagcaagtattacgggtagaactgccttataaacgcgctagccgccaatatcgtcacggtgaagcctcggaagtagtggttaatactccagatggttccgtggtatttggtgaaaaccaagccttggtggtggttgctggcccctgctctgtggaaaatgaggaaatgattattgagacggcgcaacgtgtcaaggcagccggcgctaagtttttacgcggtggtgcatacaagccccgtacttcaccttacgcttttcaaggtcacggcgaaagtgctttggaattgttggcaaaggcgcgggatgttagcggtttgggtatcatcactgaagtaatggacgcgtcagaactggatattattgcagaagtggctgatgtcatccaggtaggtgcaagaaatatgcagaatttctccctactgaaaaaagtaggggcgcaaccaaaaccagtattactgaagcgaggaatggcagctactatcgaagattggttgatggcagccgagtacgttctagcagcaggtaaccctaatgtaattttgtgcgaacgaggtattcgtacttttgaccgtcaatatacacgtaatactttagatttgtcggtagttccagtattgaggaaattaactcacctaccaattatgattgatcccagtcatggtacgggttgggctgagtatgtgccatcaatggcaatggcagcgatcgcagctggtactgattctttgatgattgaagtacaccccaatcctaaaaaagccctatccgacgggccacaatccctcacaccagaacatttcgaccgcttaatgcaggaattagccgttattggtaaagctgtaggacgctggccacaaccagcagttgtaactgcataa

SEQ ID NO: 52255 - protein, 352 aa, Nostoc sp. PCC 7120
MIVVMKVGSPEVEINRINDELTSWGLTPEKIIGKHKVVIGLVGETADLDPLQIQEVSPWIEQVLRVELPYKRASRQYRHGEASEVVVNTPDGSVVFGENQALVVVAGPCSVENEEMIIETAQRVKAAGAKFLRGGAYKPRTSPYAFQGHGESALELLAKARDVSGLGIITEVMDASELDIIAEVADVIQVGARNMQNFSLLKKVGAQPKPVLLKRGMAATIEDWLMAAEYVLAAGNPNVILCERGIRTFDRQYTRNTLDLSVVPVLRKLTHLPIMIDPSHGTGWAEYVPSMAMAAIAAGTDSLMIEVHPNPKKALSDGPQSLTPEHFDRLMQELAVIGKAVGRWPQPAVVTA

SEQ ID NO: 52256 - DNA, 1014 bp, Clostridium perfringens str. 13
  CDS (1)..(1014): transl_table=11
atgatagttatattaaaaccaggaacaaaggaagaggagattttaaaattgataaaaaagatagaatcacttggagttgagactcaaagaatttctggaagtgaaatgtgtgtaattggtttagttggagatacaagcaaaatagatcctgctaaagtagaagcaaacaaaaatgtagagagaataatgcctgttcaagagccctttaaaaaggcaaatagattattccatccagataactctataattgatgtcttaggaaataaaattggtgataagaaaatagcattaatagctggcccttgttccgtagagagtgaggaacaaataactgaaatagccaaagaagttaaggcattaggggcaagtttcttaagaggtggtgcatttaaaccaagaacttcaccatacagtttccaagggttagaacttgaagggttagagcttctaaagaaggctaaggaaaaaacaggtcttcctatagttacggaaataatgtcaactagtatgatagaaaagtttattgaagaggttgatgttattcaagttggagcaagaaatatgcaaaactttgatcttttaaaagagcttggaaagacaaaaaaacctattcttttaaaaagaggattgtcagctacaatagaggaattaataatgtcagcagagtacataatggccggtggaaatgaaaatgtaattctttgtgaaagaggaattagaacctttgaaacttatacaagaaataccttagacttaagtgcaatacctgctattaaaaaactaagccatttaccagtaattgttgatccaagccatgcagcaggaaaatcatggatggtagaacctttatcaaaagcagccatagctgtaggtgcagatggattaataatagaagtacataatgaccctgctaatgccttatgtgatggtcaacagtcaattaaaccagaagagtacggcaagcttttagacgatttaagagctatcgcaaaggctgttggtagagagttatag

SEQ ID NO: 52257 - protein, 337 aa, Clostridium perfringens str. 13
MIVILKPGTKEEEILKLIKKIESLGVETQRISGSEMCVIGLVGDTSKIDPAKVEANKNVERIMPVQEPFKKANRLFHPDNSIIDVLGNKIGDKKIALIAGPCSVESEEQITEIAKEVKALGASFLRGGAFKPRTSPYSFQGLELEGLELLKKAKEKTGLPIVTEIMSTSMIEKFIEEVDVIQVGARNMQNFDLLKELGKTKKPILLKRGLSATIEELIMSAEYIMAGGNENVILCERGIRTFETYTRNTLDLSAIPAIKKLSHLPVIVDPSHAAGKSWMVEPLSKAAIAVGADGLIIEVHNDPANALCDGQQSIKPEEYGKLLDDLRAIAKAVGREL

SEQ ID NO: 52258 - DNA, 1005 bp, Fusobacterium nucleatum subsp. nucleatum ATCC 25586
  CDS (1)..(1005): transl_table=11
atgtatataaagttaaaggataaaagtttatctaaaagaattaatgaatttttagaaaaaaatgatatagagtattttacttcattagatggagaaaatataaactatgctatactatatgtaccaaataattttaaagaagaaattttcaaagaaattgctgatttggttgaaattgtacaaattaagagttcatacaaatttgtgagtagagaatttaaaaaatctgatactataatagatataaaaggacatttaataggtggaaataactttatgcttatggcaggaccttgttctgttgaaaataaagaaatgctttcaaatatagcagaaaaagtaaaaaaaggtggagcagtagctttaagaggtggagcatataaacctagaacatctccttatgattttcaaggtttaggggaggtagctctaaaatacttgagagaagtagctgatgataatggcatgttggttgtaacagaagctatggatgttgaaaacttagatttaatttgtacttactcagatattgtacaaattggtgctagaaatatgcaaaattttagtctattaaaaaaattaggaaaaataaataaaccagtattgttaaaaagaggtttaagtgcaactattaatgaatttctattatcagcagaatacatcattgcacatggaaatagggaagtgattctttgtgaaagaggaattagaacttttgaaactatgactagaaatactttagatataaatgctatagctatgataaaagaattatcacatcttccaatcatagttgatgcaagccacggaacaggaaaaagaagtttagttgagcctgttaccttagcaggaatttttgcaggagctaatggagctatggtagaagtacatgaaaatccagattgtgcactatctgatggacctcaatcacttgatttcaaattatttgagaaattagcaaaaaatataagaaaatccttaatttttagaagggaattagaataa

SEQ ID NO: 52259 - protein, 334 aa, Fusobacterium nucleatum subsp. nucleatum ATCC 25586
MYIKLKDKSLSKRINEFLEKNDIEYFTSLDGENINYAILYVPNNFKEEIFKEIADLVEIVQIKSSYKFVSREFKKSDTIIDIKGHLIGGNNFMLMAGPCSVENKEMLSNIAEKVKKGGAVALRGGAYKPRTSPYDFQGLGEVALKYLREVADDNGMLVVTEAMDVENLDLICTYSDIVQIGARNMQNFSLLKKLGKINKPVLLKRGLSATINEFLLSAEYIIAHGNREVILCERGIRTFETMTRNTLDINAIAMIKELSHLPIIVDASHGTGKRSLVEPVTLAGIFAGANGAMVEVHENPDCALSDGPQSLDFKLFEKLAKNIRKSLIFRRELE

SEQ ID NO: 52260 - DNA, 1017 bp, Thermoanaerobacter tengcongensis MB4
  CDS (1)..(1017): transl_table=11
atggtaattgtaatgaatatagatgctagtgagaaacaaatttccgagattacaaatcttttaacttctctcgggctgggttatcacatttcaagaggggaagaaaaaatagtaataggtgtgataggggataaaaggaaacttgatggaaaagcgatagagatgatggaaggagtagagaaagtaattccaatagtcgacccttataagctagctagcaggatattcaaaccagagcctactattgtaaaagttggcgatattgaaataggaggcaaaaatattgtcataatggcaggaccttgtgctgtagagagccgagaacagctttttgagagtgctatggcagtgaaaagggcgggagctcactttttaaggggaggggcatataaacccaggacctcgccttactctttccaagggttagaggaggaaggattaaaaatgctcagtgaagcgagagagcttacgggtcttaaaattgtcacggaagtgatggacgtgcattcagtggaaaaagttgcggagtatgcggatgtccttcaaattggagcaagaaacatgcagaatttctcacttcttaaggcggtagggaggatgaataagcctgtacttttaaaaagggggcttgccgcgactttggaggagtggttgagcgctgcagagtacatcttaaatgagggaaataaggatgtaattctctgcgaaagaggtataaggacttttgagacttatacccgcaatactttagatttgagtgcggttccagccataaaaaaactgagtcatctacctataatagtagaccccagccatggaactggtcggtggcaccttgtgccttccatggccaaagcggctgttgctgcaggagcggatggacttatcatagaagtgcatcctgaccctaaaaatgctctttctgatgggcctcaatctttgaccccagacaactttgaaagcttggtgaaagaattaaaaattattgctgaagctgtagggcgggaactggcatga

SEQ ID NO: 52261 - protein, 338 aa, Thermoanaerobacter tengcongensis MB4
MVIVMNIDASEKQISEITNLLTSLGLGYHISRGEEKIVIGVIGDKRKLDGKAIEMMEGVEKVIPIVDPYKLASRIFKPEPTIVKVGDIEIGGKNIVIMAGPCAVESREQLFESAMAVKRAGAHFLRGGAYKPRTSPYSFQGLEEEGLKMLSEARELTGLKIVTEVMDVHSVEKVAEYADVLQIGARNMQNFSLLKAVGRMNKPVLLKRGLAATLEEWLSAAEYILNEGNKDVILCERGIRTFETYTRNTLDLSAVPAIKKLSHLPIIVDPSHGTGRWHLVPSMAKAAVAAGADGLIIEVHPDPKNALSDGPQSLTPDNFESLVKELKIIAEAVGRELA

SEQ ID NO: 52262 - DNA, 1032 bp, Thermosynechococcus elongatus BP-1
  CDS (1)..(1032): transl_table=11
atgattatcgttctaagaagtggcacccccagtgaagaaattgagcgggtcagcagtgaaatgcaaagttggggattgacccctgaaaaaattgtgggtaagcacaaggtagtgatcggccttgttggcgaaacagcagaacttgatcccctacggattcaagaaattagcccttggattgaacacgtcttgcgggttgagcagcccttcaagcgcgccagccgcgagtatcgccacggtgaacccagtgaagtggtggtgcccacgcccaatggcgaggttattttcggcgaaggacatgatgtggtggtggtggcggggccttgctcggttgagaatgagaccatgatcattgaaaccgcacagcgggtgaaagcagcgggggccaaattcctgcgcggcggtgcctacaaaccccgtacctccccctatgccttccagggacatggcgaaagtgcccttgaactgttggcggcagcaaaagcagcaaccggtttaggcatcattacggaagtcatggatgcagcggatctagacaaaattgctgaagtggctgatgtgctgcaaattggtgcccgcaatatgcaaaatttttcgctcctaaagcgggtgggtgcccaacccaagccggtcctcctcaaacggggcatgtccgccactattgaggaatggttgatggctgcggagtacattctggcggcaggaaatcccaatgtgattctctgtgaacggggcattcgtacctttgaccgcgaatatacccgcaataccttggatttagcggcaattcctgtgctgcgcaagctaacccatctaccgattatgattgaccctagccatggtaccggctgggcagaatttgtgccggcaatggccaaagccgcggtggcggcaggcgctgatgctctgatgattgaggtacaccccaaccccgcaaaagccctctccgatggtgctcaatcccttacccccgatcagtttgacgagttgatgcagacgctgcaacgtccccttgtcagtttgagccgctag

SEQ ID NO: 52263 - protein, 343 aa, Thermosynechococcus elongatus BP-1
MIIVLRSGTPSEEIERVSSEMQSWGLTPEKIVGKHKVVIGLVGETAELDPLRIQEISPWIEHVLRVEQPFKRASREYRHGEPSEVVVPTPNGEVIFGEGHDVVVVAGPCSVENETMIIETAQRVKAAGAKFLRGGAYKPRTSPYAFQGHGESALELLAAAKAATGLGIITEVMDAADLDKIAEVADVLQIGARNMQNFSLLKRVGAQPKPVLLKRGMSATIEEWLMAAEYILAAGNPNVILCERGIRTFDREYTRNTLDLAAIPVLRKLTHLPIMIDPSHGTGWAEFVPAMAKAAVAAGADALMIEVHPNPAKALSDGAQSLTPDQFDELMQTLQRPLVSLSR

SEQ ID NO: 52264 - DNA, 1074 bp, Oceanobacillus iheyensis HTE831
  CDS (1)..(1074): transl_table=11
atgagtaatgaaatggaccaactaagacagcaaatggatgatataaatctagaaatactagatttaatcaatcaacgtgcaagtgttgtacaagaaatagggaaattaaaaacgaaacagagcattattcgctttgacccagttcgtgaacgagaaatgctagattatattaaagagaataataacgggccattccaagatgctacgttagaacatatatttaaagaaatctttaaagcaagtttagagttgcaggaagatgatcatagtaaagctttattagtatcacgtaagaagaaaccagagaatactgtagttaatttaaaaggaaaagaagttggaaatggtgaattaagttatgtttttggaccatgtgcagttgagagttatgagcaagttgcagctgtagctcaatcggtaaaagaaaaaggcctaaaactacttcgaggtggagcatttaagcctcgtacttctccgtatgatttccaaggtttaggagtagaagggttacaaatacttaaaaaagtggcagacgaatatgatttagcagtaattagtgaaattgtgaatcctgctcatattgaagaagcaatcgattatatagatgttattcaaattggtgctagaaatatgcaaaactttgaattacttaaagcagcaggcgatgcgaaaaaacctgtattattaaaaagaggactttctgctaccatttcagaatttataaatgccgcagaatacattatgtctagaggaaatggggacattatcctttgtgaacgtggtattcgaacatacgaaaaagcaacaagaaatacattggatatatcagcagtaccaatattaaagaaagaaacgcatttaccagttatggtggacgttacgcattccactggtcgtagagacctcttgctgccaacagcaaaagcagcaatagcggttggtgcagatggtgtaatggcagaagtacatcctgatcctgcagtagcattatctgattctgctcaacaaatggatattccaactttcgatcaattctataaagaaattaaagaagtagaaggtcgtttgaaataa

SEQ ID NO: 52265 - protein, 357 aa, Oceanobacillus iheyensis HTE831
MSNEMDQLRQQMDDINLEILDLINQRASVVQEIGKLKTKQSIIRFDPVREREMLDYIKENNNGPFQDATLEHIFKEIFKASLELQEDDHSKALLVSRKKKPENTVVNLKGKEVGNGELSYVFGPCAVESYEQVAAVAQSVKEKGLKLLRGGAFKPRTSPYDFQGLGVEGLQILKKVADEYDLAVISEIVNPAHIEEAIDYIDVIQIGARNMQNFELLKAAGDAKKPVLLKRGLSATISEFINAAEYIMSRGNGDIILCERGIRTYEKATRNTLDISAVPILKKETHLPVMVDVTHSTGRRDLLLPTAKAAIAVGADGVMAEVHPDPAVALSDSAQQMDIPTFDQFYKEIKEVEGRLK

SEQ ID NO: 52266 - DNA, 996 bp, Lactobacillus plantarum WCFS1
  CDS (1)..(996): transl_table=11
atgattattatattaaaaccagcaaccgctacggctatgcaggcaaagttagtgagtcaatttggtgcggatcacgagatcttcacgcacaataatcgaattgcaattcaaggattgcgtccagaagcacttcccgcggatgtgcaagcagccagtgaatcaatcttgacggcagttcccgcagcggtccaaagcagccgtctctttcacccagaagatacgattattaagacgccacacagtgtgattggcggtaatcaattcgtcatgatggctggcccgtgttcagtcgaaagcgctgaacacgtggaccagatggccgcggttgccaagcagggtggtgcgacgattgttcgtggcggagcattcaagccacggacgtcaccttacagcttccaaggcctcggggagacgggactccaatacttacggacggcggctgataaacatggccttgatatgattaccgaagtgatggatgatgaacacgtggcgatggtggcgaaatacacggatatttttcaaattggtgcacgcaatatgcaaaatttctcgttgcttaaagccgttggacagacccaaattccggttgcattaaagcgaggaatgtcggcaacaatcgacgatgtgctcaatgcagctgaatacattgcagctggtggtaatcatcagatcatgcttttggagcggggaattcgaacgtttgataataagtacacacgcaacacgtttgacttaggtgcagtgccagtcttgcaatcgttgacacattacccagtcatcgttgatccgagtcacgcggtcggtacctgggaactcgtgaccccgatggcgatggcaggtgtagcagctggcgccagtggcatgatcgttgaaattcatgaccagccaacgcaagctttatccgatgggccgcaagcgttaaaacccgcgacgtacttaaaaatggcgcaacaggctttccagttacatgatctgatgcaaacgtgggcgtag

SEQ ID NO: 52267 - protein, 331 aa, Lactobacillus plantarum WCFS1
MIIILKPATATAMQAKLVSQFGADHEIFTHNNRIAIQGLRPEALPADVQAASESILTAVPAAVQSSRLFHPEDTIIKTPHSVIGGNQFVMMAGPCSVESAEHVDQMAAVAKQGGATIVRGGAFKPRTSPYSFQGLGETGLQYLRTAADKHGLDMITEVMDDEHVAMVAKYTDIFQIGARNMQNFSLLKAVGQTQIPVALKRGMSATIDDVLNAAEYIAAGGNHQIMLLERGIRTFDNKYTRNTFDLGAVPVLQSLTHYPVIVDPSHAVGTWELVTPMAMAGVAAGASGMIVEIHDQPTQALSDGPQALKPATYLKMAQQAFQLHDLMQTWA

SEQ ID NO: 52268 - DNA, 1026 bp, Enterococcus faecalis V583
  CDS (1)..(1026): transl_table=11
atgatcgtaattatgaaagaaaatgcaaccgaaaagcaaatgaaacaagtcattgatttagtaacaggtgcaggcttaactactcaaacaagtcaagataatggaaaaacagtgataggcttgattggtgatacagaaaaattagttgaagcagagttaacagcattagaaggcgtggagaaaagtgtccgcatttcgttgtcttacaaactaacgagtcgtttatttcatccagagaatacagtggttgatgtgaacggtgttaaaatcggtgacggcagtatgaccatgatggcgggcccttgttcaatcgaaagcttagatcagattcgcgaatgtgcgcgaattgctaaagctggaggtgcaacaattttacgaggtggtgcattcaaacctagaacgtcgccatacgctttccaaggactagaagaagaaggactaaaatacattcgccaagcggctgatgaattagatatgcaagtcattacagaagtgatggatgaagcgaatttagaacttgtcgcaaaatacagtgacattttacaaatcggtgcgcgcaacatgcaaaatttcaagttattacaagcggttggtaaaactggaaaacctattggcttaaaacgcgggattgctggtacgattgatgaatggctaaacgcagctgaatacattgctgcgcaaggaaatttcaatgtgatcttcattgaacgtgggattcgtacgtacgaaaccgctacgcgcaatacacttgatttaagtgcggtgcctttaattaaaaaattaagtcattttccaattattgttgatccgagtcatggtgttggtatctgggatttagtaccgccaatggcccgagcaggtgttgcttcaggtgcggacggcttgattgtagaaattcatccagatccagcgaatgcgtggtcagatgggccacaatccttgaatgaaaaaacttacctacgtatgatgaaagaagttcatatcatcgaaaaagcaatgaaagaaattaatgctttagaagattag

SEQ ID NO: 52269 - protein, 341 aa, Enterococcus faecalis V583
MIVIMKENATEKQMKQVIDLVTGAGLTTQTSQDNGKTVIGLIGDTEKLVEAELTALEGVEKSVRISLSYKLTSRLFHPENTVVDVNGVKIGDGSMTMMAGPCSIESLDQIRECARIAKAGGATILRGGAFKPRTSPYAFQGLEEEGLKYIRQAADELDMQVITEVMDEANLELVAKYSDILQIGARNMQNFKLLQAVGKTGKPIGLKRGIAGTIDEWLNAAEYIAAQGNFNVIFIERGIRTYETATRNTLDLSAVPLIKKLSHFPIIVDPSHGVGIWDLVPPMARAGVASGADGLIVEIHPDPANAWSDGPQSLNEKTYLRMMKEVHIIEKAMKEINALED

SEQ ID NO: 52270 - DNA, 1074 bp, Bacillus cereus ATCC 14579
  CDS (1)..(1074): transl_table=11
atggcatcacaacaattaggtcgtttacgttctgaaattgatcaacttaatttacaaatattagagttactaaacgaaagaggtcgtctcgtacaagaagttggtaatttaaaagaagtacaaggtgtgaaacgttttgatcctgtacgtgaaagaaatatgctggatttaattgcagagaataataatggtccatttgaaacttcgactttacaacatattttcaaacaaatttttcaagctggtttagaattacaagaagacgatcatcgtaaagcattacttgtttctcgtaagaaaaaaacagaagatacgattgttgaaattaatggtgaaaaaattggtgacggaaatcagcattttattatgggaccgtgtgcagtggaaagttatgaacaagtacgtcaagttgctgaagcaatgaaagggcaaggtctgaaattaatgcgtggtggtgcgtttaaaccacgtacttcaccgtatgattttcaaggtcttggattagagggattacaaattttgcgccaggtagcagatgaatatgatttggctgttattagtgaaattttaaatccgaatgatattgagatgtcattagattacgttgatgttattcaaattggcgctcgcaatatgcaaaactttgatttgctaagggcagctggtgctgtgaataaaccagtattattaaaacgtggtctatcagcaacgattgaagaattcattaatgcggcagaatatattatggcaaagggaaatgggaacattattttatgtgaacgaggtattcgcacgtatgaaagagcgacgcgtaatacgcttgatatttccgctgtgccgattttaaagaaagaaacacatttacctgtcgttgtcgatgtaacgcattctacagggcgacgtgaccttctcttaccaactgcaaaagcagcgatggcaattggtgcagacgcaattatggctgaagtacatcccgatccagctgtagctttatctgatgcagcgcaacaaatgaatataccgcagttcaatgattttatgaatgaattaaaatcatttggaagtaaattataa

SEQ ID NO: 52271 - protein, 357 aa, Bacillus cereus ATCC 14579
MASQQLGRLRSEIDQLNLQILELLNERGRLVQEVGNLKEVQGVKRFDPVRERNMLDLIAENNNGPFETSTLQHIFKQIFQAGLELQEDDHRKALLVSRKKKTEDTIVEINGEKIGDGNQHFIMGPCAVESYEQVRQVAEAMKGQGLKLMRGGAFKPRTSPYDFQGLGLEGLQILRQVADEYDLAVISEILNPNDIEMSLDYVDVIQIGARNMQNFDLLRAAGAVNKPVLLKRGLSATIEEFINAAEYIMAKGNGNIILCERGIRTYERATRNTLDISAVPILKKETHLPVVVDVTHSTGRRDLLLPTAKAAMAIGADAIMAEVHPDPAVALSDAAQQMNIPQFNDFMNELKSFGSKL

SEQ ID NO: 52272 - DNA, 1068 bp, Rhodopirellula baltica SH 1
  CDS (1)..(1068): transl_table=11
gtgatattgattctgaaaaacggcgcgaccgacgatcagatcgaccatgtgctccaaaaggtcgagtcgatggggttccagacgcacctcagccgcgggacgtttcgcacgatcatcggcatgattggtgacgagagtctcaccaccgaacaacagcttcaatcgatccccggcgtgcatcaagtcgttcccgttttgcccccttacaaattggcctcccgagaagctcaccctgaatccagcgtcatcgacgtgtcgggtgtggagatcggtggaggcaacctggccatgatcgctgggccgtgcagcgtcgaagatcgcgaccggatgatgcggatcggcgagagcgtcgtcaaatcaggagccaacctttttcgcggtggagcttacaagccgcgaaccagcccctacgcgtttcaaggtttaggcgaagccggcctgaagatcctgcgggaagtcggcgatgcgtttggtgtgccggttgtgaccgagatcaccgacccacgaaatgtggagttggtggcggagtattccgacatgctgcaggtcggtgctcgcaacatgcagaactttgtgttgctgaccgaggtcggcaaaaccaaacgccccgtcctgctcaaacgtgggatggcggcgacgattcaagacttgctgatgagcgccgagtacgtgctctcacaaggcaaccctgacgtggtgctctgcgaacgcggcatcaagagtttcgatccatcgactcggaacctttacgacgtcgctgctgtgccggctgtccaaggtttgacgcatttgccgatcattgttgatccgtcgcacgccacgggccggccggatttgattccgccgtgtgcgttggccggattagccgcgggtgcggatggcgtgcacatcgaagtccatgattgtcccgaagaagccaaaagcgacggggctcaagccttgttgcccgaacaatacaacgagatcgttcagaagatggccgcgatggctgaactactgggcaaaacgatctcacctcttccgaactcaaccactaaacacaccccgccaaccgaggccctcgcgtga

SEQ ID NO: 52273 - protein, 355 aa, Rhodopirellula baltica SH 1
MILILKNGATDDQIDHVLQKVESMGFQTHLSRGTFRTIIGMIGDESLTTEQQLQSIPGVHQVVPVLPPYKLASREAHPESSVIDVSGVEIGGGNLAMIAGPCSVEDRDRMMRIGESVVKSGANLFRGGAYKPRTSPYAFQGLGEAGLKILREVGDAFGVPVVTEITDPRNVELVAEYSDMLQVGARNMQNFVLLTEVGKTKRPVLLKRGMAATIQDLLMSAEYVLSQGNPDVVLCERGIKSFDPSTRNLYDVAAVPAVQGLTHLPIIVDPSHATGRPDLIPPCALAGLAAGADGVHIEVHDCPEEAKSDGAQALLPEQYNEIVQKMAAMAELLGKTISPLPNSTTKHTPPTEALA

SEQ ID NO: 52274 - DNA, 1029 bp, Gloeobacter violaceus PCC 7421
  CDS (1)..(1029): transl_table=11
atgatcgtcattatgcgtccggaagccaccgaggccgacatcgcggccgtgtgtcagcgcgccaacgaaatgggtctggcgggtcacccctgctacggtgtgcagcaggcgacaatcagcatcatcggtttcgatgaatccgtctcgccgggagatttcagcagcctgggcggggtggaccgggtggtgcgggtgagcacgccccacaaactcgcgagccgccagagcggtctaccggccacggcgatcaagattgcccccggcatcaccgtgggcagtggcctcaccttcgtggccggtccctgttcggtcgaaagccgcgagcacattgtgcacaccgcccggctggtgaaggcgggcggcgcctcgatgctgcgggccggggctttcaagccgcgcacttcgccctaccagtttcgcggtctgggcgaagcgggcctcgactatctggctgaagccggggcggcggcggggttgccggtagttaccgaggtgatgaccccggcgctggtcgagaaggtggccgcgcgcgcggacgtgctgcagatcggcacccgcaacatgcaaaattacgatttgctcctggcggtggggcgcaccgacaagccggtattgctcaagcggggcatgtccgcgaccctgacggaatttttgcttgccgccgagtacatcctctcggcgggcaacccgaatgtgatcctttgcgagcggggcatccgcaccttcgagacccacacccgcaataccctcgatctctcggcggtgcccgccctcaagacgctcacccacctgccggtggtggtggacccgagccacggcacggggcgacgcgaactggtgctgccgatggcccgggctgccgtcgcctgcggtgccgatgggctgctggtcgaagtgcaccccgatccggatcgctcgattagcgacgcccaacaggcaatctccccggagatgttcgcccaactggtgcgcgattgccaggcgatctttgcggcactgcacccggaggcggctcgcacgcccgtgtga

SEQ ID NO: 52275 - protein, 342 aa, Gloeobacter violaceus PCC 7421
MIVIMRPEATEADIAAVCQRANEMGLAGHPCYGVQQATISIIGFDESVSPGDFSSLGGVDRVVRVSTPHKLASRQSGLPATAIKIAPGITVGSGLTFVAGPCSVESREHIVHTARLVKAGGASMLRAGAFKPRTSPYQFRGLGEAGLDYLAEAGAAAGLPVVTEVMTPALVEKVAARADVLQIGTRNMQNYDLLLAVGRTDKPVLLKRGMSATLTEFLLAAEYILSAGNPNVILCERGIRTFETHTRNTLDLSAVPALKTLTHLPVVVDPSHGTGRRELVLPMARAAVACGADGLLVEVHPDPDRSISDAQQAISPEMFAQLVRDCQAIFAALHPEAARTPV

SEQ ID NO: 52276 - DNA, 1065 bp, Gloeobacter violaceus PCC 7421
  CDS (1)..(1065): transl_table=11
ttgattgtcgtgctcaagccgggtgctccccaaggcgtggtggacgccctcgtcgaccagttgcgcggctggaatctggaaacccagaccatcgtcgggcgtgaaaacgtggtaatcggcctgattggtgacaccagcagtctctgcgacgaccgcgtgcaggaactgagccccttcatcgaccgggttctgcgggtcaaaaagcgcttcaagcgcgcctcgcgcgaatttcatcccgagcgcactgtggtgagtgtcccgacggcgggcggcacggtcgaaattgggggcgaagggcctctggtgtgtatggcgggtccatgctcggtagaatccgaagcgatgatcctggagacggcccaccgggtcaaagcggccggtgcccggatcctgcgcggcggtgcctacaaaccgcgcacctcgccctacgactttcaaggccacggcgaatcggctctcgaactgctggctgccgcccgtaccgcgacaggcctggctatcgtcactgaggtgatggacaccagtgatctcgaagccattgccgaggtcgccgatattgtgcaagtcggcgcgcgcaacatgcagaattattcgctgctcaaaaaagtcggtcagcagcccaagccggtgctgctgaagcgggctttctccgccaccatcgacgagtggctgcttgcggcggagtatattttggcggcgggcaatccgaatgtgattctctgcgagcggggtatacgcactttcgaccgccagtacacccgcaacaccctcgatctggccgctgtgccggttctgcgcagcattacccacctgccggtgattgtcgacccgagccacggcactggcctatcgcaatttgtcgaatcgtgcagcaaggcggcggtcgccatcggcgccgacggcttgatgatcgaagtacaccccgatccggcccgcgccctttcggacggtccgcaatgcctgacgccggacgagtttgatgctgcgatggcgaacctagccccgatcgccctcgcggtggggcggccgctacaaacggccgccccggccgcagcccgtccttga

SEQ ID NO: 52277 - protein, 354 aa, Gloeobacter violaceus PCC 7421
MIVVLKPGAPQGVVDALVDQLRGWNLETQTIVGRENVVIGLIGDTSSLCDDRVQELSPFIDRVLRVKKRFKRASREFHPERTVVSVPTAGGTVEIGGEGPLVCMAGPCSVESEAMILETAHRVKAAGARILRGGAYKPRTSPYDFQGHGESALELLAAARTATGLAIVTEVMDTSDLEAIAEVADIVQVGARNMQNYSLLKKVGQQPKPVLLKRAFSATIDEWLLAAEYILAAGNPNVILCERGIRTFDRQYTRNTLDLAAVPVLRSITHLPVIVDPSHGTGLSQFVESCSKAAVAIGADGLMIEVHPDPARALSDGPQCLTPDEFDAAMANLAPIALAVGRPLQTAAPAAARP

SEQ ID NO: 52278 - DNA, 1020 bp, Geobacter sulfurreducens PCA
  CDS (1)..(1020): transl_table=11
atgatcatcgtcatgaaagcgggagcggcaaaaaaagaccgggacgaggtaatcaggcggatcagggagctgggctacaagccccatgtcatccatggcaccacgcgggacgtgatcggggccgtgggggacgagcggggcaagttggtccttcagggcgtcgaatccatgcacggcgtggagagcgtggtgccgatcctgaagccgtacaagctggcatcaagggaggtgaagcccgaaccgagtgttgtcgccattacggataccgtggtcatcggcggccctgaagtcattgtcatggccggtccctgttcggtcgagggagaggccatgattatcgagacggccagggcggtaaaggcggccggcgcccaggtgcttcggggcggagcgttcaagccgcgcacctctccctactccttccagggactcgaagaggaagggctcaagctgctggccaaggcgcgcgaggagacgggtctccccatcgtgaccgaggtggtcaatcccgagacggccgaactggtgtccgagtactccgacattctccagatcggagcccgcaatgcccagaactttgccctgctcaagaaggtggggcagcttcggcgcccggtgctcctcaagcggggcatgtccatgaccatccaggagttcctcatgagcgccgagtatgtcatgagtgaagggaatcagtcggttatcctctgcgaacgcggtatccgcaccttcgagaccgccacccgcaacacgctggatctctcggccattccggtgttgaagcagatgacccatctgccggtcattgccgatccttcccacggcaccggaaactatcactatgtggcacccatggccctggcagctgttgccgccggcgcggacgggctcatgatcgaggtgcatcccgatcccgagcgtgcgtcgtccgatgggccccagtcgctcaagccgaagaaattcgacgcgcttatggcaaagttgcggctcgtggcggcgtccgtggacaggcgactgtaa

SEQ ID NO: 52279 - protein, 339 aa, Geobacter sulfurreducens PCA
MIIVMKAGAAKKDRDEVIRRIRELGYKPHVIHGTTRDVIGAVGDERGKLVLQGVESMHGVESVVPILKPYKLASREVKPEPSVVAITDTVVIGGPEVIVMAGPCSVEGEAMIIETARAVKAAGAQVLRGGAFKPRTSPYSFQGLEEEGLKLLAKAREETGLPIVTEVVNPETAELVSEYSDILQIGARNAQNFALLKKVGQLRRPVLLKRGMSMTIQEFLMSAEYVMSEGNQSVILCERGIRTFETATRNTLDLSAIPVLKQMTHLPVIADPSHGTGNYHYVAPMALAAVAAGADGLMIEVHPDPERASSDGPQSLKPKKFDALMAKLRLVAASVDRRL

SEQ ID NO: 52280 - DNA, 1077 bp, Bacillus cereus ATCC 10987
  CDS (1)..(1077): transl_table=11
atggcaaatcatgaattagatcaattacgtaaacaggtagatgaaattaacttacaactattacaccttttaaacaaacgtggtgaaatcgttcaaaaaattggggagcaaaagcaagtacaaggtacgaaacgttttgatccagtacgtgagcgtgaagtacttgatatgatcgcagagaataacgaaggaccattcgaaacatcaacggttcaacatattttcaaaacaatcttcaaagctagcttagaattacaagaagatgataaccgtaaagcattactagtatcacgtaaaaagaaacaagaaaacacaattgttgacgtaaaaggtgaattgattggtaacggaacacaaacgttcattatgggaccttgtgcggtagaaagcttagagcaagttcgccaagtagggcaagcgatgaaagaccaaggcttaaaattaatgcgcggtggtgctttcaaaccgagaacatctccatacgatttccaaggtttaggagtagaaggattacaaatcttacgccaagtagcagatgagttcgacttagcgattattagtgaaattttaaatccgaacgatgttgaaatggcattagactacgttgatgtaattcaagttggtgcacgtaacatgcaaaacttcgatttactacgagctgtaggtaaagttaacaagccagtattattaaaacgtggattagcagcaacaattgatgagttcattaatgcagcggaatacatcattgcacaaggtaacgaccaaattattctttgtgagcgcggtatccgcacatacgaaagagcgacacgtaacacattagacatttcagcagtaccgattttaaagaaagaaacacatttaccagttgttgttgacgtaacgcattcaactggacgtagagatttattattaccaacagcaaaagcagcacttgcaattggcgcagatgcagtaatggctgaagtacacccagacccagcagttgcattatcagattctgcacaacaaatggatattccagaattccataaattcatggaagagttaaaaggattcaaaaataaattatcttaa

SEQ ID NO: 52281 - protein, 358 aa, Bacillus cereus ATCC 10987
MANHELDQLRKQVDEINLQLLHLLNKRGEIVQKIGEQKQVQGTKRFDPVREREVLDMIAENNEGPFETSTVQHIFKTIFKASLELQEDDNRKALLVSRKKKQENTIVDVKGELIGNGTQTFIMGPCAVESLEQVRQVGQAMKDQGLKLMRGGAFKPRTSPYDFQGLGVEGLQILRQVADEFDLAIISEILNPNDVEMALDYVDVIQVGARNMQNFDLLRAVGKVNKPVLLKRGLAATIDEFINAAEYIIAQGNDQIILCERGIRTYERATRNTLDISAVPILKKETHLPVVVDVTHSTGRRDLLLPTAKAALAIGADAVMAEVHPDPAVALSDSAQQMDIPEFHKFMEELKGFKNKLS

SEQ ID NO: 52282 - DNA, 1017 bp, Clostridium thermocellum ATCC 27405
  CDS (1)..(1017): transl_table=11
atgattatcgttatgagtccaaatgctacaaaagagcagattgaaaatgtggaaaaaaaacttttggagctgggttttaaaactcatcccatagtcggagacgtaaaaacggtaattggggctatcggagacaaaagacttctcaatacccactccatatccaccatgcccggagttgaaagcattgttccaatcatgaaaccttacaagctggccagcaaagaactaaagcaggaaccaaccattgttgaggtaggcgatgtacgaattggtggcaatgaagtagtggttatggccggcccctgtgcaattgaaaacgaagaaatttatgtcgaaacagccaaaaaggttaaagaggcaggagccaaaatactccgcggcggtgctttcaagccccgtacatctccttattctttccaaggtttggaagaagaaggcctcaaaataatggccattgcccgggaagtaacgggacttaagcttgtcaccgaagttgtggacacaagagatgtggaacttgtcgcatcttatacagacatcatccaaatcggtgcaagaaacatgcaaaacttcaggctgcttaaagaggtcggaatgtccaataagcccgtactcctaaaaagaggactggctgcaaccattgaagaatggttaatggccgccgaatatattatttccgagggtaatcccaatgtaatactttgcgaacgaggcatccgaaccttcgagacagccacaaggaacaccattgacatgagcgccattccggtaataaaagagctgtcccatttgccgatagtgcttgaccccagccatgcggcaggtacctggaaatatgttgagcctcttgcaaaaggcgcaatagcaaccggagccgacggtttaatcattgaagtccacagccagcctgactgtgctctctgtgacggtcaacagtctttgataccttcaaggttcgaacagcttatgaaggatcttgagcctatagctcttgcagtgggaagaaaactattgtaa

SEQ ID NO: 52283 - protein, 338 aa, Clostridium thermocellum ATCC 27405
MIIVMSPNATKEQIENVEKKLLELGFKTHPIVGDVKTVIGAIGDKRLLNTHSISTMPGVESIVPIMKPYKLASKELKQEPTIVEVGDVRIGGNEVVVMAGPCAIENEEIYVETAKKVKEAGAKILRGGAFKPRTSPYSFQGLEEEGLKIMAIAREVTGLKLVTEVVDTRDVELVASYTDIIQIGARNMQNFRLLKEVGMSNKPVLLKRGLAATIEEWLMAAEYIISEGNPNVILCERGIRTFETATRNTIDMSAIPVIKELSHLPIVLDPSHAAGTWKYVEPLAKGAIATGADGLIIEVHSQPDCALCDGQQSLIPSRFEQLMKDLEPIALAVGRKLL

SEQ ID NO: 52284 - DNA, 1026 bp, Clostridium thermocellum ATCC 27405
  CDS (1)..(1026): transl_table=11
atggttattgtaatgaaacccaactcaacggaaaacgacatcaacgaggtagcaaaggtattgacttctttgggacttggggtgcatatttcaaagggttccgaaaggactattatcggtgtaatcggcgacaaaaggaagctttccgacgtacctttagagcttatgaacggcgtcgaaaagctgattcccattgtggagtcatacaagctcgcaagcaaaacttttaagccggaacccagtataatcgacgtcggcggtgtaaaaatcggaggcaaggaaattgttgtcatggcaggtccctgtgccgttgaaagcagggagcagattatggctgccgcccaggcagtaaaaaaagccggtgcgcagtttttaaggggcggagctttcaagccgaggacttccccttattcattccaggggcttgaagaagaaggattaaaacttttaaaagaagcaaaagaagcaaccggacttctgattataaccgaggttaccagcgaaagagccatagaaatagccgacagttatgttgacatgttccaggtgggagcgagaaatgttcagaatttccagcttctgcgcgagattggtcgctccaagaaacctgttttgctgaaaagaggtccttcaaccactatagacgaatggttgaatgcggctgaatatataatgagtgaaggcaattacaacgttgttctttgtgaaagaggcataagaacctttgaaacggctaccagaaacacactggatatcagtgcggtgcctgttgtaaaaagcttgagtcatcttccgataattgtcgacccaagccatgcggcaggaaaagcccagtatattcttcctctttcaaaggcggcaattgccgcgggcgcagacggacttatcgtagaagtccatccgaatccaaaatgtgcattgtccgacgctgcccaacaacttccgccggaagatttctgtgaactgtgtaaagatataagtaaaattgccgaaatattaggaagagagtttcactatgcaggttga

SEQ ID NO: 52285 - protein, 341 aa, Clostridium thermocellum ATCC 27405
MVIVMKPNSTENDINEVAKVLTSLGLGVHISKGSERTIIGVIGDKRKLSDVPLELMNGVEKLIPIVESYKLASKTFKPEPSIIDVGGVKIGGKEIVVMAGPCAVESREQIMAAAQAVKKAGAQFLRGGAFKPRTSPYSFQGLEEEGLKLLKEAKEATGLLIITEVTSERAIEIADSYVDMFQVGARNVQNFQLLREIGRSKKPVLLKRGPSTTIDEWLNAAEYIMSEGNYNVVLCERGIRTFETATRNTLDISAVPVVKSLSHLPIIVDPSHAAGKAQYILPLSKAAIAAGADGLIVEVHPNPKCALSDAAQQLPPEDFCELCKDISKIAEILGREFHYAG

SEQ ID NO: 52286 - DNA, 1014 bp, Clostridium difficile 630
  CDS (1)..(1014): transl_table=11
atgatagtagtattaaaaatgggagcagataaaaatgaagttaaaaaattaattgaggctattgggagagaaggagtagaagttaatcccatagatggaacagaattaactgttttaggtttagttggagatactagtaaaatagatgccaaaagaatagaagcaaataaggtagttgaaaaagttatgcatgtggtagagccttttaaaaaggccaatagaaaatttcatccagaaccttcaatcataaatgttaatggaatggaaattggttcaaagaaaattgctatgatagctgggccttgttctgttgaaacagaagaccaaatagtatctatagctaaagatgtgaaaaaatcaggtgcaggatttttgagaggtggagcattcaaaccaagaacatcaccatacgctttccaaggattgaaatatgatggattggatttattaaaaaaagcaaaagaaaaaacagggcttcctatagttacagaaataatgtcaacacaagatatagatatatttgaagaaaatgtagatgtaattcaagttggagctagaaacatgcaaaactttgatttattaaaagaattaggtaaaacaaataaaacaatacttttaaaaagaggattatctgctacaattgaagagtggctaatgtcagcagagtatataatggctggaggaaatgaaaatgtagttctttgtgaaagaggtataagaacttttgaaacatatactagaaatactttggatttaagtgcaattttagctgtgaagaaacttagtcatttaccagttatagttgacccaagtcatgcagcaggtaaatcatggatggttgactctttatctaaggcagcaattgcagttggagcagatggtctaataatcgaagttcataatgacccagcacatgcactttgtgatggaaaacaatcgattaagccaaatgaatatgatgaattgataagtgaattaaagactatcgcatcagcagttggtagagaaatataa

SEQ ID NO: 52287 - protein, 337 aa, Clostridium difficile 630
MIVVLKMGADKNEVKKLIEAIGREGVEVNPIDGTELTVLGLVGDTSKIDAKRIEANKVVEKVMHVVEPFKKANRKFHPEPSIINVNGMEIGSKKIAMIAGPCSVETEDQIVSIAKDVKKSGAGFLRGGAFKPRTSPYAFQGLKYDGLDLLKKAKEKTGLPIVTEIMSTQDIDIFEENVDVIQVGARNMQNFDLLKELGKTNKTILLKRGLSATIEEWLMSAEYIMAGGNENVVLCERGIRTFETYTRNTLDLSAILAVKKLSHLPVIVDPSHAAGKSWMVDSLSKAAIAVGADGLIIEVHNDPAHALCDGKQSIKPNEYDELISELKTIASAVGREI

SEQ ID NO: 52288 - DNA, 1056 bp, Dehalococcoides sp. BAV1
  CDS (1)..(1056): transl_table=11
atgattatcatgaaaaaagatgccagtcaagaagaactagaaaacgtaattgccgaggttcgccgctgcggtctcaagaccgatgtatcaaagggggcattcagaaccattatcggccttataggagatgaaaaatctatcccgtttgcttacttttccagcttgcccggcgtcaaggaagcccgtatggtggaaaccccgtacaagcttatcagccgcgaatactcaaacctgtggcaggctgaaggaatgacccgtgagataaaagtaaaagatataattatcggcggagacgagccggtcttcattgccgggccttgcgcagtggaaagcaaagaagccctgatgaaaatagccgaaggggcaaagatggctggtgcccagatactcagaggcggcgtttacaaaccccgctcatctgtccattctttccaggggctgggttctgccggcaaggatgaggccaccgaagccctttcctggctgaaagaggccggagaacgctttgagatggcagtaatgaccgaggtgcggggcgaatcacaggcagatttggtagccgaatttgtagacatactacaggtaggctcgcgcaatatgtatgatcaggatctgttggcaacagtggccagaaaaggcaaacccgttatgtacaaacgccacttcggtgccagcatggaagaattcctttcctttgccgaatatatagccgctgaaggaaataaggatataatattgtgcgaaagaggcatagtgccggtgggcaagggtaaaagcttcacccgctacaatctggatttggcggcagtacccatagccttaaaggaaacctacctgcccatcatggttgaccccagccatgccaccggacggcgtgatctgatatacagcatgagctgtgccgccatggccgccggggctaacggactgatggtggaagtgcataccaacccggcagaagctctggtggatgcatcccaaatgataactccgccggaactgaaagaactcattgacacctgccgtcagataaacaaactggtgaaaaaacactaa

SEQ ID NO: 52289 - protein, 351 aa, Dehalococcoides sp. BAV1
MIIMKKDASQEELENVIAEVRRCGLKTDVSKGAFRTIIGLIGDEKSIPFAYFSSLPGVKEARMVETPYKLISREYSNLWQAEGMTREIKVKDIIIGGDEPVFIAGPCAVESKEALMKIAEGAKMAGAQILRGGVYKPRSSVHSFQGLGSAGKDEATEALSWLKEAGERFEMAVMTEVRGESQADLVAEFVDILQVGSRNMYDQDLLATVARKGKPVMYKRHFGASMEEFLSFAEYIAAEGNKDIILCERGIVPVGKGKSFTRYNLDLAAVPIALKETYLPIMVDPSHATGRRDLIYSMSCAAMAAGANGLMVEVHTNPAEALVDASQMITPPELKELIDTCRQINKLVKKH

SEQ ID NO: 52290 - DNA, 1035 bp, Thermus thermophilus HB27
  CDS (1)..(1035): transl_table=11
atgctgatcgtgatgaagcgggggtacacggaggaggagcttcaggaggtcgtccgggaaatagagaaggtgggctaccggccccacgtctcccggggcgtggagaccaccctggtgggggccatcggccgggggcccacccccgagctcatggagcacttccgggccctgccgggagtggccgaggtcatccccatctccaagccctggaagctcgcaagcctcgaggtccagcccttccccacggtcctggagttccccacggggaagacggggggcggccacgtgttggtggcggcggggccttgcggggtggagtcccgggagcagaccctgagggccgcccactacgtgaaggcccacggggcccacatgctccgggggggcgctttcaaaccccgcacgagcccttacgctttccagggcctgggcctcgagggcctgaagatcctcgccgaggccaagagggagacgggcctccccatcgtcaccgaggtcctctccccggagcaggtggagctcgtggccgagtacgccgacgtccttcagatcggggcgcggaacgcccagaactttcccctgctccaggcggtgggggaggcggggaagcccgtcctcctcaagcgggggatgagcatgaccctggaagagttcctcatgagcgcggagtacatcctctcccggggcaacatgcgggtgatcctcgtggagcggggcatccgcacctttgagaaggccacccgcttcaccttagacgtcgccgccgtgcccgtcctcaagagctggacccacctccccgtctggatagacccctcccacccggcgggcaagagggactgggtcatccccttggccctggcggggctcgccgcgggagcggacggcctcatcgtggagacccaccccgagccggaaaaggccctctccgacgccgcccagcagctccacgagcacgagttcgccgagctcatggacaaggtgcgccgcctggtggccgccctggacaagaccctcgccgcccccgtcctgggatga

SEQ ID NO: 52291 - protein, 344 aa, Thermus thermophilus HB27
MLIVMKRGYTEEELQEVVREIEKVGYRPHVSRGVETTLVGAIGRGPTPELMEHFRALPGVAEVIPISKPWKLASLEVQPFPTVLEFPTGKTGGGHVLVAAGPCGVESREQTLRAAHYVKAHGAHMLRGGAFKPRTSPYAFQGLGLEGLKILAEAKRETGLPIVTEVLSPEQVELVAEYADVLQIGARNAQNFPLLQAVGEAGKPVLLKRGMSMTLEEFLMSAEYILSRGNMRVILVERGIRTFEKATRFTLDVAAVPVLKSWTHLPVWIDPSHPAGKRDWVIPLALAGLAAGADGLIVETHPEPEKALSDAAQQLHEHEFAELMDKVRRLVAALDKTLAAPVLG

SEQ ID NO: 52292 - DNA, 1041 bp, Symbiobacterium thermophilum IAM 14863
  CDS (1)..(1041): transl_table=11
gtgatcatcgtcatgcggaaaggcgccaccgaggcgcaggtcaacgacatcgtggagcgggttcgggcggcgggattcggcgtgcacctctcccagggggaagagcggacgatcatcggggcgatcggcggcgaccgggcggtgctggccgacctgaacctggaggccgcccccggcgtcgagcgggtgaccccgatctcgaagccctacaagctggcttcgcgggacttccatccggaggacacgctgatccgcatcggcggtcccacggtggggggcaacgacttctgggtcgtggcggggccctgctccgtggaggggcgcgagctgctcctggaggcggcccgcctggtccgggacggcggcgcccacgccctccgggccggcgccttcaagccccggaccagcccgtactccttccaggggctgggcgaggaaggactgaagtacctggccgaggcccgggcggtgaccgggctgccggtcgtcaccgaggtcatggacacccgggacgtggagctggtggccgagtacgccgacgtgctgcagatcggcacccggaacatgcagaacttcagcctgctccgggaggtcggccgggcgaacaggcccgtgctgctgaagcggggcatgtcggccaccattgaggagtggttgatggcggccgagtacgtaatgagcgagggtaaccaccaggtgatcctgtgcgagcggggcgtgcgcacctttgagacggccacccgcaacacgctggacctgtccgccgtggtggtggccaagtcgctgacccacctgccggtggtggtggatcccagccacggcgtgggcaggcgggacttcgtggtggcgctggcccgggcggccgcggccgccggcgcggacgggatcctggtggaggtgcacccgcggccggacgaggccaagtccgacgccgcccagaccatcggacccgccgcgttccaccagatgatgcacgacgtggccgccatcctgcaggtgctggggcggcggctgcctgccgctgcggcggtccatgtctag

SEQ ID NO: 52293 - protein, 346 aa, Symbiobacterium thermophilum IAM 14863
MIIVMRKGATEAQVNDIVERVRAAGFGVHLSQGEERTIIGAIGGDRAVLADLNLEAAPGVERVTPISKPYKLASRDFHPEDTLIRIGGPTVGGNDFWVVAGPCSVEGRELLLEAARLVRDGGAHALRAGAFKPRTSPYSFQGLGEEGLKYLAEARAVTGLPVVTEVMDTRDVELVAEYADVLQIGTRNMQNFSLLREVGRANRPVLLKRGMSATIEEWLMAAEYVMSEGNHQVILCERGVRTFETATRNTLDLSAVVVAKSLTHLPVVVDPSHGVGRRDFVVALARAAAAAGADGILVEVHPRPDEAKSDAAQTIGPAAFHQMMHDVAAILQVLGRRLPAAAAVHV

SEQ ID NO: 52294 - DNA, 1077 bp, Bacillus cereus E33L
  CDS (1)..(1077): transl_table=11
atggcaaatcatgaattagatcaattacgtaaacaggtagatgaaattaacttacaactattacaccttttaaacaaacgcggtgaaatcgttcaaaaaattggggaacaaaagcaagtacaaggtacaaaacgttttgatccagtacgtgagcgtgaagtgcttgatatgattgcagagaataacgaaggaccattcgaaacatcaacagttcaacatattttcaaaacaatcttcaaagctagcttagaattacaagaagatgataaccgtaaagcattactagtatcacgtaaaaagaaacaagaaaatacaatcgttgatgtaaaaggtgaattgattggtaacggcacacaaacgttcatcatgggaccttgtgcggtagaaagcttagagcaagttcgccaagtagggcaagcgatgaaagaccaaggcttaaaattaatgcgcggtggtgctttcaaaccgagaacatctccatacgatttccaaggtttaggagtagaagggctacaaattttacgccaagtagcagatgagttcgacttagcgatcatcagtgagattttaaatccaaacgatgttgaaatggcattagactacgttgatgtaattcaagttggtgcacgtaacatgcaaaacttcgatttactacgagctgtaggtaaagttaacaagccagtattattaaaacgtggattagcagcaacaattgatgagttcattaacgcagctgaatacatcattgcacaaggtaacgaccaaattattctatgtgagcgtggtatccgcacatacgaaagagcaacacgtaacacattagacatttctgctgtaccgattttaaagaaagaaacacatttaccagttatcgttgacgtaacgcattcaactggacgtagagatttattattaccaacggcgaaagcagcacttgcaattggtgcagatgcagtaatggctgaagtacacccagacccagcagtggcactatctgattctgcacaacaaatggatattccagaattccatagattcatggatgagttaaaaggtttcaaaaataaattatcttaa

SEQ ID NO: 52295 - protein, 358 aa, Bacillus cereus E33L
MANHELDQLRKQVDEINLQLLHLLNKRGEIVQKIGEQKQVQGTKRFDPVREREVLDMIAENNEGPFETSTVQHIFKTIFKASLELQEDDNRKALLVSRKKKQENTIVDVKGELIGNGTQTFIMGPCAVESLEQVRQVGQAMKDQGLKLMRGGAFKPRTSPYDFQGLGVEGLQILRQVADEFDLAIISEILNPNDVEMALDYVDVIQVGARNMQNFDLLRAVGKVNKPVLLKRGLAATIDEFINAAEYIIAQGNDQIILCERGIRTYERATRNTLDISAVPILKKETHLPVIVDVTHSTGRRDLLLPTAKAALAIGADAVMAEVHPDPAVALSDSAQQMDIPEFHRFMDELKGFKNKLS

SEQ ID NO: 52296 - DNA, 1077 bp, Bacillus licheniformis ATCC 14580
  CDS (1)..(1077): transl_table=11
atgagcaacactgaacttgatttgctgaggcagcaggcgaatgaattaaacttgcaaatattaaagctgattaacgagcgaggaagaatcgttcaggagattggaaaagcgaaggaagcacaaggcatcaaccgctacgatcctgtcagagaaagagcgatgctgaacgaaattattgaaaataacgacggaccgtttgaaaactcgacgatccagcatatcttcaaagagattttcaaagccgggcttgaactgcaggaagacgatcacagcaaagcgctgctcgtttcccgcaagaaaaagcctgaaaatacaatcgttgatctgaaaggcgaaaaaatcggcgacggagaacaaagatttatcgtcggtccgtgtgcggttgaaagctacgaacaagtagcggaagtcgcagcggcagctaaaaagcaaggcttgaaactgcttcgcggcggagctttcaaaccgcgtacaagcccgtacgacttccaaggcctcggcgtggaaggcctgcaaatcttaaagcgtgttgctgatgagtatgatctggccgtcatcagtgagatcgtgaatccgcagcatattgaagaagccattgattacatcgatgtcatccaaatcggcgcccgcaacatgcagaacttcgagctcttaaaagcggccggttcagtgaagaagccggttctgctgaagcgcggacttgccgcaacgctgaaggaattcatcaatgcagcggagtacatcatgtcgcagggcaatgatcaaatcatcctttgtgaacgcggaatcagaacgtatgaaacagcgactagaaatacgcttgatatctcagctgtgccgatcctgaagcaggaaactcaccttcctgtattcgtggatgtcactcattcaaccggacgccgcgacctgcttcttccgacagcaaaagcagcgcttgcgatcggagctgacggtgtcatggccgaggtccatcctgatccttctgtcgcgctttccgactcagctcagcaaatggatatcccgacatttgaaaaatggttaaatgaactgaagccgctcgttcaagtaaaagcataa

SEQ ID NO: 52297 - protein, 358 aa, Bacillus licheniformis ATCC 14580
MSNTELDLLRQQANELNLQILKLINERGRIVQEIGKAKEAQGINRYDPVRERAMLNEIIENNDGPFENSTIQHIFKEIFKAGLELQEDDHSKALLVSRKKKPENTIVDLKGEKIGDGEQRFIVGPCAVESYEQVAEVAAAAKKQGLKLLRGGAFKPRTSPYDFQGLGVEGLQILKRVADEYDLAVISEIVNPQHIEEAIDYIDVIQIGARNMQNFELLKAAGSVKKPVLLKRGLAATLKEFINAAEYIMSQGNDQIILCERGIRTYETATRNTLDISAVPILKQETHLPVFVDVTHSTGRRDLLLPTAKAALAIGADGVMAEVHPDPSVALSDSAQQMDIPTFEKWLNELKPLVQVKA

SEQ ID NO: 52298 - DNA, 1056 bp, Dehalococcoides ethenogenes 195
  CDS (1)..(1056): transl_table=11
atgattatcatgaaaaaggatgccaccccggaagaactagaaaacgtaattgccgaagttcgccgctgcggtctcaagaccgacatctcaaagggagagttccggactattatcggcctgataggagatgaaaaatcaatcccgtttgcttacttttccagcttgcccggcgtcaaggaagcccgtatggtagaaaccccttacaagcttatcagccgcgagtactcaaacctgtggcaggctgaggggctgacccgtgaaataaaagtaaaagatataactatcggcggggacgagccggtcttcattgccgggccttgtgcagtggaaagtaaggaagccctgatgaagatagctgaaggggcaaagatggcaggtgcccagatactcagaggcggcgtttacaaaccccgttcatctgtccactctttccaggggctgggctctgccggcaaggatgaagccaccgaagccctgtcctggctgaaagaggccggtgaacgctttgagatggcggtaatgaccgagatacggggcgaatcccaggcggatttggttgccgaatatgtagatatactccaggtgggttcacgcaatatgtatgaccaggacctgctggccacagtggccagaaaaggcaaaccggtgatgtacaaacgccacttcggggccagcatggaagaattcctttcttttgccgaatatatagccgcagagggaaataaggatataatattatgcgaaagaggcatagtgccggtgggcaaaggcaaaaacttcacccgctacaacctggatttggcagccgtgccggtagccctgaaggaaacctatttgcccataatggttgaccccagccatgccaccgggcggcgtgacctgatatacagcatgagctgtgccgccatggccgccggggctaacggactgatgattgaggtacataccaacccggcagaggctctggtggatgcttcgcagatgattactccgccggaactgaaagagcttataaatacctgccgccagataaacaaactggtgaaaaaacactaa

SEQ ID NO: 52299 - protein, 351 aa, Dehalococcoides ethenogenes 195
MIIMKKDATPEELENVIAEVRRCGLKTDISKGEFRTIIGLIGDEKSIPFAYFSSLPGVKEARMVETPYKLISREYSNLWQAEGLTREIKVKDITIGGDEPVFIAGPCAVESKEALMKIAEGAKMAGAQILRGGVYKPRSSVHSFQGLGSAGKDEATEALSWLKEAGERFEMAVMTEIRGESQADLVAEYVDILQVGSRNMYDQDLLATVARKGKPVMYKRHFGASMEEFLSFAEYIAAEGNKDIILCERGIVPVGKGKNFTRYNLDLAAVPVALKETYLPIMVDPSHATGRRDLIYSMSCAAMAAGANGLMIEVHTNPAEALVDASQMITPPELKELINTCRQINKLVKKH

SEQ ID NO: 52300 - DNA, 1047 bp, Thermobifida fusca YX
  CDS (1)..(1047): transl_table=11
atggtcatcgttatggcgcccgacgccccttccgacaccatcgactccatcgttgacctcgtcgcctcggtgggtggtgaggcctacgtgacccggggggtgagccggaccatcatcggcctggtaggcgacgtggaacggttcgagacgcttaatctgcgtgccctccccggcgtcgccgacatcctgcgcatctccactccctacaagctggtcagccgggaaaacacgactgagcggtcggtcgtgcaggttgctggggtaccgatcggcggcgaccatatgacactcatcgccggtccctgcgcggtggaaaccccggagcagactttggaagcggcgctgatggcgaagcgtgcgggtgccgcgctgctgcgcggcggcgcctacaagccgcggacctccccctacgcgttccagggcctgggcgagaccggtctgaagatcctgtcggatgtgcgtgcggagaccggcctgccgattgtgaccgaagtggtggacgcctccgacgtggagctggtcgcctcctacgccgacatgctgcagatcggcacccgcaacatgcagaacttcgcgctgctgcaagccgtgggcgacgcgggcaagccggtgctgctcaaacgcgggatgagcagcacgatcgaggagtggctgatggccgccgagtacattgcgcagcgcggcaacttgaacatcgtgctgtgcgagcgcggcatccgcacgttcgagaaagcgacccgtaacacgctggacgtgagcgcggtcgccgtggcgcagcggctgtcgcacctgcccgtggtggtggacccgtcgcattcgggcggcaagcgggaactggtgctgccgctgtcgcgtgcggcgatcgcggtgggcgcggacggcctcatcgtcgacgtgcaccctgctccggagacggcactgtgcgacgggccgcaggcgctcacgcacgcagacttggccgagctggcgcacgtggtgacggcgctgccgccgctcgtgggccgcacgctcacgcccagcgtggcgcaggtgggcgccggcgtgtaa

SEQ ID NO: 52301 - protein, 348 aa, Thermobifida fusca YX
MVIVMAPDAPSDTIDSIVDLVASVGGEAYVTRGVSRTIIGLVGDVERFETLNLRALPGVADILRISTPYKLVSRENTTERSVVQVAGVPIGGDHMTLIAGPCAVETPEQTLEAALMAKRAGAALLRGGAYKPRTSPYAFQGLGETGLKILSDVRAETGLPIVTEVVDASDVELVASYADMLQIGTRNMQNFALLQAVGDAGKPVLLKRGMSSTIEEWLMAAEYIAQRGNLNIVLCERGIRTFEKATRNTLDVSAVAVAQRLSHLPVVVDPSHSGGKRELVLPLSRAAIAVGADGLIVDVHPAPETALCDGPQALTHADLAELAHVVTALPPLVGRTLTPSVAQVGAGV

SEQ ID NO: 52302 - DNA, 1023 bp, Dehalococcoides sp. CBDB1
  CDS (1)..(1023): transl_table=11
atgttagtaataatgaaaaacgatgcaactcaggaacagatagataacgtcatccgtgagattacggatgcaggctaccggggcatacccataccgggtgaccaccgaaccgccgtctgcatagtgggcaatcagggtatggtggaggaaagcccttttctggcactggaaggtgtgaaagaagtattgcgggtgaccaagccctataaactggtcagccatgaaacctgccccaaaccgacagttatccgtctgggagaggtagaaataggaaacggctgcaaaccggttatcattgccggaccttgctcggtggaaagtgaagaacagaccctccggatagcccgtcaggtaaaagagggcggtgccaagctcttcaggggaggggcatttaaaccccgcacttcaccctacagctttcagggtttgggcaaagccggcctcaaaatactggaaaaagtacgctctgaaactgggttgcttattgttaccgaagccaccgactctgaaaacctgaagctggttgaagccagcacagatattatccagattggggcccgaaacatgcaaaattactctctgttacgccgggcaggccagacaaaaaagccggtcattttaaaacggggactgtcagccactattgaagaactgctgatggcagccgaatatataatggccgaaggcaacactcaagttattttgtgcgaacggggtatccgcaccttttcggacaatacccgctttacactagacctaagcgccatcctgtccgtcaaggctgccagccatctgcccatcatagtagaccccagccatgccgccggacgccgtgattatgttatccccctgtccagagcagccattgcaacaggggcagacggactgatagtagaagtccattcagacccgcccagcgctctgtctgacggggcgcagtctttgtatccggaacagttttgccaattggttaaagaggtggaatatttaaatatgctgggagtagaaaaatgcctaaagtag

SEQ ID NO: 52303 - protein, 340 aa, Dehalococcoides sp. CBDB1
MLVIMKNDATQEQIDNVIREITDAGYRGIPIPGDHRTAVCIVGNQGMVEESPFLALEGVKEVLRVTKPYKLVSHETCPKPTVIRLGEVEIGNGCKPVIIAGPCSVESEEQTLRIARQVKEGGAKLFRGGAFKPRTSPYSFQGLGKAGLKILEKVRSETGLLIVTEATDSENLKLVEASTDIIQIGARNMQNYSLLRRAGQTKKPVILKRGLSATIEELLMAAEYIMAEGNTQVILCERGIRTFSDNTRFTLDLSAILSVKAASHLPIIVDPSHAAGRRDYVIPLSRAAIATGADGLIVEVHSDPPSALSDGAQSLYPEQFCQLVKEVEYLNMLGVEKCLK

SEQ ID NO: 52304 - DNA, 1077 bp, Anabaena variabilis ATCC 29413
  CDS (1)..(1077): transl_table=11
atgaaacccttcactccatctgcggaaatagaacaagtaaatgaagaaattcgtcgccatgaacttacaccagaaatctgtgtaggtcatcacaaagtagtaatcggtttggtgggagatacctcagaacttgatccacgccaaattcaaaatttgaacccttttatagaacaagtgattaggattaaaaagcctttcaaaagagcttctttagaatttcgttacggagaacatagtgaggttgtagtaccaacacctaatgggcctataacttttgggcaaaaccatcctgtagttgtagttgccggcccttgttcggtagaaaacgaagaaatgatcgtcgagacagcccaagcggtgaaagaatacggcgcacaatttttacgtggtggcgcatataaaccccgtacatcaccttatgctttccaaggtcatggtgagagcgctctagctttgttagcaaaagctaaagaagctacaggtttaggaatcattacagaaatcatggacgcagatgacttagataagctcatcgaagtagcagatgtgttgcaaattggggcccgaaatatgcagaatttttcacttctcaaaaaaataggagctactactaagccagtgctactgaagcggggactgtcagccactatcgaagattggttgatgtcagcagagtatattttagccggaggtaatccaaacgtcatactatgtgagcgaggaattcgcacttttgaccgacagtttacaagaaatacgctggatatatctgcaattccagttttgcgaaccctgacacacttacctattatgattgatcctagtcatgccaccggtaaatccgaatttgtgccaactatgacaatggcatctatagctgctggtgcagattccttgatgattgaagttcaccccaatccagctaaagcactttcagatgggcctcaatcactcacattggaaggatttaaggaattaatgcacgaaataactgccctaagtaaattctttggtcgttcgcctcacaacaatagtacaaatctaaagccaaaagctatctcattggtgagctattaa

SEQ ID NO: 52305 - protein, 358 aa, Anabaena variabilis ATCC 29413
MKPFTPSAEIEQVNEEIRRHELTPEICVGHHKVVIGLVGDTSELDPRQIQNLNPFIEQVIRIKKPFKRASLEFRYGEHSEVVVPTPNGPITFGQNHPVVVVAGPCSVENEEMIVETAQAVKEYGAQFLRGGAYKPRTSPYAFQGHGESALALLAKAKEATGLGIITEIMDADDLDKLIEVADVLQIGARNMQNFSLLKKIGATTKPVLLKRGLSATIEDWLMSAEYILAGGNPNVILCERGIRTFDRQFTRNTLDISAIPVLRTLTHLPIMIDPSHATGKSEFVPTMTMASIAAGADSLMIEVHPNPAKALSDGPQSLTLEGFKELMHEITALSKFFGRSPHNNSTNLKPKAISLVSY

SEQ ID NO: 52306 - DNA, 1059 bp, Anabaena variabilis ATCC 29413
  CDS (1)..(1059): transl_table=11
atgatagtagtcatgaaagtcggttccccagaagtggaaatcaaccggattaatgatgaattaaccagttgggggctgacaccagaaaaaattatcggcaaacacaaagtagtaattggcttagtaggtgaaaccgccgatttagaccccttacaaatccaagaagttagcccttggattgagcaagtattacgggtagaactgccttataaacgcgctagccgccaatatcgtcacggtgaagcctcggaagtagttgttaatactccagatggtccagtcgtatttggtgaaaaccaagctttagtggtggttgctggtccctgttccgtcgaaaatgaggaaatgattattgagacggcgcagcgcgtcaaggcagccggcgctaagtttttacgcggtggtgcatataagccccgtacttcaccttacgcttttcaaggtcacggcgaaagtgctttggaattgttggcaaaggcgcgggatgttagcggcttaggtatcatcaccgaagtgatggacgcgtcggaactggatattattgcagaagtggctgatgttatccaggtaggtgcaagaaatatgcagaatttctccctactgaaaaaagtaggggcgcagccaaaaccagtattactgaagcgagggatggcagctactatcgaagattggttgatggcagccgagtacgttctagcagcaggtaaccctaatgtaattttatgtgaacgaggtattcgtacttttgaccgtcaatatacacgtaacactttagatttgtcggtagttccagtattgaggaaattaactcacctaccaattatgattgatcccagtcatggtactggttgggctgagtatgtaccatcaatggcgatggcagcgatcgcagctggtactgattctttgatgattgaagtacaccccaatcccaaaaaagccctatccgacgggccgcaatccctcacaccagaacattttgaccgcttaatgcaggaattagcagtcattggtaaagctgtaggacgctggccacaaccagcagttgtaactgcataa

SEQ ID NO: 52307 - protein, 352 aa, Anabaena variabilis ATCC 29413
MIVVMKVGSPEVEINRINDELTSWGLTPEKIIGKHKVVIGLVGETADLDPLQIQEVSPWIEQVLRVELPYKRASRQYRHGEASEVVVNTPDGPVVFGENQALVVVAGPCSVENEEMIIETAQRVKAAGAKFLRGGAYKPRTSPYAFQGHGESALELLAKARDVSGLGIITEVMDASELDIIAEVADVIQVGARNMQNFSLLKKVGAQPKPVLLKRGMAATIEDWLMAAEYVLAAGNPNVILCERGIRTFDRQYTRNTLDLSVVPVLRKLTHLPIMIDPSHGTGWAEYVPSMAMAAIAAGTDSLMIEVHPNPKKALSDGPQSLTPEHFDRLMQELAVIGKAVGRWPQPAVVTA

SEQ ID NO: 52308 - DNA, 1011 bp, Carboxydothermus hydrogenoformans Z-2901
  CDS (1)..(1011): transl_table=11
atgattgtggtttttaaaaaatccgctacccgcgagcaaattgaggccgttagaaagaaactcttagcatccgggtttaccccccacctttccgaaggggtggaaagaaccattattggcattatcggcgataagaggaacttagccgatttaaaccttgagttaatgcccggagtagatactttagtcccaattttaaagccctataaacttgccagcaaagaatttcgggaaaaaacggaaattaatattaagggggaaacgataggttccggtaattttaccatcatcgcgggtccctgtgctgtagagagtagagaaagtttaaaagcagtagctcaattcttaaaagataagggaattaagtttttacgcggaggtacctttaaaccccgaacttctccttactcgtttcagggactgggtgaggaaggcgtaatcattttacaggaaatcgggcaggaatacggtctcattaccgtaacggaagtgttagaagccaaagatgtagaatttgttgccgaaagaatcgacatcctccaggtaggcgctcgaaacatgcaaaactttgcccttttaaaagagctctcccaggtagaaaatcccgtaattttaaaaagaggtttatccgccactattgaagagtggcttttagctgccgaatacctcctgtccggcggaaatcaaaaggttatcttatgcgaacggggaatcagaactttcgaaactgctacccgtaacacccttgatttaagtgcggttgctttggtgaagcaattatcacacctcccggtaatcgtggaccccagccacgccacgggcaaaagggaattaattttacccttatcccgggctgctttagcccttggcgccgatggcctgatgatagaagttcatccagaaccggaaaaagctttatcggatggccctcagtctcttaatttttccgagttttccacgctttatgccgagttaaatactttacaacaggttctggaggggtttaaatga

SEQ ID NO: 52309 - protein, 336 aa, Carboxydothermus hydrogenoformans Z-2901
MIVVFKKSATREQIEAVRKKLLASGFTPHLSEGVERTIIGIIGDKRNLADLNLELMPGVDTLVPILKPYKLASKEFREKTEINIKGETIGSGNFTIIAGPCAVESRESLKAVAQFLKDKGIKFLRGGTFKPRTSPYSFQGLGEEGVIILQEIGQEYGLITVTEVLEAKDVEFVAERIDILQVGARNMQNFALLKELSQVENPVILKRGLSATIEEWLLAAEYLLSGGNQKVILCERGIRTFETATRNTLDLSAVALVKQLSHLPVIVDPSHATGKRELILPLSRAALALGADGLMIEVHPEPEKALSDGPQSLNFSEFSTLYAELNTLQQVLEGFK

SEQ ID NO: 52310 - DNA, 1035 bp, Geobacter metallireducens GS-15
  CDS (1)..(1035): transl_table=11
gtgctgatcgtcatgatccacaaggctggtccgaaacagatcgaggcagttgtgaaggcggtggaaaccatggggcttacggcggcgccgattccggggagcgagcggaccgccatcggggtcctcggcaacaaagggtacgtggatgacaccaccatcagggacctccccggcgtccaggaagtgatccacgtctccaagccctacaagctcgtctcccgcgacttccatccccgcaacaccatcgtgaaggtctgtggcatctccatcggcgaggggaaacggccggtggtggtggccggcccctgcgcggtggaaggggaggagcagatcctgaagaccgcccgggccgtcaagaaggctggggcggatcttctccgtggaggggcgttcaagccccgcaccggcccccataccttccagggaatgcgggaagagggcctgaagctcctggccaaggcccgggaggcaacaggacttcccatcgtcaccgaagtcatgagtcccgacacggtggggctcgtggcggaatacgccgacctcctccaggtgggtgcccgcaacatgcagaatttcgaactcctcaaggagcttggccgcatccagaagccggtcctgctcaagcggggcatgagcgcaaccatcgaagaattcctggccgccgccgaatacatcctggccgagggaaacccccacgtgatcctctgcgagcgggggatcaggacctttgagaccgccacccgcaacaccctggacctggcggtggttcccctcatccgggagatgtcccacctgccggtcatggtggacccttcccacgccacgggaaagcggagcctcgtggcccccatggccaaggcggcactggtggccggagcccacggcgtcctgattgaagtccatccggagccggacaaggccctctccgacggtccccaatccctgaccttccacggctttgatctgctcatggaggaaatcaggcgcctgaacgcattcctcggggtcgacgacggtggagaaaaagccccttga

SEQ ID NO: 52311 - protein, 344 aa, Geobacter metallireducens GS-15
MLIVMIHKAGPKQIEAVVKAVETMGLTAAPIPGSERTAIGVLGNKGYVDDTTIRDLPGVQEVIHVSKPYKLVSRDFHPRNTIVKVCGISIGEGKRPVVVAGPCAVEGEEQILKTARAVKKAGADLLRGGAFKPRTGPHTFQGMREEGLKLLAKAREATGLPIVTEVMSPDTVGLVAEYADLLQVGARNMQNFELLKELGRIQKPVLLKRGMSATIEEFLAAAEYILAEGNPHVILCERGIRTFETATRNTLDLAVVPLIREMSHLPVMVDPSHATGKRSLVAPMAKAALVAGAHGVLIEVHPEPDKALSDGPQSLTFHGFDLLMEEIRRLNAFLGVDDGGEKAP

SEQ ID NO: 52312 - DNA, 1020 bp, Geobacter metallireducens GS-15
  CDS (1)..(1020): transl_table=11
atgatcatcgtcatgaaagcaggtgcagcgaaaaaggaccgggacgaggtaatcaagcggatcaaggagctggggtacaagccccacgtgatccacggaaccacgcgggacgtgatcggggccgtgggggacgagcgggggaagctggtgctgcaatcgatcgaatcgatgcacggggtggagagcgtggtcccgatcctcaagccctacaaactcgcctccaaggaggtgaaggtggagccgagcatcatccggatcagcgatgcggtgagcatcggcggcaaggagatcatcgtcatggccggcccctgttcggtggaaggggaggagcagatcatcgagacggccaaggcggtgaaggccgccggcgcccaggtgctccgcggtggggcgttcaagccgcgcacctccccgtactccttccagggccttgaggaagaaggactcaagcttctggccaaggcccgggagatcaccggccttcccatcgttaccgaggtggtgaatcccgagacggcggatctcgtggccgagtactctgacatcctccagatcggcgcccgcaatgcccagaacttcgccctgctcaagaaggtcgggcagctcaggcggccggtactcctcaagcggggcatgtccatgaccatccaggagttcctcatgagcgccgagtacgtcttgagcgaggggaaccagtcggtgatcctctgcgagcggggaatccgcaccttcgagacggcaactcgcaatacccttgacctctccgccatcccggtcctcaaggggatgacgcacctgccggtcattgccgacccctcccacggtaccggtaactaccactacgtggcccccatggcgctggccgccgttgccgccggggccgacgggctaatgatcgaggtgcatcccgatccggaacgggcctcgtcggacggtccccagtccctcaagcccaagaagttcgatgccctcatgacgaaactcaggctcgttgccgagtccgtggaccggattgtctag

SEQ ID NO: 52313 - protein, 339 aa, Geobacter metallireducens GS-15
MIIVMKAGAAKKDRDEVIKRIKELGYKPHVIHGTTRDVIGAVGDERGKLVLQSIESMHGVESVVPILKPYKLASKEVKVEPSIIRISDAVSIGGKEIIVMAGPCSVEGEEQIIETAKAVKAAGAQVLRGGAFKPRTSPYSFQGLEEEGLKLLAKAREITGLPIVTEVVNPETADLVAEYSDILQIGARNAQNFALLKKVGQLRRPVLLKRGMSMTIQEFLMSAEYVLSEGNQSVILCERGIRTFETATRNTLDLSAIPVLKGMTHLPVIADPSHGTGNYHYVAPMALAAVAAGADGLMIEVHPDPERASSDGPQSLKPKKFDALMTKLRLVAESVDRIV

SEQ ID NO: 52314 - DNA, 1029 bp, Moorella thermoacetica ATCC 39073
  CDS (1)..(1029): transl_table=11
atgatcatagtcatgcaacccggagccacccgcgaagaagagcagagagttatcagtcacctggaacgggagggtttcaaggtgcacctgtcacggggtatagaacggactataatcggcgtaataggcgataaaacccggttaaaggccgaaactgtaacggccctggccggagtggagaaggttgtccccattttgcaaccctataagctggccagccgggatttccatcccgaggatacggtggtagaaacaggcaatcggaccataggcggcgcggcggtgcagataatcgccgggccatgtgccgtggaaagccgtgaccagctcctggaggctgccgacgctgtccgggaggcgggggccaccatgctccgcggcggcgcctataaaccccgcagctcaccttactccttccaggggctggctgccaagggtctggaaatcctggctgaggcccgggaacgtaccggcctgccggtggtcaccgaggttatggaccagaacctggtagaagatgtagccgccgttgccgacgtcctgcagatcggctcccgcaatatgcagaactttgccctcctgcaggccgtaggccagacaaacaaacccgtcctcctaaagcgcggtctggcagccaccattgaagaatggcttctggctgccgagtacatcctcaacgcaggcaatagccgggtgattttatgcgagagaggtatccgcacctttgagacctatacccgcaataccctggacctcagcgcggtaccggcggtaaagcatctctcccacctgcctgtaattgtcgatcccagccacgggaccgggcgccggtttatggtggcccctatggcccgggccgccctggcagccggggccgatgggatcatggttgaggtacacccccgaccccaggaggccctctccgacggctcccagtccctggacccggaacagttcgccgccctggtcagggagatccggcccatcatcaccgccagcgggcgtgaactggagcggcaggccgtatga

SEQ ID NO: 52315 - protein, 342 aa, Moorella thermoacetica ATCC 39073
MIIVMQPGATREEEQRVISHLEREGFKVHLSRGIERTIIGVIGDKTRLKAETVTALAGVEKVVPILQPYKLASRDFHPEDTVVETGNRTIGGAAVQIIAGPCAVESRDQLLEAADAVREAGATMLRGGAYKPRSSPYSFQGLAAKGLEILAEARERTGLPVVTEVMDQNLVEDVAAVADVLQIGSRNMQNFALLQAVGQTNKPVLLKRGLAATIEEWLLAAEYILNAGNSRVILCERGIRTFETYTRNTLDLSAVPAVKHLSHLPVIVDPSHGTGRRFMVAPMARAALAAGADGIMVEVHPRPQEALSDGSQSLDPEQFAALVREIRPIITASGRELERQAV

SEQ ID NO: 52316 - DNA, 1065 bp, Moorella thermoacetica ATCC 39073
  CDS (1)..(1065): transl_table=11
atgatcatcgtcatgaagccgggggccagccgggaacagattaacgccgtgagcgagcgcctggtagagctgggctttaagacccaccccatctacggtcaggaaaagaccgtcatcggcgccatcggcgacaaaaaagccctgagttccgaggccatcatcaacctgcccggcgtcgaaaagatcgttcccataatgaagccctacaaactggtgagccgcgaactcaaggacacgccgaccatcgtccgcatcggcggtgtcccggtaggagggcggggcctggtggtcatggccggcccctgcgccgtcgagggcgaagagcaactcctggaagctgcccgggccgtcaaagccgccggggcccaggtcttgcgcggcggggcctttaaaccgcgtacctccccctatgccttccagggtttggaggaaaaggggcttaaaatgctagcccgggtccgggaggaggtcggcctgcccttcattacggaagccgtggataccagggatgtccctctggtggcggaatacgccgacgccatccagatcggcgctcgtaacatgcagaactttcgcctcctccaggaagccggggccacgggtaaacccatcctgttgaaacggggcctggcggccaccatcgaggaatggctcatggcggccgagtatatcctcgatagcggtaatcccaacgtcatcctgtgcgagcgggggatccgcacctttgaaacctccacccgctttaccttggacctggcggccatcgccgtggtcaaagaaaactcccacctgcccgtaatcgtcgatcccagccacggcacgggcagctggcgcctggtcctgcctatggccagggcggccgtggccgccggcgccgacggcctcattatcgaagtccatcccgacccggcccgggccctctgcgacggcccccagtctctgcaccctgagacctttgaccgcctgatgggcgaacttgcaccggtggccctggctgtcggtcgcggcctggcccttaatggtcttttcccggaacaggccggcaccctggcagcaggcaagtaa

SEQ ID NO: 52317 - protein, 354 aa, Moorella thermoacetica ATCC 39073
MIIVMKPGASREQINAVSERLVELGFKTHPIYGQEKTVIGAIGDKKALSSEAIINLPGVEKIVPIMKPYKLVSRELKDTPTIVRIGGVPVGGRGLVVMAGPCAVEGEEQLLEAARAVKAAGAQVLRGGAFKPRTSPYAFQGLEEKGLKMLARVREEVGLPFITEAVDTRDVPLVAEYADAIQIGARNMQNFRLLQEAGATGKPILLKRGLAATIEEWLMAAEYILDSGNPNVILCERGIRTFETSTRFTLDLAAIAVVKENSHLPVIVDPSHGTGSWRLVLPMARAAVAAGADGLIIEVHPDPARALCDGPQSLHPETFDRLMGELAPVALAVGRGLALNGLFPEQAGTLAAGK

SEQ ID NO: 52318 - DNA, 1119 bp, Syntrophus aciditrophicus SB
  CDS (1)..(1119): transl_table=11
atggccacggcggcagacagcaccgtggccatttttgttgatgctttttccgttcgaaatcggaaaaggcaagaaaaggagaacgatctcatgattatcgtcatgaaaagaaacgcaacggaaactcagatcgatcatgtcgtccgctgggtggagtccattggatacagggctcatcgttccaacggcacggaacagacggtagtcaaggctgtagggggtgagcgcggtggagaggaactgaaatatctggccgcgctttccggcgtggaaaaggttgtcccgatccgtaaaccgtacaagctgacaagtcgagaggcaaaagaggaggatactgtcgtccatgtgggtgatgtccggatcggctcgggagaattcgttgtcatggccgggccctgttccgtagaaagcgaggaacagttgctggaaagcgcctacatcgtccggaagggcggaggccggattctgcgcgggggtgcctttaaaccccggacatcgccatacagttttcaggggatggaagaggatggcttgaaactgctcgcgaaagcccgtgaaaaaacagggctgcccgtggtgacggagatcgtgaatcccgaggacctggacctggttgaggcctataccgacatccttcaggtgggagcccggaatgtccagaactttgctcttttgaaaaaaatcggcagatcacgcaagcccgttctcctgaaaagagggatgatgaccactatagaggaactgttgatgtccgcggagtatatcctgtccgcaggcaatgaccaggtgatcctctgtgagcgggggatacggacttttgagacggcaacgcgcaataccctggacatcagcgccgtgcccgtgctgaaggaactgacccatctgccggtcatcatcgatcccagtcatgcgacggggcactggaaatatgtcatcccactgagtcgggcggcgcttgccgtcggcgcggacggagtgattgtggagatgcatcctcagccggaaaaggcgttctgtgacggtgcgcagtctctcacaccggagaagttctatgagctgatggaagagcttaaaacaatggaatatgtactgaatatgacgacgaaggtgccggcatga

SEQ ID NO: 52319 - protein, 372 aa, Syntrophus aciditrophicus SB
MATAADSTVAIFVDAFSVRNRKRQEKENDLMIIVMKRNATETQIDHVVRWVESIGYRAHRSNGTEQTVVKAVGGERGGEELKYLAALSGVEKVVPIRKPYKLTSREAKEEDTVVHVGDVRIGSGEFVVMAGPCSVESEEQLLESAYIVRKGGGRILRGGAFKPRTSPYSFQGMEEDGLKLLAKAREKTGLPVVTEIVNPEDLDLVEAYTDILQVGARNVQNFALLKKIGRSRKPVLLKRGMMTTIEELLMSAEYILSAGNDQVILCERGIRTFETATRNTLDISAVPVLKELTHLPVIIDPSHATGHWKYVIPLSRAALAVGADGVIVEMHPQPEKAFCDGAQSLTPEKFYELMEELKTMEYVLNMTTKVPA

SEQ ID NO: 52320 - DNA, 1029 bp, Desulfitobacterium hafniense Y51
  CDS (1)..(1029): transl_table=11
atgattatcgtattaaagcgtggagccggtgaggcagaggttcaggaaatcaatgagcgtttaagccaggaaggattcaaaattcacctctcccaaggggtggagaagatcatcatcggtgctgtaggggatcgctcacggctgaaagccctggatctggaagccctgccttgggtagagaaagtggttccgattctggcgccgtacaaacttgtcagccgtgaatttcagagtgggaataccattatcaagatcggcgattatgagatcggcggcgaagaaattcacgtgatggcgggaccctgcagtgtggaaagccgggcccagattatcgagactgcccatgctgttaaagaagcaggagctaccttcttgagggggggagccttcaaaccccgtacttccccgtatgcttttcagggcttggaagaggagggcttaaagcttcttgccgaggccagggaggagacaggattgctggttataaccgaagtagtggatgtgcgggatgtggaacttgtagcccattacgcagatatcctgcaaatcggggcccgcaatatgcagaacttcttcctcctgaaagaagtagccaaaaccaataaacccattctcttaaaacgaggaccctcggcaactcttgaagaatggatgatggccgccgagtacattatggatggcggcaactaccaggtcatgttctgtgaacggggaattcgtacttttgaaacctatacccggaataccctggatttaagcatggttcccgctcttcaatccctttcccatctgccggttattgtcgatcccagtcacggaaccggtcgctggaacctggtgcctcccatggccaaagcggcggtagcagccggagcggacggtatcattgttgaggtgcatccccaaccggagaaagccgtatccgacggcaagcagtccttaactccggataattttgcctcgatgatggcagagctggagattctggctcaggcactgggcagaccggtgaaaggggctcgccggtga

SEQ ID NO: 52321 - protein, 342 aa, Desulfitobacterium hafniense Y51
MIIVLKRGAGEAEVQEINERLSQEGFKIHLSQGVEKIIIGAVGDRSRLKALDLEALPWVEKVVPILAPYKLVSREFQSGNTIIKIGDYEIGGEEIHVMAGPCSVESRAQIIETAHAVKEAGATFLRGGAFKPRTSPYAFQGLEEEGLKLLAEAREETGLLVITEVVDVRDVELVAHYADILQIGARNMQNFFLLKEVAKTNKPILLKRGPSATLEEWMMAAEYIMDGGNYQVMFCERGIRTFETYTRNTLDLSMVPALQSLSHLPVIVDPSHGTGRWNLVPPMAKAAVAAGADGIIVEVHPQPEKAVSDGKQSLTPDNFASMMAELEILAQALGRPVKGARR

SEQ ID NO: 52322 - DNA, 1068 bp, Acidobacteria bacterium Ellin345
  CDS (1)..(1068): transl_table=11
atgttagtcgtgatgaacgcgcacgccaccgaggaacaggtcggcgcggtctgtaaacggattgaggaacttgggttccgcgcgcatccgatcccgggagcgcagcggactgccattggtattaccggcaaccagggcgaagtcgaacctggcgccatcgaagaactgcctggcgtagtggaagtcatccgggtcagcaagccttacaagctcgtaagccgagatgtgaaggaagacaacaccgtcgtccgcttcgcgaacggcgcgaccatcggcagcgaagaactggcggtcgtggcagggccgtgcgcgatcgagaaccacaagcaggcctttgcgatcgccgagcacgttgccaaatcgggagtgcggttcttccgcggcggggcgtataagccgcgcacctcgccgtattcgttccagggactgggcgaagagggcctgaaaattatggccgagattcgcgaccagttcggcttgctgatcgtcaccgaggcagtggacaacgagtcgctcgaccaggttgagaaatatgccgatgtgatccagatcggcgcgcgcaacatgcagaacttctcgctcctcaagcgtgccggacgcgctcgcaagccggtgctgctgaaacgaggcatgtcggcgacactggaagagttcctgatggctgccgagtacgtaatgagcgagggcaactacaacgttgtgctctgcgagcgcggcgtgcggacgttctccgattacacacgcaataccctcgacctgagcgtggtgccagcagtgcatcggttgagccatctgccgatccttgtggatccgagccatgggacgggggtacgcagcaaggtgacgccgttgtcccgcgcatcggtcgccgttggagcggatgggctgatcgtggaagtgcacaacgaaccggaccgcgctctctccgatggcaagcagtctctttatctcgaacagttcgacgaactgatgacacaggttcggcagatcgcgccggtggttcagcgcaaagtcgccgaccgtggcctggcgctcacgacgcgattgaattcggccagcgcccgatga

SEQ ID NO: 52323 - protein, 355 aa, Acidobacteria bacterium Ellin345
MLVVMNAHATEEQVGAVCKRIEELGFRAHPIPGAQRTAIGITGNQGEVEPGAIEELPGVVEVIRVSKPYKLVSRDVKEDNTVVRFANGATIGSEELAVVAGPCAIENHKQAFAIAEHVAKSGVRFFRGGAYKPRTSPYSFQGLGEEGLKIMAEIRDQFGLLIVTEAVDNESLDQVEKYADVIQIGARNMQNFSLLKRAGRARKPVLLKRGMSATLEEFLMAAEYVMSEGNYNVVLCERGVRTFSDYTRNTLDLSVVPAVHRLSHLPILVDPSHGTGVRSKVTPLSRASVAVGADGLIVEVHNEPDRALSDGKQSLYLEQFDELMTQVRQIAPVVQRKVADRGLALTTRLNSASAR

SEQ ID NO: 52324 - DNA, 1119 bp, Myxococcus xanthus DK 1622
  CDS (1)..(1119): transl_table=11
atgatcgtcatgctcgagccggactcgcctgagtccgtggtgtccgccgtcctccaggttgcttcccagtacaagggagtgacgccgcggacgcacgtcatcggtggctccgagtacacgattacggaggtctacctgctgggttccaccgcgcaggtgcccgtggagcccttcgagcagattcccggcgtgcggcaggtggtgcgcgtgtcgcagaagtaccgcgtcatcgggcggcacaagggccagcggacgtccgccggcttcgagtacaacggcgtcaccttcgacgagcgctccgtgaatgtgttcgctggcctgtgtgccgtggacaacccggagaacgtggacacgatgatggcggcgcttgctcgcttgggcatccgcaccacgcgcatgggcgcctacaagccccgcaccaacccctacgagttccagggcctgggcgccgcctgcctgccctgggtgttcgaatccgcgggcaagcacggcatcaaggtcatcgcgatggaggtgacgcacccgcgtcacatcgacgagattcgcgacgcgctcgagcgctccggcaacgccacgggcgtcatgctccaggtgggcacgcgcaacgcgcagaacttcgagctgctcaagagcattggccagcagcgtgtcttcccggtgctcttcaagcgcggcatgggcatcaccctggaggagtcgctcaacgcgtgtgagtacgtggcgagcgagggcaatccgaaaatcatcttctgcctccgcggcgtgaagacgcacctgggtgacccgcaccgcaacatggtggacttcgcccacgtgcccgtggtgcgccggctgacgcgcctgccggtgtgcgtggacccgtcgcacgccattggccaggccgcgccgccgccggacggactgccggacatcttccacgccattggccaggggctcatcgcgggcgcgtccatggtgctggtggacttccacccgcacccggaggccgccctgtgtgacggcccccaggccctgcgcatggagcagctccccgcactgcagcgctacgtccaactggtgcgctccgcgtacgagacggccgtgcagagcggcgacgggctccaggccaccggcgcctga

SEQ ID NO: 52325 - protein, 372 aa, Myxococcus xanthus DK 1622
MIVMLEPDSPESVVSAVLQVASQYKGVTPRTHVIGGSEYTITEVYLLGSTAQVPVEPFEQIPGVRQVVRVSQKYRVIGRHKGQRTSAGFEYNGVTFDERSVNVFAGLCAVDNPENVDTMMAALARLGIRTTRMGAYKPRTNPYEFQGLGAACLPWVFESAGKHGIKVIAMEVTHPRHIDEIRDALERSGNATGVMLQVGTRNAQNFELLKSIGQQRVFPVLFKRGMGITLEESLNACEYVASEGNPKIIFCLRGVKTHLGDPHRNMVDFAHVPVVRRLTRLPVCVDPSHAIGQAAPPPDGLPDIFHAIGQGLIAGASMVLVDFHPHPEAALCDGPQALRMEQLPALQRYVQLVRSAYETAVQSGDGLQATGA

SEQ ID NO: 52326 - DNA, 1026 bp, Myxococcus xanthus DK 1622
  CDS (1)..(1026): transl_table=11
atgttgatcgtgatgcgacccgacgcgacggcccaggacatcgagcgtgtgaacgacgagatccgccgccgtggttggcaaccgcacgcgattccagggggcactcgcacggccgttggcatcaccggaaacccgggcgcggtggaaccggagcccttccgcgtgctccctggcgtcgctgacgccgtggccatctcccagccgttcaagctcgtcagccgcgaggtgaagccggacgacacgcagctgcgcatcggcgacctgacgattggcggctccgccttccacgtcatcgccggcccgtgctcggtggagtcgcgcgagcagattctctccaccgcccacgcggtgaagaaggcgggtgccaccatgctgcgtggcggtgcgttcaagccgcgcaccagcccctatgagttccagggcctcaagggtgacggcctggcgctgctggccgaggcgcgccaggagacgggcctgctcgtcaccaccgaggtgaaggacaccgcgacgctccaggccgtcgccgacaccacggacatccttcagattggcgcgcgcaacatgcagaacttcagcctgctggaggccgtgggggacctgcgcaagccggtgatgctcaagcgcggcatgagcgccaccatcaaggaactgctgatggcggccgagtacatcgtcgcccgcggcaacacgcaggtcatcctctgcgagcgcggcatccgcaccttcgaaacgatgacgcgcaacacgctggacctcaacgcggtgcccatgctgaaggcgctctcgcacctgcccgtcttcgtggacccgtcgcacggcatcggcgtgcgcaaggcggtgccggcgatgatgcgcgcggcgacggcggtgggggcggacggcatcatcgtcgaggtgcaccccgacccgccgcgcgcgaagtcggacggcgcccagtcgctggacttctccgagttcgagaagtccatgaacgaggtccgcgccatcgcccaggcgatgggccgcgaagtggtcaggctgggatag

SEQ ID NO: 52327 - protein, 341 aa, Myxococcus xanthus DK 1622
MLIVMRPDATAQDIERVNDEIRRRGWQPHAIPGGTRTAVGITGNPGAVEPEPFRVLPGVADAVAISQPFKLVSREVKPDDTQLRIGDLTIGGSAFHVIAGPCSVESREQILSTAHAVKKAGATMLRGGAFKPRTSPYEFQGLKGDGLALLAEARQETGLLVTTEVKDTATLQAVADTTDILQIGARNMQNFSLLEAVGDLRKPVMLKRGMSATIKELLMAAEYIVARGNTQVILCERGIRTFETMTRNTLDLNAVPMLKALSHLPVFVDPSHGIGVRKAVPAMMRAATAVGADGIIVEVHPDPPRAKSDGAQSLDFSEFEKSMNEVRAIAQAMGREVVRLG

SEQ ID NO: 52328 - DNA, 1014 bp, Clostridium perfringens ATCC 13124
  CDS (1)..(1014): transl_table=11
atgatagttatattaaaaccaggaacaaaggaagaggagattttaaaattgataaaaaagatagaatcacttggagttgagactcaaagaatttctggaagtgaaatgtgtgtaattggtttagttggagatacaagtaaaatagatcctgctaaagtagaagcaaacaaaaatgtagagagaataatgcctgttcaagagccctttaaaaaggcaaatagattattccatccagagaactctataattgatgtcttaggaaataaaattggtgataagaaaatagcattaatagctggcccttgttccgtagagagtgaggaacaaataactgaaatagccaaagaagttaaggcattaggggcaagtttcttaagaggtggtgcatttaaaccaagaacttcaccatacagtttccaagggttagaacttgaaggattggagcttctaaagaaggctaaggcaaaaacaggtcttcctatagttacagaaataatgtcaactagtatgatagaaaagtttattgaagatgttgatgttattcaagttggagcaagaaatatgcaaaactttgatcttttaaaagagcttggaaagacaaaaaaacctattcttttaaaaagaggattgtcagctacaatagaggaacttataatgtcagcagagtacataatggccggtggaaatgaaaatgtaattctttgtgaaagaggaattagaacctttgaaacttatacaagaaataccttagacttaagtgcaatacctgctattaaaaaactaagtcatttaccagtaattgttgatccaagccatgcagcaggaaagtcatggatggtagaccctttatcaaaggcagccatagctgtaggtgcagatggattaataatagaagtacataatgaccctgctaatgccttatgtgatggtcaacagtcaattaaaccagaagagtacggaaagcttttagaagatttaagagctatcgcaaaggctgttggtagagagttatag

SEQ ID NO: 52329 - protein, 337 aa, Clostridium perfringens ATCC 13124
MIVILKPGTKEEEILKLIKKIESLGVETQRISGSEMCVIGLVGDTSKIDPAKVEANKNVERIMPVQEPFKKANRLFHPENSIIDVLGNKIGDKKIALIAGPCSVESEEQITEIAKEVKALGASFLRGGAFKPRTSPYSFQGLELEGLELLKKAKAKTGLPIVTEIMSTSMIEKFIEDVDVIQVGARNMQNFDLLKELGKTKKPILLKRGLSATIEELIMSAEYIMAGGNENVILCERGIRTFETYTRNTLDLSAIPAIKKLSHLPVIVDPSHAAGKSWMVDPLSKAAIAVGADGLIIEVHNDPANALCDGQQSIKPEEYGKLLEDLRAIAKAVGREL

SEQ ID NO: 52330 - DNA, 1062 bp, Trichodesmium erythraeum IMS101
  CDS (1)..(1062): transl_table=11
atgataatagtaacaaaaatcggttctccagaagtagagatagatcgtctttgtcaggaactcaaaactaattggggtctaactccagaaaaaattgttgggcgctataaagttgttattggtttagtaggagatactgcagacctggatccattacaattacaggaaatgagtccttggatcgaacaggtaatgcgggttgaacgtccttacaaacgagcaagtctagagtttcataacggagaagctagtacagtagtagtatctactccagatggacctataccttttggccttcatcaagatctagttgtagttgctggaccctgttcggtagaaaatgagcaaatgattatagaaacagctcaacgggtgaaagctgctggtgctaagtttttgcgtggaggtgcttataaacctcgtacttctccttattcttttcagggacatggtgagagtgctttaaatttgttggctgcggctaaagaaaaaactggtctgggaattattacagaagtaatggatgctgctgacttaccaaggttgactgaagttgcggatgtggtgcaagtaggtgcccgtaatatgcaaaacttttctctattaaaaaaggtcggtgctcaagataaaccagtgcttttgaagcggggaatgtcagctactattgaagagtggctaatggctgcagaatatattttagcagccggaaattcaaatgtaattctttgtgagcgcggtgttaggacttttgatcgtcagtatgctcgtaatactttggacttgtctgcaataccagttttgcgatcgctgactcatttaccaattatgattgaccctagtcatggtactggtcgagctgaatatgtacctgcaatggcaatgggagctattgctgcaggaacagattctctaatgattgaagtccatccaaatccagcaaaagctctgtcagatggcccacaatctctaacaccagataagtttgataccttaatggaggaaatggcagttattggtaaaagtgttaaacgttggccacaaccggaaccagccattgtatag

SEQ ID NO: 52331 - protein, 353 aa, Trichodesmium erythraeum IMS101
MIIVTKIGSPEVEIDRLCQELKTNWGLTPEKIVGRYKVVIGLVGDTADLDPLQLQEMSPWIEQVMRVERPYKRASLEFHNGEASTVVVSTPDGPIPFGLHQDLVVVAGPCSVENEQMIIETAQRVKAAGAKFLRGGAYKPRTSPYSFQGHGESALNLLAAAKEKTGLGIITEVMDAADLPRLTEVADVVQVGARNMQNFSLLKKVGAQDKPVLLKRGMSATIEEWLMAAEYILAAGNSNVILCERGVRTFDRQYARNTLDLSAIPVLRSLTHLPIMIDPSHGTGRAEYVPAMAMGAIAAGTDSLMIEVHPNPAKALSDGPQSLTPDKFDTLMEEMAVIGKSVKRWPQPEPAIV

SEQ ID NO: 52332 - DNA, 1131 bp, Alkalilimnicola ehrlichei MLHE-1
  CDS (1)..(1131): transl_table=11
atgatcctaatcctagcgccagacactgatcgcgagagcccccaataccacgaaatgctcgatcacctgagccgcctgccaggggtgacggcgcgggtccaccaggttcaggggcgggagcagacgctcaccgaagtctacctcctgggcaataccgccgccctggaggagtccgagatggcggccctgccctgcgtggagcgggtggtgcgggtttcggccgattatcgcatcctgggccggcacaaggacgatgaccgggcggcgcatttcgcctataacggcgtggatttcagccaggataacctgcacgtcttcgccggcctctgcgccgtcgacaccccggagcacgtggaccagaccatgcgggcggtggccgaagccggcctaagctgcacccggatgggtgcctacaagccccgcaccaacccctacgccttccagggccatggcaagcgctgcctgccctgggtctttgagtccgccggacgccacggcatcaaggtgatcgccatggaggtgacccacgatggccacctggaggagatccatgacgccctggaggcggccggccgaccgaccggggtgatgctccagatcggcacccgcaatacccagaacttcgagttgctcaagcacgtgggccggcagaccgactttccggtcctgctcaagcggggctttgggatcacccttgaggagtccttgaacgccgccgaatacctggccagcgaaggcaacagccgggtcatcttctgcctgcgcggcatgaagacccatctcggcgacccgcaccgcaacttcgttgacttcacacacattccggtagtgaaacgcctgacccggatgccggtctgtatcgacccctcccactcggtggggtcccgggccgcctcacccgatggcatcatggatatgatgcacgccaccgcccaaggggtggtcgccggcgccaacatgatcctgctggacgtgcacccggcgccacaaaaggccctggtggacgggccccaggccctgcggctcgaggaactgccctggttcctcgaggacgtccgtctggcgcgcgaggcctacgaacggcgccgtgacctcgcgcagcgcttcctggccgagcagaataggcagtaa

SEQ ID NO: 52333 - protein, 376 aa, Alkalilimnicola ehrlichei MLHE-1
MILILAPDTDRESPQYHEMLDHLSRLPGVTARVHQVQGREQTLTEVYLLGNTAALEESEMAALPCVERVVRVSADYRILGRHKDDDRAAHFAYNGVDFSQDNLHVFAGLCAVDTPEHVDQTMRAVAEAGLSCTRMGAYKPRTNPYAFQGHGKRCLPWVFESAGRHGIKVIAMEVTHDGHLEEIHDALEAAGRPTGVMLQIGTRNTQNFELLKHVGRQTDFPVLLKRGFGITLEESLNAAEYLASEGNSRVIFCLRGMKTHLGDPHRNFVDFTHIPVVKRLTRMPVCIDPSHSVGSRAASPDGIMDMMHATAQGVVAGANMILLDVHPAPQKALVDGPQALRLEELPWFLEDVRLAREAYERRRDLAQRFLAEQNRQ

SEQ ID NO: 52334 - DNA, 993 bp, Leuconostoc mesenteroides subsp. mesenteroides ATCC 8293
  CDS (1)..(993): transl_table=11
atgattattatcgcaaagacaagtcaagatgcagaaaaaattgcagcgcaattagataccaaagaccctattaaaccagtgtttgttcacagtaatagagttgcgttagccggcgtgaaaaagttacccgaagatatattgaaaaatatatcacaagacgttgttgaaataatcacaaaccatcattcagccatcaagtcatcacgtgacttccacccagaggatacaattattacaactaaacatagtgtcatcggtggtggtaacttcgtcttcatggctggccctgattcaatcgaatctcccgaacatgttaaagaaatgggtgaagatgttaagcaggcgggcgcaactatcttgcgcggcggggctttcaagccacgtacatctccatattcatttcaaggtaatggcgaagaaggtttaaaagcccatcgcgcagcagcagatgcgttgggaatggatatggtaaccgaaatcttagatacacgagatgtggatttagttgattcttacacagatattttccaagtcggtacgcgtaatatgcaaaactttgctttgcttaaggccctgggaaagaagaacaagcccgtagttttgaaacgtggtatgtcagcaaccatcgatgatttgcttaatgctgctgaatacattgctgctggtgggaatgatcagattattttgatggaacgtggtattcgtacttatgataataagtacacgcgtaatacgcttgatgtatcagccattcctgttttacaatcgctaactcactatcctgttgttgcggatgcttcacatgcggctggtgtttcaaagtttgttgaaccgcttgctttagctgcaattgctgctggtgcacaaggtttgatgaccgaaatacatgatgatccgtcacatgcatttgttgatggtgcccaagcattgacaccagcacaattcaaacaattgacagagaaggcaaacaaggtgcgcgaggccattaaatga

SEQ ID NO: 52335 - protein, 330 aa, Leuconostoc mesenteroides subsp. mesenteroides ATCC 8293
MIIIAKTSQDAEKIAAQLDTKDPIKPVFVHSNRVALAGVKKLPEDILKNISQDVVEIITNHHSAIKSSRDFHPEDTIITTKHSVIGGGNFVFMAGPDSIESPEHVKEMGEDVKQAGATILRGGAFKPRTSPYSFQGNGEEGLKAHRAAADALGMDMVTEILDTRDVDLVDSYTDIFQVGTRNMQNFALLKALGKKNKPVVLKRGMSATIDDLLNAAEYIAAGGNDQIILMERGIRTYDNKYTRNTLDVSAIPVLQSLTHYPVVADASHAAGVSKFVEPLALAAIAAGAQGLMTEIHDDPSHAFVDGAQALTPAQFKQLTEKANKVREAIK

SEQ ID NO: 52336 - DNA, 1038 bp, Solibacter usitatus Ellin6076
  CDS (1)..(1038): transl_table=11
atgattatttcgatgcgaccgcacgcgacccgggaagaaattgaccacgtttgcgaccggattgcggaattcggatataaggtgcactccatcgaaggcgaggagcgcgtcgtgatcggggttgtcggcgtcggcgacgtgacggcgtgtttggaatcgctggaggctacgcctggcgtggagcgcgcgatgcggatctccgccccgtacaaattcgtcagcaaggagttccgcaagggacggtcggtggtccgggtgaacggcaccgaaatcggcggcgacgagttcgtgatgatggcggggccgtgctcagtggaaagcgaaaagcagatcatggagacggccgagagcgtggccgcggcgggagccaagatccttcgcggcggcgcattcaagccgcgaacgtcgccctacgatttccagggactggaactggaaggcctcaagctgctgcgcaaggcgaaagaacggacggggctgggcatcatcaccgaaatcatgagcgaccgcgatgtggaactggtggccgagtatgccgattgcatgcaggtcggcgcgcgcaatatgcagaatttcgcgctcttgaaatcgctgggcggctgcggacggccggtgctcctgaagcgcggcatgagctcgacgatcaaggaactgctgatgtcggcggagtatattgtggcgcacggcaaccccaacgtgattctctgcgagcgcggcatccggacgttcgagacggcgacgcgcaacacctgcgatatcgcggccgtgccggtgctgaatgagctgacgcacctgccggtggtcctggatccgagccacgcgacgggcaagcgcagcctgattccggcgctctctcgggcgggggttgcgattggcgcggacgggctgattatcgaagtgcatccctgcccggaaaaggcggtcagcgatggagctcaatcgcttacgctgccggcgttccaggcgatgatggacgagcttcaaccctacattcgtctttggagtgaagcgcgcaccagcgaccttgcggctgtgtga

SEQ ID NO: 52337 - protein, 345 aa, Solibacter usitatus Ellin6076
MIISMRPHATREEIDHVCDRIAEFGYKVHSIEGEERVVIGVVGVGDVTACLESLEATPGVERAMRISAPYKFVSKEFRKGRSVVRVNGTEIGGDEFVMMAGPCSVESEKQIMETAESVAAAGAKILRGGAFKPRTSPYDFQGLELEGLKLLRKAKERTGLGIITEIMSDRDVELVAEYADCMQVGARNMQNFALLKSLGGCGRPVLLKRGMSSTIKELLMSAEYIVAHGNPNVILCERGIRTFETATRNTCDIAAVPVLNELTHLPVVLDPSHATGKRSLIPALSRAGVAIGADGLIIEVHPCPEKAVSDGAQSLTLPAFQAMMDELQPYIRLWSEARTSDLAAV

SEQ ID NO: 52338 - DNA, 1014 bp, Solibacter usitatus Ellin6076
  CDS (1)..(1014): transl_table=11
atgctagttgtgatgcagcagggggcgaccgaagaacaggtggagcgcgtgatcgagcggctcaccgagctcggattcgacgtgcatcgctcgacgggcgtgatccacacggtgctcggcggagtgggtggcaagtacgatttcgacctcgcggtgttcgaagtgatggagggcgtgaaagaggcgcaccggattgtttcgccgtacaagctggcgagccggagtttccggccgggcgggacggtggtgcaggtcggggatgtagcgatcggcggcgagaacgtcgtggtgatggcgggcccgtgcagcgtggagaatcgcgaccagatcgagcaatcggcggagctggttgcgaaggcgggggcgaaaatgattcgcgggggagcgttcaagccgcggagctcgccgtacgcgtttcaggggctaggcgaagaaggcttgcagatgctgcgcgtggcggccgaccggcacgggctgctggtggtgagcgaggtgatggaccagacgcagattcctctggtatcggcgtactcggacgtgctgcaggtgggggcgcgcaatatgcagaacttcaacctgctgcgcgaactcggcaggcaacagaagccggtgctgctgaagcgcggaatcgcggcgacgatcgaagagctgctgctttcggcggagtacattctggcgggcgggaattacaacgtgattttgtgcgagcgcgggattcgcacgttcgagacgtacactcggaacacgatggacatctcggcgatcccggtggtgaagaaactttcgcatctgccgatcgttgccgatccttcgcacgggacggggcggcgcgacaaggtggcgccgatggcgcgcgctgcggtcgcggccggggcggacggtttgttgatcgaggtgcatccggatccagaccacgcgctcagcgacggggcgcaatcgctgcggccggagcaattcgaggatttgatgggacagctacgtatgattgcgcccgcggtgggccggacgatttga

SEQ ID NO: 52339 - protein, 337 aa, Solibacter usitatus Ellin6076
MLVVMQQGATEEQVERVIERLTELGFDVHRSTGVIHTVLGGVGGKYDFDLAVFEVMEGVKEAHRIVSPYKLASRSFRPGGTVVQVGDVAIGGENVVVMAGPCSVENRDQIEQSAELVAKAGAKMIRGGAFKPRSSPYAFQGLGEEGLQMLRVAADRHGLLVVSEVMDQTQIPLVSAYSDVLQVGARNMQNFNLLRELGRQQKPVLLKRGIAATIEELLLSAEYILAGGNYNVILCERGIRTFETYTRNTMDISAIPVVKKLSHLPIVADPSHGTGRRDKVAPMARAAVAAGADGLLIEVHPDPDHALSDGAQSLRPEQFEDLMGQLRMIAPAVGRTI

SEQ ID NO: 52340 - DNA, 1113 bp, Nocardioides sp. JS614
  CDS (1)..(1113): transl_table=11
atgctgagtcgcggccgtccggccgccgccggtcacctacggttctcccgcccccgagaggagtcccgcatggtcgtcgtgatgtcccccgatgccaccgccgaggacgtcgcccacgtcgtcgcgcgggtcgagagcgtcggcggcaaggcgttcgtctcgaccggcgtggtccgcacgatcatcggactggtcggcgacatcgactccttccaccacctcaacctccgcaccctgcgcggcgtcgccgacgtgcaccggatctccgacccctacaagctcgtcagccgccagcaccacccggaccggtccaccgtctgggtcggcgcccccggccgccaggtcccgatcggcccggagacgttcacgctgatcgcgggaccgtgcgcggtcgagaccgcggagcagacgctcgaggcggcgcagatggcccgctccgcgggggcgacgatcctgcgcggcggcgcgttcaagccacggacctcgccgtacgccttccaggggctgggcgtcgccgggctcaggatcctcgccgacgtcggcgccgcgaccgggctgccggtcgtgaccgaggtggtcgacgcccgcgacgtcgccgtggtcgcggagcacgccgacatgctccaggtcgggacgcggaacatggcgaacttcgggctgctccaggccgtcggcgagtccgggaagccggtgctgctcaagcgcgggatgacggccacgatcgaggagtggctgatggcggcggagtacatcgcccagcgcggcaacctggacgtggtcctctgcgagcgcggcatccggaccttcgagccgtccacccgcaacaccctcgacatctccgccgtgcccgtcgtgcaggccaccagccacctcccggtcgtcgtcgacccctcgcacgctgcgggccgcaaggacctggtcgtcccgctgtcgcgggccgcgatcgccgtcggcgccgacggcgtgatcgtcgacgtccacccggacccggagaccgccctgtgcgacggaccccaggccctgctcggctccgagctgcgcgacctggcccaggcggtacgccggctccccgagatggtcggccgccgacccgcggccgaccacgcaggctga

SEQ ID NO: 52341 - protein, 370 aa, Nocardioides sp. JS614
MLSRGRPAAAGHLRFSRPREESRMVVVMSPDATAEDVAHVVARVESVGGKAFVSTGVVRTIIGLVGDIDSFHHLNLRTLRGVADVHRISDPYKLVSRQHHPDRSTVWVGAPGRQVPIGPETFTLIAGPCAVETAEQTLEAAQMARSAGATILRGGAFKPRTSPYAFQGLGVAGLRILADVGAATGLPVVTEVVDARDVAVVAEHADMLQVGTRNMANFGLLQAVGESGKPVLLKRGMTATIEEWLMAAEYIAQRGNLDVVLCERGIRTFEPSTRNTLDISAVPVVQATSHLPVVVDPSHAAGRKDLVVPLSRAAIAVGADGVIVDVHPDPETALCDGPQALLGSELRDLAQAVRRLPEMVGRRPAADHAG

SEQ ID NO: 52342 - DNA, 1047 bp, Nostoc punctiforme PCC 73102
  CDS (1)..(1047): transl_table=11
atgaaaactggttccccagaagcggaaataaaccgcattgatgaggaactaactagctgggggctaactccagaaaaaattgttggtcaacataaagtagttattggtcttgtaggtgaaactgctagcttagatccattacaaattcaggaacttagcccctggattgagcaggtgttacgggtagagcagccttacaaacgagccagtcgccaataccgtcacggtgaggcttcggaagtagtagttaatactcctaatggagcagtggtatttggtgaacatcagcctttggtagtcgttgccggtccttgctcagtagaaaatgaagaaatgattgtagagacggcacggcgcgtcaagacagctggagcaaaatttttgcgcggaggggcatataaaccccgaacttcaccttacgccttccaaggacacggcgagagtgctttggatttattagcaagggcgcgggaagttagtgggctaggtattattacagaagtgatggatgcggctgacctggataaaattgtcgaagttgctgacgtgattcaggtaggagcaagaaatatgcagaatttctccttgctcaaaaaagtgggagcgcagccgaaaccagttctcttgaagcggggaatggcggctactattgaagattggttgatggcagccgagtatgttttggcatctggcaattccaatgtaattttgtgtgaaaggggaatacgcacctttgaccgccaatatacgcgaaatacgctggatttatcggtagtgccagtgttgcggaaactgactcacctgccaattatgattgaccccagccacggcgtaggttggtctgagtttgtgccttcaatggcaatggctgcgatcgcagctggcacagattccctgatgatagaggttcaccccaatcctgccaaagccttatccgacgggccccaatctctcacaccagaccgtttcgataacttgatgcaagaattagcagtaattggtaaggcagtgggacgttggcagcaaccagctgtggctctggcttaa

SEQ ID NO: 52343 - protein, 348 aa, Nostoc punctiforme PCC 73102
MKTGSPEAEINRIDEELTSWGLTPEKIVGQHKVVIGLVGETASLDPLQIQELSPWIEQVLRVEQPYKRASRQYRHGEASEVVVNTPNGAVVFGEHQPLVVVAGPCSVENEEMIVETARRVKTAGAKFLRGGAYKPRTSPYAFQGHGESALDLLARAREVSGLGIITEVMDAADLDKIVEVADVIQVGARNMQNFSLLKKVGAQPKPVLLKRGMAATIEDWLMAAEYVLASGNSNVILCERGIRTFDRQYTRNTLDLSVVPVLRKLTHLPIMIDPSHGVGWSEFVPSMAMAAIAAGTDSLMIEVHPNPAKALSDGPQSLTPDRFDNLMQELAVIGKAVGRWQQPAVALA

SEQ ID NO: 52344 - DNA, 1101 bp, Nostoc punctiforme PCC 73102
  CDS (1)..(1101): transl_table=11
atgattatcatacttaaaaacggtacacctgctgaggaaattactcgcatcagccaagaactaagtgaaacttggaaagtcaccgtagaaaaaagcattggcactcataaagttgtgctagggctaattggtgataccactagcatcgataaattacagattcaagagtacagcccttggattgagcaagtattacgagtgcaacaacctttcaaacgggtaagccgagaattccgacatggagaagccagcgaggttgttgtacctacacccaacggtgatgtctatttcggcgaacatcatccgattgtggtggtagctgggccttgttccgttgaaaatgaagcaatgattgtcgaaactgcaaagcgcgtcaaggcagcaggagcgaagtttctgcgcggcggagcctacaaaccccgcacttcaccttatgcctttcaaggttatggggaaagcgctttagatttattagcagcagcacgggaagctactggtttgggtatcgtcacagaattgatggatgctgccgatttatcagcagtggcgagaacagctgacataatccaaatcggagctaggaatatgcacaacttctcgctgctgaaaaaggtaggcgctcaagataaacctgtgctgctgaagcgggggatgtctgccacaattgacgagtggctgatggcagcagaatatattttggcatcaggaaacccaaatgtgattctttgtgagcggggaattagaacctttgatggtaaatatgcccggaatactttagatttatctgtgcttccggtattgcgatcgctgacccatttaccgattatgatcgatcctagtcatggtactggtaggtctgaatatgttccatcgatggcaatcgctgcgatcgcagctggtacagattccttaatgattgaagttcaccccaatcccgcaaaagctttatctgacgggccgcaatctctcacccctgataaatttgaccgcttagttcaagaaatgtcaattattggcaaagtagtcgatcgctggtctacacctacatttgatagcattaatgacaaccgcattctcttcgcgccggaactttcaaagtaa

SEQ ID NO: 52345 - protein, 366 aa, Nostoc punctiforme PCC 73102
MIIILKNGTPAEEITRISQELSETWKVTVEKSIGTHKVVLGLIGDTTSIDKLQIQEYSPWIEQVLRVQQPFKRVSREFRHGEASEVVVPTPNGDVYFGEHHPIVVVAGPCSVENEAMIVETAKRVKAAGAKFLRGGAYKPRTSPYAFQGYGESALDLLAAAREATGLGIVTELMDAADLSAVARTADIIQIGARNMHNFSLLKKVGAQDKPVLLKRGMSATIDEWLMAAEYILASGNPNVILCERGIRTFDGKYARNTLDLSVLPVLRSLTHLPIMIDPSHGTGRSEYVPSMAIAAIAAGTDSLMIEVHPNPAKALSDGPQSLTPDKFDRLVQEMSIIGKVVDRWSTPTFDSINDNRILFAPELSK

SEQ ID NO: 52346 - DNA, 1059 bp, Crocosphaera watsonii WH 8501
  CDS (1)..(1059): transl_table=11
atgatcgttgttatgaaagttggttcacctgctgaagaaattgaacgtattagtcaagaatttgccgattggggcttaagtcctgagaaaattgtcggtaaacataaggtagtaattggcttagtaggagaaacagcttcccttgatcccctgcaaatacaagaaactagcccttggatcgaaacagttctacgagtagaacaaccgtttaaacgggccagtttagagtaccgtcatggagaatacagcgaagtcattgttaataccccagatgggcctgtaagtgtgggtaaacatcatcccgttgccgtagtagcaggtccctgttcggtagaaaatgaagaaatgatcgttgaaaccgccaaacgggttaaagccgccggagctaaatttttacggggtggagcttacaaacctcgtacctctccttacgcttttcagggccatggagaaagtgccttagaattactcgctgctgctagagaagccagtggtttagggattattacagaagtgatggatgctgcggacttagacaaaattggtgctgtagctgatgtcatccaagtaggggcgagaaatatgcaaaacttcgcccttctcaaaaaagtcggcgctcaagataaaccagttttactgaaacggggaatgtcagcgactattgacgaatggttaatggcagccgaatacgttttagctgctggcaacccccaggttattctctgtgaacgaggtattcgtacctttgacgggaaatacacccgtaataccttggatttatctgtattgcccgttcttcgctccttgactcacttaccgattatgatcgatcccagtcatggcactggaaaatccgattatgtaccctctatggccgctgctgcgatcgctgctgacaccgattctttgatgatcgaagttcaccccaacccggccaaagctttatcagatggggctcaatctctcacccccgataaatttgaccgtgtgatgcgagacttatccatcattggtaaaactgttaatcgttggcctcaacctcaagcagttttagcttag

SEQ ID NO: 52347 - protein, 352 aa, Crocosphaera watsonii WH 8501
MIVVMKVGSPAEEIERISQEFADWGLSPEKIVGKHKVVIGLVGETASLDPLQIQETSPWIETVLRVEQPFKRASLEYRHGEYSEVIVNTPDGPVSVGKHHPVAVVAGPCSVENEEMIVETAKRVKAAGAKFLRGGAYKPRTSPYAFQGHGESALELLAAAREASGLGIITEVMDAADLDKIGAVADVIQVGARNMQNFALLKKVGAQDKPVLLKRGMSATIDEWLMAAEYVLAAGNPQVILCERGIRTFDGKYTRNTLDLSVLPVLRSLTHLPIMIDPSHGTGKSDYVPSMAAAAIAADTDSLMIEVHPNPAKALSDGAQSLTPDKFDRVMRDLSIIGKTVNRWPQPQAVLA

SEQ ID NO: 52348 - DNA, 1014 bp, Photobacterium sp. SKA34
  CDS (1)..(1014): transl_table=11
atgattattgtcttaaaaccgcaagcgacagaagctgatgccaatagcctactggctctaatcgccagtgtcagattaaaacctctatatatgccaggcagtgaacgcattgttttaggtgcattaggtgatgaacgtgttttacaaagcttaaatatagaagcaaaccctttagttgaaacggtaaaacccattttaactaaatacaaattggttagccgagaagtccaagcccacaacacagttgtacgttttggctctgccgcggtaggtggcgatcgttttgctgttattgcaggcccttgctctgtcgagtcagagcaacaattattatctgttgctgaaatggtgaaatctcatggcgctatggcactgcgaggcggcgcttataaaccccgcaccagcccttatgatttccaaggtttagggatagaagggttaaaattgttaaaaaaagccaatgacatgctcggtattcctaccgtatctgaagtcatggatgtgagccaagttgaaaaaatgactcaatatattgattgttttcaaattggtgcgagaaatatgcaaaactatggcttgttaaaaattatcggtgaaagtaaaaaaccgatcttgctcaaacgcggactttcagccactatcgaggaattgctactcgctgctgaatatatttatgatgcaggtaacccaaatatcattttgtgtgaacgtggtattagaacgtttgagacagcaacgagaaatacattggatctcaatgcggtcgcttatttaaagcaacatacccatttgccagtgctggtcgacccaagccatggaacaggtattcgtgagttagtgatcccactctcacgcgcagcggctgctgttggcgccgatggcatcattgtcgaatcacatttaaatccatgtgaagccttatctgatggccatcaagcattcaccgcaccaatgtttgaacaattaatgcaggaattaaaaccgtttgtggaagcggcagggagaacgctgtga

SEQ ID NO: 52349 - protein, 337 aa, Photobacterium sp. SKA34
MIIVLKPQATEADANSLLALIASVRLKPLYMPGSERIVLGALGDERVLQSLNIEANPLVETVKPILTKYKLVSREVQAHNTVVRFGSAAVGGDRFAVIAGPCSVESEQQLLSVAEMVKSHGAMALRGGAYKPRTSPYDFQGLGIEGLKLLKKANDMLGIPTVSEVMDVSQVEKMTQYIDCFQIGARNMQNYGLLKIIGESKKPILLKRGLSATIEELLLAAEYIYDAGNPNIILCERGIRTFETATRNTLDLNAVAYLKQHTHLPVLVDPSHGTGIRELVIPLSRAAAAVGADGIIVESHLNPCEALSDGHQAFTAPMFEQLMQELKPFVEAAGRTL

SEQ ID NO: 52350 - DNA, 1056 bp, Actinoplanes teichomyceticus
  CDS (1)..(1056): transl_table=11
atggtcgttgtgatggcgccggaggccacttcggcggatgtggacgcggtcgtccggctggtcgagtcggtgggcgggcaggcgttcgtcagccgcgggctgtcccggaccatcgtcggcctggtcggcgacgtggccgacttcgaggcgctcaacctgggcagcctggcgggcgtgctgcgggtgatccgggtgtcggtgccgtacaagctggtcagccgggagcaccacccggcgcgctcggtgatccgggccggcggcgtgccgatcggtcccggcacgctgaccgtgatcgccgggccgtgcgcggtggagtccccggagcagacgctggaggcggcccggatggcgcgctcggccggggcctcgatgctgcgcggcggggcgttcaagccgcggacctcaccgtactcctaccaggggttgggggagcggggcctgcgcatcctggccgacgtgcgggccgagacggggctcgccgtggtcaccgaggtgatcgatcccggcagtgtggacatggtcgcgtcgtacgccgacatgctccagatcggcgcccggaacatgcagaatttcgcgctgctgcaggcggtcgggtcggccggcaaaccggtgctgctcaagcgcgggttcagcgccacgatcgaggaatggctcagcgccgccgagtacatcgcgcagcgcggcaatctgaacatcgtgttgtgtgagcgcgggatccggacgttcgagaccgctacccgtaacacgctggacatcagcgcggtgccggtcgcccagcggctctcccacctgccggtgatcgtggatccgtcgcactccggcggccgccgcgatctggtggtgccgctgacccgcgcggcgatcgcggtgggcgcggacgggttgctcatcgacgtccacccggagccgaagaccgctctgtgcgacggtgaccaggcgctgccggaagccgacatccgggagatcgccgacatcgtggcgagcctgcccgcgttcctggggcgggagccggccgtgccctcgggtgaattccgacacgttcccgccgcggtgtga

SEQ ID NO: 52351 - protein, 351 aa, Actinoplanes teichomyceticus
MVVVMAPEATSADVDAVVRLVESVGGQAFVSRGLSRTIVGLVGDVADFEALNLGSLAGVLRVIRVSVPYKLVSREHHPARSVIRAGGVPIGPGTLTVIAGPCAVESPEQTLEAARMARSAGASMLRGGAFKPRTSPYSYQGLGERGLRILADVRAETGLAVVTEVIDPGSVDMVASYADMLQIGARNMQNFALLQAVGSAGKPVLLKRGFSATIEEWLSAAEYIAQRGNLNIVLCERGIRTFETATRNTLDISAVPVAQRLSHLPVIVDPSHSGGRRDLVVPLTRAAIAVGADGLLIDVHPEPKTALCDGDQALPEADIREIADIVASLPAFLGREPAVPSGEFRHVPAAV

SEQ ID NO: 52352 - DNA, 1017 bp, Thermotoga maritima
  CDS (1)..(1017): transl_table=11
atgatagtcgttttgaaacccggttccacagaagaagatataaggaaggtggtgaagttggccgagagttacaacttgaagtgtcacatttccaaaggtcaggaaagaacggttattgggatcatcggggacgacaggtacgtggtggcggacaagttcgagtcgctggattgcgtggaaagcgttgtgagggtgctcaaaccttacaaactcgtttctcgtgagttccatccggaggacacggtgatcgacctcggagatgtgaagataggaaacggctacttcaccatcatagcgggaccgtgctcagttgaaggcagggaaatgctcatggaaaccgcacactttttaagcgaactcggtgttaaagttttgaggggaggggcctacaagcctcgaacatctccttactctttccaaggactcggagaaaaggggctggaatacctgagagaggctgccgacaagtacggtatgtacgtggtgacggaggctctcggagaagacgatcttccaaaagtggccgagtacgctgatatcattcagataggagcgagaaacgctcagaacttcagattgctctctaaagcgggaagctacaacaaacccgttcttctgaaaaggggtttcatgaacaccatcgaagagttccttctctccgctgaatacattgcaaactctggaaacacgaagatcatactgtgtgaaaggggaatcagaacgttcgaaaaggccacgaggaacacactcgatatatccgctgttcctataatcagaaaggaatcccatcttcccattctggtggatccgagccactctgggggaagaagagacctcgttattccactctcccgggccgctatagcggttggagctcatggaatcattgtggaggttcatccggagccggagaaggcactttcggatggaaaacagagtcttgacttcgagctcttcaaggaactggttcaggaaatgaagaaactcgctgatgccctgggggtgaaggtgaattga

SEQ ID NO: 52353 - protein, 338 aa, Thermotoga maritima
MIVVLKPGSTEEDIRKVVKLAESYNLKCHISKGQERTVIGIIGDDRYVVADKFESLDCVESVVRVLKPYKLVSREFHPEDTVIDLGDVKIGNGYFTIIAGPCSVEGREMLMETAHFLSELGVKVLRGGAYKPRTSPYSFQGLGEKGLEYLREAADKYGMYVVTEALGEDDLPKVAEYADIIQIGARNAQNFRLLSKAGSYNKPVLLKRGFMNTIEEFLLSAEYIANSGNTKIILCERGIRTFEKATRNTLDISAVPIIRKESHLPILVDPSHSGGRRDLVIPLSRAAIAVGAHGIIVEVHPEPEKALSDGKQSLDFELFKELVQEMKKLADALGVKVN

SEQ ID NO: 52354 - DNA, 1077 bp, Bacillus subtilis
  CDS (1)..(1077): transl_table=11
atgagcaacacagagttagagcttttaaggcagaaagcagacgaattaaacctacaaattttaaaattaatcaacgaacgcggcaatgttgtaaaagagatcggtaaagcgaaggaagcacagggtgtcaaccgatttgaccctgtcagagaacgcacaatgttaaacaatatcattgaaaacaatgacgggccgttcgaaaattcaaccatccagcacatttttaaagagatattcaaagccggtttagagcttcaggaagaagatcacagcaaagcgctgcttgtctcccgcaagaaaaaacctgaagatacaattgttgatatcaaaggcgaaaaaatcggagacggccagcaaagattcattgtcggcccatgtgcggtagagagctatgagcaggtagctgaagtcgctgcagctgcgaaaaaacaagggattaaaattttgcgcggtggagcctttaagcctcgtacgagcccatacgatttccaagggcttggtgttgaaggccttcaaattttaaaacgtgtagcggatgaatttgatctggcggttatcagtgaaatcgtaactccggctcatatcgaagaagcgctggactacattgatgtcattcaaatcggagcgcgcaacatgcaaaacttcgaattgctgaaagcggccggcgccgtgaaaaagccagtgcttctgaagcgcggtcttgctgcaacgatctctgaattcatcaatgctgctgaatacatcatgtcacaaggaaatgaccaaattatcctttgtgagcgcggaatcagaacatatgaaacagcaacgagaaacacgctggatatttcagctgtgccgattttgaaacaagaaacgcatttgccagtctttgttgatgttacgcattcaacaggccgccgtgacctcttgcttccgacagctaaagccgctttagcgatcggtgctgatggcgtaatggctgaggttcaccctgatccgtcagtcgcactttctgactctgctcagcaaatggcgattcctgaattcgaaaaatggctgaatgaactgaagccaatggtgaaagtcaacgcttaa

SEQ ID NO: 52355 - protein, 358 aa, Bacillus subtilis
MSNTELELLRQKADELNLQILKLINERGNVVKEIGKAKEAQGVNRFDPVRERTMLNNIIENNDGPFENSTIQHIFKEIFKAGLELQEEDHSKALLVSRKKKPEDTIVDIKGEKIGDGQQRFIVGPCAVESYEQVAEVAAAAKKQGIKILRGGAFKPRTSPYDFQGLGVEGLQILKRVADEFDLAVISEIVTPAHIEEALDYIDVIQIGARNMQNFELLKAAGAVKKPVLLKRGLAATISEFINAAEYIMSQGNDQIILCERGIRTYETATRNTLDISAVPILKQETHLPVFVDVTHSTGRRDLLLPTAKAALAIGADGVMAEVHPDPSVALSDSAQQMAIPEFEKWLNELKPMVKVNA

SEQ ID NO: 52356 - DNA, 21 bp, Artificial sequence
  primer
atgatcgtcgtcatgaaagtc

SEQ ID NO: 52357 - DNA, 23 bp, Artificial sequence
  primer
ttaggccagggccgctactttag

SEQ ID NO: 52358 - protein, 353 aa, Artificial sequence
  consensus sequence
  Variant (2)..(32): Xaa in position 2 to 32 is any amino acid
  Variant (33)..(37): Xaa in position 33 to 37 is any or no amino acid
  Variant (39)..(64): Xaa in position 39 to 64 is any amino acid
  Variant (65)..(76): Xaa in position 65 to 76 is any or no amino acid
  Variant (78)..(79): Xaa in position 78 to 79 is any amino acid
  Variant (81)..(96): Xaa in position 81 to 96 is any amino acid
  Variant (97)..(103): Xaa in position 97 to 103 is any or no amino acid
  Variant (105)..(111): Xaa in position 105 to 111 is any amino acid
  Variant (112)..(112): Xaa in position 112 is any or no amino acid
  Variant (117)..(117): Xaa in position 117 is any amino acid
  Variant (120)..(127): Xaa in position 120 to 127 is any amino acid
  Variant (129)..(134): Xaa in position 129 to 134 is any amino acid
  Variant (136)..(139): Xaa in position 136 to 139 is any amino acid
  Variant (144)..(144): Xaa in position 144 is any amino acid
  Variant (152)..(152): Xaa in position 152 is any amino acid
  Variant (156)..(160): Xaa in position 156 to 160 is any amino acid
  Variant (161)..(167): Xaa in position 161 to 167 is any or no amino acid
  Variant (169)..(170): Xaa in position 169 to 170 is any amino acid
  Variant (172)..(178): Xaa in position 172 to 178 is any amino acid
  Variant (181)..(183): Xaa in position 181 to 183 is any amino acid
  Variant (185)..(185): Xaa in position 185 is any amino acid
  Variant (187)..(200): Xaa in position 187 to 200 is any amino acid
  Variant (202)..(203): Xaa in position 202 to 203 is any amino acid
  Variant (204)..(211): Xaa in position 204 to 211 is any or no amino acid
  Variant (213)..(213): Xaa in position 213 is any amino acid
  Variant (222)..(222): Xaa in position 222 is any amino acid
  Variant (225)..(227): Xaa in position 225 to 227 is any amino acid
  Variant (229)..(231): Xaa in position 229 to 231 is any amino acid
  Variant (232)..(232): Xaa in position 232 is any or no amino acid
  Variant (241)..(242): Xaa in position 241 to 242 is any amino acid
  Variant (246)..(246): Xaa in position 246 is any amino acid
  Variant (248)..(248): Xaa in position 248 is any amino acid
  Variant (250)..(251): Xaa in position 250 to 251 is any amino acid
  Variant (255)..(258): Xaa in position 255 to 258 is any amino acid
  Variant (261)..(263): Xaa in position 261 to 263 is any amino acid
  Variant (273)..(276): Xaa in position 273 to 276 is any amino acid
  Variant (277)..(279): Xaa in position 277 to 279 is any or no amino acid
  Variant (286)..(289): Xaa in position 286 to 289 is any amino acid
  Variant (291)..(296): Xaa in position 291 to 296 is any amino acid
  Variant (300)..(302): Xaa in position 300 to 302 is any amino acid
  Variant (307)..(308): Xaa in position 307 to 308 is any amino acid
  Variant (310)..(319): Xaa in position 310 to 319 is any amino acid
  Variant (320)..(326): Xaa in position 320 to 326 is any or no amino acid
  Variant (329)..(329): Xaa in position 329 is any amino acid
  Variant (331)..(331): Xaa in position 331 is any amino acid
  Variant (335)..(338): Xaa in position 335 to 338 is any amino acid
  Variant (342)..(343): Xaa in position 342 to 343 is any amino acid
  Variant (345)..(346): Xaa in position 345 to 346 is any amino acid
  Variant (348)..(349): Xaa in position 348 to 349 is any amino acid
  Variant (351)..(352): Xaa in position 351 to 352 is any amino acid
MXXXXXXXXXXXXXXXXXXXXXXXXXXXXXXXXXXXXGXXXXXXXXXXXXXXXXXXXXXXXXXXXXXXXXXXXXXXKXXSXXXXXXXXXXXXXXXXXXXXXXXGXXXXXXXXAGPCXVEXXXXXXXXAXXXXXXGXXXXRGGAXKPRTSPYXFQGXXXXXXXXXXXXLXXLXXXXXXXGLXXXTXEXXXXXXXXXXXXXXDXXXXXXXXXXQXGARNMQNFXLLXXXGXXXXKPVLLKRGXXATIXEXLXXAEYXXXXGNXXXILCERGIRTXXXXXXXTRNTLDXXXXPXXXXXXHLPXXXDPSHXXGXXXXXXXXXXXXXXXXXAAXAXGADXXXXEVHXXPXXAXXDXXQ

SEQ ID NO: 52359 - protein, 39 aa, Artificial sequence
  protein pattern
  Variant (6)..(8): Xaa in position 6 to 8 is any amino acid
  Variant (10)..(10): Xaa in position 10 is Ile or Leu
  Variant (11)..(11): Xaa in position 11 is any amino acid
  Variant (12)..(12): Xaa in position 12 is Asp or Glu
  Variant (13)..(13): Xaa in position 13 is any amino acid
  Variant (14)..(14): Xaa in position 14 is Ile, Leu or Met
  Variant (15)..(15): Xaa in position 15 is any amino acid
  Variant (16)..(16): Xaa in position 16 is Ala or Ser
  Variant (20)..(22): Xaa in position 20 to 22 is any amino acid
  Variant (23)..(23): Xaa in position 23 is any or no amino acid
  Variant (25)..(25): Xaa in position 25 is any or no amino acid
  Variant (27)..(28): Xaa in position 27 to 28 is any amino acid
  Variant (29)..(29): Xaa in position 29 is Ile or Val
  Variant (30)..(30): Xaa in position 30 is Ile, Met or Val
  Variant (31)..(31): Xaa in position 31 is Phe or Leu
  Variant (32)..(32): Xaa in position 32 is Cys or Val
  Variant (33)..(33): Xaa in position 33 is any amino acid
  Variant (36)..(36): Xaa in position 36 is Ile, Met or Val
  Variant (37)..(37): Xaa in position 37 is Lys or Arg
  Variant (38)..(38): Xaa in position 38 is Ser or Thr
  Variant (39)..(39): Xaa in position 39 is Phe, His or Tyr
LLKRGXXXTXXXXXXXAEYXXXXGXNXXXXXXXRGXXXX

SEQ ID NO: 52360 - protein, 40 aa, Artificial sequence
  protein pattern
  Variant (3)..(3): Xaa in position 3 is Ala, Gly or Ser
  Variant (6)..(6): Xaa in position 6 is Gly, Asn, Ser or Thr
  Variant (7)..(13): Xaa in position 7 to 13 is any amino acid
  Variant (15)..(20): Xaa in position 15 to 20 is any amino acid
  Variant (22)..(22): Xaa in position 22 is Ala, Gly, Ile, Leu or Val
  Variant (23)..(24): Xaa in position 23 to 24 is any amino acid
  Variant (25)..(25): Xaa in position 25 is Phe, Ile, Leu, Met or Val
  Variant (29)..(29): Xaa in position 29 is Ala, Thr or Val
  Variant (30)..(30): Xaa in position 30 is Phe or Tyr
  Variant (34)..(34): Xaa in position 34 is Ser or Thr
  Variant (35)..(35): Xaa in position 35 is Gly or Ser
  Variant (36)..(36): Xaa in position 36 is Pro or Val
  Variant (37)..(37): Xaa in position 37 is His or Tyr
  Variant (38)..(38): Xaa in position 38 is Ala, Asp, Glu, Ser or Thr
  Variant (39)..(39): Xaa in position 39 is Phe or Tyr
PCXVEXXXXXXXXAXXXXXXGXXXXRGGXXKPRXXXXXXQ

SEQ ID NO: 52361 - protein, 41 aa, Artificial sequence
  protein pattern
  Variant (2)..(3): Xaa in position 2 to 3 is any amino acid
  Variant (5)..(5): Xaa in position 5 is Phe, Leu or Met
  Variant (7)..(7): Xaa in position 7 is Ile, Leu or Val
  Variant (8)..(8): Xaa in position 8 is Ala, Gly, Asn or Ser
  Variant (9)..(9): Xaa in position 9 is any amino acid
  Variant (10)..(10): Xaa in position 10 is Ile, Leu or Val
  Variant (11)..(11): Xaa in position 11 is Ala, Leu, Pro or Val
  Variant (12)..(12): Xaa in position 12 is any amino acid
  Variant (13)..(13): Xaa in position 13 is Ala, Ile, Leu or Val
  Variant (14)..(16): Xaa in position 14 to 16 is any amino acid
  Variant (17)..(17): Xaa in position 17 is Ser or Thr
  Variant (19)..(19): Xaa in position 19 is any amino acid
  Variant (21)..(21): Xaa in position 21 is Ile or Val
  Variant (22)..(22): Xaa in position 22 is any amino acid
  Variant (23)..(23): Xaa in position 23 is Ala, Ile or Val
  Variant (25)..(25): Xaa in position 25 is Ala, Pro or Val
  Variant (26)..(26): Xaa in position 26 is Ser or Thr
  Variant (28)..(28): Xaa in position 28 is Ala, Gly, Pro or Ser
  Variant (29)..(29): Xaa in position 29 is any amino acid
  Variant (31)..(34): Xaa in position 31 to 34 is any amino acid
  Variant (35)..(35): Xaa in position 35 is Ile, Leu or Val
  Variant (36)..(36): Xaa in position 36 is any amino acid
  Variant (37)..(37): Xaa in position 37 is Ala, Pro, Ser or Thr
  Variant (38)..(40): Xaa in position 38 to 40 is any amino acid
TXXTXDXXXXXXXXXXXHXPXXXDXXHXXGXXXXXXXXXXA

SEQ ID NO: 52362 - protein, 28 aa, Artificial sequence
  protein pattern
  Variant (2)..(2): Xaa in position 2 is any amino acid
  Variant (3)..(3): Xaa in position 3 is any or no amino acid
  Variant (5)..(6): Xaa in position 5 to 6 is any or no amino acid
  Variant (8)..(8): Xaa in position 8 is Ala, Gly or Ser
  Variant (9)..(9): Xaa in position 9 is Ile, Leu or Val
  Variant (10)..(10): Xaa in position 10 is Ile, Leu or Met
  Variant (11)..(11): Xaa in position 11 is Ala, Ile or Val
  Variant (12)..(12): Xaa in position 12 is Asp or Glu
  Variant (13)..(13): Xaa in position 13 is any amino acid
  Variant (15)..(16): Xaa in position 15 to 16 is any amino acid
  Variant (18)..(19): Xaa in position 18 to 19 is any amino acid
  Variant (21)..(21): Xaa in position 21 is any amino acid
  Variant (22)..(22): Xaa in position 22 is Cys or Ser
  Variant (24)..(24): Xaa in position 24 is Ala, Gly or Ser
  Variant (25)..(25): Xaa in position 25 is any amino acid
  Variant (27)..(27): Xaa in position 27 is any amino acid
  Variant (28)..(28): Xaa in position 28 is Phe, Ile, Leu or Met
AXXAXXDXXXXXXHXXPXXAXXDXXQXX

SEQ ID NO: 52363 - protein, 19 aa, Artificial sequence
  protein pattern
  Variant (2)..(2): Xaa in position 2 is any amino acid
  Variant (3)..(3): Xaa in position 3 is Phe, Ile, Leu, Met or Val
  Variant (5)..(5): Xaa in position 5 is Ile or Val
  Variant (10)..(10): Xaa in position 10 is any amino acid
  Variant (13)..(14): Xaa in position 13 to 14 is any amino acid
  Variant (15)..(15): Xaa in position 15 is any or no amino acid
  Variant (17)..(18): Xaa in position 17 to 18 is any amino acid
  Variant (19)..(19): Xaa in position 19 is Ala, Ile, Leu or Val
DXXQXGARNXQNXXXLXXX

SEQ ID NO: 52364 - DNA, 1434 bp, Synechocystis sp.
  CDS (1)..(1434): transl_table=11
atgaagattttatttgtggcggcggaagtatcccccctagcaaaggtaggtggcatgggggatgtggtgggttccctgcctaaagttctgcatcagttgggccatgatgtccgtgtcttcatgccctactacggtttcatcggcgacaagattgatgtgcccaaggagccggtctggaaaggggaagccatgttccagcagtttgctgtttaccagtcctatctaccggacaccaaaattcctctctacttgttcggccatccagctttcgactcccgaaggatctatggcggagatgacgaggcgtggcggttcacttttttttctaacggggcagctgaatttgcctggaaccattggaagccggaaattatccattgccatgattggcacactggcatgatccctgtttggatgcatcagtccccagacatcgccaccgttttcaccatccataatcttgcttaccaagggccctggcggggcttgcttgaaactatgacttggtgtccttggtacatgcagggagacaatgtgatggcggcggcgattcaatttgccaatcgggtgactaccgtttctcccacctatgcccaacagatccaaaccccggcctatggggaaaagctggaagggttattgtcctacctgagtggtaatttagtcggtattctcaacggtattgatacggagatttacaacccggcggaagaccgctttatcagcaatgttttcgatgcggacagtttggacaagcgggtgaaaaataaaattgccatccaggaggaaacggggttagaaattaatcgtaatgccatggtggtgggtatagtggctcgcttggtggaacaaaaggggattgatttggtgattcagatccttgaccgcttcatgtcctacaccgattcccagttaattatcctcggcactggcgatcgccattacgaaacccaactttggcagatggcttcccgatttcctgggcggatggcggtgcaattactccacaacgatgccctttcccgtcgagtctatgccggggcggatgtgtttttaatgccttctcgctttgagccctgtgggctgagtcaattgatggccatgcgttatggctgtatccccattgtgcggcggacagggggtttggtggatacggtatccttctacgatcctatcaatgaagccggcaccggctattgctttgaccgttatgaacccctggattgctttacggccatggtgcgggcctgggagggtttccgtttcaaggcagattggcaaaaattacagcaacgggccatgcgggcagactttagttggtaccgttccgccggggaatatatcaaagtttataagggcgtggtggggaaaccggaggaattaagccccatggaagaggaaaaaatcgctgagttaactgcttcctatcgctaa

SEQ ID NO: 52365 - protein, 477 aa, Synechocystis sp.
MKILFVAAEVSPLAKVGGMGDVVGSLPKVLHQLGHDVRVFMPYYGFIGDKIDVPKEPVWKGEAMFQQFAVYQSYLPDTKIPLYLFGHPAFDSRRIYGGDDEAWRFTFFSNGAAEFAWNHWKPEIIHCHDWHTGMIPVWMHQSPDIATVFTIHNLAYQGPWRGLLETMTWCPWYMQGDNVMAAAIQFANRVTTVSPTYAQQIQTPAYGEKLEGLLSYLSGNLVGILNGIDTEIYNPAEDRFISNVFDADSLDKRVKNKIAIQEETGLEINRNAMVVGIVARLVEQKGIDLVIQILDRFMSYTDSQLIILGTGDRHYETQLWQMASRFPGRMAVQLLHNDALSRRVYAGADVFLMPSRFEPCGLSQLMAMRYGCIPIVRRTGGLVDTVSFYDPINEAGTGYCFDRYEPLDCFTAMVRAWEGFRFKADWQKLQQRAMRADFSWYRSAGEYIKVYKGVVGKPEELSPMEEEKIAELTASYR

SEQ ID NO: 52366 - DNA, 2348 bp, Curcuma zedoaria
  CDS (36)..(2108)
ccaccaccgtaactaccacggccacttcgctcagcatgttctcccacctcctatcctctcctccagcgccgccgccgcccggcgcggccagctgccgcctcctgcacggcggggctcgccctcttggccactctccgctttgctgggcgaatcctctctgtacgagccgatttatggcgggtctttcagaagtcaagaaagggagcaaaatcacactcaaacatatcgatcacactggaagtgctcgcacaatgaggtttcttaatgctttataccatggacaatcagcggatctagttccaatcaaccacaggggaaagtcttcaggcgcagttgggagaagcaatattaatgatatacaagaggatagcaatcaagatgttgacattgccgatgattctgttgcacaaacaatggaacaaagcaagaaggtgttggaaatgcagaggaacctgctgcaacagattattgaaaagagaaatttctctgaagagacagaatcttatgtcaagaaagatgagaaccttggaatttatgcagaagcatatatgcaaacctcaaacaatcaacaagaagctccaccagaagaaggaaatctgaactctcctcctttggctggtccaaatgtaatgaatatcatattggtagctgcagaatgtgcaccatggtctaaaacaggtgggcttggagatgttgttggagctttacctaaagcattggccaagagaggacatcgtgtcatggtagtgtctccaagatatggaaactatcctgaacctaaggaaatagggaatcttaaaaggtacaaggttgatggacaggacatggagattaaatactatcatacttacatcgattctgttgattttgtcttcatcgatagtcctattttccgccatattggaaatgatatatatggtggaaaccgagtggacattttgaagagaatggtattgttctgcaaagcagcagttgaggttccttggcatgtcccatgtggtggattctgttatggagatgggaatttggttttcattgccaacgattggcatacctccttacttccagtttatttgaaggcatgtttccgtgatcgtggattaatgacatacgctcgctgtctcttggttattcacaacattgcacatcagggtcgtggtccgctagatgacttctcatatgtggatttgccacatgatcacattgactcgtttagactggatgatcctgttggaggtgagcattttaacatttttgcagctggtataagagctgctgaccgtgtggttacagttagccatggctatgcttgggagttaaaaacatctgaaggtggttggggattgcatgagatcatcaacgagtgccattggaaattccatggtattgtaaatggaatcgatacccatagttggaatccaaaatttgacgctcacttaaattctgatggttacaccaacttcaccctggaaactcttgaaatgggaaaggcccagtgcaaggctgctttgcaacgagagtttggtctgcctgttcgtgacgacgttcctattcttgccttcattgggagattagaccatcaaaaaggtatagatctcatagcggaggccatgcactggctcgtcggtcaagatctacagataatcatgctgggcactgggaggccagacctcgaggatatgcttcgaagatttgaacgtgagcatcgcggtaaggtcaggggatgggttgggttctcagtgaaaatggctcatcggatcacagcaggtgctgatgccctactgatgccctccaggttcgaaccttgtggattgaaccaacttcacgctatgatgtacggaacaattcctgttgtgcatgcagtaggtggtcttcgagatactgtgcaacagtttgatccgttcaatgagacaggtttgggatggacctttgacagggcagaggcacataggatgatagtggcactcggccattgtctaaacacatatcggaattacaaggagagctgggtgggattgcagaagcgagggatgatgcaggacctcagttgggagagtgctgccgagcactatgaaaaagtccttgttgctgccaagtaccaatggtgatgattgattccatctttctcatagcttcccgttgatgcatgcatgcatgcatcacttggctctgctggaagttgtgtgacaccataaaataataacaatctatcctcatcttgatttgttttttgtttcccctaataactcaggtcatcttgaggcaataatgtagaagaagatatctggatctttgttgtgagtttttaattcccatgccatgggaatttataaaaaaaaaaaaaaaaa

SEQ ID NO: 52367 - protein, 690 aa, Curcuma zedoaria
MFSHLLSSPPAPPPPGAASCRLLHGGARPLGHSPLCWANPLCTSRFMAGLSEVKKGSKITLKHIDHTGSARTMRFLNALYHGQSADLVPINHRGKSSGAVGRSNINDIQEDSNQDVDIADDSVAQTMEQSKKVLEMQRNLLQQIIEKRNFSEETESYVKKDENLGIYAEAYMQTSNNQQEAPPEEGNLNSPPLAGPNVMNIILVAAECAPWSKTGGLGDVVGALPKALAKRGHRVMVVSPRYGNYPEPKEIGNLKRYKVDGQDMEIKYYHTYIDSVDFVFIDSPIFRHIGNDIYGGNRVDILKRMVLFCKAAVEVPWHVPCGGFCYGDGNLVFIANDWHTSLLPVYLKACFRDRGLMTYARCLLVIHNIAHQGRGPLDDFSYVDLPHDHIDSFRLDDPVGGEHFNIFAAGIRAADRVVTVSHGYAWELKTSEGGWGLHEIINECHWKFHGIVNGIDTHSWNPKFDAHLNSDGYTNFTLETLEMGKAQCKAALQREFGLPVRDDVPILAFIGRLDHQKGIDLIAEAMHWLVGQDLQIIMLGTGRPDLEDMLRRFEREHRGKVRGWVGFSVKMAHRITAGADALLMPSRFEPCGLNQLHAMMYGTIPVVHAVGGLRDTVQQFDPFNETGLGWTFDRAEAHRMIVALGHCLNTYRNYKESWVGLQKRGMMQDLSWESAAEHYEKVLVAAKYQW

SEQ ID NO: 52368 - DNA, 1443 bp, Clostridium difficile 630
  CDS (1)..(1443): transl_table=11
atgaaggttttttatgtaacagcagagtgttggccctttgcaaaaactggaggattaggagatgtttcttatgcattgcctaaagaattaaaaaaagaaggtgtagatgtaagggtaataatgcccaaatattcaactataccaagttatttaaaagatcaactaaaagaaatagctgtgtttagtgtacgtgttggatggagaaatcaatactgtggtcttttagaaatggaattagatggtgtaaaattttactttatagataatgaattttattttagaagagaagatgaaagaaagagtatctatggatatggagatgatgcagaaagatatactttctttacagatgcagttttagaagctataagtagaattgatttttatccagatgtaatacatataaatgattggcatacagggatgttaccattaattctaaaagaaagatatgcaacccttgaggggtataaaaatataaaaactatgtatactatacataatctccaatatcaaggtgtatttgataagcatgttttatatgatatattggatttaccacaaaaatactttgataatggagatatagagtattatggctcaataaattttatgaaagctggtataaattttgcagataaaattataactgttagtcctacttatgcaaatgaaatacaaacatctttttatggcgaacaattagatggattacttagaaaagagtcaggaaaattaaaaggtatattaaatggtatagattatgatttaaatgaccctgcaaaagataaagatatatttgttcattatgatgtagactcaattaacaaaaaagtagaaaataaattgagattacaagatatattgggactaaaaaaagattcatctattccgttgataggtatagtttcgagattagtttctcaaaaaggatttgatttaatagcatacatgatgccagaacttatgagagaagatttacagattgtcgttttaggaactggagaacatcaatatcaatcaatgttcaactattacgattctaatttttcagataaagtatcagctagaattacttttaatgcatcattggctcaacagatatatgctgcaagtgatatgttcttaatgccatcattatttgagccttgtggtataggtcaaatgttagctatgagatatggttctttaccaatagttagagagactggagggcttagagatacagtaacaccttataataaatttactggagaaggcaatggatttagttttaaaaattacaatgctcatgagatgtttttctgtttgaaaaatgcaatcaaagtatttaaggacaaagaaaaatggattaaattagttgaaaatgcaatgaaaacagataatagttggaaaaaatcagctaaggagtatatagaaacatatagagacatatgtgattaa

SEQ ID NO: 52369 - protein, 480 aa, Clostridium difficile 630
MKVFYVTAECWPFAKTGGLGDVSYALPKELKKEGVDVRVIMPKYSTIPSYLKDQLKEIAVFSVRVGWRNQYCGLLEMELDGVKFYFIDNEFYFRREDERKSIYGYGDDAERYTFFTDAVLEAISRIDFYPDVIHINDWHTGMLPLILKERYATLEGYKNIKTMYTIHNLQYQGVFDKHVLYDILDLPQKYFDNGDIEYYGSINFMKAGINFADKIITVSPTYANEIQTSFYGEQLDGLLRKESGKLKGILNGIDYDLNDPAKDKDIFVHYDVDSINKKVENKLRLQDILGLKKDSSIPLIGIVSRLVSQKGFDLIAYMMPELMREDLQIVVLGTGEHQYQSMFNYYDSNFSDKVSARITFNASLAQQIYAASDMFLMPSLFEPCGIGQMLAMRYGSLPIVRETGGLRDTVTPYNKFTGEGNGFSFKNYNAHEMFFCLKNAIKVFKDKEKWIKLVENAMKTDNSWKKSAKEYIETYRDICD

SEQ ID NO: 52370 - DNA, 2748 bp, Oryza sativa (japonica cultivar-group)
  CDS (1)..(2748)
atggcgtgcttggcggcgggcgccgaggcggcccctctcctcttccggcggcggctagcgccgtccccagtcgccgcgcgccgccgccttctcgtgtcgtgccgagctcgccgccgcggtctcaggactgctgcagaacttcctcggaagagtacaagtaatgataaacaccataatagggtgaatatgcagagagatgaagcatctgtttccagtgataaagaacggcaagagaaatatggagatgaaaatggtatatcaaaccttcaattggaagatttgatacaaatgatacaaaacactgagaagaatataatgcttctgaatcaagctcgtcttcaagcattggaacatgttgaaacagttcttaaagaaaaagaagacttacagaggaagttgaaaattttggagacgagattgtcagaaacagatgcacggcttaagctttcagctgaagggcagttcggtactgagattaatgactctctaccagtactggaattagatgatataaaggaagagaatatgctactgaaggatgacatacaatttctgaaaacaatgcttattgaggttgctgagacagagaacagtatattcacattagagaaggagcgtgctcttttagatgcttcgcttagggagctggagtctagatttatagatgcccaagcagatatgttgaagtctgatcctaggcagtatgatgcatggtgggagaaagtagaaaatttgggggacttgcttgagactgcaacaaacaaagtagagaatgctgctatggttctgggacgcaatcatgatttggaagataaggtcgacaaactagaggcatcgttggctgaagcaaatatatcaaagttctcttgttattttgttgatcttttgcaggaaaagataaaatcagtagaagagcgcttccaagtatgtaatcatgaaatgcattctcaaattgaactctatgagaattcaatagcggaatttcacgatattcttagcaagctagtggaggaaactgagaaacgatcactagagcattcagcaagtagcatgccttcagaattgtggagtaggatatctcttctgattgatggttggttgctcgagaagagaatatcctacaatgatgcaaatacattacgggaaatggtcaggaaaagggatagttgtcttcgggaagcatacttgtcatgcagaggtatgaaagatagggaaattgtggacaattttctaaagatcacattgccagggactagttctggcttgcacatcatccacatagcagcagagatggctcctgttgcaaaggttggtggtttggcggatgtgatatctggtcttggcaaggcacttcagaaaaagggccacctagtagagattattcttccaaaatatgactgcatgcagaatgaccaagttaataaccttaaggttttagatgttgttgtacaatcctactttgaaggaaatttgttcaacaacaaaatatggactgggactgttgaaggccttccagtctattttatcgagccacaacatccagcaaaattcttttggagggcacaatactatggagaacacgatgactttaaacgttttgcatacttcagccgtgcagcactggaattactttaccaatcgcagaagaaaattgacatcatccattgccatgactggcagactgcatttgtggcacctctttattgggaagcatatgcaaatctgggcttcaactcagctagaatttgcttcacctgccataattttgaatatcaaggagctgctcctgctcaagatttagcatgctgtggccttgatgttcagcaacttgatagggaagacaggatgcgggacaattcacatggcagaataaatgttgtcaagggtgcaattgtgtattccaacattgtgacaactgtatcaccaacatatgcactagaggtgcgatcagagggtggacgtggactacaagattcactcaaattacattccaggaaatttgttgggatacttaatggaatcgacacagacacatggaatccttcaacagatagacatctcaaggttcaatataatgctaatgatctccagggtaaggcagcaaacaaagcagctctcagaaagcagctaaacttatcttctacaaatgcttctcaaccactggttgggtgtattacaaggctagttcctcaaaagggtgtacatctcatcaggcatgcaatatacaaaacagctgagctaggaggacagtttgttcttctgggctcaagtccagtaccacacattcaaagagagtttgagggtattgcagaccattttcagaacaataacaatatccgactgcttttgaagtatgatgattctttatcccattggatttatgcagcatctgacatgttcattgttccatccatgtttgagccatgtggcctcacacagatgattgccatgagatatggttctgtgccgattgttcggaaaaccggtggattgaatgacagtgtcttcgatttcgacgacgaaacgatacctaaggagctgcggaatggctttacgtttgtgcatcctgatgaaaaggctctaagtggtgcaatggagagagcgttcaactactacaatagaaagcctgaggtctggaaacagctggtgcagaaggacatgaggatagatttcagctgggcctcttcagcttcccagtacgaagatatctatcaaagagcagtggctcgagcgagggcagcagcatga

SEQ ID NO: 52371 - protein, 915 aa, Oryza sativa (japonica cultivar-group)
MACLAAGAEAAPLLFRRRLAPSPVAARRRLLVSCRARRRGLRTAAELPRKSTSNDKHHNRVNMQRDEASVSSDKERQEKYGDENGISNLQLEDLIQMIQNTEKNIMLLNQARLQALEHVETVLKEKEDLQRKLKILETRLSETDARLKLSAEGQFGTEINDSLPVLELDDIKEENMLLKDDIQFLKTMLIEVAETENSIFTLEKERALLDASLRELESRFIDAQADMLKSDPRQYDAWWEKVENLGDLLETATNKVENAAMVLGRNHDLEDKVDKLEASLAEANISKFSCYFVDLLQEKIKSVEERFQVCNHEMHSQIELYENSIAEFHDILSKLVEETEKRSLEHSASSMPSELWSRISLLIDGWLLEKRISYNDANTLREMVRKRDSCLREAYLSCRGMKDREIVDNFLKITLPGTSSGLHIIHIAAEMAPVAKVGGLADVISGLGKALQKKGHLVEIILPKYDCMQNDQVNNLKVLDVVVQSYFEGNLFNNKIWTGTVEGLPVYFIEPQHPAKFFWRAQYYGEHDDFKRFAYFSRAALELLYQSQKKIDIIHCHDWQTAFVAPLYWEAYANLGFNSARICFTCHNFEYQGAAPAQDLACCGLDVQQLDREDRMRDNSHGRINVVKGAIVYSNIVTTVSPTYALEVRSEGGRGLQDSLKLHSRKFVGILNGIDTDTWNPSTDRHLKVQYNANDLQGKAANKAALRKQLNLSSTNASQPLVGCITRLVPQKGVHLIRHAIYKTAELGGQFVLLGSSPVPHIQREFEGIADHFQNNNNIRLLLKYDDSLSHWIYAASDMFIVPSMFEPCGLTQMIAMRYGSVPIVRKTGGLNDSVFDFDDETIPKELRNGFTFVHPDEKALSGAMERAFNYYNRKPEVWKQLVQKDMRIDFSWASSASQYEDIYQRAVARARAAA

SEQ ID NO: 52372 - DNA, 1827 bp, Oryza sativa (japonica cultivar-group)
  CDS (1)..(1827)
atggctagaacaatgggttcaacacctacctactgctcttaccaaacaaatggtgttggcgctttaaagcaatcacctcatatgcaattccaacaatcgtacaactatggagttaggttcctaaagagggataccctttctgtgcggattaacaaacatatggccaaaagaatagcaacaagcactggaatttgcactaagcctaggaggtctcacatgcctatagtatgctctgctggaatgacaataatttttattgcaactgaatgtcacccatggtgcaaaactggaggcctcggtgatgttctagggggactgccccctgctcttgctgcaatgggacatcgtgtcatgacaatagttcctcgttatgatcaatacaaagatgcatgggatacaaatgtccttgtcgaggtcaatattggtgacaggacagaaacagtgcgcttcttccactgctataaaaggggagttgaccgtgtttttgttgatcatcctatgtttcttgagaaggtatggggcaagactggaccaaaattatacggtcctaccactggagatgactaccgggacaaccagttgcggttctgccttttatgcctcgctgctttggaggctccaagggttctcaatctcaacaattctgaatatttctcgggaccatatggtgaaaatgttgtcttcgttgcaaatgactggcacactggagtcctgccatgctatctcaagagcatctatcaggcaaaaggaatgtatgtgaatgctaaggttgctttctgcattcacaatattgcctaccagggtagatttgccagagaagactttgaacttcttaatctaccggacagtttcctgccttcatttgattttattgatgggcattttaaacctgtagtaggtagaaagattaactggatgaaggcagggatcactgaatgtgatctggttatgacggttagtccacattatgtcaaagaactcgcttctggcccagataaaggtgttgaattggatggcatccttcgcacaaagccccttgaaactggaattgtcaatggcatggatgtttatgaatggaatccagcaacagatcagtacatcagcgtgaaatacgatgcaacaacggtaactgaagcaagggcactcaataaggaaatgctacaagctgaagttgggttgcctgtggactcgagcattcctttaatagtttttgttggtcgtcttgaagagcagaaagggtcagacatactaattgcagccattccagagttcgtggaggggaatgtccagataattgttcttggtacagggaagaagaaaatggaggaggaactgatactgctcgaagttaaatatccaaacaacgctagagggatagcaaaatttaatgttcctttagcgcatatgatgtttgctggggctgattttataattgttcctagtaggtttgagccatgtggtctcatccaattgcaagggatgagatatggagtggttcccatctgctcatctactggaggacttgtcgacacggttaaggagggcgtgaccggattccacatgggtttgttcaatgtcgagtgcgaaactgttgatccagtggacgtcacagcggttgcttcaactgtcaaacgggctctgaagcagtacaacacaccggcattccaagaaatggttcagaactgcatggctcaagacctatcttggaagggacctgcaaagaagtgggaggaggttcttcttgggttgggcgttgaggggagccagccaggcatcgagggtgaggagctggcgccacttgccaaggaaaacgtggccactccctga

SEQ ID NO: 52373 - protein, 608 aa, Oryza sativa (japonica cultivar-group)
MARTMGSTPTYCSYQTNGVGALKQSPHMQFQQSYNYGVRFLKRDTLSVRINKHMAKRIATSTGICTKPRRSHMPIVCSAGMTIIFIATECHPWCKTGGLGDVLGGLPPALAAMGHRVMTIVPRYDQYKDAWDTNVLVEVNIGDRTETVRFFHCYKRGVDRVFVDHPMFLEKVWGKTGPKLYGPTTGDDYRDNQLRFCLLCLAALEAPRVLNLNNSEYFSGPYGENVVFVANDWHTGVLPCYLKSIYQAKGMYVNAKVAFCIHNIAYQGRFAREDFELLNLPDSFLPSFDFIDGHFKPVVGRKINWMKAGITECDLVMTVSPHYVKELASGPDKGVELDGILRTKPLETGIVNGMDVYEWNPATDQYISVKYDATTVTEARALNKEMLQAEVGLPVDSSIPLIVFVGRLEEQKGSDILIAAIPEFVEGNVQIIVLGTGKKKMEEELILLEVKYPNNARGIAKFNVPLAHMMFAGADFIIVPSRFEPCGLIQLQGMRYGVVPICSSTGGLVDTVKEGVTGFHMGLFNVECETVDPVDVTAVASTVKRALKQYNTPAFQEMVQNCMAQDLSWKGPAKKWEEVLLGLGVEGSQPGIEGEELAPLAKENVATP

SEQ ID NO: 52374 - DNA, 3123 bp, Arabidopsis thaliana
  CDS (1)..(3123)
atgacgacgaagctatcgagcttctgtttcttaacccatggattagcaggaatctcctgcgagagagaacatggaagttctcgtcgatttttctatctcccttctcgtcgattagtttctacttcgtgtaagatgcgacaacaacgtggtttcgactctagtaaaagacaagaggtcaagaaaggctcccctaaaccgatcctatctataaattcaggtcttcagagcaacaatgatgaggaatctgatctggagaatggttctgcggacagtgtcccgagtcttaagtcagatgctgaaaagggtagtagtattcatggcagcatagatatgaatcatgctgatgagaatcttgaaaagaaagatgatatacaaacaactgaagttactcggcgcaagagtaaaactgcaaagaagaaaggggagagtattcatgctacgattgatattggacatgatgatgggaagaatttagataatattactgtgcctgaggttgcaaaagctttgtcccttaacaaaagtgaaggcgagcagatttcagatggacagtttggggaactaatgacaatgataagaagtgcagaaaaaaatattcttcggcttgatgaagcacgggccactgctcttgacgaccttaacaagattcttagtgataaggaagcgttgcagggagaaatcaatgtcttggaaatgaaattgtctgagactgatgaaaggattaaaactgctgctcaagagaaagcacatgtagagcttctggaagaacagttagagaagcttcgtcatgaaatgatctcccctatagaaagtgatggttatgttctagctcttagcaaagagcttgaaacattgaagctggagaatctatctttgagaaacgatatagaaatgcttaagtcagaacttgacagtgttaaagataccggtgaacgtgtggttgtgttggaaaaggagtgctccggtttggaatcttctgtaaaggatttggaatctaagttatcggtttctcaggaagatgtctcgcagctttctactcttaaaatcgaatgcactgatctatgggcgaaggtagagactctacagctgttgttagatagagctaccaaacaagcagagcaagcagttatagtgttacaacagaaccaagatctaagaaataaggtcgacaaaattgaggaatcacttaaagaagccaacgtttataaagaatcttcagagaaaattcaacagtacaatgagctaatgcaacataaggtgacattacttgaggagcggctcgaaaagtctgatgcagagatattctcatatgttcagttatatcaagaatcgataaaagaattccaggaaacacttgaaagtttgaaggaagaaagcaagaaaaaatcaagagatgaaccggttgatgatatgccttgggattattggagtcggttacttttaactgttgatggatggctgcttgaaaagaaaatagcaagcaacgatgctgacttactgagagacatggtatggaagaaagatcgaagaattcatgatacctatattgacgtcaaagataagaatgaacgtgatgccatctctgcatttctcaagcttgtctcatctccaacaagttcaggattgtatgtcgttcacattgcagctgagatggcacctgtagctaaggtgggaggtttgggagatgttgtggcaggtcttggtaaggcattgcaaagaaaaggtcatctggtggagattattcttcccaaatatgactgtatgcagtatgatcgcgtgcgtgacttaagggctttggatactgttgtggagtcatattttgatgggaagttatataaaaacaaaatctggattggcactgttgaaggtttacctgtacatttcattgaacctcaacatccaagcaaattcttctggagaggacagttttatggagagcaagatgatttcagacgcttctcgtattttagccgagctgcactagagttgcttcttcagtccggcaaaaaacccgacatcatacattgtcatgactggcaaacagcttttgttgcgccgctgtattgggatctgtatgctccaaagggattagattctgcaagaatatgctttacatgtcataattttgagtatcaaggtaccgcgtctgcttcagaattgggatcttgcgggcttgatgttaaccagttaaatagaccagacagaatgcaggatcactcgtctggagatagagtcaatcctgttaagggcgctataattttctcaaacattgtaacaaccgtgtcccctacttatgcacaagaagttcgaacagctgagggaggaaaaggactccattcaacactcaattttcactccaagaaattcattggaatcctcaacggcattgacacagattcatggaatcctgccaccgaccccttcctcaaggctcagttcaacgctaaagatctacaagggaaagaagaaaacaaacacgcccttagaaagcagcttggactttcttcagcggagtcaagacggcctttggttggttgcataacaagattagtaccacagaaaggagttcatctaatcagacatgccatatacagaacattagagttaggtggacaatttgtacttcttggttctagcccggttccacatattcagagggaatttgaaggtattgaacaacagtttaaaagccatgatcatgtccggttgttactgaagtacgatgaagctctgtctcatacgatttacgcagcctccgatttgttcatcattccgtcaatttttgagccttgtggacttacacagatgatcgctatgagatatggctccattccaattgcgcgaaaaactggaggcttaaatgacagtgtcttcgacattgatgatgatacaataccaacacagtttcaaaatggatttacatttcaaaccgcggacgaacagggtttcaattatgcgttggagcgagcatttaatcactacaagaaagatgaagagaaatggatgagacttgtagagaaagtgatgagtatagatttcagctggggatcatcagctacacaatacgaagaactctacacgagatcagtgtccagagcaagagctgttcctaatcgcacgtga

SEQ ID NO: 52375 - protein, 1040 aa, Arabidopsis thaliana
MTTKLSSFCFLTHGLAGISCEREHGSSRRFFYLPSRRLVSTSCKMRQQRGFDSSKRQEVKKGSPKPILSINSGLQSNNDEESDLENGSADSVPSLKSDAEKGSSIHGSIDMNHADENLEKKDDIQTTEVTRRKSKTAKKKGESIHATIDIGHDDGKNLDNITVPEVAKALSLNKSEGEQISDGQFGELMTMIRSAEKNILRLDEARATALDDLNKILSDKEALQGEINVLEMKLSETDERIKTAAQEKAHVELLEEQLEKLRHEMISPIESDGYVLALSKELETLKLENLSLRNDIEMLKSELDSVKDTGERVVVLEKECSGLESSVKDLESKLSVSQEDVSQLSTLKIECTDLWAKVETLQLLLDRATKQAEQAVIVLQQNQDLRNKVDKIEESLKEANVYKESSEKIQQYNELMQHKVTLLEERLEKSDAEIFSYVQLYQESIKEFQETLESLKEESKKKSRDEPVDDMPWDYWSRLLLTVDGWLLEKKIASNDADLLRDMVWKKDRRIHDTYIDVKDKNERDAISAFLKLVSSPTSSGLYVVHIAAEMAPVAKVGGLGDVVAGLGKALQRKGHLVEIILPKYDCMQYDRVRDLRALDTVVESYFDGKLYKNKIWIGTVEGLPVHFIEPQHPSKFFWRGQFYGEQDDFRRFSYFSRAALELLLQSGKKPDIIHCHDWQTAFVAPLYWDLYAPKGLDSARICFTCHNFEYQGTASASELGSCGLDVNQLNRPDRMQDHSSGDRVNPVKGAIIFSNIVTTVSPTYAQEVRTAEGGKGLHSTLNFHSKKFIGILNGIDTDSWNPATDPFLKAQFNAKDLQGKEENKHALRKQLGLSSAESRRPLVGCITRLVPQKGVHLIRHAIYRTLELGGQFVLLGSSPVPHIQREFEGIEQQFKSHDHVRLLLKYDEALSHTIYAASDLFIIPSIFEPCGLTQMIAMRYGSIPIARKTGGLNDSVFDIDDDTIPTQFQNGFTFQTADEQGFNYALERAFNHYKKDEEKWMRLVEKVMSIDFSWGSSATQYEELYTRSVSRARAVPNRT

SEQ ID NO: 52376 - DNA, 1419 bp, Deinococcus radiodurans R1
  CDS (1)..(1419): transl_table=11
ttggcgaggggccgcccgtgcctgtccgctcagcgacttggcgaggaaccccgtgtgaacagcaccgggcggtacagtgggcccatgcgtgtgctgcatctcgcctccgaggtcttccccttttcccgctccggtggcctgggcgacgtgctgggagcgctgcccgctgtgcaggcgcggctgggcgaagacgcagaagtcacggtcctctcgccgtggtacgcctccttgcagggcgagccgcaggaactctggcgcggggaagcctggggcgagcaggcgtggctgggcgaactccgtcaggacggcgtgcgctacctctttctcggcctgaacgagtttcagcgccccggcctctatcaccccgacgacgtagagcgcttctgcgccttcgggcgagcggcgctcccggcactggacgcggtgggcgtgaccccggacgtgctgcacgggcacgactggcaggcgggactggtggtcgcccacgcccggctgcgtggcctgcggaccgccttttcggtccacaacctgcaataccagggccgctggaacctgcacgaagcggcgggctggaccgggctcccggactggaccttcgggcccgatggggtggagtttttcggcgacctcaacctgatgaaagcgggcctgaactttgctgggcacgtcaccaccgtcagccccacctacgcgcaggaaatcaccacgccgcaatacggcgaggggttggaagggctgctggtgcggctgacccacgagggccgactctcgggcatcctcaacgggctcgaccaggaccgctggaacccgcgcaccgaccccgacatcgccgcctacagcgacccggcaggcaaggcaggggccgtgaaggcgctgcggcaggaattcggcctggacgacgccccgattctggcgacggtcagccgcctcgccgaccagaagggcatggacctgctgattacggcgctgcccgaactggtgcgcgactggaacgtggtggtgctcggcggcggcgacccgctgctggaagccgcgctgaccggctgggccaaccacccccgcgtcgccttcgcttcgggcatgaacgagccgttggcgcaccgcatctacgccggcgcccacgcgtttgccatgcccagccgcttcgagccgtgcggcctctcgcagctcatcgccatgcgctacggcaccctgcccatcgtgcgcgaaaccggcggactggccgacaccgtgccgcccgaagtcggtttccgctttgccgacgccaccgcgcccgccttcctgcaagcctgccgcgaggcccaggccgcctttcaggacccggcgcagtggcagacccgcgccacccgcgccatgtcattggatttctcctgggacggtccggcacggcaatacctggaactttaccgggggctgtaa

SEQ ID NO: 52377 - protein, 472 aa, Deinococcus radiodurans R1
MARGRPCLSAQRLGEEPRVNSTGRYSGPMRVLHLASEVFPFSRSGGLGDVLGALPAVQARLGEDAEVTVLSPWYASLQGEPQELWRGEAWGEQAWLGELRQDGVRYLFLGLNEFQRPGLYHPDDVERFCAFGRAALPALDAVGVTPDVLHGHDWQAGLVVAHARLRGLRTAFSVHNLQYQGRWNLHEAAGWTGLPDWTFGPDGVEFFGDLNLMKAGLNFAGHVTTVSPTYAQEITTPQYGEGLEGLLVRLTHEGRLSGILNGLDQDRWNPRTDPDIAAYSDPAGKAGAVKALRQEFGLDDAPILATVSRLADQKGMDLLITALPELVRDWNVVVLGGGDPLLEAALTGWANHPRVAFASGMNEPLAHRIYAGAHAFAMPSRFEPCGLSQLIAMRYGTLPIVRETGGLADTVPPEVGFRFADATAPAFLQACREAQAAFQDPAQWQTRATRAMSLDFSWDGPARQYLELYRGL

SEQ ID NO: 52378 - DNA, 1593 bp, Agrobacterium tumefaciens str. C58
  CDS (1)..(1593): transl_table=11
ttgtcaccaacctgtttccgggctccccaccatctgaaatcactgcgttcccggaggcgccaaatgcggattcttgccgttacggccgaaatgtttcccttcgtcaaaaccggcggattggccgatgccacgagcgctttgccgcaggcgctggaacgaaaaggggctgacgttcggacattgctacccctctaccgcgggctcacgccgcttgtccgcggccggaagccggtcctggttgccaatattctggagcagccggtatcagtttattacgttgtttccgatggtcacaagcttctgcttcttgaagcggcaagcctgttcgacagagacggacatccctatggcgtaaaaggcgagccttttgctgacaacgatcttcgctttgcggttctgtccaaagtagcggcggaaatagccctcggcgcgattgacggctggcagccggatgttgtccatgtccatgattggcacgcggctctgacctgcgtctatctcgcggattcgacgccctcggtagcctccgttctaacccttcacaatctcgcatttcagggtcagtatccgctggagagggcgggtatgcttggactaccctcgcacctctgcactgtcgattgccttgaatattacgatgacatgtcatttttgaagggcggtctgacgaccgcgtcggcggtaacgacggttagtccaacttatgcaagagaaatccttacgccggaaatggggatgggaatgcatggcgtgctcgccaggcggcgaggggacctgcgcggcatcgtcaacggtgtcgatcacgacgtctggaatccggcaacagatccgtacattctcgcaaatttcacggctgccacggcgacaagacggagcctcaacaaatatgccttgcttcaggcccttggcctagcccctacccagggccctgtcttcggcgtggtcagtcgcctgacctggcaaaagggaatcgatctcctccctcacgtcgtaccccttataatagaaaggaaaggcaggctgatcgttcacggagagggagatacggcactggaagacagcttgcaggcgctggcaaagcgctatccggaactagtctgcgcccatatcggctatgacgaacggctggcgcacatgatccaggccggctcggatttcatcatccagccgtcacggttcgaaccctgcgggctgacgcagctttacgcgctgcgatacggcgcgctgcccatcgtcagccgcacgggcgggctggcggaaaccattatcgacgcgaatgacgcggccattgaagcgggcgtagcaacaggctttcaattcgagccggcgaatgaagacgatctgcgcgccgcgctggagcgtgccattagcgcctataacgaccgggaacttttccgacggcttcagacgcaggccatgcaggccaatttttcctgggacaagagtgccgcacaatatatggcgcttttcgagagccttgtcggcaacagcacgcgcgaaacggatgccgtcgccgacatcagaaccgagacttttgcaaagataagagctgataggcggctggcgggaaccccaggatcaccaacaggttag

SEQ ID NO: 52379 - protein, 530 aa, Agrobacterium tumefaciens str. C58
MSPTCFRAPHHLKSLRSRRRQMRILAVTAEMFPFVKTGGLADATSALPQALERKGADVRTLLPLYRGLTPLVRGRKPVLVANILEQPVSVYYVVSDGHKLLLLEAASLFDRDGHPYGVKGEPFADNDLRFAVLSKVAAEIALGAIDGWQPDVVHVHDWHAALTCVYLADSTPSVASVLTLHNLAFQGQYPLERAGMLGLPSHLCTVDCLEYYDDMSFLKGGLTTASAVTTVSPTYAREILTPEMGMGMHGVLARRRGDLRGIVNGVDHDVWNPATDPYILANFTAATATRRSLNKYALLQALGLAPTQGPVFGVVSRLTWQKGIDLLPHVVPLIIERKGRLIVHGEGDTALEDSLQALAKRYPELVCAHIGYDERLAHMIQAGSDFIIQPSRFEPCGLTQLYALRYGALPIVSRTGGLAETIIDANDAAIEAGVATGFQFEPANEDDLRAALERAISAYNDRELFRRLQTQAMQANFSWDKSAAQYMALFESLVGNSTRETDAVADIRTETFAKIRADRRLAGTPGSPTG

SEQ ID NO: 52380 - DNA, 1437 bp, Yersinia pestis KIM
  CDS (1)..(1437): transl_table=11
gtgatgatgagggttttacatgtatgttctgagctgttccctttactaaaaacaggcgggttggctgatgttatcggtgctttacccgcagctcagcttgccgagggggctgatgtgcggatcatcttgcccgccttcccggatttgcgtagagggatccctgagaccgtactggtcagggagattgacacttttgcggggcgggtagcattacgctatggccattatcgggggattggcatttatctgattgatgcgccagcgctctatgatcgtgcgggtagcccttatcacgatgcttctttatatgcctatagcgataactatctacgctttgccttgctgggatggatggcgtgcgaactggcttgtggcctggacggttactggcgtccagaggttgtccatgcccatgattggcacgcgggattaacctgtgcttatctggctgcgcgtgggcggcctgcacgatcggtgtttaccgtccataatttggcttatcaggggctattttctgcagatcacttatctgaattacacctgcccgctgagtttttccagatctatgggctggagttttacgggcagatctcttatctgaaagccgggttgttctttgccgaccatgtcacgaccgtcagcccgacctatgcaaaagagatcactcagcctgcttttggctatggcatggaggggttgctacaagcattggcgcgtcaaggccggttgacggggatcctgaacggggtcgacagtgatatttgggatccgcagagcgataccttgctacctactcgttatgatgcggagaacctgcaagcaaaggccatcaataaaacacatttgcaaacggctatgggtttgcaactggcagaaaataaacccatttttgctgttgtcagtcgattgaccgtccagaaagggttggatctggtattggaagcactgcccgaattactggcactgggggggcagttggtcgtcttggggagcggagatgccacgctgcaagaggcatttctagccgccgcagcagagcattctggccaggttggggtgcaaataggttatcacgaggcattctctcatcgaattattgccgggtcggatgtcattctggtgcccagccgctttgaaccctgtgggctaacacagttgtatgggttgaaatatggcacgttgccgctggtgcgacataccggtgggctggctgataccgtggtggattgcgcgttggaaaacctggctgacggcagcgcttcgggatttgtattcaatgaatgtgaggcgcaagccttagtgaaggcgatacgccgtgcctttgtactgtggagcaggccgaagcattggcgtcacgtccagcgccatgcgatgaggctcgactttggttggcaacttgccgccgtagattatttgtcactttatcgacgtctgtaa

SEQ ID NO: 52381 - protein, 478 aa, Yersinia pestis KIM
MMMRVLHVCSELFPLLKTGGLADVIGALPAAQLAEGADVRIILPAFPDLRRGIPETVLVREIDTFAGRVALRYGHYRGIGIYLIDAPALYDRAGSPYHDASLYAYSDNYLRFALLGWMACELACGLDGYWRPEVVHAHDWHAGLTCAYLAARGRPARSVFTVHNLAYQGLFSADHLSELHLPAEFFQIYGLEFYGQISYLKAGLFFADHVTTVSPTYAKEITQPAFGYGMEGLLQALARQGRLTGILNGVDSDIWDPQSDTLLPTRYDAENLQAKAINKTHLQTAMGLQLAENKPIFAVVSRLTVQKGLDLVLEALPELLALGGQLVVLGSGDATLQEAFLAAAAEHSGQVGVQIGYHEAFSHRIIAGSDVILVPSRFEPCGLTQLYGLKYGTLPLVRHTGGLADTVVDCALENLADGSASGFVFNECEAQALVKAIRRAFVLWSRPKHWRHVQRHAMRLDFGWQLAAVDYLSLYRRL

SEQ ID NO: 52382 - DNA, 1503 bp, Vibrio vulnificus YJ016
  CDS (1)..(1503): transl_table=11
atgtctctgatgacggtatcgttgttattccaaaaggagcaagagttggctactaaccctttgtcgattctgtttgtagcatctgaagtagaaggtttgatcaaaagtggtggcttggcggatgttgccaaggcactgcctgaagctttagtaaaccttcagcatgatgcgagaattgccattccggcttataccgcaattcctaatgtgtgtgatgatgaagtcatcctcgatacacatctagaaacctggccacatactcattatcaagtcaaaaaacgtttcttaggtgacaaccctgtctacttaattgcgtgtgggcattattttgaccgtccgtcgatgtacgctgagaataatcaggcgtataccgataacggtgagcgctttgctttttttagtgctgcttgtttggatatgttaccaaaaattggtttccagcctgacatcgtgcatgccaatgattggcatacaggcttagtgccatttttgcttaagcaccgttacggtcaagatccgttttttgcacaaacaaagagtattttatctatccataatgcggtctttaaaggtgtctttcactatgatgagatgcagtgtttacctgaatttcattgccgaaatgtacccgatgccgctgtcagctctacgcatatgacgatgctgaaagcaggggttatgaatgctgataaaatcaacgcagtgagcccaacttatgcagaggagctgaaaactgaacttggcagtcacggaatggcttgggagtttcagcaacgcgcgggtgatctcgtcgggattctaaacggctgcgattattctgcatggcatccagatactgacagctatttacccatcaactacaaagcaactaagcagagtatggtgagagggaaaaatggctgtaaacgtgcgcttcaagagcaagtcggcctacctgtaaaggacgtcgctatgtttggtatggtgtgtcgcttgacgcatcagaaaggggtgcattacctattgccagtattaactgagttcctgaagttggatgttcagttggttttggttgggaccggtgatccgttgcttgctgcgcaattacgtgatgttgcagcacagtttggtgaaaagtttgtctttgttgaagcttataacaatcaactcgcacacttagttgaggctgcatccgatttctttttaatgccttcagaatttgaaccttgtggcttaaaccaaatctatagcatggcgtatggctccttgccgatcgtgagaggcgttgggggtctcaaagacagtgtatgcgattatgatgtgaaccctgagactgcgacaggatttgtgttctatgaacctacagcacaagcgttgttgattaccatgcaaagagcgttgttgctgtatgcacagaacctaacagagcttcgacgagttcagctatacgcgatggaacgagatttttgctggaacaaggcagcagagcaatatgtggagttgtatcgttctgcgctgaaatag

SEQ ID NO: 52383 - protein, 500 aa, Vibrio vulnificus YJ016
MSLMTVSLLFQKEQELATNPLSILFVASEVEGLIKSGGLADVAKALPEALVNLQHDARIAIPAYTAIPNVCDDEVILDTHLETWPHTHYQVKKRFLGDNPVYLIACGHYFDRPSMYAENNQAYTDNGERFAFFSAACLDMLPKIGFQPDIVHANDWHTGLVPFLLKHRYGQDPFFAQTKSILSIHNAVFKGVFHYDEMQCLPEFHCRNVPDAAVSSTHMTMLKAGVMNADKINAVSPTYAEELKTELGSHGMAWEFQQRAGDLVGILNGCDYSAWHPDTDSYLPINYKATKQSMVRGKNGCKRALQEQVGLPVKDVAMFGMVCRLTHQKGVHYLLPVLTEFLKLDVQLVLVGTGDPLLAAQLRDVAAQFGEKFVFVEAYNNQLAHLVEAASDFFLMPSEFEPCGLNQIYSMAYGSLPIVRGVGGLKDSVCDYDVNPETATGFVFYEPTAQALLITMQRALLLYAQNLTELRRVQLYAMERDFCWNKAAEQYVELYRSALK

SEQ ID NO: 52384 - DNA, 1452 bp, Prochlorococcus marinus str. AS9601
  CDS (1)..(1452): transl_table=11
atgagaattcttcttgccgctgccgaatgtgctccaatgatcaaagttggaggtatgggagatgtggttggttctttacctccatctttgataaaacttggtcacgatgtgagagtaataattccaggctatgggaaattgtggagtcttttagaggtgtcgaatgaaccagtctttagagcaaatacaatgggaactgatttcgccgtatataaagcaaaacatcccattcataattatgtgatttacctagtgggtcatccaacatttgactctgatcaaatatatggaggggaaaatgaggactggcgctttacattttttgctagtgccactgcagaatttgcctggaattattggaaacctcaagttctccattgccatgattggcacactggaatgattcctgtttggatgcatcaggatcccgaaattagtactgtcttcacaattcataatttaaaataccaaggcccttggaggtggaaacttgaaaaaatgacttggtgtccttggtatatgcatggagaccacacaatggctgcggcaatgttgtacgcagatagggtcaatgctgtttcgccgacttatgcagatgagattaaaacccatgaatacggggaaagcctcgaaggattacttaattacatttcaggtaaattaaggggaattcttaatggcatagatcttgatgaatggaatccagccaaagatccagttttaccagcaaaattcagtattaagaatttagaaaataggctagaaaataaaaaaattctgcagagagagatgggtcttgaagttaattctaaaaaatatcttttaggtatggtcagtaggttagtcgatcagaaaggggttgacttacttttacaagtttcaagaagactattagcctatacagattctcaaattgctgttttgggaactggagatagatatttagagtcaggattatggcaactggcattagattacccaggaagattctcagtatttcttacctatgatgattctttatcaaggcttatatatggtggctcagatgcattcttaatgccaagtagatttgaaccttgtgggattagtcaactcctcgcgatgagatatggctctattccaatagtaaggcgagttggaggtttagttgacacagttttacctcatgacccagaaaataatattggcacaggtttttgcttcgatcgctttgaacctatagatttctatacatctttagtaaggtcatgggaagcatttaggcacaaagatagttgggaattactgcaaaaaagagccatgagccaagagtttagttggcaaagatcagctcttgaatacgaagttatgtataaggatgtttgcggaataaaagaaccatcaccagatgttgctgaagttgaaaaattttcttacggacaatcagctgatccatctttaaaaaaagtatga

SEQ ID NO: 52385 - protein, 483 aa, Prochlorococcus marinus str. AS9601
MRILLAAAECAPMIKVGGMGDVVGSLPPSLIKLGHDVRVIIPGYGKLWSLLEVSNEPVFRANTMGTDFAVYKAKHPIHNYVIYLVGHPTFDSDQIYGGENEDWRFTFFASATAEFAWNYWKPQVLHCHDWHTGMIPVWMHQDPEISTVFTIHNLKYQGPWRWKLEKMTWCPWYMHGDHTMAAAMLYADRVNAVSPTYADEIKTHEYGESLEGLLNYISGKLRGILNGIDLDEWNPAKDPVLPAKFSIKNLENRLENKKILQREMGLEVNSKKYLLGMVSRLVDQKGVDLLLQVSRRLLAYTDSQIAVLGTGDRYLESGLWQLALDYPGRFSVFLTYDDSLSRLIYGGSDAFLMPSRFEPCGISQLLAMRYGSIPIVRRVGGLVDTVLPHDPENNIGTGFCFDRFEPIDFYTSLVRSWEAFRHKDSWELLQKRAMSQEFSWQRSALEYEVMYKDVCGIKEPSPDVAEVEKFSYGQSADPSLKKV

SEQ ID NO: 52386 - DNA, 1452 bp, Prochlorococcus marinus str. MIT 9515
  CDS (1)..(1452): transl_table=11
atgagaattcttcttgctgctgctgaatgtgctccaatgatcaaagttggagggatgggagatgtcgttggttccttaccaccatcattgataaaacttggtcacgacgtaagggtaataattccaggatatggaaaattgtggaatctactagaaatatcaagtgaaccagtctttagagcaaatacaatggggaatgagttttctgtatatgaagcaaaacatccgatacacaattatatagtctacttagtagggcatccaacttttgattcaggacagatatacggtggagaagatgaggactggcgatttactttttttgctagttctactgcagaattttcttggaattattggaaaccacaagtcctacattgtcatgattggcatactggcatgattcctgtttggatgcatcaagatcctgaaataagtactgtttttactatacataatttaaaatatcagggaccatggaggtggaaacttgaaaaaatgacgtggtgtccatggtatatgcatggtgaccatactatggctgctgcgatgctttatgcagatagagttaatgctgtttctccaacatatgccgatgagataaaaacgcatgagtatggggagagtcttgatggactgttgaattatatttctggaaaattgagaggcatacttaatggcatagatttaaatgaatgggatcctaatatagataaagttttacctgctcaattcaatattaaaaatttagaaagaagatcagaaaacaagataattcttcaaaaagaaatgggactagaagttaatagtaaaaaatatcttttaggaatggttagtagattagtagatcaaaaaggcgttgatttggttttgcaggtctctaaaagattactagcatatacagattctcaaatagctatattaggcacaggagataaatatttagaatctggattatggcaattagcactagattatcccgggagattttctgtatttcttacctatgatgattctttatcaaggctaatatatggaggatctgatgcatttttaatgccaagtcgatttgaaccctgtggtatcagtcaattacttgctatgaggtatggatcaattccaatagtaagaagagttggaggattagttgatactgttttgccccatgatccagagaataattgtggaacgggattttgctttgatcgattcgaaccgattgatttttatacggctttagtgagatcttgggaggcattcagacataaggatagttggaaattattacaaatcagagctatgagccaagaattcagttggcagagatcagcattagagtacgaattgatgtataaggatgtatgcggcattaaggagccatcaccagatattactgaaattgaaaagttttcttatggtcaatctgctgatccttctttaaaaaaaatatga

SEQ ID NO: 52387 - protein, 483 aa, Prochlorococcus marinus str. MIT 9515
MRILLAAAECAPMIKVGGMGDVVGSLPPSLIKLGHDVRVIIPGYGKLWNLLEISSEPVFRANTMGNEFSVYEAKHPIHNYIVYLVGHPTFDSGQIYGGEDEDWRFTFFASSTAEFSWNYWKPQVLHCHDWHTGMIPVWMHQDPEISTVFTIHNLKYQGPWRWKLEKMTWCPWYMHGDHTMAAAMLYADRVNAVSPTYADEIKTHEYGESLDGLLNYISGKLRGILNGIDLNEWDPNIDKVLPAQFNIKNLERRSENKIILQKEMGLEVNSKKYLLGMVSRLVDQKGVDLVLQVSKRLLAYTDSQIAILGTGDKYLESGLWQLALDYPGRFSVFLTYDDSLSRLIYGGSDAFLMPSRFEPCGISQLLAMRYGSIPIVRRVGGLVDTVLPHDPENNCGTGFCFDRFEPIDFYTALVRSWEAFRHKDSWKLLQIRAMSQEFSWQRSALEYELMYKDVCGIKEPSPDITEIEKFSYGQSADPSLKKI

SEQ ID NO: 52388 - DNA, 1464 bp, Prochlorococcus marinus str. NATL1A
  CDS (1)..(1464): transl_table=11
atgcgaatactttttgctgctgctgaatgcgccccaatgataaaggttggaggtatgggtgatgttgttggttcattacctcctgcgcttaaaaaacttggacatgacgttcgattaataattccagggtatggaaaattatggacgttgatggatattgctcctgaacctatctttcgatccaacacaatgggtgttgacttctctgtttttgaaaccaagcatccctctaatgggttgccaatttatttagttggacatccatgttttgattctgagcgtatttacggaggagaagatgaagattggagatttactttttttgctagtgcagtctctgaatttgcatggaactcatggaaaccacaagtcctccattgtcatgactggcatactggaatgattccagtttggatgcatcaagaccccgaaatcagtacggtatttactattcataatctcaaatatcaaggcccatggagatggaagcttgatcaaataacttggtgcccttggtatatgcatggtgatcacaccatggcatcagcaatgttgtatgcggatagagtgaatgcagtatctccaacttattcaagagaaattcgaacatctgaatatggagaaaaattagagggacttttaaattatatttctgggaaactacgaggaatattaaatggagttgatctagatgagtggaacccagcaacggataattcattgccagctaaatttagtgtagataatatttctggtagagcaattaataaaagagtcctgcaagaaagaatggggctggaagtgaaccctgataaatatctaatgggaatggttggtaggctcgttgaccaaaaaggtattgatcttttactacaagttgctaataggcttctttcttatactgactctcaggtcgttgttcttgggacgggtgatcgctatttagagtcatctttatggcaacttgcgattgagtatcctggtcgtttttctgtttttcttacttacgatgatgcattgtctaggctcatttatggaggcgctgatgcattcctaatgcctagtcgctttgagccgtgtggtatcagtcagttattagctatgcgttatggtgcaattccgatcgttagaaaagtaggtggtttagtagatacagtagagccttataaccccatgaatgaaacaggttccggattttgctttgatcggtatgaaccaattgacttttatacatcattagttcgttcttgggaagcatatagacatcaaaaaagttggaaggagttgcaattaagagcaatgtcaaataaatatagttgggatagatccgcgaaggaatatgaattaatgtacaaagacgtttgtggaattaaggagccttctcctgatgcggcagaggttgaaaagttttcttatggccaagaagcagatccttcaagaaaaggcaaaaaaataaaattatag

SEQ ID NO: 52389 - protein, 487 aa, Prochlorococcus marinus str. NATL1A
MRILFAAAECAPMIKVGGMGDVVGSLPPALKKLGHDVRLIIPGYGKLWTLMDIAPEPIFRSNTMGVDFSVFETKHPSNGLPIYLVGHPCFDSERIYGGEDEDWRFTFFASAVSEFAWNSWKPQVLHCHDWHTGMIPVWMHQDPEISTVFTIHNLKYQGPWRWKLDQITWCPWYMHGDHTMASAMLYADRVNAVSPTYSREIRTSEYGEKLEGLLNYISGKLRGILNGVDLDEWNPATDNSLPAKFSVDNISGRAINKRVLQERMGLEVNPDKYLMGMVGRLVDQKGIDLLLQVANRLLSYTDSQVVVLGTGDRYLESSLWQLAIEYPGRFSVFLTYDDALSRLIYGGADAFLMPSRFEPCGISQLLAMRYGAIPIVRKVGGLVDTVEPYNPMNETGSGFCFDRYEPIDFYTSLVRSWEAYRHQKSWKELQLRAMSNKYSWDRSAKEYELMYKDVCGIKEPSPDAAEVEKFSYGQEADPSRKGKKIKL

SEQ ID NO: 52390 - DNA, 1500 bp, Prochlorococcus marinus str. MIT 9303
  CDS (1)..(1500): transl_table=11
atgcgcgtgctatttgctgctgcggaatgcgcgccgatggtcaaggtcggtggaatgggggatgtggtgggctcattgcccccagccctggccaagcttgatcatgatgtgcgtctgatcatgcctggttacggcaagctctggagcttgctggatatccctactgatccgatttggcggggtcagaccatgggcaacgagttcgccatctatgagacaagtcatcccagcaatggtttgcccctttatctggtggggcatccagtctttgatcctgaacggatctacggcggagaagacgaagattggcgttttacgtttttcgcaagcgcaacaacggaatttgcctggaacgtttggaaaccgcaggtgctgcattgccacgactggcataccggaatgattcctgtgtggatgcatcaggaccctgaagtcagcacggtctttaccattcacaacctcaaatatcagggcccctggcgctggaaacttgatcggatgacttggtgcccctggtacatgcaaggggatcacaccatggcggcagcgttgctttatgccgatcgggtgaatgccgtttctcccacctatgccagagagatttgtacatctgaatacggggagagccttgatggcttgttgaactacatctccggaaagctgcgtgggattctcaatggcattgacctgcaggattgggaccctgctaatgacaagtctttgccagccacttttagtgccgatgacctttcaggtcgtgctgtgaacaagcaggcacttcaacagcgcatggggcttgaggtcaatccggacacctatctactggggatggtgagtcggttggtggatcagaaaggtgttgatcttctgctgcaggtgacagagcggttgcttgcttacacagattcccagatcgtggtgctgggcactggtgagcgtggtttggaatccagcctatggcaattggcgattcagaaccctggccgcttctcggttttcctcacttacgacgatgacctagcacgtttgatctacggcggcagtgacgcatttctgatgccgagtcgcttcgaaccctgtggcattagtcagctgttggccatgcgctacggcagcgtgccggtggtgcgcaaagtgggtggtcttgtcgacacggtgccttcttacgaccctattcataaaaccggtactggattctgcttcgatcgatttgagcctgttgacttctatacagcattagtgaggtcctgggaggcgttccgtcatcgtgattgctggcgtgagttgcagcaacgtgcgatgactcaaaactacagctgggatcgctccgctcttgactatgaccagatgtatcgggatgtctgtggccttaaggagccgtctcctgatgcggcggttgtggagcaattttctctcggccagggttcagatccttcccgtcagggtcaggacagcaatgcgaaaaaaagaaccagacgcaagaagaaggggaatgattaa

SEQ ID NO: 52391 - protein, 499 aa, Prochlorococcus marinus str. MIT 9303
MRVLFAAAECAPMVKVGGMGDVVGSLPPALAKLDHDVRLIMPGYGKLWSLLDIPTDPIWRGQTMGNEFAIYETSHPSNGLPLYLVGHPVFDPERIYGGEDEDWRFTFFASATTEFAWNVWKPQVLHCHDWHTGMIPVWMHQDPEVSTVFTIHNLKYQGPWRWKLDRMTWCPWYMQGDHTMAAALLYADRVNAVSPTYAREICTSEYGESLDGLLNYISGKLRGILNGIDLQDWDPANDKSLPATFSADDLSGRAVNKQALQQRMGLEVNPDTYLLGMVSRLVDQKGVDLLLQVTERLLAYTDSQIVVLGTGERGLESSLWQLAIQNPGRFSVFLTYDDDLARLIYGGSDAFLMPSRFEPCGISQLLAMRYGSVPVVRKVGGLVDTVPSYDPIHKTGTGFCFDRFEPVDFYTALVRSWEAFRHRDCWRELQQRAMTQNYSWDRSALDYDQMYRDVCGLKEPSPDAAVVEQFSLGQGSDPSRQGQDSNAKKRTRRKKKGND

SEQ ID NO: 52392 - DNA, 1323 bp, Thermus thermophilus HB27
  CDS (1)..(1323): transl_table=11
atgggcgttatgcgcgtgctccacgtggcccccgaggcctaccccctggccaaggtgggagggcttgccgacgtggtgggggccctccccaaggccctggggcctttgggggtggaggcccatgtcctcctcccctggcacggggggctagaggccaggcgggtgggggaggtggcctttgccttcttcgggcgggaggagagggcccccttgggggagcgggtggagggtggggtgcggtttctcctcctcggggtggaggggtttgggcgggagcgggtctacggctaccccgacgacgccgagcgctacctccgcttcgccctggcggccaaggaggtggcgagagggtacgacctggtccacgcccacgactggacggcggccctcctcgccctctacgcccccacggtctacaccatccacaacctggcccaccagggtctcgtggacccggggctcttcttttcctggaccgggcttccctggagcctcttccacatggaggccctggagttctacggccgggtgaacctgatgaagggggggatcgtcttcgcccgccgggtcaccacggtgagcccctcctacgccgaggagatccagacccccgagttcggcatgggcctggacggggtcttgaggaggcacgccgggaagcttaggggcatcttgaacggcctggacacggaggtctttgaccccggcaaagacccctacctccccgccccctacacccgggaggacccctcggggaaggcccgggccaaggaggccttccgggagaggacggggcttaggccccccgtcctcgcctacgtgggccgcctggattaccagaagggcctggacctcgtcttaaaggccctcccccgcctcctggagatgggctttcgcctctacgtccagggcgtgggggacggggggcttcaggaggcgttcctccgggcggaggaggaaaaccccgaaggggtacgcttcctccccgcctacgacgaggccatggcccgcctggcctacgccggggcggaggcggtcttggtcccgagccgctttgagccctgcggcctggtgcagatgatcgcgagccgctacggcacccctcccgtggcccgggcggtgggggggctcaaggacaccgtggaggacgggagggccggggtcctttttgagacctaccaccccgaggggcttctttacggcgtgctccgcctcttccgcctgggggcggaggagatgggccttagggccatggagaaggacttctcctgggaggggccggcgcgggcctaccgggaggtgtaccgggaggccttgggctag

SEQ ID NO: 52393 - protein, 440 aa, Thermus thermophilus HB27
MGVMRVLHVAPEAYPLAKVGGLADVVGALPKALGPLGVEAHVLLPWHGGLEARRVGEVAFAFFGREERAPLGERVEGGVRFLLLGVEGFGRERVYGYPDDAERYLRFALAAKEVARGYDLVHAHDWTAALLALYAPTVYTIHNLAHQGLVDPGLFFSWTGLPWSLFHMEALEFYGRVNLMKGGIVFARRVTTVSPSYAEEIQTPEFGMGLDGVLRRHAGKLRGILNGLDTEVFDPGKDPYLPAPYTREDPSGKARAKEAFRERTGLRPPVLAYVGRLDYQKGLDLVLKALPRLLEMGFRLYVQGVGDGGLQEAFLRAEEENPEGVRFLPAYDEAMARLAYAGAEAVLVPSRFEPCGLVQMIASRYGTPPVARAVGGLKDTVEDGRAGVLFETYHPEGLLYGVLRLFRLGAEEMGLRAMEKDFSWEGPARAYREVYREALG

SEQ ID NO: 52394 - DNA, 1497 bp, Bacillus anthracis str. Sterne
  CDS (1)..(1497): transl_table=11
atgaaaactcgaagggaggaagctgcaagggaagtagtagaagcttttcgtgcagtgggacaacaagtgaatattttatttgcagtatcagaatgtgtgccatttgtgaaatctggaggattagctgatgtagcaggtgcgctcccaaaagagctaaaaaaattaggtgtggaagttcgcattatacttccgaattatagtcttattccgcaaaaattaagggatggatgtacgctacataaagtaattaacgtcccgcttggctggagaaatcaatattgtggaattttaaaaggtgagcaagacgggattacgtattacttaatagataatgaatattattttaagagggattctctgtatggtcattatgatgatggagagcgtttttcttatttctcgaaagcagtattagagtgtattccgcatcttgatttcgaagtggatgttcttcatagccatgattggcatacagccatggtgaattttttactgcgtgaaaagtatcaagataacccgttatatgagcatattaaaacggtatatacgattcataacttgcagttccaaggtgtatttcctcctgaagtgatgtacgacttgttagaacttggtgatgaatattttcatagtgagcagttagagttttatggaaatgtgaactttatgaaggggggcattatcgcttctgatcaaattacagcggttagcccgacgtacaaagaagaaattcaatatgaatttttcggtgagaagttagatggattactgcgaaaatataatgataagcttagcggcattgtaaatggaattgatacgagcgtgtacaatccagaaacggattcgtatattactgcgcagtatgatgcagattcattatatgaaaagaatgaaaataaacgcgcgttgcagcgttattttggtttgccagaaaaagaagatacaccaattatttcaatggtaacgagattaacgaagcaaaaaggtcttgatttagtacgtactgtattccgagaaataatggaagaagatgtacaatgtattattttaggatcaggtgattcggaatatgaacaattctttgagtggatggcatatgagtatcctgagaaggtaaaagtgtatatcggctttaatgaggagttagctcaccaagtgtatgcgggaagtgatttattcttaatgccatcactgtttgagccgtgtggccttggacaacttatcgcattagcgtatggtacgattccaattgtaagggaaacaggcggattaaatgatacggtacaatcttatgatgaagaaactggagaaggaaatggtttcagtttcacgaactttaatgcacatgatatgttgcacacggttcttcgtgcaattgaattttatcatgataaatcggtatgggagcagcttgtaaaacaagcgatgactgaagattatagctgggagaaatcagctcttgcttataagaaattgtataaaagtctcatggaataa

SEQ ID NO: 52395 - protein, 498 aa, Bacillus anthracis str. Sterne
MKTRREEAAREVVEAFRAVGQQVNILFAVSECVPFVKSGGLADVAGALPKELKKLGVEVRIILPNYSLIPQKLRDGCTLHKVINVPLGWRNQYCGILKGEQDGITYYLIDNEYYFKRDSLYGHYDDGERFSYFSKAVLECIPHLDFEVDVLHSHDWHTAMVNFLLREKYQDNPLYEHIKTVYTIHNLQFQGVFPPEVMYDLLELGDEYFHSEQLEFYGNVNFMKGGIIASDQITAVSPTYKEEIQYEFFGEKLDGLLRKYNDKLSGIVNGIDTSVYNPETDSYITAQYDADSLYEKNENKRALQRYFGLPEKEDTPIISMVTRLTKQKGLDLVRTVFREIMEEDVQCIILGSGDSEYEQFFEWMAYEYPEKVKVYIGFNEELAHQVYAGSDLFLMPSLFEPCGLGQLIALAYGTIPIVRETGGLNDTVQSYDEETGEGNGFSFTNFNAHDMLHTVLRAIEFYHDKSVWEQLVKQAMTEDYSWEKSALAYKKLYKSLME

SEQ ID NO: 52396 - DNA, 1497 bp, Bacillus cereus E33L
  CDS (1)..(1497): transl_table=11
atgaaaactcgaagggaggaagctgcaagggaagtagtagaagcttttcgtgcagtgggacaacaagtgaatattttatttgcagtatcagaatgtgtaccgtttgtgaaatctggaggattagctgatgtagcaggtgcgctcccaaaagagctaaaaaaattaggtgtggaagttcgcattatactcccgaattatagtcttattccgcaaaaattaagggatggatgtacgttacataaagtaattaacgtcccgcttggctggagaaatcaatattgtggaattttaaaaggtgagcaagacgggattacgtattacttaatagataatgaatattattttaagagggattctctgtatggtcattatgatgatggagagcgtttttcttatttctcgaaagcagtattagagtgtattccgcatcttgatttcgaagtggatgttcttcatagccacgattggcatacagctatggtgaattttttactgcgtgaaaagtatcaagataacccgttatatgagcatattaaaacggtatatacaattcataatttgcagttccaaggtgtatttcctcctgaagtgatgtacgacttgttagaacttggtgatgaatattttcatagtgagcagttagagttttatggaaatgtgaactttatgaagggtggcattatcgcctctgatcaaattacagcggttagcccgacgtacaaagaagaaattcaatatgaatttttcggtgagaagttagatggattactgcgaaaatataatgataagcttagtggcattgtaaatggaattgatacgagcgtgtacaatccagaaacggattcgtatattactgcgcagtacgatgcaggttcattatatgaaaagaatgaaaataaacgcgcgttgcagcgttattttggtttgccagaaaaagaagatacaccaattatttcaatggtaacgagattaacgaagcaaaaaggtcttgatttagtacgtactgtattccgagaaataatggaagaagatgtacaatgtattattttaggatcaggtgattctgaatatgaacagttctttgagtggatggcatacgagtatcctgagaaggtaaaagtgtacatcggatttaatgaagaattagctcaccaagtatatgcgggaagtgatttattcttaatgccatcactgtttgaaccgtgtggacttggacaacttatcgcattagcgtacggtacgattccaattgtaagagagacaggcggattgaatgatacggtacaatcttatgatgaagaaactggagaaggaaatggtttcagtttcacgaactttaatgcacatgacatgttgcacacggttcttcgtgcaattgaattttatcatgacaaaccggtatgggagcagcttgtaaaacaagcgatgactgaagattatagctgggagaagtcagctcttgcttataagaaattgtataaaggtctcatggaataa

SEQ ID NO: 52397 - protein, 498 aa, Bacillus cereus E33L
MKTRREEAAREVVEAFRAVGQQVNILFAVSECVPFVKSGGLADVAGALPKELKKLGVEVRIILPNYSLIPQKLRDGCTLHKVINVPLGWRNQYCGILKGEQDGITYYLIDNEYYFKRDSLYGHYDDGERFSYFSKAVLECIPHLDFEVDVLHSHDWHTAMVNFLLREKYQDNPLYEHIKTVYTIHNLQFQGVFPPEVMYDLLELGDEYFHSEQLEFYGNVNFMKGGIIASDQITAVSPTYKEEIQYEFFGEKLDGLLRKYNDKLSGIVNGIDTSVYNPETDSYITAQYDAGSLYEKNENKRALQRYFGLPEKEDTPIISMVTRLTKQKGLDLVRTVFREIMEEDVQCIILGSGDSEYEQFFEWMAYEYPEKVKVYIGFNEELAHQVYAGSDLFLMPSLFEPCGLGQLIALAYGTIPIVRETGGLNDTVQSYDEETGEGNGFSFTNFNAHDMLHTVLRAIEFYHDKPVWEQLVKQAMTEDYSWEKSALAYKKLYKGLME

SEQ ID NO: 52398 - DNA, 1497 bp, Thiobacillus denitrificans ATCC 25259
  CDS (1)..(1497): transl_table=11
atgaaacgcggagcaatgaaggtgctgttcgtcgcgagcgaggcctttcccctggtcaagacgggcggactcggcgacgtcctgcacggacttccccaggccttgcacggcctcggcgtcggcgtccgactcctgctgcccggctatcgtacgctcctgcgccagctcgaccaggtgcggatagtcgcctggttcgacgtgcgcggggcggaggggccggtcgccgcgcgcgtgctcgagacgcgtcatccggggttcgatttcccgctgtggatcgtcgattgcccgccgctgttcgatcgcccgggcaatccttacgtcgacgtcacgggctatgactggcccgacaatgccgagcgtttcgcggtgttcgcgcgcgtcgccgcgctgctcgcacaggatgcccacgaggccggctggctgccggacgtcgtgcacacccacgactggcagaccggactcgtgccggctttcctcgccgacctgccggcacgtccgcggacggtgttcacgatccacaacctcgcctacggcggccacttcccgcacggcgacttcctgcgcctgcaactgccggcgcattggtggtcgcacgagggcgtcgagtttcacggcggcttttcgatgctgaaggcgggcatcgtctacgccgacgcggtcaccaccgtaagcccgacctatgccgaggaaatctgcacgccggccttcggctacggactcgacggcctgctgcgctcgcgccgccacaagctgcacggaattctcaacggcatcgatagcgcgacctgggacccggctgacgacccgcatctacgcgcgcgctacaccgcgggacgcattctgccgggcaagcggcgcgacaagcaggcgctgctcgaacgttttctgccggcggccgacgaagccgcgctgcaggcgccgctcgtcggcctggtcggccgcctcgtcgagcagaagggcatcgactgggtgctcgcggcgatgccgctgctgctcgccgaaaccgatgcgcgtttcgtgttgctcggcagcggccaggccgcctacgagcagaggctcacccggctggcccgccagcacccgacgcgcgtcttcgtcgagatcggctacgacgaggcgctggcgcaccagatcgaggccggcgccgacatgttcctgatgccgtcgcgcttcgaaccctgcggcctgaaccagatgtacagcctgcgttacggcaccttgccgatcgtgttcaagacgggcggcctcgccgacaccatcgtcgacaccaacgaagcgagcctggcggacggcagcgcgaatggcttcgtcttcgacacgccggacgtggcgcatttcgtcgacgcggtccgccgcgcgcttgccctctaccgtcagccctcgctgtggcgccgcgtgcagcagaccggaatgcgcctgtccttcgactggcgggaaagcgccggccactacctcgcgctctacgcggccgattccgccggagaacccgatgtctga

SEQ ID NO: 52399 - protein, 498 aa, Thiobacillus denitrificans ATCC 25259
MKRGAMKVLFVASEAFPLVKTGGLGDVLHGLPQALHGLGVGVRLLLPGYRTLLRQLDQVRIVAWFDVRGAEGPVAARVLETRHPGFDFPLWIVDCPPLFDRPGNPYVDVTGYDWPDNAERFAVFARVAALLAQDAHEAGWLPDVVHTHDWQTGLVPAFLADLPARPRTVFTIHNLAYGGHFPHGDFLRLQLPAHWWSHEGVEFHGGFSMLKAGIVYADAVTTVSPTYAEEICTPAFGYGLDGLLRSRRHKLHGILNGIDSATWDPADDPHLRARYTAGRILPGKRRDKQALLERFLPAADEAALQAPLVGLVGRLVEQKGIDWVLAAMPLLLAETDARFVLLGSGQAAYEQRLTRLARQHPTRVFVEIGYDEALAHQIEAGADMFLMPSRFEPCGLNQMYSLRYGTLPIVFKTGGLADTIVDTNEASLADGSANGFVFDTPDVAHFVDAVRRALALYRQPSLWRRVQQTGMRLSFDWRESAGHYLALYAADSAGEPDV

SEQ ID NO: 52400 - DNA, 1455 bp, Rhodobacter sphaeroides 2.4.1
  CDS (1)..(1455): transl_table=11
atgaaggacagggacaggatggagacggcgcgcggacgggtgttgtcggtggcttccgaatgcgtgccgctgctgaagaccggggggctcgccgatgtggtgggcgcgcttccgggggcgctggcggcggaaggctgggagatgcgggtgctgatgccctgctaccggccgctgaaatggcggctcgaggagatggaggaggtcttcgccgaagaggatctcttcggggggccggggcgggtgatggcgggcgaggtggccgggcggaagatgctgctccttgatgcgccgcatctctacgaccgcgagggcggcccctatgcgggtccggacggcgactggggcgacaatgcgcagcggtttgcggcgctttcctggatcggggcgcggatcgcgcgcgaggggctcggggacggctggcggccggatgtggttcatgcccacgactggcaggcgggcttcacgccggcctatatgaactattggggcagcggcggagcgagttcggtgctgacggtgcacaacatcgccttccagggctgggcgccggcgagccttctgtcggcgctgcgcctgccgccgcaggagttccatccggccgcgctcgaatattacggcgggctctcgtcgctgaaggcggggctggtctcggccgatcatatcaccaccgtctcgcccacctatgcctgcgagctgatgcggcccgagttcggcatgggcctgcagggcgtgattgcccagcgggctgggcaggtgaccggcatcctgaacggggtcgacaccgacatctggtcgcccgaggtcgaggagcggccctatgacgccgagagcctgaaggccaaggcggagaaccgcgccgtgctgtcgggcgccttcaaactgtcggtgccggggccgcttgcgatcctcgtgagccgcctgacctatcagaagggcatcgacctcatccccgaggtgctgccggacttcatcgccgcgggcgggggccttgcagttctgggcacgggtgacgcgccgctcgaggcggcgatgcgcgagctcgaggtgcgctttccgggtcgggtcggggtgcggatcggctatgacgaagggctgtcgcatctgatgttcgcgggcggcgatgcggttttggtgccctcgcggttcgagccctgcgggctcacgcagatgtacgggctgcgctacggggccattccggtggtggccctgacagggggccttgccgacacgatcatcaacgccaatccggccgccatggccgcgggctgtgcgaccggcctcaccttccatccgaccgagccgcccgccttcgccgaggcgctgaggcggctgatccatctttatgccgatcccgcggcctgggagacggtgcaacggaatgcgatgcgccatccggtgggctgggagacctcggccgcggcctatgcggcgctctaccgggagctcgtcgcgtga

SEQ ID NO: 52401 - protein, 484 aa, Rhodobacter sphaeroides 2.4.1
MKDRDRMETARGRVLSVASECVPLLKTGGLADVVGALPGALAAEGWEMRVLMPCYRPLKWRLEEMEEVFAEEDLFGGPGRVMAGEVAGRKMLLLDAPHLYDREGGPYAGPDGDWGDNAQRFAALSWIGARIAREGLGDGWRPDVVHAHDWQAGFTPAYMNYWGSGGASSVLTVHNIAFQGWAPASLLSALRLPPQEFHPAALEYYGGLSSLKAGLVSADHITTVSPTYACELMRPEFGMGLQGVIAQRAGQVTGILNGVDTDIWSPEVEERPYDAESLKAKAENRAVLSGAFKLSVPGPLAILVSRLTYQKGIDLIPEVLPDFIAAGGGLAVLGTGDAPLEAAMRELEVRFPGRVGVRIGYDEGLSHLMFAGGDAVLVPSRFEPCGLTQMYGLRYGAIPVVALTGGLADTIINANPAAMAAGCATGLTFHPTEPPAFAEALRRLIHLYADPAAWETVQRNAMRHPVGWETSAAAYAALYRELVA

SEQ ID NO: 52402 - DNA, 1671 bp, Burkholderia thailandensis E264
  CDS (1)..(1671): transl_table=11
atgaacgacggggtaacgggccgggcgcgcggggcgtccgccgggcgaggccgtgcggggccgcgggtgatgttcgtcgcatcggaagcgtttccgctcgcgaagacgggcggactcgccgacgtttgcgcatcgctgccgaaggcgctgcgcgcgctcggctgcgatgtgcgcgtgctgatgccgggctacgcgcaagcgctcgatcgcgtattgcggccgcgcgtcgtcgccgagctgggcgaagtgctgccgggcgcggcggtgcgcatcatcgcggggtcgatgcccgattccggcgtgccggtgtggctgctcgactgcccgtcgttgtatcgtcgcgcgggctcgctgtattgcggcccggacgacgcggactgggcggacaacgcgtaccgcttcggcctgctttgccaggtggccgcgcgcgttgcgctcggcgccgcggggctgaggtggcgtccggacgtcgtgcacgcgcacgactggcacggcgggctcgttgcgcttctgacgcgcggcgcgggcgacgcgcgcccgaagaccgtgttcacgatccacaacgccgcgttccagggcaatttcgcgctcgacgacgcggcgcgcatcggcttgccggccgatgcgctgtcggtcgatggcgtcgaattctacgggcagttgtcgttcctgaaagcgggcgcgcgctacgcggaccgactcaccacggtcagtcccacctatgcgggcgagatccagacggccgaattcggctgcggcctcgagggtttgtacgcggcgcggcgcgaccagctcagcgggatcatgaacggcatcgacaccgagctgtggaatccggcgacggaccgctggctgccgcaaccgtattcgatcgacgacatgggcggaaaggcgggctgcaaggctgcgctgcagcaggaactcggcctttgcgccgacgcaagggccccgctcgtcgcatcggtgtgccggctgacctcgcaaaagatgtcggacatcgtgctcgaacgcctgcctgagcagctcgcgcagcatccgcgcatgcagttcgcactgcatggacgcggcgatcgcgcgctcgaacaggggttcgatgcgttggccgcgcagtatccgcgccgcgtggcggtgcggatcggctatgacgaaacgctcgcgcaccggattcatgccggcgcggacatcctgctgcacggcgcccggttcgagccgtgcgggctcacgcagctgtacgcgatgcgctacggaacgattccgatcgtacggcgggttggcggactcgccgacagcgtcgtcgatctcgacacgctcgcgccgcactccgaggacgcgacgggcttcgtgttcgacgcgccgacaggcgatgcgatgagcgaagcgctgcgccgctgcgtgaatctgcacgatgcgcggcccggcgtgtggtccgcgttgtgccggctcgcgatggcgcgcgattcgagctggtcgcgttcggcgcgcgcgtatctggacctgtacgcggcgctgacgccgcggcggcgcgtcgaggcgtccgacgaggcgcggggcgcggcggccgcgcttgcgcgagcggacgccgcgagcgggcgccggcgtcgcgcgcccgagcagtccgaacggctgcgtcaggagcggctcgcgcggcaggtggcgctcgcgtcgaagtga

SEQ ID NO: 52403 - protein, 556 aa, Burkholderia thailandensis E264
MNDGVTGRARGASAGRGRAGPRVMFVASEAFPLAKTGGLADVCASLPKALRALGCDVRVLMPGYAQALDRVLRPRVVAELGEVLPGAAVRIIAGSMPDSGVPVWLLDCPSLYRRAGSLYCGPDDADWADNAYRFGLLCQVAARVALGAAGLRWRPDVVHAHDWHGGLVALLTRGAGDARPKTVFTIHNAAFQGNFALDDAARIGLPADALSVDGVEFYGQLSFLKAGARYADRLTTVSPTYAGEIQTAEFGCGLEGLYAARRDQLSGIMNGIDTELWNPATDRWLPQPYSIDDMGGKAGCKAALQQELGLCADARAPLVASVCRLTSQKMSDIVLERLPEQLAQHPRMQFALHGRGDRALEQGFDALAAQYPRRVAVRIGYDETLAHRIHAGADILLHGARFEPCGLTQLYAMRYGTIPIVRRVGGLADSVVDLDTLAPHSEDATGFVFDAPTGDAMSEALRRCVNLHDARPGVWSALCRLAMARDSSWSRSARAYLDLYAALTPRRRVEASDEARGAAAALARADAASGRRRRAPEQSERLRQERLARQVALASK

SEQ ID NO: 52404 - DNA, 1437 bp, Desulfitobacterium hafniense Y51
  CDS (1)..(1437): transl_table=11
atgttcctttgctgctttggaggaggtgcgcaaatgaaggttctttttgctataactgaagctgagccttttgtcaagacaggaggcctgggagaagtaggacgatatctccctttagctctccaggagcagggtgtggagattcgggtcattcttccccaatacagcagtattcccctgaattatttgcagaagatgaagacgattaaagaattcacagttcctctggcctggagaaatcaatattgcggattaaaggaattaaagtatgagggcatccattattattttttggataatgaatattacttccggcgttcaagatgctatggggacggggatgaaggagagcagtacgcctatttcagccgggcggtcctggagagcatccgctacctgcctgagttcaaaccggatattatccattgtcatgactggcatacggccttggttcccctgtttttaaaagccttttatgcccaggataccctttattacaatataaagaccttattcaccatccataatctgaaatatcaggggatatttcctcgggaggtccgggaggatgttctggggttgagtggagagctttcttcttcagcccagcttgaattttatggcggagtcaattttatgaaggccgggatcatgcacagtgatcaggtcaccaccgtgagtcccacctatgcccgggaaattcagcatccctattttggggaaggcctccatggagtcattcaggggcggaaagattccttgctggggatacttaatggtgtcccccggccttggccttccccaactttggccgataaaagggaaaacaggatgaagctccaggagcagctgaattttacgaacaatgaagagatccccatcctcagtatgatttcacgcttggtagaacagaaggggctggacctgcttctgcatgtgctggatgagatcctggccctggatatccggctggttgtcttaggcacgggagacgcccattatgaggagcgcctgcaaaggtttgcggaagggtatcccggcaagttacgagttatattaggctatcaggaagaactggcccacaggatctatgccggggcggatatctttctcatgccttcccggtttgagccttgcggtatagcccagatgatcgccatgagctatggcaccattcctatcgttcgggagacgggaggtttaaaagatactgtcaggccctattccccaatctcgggggaagggaatggattcacctttactgattacaatgctcatgaactcctctatgccattcaaaaggcggtggagatgttccggaatcaaaaagatacttggcaaaagcttcaggaaaatgccctgagttcggatttcagctggaaccgatccgctgcccagtaccgggatgtctatgagagcttgtattattcttcgtaa

SEQ ID NO: 52405 - protein, 478 aa, Desulfitobacterium hafniense Y51
MFLCCFGGGAQMKVLFAITEAEPFVKTGGLGEVGRYLPLALQEQGVEIRVILPQYSSIPLNYLQKMKTIKEFTVPLAWRNQYCGLKELKYEGIHYYFLDNEYYFRRSRCYGDGDEGEQYAYFSRAVLESIRYLPEFKPDIIHCHDWHTALVPLFLKAFYAQDTLYYNIKTLFTIHNLKYQGIFPREVREDVLGLSGELSSSAQLEFYGGVNFMKAGIMHSDQVTTVSPTYAREIQHPYFGEGLHGVIQGRKDSLLGILNGVPRPWPSPTLADKRENRMKLQEQLNFTNNEEIPILSMISRLVEQKGLDLLLHVLDEILALDIRLVVLGTGDAHYEERLQRFAEGYPGKLRVILGYQEELAHRIYAGADIFLMPSRFEPCGIAQMIAMSYGTIPIVRETGGLKDTVRPYSPISGEGNGFTFTDYNAHELLYAIQKAVEMFRNQKDTWQKLQENALSSDFSWNRSAAQYRDVYESLYYSS

SEQ ID NO: 52406 - DNA, 1455 bp, Acidobacteria bacterium Ellin345
  CDS (1)..(1455): transl_table=11
atgcacatcgcattcgcggcatcggaatgcgttccattttccaagaccggggggctagccgacgttgtaggcgcagttccgcgggcactggctgcactcggccacaaggtttcggtttatacgcctttatatcgcaatacgaagcttgaaaatccgaagaccgcggtccgcagcatcaccgttcccttcgacgaccaataccgcttctgctccattgtggacggcgggatgattgacggcgtgcagttctacttcgtggattacccggcctacttcgatcgcgacgcgctatacggcacaccgatcggcgattaccacgacaacgccgaacgctttgcgctgttctcgcgcgccgtgattgagggctcgaagatcctcggcgtccccgacattttccattgccacgactggcaatctgcgctgatccccgtactgctgcgcacgttgtacgccgaggacccggccttcgaccacgcgaagatcgtattcacgattcacaacatgggataccagggactcttccccggagaaatcctgccgctgctcatgctgccgtgggacctgttcacgctgacgaagatggagttttacggcaaggtcaacttcctgaagggggcgctggtttacgccgacttcgtcactaccgtgagccgccgctacgcgctcgagatccagactgcggagtacggctttggcctggaaggcgtgctgcgcgggcgttccgggacagttgcaggaatccttaacggtgtggattacagcgagtggagcccggaaaccgatcgctttatcgccgcgaaattctcggccgacagcctcgccgctaaagcccaggacaaagccgacctgctgcgcgaattcggcctacccgagacgaaactgccagtcgttggaatcgtctcgcgctttgcggcacagaagggcttcgatctcatccagcaagttggcgatcgcctggcgcgcgaggaagcgatcttcgtcgtgctcggttcgggagataaaacctacgaagatttgatgcgccgcctgagcaaacagtatccgaaccggttcgcggtgcgcgtcgcgtatgacaatgcgctcgcccacaaaatcgaagccggcagcgatatgttcttgatgccctcgcgctacgaaccctgcgggctgaaccagatctacagcctgcgctacggcacggtgccgattgtccgcgccaccggcgggctcgatgacaccatcgaaaattgggaccctatcaccaaccgcggcacaggtttcaagttcgtcgaatactccggcgaagacatgctcgacaccgtccgcaaggcactcgaactcttcaaagacaaaaccgcgtggcaaaaactcatgcgcaacggcatggcccgcgacttctcgtggaataccgcggcgaaagaatatgtgcgggtgtatgagaaagcgaagcaggtaagagcgccaatgccagtgtag

SEQ ID NO: 52407 - protein, 484 aa, Acidobacteria bacterium Ellin345
MHIAFAASECVPFSKTGGLADVVGAVPRALAALGHKVSVYTPLYRNTKLENPKTAVRSITVPFDDQYRFCSIVDGGMIDGVQFYFVDYPAYFDRDALYGTPIGDYHDNAERFALFSRAVIEGSKILGVPDIFHCHDWQSALIPVLLRTLYAEDPAFDHAKIVFTIHNMGYQGLFPGEILPLLMLPWDLFTLTKMEFYGKVNFLKGALVYADFVTTVSRRYALEIQTAEYGFGLEGVLRGRSGTVAGILNGVDYSEWSPETDRFIAAKFSADSLAAKAQDKADLLREFGLPETKLPVVGIVSRFAAQKGFDLIQQVGDRLAREEAIFVVLGSGDKTYEDLMRRLSKQYPNRFAVRVAYDNALAHKIEAGSDMFLMPSRYEPCGLNQIYSLRYGTVPIVRATGGLDDTIENWDPITNRGTGFKFVEYSGEDMLDTVRKALELFKDKTAWQKLMRNGMARDFSWNTAAKEYVRVYEKAKQVRAPMPV

SEQ ID NO: 52408 - DNA, 1434 bp, Myxococcus xanthus DK 1622
  CDS (1)..(1434): transl_table=11
atgaatgtcctcttcatctcctcggaggtggccccgttctccaagacggggggcctgggggacgtggccggggccctccccgccgcgcttgcctcgctgggccatgacgtcaaggtcatcaccccgcgctaccgcgacctgcgaggcgcggagcggctggagcccacaggccagtccctgctactgcgcttccccttcggcgagctgtcgggccccatcctctccgcccgcgtgtcggagcggctggaggtgctcttcctggagaacgcgttcctcttcggcaaccgccacggcctctacggagacgcggggggcgccttcgccgacaatcaccggcgcttcgcctatctcagcgtgggcgcgctccaggcggcgcagcggctgcgcttcatcccggacatcatccacgccaacgactggcagacggggctggtgccggtggcgctgcggcgcggcttccagacggggccgctggcgcacgcgaagagcgtcttcaccatccacaacctggcctaccaggggcagttccccaaggacgtgatgggggacctggcgctgccctgggacttgttcaccgcccatgacgggctggagttccacgacacggtgaacttcctgaaggcggggctcgtcttctccgacgcgctcaccaccgtgtcccccacctacgcacgggaaatccagacgccggagcagggctacgggctggacggcctgctgcgccaccgcgcgcaccggctccacggcatcctcaacggcgtggacacgcacgagtggaacccggaggacgacgccttcctcccggcccgctacggactgaaggacctgtccggcaaggccgtgtgcaagcgcgagctactggcccgcttcgggctggaggacggccccgcgccggtgttcggcttcgtcagccggctggcgtggcagaagggcatggacctgctgctggaggccctgccggccgcgctccacgcggacatccgcgtcgtcggcgtgggcagtggcgaagggcctctggaggaagggctgctcgcgttgcagtcccgttacccgaagcaggtgggcgtgcacatcggcttcgaccccgggctctcccacctggtggaggcgggggcggacttcttcctcatgcccagtcgctacgagccgtgcggcctgaaccagatgtattcgctgcgctacggcacggtgcccatcgtccgggccaccggcgggttggtggacacggtggagggagggctggacggaaacggcatcctcttcgaggccttccacaagtccgccctgctggcggccatccgccgcgccctggccctctatgcggacccgtcgcgcctggatgagttccgccgccggggcatggagaaggacttctcctggggggcatccggccgtcgctacgaagcgctcttccacgacctggtggcggaatag

SEQ ID NO: 52409 - protein, 477 aa, Myxococcus xanthus DK 1622
MNVLFISSEVAPFSKTGGLGDVAGALPAALASLGHDVKVITPRYRDLRGAERLEPTGQSLLLRFPFGELSGPILSARVSERLEVLFLENAFLFGNRHGLYGDAGGAFADNHRRFAYLSVGALQAAQRLRFIPDIIHANDWQTGLVPVALRRGFQTGPLAHAKSVFTIHNLAYQGQFPKDVMGDLALPWDLFTAHDGLEFHDTVNFLKAGLVFSDALTTVSPTYAREIQTPEQGYGLDGLLRHRAHRLHGILNGVDTHEWNPEDDAFLPARYGLKDLSGKAVCKRELLARFGLEDGPAPVFGFVSRLAWQKGMDLLLEALPAALHADIRVVGVGSGEGPLEEGLLALQSRYPKQVGVHIGFDPGLSHLVEAGADFFLMPSRYEPCGLNQMYSLRYGTVPIVRATGGLVDTVEGGLDGNGILFEAFHKSALLAAIRRALALYADPSRLDEFRRRGMEKDFSWGASGRRYEALFHDLVAE

SEQ ID NO: 52410 - DNA, 1440 bp, Haemophilus somnus 129PT
  CDS (1)..(1440): transl_table=11
atgaaagtattacatgtttgttccgaattatatccattattaaaaacaggcggattggctgatgtaatgggggctttaccttttgcgcaaaatgaaattggtattgatgctagacttgttttaccggcttatcctgctatttctcgtggtatccccaatactgtggttgttgctgagtttaataattttgctggacatgttgtactacgttatggtgaatacaatggtattggtgtttatttaatcgatgcaccgcatttatatgcccgtgaaggtaatccatatcatgatatgtggtataacgattatacggacaactataagcgttttgctttattggcttgggttggggcagagttggctacaggattagacttttggtggcgtgctgaaattgtgcatgctcatgattggcatgcaggattaacagctgcttatttgcatcataaaggacgtcctgctaaatcggtgtttactatccataatttagcctatcaaggacgttttttaccttatcatctaactgaaattggattgccttggtggatgtttaatgtagatggattggaattatatggtgaaatgtcttatttaaaagccggactgtattattccgatatttctactgcagttagtccaacctatgccaaagaaattacaacacctgaatttgcttatggtttacaagggttgttgcaaactttgaaagcacagggacgattggttggtattttgaatggcgtagatgaaaaaatttggcatccgtatagtgatccgtatattgaagatcattacaaattgaaatcaatgcagggtaaacgtaagaataaaataaaattacaagcttattttaatttaccacaaaatcctaatgcactgttatttgtaatggttacacgtctaacagagcaaaaaggtgtagatttactaattggtagtgctgagagaattgtacaacaaggtgggcaattagcaattttaggttccggttcagcacatttagaagccggtattaattggcttgcacaagagtatccggaaaatatcgcagtaaaaattggatatgatgaagcattatcacatttaatgattgccggaggagatgtcattcttgttccaagtcgttttgagccttgtggtttaacgcagttatacggattaaaatatggaactttaccgttagttcgttcaacaggtggtttggctgatactgtcattgatagtagcagtgaaaacatcaaagcacgtcatgcaacaggatttgtatttaatgatgctgatgttgggggattatgttatggtattgatagtgcatttactttgtggcgtaaaccaagtcaatgggaaagtgtgatagtcaatgctatggaacaggatttcagttggcagacatctgcaaaaggatatcaatccctatatgatattcttttacataaataa

SEQ ID NO: 52411 - protein, 479 aa, Haemophilus somnus 129PT
MKVLHVCSELYPLLKTGGLADVMGALPFAQNEIGIDARLVLPAYPAISRGIPNTVVVAEFNNFAGHVVLRYGEYNGIGVYLIDAPHLYAREGNPYHDMWYNDYTDNYKRFALLAWVGAELATGLDFWWRAEIVHAHDWHAGLTAAYLHHKGRPAKSVFTIHNLAYQGRFLPYHLTEIGLPWWMFNVDGLELYGEMSYLKAGLYYSDISTAVSPTYAKEITTPEFAYGLQGLLQTLKAQGRLVGILNGVDEKIWHPYSDPYIEDHYKLKSMQGKRKNKIKLQAYFNLPQNPNALLFVMVTRLTEQKGVDLLIGSAERIVQQGGQLAILGSGSAHLEAGINWLAQEYPENIAVKIGYDEALSHLMIAGGDVILVPSRFEPCGLTQLYGLKYGTLPLVRSTGGLADTVIDSSSENIKARHATGFVFNDADVGGLCYGIDSAFTLWRKPSQWESVIVNAMEQDFSWQTSAKGYQSLYDILLHK

SEQ ID NO: 52412 - DNA, 1383 bp, Trichodesmium erythraeum IMS101
  CDS (1)..(1383): transl_table=11
atgcgaattttatttgtgtctgctgaagcgactcctttagcaaaagttggtggtatggcagatgtagtgggtgccttacccaaagtactacggaaaatgggtcacgatgttcgtatcttcatgccttattatggctttttaggcgacaagatggaagttcctgaggaacctatctgggaaggaacggccatgtatcaaaactttaagatttatgagacggtactaccaaaaagtgacgtgccattgtacctatttggtcacccggctttttggccacgtcatatttactatggagatgatgaggactggagattcactctatttgctaatggggcggccgagttttgctggaatggctggaaaccagagatagttcattgtaatgactggcacactggcatgattccagtttggatgcacgaaactccagacattaaaaccgtatttactattcataacctagcttatcaaggaccttggcgctggtacttggaaagaattacttggtgtccttggtacatggaagggcataatacaatggcagcagcagttcagtttgcagatcgggtaactactgtttctccaacctatgctagtcagatccaaacacctgcctacggagaaaatctagatggtttaatgtcttttattacggggaaactacacggtatcctcaatggtattgatatgaacttttataatccagctaatgacagatatattcctcaaacttatgatgtcaataccctggaaaaacgggttgacaataaaattgctcttcaagaagaagtaggttttgaagttaacaaaaatagctttctcatgggaatggtctcccgactggtagaacaaaaaggacttgatttaatgctgcaagtcttagatcggtttatggcttatactgatactcagtttattttgttgggtacaggcgatcgcttctatgaaacccaaatgtggcaaatagcaagtcgttatcctggtcggatgagtgtccaacttttacataatgatgccctttcccgacgaatatatgcaggtactgatgctttcttaatgcccagtcgatttgagccttgtggtattagtcagttattggcaatgcgttatggtagtatacctattgtccgtcgcacaggtgggttagttgatactgtctctttctatgatcctattaataatgtaggtactggctattcttttgatcgctatgaaccactagacctgcttactgcaatggtccgagcctatgaaggtttccggttcaaagatcaatggcaggagttacagaagcgtggcatgagagagaactttagctgggataagtcagctcaaggttatatcaaaatgtacaaatcaatgctcggattacctgaagaataa

SEQ ID NO: 52413 - protein, 460 aa, Trichodesmium erythraeum IMS101
MRILFVSAEATPLAKVGGMADVVGALPKVLRKMGHDVRIFMPYYGFLGDKMEVPEEPIWEGTAMYQNFKIYETVLPKSDVPLYLFGHPAFWPRHIYYGDDEDWRFTLFANGAAEFCWNGWKPEIVHCNDWHTGMIPVWMHETPDIKTVFTIHNLAYQGPWRWYLERITWCPWYMEGHNTMAAAVQFADRVTTVSPTYASQIQTPAYGENLDGLMSFITGKLHGILNGIDMNFYNPANDRYIPQTYDVNTLEKRVDNKIALQEEVGFEVNKNSFLMGMVSRLVEQKGLDLMLQVLDRFMAYTDTQFILLGTGDRFYETQMWQIASRYPGRMSVQLLHNDALSRRIYAGTDAFLMPSRFEPCGISQLLAMRYGSIPIVRRTGGLVDTVSFYDPINNVGTGYSFDRYEPLDLLTAMVRAYEGFRFKDQWQELQKRGMRENFSWDKSAQGYIKMYKSMLGLPEE

SEQ ID NO: 52414 - DNA, 1557 bp, Synechococcus sp. CC9311
  CDS (1)..(1557): transl_table=11
atgcgcgtgctctttgccgccgccgaatgcgcccccatggtgaaagtcggtgggatgggcgatgtggtcggatcccttccccctgccttgaaggctctgggtcacgacgtgcgcttgatcatgccgggatacggcaagctctggtctcgattggagatccctgcggaaccgatctggcgaggccagaccatgggtaccgagtttgcggtttttgaaacccgtcatcccaccaatggcctcaccatctacctggttggtcaccccgtctttgatccagaacggatttatggcggagaagatgaagattggcgcttcacattttttgccagcgctgcggctgaatttgcctggaacgtctggaagccgaatgttcttcattgccatgactggcacaccggaatgattccggtctggatgcaccaggacccagagatcagcaccgtttacacgatccacaacttgaaataccagggcccctggcgctggaagctggaccggatgacctggtgcccttggtacatgcaaggcgaccacaccatggctgccgccctgctctatgccgatggcgttaatgcggtttcaccgacttactccagagagatccgcacctcggaatacagcgaaaagctggatgggttgctcaattacatctccggcaagctgcgcggcatcctgaacggtattgatcttgaggcctggaatccagccactgatcgcgccttgcccgccaccttcagtgccgatgatttgtcgggtcgcgcacgcaacaagcaggtgctgcaggagcgaatgggtcttgaagtcagacctgatgcctatctgctgggcatggtgagccgtctggtggatcaaaaaggcgttgacctgctgttgcaagtggcggatcgcttactcgcttacaccgacacccagatcgtggtgcttggcaccggtgatcgcggcttggagtccggtctgtggcagatggcctcccgccatccaggacgcgtatccgtgttcctcacctacgacgacgacctctcacgcttgatttatgcaggcagtgacgccttcctgatgcccagtcgctttgagccctgtggcatcagtcaattgctcgccatgcgctacggatgcgtgcctgtggtgagaaaggtaggtggtctggtcgatacggttccaccgcacgatccagcccagcaaagcggtactggcttctgcttcgatcgtttcgatcccgtggacttcttcacagcccttgtgcgctcctgggaagccttccgccatcaagacagctggcgcgaactccagcgaaggggcatgcggcaggactacagctgggcccggtcagcgatggaatacgaccagatgtaccgcgaggtctgtggccttaaggaaccaggccccgatgccgctgctgtggaacagttttcccagggacaggatgccgatccctccttggcccaaggacaacatgcagccccaaccagccctcctgaacaatccagcgaagacctgtccaagggacccggctcacgcaaccccctagccaaactgtttggcggtcagcgacgctga

SEQ ID NO: 52415 - protein, 518 aa, Synechococcus sp. CC9311
MRVLFAAAECAPMVKVGGMGDVVGSLPPALKALGHDVRLIMPGYGKLWSRLEIPAEPIWRGQTMGTEFAVFETRHPTNGLTIYLVGHPVFDPERIYGGEDEDWRFTFFASAAAEFAWNVWKPNVLHCHDWHTGMIPVWMHQDPEISTVYTIHNLKYQGPWRWKLDRMTWCPWYMQGDHTMAAALLYADGVNAVSPTYSREIRTSEYSEKLDGLLNYISGKLRGILNGIDLEAWNPATDRALPATFSADDLSGRARNKQVLQERMGLEVRPDAYLLGMVSRLVDQKGVDLLLQVADRLLAYTDTQIVVLGTGDRGLESGLWQMASRHPGRVSVFLTYDDDLSRLIYAGSDAFLMPSRFEPCGISQLLAMRYGCVPVVRKVGGLVDTVPPHDPAQQSGTGFCFDRFDPVDFFTALVRSWEAFRHQDSWRELQRRGMRQDYSWARSAMEYDQMYREVCGLKEPGPDAAAVEQFSQGQDADPSLAQGQHAAPTSPPEQSSEDLSKGPGSRNPLAKLFGGQRR

SEQ ID NO: 52416 - DNA, 1452 bp, Alkalilimnicola ehrlichei MLHE-1
  CDS (1)..(1452): transl_table=11
atgaagattctctttaccgcctccgaggcgtggccgctggtgaagaccggcgggctgggcgatgtggcccacggcctcacccacgccctgcgggaacgccgccacgacgtgcgcctgttgctgccggcccaccccgatgcggtggccggcctggagggccgtattcgccgccacgccctgaccctggaccagcggccgttcacactcatcgaggggcggctgcccggtacccgcgtcaccacctggctgctggacgacccgccgctcttcgcccgcgccggcaacccgtacaccaccgaggacggcgacccgtggcccgacaacgcccgccgctaccaccgcctgagccgggtggcggcggccctggccgccggcgagctgctgccgtggcaggcggcggtgctccacgcccatgactggcagacggccctggcgccgttcctcctccagcggcggcccgtcccccgcccggccactgtcttcaccattcacaacctggcctaccgcggcctcttcccggcggagacccacacccgcctcgggctaccgccggaggcgtggacgcccgaaggcctggagttccacggccgactcgcctttatcaagggcggcctggcctacgccgacgccatcaccaccgtcagccccacctacgcccgggagatccagaccccggccttcggctgcggcctggacggcctgctgcgccaccggtccggggtgctccacggcatcgtcaacggtatcgacaccacggtctggaacccggccgccgacccccacctggcggcctgctaccggaaacccgacccggcggcccgggccgccaaccgcgccgcccttgcccaacggatcggcctcgacggcgataccggcgagaggagcggcccgctactcggcttcgtcgggcggctggtggaacagaagggtgtcgacctgatcctcgccgccctcccccggctgttggccggcggcgcgcgcctcgccttgctcggctcgggggaacgggagttggaggaggcgctgcgccaagccgcccggcactatccgggccgggtcggcgtccatatcggctacgacgaggggctggctcatctgatcgaggggggctgcgatctctttctgatgccctcccgcttcgagccatgcggcctcaaccagctctactccctgcgctacggcaccccgccggtggtcacggccaccggcggactggccgacaccgtcatggacgtggacaccgaccccaccgccggcaacggctttcaccttcccgccgccaacgccggcgccctggcggccacagtggaacgggccaccgcccattggcggcgaccggcggcgtggaagcgcatccaggcgcggggaatgggcggagactactcctgggacgcctcggcggaggcgtacctgcggctctaccgcaacacccctggcaataacggatcatga

SEQ ID NO: 52417 - protein, 483 aa, Alkalilimnicola ehrlichei MLHE-1
MKILFTASEAWPLVKTGGLGDVAHGLTHALRERRHDVRLLLPAHPDAVAGLEGRIRRHALTLDQRPFTLIEGRLPGTRVTTWLLDDPPLFARAGNPYTTEDGDPWPDNARRYHRLSRVAAALAAGELLPWQAAVLHAHDWQTALAPFLLQRRPVPRPATVFTIHNLAYRGLFPAETHTRLGLPPEAWTPEGLEFHGRLAFIKGGLAYADAITTVSPTYAREIQTPAFGCGLDGLLRHRSGVLHGIVNGIDTTVWNPAADPHLAACYRKPDPAARAANRAALAQRIGLDGDTGERSGPLLGFVGRLVEQKGVDLILAALPRLLAGGARLALLGSGERELEEALRQAARHYPGRVGVHIGYDEGLAHLIEGGCDLFLMPSRFEPCGLNQLYSLRYGTPPVVTATGGLADTVMDVDTDPTAGNGFHLPAANAGALAATVERATAHWRRPAAWKRIQARGMGGDYSWDASAEAYLRLYRNTPGNNGS

SEQ ID NO: 52418 - DNA, 1443 bp, Rhizobium leguminosarum bv. viciae 3841
  CDS (1)..(1443): transl_table=11
atgaaagttctttcggtttcgtccgaagtcttccccttgatcaagacagggggtctggccgatgtgtccggcgccctgccgattgctctgaaagccttcggggtcgagaccaagacccttctacccggctatcccgccgtcatgaaggtcattcgcgacgccgtcatcaggctcgaattccccgacctgcttggtgagcgggcgaccgtgctcgaggtccagcatgagggcctcgatctgctcatcctcgatgcgccggcctattacgacaggccgggcgggccttatctcgatccgctcggcaaggactatccggacaactggcgtcgtttcgccgccctgtcgctcgctgcttccgagatcgccgccggcctgatgcccggctggcggccggatctcgtccatacccacgactggcaggcggcgctgacgtcagtctatatgcgttattatccgacgccggaactgccgagcgtgctgaccattcacaacatcgccttccagggccagttcggttccgaaatctttgccggcctgcgcctgcctgcccacgccttcaccaccgaaagcatcgaatattacggcactgtcggcttccttaagggcggcctgaagactgcccatgcgatcaccacggtcagcccgacctatgccgatgagatcctgacgtcggaattcggcatgggactggagggtgtcatcgcgagccgcgtcgacgatctgcacggcatcgtcaacggcatcgacaccgatatctggaacccggcgaccgatcctgtcgtccacacccattatggccagacgacgctgaagaaccgcgaggagaaccggcgctcgatcgccgaattcttcggtctcgacaatgacgacgccccgatcttctgcgtcatcagccgtctgacctggcagaagggcatggatatcgtcgcaaatgtcgccgatgagatcgtcgccatgggcggtaagctcgtcgtgctcggctccggcgaagccgcccttgaaggcgcgctgctcgcctccgccagccgccatcccggccgcgtcggcgtctcgatcggctataacgagccgatgtcgcacctgatgcaggccggttgcgatgcgatcatcatcccctcgcgcttcgaaccctgcggcctgacccagctttatggcctgcgttacggctgcgtgccgatcgtcgcccgcaccggcgggttgaacgacacggtgatcgacgccaatcatgccgcacttgcagcgaaagtcgcaaccggcatacaatttgcccccgtgaccgaaacaggcatgctacaggcaatccgccgtgcgatgcatttttatcaggaccgaaaactctggacccaattgcaaaagcagggcatgaaatcggatgtctcctgggagaagagcgccgaacgctacgctgccctctattcaagcctcgtctcgaaaggcatgtga

SEQ ID NO: 52419 - protein, 480 aa, Rhizobium leguminosarum bv. viciae 3841
MKVLSVSSEVFPLIKTGGLADVSGALPIALKAFGVETKTLLPGYPAVMKVIRDAVIRLEFPDLLGERATVLEVQHEGLDLLILDAPAYYDRPGGPYLDPLGKDYPDNWRRFAALSLAASEIAAGLMPGWRPDLVHTHDWQAALTSVYMRYYPTPELPSVLTIHNIAFQGQFGSEIFAGLRLPAHAFTTESIEYYGTVGFLKGGLKTAHAITTVSPTYADEILTSEFGMGLEGVIASRVDDLHGIVNGIDTDIWNPATDPVVHTHYGQTTLKNREENRRSIAEFFGLDNDDAPIFCVISRLTWQKGMDIVANVADEIVAMGGKLVVLGSGEAALEGALLASASRHPGRVGVSIGYNEPMSHLMQAGCDAIIIPSRFEPCGLTQLYGLRYGCVPIVARTGGLNDTVIDANHAALAAKVATGIQFAPVTETGMLQAIRRAMHFYQDRKLWTQLQKQGMKSDVSWEKSAERYAALYSSLVSKGM

SEQ ID NO: 52420 - DNA, 1446 bp, Magnetococcus sp. MC-1
  CDS (1)..(1446): transl_table=11
atgcgtgtgctatttgtaacatcagagatctacccactcataaaaaccggtggtcttggcgatgtcgccgctgctctgcccgcagcgttgattgaacaaggcgttgatatacgcgttttggtgcccggctaccctagtgtgctagaaggcatgcagcgccaaggtgatgctattgtgctgggtgaggtttttggtcatggtgatgcccgactcatacccggccgcctgcccgatagcgatgtttttttgtgggcactggacattcctaccctctacaaccgtccgggcaacccctacttaagccacgatggccgggattggggggacaatgccattcgctttgccgccctctcgcgggtagcggcattgattgccgaagcgggtggttttttaggttggcgtcccgatgtgctgcacgccaacgattggcaagcgggcttggcctcggcttatctgcatttttctggcaaccgtcactgtaaaagcatcatcaccgtgcacaatatccaatttcagggcaattttcccgcccgtgtggtgcacgaggttggcttacctgccagcgccatgcatgtttatggtgccgaattttacggacagtttagctttttgaaagcgggccttttttacagcaactggctcacgaccgtcagccccacttatgccaatgagatctgcacccctgcctatagctttggtatggatggcctgttgcaagatcgcgtacaccagctacacggcattcttaatggcattgattaccatgcctggaaccccgagaccgatcctttaattccccacccttatagccgtgataccctagagaacaagcttctcaacaaacgggctttgcagcaggagatggggctgttggtggaggatgatcggcccctgtttggtctggtcagccgcttgaccgaacaaaagggcattgatcttattttggaggccattccagcggtgctcagtgccggggcccaattggttgtgttgggcagcggccaccgcgcttttgaggatcagctgcgccaactcgccgcgcaaaacccgctacaagtcgcggtacatattggttatgacgagattcactcccaccgcatccaagcaggggtcgatattctgttggtgccatcacgctttgaaccgtgcggcctgacccaactctatgccatgcgctatggcaccctacccttggtcagacgcaccggcggtttggccgatagtgttacgcccatccattccgaaaaccacggcaccggttttctgtttgatcgacccgacaccatcagcctacttaccgtcatgttgcaagccatgggttgcctgcgcaaccccaccctgtggcgcaatgcccagcaacgtgccatgtccatggattttggctggcgcaaatccgcacgtgcctacatgcatctatatgaatctggggcaccaccggtcatgtaa

SEQ ID NO: 52421 - protein, 481 aa, Magnetococcus sp. MC-1
MRVLFVTSEIYPLIKTGGLGDVAAALPAALIEQGVDIRVLVPGYPSVLEGMQRQGDAIVLGEVFGHGDARLIPGRLPDSDVFLWALDIPTLYNRPGNPYLSHDGRDWGDNAIRFAALSRVAALIAEAGGFLGWRPDVLHANDWQAGLASAYLHFSGNRHCKSIITVHNIQFQGNFPARVVHEVGLPASAMHVYGAEFYGQFSFLKAGLFYSNWLTTVSPTYANEICTPAYSFGMDGLLQDRVHQLHGILNGIDYHAWNPETDPLIPHPYSRDTLENKLLNKRALQQEMGLLVEDDRPLFGLVSRLTEQKGIDLILEAIPAVLSAGAQLVVLGSGHRAFEDQLRQLAAQNPLQVAVHIGYDEIHSHRIQAGVDILLVPSRFEPCGLTQLYAMRYGTLPLVRRTGGLADSVTPIHSENHGTGFLFDRPDTISLLTVMLQAMGCLRNPTLWRNAQQRAMSMDFGWRKSARAYMHLYESGAPPVM

SEQ ID NO: 52422 - DNA, 1677 bp, Azoarcus sp. BH72
  CDS (1)..(1677): transl_table=11
atgaagaagagcggtccgttgcgggtgctgttcgccaccccggaatgcgcgccctgggccaagaccggcgggctgggcgaagtcagcgccggcctgccggcggcgctggccgggctgggcgtggatgtgcgggtgctgatgccggcctatcgctcggtgctggagcaggccgggggcttgcgccgcatcgccgcgctgccggcgggctccggcctgccgccggccacgctgctgggcggccgcctgccgagcggcgtgcgggcgatgctgatcgacagcgcggacctctacgcccgcgccggcggcccctaccaggacgaccgcggggtggattacgacgacaacgcgctgcgcttcggcctgctgtcgcgcgtggcggcgctgctgtcgtccgcggccagtccattgaaatggcgggccgacgtgctccactgcaacgactggcccaccggcctcgcgccggcttacctgaaggccgggctgccggaacccgcgccgagcgtggtgacgatccacaacctcgcgttccagggcatctttccgctcgaaaccggcaccgcgctgggcctgccggcacactgcctgaccatggacggggccgaatactggggccggctgtccttcctgaaggcgggcctgttctacgccgaccgcatcgtcacggtcagccccacctacgcccaggaaatcctcgacgaacacctgggctgcggcatgcagggcctgctgcgcgcgcgccgcgagacgctgtccggcatcctcaacggcatcgacaccgaaacctgggacccgcgcagcgatccctatctgcccacgccctacggggtggacacgctggacgacaaacgcgccaacaagcgtgcgctgcaggccgagctgcggctggccgaggacgatgacgcgctgctgctcggcatggtgacgcgcctgaccgaccagaagggcgtggacctggtgctggaggcgctgccccagctcttcgagcgcccgctgcagctcgccctgctcggcaatggcgacccggcgctggaggcggcactgcgcgaggccgagggccgctggccgcaacgcatggcggcggtgatcggtttcgacgaagggctggcgcaccgcatcgaggccggcgccgacgccttcctgatgccctcgctgttcgagccttgcgggctcaaccagatgtacagccagcgctatggcacgccgccgatcgtgcgtgccaccggcgggctggcggattcggtggatgactacgacgccgcggcggaacacgccaccggcttcgccttcgtcgagcccaccgcggccgcgctggtggccaccgtggagcgcgcgctggcggtatggcaagaccggcccgcctggcagcggctgtgccgcagcgcgatggggcgcgacttttcgtggaccgccagcgcccaccgctaccgctacctgtacgacctgatgaccgggcgcagctcgccgcggccggggcgcgcggccaaggccggcagccagcccgcggcgccggtgcccggccacggtgccgacagcgcaacgctgcgcgagcacgtgctgcaggcgggtaggtcggtggatgcgccgccgctcgccgagcgccgccgcggccgccgcgagcagcccggcggagcgggcggagacgactccgccgctcatgtcgccacccgggcgaaataa

SEQ ID NO: 52423 - protein, 558 aa, Azoarcus sp. BH72
MKKSGPLRVLFATPECAPWAKTGGLGEVSAGLPAALAGLGVDVRVLMPAYRSVLEQAGGLRRIAALPAGSGLPPATLLGGRLPSGVRAMLIDSADLYARAGGPYQDDRGVDYDDNALRFGLLSRVAALLSSAASPLKWRADVLHCNDWPTGLAPAYLKAGLPEPAPSVVTIHNLAFQGIFPLETGTALGLPAHCLTMDGAEYWGRLSFLKAGLFYADRIVTVSPTYAQEILDEHLGCGMQGLLRARRETLSGILNGIDTETWDPRSDPYLPTPYGVDTLDDKRANKRALQAELRLAEDDDALLLGMVTRLTDQKGVDLVLEALPQLFERPLQLALLGNGDPALEAALREAEGRWPQRMAAVIGFDEGLAHRIEAGADAFLMPSLFEPCGLNQMYSQRYGTPPIVRATGGLADSVDDYDAAAEHATGFAFVEPTAAALVATVERALAVWQDRPAWQRLCRSAMGRDFSWTASAHRYRYLYDLMTGRSSPRPGRAAKAGSQPAAPVPGHGADSATLREHVLQAGRSVDAPPLAERRRGRREQPGGAGGDDSAAHVATRAK

SEQ ID NO: 52424 - DNA, 1479 bp, Magnetospirillum magnetotacticum MS-1
  CDS (1)..(1479): transl_table=11
atgcgcgttctcttcgtttcctccgaggtgtttcccctggtcaagaccggggggcttgccgatgtgtcgggggccttgcccgccgccctgaccgagtcgggggaggacgtcaaaatcctgctgcccggctatcccgaggccatcaaggcttcgggcgccaagaagtccgtcgggtctctgggcgatccgttcggcctgggggccgaggtgcaactgctgtcgggcaagctgcccgatagcggcgttcccgtctggctggtggattgtcccgctctgttcgagcgtgatggtggcccctatcaggatttgcagggccgtgactggcccgataacgcgctgcgctttgccttgctgtcgtggacggcggcccatctgtgtaccgagcatagcccggtgaaatggcgtccccaggtgctgcacgccaatgactggcaggcgggactggcggcggcctatctgcaggcctggaatgtggcgcagcgcccggcgacggtgttcaccatccacaatatcgcctatcaaggccagtttccgcccgagatggtggcgcgcctgggctttccgcccgagatgtatgccatggaggggttcgagtattacgacacgctctccttcctcaaggccgggctgttctattccgatcgcatcaccacggtcagcccgcgttacgccaaggaaattcagactccggcctttggctgcggcatggatgggctgttgtcctatcgcgccgccgatctgaccggcatcctgaatggcgccgattatcaggtgtggaatcctgccacggatccccatctggatcatcccttcgcccccggcgatgcggcgggcaaggcgcgcaacaaggcggcgcttcaggcggaactggggctggcccaggacccggatgcgcccttgatggtcatcgtcagccgcctcaacgatcacaagggcatggatctggttctcgccgccctgcccaatattctgcgcctgggcgcccaggtggcggtcgtcgggaccggcgatcgtccgctggaggacgggttccgcgccgcggcggccgcccatcccgctcaggtggcggcgcgcatcggctattccgagcccctggcccatcgcatgatggcgggcggcgacatgctcttgatgccgtcgcgcttcgagccctgcggcctgacccagttctacgcgttccgttacggcacggtgccggtggcccatgccacgggcgggctggccgataccctggtggatacgggttacgataccctgatgaccggcaaggccaacggcttcgtcttcgagcattgcaatgccggggccttccagtgggcggtagagcgcgccgtggggctttacgccaagaaggatcagtggacccgcatcgtcaaggcttgcaacgcccaggatttcggatggagccgttcggcggctttgtaccgcgagctctataaatcgctggccgggaacggcaaggggaagaagaaggcatga

SEQ ID NO: 52425 - protein, 492 aa, Magnetospirillum magnetotacticum MS-1
MRVLFVSSEVFPLVKTGGLADVSGALPAALTESGEDVKILLPGYPEAIKASGAKKSVGSLGDPFGLGAEVQLLSGKLPDSGVPVWLVDCPALFERDGGPYQDLQGRDWPDNALRFALLSWTAAHLCTEHSPVKWRPQVLHANDWQAGLAAAYLQAWNVAQRPATVFTIHNIAYQGQFPPEMVARLGFPPEMYAMEGFEYYDTLSFLKAGLFYSDRITTVSPRYAKEIQTPAFGCGMDGLLSYRAADLTGILNGADYQVWNPATDPHLDHPFAPGDAAGKARNKAALQAELGLAQDPDAPLMVIVSRLNDHKGMDLVLAALPNILRLGAQVAVVGTGDRPLEDGFRAAAAAHPAQVAARIGYSEPLAHRMMAGGDMLLMPSRFEPCGLTQFYAFRYGTVPVAHATGGLADTLVDTGYDTLMTGKANGFVFEHCNAGAFQWAVERAVGLYAKKDQWTRIVKACNAQDFGWSRSAALYRELYKSLAGNGKGKKKA

SEQ ID NO: 52426 - DNA, 1440 bp, Nostoc punctiforme PCC 73102
  CDS (1)..(1440): transl_table=11
atgcggattctatttgttgcagcagaagcagcacccattgcgaaagtaggaggaatgggtgatgttgttggggcattacccaaatttctgagagaaatggggcatgatgtgcggatattcttgccttactatggcttcctgccagacaaaatggaaattcccaaagaacccatctggcgggggtctgccatgttccaggaatttgctgtttatgaaagcgttctgcctggtactgatgttcccttgtacttatttggacatcccgtcttcctacctcgccgcatttattctggagatgatgaagactggcggttcactttcttttccaatggtgcagccgagtttgcctggaattactggaaaccagacattatccattgtcatgactggcatacgggaatgattcctgtatggatgcaccaagatccagatatcaccacagtgtttaccattcataacctggcttatcaagggccctggcgttggtatttagaaaaaattacttggtgtccttggtatatgcaaggacacaacacaatggccgcagcagtgcaatttgccaataaggtaaatacagtttcgcccacttatgccgagcaaatcaagacacctgcttatggtgaaaccttagaaggtttgctgtcttttattagcggtaagttatccgggattatcaacgggattgatactgaagtttataatcccgaagatgacaaatatattgctcaaaccttcactactgagactttagataaacgcaaagctaacaaaattgctttgcaagaagaagtaggattagaagtcaattctaaagcctttttaattggaattgttacccgattagtggaacaaaaaggtattgatttgatcttgcaaatcctcgatcgcttcctatcttatacagatgcacagtttgttttattgggaacaggcgatcgctactatgaaactcagatgtggcaattagcatctcgttttcccggacgcatggcaacttacttactgtataacgatgccctgtctcgccgcatctatgctggtactgatgccttcttgatgcctagtcgttttgaaccatgcggtattagccaaatgatgtctttgcgctacggttctgtacctattgttcgccgcacaggtggattagttgacaccgtaagccatcacgaccccgaaaatgccgcaggcaccggttattgctttgaccgctatgaaccgctagaccttttcacttgtatgatccgagcttgggaaggcttccgtttcaaaccgcaatggcaagaactacaaaaacggggcatgagtgaagattttagttggtataaatctgctaaagagtacgtcaagttgtacaggtcaatttacggtttgccagaagaagaggagacaccaaaaccagagttagtcttaaacgaagcagttaccaatagcaagtcctaa

SEQ ID NO: 52427 - protein, 479 aa, Nostoc punctiforme PCC 73102
MRILFVAAEAAPIAKVGGMGDVVGALPKFLREMGHDVRIFLPYYGFLPDKMEIPKEPIWRGSAMFQEFAVYESVLPGTDVPLYLFGHPVFLPRRIYSGDDEDWRFTFFSNGAAEFAWNYWKPDIIHCHDWHTGMIPVWMHQDPDITTVFTIHNLAYQGPWRWYLEKITWCPWYMQGHNTMAAAVQFANKVNTVSPTYAEQIKTPAYGETLEGLLSFISGKLSGIINGIDTEVYNPEDDKYIAQTFTTETLDKRKANKIALQEEVGLEVNSKAFLIGIVTRLVEQKGIDLILQILDRFLSYTDAQFVLLGTGDRYYETQMWQLASRFPGRMATYLLYNDALSRRIYAGTDAFLMPSRFEPCGISQMMSLRYGSVPIVRRTGGLVDTVSHHDPENAAGTGYCFDRYEPLDLFTCMIRAWEGFRFKPQWQELQKRGMSEDFSWYKSAKEYVKLYRSIYGLPEEEETPKPELVLNEAVTNSKS

SEQ ID NO: 52428 - DNA, 1437 bp, Actinobacillus pleuropneumoniae serovar 1 str. 4074
  CDS (1)..(1437): transl_table=11
atgaaaattttacatatctgttcggaaatgtatcctttgatcaaaacaggcggcttggctgatgtgatgggagcacttccttacgcgcaacaacaatcgggcaatgacgtcagagttctgattccgttatatcctcaagtggcggaaaaaattggcgaaaccaatgaagtggcgaccatcggtacttttgccggtttagtgaccattcgttttacttattttaacggactcggcgtttatgtgattgatgcgccgcatttattccagcgttcgggtaatccttatcatgattcgggttatgcggattatccggataattataaacgttttgcacttttaggttatttaggtgcgcagctttcggaaggattggatcaatggtggggtaaggcggatatcttgcatgcgcatgattggcagggcggtttagcttgtgcttaccttaaaagttggaatagtccggtaaaaagcgtatttactattcataatatcgcttatccgggacgtttccattcttaccacttacatgagctcggtttaccttggcatttcttccaagcggaaggtttagagttttacggtgaaatttcttatcttaaagccggtttatattttgcggataaaattacaacggtaagtccgacttacgcattggaaattaccgaagaaattgccggtggcggtatgcacggtttattacaaactcgcaaagcgcaaggtcgattacacggggtgttaaacggcgtggacgatacggtgtggaatccggaaaccgacacgaatatcgttgcaacctataagccgagttatatgcaaggtaaatcgaagaataaagcggaattacaacaaatgttccacttaccggaagataaagatgcgatgcttatggtgatggttacccgtttaaccgagcaaaaaggtgcggattttattctggatcgtatcgatgaattaatggaagaacgtgttcaattagtcgttttaggaagcggctcgcctcatttggaatatttattgaatgaagcgcgtagtcgtcatccggaacaaatcggtatttacatcggctataatgaagcgctttctcatcaaattattgccggcggggacgttattttagtgccgagccgttttgaaccttgcggattaacccagttatacggtttaaaatacggtacgcttcctttagtgcgtcgtaccggcggattggccgatacggtggtggatagtaataaagaaagtattgaacaacgtactgcaacggggtttgtgtttaattatccgagcagtgacgatttccttgaggctttccgacgagcggtcaatttatggaagaaaaataaattatggtcaagcgttcgtcaaaatgcattggctcaagatttcggctgggcgagagcggcggcttcatatcaggcgatttatcaagaaatcgtataa

SEQ ID NO: 52429 - protein, 478 aa, Actinobacillus pleuropneumoniae serovar 1 str. 4074
MKILHICSEMYPLIKTGGLADVMGALPYAQQQSGNDVRVLIPLYPQVAEKIGETNEVATIGTFAGLVTIRFTYFNGLGVYVIDAPHLFQRSGNPYHDSGYADYPDNYKRFALLGYLGAQLSEGLDQWWGKADILHAHDWQGGLACAYLKSWNSPVKSVFTIHNIAYPGRFHSYHLHELGLPWHFFQAEGLEFYGEISYLKAGLYFADKITTVSPTYALEITEEIAGGGMHGLLQTRKAQGRLHGVLNGVDDTVWNPETDTNIVATYKPSYMQGKSKNKAELQQMFHLPEDKDAMLMVMVTRLTEQKGADFILDRIDELMEERVQLVVLGSGSPHLEYLLNEARSRHPEQIGIYIGYNEALSHQIIAGGDVILVPSRFEPCGLTQLYGLKYGTLPLVRRTGGLADTVVDSNKESIEQRTATGFVFNYPSSDDFLEAFRRAVNLWKKNKLWSSVRQNALAQDFGWARAAASYQAIYQEIV

SEQ ID NO: 52430 - DNA, 1386 bp, Fusobacterium nucleatum subsp. vincentii ATCC 49256
  CDS (1)..(1386): transl_table=11
atgaaagttctttttgcaacaggagaagcttttccatttgtaaaaacaggaggattgggagatgtatcttattctcttccaaaagccttagtacaaaaggaaaaggttgatgttagggttattttacctaaatatagtaaaatttcaaaagatttattaaaagatgctaaacacttaggtcacaaagaaatctgggttgcacatcataatgagtatgttggaattgaagaagttgaattagaaggagttatttactatttagtagataatgaaagatattttaaaagacctaatgtttatggtgaatttgatgactgtgaaagatttttatttttctgtaaagcagtagttgaaaccatggatattacaggttttaaaccagatattatccattgtaatgactggcaaactgcccttataccaatatatctgaaagaaagaggaatatatgatataaaaactatttttactattcataatcttagatttcaaggatttttctttaataatgttatagaagatttattagaaattgatagagcaaaatacttccaagaagatggtttaaaatattatgatatgatttctttcttaaaaggtggagttgtttattctgattatgttacaacagtgagtgatagttatgcagaagaaataaaaacatcagaacttggtgagggtatacatggactatttcaaaaatatgattatagattgtcaggtatagttaatggaatagataagtcttcatatccattatttaaaaaatctcataaaacattaaaggctgatttacaaaaaaaattaggtctaaatgtggaagaaaatacacctatggttgctattataactcgtttagatagacaaaaaggcttggattatattgttgagaaatttgatgaaatgatgagcttaggtatacaatttgttcttttaggaacaggtgaaaaacgctatgaacatttctttgcttatcaagaatatctacacaaaggtagtgtatgttcatatattggttttaatcaacaactatctactgaaatttatgcaggagcagatatatttttaatgccatcagtttttgaaccttgtggactttctcaaatgatagcgatgagatatggttgtatacctgttgttagagaaacagggggtttaaaagatactgtaaaaccatataatgagtatacaggtgaaggagatggctttggttttagacaagctaatgctgatgatatgataaaaactttaagatatgctattaaaatgtatcatagaactaatgtatggcaagaaattattaagaatgctaagaaaagagataactcttgggataaaccagcaaagagatataaggaattataccaaaggttgatagaggggtaa

SEQ ID NO: 52431 - protein, 461 aa, Fusobacterium nucleatum subsp. vincentii ATCC 49256
MKVLFATGEAFPFVKTGGLGDVSYSLPKALVQKEKVDVRVILPKYSKISKDLLKDAKHLGHKEIWVAHHNEYVGIEEVELEGVIYYLVDNERYFKRPNVYGEFDDCERFLFFCKAVVETMDITGFKPDIIHCNDWQTALIPIYLKERGIYDIKTIFTIHNLRFQGFFFNNVIEDLLEIDRAKYFQEDGLKYYDMISFLKGGVVYSDYVTTVSDSYAEEIKTSELGEGIHGLFQKYDYRLSGIVNGIDKSSYPLFKKSHKTLKADLQKKLGLNVEENTPMVAIITRLDRQKGLDYIVEKFDEMMSLGIQFVLLGTGEKRYEHFFAYQEYLHKGSVCSYIGFNQQLSTEIYAGADIFLMPSVFEPCGLSQMIAMRYGCIPVVRETGGLKDTVKPYNEYTGEGDGFGFRQANADDMIKTLRYAIKMYHRTNVWQEIIKNAKKRDNSWDKPAKRYKELYQRLIEG

SEQ ID NO: 52432 - DNA, 1776 bp, Crocosphaera watsonii WH 8501
  CDS (1)..(1776): transl_table=11
atgcgaattttatttgtaggggcagaagtagctccgttggccaaagctgggggaatgggggacgtacttggagccttaccaaaagttttacatcaattaggctatgatgtccgcattatcatgccttattacggatttctcgacgataaaatagaagtcccctcagaaccaatctggcattcccatgccatgtcccaggatttttcggtgtatcaaaccacccttcccaagagtaatgttcccctttacttactgaaacaccatagctttgctccacgccgtatttatggggatgatgaatattggcggtttaccttcttttctaatgcagcagcagaattcgcttggaattgctggaaaccggacataatccattgtcatgactggcatacaggtatgattcctgtgtggatgcaccaaacaccagatattaccactgttttcaccatccacaatttagcttatcaagggcctggccgtggttttctggaacataatacttggtgtcctgggtatatggatggagataattctctggtggcaggaataaaatttgcaggtcggatcaccaccgtttctccaacctacgccgaacaaatccaaactccagcttatggagaaagactcgatggcttattgtctaactttaaccataacttagtaggaattctcaacggcattgacatggaattgtacaatcctgctgaggatcaatttatccatcaaacctttactccttataccctagaagaccgtaaggccaataaaattggtcttcagcaagaaactggactagagattgaggaaggtgcctttttgatgggtatggtgactcgtttagtagaacaaaaagggcttgatttagttcttcaaatgttagaccgttttctggttcataccgatgcccaattggtggttttgggcagtggggatcattattatgagaatcagttatggcaattagcggctcgttatcccggccgtgtatcggtacaaattctttataacgatgtcttatcccgccgtatttttgccggagcagatgtctttttgatgccttcgcgttttgaaccctgtggcatcagtcaactgtttgccatgcgttatggttgtgttcctatcgttcgaagcacggggggattgaaagatacagtgagtttttatgatcccatgaacgaagaaggaaccggttattgttttgatcattatgatcccttggagttattattctgcatgattcgtgcttgggaaggatttcgctttaaagacgattggatgaaactgcaacaacgatgtatgacccaagattttagttggtatggctctgcggctgaatatatcaaaatttataaggagttaaccggacaacctggagagttaacctccgaagaagaagataaaataagctttttaattcaaaagaatatttcctgggatcttaatggcaagggaaatatagatgaaaatattggagaagataacactgaaaaagaatccactgaaacccagacagttatccaagaagaaagcacaacagttgaagacgaacaaacccaagaatctacagccccaactgattcttcaaccattacgagccaagcagtagaagttgttactaaccacaatgccccagaaatagaggaatcactatctcaagagagttccacctcaatcataaccacagaaacagaagttcatcaaccaacgagtgatattgaggaagatcaacccaaactaaaaccgcgcccttctatatccagtcctacgggagactaa

SEQ ID NO: 52433 - protein, 591 aa, Crocosphaera watsonii WH 8501
MRILFVGAEVAPLAKAGGMGDVLGALPKVLHQLGYDVRIIMPYYGFLDDKIEVPSEPIWHSHAMSQDFSVYQTTLPKSNVPLYLLKHHSFAPRRIYGDDEYWRFTFFSNAAAEFAWNCWKPDIIHCHDWHTGMIPVWMHQTPDITTVFTIHNLAYQGPGRGFLEHNTWCPGYMDGDNSLVAGIKFAGRITTVSPTYAEQIQTPAYGERLDGLLSNFNHNLVGILNGIDMELYNPAEDQFIHQTFTPYTLEDRKANKIGLQQETGLEIEEGAFLMGMVTRLVEQKGLDLVLQMLDRFLVHTDAQLVVLGSGDHYYENQLWQLAARYPGRVSVQILYNDVLSRRIFAGADVFLMPSRFEPCGISQLFAMRYGCVPIVRSTGGLKDTVSFYDPMNEEGTGYCFDHYDPLELLFCMIRAWEGFRFKDDWMKLQQRCMTQDFSWYGSAAEYIKIYKELTGQPGELTSEEEDKISFLIQKNISWDLNGKGNIDENIGEDNTEKESTETQTVIQEESTTVEDEQTQESTAPTDSSTITSQAVEVVTNHNAPEIEESLSQESSTSIITTETEVHQPTSDIEEDQPKLKPRPSISSPTGD

SEQ ID NO: 52434 - DNA, 1452 bp, Exiguobacterium sibiricum 255-15
  CDS (1)..(1452): transl_table=11
atgaaggtatggtttgctgccacagaagcgacaccattcatcaagacaggggggctagctgacgtcgtcggctcgctccctttagcgcttgctgaagagggtgcggaagtttcggtcattttaccaaactacggtcaaattaaagaacaatacaaactggaaatggaatttttatttgatttcatcgttccggtcggatggcgtcagcagtttggagcagtcttgcgtctaaaacaagatggcgtcacgttttatttcatcgacaatgaatattacttcaagcgtgatggggtcatttacggacattatgacgatgcggagcgttttgcctatttctcaagagccgtccttgaaatgattcagcgtgtcgacgcagaagaagtcccggatgtcattcactgtcacgattggcagacaggtgtcctgccggccttcctgcggattcattaccagcacctcaaccggtatcaggaaatcaaaacggtctttacgatccataacctgcaatatcagggggtgttcccggaagaagtacttggcgacctgctcgggctcagccatgaacactttacggcagaaggtatcgcccataacggactcgttaactacatgaaggcaggacttgtccatgccaaccaaattacgaccgtcagtccgtcttaccgcgatgaaatcatggatccatactacggcgaaacactcgaacccgtcttgcaacaccgtgccgtcgatgtccgggggattttgaacggcatcgattaccggcagttcagtccggagacggatgaacatctggtagagaactatgatgtgaagacggttgaagaaggaaaagcagccaataaggcagccttacaacaggaacttggcttaccggtcaatccggatgttccgttattcggctttgtctcgcgccttgtcgaccaaaaagggatcgatttactcgcccatatcttgccggatctgtttgaactcgatgcccagttcatcattttgggttcgggagaggcggagtacgaagggttgttccagcatgcttcaacaattcgtccggataaggtagcttcctacatcggttttgatgtcggactcgctcaacggatttacgccggaagtgacgccttcttgatgccgtcacgtttcgaaccgtgtggtctcagtcaattgatctcgatgaagtacggttcattgccgatcgtccgcgaaaccggcggcttgcgtgatacggttcaaccatttaatcagttcactttagagggaaacggcttctcgttctcgaattataatgcgcaagagttccttgatgccattaaacggacgattgagacgtatcatgataaacctgtattcaagcatctgattgagacagcaatgcaagaagactttagctggattcgatccgctgatgaatatttggcgctctatcgtttaatcgcaccgtctgctgactga

SEQ ID NO: 52435 - protein, 483 aa, Exiguobacterium sibiricum 255-15
MKVWFAATEATPFIKTGGLADVVGSLPLALAEEGAEVSVILPNYGQIKEQYKLEMEFLFDFIVPVGWRQQFGAVLRLKQDGVTFYFIDNEYYFKRDGVIYGHYDDAERFAYFSRAVLEMIQRVDAEEVPDVIHCHDWQTGVLPAFLRIHYQHLNRYQEIKTVFTIHNLQYQGVFPEEVLGDLLGLSHEHFTAEGIAHNGLVNYMKAGLVHANQITTVSPSYRDEIMDPYYGETLEPVLQHRAVDVRGILNGIDYRQFSPETDEHLVENYDVKTVEEGKAANKAALQQELGLPVNPDVPLFGFVSRLVDQKGIDLLAHILPDLFELDAQFIILGSGEAEYEGLFQHASTIRPDKVASYIGFDVGLAQRIYAGSDAFLMPSRFEPCGLSQLISMKYGSLPIVRETGGLRDTVQPFNQFTLEGNGFSFSNYNAQEFLDAIKRTIETYHDKPVFKHLIETAMQEDFSWIRSADEYLALYRLIAPSAD

SEQ ID NO: 52436 - DNA, 1446 bp, Streptococcus suis 89/1591
  CDS (1)..(1446): transl_table=11
atgacaaaaaaatctgttctctttgtagcatctgaaggacttccattcatcaagactggtggtttggccgatgtaatcggttccttacctaaagaattggtaaaacaggggttggacgtccgagtggtacttcctctctataagaaaattgctatcaataaccatgctgatttcgattacgtatcaagttttgatgtgcgggctggcgacatccaatctatggcaaatgtttacagtcaggttgttgatggagtaacattctattttattgagcaccgcgatttctttgaacgcgatgaactatatggatatgacgatgatgccatgcgttttggctatttccaacatgctacatgtcgtctgttagaagcacttcatttcttcccggatgtcatgcacacacatgactggcacactgctgcccttccattcctttgccgtactttctatagctaccgcgaagaattctgcaatatcaagcatgtattcactattcataacttggcttttcagggaattttccacaaacaagcactttggtcagcgcttggcatggactatagctactatttggatggtattgcacgttttcatgatgaatgtatcagcttcatgaagcttggtatcctatacgctgacaaggttactacagtttctgaaacttatgctcgcgaaatcctaacggaagaattcggcgaaaacatgcagcatgtactagagttgcgcaaatatgacttggttggtattgtcaatggtatcgactatgacagttgggatagtcaaacagatcagtaccttgtgagaaattatagtcttgaaacgattgaaagtaaaaaggctaataaactggccctgcaagcacaatttgctcttccacaagatgagaatgtcctattgataggtatcgtctctcgtttgacatggcaaaaagggttctacctcttgaccgaggtacttggccatcttcttcaagcccatgtccaatttgttatcttaggcaatggtgaggaagacattgaaaatgcctttaatcactttaaacatgcttatcctgataaatttgcattctaccgtggttacaatgaaccacttgcccatcaaatttatgcagcaagtgatctcttcctcatgccttctatgtttgaaccatgcggcattagccagttgatttcaatgcaatacggaacactccctctagtgcgtgaaacaggtggcttggttgatactgtagcaccatacaatatgtctaccaaagaaggaactggttttagctttggagggcgtgacgcttacaatatgcgacaagtctatgatttagcccttcaaacctactatgaccgtcccgatgactggtatgccatggttgaacaagctatgaagcgtgatttcagttggacagcttcggcagagaaatacatctggctataccgggaaattagtggttag

SEQ ID NO: 52437 - protein, 481 aa, Streptococcus suis 89/1591
MTKKSVLFVASEGLPFIKTGGLADVIGSLPKELVKQGLDVRVVLPLYKKIAINNHADFDYVSSFDVRAGDIQSMANVYSQVVDGVTFYFIEHRDFFERDELYGYDDDAMRFGYFQHATCRLLEALHFFPDVMHTHDWHTAALPFLCRTFYSYREEFCNIKHVFTIHNLAFQGIFHKQALWSALGMDYSYYLDGIARFHDECISFMKLGILYADKVTTVSETYAREILTEEFGENMQHVLELRKYDLVGIVNGIDYDSWDSQTDQYLVRNYSLETIESKKANKLALQAQFALPQDENVLLIGIVSRLTWQKGFYLLTEVLGHLLQAHVQFVILGNGEEDIENAFNHFKHAYPDKFAFYRGYNEPLAHQIYAASDLFLMPSMFEPCGISQLISMQYGTLPLVRETGGLVDTVAPYNMSTKEGTGFSFGGRDAYNMRQVYDLALQTYYDRPDDWYAMVEQAMKRDFSWTASAEKYIWLYREISG

SEQ ID NO: 52438 - DNA, 1473 bp, Prochlorococcus marinus str. MIT 9211
  CDS (1)..(1473): transl_table=11
atgcgcgttcttttcgctgctgccgaatgcgccccgatggttaaggtcggcggcatgggagatgttgtctcttctttgccaccagcactggcaaaacttggccatgatgttcgattgattatcccaggctatgggaagctatggagcttattagatataccaagcgaaccaatatttcgagcgcaagcaatgggctcagattttgcagtttatgaaactagacatcctatttcttcactccctttatatcttgtaggtcatcctgcttttgacccagagagaatttatggtggagatgacgaagattggagatttactttctttgcaagtgccactgcagaatttgcctggaattcatggaaacctcaagttcttcattgtcatgattggcatacaggcatgatccctgtgtggatgcatcaagaccccgagataagcactgtatttacgatacataaccttaaatatcaaggtccctggcgctggaagttggagagaatgacttggtgcccttggtatatgcaaggagaccacacaatggctgtcgccatgctttatgcagatagagttaatgcagtttctcctacctacgcaaaagaaatttgtacttcagaatatggagagaaattagacggtttacttaattatatttctggcaaattaagaggcattcttaatggaattgatctagatgattggaaccctgaaactgataaagctttaccggctaatttcagcgcttcgaatattttaggtcgaaggaaaaataaagctgcccttcaatcccaaatgggacttgatgttaaaccgaatagttacttgcttggtatggttggcaggcttgttgaccagaaaggtgttgacttacttcttcaggttgccaggagattacttgcttacaccgactcacagatagttgttctggggactggagaatccgctttggaatcagccctttggcagcttgctactgaatatccaggccgattcgcagttttcttaacatacgatgactatctgtcacgcctgatttatgcagggacagatgctttccttatgcccagtaggtttgagccttgtggcataagtcaactgttggcaatgcggtatgggtcgattcctgtagtgagaaatgtaggtgggttagtagacacagtttcacctcatgaccctagtaaacagactggaacagggttttgctttgatcggtttgagccaatagatttttatactgccttagttagatcttgggaggcatatcggcatcgtagaagttggcgtagattacaaattagagctatgacccaaacttacagctgggacagatctgcttatgaatatgaaaacatgtacaaagatgtatgtggtgtcaaggaaccttcccccgatgcagaggaggttgagaagttttcagtaggccaagatgccgatccttctctaaaaaaagctgtagtaagtgatagtgagaaataa

SEQ ID NO: 52439 - protein, 490 aa, Prochlorococcus marinus str. MIT 9211
MRVLFAAAECAPMVKVGGMGDVVSSLPPALAKLGHDVRLIIPGYGKLWSLLDIPSEPIFRAQAMGSDFAVYETRHPISSLPLYLVGHPAFDPERIYGGDDEDWRFTFFASATAEFAWNSWKPQVLHCHDWHTGMIPVWMHQDPEISTVFTIHNLKYQGPWRWKLERMTWCPWYMQGDHTMAVAMLYADRVNAVSPTYAKEICTSEYGEKLDGLLNYISGKLRGILNGIDLDDWNPETDKALPANFSASNILGRRKNKAALQSQMGLDVKPNSYLLGMVGRLVDQKGVDLLLQVARRLLAYTDSQIVVLGTGESALESALWQLATEYPGRFAVFLTYDDYLSRLIYAGTDAFLMPSRFEPCGISQLLAMRYGSIPVVRNVGGLVDTVSPHDPSKQTGTGFCFDRFEPIDFYTALVRSWEAYRHRRSWRRLQIRAMTQTYSWDRSAYEYENMYKDVCGVKEPSPDAEEVEKFSVGQDADPSLKKAVVSDSEK

SEQ ID NO: 52440 - DNA, 1578 bp, Synechococcus sp. RS9917
  CDS (1)..(1578): transl_table=11
atgcgcatcctgttcgctgctgccgagtgcgccccgatggtcaaggtgggtggcatgggcgatgtggtggggtccctgccgccggccctggcaaagctcggccacgatgtgcgcctgatcatgccgggctacggcaagctctggagccgtctgcagatccccgacgagccgatctggcgggcccagaccatgggcaccgagtttgccgtgttcgaaacacgccatcccagcaacggcatgaccatctatctggtgggtcatccggtgtttgatccggaacggatctacggcggtgaagacgaagactggcgcttcaccttcttcgccagcgcggcggcagagttcgcctggaatgtgtggaagccccaggtgctgcactgccatgactggcatacgggcatgattccggtgtggatgcatcaagaccctgagatcagcacggtcttcacgatccacaacctcaaataccagggcccctggcgctggaagctcgatcggatgacctggtgcccctggtacatgcagggagatcacacgatggcggcggcgctgctgtacgccgatcgggtcaacgccgtgtcgcctacctatgccagtgagatccgcacggccgaatatggcgaacaactggagggcctgctcaattacatctcgggcaagctgcgcggcatcctcaatggcctcgatctggaggcctgggatccagccaccgaccgcaccctgccggccaacttcagtgccgacgacctctccggtcgggccgagaacaagcgggtgctgcaggagcggatggggctgacgctcaatcccgacaccttcctgctcggcatggtgagtcggctggtggatcagaagggcgtggatctgctgctgcaggtggccgaccggctgctcgcttacaccgacacccagatcgtggtgctcggcaccggcgatcgggggctggaatccgggctctggcagctggcctcgcgccatcccggccgggtcgccgtgttcctcacctacgacgatgccctgtcgcggttgatctacgccggcagtgacgccttcctgatgccgagccgcttcgagccctgtggaatcagtcagctgatggcgatgcgctacggctgcgtgccggtggtgcgcaaggtgggtggcctggtcgacacggtgccgccccacgatcccgcccaccacagcggcacgggattctgtttcgatcgcttcgaaccggtcgatttctacaccgccctggtgcgggcctgggaggcctaccgccatcaggagagctggcgggagctgcagctgcgcggcatggggcaggactacagctgggatcgctccgccctcgcctacgaccagatgtaccgcgatgtctgtggtctcaaggagccgagtccggatgcggcggccgtggaacggttctcccagggccaggacgccgatcccagccggatggacccctcagcacttcagcctgcggaggagcatcaggtggctgtcgagcccaccccttcagcgccaggccctgcggctgctccggtgcaacggcgcaatcccctggctcgcctgctcggccgctcccgctcctga

SEQ ID NO: 52441 - protein, 525 aa, Synechococcus sp. RS9917
MRILFAAAECAPMVKVGGMGDVVGSLPPALAKLGHDVRLIMPGYGKLWSRLQIPDEPIWRAQTMGTEFAVFETRHPSNGMTIYLVGHPVFDPERIYGGEDEDWRFTFFASAAAEFAWNVWKPQVLHCHDWHTGMIPVWMHQDPEISTVFTIHNLKYQGPWRWKLDRMTWCPWYMQGDHTMAAALLYADRVNAVSPTYASEIRTAEYGEQLEGLLNYISGKLRGILNGLDLEAWDPATDRTLPANFSADDLSGRAENKRVLQERMGLTLNPDTFLLGMVSRLVDQKGVDLLLQVADRLLAYTDTQIVVLGTGDRGLESGLWQLASRHPGRVAVFLTYDDALSRLIYAGSDAFLMPSRFEPCGISQLMAMRYGCVPVVRKVGGLVDTVPPHDPAHHSGTGFCFDRFEPVDFYTALVRAWEAYRHQESWRELQLRGMGQDYSWDRSALAYDQMYRDVCGLKEPSPDAAAVERFSQGQDADPSRMDPSALQPAEEHQVAVEPTPSAPGPAAAPVQRRNPLARLLGRSRS

SEQ ID NO: 52442 - DNA, 1539 bp, Synechococcus sp. WH 5701
  CDS (1)..(1539): transl_table=11
atgcgcgtgttgttcgccgccgccgagtgcgccccgatgatcaaggtggggggcatgggcgatgtggtggggtctctgccgccagcggtggcggccctcggccacgacgtgcgcacgatcatgccgggctacggcaagctctggagccgcctggagatccccagcgaacccgtctggcgcggccgggcgatgggcaacgacttcgccgtctatgaaacccggcatcccacccatgggttgccgctctatctggtcggacatccggtgttcgatccggagcgcatctacggcggagaagatgaggattggcgcttcacgttctttgccaacgccgccgccgaattcgcctggaaccactggaagccggaggtctttcactgccatgactggcacaccggcatgatcccggtctggatgcaccaggaccccgagatcagcacagtcttcaccatccacaacctcgaatatcagggcccctggcgctggaaactcgagcgcatgacctggattccctggtacatgcagggggatcacaccatggccgccgctctgctctatgccgatcgggtcaacgccgtctcccccacctatgcccaggaaatccgcacgcccgaatacggcgaacgcctcgatggcctgctgaattacatcagcggaaaattgcgcggcatcctcaacggcatcgacaccgaagcctggaaccccgccaccgacagcctgctgcccgcctgctacagcgccaccgacatggctccgagggccaccaacaagcgggtgctacaggagcgcatggggctgggggtcaatgccgacacctatctgatggggatggtgagccgactggtggatcagaagggtgtggatctgctgctgcaggtggccgaccgggtcctggcctattccgacagccagatcgtggtgctgggaacaggcgaccgcaactatgaatcgggcctctggcagatggccgcccgtcatcccggccgcttctccgtgttcctcacctacgacgatgccctggcgcggttgatctatgccggcgccgatgccttcctgatgcccagccgcttcgagccctgcggcatcagccagatgctggcgatgcgctacggctgcatcccgatcgtgcgcaaggtgggcggcctggtcgacaccgtccagccccatgtgcccgccgaccacagcggcacgggcttctgcttcgatcgttatgagccggtcgacttctacaccgcgatcgtgcgctcctgggaggcctatcgccacagccacagctggcgggagctgcagttgcgcgccatggcggtggaccacagctggacccgctcggcgctcgactacgacgccatgtaccgcgatgtgcgtggggtcaaacaacccactccctcggccgccgatgtggagcaattctccctcggtcaggaggccgaccccagcctcggccaggccggtgaggccacggcccagccccccaggccggaaggcggcggcggtccccgcaatcccctctccgtccttctgcgccgcggccagggctga

SEQ ID NO: 52443 - protein, 512 aa, Synechococcus sp. WH 5701
MRVLFAAAECAPMIKVGGMGDVVGSLPPAVAALGHDVRTIMPGYGKLWSRLEIPSEPVWRGRAMGNDFAVYETRHPTHGLPLYLVGHPVFDPERIYGGEDEDWRFTFFANAAAEFAWNHWKPEVFHCHDWHTGMIPVWMHQDPEISTVFTIHNLEYQGPWRWKLERMTWIPWYMQGDHTMAAALLYADRVNAVSPTYAQEIRTPEYGERLDGLLNYISGKLRGILNGIDTEAWNPATDSLLPACYSATDMAPRATNKRVLQERMGLGVNADTYLMGMVSRLVDQKGVDLLLQVADRVLAYSDSQIVVLGTGDRNYESGLWQMAARHPGRFSVFLTYDDALARLIYAGADAFLMPSRFEPCGISQMLAMRYGCIPIVRKVGGLVDTVQPHVPADHSGTGFCFDRYEPVDFYTAIVRSWEAYRHSHSWRELQLRAMAVDHSWTRSALDYDAMYRDVRGVKQPTPSAADVEQFSLGQEADPSLGQAGEATAQPPRPEGGGGPRNPLSVLLRRGQG

SEQ ID NO: 52444 - DNA, 1575 bp, Synechococcus sp. WH 7805
  CDS (1)..(1575): transl_table=11
atgcgcgtgctctttgctgccgctgaatgtgcaccgatggtgaaggtgggcggcatgggcgatgtggtcggctcacttccgcccgccctggcggagcttggtcacgatgtgcgtctgatcttgcccggctacggcaagctctggagctctctggatatccctgcagaaccgatctggcgggcccagaccatgggcacggaatttgctgtctttgagacacgacacccgacgaatggtttgccgctctacctcgtgggtcaccccgttttcgatcccgagcggatctatggcggcgaagacgaagactggcggttcaccttctttgccagcgcgacggcggaatttgcctggaatgtttggaagccccaggttcttcactgccacgactggcacaccggcatgattccggtgtggatgcatcaggatcctgagatcagcacggtgttcacgatccacaacctcaagtaccagggtccctggcgctggaagctggatcgcatcacctggtgcccctggtacatgcagggagatcacaccatggcggcagcactgctctacgccgaccgggtgaacgctgtgtcgcccacctacgcgcaggaaatccgcacctctgaatacggcgagaagcttgagggcctgctcaattacatctccggcaagctgcgcggcattctcaacggcatcgatctcgaggcctggaatcctgcaacggacaaggctttgcctgcgaccttcagcccctccaattttgctgggaaagccacctgcaagcttttgctgcaggaacggatgggtctggctgtgaaccccgacaccttcctgctgggcatggtgagtcgtctggtggatcaaaagggtgtggatctgctgcttcaggtggccgaccgtcttctggcctacaccgacacgcagattgtcgttttgggaaccggggatcgtgggctggagtccggcctttggcaactcgcttcacgccatccaggtcgcgttgcggtgttcctcacctatgacgacgccctgtcgcgtttgatctacgcaggcagtgatgccttcctgatgcccagccgctttgaaccctgcggtatcagccagctctatgccatgcgctacggcagcgtgcctgtggtgcgcaaggtgggtggcttggtcgacaccgttccgccccacgatccccgccacaagaccgggacgggcttctgctttgaccggttcgaacctgtggatttctacaccgctttggttcgggcttgggaggccttccgccatcaggagagttggacggagcttcagcggcgggggatggagcaggactacagctgggcccgttcagcactggagtacgacctcatgtaccgcgacgtctgcggtctcaaggagcccagtcctgatgccgctgcggtggagcagttctcccagggtcaggaggccgatccctcccgtcacggtgcagcccctccggctctctcctcctccgacgatggcccgatcgagaacagcgagtcgtccggttcttcaaggccggtgcgctccagccgcaaccccctcgccaggctgctcggtaaacagcgacgctga

SEQ ID NO: 52445 - protein, 524 aa, Synechococcus sp. WH 7805
MRVLFAAAECAPMVKVGGMGDVVGSLPPALAELGHDVRLILPGYGKLWSSLDIPAEPIWRAQTMGTEFAVFETRHPTNGLPLYLVGHPVFDPERIYGGEDEDWRFTFFASATAEFAWNVWKPQVLHCHDWHTGMIPVWMHQDPEISTVFTIHNLKYQGPWRWKLDRITWCPWYMQGDHTMAAALLYADRVNAVSPTYAQEIRTSEYGEKLEGLLNYISGKLRGILNGIDLEAWNPATDKALPATFSPSNFAGKATCKLLLQERMGLAVNPDTFLLGMVSRLVDQKGVDLLLQVADRLLAYTDTQIVVLGTGDRGLESGLWQLASRHPGRVAVFLTYDDALSRLIYAGSDAFLMPSRFEPCGISQLYAMRYGSVPVVRKVGGLVDTVPPHDPRHKTGTGFCFDRFEPVDFYTALVRAWEAFRHQESWTELQRRGMEQDYSWARSALEYDLMYRDVCGLKEPSPDAAAVEQFSQGQEADPSRHGAAPPALSSSDDGPIENSESSGSSRPVRSSRNPLARLLGKQRR

SEQ ID NO: 52446 - DNA, 1521 bp, Synechococcus sp. RS9916
  CDS (1)..(1521): transl_table=11
atgcgcgtgctgtttgctgctgccgagtgcgctccgatggtcaaggtaggtggcatgggcgatgtggtcggctcgctgcctcccgcccttgcggccctgggccacgacgtgcgcttgatcatgcccggctatagccgcctctggagcaagctcgacattccggcagaaccgatctggcgtgcccagaccatgggcaccgagttcgcggtgtacgagacccggcatcccaccaatggcctgcctctgtatctcgtgggccatccggtgtttgatccagagcgcatctacggcggtgaagacgaagactggcggttcaccttttttgcgagcgccacctctgagttcgcatggaatcactggaagccccaggtgctgcattgccacgactggcacaccggcatgatcccggtgtggatgcatcaagaccctgagatcagcacggtcttcaccatccacaacctcaaatatcagggcccctggcgctggaagctggatcgcatcacctggtgcccctggtacatgcagggggatcacaccatggctgcggcgctgctgtatgccgatcgggtgaatgccgtatcgcccacctatgcccaggagatccgcaccgccgaatacggcgaacagctcgatggtctgctcaattacgtctccggcaaactgcgcggcatcttgaacggccttgatctcgaggcctgggatccggccaccgacaaagctctggctgccaatttcagcgccgaggatctttccggtcgtacagccaacaagcgcgagttgcaggagcgcatgggtttgaacgtcaaccccgacaccttcctgctgggcatggtcagccgcctggtggatcagaagggcgttgatttgctgctgcaggtggctgatcgcttgctggcttacaccgacacccagatcgtggtgctgggcaccggcgagcgggggctggaatccggtttgtggcaactggcttcccgtcatcccgggcgggtcgctgtgttcctcacctacgacgacgcgctttcgcgcttgatctatgccggtagtgatgccttcctgatgcccagtcgctttgagccctgcggcatcagtcaattgatggccatgcgctacggctcagtgcccgtggtgcgcaaggtggggggtctggtggacaccgttcctccccacgaccctggccagaacagcggcacgggtttctgcttcgatcgctttgatcccgtcgacttctacacggcgctcgtccgtgcctgggaggcctatcgccatcaggagagctggcgggaactgcaacggcgcggcatgcgtcaggactacagctgggctcgttccgctctggagtacgaccgcatgtaccgcgaggtctgcggcctcaaggagccaggtccagatgcggcggctgttgagcagttctcccgtggtcaagatgccgatccctcgcgtgaggctgcgccagagcaatcgctccctgcttcacccacgcgcaatcccctggcccgactgttgggcaaacaacgccaatga

SEQ ID NO: 52447 - protein, 506 aa, Synechococcus sp. RS9916
MRVLFAAAECAPMVKVGGMGDVVGSLPPALAALGHDVRLIMPGYSRLWSKLDIPAEPIWRAQTMGTEFAVYETRHPTNGLPLYLVGHPVFDPERIYGGEDEDWRFTFFASATSEFAWNHWKPQVLHCHDWHTGMIPVWMHQDPEISTVFTIHNLKYQGPWRWKLDRITWCPWYMQGDHTMAAALLYADRVNAVSPTYAQEIRTAEYGEQLDGLLNYVSGKLRGILNGLDLEAWDPATDKALAANFSAEDLSGRTANKRELQERMGLNVNPDTFLLGMVSRLVDQKGVDLLLQVADRLLAYTDTQIVVLGTGERGLESGLWQLASRHPGRVAVFLTYDDALSRLIYAGSDAFLMPSRFEPCGISQLMAMRYGSVPVVRKVGGLVDTVPPHDPGQNSGTGFCFDRFDPVDFYTALVRAWEAYRHQESWRELQRRGMRQDYSWARSALEYDRMYREVCGLKEPGPDAAAVEQFSRGQDADPSREAAPEQSLPASPTRNPLARLLGKQRQ

SEQ ID NO: 52448 - DNA, 1818 bp, Oryza rufipogon
  CDS (1)..(1818)
atgtcggctctcaccacgtcccagctcgccacctcggccaccggcttcggcatcgccgacaggtcggcgccgtcgtcgctgctccgccacgggttccagggcctcaagccccgcagccccgccggcggcgacgcgacgtcgctcagcgtgacgaccagcgcgcgcgcgacgcccaagcagcagcggtcggtgcagcgtggcagccggaggttcccctccgtcgtcgtgtacgccaccggcgccggcatgaacgtcgtgttcgtcggcgccgagatggccccctggagcaagaccggcggcctcggtgacgtcctcggtggcctcccccctgccatggctgcgaatggccacagggtcatggtgatctctcctcggtacgaccagtacaaggacgcttgggataccagcgttgtggctgagatcaaggttgcagacaggtacgagagggtgaggtttttccattgctacaagcgtggagtcgaccgtgtgttcatcgaccatccgtcattcctggagaaggtttggggaaagaccggtgagaagatctacggacctgacactggagttgattacaaagacaaccagatgcgtttcagccttctttgccaggctcctaggatcctaaacctcaacaacaacccatacttcaaaggaacttatggtgaggatgttgtgttcgtctgcaacgactggcacactggcccactggcgagctacctgaagaacaactaccagcccaatggcatctacaggaatgcaaaggttgctttctgcatccacaacatctcctaccagggccgtttcgctttcgaggattaccctgagctgaacctctccgagaggttcaggtcatccttcgatttcatcgacgggtatgacacgccggtggagggcaggaagatcaactggatgaaggccggaatcctggaagccgacagggtgctcaccgtgagcccgtactacgccgaggagctcatctccggcatcgccaggggatgcgagctcgacaacatcatgcggctcaccggcatcaccggcatcgtcaacggcatggacgtcagcgagtgggatcccagcaaggacaagtacatcaccgccaagtacgacgcaaccacggcaatcgaggcgaaggcgctgaacaaggaggcgttgcaggcggaggcgggtcttccggtcgacaggaaaatcccactgatcgcgttcatcggcaggctggaggaacagaagggccctgacgtcatggccgccgccatcccggagctcatgcaggaggacgtccagatcgttcttctgggtactggaaagaagaagttcgagaagctgctcaagagcatggaggagaagtatccgggcaaggtgagggccgtggtgaagttcaacgcgccgcttgctcatctcatcatggccggagccgacgtgctcgccgtccccagccgcttcgagccctgtggactcatccagctgcaggggatgagatacggaacgccctgtgcttgcgcgtccaccggtgggctcgtggacacggtcatcgaaggcaagactggtttccacatgggccgtctcagcgtcgactgcaaggtggtggagccaagcgacgtgaagaaggtggcggccaccctgaagcgcgccatcaaggtcgtcggcacgccggcgtacgaggagatggtcaggaactgcatgaaccaggacctctcctggaaggggcctgcgaagaactgggagaatgtgctcctgggcctgggcgtcgccggcagcgcgccggggatcgaaggcgacgagatcgcgccgctcgccaaggagaacgtggctgctccttga

SEQ ID NO: 52449 - protein, 605 aa, Oryza rufipogon
MSALTTSQLATSATGFGIADRSAPSSLLRHGFQGLKPRSPAGGDATSLSVTTSARATPKQQRSVQRGSRRFPSVVVYATGAGMNVVFVGAEMAPWSKTGGLGDVLGGLPPAMAANGHRVMVISPRYDQYKDAWDTSVVAEIKVADRYERVRFFHCYKRGVDRVFIDHPSFLEKVWGKTGEKIYGPDTGVDYKDNQMRFSLLCQAPRILNLNNNPYFKGTYGEDVVFVCNDWHTGPLASYLKNNYQPNGIYRNAKVAFCIHNISYQGRFAFEDYPELNLSERFRSSFDFIDGYDTPVEGRKINWMKAGILEADRVLTVSPYYAEELISGIARGCELDNIMRLTGITGIVNGMDVSEWDPSKDKYITAKYDATTAIEAKALNKEALQAEAGLPVDRKIPLIAFIGRLEEQKGPDVMAAAIPELMQEDVQIVLLGTGKKKFEKLLKSMEEKYPGKVRAVVKFNAPLAHLIMAGADVLAVPSRFEPCGLIQLQGMRYGTPCACASTGGLVDTVIEGKTGFHMGRLSVDCKVVEPSDVKKVAATLKRAIKVVGTPAYEEMVRNCMNQDLSWKGPAKNWENVLLGLGVAGSAPGIEGDEIAPLAKENVAAP

SEQ ID NO: 52450 - DNA, 1818 bp, Oryza barthii
  CDS (1)..(1818)
atgtcggctctcaccacgtcccagctcgccacctcggccaccggcttcggcatcgctgacaggtcggcgccgtcgtcgctgctccgccacgggttccagggcctcaagccccgcagccccgccggcggcgacgcgacgtcgctcagcgtgacgaccagcgcgcgcgcgacgcccaagcagcagcggtcggtgcagcgtggcagccggaggttcccctccgtcgtcgtgtacgccaccggcgccggcatgaacgtcgtgttcgtcggcgccgagatggccccctggagcaagaccggcggcctcggtgacgtcctcggtggcctcccccctgccatggctgcgaatggccacagggtcatggtgatctctcctcggtacgaccagtacaaggacgcttgggataccagcgttgtggctgagatcaaggttgcagacaggtacgagagggtgaggtttttccattgctacaagcgtggagtcgaccgtgtgttcatcgaccatccgtcattcctggagaaggtctggggaaagaccggtgagaagatctacggacctgacactggagttgattacaaagacaaccagatgcgtttcagccttctttgccaggctcctcggatcctaaacctcaacaacaacccatacttcaaaggaacttatggtgaggatgttgtgttcgtctgcaacgactggcacactggcccactggcgagctacctgaagaacaactaccagcccaatggcatctacaggaatgcaaaggttgctttctgcatccacaacatctcctaccagggccgtttcgctttcgaggattaccctgagctgaacctctccgagaggttcaggtcatccttcgatttcatcgacgggtatgacacgccggtggagggcaggaagatcaactggatgaaggccggaatcctggaagccgacagggtgctcaccgtgagcccgtactacgccgaggagctcatctccggcatcgccaggggatgcgagctcgacaacatcatgcggctcaccggcatcaccggcatcgtcaacggcatggacgtcagcgagtgggatcccagcaaggacaagtacatcaccgccaagtacgacgcaaccacggcaatcgaggcgaaggcgctgaacaaggaggcgttgcaggcggaggcgggtcttccggtcgacaggaaaatcccactgatcgcgttcatcggcaggctggaggaacagaagggccctgacgtcatggccgccgccatcccggagctcatgcaggaggacgtccagatcgttcttctgggtactggaaagaagaagttcgagaagctgctcaagagcatggaggagaagtatccgggcaaggtgagggccgtggtgaagttcaacgcgccgcttgctcatctcatcatggccggagccgacgtgctcgccgtccccagccgcttcgagccctgtggactcatccagctgcaggggatgagatacggaacgccctgtgcttgcgcgtccaccggtgggctcgtggacacggtcatcgaaggcaagactggtttccacatgggccgtctcagcgtcaactgcaaggtggtggagccaagcgacgtgaagaaggtggcggccaccctgaagcgcgccatcaaggtcgtcggcacgccggcgtacgaggagatggtcaggaactgcatgaaccaggacctctcctggaaggggcctgcgaagaactgggagaatgtgctcctgggcctgggcgtcgccggcagcgcgccggggatcgaaggcgacgagatcgcgccgctcgccaaggagaacgtggctgctccttga

SEQ ID NO: 52451 - protein, 605 aa, Oryza barthii
MSALTTSQLATSATGFGIADRSAPSSLLRHGFQGLKPRSPAGGDATSLSVTTSARATPKQQRSVQRGSRRFPSVVVYATGAGMNVVFVGAEMAPWSKTGGLGDVLGGLPPAMAANGHRVMVISPRYDQYKDAWDTSVVAEIKVADRYERVRFFHCYKRGVDRVFIDHPSFLEKVWGKTGEKIYGPDTGVDYKDNQMRFSLLCQAPRILNLNNNPYFKGTYGEDVVFVCNDWHTGPLASYLKNNYQPNGIYRNAKVAFCIHNISYQGRFAFEDYPELNLSERFRSSFDFIDGYDTPVEGRKINWMKAGILEADRVLTVSPYYAEELISGIARGCELDNIMRLTGITGIVNGMDVSEWDPSKDKYITAKYDATTAIEAKALNKEALQAEAGLPVDRKIPLIAFIGRLEEQKGPDVMAAAIPELMQEDVQIVLLGTGKKKFEKLLKSMEEKYPGKVRAVVKFNAPLAHLIMAGADVLAVPSRFEPCGLIQLQGMRYGTPCACASTGGLVDTVIEGKTGFHMGRLSVNCKVVEPSDVKKVAATLKRAIKVVGTPAYEEMVRNCMNQDLSWKGPAKNWENVLLGLGVAGSAPGIEGDEIAPLAKENVAAP

SEQ ID NO: 52452 - DNA, 1860 bp, Glycine max
  CDS (1)..(1860)
atggcgacattgactgcttcaagtaacttagtctctagaaattctcatgtccaccatggaccaacaactgcttcatatgagtctaaagcagtagcaatgggacttagatctctgaagcagacaaatactcataatggactaagaattttgaacccggtggatgagctacttaacagaaccccaattaaaaccaatgcagtgcaagctatgaggaagggacctcaaggcaagaatgccaggcctaaaggcatgatcacatgtggcatgactttcataattataggaaccgaggtggctccatggtgcaaaactggtgggttgggagatgttcttggaggtctaccaccggcattggcaggttttgggcatcgagtaatgactattgtgccgcgctatgaccagtacaaagatgcatgggatacaagtgttgtaattgaggtgaaagtaggagatagaacagaaaaggttcgcttcttccattgttataagaggggagttgatcgtgtctttgtggatcacccttggtttcttgaaaaggtatgggggaaaactggacaaaaactttatggaccaactactggaaatgattacgaagacaaccaactgcgttttagcctcttttgccaggctgctttggaagccccaagggttctgagtcttaattccagtaaatatttctctggaccatatggtgaagatgtcatttttgttgccaatgattggcacactgcccttatcccctgctacttgaaaagtatgtaccagtcaaggggcatctatacgaatgcccgggttgttttttgtatccacaacattgcttaccaaggaagatttgcattcgccgacttctcacttctaaatctcccagaccaatttaagagctcctttgactttattgatgggcatgttaaaccagtggttggaaggaaaatcaattggttgaaagctggacttatagaatcatggtttgtgataaccgttagtccaaactatgctaaagaactggtgtcaggtccagacaaaggagtggaattggacaacatcattcgcaaaattgatgatgatggtcgtttggttggaattgtgaatggcatggatgttcaggagtggaatccaaccactgacaaatatatagctgtcaaatatgatgtttcaacagtattggaagcaaaggctcttctgaaagaagccctccaagcagaagttggattgccagtcgacagaaatattcctctcattggtttcattggtaggcttgaagagcaaaaaggttctgatattcttgcagaagccattccccaatttatcaagcagaatgttcagttggtagccctaggaacaggaaaaaaacaaatggaaaagcagcttgaggaacttgaaatatcataccctgataaggccagaggagtggcaaaattcaatgttcccctagcccacatgataatagctggagctgattttatattggttcctagcagatttgagccttgtggtctcattcagttacaagctatgcgctatggatctgtaccaattgttgcctcaacaggtggattagttgacactgtcaaagaaggcttcactggatttcagatgggtgccttcaatgttgaatgtgatgctgtggatccggctgatgtggatgctatatcaaagactgtcaaaagggcccttgcagtctatggaactccagcttttacagaaattatcaagaactgcatggctcaagatctttcatggaaggggcctgctaaggagtgggaggaagtgctgctaagcttgggagttcctggcagtgaacctggaagtgatggagaagaaattgctccacaggcaaaggaaaatgtggcaacaccataa

SEQ ID NO: 52453 - protein, 619 aa, Glycine max
MATLTASSNLVSRNSHVHHGPTTASYESKAVAMGLRSLKQTNTHNGLRILNPVDELLNRTPIKTNAVQAMRKGPQGKNARPKGMITCGMTFIIIGTEVAPWCKTGGLGDVLGGLPPALAGFGHRVMTIVPRYDQYKDAWDTSVVIEVKVGDRTEKVRFFHCYKRGVDRVFVDHPWFLEKVWGKTGQKLYGPTTGNDYEDNQLRFSLFCQAALEAPRVLSLNSSKYFSGPYGEDVIFVANDWHTALIPCYLKSMYQSRGIYTNARVVFCIHNIAYQGRFAFADFSLLNLPDQFKSSFDFIDGHVKPVVGRKINWLKAGLIESWFVITVSPNYAKELVSGPDKGVELDNIIRKIDDDGRLVGIVNGMDVQEWNPTTDKYIAVKYDVSTVLEAKALLKEALQAEVGLPVDRNIPLIGFIGRLEEQKGSDILAEAIPQFIKQNVQLVALGTGKKQMEKQLEELEISYPDKARGVAKFNVPLAHMIIAGADFILVPSRFEPCGLIQLQAMRYGSVPIVASTGGLVDTVKEGFTGFQMGAFNVECDAVDPADVDAISKTVKRALAVYGTPAFTEIIKNCMAQDLSWKGPAKEWEEVLLSLGVPGSEPGSDGEEIAPQAKENVATP

SEQ ID NO: 52454 - DNA, 3216 bp, Arabidopsis thaliana
  CDS (1)..(3216)
atgacgacgaagctatcgagcttctgtttcttaacccatggattagcaggaatctcctgcgagagagaacatggaagttctcgtcgatttttctatctcccttctcgtcgattagtttctacttcgtgtaagatgcgacaacaacgtggtttcgactctagtaaaagacaagaggtcaagaaaggctcccctaaaccgatcctatctataaattcaggtcttcagagcaacaatgatgaggaatctgatctggagaatggttctgcggacagtgtcccgagtcttaagtcagatgctgaaaagggtagtagtattcatggcagcatagatatgaatcatgctgatgagaatcttgaaaagaaagatgatatacaaacaactgaagttactcggcgcaagagtaaaactgcaaagaagaaaggggagagtattcatgctacgattgatattggacatgatgatgggaagaatttagataatattactgtgcctgaggttgcaaaagctttgtcccttaacaaaagtgaaggcgagcagatttcagatggacagtttggggaactaatgacaatgataagaagtgcagaaaaaaatattcttcggcttgatgaagcacgggccactgctcttgacgaccttaacaagattcttagtgataaggaagcgttgcagggagaaatcaatgtcttggaaatgaaattgtctgagactgatgaaaggattaaaactgctgctcaagagaaagcacatgtagagcttctggaagaacagttagagaagcttcgtcatgaaatgatctcccctatagaaagtgatggttatgttctagctcttagcaaagagcttgaaacattgaagctggagaatctatctttgagaaacgatatagaaatgcttaagtcagaacttgacagtgttaaagataccggtgaacgtgtggttgtgttggaaaaggagtgctccggtttggaatcttctgtaaaggatttggaatctaagttatcggtttctcaggaagatgtctcgcagctttctactcttaaaatcgaatgcactgatctatgggcgaaggtagagactctacagctgttgttagatagagctaccaaacaagcagagcaagcagttatagtgttacaacagaaccaagatctaagaaataaggtcgacaaaattgaggaatcacttaaagaagccaacgtttataaagaatcttcagagaaaattcaacagtacaatgagctaatgcaacataaggtgacattacttgaggagcggctcgaaaagtctgatgcagagatattctcatatgttcagttatatcaagaatcgataaaagaattccaggaaacacttgaaagtttgaaggaagaaagcaagaaaaaatcaagagatgaaccggttgatgatatgccttgggattattggagtcggttacttttaactgttgatggatggctgcttgaaaagaaaatagcaagcaacgatgctgacttactgagagacatggtatggaagaaagatcgaagaattcatgatacctatattgacgtcaaagataagaatgaactttttaaagcttttgaaaaaagtaacctattttcttcatcttgtgttgattctagttcaggattgtatgtcgttcacattgcagctgagatggcacctgtagctaaggtgggaggtttgggagatgttgtggcaggtcttggtaaggcattgcaaagaaaaggtcatctggtggagattattcttcccaaatatgactgtatgcagtatgatcgcgtgcgtgacttaagggctttggatactgttgtggagtcatattttgatgggaagttatataaaaacaaaatctggattggcactgttgaaggtttacctgtacatttcattgaacctcaacatccaagcaaattcttctggagaggacagttttatggagagcaagatgatttcagacgcttctcgtattttagccgagctgcactagagttgcttcttcagtccggcaaaaaacccgacatcatacattgtcatgactggcaaacagcttttgttgcgccgctgtattgggatctgtatgctccaaagggattagattctgcaagaatatgctttacatgtcataattttgagtatcaaggtaccgcgtctgcttcagaattgggatcttgcgggcttgatgttaaccagttaaatagaccagacagaatgcaggatcactcgtctggagatagagtcaatcctgttaagggcgctataattttctcaaacattgtaacaaccgtgtcccctacttatgcacaagaagttcgaacagctgagggaggaaaaggactccattcaacactcaattttcactccaagaaattcattggaatcctcaacggcattgacacagattcatggaatcctgccaccgaccccttcctcaaggctcagttcaacgctaaagatctacaagggaaagaagaaaacaaacacgcccttagaaagcagcttggactttcttcagcggagtcaagacggcctttggttggttgcataacaagattagtaccacagaaaggagttcatctaatcagacatgccatatacagaacattagagttaggtggacaatttgtacttcttggttctagcccggttccacatattcagagggaatttgaaggtattgaacaacagtttaaaagccatgatcatgtccggttgttactgaagtacgatgaagctctgtctcatacgatttacgcagcctccgatttgttcatcattccgtcaatttttgagccttgtggacttacacagatgatcgctatgagatatggctccattccaattgcgcgaaaaactggaggcttaaatgacagtgtcttcgacattgatgatgatacaataccaacacagtttcaaaatggatttacatttcaaaccgcggacgaacagctgaaaatagggatggaaatttatttagtttggttcagttttacatgtccgtctttagctgaaaaaggaaatgtgaaaaaacagggtttcaattatgcgttggagcgagcatttaatcactacaagaaagatgaagagaaatggatgagacttgtagagaaagtgatgagtatagatttcagctggggatcatcagctacacaatacgaagaactctacacgagatcagtgtccagagcaagagctgttcctaatcgcacgtga

SEQ ID NO: 52455 - protein, 1071 aa, Arabidopsis thaliana
MTTKLSSFCFLTHGLAGISCEREHGSSRRFFYLPSRRLVSTSCKMRQQRGFDSSKRQEVKKGSPKPILSINSGLQSNNDEESDLENGSADSVPSLKSDAEKGSSIHGSIDMNHADENLEKKDDIQTTEVTRRKSKTAKKKGESIHATIDIGHDDGKNLDNITVPEVAKALSLNKSEGEQISDGQFGELMTMIRSAEKNILRLDEARATALDDLNKILSDKEALQGEINVLEMKLSETDERIKTAAQEKAHVELLEEQLEKLRHEMISPIESDGYVLALSKELETLKLENLSLRNDIEMLKSELDSVKDTGERVVVLEKECSGLESSVKDLESKLSVSQEDVSQLSTLKIECTDLWAKVETLQLLLDRATKQAEQAVIVLQQNQDLRNKVDKIEESLKEANVYKESSEKIQQYNELMQHKVTLLEERLEKSDAEIFSYVQLYQESIKEFQETLESLKEESKKKSRDEPVDDMPWDYWSRLLLTVDGWLLEKKIASNDADLLRDMVWKKDRRIHDTYIDVKDKNELFKAFEKSNLFSSSCVDSSSGLYVVHIAAEMAPVAKVGGLGDVVAGLGKALQRKGHLVEIILPKYDCMQYDRVRDLRALDTVVESYFDGKLYKNKIWIGTVEGLPVHFIEPQHPSKFFWRGQFYGEQDDFRRFSYFSRAALELLLQSGKKPDIIHCHDWQTAFVAPLYWDLYAPKGLDSARICFTCHNFEYQGTASASELGSCGLDVNQLNRPDRMQDHSSGDRVNPVKGAIIFSNIVTTVSPTYAQEVRTAEGGKGLHSTLNFHSKKFIGILNGIDTDSWNPATDPFLKAQFNAKDLQGKEENKHALRKQLGLSSAESRRPLVGCITRLVPQKGVHLIRHAIYRTLELGGQFVLLGSSPVPHIQREFEGIEQQFKSHDHVRLLLKYDEALSHTIYAASDLFIIPSIFEPCGLTQMIAMRYGSIPIARKTGGLNDSVFDIDDDTIPTQFQNGFTFQTADEQLKIGMEIYLVWFSFTCPSLAEKGNVKKQGFNYALERAFNHYKKDEEKWMRLVEKVMSIDFSWGSSATQYEELYTRSVSRARAVPNRT

SEQ ID NO: 52456 - DNA, 3049 bp, Chlamydomonas reinhardtii
  CDS (190)..(1920)
cgttggggagtgcatggccgaaaaaatgtggataaggcgtaaacgcgccagcggttgccggttccgttgacctgaccgactcgtggcgtcgcttacgcatgggccgatgtgggtcagcacctgcgtatgctttctgagtccagtggttgccccggctgtacgataggtggagctgccgcttaagagcatatgcttatccgcatcggagccccgccgcggggcccgcggcgaccctgcatacccgcagcgcaccagctccgcttagctagcagtgtcatcattgcattcgtcctccgtgggtgcccccgtgtgcagctgtccctgccgctggagtcggagatgtacattgaaccggctgcgccggtggcggaggcgcccgaggcggaggaggaggagccaccggccgtggagaagccgccgccgctggccggacctaacgttatgaacgtggtcatggtgggagccgagtgcgcgccctggtccaagactggcggcctgggtgacgtgatggcggcgctgcccaaggcgctggtccgccgcggccaccgcgtgatggtggtggtgccccggtatgagaactacgacaacgcctgggagacaggcatccgcaaaatctactcggtcttcaactccaaccaagaggtgggctacttccacgcatttgtggacggcgtggactacgtgtttgtggaccaccccacgttccacggccgggggaagaacatctacggcggcgagcgccaggagattctgtttcgctgcgcgctgctgtgcaaggcggcgctggaggctgtctggcacgtgccgtgcggcggcatcacctatggcgatgacaacctgtgcttcatcgccaacgactggcacacggcgttgctgcccgtgtacctgcaggcgcactaccgtgactacggcgagatgacgtacgcgcgctgcgccttcgtcatccacaacatggcgcaccagggccgcggcccctttgtggagagcgagcacctggagctgaacgaggagtaccgcgagcgcttccgcctgtacgaccccattggcggcgagcacatgaacgtgatgaaggctggcctggagtgcgcccaccgcctggtggctgtgtccaaatgctacgcctgggagtgccagaccgtggagggcggctgggggctgcacgaggtgatcaaggtgaacaactggaagctgcgcggcattgtgaacggcatcgactacaaggagtggaaccccatctgtgacgagttcctcacgacggacggctacgcgcactacgacgtggacacgctggctgagggcaaggccaagtgcaaggcggcgctgcagaaggagctgggcctgccggtggacccggacgccccgatgctgggcttcatcgggcggctggactaccagaagggcgtggacctcatccgcgacaactacgactacatcatgggcgagaagtgccagctggtgatgctgggcagcgggcggcaggacctggaggacgcgctgcgggacatggagaacaggaacaagaaccagtgccgcggctgggtgggcttttccaacaagatggcgcaccgcatcaccgccgccgccgacatcctgctcatgccctcgcgctttgagccgtgcggcttgaaccagctgtacgccatggcttacggcaccgtgcccatcgtgcactctgtgggcggcctgcgcgacaccgtcaagcagtacagcccctttgagaacgtgggcaccggctgggtgtttgagcgcgccgaggcgaacaagctgcgcgagagcattaacaacgctctgtacacctaccgccagttccgtgactcgttccgcggtatccagcgccgcggcatggagcaggacctgacctgggacaacgccgcctccatctatgaggaggtgctggtggccgccaagtaccagtggtagatgcgatatgcaggcgggacgcactgtgacatacgcttgtgatgtgttgtgcatgtgtgtgcatgagaccgcgctgtttgtgggtgttgggaggtcctgcagccttgccttgcaagcctggtgccgagctgcggctgtaagagcccgcgaggggagtggttagggcgtgtgggcttgaaggtggtgcgcccaagggtgcgcctgctagactctagagaagaatgtgtagctgttgacagatacggtagatcatgggtgtggttacatttggtgggacagtgcttgccgggcaacatggcggtgcctgcggatgttaaaatgcgtcgtggagtgggtgccgccccggctgctgtgtcattttagggctccacatctaggccggcttcagtgcccggcaagagcgtgtgtgcacgtttgtgtatgatgtgtttgggaaggccacttttgtggaggggctcagccccttttcccgtgaccggggaacacttgtcccgtggttatgcgcggcgcggataccttccgcagagagaatgcgagtctgggcatgcactgcagcggctcacccacgcagcgttgagagccgagcgcatttgcttgttgcgctgagagaaaataatgctgtcagctgtgatgaagggctgccagggtagcaaggctacctcaggtagaatgggctgagtgatttgttttcaggtaccgataattatattcagccgcacgggtgacggaatgctgcacgtcggcacctatacgtcatgtgatggttttttttggccaacccgtgttttttgatggcgtggataggcttgagttgtgatgcagctgatttccctgacacctgggacggtcctttgttagactacccttgttggtaaacttgcaattatttgaagggccttgcataatcagcccttttcctgccataaggcagccacctccttgttgaagggccttgcgtaattttgttcttttgcacagtgcggggacgtggaacgcatgtcacgcgctgcaggcagcaagtcgtacatttgccggcgcggcttacccgtggccaaatgcaccctctgtgctgtaactctctgatgagaaaaaaaaaaaaaaaaaaaaaaaaaaaaaaaaaaaaaaaaaa

SEQ ID NO: 52457 - protein, 576 aa, Chlamydomonas reinhardtii
MLIRIGAPPRGPRRPCIPAAHQLRLASSVIIAFVLRGCPRVQLSLPLESEMYIEPAAPVAEAPEAEEEEPPAVEKPPPLAGPNVMNVVMVGAECAPWSKTGGLGDVMAALPKALVRRGHRVMVVVPRYENYDNAWETGIRKIYSVFNSNQEVGYFHAFVDGVDYVFVDHPTFHGRGKNIYGGERQEILFRCALLCKAALEAVWHVPCGGITYGDDNLCFIANDWHTALLPVYLQAHYRDYGEMTYARCAFVIHNMAHQGRGPFVESEHLELNEEYRERFRLYDPIGGEHMNVMKAGLECAHRLVAVSKCYAWECQTVEGGWGLHEVIKVNNWKLRGIVNGIDYKEWNPICDEFLTTDGYAHYDVDTLAEGKAKCKAALQKELGLPVDPDAPMLGFIGRLDYQKGVDLIRDNYDYIMGEKCQLVMLGSGRQDLEDALRDMENRNKNQCRGWVGFSNKMAHRITAAADILLMPSRFEPCGLNQLYAMAYGTVPIVHSVGGLRDTVKQYSPFENVGTGWVFERAEANKLRESINNALYTYRQFRDSFRGIQRRGMEQDLTWDNAASIYEEVLVAAKYQW

SEQ ID NO: 52458 - DNA, 2716 bp, Chlamydomonas reinhardtii
  CDS (93)..(2048)
tggcgctggttgattcgcgctaggggtttgcaattttgctcgcacacagcctgtcacccggccagcccgctattgggctttttgtactagaaatgaagagcttcatgcggagggatgcgctcggcgcggggctccgcggtgcagccagcacaaagcccgtctcaagggtcgccagcgtgaggcctgcgcctaccgcctaccgcactgcctgccaagttgcgaaggtggatgaaatggtgtcggtggatgaggagcttactcgtctccgcaaggagaacgagctcctgcgcgcccaactggcgctgtaccagcagaaccagcagccgtccgtgggtgccgctgccgttgccccgcctgctgccgccacgaaggtgctggagaagccggcgccggccaagcaggcttccgtggatggtggcatcatctggcccaagccgggtgaggcgttctgggagcgcagcccccgcgcatcgcccatgccgctgcaaggcggtgcggcggaggcgccccccgttgagcgtgacggtaaccccatgcacatcattcacatcaccgccgagatggcaccaattgccaaggtgggcggcctaggcgacgtggtgactgggctggccaaggcggcgctggcgcgcggccacttcgtgacggtcatgctgccgttctacgagtgcctgcccaaggaccagattgagggcctcaagcacgaatgcgacatcgaggtgcccaagggctaccgctgggacggcgagatccgcgtgggcccgctcaagacgtcagtgttctggggccgtgtccagggctgccccgtgtacctgatcaagcccgctgacgacaccaactgcaacatcttccgcggcggccgcatttacggcggctcctacaacgagatggaggcctacctgtacttctgcagggcctgcctggagtacctgaacgtgtcgcagcagaacccgcacgtgttgcagctgcacgactggcacgccgccgccgcgtccatgctgtactgggacgtgtacaaccccaacggcttcagtcgcacgcgcctgatgctcaccatccacaacctggacaacaccggcgagacccgccaggacgagttcttcttcacaggtgtgccgggtgagaacttcgccaccattgataaggcgctggacgagcgcaccatcggccacaaccctgagcgcctcaacctcatgaagggcggcatcgtgtactgcaacgcggtgaccaccgtgtcgcctacctatgccaacgaggtcctcaacggcggcgcggctggctggctgcggagcaccttcgcgcgccccgagctgcgctccaagttccacggcatcctgaacggcattgactgtgaggagtggaacccggccactgacgcgctgctgccagccaacttcgacgccgaccgccccgccgggaaggcgctgtgcaaggagtttctgcagaagggtctgggcctggaggtggacccccgcaagccgctggtggcggtggtgagccggctggtgccgcagaagggcatccacctcatcaaggccgcgctgtttcgcaccgtggagaagggcggccagttcgtgctgctgggctcgggccactcggacccggccttcaggcagctggctgacgggcagttcaaggaccaccccaactgcaggctgaagatcatgtacagcgagcgcctggcgcacatgatttacgccgctgctgacgtggtggtggtgccgtccatgtttgagccgtgcggcctcacgcagatgattgcgctgcgctacggcgcggtgccgctggtgcgccgcacgggcggcctggcagacacggtgtttgatgtggacggcccggccggcgggcccgcgcagccccgcaacggcttcgtgttcgacggctccgacgacggcgcgctgcatggcgccctggaccgcgccctgaccctgtacaccacgcagcctgagcgctgggcggcgctgcagcaggacaacatgcgcctggacgtcagctggggcaagtcggcgaagagctacgtggacgtgtaccgctccatcagcgcctgagcaggaagattgagatgactcaacagagattggagaaaaggacgagggcgcagcacgtcctgcatagtgcaagagtgctgcgggcgcagtggcagcgaaggagcaggcacggcgtaacgtcacacatgcacgctaatgggtgtgccccgctgcggggacggcattggttctggggaccgctcgtgagttcacctattgtttactgctggcctggtcttcagacggggctgcagtgcttgtattatcagcaagggacttatttttgccggtggcatagtaacggtaccatttgagagagaggtatcacagagaggcatggcaccgtacatccgatgatttgggtggggcgctggcggttttgcgggagcgcacgacacgcgttgcgcacaagtagcccgcgagttttgtacctcgcctcgaaccacgtttttggggtgcgtttgagggcgaaaccattttgcagggagatgagagaggacgaggttggcagaacgcggtggtgccatacatggaacgattgcgccacccgtaggccagtggtaccgtatccgccggggaattccgagcgagccttgtacgtcacgcttgtacgtaactcggttactgcggacacagaacttgctatttttatatttaaggaattcggccactaaaaaaaaaaaaaaaaa

SEQ ID NO: 52459 - protein, 651 aa, Chlamydomonas reinhardtii
MKSFMRRDALGAGLRGAASTKPVSRVASVRPAPTAYRTACQVAKVDEMVSVDEELTRLRKENELLRAQLALYQQNQQPSVGAAAVAPPAAATKVLEKPAPAKQASVDGGIIWPKPGEAFWERSPRASPMPLQGGAAEAPPVERDGNPMHIIHITAEMAPIAKVGGLGDVVTGLAKAALARGHFVTVMLPFYECLPKDQIEGLKHECDIEVPKGYRWDGEIRVGPLKTSVFWGRVQGCPVYLIKPADDTNCNIFRGGRIYGGSYNEMEAYLYFCRACLEYLNVSQQNPHVLQLHDWHAAAASMLYWDVYNPNGFSRTRLMLTIHNLDNTGETRQDEFFFTGVPGENFATIDKALDERTIGHNPERLNLMKGGIVYCNAVTTVSPTYANEVLNGGAAGWLRSTFARPELRSKFHGILNGIDCEEWNPATDALLPANFDADRPAGKALCKEFLQKGLGLEVDPRKPLVAVVSRLVPQKGIHLIKAALFRTVEKGGQFVLLGSGHSDPAFRQLADGQFKDHPNCRLKIMYSERLAHMIYAAADVVVVPSMFEPCGLTQMIALRYGAVPLVRRTGGLADTVFDVDGPAGGPAQPRNGFVFDGSDDGALHGALDRALTLYTTQPERWAALQQDNMRLDVSWGKSAKSYVDVYRSISA

SEQ ID NO: 52460 - DNA, 2325 bp, Ipomoea batatas
  CDS (155)..(2047)
ccatggtacccggatcctcggaattcgaggatccgggtaccatgggggagtactatctacttcaagtgaacaagcaactcttgacttggaagaatatccacaattagctgtaagcgaacattttgttgaaacttctcaaacaggtaaaaaggacatgcctcgtaagggggcaaccttgaacaaagattcagacaaaaaaactacaaaaagaaatccaaagactgtgggatctactgaaaggccagctgtgaaatcaaaagtgtctttgagtccaagtcaagtgacttcttcaacagtaaattctcaggagccagcaaaagctacctatgaaactgtgaagtccagtcaagtgatgccactggacgtggattcacaaaagaatgtgacatccttttctagggagattcttttgtctgaggttccttcctcctcttcaatggcatctgcatctactttagaggatgagaaaagagatcatagagagtcaagttcaaaggagatagatgttgggactgaagatcctgtaaatgaagacttgaagccacctccattggcgggaaccaatgtcatgaatgttatattagtttgtgcagagtgtgctccatggtcaaaaacaggtgggcttggtgatgttgctggagcactacccaaggctttggctcggcgtggacacagagttatggttgtggttcctctttatggaaactatgctgaacctcaacatactggagttcgaaaaatgtttaagattgatggtcaggatatggaggtgaattactttcatgcctacatcgataatgtggattttgtcttcattgatagtcctatattccagcatagaggaaacaatatatatggaggaaatcgtgtggacattttgaagcgcatggacttattttgcaaagcagctattgtggttccgtggcatgttccgtgcggtggtatttgctatggagatggaaacttagtgttcattgcaaatgattggcatactgcattactgccagtctatctgaaagcatatttccgtgacaatggagtaatgaaattcactcgatccgtgcttgtcattcataacatagctcaccagggtcgcgggcctatggatgatttttccattgtggacctaccagctcaatatgcagacctttttaagctgtatgatccagtaggaggtgatcatttcaacatatttgcagctggtctaaagacagctgaccgtgtagtcacagtgagtcatggatatgcctgggagcttaaaacttctgaaggtggatggggtttgaatgggatcaggaatgagaatgagtggaaactgcaggggattgtcaatgggattgatattgaagagtggaatccccaattggatgtttacttgaaatctgatggctatgccaactattccctggacaccttgcagactggtaaacctcagtgcaaggcagcattgcaaaaggaaatgaatttgcctgttcgcgatgatgtcccactaattggtttcattgggaggcttgaccaccaaaaaggtgttgatttgatagccgaggcaatcccttggatgatgggccaagatgtgcagctggttatgctgggcacaggcaggcctgaccttgaacagatgctcaagcagattgaaggtcaatacggtgacaaagtaagaggatgggttggtttctcagtaaagactgcacaccggataactgcgggtgcagacattctgctgatgccatcaagatttgagccttgtggactgaaccagctgtatgctatgagctatgggacagtcccagttgtccatgctgtgggtggacttagagatacggtgcagccttttgatcctttcaatgaatcagggtatggatggacattcggtagggctgaggcaaatcagctgattgatgcactagggaattgcttattaacataccggcagtacaagcagagttgggaggggctccagaggcgtggaatgatgcaagacttaagctgggatcacgctgccgagaagtacgaggaagttcttgttgctgcaaagtatcagtggtgaggtttactacaatcactgctgacaacaggatcagaaatcatgcattccgaacatgccccatcgcccattgccagccattcactactatctattttcatatctttgccaagagaaaaggatgggacagattaccaacttattgtataggcagtaggctccctcaaatgtttgaagtgagatcaaattttatagttggttttagtttatttaataaccttaatctatatatagtccgtcctatcccagcctgcctggcctgggtacttctaaaaaaaaaa

SEQ ID NO: 52461 - protein, 630 aa, Ipomoea batatas
MPRKGATLNKDSDKKTTKRNPKTVGSTERPAVKSKVSLSPSQVTSSTVNSQEPAKATYETVKSSQVMPLDVDSQKNVTSFSREILLSEVPSSSSMASASTLEDEKRDHRESSSKEIDVGTEDPVNEDLKPPPLAGTNVMNVILVCAECAPWSKTGGLGDVAGALPKALARRGHRVMVVVPLYGNYAEPQHTGVRKMFKIDGQDMEVNYFHAYIDNVDFVFIDSPIFQHRGNNIYGGNRVDILKRMDLFCKAAIVVPWHVPCGGICYGDGNLVFIANDWHTALLPVYLKAYFRDNGVMKFTRSVLVIHNIAHQGRGPMDDFSIVDLPAQYADLFKLYDPVGGDHFNIFAAGLKTADRVVTVSHGYAWELKTSEGGWGLNGIRNENEWKLQGIVNGIDIEEWNPQLDVYLKSDGYANYSLDTLQTGKPQCKAALQKEMNLPVRDDVPLIGFIGRLDHQKGVDLIAEAIPWMMGQDVQLVMLGTGRPDLEQMLKQIEGQYGDKVRGWVGFSVKTAHRITAGADILLMPSRFEPCGLNQLYAMSYGTVPVVHAVGGLRDTVQPFDPFNESGYGWTFGRAEANQLIDALGNCLLTYRQYKQSWEGLQRRGMMQDLSWDHAAEKYEEVLVAAKYQW

SEQ ID NO: 52462 - DNA, 1545 bp, Pasteurella haemolytica
  CDS (1)..(1545): transl_table=11
atgcttcgagtttgtcatttgaggtcgcaagctcgaagtattgttatgattaaagcgcttcaagcggtcttatttttcaactattttacacatagaaaacggttaaaaatgaaagttttacatatttgctctgaaatgtaccctttaattaaaacaggcggtttagctgatgtaatgggggcattgccatttgcgcaacagcaagctggtaatgatgtcagagtgttaattccttattacccgaaagtcgcgcaaactttaggggaaacggtagaagttgctactatcggcacttttgccggaacagtctctgttcgatttgcttattttaatggcttaggcgtttacgttatcgatgcgcctcatttatttatgcgtgatggtaacccttaccacgacagcaattatcaagactatccggataactataaacgctttgctttattaggttacattggggcgcaattagcccaaggtttggatcattggtggggaaccgctcaagttttacacgcacacgattggcaagcagggcttgcttgtgcatatcttaaaagttggggaagcaatgtaaaaacgctcttcactattcataatattgcctatatcgggcgctttaatgccttccatttagcagagcttggcttaccttgggaatttttccacgccgaaggcttagaattttacggtgaaatttcttacctcaaagcaggtttgtattttgctgatcgcattactaccgttagcccgacctatgctcgtgaaattactgaggaaattgccggtgcaggcttgcatggtttactggcaacccgtcaatatcaaggtagattgcgtggcattttaaacggggtcgatgctgaggtgtggaatccggaaacggatacacatattgtggtgaattatcgtgcgaactatatgcacggtaaagccaaaaataaagcggaactccaacgaatttttggtttgccagaagacaaagaagcattattgatggtaatggtgactcgtttaactgagcagaagggggcagatttcttactcgccaatatagataccttaatgcaacataaggtacagattattgtattgggaagtggatcgccagatttagaaaatgcgctacgttatttccaacacaaatacccgaaccaaattggggtgaaaatcggttatgacgaggctttatcgcaccaaattattgcaggtggtgatctgattctagtaccaagccgttttgagccgtgcggattaactcaactttatgggctgaaatatggcactttaccgctggttcgccgtaccggtggcttagctgatacggtggtagatagccataaagagagcattgaaaaccgcagtgccaccggatttgtatttgattacccagatgcacctgcgtttttagaggcagctatgcgggcaatcagcttatggcagaaacaaaaattgtggtcgagcgttcgccagaatgcccttgctcaagattttggttgggcaaaagtggcagaacagtaccaaaatttataccacgaaattatttaa

SEQ ID NO: 52463 - protein, 514 aa, Pasteurella haemolytica
MLRVCHLRSQARSIVMIKALQAVLFFNYFTHRKRLKMKVLHICSEMYPLIKTGGLADVMGALPFAQQQAGNDVRVLIPYYPKVAQTLGETVEVATIGTFAGTVSVRFAYFNGLGVYVIDAPHLFMRDGNPYHDSNYQDYPDNYKRFALLGYIGAQLAQGLDHWWGTAQVLHAHDWQAGLACAYLKSWGSNVKTLFTIHNIAYIGRFNAFHLAELGLPWEFFHAEGLEFYGEISYLKAGLYFADRITTVSPTYAREITEEIAGAGLHGLLATRQYQGRLRGILNGVDAEVWNPETDTHIVVNYRANYMHGKAKNKAELQRIFGLPEDKEALLMVMVTRLTEQKGADFLLANIDTLMQHKVQIIVLGSGSPDLENALRYFQHKYPNQIGVKIGYDEALSHQIIAGGDLILVPSRFEPCGLTQLYGLKYGTLPLVRRTGGLADTVVDSHKESIENRSATGFVFDYPDAPAFLEAAMRAISLWQKQKLWSSVRQNALAQDFGWAKVAEQYQNLYHEII

SEQ ID NO: 52464 - DNA, 2430 bp, Amaranthus cruentus
  CDS (1)..(2430)
atggcgtctttaaattcactccgatttatgattgaaacaagatgttcacttcataactcaaatgggtcgcatcacttatcatatcagcgcagaaaacctgttaatggtggtggtttccttaaatttatggatcatgatagtaatgggagattatctttatactgtgtgaaatcagtgagtgggtgtagaagaagtaattcgatgagatataatcgattgaaggcaattggggatgatttaaatgaaggtgaacatagcaaagaagataaagatgaaaatgaagatgcacttgatgctgcaattgagaagagcaataaggtttcagctatgcagaaagagcttttactacagattgctgaacggaaaaagctagtttcatctataagaaatagtgtaatcaactccgatgacgcaccagctgacaaagattacaactctcctcaaaatgatgctcttggtgcaaaccaaatacttgtgaaaaatgagtatgatattagtactggtgctgcaagacaatctgattcagcttcgagcaagttaaacccagaccagctgcaagttccactaagttcgttagaagagaaaagtggacaagcgaaatcagcattgaaaatgttaaatcttgattcatctcagccaaaagagatcttgaccaaggcaacagaaactgactcctccatatcaaatggaagcccaattgttggaaaaagagaaatgaaaactattggaagtttatcaagtgagggaaacgccaatggcgtagatgcatcaaaaggaggtgatgaaaggacaatgttgccaaattttttatcaagcaccaacaagtcttctagcatcatggataaagaggaaaaagaattgggagaatcatacttcaaggggctgagtgagctggtgaacgacgctgccgctgaagatgataagcctcctcctcttgctggccaaaatgtgatgaatgttatcttggttgctgctgaatgtgcaccttggtgtaaaacaggtgggcttggagatgttgctggcgccttgccgaaagctttggctcggcgagggcatcgagtaatggttgtgatacctcgatatgctgaatatgctgattgtcaatttacaggagtgaggaaaagatacaaagtggctggccaggataatgaagtattatatttccatacatacattgatggtgtggactttgtattcattgaagccccaatgcttcgaaatcttgggaaagatatatatggaggaaataggctggacattttgaagcgtatgattctattctgtaaggtggcagttgaggttccttggcatgttccttgtggaggcgtgtgctatggtgacggaaatttggtatttattgcaaatgattggcatactgcactgcttcctgtgtatttaaaggcatactatcgcgacaatggattgatgaagtacacaagatcagtgcttgttatccacaacatagctcaccagggtcggggtcctgtagatgacttcacttatgtggatcttcctccacactaccttgactacttcaagttgtatgatcctgtgggtggagagcattttaatatttttgctgctggtctcaagactgctgatcgtattttgaccgttagtcatgggtatgcctgggagttgaaaactcaagagggtggttggggtttgcatgggatcattaacgacaatgattggaaattgagaggcatagtgaacggtatcgatgtcacagaatggaacccggaattggatctttatttacaatctgatggttacgctaactattcgctcgagacacttaaacccggcaaagcacagtgcaaggcagctttacagaatgagctcggtttacctgttcgtgaggatgttccattgattggtttcattggaaggctagatggtcagaaaggtgttgacatcattgcagaatcgattccatggttaagcggccaagatgtgcagctagtcatgttaggtaccgggaggcctgacctagaacagatgctccgggagtgtgagagtcgatacccagataaaataaggggatgggttgggttttctgtaaagacagcacatcggatcacagctggcgtcgatattttgcttatgccttcaagatttgagccttgtgggcttaaccagttatatgcaatgaattacggtacaattccagtcgttcatgctgttggtggactgagagatacggtccaaccttttgacccatataacaatacaggctacggctggacatttgaccgggctgaagcaaatcgcttgattgatgctttaggaaactgtttattaacttaccgtcaatacaaggagagttgggaaggtctccaaacacgcggaatgactcaagatcttagttgggaccatgctgctgagatttatgaggaagtccttgttgctgccaagtaccagtggtga

SEQ ID NO: 52465 - protein, 809 aa, Amaranthus cruentus
MASLNSLRFMIETRCSLHNSNGSHHLSYQRRKPVNGGGFLKFMDHDSNGRLSLYCVKSVSGCRRSNSMRYNRLKAIGDDLNEGEHSKEDKDENEDALDAAIEKSNKVSAMQKELLLQIAERKKLVSSIRNSVINSDDAPADKDYNSPQNDALGANQILVKNEYDISTGAARQSDSASSKLNPDQLQVPLSSLEEKSGQAKSALKMLNLDSSQPKEILTKATETDSSISNGSPIVGKREMKTIGSLSSEGNANGVDASKGGDERTMLPNFLSSTNKSSSIMDKEEKELGESYFKGLSELVNDAAAEDDKPPPLAGQNVMNVILVAAECAPWCKTGGLGDVAGALPKALARRGHRVMVVIPRYAEYADCQFTGVRKRYKVAGQDNEVLYFHTYIDGVDFVFIEAPMLRNLGKDIYGGNRLDILKRMILFCKVAVEVPWHVPCGGVCYGDGNLVFIANDWHTALLPVYLKAYYRDNGLMKYTRSVLVIHNIAHQGRGPVDDFTYVDLPPHYLDYFKLYDPVGGEHFNIFAAGLKTADRILTVSHGYAWELKTQEGGWGLHGIINDNDWKLRGIVNGIDVTEWNPELDLYLQSDGYANYSLETLKPGKAQCKAALQNELGLPVREDVPLIGFIGRLDGQKGVDIIAESIPWLSGQDVQLVMLGTGRPDLEQMLRECESRYPDKIRGWVGFSVKTAHRITAGVDILLMPSRFEPCGLNQLYAMNYGTIPVVHAVGGLRDTVQPFDPYNNTGYGWTFDRAEANRLIDALGNCLLTYRQYKESWEGLQTRGMTQDLSWDHAAEIYEEVLVAAKYQW

SEQ ID NO: 52466 - DNA, 2745 bp, Triticum aestivum
  CDS (1)..(2745)
  misc_feature (1081)..(1081): y is t or c
atggcgtgctccgcggcggcgggcgtcgaggcgaccgccctcctgtccccgcgctgccccgccccttccccgcccgacggccgctcccgccgccgcctcgccctcgcctccggcacgcgccaccgcagcctcagggcagccgcgcagcgccctcacaagagcgcaaccggcgccgaccccctttataacaacagggccaatgtgcggagcgacgaggcgtcggtttccgctgaaaaagaacggcaaaggaaatacaacgatggagatggcatatcaaaccttaagctggaagatttggtaggaatgatacagaacaccgagaagaatatacttcttttgaatcaagcccgtcttcaggcaatggaacacgctgataaagttcttaaagaaaaggaagccttgcagagaaagataaacattttagagacgaggttgtcagaaacagatgaacaacataagctttcaagtgaagggaatttcagtgactctccactagcattggagcttggtattctaaaggaagagaacattctactgaaggaggacatagaatttttcaaaacaaagcttatagaggttgccgagatagaggagggtatattcaaattggagaaagagcgtgctcttttagatgcttcccttagggagctggagtctaggtttatagccgcccaagcagatacgatgaaacttggtcctagggatgcctggtgggagaaagtagaaaaattggaagacttgcttgagaccacagcaaaccaagtagagcatgctgctgtgatattggaccacaatcatgatctgcaggataggcttgacaatttagaggcatcactgcaagcagcaaatatttcaaagttctcttgttctcttgttgatcttttgcagcaaaaggtcaaattggtagaagaccgcttccaagcatgtaacagcgaaatgcattctcagattgaactgtacgagcattcaatagtggaatttcatgatactcttagcaaactaatagaggaaagtgagaaaagatcactggagaattttacaggaaacatgccttcggaactatggagcaaaatttcccttytaattgatggatggttactggagaagaaaatagcttacaatgacgcaagtatgttacgagaaatggttcggaaaagggacagtcgccttcgggaagcgtacttgtcatacagaggtaccgaaaacagggatgttatggacagttttcttaagatggcattaccaggaaccagttctggtttgcacatcgctcacatagcagcagagatggctcctgtcgcaaaggttggtggcctggcagatgtgatatctggtcttgggaaggcacttcagaaaaaaggccatctagtagagattattcttcccaaatacgactgcatgcaggttgaccaagttagcaatctaaaggttttagatgttcttgtgcagtcctactttgaaggaaatatgttcaacaacaaaatctggaccgggactgttgaaggcctacccgtctactttattgagccacagcatccagcgatgttcttttcgagggctcagtactatggagagcatgatgacttcaaacgtttttcgtacttcagccgtgcggcactagaattactttatcaatctgggaagaaagttgatataatccactgccatgactggcaaactgcatttgttgcacctctttattgggatgtatatgcaaatctaggcttcaactcagctagaatttgcttcacctgtcataattttgaatatcaaggaactgctccagctcgtgatttagcatggtgtggccttgatgttgagcacctagacagaccagacaggatgcgggacaattcacatggaagaataaatgctgttaagggcgcaattgtgtattcaaacatcgtaaccactgtctcgccaacatatgcactagaggttcgctcagagggtgggcgtggactccaagatacacttaaagtacattccaggaaatttcttgggatacttaatggaatcgacacagatacatggaacccttccacagataggtatctcaaggtccagtacaatgctaaggatctccagggaaaggcagccaataaagcagccctcagagagcaactaaacctggcttctgcatatccttcacaaccactggttggttgcattaccaggctagttgctcagaagggtgtacatcttatcaggcgtgcaatctacaaaacagctgaattaggaggacagtttgtccttctgggttcaagtccagtaccagaaattcagagggagtttgaaggtattgcagaccattttcagaacaacaacaatatccggctgattttgaagtatgatgatgcgctgtctcattgcatatatgctgcgtctgacatgttcgttgttccctctatatttgagccatgtggcctcactcagatgatagccatgagatatggttctgtgccgattgttcggaaaactggtgggctgaatgacagtgtctttgacttcgacgacgaaacaatacccatggaggtgcggaacggctttacatttgtcaaggccgacgaacagggcctaagcagcgcgatggagagggcgttcaactgctacacgaggaagcccgaggtctggaaacagctcgtgcagaaagacatgacgatcgatttcagctgggacacctcggcttcgcagtacgaggacatctaccagaaggcggtggctcgagcgagggcggtggcgtga

SEQ ID NO: 52467 - protein, 914 aa, Triticum aestivum
MACSAAAGVEATALLSPRCPAPSPPDGRSRRRLALASGTRHRSLRAAAQRPHKSATGADPLYNNRANVRSDEASVSAEKERQRKYNDGDGISNLKLEDLVGMIQNTEKNILLLNQARLQAMEHADKVLKEKEALQRKINILETRLSETDEQHKLSSEGNFSDSPLALELGILKEENILLKEDIEFFKTKLIEVAEIEEGIFKLEKERALLDASLRELESRFIAAQADTMKLGPRDAWWEKVEKLEDLLETTANQVEHAAVILDHNHDLQDRLDNLEASLQAANISKFSCSLVDLLQQKVKLVEDRFQACNSEMHSQIELYEHSIVEFHDTLSKLIEESEKRSLENFTGNMPSELWSKISLLIDGWLLEKKIAYNDASMLREMVRKRDSRLREAYLSYRGTENRDVMDSFLKMALPGTSSGLHIAHIAAEMAPVAKVGGLADVISGLGKALQKKGHLVEIILPKYDCMQVDQVSNLKVLDVLVQSYFEGNMFNNKIWTGTVEGLPVYFIEPQHPAMFFSRAQYYGEHDDFKRFSYFSRAALELLYQSGKKVDIIHCHDWQTAFVAPLYWDVYANLGFNSARICFTCHNFEYQGTAPARDLAWCGLDVEHLDRPDRMRDNSHGRINAVKGAIVYSNIVTTVSPTYALEVRSEGGRGLQDTLKVHSRKFLGILNGIDTDTWNPSTDRYLKVQYNAKDLQGKAANKAALREQLNLASAYPSQPLVGCITRLVAQKGVHLIRRAIYKTAELGGQFVLLGSSPVPEIQREFEGIADHFQNNNNIRLILKYDDALSHCIYAASDMFVVPSIFEPCGLTQMIAMRYGSVPIVRKTGGLNDSVFDFDDETIPMEVRNGFTFVKADEQGLSSAMERAFNCYTRKPEVWKQLVQKDMTIDFSWDTSASQYEDIYQKAVARARAVA

SEQ ID NO: 52468 - DNA, 2664 bp, Chlorella kessleri
  CDS (53)..(1882)
gatcagggttgcctagcctgctgtcgccttagtattcacgacgacaggcacaatgcagcaggctttgcagaccggacctcggaccctgcctggcagtgcttgccagacagtgctgccccggttctcgggcctcagacctgctcagcagaggtctcagaggagctattctgccaaactagcagccaatgcgcagcgcgcagccctgtccgtgtcggcagcagcggccactgctgttaaacccacactggcaaccccgcctaccgagaaggccacaaaacctatgaatattgtttttgtgtcagctgaggtggccccctggagcaagaccggtggccttggcgacgtggcgggcgctttgcccatagagctagcgaagcgcgggcacagcgtgattagcatagcccccaggtatgaccagtactgggacgcctgggacacaggcgtcaccatcaacgtgggcggcgagcaggttcggttcttccactctgtgaagaagggtgtgcaccgcgtgtgggtggaccacccctggttcctggccaaggtgtggggcatgacgggtgccaagctgtacggctccaagtcgggcgctgactacatcgacaaccagaagcggttcaagatgttctgcgaggcggccctccaggcgctgcgcgtgctgccctttgcccccggcgaggactgcctcatcgttgccaacgactggcactcatcgctcatccccgtgctgctcaaggacgtgtatcagccgcgcggagagttcaaggacaccaaggtggctctgtgctgccacaacattgcgttccagggccgcttctgggccgacagctggcacgagctggggctgcccgactcctccaagcccaagtttgagttctcggatggctaccccaagatctttgacgagacctcccccgctgacgagtcgggccggctggctgacctggcccccgctggcaagcggtttgagaagatcaactggctgagggcgggcatcctgtccgcggataaggtgctcaccgtgtcgcccaactacgcaacagagattgcctccggccccgccctgggtgtggagctggataccgtgatcgccaagaagggcgtggagggcgtggtgaacggcatggatgtggaggagtggaaccctgcactggacaagttcctgcagttcaagtacaacgcggagactgtggaggcggggaaggcgtacgccaaggcggcgctgcagaaggaggcgggtctgccggtggaccccaaggcgccactgtttggcttcatcgggcggctggaggagcagaagggcgtggacatcctgctggcagcgctgggcaagatccccaagtcaaccaacgcgcaggtggtgattctgggcacgggcaagaaggcgctggaggcgtctgtgaagaacctgaccaaggccttccccggccgcgccgcgggcgtggtcaagttctccaaccccctggcccaccttatcaccgccggctccgacttcatgctggtgccctcacgctttgagccatgcggcctcatccagctccacgcaatgcagtacggcaccgtcccgctggtgagcagcaccggcgggctggtggacacggtgaaggagggggtgaccggcttccacatgggcgcgtttgaccccgacaccctcctggaggcggatgccgacgcagtggcacagaccatcgccagggcttccgaggtcttcaccacccccgcctacaaggagatgcgcaacaagtgcatcacccaggacctgtcgtgggccaagccggccaagaagtgggaggccatcctcatcgagctcaagtacgggcctgggccgacccccgaggccacagctgacaaggcggccgtgactacccccgtccagaagatctgagccggctccgaggccggagtgggctcacatgtggtgacggtggcaggtccattgacagcaaagctggaggtaatgcactgctaagagcagtgggtgaagggcaatagacaagcctaagctgcaggtgcaggttgcgtagatggtgccggtggtggatgctaggctcggccacttaagtttgtttgccacggagcacctgcaaaatatagcccgcgttccaaggcacgatgcctgggcagctcggagacccaaaacttgcagcgctaggacacatgcggcggttgccacaccagcgcgcttgaaaaaataccgaatggttgaacccccctcaagctgccagcagctgcggttgagcagttgcctggccctctgtcctgcatgcttccttgtgtgttctgttctctgcttgtacctcgatgatatgggtggccgtgcagcaggttatgcacgggggccccctggccatacatttcattattgtgctgctcgtgagtctctggtatcccctgaataccccctggccgaagcaggcaatgcacgcatggaatccctgcccgcccaggaatctgatcaagccgtgttgtctcttttcctatgcctgtacacacatgattgtttccgtgcctgccacgtatggttgcccctgggccacgattttcaacccagcgcttttggtggatgctgggcttggtaacactgtattgggagcaagaaaccccggccccgcagcacctggggcattttgtgtaagagaagaagatctcaaaaaaaaaaaaaaaaaa

SEQ ID NO: 52469 - protein, 609 aa, Chlorella kessleri
MQQALQTGPRTLPGSACQTVLPRFSGLRPAQQRSQRSYSAKLAANAQRAALSVSAAAATAVKPTLATPPTEKATKPMNIVFVSAEVAPWSKTGGLGDVAGALPIELAKRGHSVISIAPRYDQYWDAWDTGVTINVGGEQVRFFHSVKKGVHRVWVDHPWFLAKVWGMTGAKLYGSKSGADYIDNQKRFKMFCEAALQALRVLPFAPGEDCLIVANDWHSSLIPVLLKDVYQPRGEFKDTKVALCCHNIAFQGRFWADSWHELGLPDSSKPKFEFSDGYPKIFDETSPADESGRLADLAPAGKRFEKINWLRAGILSADKVLTVSPNYATEIASGPALGVELDTVIAKKGVEGVVNGMDVEEWNPALDKFLQFKYNAETVEAGKAYAKAALQKEAGLPVDPKAPLFGFIGRLEEQKGVDILLAALGKIPKSTNAQVVILGTGKKALEASVKNLTKAFPGRAAGVVKFSNPLAHLITAGSDFMLVPSRFEPCGLIQLHAMQYGTVPLVSSTGGLVDTVKEGVTGFHMGAFDPDTLLEADADAVAQTIARASEVFTTPAYKEMRNKCITQDLSWAKPAKKWEAILIELKYGPGPTPEATADKAAVTTPVQKI

SEQ ID NO: 52470 - DNA, 1830 bp, Zea mays
  CDS (1)..(1830)
atggcggctctagccacgtcgcagctcgtcgcaacgcgcgccggcctgggcgtcccggacgcgtccacgttccgccgcggcgccgcgcagggcctgagggggggccggacggcgtcggcggcggacacgctcagcatgcggaccagcgcgcgcgcggcgcccaggctccagcaccagcagcagcagcaggcgcgccgcggggccaggttcccgtcgctcgtcgtgtgcgccagcgccggcatgaacgtcgtcttcgtcggcgccgagatggcgccgtggagcaagaccggcggcctcggcgacgtcctcggcggcctgccgccggccatggccgcgaatgggcaccgtgtcatggtcgtctctccccgctacgaccagtacaaggacgcctgggacaccagcgtcgtgtccgagatcaagatgggagacaggtacgagacggtcaggttcttccactgctacaagcgcggagtggaccgcgtgttcgttgaccacccactgttcctggagagggtttggggaaagaccgaggagaagatctacgggcctgacgctggaacggactacagggacaaccagctgcggttcagcctgctatgccaggcagcacttgaagctccaaggatcctgagcctcaacaacaacccatacttctccggaccatacggggaggacgtcgtgttcgtctgcaacgactggcacaccggccctctctcgtgctacctcaagagcaactaccagtcccacggcatctacagggacgcaaagaccgctttctgcatccacaacatctcctaccagggccggttcgccttctccgactacccggagctgaacctcccggagagattcaagtcgtccttcgatttcatcgacggctacgagaagcccgtggaaggccggaagatcaactggatgaaggccgggatcctcgaggccgacagggtcctcaccgtcagcccctactacgccgaggagctcatctccggcatcgccaggggctgcgagctcgacaacatcatgcgcctcaccggcatcaccggcatcgtcaacggcatggacgtcagcgagtgggaccccagcagggacaagtacatcgccgtgaagtacgacgtgtcgacggccgtggaggccaaggcgctgaacaaggaggcgctgcaggcggaggtcgggctcccggtggaccggaacatcccgctggtggcgttcatcggcaggctggaagagcagaagggacccgacgtcatggcggccgccatcccgcagctcatggagatggtggaggacgtgcagatcgttctgctgggcacgggcaagaagaagttcgagcgcatgctcatgagcgccgaggagaagttcccaggcaaggtgcgcgccgtggtcaagttcaacgcggcgctggcgcaccacatcatggccggcgccgacgtgctcgccgtcaccagccgcttcgagccctgcggcctcatccagctgcaggggatgcgatacggaacgccctgcgcctgcgcgtccaccggtggactcgtcgacaccatcatcgaaggcaagaccgggttccacatgggccgcctcagcgtcgactgcaacgtcgtggagccggcggacgtcaagaaggtggccaccaccttgcagcgcgccatcaaggtggtcggcacgccggcgtacgaggagatggtgaggaactgcatgatccaggatctctcctggaagggccctgccaagaactgggagaacgtgctgctcagcctcggggtcgccggcggcgagccaggggtcgaaggcgaggagatcgcgccgctcgccaaggagaacgtggccgcgccctga

SEQ ID NO: 52471 - protein, 609 aa, Zea mays
MAALATSQLVATRAGLGVPDASTFRRGAAQGLRGGRTASAADTLSMRTSARAAPRLQHQQQQQARRGARFPSLVVCASAGMNVVFVGAEMAPWSKTGGLGDVLGGLPPAMAANGHRVMVVSPRYDQYKDAWDTSVVSEIKMGDRYETVRFFHCYKRGVDRVFVDHPLFLERVWGKTEEKIYGPDAGTDYRDNQLRFSLLCQAALEAPRILSLNNNPYFSGPYGEDVVFVCNDWHTGPLSCYLKSNYQSHGIYRDAKTAFCIHNISYQGRFAFSDYPELNLPERFKSSFDFIDGYEKPVEGRKINWMKAGILEADRVLTVSPYYAEELISGIARGCELDNIMRLTGITGIVNGMDVSEWDPSRDKYIAVKYDVSTAVEAKALNKEALQAEVGLPVDRNIPLVAFIGRLEEQKGPDVMAAAIPQLMEMVEDVQIVLLGTGKKKFERMLMSAEEKFPGKVRAVVKFNAALAHHIMAGADVLAVTSRFEPCGLIQLQGMRYGTPCACASTGGLVDTIIEGKTGFHMGRLSVDCNVVEPADVKKVATTLQRAIKVVGTPAYEEMVRNCMIQDLSWKGPAKNWENVLLSLGVAGGEPGVEGEEIAPLAKENVAAP

SEQ ID NO: 52472 - DNA, 1818 bp, Triticum monococcum
  CDS (1)..(1818)
atggcggctctggtcacgtcccagctcgccacctccggcgccgtcctcggcatcaccgacaggttccggcgtgcaggttttcagggcgtgaggccccggagcccggcggatgcggcgctcggcatgaggactgtcggagcaagcgcggcaccgaagcaacaaagcaggaaagcgcaccgcgggacccggcggtgcctctcggtggtggtgcgcgccacgggcagcggcggcatgaacctcgtgttcgtcggcgccgagatggcgccctggagcaagaccggcggcctcggcgacgtcctcgggggcctccccccagccatggccgccaacggtcaccgggtcatggtcatctccccgcgctacgaccagtacaaggacgcctgggacaccagcgtcgtctccgagatcaaggtcgccgacgagtacgagcgggtgaggtacttccactgcttcaaacgtggggtggaccgcgtgttcgtcgaccacccgtgcttcctggagaaggtccggggcaagaccaaggagaagatctacgggcccgacgccggcacggactacgaggacaaccagctacgcttcagccttctctgccaggcagcacttgaggtgcccaggatcctcgacctcaacaacaacccatacttttctggaccctacggggaagacgtggtgttcgtgtgcaacgactggcacacgggccttctggcctgctacctcaagagcaactaccagtccaatggcatctataggacggccaaggtggcgttctgcatccacaacatctcgtaccagggccgcttctccttcgacgacttcgcgcagctcaacctgcccgacaggttcaagtcgtccttcgacttcatcgacggctacgacaagccggtggaggggcgcaagatcaactggatgaaggccgggatcctgcaggccgacaaggtgctgacggtgagcccctactacgcggaggagctcatctccggcgaagccaggggctgcgagctcgacaacatcatgcgcctcacgggcatcaccggcatcgtcaacggcatggatgtcagcgagtgggaccccaccaaggacaagttcctcaccgtcaactacgacgtcaccaccgcgttggaggggaaggtgctgaacaaggaggcgctgcaggccgaggtggggctgccggtggaccggaaggtgccgctggtggcgttcatcggcaggctggaggagcagaagggccccgacgtgatgatcgccgccatcccggagatcgtgaaggaggaggacgtccagatcgttctcctgggcaccgggaagaagaagtttgagcggctgctcaagagcgtggaggagaagttcccaagcaaggtgagggccgtggtcaggttcaacgcgccgctggctcaccagatgatggccggagccgacgtgctcgccgtcaccagccgctttgagccctgcggcctcatccagctccaggggatgcgctacggaacgccgtgcgcatgcgcgtccaccggcgggctcgtcgacaccatcgtggagggcaagaccgggttccacatgggccgcctcagcgtcgactgcaacgtggtggagccggccgacgtgaagaaggtggtgaccaccctgaagcgcgccgtcaaggtcgtcggcacgccggcgtaccatgagatggtcaagaactgcatgatacaggatctctcctggaaggggcctgccaagaactgggagcacgtgcttctggaactgggggtcgaggggagcgagccggggatcgtcggcgaggagatcgcgccgctcgccatggagaacgtcgccgctccctga

SEQ ID NO: 52473 - protein, 605 aa, Triticum monococcum
MAALVTSQLATSGAVLGITDRFRRAGFQGVRPRSPADAALGMRTVGASAAPKQQSRKAHRGTRRCLSVVVRATGSGGMNLVFVGAEMAPWSKTGGLGDVLGGLPPAMAANGHRVMVISPRYDQYKDAWDTSVVSEIKVADEYERVRYFHCFKRGVDRVFVDHPCFLEKVRGKTKEKIYGPDAGTDYEDNQLRFSLLCQAALEVPRILDLNNNPYFSGPYGEDVVFVCNDWHTGLLACYLKSNYQSNGIYRTAKVAFCIHNISYQGRFSFDDFAQLNLPDRFKSSFDFIDGYDKPVEGRKINWMKAGILQADKVLTVSPYYAEELISGEARGCELDNIMRLTGITGIVNGMDVSEWDPTKDKFLTVNYDVTTALEGKVLNKEALQAEVGLPVDRKVPLVAFIGRLEEQKGPDVMIAAIPEIVKEEDVQIVLLGTGKKKFERLLKSVEEKFPSKVRAVVRFNAPLAHQMMAGADVLAVTSRFEPCGLIQLQGMRYGTPCACASTGGLVDTIVEGKTGFHMGRLSVDCNVVEPADVKKVVTTLKRAVKVVGTPAYHEMVKNCMIQDLSWKGPAKNWEHVLLELGVEGSEPGIVGEEIAPLAMENVAAP

SEQ ID NO: 52474 - DNA, 1830 bp, Pennisetum americanum
  CDS (1)..(1830)
atggcggctctggcaacctcccagctcgccacaacccacgccggcttcggcttcggcgacgcctcctcctcctccatgttccgcactggcgtcctaaggggctcctcccgggcctcctccccggcggcgggcacgctcaccgtgcgcaccagcgcgcgcgccgtgcccaggcagcagcaccaccgccgggcgcaccagcgcggcgccaggttcccctccctcgtcgtctgcgccaccggtgccggcatgaacgtcgtcttcgtcggcgccgagatggcgccgtggagcaagaccggcgggctcggcgacgtcctcggcggcctcccaccggccatggccgcgaatgggcacagggtcatggtcgtctcccctcgctacgaccagtacaaggacgcctgggacaccagcgtcgtctccgagatcaaggttggagacaggtacgagagggtgaggttcttccactgctacaagcgcggggttgaccgtgtgttcatcgaccacccatccttcctggagagggtttggggaaagactggtgagaagatctacgggccagacactggagtggactacaaggacaaccagctgcgtttcagcctgctttgccaggcagcacttgaagctcctaggatcctgagcctcaacagcaacccctacttctcaggaccgtacggggaggatgtcgtgttcgtctgcaacgactggcacaccggccctctgtcgagctacctcaagagcaactaccagtccaacggcatctacaggaatgcaaagaccactttctgcatccacaacatctcctaccagggccggttcgcattctccgactacacagagctgaatctccctgagagattcaagtcatccttcgatttcatcgatggctacgataagcccgtggagggcaggaagatcaactggatgaaggccgggatcctcgaagccgacaaggtcctgacggtgagcccctactacgccgaggagctcatctccggcgtcgccaggggctgcgagctcgacaacatcatgcgcctcaccggcatcaccgggatcgtcaacggcatggacgtcagcgagtgggaccccagcaaggacaaatacatcgccaccaagtacgacgtgtcaacggccatcgaggccaaggcgctcaacaaggaggcgctgcaggccgctgccgggctcccggtagaccggaagatcccgctggtggcgttcgtcggcaggctggaggagcagaagggccccgacgtcatggccgccgccatcccgcagctcatggaggaggacgtccagatcgttcttctgggcactgggaagaagaagttcgagcggatgctgatgagcgcggaggagaagtaccccgacaaggtgcgcgccgtggtgaagttcaacgcggcgctggcgcaccacatcatggccggcgctgacctgctcgccgtcaccagccgcttcgagccctgcggcctcatccagctccaggggatgcgatacggcacgccctgcgtgtgcgcgtccaccggtgggctcgtcgacaccgtcatcgaaggcaagaccggtttccacatgggccgcctcagcgtcgactgtaaggtcgtggagccggccgacgtgcagaaggtggcgagcaccctgaagcgcgccatcaaggtcgtcggcacgccggcgtacgaggagatggtgaaaaactgcatgatccaggacctctcctggaaggggcctgccaagaactgggagaacgtgctgctgagcctgggcgtcgccggcagcgagccggggatcgagggcgaggagatcgcgccgcttgccaaggagaacgtcgccgctccctga

SEQ ID NO: 52475 - protein, 609 aa, Pennisetum americanum
MAALATSQLATTHAGFGFGDASSSSMFRTGVLRGSSRASSPAAGTLTVRTSARAVPRQQHHRRAHQRGARFPSLVVCATGAGMNVVFVGAEMAPWSKTGGLGDVLGGLPPAMAANGHRVMVVSPRYDQYKDAWDTSVVSEIKVGDRYERVRFFHCYKRGVDRVFIDHPSFLERVWGKTGEKIYGPDTGVDYKDNQLRFSLLCQAALEAPRILSLNSNPYFSGPYGEDVVFVCNDWHTGPLSSYLKSNYQSNGIYRNAKTTFCIHNISYQGRFAFSDYTELNLPERFKSSFDFIDGYDKPVEGRKINWMKAGILEADKVLTVSPYYAEELISGVARGCELDNIMRLTGITGIVNGMDVSEWDPSKDKYIATKYDVSTAIEAKALNKEALQAAAGLPVDRKIPLVAFVGRLEEQKGPDVMAAAIPQLMEEDVQIVLLGTGKKKFERMLMSAEEKYPDKVRAVVKFNAALAHHIMAGADLLAVTSRFEPCGLIQLQGMRYGTPCVCASTGGLVDTVIEGKTGFHMGRLSVDCKVVEPADVQKVASTLKRAIKVVGTPAYEEMVKNCMIQDLSWKGPAKNWENVLLSLGVAGSEPGIEGEEIAPLAKENVAAP

SEQ ID NO: 52476 - DNA, 1815 bp, Hordeum bulbosum
  CDS (1)..(1815)
atggcggctctggtcacgtcccagctcgccacctccggcaccgtcctcggcatcaccgacaggttccggcgtccaggttttcagggcctcaggccccggaacccggcggatgcggcgctcggcatgaggaccatcggagcaagcgccgccccgaagcaaagccggaaagtgcaccgcgggagcaggcggtgcctctccgtggtggtgcgcgccacgggcagcagcggcatgaacctcgtgttcgtcggcgccgagatggcgccctggagcaagaccggcggccttggcgacgtcctcggcggccttcccccggccatggccgccaacggtcaccgtgtgatggtcgtctccccgcgctacgatcagtacaaggacgcctgggacaccagcgtcgtctccgagatcaaggtggctgacgggtacgagagggtgaggttcttccactgctacaagcgcggagtggaccgcgtgttcatcgaccacccgtggttcctggagaaggtccggggcaagaccaaggagaagatctatgggcccgacgccggcacggactacgaggacaaccagcagcgcttcagccttctctgccaggcagcactcgaggcacccaggatcctcaacctcaacaacaacccctacttttctgggccctacggggaagacgtggtgttcgtgtgcaacgactggcacacgggccttctggcctgttacctgaagagcaactaccagtccaatggcatctacaggaccgccaaggtggccttctgcatccacaacatctcgtaccagggccgcttctccttcgacgacttcgcgcagctcaacctgccggacaggtttaagtcgtccttcgatttcattgacggctacgacaagcccgtggaggggcgcaagatcaactggatgaaggccgggatcctgcaggctgacaaggtgctgacggtgagcccctactacgctgaggagctcatctctggcgaagctaggggctgcgagctcgacaacatcatgcgcctcacggggatcaccggcatcgtcaacggcatggacgtcagtgagtgggaccccaccaaggacaagttcctcacagtcaactacgacatcaccaccgcgttggaggccaaggcgctgaacaaggaggcgctgcaggccgaggtagggctgccggtggacaggaaggtgccgctggtggccttcataggcaggctggaggagcagaagggccctgacctgatgatcgccgccatcccggagatcgtgaaggaggaggacgtccagatcattctccttggcaccgggaagaagaagtttgagaagctgctcaagagcatggaggagaagttcccgggcaaggtgagggccgtggtcaggttcaacgcgccgctagctcaccagatgatggccggcgccgacttgctcgctgtcaccagccgctttgagccctgcggcctcatccagctccagggaatgcgctatggaacgccgtgcgtgtgcgcgtccaccggcgggctcgtcgacacgatcgtggagggcaagaccgggttccatatgggccgcctcagcgtcgactgcaacgtggtggagccggccgacgtgaagaaggtggcgaccaccctgaagcgcgccgtcaaggtagttcgcacgccggcgtaccaggagatggtcaagaactgcatgatccaggacctctcctggaagggacctgccaagaactgggaggacgtgcttctggaactgggggtggaggggagcgagccggggatcgtcggcgaggagatcgcgccgctcgccatggagaacgtcgccgctccctga

SEQ ID NO: 52477 - protein, 604 aa, Hordeum bulbosum
MAALVTSQLATSGTVLGITDRFRRPGFQGLRPRNPADAALGMRTIGASAAPKQSRKVHRGSRRCLSVVVRATGSSGMNLVFVGAEMAPWSKTGGLGDVLGGLPPAMAANGHRVMVVSPRYDQYKDAWDTSVVSEIKVADGYERVRFFHCYKRGVDRVFIDHPWFLEKVRGKTKEKIYGPDAGTDYEDNQQRFSLLCQAALEAPRILNLNNNPYFSGPYGEDVVFVCNDWHTGLLACYLKSNYQSNGIYRTAKVAFCIHNISYQGRFSFDDFAQLNLPDRFKSSFDFIDGYDKPVEGRKINWMKAGILQADKVLTVSPYYAEELISGEARGCELDNIMRLTGITGIVNGMDVSEWDPTKDKFLTVNYDITTALEAKALNKEALQAEVGLPVDRKVPLVAFIGRLEEQKGPDLMIAAIPEIVKEEDVQIILLGTGKKKFEKLLKSMEEKFPGKVRAVVRFNAPLAHQMMAGADLLAVTSRFEPCGLIQLQGMRYGTPCVCASTGGLVDTIVEGKTGFHMGRLSVDCNVVEPADVKKVATTLKRAVKVVRTPAYQEMVKNCMIQDLSWKGPAKNWEDVLLELGVEGSEPGIVGEEIAPLAMENVAAP

SEQ ID NO: 52478 - DNA, 1578 bp, Ostreococcus tauri
  CDS (1)..(1578)
atgaacatcgtgttcgtctcgagcgaagtcgcgccgtggtcgaagactgggggattgggcgacgtgtgcggagcgctgccgcaagcgctcgtcgcgcgcggacatcgcgtcatggtgatctcgccaaagtatcaaaacggatccaaggcggacgccctgtacaacggcgcgttagatacgtgcacgcgagcaaagattgggtgtttcggcgccgagcatgaggtgggattctttcatcaaattaaaaacggagtggattacgtcttcgtcgatcacgcatccttccatcgcaaggggagcttgtacggagattctttcggggtatacggagacaaccaattcagatttacgcttttagcgcacgcagcgtgcgaagcacccctgcagttggcgtttgaaggttgcggcgatcgatacggcaaggatatcgtcttcgtcgccaacgactggcacgccggtttagtccccactttggtcgcatcaaagtaccgtcctcacggtgtttacagggacgcgcgcacaatttgcgcaattcacaatatttttcaccaaggcgtcgagccatcgacgacgttcccgtgcctcggcgtaccgaccgagtggtacggcgcgctcgagtatcagtacccgcatcacatgcgagcgcacgaactcgacgagggtagagtggtgaacatcttaaagggggcgattgcgacctcggatcgcgtgctcaccgtctcccaaggctacgcttacgagatcacgaccccagagggaggcaagggcatggaagggttgctcctcagcagggcgaacaaactcgacggcatcgcgaacgggatagacatggacgagtggaacccggaggccgatccggactgcgccgctccttattccgtgatagatctcgccgggaagctcgagtgcaagcgcgcacttcaaaaggaacttgggctgcccgagcgagacgacgtcccactcatgggcttcatcgggcgtttggattggcaaaaggggccggatctgctccagcaagcgctccacgacatgatgcgcgaggacatccaggtggtgatgcttggaagcggcttgcccgagctcgaggatttcatgcgatgggccgagggtgagtacaaggacaagttccgcggatgggtcggcttttccgtcccgatggcgcaccgcatcacggcgggttgtgacctcttgctcatgccgtcgcgattcgagccttgcggtctgaaccaactgtacgcgatgcgttatggcactttgcccatcgcgcacgccaccggaggactgaaggatacgatcactccgcacaacgcgttcggagacgccgacaaggttctcgccggcacggcggacgtcaatcagggcgaaggcgtcggcaccggttggctgtttaacgacatgaacgccgacgcgctgatgtgggcgatccgatcggcgtgcgacgtttatcgatccgacaagaagttctggcgcgcaatgcagacgcaggcgatgacgcaagacttgtcttggaacaacgcggcgcgaaagtgggagcaggtcttcgagtgggccaagatggatcctccgcactgcggctaa

SEQ ID NO: 52479 - protein, 525 aa, Ostreococcus tauri
MNIVFVSSEVAPWSKTGGLGDVCGALPQALVARGHRVMVISPKYQNGSKADALYNGALDTCTRAKIGCFGAEHEVGFFHQIKNGVDYVFVDHASFHRKGSLYGDSFGVYGDNQFRFTLLAHAACEAPLQLAFEGCGDRYGKDIVFVANDWHAGLVPTLVASKYRPHGVYRDARTICAIHNIFHQGVEPSTTFPCLGVPTEWYGALEYQYPHHMRAHELDEGRVVNILKGAIATSDRVLTVSQGYAYEITTPEGGKGMEGLLLSRANKLDGIANGIDMDEWNPEADPDCAAPYSVIDLAGKLECKRALQKELGLPERDDVPLMGFIGRLDWQKGPDLLQQALHDMMREDIQVVMLGSGLPELEDFMRWAEGEYKDKFRGWVGFSVPMAHRITAGCDLLLMPSRFEPCGLNQLYAMRYGTLPIAHATGGLKDTITPHNAFGDADKVLAGTADVNQGEGVGTGWLFNDMNADALMWAIRSACDVYRSDKKFWRAMQTQAMTQDLSWNNAARKWEQVFEWAKMDPPHCG

SEQ ID NO: 52480 - DNA, 2939 bp, Colocasia esculenta
  CDS (220)..(2634)
ggtgcgtgtgtgcttatagtgtcctccatttcccccctcctcctccctctagcaggccaggcagccagggcttaccatcggcgaggttttttgcattccccctcctttaaagggattcctttccgccgggcagtcgggggagcagtacatgacacctttttaatcagttttcgcgggaggcccagctaaaggtgaggaggaaaagaggaagacagaaagatggcatctttgggacgagctgggacggctgctttcttcctggagccgtcaaggagctgcgggcagccgcgggctgctgggttctgtgtgcctgtccggtgcaggttgaattgtcttgatctccattcgcgcgctggggaattcaggtttctgcgggcgggcaatggcgaaaggcacatgggttttacatggagagacagggggacgggtagggttctgccggcagtgggaagaaaaggtgctgcagatggagctgaggatggcggcgaggacgatatgggcgacgtggatgtggatggcgacgaggtgcttaaggcgactatcgagaagaccaagagggcgctgtccgtgcagaagagcctgctcgaacagattgttgaaaggagaaaacttgtttcttccatgaaagagagtgtcatcaagacaggaaaggaaacagtccctcccaataaaagtgatgcctctttctccagtttgagctcagataccacgagtggtatggctcgtaacaaatataaaaagttttcttactccacttcggaggcagcagaaacactgtctgctaataccaatggggctgctataaaaaagaaatttcagaatgaagaagtggaagtctctggtgatgctaaggagatttctatgcttagttcaaaaatagaaagctcagatgatgaaaagaaggaaaatgaagatggcttacttgcagaaagctcgatagcagaatctcttggactgctaagagaacccagttcaaaagtttctcagtctaaggcagtgccctctttgcttccaaaagtgtctgaagctttcacggccaaggatgaacaacgtgaggaatcggaagagaaaagccaagatgatccagatgataaaacagatgtagctcccaaggaagaagatgtaaaatcccctccattggctggattaaatgttatgaatgttatcttggtagctgcagaatgtgctccttggtccaaaactggtgggcttggagatgttgctggagctttaccaaaggccttggccagacgtgggcatagagttatggttgtggttccccgatatggcaactattctggacctcaagaaataggtctacgcaagcgttacaaggtggatggacaggatatggaggtaacatattatcttacctacattgatggtgtggatttcgttttcatcgatagtcctatttttcgccatcgtgaaagcaacatatatggtggggaacgtgcggatattttaaaacgaatggtccttttatgcaaggcagctgttgaggttccatggcatgttccttgtggtggagtctgctatggtgatggaaaccttgttttcattgcaaatgattggcacacagcactgctacctgtttatctaaaagcatattatcgtgacaatggctcgatgaaatacacccggtctgtcttggttatacacaatatagctcaccagggtcgtgggcctgtagatgagttccgcattgtggatttacctggtcattatgtcgatctatttaggttgtatgacctagttggtggtgagcacttaaacatctttgctgcgggcttgaaaactgctgaccgtgtagtcacagtgagccatggttattcatgggagcttaaaacattggaaggtggttggggactgcacgagattatcaatgagaatgattggaaacttcgaggtattgtgaatggaatcgacacagaagattggaacccggaagttgatgtgcacttaaaatctgatgggtataccaactactcattggagactcttaatatgggtaagcctcaatgcaaggctgcacttcagaaagaacttggccttcctgttcgaccagaagttcctgttgttgcctttattgggaggctagatcatcaaaagggagtggatatcattgcagaggccattccctggatggtcagtcaggatatgcagttagtcatgctgggtactggaaggtcagatctggaggacatgcttcggagttttcagggcaatcactgtggcaaggtcaggagttgggttggtttttctgttaaaatggcacataggataactgcaggtgcagacgtcctgttaatgccatccaggttcgagccgtgcggcctgaaccagctgtatgccatgatgtacggaaccattcctcttgttcatgcagttggtggactgagagacactgtagtgcccttcaatccatatgaggagagtggatttgggtggacatttgacagagccaaggcagggaagctgattgacgcgctgcgcaactgtttcaacactttctggaattacaaggagagctgggaggggttgcagagacgtggtatgttgcaggaccttagctgggatcatgccgctcagctatatgaggaagtccttgttgctgccaagtaccagtggtgaatcctttgagcataaacggttcacttggggccgaacaaatttggatgggacttcagtgatccttattggtaggtcttttgctagggcgtagctgctggagagagcctcccccacctcctgatgtatattgcttattcctttttgctactttcgtgatctcctccattttactaggtccaccgacgatcatgaatactgcgagtattgcagccgtgtagtatggctcatttctctcctttgtagcccttctgaatcattagttttgctggtttttcccccaaaaaaaaaaaaaaaaaaaacaaaaa

SEQ ID NO: 52481 - protein, 804 aa, Colocasia esculenta
MASLGRAGTAAFFLEPSRSCGQPRAAGFCVPVRCRLNCLDLHSRAGEFRFLRAGNGERHMGFTWRDRGTGRVLPAVGRKGAADGAEDGGEDDMGDVDVDGDEVLKATIEKTKRALSVQKSLLEQIVERRKLVSSMKESVIKTGKETVPPNKSDASFSSLSSDTTSGMARNKYKKFSYSTSEAAETLSANTNGAAIKKKFQNEEVEVSGDAKEISMLSSKIESSDDEKKENEDGLLAESSIAESLGLLREPSSKVSQSKAVPSLLPKVSEAFTAKDEQREESEEKSQDDPDDKTDVAPKEEDVKSPPLAGLNVMNVILVAAECAPWSKTGGLGDVAGALPKALARRGHRVMVVVPRYGNYSGPQEIGLRKRYKVDGQDMEVTYYLTYIDGVDFVFIDSPIFRHRESNIYGGERADILKRMVLLCKAAVEVPWHVPCGGVCYGDGNLVFIANDWHTALLPVYLKAYYRDNGSMKYTRSVLVIHNIAHQGRGPVDEFRIVDLPGHYVDLFRLYDLVGGEHLNIFAAGLKTADRVVTVSHGYSWELKTLEGGWGLHEIINENDWKLRGIVNGIDTEDWNPEVDVHLKSDGYTNYSLETLNMGKPQCKAALQKELGLPVRPEVPVVAFIGRLDHQKGVDIIAEAIPWMVSQDMQLVMLGTGRSDLEDMLRSFQGNHCGKVRSWVGFSVKMAHRITAGADVLLMPSRFEPCGLNQLYAMMYGTIPLVHAVGGLRDTVVPFNPYEESGFGWTFDRAKAGKLIDALRNCFNTFWNYKESWEGLQRRGMLQDLSWDHAAQLYEEVLVAAKYQW

SEQ ID NO: 52482 - DNA, 1827 bp, Hordeum spontaneum
  CDS (1)..(1827)
atggcggctctggccacgtcccagctcgccacctccggcaccgtcctcggcgtcaccgacaggtcggcgccgtccatgttccggcatgctggttttcagggcctgaggccccggaagcccgcagatgggacgtttggtatgaggactgtcggagcaagcgccgccccgaagcaaagccggaaagcgcaccgcgggaaccggcggtgcctctccgtggtggtgcgtgccacgggcagcggcatgaacctcgtgttcgtcggcgccgagatggcgccctggagcaagaccggcggccttggcgacgtcctcggcggccttccaccagccatggccgccaacggtcaccgggtgatggtcgtctccccgcgctacgatcagtacaaggacgcctgggacaccagcgtcatctccgagatcaaggtcgctgacgagtacgagagggtgaggttcttccactgctacaagcgcggagtggaccgcgtgttcatcgaccacccgtggttcctggagaaggtccggggcaagaccaaggagaagatctacgggcccgacgccggcacggactacgaggacaaccagcagcgcttcagccttctctgccaggcagcgctcgaggcacccaggatcctcaacctcaacaacaacccctacttttctggtccctacggggaagacgtggtgttcgtgtgcaacgactggcacacgggccttctggcctgctacctcaagagcaactaccagtccaatggcatctacaggacggccaaggtggccttctgcatccacaacatctcgtaccagggccgcttctccttcgacgactttgcgcagctcaacctgcccgacaggttcaagtcgtccttcgacttcattgacggctacgacaagcccgtggaggggcgcaagatcaactggatgaaggccgggatcctgcaggccgacaaggtgctgacggtgagcccctactacgctgaggagctcatctctggcgaagccaggggctgcgagctcgacaacatcatgcgcctcacggggatcaccggaatcgtcaacggcatggacgtcagtgagtgggaccccaccaaggacaagttcctcgccgtcaactacgacatcaccaccgcgttggaggccaaggcgctgaacaaggaggcactgcaggccgaggtggggctgccggtggacaggaaggtgccgctggtggccttcatcggcaggctggaggagcagaagggccccgacgtgatgatcgccgccatcccggagatcctgaaggaggaggacgtccagatcattctccttggcaccgggaagaagaagtttgagaagctgctcaagagcatggaggagaagttcccgggcaaggtgagggccgtggtcaggttcaacgcgccgctagctcaccagatgatggccggcgccgacttgctcgctgtcaccagccgcttcgagccctgcggcctcatccagctccagggaatgcgctatggaacgccgtgcgtgtgcgcgtccaccggcgggctcgtcgacacgatcgtggagggcaagaccgggttccacatgggccgcctcagcgtcgactgcaacgtggtggagccggcggacgtgaagaaggtggcgaccaccctgaagcgggccgtcaaggtcgtcggcacgccggcgtaccaggagatggtcaagaactgcatgatccaggatctctcctggaagggacctgccaagaactgggaggacgtgcttctggaactgggggtggaggggagcgagccggggatcgtcggcgaggagatcgcgccgctcgccatggagaacgtcgccgctccctga

SEQ ID NO: 52483 - protein, 608 aa, Hordeum spontaneum
MAALATSQLATSGTVLGVTDRSAPSMFRHAGFQGLRPRKPADGTFGMRTVGASAAPKQSRKAHRGNRRCLSVVVRATGSGMNLVFVGAEMAPWSKTGGLGDVLGGLPPAMAANGHRVMVVSPRYDQYKDAWDTSVISEIKVADEYERVRFFHCYKRGVDRVFIDHPWFLEKVRGKTKEKIYGPDAGTDYEDNQQRFSLLCQAALEAPRILNLNNNPYFSGPYGEDVVFVCNDWHTGLLACYLKSNYQSNGIYRTAKVAFCIHNISYQGRFSFDDFAQLNLPDRFKSSFDFIDGYDKPVEGRKINWMKAGILQADKVLTVSPYYAEELISGEARGCELDNIMRLTGITGIVNGMDVSEWDPTKDKFLAVNYDITTALEAKALNKEALQAEVGLPVDRKVPLVAFIGRLEEQKGPDVMIAAIPEILKEEDVQIILLGTGKKKFEKLLKSMEEKFPGKVRAVVRFNAPLAHQMMAGADLLAVTSRFEPCGLIQLQGMRYGTPCVCASTGGLVDTIVEGKTGFHMGRLSVDCNVVEPADVKKVATTLKRAVKVVGTPAYQEMVKNCMIQDLSWKGPAKNWEDVLLELGVEGSEPGIVGEEIAPLAMENVAAP

SEQ ID NO: 52484 - DNA, 1815 bp, Aegilops tauschii
  CDS (1)..(1815)
atggcggctctggtcacgtcccagctcgccacctccggcaccgtcctcggcatcaccgacaggttccggcgtgcaggtttccagggcgtgaggccccggagcccggcggatgcggctctcggcatgaggaccgtcggagctagcgccgccccaacgcaaagccggaaagcgcaccgcgggacccggcggtgcctctccatggtggtgcgcgccaccggcagcggcggcatgaacctcgtgttcgtcggcgccgagatggcgccctggagcaagaccggcggcctcggcgacgtcctcgggggcctccccccagccatggccgccaacggccaccgggtcatggtcatctccccgcgctacgaccagtacaaggacgcctgggacaccagcgtcgtctccgagatcaaggtcgttgacaagtacgagagggtgaggtacttccactgctacaagcgcggggtggaccgcgtgttcgtcgaccacccgtgcttcctggagaaggtccggggcaagaccaaggagaagatctacgggcccgacgccggcacggactacgaggacaaccagcagcgcttcagccttctctgccaggcggcgctggaagtgcccaggatcctgaacctcgacaataacccctacttttctgggccctacggggaggacgtggtgttcgtgtgcaatgactggcacacgggccttctggcctgctacctcaagagcaactaccagtccaatggcatctacagggccgcaaaggtggcattctgcatccacaacatctcgtaccagggccgcttctccttcgacgacttcgcgcagctcaacctgcccgacaggttcaagtcgtccttcgacttcatcgacggctacgacaagccggtggaggggcgcaagatcaactggatgaaggccgggatcctgcaggccgacaaggtgctgacggtgagcccctactacgcggaggagctcatctctggcgaagccaggggctgcgagctcgacaacatcatgcgcctcactgggatcaccggcatcgtcaacggcatggatgttagcgagtgggaccccaccaaggacaagttcctcgccgtcaactacgacatcaccaccgcgttggaggggaaggcgctgaacaaggaggcgctgcaggccgaggtggggctgccggtggaccggaaggtgcccctggtggcgttcatcggcaggctggaggagcagaagggccccgacgtgatgatcgccgccatcccggagatcctgaaggaggaggacgtccagatcgttctcctgggcaccgggaagaagaagttcgagcggctactcaagagcattgaggagaaattcccgagcaaggtgagggccgtggtcaggttcaacgcgccgctggctcaccagatgatggccggcgccgacgtgctcgccgtcaccagccgcttcgagccctgcggcctcatccagctccaggggatgcgctacggaacgccgtgcgcgtgcgcgtccaccggcgggcttgtcgacacgatcgtggagggcaagaccgggttccacatgggccggctcagtgtcgattgcaatgtggtggagccggccgacgtgaagaaggtggtgaccaccctgaagcgcgccgtcaaggtcgtcggcacgccggcataccatgagatggtcaagaactgcatgatacaggatctctcctggaaggggccagccaagaactgggaggacgtgcttctggaactgggtgtcgaggggagcgagccgggggtcatcggcgaggagattgcgccgctcgccatggagaacgtcgccgctccctga

SEQ ID NO: 52485 - protein, 604 aa, Aegilops tauschii
MAALVTSQLATSGTVLGITDRFRRAGFQGVRPRSPADAALGMRTVGASAAPTQSRKAHRGTRRCLSMVVRATGSGGMNLVFVGAEMAPWSKTGGLGDVLGGLPPAMAANGHRVMVISPRYDQYKDAWDTSVVSEIKVVDKYERVRYFHCYKRGVDRVFVDHPCFLEKVRGKTKEKIYGPDAGTDYEDNQQRFSLLCQAALEVPRILNLDNNPYFSGPYGEDVVFVCNDWHTGLLACYLKSNYQSNGIYRAAKVAFCIHNISYQGRFSFDDFAQLNLPDRFKSSFDFIDGYDKPVEGRKINWMKAGILQADKVLTVSPYYAEELISGEARGCELDNIMRLTGITGIVNGMDVSEWDPTKDKFLAVNYDITTALEGKALNKEALQAEVGLPVDRKVPLVAFIGRLEEQKGPDVMIAAIPEILKEEDVQIVLLGTGKKKFERLLKSIEEKFPSKVRAVVRFNAPLAHQMMAGADVLAVTSRFEPCGLIQLQGMRYGTPCACASTGGLVDTIVEGKTGFHMGRLSVDCNVVEPADVKKVVTTLKRAVKVVGTPAYHEMVKNCMIQDLSWKGPAKNWEDVLLELGVEGSEPGVIGEEIAPLAMENVAAP

SEQ ID NO: 52486 - DNA, 2208 bp, Phaseolus vulgaris
  CDS (144)..(1991)
aagcaattcaagaatttaatgataatttttcattccaatgctttatacttctgattaaccttgcaacttggtctttcaaatctcacaaacttcaatcagttctctctcccaaactgtgtgtgcttcattgcctggtaccaaaaatggcaactttgactgcttcaagtaacttggtctctggaagttctcatgtccaccatggaccaactgcatcatatgagtctaaagcagtgacaatggggcttaaatctctaaagcagaccaatactcataatggactgagaattttgaacccggtggatgagctaagaaacaggaccccagttaaaatcaactcaaaagctacgaggaagggacttcaaggcaagaatgtcaagcctaaaggtgaaatcatatgtggcatgaaattgatttttgttggaatggaggtgggtccatggagcaaaactggtgggttaggagatgttcttgggggtcttccaccagcattagcagcttatggacatcgagttatgactatcgcgccacgttacgaccaatacaaagatgcctgggatacaagtgttgtagttgagctgaaagtaggggacagaactgaaaaggttcgctacttccattgctacaagaggggagttgatcgtgtctttgtggatcaccctttgtttctttcaaaggtctgggggaaaaccggaaccaaactttatggactaactacaggagatgattatgaagacaaccaactacgttttagtctattttgccaggcagctttggaagcaccaagggttctgaatctcaattccagtaaatatttctctggaccatatggtgaagatgtaattttcatcgccaacgattggcacaccgcccttctcccctgctacttgaaaactatgtaccagtcagtaggcatctttaagaatgctcgagttgttttatgtatccacaacattgcttaccaaggaagatttgcattcacagactatgcacttctaaatctccctgaccaatttaaaagctcctttgactttattgatgggcatgttaaaccagtgattggaaggaaaatcaattggatgaaagctggaattttagaatcatggtttgtgataactgttagtccaaactatgctaaagaactattgtcaggtccagataaaggagtggaactggacaacatccttcgcaaaaatgaagatcgtttaattggaattgtgaatggcatggatgttcaggagtggaatccatccactgacaagtatatagccgtcaaatacgatgcttcaacagttttggaagcaaaggctcttttgaaagaagccctccaagcagaagttggattgccagtggacagaaatattcctctcattggtttcattggtaggcttgaagagcaaaaaggttctgatattcttgcagaagccattccacaatttatcgaggagaatgttcagttggtagccctaggaacaggaaaaaaacaaatggaaaaacagcttcaggaacttgaaatatcataccctgacaaggccagaggagtggcaaaattcaatgttcccctagcccacatgataattgctggtgctgattttatattggttcctagcagatttgagccttgtggtctcattcagttgcaagctatgcgctatggatcagtacctattgtttcctcaaccggtggattagttgatactgtcgaagaaggcttcactggatttcagatgggttccttcaatgttgaatgtgaagctgtggatgctgctgatgttgatgctatagcaaagactatcaaaagggcccttgcactctacggaactccagctttcacagaaatgatcaagaattgcatggctcaagatctttcatggaagggacctgctaagaagtgggaggacgtgctgctaagcttggaagtacctggcagtgaacctggaattgatggagaagaaattgctccacaggcaaaggaaaatgtggcaactccataataagagcatatatgtgaaggaagcctcttttagtagtctcatgaagttcccttagctccttacttcttattgtgcttctatcctacttccattttttgttttcttcaaaatatatcatagaaattaatgtacatggacacggtgattacactgttagaatcagtgttttcaaccctatttataagagtatgtcttcaagattgaaaaaaaaaaaaaa

SEQ ID NO: 52487 - protein, 615 aa, Phaseolus vulgaris
MATLTASSNLVSGSSHVHHGPTASYESKAVTMGLKSLKQTNTHNGLRILNPVDELRNRTPVKINSKATRKGLQGKNVKPKGEIICGMKLIFVGMEVGPWSKTGGLGDVLGGLPPALAAYGHRVMTIAPRYDQYKDAWDTSVVVELKVGDRTEKVRYFHCYKRGVDRVFVDHPLFLSKVWGKTGTKLYGLTTGDDYEDNQLRFSLFCQAALEAPRVLNLNSSKYFSGPYGEDVIFIANDWHTALLPCYLKTMYQSVGIFKNARVVLCIHNIAYQGRFAFTDYALLNLPDQFKSSFDFIDGHVKPVIGRKINWMKAGILESWFVITVSPNYAKELLSGPDKGVELDNILRKNEDRLIGIVNGMDVQEWNPSTDKYIAVKYDASTVLEAKALLKEALQAEVGLPVDRNIPLIGFIGRLEEQKGSDILAEAIPQFIEENVQLVALGTGKKQMEKQLQELEISYPDKARGVAKFNVPLAHMIIAGADFILVPSRFEPCGLIQLQAMRYGSVPIVSSTGGLVDTVEEGFTGFQMGSFNVECEAVDAADVDAIAKTIKRALALYGTPAFTEMIKNCMAQDLSWKGPAKKWEDVLLSLEVPGSEPGIDGEEIAPQAKENVATP

SEQ ID NO: 52488 - DNA, 2340 bp, Colocasia esculenta
  CDS (155)..(2086)
gatcgcaaaggcagacatcacacctccacacgcgcacgttggtcggttccagaaggcggaagcaactgctctccgctcctgcctcccttttatccccgctcctctggatctccccatcttccatctctctctctctctctctctctctccgatcatggaggttctacgggtagcacgccccgcattggccgccagcagcgcccccggatcgcggccactgcgtggggctccacgccgcccgccgcctggagcttggcgggccgccggctccgccccgcgtctgcgccggcggctcggggatctccctctgacgttctgcgctgcggagaagagggaggaggtgttgcctccggctttcgaggagaaggatgtgtcagaggtgttgctccccgcggaggcgcctgggagtggtccttgctttgatgaggcgccggaggtcctcggggcggaaggaagtaaagggagaatgagatccagtactattgcagctactgttagtggagagaagcatgagaatgttggtgaggagaagcaatctcgacctgtgataagaaataacattatttttgtcactgcagaagctgctccttactccaagactggaggtctgggagatgtatgtggttctttgcctattgcccttgctgcccgtggtcatcgtgtcatggtcgtctcaccaaggtatttagatggtgtatcagatgagaaatttgcaaatgcagttgatactgggcgccgcatcaagatttcatgctttggaggacagcaagaagttgctttttttcaagagtatagggctggtgtagattgggtgtttgttgatcatctctcgtatcacagaccagggaacccttatggtgatgtatatggtgcgtatggtgataatcagtttcggttcacactgctctgccatgcagcatgtgaggctccactggtgcttccactgggaggatttacctacggagataagtgcttgttccttgccaatgattggcatgcagccctggtgccagtccttctgagtgcaaaataccgcccaaatggtgtttacaaagatggtcgctgcattcttgtcattcataaccttgcacatcagggcgtggagccagagacgacttatccgttcctaggattgccatccgagtggtatgggtctgttgagtgggtctttcctacttgggcaaggacacatgctcttgatccaggcaagtctgtcaatcttctgaaaggagcagtagtcacagtagatcgcatagtcacagttagtcagggttactcttgggagataacaacccctgagggaggatatggtctccatgaactcttaaatagcagaaagagtgtactcaatggaattactaatggcattgatgttggtgactgggatccagcctcggaccagcacatacaatttcattattctgtcaatgacctatctgggaaggtcaaatgcaaaatggctttgcaggaggaatttggccttgatgttcgtcctgattgcccattgattggtttcattggaaggctagatatgcagaaagggactgatttgatcatgatggcaatgccggagcttatgaaagaagatattcaatttgttatgcttggttctggagatgcaggtacagaacaatggatgagaactgcagaatctatttatagagacaagttccgtggatgggttgggtttaatgttgctatttctcatcggataactgctgggtgtgacatactgttaatgccatcaaggtttgaaccttgtggtcttaatcaattgtatgctatgagatatggaactgttccagttgtccatgccactggtggccttaaggatacggttgagaatttcaatccatatgctaatgaaaggagtggtaagggaacagggtgggctttttctcctttatcaaaggatagcatgctgaaggcattgaacttggcaattcggacatacagggatttcaagccctcatgggaaggactcatgaaacgagggatgtcaaaagatttcacatgggacaacgccgctgctcaatatgagcaagtgttcgggtgggccttcatagatcctccttatgtcagatgatgcccagacaaacccctgtcggccagattctttccctgatttcttccccacgttccagttttgcagtagctaacacatacttttcgtcttctcactgttcaaatgtcaagggtggtccaaagggcagcaggaactttggtgaaatgtctctgtcaccttccttccggacattggaaaccaataaagcccctgcataagcaatgacgttgtacagtggacatttcaatatttagttctattctttgtgtaatgcc

SEQ ID NO: 52489 - protein, 643 aa, Colocasia esculenta
MEVLRVARPALAASSAPGSRPLRGAPRRPPPGAWRAAGSAPRLRRRLGDLPLTFCAAEKREEVLPPAFEEKDVSEVLLPAEAPGSGPCFDEAPEVLGAEGSKGRMRSSTIAATVSGEKHENVGEEKQSRPVIRNNIIFVTAEAAPYSKTGGLGDVCGSLPIALAARGHRVMVVSPRYLDGVSDEKFANAVDTGRRIKISCFGGQQEVAFFQEYRAGVDWVFVDHLSYHRPGNPYGDVYGAYGDNQFRFTLLCHAACEAPLVLPLGGFTYGDKCLFLANDWHAALVPVLLSAKYRPNGVYKDGRCILVIHNLAHQGVEPETTYPFLGLPSEWYGSVEWVFPTWARTHALDPGKSVNLLKGAVVTVDRIVTVSQGYSWEITTPEGGYGLHELLNSRKSVLNGITNGIDVGDWDPASDQHIQFHYSVNDLSGKVKCKMALQEEFGLDVRPDCPLIGFIGRLDMQKGTDLIMMAMPELMKEDIQFVMLGSGDAGTEQWMRTAESIYRDKFRGWVGFNVAISHRITAGCDILLMPSRFEPCGLNQLYAMRYGTVPVVHATGGLKDTVENFNPYANERSGKGTGWAFSPLSKDSMLKALNLAIRTYRDFKPSWEGLMKRGMSKDFTWDNAAAQYEQVFGWAFIDPPYVR

SEQ ID NO: 52490 - DNA, 2115 bp, Setaria italica
  CDS (142)..(1959)
ctccacaccaccaccaagggtttgaagaagaggaagaactaaaccactgcaagccagtgacggatcgacgacgacacgcccaccccgggctccctgctcatccatccgtcagctagctagccctccacgctggtcaccggcatggcggctctggccacttcccagctcgtcaccacccgcgccggcttcggcctcggcgacgcctcctcctccatgttccgccccggcgtccagggcctcaggggctcccgggcctcctccccggcggccacgctcagcgtgcggaccagcgcgcgcgccgcgcccaggcagcagcaccgccgggcgcagcgcggcgccaggttcccctccctcgtcgtctgcgccaccgcgggcatgaacgtcgtcttcgtcggcgccgagatggcgccttggagcaagaccggcggactcggcgacgtcctcggcggcctcccgccggccatggccgcgaatgggcaccgggtcatggtcatctccccccgctacgaccagtacaaggacgcctgggacaccagcgtcgtctccgagatcaaggtgggagacaggtacgagagggtgaggttcttccactgctacaagcgcggagtcgaccgcgtgttcatcgaccacccgtccttcctggagagggtttggggaaagactggtgagaagatctacgggccagacgctggagtggattacaaggacaaccagctgcgtttcagccttctttgccaggcagcacttgaagctcctaggattctgagcctcaacaacaacccttacttctcaggaccgtacggggaggacgtcgtgttcgtctgcaacgactggcacaccggccctctgtcgagctacctcaagagcaactaccagtccaacggcatctacagaaacgccaagaccgctttctgcatccacaacatctcctaccagggccggttcgcattctcggactacccggagctgaacctccctgagagattcagatcatccttcgatttcatcgacggctacgagaagcctgtggagggcaggaagatcaactggatgaaggccgggatcattgaagccgacagggtcctgaccgtgagcccctactacgccgaggagctcatctccggcatcgccaggggctgcgagctcgacaacatcatgcgcctcaccggcatcaccggtatcgtcaacggcatggacgtcagcgagtgggaccccagcaaggacaagtacatcgccaccaagtacgacgtgtcaacggccattgcggccaaggcgctcaacaaggaggcgctgcaggccgcggccgggctcccggtggaccggaagatcccgctggtggcgttcgtcggcaggctggaggagcagaagggccccgacgtcatggctgccgccatcccgcagctcatggaggaggatgtccagatcgtccttctgggcactgggaagaagaagttcgagcgcatgctgatgagcgcggaggagaagtaccccgacaaggtgcgcgccgtggtgaagttcaacgcggcggtggcgcaccacatcatggccggcgccgacctgctcgccgtcaccagccgcttcgagccctgcggcctcatccagctgcaggggatgcgatacggcacgccctgcgtgtgcgcgtccaccggcgggctcgtcgacaccgtcatcgaaggcaagaccggattccacatgggccgcctcagcgtcgactgtaaggtcgtggagccggccgacgtgcagaaggtggcgagcaccctgaagcgcgccatcaaggtcgtcggcacgccggcgtacgaggagatggtcaggaactgcatgatccaggacctctcctggaagggccctgccaagaactgggagaacgttctgctgagcctgggcgtcgccggcagccagccggggatcgaaggcgaggagatcgcgccgctcgccaaggagaacgtggccgctccctgaaggcggccaagatgatccagtgaacacctacatagtatatagttgcttgtggtagtgtattgtagtggccagcggatatatgacctaataagcatgaactatatatatacactatatattgcgagtgaaaaaaaaaaaaaaaaaaaaaaaaaaaaa

SEQ ID NO: 52491 - protein, 605 aa, Setaria italica
MAALATSQLVTTRAGFGLGDASSSMFRPGVQGLRGSRASSPAATLSVRTSARAAPRQQHRRAQRGARFPSLVVCATAGMNVVFVGAEMAPWSKTGGLGDVLGGLPPAMAANGHRVMVISPRYDQYKDAWDTSVVSEIKVGDRYERVRFFHCYKRGVDRVFIDHPSFLERVWGKTGEKIYGPDAGVDYKDNQLRFSLLCQAALEAPRILSLNNNPYFSGPYGEDVVFVCNDWHTGPLSSYLKSNYQSNGIYRNAKTAFCIHNISYQGRFAFSDYPELNLPERFRSSFDFIDGYEKPVEGRKINWMKAGIIEADRVLTVSPYYAEELISGIARGCELDNIMRLTGITGIVNGMDVSEWDPSKDKYIATKYDVSTAIAAKALNKEALQAAAGLPVDRKIPLVAFVGRLEEQKGPDVMAAAIPQLMEEDVQIVLLGTGKKKFERMLMSAEEKYPDKVRAVVKFNAAVAHHIMAGADLLAVTSRFEPCGLIQLQGMRYGTPCVCASTGGLVDTVIEGKTGFHMGRLSVDCKVVEPADVQKVASTLKRAIKVVGTPAYEEMVRNCMIQDLSWKGPAKNWENVLLSLGVAGSQPGIEGEEIAPLAKENVAAP

SEQ ID NO: 52492 - DNA, 2760 bp, Oryza sativa
  CDS (1)..(2760)
atggcgtgcttggcggcgggcgccgaggcggcccctctcctcttccggcggcggctagcgccgtccccagtcgccgcgcgccgccgccttctcgtgtcgtgccgagctcgccgccgcggtctcaggttggtagcccagagcgcaggatcgcgtggttgcggcgtggtcggtgcacccggttgtgattactgggtgaatatgcagagagatgaagcatctgtttccagtgataaagaacggcaagagaaatatggagatgaaaatggtatatcaaaccttcaattggaagatttgatacaaatgatacaaaacactgagaagaatataatgcttctgaatcaagctcgtcttcaagcattggaacatgttgaaacagttcttaaagaaaaagaagacttacagaggaagttgaaaattttggagacgagattgtcagaaacagatgcacggcttaagctttcagctgaagggcagttcggtactgagattaatgactctctaccagtactggaattagatgatataaaggaagagaatatgctactgaaggatgacatacaatttctgaaaacaatgcttattgaggttgctgagacagagaacagtatattcacattagagaaggagcgtgctcttttagatgcttcgcttagggagctggagtctagatttatagatgcccaagcagatatgttgaagtctgatcctaggcagtatgatgcatggtgggagaaagtagaaaatttgggggacttgcttgagactgcaacaaacaaagtagagaatgctgctatggttctgggacgcaatcatgatttggaagataaggtcgacaaactagaggcatcgttggctgaagcaaatatatcaaagttctcttgttattttgttgatcttttgcaggaaaagataaaatcagtagaagagcgcttccaagtatgtaatcatgaaatgcattctcaaattgaactctatgagaattcaatagcggaatttcacgatattcttagcaagctagtggaggaaactgagaaacgatcactagagcattcagcaagtagcatgccttcagaattgtggagtaggatatctcttctgattgatggttggttgctcgagaagagaatatcctacaatgatgcaaatacattacgggaaatggtcaggaaaagggatagttgtcttcgggaagcatacttgtcatgcagaggtatgaaagatagggaaattgtggacaattttctaaagatcacattgccagggactagttctggcttgcacatcatccacatagcagcagagatggctcctgttgcaaaggttggtggtttggcggatgtgatatctggtcttggcaaggcacttcagaaaaagggccacctagtagagattattcttccaaaatatgactgcatgcagaatgaccaagttaataaccttaaggttttagatgttgttgtacaatcctactttgaaggaaatttgttcaacaacaaaatatggactgggactgttgaaggccttccagtctattttatcgagccacaacatccagcaaaattcttttggagggcacaatactatggagaacacgatgactttaaacgttttgcatacttcagccgtgcagcactggaattactttaccaatcgcagaagaaaattgacatcatccattgccatgactggcagactgcatttgtggcacctctttattgggaagcatatgcaaatctgggcttcaactcagctagaatttgcttcacctgccataattttgaatatcaaggagctgctcctgctcaagatttagcatgctgtggccttgatgttcagcaacttgatagggaagacaggatgcgggacaattcacatggcagaataaatgttgtcaagggtgcaattgtgtattccaacattgtgacaactgtatcaccaacatatgcactagaggtgcgatcagagggtggacgtggactacaagattcactcaaattacattccaggaaatttgttgggatacttaatggaatcgacacagacacatggaatccttcaacagatagacatctcaaggttcaatataatgctaatgatctccagggtaaggcagcaaacaaagcagctctcagaaagcagctaaacttatcttctacaaatgcttctcaaccactggttgggtgtattacaaggctagttcctcaaaagggtgtacatctcatcaggcatgcaatatacaaaacagctgagctaggaggacagtttgttcttctgggctcaagtccagtaccacacattcaaagagagtttgagggtattgcagaccattttcagaacaataacaatatccgactgcttttgaagtatgatgattctttatcccattggatttatgcagcatctgacatgttcattgttccatccatgtttgagccatgtggcctcacacagatgattgccatgagatatggttctgtgccgattgttcggaaaaccggtggattgaatgacagtgtcttcgatttcgacgacgaaacgatacctaaggagctgcggaatggctttacgtttgtgcatcctgatgaaaaggctctaagtggtgcaatggagagagcgttcaactactacaatagaaagcctgaggtctggaaacagctggtgcagaaggacatgaggatagatttcagctgggcctcttcagcttcccagtacgaagatatctatcaaagagcagtggctcgagcgagggcagcagcatga

SEQ ID NO: 52493 - protein, 919 aa, Oryza sativa
MACLAAGAEAAPLLFRRRLAPSPVAARRRLLVSCRARRRGLRLVAQSAGSRGCGVVGAPGCDYWVNMQRDEASVSSDKERQEKYGDENGISNLQLEDLIQMIQNTEKNIMLLNQARLQALEHVETVLKEKEDLQRKLKILETRLSETDARLKLSAEGQFGTEINDSLPVLELDDIKEENMLLKDDIQFLKTMLIEVAETENSIFTLEKERALLDASLRELESRFIDAQADMLKSDPRQYDAWWEKVENLGDLLETATNKVENAAMVLGRNHDLEDKVDKLEASLAEANISKFSCYFVDLLQEKIKSVEERFQVCNHEMHSQIELYENSIAEFHDILSKLVEETEKRSLEHSASSMPSELWSRISLLIDGWLLEKRISYNDANTLREMVRKRDSCLREAYLSCRGMKDREIVDNFLKITLPGTSSGLHIIHIAAEMAPVAKVGGLADVISGLGKALQKKGHLVEIILPKYDCMQNDQVNNLKVLDVVVQSYFEGNLFNNKIWTGTVEGLPVYFIEPQHPAKFFWRAQYYGEHDDFKRFAYFSRAALELLYQSQKKIDIIHCHDWQTAFVAPLYWEAYANLGFNSARICFTCHNFEYQGAAPAQDLACCGLDVQQLDREDRMRDNSHGRINVVKGAIVYSNIVTTVSPTYALEVRSEGGRGLQDSLKLHSRKFVGILNGIDTDTWNPSTDRHLKVQYNANDLQGKAANKAALRKQLNLSSTNASQPLVGCITRLVPQKGVHLIRHAIYKTAELGGQFVLLGSSPVPHIQREFEGIADHFQNNNNIRLLLKYDDSLSHWIYAASDMFIVPSMFEPCGLTQMIAMRYGSVPIVRKTGGLNDSVFDFDDETIPKELRNGFTFVHPDEKALSGAMERAFNYYNRKPEVWKQLVQKDMRIDFSWASSASQYEDIYQRAVARARAAA

SEQ ID NO: 52494 - DNA, 2112 bp, Oryza sativa
  CDS (61)..(1887)
agaattatttctagagcagaacttctaaccaccatttggcatttttgtaggtgtcactgaatggctagaacaatgggttcaacacctacctactgctcttaccaaacaaatggtgttggcgctttaaagcaatcacctcatatgcaattccaacaatcgtacaactatggagttaggttcctaaagagggataccctttctgtgcggattaacaaacatatggccaaaagaatagcaacaagcactggaatttgcactaagcctaggaggtctcacatgcctatagtatgctctgctggaatgacaataatttttattgcaactgaatgtcacccatggtgcaaaactggaggcctcggtgatgttctagggggactgccccctgctcttgctgcaatgggacatcgtgtcatgacaatagttcctcgttatgatcaatacaaagatgcatgggatacaaatgtccttgtcgaggtcaatattggtgacaggacagaaacagtgcgcttcttccactgctataaaaggggagttgaccgtgtttttgttgatcatcctatgtttcttgagaaggtatggggcaagactggaccaaaattatacggtcctaccactggagatgactaccgggacaaccagttgcggttctgccttttatgcctcgctgctttggaggctccaagggttctcaatctcaacaattctgaatatttctcgggaccatatggtgaaaatgttgtcttcgttgcaaatgactggcacactggagtcctgccatgctatctcaagagcatctatcaggcaaaaggaatgtatgtgaatgctaaggttgctttctgcattcacaatattgcctaccagggtagatttgccagagaagactttgaacttcttaatctaccggacagtttcctgccttcatttgattttattgatgggcattttaaacctgtagtaggtagaaagattaactggatgaaggcagggatcactgaatgtgatctggttatgacggttagtccacattatgtcaaagaactcgcttctggcccagataaaggtgttgaattggatggcatccttcgcacaaagccccttgaaactggaattgtcaatggcatggatgtttatgaatggaatccagcaacagatcagtacatcagcgtgaaatacgatgcaacaacggtaactgaagcaagggcactcaataaggaaatgctacaagctgaagttgggttgcctgtggactcgagcattcctttaatagtttttgttggtcgtcttgaagagcagaaagggtcagacatactaattgcagccattccagagttcgtggaggggaatgtccagataattgttcttggtacagggaagaagaaaatggaggaggaactgatactgctcgaagttaaatatccaaacaccgctagagggttagcaaaatttaatgtccctttagcgcatatgatgtttgctggggctgattttataattgttcctagtaggtttgagccatgtggtctcatccaattgcaagggatgagatatggagtggttcccatctgctcatctactggaggacttgtcgacacggttaaggagggcgtgaccggattccacatgggtttgttcaatgtcgagtgcgaaactgttgatccagtggacgtcacagcggttgcttcaactgtcaaacgggctctgaagcagtacaacacaccggcattccaagaaatggttcagaactgcatggctcaagacctatcttggaagggacctgcaaagaagtgggaggaggttcttcttgggttgggcgttgaggggagccagccaggcatcgagggtgaggaggtggcgccacttgccaaggaaaacgtggccactccctgaaattctccatgacggtgcctagcttgctggcttgtttaggtgacaggcagcctgataggatcccatggacttctgagctcgccaccggcaaagccactatttgtatccctgcaggcttctgccatttctctcgtctacttcacgtgtaatataatcgcagatgttacttagagatgtgggccagatggcatgcatttgcctgttaaaaaaaaaaaaaaaaaaaaa

SEQ ID NO: 52495 - protein, 608 aa, Oryza sativa
MARTMGSTPTYCSYQTNGVGALKQSPHMQFQQSYNYGVRFLKRDTLSVRINKHMAKRIATSTGICTKPRRSHMPIVCSAGMTIIFIATECHPWCKTGGLGDVLGGLPPALAAMGHRVMTIVPRYDQYKDAWDTNVLVEVNIGDRTETVRFFHCYKRGVDRVFVDHPMFLEKVWGKTGPKLYGPTTGDDYRDNQLRFCLLCLAALEAPRVLNLNNSEYFSGPYGENVVFVANDWHTGVLPCYLKSIYQAKGMYVNAKVAFCIHNIAYQGRFAREDFELLNLPDSFLPSFDFIDGHFKPVVGRKINWMKAGITECDLVMTVSPHYVKELASGPDKGVELDGILRTKPLETGIVNGMDVYEWNPATDQYISVKYDATTVTEARALNKEMLQAEVGLPVDSSIPLIVFVGRLEEQKGSDILIAAIPEFVEGNVQIIVLGTGKKKMEEELILLEVKYPNTARGLAKFNVPLAHMMFAGADFIIVPSRFEPCGLIQLQGMRYGVVPICSSTGGLVDTVKEGVTGFHMGLFNVECETVDPVDVTAVASTVKRALKQYNTPAFQEMVQNCMAQDLSWKGPAKKWEEVLLGLGVEGSQPGIEGEEVAPLAKENVATP

SEQ ID NO: 52496 - DNA, 2100 bp, Pisum sativum
  CDS (6)..(1847)
caaaaatggcaacagtgactgcttcaagtaacatagtatccagaacctctcatgtcaatttaccaactgtttcatgtgagtttaaaacagcaccaatgagacttggttctataaggaaagccaatactcataatggactcagagttttgaactcgttggacgagttattaaataggacgccgattaaaatgaagggagtgcaatcgaggaagaagggtgtccagagaaagaatgttaggcctaaaggtattatagtttgtggcatgaatttgatctttgttggaactgaggttgctccgtggagtaaaactggtggtttaggcgatgttcttggaggtcttccgccagcattatcagctaatgggcacagagttatgaccgtcactccgcgttatgaccaatacaaagatgcatgggatacaaatgtaacaatcgaggtaaaagtaggagatagaacagaaaaagtccgcttcttccattgctttaaacgaggagttgatcgcgtttttgtagatcaccctatatttcttgaaaaggtttgggggaaaactggaacaaaactttatggccctgccgcaggagacgattaccaagacaatcaactacgttttagcatcttttgtcaggcagctctggaagcagcgagagttctaaatcttaagagcaataaatatttctcaggaccatatggtgaagatgtcattttcgttgctaatgattggcacactgcccttatctcatgctacatgaaatccatgtaccaatcaattggcatctttaggaatgccaaagttgttttttgtatccacaacattgcttaccaaggaagatttgcatttaccgactattcacttctcaatctccctgaccaatttaaaagctcctttgacttccttgacgggcatgttaaaccaattgttggaagaaaaatcaattggatgaaagctggaattatagaatctcatcgagttttaactgttagtccatactatgcacaagaactagtgtcaggcccagataaaggagttgagttggacaacattcttcgccgagttggtgttactggaatcgtaaatggcatggatgttcaagagtggaatccatccaccgacaaatatataagtatcaaatacgatgcctcaacagtattggaaggaaaagctcttctgaaagaagaactgcaagcagaagttggattgccggttgacaaaaatgttcctctcattgctttcatcggtaggcttgaagagcaaaaaggttctgatattcttgtagaagccattcctcaatttataaaggagaatgttcaaatagtcgcactaggaacgggaaaaaaagaaatggaaaagcaacttcagcaacttgaaatatcataccctgacaaggccagaggagttgcgaaattcaatgttcccctagctcatatgatgattgcaggagctgattttatcttgattccaagtagatttgagccttgcggtctcattcagttacaagctatgcgctatggaacggtacctattgttgcctcgacgggtggattagtggacacagtcaaagaaggttttactggattccacatgggttccttcaatgtcaaatgtgatgctgtggatcctgttgatgtggatgctataccaaaaactgtcacaaaggcccttggagtctatggaacttcagcttttgcagaaatgatcaagaattgcatggctcaagaactttcatggaagggacctgctaagaagtgggaggaagtgctgctaaatttgggagttcctgacagtgaacctggaattgatggacaagaaattgctccacaggcaaaggaaaatgtggcaactccatgattaaaataatgatgtgatggaagcttcttctagtttccatctcttgaagtttcatggaacttcacccgagtgatggatcgattattagtgcattttttccaaggagtttaaatctgtaattataagtgatcttggacaagtttactattattttgccttaaaatgatagattagcattccttttaaaaaaaaaaaaaaaaaaaaaaaaaaaaaaaaaaaaaaaaaaaaaaaaaaaaaaaaaaaaaaaaaaaaa

SEQ ID NO: 52497 - protein, 613 aa, Pisum sativum
MATVTASSNIVSRTSHVNLPTVSCEFKTAPMRLGSIRKANTHNGLRVLNSLDELLNRTPIKMKGVQSRKKGVQRKNVRPKGIIVCGMNLIFVGTEVAPWSKTGGLGDVLGGLPPALSANGHRVMTVTPRYDQYKDAWDTNVTIEVKVGDRTEKVRFFHCFKRGVDRVFVDHPIFLEKVWGKTGTKLYGPAAGDDYQDNQLRFSIFCQAALEAARVLNLKSNKYFSGPYGEDVIFVANDWHTALISCYMKSMYQSIGIFRNAKVVFCIHNIAYQGRFAFTDYSLLNLPDQFKSSFDFLDGHVKPIVGRKINWMKAGIIESHRVLTVSPYYAQELVSGPDKGVELDNILRRVGVTGIVNGMDVQEWNPSTDKYISIKYDASTVLEGKALLKEELQAEVGLPVDKNVPLIAFIGRLEEQKGSDILVEAIPQFIKENVQIVALGTGKKEMEKQLQQLEISYPDKARGVAKFNVPLAHMMIAGADFILIPSRFEPCGLIQLQAMRYGTVPIVASTGGLVDTVKEGFTGFHMGSFNVKCDAVDPVDVDAIPKTVTKALGVYGTSAFAEMIKNCMAQELSWKGPAKKWEEVLLNLGVPDSEPGIDGQEIAPQAKENVATP

SEQ ID NO: 52498 - DNA, 3386 bp, Triticum aestivum
  CDS (251)..(2995)
gccgtttgcccgacgaatggcaccgtgccacgcccacggccctcctccgcctccgcccccgcctcgcccgcgcgcggagcacgagacacgccacgcgctggcccccggccaccgccaccgccaccagtccaccaccaccagtccaccaccaccactcttcagccccactccactccccgccgctttccggcccgccgcccgcttcaagctcccctcgccccaccagtcgccctgcctctccctattccccatggcgtgctccgcggcggcgggcgtcgaggcgaccgccctcctgtccccgcgctgccccgccccttccccgcccgacggccgctcccgccgccgcctcgccctcgcttcccgcacgcgccaccgcagcctcagggcggccgcgcagcgccctcacaagagcgcaaccggcgccgaccccctttataacaacagggccaatgtgcggagcgacgaggcgtcggtttccgctgaaaaagaacggcaaaggaaatacaacgatggagatggcatatcaaaccttaagctggaagatttggtaggaatgatacagaacaccgagaagaatatacttcttttgaatcaagcccgtcttcaggcaatggaacacgctgataaagttcttaaagaaaaggaagccttgcagagaaagataaacattttagagacgaggttgtcagaaacagatgaacaacataagctttcaagtgaagggaatttcagtgactctccactagcattggagcttggtattctaaaggaagagaacattctactgaaggaggacatagaatttttcaaaacaaagcttatagaggttgccgagatagaggagggtatattcaaattggagaaggagcatgctcttttagatgcttcccttagggagctggagtctaggtttatagccgcccaagcagatacgatgaaacttggtcctagggatgcctggtgggagaaagtagaaaaattggaagacttgcttgagaccacagcaaaccaagtagagcatgctgctgtgatattggaccacaatcatgatctgcaggataggcttgacaatttagaggcatcactgcaagcagcaaatatttcaaagttctcttgttctcttgttgatcttttgcagcaaaaggtcaaattggtagaagaccgcttccaagcatgtaacagcgaaatgcattctcagattgaactgtacgagcattcaatagtggaatttcatgatactcttagcaaactaatagaggaaagtgagaaaagatcactggagaattttacaggaaacatgccttcggaactatggagcaaaatttcccttttaattgatggatggttactggagaagaaaatatcttacaatgacgcaagtatgttgcgagaaatggttcagaaaagggacagtcgtcttcgggaagcatacttgtcatacagaggtaccgaaaacagggaagttatggacaacttacttaagatggcattaccaggaaccagttctggtttgcacatcgctcacatagcagcagagatggctcctgtcgcgaaggttggtggcctggcagatgtgatatctggtcttgggaaggcacttcagaaaaaaggccatctagtagagatcattcttcccaaatacgactgcatgcaggttgaccaagttagcaatctaaaggttttagatgttcttgtgcagtcctactttgaaggaaatatgttcaacaacaaaatttggaccgggactgttgaaggcctacccgtgtactttattgagccacagcatccagcgatgttcttttcgagggctcagtactatggagagcatgatgacttcaaacgtttttcatacttcagccgtgcggcactagaattactttatcaatctgggaagaaagttgatataatccactgccatgactggcaaactgcatttgttgcacctctttattgggatgtatatgcaaatctaggcttcaactcagctagaatttgcttcacctgtcataattttgaataccaaggaactgctccagctcgtgatttagcatggtgtggtcttgatgttgagcacctagacagaccagacaggatgcgggacaattcgcatggcagaataaatgctgttaagggagcagttgtgtattcaaacatcgtgacaactgtctcgccaacatatgcactagaggttcgctcagagggtgggcgtggactccaagatacacttaaagtacattccaggaaatttcttgggatacttaatggaatcgacacagatacatggaacccttgcacagataggtatctcaaggtccagtataatgctaaggatctccagggaaaggcagccaacaaagcagccctcagagagcaactaaacctggcttctgcatatccttcacaaccactggttggttgcattaccaggctggttgctcagaagggtgtacatcttatcaggcatgcaatatacaaaacagctgaattaggaggacagtttgtccttctgggttcaagtccagtaccagaaattcagagggagtttgaaggtattgcagaccattttcagaacaacaacaatatccggctgattttgaagtatgatgatgcgctgtctcattgcatatatgctgcgtctgacatgttcattgttccctctatatttgagccatgtggcctcactcagatgatagccatgagatatggttctgtgccaatcgttcggaaaactggtgggctgaatgacagtgtctttgacttcgatgacgaaacaatacccatggaggtgcggaacggctttacatttgtcaaggccgacgagcagggcctaagcagcgcgatggagagggcgttcaactgctacacgaggaagcccgaggtgtggaaacagcttgtgcagaaagacatgacgatcgatttcagctgggacacctcggcttcgcagtacgaggacatctaccagaaggcggtggctcgagcgagggcagtggcgtgagcacacacacacacggtagttggttccctgatgcctctctcccctgccctgccctcatgatacaaacggcactggacgaaatcgagggatcatggaaacagaatcatatagcaagctccatgctctcggcgcgcatttccggtaagggtgtgacggtgtatcgctggttatatgcgctgtttattgaaggcagaacgcgagctaaaaatggagtagctaccgtgaaccctcaagatcgtagtatgcgcgctgttgttggcataatattggtgtaaattgtagtaggctgtatattttcttgaggggttgcaacggagctgtatgcgtgcagtgcaggctgcagagtcgcacgtatgtactgtattatgcagaaaaaaaaaaaaaaaaaaaa

SEQ ID NO: 52499 - protein, 914 aa, Triticum aestivum
MACSAAAGVEATALLSPRCPAPSPPDGRSRRRLALASRTRHRSLRAAAQRPHKSATGADPLYNNRANVRSDEASVSAEKERQRKYNDGDGISNLKLEDLVGMIQNTEKNILLLNQARLQAMEHADKVLKEKEALQRKINILETRLSETDEQHKLSSEGNFSDSPLALELGILKEENILLKEDIEFFKTKLIEVAEIEEGIFKLEKEHALLDASLRELESRFIAAQADTMKLGPRDAWWEKVEKLEDLLETTANQVEHAAVILDHNHDLQDRLDNLEASLQAANISKFSCSLVDLLQQKVKLVEDRFQACNSEMHSQIELYEHSIVEFHDTLSKLIEESEKRSLENFTGNMPSELWSKISLLIDGWLLEKKISYNDASMLREMVQKRDSRLREAYLSYRGTENREVMDNLLKMALPGTSSGLHIAHIAAEMAPVAKVGGLADVISGLGKALQKKGHLVEIILPKYDCMQVDQVSNLKVLDVLVQSYFEGNMFNNKIWTGTVEGLPVYFIEPQHPAMFFSRAQYYGEHDDFKRFSYFSRAALELLYQSGKKVDIIHCHDWQTAFVAPLYWDVYANLGFNSARICFTCHNFEYQGTAPARDLAWCGLDVEHLDRPDRMRDNSHGRINAVKGAVVYSNIVTTVSPTYALEVRSEGGRGLQDTLKVHSRKFLGILNGIDTDTWNPCTDRYLKVQYNAKDLQGKAANKAALREQLNLASAYPSQPLVGCITRLVAQKGVHLIRHAIYKTAELGGQFVLLGSSPVPEIQREFEGIADHFQNNNNIRLILKYDDALSHCIYAASDMFIVPSIFEPCGLTQMIAMRYGSVPIVRKTGGLNDSVFDFDDETIPMEVRNGFTFVKADEQGLSSAMERAFNCYTRKPEVWKQLVQKDMTIDFSWDTSASQYEDIYQKAVARARAVA

SEQ ID NO: 52500 - DNA, 2270 bp, Perilla frutescens
  CDS (172)..(1986)
cttaggaaagggaccattttcctcccgccacgtgtcgtgtagccactagtatattagtagtccctgtattccccatgatttctgaaaaaatcagttcatcgctgatagcgtaaccgctcacaagctctgctcgactcaaagctcacccctgagatttgagtttgtgtcgttatggcaacagtaacagcttcgcagtttgcggcgtacgtgcatggaggagcaacctccgtggattccaagtcaaatttggggcaaattgggcagagggctcaactcatcactcacaatgggctgagatcagtgaacagagctgatgcgctccaaatgagaaacaacgtgaaagtgagtgctaagcgggtcggtcaagttcccatcaacaaagatcgatgtgaaacttcagggatgaccttgattttcgtgtcggccgagtgcggtccatggagcaaaaccggtggcctcggtgatgttgtgggtggattgccccctgccttggcggcaaatagacacagagtgatgactgtgtctccgcgttatgatcagtacaaagatgcttgggacacttctgtggttgttgagattcaagttggagacaaagtcgaaactgttggattcttccattgctacaagcgtggagttgatcgtgtttttgtcgatcaccctttgttcttggagaaggtctggggtaaaactaaatccaaggtttatggtccttctgctggagtcgattacgaggataatcaactgcggttcagcttgctgtccttggctgctttggaggctcctagggtgttgaatctaaccagcaacaagtatttctccggaccgtatggtgaggatgttgtcttcgttgctaatgactggcacaccgctgtgcttccgtgctacctgaaaaccatttaccaacctaagggaatctacacgaacgctaaggttgtcttgtgcatccacaacattgcatatcagggaagatttgcattctcggacttctataagcttaatctgcctgatcaactcaagagctctttcgatttcatggatgggtatgaaaaaccagtgaagggaaggaaaataaactggatgaaggctggaattatagaatcagacagagttctgactgtgagcccgtactacgccaatgaactcgtttctggtcctgataaaggagttgagttggataacatcctccgtaagtgtaccgtcaccggcatcgtgaatggcatggatactcaagagtggaacccggcgacggataaatacatcgataatcactatgatattaccactgttatggatggtaagccattgttgaaggaagctcttcaagcagaagtgggtttgcctgttgataggaatgttcctcttgttggatttatcggcagacttgaagagcagaaaggatcagacatcctggtggctgcgctgcataaatttattgagatggatgtgcaagtggtcatccttggaacggggaagaaggagttcgagaagcagatcgagcaactcgaggagttgtacccgggtaaagctgtaggagtggcgaagttcaatgtaccgttggcccataagataactgctggtgctgattttatgttggttcctagtagatttgaaccatgcggtctcatccaattacatgccatgagatatggaacaatacccatctgtgcttcaactggtggtctcgtggacaccgtgaaagaaggattcactggattccatatgggagcttttaatgttgagtgtgatgcggttgacccggccgacgtgttgaagatagtgaaaactgttgggagagctctggaagtgtatggcacccctgcattcagagaaatgataaataactgcatgtcactcgatctctcctggaagggacctgcaaagaactgggaaacggtgctgctgagcttgggcgtggccgggagcgaacccggtgttgaaggcgatgaaatcgctccgcttgccaaggaaaacgttgccactccttgaagaatgaagatgatatatctatctagtatctatatggaattgcatggtttaaactatatatatatgccccatgcatggctctctacctacttactactactaacacatcataacccttgcttgccattctccgttctccattctccattctcaactaactaataaacttctcacaccatctattcttcttccataatatctgtaggtgttatgtaacgcccactaatttttataaaatgaagagtctcatgtttggtttccaaaaaaaaaaaaaaaaaaaaaaa

SEQ ID NO: 52501 - protein, 604 aa, Perilla frutescens
MATVTASQFAAYVHGGATSVDSKSNLGQIGQRAQLITHNGLRSVNRADALQMRNNVKVSAKRVGQVPINKDRCETSGMTLIFVSAECGPWSKTGGLGDVVGGLPPALAANRHRVMTVSPRYDQYKDAWDTSVVVEIQVGDKVETVGFFHCYKRGVDRVFVDHPLFLEKVWGKTKSKVYGPSAGVDYEDNQLRFSLLSLAALEAPRVLNLTSNKYFSGPYGEDVVFVANDWHTAVLPCYLKTIYQPKGIYTNAKVVLCIHNIAYQGRFAFSDFYKLNLPDQLKSSFDFMDGYEKPVKGRKINWMKAGIIESDRVLTVSPYYANELVSGPDKGVELDNILRKCTVTGIVNGMDTQEWNPATDKYIDNHYDITTVMDGKPLLKEALQAEVGLPVDRNVPLVGFIGRLEEQKGSDILVAALHKFIEMDVQVVILGTGKKEFEKQIEQLEELYPGKAVGVAKFNVPLAHKITAGADFMLVPSRFEPCGLIQLHAMRYGTIPICASTGGLVDTVKEGFTGFHMGAFNVECDAVDPADVLKIVKTVGRALEVYGTPAFREMINNCMSLDLSWKGPAKNWETVLLSLGVAGSEPGVEGDEIAPLAKENVATP

SEQ ID NO: 52502 - DNA, 2289 bp, Triticum aestivum
  CDS (204)..(2021)
gtcactttcgccccgcccacagactagtacaaccaggaggaggaggagaggagaagcctctgccagtgaagaacgacactcactcactcacgagcgcccggccggcgaccgtgggtacgcgcaccggcgatcgtccgtccaagaagatcaaggagatcagaccagtcgtctctcgctgcaggtagccacaccctgcgcgcgcgatggcggctctggtcacgtcgcagctcgccacctccggcaccgtcctcggcatcaccgacaggttccggcgtgcaggttttcagggtgtgaggccccggagcccggcagatgcgccgctcggcatgaggactaccggagcgagcgccgccccgaagcaacaaagccggaaagcgcaccgcgggacccggcggtgcctctccatggtggtgcgcgccacgggcagcgccggcatgaacctcgtgttcgtcggcgccgagatggcgccctggagcaagaccggcggcctcggcgacgtcctcgggggcctccccccagccatggccgccaacggtcaccgggtcatggtcatctccccgcgctacgaccagtacaaggacgcctgggacaccagcgtcgtctccgagatcaaggtcgcggacgagtacgagagggtgaggtacttccactgctacaagcgcggggtggaccgcgtgttcgtcgaccacccgtgcttcctggagaaggtccggggcaagaccaaggagaagatctacgggcccgatgccggcacggactacgaggacaaccagctacgcttcagcctgctctgccaggcagcgcttgaggcacccaggatcctcgacctcaacaacaacccatacttctccggaccctacggggaagacgtggtgttcgtgtgcaacgactggcacacgggccttctggcctgctacctcaagagcaactaccagtccagtggcatctataggacggccaaggtagcgttctgcatccacaacatctcgtatcagggccgcttctccttcgacgacttcgcgcagctcaacctgcccgacaggttcaagtcgtccttcgacttcatcgacggctacgacaagccggtggaggggcgcaagatcaactggatgaaggccgggatcctgcaggccgacaaggtgctcacggtgagcccctactacgcggaggagctcatctccggcgaagccaggggctgcgagctcgacaacatcatgcgcctcacgggcatcaccggcatcgtcaacggcatggacgtcagcgagtgggaccccgccaaggacaagttcctcgccgccaactacgacgtcaccaccgcgttggaggggaaggcgctgaacaaggaggcgctgcaggccgaggtggggctgccggtggaccggaaggtgcccctggtggccttcatcggcaggctggaggagcagaagggccccgacgtgatgatcgccgccatcccggagatcttgaaggaggaggacgtccagatcgttctcctgggcaccgggaagaagaagtttgagcggctgctcaagagcgtggaggagaagttcccgagcaaggtgagggccgtggtcaggttcaacgcgccgctggctcaccagatgatggccggcgccgacgtgctcgccgtcaccagccgcttcgagccctgcggcctcatccagctccaggggatgcgctacggaacgccgtgcgcgtgcgcgtccaccggcgggctcgtcgacacgatcatggagggcaagaccgggttccacatgggccacctcagcgtcgactgcaacgtggtggagccggccgacgtgaagaaggtggtgaccaccctgaagcgcgccgtcaaggtcgtcggcacgccagcctaccatgagatggtcaagaactgcatgatccaggatctctcctggaaggggccagccaagaactgggaggacgtgcttctggaactgggggtcgaggggagcgagccaggggtcatcggcgaggagattgcgccgctcgccatggagaacgtcgccgctccctgaagagaggaaagaggtttttggtgcatggagcattcatccatcttcagggttcccgtgtgaggagatagccgcttgttgtagtgaagggccgatatatacatatttatatatagactaataagtacttatgctttgttgtgccgcttgcctctttattacaaacaaaaaaaaaggtaagaagttaggggttgtgcttgtgagagtgtgtacttaatcgtgcttgcattttggtgtggtatattgcaaataaacaaaggatttgttatgt

SEQ ID NO: 52503 - protein, 605 aa, Triticum aestivum
MAALVTSQLATSGTVLGITDRFRRAGFQGVRPRSPADAPLGMRTTGASAAPKQQSRKAHRGTRRCLSMVVRATGSAGMNLVFVGAEMAPWSKTGGLGDVLGGLPPAMAANGHRVMVISPRYDQYKDAWDTSVVSEIKVADEYERVRYFHCYKRGVDRVFVDHPCFLEKVRGKTKEKIYGPDAGTDYEDNQLRFSLLCQAALEAPRILDLNNNPYFSGPYGEDVVFVCNDWHTGLLACYLKSNYQSSGIYRTAKVAFCIHNISYQGRFSFDDFAQLNLPDRFKSSFDFIDGYDKPVEGRKINWMKAGILQADKVLTVSPYYAEELISGEARGCELDNIMRLTGITGIVNGMDVSEWDPAKDKFLAANYDVTTALEGKALNKEALQAEVGLPVDRKVPLVAFIGRLEEQKGPDVMIAAIPEILKEEDVQIVLLGTGKKKFERLLKSVEEKFPSKVRAVVRFNAPLAHQMMAGADVLAVTSRFEPCGLIQLQGMRYGTPCACASTGGLVDTIMEGKTGFHMGHLSVDCNVVEPADVKKVVTTLKRAVKVVGTPAYHEMVKNCMIQDLSWKGPAKNWEDVLLELGVEGSEPGVIGEEIAPLAMENVAAP

SEQ ID NO: 52504 - DNA, 2575 bp, Manihot esculenta
  CDS (50)..(2305)
gtttgatgaaccccatctcaagctgttggggctgtcgcacttgtgagaaatggcatttataggatcacttccttttattatccaaaccaaagcagaaagttctgtccttctccatgacaaaaacctacagcgatccagattctccgttttcccatgtagatcacaaaactcttttaatttagccgtttcgttatctttgagttttaagcctgtaagagctacaggtaaggaaggcgttagtggtgatgggtcagaggatacacttcaagccaccatcgagaaaagcaagaaagttctcgccttgcaaagggacctacttcagaagattgctgaaagaaggaaattggtttcttctatacaaagtagtgttggtgaccacgacacaaacaaaacttctcatgaacagagggaaaactctttggcaaattcagataatacttcaactagtgatgtgaatatgcaccaacagcaaaatggcccagttcttccgagtagctatgtccattcaactgcagatgaggtatcagaaactgcatcttcagctattaatagaggtcatgctaaagatgataaggaacttgaacaacatgcatctcctagaacagcctttgttaagaattctaccaaacagtttaaagagatggattctgagaaactacagacagatgagataccatcttttctttcaaacaccacagatatttccactataaatgaagaaaatagtgaacattcaaatgaatcaacctcacctatggtcgacatttttgaaagtgattctatgactgaagacatgaagccacctcctttggctggggacaatgtcatgaatgttattttggtagctgcagaatgtgctccatggtccaaaacaggtggccttggtgatgtcgctggatctttaccaaaggctttggctcggcgtggacatcgggttatggttgtggcaccgcgatatggcaactatgttgaacctcaggatactggagtccgaaagaggtataaggtggatggtcaggattttgaagtatcatacttccaagccttcattgatggggttgattttgtattcattgacagtcctatgtttcgccacatagggaatgatatatatggaggaaacagaatggatatattaaagaggatggtattattttgcaaagctgctgttgaggttccttggcatgtcccatgtggtggagtctgctatggggatggaaatttggctttcattgcaaatgattggcatacagcattgttgccagtgtatctgaaggcatattatcgggataatggtttaatgcaatatacaagatctgttcttgtaattcataacatagctcaccagggtcggggtcccagtggagatttctcttacgtgggtctaccagaacattacattgatctcttcaaactgcatgatccgattggtggtgaccacttcaatatctttgcacctggtcttaaggtggcagatcgtgtggttactgttagtcatggatacgcctgggagcttaaaacatctgaaggtggttggggtcttcacaatatcataaatgagaaccactggaaattgcagggcattgttaatgggattgatgccaaagaatggaatccacagtttgatattcaactgacatcagatggttatactaactattccctggaaacacttgatactggcaagcctcagtgcaagacagccttacagaacgagctccggtttgccatccccccagatgtccctgttattgggttcattggaaggttggattatcagaaaggtgtcgatctcatagctgaggcaattccctggatggtgggtcaggatgtgcaactagtaatgttgggtactggcagacaagacttggaagagatgcttagacaatttgaaaaccaacatagagataaagtgaggggatgggttggtttttctgtgaagacagctcacaggataactgctggtgcagatattttgctcatgccatcaagatttgaaccatgtgggctaaaccagttatatgctatgatgtacgggacgattcctgtagtacacgctgtgggtggactaagggacacggtgcaacctttcgatccatttaatgagtcggggcttgggtggacatttgatagcgctgaatcacataaactgatacatgcattaggcaattgcttgctcacttaccgagagtacaagaagagctgggaaggcctgcagagaagagggatgactccaaacctcagctgggaccatgctgctgagaaatatgaggagactcttgttgcagccaagtaccagtggtgagcaatagtgcttttccttaaattttgacttttttttttctgttaaataatgcttccaagaggttgccctctgatgctagtaagggggccaatagatggccatgtatgttctgctatatagctcaatgtgtaatcagcttagagttatgattcaggagttgtaatcctttctggttttatcacacattagcagaggatggtttggatgtgatgagtggtgacccatgttttatccttgtgcttattctgttatctgaaaaaaaaaaaaaaa

SEQ ID NO: 52505 - protein, 751 aa, Manihot esculenta
MAFIGSLPFIIQTKAESSVLLHDKNLQRSRFSVFPCRSQNSFNLAVSLSLSFKPVRATGKEGVSGDGSEDTLQATIEKSKKVLALQRDLLQKIAERRKLVSSIQSSVGDHDTNKTSHEQRENSLANSDNTSTSDVNMHQQQNGPVLPSSYVHSTADEVSETASSAINRGHAKDDKELEQHASPRTAFVKNSTKQFKEMDSEKLQTDEIPSFLSNTTDISTINEENSEHSNESTSPMVDIFESDSMTEDMKPPPLAGDNVMNVILVAAECAPWSKTGGLGDVAGSLPKALARRGHRVMVVAPRYGNYVEPQDTGVRKRYKVDGQDFEVSYFQAFIDGVDFVFIDSPMFRHIGNDIYGGNRMDILKRMVLFCKAAVEVPWHVPCGGVCYGDGNLAFIANDWHTALLPVYLKAYYRDNGLMQYTRSVLVIHNIAHQGRGPSGDFSYVGLPEHYIDLFKLHDPIGGDHFNIFAPGLKVADRVVTVSHGYAWELKTSEGGWGLHNIINENHWKLQGIVNGIDAKEWNPQFDIQLTSDGYTNYSLETLDTGKPQCKTALQNELRFAIPPDVPVIGFIGRLDYQKGVDLIAEAIPWMVGQDVQLVMLGTGRQDLEEMLRQFENQHRDKVRGWVGFSVKTAHRITAGADILLMPSRFEPCGLNQLYAMMYGTIPVVHAVGGLRDTVQPFDPFNESGLGWTFDSAESHKLIHALGNCLLTYREYKKSWEGLQRRGMTPNLSWDHAAEKYEETLVAAKYQW

SEQ ID NO: 52506 - DNA, 1818 bp, Triticum aestivum
  CDS (1)..(1818)
atggcggctctggtcacgtcgcagctcgccacctccggcaccgtcctcggcatcaccgacaggttccggcgtgcaggttttcagggtgtgaggccccggagcccggcagatgcgccgctcggcatgaggactaccggagcgagcgccgccccgaagcaacaaagccggaaagcgcaccgcgggacccggcggtgcctctccatggtggtgcgcgccacgggcagcgccggcatgaacctcgtgttcgtcggcgccgagatggcgccctggagcaagaccggcggcctcggcgacgtcctcgggggcctccccccagccatggccgccaacggtcaccgggtcatggtcatctccccgcgctacgaccagtacaaggacgcctgggacaccagcgtcgtctccgagatcaaggtcgcggacgagtacgagagggtgaggtacttccactgctacaagcgcggggtggaccgcgtgttcgtcgaccacccgtgcttcctggagaaggtccggggcaagaccaaggagaagatctacgggcccgatgccggcacggactacgaggacaaccagctacgcttcagcctgctctgccaggcagcgcttgaggcacccaggatcctcgacctcaacaacaacccatacttctccggaccctacggggaagacgtggtgttcgtgtgcaacgactggcacacgggccttctggcctgctacctcaagagcaactaccagtccagtggcatctataggacggccaaggtagcgttctgcatccacaacatctcgtatcagggccgcttctccttcgacgacttcgcgcagctcaacctgcccgacaggttcaagtcgtccttcgacttcatcgacggctacgacaagccggtggaggggcgcaagatcaactggatgaaggccgggatcctgcaggccgacaaggtgctcacggtgagcccctactacgcggaggagctcatctccggcgaagccaggggctgcgagctcgacaacatcatgcgcctcacgggcatcaccggcatcgtcaacggcatggacgtcagcgagtgggaccccgccaaggacaagttcctcgccgccaactacgacgtcaccaccgcgttggaggggaaggcgctgaacaaggaggcgctgcaggccgaggtggggctgccggtggaccggaaggtgcccctggtggccttcatcggcaggctggaggagcagaagggccccgacgtgatgatcgccgccatcccggagatcttgaaggaggaggacgtccagatcgttctcctgggcaccgggaagaagaagtttgagcggctgctcaagagcgtggaggagaagttcccgagcaaggtgagggccgtggtcaggttcaacgcgccgctggctcaccagatgatggccggcgccgacgtgctcgccgtcaccagccgcttcgagccctgcggcctcatccagctccaggggatgcgctacggaacgccgtgcgcgtgcgcgtccaccggcgggctcgtcgacacgatcatggagggcaagaccgggttccacatgggccgcctcagcgtcgactgcaacgtggtggagccggccgacgtgaagaaggtggtgaccaccctgaagcgcgccgtcaaggtcgtcggcacgccagcctaccatgagatggtcaagaactgcatgatccaggatctctcctggaaggggccagccaagaactgggaggacgtgcttctggaactgggggtcgaggggagcgagccaggggtcatcggcgaggagattgcgccgctcgccatggagaacgtcgccgctccctga

SEQ ID NO: 52507 - protein, 605 aa, Triticum aestivum
MAALVTSQLATSGTVLGITDRFRRAGFQGVRPRSPADAPLGMRTTGASAAPKQQSRKAHRGTRRCLSMVVRATGSAGMNLVFVGAEMAPWSKTGGLGDVLGGLPPAMAANGHRVMVISPRYDQYKDAWDTSVVSEIKVADEYERVRYFHCYKRGVDRVFVDHPCFLEKVRGKTKEKIYGPDAGTDYEDNQLRFSLLCQAALEAPRILDLNNNPYFSGPYGEDVVFVCNDWHTGLLACYLKSNYQSSGIYRTAKVAFCIHNISYQGRFSFDDFAQLNLPDRFKSSFDFIDGYDKPVEGRKINWMKAGILQADKVLTVSPYYAEELISGEARGCELDNIMRLTGITGIVNGMDVSEWDPAKDKFLAANYDVTTALEGKALNKEALQAEVGLPVDRKVPLVAFIGRLEEQKGPDVMIAAIPEILKEEDVQIVLLGTGKKKFERLLKSVEEKFPSKVRAVVRFNAPLAHQMMAGADVLAVTSRFEPCGLIQLQGMRYGTPCACASTGGLVDTIMEGKTGFHMGRLSVDCNVVEPADVKKVVTTLKRAVKVVGTPAYHEMVKNCMIQDLSWKGPAKNWEDVLLELGVEGSEPGVIGEEIAPLAMENVAAP

SEQ ID NO: 52508 - DNA, 3519 bp, Vigna unguiculata
  CDS (386)..(3010)
ggcacgagagaaacgatcaattggtcgctaaaatggcttcgaagctaacaacatgttttatttgctggaatctgaatagcaacaacggcttcaactgtaataataacaatactcgcgtaatgcactctccttttcaaccttattgcaaaatgcgacaccgtattcccagttctcgccacaaaagacaatatatcaagaaagcatcacacccttccattgatggagctctcaatcaaaatcaaaactctgatgatgattctctccacaatttcaaccctccaattctactgcctcttaataataattccacaccatcggccttgaacgtaaacggagcagagcggctgaacagttgtctggcagtcaactcgaccatttgttagccatgataaaaaatgcagagaaaaatatccttcttctgaatcaagctagagttcatgcacttgaagaccttgaaaagattcttgccgaaaaggaagccttacaaggagaaattaatgtcttagcgatgagattggccgagtctgatgtgcggattgaagttgcggcccaggaaaagacacgtgttgaactcttggagggtgagttggagaaactgcgtagtgaattggcgcaaaagggcagtattgaaggaagagatgctgaattgcatgaacttcaaaatggagtatttagtgatgcaattacaaacaatctaagtcataatgataagatccattcccttaccgaggagctaaattcaattagagaagaaaatgccactttgaagaatgccatagaatcatttaaagcacagctcaatgatgttgcaaacaatgatgaacgtttagcggtattggaaaaagaacgcttatctttgcgatcagccctaaaagacatggaatcaaaactgtcaatatttccagaagatgtatctgaactgtctacacttagagttgaatgcaaggatttgtctgataaggttgaaaatttgcaattgctgctagacaaagcaaccaaacaagacagccaagctgttacagtgctgcaacaaaaccaggatcttcaaaggaaggttgataaattggaagcatccctcgaagaagctaacatctataagctgtcatctgataaattgcaaaaatctaatgaactaatgcaacaaaagataaaactattggagagccagctacaaaaatcagatgaagatataaactcttacgttcagttgtatcagcagtcagtgaaggaatttcaagatacactcgatcttctgaaaaaagaaagcaagagaagggcgccggatgaaccagtggaagatatgccgtgggaattctggagtcggttgttgcttctaattgatggttgggcacttgaaaagaagatatcagtagatgatgcaaagcttttgagagaaaaggtctggaagagagacaagagtgttagtgatgtatatatggcttacaaagaaaagaccgaacatgaggctatatctgcatttcttgggcttacatcatctgcaacaagtccaggattgtacgtgattcatattgcagcagagatggcaccagtagctaaggttggtggcttgggggatgttatcagtggtctaagtaaagcattgcaaaagaaaggacaccttgttgaaattatacttcccaaatatgactgtatgcaatatgaccgcattggtgacttaagagctttggatgtggtgatagagtcatactttgatggtcaattattcaaaaataaaatctgggttggcactgttgaaggccttcctgtttatttcattgagcctcatcatcctggtaagttcttttggagaggagattattatggcgcgcatgacgacttcagaagattttcatattttagccgtgcagctcttgagtttcttcttcaagctggcaagaagccagatatcatccattgccatgattggcagacagcatttattgctcctctatattgggatgtatatgccccaaaaggattaaattcagctaggatatgttttacatgccacaactttgagtatcaagggactgcaggagcttcagagttggaagcatgtggtcttgatagccaccagctaaacagaccagatagaatgcaggacaactcagcacataacagagtcaattctgtcaagggtgcagttgtttactcaaacattgtaacaacagtgtcccccacttatgctcaagaagtgagaactgcagagggaggtaaaggcctccattcaactctctctacccactccaaaaagttcatcggtattcttaatggtattgacactgatatatggaatcctgccactgatccatttcttcaagtccagtacaatgcaaatgatcttcaagggaaatcagagaataaggaagccttgagaaggaatctaggtctttcttctgcagacgttaggaggccattggttggctgcattacaagattggttccacaaaaaggtgttcatcttatccgacatgcaatatatctaacattggaactgggaggacaatttgttctacttggttcaagtccagtccctcatattcagagagaatttgagggcattgccaaccactttcagaatcacgaccacataaggttgatattgaagtatgatgagtctctctcccatgctatttatgctgcatctgacatgttcatcattccatcaatctttgaaccttgtggcctaacacagatgatatcaatgagatatggtgccatacctattgccagaaaaaccggtggcctaaatgacagtgtttttgacgttgatgatgatacaataccttcacagtttcgaaatggatttacattcttgaatgccgatgagaagggaataaacgatgccttagtacgtgcaattaatctcttcacaaacgatcctaagagttggaagcaacttgttcagaaggacatgaacatagatttcagctgggattcttcagcagcacaatatgaggagctctactcaaagtctgtgactagaggaagggcaacaaaacgtgcttaatttagcaaaaggaggcttttctgtgctatccgttcaattttgtcagtttcctaaacagagatgggagatcagatttaatgctcaatgaggaggatttatctgaacatgcctgtcatgcaaaaacatctcaaattgagaatgaatataaagaataataatatgaatgcaacatggttactgaaactatgctgctagctagattagtttccgtgaagcaaccgttctcatgcattgatggattctatatctaggtgatatttgaacttcactatacctcacaggattgtgtaattatttcccccttttcttcgttatttaattagtttgccaacagtgtataaaggtcacacatgtaaaagcgttacaggctttcatcttagttttctactaaaaagaatgtagaatgtaatcaaatgtcaagcaaaataaaaattgttcactgcctgtaaactttttatcttttatttttgacaaagcttataactttttcctaaaaaaaaaaaaaaaaa

SEQ ID NO: 52509 - protein, 874 aa, Vigna unguiculata
MIKNAEKNILLLNQARVHALEDLEKILAEKEALQGEINVLAMRLAESDVRIEVAAQEKTRVELLEGELEKLRSELAQKGSIEGRDAELHELQNGVFSDAITNNLSHNDKIHSLTEELNSIREENATLKNAIESFKAQLNDVANNDERLAVLEKERLSLRSALKDMESKLSIFPEDVSELSTLRVECKDLSDKVENLQLLLDKATKQDSQAVTVLQQNQDLQRKVDKLEASLEEANIYKLSSDKLQKSNELMQQKIKLLESQLQKSDEDINSYVQLYQQSVKEFQDTLDLLKKESKRRAPDEPVEDMPWEFWSRLLLLIDGWALEKKISVDDAKLLREKVWKRDKSVSDVYMAYKEKTEHEAISAFLGLTSSATSPGLYVIHIAAEMAPVAKVGGLGDVISGLSKALQKKGHLVEIILPKYDCMQYDRIGDLRALDVVIESYFDGQLFKNKIWVGTVEGLPVYFIEPHHPGKFFWRGDYYGAHDDFRRFSYFSRAALEFLLQAGKKPDIIHCHDWQTAFIAPLYWDVYAPKGLNSARICFTCHNFEYQGTAGASELEACGLDSHQLNRPDRMQDNSAHNRVNSVKGAVVYSNIVTTVSPTYAQEVRTAEGGKGLHSTLSTHSKKFIGILNGIDTDIWNPATDPFLQVQYNANDLQGKSENKEALRRNLGLSSADVRRPLVGCITRLVPQKGVHLIRHAIYLTLELGGQFVLLGSSPVPHIQREFEGIANHFQNHDHIRLILKYDESLSHAIYAASDMFIIPSIFEPCGLTQMISMRYGAIPIARKTGGLNDSVFDVDDDTIPSQFRNGFTFLNADEKGINDALVRAINLFTNDPKSWKQLVQKDMNIDFSWDSSAAQYEELYSKSVTRGRATKRA

SEQ ID NO: 52510 - DNA, 2107 bp, Astragalus membranaceus
  CDS (96)..(1919)
gttttttggttaacggcactcctcactctctagtagccatttccgttcagcttccttccatcggcgattgttgctccttactgctctctcacagaatggcaacggtgacggggtcttatgtggtgtcgagaagcgcgtgcttcaattcccagggaagaacagaagccaaagtgaattcacctcagaagataaatctcaatagccaagcattcacttacgttggcttgagatctctcaacaagctgcacgtgcaaaccgcacgtgcaaccaaaacatcttcgtcttccttgaaggctactaacaaagatttggtgaaaatagtgtgtgggaatgggatgaacttggtgtttgtgggagctgaggtgggaccatggagtaaaactggaggacttggtgatgttcttggaggacttccaccagctttggctggaaatgggcaccgtgttatgactgtgtcaccgcgttacgatcaatacaaggatgcatgggacactggtgtgtctgtggagatcaaagttggagatagattcgaaactgtccgattctttcactgctacaaacgaggagttgatcgtgtttttgtagatcacccacttttccttgagaaggtgtggggaaagaccgaatctaaactctatggccctaaaactggtgtggattataaagataaccaacttagattcagcttgttgtgccaggctgcacttgaggcaccaagggttttgaacttaaacagcaacaaacatttctcaggaccatatggcgaagatgtagttttcgttgccaatgattggcatactgctcttcttccatgctatctgaaatccttgtacaagtccaagggaatttacaaaagcgcaaaggtagcattttgtattcataacatagcgtatcagggaaggcatgccttttcagacctctcccttctcaatttaccaaatgaattcagaagctctttcgactttattgatgggtatgataagcctgtgaagggaaggaaaattaactggatgaaggctggagtgttagaatctgaccgagtcttcactgtaagtccatattatgccaaggagcttgtttctggagaggatagaggtgtggaattggacaatataattcgttcgattggtatcactggtattgtaaatggcatggataatcgagagtggagtccacaaactgatagatacatagatgtacactacgatgcatcaactgtcaccgaagcaaaagctatactgaaagaagcccttcaagcagaggttgggttgcctgttgacaggaatatccctgtgatagggttcattggcaggctagaagagcagaaaggttcagatattcttgttgaatctatcccaaagttcattgaccagaatgttcagataatagttcttggaactggcaaaaagatcatggagaaacaaattgaacagctggaggtaacctatcctggcaaggctataggagtagcaaaattcaacagtcccttggctcacaagattattgctggagctgactttatagtgatcccaagtagatttgagccatgtggtttagttcagttgcatgccatgccatacggaacggtgcctatagtttcctcaactggtggacttgttgacaccgtaaaagaaggttataccggattccatgtaggagcattcagcgtcgagtgtgaagctgttgatcctgctgatgtggagaagttagcaactacagtcaacagagcccttaaaacctatggtacccaagccttgaaagagatgatcctgaattgcatggcccaagacttttcttggaagggaccggcgaaacaatgggagcaggcgctgttgagcttagaggtcgctggcagcgaacctggaattgatggagaggaggtcgctcctcttgcaaaggaaaatgttgccactccttgaacatccccatggatttcctgatttcagaaggattttgtagccacaaattggtaatatgaccaacgagttctaacgatgggattgtgtggttacaagggaataaagttgaaggtctttctcaagcaatgtatatatttatttatatataactaaaactaacataacgtttattataaaaaaaaaaaaaa

SEQ ID NO: 52511 - protein, 607 aa, Astragalus membranaceus
MATVTGSYVVSRSACFNSQGRTEAKVNSPQKINLNSQAFTYVGLRSLNKLHVQTARATKTSSSSLKATNKDLVKIVCGNGMNLVFVGAEVGPWSKTGGLGDVLGGLPPALAGNGHRVMTVSPRYDQYKDAWDTGVSVEIKVGDRFETVRFFHCYKRGVDRVFVDHPLFLEKVWGKTESKLYGPKTGVDYKDNQLRFSLLCQAALEAPRVLNLNSNKHFSGPYGEDVVFVANDWHTALLPCYLKSLYKSKGIYKSAKVAFCIHNIAYQGRHAFSDLSLLNLPNEFRSSFDFIDGYDKPVKGRKINWMKAGVLESDRVFTVSPYYAKELVSGEDRGVELDNIIRSIGITGIVNGMDNREWSPQTDRYIDVHYDASTVTEAKAILKEALQAEVGLPVDRNIPVIGFIGRLEEQKGSDILVESIPKFIDQNVQIIVLGTGKKIMEKQIEQLEVTYPGKAIGVAKFNSPLAHKIIAGADFIVIPSRFEPCGLVQLHAMPYGTVPIVSSTGGLVDTVKEGYTGFHVGAFSVECEAVDPADVEKLATTVNRALKTYGTQALKEMILNCMAQDFSWKGPAKQWEQALLSLEVAGSEPGIDGEEVAPLAKENVATP

SEQ ID NO: 52512 - DNA, 1482 bp, Methylococcus capsulatus
  CDS (1)..(1482): transl_table=11
atgaagatcctgttcgtctccagtgaggtcttccccctgatgaagaccggcggactcgcggacgtctccggcagcctgccggcggccttgtccgccctgggtcatgatgtgcgtatcctgatgccggcatacccggaagccatctccgccgccgaaacccccaacgcgctgagtctgcgtcaggcgggcagtcagctgaccctgctgtcgacgcgcttgccgggcaccaccgtgcccctctggctgctggacgcaccggcttcgttcggccgcttcggcaacccttacctggcacccaacggtgccccctggcccgacaatgccgaacgtttcgctctgctcgcgcgtgtcgccgtcgacctcacccaggaccggctcggcctcggctggaaacccgatgtcgtccattgcaatgactggcaaaccggtttgatcccgccgcttttgagcgacgagccgaatcgtccggccgtggtgttcaccgtccacaatctcgcctaccaaggtctgttcccctacgaaacctttcaacgcctggcgctccctccccgtctctggaagatggaggcactggagttctacggccagctttccttcatcaagggagggttggtattcgccgaccgcatcaacacggtgagtccaagctatgccgaagagatccagaccccggagttcggctgcggcctggacggtctgctcagaagccgcaagtcatgcctgagcgggattctcaacggtatcgacgacgtggcctggaatccggccaccgatccctatcttcccgcgccctacggcccggataccctggagcggaaaaaggtcaaccgcacggtgctcagacagcggtacggcctgccggacgacccggaggtcgccgtgctcggaatggtgggaaggatggtcgagcagaagggagtggacctgttgatcgacattctggatgatctgctgcagttgccggtccagctcgtcgtcctgggcagcggcgacaaggaattcgaacgctgcttcgaaagggccgccgcagcccgtccggagcgtatcgccgtcaccatcggctatgacgaaccgctggcccatctcatcgaagccggcgccgatatctttctgatgccttcccgcttcgagccctgcggcctgaaccaactctatagtcagcgctacggcaccgtaccgatcgtgcgcaaggtcggcggactcgcggacaccgtggaagatgccacgcccgagcgccttgcggccggacaggccagcggcatcgtgttcgagccggccaagcccgccttcctgctggaggccgtctaccgcgccctggcgctgtaccgggagcccgaggtctggcgggcggtctgcaagtgcggcatggccaaggatttttcctggcgcaagagtgcctcccggtatgtcggactctaccgggaggcactggccggaatgaatgccggctgctccatcgccgacccccgctgtgcggcctag

SEQ ID NO: 52513 - protein, 493 aa, Methylococcus capsulatus
MKILFVSSEVFPLMKTGGLADVSGSLPAALSALGHDVRILMPAYPEAISAAETPNALSLRQAGSQLTLLSTRLPGTTVPLWLLDAPASFGRFGNPYLAPNGAPWPDNAERFALLARVAVDLTQDRLGLGWKPDVVHCNDWQTGLIPPLLSDEPNRPAVVFTVHNLAYQGLFPYETFQRLALPPRLWKMEALEFYGQLSFIKGGLVFADRINTVSPSYAEEIQTPEFGCGLDGLLRSRKSCLSGILNGIDDVAWNPATDPYLPAPYGPDTLERKKVNRTVLRQRYGLPDDPEVAVLGMVGRMVEQKGVDLLIDILDDLLQLPVQLVVLGSGDKEFERCFERAAAARPERIAVTIGYDEPLAHLIEAGADIFLMPSRFEPCGLNQLYSQRYGTVPIVRKVGGLADTVEDATPERLAAGQASGIVFEPAKPAFLLEAVYRALALYREPEVWRAVCKCGMAKDFSWRKSASRYVGLYREALAGMNAGCSIADPRCAA

SEQ ID NO: 52514 - DNA, 1443 bp, Rhizobium meliloti
  CDS (1)..(1443): transl_table=11
atgaacatcctgtcagttgcgtccgaagtctacccgctggtgaagacggggggcctcgccgatgtcgtcggcgcgctgccctccgcacttctcccgcatggtgtgcggacgcgcacgctggtgcccggctatccctcggtgctgaagaagctgaagaagaaaaaaccggtcggccgattcgacaatctcttcggccatccagccacggtgcttgccgccgaggtcaacggagtggacctgctcgtcctcgaccagcccgcactctatgcacgggacggcggcccttatctcgattcgaccgggcgcgattatcccgataatttccggcgcttcgccgcactctcgctggcagctgcggagatcgcggggaacggcatcatccccaactggaagccggacatcgttcacgtccacgactggcagacggcgctcacccccgtctatatgcgcttcggcccggcgccggacctgccgacggtcatgacgatccacaacatcgccttccagggtcagttcggcgcctcggtgttcccggaactggcgctgccgccggatgccttctccacgcaattcgtcgaatattatggagatgtcggcttcctcaaaggcggcctgcagacggcaagcgcaatcaccacggtcagcccttcatatgcgcaggaaatcctgacgcccgaattcggcatgggccttgatgggctcctgtcgagccgtgtcgcggacctgacgggcatcgtcaacggcatcgacggagagacgtgggacccgcagacggacccgcacattccggcgcattacgggccgggaacgctcaaacggcgcgccggcaaccgcaaggcgctggaagagcgtttcggcctcgaaaaaggtccggggccgatcttctgcgtcatcagccgcctcacctggcagaaaggcatggacctcgtcgccgaagccgccgacgatatcgtggcactcggcggcaagctcgtcgtgctcggctcgggcgatccggcgctcgaaagcgcgcttatggcggccgcgtcgcgcaaccgcgggcatatcggcatggtgaccggttatgacgagccgctgtcgcacctcatgcaggcaggcgccgatgcgatcctcattccgtcgcgtttcgaaccctgcggcctgacgcagctctatggcctgcgctatggttgcgttccggtcgtggcccgcaccggcggtctcaccgacaccatcatcgacgccaacgaggcggcgctgtcggcgaagtgcgccaccggctttcatttcctgccggtgacgaccgacgggctaaggcttgcgatccggcgcgtcctgcgcgcatacaatgaacccaagctctgggcacgcctgcagtaccagggcatgaaatccgacgtttcctgggccaaaagcgcggaacgctacgtctcgctttactccgctcttctcgcgaaaggctaa

SEQ ID NO: 52515 - protein, 480 aa, Rhizobium meliloti
MNILSVASEVYPLVKTGGLADVVGALPSALLPHGVRTRTLVPGYPSVLKKLKKKKPVGRFDNLFGHPATVLAAEVNGVDLLVLDQPALYARDGGPYLDSTGRDYPDNFRRFAALSLAAAEIAGNGIIPNWKPDIVHVHDWQTALTPVYMRFGPAPDLPTVMTIHNIAFQGQFGASVFPELALPPDAFSTQFVEYYGDVGFLKGGLQTASAITTVSPSYAQEILTPEFGMGLDGLLSSRVADLTGIVNGIDGETWDPQTDPHIPAHYGPGTLKRRAGNRKALEERFGLEKGPGPIFCVISRLTWQKGMDLVAEAADDIVALGGKLVVLGSGDPALESALMAAASRNRGHIGMVTGYDEPLSHLMQAGADAILIPSRFEPCGLTQLYGLRYGCVPVVARTGGLTDTIIDANEAALSAKCATGFHFLPVTTDGLRLAIRRVLRAYNEPKLWARLQYQGMKSDVSWAKSAERYVSLYSALLAKG

SEQ ID NO: 52516 - DNA, 1419 bp, Anabaena variabilis
  CDS (1)..(1419): transl_table=11
atgcggattctatttgtggcagcagaagcagcacccatcgcaaaagtaggagggatgggtgatgttgtcggtgcattacctaaggtcttgagaaaaatggggcatgatgtgcgtatcttcttgccctattacggctttttgccagacaaaatggaaattcccaaagatccaatctggaagggatacgccatgtttcaggactttacagttcacgaagcagttctgcctggtactgatgttcccttgtatttatttggacatccagccttcaacccccggcgaatttattcgggagatgatgaagactggcggttcaccttgttttccaatggtgcggcggaattttgttggaattactggaaaccagaaattattcactgtcacgattggcacacaggcatgattcctgtgtggatgaaccaatcaccagatatcaccacagtcttcactatccacaacctagcttaccaagggccttggcgttggtatctagataaaattacttggtgtccttggtatatgcagggacacaacacaatggcggcggctgtccagtttgctgacagagtaaataccgtttctcctacatacgccgagcaaatcaagaccccggcttacggtgagaaaatagaaggcttgctgtctttcatcagtggtaaattatctgggattgttaacggtatagatacggaagtttatgacccagctaatgataaatttattgctcaaacttttactgctgatactttagataaacgcaaagccaacaaaattgctttacaagaagaagtagggttagaagttaacagcaatgcctttttaattggcatggtgacaaggttagtcgagcagaagggtttagatttagtcatccaaatgctcgatcgctttatggcttatactgatgctcagttcgtcttgttaggaacaggcgatcgctactacgaaactcaaatgtggcaattagcatcccgctaccccggacgtatggccacctatctcctatacaatgatgccctatcccgccgcatctacgccggttctgatgcctttttaatgcccagccgctttgaaccatgcggtattagccagatgatggctttacgctacggttccatccccatcgttcgccgcactgggggtttagttgacaccgtatcccaccacgaccccgtaaacgaagccggtacaggctactgctttgaccgctacgaacccctagacttattcacctgcatgattcgcgcctgggaaggcttccgctacaaaccccaatggcaagaactacaaaagcgtggtatgagtcaagacttcagctggtacaaatccgctaaggaatacgacagactctatcgctcaatatacggtttgccagaagcagaagagacacagccagagttaattctggcaaatcagtag

SEQ ID NO: 52517 - protein, 472 aa, Anabaena variabilis
MRILFVAAEAAPIAKVGGMGDVVGALPKVLRKMGHDVRIFLPYYGFLPDKMEIPKDPIWKGYAMFQDFTVHEAVLPGTDVPLYLFGHPAFNPRRIYSGDDEDWRFTLFSNGAAEFCWNYWKPEIIHCHDWHTGMIPVWMNQSPDITTVFTIHNLAYQGPWRWYLDKITWCPWYMQGHNTMAAAVQFADRVNTVSPTYAEQIKTPAYGEKIEGLLSFISGKLSGIVNGIDTEVYDPANDKFIAQTFTADTLDKRKANKIALQEEVGLEVNSNAFLIGMVTRLVEQKGLDLVIQMLDRFMAYTDAQFVLLGTGDRYYETQMWQLASRYPGRMATYLLYNDALSRRIYAGSDAFLMPSRFEPCGISQMMALRYGSIPIVRRTGGLVDTVSHHDPVNEAGTGYCFDRYEPLDLFTCMIRAWEGFRYKPQWQELQKRGMSQDFSWYKSAKEYDRLYRSIYGLPEAEETQPELILANQ

SEQ ID NO: 52518 - DNA, 1449 bp, Bradyrhizobium japonicum
  CDS (1)..(1449): transl_table=11
atgacgcctgctcgcgtcctcgcggtcgcctccgaagtctatcccatcgtcaagaccggcggcctcgcggatgtcgccggcgcgctgccgattgcgctgaaggcgcacggcgtcgagatgcgcaccctgatgccgggctatcccgacgtgatgcggctgctctcgggcgcggaggagatccggcgctggccggattatttcggcgggccgggccggctgctcgccggcgcgcatgacgggctcgacctgttcgtgctcgacgtgccgcatctctacgcgcggccgggcaacccatacgtcacgacagagggggtcgactggccggacaacggcgtgcgctttgcggcgctgtcgcgcgtggcggccgacatcggccacggactcgttccggccttcgtgcccgacatcgtgcacgcccatgactggcaggccgggctcgcgcccgcttatctgcactacgacaatcgtccgcggcccggcaccgtgatgacgatccacaacatggcctatcagggcaagttcgctcctgagctgatcggtgcgatcggcctgccgtggagctccttcgacgtcaacggcctcgaatatttcggcggcatcagcttcctgaaggccggcctgcaattcgccgatcgcatcacgacggtgtccccgacctacgcgcgtgagatccagagcgacgaaggcggcatggggctcggcggcctgctgcgcgcgcgcgcgggcgcattgagcgggatcctcaacggcatcgacatcgcggtgtggaatccgcagaccgattcgcacatcgcctatcggttcggcgcggaggaccttacattccgcgctgcgaacaaggcggtgcttcagcaacaattcaatctcgattcctcggacgaagcccccctgctcggcgtcatcagccggctgtcctggcagaaggggctcgatctcctgctcgaggccattccgaccattttgggcgaaggcatgcagctcgcgctgctcggcagcggcgaccgcgatctccaggatcgctatcaggccgccgcccgcgcgaatcccggccggatcggggtcgtaatcggctacgacgagatcctggcgcatctgatccaggccggctcggacgcgctcatcgtgccgtcgcggttcgagccgtgcggcctgacccagctctgcgccctgcgctatggcgccgtgccgatcgtctcgcgcgtcggcggcctcgaggataccatcgtcgatatcggcgaggccggccgcgaggccaccggcttcaagttcggcccggtgacggcggatgccctcgccggcacgctgcgcaaggccaacacggctttccacgacaagctgacctggcggcagctgcaacgaaacggccttgcgaccgacgtctcctggcgcagccgcgccggcgactatgcagcgctgtatcggagcctgatcgaatcgcgccgcgcctag

SEQ ID NO: 52519 - protein, 482 aa, Bradyrhizobium japonicum
MTPARVLAVASEVYPIVKTGGLADVAGALPIALKAHGVEMRTLMPGYPDVMRLLSGAEEIRRWPDYFGGPGRLLAGAHDGLDLFVLDVPHLYARPGNPYVTTEGVDWPDNGVRFAALSRVAADIGHGLVPAFVPDIVHAHDWQAGLAPAYLHYDNRPRPGTVMTIHNMAYQGKFAPELIGAIGLPWSSFDVNGLEYFGGISFLKAGLQFADRITTVSPTYAREIQSDEGGMGLGGLLRARAGALSGILNGIDIAVWNPQTDSHIAYRFGAEDLTFRAANKAVLQQQFNLDSSDEAPLLGVISRLSWQKGLDLLLEAIPTILGEGMQLALLGSGDRDLQDRYQAAARANPGRIGVVIGYDEILAHLIQAGSDALIVPSRFEPCGLTQLCALRYGAVPIVSRVGGLEDTIVDIGEAGREATGFKFGPVTADALAGTLRKANTAFHDKLTWRQLQRNGLATDVSWRSRAGDYAALYRSLIESRRA

SEQ ID NO: 52520 - DNA, 1455 bp, Geobacter metallireducens
  CDS (1)..(1455): transl_table=11
atgaaaatcctgcaggttgcatccgaggttgccccccttgccaagaccggcggtctggcggacgtggtcgctgctctccccaaggagctccggcggatggggcacgatgtccgcgttgccatccccttctacaaggaggtgtcgtcggggaatctcccggtgcgcaaggcccgtaagagtgcggaggtggcgttggggggggagctccacaaggggtacctgcgccagactgccttgggggaggtgccggtctacctggttgaaaaccgcgatctcttcgggcgggaccacctctatggcccccccgagggggactatcccgataatcccctgcgcttcgccttcttttgccgcagcgtgctccagttcctgaagcggatggacttccgccccgacgtgatccattgccacgactggcagtcggccctcattcccatcatcctgaaatacgaactgggccatgacccgttcttcaaccgcacggcagtcatctttaccatccacaacctggcctaccagggggtgttccccgctgacgccctggcgcagacggggctcgacccgtccctcttctccgtggaccggattgaattctacggccgcatcaacctcctgaaaggggcgatccttgccgccgacgccatcacgaccgtttcggaaacctactgccacgagatactgagccctggccagggatgcgggcttgaaggggtgctcgagcgccgtcaggccgaccttgccggcatcctcaacggtctcgactcggaagagtggaacccatccctggatcggcgcattttccggaactactcgtccaagtccctggcgggaaagggggctgacaagcgggagctccaacgggaactggggctcaaggcgggagcgtcgatccccatcatcggcatggtgggacggattgtggagcagaaggggatcgacctggtcatcgacctccttccccggtttgccgccgaagagctgcagttggtgattcttggcaccggcgacctccgcctcatgcatcagctccatgaattcaggaacaagggggtgaagaacgtctccatcaacctcggcttcaaggagcccctggcgccaaagatctatgccggatgcgacatgtttctcatgccctcgcgattcgagccctgcggcctgagccagctcattgccctcagctacggcacggtgccgatcgtgcgaaggaccggcggacttgccgacacggtcatcgatgtcaccgccaatccccgggaagggaacggcttctccttcacggagttcagtgccgatgcgtgctgggacgctgtccagcgggcgctggccgcctaccgggaccgggaggggtggcgcaagatcatgcggcgtggtatgctccgtgacgtttcctggcgcagtgccgccggcaagtacgaggaactctatcgcacatgtgcggacaataggcgggggtaa

SEQ ID NO: 52521 - protein, 484 aa, Geobacter metallireducens
MKILQVASEVAPLAKTGGLADVVAALPKELRRMGHDVRVAIPFYKEVSSGNLPVRKARKSAEVALGGELHKGYLRQTALGEVPVYLVENRDLFGRDHLYGPPEGDYPDNPLRFAFFCRSVLQFLKRMDFRPDVIHCHDWQSALIPIILKYELGHDPFFNRTAVIFTIHNLAYQGVFPADALAQTGLDPSLFSVDRIEFYGRINLLKGAILAADAITTVSETYCHEILSPGQGCGLEGVLERRQADLAGILNGLDSEEWNPSLDRRIFRNYSSKSLAGKGADKRELQRELGLKAGASIPIIGMVGRIVEQKGIDLVIDLLPRFAAEELQLVILGTGDLRLMHQLHEFRNKGVKNVSINLGFKEPLAPKIYAGCDMFLMPSRFEPCGLSQLIALSYGTVPIVRRTGGLADTVIDVTANPREGNGFSFTEFSADACWDAVQRALAAYRDREGWRKIMRRGMLRDVSWRSAAGKYEELYRTCADNRRG

SEQ ID NO: 52522 - DNA, 1455 bp, Geobacter sulfurreducens
  CDS (1)..(1455): transl_table=11
atgaaagtcctcatggttgcatccgaagtggcccccttcgcccggaccggcggactggccgaggtgactgcggccctgcccgcggccttgcgccggatgggacacgacgtgcgggtcatcatgcccttttatcggtgcgctgcccagactgaactgggggtccgcaaggcgcgcaaaagcgccgaagtctccctcaatggcgagacgcacaagggatttctccgccaagccgccctgggagatgtgccggtctacttggtggagaaccgggagttcttttcccgcgactatctctacggcacacccgaaggcgactatccggacaacccgcgccgtttcgcctttttctgccgcagtgttttgcagtttctcaagcggatggactttcgccccgacgtgatccactgccacgactggcagaccgccctgatccccatcattctgcgcctcgaagcggccgacgacccgtttttcgcccgtacggccacggtcttcaccattcacaacctggcctaccaggggctgtttcccgccccggccatcgccgaaacggggctgccatcagctctgttcaccaccgagtggctcgagtactacggccagctcaatctcatgaagggggcaatcctcacggcggatctcatcaccaccgtatccgaaacctatcgccgggagatcatgacccccacgcagggatgcggcctggagggggtgctggcccggcgcggcgacgacctgttcggcatcgtgaacggcatcgataccgacgagtggaatccggccgccgataagcgcattttccgcaactactcggcccgggctctggcaggcaaggccgctgacaagcttgaactccagcgggaattgggcatgccggcagcgccatcggtgccgctcatcggcatggtcagccggctcgcggagcaaaaggggatcgacctggtgctggagcttctgccccgcctggccgagagcgaacttcaattcgtactgctcggcaccggcaatgcctgctacctggagcgcctgaactccttccgcagcaaaggtgctgccaacatctccatcaacctgggcttcaatgacccgctggcaccgaagatctatgccggcagcgacctgttcctcatgccgtcgcgtttcgagccgtgtggcctgagccagctcattgcaatgcgctacgggacggtcccggtagtccgacacacggggggactccgggatacggtcgtcgacgtcacgcgccatccccgcgaggggaccggcttcaccttcgaagactttaccgccgacgcctgctgggaagccatcgaacgggcgctggccggctaccgggaccgggagtcgtggcgcaggatcatgcgcaggggcatgcacagagatgtttcgtggcacaatgcggcaggccgctatgagacgctgtaccgaatggcggcggacactagacgggggtag

SEQ ID NO: 52523 - protein, 484 aa, Geobacter sulfurreducens
MKVLMVASEVAPFARTGGLAEVTAALPAALRRMGHDVRVIMPFYRCAAQTELGVRKARKSAEVSLNGETHKGFLRQAALGDVPVYLVENREFFSRDYLYGTPEGDYPDNPRRFAFFCRSVLQFLKRMDFRPDVIHCHDWQTALIPIILRLEAADDPFFARTATVFTIHNLAYQGLFPAPAIAETGLPSALFTTEWLEYYGQLNLMKGAILTADLITTVSETYRREIMTPTQGCGLEGVLARRGDDLFGIVNGIDTDEWNPAADKRIFRNYSARALAGKAADKLELQRELGMPAAPSVPLIGMVSRLAEQKGIDLVLELLPRLAESELQFVLLGTGNACYLERLNSFRSKGAANISINLGFNDPLAPKIYAGSDLFLMPSRFEPCGLSQLIAMRYGTVPVVRHTGGLRDTVVDVTRHPREGTGFTFEDFTADACWEAIERALAGYRDRESWRRIMRRGMHRDVSWHNAAGRYETLYRMAADTRRG

SEQ ID NO: 52524 - DNA, 1458 bp, Bacillus stearothermophilus
  CDS (1)..(1458): transl_table=11
atgaaggtcctatttgccgtttccgaatgtgcaccgtttgccaaatcagggggattggctgacgtcgccggcgcactgccgaaagagctgcgccggctcggcattgatgcccgcgtgatgttgccgaaatatgaaacgatcgcccctgaatggaaaaagaaaatgaaaaaagtcgccgagctcatcgtgccggttgggtggcggcgccaatattgcggcgtggaggagcttcggcatgacggagtcatctattactttatcgacaacgaatattattttaagcggccgcagctgtacggccattatgatgatggcgagcggttcgcctatttttgtcgggcggtgctcgaagtgttgccggaaattcagttccagcccgacgtaattcactgccatgactggcatacaggcatggtgccgtttttgcttcgggaacaataccggcatgagctgttttatgtcgacatgcgcaccgtctttacgattcataacttgcagtttcaagggctgtttccgcgcggcattttagaagacttattgaatttggatggtcgctatttcactgtggatcatcttgagttttatggctgcgtcagctttatgaaaggggcgctcgttgcttccgatttgattacaacagtgagcccgacgtataaagaggagattcaaaccgcctattacggcgagcggttagacggtttgctgcgggcgcggcgggatgatctgctcggcattttaaacggcattgacgatgagttttacaatccagaagcggatccgtttttgacggcgacgtatagcgtacatacgcgggaaagaaaacaactcaacaagcgtgccttgcagcggcagttcggcttgccggagtgggacgatgtaccgcttatcgcgatggtcacgagaatgacggcgcaaaaagggcttgatttagtaacatgcgtctttcatgagatgatgagtgaagatatgcagcttgtcgtactcggcacgggcgactggcggtttgaacaatttttctcgcaaatggctgcggcgtatccgggcaaagtcggcgtgtacatcggcttccatgaaccgctcgcccaccaaatttacgccggtgccgatttgtttttaatcccgtcgttatttgaaccgtgcgggctgagccaaatgatcgcgctccggtatggaacgatcccgatcgtccgggaaactgggggattaaacgatacggtgcaatcatacaatgagataacaaaagaaggaaatgggttcagctttaccaattttaacgctcatgacatgctgtatacgatccgccgggcgctgtcattttaccgccaaccatccgtttgggaacagttgacggaacgggcgatgcgcggtgattacagttggcgtcggtcggcaaaccaatataaacaagcctatgaacagctgatcaaaaaggaggagcacacgcttgttcacggataa

SEQ ID NO: 52525 - protein, 485 aa, Bacillus stearothermophilus
MKVLFAVSECAPFAKSGGLADVAGALPKELRRLGIDARVMLPKYETIAPEWKKKMKKVAELIVPVGWRRQYCGVEELRHDGVIYYFIDNEYYFKRPQLYGHYDDGERFAYFCRAVLEVLPEIQFQPDVIHCHDWHTGMVPFLLREQYRHELFYVDMRTVFTIHNLQFQGLFPRGILEDLLNLDGRYFTVDHLEFYGCVSFMKGALVASDLITTVSPTYKEEIQTAYYGERLDGLLRARRDDLLGILNGIDDEFYNPEADPFLTATYSVHTRERKQLNKRALQRQFGLPEWDDVPLIAMVTRMTAQKGLDLVTCVFHEMMSEDMQLVVLGTGDWRFEQFFSQMAAAYPGKVGVYIGFHEPLAHQIYAGADLFLIPSLFEPCGLSQMIALRYGTIPIVRETGGLNDTVQSYNEITKEGNGFSFTNFNAHDMLYTIRRALSFYRQPSVWEQLTERAMRGDYSWRRSANQYKQAYEQLIKKEEHTLVHG

SEQ ID NO: 52526 - DNA, 1533 bp, Bordetella parapertussis
  CDS (1)..(1533): transl_table=11
atgacgaccatacgtaccttggtggtggccgcggaggcgtttccgctggccaagacgggcggcctgggcgacgccgtgtcgggcatggtgcaggcgctgggccaccggccgggcggtgtggacgtgcagtgcgagttgctgatgcctgcctatcgcggcacgctggatatggtgtatcggccgcgcacggtcgcgcggctgggcggactgcccggcggcccggccagcctggtgcgcggccattgcccgggctcgggattgtcggtgctgctgctgcgcaacgacgcgctgtacgaccggcccggcatttacgtggacgacagcggccagggctacccggacaatgcccgccgctatgcggccctggcccacgcggccgcccggctggcgcagggcctgcccgggctgcggccgccgcacgtggtgcacgcgcacgactggcatgccgcgctcgcgccgctgctcatccacgcggccggactgcactacgtcaagacgctgctcaccattcacaacctggcgttccagggtacgtttccggccgagctggctagcgcgctgggcatcccgctggcgtgccggcacgacgacggcgcgctgtccgatgacagcgtgaatttcctcaaggccggcatccgttatgcgacccgcgtcaccaccgtcagccgcgcctatgcgcgcgagattctcacgccggcgttcggctgcggattgcacggtttgctgcgcgcgcgcggcgccgacctgagcccggtgcccaatggcatcgacaccgcgctgtggaatccggccgccgacccgcatctgggcggcctgcgcttcgacgcgctggatatgcgcaacaaggcctgttgcaaggccgcgctgcaggccgagctgggcctgcagccgcgcgcggacgcgaccgtgctggccatgggcagccgcctgaccggccagaagatggccgacgtggccatcgccgccctgcccgccctgctggaggcgcacgaacacttgcagttcgcgctgatcggccgcggcgagccggccctggagacggcactgcgcgccctggcggcgcgctacccgggccgttgcgcggtccacatcggctacgacgagccgctcgcccaccgtttgcacgcgggtgccgacctgctgctgcacggcagccgcttcgagcctttcggcctgaccccgttgtacgccatgcgctacggcaccctgccggtggcctcgcgggtgggcggcatggtcgataccatccgcgatcccggcccggcggtcgaggaatcctgcgccggccagggtacgggcttcctgttcgatggcagcgagcccgccgatatgcagctggccgtggcgcgcgcgctgcgcgcgctggccaagccggcggtgtgcgacgccatgcgccgcaacgccatgcaggccgatttcagctggcgcgcttcggcgcaggcctatgcgggcctgtacgccagcctggccagcgcgccgcagcgcggccgggtgcccgcgcccacgctgccgctgctggccaacgcggcctga

SEQ ID NO: 52527 - protein, 510 aa, Bordetella parapertussis
MTTIRTLVVAAEAFPLAKTGGLGDAVSGMVQALGHRPGGVDVQCELLMPAYRGTLDMVYRPRTVARLGGLPGGPASLVRGHCPGSGLSVLLLRNDALYDRPGIYVDDSGQGYPDNARRYAALAHAAARLAQGLPGLRPPHVVHAHDWHAALAPLLIHAAGLHYVKTLLTIHNLAFQGTFPAELASALGIPLACRHDDGALSDDSVNFLKAGIRYATRVTTVSRAYAREILTPAFGCGLHGLLRARGADLSPVPNGIDTALWNPAADPHLGGLRFDALDMRNKACCKAALQAELGLQPRADATVLAMGSRLTGQKMADVAIAALPALLEAHEHLQFALIGRGEPALETALRALAARYPGRCAVHIGYDEPLAHRLHAGADLLLHGSRFEPFGLTPLYAMRYGTLPVASRVGGMVDTIRDPGPAVEESCAGQGTGFLFDGSEPADMQLAVARALRALAKPAVCDAMRRNAMQADFSWRASAQAYAGLYASLASAPQRGRVPAPTLPLLANAA

SEQ ID NO: 52528 - DNA, 1602 bp, Burkholderia thailandensis
  CDS (1)..(1602): transl_table=11
atgttcgtcgcatcggaagcgtttccgctcgcgaagacgggcggactcgccgacgtttgcgcatcgctgccgaaggcgctgcgcgcgctcggctgcgatgtgcgcgtgctgatgccgggctacgcgcaagcgctcgatcgcgtattgcggccgcgcgtcgtcgccgagctgggcgaagtgctgccgggcgcggcggtgcgcatcatcgcggggtcgatgcccgattccggcgtgccggtgtggctgctcgactgcccgtcgttgtatcgtcgcgcgggctcgctgtattgcggcccggacgacgcggactgggcggacaacgcgtaccgcttcggcctgctttgccaggtggccgcgcgcgttgcgctcggcgccgcggggctgaggtggcgtccggacgtcgtgcacgcgcacgactggcacggcgggctcgttgcgcttctgacgcgcggcgcgggcgacgcgcgcccgaagaccgtgttcacgatccacaacgccgcgttccagggcaatttcgcgctcgacgacgcggcgcgcatcggcttgccggccgatgcgctgtcggtcgatggcgtcgaattctacgggcagttgtcgttcctgaaagcgggcgcgcgctacgcggaccgactcaccacggtcagtcccacctatgcgggcgagatccagacggccgaattcggctgcggcctcgagggtttgtacgcggcgcggcgcgaccagctcagcgggatcatgaacggcatcgacaccgagctgtggaatccggcgacggaccgctggctgccgcaaccgtattcgatcgacgacatgggcggaaaggcgggctgcaaggctgcgctgcagcaggaactcggcctttgcgccgacgcaagggccccgctcgtcgcatcggtgtgccggctgacctcgcaaaagatgtcggacatcgtgctcgaacgcctgcctgagcagctcgcgcagcatccgcgcatgcagttcgcactgcatggacgcggcgatcgcgcgctcgaacaggggttcgatgcgttggccgcgcagtatccgcgccgcgtggcggtgcggatcggctatgacgaaacgctcgcgcaccggattcatgccggcgcggacatcctgctgcacggcgcccggttcgagccgtgcgggctcacgcagctgtacgcgatgcgctacggaacgattccgatcgtacggcgggttggcggactcgccgacagcgtcgtcgatctcgacacgctcgcgccgcactccgaggacgcgacgggcttcgtgttcgacgcgccgacaggcgatgcgatgagcgaagcgctgcgccgctgcgtgaatctgcacgatgcgcggcccggcgtgtggtccgcgttgtgccggctcgcgatggcgcgcgattcgagctggtcgcgttcggcgcgcgcgtatctggacctgtacgcggcgctgacgccgcggcggcgcgtcgaggcgtccgacgaggcgcggggcgcggcggccgcgcttgcgcgagcggacgccgcgagcgggcgccggcgtcgcgcgcccgagcagtccgaacggctgcgtcaggagcggctcgcgcggcaggtggcgctcgcgtcgaagtga

SEQ ID NO: 52529 - protein, 533 aa, Burkholderia thailandensis
MFVASEAFPLAKTGGLADVCASLPKALRALGCDVRVLMPGYAQALDRVLRPRVVAELGEVLPGAAVRIIAGSMPDSGVPVWLLDCPSLYRRAGSLYCGPDDADWADNAYRFGLLCQVAARVALGAAGLRWRPDVVHAHDWHGGLVALLTRGAGDARPKTVFTIHNAAFQGNFALDDAARIGLPADALSVDGVEFYGQLSFLKAGARYADRLTTVSPTYAGEIQTAEFGCGLEGLYAARRDQLSGIMNGIDTELWNPATDRWLPQPYSIDDMGGKAGCKAALQQELGLCADARAPLVASVCRLTSQKMSDIVLERLPEQLAQHPRMQFALHGRGDRALEQGFDALAAQYPRRVAVRIGYDETLAHRIHAGADILLHGARFEPCGLTQLYAMRYGTIPIVRRVGGLADSVVDLDTLAPHSEDATGFVFDAPTGDAMSEALRRCVNLHDARPGVWSALCRLAMARDSSWSRSARAYLDLYAALTPRRRVEASDEARGAAAALARADAASGRRRRAPEQSERLRQERLARQVALASK

SEQ ID NO: 52530 - DNA, 1428 bp, Chlamydophila caviae
  CDS (1)..(1428): transl_table=11
atgaaaatcatacaaactgctgtagaatttgctccttttattaaagctggcggattaggtgatgccgtctatggcttatcaaaagcattgtctgaaagccatgatgttgaggtattacttcctttctttcctctaatcaccccctctttttcttctcaagtaattgacgagaaggttttttcttacgaattcctagggagacagcatgcgcattccatttcctattcctatgaaggaatgattctcacaataattaaattggattcacaattagatctgttctcaacatcaacaatctatactgaagatgatacattacgcttcagcgctttctctgctgccgctgccgcctacattggggaattagatcatgtggacattgtacacatgcatgattggcatatggggcttctaagcggccttttaaaagaacctaaccgcccgcattatccaaaaagaatttttacaattcataattttagttatcgaggctattgcagcacacaattacttgggacatcagggatcagcgatttcgggttaagtaattatcaattatatagagatcctcagatgagtgtattactgaaaggagctctatattgttctgattatattaccactgtctcccctacatatgctcaagagattcttaatgattattctgattatgaaatgcacgatgcgatcatggctagacgccatgttttctgtgggatcttaaatggtatagatgaacagatctggaatcctgaaacggatgcttctttggctgtcaattacagcaaagatttacttgatgctcctgatgttttattcacaaagaaagaggaaaataaaaatgctctatatgagaaattagggctgtcctatgaatactctcctttaatgtgcatcatttctcgcattgtagaacaaaaagggcctgaatttatgaaagcagccattctccatgctatggaaaatggctatgctttagtcatagtaggcacgtgttacgatccagaaattcaaagaaaatttacaaatttacaagagtcgttaacgacttctccgaatatccgcattatcttagattataacgatcctctagcccggttagtgtatggggctgcggacatgatctgtattccttctcattttgagccctgtgggctcacacaactcattggaatgcgttatggaacggttcccttagttagatctaccggaggccttgccgatacggttgtaacgggaatcaatgggttcacattctctcagacggataatttcaatgatttccttcacatgctaacgctagcaattaccacttacagacaagagccggacatatggttccaacttgtagaagaaggtatgctgcgatcttcgggtctaacaacaatggcgatacattatttaggagtctataattccttattatga

SEQ ID NO: 52531 - protein, 475 aa, Chlamydophila caviae
MKIIQTAVEFAPFIKAGGLGDAVYGLSKALSESHDVEVLLPFFPLITPSFSSQVIDEKVFSYEFLGRQHAHSISYSYEGMILTIIKLDSQLDLFSTSTIYTEDDTLRFSAFSAAAAAYIGELDHVDIVHMHDWHMGLLSGLLKEPNRPHYPKRIFTIHNFSYRGYCSTQLLGTSGISDFGLSNYQLYRDPQMSVLLKGALYCSDYITTVSPTYAQEILNDYSDYEMHDAIMARRHVFCGILNGIDEQIWNPETDASLAVNYSKDLLDAPDVLFTKKEENKNALYEKLGLSYEYSPLMCIISRIVEQKGPEFMKAAILHAMENGYALVIVGTCYDPEIQRKFTNLQESLTTSPNIRIILDYNDPLARLVYGAADMICIPSHFEPCGLTQLIGMRYGTVPLVRSTGGLADTVVTGINGFTFSQTDNFNDFLHMLTLAITTYRQEPDIWFQLVEEGMLRSSGLTTMAIHYLGVYNSLL

SEQ ID NO: 52532 - DNA, 1458 bp, Dechloromonas aromatica
  CDS (1)..(1458): transl_table=11
atgagctcgctctcgattctctttgccacctccgaaatggccccctgggtcaagaccggtggtctcggcgatgtcgccgccgccctgcctgccgccttgcgcaaggccggccacgacatccgcgtcctgctgccggcctacccggcgctgaaacaggctttcccgacagcgacgacggtcgctgaactgcccgccttcgccccgggactgccggcctcccggctgcttgccgcccagaccggcaagctggaattgctgctgctcgactgcccggaactctacgaccgcccgggcaacccctatctcgatgccactggccgcgactggcccgacaatgcgctgcgcttcggcctgctgtcgcgggttgccgcccgcctcggccagccggattcaccgctgagctggcagcccgacatcgtccacgccaacgactggcaaaccgccctcgcaccagcttacctgcattaccagggcggtgcggccagcgtcgtcaccgtgcacaacatcgccttccagggctgcttcggtcgcgaaatgctggccgcccttggcctgccggaacacgcctggcgtttcgatggggtcgaatatcacgaccagctatcgttcctgaaagccggcctgcaactcgcctcacagatttccacggtcagcccgacctatgcccgggaaatccaggacgagcatttcggctatggcctggccccgctgctgcgccaccgcagcgcggaactgcgcggcattttgaacggcgttgataccgacctctggaatccggccaccgacccggtactggcgaccggctatgcggccaaccgcctggctgccaagcggaccaacaaagcggcactgcaaaccgaaatggggctggaggtcaccgctgaccgcccgctgttcggtgtgatcagccgtctgaccagccagaaaggcctcgacctgctgctcaccgtcgccgaaggcctgcccgagctaccggcccaactggtcgtactgggcagcggtgacaagcttatggaggcgggtttcgttgagctggccaagcgcttcccggcgcagattgtcgtcaagatcggctttgatgaaggccttgcccatcgtatcgaagccggcgccgactgcttcgtgatgccatcgcgcttcgaaccctgcggcctgaaccagatgtacagcctgcgttacggcacgccgcccatcgttcgcgccaccggcggcctggccgatacggtcgtcgatgtctgtgaagacacgctggccgacaagtcggccaacggatttgtgctcgacggcgacacgccgcatgcactctggctgaccatcgagcatgtatgccgcacctggcaggacaagaaactgtggcagcgcatccagcagaacggcatgcgccgggatttttcctggacgcacgccgccaacgaatacgttgcgctctatcgcgacgccatcgctacccgagcttaa

SEQ ID NO: 52533 - protein, 485 aa, Dechloromonas aromatica
MSSLSILFATSEMAPWVKTGGLGDVAAALPAALRKAGHDIRVLLPAYPALKQAFPTATTVAELPAFAPGLPASRLLAAQTGKLELLLLDCPELYDRPGNPYLDATGRDWPDNALRFGLLSRVAARLGQPDSPLSWQPDIVHANDWQTALAPAYLHYQGGAASVVTVHNIAFQGCFGREMLAALGLPEHAWRFDGVEYHDQLSFLKAGLQLASQISTVSPTYAREIQDEHFGYGLAPLLRHRSAELRGILNGVDTDLWNPATDPVLATGYAANRLAAKRTNKAALQTEMGLEVTADRPLFGVISRLTSQKGLDLLLTVAEGLPELPAQLVVLGSGDKLMEAGFVELAKRFPAQIVVKIGFDEGLAHRIEAGADCFVMPSRFEPCGLNQMYSLRYGTPPIVRATGGLADTVVDVCEDTLADKSANGFVLDGDTPHALWLTIEHVCRTWQDKKLWQRIQQNGMRRDFSWTHAANEYVALYRDAIATRA

SEQ ID NO: 52534 - DNA, 1440 bp, Lactobacillus plantarum
  CDS (1)..(1440): transl_table=11
atgactagggtattattcgcggcggcagaagcggcccctttttataagactggtggcttaggcgatgttagtatggcgttaccgcgcgccttgcaagcggaaggaatcgagacgcgtgtagtgattccgtattaccctcaccagatgccgaccgaatatcagcagcagttagtgccagtgacgcattttactgttcaagtgggtgaacatgcgatgtattgcggtattaaaactctgacagtcgcgcacgttcagtattatctaattgataatttagattattttggtcgtgaaggattatatggttattgggatgatggtgcacgctttgccttctttcagatggcggtttgtgaaatgatggagcagatcgattatatccctgatattttacaactcaatgattggcatacggcgtttattcctgtcttgctagctgaaaagtactattggatcgaagcgtatcgtgatattaaaacggtgctgacgattcataacttacagtttcaaggtgtctacgatccgattattttggatagtctctttcgaatcggaactgagacttacaccgaagccggcgtggcgttttacgatcaagtgaactggctgaagggcggtattaactttgcagatgccgttaatacggtgtcaccgacctacgcacaagagattcaaacaccagcttttggggaacgtctcgacggggtgctgcgggccaatcggtacaaactgagtgggattcttaatggcattgatatgcaattatacgatcccgcaaccgacctggcactaacggcgaattattcggctaaggatttgaaacctaagcgtcagaataaacgtgccttacagcgccgattagggttgcctgtcaaaaacatgccggtattggcagtcgtttctcggttaacgaagcaaaagggtatcgacctcttgctggatgcattgaatccattcttgcagcaacaagatgtgcaactcattgttttgggaacgggtgacccagcattggaacgcgcgttacgcacctatcagtcggcgtatccgcaaaaggtggtcgccgcgattcaatttgatacgcagctagctcagcaaatctatgcggccagtgatatctttcttatgccttctgcctttgaaccgtgtggcttgtcgcagatgatggcgatgcattacgggacgttaccgatcgtgcacgcggtcggtgggttgcgggacacggtcattccgtacaatcgctataccggtcagggaaccggctttagctttgacgactaccagccagcggttctacgtaaaattatgattctagccgtgaccttatatcggcagcatccactggtttggcggcagctgcaacaccaagcaatgacttgtgattttggctgggaacattctgcacagcagtaccgtgcgacttatcagaagctaatgcgttag

SEQ ID NO: 52535 - protein, 479 aa, Lactobacillus plantarum
MTRVLFAAAEAAPFYKTGGLGDVSMALPRALQAEGIETRVVIPYYPHQMPTEYQQQLVPVTHFTVQVGEHAMYCGIKTLTVAHVQYYLIDNLDYFGREGLYGYWDDGARFAFFQMAVCEMMEQIDYIPDILQLNDWHTAFIPVLLAEKYYWIEAYRDIKTVLTIHNLQFQGVYDPIILDSLFRIGTETYTEAGVAFYDQVNWLKGGINFADAVNTVSPTYAQEIQTPAFGERLDGVLRANRYKLSGILNGIDMQLYDPATDLALTANYSAKDLKPKRQNKRALQRRLGLPVKNMPVLAVVSRLTKQKGIDLLLDALNPFLQQQDVQLIVLGTGDPALERALRTYQSAYPQKVVAAIQFDTQLAQQIYAASDIFLMPSAFEPCGLSQMMAMHYGTLPIVHAVGGLRDTVIPYNRYTGQGTGFSFDDYQPAVLRKIMILAVTLYRQHPLVWRQLQHQAMTCDFGWEHSAQQYRATYQKLMR

SEQ ID NO: 52536 - DNA, 1464 bp, Moorella thermoacetica
  CDS (1)..(1464): transl_table=11
atgaacaaacccttgaagatcttgctggtttctcccgaggttgcacccctggccaaaaccggcggcctggctgatgtggccggtagcctgcccaaagccctggcggccaagggccacgaggtcagggtagccatgccccgttaccgccaggtcaaggaggttaactacctcaccgatctgccggtagagatggacggcagcctggagacagccgtcattcgccaggggaaactgcccggggaagccgggatcccggtatacctgatcgacaactacaagtttttctaccgtgatggcatgtatggttacggcgatgacgccgcacggttcaatttcttctgcaaagccgtgctgtccatgctgccctggctggagtttcagccggatatcatccattgtaacgactggcagaccggtcccatacccctgttcctcaaggtaaagcacgaggacaaccctttttaccgggagacggcaaccatctataccatccataacctgcagtaccagggtacctttccccgcaacatcctcaagaccatggccctcagcgaggaattctttgtcccggaacgcctggagttttacgggcaggtcagctatatgaaggccgggatcctgtacgccgacctggtgaacaccgtcagcaagaaatacgccctggaaatccagacgccggagtacggggagcgcctggacggcctgctccgtaaaagggcagccgacctgaggggcatcctgaacggcatcgactatgaggagttcgacccggccaccgaccggcgcctggcagtcaattacgacgccgatcacctggagaagaaaggggaaaacaaggcggccctgcagcgggagatggaactgcccgtcagggacgtccccgtcctgggcctgatctcccgcctggtgagccagaagggtctcgacctcctggccgctatcctggacccattgatgcaacaggacctgcagttcgtcctcctgggcagcggcgaggactactaccagcagcttttctcccgatataaggtaaaatatcgcgataaaatggccgtgaaaatcggctttgacccggtcctggcccagcatatctacgccgggtgcgatatcttcctgatgccatcccggttcgagccctgcggcctggggcagatgatcagcctgcgctatggtgccgtcccggtggtcagggcaactggcggcctggaggataccatcaaagacttgcaccagtatccgggagtgggtaacggctttaccttccgtgattaccagccccaggccctcctggataccatcaaccgcgccctgcacgtctaccgccacgaacccggagaatggcgtaaactgatgcggcggggcatggccgccgatttctcctggagcgcttcggccggtcactacgaggaaatgtaccgcgaggccctggagaagaggcgggccgccatgtttaaggtagggtaa

SEQ ID NO: 52537 - protein, 487 aa, Moorella thermoacetica
MNKPLKILLVSPEVAPLAKTGGLADVAGSLPKALAAKGHEVRVAMPRYRQVKEVNYLTDLPVEMDGSLETAVIRQGKLPGEAGIPVYLIDNYKFFYRDGMYGYGDDAARFNFFCKAVLSMLPWLEFQPDIIHCNDWQTGPIPLFLKVKHEDNPFYRETATIYTIHNLQYQGTFPRNILKTMALSEEFFVPERLEFYGQVSYMKAGILYADLVNTVSKKYALEIQTPEYGERLDGLLRKRAADLRGILNGIDYEEFDPATDRRLAVNYDADHLEKKGENKAALQREMELPVRDVPVLGLISRLVSQKGLDLLAAILDPLMQQDLQFVLLGSGEDYYQQLFSRYKVKYRDKMAVKIGFDPVLAQHIYAGCDIFLMPSRFEPCGLGQMISLRYGAVPVVRATGGLEDTIKDLHQYPGVGNGFTFRDYQPQALLDTINRALHVYRHEPGEWRKLMRRGMAADFSWSASAGHYEEMYREALEKRRAAMFKVG

SEQ ID NO: 52538 - DNA, 1488 bp, Nitrosomonas europaea
  CDS (1)..(1488): transl_table=11
atgtcttcatctccttcccgcaaaaatccacgggtgttgtttgtcacttccgaagtatttccgttatgcaaaaccggagggctgggtgatgtcagtgccgcattacctgccgcgctgcgtgaactgaaggcagatgtacgcttactcgtacccggctacccgtcagtactatccgggctcaaatacaaacgtaagctggcagaattcgatctcctgccgcacttccctccaaccacattattttcctcccggttacagatcaatgaatccgtcagtctgcccttatatgtgatccactgcccggaactctatcagcgaccaggcggcatctatctggatgacgacgggcaggactggccggataacgcacaacgcttcggcctgctgtcaaaaatgggtgcactcctcgccagtgatgccagcccgctctcctggataccggatatcatccattgcaatgactggcaaagcgggctcacacctgcttatctccactaccactccgggaagaaagcagccagcctgatgacactgcacaaccttgcttttcagggctgctttccacccgatgaagtagccaggctgggattgccacccgaaagcttcagcgtgcatggcgtcgaatactacggcaatctatcgttcctcaaggcgggaatctactatgcaacccggattactacggtcagccctacttacgcccgggaaatccagcatgagccgctgggattcggtttacagggattactggccgaacgcagcaacgccatcaccggaatcatcaacgggatcgataacaccgtctggaatccggcaaccgatccgcacatcgtaaaaaaatattcaagccgcaacctggcagcaaaaaaaattaacaagctcgctctgcaacgggagatggggctggaagaaaacgaaacgattccgctgtttgccggaatcagccgtctcagttaccagaaaggctacgatattctgttgcaggtcgcacccatgctggcagatctccctgctcaactggtattgctgggaaagggagatcaatctctggaaaaacaactcgttatgcttgcacaaaccaaccctgccagaattgccgtccgcatcgactacgacgaagcgctctcgcatcggatcaatgccagtgcggactgctttctgatgccttcccgctttgaaccgtgcggactgaaccagatgtacagccagcgctacggcactccgcccatcgtccatacaaccggcggactgatcgatacagtgactgatctggcccctgatactccagccggcgaatctgcaagcggattccattttcacgaaatgaccgcagatgcattcatgaatggaatcggacgggcaattgatgcctattacaacaccaggttatggaaaaccctgcagcacaatggcatgcgtaaggatttcagctggcgatccagtgctttggcatacctgtccatttactcgctgttgatgcagcgataa

SEQ ID NO: 52539 - protein, 495 aa, Nitrosomonas europaea
MSSSPSRKNPRVLFVTSEVFPLCKTGGLGDVSAALPAALRELKADVRLLVPGYPSVLSGLKYKRKLAEFDLLPHFPPTTLFSSRLQINESVSLPLYVIHCPELYQRPGGIYLDDDGQDWPDNAQRFGLLSKMGALLASDASPLSWIPDIIHCNDWQSGLTPAYLHYHSGKKAASLMTLHNLAFQGCFPPDEVARLGLPPESFSVHGVEYYGNLSFLKAGIYYATRITTVSPTYAREIQHEPLGFGLQGLLAERSNAITGIINGIDNTVWNPATDPHIVKKYSSRNLAAKKINKLALQREMGLEENETIPLFAGISRLSYQKGYDILLQVAPMLADLPAQLVLLGKGDQSLEKQLVMLAQTNPARIAVRIDYDEALSHRINASADCFLMPSRFEPCGLNQMYSQRYGTPPIVHTTGGLIDTVTDLAPDTPAGESASGFHFHEMTADAFMNGIGRAIDAYYNTRLWKTLQHNGMRKDFSWRSSALAYLSIYSLLMQR

SEQ ID NO: 52540 - DNA, 1458 bp, Novosphingobium aromaticivorans
  CDS (1)..(1458): transl_table=11
atgacgatcaaggtcctttccgtcgcctcagaggccgtcccgcttgtgaagactggcggcctcgccgacgttgccggcgccctgccctcggcagtggcgccacacggcgtcgggatgacgacgatcctccccggatatccggcggtgatgaaggcgctcgcccgcccgcgcgcccttcacacctggaacagcctgctgggagagaaggcccgcctcgtatccggaaagatcgacggccatcccctgctggtcctcgatgcgcccgcctttttccagcgcgacggaaccccctatgtcgacagctcgggccgggactgggcggacaattggcgccgcttcgccgcgttcggacgcgctgcggccgatgtcgctggcggtgcggtcaagggtcgcgccttcgatctcgtccacgcgcacgactggcaggcagccatggctctggcctacctccgcttcgcgccgccgcccgggggacgccgcgtgccctcggtcatgacgatccacaacatggctttccagggtcactacggcgcggacctcttccccgcgctcggcctcccgccccaggcctgggcgatggacggcgtcgagtatcacggcggggtcggctacctgaaggcgggcctcgaagccgccagcgccatcacgaccgtaagcccaacctacgcccgcgaaatccgcacgcccgaattcggcatgggcctcgaaggtctggtcgtcagccggggcaaccgcgtgtcgggcatcgtcaacggcatcgacacggcccagtggaaccctgaaaccgatccagcactcgccgcccgcttcggcgtcaagtcgctcgcccgccgggtgaccaacaagcgcgcgctcgaggccgaattcgcgctggaggccgatgatggaccgctcttcgtcgtcataacccgcctgacctggcagaagggcatcgacgtcctgctcgaatgcatcgaccacctcgtcggcatcggcggccggctcgccctgctcggctccggcgacaaggcgatggaaaacgctttccacgcagccgccacgcgccatcccggcaaggtcggggtgcggatcggctatgacgaagcgctgtcccaccgcatgcaggcggggggcgatgcgatcctcgtaccctctcgcttcgaaccctgcggcctcacccagctctatggccttgcctatggctgcgtacctgtcgtcgcacgaaccgggggccttgccgatacggtgatagatgccaacctggcagcggtcatggccggcgtcgcaaccggcgtgcaattcgaaggcgtgaactatcccagcgtgtcggacgctatcagccgggccgtaacgctctaccggcaaccggatgtctggcgcgcgatgcagcgagccggcatgaagaccgacttttcgtggagccgctcgggcaaggcctatgcggacctctacgccgccctcatcgcggaggaccaatga

SEQ ID NO: 52541 - protein, 485 aa, Novosphingobium aromaticivorans
MTIKVLSVASEAVPLVKTGGLADVAGALPSAVAPHGVGMTTILPGYPAVMKALARPRALHTWNSLLGEKARLVSGKIDGHPLLVLDAPAFFQRDGTPYVDSSGRDWADNWRRFAAFGRAAADVAGGAVKGRAFDLVHAHDWQAAMALAYLRFAPPPGGRRVPSVMTIHNMAFQGHYGADLFPALGLPPQAWAMDGVEYHGGVGYLKAGLEAASAITTVSPTYAREIRTPEFGMGLEGLVVSRGNRVSGIVNGIDTAQWNPETDPALAARFGVKSLARRVTNKRALEAEFALEADDGPLFVVITRLTWQKGIDVLLECIDHLVGIGGRLALLGSGDKAMENAFHAAATRHPGKVGVRIGYDEALSHRMQAGGDAILVPSRFEPCGLTQLYGLAYGCVPVVARTGGLADTVIDANLAAVMAGVATGVQFEGVNYPSVSDAISRAVTLYRQPDVWRAMQRAGMKTDFSWSRSGKAYADLYAALIAEDQ

SEQ ID NO: 52542 - DNA, 1434 bp, Oceanobacillus iheyensis
  CDS (1)..(1434): transl_table=11
atgaaaaacattttatttgtcacctcagaatgtacaccatttattaagacaggcggacttgcggatgtatctggatcgttgccacaagctcttcaggaacatggaggaatggaagtaagagtgatgttacctttatatgatgaaattgatcgttcttggaaggatcaatttgaatttgtgtgcgcttttacggtctcattagggtggagagaacaaactgcagagctatatcgttatcgttataatgacgtcacgtattatttcatcggaaacgattattattttactagaaaaggaatatacggctattacgatgatggagaacgatttgtattttttagtcaggctattatagcttctttagaatatatcgattttataccaagtgtattacatgcccatgattggcaaacagggatagctgttgcactagctaaaatctatcaacctattgaagaattgattaccgtttttaccattcataatatatattaccaagggacaatgcctttaacgacatttgatgatttttttcaattaggcagagaacatttagcaggcatggaatggaatcaaatgattaatagtttgaaatcaggcatttttcatgccgataaaataacgacagtaagtccaacctatgcagaagaaatactaacaccttattacggtgccggactggaagagatgctttggaatcggcgagaagacttgataggagtgctaaatgggattgatttaaaagattataatcctgctatagataaatctttaccagttaactaccgttctgcacggtcgaaaaaaatagagaatcgtaagttactctatgaagaaataggtttgaatcttaaagatggagtacctctttatattatggttactagactagtagaacagaaaggaattcatcttgttcaacgaattttagaggaatttttacaagaggatattcaattgattgttcttggaaatggagaacaggaatttgaatactatttcaaagacatcgaataccgttacccagataaaatgattacccacctgcattttaatgaatcattagctaggagattatatgcaagtgccgattttctcctgatgccatcgaagtttgagccatgtgggttatctcaattaattgctttacaatataaaaccgtacctattgtccgtgagacaggaggattaaaagatacgataattgcttttaatgaaattacaggagaaggaaatggctttcgatttgccaattataatgcacatgaacttttacatgtactgaagtactctctggagatttatcaacaaccttcactttggtcagtattaataaagaatgtaaataaaagtaaatttagttggaaggattccgcgtctgcatatgcagacgtatatcaacagctcgatgcttcatctgtatcttataaatag

SEQ ID NO: 52543 - protein, 477 aa, Oceanobacillus iheyensis
MKNILFVTSECTPFIKTGGLADVSGSLPQALQEHGGMEVRVMLPLYDEIDRSWKDQFEFVCAFTVSLGWREQTAELYRYRYNDVTYYFIGNDYYFTRKGIYGYYDDGERFVFFSQAIIASLEYIDFIPSVLHAHDWQTGIAVALAKIYQPIEELITVFTIHNIYYQGTMPLTTFDDFFQLGREHLAGMEWNQMINSLKSGIFHADKITTVSPTYAEEILTPYYGAGLEEMLWNRREDLIGVLNGIDLKDYNPAIDKSLPVNYRSARSKKIENRKLLYEEIGLNLKDGVPLYIMVTRLVEQKGIHLVQRILEEFLQEDIQLIVLGNGEQEFEYYFKDIEYRYPDKMITHLHFNESLARRLYASADFLLMPSKFEPCGLSQLIALQYKTVPIVRETGGLKDTIIAFNEITGEGNGFRFANYNAHELLHVLKYSLEIYQQPSLWSVLIKNVNKSKFSWKDSASAYADVYQQLDASSVSYK

SEQ ID NO: 52544 - DNA, 1443 bp, Pasteurella multocida
  CDS (1)..(1443): transl_table=11
atgaaagtattacatgcttgctcggagttataccccttgttaaaaaccggtgggttggcagatgtgatgggcgcattaccttttgcacaaaaagagattggaattgacgcacgtattgtcttaccggcgtatcctgcaattaaagcgggcattcctgagacgactgttgtcagtgaatttgataattttgcagggcatattgtgttgcgttatggtgaatataaaggtcttggtgtgtatttaattgatgcgcctcatttatatcaacgtgaaggcaatccttaccatgatcaatggtataacgattatgccgacaactataaacgttttgcattattgggctgggtcgcagcggaattagccacgggattagacagttggtggcatgcggatgtggtgcatgcacatgactggcatgccggattagccagtgcttatttgtttaataaaggtcgccctgccaaatctgttttcacgattcataatttagcctatcaaggacaatttgcttatcaccatttagttgaaattggtttacctgctggcatgttccatgtggatggattggaattgcacggtcagatttcttacttaaaagcaggactttattattctgatgcggtgacggcagtgagcccaacttatgcaaaagaaatcaccacgcctgaatttgggtatggcttacaagggctattaaccacattaaattcacaaggaaaattagtcgggattttaaatggtgtggatgatcaaatctggcatccaaatcatgatgcgtacattgagcatcattacaaattaaaagccatgacgggtaaacgtaaaaacaaagaggcattgcaagcttactttaacttaccacaagatccggacgcgttattatttgtgatggtgacacgtttaacagagcaaaagggggtggatctgttaattgacagtgccgaagaaattgtaaaacagggtgggcaattaacgattttaggttcaggatcgccgcatttagaagccggtatcttacatttagcccagcaatatccacaccaaattgcggtgaaaattggctatgatgaagccttatctcatttaatgattgcaggtggtgacgtcattttagtgccaagtcgttttgagccttgtggcttaacacagttatacggtttgaaatatggcaccttaccgttagtcagagccaccggtggtttggcggatacagtggtaaatgcgacagtagaaaacatcaagtcacgattagctacaggatttgtatttgagcaagcaaaccgtgaggcattacgccaagccttagtaaatgcctttgcgttatggcaaaaacagcgcctttggtttacggtgcgtagcgtcgcgatggaacaagattttagctggcaaatttcagcgacgggttatcatgccctatatcaacgtcttttatcgttcaactag

SEQ ID NO: 52545 - protein, 480 aa, Pasteurella multocida
MKVLHACSELYPLLKTGGLADVMGALPFAQKEIGIDARIVLPAYPAIKAGIPETTVVSEFDNFAGHIVLRYGEYKGLGVYLIDAPHLYQREGNPYHDQWYNDYADNYKRFALLGWVAAELATGLDSWWHADVVHAHDWHAGLASAYLFNKGRPAKSVFTIHNLAYQGQFAYHHLVEIGLPAGMFHVDGLELHGQISYLKAGLYYSDAVTAVSPTYAKEITTPEFGYGLQGLLTTLNSQGKLVGILNGVDDQIWHPNHDAYIEHHYKLKAMTGKRKNKEALQAYFNLPQDPDALLFVMVTRLTEQKGVDLLIDSAEEIVKQGGQLTILGSGSPHLEAGILHLAQQYPHQIAVKIGYDEALSHLMIAGGDVILVPSRFEPCGLTQLYGLKYGTLPLVRATGGLADTVVNATVENIKSRLATGFVFEQANREALRQALVNAFALWQKQRLWFTVRSVAMEQDFSWQISATGYHALYQRLLSFN

SEQ ID NO: 52546 - DNA, 1506 bp, Prochlorococcus marinus
  CDS (1)..(1506): transl_table=11
atgcgcgttctttttgctgctgctgaatgcgcaccgatggttaaggtcggtgggatgggagatgttgtagcttctttgccatcagcattggcaaaacttggacatgatgttcgtttgataattcctggctatagcaaactttggggattacttgatatttctaaggatcccatatatacggcccaaacaatgggagcagaattttccgtttacgaaactaagcacccaacttctaatcttcctatttatttagtcggacatcctgtttttgatcctgagaggatttatggaggtgaagatgaagattggcgatttactttttttgcaagtgcgacagcagaatttgcttggaatgtatggaagccacaagtattgcattgccatgattggcacactggaatgatccctgtctggatgcatcaggaccctgaaattagtacagtatttaccatccataatttgaagtatcaaggaccttggcggtggaaattggaacgcatgacatggtgtccgtggtacatgagtggagatcacacaatggcggctgcaatgctttttgcagatcgtgtaaatgcagtttctccaacatattcaagggaaatacgtacttctgaatatggtgaaagtttagaaggtcttttaaattatatttcggggaaactacgaggcatacttaatggaatcgatttagatgaatgggatccagctactgataaggccttgcctgcaaattttagttctggcaagatgtctacccgtaagaaaaataaagaggcccttcagagacaaatggggcttgaagtcaataatgataaatacttgcttgggatggtgggtagactcgttgatcagaaaggtgttgatttacttcttcaggtttctagaagacttttggcatacactgactctcaaatagttgttcttggtacaggagatcaaattctcgaatcagctttatgggagcttgctattgatcaccctggtcgatttgcagttttccttacctatgatgattatctttcgcgtttaatttatgcagggagtgatgctttcttaatgcctagtcgtttcgagccatgtggtattagccagctacttgctatgcgctatggctccataccaattgttagaaatgtaggtggattagttgatactgttattcctcatgatcctattaacaaatcaggaacaggcttttgctttgatagatttgaaccaattgacttttatacagctttggttagatcttgggaggcatttcgtcatagacgtagttggaaggagttacagaaacgagctatgactcagatgtacagttgggagcgctctgctatggaatatgaaactatgtataaagaagttagtggatacaaggaaccttccccagatgctattgaagttgaaaaattttctgtaggtcaagatgcagatccttccttgaaaaatgagaagctttctgtaggtcaagatgaagattcttccttgaaaaatgagaggtttatttaa

SEQ ID NO: 52547 - protein, 501 aa, Prochlorococcus marinus
MRVLFAAAECAPMVKVGGMGDVVASLPSALAKLGHDVRLIIPGYSKLWGLLDISKDPIYTAQTMGAEFSVYETKHPTSNLPIYLVGHPVFDPERIYGGEDEDWRFTFFASATAEFAWNVWKPQVLHCHDWHTGMIPVWMHQDPEISTVFTIHNLKYQGPWRWKLERMTWCPWYMSGDHTMAAAMLFADRVNAVSPTYSREIRTSEYGESLEGLLNYISGKLRGILNGIDLDEWDPATDKALPANFSSGKMSTRKKNKEALQRQMGLEVNNDKYLLGMVGRLVDQKGVDLLLQVSRRLLAYTDSQIVVLGTGDQILESALWELAIDHPGRFAVFLTYDDYLSRLIYAGSDAFLMPSRFEPCGISQLLAMRYGSIPIVRNVGGLVDTVIPHDPINKSGTGFCFDRFEPIDFYTALVRSWEAFRHRRSWKELQKRAMTQMYSWERSAMEYETMYKEVSGYKEPSPDAIEVEKFSVGQDADPSLKNEKLSVGQDEDSSLKNERFI

SEQ ID NO: 52548 - DNA, 1500 bp, Prochlorococcus marinus
  CDS (1)..(1500): transl_table=11
atgcgcgtgctatttgctgctgcggaatgcgcgccgatggtcaaggttggtggaatgggtgatgtggtgggctcattgcccccagctctggccaagcttgatcatgatgtgcgtctgatcatgcctggttacggcaagctctggagcttgctggatatccctactgatccgatttggcggggtcagaccatgggcaacgagttcgccatctatgagacaagtcatcccagcaatggtttgcccctttatctggtagggcatccagtgtttgatcctgaaaggatctacggcggagaagacgaagattggcgttttacgtttttcgcaagcgcgacaacggaatttgcctggaacgtttggaaaccgcaagtgctgcattgccacgactggcataccgggatgattcctgtgtggatgcatcaggaccctgaaatcagcacggtctttaccattcacaacctcaaatatcagggcccctggcgctggaaacttgatcggatgacttggtgcccctggtacatgcaaggggatcacaccatggcggcagccttgctttatgccgatcgggtgaatgccgtctcccccacctatgccagagagatttgtacatctgaatacggggagagccttgatggcttgttgaactacatctctggaaaactgcgtgggatcctcaatggcattgacctgcaggattgggaccctggcaatgacaagtctttgccagccactttcaatgccgatgacctttcaggtcgtgctgtgaacaagcaggcccttcaacagcgcatggggcttgaggtcaatccagacacctatctactggggatggtgagtcggttggtggatcagaaaggggttgatcttctgctgcaggtgacagagcggttgcttgcttacacagattcccagatcgtcgtgctgggcactggtgagcgtggtttggaatccggcctgtggcaattggcaattcagaaccctggccgcttctcggttttcctcacttacgacgatgacctagcacgtttgatctacggcggcagtgacgcatttctgatgccgagtcgcttcgaaccctgtggcattagtcagctgttggccatgcgctacggcagcgtgccggtggtgcgcaaagtgggtggtcttgtcgacacggtgccttcctacgaccctattcatcaaaccggtactggattctgcttcgatcgatttgagcctgttgacttctatacagcattagtgaggtcttgggaggcgttccgtcatcgtgattgctggcgtgagttgcagcaacgtggaatgactcaaaactacagctgggatcgctccgctctcgactatgagcagatgtatcgggatgtctgtggctttaaggagccgtctcctgatgcggcggttgtggagcaattttctctcggccagggttcagatccttcccgtcagaaccaggacagcaatgcgaaaaaaagaaccagacgcaagaagaaggggaatgattaa

SEQ ID NO: 52549 - protein, 499 aa, Prochlorococcus marinus
MRVLFAAAECAPMVKVGGMGDVVGSLPPALAKLDHDVRLIMPGYGKLWSLLDIPTDPIWRGQTMGNEFAIYETSHPSNGLPLYLVGHPVFDPERIYGGEDEDWRFTFFASATTEFAWNVWKPQVLHCHDWHTGMIPVWMHQDPEISTVFTIHNLKYQGPWRWKLDRMTWCPWYMQGDHTMAAALLYADRVNAVSPTYAREICTSEYGESLDGLLNYISGKLRGILNGIDLQDWDPGNDKSLPATFNADDLSGRAVNKQALQQRMGLEVNPDTYLLGMVSRLVDQKGVDLLLQVTERLLAYTDSQIVVLGTGERGLESGLWQLAIQNPGRFSVFLTYDDDLARLIYGGSDAFLMPSRFEPCGISQLLAMRYGSVPVVRKVGGLVDTVPSYDPIHQTGTGFCFDRFEPVDFYTALVRSWEAFRHRDCWRELQQRGMTQNYSWDRSALDYEQMYRDVCGFKEPSPDAAVVEQFSLGQGSDPSRQNQDSNAKKRTRRKKKGND

SEQ ID NO: 52550 - DNA, 1464 bp, Prochlorococcus marinus
  CDS (1)..(1464): transl_table=11
atgcgaatactttttgctgctgctgaatgcgccccaatgataaaggttggaggtatgggtgatgttgttggttcattacctcctgcgcttaaaaaacttggacatgacgttcgattaataattccagggtatggaaaattatggacgttgatggatattgctcctgaacctatctttcgatccaacacaatgggtgttgacttctctgtttttgaaacaaagcatccctctaatgggttgccaatttatttagttggacatccatgttttgattctgagcgtatttacggaggagaagatgaagattggagatttactttttttgctagtgcagtctctgaatttgcatggaactcatggaaaccacaagtcctccattgtcatgactggcatactggaatgattccagtttggatgcatcaagaccccgaaatcagtacggtatttactattcataatctcaaatatcaaggcccatggagatggaagcttgatcaaataacttggtgcccttggtatatgcatggtgatcacaccatggcatcagcaatgttgtatgcggatagagtgaatgcagtatctccaacttattcaagagaaattcgaacatctgaatatggagaaaaattagagggacttttaaattatatttctgggaaattacgaggaatattaaatggagttgatctagatgagtggaacccagcaacggataattcattgccagctaaatttagtgtagataatatttctggtagagcaattaataaaagagtcctgcaagaaagaatgggactggaagtgaaccctgataaatatctaatgggaatggttggtaggcttgttgaccaaaaaggtattgatcttttactacaagttgctaataggcttctttcttatactgactctcaggtcgttgttcttgggacgggtgatcgctatttagagtcatctttatggcaacttgcgattgaatatcctggtcgtttttctgtttttcttacttacgatgatgcattatctaggctcatttatggaggcgctgatgcattcctaatgcctagtcgctttgagccgtgtggtatcagtcagttattagctatgcgttatggtgcaattccgatcgttaggaaagtaggtggtttagtagatacagtagagccttataaccccatgaatgaaacaggttccggattttgctttgatcggtatgaaccaattgacttttatacatcattagttcgttcttgggaagaatatagacatcaaaaaagttggaagcagttgcaattaagagcaatgtcaaataaatatagttgggatagatccgcgaaggaatatgaattaatgtacaaagacgtttgtggaattaaggagccttctcctgatgcggcagaggttgaaaagttttcttatggccaagaagcagatccttcaagaaaaggcaaaaaaataaaattatag

SEQ ID NO: 52551 - protein, 487 aa, Prochlorococcus marinus
MRILFAAAECAPMIKVGGMGDVVGSLPPALKKLGHDVRLIIPGYGKLWTLMDIAPEPIFRSNTMGVDFSVFETKHPSNGLPIYLVGHPCFDSERIYGGEDEDWRFTFFASAVSEFAWNSWKPQVLHCHDWHTGMIPVWMHQDPEISTVFTIHNLKYQGPWRWKLDQITWCPWYMHGDHTMASAMLYADRVNAVSPTYSREIRTSEYGEKLEGLLNYISGKLRGILNGVDLDEWNPATDNSLPAKFSVDNISGRAINKRVLQERMGLEVNPDKYLMGMVGRLVDQKGIDLLLQVANRLLSYTDSQVVVLGTGDRYLESSLWQLAIEYPGRFSVFLTYDDALSRLIYGGADAFLMPSRFEPCGISQLLAMRYGAIPIVRKVGGLVDTVEPYNPMNETGSGFCFDRYEPIDFYTSLVRSWEEYRHQKSWKQLQLRAMSNKYSWDRSAKEYELMYKDVCGIKEPSPDAAEVEKFSYGQEADPSRKGKKIKL

SEQ ID NO: 52552 - DNA, 1542 bp, Pseudomonas aeruginosa
  CDS (1)..(1542): transl_table=11
atgggacattctgttgcaggcgtttgcctggaagaacccgcggtactgaccgcttttccgtcgctgctgcacccgcaggacccgccgcaacagagggatcggatactcttcgttaccgccgagctcagcgatttcgtcaaggtcggcggactcggcgacttttccgccgcgctgccgagggtcctcaagcgcgagcattcggtgcgagtcctgctgcccggctatcgccaggtgctggagcgctgccgcgacttgcggatcatcggcagcctgcccggccgggcggcgatcccgccctgcgagatcggcctggtgaccctcgacgacggcctggaagtcatgctggtgctctgcccgctgctctacgagcgcgagggtacgccgtacatggacgaccagggcaacgactggccggacaaccacctgcgcttcgcccgcctgtgcctggccgccgccgagatcgccggtggacgcggcgcccagggctggcaaccgggcctggtgcacgccaacgactggccgtcggcgctgacgccggcctacatggcctggaacggcgtgcgcacgccgagcctgtttaccatccacaacctcgcctaccagggcctctgcgacctgcaatgcagcgccgaactgggcctccccgacgaagcgctgagccacgaaagcatggagttccacgggcgcctgtcgttcctcaaggccggcatcgcccatgcccaccacatcaccacggtgagcgagacctacgcccaggaaatcactaccccggaatacggctgcggcctgcacggcatcctcaagtacaaggtcgagaagcgtcagctcagcggcatcgtcaacggtatcgacgatagctggcagccgcactgcgatccgcacctggtggcctgcttcagcgcccgccaatgggccggcaagcgcgccaacacgcgctacgtggaggagcgtttcggcctggagccgggcaaggggccgctgttcgcggtggtctcgcgcctggtgcagcagaaaggcatcgacctgaccctggagatcagcgatgccctgctccaggccggcggccgtctggtcagcatcggccgtggcgagccgaacctggagaaggccatgctcgaactcgcccggcgtcatcccggccaggtcggcgtgcacatcggtttcgacgagaccgaggcccgccgtatctacgccggcagcgacttcctgctcatgccctcgcgttatgagccctgcgggctcagtcagctctatgcgcaatgcttcggctcgctgccgatcgcgcgctgcaccggcggcctcgccgataccatcgtcgacggggtcaccggcttcctgttccgtgaggaaaccgcgcagagctacctcgatgcggtgatgcgcgcgatcaacgtctaccactgtccctcgctgctcaacgccatgcgttgcaaggcgatggccgcgccgatgttctggagcgactcggtggagccttacaaccgcctgtaccggcgcctgttgaggaataccgctccggccctgcgcggggtacgccagtga

SEQ ID NO: 52553 - protein, 513 aa, Pseudomonas aeruginosa
MGHSVAGVCLEEPAVLTAFPSLLHPQDPPQQRDRILFVTAELSDFVKVGGLGDFSAALPRVLKREHSVRVLLPGYRQVLERCRDLRIIGSLPGRAAIPPCEIGLVTLDDGLEVMLVLCPLLYEREGTPYMDDQGNDWPDNHLRFARLCLAAAEIAGGRGAQGWQPGLVHANDWPSALTPAYMAWNGVRTPSLFTIHNLAYQGLCDLQCSAELGLPDEALSHESMEFHGRLSFLKAGIAHAHHITTVSETYAQEITTPEYGCGLHGILKYKVEKRQLSGIVNGIDDSWQPHCDPHLVACFSARQWAGKRANTRYVEERFGLEPGKGPLFAVVSRLVQQKGIDLTLEISDALLQAGGRLVSIGRGEPNLEKAMLELARRHPGQVGVHIGFDETEARRIYAGSDFLLMPSRYEPCGLSQLYAQCFGSLPIARCTGGLADTIVDGVTGFLFREETAQSYLDAVMRAINVYHCPSLLNAMRCKAMAAPMFWSDSVEPYNRLYRRLLRNTAPALRGVRQ

SEQ ID NO: 52554 - DNA, 1446 bp, Rhizobium loti
  CDS (1)..(1446): transl_table=11
atgcaggttctgtcggtcacgcccgagatcttcccgctgatcaagaccggcgggcttgccgacgtgaccggtgcgctgcccgtcgcgctggcagccaagggcgtgaccatgcgcacgctcattccaggctttcccgcggtgatggaaggcttcaagaaaaggaaggctgtttaccaatacccgctgctccagggtggcaaggcttcgatccatgctgtccagatcgcagggctcgatcttttcgtgctcgacgcgccgcatctcttcgaccgtcccggcggtccctacggcaatgcttcgggcgccgactggccggacaattggcggcgttttgcggcactgagccaggccggcgccgatatcgccggcggcgccatctcgggctacttgcccgagatcgtccatgcccatgactggcagtcggcgatgacgctggcctatatgcgctacggcaaggcggtcggcacgccgtcgatgatgacggtccacaatctcgccttccagggccagttcggcgcaggcatcttcggcgagctcggcctgccggcggtggcgatggcgcttgacggtgtcgaatattatggcggagtcggcttcctcaaggccggcctgcaggccgcctgggcgatcaccacggtcagcccgacctatgcgcaggaaatccgctcgccggaattcggcatgggcctcgacggcctgatcaacatgcgctccagcgatctctacggcatcgtcaacggcatcgacaccgccatctgggatccggagacggacaagcatctggtatcgaactatacggccaccacgctcaaggcgcgggcgccgaacagggcggccgtggaggaacgcttcggcctcgaccgcgacgacagcccgattgtctgcgtcatcagccggctgacctggcagaagggcatggacatattggcgacggtgatcgacggcatcgtcgcgaccggcgcgcggctggccatattgggctcgggcgacgccggcctcgaaggcgcgctgcttgccgcagccgcacgccaccgtggccgcatcggcgtggtcatcggctatgacgaagggttgtcgcacaccatgcagggcggctgcgacgccatcatcatcccgtcgcgcttcgaaccctgcggattgacgcagctctacggcctccgctacggctgcgtgccggtggtcgcccggaccggcggcctagccgacaccatcatcgacgccaacgaagcggcgatggcggccggcgtggccacagggctccagttcgctcccaacaatggcggcgcgatgctgcacgccatccgccgcctggtcgatgcctacgccgaccccgcggccttcgagaccatccagcgccagggcatgaaggccgatgtgtcatgggacaagagcgcggaaaaatatcttgaactctatcgcctgctgctttcgaaaagggttgcctga

SEQ ID NO: 52555 - protein, 481 aa, Rhizobium loti
MQVLSVTPEIFPLIKTGGLADVTGALPVALAAKGVTMRTLIPGFPAVMEGFKKRKAVYQYPLLQGGKASIHAVQIAGLDLFVLDAPHLFDRPGGPYGNASGADWPDNWRRFAALSQAGADIAGGAISGYLPEIVHAHDWQSAMTLAYMRYGKAVGTPSMMTVHNLAFQGQFGAGIFGELGLPAVAMALDGVEYYGGVGFLKAGLQAAWAITTVSPTYAQEIRSPEFGMGLDGLINMRSSDLYGIVNGIDTAIWDPETDKHLVSNYTATTLKARAPNRAAVEERFGLDRDDSPIVCVISRLTWQKGMDILATVIDGIVATGARLAILGSGDAGLEGALLAAAARHRGRIGVVIGYDEGLSHTMQGGCDAIIIPSRFEPCGLTQLYGLRYGCVPVVARTGGLADTIIDANEAAMAAGVATGLQFAPNNGGAMLHAIRRLVDAYADPAAFETIQRQGMKADVSWDKSAEKYLELYRLLLSKRVA

SEQ ID NO: 52556 - DNA, 1452 bp, Rhodopseudomonas palustris
  CDS (1)..(1452): transl_table=11
atgacgacactggcggttctatctgttgcgtcggaactgtttccgctgatcaagaccgggggcctcgccgatgtggccggcgcattgccggccgccctgcgtgccaacgacgtcgccgtcacctcgctgctgccgggctacccggcggtgctcggcgggatcgaggatccgcagcaggtccacagcttcaacgagctgttcggcggcacggcgcggctgctggcggcgcgctgcggcgatctcgatctatttgtgctcgacgcgccgcatctctatgtccggcccggcaatccctatgtcggcccggacggcaaggattggccagacaacggcctgcgttttgcggcgttggcgcaggtcggcgccgcgctcggccagggcctgctgccgcactacaagccggatgtgctgcacgcccacgactggcagaccgggctgttgccggcctatctgaaatacagcggccggcctgggccgaagactgtcttcaccatccacaatctggcgttccaggggaggtttccctacgagctgctcggcaggctgggcctgccggagcgcgccttcggtctcgacggtatcgagtactacggcggtatcggttatctcaaggccggcctgcaactcgccgaccgcatcaccaccgtgtcgccgacctacgcggccgagatccagggttcggaagccggcatgggcctcgacggcctgctgcggctgcgcgccgatcggctgtccggcatcctcaacggcatcgacaccgacgtctggaatccggccagcgatgcgttgatctccgccacctacgatgtcgaaagcatcgcagcccgcgcccgcaacaagaaggtgctgcaggcgcggttcggtctgaagcccgagccgggcgcactgctgtacggcgtgatcagccggctgtcgtggcagaaggggctcgacctcttgctcgaagccctgccgcaattgatcggcggtggcgcccagctcgccctgctcggctccggcgatgccgaactcgaacagggctacgcggccgcggctcgcaagtatcccggccaggtcggcgcagtgatcggctacgacgaagcgctcgcgcatcagatccaggccggcgccgacgcgctgcttgtgccgtcgcgattcgaaccctgcggcctgacgcagctctgcgccttgcgctatggcgcggtgccggtggtggcgcgggtgggcggtctggccgatacggtggtcgacgccaacgagatggcgaccgccacaggcgtcgcgaccggcgtccagttcgcaccggtgacgactgacgcgctgatcaaggcgttcggcaaaacccgcgcgctgtttgcagacgtcgtcgcctggcgcaatctgcaaatcaacggcatgaccaccgatgtgtcgtggaagaacccggcgcagcactacgcgaagctgtatcgcgatctggtggcggagcgctga

SEQ ID NO: 52557 - protein, 483 aa, Rhodopseudomonas palustris
MTTLAVLSVASELFPLIKTGGLADVAGALPAALRANDVAVTSLLPGYPAVLGGIEDPQQVHSFNELFGGTARLLAARCGDLDLFVLDAPHLYVRPGNPYVGPDGKDWPDNGLRFAALAQVGAALGQGLLPHYKPDVLHAHDWQTGLLPAYLKYSGRPGPKTVFTIHNLAFQGRFPYELLGRLGLPERAFGLDGIEYYGGIGYLKAGLQLADRITTVSPTYAAEIQGSEAGMGLDGLLRLRADRLSGILNGIDTDVWNPASDALISATYDVESIAARARNKKVLQARFGLKPEPGALLYGVISRLSWQKGLDLLLEALPQLIGGGAQLALLGSGDAELEQGYAAAARKYPGQVGAVIGYDEALAHQIQAGADALLVPSRFEPCGLTQLCALRYGAVPVVARVGGLADTVVDANEMATATGVATGVQFAPVTTDALIKAFGKTRALFADVVAWRNLQINGMTTDVSWKNPAQHYAKLYRDLVAER

SEQ ID NO: 52558 - DNA, 1458 bp, Rhodospirillum rubrum
  CDS (1)..(1458): transl_table=11
atgaaggttttgttcgtgacttccgaggcctacccgctggtcaagaccggcggattgggcgatgtggcgggggctctgcccgccgccctgcgcgacatcggcgtcgatgcccgcattcttctgcccgcctatcccgacgccatgcgccgggcccgcctgacgggcaagaccgtaccgcttggtaatccgcttggcgttggcgagaccagactgcttgaagggacgatgcccgataccggctgccccttgtggttgctcgactgcccggcgatgtacgagcggaccggagggccctacatgatgtattcgggcgtcgactggcccgataacttccgaagattcgccttgttgtccaaggtcgcggcgatgatcggcaccgccggcgacctgatggactggcgccccgacgtgttgcacggccacgattggcagaccggactggttccggcctatctgaatgcctggggggcgcgccgtccgccctttttgttctcgatccacaacatggaataccgcgggttgttcggtcccgagatccttgatctgatcgggttgccgcgcagccagttctcgatcaacggcttggaattccatgggctggtctccacgctcaaggccgggatagtctatgcccaagccgtggccaccgttagcccaagttatgccgccgagataaagactccggtcggcggccaggggctggaaggcttgctgcaggcgcgggcgggcgatctttcgggaattctgaacggcatcgactccaacgcctggaacccgcaaaccgatccctatttggccgcgcccatcgacggggccgatccggcgccggggaagcggatcaacaaggacatgctcaagcggcggatgggactcgacgccgatggcgatcgcccgctgtttggtctggtcagccgtttcgtcgcccagaagggaatcgatctggtggtcgccgcgctgcccggcatgatcgccggcggcgcccaggtcgccattctcggcgccggcgacaccggccttgaagcggccttgaacgacatcgtcgggcgctatcccggggcggcggccgtccatgtcggctatgacgagcatctggcccatctgatcgaaggggcggccgatttcctgctggtgccttcgcgcttcgagccctgcgggctgacccagctttacgccttgcgctatggcaccattccggtggtgcgccgcaccggtgggctggccgattcggtgagccatctcgatgatggtccgaacggaacgggcatcgtgttcgaccatgcgcttcccgacgccctggagtgggcgatcggtcgggcgatgacgctgtatcgcgacaaggcgacgctgaacaaagttcgccagcgggggatgtcccaggatttcagttggaaacgctccgccaaagagtaccttagagtctacggctccatggtgggcggggatgttcaccggccttga

SEQ ID NO: 52559 - protein, 485 aa, Rhodospirillum rubrum
MKVLFVTSEAYPLVKTGGLGDVAGALPAALRDIGVDARILLPAYPDAMRRARLTGKTVPLGNPLGVGETRLLEGTMPDTGCPLWLLDCPAMYERTGGPYMMYSGVDWPDNFRRFALLSKVAAMIGTAGDLMDWRPDVLHGHDWQTGLVPAYLNAWGARRPPFLFSIHNMEYRGLFGPEILDLIGLPRSQFSINGLEFHGLVSTLKAGIVYAQAVATVSPSYAAEIKTPVGGQGLEGLLQARAGDLSGILNGIDSNAWNPQTDPYLAAPIDGADPAPGKRINKDMLKRRMGLDADGDRPLFGLVSRFVAQKGIDLVVAALPGMIAGGAQVAILGAGDTGLEAALNDIVGRYPGAAAVHVGYDEHLAHLIEGAADFLLVPSRFEPCGLTQLYALRYGTIPVVRRTGGLADSVSHLDDGPNGTGIVFDHALPDALEWAIGRAMTLYRDKATLNKVRQRGMSQDFSWKRSAKEYLRVYGSMVGGDVHRP

SEQ ID NO: 52560 - DNA, 1434 bp, Salmonella paratyphi
  CDS (1)..(1434): transl_table=11
atgcaggttttacatgtatgttcagagatgttccccctgctgaagactggggggctggcggatgtgataggcgcgttgcctgcggcacaaattgcggatggtgttgatgttcgcgttctgcttccagggtttcccgatatccgtcgggggatacccgacgcgcatgtggtgagccgccgcgatactttcgcaggtaagatatcgctgctgtttgggcattataacggcgtaggcatttatctaatcgacgcgccgcatctgtacgagcgtccaggcagtccctatcacgatacgaatttatatgcctataccgataacgtgctgcgctttgccctgttagggtgggtcggctgtgaaatggcctgcggacttgatccattctggcgccccgacgtggtgcacgcccatgactggcacgctgggctggcgcccgcctatctggcggcgcgcgggcggccggcgaaatcggtctttaccgtacacaacctggcctatcaaggcatgttttatgcaaagcatatggatgacatcgaactgccgtggtcattctttaatatgcatgggctggagttcaacggacaactctcctttttgaaggccggtttgtactatgccgaccatattacggcggtgagcccgacctatgcgcgtgaaattaccgaaccgcagtttgcttatggtatggaaggcctgctgcgccagcgtcatctggaagggcgcttgtccggcatactgaacggcgtggatgagaagatctggaacccggaatccgatctgctgctggcgtcgcgctacacgcgcgataccctggaagagaaggcggaaaacaaacgtcagctacaaattgcgatggggttgaaggttaacgacaaagtgccgctgtttgccgtggtaagccgtctgaccaaccagaaaggtctggatctggtgctggaggcgttaccggggctgctggagcagggcgggcagttggcgctactcggcgcgggcgatccggtgcttcaggaagggttcctcgcggcggcggcggaacacccagggcaggttggcgtacagatcggctatcacgaagctttctcgcatcgcattatgggcggcgcggacgttattctggtgcccagtcgtttcgaaccgtgcggcttaacgcagttatatggcttaaagtatggcacgctgcctctggtgcggcgtaccggggggttggccgatacggtctccgacagttcgctggaaaatctggcggacggtatcgccagcggttttgtcttcgaagacagtaatgcctggtcgttgctacgcgcgattcggcgtgcttttgtgttgtggtcacggccttcgctttggcggtttgtacaacggcaggcgatggcgatggattttagctggcaagttgccgcgaaatcataccgcgagctgtactatcgcttgaaatag

SEQ ID NO: 52561 - protein, 477 aa, Salmonella paratyphi
MQVLHVCSEMFPLLKTGGLADVIGALPAAQIADGVDVRVLLPGFPDIRRGIPDAHVVSRRDTFAGKISLLFGHYNGVGIYLIDAPHLYERPGSPYHDTNLYAYTDNVLRFALLGWVGCEMACGLDPFWRPDVVHAHDWHAGLAPAYLAARGRPAKSVFTVHNLAYQGMFYAKHMDDIELPWSFFNMHGLEFNGQLSFLKAGLYYADHITAVSPTYAREITEPQFAYGMEGLLRQRHLEGRLSGILNGVDEKIWNPESDLLLASRYTRDTLEEKAENKRQLQIAMGLKVNDKVPLFAVVSRLTNQKGLDLVLEALPGLLEQGGQLALLGAGDPVLQEGFLAAAAEHPGQVGVQIGYHEAFSHRIMGGADVILVPSRFEPCGLTQLYGLKYGTLPLVRRTGGLADTVSDSSLENLADGIASGFVFEDSNAWSLLRAIRRAFVLWSRPSLWRFVQRQAMAMDFSWQVAAKSYRELYYRLK

SEQ ID NO: 52562 - DNA, 1434 bp, Shigella flexneri
  CDS (1)..(1434): transl_table=11
atgcaggttttacatgtatgttcagagatgttcccgctgcttaaaaccggcggtctggctgatgttattggggcattacccgcagcacaaatcgcagacggcgttgacgctcgcgtactgttgcctgcatttcccgatattcgccgtggcgtgaccgatgcgcaggtagtatcccgtcgtgatactttcgccgggcatatcacgctgttgttcggtcattacaacggggttggcatatacctgattgacgcgccgcatctctatgatcgtccgggaagcccgtatcacgataccaacttatttgcctataccgacaacgtattgcgttttgcgctgctggggtgggttggggcagaaatggccagcgggcttgacccattctggcgtcctgatgtggtgcatgtgcacgactggcatgcaggtcttgcgcctgcgtatctggcggcgcgcgggcgtcctgcgaagtcggtgtttactgtgcacaacctggcctatcaaggcatgttttatgcacatcacatgaatgacatccaattgccatggtcattctttaatattcatgggctggaattcaacggacaaatctctttcctgaaggccggtctgtactatgccgatcacattacggcggtcagtccaacctacgctcgcgagatcaccgaaccgcagtttgcctacggtatggaaggtctgttgcaacagcgtcaccgtgaagggcgtctttcaggcgtactgaacggcgtggacgagaaaatctggagtccagagacggacttactgttggcctcgcgttacacccgcgatacgttggaagataaagcggaaaataagagccagttacaaatcgcaatggggcttaaggttgacgataaagtgccgctttttgcagtggtgagccgtctgaccagccagaaaggtctcgacctggtgctggaagccttaccggggcttctggagcagggcgggcagctggcgctactcggcgcgggcgatccggtgctgcaggaaggtttccttgcggcggcagcggaataccccggtcaggtgggcgttcagattggctatcacgaagcattttcgcatcgcattatgggcggcgcggacgtcattctggtgcccagccgttttgaaccgtgcggcttaacgcaactttatggattgaagtacggtacgctgccgttagtgcggcgcaccggtgggcttgctgatacggtttctgactgttctcttgagaaccttgcagatggcgtcgccagtgggtttgtctttgaagatagtaatgcctggtcgctgttacgggctattcggcgtgcttttgtactgtggtcccgtccttcactgtggcggtttgtgcaacgtcaggctatggcaatggattttagctggcaggtcgcggcgaagtcgtaccgtgagctttactatcgcttgaaatag

SEQ ID NO: 52563 - protein, 477 aa, Shigella flexneri
MQVLHVCSEMFPLLKTGGLADVIGALPAAQIADGVDARVLLPAFPDIRRGVTDAQVVSRRDTFAGHITLLFGHYNGVGIYLIDAPHLYDRPGSPYHDTNLFAYTDNVLRFALLGWVGAEMASGLDPFWRPDVVHVHDWHAGLAPAYLAARGRPAKSVFTVHNLAYQGMFYAHHMNDIQLPWSFFNIHGLEFNGQISFLKAGLYYADHITAVSPTYAREITEPQFAYGMEGLLQQRHREGRLSGVLNGVDEKIWSPETDLLLASRYTRDTLEDKAENKSQLQIAMGLKVDDKVPLFAVVSRLTSQKGLDLVLEALPGLLEQGGQLALLGAGDPVLQEGFLAAAAEYPGQVGVQIGYHEAFSHRIMGGADVILVPSRFEPCGLTQLYGLKYGTLPLVRRTGGLADTVSDCSLENLADGVASGFVFEDSNAWSLLRAIRRAFVLWSRPSLWRFVQRQAMAMDFSWQVAAKSYRELYYRLK

SEQ ID NO: 52564 - DNA, 1434 bp, Streptococcus pneumoniae
  CDS (1)..(1434): transl_table=11
atgaaaattttatttgtagcagcagagggtgcacccttttcaaaaacaggtggtttgggagacgtcattggcgctcttccaaaatcactggtaaaagctgggcacgaagttgcagtgattttaccctactatgatatggtagaggctaaatttggaaatcagattgaagatgtgcttcattttgaggtgagcgttggttggcgcagacagtattgtggaattaagaaaacagtattaaatggtgtaaccttctactttattgacaatcaatattatttcttccgtggtcatgtttacggtgattttgatgacggagaacgctttgcctttttccaactggctgccattgaggctatggaaaggattgactttattcctgatcttctccatgttcatgactaccatacagctatgattcctttcttgttgaaggaaaaataccgttggattcaagcctatgaggacattgaaacagttttaaccattcataatttagaattccaaggacaattttcagaaggaatgttgggtgatttgtttggagttggctttgaacgttacgctgatggcacccttcgatggaacaactgtctgaactggatgaaggcaggtattctctatgcgaaccgtgtttcaaccgtttcacctagctatgctcatgaaattatgactagtcagtttggatgtaatttggatcatattcttaaaatggagtctggtaaagtatctggtatcgtgaatgggattgatgctgatctttataatcctcagacggatgctcttttagactatcatttcaatcaggaagatttgtctgggaaagccaaaaataaggcaaaattgcaagaaagagttggcttgcctgttagagcagacgttccactggtgggaattgtttctcgtttgacacgtcaaaaaggttttgatgtggtggtcgaaagtcttcaccatatcttgcaagaagatgttcagattgttcttttgggaactggcgatccagcctttgaaggagctttctcatggtttgctcagatttacccagacaagctatcaacaaatatcacttttgatgtcaaacttgctcaggaaatctacgctgcttgtgacctcttcctcatgccaagtcgttttgaaccgtgtggcttgtctcaaatgatggctatgcgttatggaaccttgccattggtccatgaagttggaggcttgcgagatacagttcgcgctttcaatccaatcgaaggaagcggtactggctttagctttgacaatctatctccttattggttaaattggactttccaaacagcattggacttgtatagaaaccatccagacatttggagaaacctacaaaaacaagctatggagagtgacttctcatgggatacagcctgcaagtcataccttgacttgtaccatagtttagttaattaa

SEQ ID NO: 52565 - protein, 477 aa, Streptococcus pneumoniae
MKILFVAAEGAPFSKTGGLGDVIGALPKSLVKAGHEVAVILPYYDMVEAKFGNQIEDVLHFEVSVGWRRQYCGIKKTVLNGVTFYFIDNQYYFFRGHVYGDFDDGERFAFFQLAAIEAMERIDFIPDLLHVHDYHTAMIPFLLKEKYRWIQAYEDIETVLTIHNLEFQGQFSEGMLGDLFGVGFERYADGTLRWNNCLNWMKAGILYANRVSTVSPSYAHEIMTSQFGCNLDHILKMESGKVSGIVNGIDADLYNPQTDALLDYHFNQEDLSGKAKNKAKLQERVGLPVRADVPLVGIVSRLTRQKGFDVVVESLHHILQEDVQIVLLGTGDPAFEGAFSWFAQIYPDKLSTNITFDVKLAQEIYAACDLFLMPSRFEPCGLSQMMAMRYGTLPLVHEVGGLRDTVRAFNPIEGSGTGFSFDNLSPYWLNWTFQTALDLYRNHPDIWRNLQKQAMESDFSWDTACKSYLDLYHSLVN

SEQ ID NO: 52566 - DNA, 1461 bp, Thermotoga maritima
  CDS (1)..(1461): transl_table=11
atgaaagtggtattcgtttcttacgaggtttttccgttcgcgaaagtaggaggattggcggacgttgctggaactcttccaaagtacttgaagaaacacggggtggatgtcacgatagttatgccgaaacacagaatcgttgaaaaaaatgcggagaaatttgggtatgagatcaagaaagtagccgaaagtctctctgtttctcatgtcaaaaccgatcaaaagttcgatatatatgaatccgttcttcccggtagcgatgtgaaaacgtatttcgttgccaacgattactatttctctgcggaagatgtctacgcggggccagatcttggtgaacaggcgattttcttctgtgcggccactctggatctggtaaaacatcttgatttgaagcccgatatcgtccatgtgaacgactggcaaaccgctttgatccccgtctatttgaaaactgtgtacagggacgatccttacttttccagaacggccacggttttgacaatacacaaccttggataccagggcgtgttcgatccaaagtacctctcttttgcaggccttcccgattatgtttacactatcgacggtcttgagttctacggacagctgaatttcctcaagggcggaatagtgttcagcgatgtgataaacacggttagccccacttacgccgaggaaattcagacggaagagtatggtgagaaactcgatggtgtactgagaatgcgctcgaaggatctctacggtatattgaacggaatagattacgagctttataacccagccacggacagatacatttacgtcaactacgacgtgaatcgtcttgaactcaagtgggaaaacaaggtgaagctccaggaagaactgggacttcccgttaacaaggaaacggctgtagccgggttgatcagcaggctcgtccctcaaaaaggtctggaccttctggttgatgtgatggattatctgacgctctttgatcttcagatcgttgttctaggaacaggagatgaacagtacgagaacgctttcagaaagttccaggaaaggtatccagacaaagtatcagcgaacataaagttcgatgtcgagctggcgcagaagatatacgccggtgcggacatattcctcatgccgagcagatacgaaccgtgcggtttgggacagatgttcagcatgagatacggaacaatccccgttgtgagatacacgggaggcctggcggatactgtgaaagaatacgatccacaatcgatggaaggtacgggttttggattcaagaagtacgattccgctcatcttttgaaggctgtttcgaaggctttgcacttttactacagggaaaaagatcattggaggagaatcatgacaaatgccatgaacacggatctgtcctgggacaggtccgccaaagagtacgttgatctttacaaaaaagcccttgcaaaggttggaaggtga

SEQ ID NO: 52567 - protein, 486 aa, Thermotoga maritima
MKVVFVSYEVFPFAKVGGLADVAGTLPKYLKKHGVDVTIVMPKHRIVEKNAEKFGYEIKKVAESLSVSHVKTDQKFDIYESVLPGSDVKTYFVANDYYFSAEDVYAGPDLGEQAIFFCAATLDLVKHLDLKPDIVHVNDWQTALIPVYLKTVYRDDPYFSRTATVLTIHNLGYQGVFDPKYLSFAGLPDYVYTIDGLEFYGQLNFLKGGIVFSDVINTVSPTYAEEIQTEEYGEKLDGVLRMRSKDLYGILNGIDYELYNPATDRYIYVNYDVNRLELKWENKVKLQEELGLPVNKETAVAGLISRLVPQKGLDLLVDVMDYLTLFDLQIVVLGTGDEQYENAFRKFQERYPDKVSANIKFDVELAQKIYAGADIFLMPSRYEPCGLGQMFSMRYGTIPVVRYTGGLADTVKEYDPQSMEGTGFGFKKYDSAHLLKAVSKALHFYYREKDHWRRIMTNAMNTDLSWDRSAKEYVDLYKKALAKVGR

SEQ ID NO: 52568 - DNA, 1476 bp, Treponema denticola
  CDS (1)..(1476): transl_table=11
atgaaaataatgatggttacaagcgagcttgttccttttgcaaaagtaggaggtttggctgatgccgttacagctttatcaatagctcttgcagaaaaaagacatgatgtaagggttgtaatgcctcgttattataaaatcgatcgaaaaaacttaaagcaaattccgggggctatggccgttcatcttgggccttatgaacactgggtaggagtttatgagtcaaatctgccttcttcaaaggtaaaggtttattttatagaccatgaacaagcctttggcagagatggcgtttacggttcagcttttgaacctgatttttccgataatacgaaaagattttcacttttagcccatgcagcttttcaagtttgcagaaaacaggcatggattcccgacgttgtacatgcccatgattgggctgcgggcttggtacccgtacttttacgctttacagaaaaaaatacggaatttaaaaatacggcaagtgtttttaccattcataatatgggttaccaaggtgtttattcaaagcatacctttcccgacacaggccttgattggaacgacttttatactacaggctttgaagactgggatagaataaactttttaaaagcggcccttgtttcttccgatatgcttacaaccgtttctccttcttatgcggaagaaattaaacgccccgaattcggctttaggatggatggtattttgcggtacagggaaaaagaactgacaggaattttaaatggggtagacacctcaatttggaatccttcaaaagacgagtatattccttaccgatacaattctaaaacccttgaggaaaaggaaaaaaataaatccgttttacaggaaaggttcggtctcgaaatagatatttccgttccggtattcggtatgataagccgattggttgatcaaaagggtatttcagagcttttcggacccatgtacggttcagcctttaagatatgttccgatataaaacttcaaatggttgttttgggctcaggtgaatcttggtgcgaaaaagagctcaattttctttcacaaaggctgcctaattttagatgttatataggctataatgaagaattaagtcatttaatcgaagccggaagcgactttttcttgatgccttcaagatatgaaccatgcggcttaaaccaaatgtattccctcctttacggaaccttgcccatagtccgaaagactggagggctcgcagatacggtagaaaactataatgaagaaacaggcgagggtacgggttttgtgcttgactacttaagccctcaaagtatttacgatacggtcggctgggcagcttatgcatggtataataaaaaagatcacataaaaaagatgagaaccaaggccatgagtaaaaagttcggatggaatatagccgcggaaaaatatttaaaagtatatgccgatgctattgaaaaaaaagcttccatgttatag

SEQ ID NO: 52569 - protein, 491 aa, Treponema denticola
MKIMMVTSELVPFAKVGGLADAVTALSIALAEKRHDVRVVMPRYYKIDRKNLKQIPGAMAVHLGPYEHWVGVYESNLPSSKVKVYFIDHEQAFGRDGVYGSAFEPDFSDNTKRFSLLAHAAFQVCRKQAWIPDVVHAHDWAAGLVPVLLRFTEKNTEFKNTASVFTIHNMGYQGVYSKHTFPDTGLDWNDFYTTGFEDWDRINFLKAALVSSDMLTTVSPSYAEEIKRPEFGFRMDGILRYREKELTGILNGVDTSIWNPSKDEYIPYRYNSKTLEEKEKNKSVLQERFGLEIDISVPVFGMISRLVDQKGISELFGPMYGSAFKICSDIKLQMVVLGSGESWCEKELNFLSQRLPNFRCYIGYNEELSHLIEAGSDFFLMPSRYEPCGLNQMYSLLYGTLPIVRKTGGLADTVENYNEETGEGTGFVLDYLSPQSIYDTVGWAAYAWYNKKDHIKKMRTKAMSKKFGWNIAAEKYLKVYADAIEKKASML

SEQ ID NO: 52570 - DNA, 2345 bp, Antirrhinum majus
  CDS (10)..(1836)
caggttcctatggctacagtaacagcttcacagttggtgtcacatgtccatggtggagcaacgtcttcaccggatactaaaacaaacttggcccaggttggcctcaggaaccagcaattcactcacaatgggttgagatcaataaacatggttgataagcttcaaatgaggaacaatgcgaaacaatccaggagcttggtaaagaaaactgataatggtagccctttgggaaaaattatttgtggaacagggatgaacttggttttcgtgttagctgaggttggtccgtggagcaaaaccggtggcctcggtgacgttgttggaggattgcctcccgcaatggcaggaaatggacacagagttatgacagtatcaccacgttacgatcagtacaaagacgcttgggacactagtgttgttgttgagataaaagttggagacagcattgagactgtcagatttttccactgctataaacgtggggtggatcgtgtttttgttgatcatcctatattcctcgaaaaggtctggggcaaaactaaatcaaagatttatggccctaatgctggaactgattatcaggacaatcaacttcgattcagcttattgtgccaagctgctttggaagcgcccagggtcctgaatctaaccagcagcaaatatttctctggaccatatggcgaggatgttgtatttgtcgctaatgactggcacactgctttgcttccgtgctacctgaaaagtatgtaccaatctaaaggaatgtaccttcatgctaaggttgccttctgcatccacaacattgcatatcagggaagatttgggtcctcagacttttgtcttctcaatctccccgatcagttcaaaagttcttttgacttcttcgatgggtacgagaaacccgtgaagggaaggaaaattaactggatgaaggctggaatcttagaatcagatagggtcgtaactgtgagtccttactatgccatggaacttgtttctggggctgagaaaggtgttgaactggataatgtcattgctaagacaagcataactgggattgtgaatggtatggatacccaagagtggaatccagcaactgataagcacatcgatactaactacgatatcaccactgtcatggatgctaagcctctgttgaaagaagctcttcaagcagcagtcggattgcctgtggacaagaacattcctgtcattggatttattggcagactcgaagagcagaaaggctcggatatccttgttgctgccatttctaagtttgtcgggttggatgttcaaataataatcctcggaactggcaagaagaagtttgagcagcagattcaggagctggaggtgttgtatcctgataaagcaagaggagtggccaagtttaacgttcccttggctcacatgatcactgctggagctgattttatgctggtcccaagtagattcgaaccttgtggtctcatccaattacacgccatgcgatatggaacgatacccatctgtgcctcaactggtggtcttgtcgacactgtgacagaaggatttactgggttccatatgggagctttcaatgttgaatgtgccaccgtggacccagccgatgtgcaaaagatagccacaactgttgagagagctcttgctgcttatggtagcgttgcctataaagaaatgattcagaactgcatggcacaagatctctcctggaagggacctgcaaagaactgggaaaagatgctgcttagcttgggcgtttcagggagtgaacctggtgttgacggcgaggaaattgctccacttgccaaggaaaatgtcgccactccttagaggctgatcaatatatagactgttgaacataaagtatgactgactgcaatatatagatctgttgaacataaagtatgactgactgactatatgacctgaaatgcttatgatcttataggaataattgcatagtgaagcagtttgtttagatgggtaatggttagattatgggatggtaatgcgtgtgggtgctctataatatatgaggcgaaggaggtcttatatgatagtcagtagcaattgacagatggggtttattttaagaacgtgccactgtgtggtcaagccaagcaccatataaacgtaattaaataaagttgatggcgctagtaggtggtgttgtttatgcttattctggtaattggtatcggtataaagtaggtttgaattgttgaaacgtgcctcgatgtgattcttgtcctggatatgcattcggattctttatataaaagttatagtattaaatgcaaaaaaaaaaaaaaaaaaaaaaaaaaaaaaaaaaaaaaaaa

SEQ ID NO: 52571 - protein, 608 aa, Antirrhinum majus
MATVTASQLVSHVHGGATSSPDTKTNLAQVGLRNQQFTHNGLRSINMVDKLQMRNNAKQSRSLVKKTDNGSPLGKIICGTGMNLVFVLAEVGPWSKTGGLGDVVGGLPPAMAGNGHRVMTVSPRYDQYKDAWDTSVVVEIKVGDSIETVRFFHCYKRGVDRVFVDHPIFLEKVWGKTKSKIYGPNAGTDYQDNQLRFSLLCQAALEAPRVLNLTSSKYFSGPYGEDVVFVANDWHTALLPCYLKSMYQSKGMYLHAKVAFCIHNIAYQGRFGSSDFCLLNLPDQFKSSFDFFDGYEKPVKGRKINWMKAGILESDRVVTVSPYYAMELVSGAEKGVELDNVIAKTSITGIVNGMDTQEWNPATDKHIDTNYDITTVMDAKPLLKEALQAAVGLPVDKNIPVIGFIGRLEEQKGSDILVAAISKFVGLDVQIIILGTGKKKFEQQIQELEVLYPDKARGVAKFNVPLAHMITAGADFMLVPSRFEPCGLIQLHAMRYGTIPICASTGGLVDTVTEGFTGFHMGAFNVECATVDPADVQKIATTVERALAAYGSVAYKEMIQNCMAQDLSWKGPAKNWEKMLLSLGVSGSEPGVDGEEIAPLAKENVATP

SEQ ID NO: 52572 - DNA, 1833 bp, Arabidopsis thaliana
  CDS (1)..(1833)
atggcaactgtgactgcttcttctaactttgtgtcaagaacttcacttttcaacaatcatggtgcttcttcatgctctgatgtcgctcagattaccttaaaaggccaatccttgactcattgtgggttaaggtcattcaacatggtggataaccttcagaggagatctcaagctaaacctgtttctgctaaatcctcaaagagatcttctaaagttaagactgctggtaagattgtgtgtgagaaaggaatgtctgtgatttttattggagctgaagttggtccatggagtaaaactggtggtcttggtgatgttctcggtggtctacctccagctcttgctgctagaggccaccgtgtgatgacaatttgtcctcggtatgaccaatataaagatgcttgggacacttgtgttgtggttcagatcaaagttggggataaagttgagaatgttcgtttcttccattgctacaaacgaggagttgatcgtgtctttgttgaccatccaatctttcttgctaaggttgtgggcaaaacaggatccaaaatctatggtcctataactggagtagactacaatgacaaccaactccggttcagtttgttgtgtcaggctgctcttgaggcaccacaggttctgaacctgaacagcagcaagtacttctctggaccatatggtgaagatgtagtctttgttgccaatgactggcacactgctctacttccatgttacctcaaatctatgtatcaatcccgcggagtctacatgaatgcaaaggtggtcttctgcattcacaacatagcctaccagggaagatttgcctttgatgactattcccttctcaacttgcccatcagctttaaaagttctttcgacttcatggacgggtatgaaaagccagtaaaaggacggaaaattaactggatgaaggctgcaattctggaagctcaccgtgtcttaacagttagtccatactacgctcaagaactcatctctggagttgatagaggcgtggaattgcataaatatcttcgaatgaaaacagtttccggaattattaatggaatggatgttcaagaatggaacccgtctactgacaagtacatcgacatcaaatacgatattaccactgttacagatgctaaaccattgatcaaagaagcacttcaggctgctgttggacttcccgtggacagggatgtcccggttatcggtttcatagggagattggaggagcagaagggttctgatattctagtggaagctatttccaagttcatggggctcaatgttcagatggttatccttgggactggaaagaagaagatggaggctcagattcttgaactagaagagaagttcccagggaaggcggttggagtggcgaaattcaacgtgccattggctcatatgatcactgctggagctgacttcatcattgtcccaagcaggtttgagccgtgtggtctcattcagctgcacgcaatgagatatggaaccgtccctattgtggcatctactggtggacttgtggacactgtgaaagatggctacacaggtttccacattggaagattcaacgtcaagtgtgaagttgtggatccagatgatgtgatagcaacagcaaaggctgtgacaagagccgttgcagtatatggaacatccgcaatgcaagaaatggtcaagaactgcatggaccaagacttctcctggaagggacctgcgaggttgtgggagaaggtactattgtcccttaatgtggcgggaagtgaagccggaaccgagggtgaagagatagctcctctggccaaggagaacgtagcgacgccgtga

SEQ ID NO: 52573 - protein, 610 aa, Arabidopsis thaliana
MATVTASSNFVSRTSLFNNHGASSCSDVAQITLKGQSLTHCGLRSFNMVDNLQRRSQAKPVSAKSSKRSSKVKTAGKIVCEKGMSVIFIGAEVGPWSKTGGLGDVLGGLPPALAARGHRVMTICPRYDQYKDAWDTCVVVQIKVGDKVENVRFFHCYKRGVDRVFVDHPIFLAKVVGKTGSKIYGPITGVDYNDNQLRFSLLCQAALEAPQVLNLNSSKYFSGPYGEDVVFVANDWHTALLPCYLKSMYQSRGVYMNAKVVFCIHNIAYQGRFAFDDYSLLNLPISFKSSFDFMDGYEKPVKGRKINWMKAAILEAHRVLTVSPYYAQELISGVDRGVELHKYLRMKTVSGIINGMDVQEWNPSTDKYIDIKYDITTVTDAKPLIKEALQAAVGLPVDRDVPVIGFIGRLEEQKGSDILVEAISKFMGLNVQMVILGTGKKKMEAQILELEEKFPGKAVGVAKFNVPLAHMITAGADFIIVPSRFEPCGLIQLHAMRYGTVPIVASTGGLVDTVKDGYTGFHIGRFNVKCEVVDPDDVIATAKAVTRAVAVYGTSAMQEMVKNCMDQDFSWKGPARLWEKVLLSLNVAGSEAGTEGEEIAPLAKENVATP

SEQ ID NO: 52574 - DNA, 1812 bp, Hordeum vulgare
  CDS (1)..(1812)
atggcggctctggccacgtcccagctcgccacctccggcaccgtcctcggcgtcaccgacagattccggcgtccaggttttcagggactcaggccccggaacccggcggatgcggcgcttggtatgaggactatcggagcaagcgccgccccgaagcaaagccggaaagcgcaccgcgggagccggcggtgcctctccgtggtggtgagcgccacgggcagcggcatgaacctcgtgttcgtcggcgccgagatggcgccctggagcaagaccggcggccttggcgatgtcctcggcggcctccccccggccatggccgccaacggtcaccgggtgatggtcgtctccccgcgctacgatcagtacaaggacgcctgggacaccagcgtcatctccgagatcaaggtcgctgacgagtacgagagggtgaggttcttccactgctacaagcgcggagtggaccgcgtgttcatcgaccacccgtggttcctggagaaggtccggggcaagaccaaggagaagatctacgggcccgacgccggcacagactatgaggacaaccagcagcgcttcagccttctctgccaggcagcactcgaggcacccaggatcctcaacctcaacaacaacccctacttttctggtccctacggggaagacgtggtgttcgtgtgcaacgactggcacacgggccttctggcctgctacctcaagagcaactaccagtccaatggcatctacaggacggccaaggtggccttctgcatccacaacatctcgtaccagggccgcttctccttcgacgactttgcgcagctcaacctgcccgacaggttcaagtcgtccttcgacttcattgacggctacgacaagcccgtggaggggcgcaagatcaactggatgaaggccgggatcctgcaggccgacaaggtgctgacggtgagcccctactacgctgaggagctcatctctggcgaagccaggggctgcgagctcgacaacatcatgcgcctcacggggatcaccggaatcgtcaacggcatggacgtcagtgagtgggaccccaccaaggacaagttcctcgccgtcaactacgacatcaccaccgcgttggaggccaaggcgctgaacaaggaggcgctgcaggccgaggtggggctgccggtggacaggaaggtgccgctggtggccttcatcggcaggctggaggagcagaagggccccgacgtgatgatcgccgccatcccggagatcctgaaggaggaggacgtccagatcattctccttggcaccgggaagaagaagtttgagaagctgctcaagagcatggaggagaagttcccgggcaaggtgagggccgtggtcaggttcaacgcgccgctagctcaccagatgatggccggcgccgacttgctcgctgtcaccagccgcttcgagccctgcggcctcatccagctccagggaatgcgctatggaacgccgtgcgtgtgcgcgtccaccggcgggctcgtcgacacgatcgtggagggcaagaccgggttccacatgggccgcctcagcgtcgactgcaacgtggtggagccggcggacgtgaagaaggtggcgaccaccctgaagcgggccgtcaaggtcgtcggcacgccggcgtaccaggagatggtcaagaactgcatgatccaggatctctcctggaagggacctgccaagaactgggaggacgtgcttctggaactgggggtggaggggagcgagccggggatcgtcggcgaggagatcgcgccgctcgccatggagaacgtcgccgctccctga

SEQ ID NO: 52575 - protein, 603 aa, Hordeum vulgare
MAALATSQLATSGTVLGVTDRFRRPGFQGLRPRNPADAALGMRTIGASAAPKQSRKAHRGSRRCLSVVVSATGSGMNLVFVGAEMAPWSKTGGLGDVLGGLPPAMAANGHRVMVVSPRYDQYKDAWDTSVISEIKVADEYERVRFFHCYKRGVDRVFIDHPWFLEKVRGKTKEKIYGPDAGTDYEDNQQRFSLLCQAALEAPRILNLNNNPYFSGPYGEDVVFVCNDWHTGLLACYLKSNYQSNGIYRTAKVAFCIHNISYQGRFSFDDFAQLNLPDRFKSSFDFIDGYDKPVEGRKINWMKAGILQADKVLTVSPYYAEELISGEARGCELDNIMRLTGITGIVNGMDVSEWDPTKDKFLAVNYDITTALEAKALNKEALQAEVGLPVDRKVPLVAFIGRLEEQKGPDVMIAAIPEILKEEDVQIILLGTGKKKFEKLLKSMEEKFPGKVRAVVRFNAPLAHQMMAGADLLAVTSRFEPCGLIQLQGMRYGTPCVCASTGGLVDTIVEGKTGFHMGRLSVDCNVVEPADVKKVATTLKRAVKVVGTPAYQEMVKNCMIQDLSWKGPAKNWEDVLLELGVEGSEPGIVGEEIAPLAMENVAAP

SEQ ID NO: 52576 - DNA, 2263 bp, Zea mays
  CDS (194)..(2011)
cgtcacatccatccatcgaccgatcgatcgccacagccaacaccacccgccgaggcgacgcgacagccgccaggaggaaggaataaactcactgccagccagtgaagggggagaagtgtactgctccgtcgaccagtgcgcgcaccgcccggcagggctgctcatctcgtcgacgaccagtggattaatcggcatggcggctctggccacgtcgcagctcgtcgcaacgcgcgccggcctgggcgtcccggacgcgtccacgttccgccgcggcgccgcgcagggcctgaggggggcccgggcgtcggcggcggcggacacgctcagcatgcggaccagcgcgcgcgcggcgcccaggcaccagcagcaggcgcgccgcgggggcaggttcccgtcgctcgtcgtgtgcgccagcgccggcatgaacgtcgtcttcgtcggcgccgagatggcgccgtggagcaagaccggcggcctcggcgacgtcctcggcggcctgccgccggccatggccgcgaacgggcaccgtgtcatggtcgtctctccccgctacgaccagtacaaggacgcctgggacaccagcgtcgtgtccgagatcaagatgggagacgggtacgagacggtcaggttcttccactgctacaagcgcggagtggaccgcgtgttcgttgaccacccactgttcctggagagggtttggggaaagaccgaggagaagatctacgggcctgtcgctggaacggactacagggacaaccagctgcggttcagcctgctatgccaggcagcacttgaagctccaaggatcctgagcctcaacaacaacccatacttctccggaccatacggggaggacgtcgtgttcgtctgcaacgactggcacaccggccctctctcgtgctacctcaagagcaactaccagtcccacggcatctacagggacgcaaagaccgctttctgcatccacaacatctcctaccagggccggttcgccttctccgactacccggagctgaacctcccggagagattcaagtcgtccttcgatttcatcgacggctacgagaagcccgtggaaggccggaagatcaactggatgaaggccgggatcctcgaggccgacagggtcctcaccgtcagcccctactacgccgaggagctcatctccggcatcgccaggggctgcgagctcgacaacatcatgcgcctcaccggcatcaccggcatcgtcaacggcatggacgtcagcgagtgggaccccagcagggacaagtacatcgccgtgaagtacgacgtgtcgacggccgtggaggccaaggcgctgaacaaggaggcgctgcaggcggaggtcgggctcccggtggaccggaacatcccgctggtggcgttcatcggcaggctggaagagcagaagggccccgacgtcatggcggccgccatcccgcagctcatggagatggtggaggacgtgcagatcgttctgctgggcacgggcaagaagaagttcgagcgcatgctcatgagcgccgaggagaagttcccaggcaaggtgcgcgccgtggtcaagttcaacgcggcgctggcgcaccacatcatggccggcgccgacgtgctcgccgtcaccagccgcttcgagccctgcggcctcatccagctgcaggggatgcgatacggaacgccctgcgcctgcgcgtccaccggtggactcgtcgacaccatcatcgaaggcaagaccgggttccacatgggccgcctcagcgtcgactgtaacgtcgtggagccggcggacgtcaagaaggtggccaccacattgcagcgcgccatcaaggtggtcggcacgccggcgtacgaggagatggtgaggaactgcatgatccaggatctctcctggaagggccctgccaagaactgggagaacgtgctgctcagcctcggggtcgccggcggcgagccaggggtcgaaggcgaggagatcgcgccgctcgccaaggagaacgtggccgcgccctgaagagttcggcctgcagggcccctgatctcgcgcgtggtgcaaagatgttgggacatcttcttatatatgctgtttcgtttatgtgatatggacaagtatgtgtagctgcttgcttgtgctagtgtaatgtagtgtagtggtggccagtggcacaacctaataagcgcatgaactaattgcttgcgtgtgtagttaagtaccgatcggtaattttatattgcgagtaaataaatggacctgtagtggtggagt

SEQ ID NO: 52577 - protein, 605 aa, Zea mays
MAALATSQLVATRAGLGVPDASTFRRGAAQGLRGARASAAADTLSMRTSARAAPRHQQQARRGGRFPSLVVCASAGMNVVFVGAEMAPWSKTGGLGDVLGGLPPAMAANGHRVMVVSPRYDQYKDAWDTSVVSEIKMGDGYETVRFFHCYKRGVDRVFVDHPLFLERVWGKTEEKIYGPVAGTDYRDNQLRFSLLCQAALEAPRILSLNNNPYFSGPYGEDVVFVCNDWHTGPLSCYLKSNYQSHGIYRDAKTAFCIHNISYQGRFAFSDYPELNLPERFKSSFDFIDGYEKPVEGRKINWMKAGILEADRVLTVSPYYAEELISGIARGCELDNIMRLTGITGIVNGMDVSEWDPSRDKYIAVKYDVSTAVEAKALNKEALQAEVGLPVDRNIPLVAFIGRLEEQKGPDVMAAAIPQLMEMVEDVQIVLLGTGKKKFERMLMSAEEKFPGKVRAVVKFNAALAHHIMAGADVLAVTSRFEPCGLIQLQGMRYGTPCACASTGGLVDTIIEGKTGFHMGRLSVDCNVVEPADVKKVATTLQRAIKVVGTPAYEEMVRNCMIQDLSWKGPAKNWENVLLSLGVAGGEPGVEGEEIAPLAKENVAAP

SEQ ID NO: 52578 - DNA, 2287 bp, Sorghum bicolor
  CDS (207)..(2033)
caagaaataaaccactgccagccagtgacacggatcggagtccgacggacggacgcgcgcaccacgccggccggccgctcgatcgcatcgccgggatcgatactgctttgaacgggcgcctcacagtgctgctagctcctccatcgatcagctactgcacggccgcgccccgccggctgctctcatctcatccatcaggcatcagcatgtcgactctagccacgtcgcagctcgtcgccacgcacgccggcctaggcgtcccggacgcgtccatgttccgccgcggcggcgtgcagggcctgagggcggcggcccgggcatcggcggcagcaggggacgcgctcagcatgcggaccagcgcgtgtccggctccgaggcagcagccggcggcgcgccgcgggggccgcggaggaaggttcccgtcgctcgtcgtgtgcgccaccgccggcatgaacgtcgtcttcgttggcgccgagatggcgccctggagcaagaccggcggcctcggcgacgtcctcggcggcctgccgccggccatggccgcgaatgggcaccgtgtcatggtcgtctctccccgctacgaccagtacaaggacgcctgggacaccagcgtcgtgtccgagatcaagatgggagacgggtacgagacggtgaggtttttccactgctacaagcgcggagtcgaccgtgtgttcattgaccacccgctgttccttgagagggtttggggaaagacggaggagaagatctacgggcctgacgctggaacggactacaaggacaaccagctgcgtttcagcctgctatgccaggcggcacttgaagctcctaggatcctaagcctcaacaacaacccatacttctctggaccatatggggaggatgtcgtgttcgtctgcaatgactggcataccggccctctgtcatgctacctcaagagcaactaccagtccaatggcatctacaaggacgcaaagacggctttctgcatccacaacatctcctaccagggcaggttcgccttctcggacttcccagagttgaacctccctgagagattcaagtcatccttcgatttcatcgacggctacgagaagcccgtggaaggccggaagatcaactggatgaaggccgggatccttgaagccgacagggtcctcaccgtgagcccctactacgcggaggagctcatctccggcatcgccaggggctgcgagctcgacaacatcatgcgcctcaccggcatcaccgggatcgtcaacggcatggacgtcagcgagtgggatcccagcaaggacaagtacatcgccgtcaaatacgacgtgtcaacggctgtcgaggcaaaggcactgaacaaggaggcgctgcaggccgaggtcgggctcccggtggaccggaagatcccgctggtggcgttcatcggcaggctggaggagcagaagggccccgacgtcatggcggccgccatcccgctgctcatggaggaggacatacagatcgttctgctgggcactggcaagaagaagttcgagcgcatgctgatgagcgccgaggagaagtaccccgacaaggtgcgcgccgtggtcaagttcaacgcggcgctggcacaccacatcatggccggcgccgacctgctggccgtcaccagccgcttcgagccctgcggcctcatccagctccaggggatgcgatacggaacgccctgcgcctgcgcgtccaccggcggactcgtcgacaccatcatcgaaggcaagacaggattccacatgggccgcctcagcgtcgactgcaacgtcgtggagccggccgatgtgaagaaggtggcgaccaccttgaagcgtgccatcaaggtggtcggcacgccggcgtacgaggagatggtcaagaactgcatgatccaggatctgtcctggaagggccctgccaagaactgggagaacgtgctgctcagcctgggtgtcgccggcggcgagccggggatcgaaggcgaggagatcgcgccgctcgccaaggagaacgtggccgcaccctgaaggaggcgaggacccctgatatcgcgtgtagaacaaagatgatgaatcaagtgaacatgcatcttcgtatatatatgtgtcgtctatgagtatatatgaagaactatatagctgcttgtggtagtgtaatgtagtggtggccagtggcacaacctaataataagtacatgaactagttgcttgtgtgtgtaattaagtaccgatcggcaataatatattgctagtgaataaatggacttatatttgcgaagtca

SEQ ID NO: 52579 - protein, 608 aa, Sorghum bicolor
MSTLATSQLVATHAGLGVPDASMFRRGGVQGLRAAARASAAAGDALSMRTSACPAPRQQPAARRGGRGGRFPSLVVCATAGMNVVFVGAEMAPWSKTGGLGDVLGGLPPAMAANGHRVMVVSPRYDQYKDAWDTSVVSEIKMGDGYETVRFFHCYKRGVDRVFIDHPLFLERVWGKTEEKIYGPDAGTDYKDNQLRFSLLCQAALEAPRILSLNNNPYFSGPYGEDVVFVCNDWHTGPLSCYLKSNYQSNGIYKDAKTAFCIHNISYQGRFAFSDFPELNLPERFKSSFDFIDGYEKPVEGRKINWMKAGILEADRVLTVSPYYAEELISGIARGCELDNIMRLTGITGIVNGMDVSEWDPSKDKYIAVKYDVSTAVEAKALNKEALQAEVGLPVDRKIPLVAFIGRLEEQKGPDVMAAAIPLLMEEDIQIVLLGTGKKKFERMLMSAEEKYPDKVRAVVKFNAALAHHIMAGADLLAVTSRFEPCGLIQLQGMRYGTPCACASTGGLVDTIIEGKTGFHMGRLSVDCNVVEPADVKKVATTLKRAIKVVGTPAYEEMVKNCMIQDLSWKGPAKNWENVLLSLGVAGGEPGIEGEEIAPLAKENVAAP

SEQ ID NO: 52580 - DNA, 2329 bp, Arabidopsis thaliana
  CDS (67)..(2025)
aacaaccagacgaaatcaaacataaatctgtaacagtcgaagaaactctcactctttaattgatcaatggcgtctcttcaaatcagtggctccgttaaattcgagccgttcgttggattcaaccggatccgccatttccgtccgatcgccagtctcggatttcctcgttttcgacggagattcagtatcggacggtcattgttgcttcgtcgttcttcttccttctccggtgactctcgtgagtctgatgaagagagatttatcacagacgcagagagagatggttctggctccgttcttggctttcagctcactcctcctggtgatcaacaaacagttagcactagcacaggagaaattacacatcatgaagagaagaaagaggctattgatcaaattgtaatggctgactttggcgtacctggaaatagagctgttgaagaaggagctgcagaggttgggattccgagtggaaaagctgaagttgtcaataaccttgttttcgttacatccgaggcggctccttactcgaaaacaggaggattaggagatgtttgtggttctttgccaatagctttagctggtcgtgggcatcgtgttatggtcatttctcctcggtacttaaatggaactgctgcagacaagaactatgcccgggctaaggatttggggatacgtgtaacagtaaattgctttggtggttctcaagaagtttccttctatcatgagtatagagatggtgttgattgggtttttgttgatcacaaatcctaccatagacctggtaatccctacggagatagtaaaggagcctttggtgacaatcagtttcggttcacgttactttgccatgctgcatgtgaagcccctctcgtgctgcctcttggagggttcacttatggagagaaatcactcttccttgtcaatgactggcatgccggccttgttcccatacttttggccgcaaagtatcgcccatatggagtttataaggatgcaagaagcattctcattatccataacctcgctcatcagggggtggagccagcagctacatacaccaacttgggattgccttcggaatggtatggagcagtcgggtgggtatttccaacgtgggcaagaactcatgcccttgacaccggtgaagcggttaatgttctcaagggtgctattgtgacctctgaccgtatcattactgtgagccagggctatgcatgggaaatcactactgttgaaggtggttatggtcttcaagatttgctttctagtcggaaaagtgttataaatgggatcacaaatggaattaatgttgatgaatggaatccatccacggatgaacacattcctttccattactctgctgatgatgtctccgagaagatcaaatgcaagatggcactacaaaaggaattgggtctccccattaggcctgaatgtcctatgattggttttataggaagacttgattaccagaagggcattgatctgatccaaaccgctggtcctgatctcatggtggatgacattcaattcgtcatgcttggttcgggtgacccaaaatatgaaagctggatgagaagtatggaggaaacatacagagacaaattccgtggttgggttgggttcaatgtccccatctctcatcgaatcacagccggctgtgacattcttctcatgccgtcgagattcgagccctgtggtttaaatcagctatacgcaatgagatacggaaccattccagttgttcatggcactggaggactcagagatacggttgagaatttcaacccttatgcagaaggtggagctggtactggtacagggtgggtcttcactcccttgtcgaaagatagcatggtctcggccttgaggttggctgcagcaacgtacagagagtataaacagtcatgggaaggattgatgagaagaggaatgacccgaaactactcttgggaaaacgctgccgttcagtatgagcaagtttttcagtgggttttcatggaccctccctatgtcagctagaccaaacataaactgaaccaaaccgagttggaccggatcagaccagacctgaccaatcagatggagagtgtggaacctccttttccggctatcgaaaatctatggttttcaacgtttccacattaaaccgtgtatctatctatgtctattatcttaaactcgtatggtgtttgttttggggaggtatagaattttagttatgaggttataatatgtttttctttcggttatgacatgtgtgtcttactcttttcctaattatctgaatctgaactagatttctttcgaaaaaaaaaaaaaaaag

SEQ ID NO: 52581 - protein, 652 aa, Arabidopsis thaliana
MASLQISGSVKFEPFVGFNRIRHFRPIASLGFPRFRRRFSIGRSLLLRRSSSFSGDSRESDEERFITDAERDGSGSVLGFQLTPPGDQQTVSTSTGEITHHEEKKEAIDQIVMADFGVPGNRAVEEGAAEVGIPSGKAEVVNNLVFVTSEAAPYSKTGGLGDVCGSLPIALAGRGHRVMVISPRYLNGTAADKNYARAKDLGIRVTVNCFGGSQEVSFYHEYRDGVDWVFVDHKSYHRPGNPYGDSKGAFGDNQFRFTLLCHAACEAPLVLPLGGFTYGEKSLFLVNDWHAGLVPILLAAKYRPYGVYKDARSILIIHNLAHQGVEPAATYTNLGLPSEWYGAVGWVFPTWARTHALDTGEAVNVLKGAIVTSDRIITVSQGYAWEITTVEGGYGLQDLLSSRKSVINGITNGINVDEWNPSTDEHIPFHYSADDVSEKIKCKMALQKELGLPIRPECPMIGFIGRLDYQKGIDLIQTAGPDLMVDDIQFVMLGSGDPKYESWMRSMEETYRDKFRGWVGFNVPISHRITAGCDILLMPSRFEPCGLNQLYAMRYGTIPVVHGTGGLRDTVENFNPYAEGGAGTGTGWVFTPLSKDSMVSALRLAAATYREYKQSWEGLMRRGMTRNYSWENAAVQYEQVFQWVFMDPPYVS

SEQ ID NO: 52582 - DNA, 2360 bp, Solanum tuberosum
  CDS (68)..(1993)
agattttctatattgaaagattttgtctttacatgattcttgattttacagcaggtgtcaataccaaatggggtctctgcaaacacccacaaatcttagcaataagtcatgtttatgtgtgtcagggagagttgtgaagggtttgagggtagaaagacaagtggggttggggttttcttggttgttgaagggacgaagaaacagaaaagttcaatctttgtgtgttacaagtagtgtttcagatggttcatcaattgctgaaaataagaatgtgtcagaagggcttcttttgggtgctgagagagatggttctggctctgttgttggttttcaattgattccacattctgttgcaggagatgcaacaatggtagaatctcatgatattgtagccaatgatagagatgacttgagtgaggatactgaggagatggaggaaaccccaatcaaattaactttcaatatcatttttgttactgctgaagcagctccatattctaagactggtggattaggagatgtttgtggttctttgccaatggcactagctgctcggggtcatcgtgtaatggtcgtttcacctaggtatttgaatggaggtccttcagatgaaaagtacgccaatgctgttgaccttgatgtgcgggccactgtccattgctttggtgatgcacaggaagtagccttctaccatgaatacagggcaggtgttgattgggtatttgtggaccactcttcttactgcagacctggaacgccatatggtgatatttatggtgcatttggtgataatcagtttcgcttcactttgctttctcacgcagcatgtgaagcgccattggttcttccactgggagggttcacttatggagagaagtgcttgtttctcgctaatgattggcatgctgccctggttcctttacttttagcggccaagtatcgtccttatggtgtttacaaggatgctcgtagtattgtcgcaatacacaacattgcacatcagggagtggagcctgcagtaacctacaataatttgggtttgcctccacaatggtatggagcagttgaatggatatttcccacatgggcaagggcgcatgcgcttgacactggtgaaacagtgaacgttttgaaaggggcaatagcagttgctgatcggatactgacagttagccagggatactcatgggaaataacaactcctgaagggggatatgggctacatgagctgttgagcagtagacagtctgttcttaatggaattactaatggaatagatgttaatgattggaacccgtcgacagatgagcatattgcttcgcattactccatcaatgacctctccggaaaggttcagtgcaagactgatctgcaaaaggaactgggccttccaattcgacctgattgtcctctgattggatttattggaaggctggactaccagaaaggtgttgacataatcctgtcagcaattccagaacttatgcagaatgatgtccaagttgtaatgcttggatctggtgagaaacaatatgaagactggatgagacatacagaaaatctttttaaagacaaatttcgtgcttgggttggatttaatgttccagtttctcataggataacagcaggatgcgacatactattgatgccctcaagattcgaaccgtgtggcttaaaccaattgtatgcaatgagatatggcaccatacctattgttcatagcacggggggcctaagagacacagtgaaggattttaatccatatgctcaagaaggaataggtgaaggtaccgggtggacattttctcctctaacgagtgaaaagttgcttgatacactgaagctggcaatcgggacttatacagaacataagtcatcttgggagggattgatgaggagaggtatgggaagggactattcctgggaaaatgcagccattcaatatgaacaagttttcacctgggcctttatagatcctccatatgtcagatgatttatcaagaaagattgcaaacgggatacatcattaaactatacgcggagcttttggtgctattagctactgtcattgggcgcggaatgtttgtggttctttctgattcagagagatcaagttagttccaaagacatacgtagcctgtccctgtctgtgagggagtaaaactacaaaaggcaattagaaaccaccaagaactggctcctttgggagaagagtggaaatatgtaaaaaagaattttgagtttaatgtcaattgattaattgttctcatttttaaaaaaaacatctcatctcatacaatatataaaattgatcatgattgatgaaaaaaaaaaaaaaaaaaaaaaaaaaaaaaaaaaaa

SEQ ID NO: 52583 - protein, 641 aa, Solanum tuberosum
MGSLQTPTNLSNKSCLCVSGRVVKGLRVERQVGLGFSWLLKGRRNRKVQSLCVTSSVSDGSSIAENKNVSEGLLLGAERDGSGSVVGFQLIPHSVAGDATMVESHDIVANDRDDLSEDTEEMEETPIKLTFNIIFVTAEAAPYSKTGGLGDVCGSLPMALAARGHRVMVVSPRYLNGGPSDEKYANAVDLDVRATVHCFGDAQEVAFYHEYRAGVDWVFVDHSSYCRPGTPYGDIYGAFGDNQFRFTLLSHAACEAPLVLPLGGFTYGEKCLFLANDWHAALVPLLLAAKYRPYGVYKDARSIVAIHNIAHQGVEPAVTYNNLGLPPQWYGAVEWIFPTWARAHALDTGETVNVLKGAIAVADRILTVSQGYSWEITTPEGGYGLHELLSSRQSVLNGITNGIDVNDWNPSTDEHIASHYSINDLSGKVQCKTDLQKELGLPIRPDCPLIGFIGRLDYQKGVDIILSAIPELMQNDVQVVMLGSGEKQYEDWMRHTENLFKDKFRAWVGFNVPVSHRITAGCDILLMPSRFEPCGLNQLYAMRYGTIPIVHSTGGLRDTVKDFNPYAQEGIGEGTGWTFSPLTSEKLLDTLKLAIGTYTEHKSSWEGLMRRGMGRDYSWENAAIQYEQVFTWAFIDPPYVR

SEQ ID NO: 52584 - DNA, 2631 bp, Solanum tuberosum
  CDS (64)..(2367)
ggttcttgaaatcttggattcctattatccctgtgaacttcatcttttgtgatttctactgtaatggagaattccattcttcttcatagtggaaatcagttccaccccaacttaccccttttagcacttaggcccaaaaaattatctctaattcatggctccagtagagagcaaatgtggaggatcaagcgcgttaaagcaacaggtgaaaattctggggaagctgcaagtgctgatgaatcgaatgatgccttacaggttacaattgaaaagagcaaaaaggttttagccatgcaacaggacctacttcaacagattgcagaaagaagaaaagtagtctcttcaataaaaagcagtcttgccaatgccaaaggtacttatgatggtgggagtggtagcttatcagatgttgatatccctgacgtggataaagattataatgttactgtacctagtactgctgctactccaattactgatgtcgataaaaatacaccgcctgctataagccaagattttgttgaaagtaaaagagaaatcaaaagggacctggccgatgaaagggcacccccactgtcgagatcatctatcacagccagtagccagatttcctctactgtaagttccaaaagaacgttgaatgtccctccagaaactccgaagtccagtcaagagacacttttggatgtgaattcacgcaaaagtttagtagatgttcctggaaagaagatccagtcttatatgccttcattacgtaaagaatcctcagcatcccatgtggaacagaggaatgaaaatcttgaaggatcaagtgctgaggcaaacgaagagactgaagatcctgtgaatatagatgagaaaccccctccattggcaggaacaaatgttatgaacattattttggtggcttcagaatgcgctccatggtctaaaacaggtgggcttggagatgttgctggagcattacccaaagctttggctcgacgtggccacagagttatggttgtggcacctcgttatgacaactatcctgaacctcaagattctggtgtaagaaaaatttataaagttgatggtcaggatgtggaagtgacttacttccaagcttttattgatggtgtggattttgttttcattgacagtcatatgtttagacacattgggaacaacatttacggagggaaccgtgtggatattttaaaacgcatggttttattttgcaaagcagcgattgaggttccttggcatgttccatgtggtggggtctgctatggagatggaaatttagtgttcattgctaatgattggcatactgctttattgccagtatatctgaaagcttattatcgtgacaatggaattatgaactatacaagatctgtcctggtgattcataacatcgctcatcagggtcgtggtcctttggaggatttttcatatgtagatcttccaccacactatatggaccctttcaagttgtatgacccagtaggaggtgagcatttcaacatttttgcggctggtctaaagacagcagatcgtgtagttacagttagtcatggatattcatgggaactaaagacttcccaaggtggttggggattgcatcagataattaatgagaacgattggaaattacagggtattgtgaatgggattgatacaaaagagtggaaccctgagttggacgttcacttacagtcagatggttacatgaactactccttggacacgctacagactggcaagcctcaatgtaaagctgcattgcagaaggaacttggtttaccagttcgtgatgatgtcccactgatcggtttcattgggaggcttgacccacaaaagggtgttgatctgattgctgaggcagtgccttggatgatgggtcaggatgtacaactggtcatgttggggacggggaggcgtgaccttgaacagatgctaaggcaatttgagtgtcaacacaatgataaaattagaggatgggttggtttctctgtgaagacttctcatcgtataactgctggtgcagacattctgctcatgccttctagatttgagccttgcggactgaaccagctttatgcaatgaaatatgggactattcctgttgttcatgcagtaggaggactcagagatactgtgcagccctttgatccttttaatgagtcaggactggggtggaccttcagtagggctgaagctagccagctgatccacgcattaggaaattgcttactgacttatcgtgagtacaaaaagagttgggaggggattcagacacgttgtatgacacaagacttaagttgggataatgctgctcagaactatgaagaagttctcatcgctgctaagtatcagtggtgaggttcattacttgtagatatttggggattttggccattgtatcaagttctaatgatgggatttcagagacatgtttctggtatcgacacgagaggatgcatgcaacaagttggctaactatcatactactaccacgtcaggaatgattgccgcacttgatcatgtaatcatgtatatactctattttgtttgcaaaatgtagttacatgttgcaatttctactctatatttgttgaaagttttagtgtcaaaaaaaaaaaaaaa

SEQ ID NO: 52585 - protein, 767 aa, Solanum tuberosum
MENSILLHSGNQFHPNLPLLALRPKKLSLIHGSSREQMWRIKRVKATGENSGEAASADESNDALQVTIEKSKKVLAMQQDLLQQIAERRKVVSSIKSSLANAKGTYDGGSGSLSDVDIPDVDKDYNVTVPSTAATPITDVDKNTPPAISQDFVESKREIKRDLADERAPPLSRSSITASSQISSTVSSKRTLNVPPETPKSSQETLLDVNSRKSLVDVPGKKIQSYMPSLRKESSASHVEQRNENLEGSSAEANEETEDPVNIDEKPPPLAGTNVMNIILVASECAPWSKTGGLGDVAGALPKALARRGHRVMVVAPRYDNYPEPQDSGVRKIYKVDGQDVEVTYFQAFIDGVDFVFIDSHMFRHIGNNIYGGNRVDILKRMVLFCKAAIEVPWHVPCGGVCYGDGNLVFIANDWHTALLPVYLKAYYRDNGIMNYTRSVLVIHNIAHQGRGPLEDFSYVDLPPHYMDPFKLYDPVGGEHFNIFAAGLKTADRVVTVSHGYSWELKTSQGGWGLHQIINENDWKLQGIVNGIDTKEWNPELDVHLQSDGYMNYSLDTLQTGKPQCKAALQKELGLPVRDDVPLIGFIGRLDPQKGVDLIAEAVPWMMGQDVQLVMLGTGRRDLEQMLRQFECQHNDKIRGWVGFSVKTSHRITAGADILLMPSRFEPCGLNQLYAMKYGTIPVVHAVGGLRDTVQPFDPFNESGLGWTFSRAEASQLIHALGNCLLTYREYKKSWEGIQTRCMTQDLSWDNAAQNYEEVLIAAKYQW

SEQ ID NO: 52586 - DNA, 2928 bp, Oryza sativa
  CDS (1)..(2928)
atggcggcttgcggcgccgcggcggcggagtattcagctctcctgtccctctcatgtgggcctatcactcgccgccgtttcgccgtctcctgccgcgctcgaccgcccggcaacctcagtgcacagcagaagaagaagcgagggaaaaacattgctccaaaacagcgctcttcaaatgcaaaactcttgcttactactgaggaaaatggacagcttccaagtaccagtttgaggacttctatggaacgtcctcagaagagtacatccagtgaggacgataccaatggggctattagccagatagatgaaaaaattgcagccattggtaatgaacagcaagagaggtcaaaggataaacatttcgaatcagactttcaacttgaagattttggggaaatgatacaaaacatggaaaagaatattctgctcctaaatcaagctcgtcttcaagcaattgaagatgttgacaaaattcttactgaaaaggaagctttgcagaaaaaggttgacactctagagatgaatttgtcaaaagcacttgcaaccaaagggaacataaatacagatatccctggtgatcatttagagaaatttacaaaagaaattttgatagaaagtgctctaagtggaggcaatccagcacatttgtgtgagtctccacttttcatggagctgactgttctaaaagaagagaatatgctacttaaggctgacgcacaatttcttaaagcaaagattgttgagtttgctgaaacagaggaattcctattcaaattggagaaagaaaggtcactgttagacgctacagttagggagctggaagctaggtttctagttgctcaaactgatatctggaaagttgtccctctgcaatatgatgtttggatggagaaagtagaaaatctgcaacacatgcttggatgtttgaaaaatcatgtagagaagtatgctgcattgttggatcagcatgatgatctgcatgacaagattgatgagctagaagcatcactaaaagaagggaaaacatctgagttttctccttatgttgttgaacttctgcaacagaagttgaaagcagcaaaaagccatcaccaagcaggccatcaagaaacaaacactcacattcaagtatatcagcagttaactgaggaatttcaagataacctaggtaaactaatagaagaaagtggcagactggagcattctgcaaatagtatgccatcagaattctggagtcacatcctgctcatgattgatggttggttccttgagcggaaaataccaaatactgatgcacgtatgctgagagaaatggcatggaagagagatgaccgtatctgtgaagcctactttgcttgcaagggtgcaaaagaaagtgatgttatggaaactttcctaaagctatcgttatcaggaaacagtcaatgcagttctggcttgcacattgtccatatagcagcagagatggctccagtggcaaaggttggcggtctggcagatgtagttgctggtcttggcaaggcacttcagactaagggacatttagtagagattgttcttcccaaatacgactgtatgcaacttgaccagattactaatcttaaggttttagatgttgtcatacaatcctattttgatggaaatctattcagcaacaacgtgtggacaggaactgttgaaggtcttccagtctattttattgagccacagcatccttcaaaattcttctggagggcccaatactatggagagcatgacgattttaaacgttattcatactttagccgtgcagcactggaattactttaccaatctgggaagaaaattgatataatccactgccatgactggcaaactgcatttgttgcacctctatattgggatatatatgcaactcgaggcttcagctcagctagaatttgtttcacttgccacaacttcgaataccaaggtacagcacctgctcctgatttatcatattgcggccttgatgttgagcagttggatagaccagacaggatgcaagacaatgcacatggaagaataaatgttgccaagggtggaattgtttattccaatattgtgacaactgtatcaccaacatatgctttagaagtgcgctcagagggtggtcgtggtctccaagatacacttaaaatgcattccaggaaatttgtggggatacttaatggaatcgacacaggaacatggaacccttccacagacagatttcttgctgtgcaatatagtgctactgatcttcaggggaaagcagcaaacaaagcatttctcaggaagcagctagggctgtattctgaggatgcctctcaaccactggtagcctgcattacgaggctagttcctcaaaagggtctacatcttatcaggcatgcaatatacaaaacagctgagttaggaggacagtttgtactcctgggttcaagtccagttccacatattcagagggaatttgagggtgttgcagaccaattccagaagaataacaatattaggttaattctgaaatatgatgaagctttgtctcattgtatttatgcggcatctgacatgtttatcattccatcaatgtttgagccttgtggccttactcagatgatagctatgagatatggttctgtgccaattgttcgacaaactggtggattgtgtgatagtgtttttgattttgatgatgaaactatacctgtggagctgcggaatggctttacatttgctaggactgatgagcaggatctaagcagttgcttggaaagggcattcagctactacagcagaaaacctatggtttggaaacagttagtgcagaaggatatgcagattgatttcagctgggattctccagcttcacagtacgaaaacctttatcagagtgctgttgctcaggcaaggggagcggctcaaacataa

SEQ ID NO: 52587 - protein, 975 aa, Oryza sativa
MAACGAAAAEYSALLSLSCGPITRRRFAVSCRARPPGNLSAQQKKKRGKNIAPKQRSSNAKLLLTTEENGQLPSTSLRTSMERPQKSTSSEDDTNGAISQIDEKIAAIGNEQQERSKDKHFESDFQLEDFGEMIQNMEKNILLLNQARLQAIEDVDKILTEKEALQKKVDTLEMNLSKALATKGNINTDIPGDHLEKFTKEILIESALSGGNPAHLCESPLFMELTVLKEENMLLKADAQFLKAKIVEFAETEEFLFKLEKERSLLDATVRELEARFLVAQTDIWKVVPLQYDVWMEKVENLQHMLGCLKNHVEKYAALLDQHDDLHDKIDELEASLKEGKTSEFSPYVVELLQQKLKAAKSHHQAGHQETNTHIQVYQQLTEEFQDNLGKLIEESGRLEHSANSMPSEFWSHILLMIDGWFLERKIPNTDARMLREMAWKRDDRICEAYFACKGAKESDVMETFLKLSLSGNSQCSSGLHIVHIAAEMAPVAKVGGLADVVAGLGKALQTKGHLVEIVLPKYDCMQLDQITNLKVLDVVIQSYFDGNLFSNNVWTGTVEGLPVYFIEPQHPSKFFWRAQYYGEHDDFKRYSYFSRAALELLYQSGKKIDIIHCHDWQTAFVAPLYWDIYATRGFSSARICFTCHNFEYQGTAPAPDLSYCGLDVEQLDRPDRMQDNAHGRINVAKGGIVYSNIVTTVSPTYALEVRSEGGRGLQDTLKMHSRKFVGILNGIDTGTWNPSTDRFLAVQYSATDLQGKAANKAFLRKQLGLYSEDASQPLVACITRLVPQKGLHLIRHAIYKTAELGGQFVLLGSSPVPHIQREFEGVADQFQKNNNIRLILKYDEALSHCIYAASDMFIIPSMFEPCGLTQMIAMRYGSVPIVRQTGGLCDSVFDFDDETIPVELRNGFTFARTDEQDLSSCLERAFSYYSRKPMVWKQLVQKDMQIDFSWDSPASQYENLYQSAVAQARGAAQT

SEQ ID NO: 52588 - DNA, 2919 bp, Oryza sativa
  CDS (1)..(2919)
atggcggcttgcggcgccgcggcggcggagtattcagctctcctgtccctctcatgtgggcctatcactcgccgccgtttcgccgtctcctgccgcgctcgaccgcccggcaacctcagtgcacagcagaagaagaagcgagggaaaaacattgctccaaaacagcgctcttcaaatgcaaaactcttgcttactactgaggaaaatggacagcttccaagtaccagtttgaggacttctatggaacgtcctcagaagagtacatccagtgaggacgataccaatggggctattagccagatagatgaaaaaattgcagccattggtaatgaacagcaagagaggtcaaaggataaacatttcgaatcagactttcaacttgaagattttggggaaatgatacaaaacatggaaaagaatattctgctcctaaatcaagctcgtcttcaagcaattgaagatgttgacaaaattcttactgaaaaggaagctttgcagaaaaaggttgacactctagagatgaatttgtcaaaagcacttgcaaccaaagggaacataaatacagatatccctggtgatcatttagagaaatttacaaaagaaattttgatagaaagtgctctaagtggaggcaatccagcacatttgtgtgagtctccacttttcatggagctgactgttctaaaagaagagaatatgctacttaaggctgacgcacaatttcttaaagcaaagattgttgagtttgctgaaacagaggaattcctattcaaattggagaaagaaaggtcactgttagacgctacagttagggagctggaagctaggtttctagttgctcaaactgatatctggaaagttgtccctctgcaatatgatgtttggatggagaaagtagaaaatctgcaacacatgcttggatgtttgaaaaatcatgtagagaagtatgctgcattgttggatcagcatgatgatctgcatgacaagattgatgagctagaagcatcactaaaagaagggaaaacatctgagttttctccttatgttgttgaacttctgcaacagaagttgaaagcagcaaaaagccatcaccaagcaggccatcaagaaacaaacactcacattcaagtatatcagcagttaactgaggaatttcaagataacctaggtaaactaatagaagaaagtggcagactggagcattctgcaaatagtatgccatcagaattctggagtcacatcctgctcatgattgatggttggttccttgagcggaaaataccaaatactgatgcacgtatgctgagagaaatggcatggaagagagatgaccgtatctgtgaagcctactttgcttgcaagggtgcaaaagaaagtgatgttatggaaactttcctaaagctatcgttatcaggaaacagttctggcttgcacattgtccatatagcagcagagatggctccagtggcaaaggttggcggtctggcagatgtagttgctggtcttggcaaggcacttcagactaagggacatttagtagagattgttcttcccaaatacgactgtatgcaacttgaccagattactaatcttaaggttttagatgttgtcatacaatcctattttgatggaaatctattcagcaacaacgtgtggacaggaactgttgaaggtcttccagtctattttattgagccacagcatccttcaaaattcttctggagggcccaatactatggagagcatgacgattttaaacgttattcatactttagccgtgcagcactggaattactttaccaatctgggaagaaaattgatataatccactgccatgactggcaaactgcatttgttgcacctctatattgggatatatatgcaactcgaggcttcagctcagctagaatttgtttcacttgccacaacttcgaataccaaggtacagcacctgctcctgatttatcatattgcggccttgatgttgagcagttggatagaccagacaggatgcaagacaatgcacatggaagaataaatgttgccaagggtggaattgtttattccaatattgtgacaactgtatcaccaacatatgctttagaagtgcgctcagagggtggtcgtggtctccaagatacacttaaaatgcattccaggaaatttgtggggatacttaatggaatcgacacaggaacatggaacccttccacagacagatttcttgctgtgcaatatagtgctactgatcttcaggggaaagcagcaaacaaagcatttctcaggaagcagctagggctgtattctgaggatgcctctcaaccactggtagcctgcattacgaggctagttcctcaaaagggtctacatcttatcaggcatgcaatatacaaaacagctgagttaggaggacagtttgtactcctgggttcaagtccagttccacatattcagagggaatttgagggtgttgcagaccaattccagaagaataacaatattaggttaattctgaaatatgatgaagctttgtctcattgtatttatgcggcatctgacatgtttatcattccatcaatgtttgagccttgtggccttactcagatgatagctatgagatatggttctgtgccaattgttcgacaaactggtggattgtgtgatagtgtttttgattttgatgatgaaactatacctgtggagctgcggaatggctttacatttgctaggactgatgagcaggatctaagcagttgcttggaaagggcattcagctactacagcagaaaacctatggtttggaaacagttagtgcagaaggatatgcagattgatttcagctgggattctccagcttcacagtacgaaaacctttatcagagtgctgttgctcaggcaaggggagcggctcaaacataa

SEQ ID NO: 52589 - protein, 972 aa, Oryza sativa
MAACGAAAAEYSALLSLSCGPITRRRFAVSCRARPPGNLSAQQKKKRGKNIAPKQRSSNAKLLLTTEENGQLPSTSLRTSMERPQKSTSSEDDTNGAISQIDEKIAAIGNEQQERSKDKHFESDFQLEDFGEMIQNMEKNILLLNQARLQAIEDVDKILTEKEALQKKVDTLEMNLSKALATKGNINTDIPGDHLEKFTKEILIESALSGGNPAHLCESPLFMELTVLKEENMLLKADAQFLKAKIVEFAETEEFLFKLEKERSLLDATVRELEARFLVAQTDIWKVVPLQYDVWMEKVENLQHMLGCLKNHVEKYAALLDQHDDLHDKIDELEASLKEGKTSEFSPYVVELLQQKLKAAKSHHQAGHQETNTHIQVYQQLTEEFQDNLGKLIEESGRLEHSANSMPSEFWSHILLMIDGWFLERKIPNTDARMLREMAWKRDDRICEAYFACKGAKESDVMETFLKLSLSGNSSGLHIVHIAAEMAPVAKVGGLADVVAGLGKALQTKGHLVEIVLPKYDCMQLDQITNLKVLDVVIQSYFDGNLFSNNVWTGTVEGLPVYFIEPQHPSKFFWRAQYYGEHDDFKRYSYFSRAALELLYQSGKKIDIIHCHDWQTAFVAPLYWDIYATRGFSSARICFTCHNFEYQGTAPAPDLSYCGLDVEQLDRPDRMQDNAHGRINVAKGGIVYSNIVTTVSPTYALEVRSEGGRGLQDTLKMHSRKFVGILNGIDTGTWNPSTDRFLAVQYSATDLQGKAANKAFLRKQLGLYSEDASQPLVACITRLVPQKGLHLIRHAIYKTAELGGQFVLLGSSPVPHIQREFEGVADQFQKNNNIRLILKYDEALSHCIYAASDMFIIPSMFEPCGLTQMIAMRYGSVPIVRQTGGLCDSVFDFDDETIPVELRNGFTFARTDEQDLSSCLERAFSYYSRKPMVWKQLVQKDMQIDFSWDSPASQYENLYQSAVAQARGAAQT

SEQ ID NO: 52590 - DNA, 2085 bp, Oryza sativa
  CDS (1)..(2085)
atgtcgggggcaatcgcttcctcgccggcggctactctcttcctcgctggctcctcctcctcttcgccgcggcgcaggcggagcagggtgagcggggtttggtggcacttgtatggtggcacggggctgcggttgcattgggagcggcggggtttggttcgggacggagccgtcgtgtgctcggcgtcggccgccggtggtgaggatggcgtcgcgaaggcgaagacgaagtcagcggggagctcgaaggcggtcgctgtgcagggcagcacggccaaggctgatcatgttgaggattcagtttcatcacccaaatacgtgaaacctgccgttgcgaagcaaaatggagaggttgtgagcagagctaccaaatctgatgcaccagtgtctaaacccaaagttgacccgtcagttcctgcttccaaggctgaagctgatggtaatgcacaagctgtggaatcgaaggctgcactggacaagaaggaagacgtcggtgttgctgaaccgttggaagctaaggctgatgctggtggagatgcaggtgcagtaagctctgcagatgatagtgagaacaaggaatctggtccattggcagggccaaatgtgatgaatgtcattgtggtggcttctgaatgttctcctttctgtaaaacaggtggtcttggagatgttgtgggtgctttgcctaaggctctggcaagaagaggacatcgtgttatggttgtgataccaagatacggagaatatgcagaagccaaggatctaggtgtccgcaaacgttacagggtagctggacaggattcagaagtgagttattttcatgcttttatcgatggtgttgattttgtgtttctagaggcccctccctttcgacaccggcacaatgatatttatggaggagaaagatttgatgttttgaagcgtatgattttgttctgcaaagctgctgttgaggttccttggtttgctccatgtggtggttccatctacggtgatggcaatttagtcttcattgcaaatgattggcatactgcacttttacccgtatatttgaaggcatattaccgagataatggcttgatgcagtatactcgctctgttcttgtgatacacaacattgctcatcagggtcgtggccctgtagatgacttcgccacgatggacttgcccgagcactacatcgatcatttcagactgtacgaccccgtcggcggtgagcacagcaacgtgttcgccgctggcctgaagatggctgaccgcgcggtcaccgtcagccatggctatctgtgggagatcaagacaatggacggtggctggggcctccacgagataataaaccacaacgactggaagctgcagggcatcgtgaacggcatcgacatggccgaatggaaccccgaggtggacgagcacctgcagtccgacggctacgccaactacacgttcgagacgctggacaccggcaagaaacagtgcaaggaggcgctgcagcggcagctgggcctgcaggtccgcgacgacgtgccgctgatcgggttcatcgggcggctcgaccaccagaagggcgtggacatcatcggcgacgcgatgccgtggatcgccgggcaggacgtgcaggtggtgatgctgggcacggggcggccggacctggaggagatgctgcggcggttcgagtcggagcacaacgacaaggtgcgcgggtgggtggggttctcggtgcagctggcgcaccggatcacggcgggcgccgacgtcctcctgatgccgtcgcggttcgagccgtgcgggctgaaccagctgtacgccatggcgtacggcaccgtgcccgtggtgcacgccgtgggcgggctccgcgacacggtggcgccgttcgacccgttcgccgacacggggctcgggtggacgttcgaccgcgccgaggcgaaccggatgatcgacgcgctcgggcactgcctcaacacgtaccggaactacaaggagagctggagggggctccaggcgcgcggcatggcgcaggacctcagctgggaccacgccgccgagctctacgaggacgtcctcgtcaaggccaagtaccagtggtga

SEQ ID NO: 52591 - protein, 694 aa, Oryza sativa
MSGAIASSPAATLFLAGSSSSSPRRRRSRVSGVWWHLYGGTGLRLHWERRGLVRDGAVVCSASAAGGEDGVAKAKTKSAGSSKAVAVQGSTAKADHVEDSVSSPKYVKPAVAKQNGEVVSRATKSDAPVSKPKVDPSVPASKAEADGNAQAVESKAALDKKEDVGVAEPLEAKADAGGDAGAVSSADDSENKESGPLAGPNVMNVIVVASECSPFCKTGGLGDVVGALPKALARRGHRVMVVIPRYGEYAEAKDLGVRKRYRVAGQDSEVSYFHAFIDGVDFVFLEAPPFRHRHNDIYGGERFDVLKRMILFCKAAVEVPWFAPCGGSIYGDGNLVFIANDWHTALLPVYLKAYYRDNGLMQYTRSVLVIHNIAHQGRGPVDDFATMDLPEHYIDHFRLYDPVGGEHSNVFAAGLKMADRAVTVSHGYLWEIKTMDGGWGLHEIINHNDWKLQGIVNGIDMAEWNPEVDEHLQSDGYANYTFETLDTGKKQCKEALQRQLGLQVRDDVPLIGFIGRLDHQKGVDIIGDAMPWIAGQDVQVVMLGTGRPDLEEMLRRFESEHNDKVRGWVGFSVQLAHRITAGADVLLMPSRFEPCGLNQLYAMAYGTVPVVHAVGGLRDTVAPFDPFADTGLGWTFDRAEANRMIDALGHCLNTYRNYKESWRGLQARGMAQDLSWDHAAELYEDVLVKAKYQW

SEQ ID NO: 52592 - DNA, 3651 bp, Oryza sativa
  CDS (1)..(3651)
atggagatggcgcatagcccgctctgctcccggagccggccggtgctcgtcgtccgcccggcgacggccgccactggcttcgcgcagccgatcataaggtgcaggagatttacaaggacaaggcttctccgatgcttggtggcaagtgcagattattctaagagaaacccaaggagagcctccactccgaaacctaaaggtgctgcctctagaacatatgctccgagacctactgttgaatccagcatgaagaagattggacaaagcggcacagatgaaggtgatcttggcacaagcaatgggaagctcagtagtgaagcaacagagcaaactagtaatgtagaagaatcatcggaggtggacttctctggaaatgtatcgagcagtgtattcttggagggaatggatgatgcttttgaagctgagactgaagaagaggtcgagcaaaatcagtctccagaactgtcttctgaatctatggatgatgatgcaattgacagaaaacttgatgaataccgtggtaaaataagtgcactaataagttcgaaacctgaacctacatcagtttctagcactcatgtacaggacagatcaattgttggttttcatgaacaagaaaaatctgtagttagtttccatgagcaagatagatcaattgtctctgttcccgaacaaagccagccaagtagtggtgtcagtggacaaaatccaacagaagagaaaaccattattagtggacaagatgtcaccgaagaagcaccagaagagataactggcaagagtattgagagggaaccattaagtagagaaactgagaaagttctgtttgctgatgatgaccctaggataatcaaggatgaacagtatgaacctgatatagcaccagtacaggatgatgtggatccacaagtgctcaggaggcggcttgaagagcttgctgagaaaaattatttggctgggaataagtgttttgtttttcctgaagtagtacaggcggattcggtcattgatctttacttgaaccatagcatgtcagccttagccagtgagcctgatattcttatcaaaggggcattcaatggttggagatggaaaaaatttacccaaaaaatgcataaaagtgagttaacaggggattggtggtgctgcaaactccatatacccaagcaggcttacagattagattttgtattctttaatggtgacaccatctacgaaaataacaatcataatgatttcgtcctacaaatagaaagcgaaatcaatgaacactcatttgaggacttcttggttgaagaaaaacaaagagagcttgaaaggcttgctgcagaagaagctgaaaggaaaagacaggctgaggaggagcgtcgtaaggaggaagaaagggctgcaatggaggctgacagggcacaagcaaaggctgaagtcgagatgaacaagaataagttgcaaaatttattaaattcagccagcagatatgctgataatctatggtatatagagcctcacacatacaaagcaggggatagggtcaaattgttctacaacagaagctcaagaccgctaatgcataacactgagatttggatgcatggcggttacaataattggagtgatgggctctctattgctgaaaaattaatcaaatcatatgaaaaggatggtgattggtggtatgcagatgttactctacctgaaggggcattggtgttagactgggtttttgctgatgggccacctgggaatgcaaggaattatgataacaatggacgccaggatttccatgctgttgttccaaataacatatctgaggacctgttttgggtggaagaagagcacatgatatttaaaaggcttcagaaagaaaggaaagaaagggaggatgctgatcgaagaaagtctgagataactgcaaaaatgaaagctgagatgaaggaaaagactatgagagactttcttctctcgcagaaacacattgtgtacactgagcctctcgaagtacgtgcaggaaccaccgtggatgttctatacaatccgtctaacacggtgctgaacggaaagccagaggtttggttcagatgttcctttaatcgttggactcatccaagtggtcctttgccgccacagaagatggtgaatgcggagaatggttcacacttaagagcaacagttagggttcctttggatgcatatatgatggactttgttttctctgagtcggaagaaggtggaatatatgacaacaggaatggcatggactatcatagtcctgtgactgattccgttgcaaaagaacctcctatgcatattgtgcacattgcagtagaaatggctcctattgcaaaggttgggggtcttggtgatgttgttacaagtctttcacgagccgttcaagatttaggccacaatgttgaggttattcttcccaagtatgactgtttaaacctaagcaatgtgaaagatttacattaccgtcaaagttttacttggggtaatacagagataaaagtatggtttggaaaagttgaagacgtccctgtttacttcttggaaccacagaatgggatgttttgggttggatgtgtctatggaagaaatgacgagagtagatttggcttcttctgccattctgctctagagtttctccgccaaaatggatcttctcctgatattatacattgtcatgattggtcaagtgctccagttgcttggctattcaaggaacaatatgctcaaaatggactgtcaaatgggcgggttgtatttaccatccacaaccttgaatttggtgcacatcacatcggcaaagcaatggcacgttgtgataaggctacaactgtttcatatacgtattcaagggaagtgtcaggacatggtgctattgcccctcacttttccaaattccacggtattcgtaacggaattgatccagatatttgggatccatacagtgacaattttatcccggtccactatacctctgagaatgttgttgagggcaagagtgctgccaaaaaggcattgcaacagaggcttggactacagcaaactgatacccctgttgttggaattatcagtcgtctgacagtccagaagggaattcaccttatcaaacatgcaatttatcgaactcttgaacgcaatgggcaggtggttttactaggctcagctccagatcatcgcatacaaggtgactttaccaacttagctagtaaactgcatggcgaataccatggtcgtgtaaagctttgtttaacctatgatgagccactatctcatttgatttatgctggtgccgacttcatccttgttccttccatgtttgaaccttgtggtttaacccagcttactgctatgcgttatggatctatcccaatagttcggaaaactggaggcctttatgacaccgtttttgacgtcgacgatgataaggatcgagctcgagaacaaggtcttgagccaaacgggttcagtttcgaaggagctgacagcaacggtgtggattacgcccttgacagagcgatcaccacatggtatgatgctcgcgattggttccactccctctgcaagagggtgatggagcaagattggacatggaaccgacctgctctggactatatggaattgtaccattccgctcgcaagaactga

SEQ ID NO: 52593 - protein, 1216 aa, Oryza sativa
MEMAHSPLCSRSRPVLVVRPATAATGFAQPIIRCRRFTRTRLLRCLVASADYSKRNPRRASTPKPKGAASRTYAPRPTVESSMKKIGQSGTDEGDLGTSNGKLSSEATEQTSNVEESSEVDFSGNVSSSVFLEGMDDAFEAETEEEVEQNQSPELSSESMDDDAIDRKLDEYRGKISALISSKPEPTSVSSTHVQDRSIVGFHEQEKSVVSFHEQDRSIVSVPEQSQPSSGVSGQNPTEEKTIISGQDVTEEAPEEITGKSIEREPLSRETEKVLFADDDPRIIKDEQYEPDIAPVQDDVDPQVLRRRLEELAEKNYLAGNKCFVFPEVVQADSVIDLYLNHSMSALASEPDILIKGAFNGWRWKKFTQKMHKSELTGDWWCCKLHIPKQAYRLDFVFFNGDTIYENNNHNDFVLQIESEINEHSFEDFLVEEKQRELERLAAEEAERKRQAEEERRKEEERAAMEADRAQAKAEVEMNKNKLQNLLNSASRYADNLWYIEPHTYKAGDRVKLFYNRSSRPLMHNTEIWMHGGYNNWSDGLSIAEKLIKSYEKDGDWWYADVTLPEGALVLDWVFADGPPGNARNYDNNGRQDFHAVVPNNISEDLFWVEEEHMIFKRLQKERKEREDADRRKSEITAKMKAEMKEKTMRDFLLSQKHIVYTEPLEVRAGTTVDVLYNPSNTVLNGKPEVWFRCSFNRWTHPSGPLPPQKMVNAENGSHLRATVRVPLDAYMMDFVFSESEEGGIYDNRNGMDYHSPVTDSVAKEPPMHIVHIAVEMAPIAKVGGLGDVVTSLSRAVQDLGHNVEVILPKYDCLNLSNVKDLHYRQSFTWGNTEIKVWFGKVEDVPVYFLEPQNGMFWVGCVYGRNDESRFGFFCHSALEFLRQNGSSPDIIHCHDWSSAPVAWLFKEQYAQNGLSNGRVVFTIHNLEFGAHHIGKAMARCDKATTVSYTYSREVSGHGAIAPHFSKFHGIRNGIDPDIWDPYSDNFIPVHYTSENVVEGKSAAKKALQQRLGLQQTDTPVVGIISRLTVQKGIHLIKHAIYRTLERNGQVVLLGSAPDHRIQGDFTNLASKLHGEYHGRVKLCLTYDEPLSHLIYAGADFILVPSMFEPCGLTQLTAMRYGSIPIVRKTGGLYDTVFDVDDDKDRAREQGLEPNGFSFEGADSNGVDYALDRAITTWYDARDWFHSLCKRVMEQDWTWNRPALDYMELYHSARKN

SEQ ID NO: 52594 - DNA, 1830 bp, Oryza sativa
  CDS (1)..(1830)
atgtcggctctcaccacgtcccagctcgccacctcggccaccggcttcggcatcgccgacaggtcggcgccgtcgtcgctgctccgccacgggttccagggcctcaagccccgcagccccgccggcggcgacgcgacgtcgctcagcgtgacgaccagcgcgcgcgcgacgcccaagcagcagcggtcggtgcagcgtggcagccggaggttcccctccgtcgtcgtgtacgccaccggcgccggcatgaacgtcgtgttcgtcggcgccgagatggccccctggagcaagaccggcggcctcggtgacgtcctcggtggcctcccccctgccatggctgcgaatggccacagggtcatggtgatctctcctcggtacgaccagtacaaggacgcttgggataccagcgttgtggctgagatcaaggttgcagacaggtacgagagggtgaggtttttccattgctacaagcgtggagtcgaccgtgtgttcatcgaccatccgtcattcctggagaaggtttggggaaagaccggtgagaagatctacggacctgacactggagttgattacaaagacaaccagatgcgtttcagccttctttgccaggcagcactcgaggctcctaggatcctaaacctcaacaacaacccatacttcaaaggaacttatggtgaggatgttgtgttcgtctgcaacgactggcacactggcccactggcgagctacctgaagaacaactaccagcccaatggcatctacaggaatgcaaaggttgctttctgcatccacaacatctcctaccagggccgtttcgctttcgaggattaccctgagctgaacctctccgagaggttcaggtcatccttcgatttcatcgacgggtatgacacgccggtggagggcaggaagatcaactggatgaaggccggaatcctggaagccgacagggtgctcaccgtgagcccgtactacgccgaggagctcatctccggcatcgccaggggatgcgagctcgacaacatcatgcggctcaccggcatcaccggcatcgtcaacggcatggacgtcagcgagtgggatcctagcaaggacaagtacatcaccgccaagtacgacgcaaccacggcaatcgaggcgaaggcgctgaacaaggaggcgttgcaggcggaggcgggtcttccggtcgacaggaaaatcccactgatcgcgttcatcggcaggctggaggaacagaagggccctgacgtcatggccgccgccatcccggagctcatgcaggaggacgtccagatcgttcttctgggtactggaaagaagaagttcgagaagctgctcaagagcatggaggagaagtatccgggcaaggtgagggccgtggtgaagttcaacgcgccgcttgctcatctcatcatggccggagccgacgtgctcgccgtccccagccgcttcgagccctgtggactcatccagctgcaggggatgagatacggaacgccctgtgcttgcgcgtccaccggtgggctcgtggacacggtcatcgaaggcaagactggtttccacatgggccgtctcagcgtcgactgcaaggtggtggagccaagcgacgtgaagaaggtggcggccaccctgaagcgcgccatcaaggtcgtcggcacgccggcgtacgaggagatggtcaggaactgcatgaaccaggacctctcctggaaggggcctgcgaagaactgggagaatgtgctcctgggcctgggcgtcgccggcagcgcgccggggatcgaaggcgacgagatcgcgccgctcgccaaggagaacgtggctgctccttga

SEQ ID NO: 52595 - protein, 609 aa, Oryza sativa
MSALTTSQLATSATGFGIADRSAPSSLLRHGFQGLKPRSPAGGDATSLSVTTSARATPKQQRSVQRGSRRFPSVVVYATGAGMNVVFVGAEMAPWSKTGGLGDVLGGLPPAMAANGHRVMVISPRYDQYKDAWDTSVVAEIKVADRYERVRFFHCYKRGVDRVFIDHPSFLEKVWGKTGEKIYGPDTGVDYKDNQMRFSLLCQAALEAPRILNLNNNPYFKGTYGEDVVFVCNDWHTGPLASYLKNNYQPNGIYRNAKVAFCIHNISYQGRFAFEDYPELNLSERFRSSFDFIDGYDTPVEGRKINWMKAGILEADRVLTVSPYYAEELISGIARGCELDNIMRLTGITGIVNGMDVSEWDPSKDKYITAKYDATTAIEAKALNKEALQAEAGLPVDRKIPLIAFIGRLEEQKGPDVMAAAIPELMQEDVQIVLLGTGKKKFEKLLKSMEEKYPGKVRAVVKFNAPLAHLIMAGADVLAVPSRFEPCGLIQLQGMRYGTPCACASTGGLVDTVIEGKTGFHMGRLSVDCKVVEPSDVKKVAATLKRAIKVVGTPAYEEMVRNCMNQDLSWKGPAKNWENVLLGLGVAGSAPGIEGDEIAPLAKENVAAP

SEQ ID NO: 52596 - DNA, 1824 bp, Oryza sativa
  CDS (1)..(1824)
atgtcggctctcaccacgtcccagctcgccacctcggccaccggcttcggcatcgccgacaggtcggcgccgtcgtcgctgctccgccacgggttccagggcctcaagccccgcagccccgccggcggcgacgcgacgtcgctcagcgtgacgaccagcgcgcgcgcgacgcccaagcagcagcggtcggtgcagcgtggcagccggaggttcccctccgtcgtcgtgtacgccaccggcgccggcatgaacgtcgtgttcgtcggcgccgagatggccccctggagcaagaccggcggcctcggtgacgtcctcggtggcctcccccctgccatggctgcgaatggccacagggtcatggtgatctctcctcggtacgaccagtacaaggacgcttgggataccagcgttgtggctgagatcaaggttgcagacaggtacgagagggtgaggtttttccattgctacaagcgtggagtcgaccgtgtgttcatcgaccatccgtcattcctggagaaggtttggggaaagaccggtgagaagatctacggacctgacactggagttgattacaaagacaaccagatgcgtttcagccttctttgccaggcagcactcgaggctcctaggatcctaaacctcaacaacaacccatacttcaaaggaacttatggtgaggatgttgtgttcgtctgcaacgactggcacactggcccactggcgagctacctgaagaacaactaccagcccaatggcatctacaggaatgcaaaggttgctttctgcatccacaacatctcctaccagggccgtttcgctttcgaggattaccctgagctgaacctctccgagaggttcaggtcatccttcgatttcatcgacgggtatgacacgccggtggagggcaggaagatcaactggatgaaggccggaatcctggaagccgacagggtgctcaccgtgagcccgtactacgccgaggagctcatctccggcatcgccaggggatgcgagctcgacaacatcatgcggctcaccggcatcaccggcatcgtcaacggcatggacgtcagcgagtgggatcctagcaaggacaagtacatcaccgccaagtacgacgcaaccacggcaatcgaggcgaaggcgctgaacaaggaggcgttgcaggcggaggcgggtcttccggtcgacaggaaaatcccactgatcgcgttcatcggcaggctggaggaacagaagggccctgacgtcatggccgccgccatcccggagctcatgcaggaggacgtccagatcgttcttctgggtactggaaagaagaagttcgagaagctgctcaagagcatggaggagaagtatccgggcaaggtgagggccgtggtgaagttcaacgcgccgcttgctcatctcatcatggccggagccgacgtgctcgccgtccccagccgcttcgagccctgtggactcatccagctgcaggggatgagatacggaacgccctgtgcttgcgcgtccaccggtgggctcgtggacacggtcatcgaaggcaagactggtttccacatgggccgtctcagcgtcgacgtggtggagccaagcgacgtgaagaaggtggcggccaccctgaagcgcgccatcaaggtcgtcggcacgccggcgtacgaggagatggtcaggaactgcatgaaccaggacctctcctggaaggggcctgcgaagaactgggagaatgtgctcctgggcctgggcgtcgccggcagcgcgccggggatcgaaggcgacgagatcgcgccgctcgccaaggagaacgtggctgctccttga

SEQ ID NO: 52597 - protein, 607 aa, Oryza sativa
MSALTTSQLATSATGFGIADRSAPSSLLRHGFQGLKPRSPAGGDATSLSVTTSARATPKQQRSVQRGSRRFPSVVVYATGAGMNVVFVGAEMAPWSKTGGLGDVLGGLPPAMAANGHRVMVISPRYDQYKDAWDTSVVAEIKVADRYERVRFFHCYKRGVDRVFIDHPSFLEKVWGKTGEKIYGPDTGVDYKDNQMRFSLLCQAALEAPRILNLNNNPYFKGTYGEDVVFVCNDWHTGPLASYLKNNYQPNGIYRNAKVAFCIHNISYQGRFAFEDYPELNLSERFRSSFDFIDGYDTPVEGRKINWMKAGILEADRVLTVSPYYAEELISGIARGCELDNIMRLTGITGIVNGMDVSEWDPSKDKYITAKYDATTAIEAKALNKEALQAEAGLPVDRKIPLIAFIGRLEEQKGPDVMAAAIPELMQEDVQIVLLGTGKKKFEKLLKSMEEKYPGKVRAVVKFNAPLAHLIMAGADVLAVPSRFEPCGLIQLQGMRYGTPCACASTGGLVDTVIEGKTGFHMGRLSVDVVEPSDVKKVAATLKRAIKVVGTPAYEEMVRNCMNQDLSWKGPAKNWENVLLGLGVAGSAPGIEGDEIAPLAKENVAAP

SEQ ID NO: 52598 - DNA, 1926 bp, Oryza sativa
  CDS (1)..(1926)
atggcgacggcggcggggatggggatcggggcggcgtgcctggtggcgccgcaggtgaggccggggaggaggttgcggctccagcgggtgcggaggcggtgcgtggcggagctgagcagggacggtgggtcggcgcagcgcccgctggcaccggcgccgctggtgaagcagccggtcctgccgaccttcctcgtgccgacgtcgacgccacccgcgcccacgcagtcgccggcgccggcgccgaccccgccgccgttgccggactccggcgtgggggagatcgagcccgatctagaaggtctcacagaagattccatcgacaaaacaatttttgtggctagtgagcaggagtctgagatcatggatgtgaaggagcaagctcaagctaaagtaacacgcagcgttgtctttgtaaccggtgaagcttctccttatgcaaagtcaggtggactaggagatgtttgtggttcactgccaattgctcttgctcttcgtggtcatcgtgtgatggttgtaatgccgagatacatgaacggggccttgaacaaaaattttgcaaacgcattttacactgagaagcacattaagattccatgctttggcggagaacatgaagttactttttttcacgagtatagggattctgttgattgggtgtttgttgatcatccctcatatcatagacctggaaatttgtatggagataattttggtgcttttggcgataatcagttcagatacacactcctgtgctatgcggcgtgtgaagccccattaattcttgaactgggaggatatatctatggacagaaatgcatgtttgttgtgaatgattggcatgccagtcttgtgccagtccttcttgctgcaaaatatagaccatatggtgtttacagggatgcccgcagtgttcttgtcatacataatctagcacatcagggtgtggagcctgccagtacatatcctgacctgggattgccacctgaatggtatggagcattagaatgggtgtttccagagtgggcaaggcggcatgcccttgacaagggtgaggcagtcaattttttaaaaggcgcagttgtgacagcagatcgaattgtgactgtcagccaggggtattcatgggaggtcacaactgctgaaggtgggcaaggcctcaatgagctcttaagctcccggaagagtgtattgaatggaattgtaaatggaattgacattaatgattggaacccatccacagacaagtttctcccttatcattattctgttgatgacctgtccggaaaggccaagtgtaaagctgaattgcagaaggagctgggtttacctataaggcccgatgtgcctctgattggctttattggaagattggactatcaaaaaggcattgatctaattaaacttgccattccagatctcatgcgggacaatattcaattcgtcatgcttggatctggtgacccaggttttgaaggatggatgagatccacagaatcagggtacagggataaatttcgtggatgggttggatttagtgttccagtttcccaccgaataactgcaggttgcgatatattgttgatgccatccagattcgaaccttgtggcctcaatcagctatatgctatgcaatatggtacagtgcctgttgttcatggaactggaggcctcagagatacagtggagaattttaacccgtttgctgagaaaggagagcagggtacagggtgggcattctcgccactaaccattgaaaaaatgctgtgggcattgcggatggcaatttcgacatacagggaacacaagtcctcttgggagggtctaatgaagcgaggcatgtcaagcgactttacatgggaccatgccgcctcacagtatgaacagatcttcgaatgggccttcatggatcaaccatatgtcatgtaa

SEQ ID NO: 52599 - protein, 641 aa, Oryza sativa
MATAAGMGIGAACLVAPQVRPGRRLRLQRVRRRCVAELSRDGGSAQRPLAPAPLVKQPVLPTFLVPTSTPPAPTQSPAPAPTPPPLPDSGVGEIEPDLEGLTEDSIDKTIFVASEQESEIMDVKEQAQAKVTRSVVFVTGEASPYAKSGGLGDVCGSLPIALALRGHRVMVVMPRYMNGALNKNFANAFYTEKHIKIPCFGGEHEVTFFHEYRDSVDWVFVDHPSYHRPGNLYGDNFGAFGDNQFRYTLLCYAACEAPLILELGGYIYGQKCMFVVNDWHASLVPVLLAAKYRPYGVYRDARSVLVIHNLAHQGVEPASTYPDLGLPPEWYGALEWVFPEWARRHALDKGEAVNFLKGAVVTADRIVTVSQGYSWEVTTAEGGQGLNELLSSRKSVLNGIVNGIDINDWNPSTDKFLPYHYSVDDLSGKAKCKAELQKELGLPIRPDVPLIGFIGRLDYQKGIDLIKLAIPDLMRDNIQFVMLGSGDPGFEGWMRSTESGYRDKFRGWVGFSVPVSHRITAGCDILLMPSRFEPCGLNQLYAMQYGTVPVVHGTGGLRDTVENFNPFAEKGEQGTGWAFSPLTIEKMLWALRMAISTYREHKSSWEGLMKRGMSSDFTWDHAASQYEQIFEWAFMDQPYVM

SEQ ID NO: 52600 - DNA, 2433 bp, Oryza sativa
  CDS (1)..(2433)
atgtcgtcggccgtcgtcgcgtcatccaccacgttcctcgtcgcgctcgcctcttcggcgtcacggggagggcccaggagggggagggtggtgggcgtggccgcgccgccggccctgctttacgacggccgcgccggaaggctagccctacgggcgccgcctccgccccggcctcggcctcggcgtcgggatgcgggcgtggtgcgccgcgcggatgatggggagaacgaggcggcggtggagcgggcgggtgaggacgacgacgaggaggaggagttctcttcgggcgcgtggcagccgccccgctcgcgtcgcggcggcgtcggcaaggtcttgaagcggaggggcaccgtcccgcccgtcggccggtacggctccggcggtgatgcggcgagagtgcgcggggcggccgcgccggcgccggcgccgacacaggacgccgcctcaagtaagaacggagcgcttctcagcggccgcgacgacgacacacctgcctcacggaacggatcggtcgttaccggcgccgacaagcctgccgccgccacgccgccggtgaccataacgaagctcccagcgccggactcccccgtgatccttccatccgtagacaagccgcagccggagttcgtcatcccagacgcgacggcgccggcgccgccaccgcccggttcaaatcccaggtcgtccgctcctctccccaagcctgacaattcggaatttgcagaggataagagcgcaaaagttgttgagagtgctccgaagccaaaggcgactagatcttcccctattcctgcggtagaagaggagacgtgggatttcaagaaatattttgatctgaacgaaccggacgccgcggaggatggcgatgacgatgatgactgggctgattcagatgcgtcagattctgagatcgaccaggatgacgattcgggccctttggctggggagaatgtcatgaacgtgatcgtggtggctgctgaatgttctccctggtgcaaaacaggtgggcttggagatgttgcaggtgctttacccaaagctttggcgaggagaggacatcgtgttatggttgtggtaccaaggtacggtgattacgcggaagcccaggatgtaggaatcaggaaatactacaaggctgctggacaggatctggaagtgaaatatttccatgcatttatcgatggagttgattttgtgttcattgacgctcctctcttccgtcaccgtcaggatgacatctatggggggaacagacaggaaatcatgaagcgcatgattctgttttgtaaggctgctgttgaggttccttggcacgttccatgcggtggtgtgccctatggggatggcaacttggtgttccttgcaaacgattggcacactgcactcctgcctgtttatctgaaggcatattacagagacaatggcatgatgcagtacactcgctctgtccttgtgatacataatatcgcttaccagggccgtggcccagtagatgaattcccctacatggaattgccggagcactacctggatcacttcaagctgtacgaccccgtcggcggcgagcacgccaacatcttcggcgcgggcctgaagatggcggaccgggtggtgaccgtgagccccggctacctctgggagctgaagacgacggagggcggctggggcctccacgacatcatacgggagaacgactggaagatgaacggcatcgtgaacggcatcgactaccgggagtggaacccggaggtggacgtgcacctgcagtccgacggctacgccaactacaccgtggcctcgctggactccagcaagccgcggtgcaaggcggcgctgcagcgcgagctggggctggaggtgcgcgacgacgtgccgctgatcgggttcatcgggcggctcgacgggcagaaaggtgtggacatcatcggcgacgcgatgccgtggatcgccgggcaggacgtgcagctggtgctgctgggctccggccgccgcgacctggaggtgatgctgcagcggttcgaggcgcagcacaacagcaaggtgcgcgggtgggtggggttctcggtgaagatggcgcaccggatcacggcgggcgccgacgtgctggtcatgccgtcgcggttcgagccgtgcggcctcaaccagctctacgccatggcgtacggcaccgtccccgtcgtgcacgccgtcggcgggctgagggacaccatgtcggcgttcgacccgttcgaggacaccggcctcgggtggacgttcgaccgcgccgagccgcacaagctcatcgaggcgctcggccactgcctcgagacgtaccgcaagtacaaggagagctggagggggctccaggtgcgcggcatgtcgcaggacctcagctgggaccacgccgccgagctctacgaggaggtccttgtcaaggccaagtaccaatggtga

SEQ ID NO: 52601 - protein, 810 aa, Oryza sativa
MSSAVVASSTTFLVALASSASRGGPRRGRVVGVAAPPALLYDGRAGRLALRAPPPPRPRPRRRDAGVVRRADDGENEAAVERAGEDDDEEEEFSSGAWQPPRSRRGGVGKVLKRRGTVPPVGRYGSGGDAARVRGAAAPAPAPTQDAASSKNGALLSGRDDDTPASRNGSVVTGADKPAAATPPVTITKLPAPDSPVILPSVDKPQPEFVIPDATAPAPPPPGSNPRSSAPLPKPDNSEFAEDKSAKVVESAPKPKATRSSPIPAVEEETWDFKKYFDLNEPDAAEDGDDDDDWADSDASDSEIDQDDDSGPLAGENVMNVIVVAAECSPWCKTGGLGDVAGALPKALARRGHRVMVVVPRYGDYAEAQDVGIRKYYKAAGQDLEVKYFHAFIDGVDFVFIDAPLFRHRQDDIYGGNRQEIMKRMILFCKAAVEVPWHVPCGGVPYGDGNLVFLANDWHTALLPVYLKAYYRDNGMMQYTRSVLVIHNIAYQGRGPVDEFPYMELPEHYLDHFKLYDPVGGEHANIFGAGLKMADRVVTVSPGYLWELKTTEGGWGLHDIIRENDWKMNGIVNGIDYREWNPEVDVHLQSDGYANYTVASLDSSKPRCKAALQRELGLEVRDDVPLIGFIGRLDGQKGVDIIGDAMPWIAGQDVQLVLLGSGRRDLEVMLQRFEAQHNSKVRGWVGFSVKMAHRITAGADVLVMPSRFEPCGLNQLYAMAYGTVPVVHAVGGLRDTMSAFDPFEDTGLGWTFDRAEPHKLIEALGHCLETYRKYKESWRGLQVRGMSQDLSWDHAAELYEEVLVKAKYQW

SEQ ID NO: 52602 - DNA, 2250 bp, Oryza sativa
  CDS (1)..(2250)
atggcggcggcggccgtctcctccctcctcgccccttcgggatcctgctactcccccggatgccacagctgctggggtcccgggcccggaggcgggcggcgcctaccttccccgcgccggcgcccgattaccgccgcggctcgccctacttgggcagtgccgaggaggagcaggttggagtgggggcgtgtggaggctcagaattcgggcgctcgcaccagctgccgagcagcactgcaatggctatcatccacggcaaggtcccatgtgaatgttggttatgggtcgccgctggtgttcccaggtttgaccaaaccggggtcaagcaggtgtctatgcgttgttggaatggtcggcaatgcagggaatcaagttggtgacgatagtgatgatggaatcaaggttaccaatgagaagcttcgtgctgttatccgcaagagcaaagaggtgttggagatccatcggaatctacttgagaagatatcggcatcagaaaggaagaagatcacttcaattatagaggacagttccatttataatgagcaagatccatttggtcaaagagatagttctttttatcatcttgatgaagttccagacgatgatgaatttagctatgacctacagatgtaccttgatagacgtccagatcaatctgaagttgttgcaactcaggattatgaggcacaactaagtcaaataagtgaaatgggacagtcagttgctgagggcactagtgatgatccatctgcttcagctgctgtagatcttatcaatatcatattggtagcggcggagtgtgctccttggtccaaaacaggtgggcttggagatgttgctggagctttgccaaaggctttggctaggagaggtcaccgtgtcatggtagtagtgccaatgtataaaaactacgcagaacctcaacagctaggagagccaaggagataccaggttgcagggcaggatatggaggtaatttattatcatgcatacatagatggtgtggattttgttttcattgacaatcctatcttccaccacgttgagaatgacatttatggcggagaccgaacagacatcttaaaacggatggttttgttgtgcaaagcggctatagaggttccatggtatgttccttgtggtggctactgctacggtgatggaaatcttgtgttccttgcaaatgattggcatactgcactactgcctgtttatttgaaggcatactatcatgacaatggtttcatgatatatgcccgttctgttcttgtcatacacaatatagcacatcagggtcgtggcccattagatgacttcagttatctggatttgccagttgattacatggatcttttcaaactttatgacccatttgggggtgatcacctaaacatatttgcagctggtattaaagctgctgaccgtttgcttactgtaagccatggttatgcatgggagctcaaaacagctgaaggtggttggggtcttcatgggatcatcaatgaaagcgattggaaatttcagggcattgtaaatggcattgatacaactgattggaatcctaggtgtgatatccacctaaaatctgatgggtacaccaattattctctagaaacagttcaggcaggtaaacagcaatgtaaggcagcattgcagaaggaacttggtctcccagttcgtggcgatgttcctgtcattgctttcattggacggctagaccatcaaaaaggtgtagaccttatagcagaagcaatgccatggattgctggccaagatgtacagttaataatgttgggcactggacggcaagacctcgaagatacattgaggaggcttgagagccaacattacgatagagttagggggtgggttggtttttccatcaggttggctcatcgaatgacagcaggggctgatatactattgatgccatcaaggtttgagccatgtggattgaatcagctctatgccatgatgtatgggactgtcccagtagtccatgcggtcggtggtcttcgagacaccgttgagcactacaatccctacgaggagtccggacttggttggacttttgaaaaggcagaggcaaacagactgattgatgctctagggcactgcttgaacacgtacaggaactacaggactagttgggagggactccaaaagagagggatgatgcaagatctaagttgggataatgctgctaagctgtatgaggaagtcctcctagctgccaagtatcaatggtga

SEQ ID NO: 52603 - protein, 749 aa, Oryza sativa
MAAAAVSSLLAPSGSCYSPGCHSCWGPGPGGGRRLPSPRRRPITAAARPTWAVPRRSRLEWGRVEAQNSGARTSCRAALQWLSSTARSHVNVGYGSPLVFPGLTKPGSSRCLCVVGMVGNAGNQVGDDSDDGIKVTNEKLRAVIRKSKEVLEIHRNLLEKISASERKKITSIIEDSSIYNEQDPFGQRDSSFYHLDEVPDDDEFSYDLQMYLDRRPDQSEVVATQDYEAQLSQISEMGQSVAEGTSDDPSASAAVDLINIILVAAECAPWSKTGGLGDVAGALPKALARRGHRVMVVVPMYKNYAEPQQLGEPRRYQVAGQDMEVIYYHAYIDGVDFVFIDNPIFHHVENDIYGGDRTDILKRMVLLCKAAIEVPWYVPCGGYCYGDGNLVFLANDWHTALLPVYLKAYYHDNGFMIYARSVLVIHNIAHQGRGPLDDFSYLDLPVDYMDLFKLYDPFGGDHLNIFAAGIKAADRLLTVSHGYAWELKTAEGGWGLHGIINESDWKFQGIVNGIDTTDWNPRCDIHLKSDGYTNYSLETVQAGKQQCKAALQKELGLPVRGDVPVIAFIGRLDHQKGVDLIAEAMPWIAGQDVQLIMLGTGRQDLEDTLRRLESQHYDRVRGWVGFSIRLAHRMTAGADILLMPSRFEPCGLNQLYAMMYGTVPVVHAVGGLRDTVEHYNPYEESGLGWTFEKAEANRLIDALGHCLNTYRNYRTSWEGLQKRGMMQDLSWDNAAKLYEEVLLAAKYQW

SEQ ID NO: 52604 - DNA, 1800 bp, Triticum aestivum
  CDS (1)..(1800)
atgggttccattcctacttattgttcttatcaaacaaacagtgttggttcactgaaactgtcacctcacatccaattccagcaatcttgtaacaatggagttatgtttgtatccatgcggaataagacacagctggccaaaagaagagccacaaattatggaactcatcctaattctagtaggactcctgcacctatcgtatgttcaactggaatgcccataattttcgttgccactgaagtgcacccatggtgcaaaactggaggccttggtgatgtcgtaggaggattgcccccagctctggctgcaatggggcaccgggttatgacgatagctcctcgctatgatcagtacaaggatacatgggatacaaatgttcttgttgaggtaattgttggtgacagaacagaaacagtgcgcttttttcactgctacaaaaggggagttgatcgtgtttttgttgatcatcctatgtttcttgagaaggtatggggcaaaactggatcaaaattgtacgggcctaccactggaacagacttccgagataaccagttacggttctgccttttgtgccttgctgcattggaggctccgagggttcttaatctcaataattctgaatacttctctggaccatatggagaaaatgttgtcttcgttgcaaatgactggcacactgcagttttgccatgctatttgaagagcatgtataagcaaaatggaatttatgagaatgccaaggttgctttctgcattcacaatatcgcctatcagggcagatttcccagagcggacttcgaacttcttaatttacctgaaagtttcatgccgtcatttgattttgttgatgggcatgttaagccagtagtagggagaaagattaactggatgaaggcagggatcactgagtgtgacgtggtccttacagttagtccacattatgtcaaagaactcacttctggcccagagaaaggtgttgagttggatggcgtccttcgtgcaaagcctcttgaaactggaattgtaaatggaatggatgttgttgattggaatccagcaacagataagtacatcagtgtcaaatacaatgcaacaacggtggcagaagcaagagctctcaataaagaaatactgcaagctgaagttggattgcctgtggactctagcatacctgttatagttttcattggacgtcttgaagaacagaaagggtcagacatactaattgcagccataccggagtttctcgaggagaatgttcagataattgttctcggcacagggaagaagaaaatggaggaggaactgatgctgctagaagcgaagtacccacagaatgccagaggcatagcaaaattcaatgtcccattggcgcacatgatgttcgccggggctgatttcatcattgttccaagtaggtttgagccatgtggcctcatccaattgcaagggatgagatatggagtgattcccatctgttcatccaccggaggacttgttgacacggtgagggagggtgtcaccggattccacatgggttcgttcaatgtcgagtttgaaaccgtcgatccagcagatgtcgcggcagtcgcttcgaatgtcacacgagctctgaaacagtacaaaacaccgtcgttccacgcaatggttcggaattgcatggcgcaggacctatcttggaagggaccggcaaagaagtgggaggaggcacttcttggcctaggagtcgagggaagtcagctgggcatcgagggcgaggagatcgctccacttgcgaaacagaatgtggccactccctga

SEQ ID NO: 52605 - protein, 599 aa, Triticum aestivum
MGSIPTYCSYQTNSVGSLKLSPHIQFQQSCNNGVMFVSMRNKTQLAKRRATNYGTHPNSSRTPAPIVCSTGMPIIFVATEVHPWCKTGGLGDVVGGLPPALAAMGHRVMTIAPRYDQYKDTWDTNVLVEVIVGDRTETVRFFHCYKRGVDRVFVDHPMFLEKVWGKTGSKLYGPTTGTDFRDNQLRFCLLCLAALEAPRVLNLNNSEYFSGPYGENVVFVANDWHTAVLPCYLKSMYKQNGIYENAKVAFCIHNIAYQGRFPRADFELLNLPESFMPSFDFVDGHVKPVVGRKINWMKAGITECDVVLTVSPHYVKELTSGPEKGVELDGVLRAKPLETGIVNGMDVVDWNPATDKYISVKYNATTVAEARALNKEILQAEVGLPVDSSIPVIVFIGRLEEQKGSDILIAAIPEFLEENVQIIVLGTGKKKMEEELMLLEAKYPQNARGIAKFNVPLAHMMFAGADFIIVPSRFEPCGLIQLQGMRYGVIPICSSTGGLVDTVREGVTGFHMGSFNVEFETVDPADVAAVASNVTRALKQYKTPSFHAMVRNCMAQDLSWKGPAKKWEEALLGLGVEGSQLGIEGEEIAPLAKQNVATP

SEQ ID NO: 52606 - DNA, 1848 bp, Brassica napus
  CDS (1)..(1848)
atggcatatgtgacagcttcccattttgtctcgcttgtcaacaacaaccatggaggagcttcaggctctgaggccaacgccaatctgtctcagatcagcttcaagtgtcaatccatgactcactgtgggctaagatccttcaacatggtggataggcttcagaggagatgtcaagccaaagctgtttctgctaaatcctcaaagggattacagcagaatgctcctaaagctaaacgtgtgggtaagattgtgtgtgagaaaggcatgtctatgatctttattggtgctgaggttggtccatggagcaaaaccggtggccttggtgatgtcttaggtggtcttcctccagctctcgccgcaagaggccaccgtgtgatgacagtatgccctcggtatgaccaatataaagatgcttgggacacctgtgtagtggttcagataaaagttggagataaagttgaggacgtgcgtttctttcactgctacaaacgaggagttgatcgtgtctttgtcgaccatccactcttccttgcaaaggttgtgggcaaaactggatccaaaatctatggtcctataactggagtagactacactgacaaccaactccggttcagtttgttgtgtcaggctgctcttgaggcaccacgggttctaaacctgaacagcagcaagtatttctctggaccatatggggaagatgtggtgtttgttgccaatgattggcacactgctctccttccttgttacctcaagtctatgtatcagtcacgcggaatctacatgaatgcaaaggttgtgttctgcattcacaacatagcctaccaaggaagatttgcctttgacgacttttctcttctcaatttgcctgacagctttaagagctctttcgacttcatggacggttacgaaaagccagtaaaaggaaggaagatcaactggatgaaggctgcgattctagaagcatggcgtgtcttaacagttagtccatactatgctcaagagctcatctctgggatcgatagaggcgtggagctgcattcataccttcgaatgaaaacagtttctggaattattaacggcatggatgttcaagaatggaacccggctactgacaagtacatcgatatcaaatatgacattaccactgtaacggaagctaagccactgatcaaagaagcgcttcaggccgctgttggacttccagtggacagggatgtccctgtgatcggtttcattgggagattggaggagcagaagggctctgatattctcgtggaagctatctccaagttcatgggcctcaatgttcagatggtgatccttggaaccggtaagaagaagatggaggctcagattcttgaactcgaagagaagttcccagggaaggcggttggagtggcgaaattcaacgtgccattggctcatatgatcacagcaggagctgacttcatcattgtccccagcaggtttgagccgtgcggtctcattcagctgcacgccatgaggtatggaaccgtccccattgtggcatctactggtgggcttgtggatactgttaaagatggcttcacaggtttccacattggaagattcaacgtcaagtgtgaagttgtggatccagatgatgtgattgcaacagcaaaggctgtagctagagctgttgcagtgtacggtacacccgctatgaaagagatggtcaagaactgcatggaccaagacttctcctggaagggaccagcgagactgtgggagaaggtactattgtcactagatgttgccggaagtgaagctggagtcgaaggtgaagaaatagctcctctggcgaaggagaacgtagcgacaccttga

SEQ ID NO: 52607 - protein, 615 aa, Brassica napus
MAYVTASHFVSLVNNNHGGASGSEANANLSQISFKCQSMTHCGLRSFNMVDRLQRRCQAKAVSAKSSKGLQQNAPKAKRVGKIVCEKGMSMIFIGAEVGPWSKTGGLGDVLGGLPPALAARGHRVMTVCPRYDQYKDAWDTCVVVQIKVGDKVEDVRFFHCYKRGVDRVFVDHPLFLAKVVGKTGSKIYGPITGVDYTDNQLRFSLLCQAALEAPRVLNLNSSKYFSGPYGEDVVFVANDWHTALLPCYLKSMYQSRGIYMNAKVVFCIHNIAYQGRFAFDDFSLLNLPDSFKSSFDFMDGYEKPVKGRKINWMKAAILEAWRVLTVSPYYAQELISGIDRGVELHSYLRMKTVSGIINGMDVQEWNPATDKYIDIKYDITTVTEAKPLIKEALQAAVGLPVDRDVPVIGFIGRLEEQKGSDILVEAISKFMGLNVQMVILGTGKKKMEAQILELEEKFPGKAVGVAKFNVPLAHMITAGADFIIVPSRFEPCGLIQLHAMRYGTVPIVASTGGLVDTVKDGFTGFHIGRFNVKCEVVDPDDVIATAKAVARAVAVYGTPAMKEMVKNCMDQDFSWKGPARLWEKVLLSLDVAGSEAGVEGEEIAPLAKENVATP

SEQ ID NO: 52608 - DNA, 1860 bp, Glycine max
  CDS (1)..(1860)
atggcgacattgactgcttcaagtaacttagtctctagaaattctcatgtccaccatggaccaacaactgcttcatatgagtctaaagcagtagcaatgggacttagatctctgaagcagacaaatactcataatggactaagaattttgaacccggtggatgagctacttaacagaaccccaattaaaaccaatgcagtgcaagctatgaggaagggacctcaaggcaagaatgccaggcctaaaggcatgatcacatgtggcatgactttcataattataggaaccgaggtggctccatggtgcaaaactggtgggttgggagatgttcttggaggtctaccaccggcattggcaggttttgggcatcgagtaatgactattgtgccgcgctatgaccagtacaaagatgcatgggatacaagtgttgtaattgaggtgaaagtaggagatagaacagaaaaggttcgcttcttccattgttataagaggggagttgatcgtgtctttgtggatcacccttggtttcttgaaaaggtatgggggaaaactggacaaaaactttatggaccaactactggagatgattacgaagacaaccaactgcgttttagcctcttttgccaggctgctttggaagccccaagggttctgagtcttaattccagtaaatatttctctggaccatatggtgaagatgtcattttcgtcgccaatgattggcacactgcccttatcccctgctacttgaaaagtatgtaccagtcaaggggcatctatacgaatgcccgggttgttttttgtatccacaacattgcttaccaaggaagatttgcattcgccgacttctcacttctaaatctcccagaccaatttaagagctcctttgactttattgatgggcatgttaaaccagtggttggaaggaaaatcaattggttgaaagctggacttatagaatcatggtttgtgataaccgttagtccaaactatgctaaagaactggtgtcaggtccagacaaaggagtggaattggacaacatcattcgcaaaattgatgatgatggtcgtttggttggaattgtgaatggcatggatgttcaggagtggaatccaaccactgacaaatatatagctgtcaaatatgatgtttcaacagtattggaagcaaaggctcttctgaaagaagccctccaagcagaagttggattgccagtcgacagaaatattcctctcattggtttcattggtaggcttgaagagcaaaaaggttctgatattcttgcagaagccattccccaatttatcaagcagaatgttcagttggtagccctaggaacaggaaaaaaacaaatggaaaagcagcttgaggaacttgaaatatcataccctgataaggccagaggagtggcaaaattcaatgttcccctagcccacatgataatagctggagctgattttatattggttcctagcagatttgagccttgtggtctcattcagttacaagctatgcgctatggatctgtaccaattgttgcctcaacaggtggattagttgacactgtcaaagaaggcttcactggatttcagatgggtgccttcaatgttgaatgtgatgctgtggatccggctgatgtggatgctatatcaaagactgtcaaaagggcccttgcagtctatggaactccagcttttacagaaattatcaagaactgcatggctcaagatctttcatggaaggggcctgctaaggagtgggaggaagtgctgctaagcttgggagttcctggcagtgaacctggaagtgatggagaagaaattgctccacaggcaaaggaaaatgtggcaacaccataa

SEQ ID NO: 52609 - protein, 619 aa, Glycine max
MATLTASSNLVSRNSHVHHGPTTASYESKAVAMGLRSLKQTNTHNGLRILNPVDELLNRTPIKTNAVQAMRKGPQGKNARPKGMITCGMTFIIIGTEVAPWCKTGGLGDVLGGLPPALAGFGHRVMTIVPRYDQYKDAWDTSVVIEVKVGDRTEKVRFFHCYKRGVDRVFVDHPWFLEKVWGKTGQKLYGPTTGDDYEDNQLRFSLFCQAALEAPRVLSLNSSKYFSGPYGEDVIFVANDWHTALIPCYLKSMYQSRGIYTNARVVFCIHNIAYQGRFAFADFSLLNLPDQFKSSFDFIDGHVKPVVGRKINWLKAGLIESWFVITVSPNYAKELVSGPDKGVELDNIIRKIDDDGRLVGIVNGMDVQEWNPTTDKYIAVKYDVSTVLEAKALLKEALQAEVGLPVDRNIPLIGFIGRLEEQKGSDILAEAIPQFIKQNVQLVALGTGKKQMEKQLEELEISYPDKARGVAKFNVPLAHMIIAGADFILVPSRFEPCGLIQLQAMRYGSVPIVASTGGLVDTVKEGFTGFQMGAFNVECDAVDPADVDAISKTVKRALAVYGTPAFTEIIKNCMAQDLSWKGPAKEWEEVLLSLGVPGSEPGSDGEEIAPQAKENVATP

SEQ ID NO: 52610 - DNA, 1479 bp, Hordeum vulgare
  CDS (1)..(1479)
atgaacgtggtcgtcgttgctgctgaatgttctccctggtgcaaaacaggtggtcttggagatgttgcgggtgctttgcccaaggctttggctaagagaggacatcgtgttatggttgtggtaccaaggtatggggactatgaggaagcctacgatgtcggagtccgaaaatactacaaggctgctggacaggatatggaagtgaattatttccatgcttatatcgatggagtggattttgtgttcattgacgctcctctcttccgacaccgtcagcaagacatttatgggggcagcagacaggaaattatgaagcgcatgattttgttctgcaaggccgctgtcgaggttccttggcacgttccatgcggcggtgtcccttacggggatggaaatctggtcttcattgcaaatgattggcacacggcactcctgcctgtctatctgaaagcatattacagggaccatggtttgatgcaatacagtcgctccgttatggtgatacataacatcgctcaccagggccgtggccctgtagatgaattcccgttcaccgagttgcctgagcactacctggaacacttcagactgtacgaccccgtcggcggtgagcacgccaactacttcgccgccggcctgaagatggcggaccaggttgtcgtcgtgagccccgggtacctgtgggagctgaagacggtggagggcggctgggggcttcacgacatcatacggcagaacgactggaagacccgcggcatcgtgaacggcatcgacaacatggagtggaaccctgaggtggacgtccacctgaagtcggacggctacaccaacttctccctgaagacgctggactccggcaagcggcagtgcaaggaggccctgcagcgcgagctggggctgcaggtccgcggcgacgtgccgctgctcgggttcatcgggcggctggacgggcagaagggcgtggagatcatcgcggacgcgatgccctggatcgtgagccaggacgtgcagctggtgatgctgggcacggggcgccacgacctggagagcatgctgcagcacttcgagcgggagcaccacgacaaggtgcgcgggtgggtggggttctccgtgcgcctggcgcaccggatcacggcgggcgccgacgcgctcctcatgccctcccggttcgagccgtgcgggctgaaccagctctacgcgatggcctacggcaccatccctgtcgtgcacgccgtcggcggcctgagggataccgtgccgccgttcgaccccttcaaccactccgggctcgggtggacgttcgaccgcgccgaggcgcacaagctgatcgaggcgctcgggcactgcctccgcacctaccgggaccacaaggagagctggaggggcctccaggagcgcggcatgtcgcaggacttcagctgggaacatgccgccaagctctacgaggacgtcctcgtccaggccaagtaccagtggtga

SEQ ID NO: 52611 - protein, 492 aa, Hordeum vulgare
MNVVVVAAECSPWCKTGGLGDVAGALPKALAKRGHRVMVVVPRYGDYEEAYDVGVRKYYKAAGQDMEVNYFHAYIDGVDFVFIDAPLFRHRQQDIYGGSRQEIMKRMILFCKAAVEVPWHVPCGGVPYGDGNLVFIANDWHTALLPVYLKAYYRDHGLMQYSRSVMVIHNIAHQGRGPVDEFPFTELPEHYLEHFRLYDPVGGEHANYFAAGLKMADQVVVVSPGYLWELKTVEGGWGLHDIIRQNDWKTRGIVNGIDNMEWNPEVDVHLKSDGYTNFSLKTLDSGKRQCKEALQRELGLQVRGDVPLLGFIGRLDGQKGVEIIADAMPWIVSQDVQLVMLGTGRHDLESMLQHFEREHHDKVRGWVGFSVRLAHRITAGADALLMPSRFEPCGLNQLYAMAYGTIPVVHAVGGLRDTVPPFDPFNHSGLGWTFDRAEAHKLIEALGHCLRTYRDHKESWRGLQERGMSQDFSWEHAAKLYEDVLVQAKYQW

SEQ ID NO: 52612 - DNA, 1800 bp, Triticum aestivum
  CDS (1)..(1800)
atgggttccattcctacttattgttcttatcaaacaaacagtgttggttcactgaaactgtcacctcacatccaattccagcaatcttgtaacaatggagttatgtttgtatccatgcggaataagacacagctggccaaaagaagagccacaaattatggaactcatcctaattctagtaggactcctgcacctatcgtatgttcaactggaatgcccataattttcgttgccactgaagtgcacccatggtgcaaaactggaggccttggtgatgtcgtaggaggattgcccccagctctggctgcaatggggcaccgggttatgacgatagctcctcgctatgatcagtacaaggatacatgggatacaaatgttcttgttgaggtaattgttggtgacagaacagaaacagtgcgcttttttcactgctacaaaaggggagttgatcgtgtttttgttgatcatcctatgtttcttgagaaggtatggggcaaaactggatcaaaattgtatgggcctaccactggaacagacttccgagataaccagttacggttctgccttttgtgccttgctgcattggaggctccgagggttcttaatctcaacaattctgaatacttctctggaccatatggagaaaatgttgtcttcgttgcaaatgactggcacactgcagttttgccatgctatttgaagagcatgtataagcaaaatggaatttatgagaatgccaaggttgctttctgcattcacaatatcgcctatcagggcagatttcccagagcggacttcgaacttcttaatttacctgaaagtttcatgccgtcatttgattttgttgatgggcatgttaagccagtagtagggagaaagattaactggatgaaggcagggatcactgagtgtgacgtggtccttacagttagtccacattatgtcaaagaactcacttctggcccagagaaaggtgttgagttggatggcgtccttcgtgcaaagcctcttgaaactggaattgtaaatggaatggatgttgttgattggaatccagcaacagataagtacatcagtgtcaaatacaatgcaacaacggtggcagaagcaagagctctcaataaagaaatactgcaagctgaagttggattgcctgtggactctagcatacctgttatagttttcattggacgtcttgaagaacagaaagggtcagacatactaattgcagccataccggagtttctcgaggagaatgttcagataattgttctcggcacagggaagaagaaaatggaggaggaactgatgctgctagaagcgaagtacccacagaatgccagaggcatagcaaaattcaatgtcccattggcgcacatgatgttcgccggggctgatttcataattgttccaagtaggttcgagccatgtggcctcatccaattgcaagggatgagatatggagtgattcccatctgttcatccaccggaggacttgttgacacggtgagggagggtgtcaccggattccacatgggttcgttcaatgtcgagtttgaaaccgtcgatccagcagatgtcgcggcagtcgcttcgaatgtcacacgagctctgaaacagtacaaaacaccgtcgttccacgcaatggttcagaattgcatggcgcaggacctatcttggaagggaccggcaaagaagtgggaggaggctcttcttggcctaggagtcgagggaagtcagccgggcatcgagggcgaggagatcgctccacttgcgaaacagaatgtggccactccctga

SEQ ID NO: 52613 - protein, 599 aa, Triticum aestivum
MGSIPTYCSYQTNSVGSLKLSPHIQFQQSCNNGVMFVSMRNKTQLAKRRATNYGTHPNSSRTPAPIVCSTGMPIIFVATEVHPWCKTGGLGDVVGGLPPALAAMGHRVMTIAPRYDQYKDTWDTNVLVEVIVGDRTETVRFFHCYKRGVDRVFVDHPMFLEKVWGKTGSKLYGPTTGTDFRDNQLRFCLLCLAALEAPRVLNLNNSEYFSGPYGENVVFVANDWHTAVLPCYLKSMYKQNGIYENAKVAFCIHNIAYQGRFPRADFELLNLPESFMPSFDFVDGHVKPVVGRKINWMKAGITECDVVLTVSPHYVKELTSGPEKGVELDGVLRAKPLETGIVNGMDVVDWNPATDKYISVKYNATTVAEARALNKEILQAEVGLPVDSSIPVIVFIGRLEEQKGSDILIAAIPEFLEENVQIIVLGTGKKKMEEELMLLEAKYPQNARGIAKFNVPLAHMMFAGADFIIVPSRFEPCGLIQLQGMRYGVIPICSSTGGLVDTVREGVTGFHMGSFNVEFETVDPADVAAVASNVTRALKQYKTPSFHAMVQNCMAQDLSWKGPAKKWEEALLGLGVEGSQPGIEGEEIAPLAKQNVATP

SEQ ID NO: 52614 - DNA, 1815 bp, Triticum aestivum
  CDS (1)..(1815)
atggcggctctggtcacgtcccagctcgccacctccggcaccgtcctcggcatcaccgacaggttccggcgtgcaggtttccagggcgtgaggccccggagcccggcggatgcggctctcggcatgaggaccgtcggagctagcgccgccccaacgcaaagccggaaagcgcaccgcgggacccggcggtgcctctccatggtggtgcgcgccaccggcagcggcggcatgaacctcgtgttcgtcggcgccgagatggcgccctggagcaagaccggcggcctcggcgacgtcctcgggggcctccccccagccatggccgccaacggccaccgggtcatggtcatctccccgcgctacgaccagtacaaggacgcctgggacaccagcgtcgtctccgagatcaaggtcgcggacgagtacgagagggtgaggtacttccactgctacaagcgcggggtggaccgcgtgttcgtcgaccacccgtgcttcctggagaaggtccggggcaagaccaaggagaagatctacgggcccgatgccggcacggactacgaggacaaccagctacgcttcagcctgctctgccaggcagcgcttgaggcacccaggatcctcgacctcaacaacaacccatacttctccggaccctacggggaagacgtggtgttcgtgtgcaacgactggcacacgggccttctggcctgctacctcaagagcaactaccagtccagtggcatctataggacggccaaggtagcgttctgcatccacaacatctcgtatcagggccgcttctccttcgacgacttcgcgcagctcaacctgcccgacaggttcaagtcgtccttcgacttcatcgacggctacgacaagccggtggaggggcgcaagatcaactggatgaaggccgggatcctgcaggccgacaaggtgctgacggtgagcccctactacgcggaggagctcatctctggcgaagccaggggctgcgagctcgacaacatcatgcgcctcactgggatcaccggcatcgtcaacggcatggatgttagcgagtgggaccccaccaaggacaagttcctcgccgtcaactacgacatcaccaccgcgttggaggggaaggcgctgaacaaggaggcgctgcaggccgaggtggggctgccggtggaccggaaggtgcccctggtggccttcatcggcaggctggaggagcagaagggccccgacgtgatgatcgccgccatcccggagatcttgaaggaggaggacgtccagatcgttctcctgggcaccgggaagaagaagtttgagcggctgctcaagagcgtggaggagaagttcccgagcaaggtgagggccgtggtcaggttcaacgcgccgctggctcaccagatgatggccggcgccgacgtgctcgccgtcaccagccgcttcgagccctgcggcctcatccagctccaggggatgcgctacggaacgccgtgcgcgtgcgcgtccaccggcgggctcgtcgacacgatcatggagggcaagaccgggttccacatgggccacctcagcgtcgactgcaacgtggtggagccggccgacgtgaagaaggtggtgaccaccctgaagcgcgccgtcaaggtcgtcggcacgccagcctaccatgagatggtcaagaactgcatgatccaggatctctcctggaaggggccagccaagaactgggaggacgtgcttctggaactgggggtcgaggggagcgagccaggggtcatcggcgaggagattgcgccgctcgccatggagaacgtcgccgctccctga

SEQ ID NO: 52615 - protein, 604 aa, Triticum aestivum
MAALVTSQLATSGTVLGITDRFRRAGFQGVRPRSPADAALGMRTVGASAAPTQSRKAHRGTRRCLSMVVRATGSGGMNLVFVGAEMAPWSKTGGLGDVLGGLPPAMAANGHRVMVISPRYDQYKDAWDTSVVSEIKVADEYERVRYFHCYKRGVDRVFVDHPCFLEKVRGKTKEKIYGPDAGTDYEDNQLRFSLLCQAALEAPRILDLNNNPYFSGPYGEDVVFVCNDWHTGLLACYLKSNYQSSGIYRTAKVAFCIHNISYQGRFSFDDFAQLNLPDRFKSSFDFIDGYDKPVEGRKINWMKAGILQADKVLTVSPYYAEELISGEARGCELDNIMRLTGITGIVNGMDVSEWDPTKDKFLAVNYDITTALEGKALNKEALQAEVGLPVDRKVPLVAFIGRLEEQKGPDVMIAAIPEILKEEDVQIVLLGTGKKKFERLLKSVEEKFPSKVRAVVRFNAPLAHQMMAGADVLAVTSRFEPCGLIQLQGMRYGTPCACASTGGLVDTIMEGKTGFHMGHLSVDCNVVEPADVKKVVTTLKRAVKVVGTPAYHEMVKNCMIQDLSWKGPAKNWEDVLLELGVEGSEPGVIGEEIAPLAMENVAAP

SEQ ID NO: 52616 - DNA, 2745 bp, Triticum aestivum
  CDS (1)..(2745)
atggcgtgctccgcggcggcgggcgtcgaggcgaccgccctcctgtccccgcgctgccccgccccttccccgcccgacggccgctcccgccgccgcctcgccctcgcctcccgcacgcgccaccgcagcctcagggcggccgcgcagcgccctcacaagagcacaaccggcgccgaccccctttataacaacagggccaatgtacgaagcgacgaggcagcggtttccgccgaaaaagaacggcaaaggaaatacaacgatggagatggcatatcaaaccttaagctggaagatttggtaggaatgatacagaacaccgagaagaatatacttcttttgaatcaagcccgtcttcaggcaatggaacacgctgataaaattcttaaagaaaaggaagccttgcagagaaagataaacattttagagacgaggttgtcagaaacagatgaacaacataagctttcaagtgaagggaatttcagtgactctccactagcattggagcttgatattctaaaggaagagaacattctactgaaggaggacatagaatttttcaaaacaaagcttatagaggttgccgagatagaggagggtatattcaaattggagaaagagcatgctcttttagatgcttcccttagggagctggagtctaggtttatagccgcccaagcagatacgatgaaacttggtcctagggatgcctggtgggagaaagtagaaaaattggaagacttgcttgagaccacagcaaaccaagtagagcatgctgctgtgatattggaccacaatcatgatctgcaggataggcttgacaatttagaggcatcactgcaagcagcaaatatttcaaagttctcttgttctcttgttgatcttttgcagcaaaaggtcaaattggtagaagaccgcttccaagcatgtaacagcgaaatgcattctcagattgaactgtacgagcattcaatagtggaatttcatgatactcttagcaaactaatagaggaaagtgagaaaagatcactggagaattttacaggaaacatgccttcggaactatggagcaaaatttcccttttaattgatggatggttactggagaagaaaatatcttacaatgacgcaagtatgttgcgagaaatggttcagaaaagggacagtcgtcttcgggaagcatacttgtcatacagaggtaccgaaaacagggaagttatggacaacttacttaagatggcattaccaggaaccagttctggtttgcacatcgctcacatagcagcagagatggctcctgtcgcgaaggttggtggcctggcagatgtgatatctggtcttgggaaggcacttcagaaaaaaggccatctagtagagatcattcttcccaaatacgactgcatgcaggttgaccaagttagcaatctaaaggttttagatgttcttgtgcagtcctacttcgaaggaaatatgttcaacaacaaaatttggaccgggactgttgaaggcctacccgtctactttattgagccacagcatccagcgatgttcttttcgagggctcagtactatggagagcatgatgacttcaaacgtttttcgtacttcagccgtgcggcactagaattactttatcaatctgggaagaaagttgatataatccactgccatgactggcaaactgcatttgttgcacctctttattgggatgtatatgcaaatctaggcttcaactcagctagaatttgcttcacctgtcataattttgaataccaaggaactgctccagctcgtgatttagcatggtgtggtcttgatgttgagcacctagacagaccagacaggatgcgggacaattcgcatggcagaataaatgctgttaagggagcagttgtgtattcaaacatcgtgacaactgtctcgccaacatatgcactagaggttcgctcagagggtgggcgtggactccaagatacacttaaagtacattccaggaaatttcttgggatacttaatggaatcgacacagatacatggaacccttgcacagataggtatctcaaggtccagtataatgctaaggatctccagggaaaggcagccaacaaagcagccctcagagagcaactaaacctggcttctgcatatccttcacaaccactggttggttgcattaccaggctggttgctcagaagggtgtacatcttatcaggcatgcaatatacaaaacagctgaattaggaggacagtttgtccttctgggttcaagtccagtaccagaaattcagagggagtttgaaggtattgcagaccattttcagaacaacaacaatatccggctgattttgaagtatgatgatgcgctgtctcattgcatatatgctgcgtctgacatgttcattgttccctctatatttgagccatgtggcctcactcagatgatagccatgagatatggttctgtgccaatcgttcggaaaactggtgggctgaatgacagtgtctttgacttcgatgacgaaacaatacccatggaggtgcggaacggctttacatttgtcaaggccgacgagcagggcctaagcagcgcgatggagagggcgttcaactgctacacgaggaagcccgaggtgtggaaacagcttgtgcagaaagacatgacgatcgatttcagctgggacacctcggcttcgcagtacgaggacatctaccagaaggcggtggctcgagcgagggcagtggcgtga

SEQ ID NO: 52617 - protein, 914 aa, Triticum aestivum
MACSAAAGVEATALLSPRCPAPSPPDGRSRRRLALASRTRHRSLRAAAQRPHKSTTGADPLYNNRANVRSDEAAVSAEKERQRKYNDGDGISNLKLEDLVGMIQNTEKNILLLNQARLQAMEHADKILKEKEALQRKINILETRLSETDEQHKLSSEGNFSDSPLALELDILKEENILLKEDIEFFKTKLIEVAEIEEGIFKLEKEHALLDASLRELESRFIAAQADTMKLGPRDAWWEKVEKLEDLLETTANQVEHAAVILDHNHDLQDRLDNLEASLQAANISKFSCSLVDLLQQKVKLVEDRFQACNSEMHSQIELYEHSIVEFHDTLSKLIEESEKRSLENFTGNMPSELWSKISLLIDGWLLEKKISYNDASMLREMVQKRDSRLREAYLSYRGTENREVMDNLLKMALPGTSSGLHIAHIAAEMAPVAKVGGLADVISGLGKALQKKGHLVEIILPKYDCMQVDQVSNLKVLDVLVQSYFEGNMFNNKIWTGTVEGLPVYFIEPQHPAMFFSRAQYYGEHDDFKRFSYFSRAALELLYQSGKKVDIIHCHDWQTAFVAPLYWDVYANLGFNSARICFTCHNFEYQGTAPARDLAWCGLDVEHLDRPDRMRDNSHGRINAVKGAVVYSNIVTTVSPTYALEVRSEGGRGLQDTLKVHSRKFLGILNGIDTDTWNPCTDRYLKVQYNAKDLQGKAANKAALREQLNLASAYPSQPLVGCITRLVAQKGVHLIRHAIYKTAELGGQFVLLGSSPVPEIQREFEGIADHFQNNNNIRLILKYDDALSHCIYAASDMFIVPSIFEPCGLTQMIAMRYGSVPIVRKTGGLNDSVFDFDDETIPMEVRNGFTFVKADEQGLSSAMERAFNCYTRKPEVWKQLVQKDMTIDFSWDTSASQYEDIYQKAVARARAVA

SEQ ID NO: 52618 - DNA, 1830 bp, Zea mays
  CDS (1)..(1830)
atggctgcaacgatgggttcaatatctgccaacggttcttaccaaacaaataggcccagtgcactaaagcaggcacctcacatgcaattccaacaatgttgcaacggtggacttaggttcttaagcaagcactcccaatccacgcgaagtaagatacaggtggctaaaagaagagctacagataatggaattcatccaaagactacgggacatcgggcacctattgtatgttctgctgggatgactattgtatttgttgcaactgaagtgcacccatggtgcaaaactggtggcctcggtgatgttgtaggaggactgcccccagctttggctgctatgggacaccgtgtcatgacaatagctcctcgttatgatcaatacaaggatgcatgggatacaagtgtccttgttgaggtaaatattggtgacacggtagaaactgttcgattcttccactgctacaaaagaggagtcgatcgtgtttttgttgatcatcctatgtttcttgaaaaggtatggggcaagactggagcaaaattgtatggtcctactactggaactgactatcgagataaccagttgaggttctgccttttgtgccttgctgctttggaggctccaagagttctcaatttcaacaattctgaatatttctctggaccatatggggaagatgttgtcttcgtagccaatgattggcacactgctattttgccatgttatctgaagagcatgtataagccaaatggaatttataaaaatgctaaggttgctttctgcatacataatattgcctatcaaggtagatttgccagagcagacttcgatcttcttaatctacctgacagtttcttgccatcatttgattttattgatggacatgttaagcctgttctagggagaaagcttaactggatgaaggcagggatcattgagagtgatctggttctaacagtcagtccacattatgtcaaggaactcacttctggcccagataagggtgttgagttggatggtgtccttcgcacaaagcctctagaaattggaatcgtaaatggcatggatgtttatgaatgggatccttcaacagataagtacatcagcgtgaaatatgatgcaacaacggtaactgaagcaagggctctcaataaagagaggttgcaagccgaagtcggattgcctgtggactcgagcatccctgttatagttttcgtcgggcgtctcgaagaacagaaagggtccgacatactcattgcagccattccagagttcgtgggcgagaatgtccagataatcgttcttggcacgggaaagaagaagatggaggaggaactaacgcagctggaagtgaaatatccaaacaacgctagaggcatagcgaaattcaatgttccattggcacacatgatgtttgccggggctgacttcattatcgtcccgagcaggtttgagccatgtggtctcattcagctgcaagggatgagatatggagtgattcccatctgttcatccactggaggacttgtcgacacggttgaggagggtgtcaccggattccacatgggttctttcaatgtcgagtgtgaaactgtagacccagccgacgtgacagcagtagcgtcagccgtcacgcgagccctgaagcagtacgacaccccggcattccatgagatggttcagaactgcatggcgcaagacctgtcctggaaggggcctgcgaagaagtgggaggaggtgcttctgggccttggagtcgaggggagtcgagctggtatcgacgacgcagaggagatcgccccacttgccaaggaaaacgtagccactccgtga

SEQ ID NO: 52619 - protein, 609 aa, Zea mays
MAATMGSISANGSYQTNRPSALKQAPHMQFQQCCNGGLRFLSKHSQSTRSKIQVAKRRATDNGIHPKTTGHRAPIVCSAGMTIVFVATEVHPWCKTGGLGDVVGGLPPALAAMGHRVMTIAPRYDQYKDAWDTSVLVEVNIGDTVETVRFFHCYKRGVDRVFVDHPMFLEKVWGKTGAKLYGPTTGTDYRDNQLRFCLLCLAALEAPRVLNFNNSEYFSGPYGEDVVFVANDWHTAILPCYLKSMYKPNGIYKNAKVAFCIHNIAYQGRFARADFDLLNLPDSFLPSFDFIDGHVKPVLGRKLNWMKAGIIESDLVLTVSPHYVKELTSGPDKGVELDGVLRTKPLEIGIVNGMDVYEWDPSTDKYISVKYDATTVTEARALNKERLQAEVGLPVDSSIPVIVFVGRLEEQKGSDILIAAIPEFVGENVQIIVLGTGKKKMEEELTQLEVKYPNNARGIAKFNVPLAHMMFAGADFIIVPSRFEPCGLIQLQGMRYGVIPICSSTGGLVDTVEEGVTGFHMGSFNVECETVDPADVTAVASAVTRALKQYDTPAFHEMVQNCMAQDLSWKGPAKKWEEVLLGLGVEGSRAGIDDAEEIAPLAKENVATP

SEQ ID NO: 52620 - DNA, 2730 bp, Zea mays
  CDS (1)..(2730)
atgtcgtgctcggcggcggcgggcgccgaggccaccgctctcctgttccgcagcgccgctccgtccacgatcgtcgggcgtcaccgcctcgctatgtctcgccggacttcgcgccgaaacctcaggactggtgtgcaccctcatcagaagagtgcacctagtgctaaccatcgtaacagggctagcattcagagagatagagcatcagcttccattgatgaagaacagaaacagatgtctgaagatgaaaatggcctactagacattcaactggaagatctggtaggaatgatacagaatacccagaagaatatattgcttctgaatcaagctcgtcttcaagcattggaacgtgctgacaaaattcttaaagagaaagaaactttgcaacagaagataaacattttagagatgaaactgtcagaaacaggtaaacaatctgtgctttctagtgaagtaaagtctgatgaagagagtctggagtttgatgtcgtaaaggaagagaatatgctactgaaggatgagatgaattttctaaaaggaaagcttattgagataactgagacagaggagagtctattcaagttggagaaagagtgtgctcttctaaatgcttcccttagggagctcgagtgtacatccacttctgcccaatctgatgtgttgaaacttggccctctgcaacaagatgcctggtgggagaaagtagaaaatttggaagacttgcttgattccacagcaaaccaagtggagcatgcttctttgacgctagatggttaccgtgatttccaggataaggttgacaaactaaaagcatcattgggaacaacaaacatatcagagttctggcttcaattggttgatattatgcagcaaagagaaaaatcaggagaagagcgcttgcaaccatcgaatcatgaaatgcattcacaaattgaactttatgaacactcaatagtggagtttcatggtactctcagcaaactaataaatgaaagtgagaaaaagtcaatggagcattatgcagaaggcatgccatcagagttctggagtaggatctctcttctgattgatgggtggtcgcttgagaagaaaatatccattaatgatgcaagtatgttgagagaaatggcttggaaaagggataatcgcctccgggaagcttacttgtcatccagaggaatggaagagagggaactgatagatagttttctaaagatggcactaccaggaacaagttctggtttgcacattgtccacatagcagcagagatggctcctgtcgcaaaggttggtggtctggcagatgtgatctctggtcttgggaaggcacttcaaaaaaaggggcaccttgtagagattattcttcccaaatatgattgcatgcagcataaccaaataaataatcttaaggttctagatgttgtggtgaagtcttactttgaaggaaatatgtttgccaacaagatatggactggaactgttgaaggtcttccggtctactttattgaaccgcaacatccaggtaagttcttctggagggcacaatactacggagagcatgatgacttcaaacgtttttcgtactttagccgtgttgcactggaattgctttaccaatctgggaagaaagttgacataattcactgccatgactggcagactgcatttgttgcacctctttactgggatgtatatgcaaacctgggcttcaactcagctagaatttgttttacctgtcacaattttgaatatcaaggaatcgctccagctcaggacttagcatattgtggtcttgatgttgatcacctggatagaccagacagaatgcgggataattcacatggcagaataaatgttgttaagggtgcagttgtatattccaacattgtgacaactgtatcaccaacatatgcacaagaggttcgctcagagggtgggcgtgggctccaagatacactcaaagtgcactccaagaaatttgttggaatacttaatggcattgacacagatacttggaatccgtctacggataggtttctcaaggttcaatacagtgctaatgatctatatggaaagtcagcaaacaaagcagctcttaggaagcagttgaagcttgcttccacacaagcttctcaaccattagttggttgcattacgaggctagttcctcaaaagggtgtacatctcatcaggcatgcaatatataaaataactgagttgggtggtcaatttgttctgctgggttcaagtccagtacagcatatccagagagagttcgagggtattgcggaccaatttcagaacaacaacaatgtcaggctgcttttgaagtatgatgatgctctggcacatatgatctttgcagcatcagacatgttcattgttccttctatgtttgaaccatgtggcctcactcagatggtagctatgcgatatggttctgtgccagttgttcggagaaccggcggtttgaatgacagtgtcttcgatttggacgatgaaacgatacccatggaggtgcgaaatggcttcacctttttgaaggctgatgagcaggattttggtaatgcactggaaagagctttcaactactaccacagaaaacctgaagtttggaaacagttggtgcagaaagacatgaagatagatttcagctgggatacttcagtttctcaatacgaagaaatctatcagaaagcagccactcgagccagggcagcggcataa

SEQ ID NO: 52621 - protein, 909 aa, Zea mays
MSCSAAAGAEATALLFRSAAPSTIVGRHRLAMSRRTSRRNLRTGVHPHQKSAPSANHRNRASIQRDRASASIDEEQKQMSEDENGLLDIQLEDLVGMIQNTQKNILLLNQARLQALERADKILKEKETLQQKINILEMKLSETGKQSVLSSEVKSDEESLEFDVVKEENMLLKDEMNFLKGKLIEITETEESLFKLEKECALLNASLRELECTSTSAQSDVLKLGPLQQDAWWEKVENLEDLLDSTANQVEHASLTLDGYRDFQDKVDKLKASLGTTNISEFWLQLVDIMQQREKSGEERLQPSNHEMHSQIELYEHSIVEFHGTLSKLINESEKKSMEHYAEGMPSEFWSRISLLIDGWSLEKKISINDASMLREMAWKRDNRLREAYLSSRGMEERELIDSFLKMALPGTSSGLHIVHIAAEMAPVAKVGGLADVISGLGKALQKKGHLVEIILPKYDCMQHNQINNLKVLDVVVKSYFEGNMFANKIWTGTVEGLPVYFIEPQHPGKFFWRAQYYGEHDDFKRFSYFSRVALELLYQSGKKVDIIHCHDWQTAFVAPLYWDVYANLGFNSARICFTCHNFEYQGIAPAQDLAYCGLDVDHLDRPDRMRDNSHGRINVVKGAVVYSNIVTTVSPTYAQEVRSEGGRGLQDTLKVHSKKFVGILNGIDTDTWNPSTDRFLKVQYSANDLYGKSANKAALRKQLKLASTQASQPLVGCITRLVPQKGVHLIRHAIYKITELGGQFVLLGSSPVQHIQREFEGIADQFQNNNNVRLLLKYDDALAHMIFAASDMFIVPSMFEPCGLTQMVAMRYGSVPVVRRTGGLNDSVFDLDDETIPMEVRNGFTFLKADEQDFGNALERAFNYYHRKPEVWKQLVQKDMKIDFSWDTSVSQYEEIYQKAATRARAAA

SEQ ID NO: 52622 - DNA, 5025 bp, Zea mays
  CDS (1)..(5025)
atggagatggtcctacggtcgcagagccctctctgccttcggagtgggccggtgctcatttttcgaccaaccgtcgcgggcggaggagggggcactcagtctttgttgaggactaccagatttgcgagaagaagggtcattcgatgcgttgtagcaagtccaggttgtcctaataggaaatctaggacagcgtctcccaacgtaaaagtagctgcttatagcaactatgcgccaagactcctcgttgagtcaagctccaagaagagcgaacaccatgatagcagcagacaccgtgaagaaactattgatacatacaatgggctgtcaggttctgatgcagcagaattgacaagtaatagagatgtagaaattgaagtggatttgcagcacatttctgaggaggaattgccaggaaaagtatcgattaatgcatcattaggagaaatggaaacagtggatgaagctgaggtcgaggaggataagtttgaggtagatacctcaggaattgtattgcgcaatgttgcagttcgggaagtggatccaaaggatgaacataatgctaaagatgtatttgtggtagattcgtcaggaactgcaccagataatgctgcagtggaggaagtggtagatgaagctgaggttgaagaggatatggttgatgtggatatcttgggacttgacttgaataatgcaacgatcgaggaaattgatttgatggaagaggctttactggagaacttcgacgtggattcaccaggcaatgcttctagtggtcgaacctatgggggtgtggatgagttgggtgagctgccttcaacatccgtggattgcatcgccattaacggaaaacgtagaagtttgaagcctaagcccttgccaattgtcaggttccaggaacaagaacagatagttttaagcattgttgacgaagaagggttgattgctagttcatgtgaagaaggccaaccggtggtagattacgataagcaagaggaaaactctaccgctttcgatgaacagaagcaattaactgatgatttccctgaagaaggcatatctatagttcacttccctgagccaaacaatgatattgttggatcctcaaaattcttggagcaaaaacaagaattggatggttcttataaacaagatcgatcaaccactggattgcatgaacaagatcagtctgttgttagttcacacggacaagataaatcaattgttggtgtgcctcagcaaatccagtacaatgatcaatctattgctggttctcatagacaagatcaatcaattgccggtgcacctgagcaaatccaatccgttgctggctatataaaaccaaatcaatctattgttggttcttgtaaacaacatgaattgattattcctgagcctaagaaaatcgaatccatcatcagttacaatgaaatagatcaatctattgttggttctcacaaacaagacaaatctgttgttagtgtgcctgagcaaatccaatccattgttagtcacagcaaaccaaatcaatctactgttgattcttatagacaagctgaatcaattattggtgtgcctgagaaagtccaatccatcaccagttacgataaactagaccagtccattgttggttctcttaaacaagatgagcctattattagcgtgcctgagaaaatccaatccattgtccattacactaaaccaaatcagtctattgttggcttgcccaaacaacaacaatcaattgttcatatcgttgaaccaaaacagtccatagatggtttccctaaacaagatctatcaatcgttggtatctccaatgagtttcaaacaaagcaactggctactgttgggactcatgatggattgcttatgaagggtgtggaagctaaggagacatctcaaaagactgaaggggatacacttcaggcaacgttcaatgtcgacaacttgtcacagaaacaggaaggcttaactaaagaagcagacgagataacaattattgagaaaatcaatgatgaagaccttgtgatgattgaagaacagaaaagcatagccatgaatgaagaacagacgattgttaccgaagaagacattccaatggctaaggttgagataggaattgacaaggccaaatttttacatctgctttctgaagaagagagttcatgggatgaaaatgaagtgggaataattgaggctgatgaacagtatgaagtcgatgagacatctatgtccactgaacaagatatccaggaatcacctaatgatgatttggatccacaagcactatggagtatgcttcaagagcttgctgaaaaaaattattcgctgggaaacaagttgtttacttatccagatgtattgaaagctgattcaacaattgatctctatttcaatcgtgatctatcagctgtggccaatgagcctgatgtacttatcaaaggagcattcaatgggtggaagtggagatttttcactgaaaaattgcacaagagcgagctggcaggggactggtggtgctgcaaactatacattcctaagcaggcatacagaatggactttgtgttttttaacggacacacggtatatgaaaataataacaataatgatttcgtgatacaaatagaaagcaccatggatgaaaatttatttgaggatttcttggctgaagaaaagcaacgagaacttgagaaccttgcaaatgaggaagctgaaaggaggagacaaactgatgagcagcggcgaatggaggaagaaagggccgcagataaagctgacagggtacaagccaaggttgaggtagagacgaagaagaataaattgtgcaatgtattgggtttagccagagctcctgttgataatttatggtacattgagcccatcacgactggacaagaggctactgtcagattgtattataacataaactcaagacctctagttcacagtactgagatatggatgcatggtggctataacaattggattgatggactctcttttgctgaaaggcttgttcatcatcatgacaaagattgtgattggtggtttgcagatgttgtcgtgcctgaaagaacatatgtattggactgggtttttgctgacggcccaccagggagtgcaaggaattatgacaacaatggaggacatgattttcatgctacccttccaaataacatgactgaggaagagtattggatggaagaagaacaaaggatctatacaaggcttcaacaagagaggagggaaagggaggaggctattaaaaggaaggctgagagaaatgcaaaaatgaaagctgagatgaaggaaaagactatgagaatgttcctggtttctcagaaacacattgtttacaccgaaccacttgaaatacatgctggaactactattgatgtgctttataatccttctaatacagttctaactggaaagccagaggtttggtttcgatgttcctttaatcgttggatgtatccaggtggggtgttgccacctcagaagatggtacaagcagaaaatggttcacacctaaaagcaacagtttacgttccacgagatgcctatatgatggacttcgttttctcggagtcagaagaaggtggaatttatgataacagaaatgggttagactatcatattcctgtttttgggtcaattgcaaaggaaccacctatgcacattgtccacatcgctgttgagatggcaccaatcgcaaaggttggaggtcttggtgatgttgtcactagtctttcacgtgctgtgcaagatttaggacacaatgtggaggttattcttccaaagtacggttgcttgaatctaagcaatgtcaagaatctacaaatccatcagagtttttcttggggtggttctgaaataaatgtgtggcgtggactagtcgaaggcctttgtgtttacttcctggaacctcaaaatgggatgtttggagtcggatatgtatatggcagggacgatgaccgccgatttggcttcttctgtcgttctgctctagagtttctcctccaaagtggatcttctccgaacataatacattgccatgattggtcaagtgctcctgttgcctggctacacaaggaaaactacgcgaagtctagcttggcaaatgcacgggtggtattcaccatccacaatcttgaatttggagcgcatcatattggcaaagcaatgagatattgtgataaagcaacaactgtctctaatacatattcaaaggaagtgtcaggtcatggtgccatcgttcctcatcttgggaaattctatggcattctcaatggaattgatccggatatatgggatccgtacaatgacaactttatcccggtccactacacttgtgagaatgtggttgaaggcaagagggctgctaagagggcactgcagcagaagtttgggttacagcaaatcgatgtccccgtcgtaggaatcgtcactcgcctgacagcccaaaaggggatccacctgatcaagcatgcgattcaccgtacactcgaacggaacggacaggtggttttgcttggttcagcgccggactctcgaatccaagctgattttgtcaacctggcgaataagctccacggcgtaaaccatgggcaagtgaggctttccttgacctacgacgagcctctctcgcatctgatatacgctggctctgacttcattctggtcccatctatatttgagccttgcggcctaactcagctcgtcgccatgcggtatgggaccatcccgattgtccgcaagactggagggctcttcgacactgtcttcgatgtggacaatgacaaggaacgagcccgagatcgaggccttgagcccaacgggtttagctttgacggagctgatagcaacggtgttgactacgcgctgaacagggcgatctcagcttggttcgatgcccggagctggttccactccctttgcaagagagtcatggagcaggactggtcgtggaaccgacctgccctcgactacatcgagctctaccgttcagcgtccaaattgtaa

SEQ ID NO: 52623 - protein, 1674 aa, Zea mays
MEMVLRSQSPLCLRSGPVLIFRPTVAGGGGGTQSLLRTTRFARRRVIRCVVASPGCPNRKSRTASPNVKVAAYSNYAPRLLVESSSKKSEHHDSSRHREETIDTYNGLSGSDAAELTSNRDVEIEVDLQHISEEELPGKVSINASLGEMETVDEAEVEEDKFEVDTSGIVLRNVAVREVDPKDEHNAKDVFVVDSSGTAPDNAAVEEVVDEAEVEEDMVDVDILGLDLNNATIEEIDLMEEALLENFDVDSPGNASSGRTYGGVDELGELPSTSVDCIAINGKRRSLKPKPLPIVRFQEQEQIVLSIVDEEGLIASSCEEGQPVVDYDKQEENSTAFDEQKQLTDDFPEEGISIVHFPEPNNDIVGSSKFLEQKQELDGSYKQDRSTTGLHEQDQSVVSSHGQDKSIVGVPQQIQYNDQSIAGSHRQDQSIAGAPEQIQSVAGYIKPNQSIVGSCKQHELIIPEPKKIESIISYNEIDQSIVGSHKQDKSVVSVPEQIQSIVSHSKPNQSTVDSYRQAESIIGVPEKVQSITSYDKLDQSIVGSLKQDEPIISVPEKIQSIVHYTKPNQSIVGLPKQQQSIVHIVEPKQSIDGFPKQDLSIVGISNEFQTKQLATVGTHDGLLMKGVEAKETSQKTEGDTLQATFNVDNLSQKQEGLTKEADEITIIEKINDEDLVMIEEQKSIAMNEEQTIVTEEDIPMAKVEIGIDKAKFLHLLSEEESSWDENEVGIIEADEQYEVDETSMSTEQDIQESPNDDLDPQALWSMLQELAEKNYSLGNKLFTYPDVLKADSTIDLYFNRDLSAVANEPDVLIKGAFNGWKWRFFTEKLHKSELAGDWWCCKLYIPKQAYRMDFVFFNGHTVYENNNNNDFVIQIESTMDENLFEDFLAEEKQRELENLANEEAERRRQTDEQRRMEEERAADKADRVQAKVEVETKKNKLCNVLGLARAPVDNLWYIEPITTGQEATVRLYYNINSRPLVHSTEIWMHGGYNNWIDGLSFAERLVHHHDKDCDWWFADVVVPERTYVLDWVFADGPPGSARNYDNNGGHDFHATLPNNMTEEEYWMEEEQRIYTRLQQERREREEAIKRKAERNAKMKAEMKEKTMRMFLVSQKHIVYTEPLEIHAGTTIDVLYNPSNTVLTGKPEVWFRCSFNRWMYPGGVLPPQKMVQAENGSHLKATVYVPRDAYMMDFVFSESEEGGIYDNRNGLDYHIPVFGSIAKEPPMHIVHIAVEMAPIAKVGGLGDVVTSLSRAVQDLGHNVEVILPKYGCLNLSNVKNLQIHQSFSWGGSEINVWRGLVEGLCVYFLEPQNGMFGVGYVYGRDDDRRFGFFCRSALEFLLQSGSSPNIIHCHDWSSAPVAWLHKENYAKSSLANARVVFTIHNLEFGAHHIGKAMRYCDKATTVSNTYSKEVSGHGAIVPHLGKFYGILNGIDPDIWDPYNDNFIPVHYTCENVVEGKRAAKRALQQKFGLQQIDVPVVGIVTRLTAQKGIHLIKHAIHRTLERNGQVVLLGSAPDSRIQADFVNLANKLHGVNHGQVRLSLTYDEPLSHLIYAGSDFILVPSIFEPCGLTQLVAMRYGTIPIVRKTGGLFDTVFDVDNDKERARDRGLEPNGFSFDGADSNGVDYALNRAISAWFDARSWFHSLCKRVMEQDWSWNRPALDYIELYRSASKL

SEQ ID NO: 52624 - DNA, 2199 bp, Zea mays
  CDS (1)..(2199)
atgtcgtcggcggccgtgtcgtcctcttcctccaccttcttcctcgcgctcgcctccgcctcccccgggggccgcaggcgggctagggtcggctcctcgccgttccacaccggcgccagcctgagtttcgcgttctgggcgccaccgtcgccgccgcgcgcgccccgggacgcagcgctggtgcgcgctgaggctgaggccgggggcaaggacgcgccgccggagaggagcggcgacgccgccaggttgccccgcgctcggcgcaatgcggtctccaaacggagggatcctcttcagccggtcggccggtacggctccgcgacgggaaacacggccaggaccggcgccgcgtcctgccagaacgccgcattggcggacgttgagatcaagtccatcgtcgccgcgccgccgacgagcatagtgaagttcccagcgccgggctacaggatgatccttccctctggggacatagcgccggagactgtcctcccagccccgaagccactgcatgaatcgcctgcggttgacggagattcaaatggaattgcacctcctacagttgagccattagtacaggaggccacttgggatttcaagaaatacatcggttttgacgagcctgtcgaagcgaaggatgattccagggttggtgcagatgatgctggttcttttgaacattatggggacaatgattctgggcctttggctggggagaatgttatgaacgtgatcgtggtggctgctgaatgttctccatggtgcaaaacaggtggtcttggagatgttgtgggagctttacccaaggctttagcgagaagaggacatcgtgttatggttgtggtaccaaggtatggggactatgtggaagcctttgatatgggaatccggaaatactacaaagctgcaggacaggacctagaagtgaactatttccatgcatttattgatggagtcgactttgtgttcattgatgcccctcttttccggcaccgtcaagatgacatatatgggggaagtaggcaggaaatcatgaagcgcatgattttgttttgcaaggttgctgttgaggttccttggcacgttccatgcggtggtgtgtgctacggagatggaaatttggtgttcattgccaatgattggcacactgcactcctgcctgtttatctgaaggcatattacagagaccatgggttaatgcagtacactcgctccgtcctcgtcatacataacatcgcccaccagggccgtggtcctgtagatgaattcccgtacatggacttgcctgaacactaccttcaacatttcgagctgtacgatcccgtcggtggcgagcacgccaacatctttgccgcgggtctgaagatggcagaccgggtggtgactgtcagccgcggctacctgtgggagctgaagacagtggaaggcggctggggcctccacgacatcatccgttctaacgactggaagatcaatggcatcgtgaacggcatcgaccaccaggagtggaaccccaaggtggacgtgcacctgcggtcggacggctacaccaactactccctcgagacactcgacgctggaaagcggcagtgcaaggcggccctgcagcgggagctgggcctggaagtgcgcgacgacgtgccgctgctcggcttcatcgggcgtctggatggacagaagggcgtggacatcatcggggacgcgatgccgtggatcgcggggcaggacgtgcagctggtgatgctgggcaccgggcgcgccgacctggaacgaatgctgcagcacttggagcgggagcatcccaacaaggtgcgcgggtgggtcgggttctcggtgcctatggcgcatcgcatcacggcgggcgccgacgtgctggtgatgccctcccgcttcgagccctgcgggctgaaccagctctacgcgatggcatacggcaccgtccctgtggtgcacgccgtgggcgggctcagggacaccgtggcgccgttcgacccgttcggcgacgccgggctcgggtggacttttgaccgcgccgaggccaacaagctgatcgaggcgctcaggcactgcctcgacacgtaccggaactacgaggagagctggaagagtctccaggcgcgcggcatgtcgcaggacctcagctgggaccacgcggctgagctctacgaggacgtccttgtcaaggccaagtaccagtggtga

SEQ ID NO: 52625 - protein, 732 aa, Zea mays
MSSAAVSSSSSTFFLALASASPGGRRRARVGSSPFHTGASLSFAFWAPPSPPRAPRDAALVRAEAEAGGKDAPPERSGDAARLPRARRNAVSKRRDPLQPVGRYGSATGNTARTGAASCQNAALADVEIKSIVAAPPTSIVKFPAPGYRMILPSGDIAPETVLPAPKPLHESPAVDGDSNGIAPPTVEPLVQEATWDFKKYIGFDEPVEAKDDSRVGADDAGSFEHYGDNDSGPLAGENVMNVIVVAAECSPWCKTGGLGDVVGALPKALARRGHRVMVVVPRYGDYVEAFDMGIRKYYKAAGQDLEVNYFHAFIDGVDFVFIDAPLFRHRQDDIYGGSRQEIMKRMILFCKVAVEVPWHVPCGGVCYGDGNLVFIANDWHTALLPVYLKAYYRDHGLMQYTRSVLVIHNIAHQGRGPVDEFPYMDLPEHYLQHFELYDPVGGEHANIFAAGLKMADRVVTVSRGYLWELKTVEGGWGLHDIIRSNDWKINGIVNGIDHQEWNPKVDVHLRSDGYTNYSLETLDAGKRQCKAALQRELGLEVRDDVPLLGFIGRLDGQKGVDIIGDAMPWIAGQDVQLVMLGTGRADLERMLQHLEREHPNKVRGWVGFSVPMAHRITAGADVLVMPSRFEPCGLNQLYAMAYGTVPVVHAVGGLRDTVAPFDPFGDAGLGWTFDRAEANKLIEALRHCLDTYRNYEESWKSLQARGMSQDLSWDHAAELYEDVLVKAKYQW

SEQ ID NO: 52626 - DNA, 1821 bp, Zea mays
  CDS (1)..(1821)
atggcggctctggccacgtcgcagctcgtcgcaacgcgcgccggcctgggcgtcccggacgcgtccacgttccgccgcggcgccgcgcagggcctgaggggggcccgggcgtcggcggcggcggacacgctcagcatgcggaccagcgcgcgcgcggcgcccaggcaccagcagcagcaggcgcgccgcggggccaggttcccgtcgctcgtcgtgtgcgccagcgccggcatgaacgtcgtcttcgtcggcgccgagatggcgccgtggagcaagaccggcggcctcggcgacgtcctcggcggcctgccgccggccatggccgcgaacgggcaccgtgtcatggtcgtctctccccgctacgaccagtacaaggacgcctgggacaccagcgtcgtgtccgagatcaagatgggagacgggtacgagacggtcaggttcttccactgctacaagcgcggagtggaccgcgtgttcgttgaccacccactgttcctggagagggtttggggaaagaccgaggagaagatctacgggcctgtcgctggaacggactacagggacaaccagctgcggttcagcctgctatgccaggcagcacttgaagctccaaggatcctgagcctcaacaacaacccatacttctccggaccatacggggaggacgtcgtgttcgtctgcaacgactggcacaccggccctctctcgtgctacctcaagagcaactaccagtcccacggcatctacagggacgcaaagaccgctttctgcatccacaacatctcctaccagggccggttcgccttctccgactacccggagctgaacctcccggagagattcaagtcgtccttcgatttcatcgacggctacgagaagcccgtggaaggccggaagatcaactggatgaaggccgggatcctcgaggccgacagggtcctcaccgtcagcccctactacgccgaggagctcatctccggcatcgccaggggctgcgagctcgacaacatcatgcgcctcaccggcatcaccggcatcgtcaacggcatggacgtcagcgagtgggaccccagcagggacaagtacatcgccgtgaagtacgacgtgtcgacggccgtggaggccaaggcgctgaacaaggaggcgctgcaggcggaggtcgggctcccggtggaccggaacatcccgctggtggcgttcatcggcaggctggaagagcagaagggccccgacgtcatggcggccgccatcccgcagctcatggagatggtggaggacgtgcagatcgttctgctgggcacgggcaagaagaagttcgagcgcatgctcatgagcgccgaggagaagttcccaggcaaggtgcgcgccgtggtcaagttcaacgcggcgctggcgcaccacatcatggccggcgccgacgtgctcgccgtcaccagccgcttcgagccctgcggcctcatccagctgcaggggatgcgatacggaacgccctgcgcctgcgcgtccaccggtggactcgtcgacaccatcatcgaaggcaagaccgggttccacatgggccgcctcagcgtcgactgcaacgtcgtggagccggcggacgtcaagaaggtggccaccaccttgcagcgcgccatcaaggtggtcggcacgccggcgtacgaggagatggtgaggaactgcatgatccaggatctctcctggaagggccctgccaagaactgggagaacgtgctgctcagcctcggggtcgccggcggcgagccaggggtcgaaggcgaggagatcgcgccgctcgccaaggagaacgtggccgcgccctga

SEQ ID NO: 52627 - protein, 606 aa, Zea mays
MAALATSQLVATRAGLGVPDASTFRRGAAQGLRGARASAAADTLSMRTSARAAPRHQQQQARRGARFPSLVVCASAGMNVVFVGAEMAPWSKTGGLGDVLGGLPPAMAANGHRVMVVSPRYDQYKDAWDTSVVSEIKMGDGYETVRFFHCYKRGVDRVFVDHPLFLERVWGKTEEKIYGPVAGTDYRDNQLRFSLLCQAALEAPRILSLNNNPYFSGPYGEDVVFVCNDWHTGPLSCYLKSNYQSHGIYRDAKTAFCIHNISYQGRFAFSDYPELNLPERFKSSFDFIDGYEKPVEGRKINWMKAGILEADRVLTVSPYYAEELISGIARGCELDNIMRLTGITGIVNGMDVSEWDPSRDKYIAVKYDVSTAVEAKALNKEALQAEVGLPVDRNIPLVAFIGRLEEQKGPDVMAAAIPQLMEMVEDVQIVLLGTGKKKFERMLMSAEEKFPGKVRAVVKFNAALAHHIMAGADVLAVTSRFEPCGLIQLQGMRYGTPCACASTGGLVDTIIEGKTGFHMGRLSVDCNVVEPADVKKVATTLQRAIKVVGTPAYEEMVRNCMIQDLSWKGPAKNWENVLLSLGVAGGEPGVEGEEIAPLAKENVAAP

SEQ ID NO: 52628 - DNA, 1830 bp, Zea mays
  CDS (1)..(1830)
atggctgcaacgatgggttcaatatctgccaacggttcttaccaaacaaataggcccagtgcactaaagcaggcacctcacatgcaattccaacaatgttgcaacggtggacttaggttcttaagcaagcactcccaatccatgcgaagtaagatacaggtggctaaaagaagagctacagataatggaattcatccaaagactacgggacatcgggcacctattgtatgttctgctgggatgactattgtatttgttgcaactgaagtgcacccatggtgcaaaactggtggcctcggtgatgttgtaggaggactgcccccagctttggctgctatgggacaccgtgtcatgacaatagctcctcgttatgatcaatacaaggatgcatgggatacaagtgtccttgttgaggtaaatattggtgacacggtagaaactgttcgattcttccactgctacaaaagaggagtcgatcgtgtttttgttgatcatcctatgtttcttgaaaaggtatggggcaagactggagcaaaattgtatggtcctactactggaactgactatcgagataaccagttgaggttctgccttttgtgccttgctgctttggaggctccaagagttctcaatttcaacaattctgaatatttctctggaccatatggggaagatgttgtcttcgtagtcaatgattggcacactgctattttgccatgttatctgaagagcatgtataagccaaatggaatttataaaaatgctaaggttgctttctgcatacataatattgcctatcaaggtagatttgccagagcagacttcgatcttcttaatctacctgacagtttcttgccatcatttgattttattgatggacatgttaagcctgttctagggagaaagcttaactggatgaaggcagggatcattgagagtgatctggttctaacagtcagtccacattatgtcaaggaactcacttctggcccagataagggtgttgagttggatggtgtccttcgcacaaagcctctagaaattggaatcgtaaatggcatggatgtttatgaatgggatccttcaacagataagtacatcagcgtgaaatatgatgcaacaacggtaactgaagcaagggctctcaataaagagaggttgcaagccgaagtcggattgcctgtggactcgagcatccctgttatagttttcgtcgggcgtctcgaagaacagaaagggtccgacatactcattgcagccattccagagttcgtgggcgagaatgtccagataatcgttcttggcacgggaaagaagaagatggaggaggaactaacgcagctggaagtgaaatatccaaacaacgctagaggcatagcgaaattcaatgttccattggcacacatgatgtttgccggggctgacttcattatcgtcccgagcaggtttgagccatgtggtctcattcagctgcaagggatgagatatggagtgattcccatctgttcatccactggaggacttgtcgacacggttgaggagggtgtcaccggattccacatgggttctttcaatgtcgagtgtgaaactgtagacccagccgacgtgacagcagtagcgtcagccgtcacgcgagccctgaagcagtacgacaccccggcattccatgagatggttcagaactgcatggcgcaagacctgtcctggaaggggcctgcgaagaagtgggaggaggtgcttctgggccttggagtcgaggggagtcgagctggtatcgacgacgcagaggagatcgccccacttgccaaggaaaacgtagccactccgtga

SEQ ID NO: 52629 - protein, 609 aa, Zea mays
MAATMGSISANGSYQTNRPSALKQAPHMQFQQCCNGGLRFLSKHSQSMRSKIQVAKRRATDNGIHPKTTGHRAPIVCSAGMTIVFVATEVHPWCKTGGLGDVVGGLPPALAAMGHRVMTIAPRYDQYKDAWDTSVLVEVNIGDTVETVRFFHCYKRGVDRVFVDHPMFLEKVWGKTGAKLYGPTTGTDYRDNQLRFCLLCLAALEAPRVLNFNNSEYFSGPYGEDVVFVVNDWHTAILPCYLKSMYKPNGIYKNAKVAFCIHNIAYQGRFARADFDLLNLPDSFLPSFDFIDGHVKPVLGRKLNWMKAGIIESDLVLTVSPHYVKELTSGPDKGVELDGVLRTKPLEIGIVNGMDVYEWDPSTDKYISVKYDATTVTEARALNKERLQAEVGLPVDSSIPVIVFVGRLEEQKGSDILIAAIPEFVGENVQIIVLGTGKKKMEEELTQLEVKYPNNARGIAKFNVPLAHMMFAGADFIIVPSRFEPCGLIQLQGMRYGVIPICSSTGGLVDTVEEGVTGFHMGSFNVECETVDPADVTAVASAVTRALKQYDTPAFHEMVQNCMAQDLSWKGPAKKWEEVLLGLGVEGSRAGIDDAEEIAPLAKENVATP

SEQ ID NO: 52630 - DNA, 20 bp, Artificial sequence
  primer
atgaagattttatttgtggc

SEQ ID NO: 52631 - DNA, 22 bp, Artificial sequence
  primer
ttagcgataggaagcagttaac

SEQ ID NO: 52632 - protein, 561 aa, Artificial sequence
  consensus sequence
  Variant (2)..(3): Xaa in position 2 to 3 is any amino acid
  Variant (5)..(6): Xaa in position 5 to 6 is any amino acid
  Variant (8)..(8): Xaa in position 8 is any amino acid
  Variant (12)..(12): Xaa in position 12 is any amino acid
  Variant (15)..(17): Xaa in position 15 to 17 is any amino acid
  Variant (20)..(20): Xaa in position 20 is any amino acid
  Variant (22)..(32): Xaa in position 22 to 32 is any amino acid
  Variant (33)..(37): Xaa in position 33 to 37 is any or no amino acid
  Variant (39)..(39): Xaa in position 39 is any amino acid
  Variant (41)..(88): Xaa in position 41 to 88 is any amino acid
  Variant (89)..(112): Xaa in position 89 to 112 is any or no amino acid
  Variant (114)..(116): Xaa in position 114 to 116 is any amino acid
  Variant (119)..(138): Xaa in position 119 to 138 is any amino acid
  Variant (139)..(153): Xaa in position 139 to 153 is any or no amino acid
  Variant (156)..(169): Xaa in position 156 to 169 is any amino acid
  Variant (170)..(182): Xaa in position 170 to 182 is any or no amino acid
  Variant (186)..(188): Xaa in position 186 to 188 is any amino acid
  Variant (191)..(205): Xaa in position 191 to 205 is any amino acid
  Variant (206)..(259): Xaa in position 206 to 259 is any or no amino acid
  Variant (264)..(264): Xaa in position 264 is any amino acid
  Variant (266)..(267): Xaa in position 266 to 267 is any amino acid
  Variant (269)..(271): Xaa in position 269 to 271 is any amino acid
  Variant (272)..(275): Xaa in position 272 to 275 is any or no amino acid
  Variant (277)..(278): Xaa in position 277 to 278 is any amino acid
  Variant (280)..(289): Xaa in position 280 to 289 is any amino acid
  Variant (290)..(293): Xaa in position 290 to 293 is any or no amino acid
  Variant (296)..(296): Xaa in position 296 is any amino acid
  Variant (299)..(299): Xaa in position 299 is any amino acid
  Variant (301)..(302): Xaa in position 301 to 302 is any amino acid
  Variant (303)..(303): Xaa in position 303 is any or no amino acid
  Variant (305)..(305): Xaa in position 305 is any amino acid
  Variant (307)..(308): Xaa in position 307 to 308 is any amino acid
  Variant (310)..(323): Xaa in position 310 to 323 is any amino acid
  Variant (324)..(334): Xaa in position 324 to 334 is any or no amino acid
  Variant (336)..(337): Xaa in position 336 to 337 is any amino acid
  Variant (339)..(342): Xaa in position 339 to 342 is any amino acid
  Variant (345)..(353): Xaa in position 345 to 353 is any amino acid
  Variant (354)..(360): Xaa in position 354 to 360 is any or no amino acid
  Variant (363)..(364): Xaa in position 363 to 364 is any amino acid
  Variant (368)..(368): Xaa in position 368 is any amino acid
  Variant (370)..(386): Xaa in position 370 to 386 is any amino acid
  Variant (387)..(392): Xaa in position 387 to 392 is any or no amino acid
  Variant (395)..(395): Xaa in position 395 is any amino acid
  Variant (397)..(399): Xaa in position 397 to 399 is any amino acid
  Variant (400)..(400): Xaa in position 400 is any or no amino acid
  Variant (402)..(422): Xaa in position 402 to 422 is any amino acid
  Variant (423)..(424): Xaa in position 423 to 424 is any or no amino acid
  Variant (426)..(430): Xaa in position 426 to 430 is any amino acid
  Variant (433)..(433): Xaa in position 433 is any amino acid
  Variant (435)..(438): Xaa in position 435 to 438 is any amino acid
  Variant (448)..(448): Xaa in position 448 is any amino acid
  Variant (450)..(454): Xaa in position 450 to 454 is any amino acid
  Variant (457)..(458): Xaa in position 457 to 458 is any amino acid
  Variant (460)..(464): Xaa in position 460 to 464 is any amino acid
  Variant (468)..(468): Xaa in position 468 is any amino acid
  Variant (472)..(507): Xaa in position 472 to 507 is any amino acid
  Variant (508)..(550): Xaa in position 508 to 550 is any or no amino acid
  Variant (552)..(553): Xaa in position 552 to 553 is any amino acid
  Variant (555)..(555): Xaa in position 555 is any amino acid
  Variant (558)..(560): Xaa in position 558 to 560 is any amino acid
EXXPXXKXGGLXDVXXXLPXAXXXXXXXXXXXXXXXXPXYXXXXXXXXXXXXXXXXXXXXXXXXXXXXXXXXXXXXXXXXXXXXXXXXXXXXXXXXXXXXXXXXXXXXXXXXDXXXRFXXXXXXXXXXXXXXXXXXXXXXXXXXXXXXXXXXXDWXXXXXXXXXXXXXXXXXXXXXXXXXXXIHNXXXQGXXXXXXXXXXXXXXXXXXXXXXXXXXXXXXXXXXXXXXXXXXXXXXXXXXXXXXXXXXXXXXXXXXXXXTVSPXYXXEXXXXXXXGXXLXXXXXXXXXXXXXXGIXNGXDXXXWXPXXDXXXXXXXXXXXXXXXXXXXXXXXXXKXXLXXXXGLXXXXXXXXXXXXXXXXRLXXQKGXDXXXXXXXXXXXXXXXXXXXXXXXLGXGXXXXEXXXXXXXXXXXXXXXXXXXXXXXLXXXXXAGXDXXXXPSRFEPCGLXQXXXXXYGXXPXXXXXGGLXDTVXXXXXXXXXXXXXXXXXXXXXXXXXXXXXXXXXXXXXXXXXXXXXXXXXXXXXXXXXXXXXXXXXXXXXXXXXXXXXXXMXXDXSWXXXA

SEQ ID NO: 52633 - protein, 48 aa, Artificial sequence
  protein pattern
  Variant (2)..(2): Xaa in position 2 is Ala or Ser
  Variant (3)..(4): Xaa in position 3 to 4 is any amino acid
  Variant (5)..(5): Xaa in position 5 is Ile, Met or Val
  Variant (6)..(6): Xaa in position 6 is any amino acid
  Variant (7)..(8): Xaa in position 7 to 8 is Ala or Gly
  Variant (9)..(9): Xaa in position 9 is Ala, Cys, Gly, Ser or Thr
  Variant (10)..(10): Xaa in position 10 is Asp or His
  Variant (11)..(11): Xaa in position 11 is any amino acid
  Variant (12)..(12): Xaa in position 12 is Phe, Ile, Leu, Met or Val
  Variant (13)..(14): Xaa in position 13 to 14 is any amino acid
  Variant (15)..(15): Xaa in position 15 is Gly, Pro or Thr
  Variant (16)..(16): Xaa in position 16 is Ala or Ser
  Variant (17)..(17): Xaa in position 17 is any amino acid
  Variant (18)..(18): Xaa in position 18 is Phe or Tyr
  Variant (23)..(23): Xaa in position 23 is Ile or Leu
  Variant (24)..(24): Xaa in position 24 is any amino acid
  Variant (26)..(26): Xaa in position 26 is Phe, Ile, Leu or Met
  Variant (27)..(27): Xaa in position 27 is any amino acid
  Variant (28)..(28): Xaa in position 28 is Ala, Gly or Ser
  Variant (29)..(30): Xaa in position 29 to 30 is any amino acid
  Variant (33)..(33): Xaa in position 33 is any amino acid
  Variant (34)..(34): Xaa in position 34 is any or no amino acid
  Variant (36)..(40): Xaa in position 36 to 40 is any amino acid
  Variant (41)..(41): Xaa in position 41 is any or no amino acid
  Variant (45)..(45): Xaa in position 45 is any amino acid
  Variant (47)..(47): Xaa in position 47 is Ser or Thr
  Variant (48)..(48): Xaa in position 48 is Ile, Leu or Val
LXXXXXXXXXXXXXXXXXEPCGXXQXXXXXYGXXPXXXXXXGGLXDXX

SEQ ID NO: 52634 - DNA, 2064 bp, Synechocystis sp.
  CDS (1)..(2064): transl_table=11
atgctggcaaagtccctgggctggttgttggctgtatctaggaggaactattgcatgggatctcgcaccgccttggcttccaggccttggtccaaacatttagcagacccccagattgacccgacggcctacgtgcattcgtttgccaatgtggtgggggatgtgcgcattcagcccggggtcagtgttgcccctgggagctccattcgagcggacgagggcacgcccttttggattggcggtaatgtgctgatccaacatggagtggtgatccatggcttagaaactggtcgggtgctgggggatgatgaccaggaatattctgtttggattgggccgggcacctgtgtggcccatttggctttggtccacggcccagtttacctcggcgctaattgcttcattggtttccgttccactgtgctcaatgcacgggtgggggatggggcggtggtgatgatgcattccctagttcaggatgtggaaattccccccaacaaattggtgccctccggtgccatgattacccagcaacaccaggcggatagtttaccggatgtgcaagctggcgatcgccattttgtccagcagattgcggccatgcacggacaaagtgcttctccaacccagggaactgatccaaccgtgtgtgtgttgccggagtccctccccgccgttacccccgttactgaaaccccctatataaattccatagacaacatgagtattaattctgacattaccaaccagatccgctccctcctggcccagggctatggtatcggggcggaacacgccaacgaacgacgtttcaaaaccaaatcttggcagagctgtggcaccgccgatggtttccgtcccgaccaggttattgccacggtggaaggttggctccaggagtttgcgggggaatatgtccgcctcattggcattgaccagggggctaaacgccgggtagtggaagtgattattcaacgccccggtgatgttcccggttctcctagtcggggtaccaccaccaccaaagccctaagcagtggcggtagcggccggagtgcggtggcccaccaaacaggtaacttagctggggatagtgctaaccagttgcgggccctgttgcatcagggttataaaatcggcttggaatatgccagtgcccgtcgcttcaaaaccggctcttggttaactggaggcaccattggtagtcatcgggaaggggaagctttgcaggaattaaatcgtttcctggccgaccacaccaatgagtatgtgcgcattatcggtattgatccagccggtaagcggcgggtggcagaaattgttgtacaccgtcccaatggtaatggcaatggtaaaccttctagttccagcagttccgttggctataagtctgcccctgtgagctccgccgggggctctagtgctggtggtttaaccccagaagtgatagcaacggtgcggggattactcgccaacggccatagcattggtaccgaacacacagataaacgtcgctttaaggccaaatcctgggatacttgtcccaccattgatggtggccgggaagctgaagttttagccaaattggaagcttgcctagcagatcatgccggggagtatgtgcggattattggtattgaccgggttggtaagcgacgggtgttagaacagattattcaacgtccaggggacaacgttgttgctgggcgatcgccgtcttcgtctagtgctagtacatccagtagtgcctccagcaatggctttggcagtggcaatggtggtggttacagtaattctgccgtgcgcctagataacagcgtggttacccaggtgcgttccctcctggcccagggttacaaaattggcaccgaacacacggataaacgtcgctttaaagccaaatcctggcagagttgtgcccctatcaccagtacccacgagtcggaagtgttgcgggccctagaaggttgtttggcagaccataacggcgaatatgtccgcttactaggcatagatcccacggctaaacggcgggtgttggaaaccattattcagcgtccctaa

SEQ ID NO: 52635 - protein, 687 aa, Synechocystis sp.
MLAKSLGWLLAVSRRNYCMGSRTALASRPWSKHLADPQIDPTAYVHSFANVVGDVRIQPGVSVAPGSSIRADEGTPFWIGGNVLIQHGVVIHGLETGRVLGDDDQEYSVWIGPGTCVAHLALVHGPVYLGANCFIGFRSTVLNARVGDGAVVMMHSLVQDVEIPPNKLVPSGAMITQQHQADSLPDVQAGDRHFVQQIAAMHGQSASPTQGTDPTVCVLPESLPAVTPVTETPYINSIDNMSINSDITNQIRSLLAQGYGIGAEHANERRFKTKSWQSCGTADGFRPDQVIATVEGWLQEFAGEYVRLIGIDQGAKRRVVEVIIQRPGDVPGSPSRGTTTTKALSSGGSGRSAVAHQTGNLAGDSANQLRALLHQGYKIGLEYASARRFKTGSWLTGGTIGSHREGEALQELNRFLADHTNEYVRIIGIDPAGKRRVAEIVVHRPNGNGNGKPSSSSSSVGYKSAPVSSAGGSSAGGLTPEVIATVRGLLANGHSIGTEHTDKRRFKAKSWDTCPTIDGGREAEVLAKLEACLADHAGEYVRIIGIDRVGKRRVLEQIIQRPGDNVVAGRSPSSSSASTSSSASSNGFGSGNGGGYSNSAVRLDNSVVTQVRSLLAQGYKIGTEHTDKRRFKAKSWQSCAPITSTHESEVLRALEGCLADHNGEYVRLLGIDPTAKRRVLETIIQRP

SEQ ID NO: 52636 - DNA, 1668 bp, Nostoc sp. PCC 7120
  CDS (1)..(1668): transl_table=11
atggcagtccgcagcacggcggcacccccaaccccgtggtcgaggagtttagctgaagcccaaatccatgaaagcgcctttgtacatccgttttctaacattattggggatgtccatatcggtgcaaatgtcatcattgccccagggacttcaattagagccgatgaaggcacaccctttcatattggtgaaaataccaatattcaagatggtgtagtgattcacggtttagagcaaggtagagtcgttggcgatgacaacaaagaatactcagtttgggtgggtagcagcgcgtccttgacacatatggcgctgattcatggccctgcttacgttggggataactcgtttattggttttcgctctacggtatttaatgccaaggtaggagcaggttgcatcgttatgatgcacgctttaattaaggacgtagaagttccccctggtaagtatgttccgtcaggagcgatcatcactaaccaaaagcaggccgatcgcttgccagatgtgcaaccccaagacagggattttgctcatcacgtaattgggattaatcaagcattgcgggctggatatctttgtgctgcggatagcaagtgtattgccccccttcgcaatgatcaagttaaatcttatacaagtactacagttattgggttagaaaggagtagtgaagtggcaagcaacagcttgggtgcagaaaccatagagcaggtacgctatttattagagcaaggctataaaattggttcagaacacgtagatcaaagaagatttcgtacaggttcttggactagttgccagccgattgaagctagatccgtaggtgatgctttagcagctttagaagcttgtttagctgaccatagtggcgagtatgtgcgtttgtttggcattgatcccaaaggtaaacgacgagttttagaaacaattatccaacgtcccgatggtgtggtggcaggttctaccagcttcaaagcacctgctagtaacaccaatggcaatggtagttaccacagcaacggcaatggcaacggttatagcaacggtgcaactagtggcaaagtcagcgctgaaaccgtagaccaaattcgccagttattggctggtggttacaagattggcacagaacacgtagatgagcgccgcttccgtacaggttcttggaatagctgtaagccaattgaagcaacttccgcaggcgaagtagtggcggccttagaagaatgtatcgacagtcatcaaggtgagtacatccgcctaatcggcattgatccgaaagctaaacggcgtgtactggaaagtattatccaacgtcccaacggtcaagtagctccatcgagtagtcccagaaccgtagtgagtgcctcctctgcctcatccggaacagctaccgcaacagctactcggttaagtacagaagtagtagatcaggtgcggcaaatactgggtggcgggtataaactcagtattgaacacgtagatcaaagaagattccgtactggttcttggagtagtaccggagcaatttcagctacttccgaaagagaagcgatcgcagtcatagaagcctccttatccgaatttgctggagaatatgtgcgcttgattggtatcgaccccaaagccaagcggcgagtgttggaaacaatcattcagcgtccatag

SEQ ID NO: 52637 - protein, 555 aa, Nostoc sp. PCC 7120
MAVRSTAAPPTPWSRSLAEAQIHESAFVHPFSNIIGDVHIGANVIIAPGTSIRADEGTPFHIGENTNIQDGVVIHGLEQGRVVGDDNKEYSVWVGSSASLTHMALIHGPAYVGDNSFIGFRSTVFNAKVGAGCIVMMHALIKDVEVPPGKYVPSGAIITNQKQADRLPDVQPQDRDFAHHVIGINQALRAGYLCAADSKCIAPLRNDQVKSYTSTTVIGLERSSEVASNSLGAETIEQVRYLLEQGYKIGSEHVDQRRFRTGSWTSCQPIEARSVGDALAALEACLADHSGEYVRLFGIDPKGKRRVLETIIQRPDGVVAGSTSFKAPASNTNGNGSYHSNGNGNGYSNGATSGKVSAETVDQIRQLLAGGYKIGTEHVDERRFRTGSWNSCKPIEATSAGEVVAALEECIDSHQGEYIRLIGIDPKAKRRVLESIIQRPNGQVAPSSSPRTVVSASSASSGTATATATRLSTEVVDQVRQILGGGYKLSIEHVDQRRFRTGSWSSTGAISATSEREAIAVIEASLSEFAGEYVRLIGIDPKAKRRVLETIIQRP

SEQ ID NO: 52638 - DNA, 1959 bp, Thermosynechococcus elongatus BP-1
  CDS (1)..(1959): transl_table=11
atggcggttcaaagctatgcggcacctccaacgccgtggtctagggatttagcggaaccagagattgcccccacggcttacgtccactccttcagtaacctcattggcgatgtccgcatcaaagattatgttcacatcgcccccggcacctccatccgtgccgatgaaggaacgcccttccacattggctctcgcacaaatattcaagacggcgttgtcatccatggcctccaacagggacgggtgattggcgatgatggccaagagtattctgtctggatcggtgataatgtctcaattacccacatggcactgatccacggccctgcctacattggcgatggctgttttattggctttcgctcaacggtgtttaatgcccgggttggtgctggctgtgtggtcatgatgcatgtcctgattcaagatgtggaaattccaccgggaaaatatgtgccttcgggaatggtgatcacgacgcaacagcaagccgatcgcctgccgaatgtggaagagtcagatattcactttgcccagcacgtggttggcattaatgaagcgctgctatcggggtaccagtgtgctgagaatattgcctgtattgccccgattcgcaatgaactgcagcgtcaagaagatccaccaaccctacacgttgaaatgctcaccggggaaaagaacaccatgaccacagactatgggactcatgtccgccaactcttgcagcagggataccagatcagtttggaatatgcagatgcgcggcggtatcgcactagctcttggcaaagtggcccgaccttaacagggcagcaggagtctcaagtgatggcggcgatcgcgcaactactcaaggaacatgagggcgagtatgtgcgcctgatcggtgtcgatcccaaggccaagcgtcgtgttttcgaggaaatcattcaacgtcccggccaagcagcggtggctagtagcagtagctctcgtcccagtgcaacggtgaatgcatctccagtgggctccttggatgccgccgttgtggctcaggtgcggcagttgctccaacaggggtatcaaatcggcaccgagcacgccgatgcccgccgctatcgcaccagttcttggacaagctgtgctcccattcaatccaaacaggagccggaggtgttggccgcccttgaggcctgcctccaagaacatgcgggtgaatatgtgcgcctgattggcattgatcaaaagcaaaagcggcgcgtcctcgagcaaattattcagcgcccgcagggaccggtggcgatcgccccaaaaacacccacgccagtggctaccagtcatgcctccgtcagctctggtggcaatgacactcttctcagtgccgatctggtgaaccaaattcaagacctgttgcgccaaggctgccaagtcatcaccgagtatgccgaccagcgccgcttccgtaccagttcttggcaaagcggcatcaaaattacttctgcccagcaaatcaatgatctgaggtctttccttgctgagcatcagcgggattatatccgccttgtgggcgtcaatccccaagccaaacagcgggtcttggaaaccattattcaccgccccaatggcaaagccgccagcaatggcaatagcacccgtggtcaagggttcacaccgcggccaactgcctccagtcaagggagccctagcactcatagcctcagtcaagaggtgattgaacaagtgcggcaactcctgcaacagggctataccctcggcttagaacatgtagatgcccgtcgctaccgcaccaactcttggcaaagcggcccccgcattgaggcgaaaaatctcaatgaagcccttgctgcgattcaggcttgcctccaagaatacagtggcgagtatgtgcggctgattggcattaatcctgccggcaagcagcgggtggccgaaatcctactccaacaggctgctaagtag

SEQ ID NO: 52639 - protein, 652 aa, Thermosynechococcus elongatus BP-1
MAVQSYAAPPTPWSRDLAEPEIAPTAYVHSFSNLIGDVRIKDYVHIAPGTSIRADEGTPFHIGSRTNIQDGVVIHGLQQGRVIGDDGQEYSVWIGDNVSITHMALIHGPAYIGDGCFIGFRSTVFNARVGAGCVVMMHVLIQDVEIPPGKYVPSGMVITTQQQADRLPNVEESDIHFAQHVVGINEALLSGYQCAENIACIAPIRNELQRQEDPPTLHVEMLTGEKNTMTTDYGTHVRQLLQQGYQISLEYADARRYRTSSWQSGPTLTGQQESQVMAAIAQLLKEHEGEYVRLIGVDPKAKRRVFEEIIQRPGQAAVASSSSSRPSATVNASPVGSLDAAVVAQVRQLLQQGYQIGTEHADARRYRTSSWTSCAPIQSKQEPEVLAALEACLQEHAGEYVRLIGIDQKQKRRVLEQIIQRPQGPVAIAPKTPTPVATSHASVSSGGNDTLLSADLVNQIQDLLRQGCQVITEYADQRRFRTSSWQSGIKITSAQQINDLRSFLAEHQRDYIRLVGVNPQAKQRVLETIIHRPNGKAASNGNSTRGQGFTPRPTASSQGSPSTHSLSQEVIEQVRQLLQQGYTLGLEHVDARRYRTNSWQSGPRIEAKNLNEALAAIQACLQEYSGEYVRLIGINPAGKQRVAEILLQQAAK

SEQ ID NO: 52640 - DNA, 2007 bp, Gloeobacter violaceus PCC 7421
  CDS (1)..(2007): transl_table=11
atggttgcacaaagccgccttgcggctccccctaccccgtggtcgagacggttggctgaagccgcaatcgatccgtccgcctacgtacacagtttctcgcagatcatcggcgatgtacgcatcggcgccaacgtgctggtctcgccgggaacctcgatccgtgccgacgaaggttcaccttttcacattggtgccaacaccaacatccaggacggcgtggtcatgcacggcctgcaggaagggcgggtcaacggcgacgacggccaatcctactcggtgtgggtcggctccaacacctcgattacccacatggccctcatccacgggccgtgctacgtcggcgacgattgcttcatcggttttcgctcgacgatcttcaacgcccgggtgggcaaaggctgcatcgtgatgatgcacgcgctggtgcaggatgtggaaatcccgcccggcaagtacgtgccctccggcgcggtgatcacctcccagcagcaggccaaccgcctgcccgacgcccaggatatcgacatccactttgccaagcacgtcatcggcatcaacgatgcgttgcgccagggttaccgctgcgccgccgacatcgagtgtatcgtgccgattcgcgacgagagcagcccggcggcgccgggcaccaacggtaaacccacacccaaaacccacgctcaggtaagcagtatgttcatgaccagtcaaaccctcgacacggtgcgctccctgcttgcccagggctgtcgcctcgcggtcgaattcgccgacgagcgccgcttccgggccaactcgtgggtgagcggtccggcgatccaggcggcccgcgagccggaggtggtcagtgccctggagaacgtgctgcgcgagcatgcgggcgaatatgtccgcatcatcggcattgatcccaaagccaagcgccgcgtggccgagaccgtcatccaacggcccgacggcaaaccggtcgaggccaacagcagcagcggcaagttcgctatgaccccggccgctcccccgggcggttcccaccggcccggcaacggcggtctgttgagtccggaggcagcccagcaagtgcaatcgctcctttcccagggctatcgcatcggcaccgaacacgccgatgagcggcgattccgggccaattcctggcagaattgcgcgccgattgccgccacccgcgaaccggaagtgctcgcagccctcgaaggttgtctacaggagcacgcgggcgaatacgtccgcatcatcggcatcgacccgaaggccaagcgccgtgtggccgagacgattattcagcaccccaacggcaagcaacccagtgggggagccgccgctccagctcagggttacaacaccgtcagccatcgggcgagcgggggcggcatgctcgatgccgccgtgctcgatatggtgcgttcactgctcagccagggccatcgcctcggcgtcgaatttgctgacgagcgccgcttccgggccaactcgtgggtgagcggtccggcgatccaggcggcccgcgagccggaggtggtcagtgccctggagaacgtgctgcgcgagcatgcgggcgaatatgtccgcatcatcggcattgatcccaaagccaagcgccgcgtggccgagaccgtcatccagcggcccaacggtaggcccgtctcggggggggctgctactgcgagcacaccggccgcgggcggctacagtcccgcaccggcacacgcacccggcccgatgcgcagcagttcgctcagcagcgaggtgctcgatcagttgcggcatctgctcggtcagggccatcggattggggttgaatttgccgatgtccgccgcttcaaggccaactcgtgggtgagcggcccggcaatccaggcggcccgcgagccggaggcggcggcggcgctggagaccgtgctgcgcgagcacgccggggagtacgtgcggctgattggcatcgaccccaaggccaagcgccgcgtggctgaactgatcatccagcggccctga

SEQ ID NO: 52641 - protein, 668 aa, Gloeobacter violaceus PCC 7421
MVAQSRLAAPPTPWSRRLAEAAIDPSAYVHSFSQIIGDVRIGANVLVSPGTSIRADEGSPFHIGANTNIQDGVVMHGLQEGRVNGDDGQSYSVWVGSNTSITHMALIHGPCYVGDDCFIGFRSTIFNARVGKGCIVMMHALVQDVEIPPGKYVPSGAVITSQQQANRLPDAQDIDIHFAKHVIGINDALRQGYRCAADIECIVPIRDESSPAAPGTNGKPTPKTHAQVSSMFMTSQTLDTVRSLLAQGCRLAVEFADERRFRANSWVSGPAIQAAREPEVVSALENVLREHAGEYVRIIGIDPKAKRRVAETVIQRPDGKPVEANSSSGKFAMTPAAPPGGSHRPGNGGLLSPEAAQQVQSLLSQGYRIGTEHADERRFRANSWQNCAPIAATREPEVLAALEGCLQEHAGEYVRIIGIDPKAKRRVAETIIQHPNGKQPSGGAAAPAQGYNTVSHRASGGGMLDAAVLDMVRSLLSQGHRLGVEFADERRFRANSWVSGPAIQAAREPEVVSALENVLREHAGEYVRIIGIDPKAKRRVAETVIQRPNGRPVSGGAATASTPAAGGYSPAPAHAPGPMRSSSLSSEVLDQLRHLLGQGHRIGVEFADVRRFKANSWVSGPAIQAAREPEAAAALETVLREHAGEYVRLIGIDPKAKRRVAELIIQRP

SEQ ID NO: 52642 - DNA, 1671 bp, Anabaena variabilis ATCC 29413
  CDS (1)..(1671): transl_table=11
atggcagtccgcagcacggcggcacccccaaccccgtggtcgaggagtttagctgaagcccaaatccatgaaagcgcctttgtacatccgttttctaacattattggggatgttcatatcggtgcaaatgtcatcattgctccagggacttcaatcagagccgatgaaggtacaccctttcatattggtgaaaataccaatattcaagacggtgtagtgattcacggtttagagcaaggtagagtcgttggtgatgacaaccaagaatactccgtttgggtgggtagcagcgcttccttgacacatatggcgttgattcatggccctgcttacgttggggataactcgtttattggttttcgctctacggtatttaatgccaaggtgggagcaggttgcatcgtcatgatgcacgctttaattaaggacgtagaagttccccctggtaagtacgttccttcaggagcgatcatcactaatcaaaagcaggccgatcgcttgccagatgtgcaacctcaagacagggattttgctcatcacgtaattgggattaatcaagcattgcgggctggatatctttgtgctgcggatagcaagtgtattgccccccttcgcaatgatcaagttaaatcttatacaagtaatacagttattgggttagaaaggagtagtgaagtggcaagcaacagcttgggtgcagaaaccatagagcaggtacgctatttattagagcaaggctataagattgggacagaacacgtagatcaaagaagatttcgtacaggttcttggactagttgccagccaattgaaggtagatccgtaggagatgccttagcagctttagaagcttgtttagctgaccatagtggtgagtatgtacgtttattcggcattgaccccaaaggtaaacggcgagttttagaaacaattatccaacgtcccgatggtgtggtggcaggttctaccagcttcaaagcgcctgctagtaacaccaatggcaatggtagctaccacagcaacggcaatggtaacggttatagtaacggtgcagccagtggtaaagtcagtgctgaaaccgtagaccaaattcgccagttattggctggtggttacaaaattggcacagaacacgtagatgagcgtcgcttccgtacaggttcctggaatagctgtaagccaattgaagcaaactccccaggtgaagtagtggcggctttagaagaatgtatcgacagtcatcaaggtgagtacatccgcctcatcggcattgacccgaaagccaaacggcgtgtattggaaagtattatccaacgtcccaacggtcaagtagctccatcgacgagtagccccagaaccgtcgtgagtgcctcatctgcttcatccggaacagctaccgcaacagctacccgcttaagtacagaagtagtagatcaggtgcggcaaatactgggtggtgggtataaactcagcattgaacacgtagatcaaagaagattccgtactggttcttggactagtaccggggcaatttccgctacttccgaaagagaagcgatcgcagtcatagaagcctccttatccgaatttgctggagaatatgtgcgcttgattggtatcgaccccaaagccaagaggcgagtgttggaaacaatcattcagcgtccatag

SEQ ID NO: 52643 - protein, 556 aa, Anabaena variabilis ATCC 29413
MAVRSTAAPPTPWSRSLAEAQIHESAFVHPFSNIIGDVHIGANVIIAPGTSIRADEGTPFHIGENTNIQDGVVIHGLEQGRVVGDDNQEYSVWVGSSASLTHMALIHGPAYVGDNSFIGFRSTVFNAKVGAGCIVMMHALIKDVEVPPGKYVPSGAIITNQKQADRLPDVQPQDRDFAHHVIGINQALRAGYLCAADSKCIAPLRNDQVKSYTSNTVIGLERSSEVASNSLGAETIEQVRYLLEQGYKIGTEHVDQRRFRTGSWTSCQPIEGRSVGDALAALEACLADHSGEYVRLFGIDPKGKRRVLETIIQRPDGVVAGSTSFKAPASNTNGNGSYHSNGNGNGYSNGAASGKVSAETVDQIRQLLAGGYKIGTEHVDERRFRTGSWNSCKPIEANSPGEVVAALEECIDSHQGEYIRLIGIDPKAKRRVLESIIQRPNGQVAPSTSSPRTVVSASSASSGTATATATRLSTEVVDQVRQILGGGYKLSIEHVDQRRFRTGSWTSTGAISATSEREAIAVIEASLSEFAGEYVRLIGIDPKAKRRVLETIIQRP

SEQ ID NO: 52644 - DNA, 2019 bp, Trichodesmium erythraeum IMS101
  CDS (1)..(2019): transl_table=11
atgccacaccgcaaacaaccagctccacccaccccctggtcaaaaaacttggcacagccgaagattgatgacacagcttatattcactccttttccaatatcattggagatgtccgtgttggagctaatgtattagtagctccgggcacatcaattcgtgcagatgaaggtactcccttctttattggagcaggaactaatatccaagatggagtagttatacatggtttagaacaaggacgagttataggagatgaccaacaaaactattctgtatggataggtacaaatgtttctatcactcataaagctttagttcatggtccttgctatatcggtgatgactgttttatcggctttcgttctacagtttttaactcccgcattggtgaaggatgtatagttatgcttcacgctctgatccaggacgtggaaattcctcccggtaagtatgtgccttcaggagcaattattacaaatcaacagcaagtaaatcgtttgtcagatgtactacccgatgatataaaatttgcccatcatgtagtgggaattaacgaatctttacgacaaggttatctgtgtgcgaataatatatcttgcattacccctattagaaatgaaatgaatattaattataaaaatggtaacggttacaacccttcaggaacaactggtagactaaccccagaagtagttgctcatgtaaaccagttagtatcccaaggatattatgttggtacagaacacgctgacacccgtcacttcaaaacaggttcctggaaaacttgttctccaattcaaagtagtcactcttcagaagtagtagcagctctagaagcttgtatacaagaacattctacagagtatgtgcggatgtttggtatagaccctaaagctaaacgtcgtatatctccaattatgattcaacgtcctgatggtaaaaaagttgctcaaaaatcaacgactggtaactacagtgttcctgctgctactggtactactagggttggaagtactactacccccaatactacaggtctaactccagaagtagtaacccaagttaattctttgctgtctcaaggatacaagattggtacggagtatgccaatgaacgtcgttttaaaactagctcttggcaaaacggtccgactatttctgagactaattctgcacaagttttggctgctctagaaaaatttttagcagaacacagtggtgaatatgtacgtttaattggtatagactctaaagttaaacgtcgtgttgcagaaataataattcaacgaccaggcgatagcccaattcaacaatgtgtatctacttctccaagttatcaagctcctgtatctactcatgcaggaattaatactcgattaagtcaggaagttgtagagcaagtacgttcattatttaatcaaggatatagaattagcttagaacacgctaatgaacgtcgctttaaaactagctcctggataagttgcgctcccatttctgctactaaccattctcaagcaatagctgaattagaacaagttttagcagaatataatggggaatatgtacgtttaattggtatcgatactcaagctaaacgtcgggtcatggaaagtttgattcaacaacccaatggtaaaggtgaaagatctgcttctcttaaggctacttctaatggagtagtcaatactactcaacaatctcctgtttctagtagtcaagtggctacaacaatagcccataaattaagtcaagaggctgtggaagaaattcgttctttgattgcaggtggttataaaattggtacagaatatgctgataaacgtcgttttaaaactagctcttggaaaacagatattcaaatagatggtaaacgagaggctgatgtttttccagtgcttgaagaaagtctggctcaccatgagggagaatatgtccgcttgataggtatagatccaaaagcgaaacgccgagtcttagaaaagattattcaacaacctaacggtaaggctaactga

SEQ ID NO: 52645 - protein, 672 aa, Trichodesmium erythraeum IMS101
MPHRKQPAPPTPWSKNLAQPKIDDTAYIHSFSNIIGDVRVGANVLVAPGTSIRADEGTPFFIGAGTNIQDGVVIHGLEQGRVIGDDQQNYSVWIGTNVSITHKALVHGPCYIGDDCFIGFRSTVFNSRIGEGCIVMLHALIQDVEIPPGKYVPSGAIITNQQQVNRLSDVLPDDIKFAHHVVGINESLRQGYLCANNISCITPIRNEMNINYKNGNGYNPSGTTGRLTPEVVAHVNQLVSQGYYVGTEHADTRHFKTGSWKTCSPIQSSHSSEVVAALEACIQEHSTEYVRMFGIDPKAKRRISPIMIQRPDGKKVAQKSTTGNYSVPAATGTTRVGSTTTPNTTGLTPEVVTQVNSLLSQGYKIGTEYANERRFKTSSWQNGPTISETNSAQVLAALEKFLAEHSGEYVRLIGIDSKVKRRVAEIIIQRPGDSPIQQCVSTSPSYQAPVSTHAGINTRLSQEVVEQVRSLFNQGYRISLEHANERRFKTSSWISCAPISATNHSQAIAELEQVLAEYNGEYVRLIGIDTQAKRRVMESLIQQPNGKGERSASLKATSNGVVNTTQQSPVSSSQVATTIAHKLSQEAVEEIRSLIAGGYKIGTEYADKRRFKTSSWKTDIQIDGKREADVFPVLEESLAHHEGEYVRLIGIDPKAKRRVLEKIIQQPNGKAN

SEQ ID NO: 52646 - DNA, 2010 bp, Nostoc punctiforme PCC 73102
  CDS (1)..(2010): transl_table=11
atggcagtccgcagcacggcagcacccccaactccgtggtcaaggaatttagctgaacccaaaatccatcaaactgcttttgtacattcattctccaatctgattggggatgtaagaataggtgcaaatgtaatcgttgctccggggactacgattagagcggatgaaggcacacctttttatcttggtgaaaacactaatattcaagatggtgtggtcattcatgggttagagcaaggtcgagtaattggcgatgaccaagagaaatactcggtatgggtaggtaaaaatgcttgcattacccacatggctctaattcacgggccagcttatgtaggcgataattccttcattggctttcgctctacagtgtttaatgccagggtaggtgcaggttgcatcgtgatgatgcacgctttgattcaagacgtagaaattcccgcaggtaaatatgtaccttcgggagcggtaattactagccagcagcaagctgaccgcttgccagatgtgcaagatcaggataaggaatttgctcatcatgtggttggaattaatcaggcgctacgagctggttatctttgtgctgcggatagcaaatgtatagcacccattcgggatgagaacgctaaatcttatacaggtaatggtattactgttttagagttggaaaggagtagtgaagtggcgagcaatagcttgggtgcagaaacaatagagcagttgcgctatctattggaacaagggtataaaattggtacagaacacgtagatcagagacggttccgcacgggttcttggactagctgccaaccaattgaaccgagatccatcggtgaagcgatcgcagcattagaaagctgtgtaagtgaccatagcggcgaatatgtccgcctttttggtattgataaagatagacgacgtgtgttagagagcatcatccaacgcccggatggtgattttaaaccagctaccaattttaaggctccggctagtaatcatagcaatggcagctacagcaataatggtaacggtaacggctctagcagtggcaaagtcaatggcgaaactgtagagcaaatccgccaacttttggcaggtggttataaaattggcatggaacacgtagacgagcgccgtttccgtactggttcctggactagctgcaagccaattgaagcaacttccataaatcaagtaatttccggcttggaagaatgtatagaaagccatcaaggtgagtatgtgcgtttaataggcattgataccaaagccaaacggcgggtattagaaacgattatccaacgtccaaatggtcaagtagcctcctttggtagtcagaaatcatcatttactagcagtggaagctctggaagtgctacggcaacagctaccagtaatcgtttgagtactgaagtagtagaccaactccggcaattattggctggtgggtataagattagtcttgaacacgtagacgaacgacggttccgtacaggttcctggacgagtaccggtcaaattcaagcctcctcagaaagagaagcgatcgcagctatagaaggacaccttggcgaataccaaggggaatatgtacgcttaattggtattgaccccaaagccaagcgtcgggtattagaaacgattatccaacgtccaaatggtcaagtagcctcctctggcagtcagaaatcatttactagcagtgcgccttctgctacagcaacagctacagcaacagctaccagtacccgcttgagtagtgaagttgtagaccaactccgacaattattggctggcggctctaaaattagccttgaacacgtagaccaacggcggttccgtactggttcttggactagtaccggtcagattcaagcctcctcagaaagagaagcgatcgcagccgtagaaggacaccttggcgaataccaaggagaatatgtgcgcttaattggtattgaccccaaagccaagcgtcgggtattagaaacgatcatccaacgtccataa

SEQ ID NO: 52647 - protein, 669 aa, Nostoc punctiforme PCC 73102
MAVRSTAAPPTPWSRNLAEPKIHQTAFVHSFSNLIGDVRIGANVIVAPGTTIRADEGTPFYLGENTNIQDGVVIHGLEQGRVIGDDQEKYSVWVGKNACITHMALIHGPAYVGDNSFIGFRSTVFNARVGAGCIVMMHALIQDVEIPAGKYVPSGAVITSQQQADRLPDVQDQDKEFAHHVVGINQALRAGYLCAADSKCIAPIRDENAKSYTGNGITVLELERSSEVASNSLGAETIEQLRYLLEQGYKIGTEHVDQRRFRTGSWTSCQPIEPRSIGEAIAALESCVSDHSGEYVRLFGIDKDRRRVLESIIQRPDGDFKPATNFKAPASNHSNGSYSNNGNGNGSSSGKVNGETVEQIRQLLAGGYKIGMEHVDERRFRTGSWTSCKPIEATSINQVISGLEECIESHQGEYVRLIGIDTKAKRRVLETIIQRPNGQVASFGSQKSSFTSSGSSGSATATATSNRLSTEVVDQLRQLLAGGYKISLEHVDERRFRTGSWTSTGQIQASSEREAIAAIEGHLGEYQGEYVRLIGIDPKAKRRVLETIIQRPNGQVASSGSQKSFTSSAPSATATATATATSTRLSSEVVDQLRQLLAGGSKISLEHVDQRRFRTGSWTSTGQIQASSEREAIAAVEGHLGEYQGEYVRLIGIDPKAKRRVLETIIQRP

SEQ ID NO: 52648 - DNA, 2010 bp, Crocosphaera watsonii WH 8501
  CDS (1)..(2010): transl_table=11
atggtagtccgcaaaagggcggcacccccaacaccctggtcacaaaccctcgcagaaccccaaattgatgacagtgccttcgtgcattccttttctaacctgatcggggatgttgagatagagggcaatgtcttaatagccccaggaacctccatcagagccgatgaaggcacacctttttatattggtgaaggcacaaacatccaagatggtgttgtcattcatgggttagaacaagggcgggttatgggagatgacggccaagaatattcagtttggatcggtaaagaagcctgtattacccacatggcactgatccacggacctgcttatattggtgagggctgctttatcggttttcgctcaaccgtatttaacgctagagtcggtgaaggctgtgttattatgatgcacgccttgattcaggatgtagagattcccccaggaaaatacgtcccctctggtgcagttattactaaccaacaacaagccgatcgcctccctgacgtacaagagagcgatcgccactttgcccatcatgtagtggaagtcaacgaagcgttgcggatcggatatcaatgtgccgccaacaacgcttgtattacccccattcgtggacagttagggcagtctataaaagacattaaacagactgattatagaaattcggtgacaagtatgagtttaagttcagacatcgtggctcaagtccgttccttactttcccaagggtataccattggggcagaatatgctaatgaacgtcgttttaaaacaaaatcttggttaactggtgggacttttagtggtcgcgccgatcaagttttaggagacttagaagggtttctacaacagcatcaaggggaatatgttcgcctcttaggagttgatacgggagcaaaacgccgtgttctcgaagtgatagtgcaacgaccaaaagacaccccaggggaacccagtcgcattactaccaccaaaaacaactctagtaatggccatgttgccgctgccagcaacggcaatggaaatgttggagatgatattgcttcccaagttcgtgccttactacatcaagggtataaaattggcacagaatatgccaataaacgtcgttttcagaccaaatcttggaaaacaggcccctccattcaaggtaatcgtgaatccgatgttattaaccaattacaaaacattttagccgaacaccagcaggaatatgtccgcttgatcggggttgatcctaacgctaaacgtcgggtatcagaaagcattattcagcgtccaggacaagcaggtaatattcagagtaatggtgcagttgcctctcccagagcagccaacagagaagccgtagccagtggcggtttaactgctgatgttgctcaacaagtccgttctttactctctcaagggtacaaaataggcacagaacacgccgataagcgtcgttttcgtaccaagtcttggcagagttgttctcccatcgatagcaaccgtgaagccgatgtgcttgctgctttagaggtctgtttagtagatcatagtggggagtacgttcgtttaattgggatcgatactcaggctaaaagacgagtggtagaaaccattattcaacggcctggtgaaacttctaataatggagccagaaccgccacagcgacggcccctggtcaaagttacagttatgccagcagtagtcgtgacaatggcaatggcaatggcaatggcaatggtcgtgttgctaccatgaacttaaccaccgagatagtttcccaagtgagttcgttactcaagcaaggttataaaattggcacagaacacgcaaataaacggcgtttccgtaccaagtcttggcaaagttgctctcccatagatagcaaccgtgaagccgatgtacttgcggctctagaagcctgtttaacagagcatcaaggggaatatatccgcttgattggtattgatagccaagccaaacggcgtgtcttagaaaccatcatccaacgtccataa

SEQ ID NO: 52649 - protein, 669 aa, Crocosphaera watsonii WH 8501
MVVRKRAAPPTPWSQTLAEPQIDDSAFVHSFSNLIGDVEIEGNVLIAPGTSIRADEGTPFYIGEGTNIQDGVVIHGLEQGRVMGDDGQEYSVWIGKEACITHMALIHGPAYIGEGCFIGFRSTVFNARVGEGCVIMMHALIQDVEIPPGKYVPSGAVITNQQQADRLPDVQESDRHFAHHVVEVNEALRIGYQCAANNACITPIRGQLGQSIKDIKQTDYRNSVTSMSLSSDIVAQVRSLLSQGYTIGAEYANERRFKTKSWLTGGTFSGRADQVLGDLEGFLQQHQGEYVRLLGVDTGAKRRVLEVIVQRPKDTPGEPSRITTTKNNSSNGHVAAASNGNGNVGDDIASQVRALLHQGYKIGTEYANKRRFQTKSWKTGPSIQGNRESDVINQLQNILAEHQQEYVRLIGVDPNAKRRVSESIIQRPGQAGNIQSNGAVASPRAANREAVASGGLTADVAQQVRSLLSQGYKIGTEHADKRRFRTKSWQSCSPIDSNREADVLAALEVCLVDHSGEYVRLIGIDTQAKRRVVETIIQRPGETSNNGARTATATAPGQSYSYASSSRDNGNGNGNGNGRVATMNLTTEIVSQVSSLLKQGYKIGTEHANKRRFRTKSWQSCSPIDSNREADVLAALEACLTEHQGEYIRLIGIDSQAKRRVLETIIQRP

SEQ ID NO: 52650 - DNA, 20 bp, Artificial sequence
  primer
atgctggcaaagtccctggg

SEQ ID NO: 52651 - DNA, 20 bp, Artificial sequence
  primer
ttagggacgctgaataatgg

SEQ ID NO: 52652 - protein, 567 aa, Artificial sequence
  consensus sequence
  Variant (2)..(6): Xaa in position 2 to 6 is any amino acid
  Variant (7)..(14): Xaa in position 7 to 14 is any or no amino acid
  Variant (23)..(24): Xaa in position 23 to 24 is any amino acid
  Variant (27)..(29): Xaa in position 27 to 29 is any amino acid
  Variant (31)..(33): Xaa in position 31 to 33 is any amino acid
  Variant (35)..(35): Xaa in position 35 is any amino acid
  Variant (38)..(38): Xaa in position 38 is any amino acid
  Variant (42)..(42): Xaa in position 42 is any amino acid
  Variant (47)..(47): Xaa in position 47 is any amino acid
  Variant (49)..(51): Xaa in position 49 to 51 is any amino acid
  Variant (53)..(54): Xaa in position 53 to 54 is any amino acid
  Variant (69)..(69): Xaa in position 69 is any amino acid
  Variant (72)..(73): Xaa in position 72 to 73 is any amino acid
  Variant (86)..(87): Xaa in position 86 to 87 is any amino acid
  Variant (91)..(91): Xaa in position 91 is any amino acid
  Variant (95)..(97): Xaa in position 95 to 97 is any amino acid
  Variant (102)..(102): Xaa in position 102 is any amino acid
  Variant (104)..(108): Xaa in position 104 to 108 is any amino acid
  Variant (111)..(111): Xaa in position 111 is any amino acid
  Variant (114)..(114): Xaa in position 114 is any amino acid
  Variant (118)..(118): Xaa in position 118 is any amino acid
  Variant (120)..(120): Xaa in position 120 is any amino acid
  Variant (122)..(124): Xaa in position 122 to 124 is any amino acid
  Variant (136)..(136): Xaa in position 136 is any amino acid
  Variant (139)..(139): Xaa in position 139 is any amino acid
  Variant (142)..(142): Xaa in position 142 is any amino acid
  Variant (147)..(147): Xaa in position 147 is any amino acid
  Variant (149)..(150): Xaa in position 149 to 150 is any amino acid
  Variant (154)..(154): Xaa in position 154 is any amino acid
  Variant (165)..(165): Xaa in position 165 is any amino acid
  Variant (168)..(168): Xaa in position 168 is any amino acid
  Variant (170)..(170): Xaa in position 170 is any amino acid
  Variant (173)..(173): Xaa in position 173 is any amino acid
  Variant (179)..(181): Xaa in position 179 to 181 is any amino acid
  Variant (183)..(184): Xaa in position 183 to 184 is any amino acid
  Variant (187)..(187): Xaa in position 187 is any amino acid
  Variant (190)..(192): Xaa in position 190 to 192 is any amino acid
  Variant (194)..(195): Xaa in position 194 to 195 is any amino acid
  Variant (197)..(198): Xaa in position 197 to 198 is any amino acid
  Variant (201)..(201): Xaa in position 201 is any amino acid
  Variant (204)..(207): Xaa in position 204 to 207 is any amino acid
  Variant (210)..(210): Xaa in position 210 is any amino acid
  Variant (212)..(212): Xaa in position 212 is any amino acid
  Variant (214)..(242): Xaa in position 214 to 242 is any amino acid
  Variant (243)..(249): Xaa in position 243 to 249 is any or no amino acid
  Variant (251)..(251): Xaa in position 251 is any amino acid
  Variant (254)..(254): Xaa in position 254 is any amino acid
  Variant (258)..(261): Xaa in position 258 to 261 is any amino acid
  Variant (263)..(266): Xaa in position 263 to 266 is any amino acid
  Variant (270)..(270): Xaa in position 270 is any amino acid
  Variant (272)..(272): Xaa in position 272 is any amino acid
  Variant (275)..(291): Xaa in position 275 to 291 is any amino acid
  Variant (292)..(292): Xaa in position 292 is any or no amino acid
  Variant (294)..(298): Xaa in position 294 to 298 is any amino acid
  Variant (300)..(300): Xaa in position 300 is any amino acid
  Variant (306)..(307): Xaa in position 306 to 307 is any amino acid
  Variant (309)..(309): Xaa in position 309 is any amino acid
  Variant (311)..(312): Xaa in position 311 to 312 is any amino acid
  Variant (313)..(313): Xaa in position 313 is any or no amino acid
  Variant (318)..(318): Xaa in position 318 is any amino acid
  Variant (320)..(321): Xaa in position 320 to 321 is any amino acid
  Variant (326)..(356): Xaa in position 326 to 356 is any amino acid
  Variant (357)..(372): Xaa in position 357 to 372 is any or no amino acid
  Variant (374)..(376): Xaa in position 374 to 376 is any amino acid
  Variant (379)..(380): Xaa in position 379 to 380 is any amino acid
  Variant (383)..(383): Xaa in position 383 is any amino acid
  Variant (386)..(386): Xaa in position 386 is any amino acid
  Variant (388)..(391): Xaa in position 388 to 391 is any amino acid
  Variant (395)..(395): Xaa in position 395 is any amino acid
  Variant (397)..(397): Xaa in position 397 is any amino acid
  Variant (400)..(404): Xaa in position 400 to 404 is any amino acid
  Variant (406)..(412): Xaa in position 406 to 412 is any amino acid
  Variant (414)..(416): Xaa in position 414 to 416 is any amino acid
  Variant (418)..(423): Xaa in position 418 to 423 is any amino acid
  Variant (425)..(426): Xaa in position 425 to 426 is any amino acid
  Variant (429)..(429): Xaa in position 429 is any amino acid
  Variant (431)..(431): Xaa in position 431 is any amino acid
  Variant (436)..(438): Xaa in position 436 to 438 is any amino acid
  Variant (443)..(443): Xaa in position 443 is any amino acid
  Variant (445)..(445): Xaa in position 445 is any amino acid
  Variant (451)..(451): Xaa in position 451 is any amino acid
  Variant (453)..(477): Xaa in position 453 to 477 is any amino acid
  Variant (478)..(482): Xaa in position 478 to 482 is any or no amino acid
  Variant (484)..(486): Xaa in position 484 to 486 is any amino acid
  Variant (488)..(491): Xaa in position 488 to 491 is any amino acid
  Variant (493)..(494): Xaa in position 493 to 494 is any amino acid
  Variant (496)..(497): Xaa in position 496 to 497 is any amino acid
  Variant (499)..(503): Xaa in position 499 to 503 is any amino acid
  Variant (505)..(506): Xaa in position 505 to 506 is any amino acid
  Variant (508)..(508): Xaa in position 508 is any amino acid
  Variant (512)..(514): Xaa in position 512 to 514 is any amino acid
  Variant (517)..(517): Xaa in position 517 is any amino acid
  Variant (519)..(521): Xaa in position 519 to 521 is any amino acid
  Variant (523)..(531): Xaa in position 523 to 531 is any amino acid
  Variant (532)..(534): Xaa in position 532 to 534 is any or no amino acid
  Variant (536)..(537): Xaa in position 536 to 537 is any amino acid
  Variant (539)..(542): Xaa in position 539 to 542 is any amino acid
  Variant (548)..(548): Xaa in position 548 is any amino acid
  Variant (553)..(554): Xaa in position 553 to 554 is any amino acid
  Variant (560)..(560): Xaa in position 560 is any amino acid
  Variant (562)..(563): Xaa in position 562 to 563 is any amino acid
MXXXXXXXXXXXXXAAPPTPWSXXLAXXXIXXXAXVHXFSNXIGDVXIXXXVXXAPGTSIRADEGTPFXIGXXTNIQDGVVIHGLXXGRVXGDDXXXYSVWXGXXXXXTHXALXHGPXYXGXXXFIGFRSTVFNAXVGXGCXVMMHXLXXDVEXPPGKYVPSGAXITXQXQAXRLPDVXXXDXXFAXHVXXXNXXLXXGYXCAXXXXCIXPXRXXXXXXXXXXXXXXXXXXXXXXXXXXXXXXXXXXXXRXLLXQGYXXXXEXXXXRRFXTXSWXXXXXXXXXXXXXXXXXXEXXXXXHXGEYVRXXGXDXXXKRRVXEXXIQRPXXXXXXXXXXXXXXXXXXXXXXXXXXXXXXXXXXXXXXXXXXXXXXXQXXXLLXXGYXIGXEXXXXRRFXTXSWXXXXXIXXXXXXXVXXXLXXXXXXHXXEYXRXIGIDXXXKRRVXEXIIQRPXGXXXXXXXXXXXXXXXXXXXXXXXXXXXXXXLXXXVXXXXRXXLXXGXXXXXEXXDXRRFXXXSWXSXXXIXXXXXXXXXXXXEXXLXXXXGEYVRXIGIDXXAKRRVXEXXIQRP

SEQ ID NO: 52653 - protein, 59 aa, Artificial sequence
  protein pattern
  Variant (2)..(3): Xaa in position 2 to 3 is any amino acid
  Variant (7)..(7): Xaa in position 7 is Ala, Cys or Val
  Variant (9)..(9): Xaa in position 9 is Ile, Leu or Val
  Variant (11)..(11): Xaa in position 11 is Ala, Asp or Glu
  Variant (12)..(12): Xaa in position 12 is Asp, Gly or Asn
  Variant (13)..(13): Xaa in position 13 is Cys or Ser
  Variant (22)..(22): Xaa in position 22 is Phe or Leu
  Variant (24)..(24): Xaa in position 24 is Ala or Ser
  Variant (25)..(25): Xaa in position 25 is Lys or Arg
  Variant (26)..(26): Xaa in position 26 is Ile or Val
  Variant (28)..(28): Xaa in position 28 is Ala, Asp or Glu
  Variant (30)..(30): Xaa in position 30 is any amino acid
  Variant (31)..(31): Xaa in position 31 is any or no amino acid
  Variant (33)..(33): Xaa in position 33 is any or no amino acid
  Variant (35)..(35): Xaa in position 35 is Leu or Met
  Variant (37)..(37): Xaa in position 37 is Ala, Ser or Val
  Variant (39)..(39): Xaa in position 39 is Ile or Val
  Variant (40)..(40): Xaa in position 40 is any amino acid
  Variant (44)..(44): Xaa in position 44 is Ile or Val
  Variant (46)..(46): Xaa in position 46 is Ala or Pro
  Variant (47)..(47): Xaa in position 47 is Gly or Asn
  Variant (49)..(49): Xaa in position 49 is any amino acid
  Variant (54)..(54): Xaa in position 54 is any amino acid
  Variant (55)..(55): Xaa in position 55 is Ile, Met or Val
  Variant (58)..(58): Xaa in position 58 is Asn, Gln, Ser or Thr
AXXHGPXYXGXXXFIGFRSTVXNXXXGXGXXVXMXHXLXXDVEXPXXKXVPSGXXITXQ

SEQ ID NO: 52654 - protein, 59 aa, Artificial sequence
  protein pattern
  Variant (3)..(3): Xaa in position 3 is any amino acid
  Variant (5)..(5): Xaa in position 5 is Ala or Ser
  Variant (6)..(6): Xaa in position 6 is Asn or Gln
  Variant (7)..(7): Xaa in position 7 is Ile, Leu or Val
  Variant (8)..(8): Xaa in position 8 is Ile or Val
  Variant (12)..(12): Xaa in position 12 is Glu, His or Arg
  Variant (14)..(14): Xaa in position 14 is any amino acid
  Variant (15)..(15): Xaa in position 15 is Ala, Asp, Gly or Pro
  Variant (16)..(16): Xaa in position 16 is any amino acid
  Variant (18)..(18): Xaa in position 18 is any amino acid
  Variant (19)..(19): Xaa in position 19 is Ile or Val
  Variant (20)..(20): Xaa in position 20 is Ala or Ser
  Variant (23)..(24): Xaa in position 23 to 24 is Ser or Thr
  Variant (31)..(31): Xaa in position 31 is Ser or Thr
  Variant (34)..(34): Xaa in position 34 is His, Trp or Tyr
  Variant (35)..(35): Xaa in position 35 is Ile or Leu
  Variant (37)..(37): Xaa in position 37 is Ala, Glu, Gly or Ser
  Variant (38)..(38): Xaa in position 38 is any amino acid
  Variant (39)..(39): Xaa in position 39 is Thr or Val
  Variant (40)..(40): Xaa in position 40 is any amino acid
  Variant (43)..(43): Xaa in position 43 is Asp or His
  Variant (47)..(47): Xaa in position 47 is Ile or Met
  Variant (51)..(51): Xaa in position 51 is Glu or Gln
  Variant (52)..(52): Xaa in position 52 is Glu, Gln or Thr
  Variant (56)..(56): Xaa in position 56 is any amino acid
VHXFXXXXGDVXIXXXVXXXPGXXIRADEGXPFXXGXXXXIQXGVVXHGLXXGRVXGDD

SEQ ID NO: 52655 - protein, 49 aa, Artificial sequence
  protein pattern
  Variant (3)..(3): Xaa in position 3 is Ala, Thr or Val
  Variant (5)..(5): Xaa in position 5 is any amino acid
  Variant (8)..(8): Xaa in position 8 is Phe or Tyr
  Variant (9)..(9): Xaa in position 9 is Lys or Arg
  Variant (10)..(10): Xaa in position 10 is Ala or Thr
  Variant (11)..(11): Xaa in position 11 is any amino acid
  Variant (14)..(14): Xaa in position 14 is Gln or Thr
  Variant (15)..(15): Xaa in position 15 is Asn or Ser
  Variant (17)..(17): Xaa in position 17 is Ala, Gln or Ser
  Variant (20)..(20): Xaa in position 20 is Ala, Asp, Glu, Gln or Thr
  Variant (21)..(21): Xaa in position 21 is Ala, Gly, Pro or Ser
  Variant (22)..(24): Xaa in position 22 to 24 is any amino acid
  Variant (25)..(25): Xaa in position 25 is Ala, Gly, Pro or Ser
  Variant (26)..(26): Xaa in position 26 is Asp or Glu
  Variant (27)..(27): Xaa in position 27 is Ala or Val
  Variant (28)..(28): Xaa in position 28 is Ile or Leu
  Variant (29)..(29): Xaa in position 29 is any amino acid
  Variant (33)..(33): Xaa in position 33 is Ala, Gly, Ser or Val
  Variant (35)..(35): Xaa in position 35 is Leu or Val
  Variant (36)..(36): Xaa in position 36 is any amino acid
  Variant (37)..(37): Xaa in position 37 is Asp or Glu
  Variant (39)..(39): Xaa in position 39 is Ala, Asn or Ser
  Variant (45)..(45): Xaa in position 45 is Ile or Leu
  Variant (46)..(46): Xaa in position 46 is Phe, Ile or Leu
EHXDXRRXXXXSWXXCXPIXXXXXXXXXXALEXCXXXHXGEYVRXXGID

SEQ ID NO: 52656 - protein, 59 aa, Artificial sequence
  protein pattern
  Variant (2)..(2): Xaa in position 2 is any amino acid
  Variant (4)..(4): Xaa in position 4 is Lys or Arg
  Variant (5)..(5): Xaa in position 5 is Ala or Thr
  Variant (6)..(6): Xaa in position 6 is any amino acid
  Variant (9)..(9): Xaa in position 9 is any amino acid
  Variant (10)..(10): Xaa in position 10 is Ser or Thr
  Variant (11)..(11): Xaa in position 11 is Cys, Asp or Gly
  Variant (12)..(13): Xaa in position 12 to 13 is any amino acid
  Variant (15)..(15): Xaa in position 15 is Asp, Glu or Gln
  Variant (16)..(16): Xaa in position 16 is Ala, Gly or Ser
  Variant (17)..(17): Xaa in position 17 is any amino acid
  Variant (18)..(18): Xaa in position 18 is Arg or Ser
  Variant (19)..(19): Xaa in position 19 is any amino acid
  Variant (20)..(20): Xaa in position 20 is Ala, Gly, Asn or Pro
  Variant (21)..(21): Xaa in position 21 is Asp, Glu or Gln
  Variant (23)..(23): Xaa in position 23 is Phe, Ile, Leu or Val
  Variant (24)..(24): Xaa in position 24 is Ala, Pro or Ser
  Variant (25)..(25): Xaa in position 25 is any amino acid
  Variant (28)..(28): Xaa in position 28 is Ala, Glu or Asn
  Variant (29)..(29): Xaa in position 29 is Cys, Ser or Val
  Variant (30)..(30): Xaa in position 30 is Ile or Leu
  Variant (31)..(32): Xaa in position 31 to 32 is any amino acid
  Variant (34)..(34): Xaa in position 34 is Ala, Glu or Gln
  Variant (38)..(38): Xaa in position 38 is Ile or Val
  Variant (40)..(40): Xaa in position 40 is Ile or Leu
  Variant (45)..(46): Xaa in position 45 to 46 is any amino acid
  Variant (47)..(47): Xaa in position 47 is Ala or Gly
  Variant (52)..(52): Xaa in position 52 is Ala or Leu
  Variant (54)..(54): Xaa in position 54 is any amino acid
  Variant (55)..(55): Xaa in position 55 is Ile or Val
  Variant (58)..(58): Xaa in position 58 is Gln or Arg
RXFXXXSWXXXXXIXXXXXXXVXXXLEXXXXXHXGEYXRXIGIDXXXKRRVXEXXIQXP

SEQ ID NO: 52657 - protein, 60 aa, Artificial sequence
  protein pattern
  Variant (2)..(6): Xaa in position 2 to 6 is any amino acid
  Variant (9)..(9): Xaa in position 9 is any amino acid
  Variant (10)..(10): Xaa in position 10 is Ala or Thr
  Variant (11)..(11): Xaa in position 11 is any amino acid
  Variant (14)..(14): Xaa in position 14 is any amino acid
  Variant (15)..(15): Xaa in position 15 is Ser or Thr
  Variant (16)..(16): Xaa in position 16 is Cys, Gly or Thr
  Variant (17)..(17): Xaa in position 17 is Ala, Gly or Pro
  Variant (18)..(18): Xaa in position 18 is any amino acid
  Variant (19)..(19): Xaa in position 19 is Ala or Ile
  Variant (20)..(20): Xaa in position 20 is Asp, Gln or Ser
  Variant (21)..(21): Xaa in position 21 is Ala or Gly
  Variant (22)..(22): Xaa in position 22 is any amino acid
  Variant (23)..(23): Xaa in position 23 is Asn, Arg or Ser
  Variant (24)..(25): Xaa in position 24 to 25 is any amino acid
  Variant (26)..(26): Xaa in position 26 is Asp, Glu or Gln
  Variant (27)..(27): Xaa in position 27 is Ala or Val
  Variant (28)..(28): Xaa in position 28 is Ala or Ile
  Variant (29)..(29): Xaa in position 29 is Ala or Asn
  Variant (30)..(30): Xaa in position 30 is any amino acid
  Variant (31)..(31): Xaa in position 31 is Ile, Leu or Val
  Variant (32)..(32): Xaa in position 32 is Glu or Gln
  Variant (33)..(33): Xaa in position 33 is Ala, Gly, Asn, Gln or Thr
  Variant (34)..(34): Xaa in position 34 is any amino acid
  Variant (36)..(36): Xaa in position 36 is any amino acid
  Variant (38)..(38): Xaa in position 38 is Phe, His or Tyr
  Variant (39)..(39): Xaa in position 39 is Ala, Asn or Gln
  Variant (40)..(40): Xaa in position 40 is Gly or Gln
  Variant (48)..(48): Xaa in position 48 is Ile or Val
  Variant (50)..(50): Xaa in position 50 is Pro, Gln or Thr
  Variant (51)..(51): Xaa in position 51 is any amino acid
  Variant (57)..(57): Xaa in position 57 is any amino acid
  Variant (59)..(59): Xaa in position 59 is any amino acid
  Variant (60)..(60): Xaa in position 60 is Ile or Leu
EXXXXXRFXXXSWXXXXXXXXXXXXXXXXXXXXXLXEXXXEYVRLIGXDXXAKRRVXEXX

SEQ ID NO: 52658 - protein, 14 aa, Artificial sequence
  protein pattern
  Variant (2)..(2): Xaa in position 2 is Ile or Leu
  Variant (3)..(3): Xaa in position 3 is Ala, Gln or Ser
  Variant (4)..(4): Xaa in position 4 is Gly, Asn or Gln
  Variant (6)..(6): Xaa in position 6 is His or Tyr
  Variant (7)..(7): Xaa in position 7 is any amino acid
  Variant (9)..(9): Xaa in position 9 is Gly or Ser
  Variant (10)..(10): Xaa in position 10 is any amino acid
  Variant (12)..(12): Xaa in position 12 is His or Tyr
  Variant (13)..(13): Xaa in position 13 is Ala, Thr or Val
  Variant (14)..(14): Xaa in position 14 is Asp or Asn
LXXXGXXIXXEXXX

SEQ ID NO: 52659 - protein, 11 aa, Artificial sequence
  protein pattern
  Variant (4)..(4): Xaa in position 4 is Ala, Leu or Val
  Variant (6)..(6): Xaa in position 6 is Gln, Ser or Thr
  Variant (10)..(10): Xaa in position 10 is His or Arg
RRVXEXIIQXP

SEQ ID NO: 52660 - DNA, 2334 bp, Synechocystis sp.
  CDS (1)..(2334): transl_table=11
atgcctgacccttttaccctccttgccatgaccgccccctttactcccgccgaaatcgctgccgaaggtatcaaacccgaagaatacgaagatattgtgcaacggctcggccgccatcccaacaaagctgaactgggaatgttcggtgtcatgtggtcagaacattgttgttataaaaattcccgtcccctactgagtaactttcccaccgaaggagaacgcattttagtggggcctggggaaaatgccggggtcgtagatttgggggatggcctgagattggcgtttaaaatcgaatcccataaccatccttccgcagtggagccattccagggagccgccaccggagtaggggggattctgcgggatattttcaccatgggagcgaggccgatcgccattttaaattccctacggttcggtaatttggacgatgctaggaatcgacgtattttcaccggggtagtggatgggatcagtcattacggtaattgtgttggtgtgcccactgtgggcggggaaatctactttgatccggcttactccggtaatcccctcgtcaacgccatggccttgggtttgatggaaacggaagaaattgtcaaagctggggcttctgggataggcaatccagttttatatgtcggttccaccacgggacgggatggcatggggggagccagttttgccagtgctgagttaacggatcagtccatggacgatcgcccagcggtgcaggtgggggatccctttctggaaaaatccttaattgaagcttgcttggaagcctttaaaagtggggcagtggtggcggcccaggacatgggagcggcgggcattacctgttccacggcggaaatggcagccaagggaggcgtgggcattgagttggatttggataaaattccagtgcgggaaacgggcatggtgccctacgaatatctcctatccgaatcccaagaacggatgttatttgtggctcaaccggggcgggaacaggaattaatcgatattttccatcgttggggtttacaggcggtggtggcggggcaggtgattgcggatcccattgtgcggatctttttccaaggagggattgcggcggaaattcccgctacagccctggccgataacactcccatttaccatcgtcagttgctagaccaagcacccgactatgcccaacaagcttggcaatggcaggaaagtgatttatctccagcggcgatcgccggcattgaaattgcagggcaaaagcaaagctggaatgaagtgttattaaccctgttggacagtcccaccattgcctctaagcattgggtttaccgtcaatacgaccatcaagtacaaaacaatacggtcatagtgcccggtggggccgatgcggcggtggtgcgggtgcgtcccctggatgccaaaccagaggaatgtgtgatcggggtggcggccaccacagattgtaatgcccgttacgtttacttaaatcccttggaaggggccaaggccgcagtggcagaagcggctcgaaatctcagttgtgtgggagcagaacccctggcggtaacggataatttaaactttggtagccctgaaaatccagtgggctattggcagttggccctggcctgtgaaggcattgcggagggttgtcggcagttaaacaccccagtgacggggggcaatgtcagcctgtataacgaaacgttggactccaacggtagaccccaacccatttatcccacgccggttattggcatggtgggacgggtggaaaacatcaataaagttgttggccaaggttggcgcaattcggggaatggcatttacttactgggtagtaatgacggcaataccctcgggggatcggaatatttagccgttgtccatcacaccgttgctggtcagccgccccaggtggatttcgatttggaaaaagcagtgcaaaaagcctgtcgccatggtattgcccaaggttgggtgaacgcggcccatgactgtgcggaagggggtttatcggtagccctggcagaaatggcgatcgccagtcagttgggagcggaaattaatctacctgattccgaccaaagattggataacttgctgtttggggaatccgccagtcgcattgtggtagcggtggcaccggaacatcagcctgcctgggaaaactatttagctggtcagtccttaccctggcaaaaattgggagtagtgggtacagcacagggcaacttgacttttatcgatgcccaaaataacgctctgattgatttaccagtttccgctctgacagaaccttggcaaacggcgatcgcccgtcggctaaaatcctaa

SEQ ID NO: 52661 - protein, 777 aa, Synechocystis sp.
MPDPFTLLAMTAPFTPAEIAAEGIKPEEYEDIVQRLGRHPNKAELGMFGVMWSEHCCYKNSRPLLSNFPTEGERILVGPGENAGVVDLGDGLRLAFKIESHNHPSAVEPFQGAATGVGGILRDIFTMGARPIAILNSLRFGNLDDARNRRIFTGVVDGISHYGNCVGVPTVGGEIYFDPAYSGNPLVNAMALGLMETEEIVKAGASGIGNPVLYVGSTTGRDGMGGASFASAELTDQSMDDRPAVQVGDPFLEKSLIEACLEAFKSGAVVAAQDMGAAGITCSTAEMAAKGGVGIELDLDKIPVRETGMVPYEYLLSESQERMLFVAQPGREQELIDIFHRWGLQAVVAGQVIADPIVRIFFQGGIAAEIPATALADNTPIYHRQLLDQAPDYAQQAWQWQESDLSPAAIAGIEIAGQKQSWNEVLLTLLDSPTIASKHWVYRQYDHQVQNNTVIVPGGADAAVVRVRPLDAKPEECVIGVAATTDCNARYVYLNPLEGAKAAVAEAARNLSCVGAEPLAVTDNLNFGSPENPVGYWQLALACEGIAEGCRQLNTPVTGGNVSLYNETLDSNGRPQPIYPTPVIGMVGRVENINKVVGQGWRNSGNGIYLLGSNDGNTLGGSEYLAVVHHTVAGQPPQVDFDLEKAVQKACRHGIAQGWVNAAHDCAEGGLSVALAEMAIASQLGAEINLPDSDQRLDNLLFGESASRIVVAVAPEHQPAWENYLAGQSLPWQKLGVVGTAQGNLTFIDAQNNALIDLPVSALTEPWQTAIARRLKS

SEQ ID NO: 52662 - DNA, 3774 bp, Streptococcus pyogenes M1 GAS
  CDS (1)..(3774): transl_table=11
atgtcctcctattttccagtcgctcccttgtcggacttggtatcttatatgaataaacgtatttttgttgagaaaaaggctgactttggtattaaatcggctagtcttgtgaaagagttgacgcataatctacaactgacctctttgaaggctttgcgtattgtgcaggtctatgatgtcttcaatttggctgaggatttgctggcgcgtgctgagaagcatattttctctgagcaggtgacagactgtcttttgacggaaactgaaatcactgcggagcttgataaggttgccttctttgccattgaggcgcttcctggtcaatttgaccaacgtgctgctagttcgcaagaagctttgctattatttggaagtgacagtcaggttaaggtcaatacagcccagctatacttggtcaataaggatattacagaagcagagcttgaagccgttaagaactatcttttgaaccctgttgattcgcgtttcaaggacattactttgccgcttgaagagcaggctttctctgtatctgataagacgatccctaatcttgatttctttgaaacttatcaagctgacgattttgcgacttataaggcagagcagggcttggctatggaggtcgatgaccttctcttcatccaaaattatttcaaatcaatcggatgtgtgccaactgagactgagttgaaagttttggatacttactggtcagaccactgccgtcacacaacctttgaaactgaattgaagaacattgatttttcagcttctaaattccaaaaacaattgcagacaacttatgacaaatatatcgccatgcgtgatgagcttggtcgttctgaaaagccacaaacacttatggatatggcgactatttttggtcgttatgagcgtgccaacggtcgtctggacgatatggaagtctcagatgaaatcaatgcctgctcagttgagattgaagtagatgttgatggtgtgaaagagccttggctcctcatgtttaagaacgagactcacaatcacccaacagaaattgagccattcggtggagcggcgacttgtatcggtggtgctattcgtgacccattgtcaggacgttcatacgtttatcaggctatgcgtatttcaggcgcaggcgatatcacgactccgattgcggaaacacgtgctggtaaattgccacaacaagttatttctaaaactgcggcgcacggctattcttcatatggtaaccaaattgggcttgcgacaacttatgtgcgcgagtacttccaccctggcttcgtagccaaacgtatggagcttggagctgtggttggtgctgcacctaaggaaaatgtggttcgtgaaaaaccagaagcaggcgatgtggtcatcttgctcggtggtaaaacaggtcgtgatggtgtcggtggtgcgacaggttcatctaaggttcaaacggttgaatctgtggaaacagctggcgcagaggtacaaaaagggaatgccattgaagaacgtaagattcaacgtcttttccgtgatggcaatgtcactcgtcttattaagaaatcaaatgacttcggtgcaggtggtgtctgtgttgccatcggtgaattggctgacggtcttgaaatcgatttggacaaggtgcctcttaaataccaaggtcttaatggtactgaaattgcaatctcagaatctcaagagcgtatgtcagtcgttgttcgtccaaatgatgtggatgccttcatcgcagcctgcaacaaggaaaatatcgatgcagtcgttgttgcgaccgttactgaaaaaccaaatcttgtcatgacttggaatggcgaaatcatcgttgatttggaacgccgtttccttgataccaatggtgtccgtgtcgttgttgatgctaaagtcgttgacaaggacttgacagttccagaagcacgcacaacatcagcagagacacttgaagcagatacgcttaaggtcttgtctgacctcaaccacgctagtcaaaaaggtcttcaaactatctttgactcatctgttggtcgttcaaccgttaaccacccaatcggtggtcgttaccaaatcacaccgacagaaagttctgttcaaaaattgccagttcaacatggtgtgacaacaactgcatctgttatggctcaaggttacaatccttatattgcagagtggtcaccttatcacggtgctgcctatgctgtcattgaagcgacagctcgcttggtagcaacgggtgctgactggtctcgtgcacgtttctcttaccaagagtactttgagcgtatggataaacaggcagagcgttttggtcagccagtatcagctcttcttggttctattgaggctcagattcaacttggtttgccatcaatcggcggtaaggactctatgtctggtactttcgaagacttgacagtaccaccaaccttggtagctttcggcgtgacaacagcggacagccgcaaggttctctctcctgagtttaaagcggctggcgaaaacatttactatatcccaggtcaagctatttcagaagatattgattttgaccttatcaaggataactttagccagtttgaagctattcaagctcaacataagattacagctgcctcagccgctaaatacggtggtgtcctagaaagtcttgctctcatgacttttggtaaccgtatcggtgcttctgttgaaattgcagagcttgacagcagcttgacagctcaactcggaggttttgtctttacatcagctgaggaaattgctgacgcggtgaaaatcggtcaaactcaggcagactttacagtcactgtcaatggaaatgaccttgctggcgctagccttctagcagccttcgaaggcaaattggaagaggtttacccaacagaatttgagcagacagatgttcttgaagaagttcctgctgtggtatcagatactgttatcaaggctaaggaaacaattgaaaaaccagtggtttacattccagtcttccctggtaccaactcagaatacgattcagctaaggcctttgaacaggttggagctagtgtcaacttggtaccatttgtaaccttgaatgaggttgctattgctgagtcagttgacactatggttgctaatattgctaaggcaaatatcatcttctttgctggaggtttctcagcagcggatgaaccagatgggtctgctaagtttatcgtcaatatcttgcttaacgagaaggtccgcgcagctattgacagcttcatcgaaaaaggtggccttatcatcggtatctgtaatggtttccaagcccttgttaaatcaggtcttcttccatacggaaacttcgaggaagctggtgagacaagtccaactctcttctataatgatgctaatcagcatgttgccaagatggttgagactcgtatcgcaaataccaactcaccttggttggcaggagttgaggtcggcgatattcatgccattccagtttcacatggtgaaggtaaacttgttgtcagcgcttctgaatttgcagagctaagagacaatggtcaaatctggagccaatatgtggactttgacggacaaccatctatggattctaaatacaatccaaacggctctgtcaatgccatcgaagggattaccagcaagaatggtcaaatcatcggtaagatgggacactcagaacgctgggaagacggactcttccaaaatatccctggtaacaaagaccaaatcctctttgcaagtgctgtaaaatactttacagggaagtaa

SEQ ID NO: 52663 - protein, 1257 aa, Streptococcus pyogenes M1 GAS
MSSYFPVAPLSDLVSYMNKRIFVEKKADFGIKSASLVKELTHNLQLTSLKALRIVQVYDVFNLAEDLLARAEKHIFSEQVTDCLLTETEITAELDKVAFFAIEALPGQFDQRAASSQEALLLFGSDSQVKVNTAQLYLVNKDITEAELEAVKNYLLNPVDSRFKDITLPLEEQAFSVSDKTIPNLDFFETYQADDFATYKAEQGLAMEVDDLLFIQNYFKSIGCVPTETELKVLDTYWSDHCRHTTFETELKNIDFSASKFQKQLQTTYDKYIAMRDELGRSEKPQTLMDMATIFGRYERANGRLDDMEVSDEINACSVEIEVDVDGVKEPWLLMFKNETHNHPTEIEPFGGAATCIGGAIRDPLSGRSYVYQAMRISGAGDITTPIAETRAGKLPQQVISKTAAHGYSSYGNQIGLATTYVREYFHPGFVAKRMELGAVVGAAPKENVVREKPEAGDVVILLGGKTGRDGVGGATGSSKVQTVESVETAGAEVQKGNAIEERKIQRLFRDGNVTRLIKKSNDFGAGGVCVAIGELADGLEIDLDKVPLKYQGLNGTEIAISESQERMSVVVRPNDVDAFIAACNKENIDAVVVATVTEKPNLVMTWNGEIIVDLERRFLDTNGVRVVVDAKVVDKDLTVPEARTTSAETLEADTLKVLSDLNHASQKGLQTIFDSSVGRSTVNHPIGGRYQITPTESSVQKLPVQHGVTTTASVMAQGYNPYIAEWSPYHGAAYAVIEATARLVATGADWSRARFSYQEYFERMDKQAERFGQPVSALLGSIEAQIQLGLPSIGGKDSMSGTFEDLTVPPTLVAFGVTTADSRKVLSPEFKAAGENIYYIPGQAISEDIDFDLIKDNFSQFEAIQAQHKITAASAAKYGGVLESLALMTFGNRIGASVEIAELDSSLTAQLGGFVFTSAEEIADAVKIGQTQADFTVTVNGNDLAGASLLAAFEGKLEEVYPTEFEQTDVLEEVPAVVSDTVIKAKETIEKPVVYIPVFPGTNSEYDSAKAFEQVGASVNLVPFVTLNEVAIAESVDTMVANIAKANIIFFAGGFSAADEPDGSAKFIVNILLNEKVRAAIDSFIEKGGLIIGICNGFQALVKSGLLPYGNFEEAGETSPTLFYNDANQHVAKMVETRIANTNSPWLAGVEVGDIHAIPVSHGEGKLVVSASEFAELRDNGQIWSQYVDFDGQPSMDSKYNPNGSVNAIEGITSKNGQIIGKMGHSERWEDGLFQNIPGNKDQILFASAVKYFTGK

SEQ ID NO: 52664 - DNA, 3888 bp, Escherichia coli O157:H7 EDL933
  CDS (1)..(3888): transl_table=11
  misc_feature (542)..(542): m is a or c
atgatggaaattctgcgtggttcgcctgcactgtcggcattccgaatcaacaaactgctggcacgttttcaggctgccaggctcccggttcacaatatttacgccgagtatgtccattttgctgacctcaatgcgccgttaaacgatgatgagcacgcacaacttgaacgcctgctgaaatatggcccggcactcgccagccacgccccgcaaggcaaactcctgctggtgaccccgcgtcctggcaccatctctccctggtcttcgaaagcgaccgatattgctcataactgcgggctacaacaggtaaaccgccttgagcgcggcgttgcttactatatagaagccggtacgctgaccaatgaacaatggcagcaggttaccgctgaactgcacgaccgcatgatggaaacggtcttttttgctttagatgatgcagagcagttgtttgcccaccatcaaccgactccggttaccagcgttgatttgctggggcagggccgtcaggcgctgatcgacgctaacctgcgtcttggcctggmtctggcggaagatgaaattgactatctgcaggatgctttcacaaagcttggtcgtaacccgaacgacatcgagctgtatatgttcgctcaggcgaactctgagcactgccgccacaaaatttttaatgccgactggattatcgacggtgaacagcagccgaaatcgctgttcaagatgatcaaaaatactttcgaaaccacgccagatcacgttctctctgcttataaagataacgccgccgtaatggaaggttctgaagtgggccgctactttgctgaccacgaaacgggccgctacgatttccatcaggaaccggcgcatattctgatgaaagtcgaaactcacaaccacccgacggcgatttctccgtggccgggcgcggcgaccggttccggcggtgaaatccgcgatgaaggtgccaccgggcgcggcgcgaagccgaaagcgggtttggttggtttctccgtttccaacctgcgaattcctggcttcgaacagccgtgggaagaagatttcggtaagcctgagcgcattgtcaccgcgctggacatcatgaccgaaggcccgctgggcggcgcggcgtttaacaacgaatttggtcgtccggcactgaatggctacttccgtacttatgaagaaaaagtgaacagccacaacggcgaagagctgcgcggttatcacaaaccgatcatgctggcgggcgggatcggcaacattcgcgccgatcacgtacaaaaaggcgagatcaacgtcggtgcgaaactggtcgttctcggcggcccggcaatgaacatcggtcttggcggcggagcggcgtcttccatggcgtcaggtcagtctgatgccgacctcgactttgcttccgtacagcgcgacaacccggagatggagcgtcgctgccaggaagtgatcgaccgttgctggcagcttggtgatgccaacccaatcctgtttatccacgacgtcggcgctggcggtctttctaacgcgatgccggaactggtgagcgacggcgggcgcggcggtaaatttgaactgcgcgatattctaagcgacgaaccgggcatgagcccgctggaaatctggtgtaacgaatcccaggaacgctacgtgctggcggttgctgccgatcaattaccgctgtttgacgaactgtgtaagcgtgagcgcgcaccctacgcggtgattggtgaagcgaccgaagaactgcatctttctctgcacgatcgtcattttgataatcagccgatcgatctgccgctggacgtcctgcttggtaaaacgccgaagatgacccgcgatgtacaaacgctgaaagcgaagggcgatgcgctggtccgtgaagggatcaccattgcagacgcggtgaaacgcgtactgcatttgccgaccgtggcggagaaaactttcctggtgaccatcggtgaccgcagcgtaaccggcatggtggcgcgcgatcagatggtggggccgtggcaggtgccggtcgctaactgcgcggtcactaccgccagcctcgacagctactacggtgaagcgatggcgattggcgagcgtgcgccggttgcgctgctggatttcgccgcctctgcccgtctggcggtcggtgaagcgttaaccaatattgccgcaacacagattggcgatatcaaacgcattaaactttccgccaactggatggcggcggcaggccaccctggtgaagatgcgggcctgtatgaagccgttaaagccgtgggcgaagagctttgtccggcgctgggcctgacgatcccggtgggtaaagactctatgtcgatgaaaacccgctggcaggaaggtaacgaagagcgcgaaatgacgtcgccgctgtcgctggtgatttctgcatttgcccgcgtggaagatgtacgtcacaccatcacgccgcagctttctaccgaagataacgcactgctgctgattgatttgggcaaaggcaataacgcgctgggcgcaacggcgctggcgcaggtttatcgtcagcttggcgacaaaccggcagatgtacgcgatgtcgcgcaactgaaaggcttctatgacgcgattcaggcgctggttgcacagcgtaagttgctggcgtatcacgaccgctctgatggcggtctgctggtaacgctggcggaaatggcctttgctggtcattgcggcattgacgcggatatcgccactctgggtgacgatcgcctggcggcgttgtttaacgaagaactgggtgcggtcattcaggttcgtgccgctgaccgtgaagcggtcgagtccgtactggcacagcatgggcttgctgattgcgtccattatgttgggcaggcggtttccggtgaccgttttgtgattaccgccaacgggcagactgtattcagcgaaagccgcactacgttgcgtgtctggtgggcagaaactacctggcagatgcagcgcctgcgtgacaacccggagtgtgccgatcaggagcatcaggcgaaatcaaacgacgccgatccgggcctgaatgtgaaactgtcgtttgatatcaacgaagatgtggcagcaccgtatattgccactggcgcacgtccgaaagttgctgtgctgcgtgagcagggcgtgaactcgcatgttgaaatggcggcagctttccaccgtgcaggcttcgatgctatcgacgtgcatatgagcgacctgctggctggacgcacgggcctggaggatttccacgccctggtcgcgtgcggtggtttctcctacggtgatgtgctgggtgccggtgaaggttgggcgaagtctatcctgttcaatgaccgtgtacgcgatgagtttgcaaccttcttccaccgtccgcaaacgctggcgctgggggtatgtaacggttgccagatgatgtctaatctgcgtgaactgatcccaggtagtgagttgtggccacgttttgtgcgcaatacctccgatcgctttgaagcgcgtttcagcttggttgaagtgacccaaagcccgtcgctgctgttgcaggggatggtgggctcgcaaatgccgattgctgtctctcatggtgaagggcgcgtggaagtgcgtgatgcggcgcatctggcggcactggaaagcaaagggctggtggcactgcgctatgtcgataacttcggcaaagtcactgaaacctacccggctaacccgaacggttctccgaacggtattacggcggtcacgactgaaagcggtcgagtcaccattatgatgccgcacccggaacgtgttttccgtactgtcagcaactcctggcatcctgaaaactggggcgaggatggcccatggatgcgcattttccgcaatgcacgtaagcagttggggtaa

SEQ ID NO: 52665 - protein, 1295 aa, Escherichia coli O157:H7 EDL933
  misc_feature (181)..(181): The Xaa at location 181 stands for Ala, or Asp.
MMEILRGSPALSAFRINKLLARFQAARLPVHNIYAEYVHFADLNAPLNDDEHAQLERLLKYGPALASHAPQGKLLLVTPRPGTISPWSSKATDIAHNCGLQQVNRLERGVAYYIEAGTLTNEQWQQVTAELHDRMMETVFFALDDAEQLFAHHQPTPVTSVDLLGQGRQALIDANLRLGLXLAEDEIDYLQDAFTKLGRNPNDIELYMFAQANSEHCRHKIFNADWIIDGEQQPKSLFKMIKNTFETTPDHVLSAYKDNAAVMEGSEVGRYFADHETGRYDFHQEPAHILMKVETHNHPTAISPWPGAATGSGGEIRDEGATGRGAKPKAGLVGFSVSNLRIPGFEQPWEEDFGKPERIVTALDIMTEGPLGGAAFNNEFGRPALNGYFRTYEEKVNSHNGEELRGYHKPIMLAGGIGNIRADHVQKGEINVGAKLVVLGGPAMNIGLGGGAASSMASGQSDADLDFASVQRDNPEMERRCQEVIDRCWQLGDANPILFIHDVGAGGLSNAMPELVSDGGRGGKFELRDILSDEPGMSPLEIWCNESQERYVLAVAADQLPLFDELCKRERAPYAVIGEATEELHLSLHDRHFDNQPIDLPLDVLLGKTPKMTRDVQTLKAKGDALVREGITIADAVKRVLHLPTVAEKTFLVTIGDRSVTGMVARDQMVGPWQVPVANCAVTTASLDSYYGEAMAIGERAPVALLDFAASARLAVGEALTNIAATQIGDIKRIKLSANWMAAAGHPGEDAGLYEAVKAVGEELCPALGLTIPVGKDSMSMKTRWQEGNEEREMTSPLSLVISAFARVEDVRHTITPQLSTEDNALLLIDLGKGNNALGATALAQVYRQLGDKPADVRDVAQLKGFYDAIQALVAQRKLLAYHDRSDGGLLVTLAEMAFAGHCGIDADIATLGDDRLAALFNEELGAVIQVRAADREAVESVLAQHGLADCVHYVGQAVSGDRFVITANGQTVFSESRTTLRVWWAETTWQMQRLRDNPECADQEHQAKSNDADPGLNVKLSFDINEDVAAPYIATGARPKVAVLREQGVNSHVEMAAAFHRAGFDAIDVHMSDLLAGRTGLEDFHALVACGGFSYGDVLGAGEGWAKSILFNDRVRDEFATFFHRPQTLALGVCNGCQMMSNLRELIPGSELWPRFVRNTSDRFEARFSLVEVTQSPSLLLQGMVGSQMPIAVSHGEGRVEVRDAAHLAALESKGLVALRYVDNFGKVTETYPANPNGSPNGITAVTTESGRVTIMMPHPERVFRTVSNSWHPENWGEDGPWMRIFRNARKQLG

SEQ ID NO: 52666 - DNA, 2265 bp, Mycobacterium tuberculosis CDC1551
  CDS (1)..(2265): transl_table=11
gtgctggacaccgtcgaacacgccgcgaccacacccgaccaaccacaaccgtatggtgagctgggcctcaaagacgacgagtaccggcggattcgccagatcctgggccgccggcccaccgacaccgagctggccatgtactcggtgatgtggagcgaacactgttcgtacaagtcctccaaggtgcacctgcgctacttcggtgagaccacctccgacgagatgcgcgcggccatgctggccggcatcggcgagaacgccggcgtcgtcgacatcggcgacggctgggcggtcaccttcaaggtggagtcacacaaccacccgtcctacgtcgagccctaccagggcgcggccaccggggtgggcggcatcgtccgcgacatcatggccatgggcgcccgaccggtcgccgtgatggaccagcttcggttcggcgccgccgacgcccccgatacccgccgcgtgctcgacggcgtggtccgcggcatcggcggatacggcaactccctgggcctgcccaacattggcggagagactgtcttcgacccgtgctacgccggcaaccccttagtgaacgcgttgtgtgtcggcgtattacggcaggaggacctgcatttggcgttcgcctccggcgccggcaacaagatcatcctgtttggcgcgcgcaccgggctcgacggtatcggcggggtgtcggtgctggcgtcggacaccttcgatgccgagggatcccgcaagaagctgccctcggtgcaggtcggcgacccgttcatggagaaggtgctcatcgaatgctgtctcgagctctacgcgggcggcctggtgatcggcatccaagacctgggcggagccggattatcttgtgccacatcggagttagcatccgccggtgatggcggaatgacgatccagctggacagcgtcccgctgcgggccaaggagatgacgcccgccgaggtgctctgcagcgaatcgcaggagcggatgtgcgcggtggtctccccgaagaacgtcgacgcattcctggcggtgtgccgcaagtgggaggtgctggcgacggtgatcggcgaggtcaccgacggcgaccggctgcagatcacctggcacggcgagacggtggtcgacgtgccgccgcgcaccgtagctcacgaaggtccggtatatcagcgcccggtcgcccgccccgatacgcaggacgcgctgaacgccgaccgctcggccaagctgtcacggccggtcaccggcgacgagctgcgcgcgactttgcttgcgttacttggcagcccgcacctgtgcagccgcgcgttcatcaccgagcagtacgaccgctatgtgcgcggcaacacggtgctcgccgagcacgccgacggcggcatgctgcgcatcgaccagtcgaccggccggggcatcgcggtatcgaccgacgcgtcgggacgctacacgctgctggatccctacgctggcgcgcaactcgcgttggccgaggcgtaccgcaacgtcgccgtcaccggcgccaccccggtcgcggtgaccaactgcctgaacttcggttcccccgaggaccccggcgtgatgtggcagttcacgcaggcggtccgcggtctggccgatggctgtgcggacctcgggattccggtgaccggtggcaacgtgagtttctacaaccaaaccggttcggcggcaatcctgcccacgccggtggtcggggtgctcggcgtcatcgacgatgtgcgtcggcgcatccctaccggcctgggcgccgagcccggggaaacgttgatgctgttgggcgacacccgcgacgagttcgacggttccgtgtgggcgcaggtgaccgcagaccacctgggtggattgccgccggtagtcgatctggcgcgggagaagctgctggccgcggtgctgagctcggcgtcgcgggacgggctagtgtccgcggcgcacgatctgtccgagggtgggctggcccaagccatcgtggaatcggcgttagcgggtgaaaccggttgccgcatagtgcttcccgaaggggctgacccgtttgtgctgctgttctccgagtcggcgggtcgggtgctggtcgcggtgccacgcaccgaggagagccggtttcgcgggatgtgtgaggcgcggggacttcccgcggtccgcatcggcgtcgtcgatcaaggttcggacgcggttgaggtgcagggcttgttcgcggtgtcgttggccgaactgcgtgcgacatccgaggcggtgttgccgcgatacttcggatga

SEQ ID NO: 52667 - protein, 754 aa, Mycobacterium tuberculosis CDC1551
MLDTVEHAATTPDQPQPYGELGLKDDEYRRIRQILGRRPTDTELAMYSVMWSEHCSYKSSKVHLRYFGETTSDEMRAAMLAGIGENAGVVDIGDGWAVTFKVESHNHPSYVEPYQGAATGVGGIVRDIMAMGARPVAVMDQLRFGAADAPDTRRVLDGVVRGIGGYGNSLGLPNIGGETVFDPCYAGNPLVNALCVGVLRQEDLHLAFASGAGNKIILFGARTGLDGIGGVSVLASDTFDAEGSRKKLPSVQVGDPFMEKVLIECCLELYAGGLVIGIQDLGGAGLSCATSELASAGDGGMTIQLDSVPLRAKEMTPAEVLCSESQERMCAVVSPKNVDAFLAVCRKWEVLATVIGEVTDGDRLQITWHGETVVDVPPRTVAHEGPVYQRPVARPDTQDALNADRSAKLSRPVTGDELRATLLALLGSPHLCSRAFITEQYDRYVRGNTVLAEHADGGMLRIDQSTGRGIAVSTDASGRYTLLDPYAGAQLALAEAYRNVAVTGATPVAVTNCLNFGSPEDPGVMWQFTQAVRGLADGCADLGIPVTGGNVSFYNQTGSAAILPTPVVGVLGVIDDVRRRIPTGLGAEPGETLMLLGDTRDEFDGSVWAQVTADHLGGLPPVVDLAREKLLAAVLSSASRDGLVSAAHDLSEGGLAQAIVESALAGETGCRIVLPEGADPFVLLFSESAGRVLVAVPRTEESRFRGMCEARGLPAVRIGVVDQGSDAVEVQGLFAVSLAELRATSEAVLPRYFG

SEQ ID NO: 52668 - DNA, 3726 bp, Streptococcus pneumoniae TIGR4
  CDS (1)..(3726): transl_table=11
atggataaacgtatttttgttgaaaaaaaggctgattttcaggtcaagtcagagagtttggttagagagctccagcacaacttgggactgtcaagcttgaaaagtattcgtattgtgcaagtatatgatgtatttgacttggctgaggacttgtttgcacctgcagagaagcacattttctctgagcaggtaaccgaccatgttttagatgaagtatctgtgcaggcggatcttgctaactatgctttctttgccattgaaagtctgccagggcagtttgaccagcgtgcagcttcgtcacaggaagccttgcttttgttgggaagttcgagtgacgtgacagtcaacacagcccaactttacttggtgaataaagatattgatgcgactgagttggaagctgtcaaaaactacctgctcaatccagttgattctcgtttcaaggatatcacgacagggattgccaagcaggagttttcagagtcagacaagaccattcccaaattgactttctttgaaagctatgcagcagaagactttgctcgctacaaggccgaacaagggatggccatggaagtggatgatttgctctttatccaagactactttaagtcaatcgggcgcgtgccaactgagactgaactcaaggttttggacacttactggtctgaccactgccgtcatacgacttttgagacagagttgaaacacatcgacttttcagcttctaaatttcaaaagcaattgcagtcaacctatgacaagtatattgccatgcgcgaggaattaggtcggtctgaaaaaccacaaaccttgatggatatggcgactattttcggtcgttatgagcgtgctaatggacgattggatgatatggaagtctctgacgaaatcaatgcctgctcagttgaaattgaagtggacgttgatggtgtcaaggaaccttggctcctcatgtttaaaaacgaaacccacaaccatccaacagaaattgagccatttggtggagcggctacctgtattggtggagctattcgtgatccgttgtcaggccgttcctatgtttaccaagccatgcgtatttcaggtgctggtgatattacagcaccgatttcggaaactcgcgctgggaaattgccacaacaagtcatttctaaaacagcagctcatggttattcttcatatggtaaccagattgggcttgcaacaacctacgttcgtgaatacttccacccaggctttgtagctaaacgtatggaacttggtgccgttgttggtgcgactcccaagggcaatgttgtccgtgaaaaacctgaagcaggtgatgtgatcatccttctcggaggcaaaacaggtcgtgatggtgtcggtggtgcgacgggctcttctaaggttcaaacagttgagtctgtagagactgctggtgctgaggttcaaaaaggaaatgccatcgaagaacgcaagattcagcgcctcttccgtaatggcaatgtcactcgtctgatcaagaagtccaatgactttggggcaggcggtgtctgtgtggctatcggtgaattggcagacggtcttgaaatcgacctcaacaaggtgcctcttaaataccagggcttgaatggtacagaaattgccatctctgaatcacaagaacggatggcggtcgtggttcgtcctgaagatgtggatgccttcgttgccgaatgtaacaaagaaaatattgatgctgttgtggtggcgacagtaactgaaaaaccaaatcttgtcatgcactggaatggtgagacaatcgttgacttggagcgtcgtttccttgacaccaatggtgtgcgcgtggttgtcgatgccaaagttgtggacaaggatgtcaaactcccagaagagcgtcaaacatctgctgaaacactggaatcagatacccttacggttctatctgacctcaaccatgcaagtcaaaaaggattacagactatctttgactgctctgttggacgctcaacggttaatcacccacttggtggtcgttaccaactcacaccaactgaggcatctgtgcagaaattgccagttcaacacggtgtgactcatactgcgtcggtcattgctcaaggtttcaacccatatgtagctgaatggtctccataccacggtgctgcttatgcggttatcgaagcaactgctcgtttggtggctgctggtgccaactggttcaaggctcgtttctcttaccaagagtatttcgagcgtatggataaacaagcagagcgtttcggtcagccagtagctgctcttctaggttctattgaagcacaaattcagcttggcttgccatctatcggtggtaaggactccatgtctggtacctttgaagaattgaccgttccgccaaccttggctgcctttggggtgacgacggcagatagccgtaaggtgctctctccagaatttaaagctgttggggaaaatatctactacatcccaggtcaagccctctctgcagagattgattttgacttgattaagaaaaattttgctcagtttgaagccatccaagctgaccataaagtgacatctgcatcagctgtcaaatacggtggtgtagttgaaagtttggctcttgctacctttggaaactatattggtgcagaggtgaccttgcctgaacttgaaacagctttgacagctcaattaggcggctttgtcttcacatctcctgaagaaattgctggagtagagaaggttggacaaacgaaagcagactttacactgactgtcaacggtgtgaagctagatggacacaagcttgacagtgcatttcaagggacattggaagaagtttacccaacagaatttacccaagcgaaagaactagaagaagtaccagctgtggcatcagatgttgtgattaaagccaaagaaaaggttgaaaaacctgtggtttacatcccagtctttccaggaaccaactcagaatatgattcagctaaggccttcgaaaaagaaggtgcagaggtcaatttggtgccattcgtgaccttgaatgaagaagctattgtcaagtcagttgaaactatggttgacaatatcgacaagactaatattctcttctttgctggtggattctcggctgcggatgaaccagatggttcagctaagtttatcgtcaatatcctgcttaatgaaaaagtgcgtgtggctattgatagctttatcgcccgtggtggtttgattatcggtatttgtaatggattccaagccttagtcaaatcgggtctcctaccctacggaaactttgaagctgctaacagtactagcccaaccctcttctacaatgatgccaaccaacacgtggccaagatggtggaaactcgcattgccaataccaactcaccatggttggttggtgtgcaagtgggcgatatccacgctattcctgtttcgcacggtgaagggaagtttgtcgtgacggctgaggaatttgcagagctccgtgacaatggacaaattttcagccaatacgttgactttaacggtaaaccaagtatggattctaagtacaatccgaatggttctgtccatgccatcgaaggaattaccagcaagaatggtcaaatcatcggtaagatgggccactcagaacgttatgaggatggtcttttccaaaatatcccaggcaataaagaccaacacctgttcgcatcagcggttaaacatttcactggaaaataa

SEQ ID NO: 52669 - protein, 1241 aa, Streptococcus pneumoniae TIGR4
MDKRIFVEKKADFQVKSESLVRELQHNLGLSSLKSIRIVQVYDVFDLAEDLFAPAEKHIFSEQVTDHVLDEVSVQADLANYAFFAIESLPGQFDQRAASSQEALLLLGSSSDVTVNTAQLYLVNKDIDATELEAVKNYLLNPVDSRFKDITTGIAKQEFSESDKTIPKLTFFESYAAEDFARYKAEQGMAMEVDDLLFIQDYFKSIGRVPTETELKVLDTYWSDHCRHTTFETELKHIDFSASKFQKQLQSTYDKYIAMREELGRSEKPQTLMDMATIFGRYERANGRLDDMEVSDEINACSVEIEVDVDGVKEPWLLMFKNETHNHPTEIEPFGGAATCIGGAIRDPLSGRSYVYQAMRISGAGDITAPISETRAGKLPQQVISKTAAHGYSSYGNQIGLATTYVREYFHPGFVAKRMELGAVVGATPKGNVVREKPEAGDVIILLGGKTGRDGVGGATGSSKVQTVESVETAGAEVQKGNAIEERKIQRLFRNGNVTRLIKKSNDFGAGGVCVAIGELADGLEIDLNKVPLKYQGLNGTEIAISESQERMAVVVRPEDVDAFVAECNKENIDAVVVATVTEKPNLVMHWNGETIVDLERRFLDTNGVRVVVDAKVVDKDVKLPEERQTSAETLESDTLTVLSDLNHASQKGLQTIFDCSVGRSTVNHPLGGRYQLTPTEASVQKLPVQHGVTHTASVIAQGFNPYVAEWSPYHGAAYAVIEATARLVAAGANWFKARFSYQEYFERMDKQAERFGQPVAALLGSIEAQIQLGLPSIGGKDSMSGTFEELTVPPTLAAFGVTTADSRKVLSPEFKAVGENIYYIPGQALSAEIDFDLIKKNFAQFEAIQADHKVTSASAVKYGGVVESLALATFGNYIGAEVTLPELETALTAQLGGFVFTSPEEIAGVEKVGQTKADFTLTVNGVKLDGHKLDSAFQGTLEEVYPTEFTQAKELEEVPAVASDVVIKAKEKVEKPVVYIPVFPGTNSEYDSAKAFEKEGAEVNLVPFVTLNEEAIVKSVETMVDNIDKTNILFFAGGFSAADEPDGSAKFIVNILLNEKVRVAIDSFIARGGLIIGICNGFQALVKSGLLPYGNFEAANSTSPTLFYNDANQHVAKMVETRIANTNSPWLVGVQVGDIHAIPVSHGEGKFVVTAEEFAELRDNGQIFSQYVDFNGKPSMDSKYNPNGSVHAIEGITSKNGQIIGKMGHSERYEDGLFQNIPGNKDQHLFASAVKHFTGK

SEQ ID NO: 52670 - DNA, 3768 bp, Clostridium acetobutylicum ATCC 824
  CDS (1)..(3768): transl_table=11
atgaatacaaaagtaaggcgtatattcgtaaagaaaaaagcaggttttgatgttgcagcaaaagaacttttgaaggatttagtagaaaacctcggaataaaaactttaaaggatttatcaatattaaatagatacgatgtttctggcataaatgacagtgagtatgaggatgctaaagctattatattttctgaaaaaactgttgatgatgtatatgatgaaaaatttgaagtttcaagtgaagataaagtttttgctgtagaatatttgccggggcagtacgatcaaagagcggattctgcatgtcagtgcattaaaatacttacaggaaatgaagatgttttaatagcatcagcaaaagtaatcattttaaagggaaatataagcgttagtgatttagaaaaaattaaaaaatatgttatcaatccagttgattctagagaggcatctcttgataaaccggaaacattagaagtaatatatgatcttccgtatgaagttgaaaccatagagaattttataagcatgtcagaggatgagcttaaggtattcttagatagtaatggacttgcaatgagtatggaagatttaaaattttgtagggaatactttaagaatgaagaaaagagaaatcctacaataacagaaataaaggttatagatacttattggtcggatcactgtaggcatacaactttccaaacaaggcttcagaatattcagtttgaagatggaaaatatacagaagttttaaagtctgcctacaaaaattatgtggatgcaagaaaatatgtttatggaaataaagaaaaagaagtatgtcttatggacattgcagttattggaatgaaggaattaaagaaaaagggctttttaaatgatttagatgagtcagatgaaataaatgcctgtagtatagtagttgatgcagatgtaaacggaaaagatgaaaaatggcttgtaatgtttaaaaatgaaactcataatcatcctactgaaattgagccttttggaggagctgcaacctgtcttggaggagctataagagatccactttcaggaagagcctatgtatatcaagcaatgagagttacaggtagtggagatccaagagttagaatagaagatacaactaaaggaagacttcctcaaaagaagataacacttggagcagcaaacggctatagttcctatggaaaccaaataggacttgcaacaggacaagtttccgagtgctatgatgagggctttatagcaaagagaatggaagttggagctgtggttggagcagcacctaaggaaaacgtagttagagaagagccaaaaccatctgatgttgttattcttttaggtggaagaacaggaagagacggctgtggtggagcaacaggttcctcaaaagaacatgatgtaaattcacttcaaaactgtggtgcagaagttcaaaagggtaacgcacctacagaaagaaaacttcaaagactttttagaaataataaggtaagtacattaataaaaagatgtaatgattttggagctggtggagtttctgttgctataggtgaacttacagatggacttgacattaacttagatttagtccctaaaaagtatgagggactagatggaactgagcttgcaatttccgaatctcaagagagaatggcagttgttgttgagaaaaaagatgctgaaaagtttatagaatatgcagataaggaaaatttagaagctgtaatagtggcaaaggtaacagatacaaaaagacttaaattattctggaaaggaaatgctatagtaaatatttcaagggcatttttagatacaaatggtgttagacaaaatgttgatgtttttgtaaaggcaccaaaaaaggaagataactacttcaagactgaaaataaaaataaggacgttaaagaggaagttttagaaaccttaagggatttaaatgtatgcagtcagaagggactttcagaaagatttgacagcactataggtgcaggtactgttttaatgccttttggaggaaagaatcaaataactccagctgagggtatggcagcaaagcttccagttcttaatggagagacttcaacaggaacggtaatgacttacggttataatcctaagataggaaaatggagtcctttccatggtgcaatgtatgccgttatagaatcccttacaaagatagtgtgcatgggcggagattataaaaagactagacttacttttcaagagtattttgaaagattaaataaagagcctgaaagatggggtaaaccttttgcagcacttcttggagcacttaaggcgcaagagatatttaatactccagctataggtggaaaggacagtatgtctggtacttttatggacttaaatgttccaccaacacttgtatcctttgctgtgaatgtagttgatataaataatgtgatatcacctgaatttaaaaaggtaggcagcagtgtggttttagttaagtgtgaaagggatgaaaatgaagttcctttatttgatgaattgaagaaaaactttgatactgtacaggctttaattaaggataaaaaggtaataagtgctcaaagcgttagacacggcggactcatagctgctttaagtaaaatgtgttttggaaataaaattggttttgaaatgctcaaagaggaagaactatttactcctgattatggttctatagttttagaacttgaggagagcttagatattaaggaattatttaaagatgtaaaatacgaagttattggtaaaactatagctgatagtaaaataatcttaaataatgtttcaataagcattgatgaagctttagaggcatatactgagcctttagaaaaagttttccctactaaagtggaagcttcaaagaagattaatctagctttatatgatgaagttaaatatgaaaatataaaaagagttagtgctgtaaataaaattgcaaagccaagagtattcataccagtattcccgggaacaaactgtgagtatgattcaaaaagggcctttgaaagagcaggagctgaagttaatacccttgtatttagaaatatgaaggcaacagatattgaagaatctataaatgaaatggtagaggaaataaataaagctcagataataatgcttcctggaggcttcagtgcaggtgatgaaccggatggttctggaaagtttatagcaactgtatttagaaatgagaagattaaagaagcagtaatgaagctattaaatgcacgtgatggccttatgcttggaatatgcaacggcttccaggcacttataaaattaggacttgtgccttatggagaaataagagaaatagatgaaaactgtcctacactaacatacaacaatataggaagacatgtatctaaaattgcatatactaaaattgtttcaaataaatcaccttggttttctaatgtagaaattggagatattcatagtatacctatttctcatggagagggaagatttgctgcaagtaaagaggttgtagaagagcttataaagaatggacagatagcaacgaggtatgtagatttaaacggtaattcaagttatgaaacagaagtaaatcctaatggatcagtactttgtatagaaggaataacaagtcctgatggaagaatacttggtaagatggggcattctgagagattttctaaggggacttataagaatataattggaaatcaagaccaaaagatatttgaaagtggagtacagtattttaaataa

SEQ ID NO: 52671 - protein, 1255 aa, Clostridium acetobutylicum ATCC 824
MNTKVRRIFVKKKAGFDVAAKELLKDLVENLGIKTLKDLSILNRYDVSGINDSEYEDAKAIIFSEKTVDDVYDEKFEVSSEDKVFAVEYLPGQYDQRADSACQCIKILTGNEDVLIASAKVIILKGNISVSDLEKIKKYVINPVDSREASLDKPETLEVIYDLPYEVETIENFISMSEDELKVFLDSNGLAMSMEDLKFCREYFKNEEKRNPTITEIKVIDTYWSDHCRHTTFQTRLQNIQFEDGKYTEVLKSAYKNYVDARKYVYGNKEKEVCLMDIAVIGMKELKKKGFLNDLDESDEINACSIVVDADVNGKDEKWLVMFKNETHNHPTEIEPFGGAATCLGGAIRDPLSGRAYVYQAMRVTGSGDPRVRIEDTTKGRLPQKKITLGAANGYSSYGNQIGLATGQVSECYDEGFIAKRMEVGAVVGAAPKENVVREEPKPSDVVILLGGRTGRDGCGGATGSSKEHDVNSLQNCGAEVQKGNAPTERKLQRLFRNNKVSTLIKRCNDFGAGGVSVAIGELTDGLDINLDLVPKKYEGLDGTELAISESQERMAVVVEKKDAEKFIEYADKENLEAVIVAKVTDTKRLKLFWKGNAIVNISRAFLDTNGVRQNVDVFVKAPKKEDNYFKTENKNKDVKEEVLETLRDLNVCSQKGLSERFDSTIGAGTVLMPFGGKNQITPAEGMAAKLPVLNGETSTGTVMTYGYNPKIGKWSPFHGAMYAVIESLTKIVCMGGDYKKTRLTFQEYFERLNKEPERWGKPFAALLGALKAQEIFNTPAIGGKDSMSGTFMDLNVPPTLVSFAVNVVDINNVISPEFKKVGSSVVLVKCERDENEVPLFDELKKNFDTVQALIKDKKVISAQSVRHGGLIAALSKMCFGNKIGFEMLKEEELFTPDYGSIVLELEESLDIKELFKDVKYEVIGKTIADSKIILNNVSISIDEALEAYTEPLEKVFPTKVEASKKINLALYDEVKYENIKRVSAVNKIAKPRVFIPVFPGTNCEYDSKRAFERAGAEVNTLVFRNMKATDIEESINEMVEEINKAQIIMLPGGFSAGDEPDGSGKFIATVFRNEKIKEAVMKLLNARDGLMLGICNGFQALIKLGLVPYGEIREIDENCPTLTYNNIGRHVSKIAYTKIVSNKSPWFSNVEIGDIHSIPISHGEGRFAASKEVVEELIKNGQIATRYVDLNGNSSYETEVNPNGSVLCIEGITSPDGRILGKMGHSERFSKGTYKNIIGNQDQKIFESGVQYFK

SEQ ID NO: 52672 - DNA, 3729 bp, Streptococcus pneumoniae R6
  CDS (1)..(3729): transl_table=11
ttgatggataaacgtatttttgttgaaaaaaaggctgattttcaggtcaagtcagagagtttggttagagagctccagcacaacttgggactgtcaagcttgaaaagtattcgtattgtgcaagtatatgatgtatttgacttggctgaggacttgtttgcacctgcagagaagcacattttctctgagcagggaaccgaccatgttttagatgaagtatctgtgcaggcggatcttgctaactatgctttctttgccattgaaagtctgccagggcagtttgaccagcgtgcagcttcgtcacaggaagccttgcttttgttgggaagttcgagtgacgtgacagttaacacagcccaactttacttggtgaataaagatattgatgcgactgagttggaagctgtcaaaaactacctgctcaatccagttgattctcgtttcaaggatatcacgacagggattgccaagcaggagttttcagagtcagacaagaccattccaaaattgactttctttgaaagctatacagcagaagactttgctcgctacaaggccgagcaagggatggccatggaagtggatgatttgctctttatccaagactactttaagtcaatcgggcgcgtgccaactgagactgaactcaaggttttggacacttactggtctgaccactgccgtcatacgacttttgagacagagttgaaacacatcgacttttcagcttctaaatttcaaaagcaattgcagtcaacctatgacaagtatattgccatgcgcgaggagttaggtcggtctgaaaaaccacaaaccttgatggatatggcgactattttcggtcgttatgagcgtgctaacggacgattggatgatatggaagtctctgacgaaatcaatgcctgctcagttgaaattgaagtggatgttgatggtgtcaaggaaccttggctcctcatgtttaaaaatgaaacccacaaccatccaacagaaattgagccatttggtggagcggctacctgtatcggtggagctattcgtgatccgttgtcaggccgttcctatgtttaccaagccatgcgtatttcaggtgctggtgatattacagcaccgatttcggaaactcgtgctgggaaattgccacaacaagtcatttctaaaacagcagctcatggttattcttcatatggtaaccagattgggcttgccacaacctacgttcgtgaatacttccacccaggctttgtagctaaacgtatggaacttggtgccgttgttggtgcggctcccaagggcaatgttgtccgtgaaaaacctgaagcaggtgatgtgatcatccttctcggaggtaaaacaggtcgtgatggtgtcggtggtgcgacgggctcttctaaggttcaaacagttgagtctgtagagactgctggtgctgaggttcaaaaaggaaatgccatcgaagaacgcaagattcagcgcctcttccgtaatggcaatgtcactcgtctgatcaagaagtccaatgactttggggcaggcggtgtctgtgtggctatcggtgaattggcagacggtcttgaaatcgacctcaacaaggtgcctcttaaataccagggcttgaatggtacagaaattgccatctctgaatcacaagaacggatggcggttgtggttcgtcctgaagatgtggataccttcgttgccgaatgtaacaaagaaaatattgatgctgttgtggtggcgacagtaactgaaaaaccaaatcttgtcatgcactggaatggtgagacaatcgttgacttggagcgtcgtttccttgacatcaatggtgtgcgcgtggttgtcgatgccaaagttgtggacaaggatgtcaaactcccagaagagcgtcaaacatctgctgaaacactggaatcagatacccttacggttctatctgacctcaaccatgcaagtcaaaaaggattacagactatctttgactgctctgttggacgctcaacggttaatcacccacttggtggtcgttaccaactcacaccaactgaggcatctgtgcagaaattgccagttcaacacggtgtgactcatactgcgtcggtcattgctcaaggtttcaacccatatgtagctgaatggtctccataccacggtgctgcttatgcggttatcgaagcaactgctcgtttggtggctgctggtgccaactggtccaaggctcgtttctcttaccaagaatatttcgagcgtatggacaagcaagcagagcgttttggtcagccagtagccgctcttctaggctctattgaagctcagattcaacttggcttgccatctatcggtggtaaggactccatgtctggtacctttgaagaattgaccgttccgccaaccttggttgcctttggggtgacgacggcagatagccgtaaggtgctctctccagaatttaaagctgttggggaaaatatctactacatcccaggtcaagccctctctgcagagattgattttgacttgattaagaaaaattttgctcagtttgaagcaagccaagctgaccataaagtgacatctgcatcagctgtcaaatacggtggtgtagttgaaagtttggctcttgctacctttggaaactatattggtgcagaggtgaccttgcctgaacttaaaacagctttgacagctcaattaggcggctttgtcttcacatctcctgaagaaattgctggagtagagaagattggacaaacgaaagcagactttacactgactgtcaacggtgtgaagctagatggacacaagcttgacagtgcatttcaagggacattggaagaagtttacccaacagaatttacccaagcgaaagaactagaagaagtaccagctgtggcatcagatgttgtgattaaagccaaagaaaaggttgaaaaacctgtggtttacatcccagtctttccaggaaccaactcagaatatgattcagctaaggccttcgaaaaagaaggtgcagaggtcaatttggtgccattcgtgaccttgaatgaagaagctattgtcaagtcagttgaaactatggttgacaatatcgacaagactaatattctcttctttgctggtggattctcggctgcggatgaaccagatggttcagctaagtttatcgtcaatatcctgcttaatgaaaaagtgcgtgtggctattgatagctttatcgcccgtggtggtttgattatcggtatttgtaatggattccaagccttagtcaaatcgggtctcctaccctacggaaactttgaagatgctaacaatactagcccaaccctcttctacaatgatgccaaccaacacgtggccaagatggtggaaactcgcattgccaataccaactcaccatggttggctggtgtgcaagtgggcgatatccacgctattcctgtttcgcacggtgaagggaagtttgtcgtgacggctgaggaatttgcagagctccgtgacaatggacaaattttcagccaatacgttgactttaacggtaaaccaagtatggattctaagtacaatccgaatggttctgtccatgccatcgaaggaattaccagcaagaatggtcaaatcatcggtaagatgggccattcagaacgttatgaggacggtcttttccaaaatatcccaggcaataaagaccagcacctgttcgcgtcagcggttaaacatttcactggaaaataa

SEQ ID NO: 52673 - protein, 1242 aa, Streptococcus pneumoniae R6
MMDKRIFVEKKADFQVKSESLVRELQHNLGLSSLKSIRIVQVYDVFDLAEDLFAPAEKHIFSEQGTDHVLDEVSVQADLANYAFFAIESLPGQFDQRAASSQEALLLLGSSSDVTVNTAQLYLVNKDIDATELEAVKNYLLNPVDSRFKDITTGIAKQEFSESDKTIPKLTFFESYTAEDFARYKAEQGMAMEVDDLLFIQDYFKSIGRVPTETELKVLDTYWSDHCRHTTFETELKHIDFSASKFQKQLQSTYDKYIAMREELGRSEKPQTLMDMATIFGRYERANGRLDDMEVSDEINACSVEIEVDVDGVKEPWLLMFKNETHNHPTEIEPFGGAATCIGGAIRDPLSGRSYVYQAMRISGAGDITAPISETRAGKLPQQVISKTAAHGYSSYGNQIGLATTYVREYFHPGFVAKRMELGAVVGAAPKGNVVREKPEAGDVIILLGGKTGRDGVGGATGSSKVQTVESVETAGAEVQKGNAIEERKIQRLFRNGNVTRLIKKSNDFGAGGVCVAIGELADGLEIDLNKVPLKYQGLNGTEIAISESQERMAVVVRPEDVDTFVAECNKENIDAVVVATVTEKPNLVMHWNGETIVDLERRFLDINGVRVVVDAKVVDKDVKLPEERQTSAETLESDTLTVLSDLNHASQKGLQTIFDCSVGRSTVNHPLGGRYQLTPTEASVQKLPVQHGVTHTASVIAQGFNPYVAEWSPYHGAAYAVIEATARLVAAGANWSKARFSYQEYFERMDKQAERFGQPVAALLGSIEAQIQLGLPSIGGKDSMSGTFEELTVPPTLVAFGVTTADSRKVLSPEFKAVGENIYYIPGQALSAEIDFDLIKKNFAQFEASQADHKVTSASAVKYGGVVESLALATFGNYIGAEVTLPELKTALTAQLGGFVFTSPEEIAGVEKIGQTKADFTLTVNGVKLDGHKLDSAFQGTLEEVYPTEFTQAKELEEVPAVASDVVIKAKEKVEKPVVYIPVFPGTNSEYDSAKAFEKEGAEVNLVPFVTLNEEAIVKSVETMVDNIDKTNILFFAGGFSAADEPDGSAKFIVNILLNEKVRVAIDSFIARGGLIIGICNGFQALVKSGLLPYGNFEDANNTSPTLFYNDANQHVAKMVETRIANTNSPWLAGVQVGDIHAIPVSHGEGKFVVTAEEFAELRDNGQIFSQYVDFNGKPSMDSKYNPNGSVHAIEGITSKNGQIIGKMGHSERYEDGLFQNIPGNKDQHLFASAVKHFTGK

SEQ ID NO: 52674 - DNA, 3963 bp, Haemophilus influenzae Rd KW20
  CDS (1)..(3963): transl_table=11
atgcaaacgtttgctttgttcgttataatacgtctgtttttttatttttcttttatacggaactgcaatatgactgtcaaaacctttcgtggctcgcctgctctttctgaatttcgtttaactcaacttcaacaaaaatgccagcaatatcaattgcctattacgtcagtttatgcagagtatttgcattttgttgaacaaaaaacatcgcttgtagaagatgaaatcgttaaattacaagcattattgcattatggatcaatgttttctgaactcaagcctgcaggatattgtttaattgtgactccacgagtggggacaatttcctcttggtcttcaaaagcgacggacatcgctcacaattgtggtttgtcgaaggtaaatcgtattgaacgtggtatagcctattacttcaatattgagcgtgatttaaccgaagcagaattggctacgctgaaagatttattacacgaccgtatgttagaaaccgtgttaaatcacgaaacagaagcagccttgctttttactcaacaagaacccaaagcattaactacaattgatattttaaatggtggccgtcaagcattagaacaggcgaatattgccttgggtttagcgttggcagatgatgagatggattatttagtggaaagttttactgccttaaagcgtaatccacaggatgtggagctttatatgtttgcacaagcgaattcagagcattgtcgccataaaatttttaatgccgattggattattgatggcaaaaaacaggataaatcgctgtttaaaatgatcaaaaatacctttgagcaaacgcctgattttgtgctttctgcttataaagataatgctgcagtaatggaaggttcgaaagtcggccgttggtttcctgatcctgatggacaatatcgtgttcatcaagaagatgtgcacattttaatgaaagtagaaacacataaccatcccacagcaatttcgccatttcctggtgccgcaacaggctctggcggggagattcgtgatgaaggggcaacggggcgtggggcaaaacccaaagcaggtttaacaggtttctcggtgtctaacctcgttattccaaactttgaacaaccttgggaaaatccattgtctaaaccaaatcgcattgcttctgccttagatattatgatagatgcgcctttaggtagtgcggcatttaataatgaatttggtcgcccagcattattaggttatttccgtacttatgaagaaaaagtaaatagttttgctggaaaagaagtgcgcggttatcacaagccgattatgttagcgggaggaatcggtaatattcgtggcgaacaggttcaaaaaggcgaaattccaatcggtgctaaattgatcgttttgggtggggcagcaatgaacatcggtttaggtggtggtgctgcttcttcgatggacagtggtaaatcaaaagaagatttagattttgcttctgttcaacgtgaaaatccggaaatggaacgccgctgccaagaagttattgaccgctgttggcaattaggcgaagaaaatccaatcctgtttattcacgatgtgggtgcgggtggtttatctaatgcaatgcctgaattggtacacgatggcaagcgtggaggaaaattcgatctgcgttctattctttgtgatgaaaaaggtatgtcgccattggaaatttggtgtaatgaatcgcaagaacgttatgtattagccgttgcgccagaaaacctcgaattatttaccgcactttgtgagcgtgaacgtgccccttttgcagtgattggcgaagcaacacaagcagaacatttaatcttgcacgatagtcatttcgataataatccaattgatttaccaatgaatgtgttattaggcaaaacgccgaaaatgacgcgtgaggttttgtcaaaaacagtggaaaatcaatcacttaaaatagaaagtattcaattaaaagaagcattccaccgtgtattacgtttacccgttgttgcagaaaaaactttcttaattactattggtgatcgctcggtaacaggaatggtagcccgagatcaaatggtgggtccttggcaaatccccgtgtctgatgtggctgttactactgcttcactggatagctaccacggcgaagcaatggcaattggcgaacgctctccagttgccttgctagatttctcggcttcggcacgtttagctgtggcggaggcgattactaacattgctggcaccctaattggcgagatgaaacgtattaaactttctgccaactggatgagtgcagcaggtcacacaggcgaagatgctggactttatgaagcagtaaaagctgtgggcgaagaactttgtcctgcgttaggcttaactattcctgtgggtaaagactcaatgtcgatgaaaaccacttggatcgataatggcgaacaaaaatcagtgaccgccccgctttcattagtaatttccgcttttgctcgtgtagaagatgtacgtaaaacgcttacgccacaacttcgtaccgacaaaggtttctcgagtttattgctaattgatttaggcgaagggcataatcgattaggtgcgaccgcacttgctcaagtgtacaaacagttaggagacaagcctgccgatgtggtaaaggttcaacgcttaaaagatttttacaatgcaatgcaaactttagtggcagaagataaattattggcttatcacgaccgttcggacggcggtttaatcacaactcttgcagaaatggcgtttgcagggcattgtggggtagaagttgatatttcagctttaggcgacaacgatttagcggtattatttaacgaagaattgggagcggttatccaagttgccgatagccaattagaaagcgtacgtgaggtgttgaaagctcacaatttgcttggtattatccaccaattaggtacggtaactgctgatgatcgctttgagatcagccgcggcagccataaattattcagcgaaaaacgctctgaattacgtagtatttgggcagaattaacttaccaaatgcaacgcttacgcgataatccagagtgtgctgagcaagagtttgaagctaagaaaaaccctgacgacaaaggcttatccgcatttttgacttacgatgtgaatgaagatattactgcgccatttatcaataaaggtgtaaaaccaaccattgcaattttacgtgaacaaggtgtaaatagtcattatgaaatggcagcagcgtttgatcgagcaggctttaatgcaattgacgtgcatatgtctgatttaatgattggtcgtcgtaatttagccgaattcaatgcaatggttgcttgtggcggtttctcttacggcgatgtgcttggcgcagggggcggttgggcaaaatccatcttatttaacccgaaattacacgagcaattcagccagttttttatcaatccaaacacactgaccttaggcgtatgtaacggttgtcaaatgatctctaacttggcggaaattatcccaggtacagaaaactggccgcattttgtacgcaacaaatctgaacgctttgaagcgcgtgtgagtttagtgaaaattaatgaagtggattcagtttggtttgcaggaatggctggctcacatatgcccattgcggtttctcacggggaaggacaagttaagtttaaatcagttgaacagtttgcaggcttaaaagcacaaggcatcattgccgcacaatatattgacaacaacggtagccccaccgaactatatcctgccaatccgaatggttcttcggagggcattactgcaattacaaatcttgatgggcgagttgctattatgatgccacaccctgaacgtgtgttccgtgctgtgagtaactcttggcacccagaaaactggacagaagacggtgcgtggatgagattattcagaaatgcaagaatggtattttag

SEQ ID NO: 52675 - protein, 1320 aa, Haemophilus influenzae Rd KW20
MQTFALFVIIRLFFYFSFIRNCNMTVKTFRGSPALSEFRLTQLQQKCQQYQLPITSVYAEYLHFVEQKTSLVEDEIVKLQALLHYGSMFSELKPAGYCLIVTPRVGTISSWSSKATDIAHNCGLSKVNRIERGIAYYFNIERDLTEAELATLKDLLHDRMLETVLNHETEAALLFTQQEPKALTTIDILNGGRQALEQANIALGLALADDEMDYLVESFTALKRNPQDVELYMFAQANSEHCRHKIFNADWIIDGKKQDKSLFKMIKNTFEQTPDFVLSAYKDNAAVMEGSKVGRWFPDPDGQYRVHQEDVHILMKVETHNHPTAISPFPGAATGSGGEIRDEGATGRGAKPKAGLTGFSVSNLVIPNFEQPWENPLSKPNRIASALDIMIDAPLGSAAFNNEFGRPALLGYFRTYEEKVNSFAGKEVRGYHKPIMLAGGIGNIRGEQVQKGEIPIGAKLIVLGGAAMNIGLGGGAASSMDSGKSKEDLDFASVQRENPEMERRCQEVIDRCWQLGEENPILFIHDVGAGGLSNAMPELVHDGKRGGKFDLRSILCDEKGMSPLEIWCNESQERYVLAVAPENLELFTALCERERAPFAVIGEATQAEHLILHDSHFDNNPIDLPMNVLLGKTPKMTREVLSKTVENQSLKIESIQLKEAFHRVLRLPVVAEKTFLITIGDRSVTGMVARDQMVGPWQIPVSDVAVTTASLDSYHGEAMAIGERSPVALLDFSASARLAVAEAITNIAGTLIGEMKRIKLSANWMSAAGHTGEDAGLYEAVKAVGEELCPALGLTIPVGKDSMSMKTTWIDNGEQKSVTAPLSLVISAFARVEDVRKTLTPQLRTDKGFSSLLLIDLGEGHNRLGATALAQVYKQLGDKPADVVKVQRLKDFYNAMQTLVAEDKLLAYHDRSDGGLITTLAEMAFAGHCGVEVDISALGDNDLAVLFNEELGAVIQVADSQLESVREVLKAHNLLGIIHQLGTVTADDRFEISRGSHKLFSEKRSELRSIWAELTYQMQRLRDNPECAEQEFEAKKNPDDKGLSAFLTYDVNEDITAPFINKGVKPTIAILREQGVNSHYEMAAAFDRAGFNAIDVHMSDLMIGRRNLAEFNAMVACGGFSYGDVLGAGGGWAKSILFNPKLHEQFSQFFINPNTLTLGVCNGCQMISNLAEIIPGTENWPHFVRNKSERFEARVSLVKINEVDSVWFAGMAGSHMPIAVSHGEGQVKFKSVEQFAGLKAQGIIAAQYIDNNGSPTELYPANPNGSSEGITAITNLDGRVAIMMPHPERVFRAVSNSWHPENWTEDGAWMRLFRNARMVF

SEQ ID NO: 52676 - DNA, 3888 bp, Salmonella enterica subsp. enterica serovar Typhi str. CT18
  CDS (1)..(3888): transl_table=11
atgatggaaattctgcgtggttcgcctgcactgtctgcattccgtatcaataaactgctggcgcgctttcaggctgccaacctccaggtccacaatatatacgctgagtatgtccattttgctgacctgaacgccccgttaaatgatagcgagcaggcgcagcttacccgtctgctgcaatacggcccggcgcttagcagccatacgctggcgggtaaactcctgttggtcacaccgcgtcctggtaccatctccccctggtcttcaaaagcaacggatatcgcccacaactgcggcctgcaacagattgaccgtctggagcgcggcgtagcgtactatatcgaggcttcgacgttgacggcggaacagtggcgacaagtggccgcagagctgcacgaccgtatgatggagacggtgttctcttctttaaccgatgcggaaaaactgtttatccaccatcagcctgcgccggtttccagtgtcgatctgctgggagaaggccgtcaggcgttaattgacgctaacctgcgtctcggtctggcgctggcggaagatgaaatcgactatttgcaggaggcgtttaccaaactgggacgcaacccgaacgatatcgaactgtacatgttcgcccaggcgaactccgagcactgccgccacaagatttttaacgccgactggattatcgacggtaaaccgcagccgaagtcgctgtttaaaatgattaaaaacaccttcgaaaccacgccggactatgtgctctctgcctataaagacaatgccgcggtgatggaaggatctgcggtggggcgctacttcgccgaccacaataccggccgttacgattttcatcaggagcccgcgcacattctgatgaaggtcgaaacgcataaccacccaaccgccatctctccgtggccgggggcggcgaccggttccggcggcgaaattcgtgatgaaggcgccaccgggcgtggcgcgaaaccaaaagccgggctggtaggcttctccgtttccaacctgcgtattccgggctttgaacagccgtgggaagaggattttggcaagccggaacgtattgtcaccgcgctggatatcatgaccgaaggtccgctgggcggcgcggcgtttaacaacgaatttggtcgcccggcgctgaccggttacttccgtacttatgaagagaaagtgaacagccacaatggcgaagagctgcgtggctatcacaagccgatcatgctggcgggcgggatcggtaatatccgcgccgatcacgtgcagaaaggcgagatcgtcgtaggcgcgaagctgatcgtccttggcggcccggcgatgaatatcggcctcggcggcggcgcggcatcgtcaatggcttccggccagtctgatgcggatctcgattttgcctctgttcagcgcgacaacccggaaatggaacgccgctgccaggaagtgatcgaccgctgctggcagttgggcgacgctaacccaatcctgtttatccatgatgtgggcgcgggcggtctctccaacgccatgccggagctggtaagcgacggcgggcgcggcgggaaattcgaactgcgcgacattcttagcgacgagccgggcatgagcccgctggaaatctggtgtaacgaatcccaggagcgctatgtgctggcggtcgcggctgaccagttaccgctgttcgatgaactgtgtaagcgcgaacgcgcgccgtatgcggtcattggcgacgctaccgaagaacagcatctctcgttgcatgataaccatttcgacaatcagccgatcgatctaccgctggatgtcctgctgggcaaaacaccgaaaatgacccgcgatgtgcaaacattgaaggcgaaaggcgatgcgctgaaccgcgcggatatcacgattgccgacgcggtaaatcgtgttctgcatctgccgaccgtggcggaaaaaaccttccttgtcactattggcgaccgtaccgtcaccggtatggtggcgcgtgaccagatggttggcccgtggcaggtcccggtagctgactgcgcggtcactaccgctagcctcgacagctactacggcgaagcgatgtcgattggcgagcgcgcgccggtggcgctgctggactttgccgcctccgcccgtctggccgtcggtgaagcgttgactaacattgccgcgacgcagattggcgatatcaagcgcattaagctttccgctaactggatggcggcagccggtcatcctggcgaagatgccggtttgtatgacgcggttaaagcggtgggagaggaactctgtccgcagcttggcctgacgattccggtgggtaaagattcgatgtcgatgaaaacccgctggcaggaaggcaacgaacagcgcgaaatgacctcgccgctgtcgctggtgatttccgcgtttgcccgcgtggaagacgtgcgtcacacccttacgccgcagctgtcaacggaagataacgccttgctgctgatcgatcttggcaagggccacaacgcgctgggcgcaacggcgttggcgcaggtctatcgtcagcttggcgacaaacccgcggacgtgcgtgacgttgcgcaactgaaaggcttctatgacgccatgcaggtgctggttgctgcgcgtaaattactggcatggcacgaccgttccgacggcggtctgctggtgacgctggccgagatggcctttgccggccactgcggcgtgcaggtcgatatcgccgcgctgggcgatgaccatctggccgcactgttcaacgaggagctgggcggcgtgattcaggtacgcgctgaagacagagacgcggtcgaaacgctgttggcgcagtacggtcttgctgactgcgtccactaccttggtcaggccctggctggcgatcgctttgtgattaccgctaatgatcggacggtattcagcgaaagccgtactacgctgcgtgtctggtgggcggaaaccacctggcagatgcagcgtctgcgcgacaatccgcaatgtgctgaccaggaacacgaggcgaaagcgaatgatgccgatccgggcctcaacgtgaagctgtcgtttgatattaatgaagatatcgccgcgccgtacattgcgacaggcgcacgaccgaaagtcgctgtactgcgcgagcagggggtgaactctcacgtggagatggcggcggcgttccatcgtgcgggctttgacgcgattgacgtccatatgagcgacctgctgggcggtcgtatcggtctgggcaacttccatgcgctggtggcttgcggcggcttttcctacggcgacgtgctgggggcgggcgaaggctgggcgaaatccattctgtttaaccatcgggtgcgcgacgaattcgaaaccttcttccatcgtccgcagacgctggcgctgggcgtgtgcaacggttgccagatgatgtcgaatctgcgcgagctgatcccgggcagcgaactgtggccgcgttttgtacgtaaccattctgaccgcttcgaagcccgcttcagcctggtggaagtgacgcaaagcccatcgctgctgctgcaaggaatggtaggctcacagatgccgattgcggtttcccatggggaagggcgcgttgaggtgcgtgacgatgcgcatcttgccgcgcttgagagcaaaggcctggtcgctctgcgctacgttgataactttggtaaggtgaccgaaacctatccggctaacccgaacggttcgccgaacggcatcacggcggtgacgaccgaaaacggtcgggtgacgattatgatgccgcatccggaacgcgtattccgcaccgtcgccaactcctggcacccggaaaactggggcgaggatagcccgtggatgcgtatcttccgtaatgcgcgtaagcagcttggttaa

SEQ ID NO: 52677 - protein, 1295 aa, Salmonella enterica subsp. enterica serovar Typhi str. CT18
MMEILRGSPALSAFRINKLLARFQAANLQVHNIYAEYVHFADLNAPLNDSEQAQLTRLLQYGPALSSHTLAGKLLLVTPRPGTISPWSSKATDIAHNCGLQQIDRLERGVAYYIEASTLTAEQWRQVAAELHDRMMETVFSSLTDAEKLFIHHQPAPVSSVDLLGEGRQALIDANLRLGLALAEDEIDYLQEAFTKLGRNPNDIELYMFAQANSEHCRHKIFNADWIIDGKPQPKSLFKMIKNTFETTPDYVLSAYKDNAAVMEGSAVGRYFADHNTGRYDFHQEPAHILMKVETHNHPTAISPWPGAATGSGGEIRDEGATGRGAKPKAGLVGFSVSNLRIPGFEQPWEEDFGKPERIVTALDIMTEGPLGGAAFNNEFGRPALTGYFRTYEEKVNSHNGEELRGYHKPIMLAGGIGNIRADHVQKGEIVVGAKLIVLGGPAMNIGLGGGAASSMASGQSDADLDFASVQRDNPEMERRCQEVIDRCWQLGDANPILFIHDVGAGGLSNAMPELVSDGGRGGKFELRDILSDEPGMSPLEIWCNESQERYVLAVAADQLPLFDELCKRERAPYAVIGDATEEQHLSLHDNHFDNQPIDLPLDVLLGKTPKMTRDVQTLKAKGDALNRADITIADAVNRVLHLPTVAEKTFLVTIGDRTVTGMVARDQMVGPWQVPVADCAVTTASLDSYYGEAMSIGERAPVALLDFAASARLAVGEALTNIAATQIGDIKRIKLSANWMAAAGHPGEDAGLYDAVKAVGEELCPQLGLTIPVGKDSMSMKTRWQEGNEQREMTSPLSLVISAFARVEDVRHTLTPQLSTEDNALLLIDLGKGHNALGATALAQVYRQLGDKPADVRDVAQLKGFYDAMQVLVAARKLLAWHDRSDGGLLVTLAEMAFAGHCGVQVDIAALGDDHLAALFNEELGGVIQVRAEDRDAVETLLAQYGLADCVHYLGQALAGDRFVITANDRTVFSESRTTLRVWWAETTWQMQRLRDNPQCADQEHEAKANDADPGLNVKLSFDINEDIAAPYIATGARPKVAVLREQGVNSHVEMAAAFHRAGFDAIDVHMSDLLGGRIGLGNFHALVACGGFSYGDVLGAGEGWAKSILFNHRVRDEFETFFHRPQTLALGVCNGCQMMSNLRELIPGSELWPRFVRNHSDRFEARFSLVEVTQSPSLLLQGMVGSQMPIAVSHGEGRVEVRDDAHLAALESKGLVALRYVDNFGKVTETYPANPNGSPNGITAVTTENGRVTIMMPHPERVFRTVANSWHPENWGEDSPWMRIFRNARKQLG

SEQ ID NO: 52678 - DNA, 3888 bp, Salmonella typhimurium LT2
  CDS (1)..(3888): transl_table=11
atgatggaaattctgcgtggttcgcctgcactgtctgcattccgtatcaataaactgctggcgcgctttcaggctgccaacctccaggtccacaatatatacgctgagtatgtccattttgctgacctgaacgccccgttaaatgatagcgagcaggcgcagcttacccgtctgctgcaatacggcccggcgcttagcagccatacgccggcgggtaaactcctgttggtcacaccgcgtcctggtaccatctccccctggtcttcaaaagcaacggatatcgcccacaactgcggcctgcaacaggttgatcgtctggagcgcggcgtagcgtactatatcgaggcttcgacgttgacggcggaacagtggcgacaagtggccgcagagctgcacgaccgtatgatggagacggtgttctcttctttaaccgatgcggaaaaactgtttatccaccatcagcctgcgccggtttccagtgtcgatctgctgggagaaggccgtcaggcgttaattgacgccaacctgcgtcttggtctggcgctggcggaagatgaaatcgactatttgcaggaggcgtttaccaaactggggcgcaacccgaacgatatcgaactgtacatgttcgcccaggcgaactccgagcactgccgccacaagatttttaacgccgactggattatcgacggtaaaccgcagccgaagtcgctgtttaaaatgattaaaaacaccttcgaaaccacgccggactatgtgctctctgcctataaagacaatgccgcggtgatggaaggatctgcggtggggcgctacttcgccgaccacaataccggccgttacgattttcatcaggagcccgcgcacattctgatgaaggtcgaaacgcataaccacccaaccgccatctctccgtggccgggggcggcgaccggttccggcggcgaaattcgtgatgaaggcgccaccgggcgtggcgcgaaaccaaaagccgggctggtgggcttctccgtttccaacctgcgtattccgggctttgaacagccgtgggaagaggattttggcaagccggaacgtattgtcaccgcgctggatatcatgaccgaaggtccgctgggcggcgcggcgtttaacaacgaatttggtcgcccggcgctgaccggttacttccgtacttatgaagagaaagtgaacagccacaacggcgaagagctgcgcggctaccataagccgatcatgctggcgggcgggatcggtaatattcgcgccgatcacgtgcagaaaggcgagatcgtcgtgggcgcgaagctgatcgtccttggcggcccggcgatgaatatcggcctcggcggcggcgcggcatcgtcaatggcttccggccagtctgatgcggatctcgattttgcctctgttcagcgcgacaacccggaaatggaacgccgctgccaggaagtgatcgaccgctgctggcagttgggcgacgctaacccaatcttgtttatccatgatgtgggcgcgggcggtctctccaacgccatgccggagctggtgagcgacggcgggcgcggcgggaaattcgaactgcgcgacattcttagcgacgagccgggcatgagcccgctggaaatctggtgtaacgaatcccaggagcgctatgtgctggcggtcgcggctgaccagttgccgctgttcgatgaactgtgtaagcgcgaacgcgcgccgtatgcggtcattggcgacgctaccgaagaacagcatctctcgttgcatgataaccatttcgacaatcagccgatcgacctgccgctggatgtcctgctgggcaaaacgccgaaaatgacccgcgatgtgcaaacattgaaggcgaaaggcgatgcgctgaaccgcgcggatatcacgattgccgacgcggtaaagcgtgttctgcatctgccgaccgtggcggaaaaaaccttccttgtcactattggcgaccgtaccgtcaccggtatggtggcgcgtgaccagatggttggcccgtggcaggtcccggtggctgactgcgcggtcactaccgccagcctcgacagctactacggcgaagcgatgtcgattggcgagcgcgcgccggtggcgctgctggactttgccgcctccgcccgtctggccgtcggtgaagcgttgactaacattgccgcgacgcagattggcgatatcaagcgcattaagctttccgctaactggatggcggcagccggtcatcctggcgaagatgccggtttatatgacgcggttaaagcggtgggagaggaactctgtccgcagcttggcctgactattccggtgggcaaagattcgatgtcgatgaaaacccgctggcaggaaggcaacgaacagcgcgaaatgacctcgccgctgtcgctggtgatttccgcgtttgcccgcgtggaagacgtgcgtcacacccttacgccgcagctttcaacggaagataacgccttgctgctgatcgatctcggcaagggccacaacgcgctgggcgcaacggcgttggcgcaggtctatcgtcagcttggcgacaaacccgcggacgtgcgtgacgtcgcgcaactgaaaggcttctatgacgccatgcaggcgctggtcgctgcgcgtaaattactggcctggcacgaccgttccgacggcggtctgctggtgacgctggccgagatggcctttgccggccactgcggcgtgcaggtcgatattgccgcgctgggcgatgaccatctggccgcactgttcaacgaggagctgggcggcgtgattcaggtacgcgctgaagacagagacgcggtcgaagcgctattggcgcagtacggccttgctgactgcgtccactaccttggtcaggccctggctggcgatcgctttgtgattaccgctaatgaccagacggtattcagcgaaagccgcactacactgcgtgtctggtgggcggaaaccacctggcagatgcagcgtctgcgcgacaatccgcaatgtgccgaccaggaacacgaggcgaaagcgaatgataccgatccgggcctcaacgtgaagctgtcgtttgatattaatgaagatatcgccgcgccgtacattgcgacaggcgcacgaccgaaagtcgctgtactgcgcgagcagggggtgaactctcacgtggagatggcggcggcgttccatcgtgcgggctttgacgcgattgacgtccatatgagcgacctgctgggcggtcgtatcggtctgggtaacttccatgcgctggtggcttgcggcggcttttcctacggcgacgtgctgggggcgggcgaaggctgggcgaaatccattctgtttaaccatcgggtgcgcgacgaattcgaaaccttcttccatcgtccgcagacgctggcgctgggcgtgtgcaacggttgccagatgatgtcgaatctgcgcgagctgatcccgggcagcgaactgtggccgcgttttgtacgtaaccattctgaccgcttcgaagcccgcttcagcctggtagaagtgacgcaaagcccatcgctgctgctgcaaggaatggtaggctcacagatgccgattgcggtttcccatggggaagggcgcgttgaggtgcgtgacgatgcgcatcttgccgcgcttgagagcaaaggcctggtcgctctgcgctacgttgataactttggtaaggtgaccgaaacctatccggctaacccgaacggttcgccgaacggcatcacggcggtgacgaccgaaaacggtcgggtgacgattatgatgccgcatccggaacgcgtattccgcaccgtcgccaactcctggcacccggaaaactggggcgaggatagcccgtggatgcgtatcttccgtaatgcgcgtaagcagcttggttaa

SEQ ID NO: 52679 - protein, 1295 aa, Salmonella typhimurium LT2
MMEILRGSPALSAFRINKLLARFQAANLQVHNIYAEYVHFADLNAPLNDSEQAQLTRLLQYGPALSSHTPAGKLLLVTPRPGTISPWSSKATDIAHNCGLQQVDRLERGVAYYIEASTLTAEQWRQVAAELHDRMMETVFSSLTDAEKLFIHHQPAPVSSVDLLGEGRQALIDANLRLGLALAEDEIDYLQEAFTKLGRNPNDIELYMFAQANSEHCRHKIFNADWIIDGKPQPKSLFKMIKNTFETTPDYVLSAYKDNAAVMEGSAVGRYFADHNTGRYDFHQEPAHILMKVETHNHPTAISPWPGAATGSGGEIRDEGATGRGAKPKAGLVGFSVSNLRIPGFEQPWEEDFGKPERIVTALDIMTEGPLGGAAFNNEFGRPALTGYFRTYEEKVNSHNGEELRGYHKPIMLAGGIGNIRADHVQKGEIVVGAKLIVLGGPAMNIGLGGGAASSMASGQSDADLDFASVQRDNPEMERRCQEVIDRCWQLGDANPILFIHDVGAGGLSNAMPELVSDGGRGGKFELRDILSDEPGMSPLEIWCNESQERYVLAVAADQLPLFDELCKRERAPYAVIGDATEEQHLSLHDNHFDNQPIDLPLDVLLGKTPKMTRDVQTLKAKGDALNRADITIADAVKRVLHLPTVAEKTFLVTIGDRTVTGMVARDQMVGPWQVPVADCAVTTASLDSYYGEAMSIGERAPVALLDFAASARLAVGEALTNIAATQIGDIKRIKLSANWMAAAGHPGEDAGLYDAVKAVGEELCPQLGLTIPVGKDSMSMKTRWQEGNEQREMTSPLSLVISAFARVEDVRHTLTPQLSTEDNALLLIDLGKGHNALGATALAQVYRQLGDKPADVRDVAQLKGFYDAMQALVAARKLLAWHDRSDGGLLVTLAEMAFAGHCGVQVDIAALGDDHLAALFNEELGGVIQVRAEDRDAVEALLAQYGLADCVHYLGQALAGDRFVITANDQTVFSESRTTLRVWWAETTWQMQRLRDNPQCADQEHEAKANDTDPGLNVKLSFDINEDIAAPYIATGARPKVAVLREQGVNSHVEMAAAFHRAGFDAIDVHMSDLLGGRIGLGNFHALVACGGFSYGDVLGAGEGWAKSILFNHRVRDEFETFFHRPQTLALGVCNGCQMMSNLRELIPGSELWPRFVRNHSDRFEARFSLVEVTQSPSLLLQGMVGSQMPIAVSHGEGRVEVRDDAHLAALESKGLVALRYVDNFGKVTETYPANPNGSPNGITAVTTENGRVTIMMPHPERVFRTVANSWHPENWGEDSPWMRIFRNARKQLG

SEQ ID NO: 52680 - DNA, 2256 bp, Brucella melitensis 16M
  CDS (1)..(2256): transl_table=11
gtgccacagcctgcgacggggttccccatttccatgactatttccaatacgcgagacatcacgccggaactgatcgaagcgcatggtcttaagccggacgagtatcagcgcattcttgagctgatcgggcgcgagccgacttttaccgaactcggcattttctccgccatgtggaatgagcactgctcctacaagtcctccaagaaatggctacgcacacttccgaccagcggaccgcgcgtcattcaaggccccggtgaaaatgcaggcgtggtcgatattggcgatggcgattgcgtcgtcttcaagatggaaagccacaatcacccctcctatatcgagccttatcagggtgccgcgaccggcgtgggcggaatcttgcgcgacgtgttcaccatgggcgcgcgccccgttgcggcaatgaatgcgctgcgctttggcgaacccgaccatccaaaaacccgccacctcgtctcgggcgttgtttccggcgtcggcggctatggcaatgccttcggcgtgccgactgtcggtggcgaggtgaatttcgacaagcgctataacggcaatatcctcgtcaatgcctttgctgccggtcttgcccggcatgatggcattttcctgtcggaagccgagggcgtcggcctgccggtcgtctatctgggtgcaaagactagccgcgatggtgttggcggcgcaacaatggcatcggctgaattcgacgagtcgatcgaggaaaagcgccccaccgttcaggtgggcgatcctttcaccgaaaaatgcctgcttgaagcctgccttgaactcatggcttccggtgcggtcatcgccattcaggacatgggcgctgccggcctcacctgctcggcggtcgagatgggtgccaagggcgatctcggcatcgaactcattctcgatcatgttcccgttcgcgaagagaacatgaccgcctatgaaatgatgctttcggaaagccaggagcgcatgctcatggtgctgaagccggaaaaggaagcagaagcgcaggctatcttccgcaaatggggccttgatttcgcgattgtcggcaagaccacggacgatcttcgtttccgcgtcatccatcagggggaagaggtcgccaatctgccgatcaaggatctgggcgacgaagcgccggaatatgatcgcccgtggatggagccgggcaagcatgcgccgctgcctgccagcaatgtgccgcaggtggaagactattccgcagccctgctgaagctgatcggctcgcccgatctttcctcgcgccgctgggtctatgaacagtacgacacgctcattcagggcaattccttgcaggttccgggcggcgacgccggtgtaatccgtgtcgaaggccatgaaaccaaggctctcgccttctcttccgacgtgacgccgcgctattgcgaagccgatccgtttgaaggcggcaagcaggccgttgccgaatgctggcgcaacatcacggcgaccggcgcggagccgctggcctcgaccgataatctgaacttcggcaatcccgaaaagccggaaatcatgggccagctcgtcaaggctatcgaaggcattggcgaggcctgccgcgcactcgacttcccgatcgtgtccggcaatgtgtcgctttacaatgagaccaacggccaggccattctgccaacgccaacgattgcgggtgttggcctccttcccgactggtcgcaaatggcgaagatcggcggcatgcaggatggcgatacgctggttctgctcggtggtgacggaacgcatctcggccagtcggtctatctgcgtgaccttttcgaccgcgcggacggtcctgcgccttttgtcgatctggcgcttgaaaagcgcaatggcgaatttgtccgttctgccattcgcaacggtcaggtgacggcctgccatgatctttccgatggcggtctggcgattgccgttgccgaaatggcgatcaagtccggcaaaggtgcgacgctggacgctggtgacggcctgccgcacgccctgcttttcggtgaagatcaggcacgctatgttatttccgccacgcctgaaatggcaaagctcatcgcgcttaacgcggaaggcgcaggcgttccattccgcattttgggtacagttggcggcgaccggctgaaaatcagcaagaatgtcgatgtcagcgtggccgatctgacgcaggcttatgaaggttggttcccgaacttcatgaacggcgaactgaccggcaataactga

SEQ ID NO: 52681 - protein, 751 aa, Brucella melitensis 16M
MPQPATGFPISMTISNTRDITPELIEAHGLKPDEYQRILELIGREPTFTELGIFSAMWNEHCSYKSSKKWLRTLPTSGPRVIQGPGENAGVVDIGDGDCVVFKMESHNHPSYIEPYQGAATGVGGILRDVFTMGARPVAAMNALRFGEPDHPKTRHLVSGVVSGVGGYGNAFGVPTVGGEVNFDKRYNGNILVNAFAAGLARHDGIFLSEAEGVGLPVVYLGAKTSRDGVGGATMASAEFDESIEEKRPTVQVGDPFTEKCLLEACLELMASGAVIAIQDMGAAGLTCSAVEMGAKGDLGIELILDHVPVREENMTAYEMMLSESQERMLMVLKPEKEAEAQAIFRKWGLDFAIVGKTTDDLRFRVIHQGEEVANLPIKDLGDEAPEYDRPWMEPGKHAPLPASNVPQVEDYSAALLKLIGSPDLSSRRWVYEQYDTLIQGNSLQVPGGDAGVIRVEGHETKALAFSSDVTPRYCEADPFEGGKQAVAECWRNITATGAEPLASTDNLNFGNPEKPEIMGQLVKAIEGIGEACRALDFPIVSGNVSLYNETNGQAILPTPTIAGVGLLPDWSQMAKIGGMQDGDTLVLLGGDGTHLGQSVYLRDLFDRADGPAPFVDLALEKRNGEFVRSAIRNGQVTACHDLSDGGLAIAVAEMAIKSGKGATLDAGDGLPHALLFGEDQARYVISATPEMAKLIALNAEGAGVPFRILGTVGGDRLKISKNVDVSVADLTQAYEGWFPNFMNGELTGNN

SEQ ID NO: 52682 - DNA, 3801 bp, Clostridium perfringens str. 13
  CDS (1)..(3801): transl_table=11
atgtctggtattagaatggtatttgtagaaaaaaaagctggttttaatgtagaaagtcagatattacttaaggattttaaagataatttagggattgaagctttggaggatgtaagagttttaaataaatacatattaggagatatggaagaagaacagtatgtaagaactgtaaatactattttgtcagaagctccagtagatagagtatatgaggaaaattttgaaataggacaagatgaaatagcttttggtgttgaatatttaccaggacagtatgatcaaagagctgattcagcttcagagtgtataatgcttcttactgaggaggaaaaagttcctgttaaatcatcaaaagtacttattttaaaagggaatttaaatcaggaagagataaataaaataaaatcttattacattaatcctgttgattcaagggaagttagtccactttcaaaagtcttagaagaaaacttagaggaacctaatgaggttgagattttaaatggctttttaggtttaaatgaagagggacttaaaaatttccatagagaaaaatctttagctatgagtttagaagatttaaaactaataagagattattttaaatcagaggatagaaatccaacaataactgagattaaggttattgatacttattggtcagatcattgtagacacacaacttttgaaacaataataaaagatgtttatatagaagagggcaagtattctgaacctattaaaaaggcttatgaagattataaaaattcaagagcctatgtttatggggagaacttaaataataaagaagttaagttaatggatttagccacaatagccatgaaggagctaagaaaaagaggaaaacttgatgatttagatgtttcagaagaaataaatgcttgttctataaatatagaaatagaaacagataagggaactgaagaatatcttttaatgtttaaaaatgagacacacaatcacccaacagaaatagagccttttggaggagcagccacttgtttagggggagctattagggatcccctttcaggaagaagttatgtttatcaagctatgagggttacaggatcagcagatccaacagttgaaatttgtgaaactttaaagggcaaattacctcaaagaaaaataactttaggagctgctcatggatatagctcatatggaaatcaaataggccttgcaactggacaagtatcagaaatttatcatccaaattatgcggctaagagaatggaagtaggtgcagttatagctgccacgccaaaggaaaatgtaataagacttgaaccttcaaagggagatattgtaatacttcttggaggaagaactggaagagatggtattggtggggctacaggttcttcaaaggaacacacagaagaatcaataaatcaatgtggagcagaagttcaaaaaggaaatgctccaacagagagaaaaattcagagactttttagaaataaagaagtagctcaaatgataaaaagatgtaatgactttggagctggtggagtatcagtagcaattggagaattatgcagaggaattgatatagatttaaataaagttcctaaaaaatatgagggattagatggaactgaacttgccatatcagaatctcaagaaagaatggctgttgttatttcctctgaaaatgcagatagatttataaaactttcagaagaagagaatttagaagctacaattgtggctgaagttacagatactgataggttaagaatgaattggaaggataaaactatagttgatataaagagaagtttcttagatacaaatggggcaaaacaagaaatttctttaaaagtaaaatcaccaagtgtttatccatatgaagttaaaaactttgacgttaaagaggaatggctaaaatctttaagaaatttaaatgtttgtagtcaaaaaggattaattgagagatttgattcaactataggtggaggaacagttcttatgcctttaggagggaagtatcaattaacaccagcagagggtatggctgctaaaattcctgtcttaggaggagaaagtaaagatgcttctttaatgacatatggatttaatccttatttaggagtatggagtccattccacatggcattttattcagttattgaatcagtaactaaaatagctgctatgggaggagattataaaaaagttagattaactttccaagaatattttgaaaaattattaagagatgaagaaaaatggggcaagccttttgcagcattactaggagcttataaggcacaaatggatttaggattacctgcaataggtggaaaagattcaatgtcaggaagttttggagagttaaatgttccaccaactttagtttcctttgcagtaggtcttgaaaaggcttcaagaattatttcacctgagtttaaaaatataggatcaactttagttcttatgaaaggtgagaaattagaagatggaactttagaaatggaaggatttaaaaataacttagaaaaactttatgagttaataggagaagaaaaggtggtttcagcatactctcttaagtttggtggggtatcagagggaattactaagatgtcactaggaaatagaattggggcaatattaaataatatttctaaagaagaactttttggatttaattatggaagtttaatattagaggttaaagaaggggttaaccttgaggatgagtttaagggaactaattataaggttataggaagcacaataaaagatggggttataaaatgtgaagaatatgattttgaggtttctttagaggaattagaaaaagcttatgaagaaaagcttgagtatgtatttaaatctaaaactgaagataaagaagagtgcgtttcagacttaataaataatgataaagacggggctaatattttagataatggacaaatgcatatagaagaaaaacttaaatcaaagataacaagggtagaaaaaccaagagtagttataccagtattcccaggaactaactgtgagtatgattgtagaagggcctttgaaaaagaaggtgctgaggtaagtgaagttataattagaaatttaaataaggaagccttaattgattcaataaatatgcttaaaaaagaaattgacaaatctcaaataattatgttgccaggggggttctcagcaggagatgagccagatggatcagctaaatttatagcaacaatatttagaaatcctaagataaaagattcagttatgaagcttttaaatgagagagatggattaatacttggaatttgtaatggcttccaagccttaattaagttaggacttcttccatacggaaaaataattgatattgaagaagatatggcaaccttaacttataacaatataaatagacatatgtcatccatagttagaactaaaattacatctaagaaatctccttggtttaatgaggtttctcttggagaggtacacagtattccaatatcacatggagaaggaagatttgttgcaccagaagctttaataaaagagttagtagaaaatgatcaaatagctactcagtatgtagacttagaaggaaatatggctatgaatatgccatataatcctaatggttcatctttagcaatagaaggaataataagtagagatggaagaatcctaggtaagatgggtcattcagagagaattggagacaatctttataaaaacataccaggagaatttgatcaaaaactatttaaatcaggtgtagattattttagaaaataa

SEQ ID NO: 52683 - protein, 1266 aa, Clostridium perfringens str. 13
MSGIRMVFVEKKAGFNVESQILLKDFKDNLGIEALEDVRVLNKYILGDMEEEQYVRTVNTILSEAPVDRVYEENFEIGQDEIAFGVEYLPGQYDQRADSASECIMLLTEEEKVPVKSSKVLILKGNLNQEEINKIKSYYINPVDSREVSPLSKVLEENLEEPNEVEILNGFLGLNEEGLKNFHREKSLAMSLEDLKLIRDYFKSEDRNPTITEIKVIDTYWSDHCRHTTFETIIKDVYIEEGKYSEPIKKAYEDYKNSRAYVYGENLNNKEVKLMDLATIAMKELRKRGKLDDLDVSEEINACSINIEIETDKGTEEYLLMFKNETHNHPTEIEPFGGAATCLGGAIRDPLSGRSYVYQAMRVTGSADPTVEICETLKGKLPQRKITLGAAHGYSSYGNQIGLATGQVSEIYHPNYAAKRMEVGAVIAATPKENVIRLEPSKGDIVILLGGRTGRDGIGGATGSSKEHTEESINQCGAEVQKGNAPTERKIQRLFRNKEVAQMIKRCNDFGAGGVSVAIGELCRGIDIDLNKVPKKYEGLDGTELAISESQERMAVVISSENADRFIKLSEEENLEATIVAEVTDTDRLRMNWKDKTIVDIKRSFLDTNGAKQEISLKVKSPSVYPYEVKNFDVKEEWLKSLRNLNVCSQKGLIERFDSTIGGGTVLMPLGGKYQLTPAEGMAAKIPVLGGESKDASLMTYGFNPYLGVWSPFHMAFYSVIESVTKIAAMGGDYKKVRLTFQEYFEKLLRDEEKWGKPFAALLGAYKAQMDLGLPAIGGKDSMSGSFGELNVPPTLVSFAVGLEKASRIISPEFKNIGSTLVLMKGEKLEDGTLEMEGFKNNLEKLYELIGEEKVVSAYSLKFGGVSEGITKMSLGNRIGAILNNISKEELFGFNYGSLILEVKEGVNLEDEFKGTNYKVIGSTIKDGVIKCEEYDFEVSLEELEKAYEEKLEYVFKSKTEDKEECVSDLINNDKDGANILDNGQMHIEEKLKSKITRVEKPRVVIPVFPGTNCEYDCRRAFEKEGAEVSEVIIRNLNKEALIDSINMLKKEIDKSQIIMLPGGFSAGDEPDGSAKFIATIFRNPKIKDSVMKLLNERDGLILGICNGFQALIKLGLLPYGKIIDIEEDMATLTYNNINRHMSSIVRTKITSKKSPWFNEVSLGEVHSIPISHGEGRFVAPEALIKELVENDQIATQYVDLEGNMAMNMPYNPNGSSLAIEGIISRDGRILGKMGHSERIGDNLYKNIPGEFDQKLFKSGVDYFRK

SEQ ID NO: 52684 - DNA, 3750 bp, Fusobacterium nucleatum subsp. nucleatum ATCC 25586
  CDS (1)..(3750): transl_table=11
atggaggaaagaatgtcaaatttaagattttttgttgaaaagaaaaaaggttttgatttagatgcaaaaagattagaaaaacagtttagagaagaattaggagtaaatgttagagatttaagactaataaactgttatgatatttttaatcttaatgataacaaagaagatattgaaaaaattaaaaaaatgatattgtcagaacctgttacagatactatcacaacagaattagatttaaaaggaaaaaagtattttgctgttgagtttttaccaggacagtttgaccaaagagcagactcagctttacaatgtattgatatagtatcaagtgaaaaacaaaatgcagatatattaacttcaagaatcattatattaaataatgagcttagtgatgaagaattaaataaaatcaagaaattctatattaaccctattgaaatgagagaaaaagatttatctgtattaaagaaagaagaaatcttgtttaattcagaagttattacttatgataattttattttatttgatgatgttgacttagaaaaaataagaacagatttaggactttctatgtcttttgaagatttaaaatttattcaaggccactataaagagataggaagaaatcctactgaaacagaaataaaagttttggatacttattggtctgaccattgtagacatacaacatttgaaacaaagataaataaagttacatttcctgactcggagtttggaaaacaaatggaaaaagaattcaatgattatttaaaattaaaagaagatgtatctaagaaaagagatgtttctttaatggatatggcaacaatagttgcaaaatatttaaagaaagaaggaaagttagataatttagaagtttcagaagaaaataatgcttgttctgtctatgtagatgttgaagtagaagactttgaaggaaagaaagctattgaaaaatggttattgatgtttaaaaatgaaactcataatcacccaactgaaatagagccatttggtggagcttcaacttgtttagggggagcaataagggatccattatccggtagagcttatgtatatcaagcaataagagttacaggttctggaaatccacttgaaactgttgaagaaactttaaaaggaaaattatttcaaaagaaaataacaacaggagcagctagtggatatgcttcttatggaaaccaaataggaattgcaacttcattggtatctgaaatttatcatgatgggtataaggcaaaaagaatggaagttggagcagttgttgctgcagcacctgtagaaaatgtagttagaaaatctcctgtacctactgatagcataattattataggtggtaaaacaggtagagatggttgtggaggagcaactggttcttctaaggaacataatgataaatcacttctattatgtggagcagaagttcaaaaaggtaatgcaccagaagaaagaaaaatacaaagattatttagaaatccaaatgcaacaaaacttattaaaaaatgtaatgactttggagctggtggagtttcagttgctattggagaattagcagatggagttgaagtaaaccttgatttagtccctgttaaatatgaaggacttaatggaacagaacttgctatatctgaatcacaagaaagaatggcagttatagtttcaaaagaagatactgaaaaattcttaaaatatgtagatgaagaaaacttacttggaacagtagtaggttatgtgacagataaaaatagattgactttaaattggaaaggtaaagcaatagttgatatttcaagagatttcttaaatactaatggagtacaacaaaatatagatatagaagttagagattatgaaaacgaaaatgtttttgaaaagtttaaaacttctgatagtagtttagaaaagaaatggctacataatattaaaaaattaaatgttgtttctcaaaaaggattagtagaaatgtttgattcttctgttggagcaggaacaatcttagcaccatttggtggaaaatatcaaatgactccaactgatgtttctataatgaaatttccagttttaaataaaaatacaaacactgcttctgctataacttggggctttaatccttatatatctgaatggtcaacataccatggagctatctatgcagttgtagaatcattagctaaattagttgcagcaggagttgattacaaaacagctagactttcattccaagaatactttgaaaaacttggaaaagattcatataaatggtctaaaccattccttgcactacttggagctatgaaagtacaaaaagattttgatgtagcagccattggtggaaaagattctatgagtggaacatttaatgatatatctgtaccacctacattaatttcatttgcagttagtactgtaaatgtaactgatgttatatcaactgaatttaaaaaagctaaaaataaaatatatttggttgaaaataaaattaatgaaaaagattttttatttgatagtcaagaattaaaagaaaactttcactttatattaaaaaatataaaagataaaaaaatagtatctgcaatggttgttaaaattggtggacttgcagaggtattatcaaaaatgagttttggtaatagattaggttttgagatcaataataaaaatgtagacttatttagtttaaaaccagcttctattttgattgaaacaacagaagaattatcatataaaaatgccatctatttaggtgaagttacagataagtttgaaggaaaggtaaatggggaaaatattaatttagaagaagttgaagcaacttggttaaataaattaaagcctatttttccatataagttagaagaaaaaatagagacttatgatattaaaaataaaatatctgaaaagaaaatctataaatcatctataactattgctaagccaagagttgttatagctgctttcccaggaactaactctgaatatgatatgtataacagatttaatgaaaacggtggagaagcaaaaataactttacttagaaacttaacacaaaaacatttaactgaatcagttgatgaaatgtgtaaagatttaagaaattctcaaatatttgttttaccaggaggatttagtgctggagatgagccagatggttcaggtaaatttatggcagcagttttacaaaatcctaagcttatgaatgaaataaaagctttcttagatagagatggacttattttaggagtatgtaatggtttccaagccttagttaaatctggtttgttgccttatggagaaataggaaatgttcatgaaaattctcctactcttacatttaataagataggtagacatatttctcaaatagtaaaaacaaaaatagttacaaataattctccttggttatcatcttttgaaataggtgaaacatttgatatcccagtatcacatggagagggaagattctatgctagtgatggagtactaaaacaactatttgaaaatggacaaatagcaactcaatatgtagactttgatttagaggctacaaatgaatttagattcaatcctaatggctctagttttgctattgaaggaattatatcacctgatggtaaaatttttgggaaaatgggacactctgaaagatattcaaaagatacatttaagaatatagatggtaataaaaatcaaaacttaatattaaatggaataaagtattttaaataa

SEQ ID NO: 52685 - protein, 1249 aa, Fusobacterium nucleatum subsp. nucleatum ATCC 25586
MEERMSNLRFFVEKKKGFDLDAKRLEKQFREELGVNVRDLRLINCYDIFNLNDNKEDIEKIKKMILSEPVTDTITTELDLKGKKYFAVEFLPGQFDQRADSALQCIDIVSSEKQNADILTSRIIILNNELSDEELNKIKKFYINPIEMREKDLSVLKKEEILFNSEVITYDNFILFDDVDLEKIRTDLGLSMSFEDLKFIQGHYKEIGRNPTETEIKVLDTYWSDHCRHTTFETKINKVTFPDSEFGKQMEKEFNDYLKLKEDVSKKRDVSLMDMATIVAKYLKKEGKLDNLEVSEENNACSVYVDVEVEDFEGKKAIEKWLLMFKNETHNHPTEIEPFGGASTCLGGAIRDPLSGRAYVYQAIRVTGSGNPLETVEETLKGKLFQKKITTGAASGYASYGNQIGIATSLVSEIYHDGYKAKRMEVGAVVAAAPVENVVRKSPVPTDSIIIIGGKTGRDGCGGATGSSKEHNDKSLLLCGAEVQKGNAPEERKIQRLFRNPNATKLIKKCNDFGAGGVSVAIGELADGVEVNLDLVPVKYEGLNGTELAISESQERMAVIVSKEDTEKFLKYVDEENLLGTVVGYVTDKNRLTLNWKGKAIVDISRDFLNTNGVQQNIDIEVRDYENENVFEKFKTSDSSLEKKWLHNIKKLNVVSQKGLVEMFDSSVGAGTILAPFGGKYQMTPTDVSIMKFPVLNKNTNTASAITWGFNPYISEWSTYHGAIYAVVESLAKLVAAGVDYKTARLSFQEYFEKLGKDSYKWSKPFLALLGAMKVQKDFDVAAIGGKDSMSGTFNDISVPPTLISFAVSTVNVTDVISTEFKKAKNKIYLVENKINEKDFLFDSQELKENFHFILKNIKDKKIVSAMVVKIGGLAEVLSKMSFGNRLGFEINNKNVDLFSLKPASILIETTEELSYKNAIYLGEVTDKFEGKVNGENINLEEVEATWLNKLKPIFPYKLEEKIETYDIKNKISEKKIYKSSITIAKPRVVIAAFPGTNSEYDMYNRFNENGGEAKITLLRNLTQKHLTESVDEMCKDLRNSQIFVLPGGFSAGDEPDGSGKFMAAVLQNPKLMNEIKAFLDRDGLILGVCNGFQALVKSGLLPYGEIGNVHENSPTLTFNKIGRHISQIVKTKIVTNNSPWLSSFEIGETFDIPVSHGEGRFYASDGVLKQLFENGQIATQYVDFDLEATNEFRFNPNGSSFAIEGIISPDGKIFGKMGHSERYSKDTFKNIDGNKNQNLILNGIKYFK

SEQ ID NO: 52686 - DNA, 3888 bp, Shigella flexneri 2a str. 301
  CDS (1)..(3888): transl_table=11
atgatggaaattctgcgtggttcgcctgcactgtcggcattccgaatcaacaaactgctggcacgttttcaggctgccaggctcccggttcacaatatttacgccgagtatgtccattttgctgacctcaatgcgccgttaaacgatgatgagcacgcacaacttgaacgcctgctgaaatatggtccggcactcgccagccacgccccgcaaggcaaactcctgctggtgaccccgcgtcctggcaccatctctccctggtcttcgaaagcgaccgatattgcccataactgcgggctacaacaggtaaaccgccttgagcgcggcgttgcttactatatagaagccggtacgctgaccaatgaacaatggcagcaggttaccgctgaactgcacgaccgcatgatggaaacggtcttttttgatttagatgatgcagagcagttgtttgcccaccatcaaccgactccggtcacaagcgttgatttgctggggcagggccgtcaggcgctgatcgacgctaacctgcgtcttggcttggctctggcggaagatgaaattgactatctgcaggatgctttcacaaagcttggtcgtaacccgaacgacatcgagctgtatatgttcgctcaggcgaactctgagcactgccgccacaaaatttttaacgccgactggattatcgacggtgaacaacagccgaaatcgctgttcaggatgatcaaaaatactttcgaaaccacgccagatcacgttctctctgcttataaagataacgccgccgtaatggaaggttctgaagtgggccgctactttgctgaccacgaaacgggccgctacaatttccatcaggaaccggcgcacatcctgatgaaagtcgaaactcacaaccacccgacggcgatttctccgtggccgggcgcggcgaccggttccggcggtgaaatccgcgatgaaggtgccaccgggcgcggcgcgaagccgaaagctggtttggttggtttctccgtatccaacctgcgaattcctggcttcgaacagccgtgggaagaagatttcggtaagcctgagcgcattgttaccgcgctggacatcatgaccgaaggcccgctgggcggtgcggcgtttaacaacgaatttggtcgtccggcactgaacggctacttccgtacttatgaagaaaaagtgaacagccacaatggcgaagagctgcgcggttatcacaaaccgatcatgctggcgggcgggatcggcaacattcgcgccgatcacgtacaaaaaggcgagatcaacgtcggtgcgaagctggtcgttctcggcggcccggcaatgaacatcggtcttggcggcggcgcggcgtcttccatggcgtctggtcagtctgatgccgacctcgactttgcttccgtacagcgcgacaacccggagatggagcgtcgttgccaggaagtgatcgaccgttgctggcagcttggtgatgctaacccaattctgtttatccacgacgtcggtgcgggcggtctttctaacgcgatgccggagctggtgagcgacggcggacgcggcggtaaatttgaactgcgcgatattctaagcgacgaaccgggcatgagcccgctggaaatctggtgtaacgaatcccaggaacgctacgtgctggcggttgctgccgatcaattaccgctgtttgacgaactgtgtaagcgtgagcgcgcaccctacgcggtgattggtgaagcgaccgaagaactgcatctttctctgcacgatcgtcattttgataatcagccgatcgatctgccgctggacgtcctgcttggtaaaacgccgaagatgacccgcgatgtacaaacgctgaaagcgaagggcgatgcgctggtccgtgaagggatcaccattgcagacgcggtgaaacgcgtactgcatctgccgaccgtggcggagaaaactttcctggtgaccatcggtgaccgcagcgtaaccggcatggtggcgcgcgatcagatggtggggccgtggcaggtgccggtcgctaactgcgcggtcactaccgccagcctcgacagctactacggtgaagcgatggcgattggcgagcgtgcgccggttgcgctgctggatttcgccgcctctgcccgtctggcggtcggtgaagcgttaaccaatattgccgcaacacagattggcgatatcaaacgcattaaactttccgccaactggatggcggcggcaggccaccctggtgaagatgcgggcctgtatgaagccgttaaagccgtgggtgaagaactttgtccggcgcttggcctgacgatcccggtgggtaaagactctatgtcgatgaaaacccgctggcaggaaggtaacgaagagcgcgaaatgacgtcgccgctgtcgctggtgatttctgcatttgcccgcgtggaagatgtacgtcacaccatcacgccgcagctttgtaccgaagataacgcactgctgctgattgatttgggcaaaggcaataacgcgctgggcgcaacggcgctggcgcaggtttatcgtcagcttggcgacaaaccggcagatgtacgcgatgttgtccaactgaaaggcttctatgacgcgattcaggcgctggttgcacagcgtaagctgctggcgtatcacgaccgctctgatggaggcctgctggtaacgctggcggaaatggcctttgcaggtcattgtggcattgacgcggatatcgcctctctgggtgacgatcgcctggcggcgttgtttaacgaagaactgggtgcggtgattcaggttcgtgccgctgaccgtgaagcggtcgagtccgtactggcacagcatgggcttgcggattgcgtccattatgttgggcaggcggtttccggtgaccgttttgtgattaccgccaacgggcagactgtattcagcgaaagccgcactacgttgcgtgtctggtgggcagaaactacctggcagatgcagcgcctgcgtgacaacccggagtgtgccgatcaggagcatcaggcgaaatctaacgacgccgatccgggcctgaatgtaaaactgtcgttcgatatcaacgaagatgtggcagcaccgtatattgccactggcgcacgtccgaaagttgccgtactgcgtgagcagggcgtgaactcgcatgttgaaatggcggcagctttccaacgtgggggctttgatgctatcgacgtgcatatgagcgacctgctgactggacgtacgggactggaggattttcacgccctggtcgcgtgcggaggtttctcctacggtgatgtgctgggtgccggtgaaggttgggcgaagtctatcctgttcaatgaccgtgtacgcgatgagtttgcaaccttcttccatcgtccgcaaacgctggccctgggggtatgtaacggttgccagatgatgtctaacctgcgtgaactgatcccggggagtgagttgtggccacgttttgtgcgtaacacctccgatcgctttgaagcgcgtttcagcctggttgaagtaacccaaagcccgtctctgctgttgcaggggatggtgggctcgcaaatgccgattgctgtctctcatggtgaagggcgcgtggaagtgcgtgatgcggcgcatctggcggcactggaaagcaaagggctggtggcactgcgctatgtcgataacttcggcaaagtcactgaaacctacccggctaacccgaacggttcaccgaacggtattacggcggttacgactgaaagtggtcgagtcaccattatgatgccgcacccggaacgtgttttccgtactgtcagcaactcctggcatccggaaaactggggcgaggatggcccatggatgcgcattttccgcaatgcgcgtaagcagttggggtaa

SEQ ID NO: 52687 - protein, 1295 aa, Shigella flexneri 2a str. 301
MMEILRGSPALSAFRINKLLARFQAARLPVHNIYAEYVHFADLNAPLNDDEHAQLERLLKYGPALASHAPQGKLLLVTPRPGTISPWSSKATDIAHNCGLQQVNRLERGVAYYIEAGTLTNEQWQQVTAELHDRMMETVFFDLDDAEQLFAHHQPTPVTSVDLLGQGRQALIDANLRLGLALAEDEIDYLQDAFTKLGRNPNDIELYMFAQANSEHCRHKIFNADWIIDGEQQPKSLFRMIKNTFETTPDHVLSAYKDNAAVMEGSEVGRYFADHETGRYNFHQEPAHILMKVETHNHPTAISPWPGAATGSGGEIRDEGATGRGAKPKAGLVGFSVSNLRIPGFEQPWEEDFGKPERIVTALDIMTEGPLGGAAFNNEFGRPALNGYFRTYEEKVNSHNGEELRGYHKPIMLAGGIGNIRADHVQKGEINVGAKLVVLGGPAMNIGLGGGAASSMASGQSDADLDFASVQRDNPEMERRCQEVIDRCWQLGDANPILFIHDVGAGGLSNAMPELVSDGGRGGKFELRDILSDEPGMSPLEIWCNESQERYVLAVAADQLPLFDELCKRERAPYAVIGEATEELHLSLHDRHFDNQPIDLPLDVLLGKTPKMTRDVQTLKAKGDALVREGITIADAVKRVLHLPTVAEKTFLVTIGDRSVTGMVARDQMVGPWQVPVANCAVTTASLDSYYGEAMAIGERAPVALLDFAASARLAVGEALTNIAATQIGDIKRIKLSANWMAAAGHPGEDAGLYEAVKAVGEELCPALGLTIPVGKDSMSMKTRWQEGNEEREMTSPLSLVISAFARVEDVRHTITPQLCTEDNALLLIDLGKGNNALGATALAQVYRQLGDKPADVRDVVQLKGFYDAIQALVAQRKLLAYHDRSDGGLLVTLAEMAFAGHCGIDADIASLGDDRLAALFNEELGAVIQVRAADREAVESVLAQHGLADCVHYVGQAVSGDRFVITANGQTVFSESRTTLRVWWAETTWQMQRLRDNPECADQEHQAKSNDADPGLNVKLSFDINEDVAAPYIATGARPKVAVLREQGVNSHVEMAAAFQRGGFDAIDVHMSDLLTGRTGLEDFHALVACGGFSYGDVLGAGEGWAKSILFNDRVRDEFATFFHRPQTLALGVCNGCQMMSNLRELIPGSELWPRFVRNTSDRFEARFSLVEVTQSPSLLLQGMVGSQMPIAVSHGEGRVEVRDAAHLAALESKGLVALRYVDNFGKVTETYPANPNGSPNGITAVTTESGRVTIMMPHPERVFRTVSNSWHPENWGEDGPWMRIFRNARKQLG

SEQ ID NO: 52688 - DNA, 3726 bp, Streptococcus mutans UA159
  CDS (1)..(3726): transl_table=11
atggatagacgtatttttgttgagaaaaaagctaactttagcattaaatcggagtcactggtcaaagaactaacacataatttgcagttaacctccttaaaaattttacgtattgtgcaggtttatgatatctttaatttagaagaaagcctgtttgcgcgtgcgcaaaagcatgtcttttctgagcaggtgacagatacaattttagatgaagcaactgtgcaggcggatcttaacagccatgctttttttgctattgaagctttgccgggtcagtttgaccagcgggcagcaagttcacaagaagctttgctcttacttggtagtgacagcaacgtaacggttaatactgcccagctttatctggttaataaggatattgatgcatctgagttggaagcggtgaagcattatcttttgaatccagttgattcgcgtttcaaagatatcaccttgcctattcgtccacaggaattttcaaattctgacaaaacaattccaaatttggatttctttaagacttatacagctgaagattttgcggcttacaaggcggaacaaggtttggctatggaagtggatgatcttgtttttattcaagattattttaaatcaattgggcgtgtgccaacagaaacggaattgaaagttttggatacctactggtctgaccactgccgtcacacgacttttgagacagaattgaaaaatattaacttttcagcttctaagttccaaaaacaattgcagacaacttatgataaatatattgccatgcgtgacgaattgggacgttctgaaaagccacagacgcttatggatatggcgacaatctttggtcgttatgagcgtgctaacggtcgtttgaacgacatggaagtgtcggacgaaatcaatgcctgctcggttgaaattgaggtagatgtagatggcatcaaagaaccttggctgctcatgttcaaaaatgaaacccacaatcacccaacggaaattgagcctttcggtggagctgcaacttgtattggtggtgctattcgtgacccattgtcaggtcgttcttatgtttaccaagctatgcgtatatcaggtgcaggtgatattaccgcaccaatagcagaaacacgctctggtaaattgccacaacaagtcatctctaaaacggcggcgcacggctattcgtcatacgggaaccaaataggacttgcgactacctatgtcaaagagtacttccatccaggcttcgttgctaagcgtatggagctaggtgctgttgtcggtgcagcaccaaaagaaaatgtcgtgcgtgaaaaaccagaagctggtgatgtggtcatccttcttggtggaaaaacaggacgtgacggtgtcggtggtgctacaggctcatctaaggttcaaacggttgaatcggttgagacagcaggtgccgaagtgcaaaaagggaatgctattgaagaacgtaagattcaacgtcttttccgcaatggcaatgtcactcgtctcatcaagaaatcaaatgattttggtgctggcggcgtctgtgtggctattggtgaattggcagatggtcttgaaattgacttggacaaagtgccactaaaataccaaggtcttaacggtaccgaaattgccatttctgagtcacaagaacgcatggctgttgttgttcgtccaagtgatgtggacgcctttattgcagcatgtcataaagagaacattgatgcagttgttgtcgcgactgttactgaaaaaccaaaccttgtcatgacttggaatggtgaaaccatcgttgacttggaacgtgccttccttgatactaacggtgtgcgtgtggttgttgatgcaaacgttgtggataaggatgttgcccttcctgaggtgcgtacaacatcagcagcaacacttgaagcagacacagtgaaagttctgtctgatcttaaccacgctagtcaaaaagggttgcaaactatctttgacagctcggttgggcgttcaacagttaatcatccaatcggcggtcgttatcaaattacgcctactgaagcttctgtgcaaaaattgccagtacaaaatggtgtcacaacgacagcttctgtcatggcacagggattcaatccttatattgcggagtggtcaccttatcatggtgcagcttacgctgttattgaagcaacagctcgcttggtagcaacaggtgctgattggtctcgtgcgcgtttctcttaccaagaatactttgaacgcatggataaacaagcggatcgctttggtcagccagtagctgctctgcttggttcgatcgaggcacaaatccaacttggtttgccatcaatcggtggtaaggactccatgtcagggacctttgaagaattgacggtaccgccaaccttggttgcctttggtgtgacaacagtagatagtcgtcaggttctttcaccagaattcaagactgttggtgagaacatttactacatcccaggacaggctatttcagaagacattaattttgattatatcaaggctaactttgcacaatttgaagccattcaagctaaacataaagtaacagcagcttcagctattaaatacggcggtgttcttgaaagcctagcactcatgagctttggtaatcatattggtgcttctgtagaattgacagagcttgacagcagcttgacagcgcagcttggtggttttgtctttacatctgatgaagccattgctgacgcagtgaaaattggtcaaactgtggcagactttacagtaactgtcaacggtgtcaacttgtccgctgcgaaattacttgcagcttttgagggcaggttagaggaggtttacccaaccgaatttgaacagtcaacagctcttgaagaaatacctgctgtggtatctgatgctgttattaaagctaaagaaagaattgcacagcctctggtttatatcccagttttccctggttccaattcagagtacgattcagctaaggcctttgaacaagctggtgccaaagtcaactcagtgccatttgtgactcttaatgaagcagcgattgaggcttctgttgacaccatggttgacaacattgttaaagccaatattatcttctttgtcggcggcttctcagcggcagatgagccagacggttcggctaagtttatcgtcaatatcttacttaatgaaaaagtttgctctgctattgacagcttcattgaaaggggtggcctcatcatcggtatctgtaatgggtttcaagctcttgtcaaatccggtcttctgccttatggtgactttgaagaagttggtgagacaagcccaaccctcttctacaatgatgccaatcagcacgtggctaagatggtagaaacccgtatcactaatactaactctccatggttggcaggtgttaagatcggtgatatccatgcgattccagtctctcacggtgaagggaaatttgtcgtgacagctgaagaatttgcggaactgcgtgacaatggtcaaatctggagccaatacgtggactttgatggtaagccttctatggattctaaatacaatccaaacggttcgctcaacgctattgaagggattacgagcaagaacggtcaaatcattggtaagatgggacactcggaacgctatgaaaacgggctctttcaaaacatcccaggtaacaaagatcaaggcctatttgaaagtgcagtgaaatactttactgggaaatag

SEQ ID NO: 52689 - protein, 1241 aa, Streptococcus mutans UA159
MDRRIFVEKKANFSIKSESLVKELTHNLQLTSLKILRIVQVYDIFNLEESLFARAQKHVFSEQVTDTILDEATVQADLNSHAFFAIEALPGQFDQRAASSQEALLLLGSDSNVTVNTAQLYLVNKDIDASELEAVKHYLLNPVDSRFKDITLPIRPQEFSNSDKTIPNLDFFKTYTAEDFAAYKAEQGLAMEVDDLVFIQDYFKSIGRVPTETELKVLDTYWSDHCRHTTFETELKNINFSASKFQKQLQTTYDKYIAMRDELGRSEKPQTLMDMATIFGRYERANGRLNDMEVSDEINACSVEIEVDVDGIKEPWLLMFKNETHNHPTEIEPFGGAATCIGGAIRDPLSGRSYVYQAMRISGAGDITAPIAETRSGKLPQQVISKTAAHGYSSYGNQIGLATTYVKEYFHPGFVAKRMELGAVVGAAPKENVVREKPEAGDVVILLGGKTGRDGVGGATGSSKVQTVESVETAGAEVQKGNAIEERKIQRLFRNGNVTRLIKKSNDFGAGGVCVAIGELADGLEIDLDKVPLKYQGLNGTEIAISESQERMAVVVRPSDVDAFIAACHKENIDAVVVATVTEKPNLVMTWNGETIVDLERAFLDTNGVRVVVDANVVDKDVALPEVRTTSAATLEADTVKVLSDLNHASQKGLQTIFDSSVGRSTVNHPIGGRYQITPTEASVQKLPVQNGVTTTASVMAQGFNPYIAEWSPYHGAAYAVIEATARLVATGADWSRARFSYQEYFERMDKQADRFGQPVAALLGSIEAQIQLGLPSIGGKDSMSGTFEELTVPPTLVAFGVTTVDSRQVLSPEFKTVGENIYYIPGQAISEDINFDYIKANFAQFEAIQAKHKVTAASAIKYGGVLESLALMSFGNHIGASVELTELDSSLTAQLGGFVFTSDEAIADAVKIGQTVADFTVTVNGVNLSAAKLLAAFEGRLEEVYPTEFEQSTALEEIPAVVSDAVIKAKERIAQPLVYIPVFPGSNSEYDSAKAFEQAGAKVNSVPFVTLNEAAIEASVDTMVDNIVKANIIFFVGGFSAADEPDGSAKFIVNILLNEKVCSAIDSFIERGGLIIGICNGFQALVKSGLLPYGDFEEVGETSPTLFYNDANQHVAKMVETRITNTNSPWLAGVKIGDIHAIPVSHGEGKFVVTAEEFAELRDNGQIWSQYVDFDGKPSMDSKYNPNGSLNAIEGITSKNGQIIGKMGHSERYENGLFQNIPGNKDQGLFESAVKYFTGK

SEQ ID NO: 52690 - DNA, 3888 bp, Escherichia coli CFT073
  CDS (1)..(3888): transl_table=11
atgatggaaattctgcgtggttcgcctgcattgtcggcattccgaatcaacaaactgctggcacgttttcaggctgccaggctcccggttcacaatatttacgccgagtatgtccattttgctgacctcaatgcgccgttaaacgatgatgagcacgcacaacttgaacgcctgctgaaatatggcccggcactcgccagccacgccccgcaaggcaaactcctgctggtgaccccgcgtcctggcaccatctctccctggtcttcgaaagcgaccgatattgcccataactgcgggctgcaacaggttaaccgccttgagcgcggcgttgcttactatatagaagccggtacgctgaccaatgaacaatggcagcaggttaccgctgaactgcacgaccgcatgatggaaacggtcttttttgctttagatgatgcagagcagttgtttgcacaccatcaaccgactccggtcaccagcgtagatttgctggggcagggccgtcaggcgctaattgacgctaacctgcgtcttggcctggcactggcggaagatgaaattgactatctgcaggatgcgttcacaaagctgggtcgtaacccgaacgacatcgagctgtatatgtttgctcaggcgaactctgagcactgccgccacaaaatttttaacgccgactggattatcgacggtgaacagcagccgaaatcgctgttcaagatgatcaaaaacaccttcgaaaccacgccagaccacgttctctctgcttataaagataacgccgccgtaatggaaggttctgaagtgggccgctactttgctgaccacgaaacgggccgctacgatttccatcaggaaccggcgcatattctgatgaaagttgaaactcacaaccacccgacggcgatttctccgtggccgggcgcggcgaccggttccggcggtgaaatccgcgatgaaggtgccaccggacgtggcgcaaagccgaaagctggtctggttggtttctccgtatccaacctgcgaattcctggcttcgaacagccgtgggaagaagatttcggtaaacctgagcgcattgttaccgcgctggacatcatgaccgaaggcccgctgggcggtgcggcgtttaacaacgaatttggtcgtccggcactgaacggctacttccgtacttatgaagaaaaagtgaacagccacaatggcgaagagctgcgcggttatcacaaaccgatcatgctggcgggtgggatcggcaacattcgcgccgatcacgtacaaaaaggcgagatcaacgttggtgcgaagctggtcgttctcggcggcccggcaatgaacatcggtcttggcggcggcgcggcgtcttccatggcatctggtcagtctgatgccgacctcgactttgcttccgtacagcgcgacaacccggagatggagcgtcgctgccaggaagtgatcgaccgttgctggcagcttggtgatgccaacccaatcctgtttatccacgacgttggcgcaggcggtctttctaacgccatgccggaactggtgagcgacggcgggcgcggcggtaaatttgaactgcgcgatatcctgagcgacgaaccgggcatgagcccgctggaaatctggtgtaacgaatcccaggaacgctacgtgctggcggttgctgccgatcagttaccgctgtttgacgaactgtgtaagcgtgagcgcgcgccatacgcggtgattggtgaagcgaccgaagaactgcatctttctttgcacgatcgtcattttgataatcagccgattgatctaccgctggacgtactgcttggcaaaacgccgaagatgacccgcgatgtacaaacgctgaaagcgaaaggcgacgcgctggcccgtgaagggatcaccatcgctgacgcggtgaaacgcgtgctgcatctgccgaccgtggcggagaaaactttcctggtgaccatcggtgaccgcagcgtaaccggcatggtggcgcgcgatcagatggtggggccgtggcaggtgccggtcgctaactgcgcagtcactaccgccagcctcgacagctactatggcgaagcgatggcaattggcgaacgtgcgccagttgcgctgctggatttcgccgcttctgcccgtctggcagtcggtgaagcgctaaccaacatcgccgcaacacaaattggcgatatcaaacgcattaaactttccgccaactggatggcggcggcaggccaccctggtgaagatgcgggcctgtatgaagccgttaaagctgtgggcgaagaactttgtccggcgctgggcctgacgataccggtgggtaaagactctatgtcgatgaaaacccgctggcaggaaggtaacgaagagcgcgaaatgacgtcgccgttgtcgctggtgatttccgcatttgcccgcgtggaagatgtacgtcacaccattacgccgcagctttctaccgaagataacgcactgttgctgattgatttgggcaaaggcaataacgcgctgggcgcaacggcactggcgcaggtttatcgtcagcttggcgacaaaccggcagatgtacgcgatgttgcccaactgaaaggcttctatgacgcgattcaggcgctggttgcacagcgtaagctgctggcgtatcacgaccgctctgatggcggcctgctggtaacgctggcggaaatggcctttgctggtcattgtggcattgacgcggatatcgccactctgggtgacgatcgcctggctgcattgtttagcgaagaactgggtgcggtgattcaggttcgagccgctgaccgtgaagccgttgaagcggtactggcacagcatgggcttgctgattgcgtccattatgttgggcaggcggtttccggtgaccgttttgtgattaccgccaacgggcagactgtatttagcgaaagccgcaccacgttgcgtgtctggtgggcagaaactacctggcagatgcagcgtctgcgtgacaacccggagtgtgccgatcaggaacaccaggcgaaatcaaacgacgccgatccgggcctgaatgtgaaactgtcgtttgatatcaacgaagatgtggcagcaccgtttattgccactggcgcgcgcccgaaagttgccgtactgcgtgagcagggtgtgaactcccatgttgaaatggcggcagctttccaccgtgcgggcttcgatgctatcgacgtgcatatgagcgatctgctggctggacgcacgggcctggagggtttccacgtcctggtagcgtgcggtggtttttcctacggtgatgtgctgggcgctggtgaaggttgggcgaagtctatcctgttcaatgaccgtgtacgcgatgagtttgcaaccttcttccatcgtccgcaaacgctggcgctgggggtatgtaacggttgccagatgatgtctaatctgcgtgaactgatcccgggtagcgagttgtggccacgttttgtgcgtaacacctccgatcgctttgaagcgcgtttcagtctggtagaagtaacccaaagcccgtcgctgctgttgcaggggatggtgggctcgcagatgccgattgctgtctctcacggtgaagggcgcgtggaagtgcgtgatgcggcgcatctggcggcactggaaagcaaagggctggtggcactgcgctatgtcgataacttcggcaaagtcactgaaacctacccggctaacccgaacggttctccgaatggtattacggcagtcacgactgaaagtggtcgagtcaccattatgatgccgcacccggaacgtgttttccgtactgtcagcaactcctggcatccggaaaactggggcgaggatggcccatggatgcgcattttccgcaatgcacgtaagcagttggggtaa

SEQ ID NO: 52691 - protein, 1295 aa, Escherichia coli CFT073
MMEILRGSPALSAFRINKLLARFQAARLPVHNIYAEYVHFADLNAPLNDDEHAQLERLLKYGPALASHAPQGKLLLVTPRPGTISPWSSKATDIAHNCGLQQVNRLERGVAYYIEAGTLTNEQWQQVTAELHDRMMETVFFALDDAEQLFAHHQPTPVTSVDLLGQGRQALIDANLRLGLALAEDEIDYLQDAFTKLGRNPNDIELYMFAQANSEHCRHKIFNADWIIDGEQQPKSLFKMIKNTFETTPDHVLSAYKDNAAVMEGSEVGRYFADHETGRYDFHQEPAHILMKVETHNHPTAISPWPGAATGSGGEIRDEGATGRGAKPKAGLVGFSVSNLRIPGFEQPWEEDFGKPERIVTALDIMTEGPLGGAAFNNEFGRPALNGYFRTYEEKVNSHNGEELRGYHKPIMLAGGIGNIRADHVQKGEINVGAKLVVLGGPAMNIGLGGGAASSMASGQSDADLDFASVQRDNPEMERRCQEVIDRCWQLGDANPILFIHDVGAGGLSNAMPELVSDGGRGGKFELRDILSDEPGMSPLEIWCNESQERYVLAVAADQLPLFDELCKRERAPYAVIGEATEELHLSLHDRHFDNQPIDLPLDVLLGKTPKMTRDVQTLKAKGDALAREGITIADAVKRVLHLPTVAEKTFLVTIGDRSVTGMVARDQMVGPWQVPVANCAVTTASLDSYYGEAMAIGERAPVALLDFAASARLAVGEALTNIAATQIGDIKRIKLSANWMAAAGHPGEDAGLYEAVKAVGEELCPALGLTIPVGKDSMSMKTRWQEGNEEREMTSPLSLVISAFARVEDVRHTITPQLSTEDNALLLIDLGKGNNALGATALAQVYRQLGDKPADVRDVAQLKGFYDAIQALVAQRKLLAYHDRSDGGLLVTLAEMAFAGHCGIDADIATLGDDRLAALFSEELGAVIQVRAADREAVEAVLAQHGLADCVHYVGQAVSGDRFVITANGQTVFSESRTTLRVWWAETTWQMQRLRDNPECADQEHQAKSNDADPGLNVKLSFDINEDVAAPFIATGARPKVAVLREQGVNSHVEMAAAFHRAGFDAIDVHMSDLLAGRTGLEGFHVLVACGGFSYGDVLGAGEGWAKSILFNDRVRDEFATFFHRPQTLALGVCNGCQMMSNLRELIPGSELWPRFVRNTSDRFEARFSLVEVTQSPSLLLQGMVGSQMPIAVSHGEGRVEVRDAAHLAALESKGLVALRYVDNFGKVTETYPANPNGSPNGITAVTTESGRVTIMMPHPERVFRTVSNSWHPENWGEDGPWMRIFRNARKQLG

SEQ ID NO: 52692 - DNA, 3777 bp, Clostridium tetani E88
  CDS (1)..(3777): transl_table=11
atgaaaaaaaatatatttaggctttatgtagaaaaaaaagataaatttgacgtagaatcatcaaaccttcaacaggatttaaaacttactttaggtatagaaggaatttcaaaattaaaaatagttaatgtctatgatatagaaggattagatgcagaggaattagaaaaggctaaaaacactatattttcagatcctgttgtagataacgtgtatgaagaagaatttcctattggaaagaaagataagttttttgtatcagaatatttgccaggtcaatatgatcaaagagcagattcttcggtacaatgtgtacagattcttacaggaaaaagtggtataaatataaaaacttcaaggttatatatactagagggaataaaaaaagacgaatattttaataaaataaaggattattgtataaatgatgtagattcaagagaaggaagtattaataaacctaatactctagatttaaattttgctaaacctaaaagtgtgagaatattagaagattttatagatttaaaagaagaaggcttagaagaatttctagaacaggaaggtttggctatggatatagaagatttaaaatattgtcaagcttattttaaaaaagagaataggaatccaactataacagagataaaagttatagatacatattggtcagatcactgcagacatacaacttttaatacagaaataaaaaatgtgaaaatagaagagactcatttaacagaacctataaaagatgcttatgaggattatttaaatagtagagaatttacccataaagatagagaggatgataaatatcaatcacttatggatattgctactataggcatgaaggaagctttaaaaaaaggaatgctacaaagactagataagagtgaagaaattaatgcttgtagtataagaatagaagcagaagtagatggagaaactgaagagtggcttattatgtttaaaaatgaaactcataatcatcccacagaaatagaaccttttggaggagcagctacttgtcttggaggagcaataagagatccattatcaggtagagcttatgtatatcaagctatgagagtaacgggaagtgcagatcctagaagaaaaatagaggacactataaagggaaaattatctcaaaagaaaataactacagaagcagctggaggatatagctcctatggtaatcaaataggtgtttccacaggatttgtagatgaactatatcacgaaggatatatagctaaaagaatggaagttggagctgtaataggaggagttaaagcttctaatgtagtgagaaatgctccacaagaaggagatgtagttatattacttggaggaaaaacaggaagagatggttgtggaggagctactggttcttctaaagaacatacagaaaaatccattgtagaatgtagttcagaggttcaaaagggtaatgctccaacagagagaaaaatccaaagattttttagaaacgaagaagtatgtaaaatgattaaaagatgcaatgattttggagctggtggagtatctgtagcagttggagaattaacagaaggactttatatagacctagataaagtacctaaaaaatatgaaggattagatggaactgaaattgccatatctgaatcacaagagagaatggctatagtaatagatggcaaaaatttagaaagatttataagtcttgcagaagaagaaaacctagaagctactaaaatcgcagatgtaacttctaatgaaacacttgaaatgtactggcgtggagataaaatattagatttaaaaagagaattcttagatagttttggagtaaaaaagaagatagatgtagaagtattatcacctaaaaaagaagaaaactattttactaagtgtacagataaatataaaactattaaagaagcatggttagaaactctttcaaatttaaatgtatgtagtaaaaaaggtatggttgaaagatttgataatactgttggagcgtctactattttaatgccttttggaggcaaatacgcgttaactccaagtgaaggtatggttgcgaaaattcctgttttacatgggcaaactacaacagctacaattatgtcctatggatttaatccatatatatctaagtggagtcctttccatggagcattgtatgcagtattagaatctataacaaaaattgtagcattaggtggaaattataaagatatatatctaagcttccaagaatattttgaaagcctaggagaagataaaactaaatggggaaaaccctttgcggcgctacttggagctcttaaagcacaaaaggtatttaagacctttgccataggtggtaaagacagtatgtcaggaacctttaaagaattaaatgttccgccaacgcttatatcttttgcagtagggatactaaatacaaagtacagtatttcacaagaatttaaagggaaaaatagtaaagttgtaatgttaaaagttgatacagatgaaaattacattcctaatttagatatggcaaagaaaaactttaaagtagttcattcattaataaaagagagaaaagtactatcttcttataccgttaaagagggaggaataatagaggctataaataaaatggcctttggaaataaaataggaataagctttgacaatagtaaagaatggaatttagaagagttattatatccaagttatggttcaattatattagaattttctaaggagatggatttagatagagaattaaaagatagtaattggcaattaataggtgacactatagaatatgagtgtataaaaatcaaaaatgaagttataaaaatagacgaagccttagaaagttggataaaacctttagacagtatatttcccacaaaaactgatcagattaaggataatataaataatataagctttgaaaaaggtaataaaaatgtttctataataaaaaatataaaaccaaaagtatttataccagcttttccaggcaccaattcagaatatgatacagcaaaagcatttataaaagcaggaggacaggtttctagtttagtatttagaaataattctataaaagatatagaagaaaccatagatgcttatgcaaaagaaataagaaattctaatatattagctattccaggaggctttagtgctggcgatgaaccggatggctctggtaaatttatagctacagtatttagaaatgaaaaaataaaagatgcagtaatggatcttatcaagaacagagatggattaattttaggtatatgtaatggcttccaagcacttattaaattaggtttaataccttatggagaaataagagaattagatgaaaaatctcctacattagctcaaaacaaaataggaagacatgtatctaaaatagttagaacaaaggttgtatctaatttatctccttggtttaacaatataaaagttggagatgttttctcattacctatatctcacggagaaggaagatttatggctgatgaagatgtattaagaaaattaatagataatggtcaaatagcttcacaatatgtggacttaaatggaaacgcaacctatgatatagaatttaatccaaatggatcattatatgcagtagaagcattaacaagtccaaatggaagaattcttggtaaaatggctcactcagaaagaataggagaaggattatataaaaatattccaggtgaaaagaaccaaagaatatttgaagcgggaataaattactttaaataa

SEQ ID NO: 52693 - protein, 1258 aa, Clostridium tetani E88
MKKNIFRLYVEKKDKFDVESSNLQQDLKLTLGIEGISKLKIVNVYDIEGLDAEELEKAKNTIFSDPVVDNVYEEEFPIGKKDKFFVSEYLPGQYDQRADSSVQCVQILTGKSGINIKTSRLYILEGIKKDEYFNKIKDYCINDVDSREGSINKPNTLDLNFAKPKSVRILEDFIDLKEEGLEEFLEQEGLAMDIEDLKYCQAYFKKENRNPTITEIKVIDTYWSDHCRHTTFNTEIKNVKIEETHLTEPIKDAYEDYLNSREFTHKDREDDKYQSLMDIATIGMKEALKKGMLQRLDKSEEINACSIRIEAEVDGETEEWLIMFKNETHNHPTEIEPFGGAATCLGGAIRDPLSGRAYVYQAMRVTGSADPRRKIEDTIKGKLSQKKITTEAAGGYSSYGNQIGVSTGFVDELYHEGYIAKRMEVGAVIGGVKASNVVRNAPQEGDVVILLGGKTGRDGCGGATGSSKEHTEKSIVECSSEVQKGNAPTERKIQRFFRNEEVCKMIKRCNDFGAGGVSVAVGELTEGLYIDLDKVPKKYEGLDGTEIAISESQERMAIVIDGKNLERFISLAEEENLEATKIADVTSNETLEMYWRGDKILDLKREFLDSFGVKKKIDVEVLSPKKEENYFTKCTDKYKTIKEAWLETLSNLNVCSKKGMVERFDNTVGASTILMPFGGKYALTPSEGMVAKIPVLHGQTTTATIMSYGFNPYISKWSPFHGALYAVLESITKIVALGGNYKDIYLSFQEYFESLGEDKTKWGKPFAALLGALKAQKVFKTFAIGGKDSMSGTFKELNVPPTLISFAVGILNTKYSISQEFKGKNSKVVMLKVDTDENYIPNLDMAKKNFKVVHSLIKERKVLSSYTVKEGGIIEAINKMAFGNKIGISFDNSKEWNLEELLYPSYGSIILEFSKEMDLDRELKDSNWQLIGDTIEYECIKIKNEVIKIDEALESWIKPLDSIFPTKTDQIKDNINNISFEKGNKNVSIIKNIKPKVFIPAFPGTNSEYDTAKAFIKAGGQVSSLVFRNNSIKDIEETIDAYAKEIRNSNILAIPGGFSAGDEPDGSGKFIATVFRNEKIKDAVMDLIKNRDGLILGICNGFQALIKLGLIPYGEIRELDEKSPTLAQNKIGRHVSKIVRTKVVSNLSPWFNNIKVGDVFSLPISHGEGRFMADEDVLRKLIDNGQIASQYVDLNGNATYDIEFNPNGSLYAVEALTSPNGRILGKMAHSERIGEGLYKNIPGEKNQRIFEAGINYFK

SEQ ID NO: 52694 - DNA, 2343 bp, Tropheryma whipplei str. Twist
  CDS (1)..(2343): transl_table=11
atgctgtcttttaccccaaggattggcagtcgcgattacagttgcgaggcaggctattcggtgaatatgagcctgccagcagatcgagataccgcaaaaaagcctagcgcgcaaaagcctagcgcgcacgcacagaacgcgactgccgccgtggacgtcacagcacttggcttgacggagtctgagtatacacaaatttgctcgctgctaaaacgctctccaacaaaaagtgaactcgcgatctattctgttctatggagcgaacattgttcctacaagtcttcccgtagacacttacgacagttagctgacctaacagaggtaacaaaaaaacatttgcttgttggaattggtcagaacgccggagttgttgatatcggtggtggctgggctgcagccttcaagatagaaagccacaatcacccgtcttttattgaacccttccagggtgccgcaacgggcattggcggtatcgtgcgtgacattattgccatgggtgcaaaacctgttgcactaatggactcgttgcgtttcggcgctgcgtccgatccagacacacagagggttgctgatggcgttgtctctgggatctcattctatggaaactgtctcggtgtgcccaatataggaggagaaacggcattcgatcccgtatatcaaggcaatcctttggtgaatgttttgtgcgttggggttatgcgacgggaaaatattcgcttggcgaatgccagcggaccgggaaaccttgtagttctatttggtgcccccacgggaagagatggcattggcggcgcttcggtcctcgcctcagattcttttacatccgatgccaaagctaatcggccggccgtacaaattggagatccgtttgtagaaaaactacttaccgaatgttgccttgaattgtatgccgctgatcttgtggttgctattcaagaccttggtgctgcgggtatatcttgcgcggcgagtgagctggcacacaacggccgcgtcggtatccgtctggacttgtctgcagttcctctcagggatacaacactagcacctgatgaaatacttgtatcagagtctcaagagcgcatgatggccattgtgcatccggacaatttagaagcattttttgaaataacaaaccgttggggtatctcaggggctgttattggagaagtggataattcacaatatctgaccgttgtgcatgaaggcaaaacactggttaggctgaatccaaaaacacttaccggcccatcgtataaccgtcctgtcaaaaagccagcatacctcattcgcaggagcgcagccaatagactgcctgttacaaatgacccacacctacttcgagaagatattttgcaggttatttcttgcccaaatctatctgataaaagtgtgattaccaatcagtatgatcgttatgtccagggcaataccgcactttgtcatcctgatgatgcgggggtaatcaggatgtataagaataccggggttgcactttcatgtgatggtaattcgcgatactcttatcttgatccacacgcgggggcccagcttgcagttgcggaagcttaccgcaatgtatcggttgttggggccacgccccttgcggtaacaaactgtctcaattttggtaacccagaaaacccagaagttatgtggcagtttagggaaacctgtagagggctttctgatgcctgtaagcggcttgagattccaattacggggggtaatgtttccttttacaaccagaccgacggtaaagacatatttcccactccggtggttggcattcttggcattgtagataatctgacccaaacacttacttccggatggaatgcgccagatctctttatttatcttctgggtgttacgcgacccgagtttggcggaagcgtttgggctgataccatgtacggccacattggcggggtgccacctaagctagatttagcgagagaaagtcgcctgtctaatttgttggttgcgggtgcaaagaaacgggtttttgagtctgcgcatgacctatcggaaggcggtcttatccaggcaatagttgaaagttgccttcgtcacggttttggtgctgatatcgctcttgatacaatccgtgcaacgagcctaacagaggcactttttagtgaaagcgcttcgcgtgttcttgtgtcttgtagatctcaggaggatttgcgtgacctttgcaggagaaatagttatgaatacaccctaattggcacaacacgtcacaccggagagcttacgatttccgagatcggcaaattcactctgaatgagctcagtgatgctcgccaaaaggtcactcgtgtcctgtttaggggataa

SEQ ID NO: 52695 - protein, 780 aa, Tropheryma whipplei str. Twist
MLSFTPRIGSRDYSCEAGYSVNMSLPADRDTAKKPSAQKPSAHAQNATAAVDVTALGLTESEYTQICSLLKRSPTKSELAIYSVLWSEHCSYKSSRRHLRQLADLTEVTKKHLLVGIGQNAGVVDIGGGWAAAFKIESHNHPSFIEPFQGAATGIGGIVRDIIAMGAKPVALMDSLRFGAASDPDTQRVADGVVSGISFYGNCLGVPNIGGETAFDPVYQGNPLVNVLCVGVMRRENIRLANASGPGNLVVLFGAPTGRDGIGGASVLASDSFTSDAKANRPAVQIGDPFVEKLLTECCLELYAADLVVAIQDLGAAGISCAASELAHNGRVGIRLDLSAVPLRDTTLAPDEILVSESQERMMAIVHPDNLEAFFEITNRWGISGAVIGEVDNSQYLTVVHEGKTLVRLNPKTLTGPSYNRPVKKPAYLIRRSAANRLPVTNDPHLLREDILQVISCPNLSDKSVITNQYDRYVQGNTALCHPDDAGVIRMYKNTGVALSCDGNSRYSYLDPHAGAQLAVAEAYRNVSVVGATPLAVTNCLNFGNPENPEVMWQFRETCRGLSDACKRLEIPITGGNVSFYNQTDGKDIFPTPVVGILGIVDNLTQTLTSGWNAPDLFIYLLGVTRPEFGGSVWADTMYGHIGGVPPKLDLARESRLSNLLVAGAKKRVFESAHDLSEGGLIQAIVESCLRHGFGADIALDTIRATSLTEALFSESASRVLVSCRSQEDLRDLCRRNSYEYTLIGTTRHTGELTISEIGKFTLNELSDARQKVTRVLFRG

SEQ ID NO: 52696 - DNA, 3888 bp, Salmonella enterica subsp. enterica serovar Typhi Ty2
  CDS (1)..(3888): transl_table=11
atgatggaaattctgcgtggttcgcctgcactgtctgcattccgtatcaataaactgctggcgcgctttcaggctgccaacctccaggtccacaatatatacgctgagtatgtccattttgctgacctgaacgccccgttaaatgatagcgagcaggcgcagcttacccgtctgctgcaatacggcccggcgcttagcagccatacgctggcgggtaaactcctgttggtcacaccgcgtcctggtaccatctccccctggtcttcaaaagcaacggatatcgcccacaactgcggcctgcaacagattgaccgtctggagcgcggcgtagcgtactatatcgaggcttcgacgttgacggcggaacagtggcgacaagtggccgcagagctgcacgaccgtatgatggagacggtgttctcttctttaaccgatgcggaaaaactgtttatccaccatcagcctgcgccggtttccagtgtcgatctgctgggagaaggccgtcaggcgttaattgacgctaacctgcgtctcggtctggcgctggcggaagatgaaatcgactatttgcaggaggcgtttaccaaactgggatgcaacccgaacgatatcgaactgtacatgttcgcccaggcgaactccgagcactgccgccacaagatttttaacgccgactggattatcgacggtaaaccgcagccgaagtcgctgtttaaaatgattaaaaacaccttcgaaaccacgccggactatgtgctctctgcctataaagacaatgccgcggtgatggaaggatctgcggtggggcgctacttcgccgaccacaataccggccgttacgattttcatcaggagcccgcgcacattctgatgaaggtcgaaacgcataaccacccaaccgccatctctccgtggccgggggcggcgaccggttccggcggcgaaattcgtgatgaaggcgccaccgggcgtggcgcgaaaccaaaagccgggctggtaggcttctccgtttccaacctgcgtattccgggctttgaacagccgtgggaagaggattttggcaagccggaacgtattgtcaccgcgctggatatcatgaccgaaggtccgctgggcggcgcggcgtttaacaacgaatttggtcgcccggcgctgaccggttacttccgtacttatgaagagaaagtgaacagccacaatggcgaagagctgcgtggctatcacaagccgatcatgctggcgggcgggatcggtaatatccgcgccgatcacgtgcagaaaggcgagatcgtcgtaggcgcgaagctgatcgtccttggcggcccggcgatgaatatcggcctcggcggcggcgcggcatcgtcaatggcttccggccagtctgatgcggatctcgattttgcctctgttcagcgcgacaacccggaaatggaacgccgctgccaggaagtgatcgaccgctgctggcagttgggcgacgctaacccaatcctgtttatccatgatgtgggcgcgggcggtctctccaacgccatgccggagctggtaagcgacggcgggcgcggcgggaaattcgaactgcgcgacattcttagcgacgagccgggcatgagcccgctggaaatctggtgtaacgaatcccaggagcgctatgtgctggcggtcgcggctgaccagttaccgctgttcgatgaactgtgtaagcgcgaacgcgcgccgtatgcggtcattggcgacgctaccgaagaacagcatctctcgttgcatgataaccatttcgacaatcagccgatcgatctaccgctggatgtcctgctgggcaaaacaccgaaaatgacccgcgatgtgcaaacattgaaggcgaaaggcgatgcgctgaaccgcgcggatatcacgattgccgacgcggtaaatcgtgttctgcatctgccgaccgtggcggaaaaaaccttccttgtcactattggcgaccgtaccgtcaccggtatggtggcgcgtgaccagatggttggcccgtggcaggtcccggtagctgactgcgcggtcactaccgctagcctcgacagctactacggcgaagcgatgtcgattggcgagcgcgcgccggtggcgctgctggactttgccgcctccgcccgtctggccgtcggtgaagcgttgactaacattgccgcgacgcagattggcgatatcaagcgcattaagctttccgctaactggatggcggcagccggtcatcctggcgaagatgccggtttgtatgacgcggttaaagcggtgggagaggaactctgtccgcagcttggcctgacgattccggtgggtaaagattcgatgtcgatgaaaacccgctggcaggaaggcaacgaacagcgcgaaatgacctcgccgctgtcgctggtgatttccgcgtttgcccgcgtggaagacgtgcgtcacacccttacgccgcagctgtcaacggaagataacgccttgctgctgatcgatcttggcaagggccacaacgcgctgggcgcaacggcgttggcgcaggtctatcgtcagcttggcgacaaacccgcggacgtgcgtgacgttgcgcaactgaaaggcttctatgacgccatgcaggtgctggttgctgcgcgtaaattactggcatggcacgaccgttccgacggcggtctgctggtgacgctggccgagatggcctttgccggccactgcggcgtgcaggtcgatatcgccgcgctgggcgatgaccatctggccgcactgttcaacgaggagctgggcggcgtgattcaggtacgcgctgaagacagagacgcggtcgaaacgctgttggcgcagtacggtcttgctgactgcgtccactaccttggtcaggccctggctggcgatcgctttgtgattaccgctaatgatcggacggtattcagcgaaagccgtactacgctgcgtgtctggtgggcggaaaccacctggcagatgcagcgtctgcgcgacaatccgcaatgtgctgaccaggaacacgaggcgaaagcgaatgatgccgatccgggcctcaacgtgaagctgtcgtttgatattaatgaagatatcgccgcgccgtacattgcgacaggcgcacgaccgaaagtcgctgtactgcgcgagcagggggtgaactctcacgtggagatggcggcggcgttccatcgtgcgggctttgacgcgattgacgtccatatgagcgacctgctgggcggtcgtatcggtctgggcaacttccatgcgctggtggcttgcggcggcttttcctacggcgacgtgctgggggcgggcgaaggctgggcgaaatccattctgtttaaccatcgggtgcgcgacgaattcgaaaccttcttccatcgtccgcagacgctggcgctgggcgtgtgcaacggttgccagatgatgtcgaatctgcgcgagctgatcccgggcagcgaactgtggccgcgttttgtacgtaaccattctgaccgcttcgaagcccgcttcagcctggtggaagtgacgcaaagcccatcgctgctgctgcaaggaatggtaggctcacagatgccgattgcggtttcccatggggaagggcgcgttgaggtgcgtgacgatgcgcatcttgccgcgcttgagagcaaaggcctggtcgctctgcgctacgttgataactttggtaaggtgaccgaaacctatccggctaacccgaacggttcgccgaacggcatcacggcggtgacgaccgaaaacggtcgggtgacgattatgatgccgcatccggaacgcgtattccgcaccgtcgccaactcctggcacccggaaaactggggcgaggatagcccgtggatgcgtatcttccgtaatgcgcgtaagcagcttggttaa

SEQ ID NO: 52697 - protein, 1295 aa, Salmonella enterica subsp. enterica serovar Typhi Ty2
MMEILRGSPALSAFRINKLLARFQAANLQVHNIYAEYVHFADLNAPLNDSEQAQLTRLLQYGPALSSHTLAGKLLLVTPRPGTISPWSSKATDIAHNCGLQQIDRLERGVAYYIEASTLTAEQWRQVAAELHDRMMETVFSSLTDAEKLFIHHQPAPVSSVDLLGEGRQALIDANLRLGLALAEDEIDYLQEAFTKLGCNPNDIELYMFAQANSEHCRHKIFNADWIIDGKPQPKSLFKMIKNTFETTPDYVLSAYKDNAAVMEGSAVGRYFADHNTGRYDFHQEPAHILMKVETHNHPTAISPWPGAATGSGGEIRDEGATGRGAKPKAGLVGFSVSNLRIPGFEQPWEEDFGKPERIVTALDIMTEGPLGGAAFNNEFGRPALTGYFRTYEEKVNSHNGEELRGYHKPIMLAGGIGNIRADHVQKGEIVVGAKLIVLGGPAMNIGLGGGAASSMASGQSDADLDFASVQRDNPEMERRCQEVIDRCWQLGDANPILFIHDVGAGGLSNAMPELVSDGGRGGKFELRDILSDEPGMSPLEIWCNESQERYVLAVAADQLPLFDELCKRERAPYAVIGDATEEQHLSLHDNHFDNQPIDLPLDVLLGKTPKMTRDVQTLKAKGDALNRADITIADAVNRVLHLPTVAEKTFLVTIGDRTVTGMVARDQMVGPWQVPVADCAVTTASLDSYYGEAMSIGERAPVALLDFAASARLAVGEALTNIAATQIGDIKRIKLSANWMAAAGHPGEDAGLYDAVKAVGEELCPQLGLTIPVGKDSMSMKTRWQEGNEQREMTSPLSLVISAFARVEDVRHTLTPQLSTEDNALLLIDLGKGHNALGATALAQVYRQLGDKPADVRDVAQLKGFYDAMQVLVAARKLLAWHDRSDGGLLVTLAEMAFAGHCGVQVDIAALGDDHLAALFNEELGGVIQVRAEDRDAVETLLAQYGLADCVHYLGQALAGDRFVITANDRTVFSESRTTLRVWWAETTWQMQRLRDNPQCADQEHEAKANDADPGLNVKLSFDINEDIAAPYIATGARPKVAVLREQGVNSHVEMAAAFHRAGFDAIDVHMSDLLGGRIGLGNFHALVACGGFSYGDVLGAGEGWAKSILFNHRVRDEFETFFHRPQTLALGVCNGCQMMSNLRELIPGSELWPRFVRNHSDRFEARFSLVEVTQSPSLLLQGMVGSQMPIAVSHGEGRVEVRDDAHLAALESKGLVALRYVDNFGKVTETYPANPNGSPNGITAVTTENGRVTIMMPHPERVFRTVANSWHPENWGEDSPWMRIFRNARKQLG

SEQ ID NO: 52698 - DNA, 3705 bp, Bacteroides thetaiotaomicron VPI-5482
  CDS (1)..(3705): transl_table=11
atgattctttttttcagaaccccttccaagagcgtgattgccgtagagagcaaccatcagctcaccccggacgaaagtaataaactctgctggctttttggagaagccgtgacggaaagtgaagaaaacctgaaaggctgtttcgtcggcccacgccgcgaaatgattaccccttggagtacaaacgcagtagaaatcacccaaaacatgggacttgaagacattctccgcattgaggaatattttccggtaaaagatgaaaatgccgactacgacccgatgctgcaacgcatgtacaaaggactcgaccaaaacgtattcaccaccaaccgccaaccggaacctatcgtatccatcgaagacctcgaagcctacaacgaaaaagaaggcctcgcactctcgaaagaagaaatggactatctgaaaaaggtagaaaacgatctgggacgcaagttgactgactccgaagttttcggtttcgcacagatcaactctgaacactgtcgccacaaaatattcggtggaacattcatcatcgacggtgtagaacaggaatcatctctgttccagatgattaaaaagaccacacaggagaatccgaataaaatcatctctgcttataaagacaacgtagccttcgccgaaggtccggtagttgaacagtttgctccggcagatcactcaaaacctgacttcttccaggtgaaagacatcaaaagcgtcatctcactgaaagcagaaactcataacttcccgacgactgtagaaccgttcaacggcgcatctaccggtacaggcggtgaaatccgcgaccgtatgggtggtggcaaaggttcatggccgatcgcaggtactgctgtctacatgacttcttatccccgcacggacgaaggccgcgaatgggaagatattcttccggtacgcaaatggctgtaccagactccggaacagattctgatcaaggcatccaacggtgcttccgacttcggtaacaagttcggccaaccgctgatctgcggctcagtattgactttcgaacacacggaaaacaacgaagtttatggctacgacaaagtaatcatgcttgcgggcggtgtaggctacggcacacaacgtgactgcctcaaaggtactccggaagcaggaaacaaagtagtcgtcatcggtggagacaattatcgtatcggactgggtggcggttccgtatcttctgtagataccggtcgttacagcagcggtatcgaactgaatgccgtacaacgtgccaacgccgaaatgcagaaacgtgccaacaacgtagtacgcgctctctgcgaggaagatgtgaatccggtagtttctatccacgaccacggttcggcaggtcacgtaaactgtctgtcggaattggtggaagaatgtggcggtctgatcgacatgagcaaacttccgatcggcgacaagacattgtccgctaaagaaatcatcgccaacgaaagtcaggaacgtatgggacttctgatcaaagaagaagccatcgaacatgtacgtaagatcgccgaacgcgaacgcgctccgatgtacgtagtaggtgaaacaaccggcgatcaccgcttctctttccagcaggcagacggcgtacgtccgttcgacctggccgttgagcagatgttcggttcatctccgaagacttatatgatcgacaagaccgtagaacgtcattatgaaatgccggaatacgaattgccgaaattacatgaatacctgaccaatgtgctgcaactcgaagccgtagcttgtaaggactggctgacaaataaggtagaccgttccgttacgggcaaagtagcccgccagcaatgccagggcgaacttcaattgccgttgagcgactgtggtgtcgtagcactcgactatcgtggtgaaaaaggtatcgccacttctatcggtcacgctccgcaagccgcactggctgatccggctgccggctctatcctttcggtatccgaagcactgacaaaccttgtatgggctccgatggcagaaggcatggacagcatttccctgtctgccaactggatgtggccgtgccgctcacaggaaggtgaagacgcccgtctttacactgccgtgaaagcattgagcgacttctgctgcgctctgcaaatcaatgttcctaccggaaaggactctttgtccatgacacagaaatatccgaacggcgagaaagtgatttctccgggaacagtgatcgtttctgccggcggtgaagtatccgacgtgaagaaagtcgtatctccggtattggtgaacaacgaaaagacaacactctaccatatcgatttcagctttgacgaactgaagctaggaggttccgcttttgcacagtctctgggtaaagttggcgacgacgtaccctgcgtacaggatgccgaatacttccgcgatgctttccttgccgtacaggaactggtgaacaagggactgatcctggcaggacacgatatttcagcaggtggtctgatcactacattactggaaatgtgcttcgccaacgttgaaggcggtatggaaatcagcctcgacaagatgaaggaacaagatatcatcaagattctgtttgcagaaaatccgggtatcgtgatccagatcagcgacaagcataaagaagaagtgaaaaagattctggaagatgcaggcgtaggattcgtgaaactgggtaaaccgaccgacgaacgtcatatcctggtatcgaagggcgacgctacttatcagttcggcgttgactatatgcgtgatgtatggtattcttcttcttacctgctcgaccgcaaacagtctatgaacggctgcgcaaagaaacgtttcgaaaactacaagatgcaaccggttgaattcgctttcatgcccggattcaaaggtaaactctctcagtatggtatcactccggaccgtcgtactccgagcggtgtccgcgctgccatcatccgcgagaaaggaacgaacggcgaacgcgaaatggcttactcactctatcttgccggcttcgacgtgaaagacgtgacgatgaccgacctgatcagcggacgcgaaacactggaagatgtaaacatgattgtttactgcggtggattctccaactccgacgtactcggttcggccaaaggatgggcaggaggtttcttgttcaaccctaaagccaaagaggcacttgacaagttctacgcacgtgaagatacgctttcactgggtatctgcaacggttgccagctgatgatggaactgggacttatcaatccggaacacgaaaagaaaggcaagatgctgcacaacgactcacataaattcgaatcgacttatgtaggcttgacaatcccgaccaaccgcagtgtaatgttcggctcattgagcggcagcaaactgggtatctgggtggctcacggagaaggtaaattctctctgccttacgatgaagaccaatacaacgtagtggcaaaatacagctacgatgaataccccggcaacccgaacggttccgattattctatcgcaggtcttgccagcgccgacggccgccatctggcaatgatgcctcacctcgaacgtgctatcttcccgtggcagaatggctgctatcctgctgaccgtaagaacagcgatcagattactccatggatagaagcatttgtcaacgcccgcaaatgggtagaagagaagactaaataa

SEQ ID NO: 52699 - protein, 1234 aa, Bacteroides thetaiotaomicron VPI-5482
MILFFRTPSKSVIAVESNHQLTPDESNKLCWLFGEAVTESEENLKGCFVGPRREMITPWSTNAVEITQNMGLEDILRIEEYFPVKDENADYDPMLQRMYKGLDQNVFTTNRQPEPIVSIEDLEAYNEKEGLALSKEEMDYLKKVENDLGRKLTDSEVFGFAQINSEHCRHKIFGGTFIIDGVEQESSLFQMIKKTTQENPNKIISAYKDNVAFAEGPVVEQFAPADHSKPDFFQVKDIKSVISLKAETHNFPTTVEPFNGASTGTGGEIRDRMGGGKGSWPIAGTAVYMTSYPRTDEGREWEDILPVRKWLYQTPEQILIKASNGASDFGNKFGQPLICGSVLTFEHTENNEVYGYDKVIMLAGGVGYGTQRDCLKGTPEAGNKVVVIGGDNYRIGLGGGSVSSVDTGRYSSGIELNAVQRANAEMQKRANNVVRALCEEDVNPVVSIHDHGSAGHVNCLSELVEECGGLIDMSKLPIGDKTLSAKEIIANESQERMGLLIKEEAIEHVRKIAERERAPMYVVGETTGDHRFSFQQADGVRPFDLAVEQMFGSSPKTYMIDKTVERHYEMPEYELPKLHEYLTNVLQLEAVACKDWLTNKVDRSVTGKVARQQCQGELQLPLSDCGVVALDYRGEKGIATSIGHAPQAALADPAAGSILSVSEALTNLVWAPMAEGMDSISLSANWMWPCRSQEGEDARLYTAVKALSDFCCALQINVPTGKDSLSMTQKYPNGEKVISPGTVIVSAGGEVSDVKKVVSPVLVNNEKTTLYHIDFSFDELKLGGSAFAQSLGKVGDDVPCVQDAEYFRDAFLAVQELVNKGLILAGHDISAGGLITTLLEMCFANVEGGMEISLDKMKEQDIIKILFAENPGIVIQISDKHKEEVKKILEDAGVGFVKLGKPTDERHILVSKGDATYQFGVDYMRDVWYSSSYLLDRKQSMNGCAKKRFENYKMQPVEFAFMPGFKGKLSQYGITPDRRTPSGVRAAIIREKGTNGEREMAYSLYLAGFDVKDVTMTDLISGRETLEDVNMIVYCGGFSNSDVLGSAKGWAGGFLFNPKAKEALDKFYAREDTLSLGICNGCQLMMELGLINPEHEKKGKMLHNDSHKFESTYVGLTIPTNRSVMFGSLSGSKLGIWVAHGEGKFSLPYDEDQYNVVAKYSYDEYPGNPNGSDYSIAGLASADGRHLAMMPHLERAIFPWQNGCYPADRKNSDQITPWIEAFVNARKWVEEKTK

SEQ ID NO: 52700 - DNA, 3891 bp, Coxiella burnetii RSA 493
  CDS (1)..(3891): transl_table=11
atgctctttttgcaaggttctcacgtttatactccctttcgacaccaacaaattcttttccgtctgaaacaaaagcaaaatacagttcgatccgttgaagcaatctatggttattttgtcgatggtgaaaaactcttaagccgcgctgagcaagaacgtctagaacgcttgttgccgaaagcttatttttccgattatccaaagtctgctgaaaatttttcggtctgggtgacacctcggttgggcacaatctcgccgtggtcatctaaagcaacggatatcgctcataattgcgaaattcccatcaaccgaattgaacgcgggatttactttattatcgacggcattgccaaacgcgataaaaaagccattgagaaagtcgcttctgaattatacgatcctttgacggaatcgcttttattcgatgcggaagatttagctcaattatttcaacatcccgcgcccaaaactttcaatgacattccagtattgggaaaaggagaagcggcattaaaagaagccgatcagaatttgggtctcgcgttaagcgatcctgacatccattatttattacgtgcttttcaccaattaaatcgtaatcccactgatattgaattaatgatgttcgctcaagtcaattctgagcattgccggcacaaaatttttaacgctcagtggaccatcgatggaaaagaaaaaaaagaatctttatttgacatgattcgctatacgtataaaacccatcctgaaaagatattagtggcgtacaaagacaatgccgccgttatagaaggctttaactgcgaatcctttttaattaatcccagcaaccattcgtatgaaaaacaaaagggacgcctccacaccgttctaaaagtagaaacgcacaaccatcccaccgccatcgcacctttcgcaggagctgctactggcagtggcggagaaattcgtgatgaagcggctactgggcggggcgctcaaagtttagcgggattagcgggtttttcggtctctcatctaaggattcctgattttttacagccgtgggaaaaagcgccttcaaaaaaatcccttcactcggactccaagccaaaaacattggcatcggcattggacattatgctccaaggaccgattggggcggcgtcgtttaataatgaatttggacgcccgactatttgtggttattttcgaacgttagaacatttatcttctaaaactttgaaatggggttatcacaaacccatcatgatagcggggggcatcggacacattcgcgagtctcaaattgaaaaacaatccttcacggaaggggcgttgttggtcgtgttgggggggccggcgatggctattggcttaggcggtggctctgcctcgtctcgtacgagtggagaatcaacagaggcattggattttgcctccgttcaacgggccaatcccgaaatgcagcgtcgagcccaagaggttatcaacgcctgcttatccctcggtgatgataatcccattttgagccttcacgacgtcggtgccggcggattatccaacgccttccccgaactggttcatgcgacggaatgcgggggtgaatttgaattgcgtcatattccgaatgcggaaccaggcatgagtcctctggaaatatggtgtaacgaagcccaagagcgttttgtattggccatcaagcctgaatctttgaaagtttttagtggtattgctgagcgggagcgctgtccttttgcggtagtagggcgggcgaaagaggaaaaaaaattaatcctcaacgatgcacattttcataatcgccctatcgatctcccgctttcttttttgtttgaggacatgccgccgatgaagcgtgaagataaacgtgttttttcgggagaaacggcgtggaatatttcgaaaattaattgggctgatgcggtcaaacgcgttttgcaatatccgtgcgtggcagacaaaagttttttgatcacgattggcgatcgaacggttggaggcatggtggcgcgcgatcaaatggtggggccttggcaaataccagttgctgatgttgctgtcactgctcacagttttaccggttacgaaggacaagcattggcgatgggagaacgttcgcccatcgcgattgttcatcctgctgcttctgctcgaatggcagtaggagaagcgatcactaatattgcagccgccccgattaaagctatttcagatattgttttatcggctaactggatggcggctcctgatcaaccgggggagggcgcgggtttatatgaggctgtgcaaaccgtggcaaaagaattatgccccgctttaggcatttgtattccggtagggaaagattctttgtctatgcagacctcattggaaaaagaaattgtcactgcgcccttatcattaattattaccgctaccgcgccggttagcgatgtccgccatgcgctaacaccacaactgcaaacagatgtcggtgagacgagactgttattaatcgacttagggcaaggcgctaatttccttggtggctcttgtttggcccagacgtacaatttattaggaaaacaaccaccggatgtcgatgatcctctattattgcgccgcttctttgaagcgatccaatcacttaaccaaaaaaatttattactcgcttatcacgatcgttccgatggcggattgttagcaacgctttgcgaaatggctttcaccgctcatgtgggtataactataaaattggattctttaggcgatgacgctttagccagtgtttttaatgaggaattgggagcggtgatacaggtgaaagaaaaaaatatcgatatcgtttttgaaattttaaaatcgcataaattacaagcccatagccatgttattggtgaattaaatcaattggatgaaattatttttaatttccggggtcaaacgctttaccaagaaactcgcacaaccttgcaacgatggtggagcgaaacgagctaccgtttgcaatcccttcgggacaatcccgagtgtgcaaaacaacaatatgatggtttgctagataaaaaagacactggattatttacaaaaataacttttgataataacgaagatattgcgcttccctatattaatagcggtaaacgaccgcgcgttgcaattttacgagaacaaggcacgaatggtcatcgagaaatggcagcagcgtttcatttagctggttttgaaagcgttgacgttcatatgagtgatttgctcaatgaacgcgttaatttaatggattttaagggagcggttgccggcgggggattttcttatggagatgttttaggcgccgggcgcggatgggcgcaagttattttaatgcatcccaaaatacgcgataaattcagtctattttttgaaagcaaagatcgttttgcgctaggggtttgtaacggctgccagctcttttctcatttaaaatcacttattcccggcgctctacattggccggctttccaacgaaacgtttcggaacaatttgaggcgcgattgtcgatggtagaaatcccgcaatcgccttctcttttttttcaagggatggcgggaagccaactacctgttgccgtagcgcatggggaaggtcgtgttgtttttgaaaaaaatacacaagaatttgaaaacgaaaaacttatcgctttgcgctatgtgaattacgccggccagcccaccgaaaattatcccgctaaccccaatggcagccccaaaggcattactgggcttactacccctgacgggcgcatcactattttaatgccgcatcccgaacgcgtttttcgcaccgtccaattttcttggcaccccaaacaatggtccgaaatgagtccctggatgcgaattttcaaaaacgcgcgaaagtgggtgggttga

SEQ ID NO: 52701 - protein, 1296 aa, Coxiella burnetii RSA 493
MLFLQGSHVYTPFRHQQILFRLKQKQNTVRSVEAIYGYFVDGEKLLSRAEQERLERLLPKAYFSDYPKSAENFSVWVTPRLGTISPWSSKATDIAHNCEIPINRIERGIYFIIDGIAKRDKKAIEKVASELYDPLTESLLFDAEDLAQLFQHPAPKTFNDIPVLGKGEAALKEADQNLGLALSDPDIHYLLRAFHQLNRNPTDIELMMFAQVNSEHCRHKIFNAQWTIDGKEKKESLFDMIRYTYKTHPEKILVAYKDNAAVIEGFNCESFLINPSNHSYEKQKGRLHTVLKVETHNHPTAIAPFAGAATGSGGEIRDEAATGRGAQSLAGLAGFSVSHLRIPDFLQPWEKAPSKKSLHSDSKPKTLASALDIMLQGPIGAASFNNEFGRPTICGYFRTLEHLSSKTLKWGYHKPIMIAGGIGHIRESQIEKQSFTEGALLVVLGGPAMAIGLGGGSASSRTSGESTEALDFASVQRANPEMQRRAQEVINACLSLGDDNPILSLHDVGAGGLSNAFPELVHATECGGEFELRHIPNAEPGMSPLEIWCNEAQERFVLAIKPESLKVFSGIAERERCPFAVVGRAKEEKKLILNDAHFHNRPIDLPLSFLFEDMPPMKREDKRVFSGETAWNISKINWADAVKRVLQYPCVADKSFLITIGDRTVGGMVARDQMVGPWQIPVADVAVTAHSFTGYEGQALAMGERSPIAIVHPAASARMAVGEAITNIAAAPIKAISDIVLSANWMAAPDQPGEGAGLYEAVQTVAKELCPALGICIPVGKDSLSMQTSLEKEIVTAPLSLIITATAPVSDVRHALTPQLQTDVGETRLLLIDLGQGANFLGGSCLAQTYNLLGKQPPDVDDPLLLRRFFEAIQSLNQKNLLLAYHDRSDGGLLATLCEMAFTAHVGITIKLDSLGDDALASVFNEELGAVIQVKEKNIDIVFEILKSHKLQAHSHVIGELNQLDEIIFNFRGQTLYQETRTTLQRWWSETSYRLQSLRDNPECAKQQYDGLLDKKDTGLFTKITFDNNEDIALPYINSGKRPRVAILREQGTNGHREMAAAFHLAGFESVDVHMSDLLNERVNLMDFKGAVAGGGFSYGDVLGAGRGWAQVILMHPKIRDKFSLFFESKDRFALGVCNGCQLFSHLKSLIPGALHWPAFQRNVSEQFEARLSMVEIPQSPSLFFQGMAGSQLPVAVAHGEGRVVFEKNTQEFENEKLIALRYVNYAGQPTENYPANPNGSPKGITGLTTPDGRITILMPHPERVFRTVQFSWHPKQWSEMSPWMRIFKNARKWVG

SEQ ID NO: 52702 - DNA, 3915 bp, Nitrosomonas europaea ATCC 19718
  CDS (1)..(3915): transl_table=11
atgctgcaattttgcgggcgcaatgcgctttccccctttcgtctggaacgcctgctccattcaattcaggcaatcgtaccgcaaatttccggcattactgccaattaccgctatttctgccaggttcagcgtgatttgacgcaggaagaaaccaatcgactgcggcagttactcgacgtcgatgaaacagaggcacagccctttccggatagcaagctgttactggtggtacctcgtcccggcacgatttctccgtggtcttccaaagcgaccgatattgctcattgctgcggcctgaacggaatcgaacggctggagcgcggtatttccttcgaattgcgctgccaggtaacgctgctgcccgcacaactatcccgaatcgaagcatgcattcatgaccgcatgactgaagtagtactgcactcactggctgaagccacccttctgtttcaccattcagaaccgggaatgttgaatgaaatcgatctgacaggccggggaatcgacgcgctgttgcaggccaaccgggaaatggggcttgcattgtcttctgacgaaatcgattacctgctggattattttacccgtatccagcgcgaccccaccgatgtcgaactgatgatgtttgcgcaagccaattcggaacattgccggcacaagattttcaatgccgactggataatcgatggcgtacaacaaccgcattcgctgtttggcatgattcggcatacccatcaaagccatccccagcacacgatcgttgcctattcggataatgccgcaattctggaaggggaaatcatcgagcggttttaccccggaaaaaatgatcaatatggctacgcaccggagctgacacactggctggccaaagtagaaacacataaccacccgacggcgatttccccctttccaggtgcagccaccggggtggggggtgaaatccgcgatgaaggcgcaaccggatccggtgcaaaacccaaggcgggactaaccggattcagtgtctccaatttgcggattcctgaagccatacagccctgggaaaccaacgcttatggcaagccaggacacattgcctccgcactcgacatcatgctgaccgcaccgattggcggcgcagctttcaataacgaattcggccgtccgaatctggcaggctattttcgtacttatgaagtggaaatcaacggccggatgcgcggctaccacaaacccatcatgctggctgggggtatcggccagatttccgcgttgcatactgcaaaagaacctttcccggaaggcacgctgttgattcatctgggagggccgggcatggccatcgggctgggtggtggtgccgcttccagcatggatgccggtacgaatgaagaagcgctcgatttcaactcggtgcagcgaggcaatgcagaaatacaacgtcgtgcacaggaggtgatcgatcgttgctggcaactggcgcgcagcgggcaacccaatccgattctggccattcacgacgtcggcgccggcgggctttccaacgccctgcccgagctggtacacgatgccgggcgggggggtcggtttgacctgcgcgcagttccttccgacgaacccggaatgtcacccatgcagatctggtgtaatgaagcacaggaacgttatgtactcgctatccggccggaatctctttccctgttccaggccatctgcgaacgtgagcgctgcccgttcgctgtggtcggcgaagcactggcagagctccagctgatcgtgacggatgaacgttcatccactcatccagccgatatgcccctgcccgtattgttaggcaaaccgcccaaaatggtgcgtgatgtcaaacgcatccaccctgaccctgctctgctggataaaaccggtatgcagctgcaggaagctgcccgccgtgttctgcgcctgccggccgtggcaaacaaatccttcttgattacgatcggtgatcgcagcgtaggtggccagactgcacgggaccagatggttggcccgtggcaggttccggtggccgatgtcgcggttaccaccatgggcttccagacgtattcgggtgaagcattcgcgctaggtgaacgtacgccgctggctgtgatcaatgcggctagttcagcacgcatggcggtaggagaagcggttaccaatctggctgctgccgcgattgccggcctgggaaccgtccggttatccgccaactggatggccgcagcaggacacccgggcgaggatgttgccctgtatgacgctgtgcatgccgtagcgatggaattgtgccccgcactgggaatcagcatcccggtaggcaaggattcattatcgatgaaaactgcctggcacgatgatcaacccaaagaagtcgttgcgccgctctccctgattatttcagcatttgccacagtatccgatgtgcgtaagacgctcacgccgcaactgcgtacggataaaggcgaaacgaagctgattctgatcgatctcggcaatggcaaaaaccgtctcggcggatcggcactggctcaggtttatacccagtcaggcgacgatacgcccgatctggaaagcccggaaaaactcaacgctttttttgatgcgattcaaacactcaatggcagcggattgctgctggcctaccatgatcgctctgatggcggcctgttcgtcacgttatgcgaaatggcctttgccggacattgcggtatcacccttgcactcgattcgctgatttcactgagcgctgagccggatgatgatcgggatggacaagtgctgtccaccttgttcaatgaggaactcggtgctgtcatccagatcgaagctcgacatcatgacgcagtgatgaccattctggcggatgcagggctggggcacatcagccatacgatcggcagtccgaaccggcaggatgacatcacgttgatggttgatggcggaatcgtattccaggaaaagtgtgtggcgttgcagcgtatctggtcggaaacgagcttccggatgcaaaaattgcgcgatcatcccgaatgtgcacagcaggagttcgatcagattctggacgtggacgatccggggttgcatgcacaactgacattttcactcactgaatctgttgcttctgcaccggctatacttgccagccgtcctgcagtcgcgattctgcgtgaacagggggtgaacggtcatgtggaaatggcagccgctttcgaccgcgccggattcgatgcagtagacgtgcacatgagtgatattttatccgggcgggtgaagttggccgaatataaaggattgattgccggagggggattctcttatggcgatgtgcttggtgcaggccggggatgggctcagtcgattttgttcaatgcacgggcacgagatgagtttgcaaccttttttgcgcgcacagatacctttgctttaggcgtatgcaatggttgccagatgatgagccacctgcaggcgatcattccgggaacggctcactggccccgttttggacgtaaccgctccgagcagtttgaagcacgttttgtcatggtcagaattggaaccagcccttcgttgtttttcgatggcatggcaggcagccgcttgccggtgaccgttgcccatggtgaagggcttgcggtattccgggatgccgagcaactgcttgcggcacacccctatgttgcgttgcagtttgtcgataatcggggcacgcttaccgaaacctacccgctgaatccgaacggttcacccgcaggcattaccggtatgacttcagccgatggccgggtgacgatcctgatgccacacccggaaagagttttccgtaccgtacagcattcgtggcatcctgacgattggccggaagattctccctggatgaaaatgttcagaaatgcccgtaaatgggtcgattga

SEQ ID NO: 52703 - protein, 1304 aa, Nitrosomonas europaea ATCC 19718
MLQFCGRNALSPFRLERLLHSIQAIVPQISGITANYRYFCQVQRDLTQEETNRLRQLLDVDETEAQPFPDSKLLLVVPRPGTISPWSSKATDIAHCCGLNGIERLERGISFELRCQVTLLPAQLSRIEACIHDRMTEVVLHSLAEATLLFHHSEPGMLNEIDLTGRGIDALLQANREMGLALSSDEIDYLLDYFTRIQRDPTDVELMMFAQANSEHCRHKIFNADWIIDGVQQPHSLFGMIRHTHQSHPQHTIVAYSDNAAILEGEIIERFYPGKNDQYGYAPELTHWLAKVETHNHPTAISPFPGAATGVGGEIRDEGATGSGAKPKAGLTGFSVSNLRIPEAIQPWETNAYGKPGHIASALDIMLTAPIGGAAFNNEFGRPNLAGYFRTYEVEINGRMRGYHKPIMLAGGIGQISALHTAKEPFPEGTLLIHLGGPGMAIGLGGGAASSMDAGTNEEALDFNSVQRGNAEIQRRAQEVIDRCWQLARSGQPNPILAIHDVGAGGLSNALPELVHDAGRGGRFDLRAVPSDEPGMSPMQIWCNEAQERYVLAIRPESLSLFQAICERERCPFAVVGEALAELQLIVTDERSSTHPADMPLPVLLGKPPKMVRDVKRIHPDPALLDKTGMQLQEAARRVLRLPAVANKSFLITIGDRSVGGQTARDQMVGPWQVPVADVAVTTMGFQTYSGEAFALGERTPLAVINAASSARMAVGEAVTNLAAAAIAGLGTVRLSANWMAAAGHPGEDVALYDAVHAVAMELCPALGISIPVGKDSLSMKTAWHDDQPKEVVAPLSLIISAFATVSDVRKTLTPQLRTDKGETKLILIDLGNGKNRLGGSALAQVYTQSGDDTPDLESPEKLNAFFDAIQTLNGSGLLLAYHDRSDGGLFVTLCEMAFAGHCGITLALDSLISLSAEPDDDRDGQVLSTLFNEELGAVIQIEARHHDAVMTILADAGLGHISHTIGSPNRQDDITLMVDGGIVFQEKCVALQRIWSETSFRMQKLRDHPECAQQEFDQILDVDDPGLHAQLTFSLTESVASAPAILASRPAVAILREQGVNGHVEMAAAFDRAGFDAVDVHMSDILSGRVKLAEYKGLIAGGGFSYGDVLGAGRGWAQSILFNARARDEFATFFARTDTFALGVCNGCQMMSHLQAIIPGTAHWPRFGRNRSEQFEARFVMVRIGTSPSLFFDGMAGSRLPVTVAHGEGLAVFRDAEQLLAAHPYVALQFVDNRGTLTETYPLNPNGSPAGITGMTSADGRVTILMPHPERVFRTVQHSWHPDDWPEDSPWMKMFRNARKWVD

SEQ ID NO: 52704 - DNA, 3030 bp, Rhodopirellula baltica SH 1
  CDS (1)..(3030): transl_table=11
atgccgctttggcaaatcgacattcatcctgctcccggtcaaatcgatcgactcggcgaacaaacggctcgtgaaattcatgaacttggattgggcgacgacctgctgatcgccgctgcacggggatacttgatccaagccgacatcgacgaagcttccgccaacgaaattgcgtcgacgttgctggccgattccatcacggaatcggtcgttgtcgggcaccctggcaacgacgcttcgctggtcgaagccgacctgtccgaggcccccgaatcgttgatggaattgctggccgagcgtggcatcgaatccgaaccgcacttggtgcacgtgatgcccaaacccggtgtgatggatccggtcgcggccagtacccaaggcgcactcgccgatcgcggtgtcgaaggcagcacagtcaaaacgttccgcaaattttggatcgcgggcaccgacgaagctcaactggaaacgatttgccgccgtgccctgtcaaacgattccatcgaagcgtttgtgatcgggccgttaacgatggatcgattggatgttggttcggcgggcgaatttgaattggtgcacgtgccgattcgcgaactcgatgacgccggattggaaaaactttccaaggaaggccagctgtatctgacgctggtcgagatgcaaacgatccgcgatcacttcgtcgaactgggacgtgacccaaccgacattgaactggaatcggtcgcccaaacctggtcggaacactgcagccacaaaacactggctggccggattcactacaagggtcctggtgccgatggcacacccggcggcgacgaacgccaatacaacaacatgctcaaagaaacgatctttgaagcaacccaaaccattcgtcgctccctgggcgatgacgattggtgcgtcagcgtgttcaaagacaacgcgggcatcgtgaccttcgacgaacaagaccacgtgtgtttcaaagtcgaaacgcacaaccacccgtcggcgttggaaccctacggcggagccaacacgggaatcggtggcgtgatccgggacccgatgggcaccggcatgggagccaaacccgtctgcaataccgacgtgttctgcttcgctccaccggacgtttcacctgaagaactgcccccgggcgtgctgcatccccgccgcgtcattcagggtgtcgtgtccggcgtgcgtgactacggcaaccgaatgggaatccccacggtcaacggtgcggtctactttgacgagcgttatctcggcaacccgctggtctactgcggcaacgtcggcatcattccggtcggcatggaagacaaggaagtcaaacccaacgacttgatcgtcgcggttggcggacgcaccggacgagacgggatccatggggcaacgttcagcagtgcggaactgaccagcgaatctgaatcgctgtccggcggtgccgttcaaatcggcaacgcaatcaccgaaaaaatggtgctcgacgtgctgatgcaggctcgcgatcgcgggctgtacaacgcggtcacggactgcggtgcaggcggcttcagcagtgcggttggcgaaatgggcgaagagctcggtgccgaagtttggctggacaaagccccgctgaaatacgatggcctgacttacaccgagatctggatttccgaagctcaagaacgcatggtcttggccgttccccaagaacgctgggacgaactgcgtgaactgtgcgaaagcgaaggcgtcgaggcagccgccatcggccgcttcgttcccaccggtcgactgcaattgaacttccatggccaaacggtcggcgacgtcgccatgtcgttcttgcacgacggacgtccgcccgtgattcgcgatgcgatctacgaaccaccaaaagccaaaccattatcaatcggcgaccgcgatgccgcagccaactcggaaacgctgctcaagatcctgggcagctacaacgtcgccagcaagcactgggtgatccgccaatacgatcacgaagtccaagcgggcagcgtcgtcaaacccttggtcggcccacaatgcgatggccccggcgacgccgccgtcgtgcgtcccaaactgaacagccgtcgcgggttggtgatcagttgcggcatgaaccctcactacggcgacttcgacacgtatcacatggccgcttcggcgatcgacgaagccatgcggaacgcagtcgcggtcggtgctgatccttccaagattgccatcctcgacaacttctgctggggatacaccgatcgagccgaaacgctcgggtcgctcgtccgggccgcgatcgcttgccaagacctcgcggtcactttgggcacgccgttcgtcagcggcaaagacagcttgaacaacgagttcagctacttcgacgacaagaacgaaaagcaaaccatcgcgatcccgcccagcctgttgatcagtgcgatgggccaaatcgacgatgtcagcaaatcaatcacgatggacgccaaggaagccggcaacgtgatcttcctggttggcgaaacgcatcgtgaactcggcggctcgcactacggcttggtcgaaaacgaacccggcggtgcggtccctgaggtcgacgcaaagttggcgaagaaaacgtttgcgaccgtccaccaagcgatccagtcacgactggtccgctcgtgccacgacctgtgcgaaggcggcctggccgtcgctgcggtcgaaatggcattggccggcggattgggcatgaacctcgacctcgcaaccgtttctcgcgagcaaccctccaacgatggcgtgctcaccgcagcagcactgtcagccacggaagttctattcagcgaatcaaacactcgattcctgatcgaatgcgctcccgaatcagccgaagctctgtccaagattttcgcggactccgggatcagcctgactcgtttgggcgaggtcaccgattcgggccaattcacagtccgcgacggtgacgccgtggtgctggaaactgacattgcgaccgcaaaatcggcctggcaagcacctttggattggtga

SEQ ID NO: 52705 - protein, 1009 aa, Rhodopirellula baltica SH 1
MPLWQIDIHPAPGQIDRLGEQTAREIHELGLGDDLLIAAARGYLIQADIDEASANEIASTLLADSITESVVVGHPGNDASLVEADLSEAPESLMELLAERGIESEPHLVHVMPKPGVMDPVAASTQGALADRGVEGSTVKTFRKFWIAGTDEAQLETICRRALSNDSIEAFVIGPLTMDRLDVGSAGEFELVHVPIRELDDAGLEKLSKEGQLYLTLVEMQTIRDHFVELGRDPTDIELESVAQTWSEHCSHKTLAGRIHYKGPGADGTPGGDERQYNNMLKETIFEATQTIRRSLGDDDWCVSVFKDNAGIVTFDEQDHVCFKVETHNHPSALEPYGGANTGIGGVIRDPMGTGMGAKPVCNTDVFCFAPPDVSPEELPPGVLHPRRVIQGVVSGVRDYGNRMGIPTVNGAVYFDERYLGNPLVYCGNVGIIPVGMEDKEVKPNDLIVAVGGRTGRDGIHGATFSSAELTSESESLSGGAVQIGNAITEKMVLDVLMQARDRGLYNAVTDCGAGGFSSAVGEMGEELGAEVWLDKAPLKYDGLTYTEIWISEAQERMVLAVPQERWDELRELCESEGVEAAAIGRFVPTGRLQLNFHGQTVGDVAMSFLHDGRPPVIRDAIYEPPKAKPLSIGDRDAAANSETLLKILGSYNVASKHWVIRQYDHEVQAGSVVKPLVGPQCDGPGDAAVVRPKLNSRRGLVISCGMNPHYGDFDTYHMAASAIDEAMRNAVAVGADPSKIAILDNFCWGYTDRAETLGSLVRAAIACQDLAVTLGTPFVSGKDSLNNEFSYFDDKNEKQTIAIPPSLLISAMGQIDDVSKSITMDAKEAGNVIFLVGETHRELGGSHYGLVENEPGGAVPEVDAKLAKKTFATVHQAIQSRLVRSCHDLCEGGLAVAAVEMALAGGLGMNLDLATVSREQPSNDGVLTAAALSATEVLFSESNTRFLIECAPESAEALSKIFADSGISLTRLGEVTDSGQFTVRDGDAVVLETDIATAKSAWQAPLDW

SEQ ID NO: 52706 - DNA, 3891 bp, Wigglesworthia glossinidia endosymbiont of Glossina brevipalpis
  CDS (1)..(3891): transl_table=11
atgaaaatattaacaggaaaaaaaacaaattctgttctttatttagaaaaaataataattagttttaaaaaattaaaaatttatttaaattttataaattgcgaatatatatattttatatctcataaaaaaaatttttttaaaaatacgtttgtcaaaattaataaactcctaaaatctagaaactttgttttaccaaataaagaaataagttattttataataatacctaggcttggaactttatcatcttggtctacaaaaataataagtattataaaaaattgtggattaaatgatataaataaaattgaaagaggaataatactttattatcattctaaaaataatatttcagaagaattaaaaaattttttaaacaaattaaatgataaaaattcaaaatttatttgcaaagatataaaagaagcgataaaaatttttaaaaatgaagaaacaccaaacaaattaaaaaaaataaaaatattagaattaggaaaatatgctttagaaaaagcaaatattgatttaaacttatcattaaataaaacagaaattgaatatttattcaatgtatttaaaaatctaaaaagaaatcctagtgatgcagaattatatatattttctcaagctaattctgaacattgtaggcataaaatatttaatgcaaaatggatcatagataataaaattaaaaaatattctttgttatcaatgataaaaaaaactacaaaaaaaactccaaaaaatgttatatctgcttattttgataattcagctataatttcaggaaactgttatggtaaatttttttcaaatccatatactaaaaaatataatttttaccaaaaaaaaaataatattttaattaaagtagaaactcataattatccaactgctttatcaccattttcagggtcttctacaggagctggtggggatataagggatcaaggatctactgggtgtggatcaattccaaaagttggattgtctggtttttctgtatctaatctttttattccgaaatatcatcaaccatgggaagagagttttggttacccaaaaaatatttgcacagcattaaaaataattttagaagctcctttaggagcatcttcatttaacaacgaatttggaagaccaagtctacttgggtattttagaacatatgaaaaaaaaattaatactaaaaatagttttgaaataagaggttatcataaaccaattatgctatctggaggttttggatcaataagtgaaatacatgtaaataaaaaaaatataaatccagaagataagataatagtattaggaaatttaggaatgaacgttggaataggaggagcatcttcttcttctgttaaaaattatttaaacgtagaatctccttttattcagtccggaaatccagaaatacaaagaagatgtcaagaagtcattaatagatgttgcgaattagaagaagaaaatccaattttatttatacatgatgtcggagcaggtggcttatctaattcaatattagaaatattacaccatggaaaatgtggaggtgttgtatttttaagagaaatattaattggaaataataaaatgagcccattagaaatattatgcaacgaatctcaagaacgttatgttttaattttatctaaatctaaaataaaaatttttaattctatatgtaaaagggaaaacgctcaatattatattgtaggaaaaattacaaattctttaaatttgaaaatttatgatagttattttaaaaataaagttgtagatttacctgtaaatattttttttaataaatctcaaataaaaaaaataagaaaaaaatctaaaaatgtttgccatataaaaaaaattccaataaataaaaaaaatattaatttaactgacgcaattaatagagtgttacatcttccgtctgtatcagataagaattttttaattactataggagatcgtagtattactgggtcagtggtaaaagatcaaatggtaggaccttggcaaataccagtatcagattgtgcagttactacttcaagctttgatagctactttggagaagctatatctataggggaaagatctccagcttcattaatagattttaacgcatcttctagattatctttaggagaagctattactaatatttcaagcatgtatgttaattcattaaaaaacataaagctttcagcaaattggatgattgattctagcaataatcatgatacttttaaattatacaaagcagtagaaaatttaggcaaaaaaacatgccctgaactggatctaagtattgtagttggaaaagattctatgtttatgaaaacagaatggttagaaaaaaaaaataaaatttctattatttcacctccatcattaataataacagcatgttctccgatagaagacgttagattaaatgtaactcctcaattaaaatctgatatagataatattattctttttattgatcttggagattttaatcaatcattgggtggaacagctttatctcaagtataccaacaaattggagataatgtagctgatttaagagatacaaaaaaatttaagatgtttttttatatttttcaaaaactaattaagtcaaataaaataattgcgtatcatgatagatcagatggaggtttattagttactattttagaaatggcttttgcaggtcattgttctataaatataaatttaagtaaactaggaaatgatataataaaaatattatttaatgaagaattaggagtagttatacaaataaaaaaaaatgattataataatgtatttagcatttttaaaagtttcggtttaaatgattatatatataatataggatattcttatataggagatcagttttctttaacttataaaaacaaaattttatacgaaaacagcataactactttgcgtttatggtggtcagaaactacctggaacattcaaagattgagagacgatccaaaaagcgctaaccaagaacatgaggtcagaggagattttaataatccaggccttgatacttgtttaagctttgattatgaaaacgacacttcttttcctttttttataactggaaaatacccaaaagttgcaattttaagagaacaaggaacaaatgcatatttggagatggctcatgccttttacaaagccggatttcaaccaatagatattcatatgaatgatttgcgttatagtaaaaataatatattaaaagaattctcagttttagttgcatgcggtggtttttcatatggagacgtattgaacggaggttatggatgggctaaaacaattttattaaataataaattaagagatatgttcgaatcattttttaatgataaaaatactttatcatttggagtatgcaatggatgtcaaatgatgtcatatttaagagaaataattccaggatcgaaattttggcctaaattcgtaaaaaataaatcaaatagatttgaatctagaattgtattagtagaagttatgaatagcccatctttattatttcaaggaatgaaaggatcttatattccaatatctgtcgcccatagcttaggaagagtagaatttaaaaaacattttcacttaaataaattagaaaactcaaaactagtagttttaaaatatgtagataattatcgcatgactacagaagtatatccatataatccaaatggatctaaaaacggcattactgcaattactaattctgacggtagaataacaatatctatgcctcatccagaaagacatgttagaatggtaaattgttcttggatatctaattattctagtgaatatagtccatggattaaggtttttaaaaacgctagaaaacaaataggataa

SEQ ID NO: 52707 - protein, 1296 aa, Wigglesworthia glossinidia endosymbiont of Glossina brevipalpis
MKILTGKKTNSVLYLEKIIISFKKLKIYLNFINCEYIYFISHKKNFFKNTFVKINKLLKSRNFVLPNKEISYFIIIPRLGTLSSWSTKIISIIKNCGLNDINKIERGIILYYHSKNNISEELKNFLNKLNDKNSKFICKDIKEAIKIFKNEETPNKLKKIKILELGKYALEKANIDLNLSLNKTEIEYLFNVFKNLKRNPSDAELYIFSQANSEHCRHKIFNAKWIIDNKIKKYSLLSMIKKTTKKTPKNVISAYFDNSAIISGNCYGKFFSNPYTKKYNFYQKKNNILIKVETHNYPTALSPFSGSSTGAGGDIRDQGSTGCGSIPKVGLSGFSVSNLFIPKYHQPWEESFGYPKNICTALKIILEAPLGASSFNNEFGRPSLLGYFRTYEKKINTKNSFEIRGYHKPIMLSGGFGSISEIHVNKKNINPEDKIIVLGNLGMNVGIGGASSSSVKNYLNVESPFIQSGNPEIQRRCQEVINRCCELEEENPILFIHDVGAGGLSNSILEILHHGKCGGVVFLREILIGNNKMSPLEILCNESQERYVLILSKSKIKIFNSICKRENAQYYIVGKITNSLNLKIYDSYFKNKVVDLPVNIFFNKSQIKKIRKKSKNVCHIKKIPINKKNINLTDAINRVLHLPSVSDKNFLITIGDRSITGSVVKDQMVGPWQIPVSDCAVTTSSFDSYFGEAISIGERSPASLIDFNASSRLSLGEAITNISSMYVNSLKNIKLSANWMIDSSNNHDTFKLYKAVENLGKKTCPELDLSIVVGKDSMFMKTEWLEKKNKISIISPPSLIITACSPIEDVRLNVTPQLKSDIDNIILFIDLGDFNQSLGGTALSQVYQQIGDNVADLRDTKKFKMFFYIFQKLIKSNKIIAYHDRSDGGLLVTILEMAFAGHCSININLSKLGNDIIKILFNEELGVVIQIKKNDYNNVFSIFKSFGLNDYIYNIGYSYIGDQFSLTYKNKILYENSITTLRLWWSETTWNIQRLRDDPKSANQEHEVRGDFNNPGLDTCLSFDYENDTSFPFFITGKYPKVAILREQGTNAYLEMAHAFYKAGFQPIDIHMNDLRYSKNNILKEFSVLVACGGFSYGDVLNGGYGWAKTILLNNKLRDMFESFFNDKNTLSFGVCNGCQMMSYLREIIPGSKFWPKFVKNKSNRFESRIVLVEVMNSPSLLFQGMKGSYIPISVAHSLGRVEFKKHFHLNKLENSKLVVLKYVDNYRMTTEVYPYNPNGSKNGITAITNSDGRITISMPHPERHVRMVNCSWISNYSSEYSPWIKVFKNARKQIG

SEQ ID NO: 52708 - DNA, 2406 bp, Prochlorococcus marinus subsp. marinus str. CCMP1375
  CDS (1)..(2406): transl_table=11
atgattgatatttcatttaatagattgattaaatctaaagattatttagttgattataatgttgaattagctttaaaaaaggaaggtttaacgaaggctgattatattgaaatttgtaatcgattaaaaagatctcctaatagaactgaattaggaatgtttggagttatgtggtctgagcattgttgttaccgtaattcacgttctttattgtccaattttccaacaacaggaaaaaatattttagttggacctggtgaaaatgctggcgttgttgatttaggtgaaggacaaagattagcttttaagatagaaagtcataatcatccttctgctattgaaccttttcaaggagcagctactggtgtaggtggcatattgcgagacatttttactatgggagcacgtcctattgctttactgaattcattaagatttggtccattggatactcctataaatgtaggtttattggaaggtgttgtttcaggaatagcccattatggaaattgtgttggtgttcctactgttgggggtgaagtagcttttgataaaagttattcaggaaatcctttagtaaatgcaatggctttaggcattatggaaactaaggagattgtttgttcaggtgcaaaaggaatagattttcctgttatttatgtcggtagcactacaggtagagatggtatgggaggagctagttttgcaagttcggagcttactcaagcttctatagatgatagacctgctgtacaagttggcgacccttttctagaaaagggtcttattgaaggatgcttagaagcctttaaaacaggttatgttgtcgcagctcaagatatgggagcggcaggtcttacttgcagttgttctgaaatggctgcaaaaggtggtgttggtattgaactagatctggatttagttccagcaagagaaaaaaatatgacagcatacgaatttttgctttctgaatcacaagaacgcatgctttttgttgttgaaccaggtaaagaagagcttataatgaataaatttagaaaatggggattacaagctaaggtggtagggaaagtattagaagaaaatattgttcgtgttattcatgaaaaacaaattgttgttaatttacctgcagattctttagctgaagatactcctgtgaataaacatgaattgcttgaagagcctcctggcttcattaaagatcattggaaatgggatgaaacatctcttcctaaagtttcaattaaaggagttcattttaaggaaaataacactattttagattggaatcaaattatcttgagattattagatgatcccacaattgcatcaaaaagatggatttataatcaatatgattatcaagtacaaaataatacaattattgctcctggtataggagatgcagctctgattcgattaagagaaatagagaatcaaaatcaaaattctaatcgtggaattgctgcagtagttgattgccctaatagatgggttgctttagatccagaacgtggtgctattgctgcagtagcagaggcatcccgaaatattagttgtgtaggagctaaacctcttgctgttacagataatttaaatttttcttcacctgaagatccaattgggtattggcaattagcaaaggcatgtaagggtttatcaaaagcttgtgtagttttagaaacacctgttacaggaggtaatgtctctctatataacgaaactgcattgccaaatggattaaagcaaccgattcaaccaacaccagttgttggaatgattggtttaatccaagatatcaattctgcgacacgacaaggttggaaagatcaaggagatcaaatttatttattaggtacatcgatagacccctctatactaaataatcaaaatatttctttagctgcaacctcttacttagaaaatatttatggcttaaaaacaggaagacctcctttaattgacttagagtttgaaaaattagtgcaattatttttaagagaatcaattgctaataatttaataaaatctgctcatgatattagtgatggtggcctcgttattggacttgcagaatcatgtattagttctggtttaggaatcgaatgcaatttgccggaaattgataatcgcttagataaacttttgtttgctgaaggaggctcgagagttttagtaagtgtttctccaaataacattcacaatattaaaaatagtttgaataattttaatattgctaactctgaacaaatttcttttaattatttaggaacagttactgataataaatattttcagattaacataaatcagacaaaaatcatagatttatcagttaatgaaattacaaataaatttgaaagatctataccaagaagaataaactctactatagtgagctaa

SEQ ID NO: 52709 - protein, 801 aa, Prochlorococcus marinus subsp. marinus str. CCMP1375
MIDISFNRLIKSKDYLVDYNVELALKKEGLTKADYIEICNRLKRSPNRTELGMFGVMWSEHCCYRNSRSLLSNFPTTGKNILVGPGENAGVVDLGEGQRLAFKIESHNHPSAIEPFQGAATGVGGILRDIFTMGARPIALLNSLRFGPLDTPINVGLLEGVVSGIAHYGNCVGVPTVGGEVAFDKSYSGNPLVNAMALGIMETKEIVCSGAKGIDFPVIYVGSTTGRDGMGGASFASSELTQASIDDRPAVQVGDPFLEKGLIEGCLEAFKTGYVVAAQDMGAAGLTCSCSEMAAKGGVGIELDLDLVPAREKNMTAYEFLLSESQERMLFVVEPGKEELIMNKFRKWGLQAKVVGKVLEENIVRVIHEKQIVVNLPADSLAEDTPVNKHELLEEPPGFIKDHWKWDETSLPKVSIKGVHFKENNTILDWNQIILRLLDDPTIASKRWIYNQYDYQVQNNTIIAPGIGDAALIRLREIENQNQNSNRGIAAVVDCPNRWVALDPERGAIAAVAEASRNISCVGAKPLAVTDNLNFSSPEDPIGYWQLAKACKGLSKACVVLETPVTGGNVSLYNETALPNGLKQPIQPTPVVGMIGLIQDINSATRQGWKDQGDQIYLLGTSIDPSILNNQNISLAATSYLENIYGLKTGRPPLIDLEFEKLVQLFLRESIANNLIKSAHDISDGGLVIGLAESCISSGLGIECNLPEIDNRLDKLLFAEGGSRVLVSVSPNNIHNIKNSLNNFNIANSEQISFNYLGTVTDNKYFQININQTKIIDLSVNEITNKFERSIPRRINSTIVS

SEQ ID NO: 52710 - DNA, 4047 bp, Bordetella pertussis Tohama I
  CDS (1)..(4047): transl_table=11
gtgtcccttgtccagcatctgcccggttcctccgtcctttccgctttccgccgcgagcgcctgctggcgcaactgaagaaggccggcctgccggttgccgatatctccgcgcgctacgagcatttcatccataccgacagcgccttgccggccgaacagcaggcgcgtctggcgcaactgctggactacggcacgccggccgccgagacgccggccaagagcctggagctgctggtcattccgcgcctggggacgatgtcgccgtgggccagcaaggcgaccgatatcgcgcacaattgtggcctggacgccgtgcgccgcatcgagcgcggcgtgcgttacgcgctgacgcccgaacgcggcctgctgggcgccaagtcgttcgacgccgacatgctggcgcgcgcggccgactgcctgcacgaccgcatgaccgagaccgtggtcgacggcgcgttcgacggccaggcgctgttcgagacgctggccggcaagccgatgcgcaccgtggcggtgcaggccgagggccgcgccgcgctggagcaggccaacgtggcgctggggctggcgctgtccgaagacgaaatcgattacctggcgcagtcgttcggcgacctggggcgcgatccgaccgacgtcgagctgatgatgttcgcgcaggccaacagcgagcactgccgccacaagatcttcaacgcgcagtgggtcatcgacgggcaggagcagtccaacaccctgttcggcatgatccgcgccacccacaaggcccagccggccggcaccgtggtggcctattcggacaacgccgccatcatggaaggcggtccggcgcagcgtttccaggccggcgtgccgggcgtggccggcgagggcgcgcaggccgcgcgctacgtgcgccgcgacaccaccgtgcacaccctgatgaaggtcgagacgcacaaccacccgaccgcgatcgcgccgtttccgggcgcggccaccggcgccggcggcgaaatccgcgacgagggcgccacgggccgcggctccaagcccaaggccggcctgaccggctttaccgtttcgcacctgcgcttcgacgatgcgctgcaaccgtgggagaacgaccaccacggcctgcccgagcgcatcgcctcgccgctgtccatcatgatcgatggcccgatcggcggcgccgccttcaacaacgagttcggccggtccaacctgctgggctatttccgcgccttcgaacagaccgcgggcggcacgcgctggggctaccacaagcccatcatgatcgccggcggcctgggcagcatcgacgccggcctcacgcacaaggaagtgattccgccgggcgcgctgctgatccagctgggcggcccggggctgcgcatcggcatgggcggcggcgccgcctccagcatcagcatgggcagcaattcggccgaactggacttcgattcggtgcagcgcggcaaccccgagctggagcgccgcgcgcaggaggtcatcgaccgctgctggcagcagggcgagcgcaaccccatcgtcgcgatccacgacgtgggcgcgggcggcctgtccaacgcgtttcccgaactggtcaatgacgccggccgcggcgcgatcttcgacctcaagcgcgtgccgctggaagagtcgggcatgtcgccggccgagatctggagcaacgagtcgcaggagcgctacgtgctgtcgatcctgccgcaggacctggagcgcttcgacgccatcgcgcggcgcgagcgctgcccgtacgcggtggtcggcgtggcgaccgaagagcgccagctgcgcgtggtcgacggcgagggcctgcccgggctggacacgatccgcgcgcaaggcgagaacgaagtgcgtccggtggacgtgcccatcgacgtgatcctgggcaagccgccgcgcatgacgcgcgacgtgcagcgcctgcccggcgtgagcgagccgctcgacctggccggcctggatctcaccgaggcggcctatcgcgtgctgcgccatccgacggtggcgaacaagtcgttcctgatcaccattggcgatcgcaccgtgggcgggctgtccagccgcgaccagatggtcggtccgtggcaggtgccggtggccgattgcgccgtgacgctggccgatttcgaaggcacgcgcggcgaagccatgtccatgggcgagcgcacgccgctggcgatgctggacgcgcccgcttccggccgcatggcggtggccgaggcgctgaccaacctggcggccgccgacgtggcgcgcctcgaagacatcaagctgtcggccaactggatggccgcctgcggcgtgcccggccaggatgccgcgctgtacgacaccgtgtcggcggtcagcgagctgtgccagtcggtcggactgtcgattccggtgggcaaggactcgctgtcgatgaagacgtcctgggacgaggtgggcgagcagcgccaggtggtggcgccggtctcgctcgtcgtgacggcgttcgcgccggtgggcgatgtgcgcgccagcctgaccccgcagctgcgcaccgatgccggcgatacggtgctgatcctgatcgacctgggccgcggccggcaccgcatggccggctccatcctggcgcaagcctataaccaggtcggcgagacggtgcccgatatcgacgcgccgcaggatctgcgcgccttcttcgtgacgatccgcacgctggccgaggccggcaccatcctggcctaccacgaccgctcggacggcggcctgttcgccacgctggccgaaatggcgttcgccgggcgcaccggcgtgtcggtcaacctggacatgctcaccttcgatccgcagtcggccgactggggcgattacaagatccgtcccgaacaggtggcggtgcagcgcgaggagctcaccctcaaggcgctgttctcggaagaggccggcgcggtcatccaggtgccggcttcgcagcgcgacgcggtgatgcaagtgctgcgcggcgccggcctgtccgcgcattcgcatgtcatcggcggcctgaacggcgccgacgaggtcgagttctaccgcgacggccgcaaggtctggagccagccgcgcgccgacctgggccgcgcctggagcgaggtcagctaccgcatcatggcgcggcgcgacaacccggcctgcgcgcaggccgagctggacgtctggaacgacgccaaggatccgggcctggccccgcgcgtggcgttcgatccgcaggaagacgtggcggccccgttcatcggcaccggcaagcggccgcgcgtggcgattctgcgcgagcagggctgcaacagccaggtcgagatgggctgggcgttcgacacggccggcttcgaggccatcgacgtgcacatgaccgacctcctgtcgggccgcatcgacctggccggcatgcagggcctggtggcggtgggcggtttcagctatggcgacgtactgggcgccggcgagggttgggcccgcaccattcgctacaacgacaaactgtcggatcagttcgcggcctactttgcccgccccgacacctttgcgctgggcgtgtgcaacggctgccagatgatggcggcgctggcgcccatgatccccggcgccgagcactggccgcgctttacccgcaaccagtccgagaagtacgaggcgcgcctgtcgctggtcgaagtcacggcttcgccgtctatcttcttcgccggcatggagggcgcgcgcattccggtggccgtggcgcacggcgaaggctacgccgacttctcccagcagggcgatgcggcgcgcgcgttgatggcggtccgctacatcgacaaccatggcgcggccaccgaaacctatccgttcaaccccaacggcagccccggcggcctgaccgcggtgacgacggccgacggccgcttcacggtcatgatgccgcaccccgagcgcgtgacccgcaacgtcatgatgtcgtgggcgccggcgcaatggggcgagcgcgatgccggcggcgcgttcagtccctggatgcgcatcttccgtaacgcgcgcgtctggctgaagtaa

SEQ ID NO: 52711 - protein, 1348 aa, Bordetella pertussis Tohama I
MSLVQHLPGSSVLSAFRRERLLAQLKKAGLPVADISARYEHFIHTDSALPAEQQARLAQLLDYGTPAAETPAKSLELLVIPRLGTMSPWASKATDIAHNCGLDAVRRIERGVRYALTPERGLLGAKSFDADMLARAADCLHDRMTETVVDGAFDGQALFETLAGKPMRTVAVQAEGRAALEQANVALGLALSEDEIDYLAQSFGDLGRDPTDVELMMFAQANSEHCRHKIFNAQWVIDGQEQSNTLFGMIRATHKAQPAGTVVAYSDNAAIMEGGPAQRFQAGVPGVAGEGAQAARYVRRDTTVHTLMKVETHNHPTAIAPFPGAATGAGGEIRDEGATGRGSKPKAGLTGFTVSHLRFDDALQPWENDHHGLPERIASPLSIMIDGPIGGAAFNNEFGRSNLLGYFRAFEQTAGGTRWGYHKPIMIAGGLGSIDAGLTHKEVIPPGALLIQLGGPGLRIGMGGGAASSISMGSNSAELDFDSVQRGNPELERRAQEVIDRCWQQGERNPIVAIHDVGAGGLSNAFPELVNDAGRGAIFDLKRVPLEESGMSPAEIWSNESQERYVLSILPQDLERFDAIARRERCPYAVVGVATEERQLRVVDGEGLPGLDTIRAQGENEVRPVDVPIDVILGKPPRMTRDVQRLPGVSEPLDLAGLDLTEAAYRVLRHPTVANKSFLITIGDRTVGGLSSRDQMVGPWQVPVADCAVTLADFEGTRGEAMSMGERTPLAMLDAPASGRMAVAEALTNLAAADVARLEDIKLSANWMAACGVPGQDAALYDTVSAVSELCQSVGLSIPVGKDSLSMKTSWDEVGEQRQVVAPVSLVVTAFAPVGDVRASLTPQLRTDAGDTVLILIDLGRGRHRMAGSILAQAYNQVGETVPDIDAPQDLRAFFVTIRTLAEAGTILAYHDRSDGGLFATLAEMAFAGRTGVSVNLDMLTFDPQSADWGDYKIRPEQVAVQREELTLKALFSEEAGAVIQVPASQRDAVMQVLRGAGLSAHSHVIGGLNGADEVEFYRDGRKVWSQPRADLGRAWSEVSYRIMARRDNPACAQAELDVWNDAKDPGLAPRVAFDPQEDVAAPFIGTGKRPRVAILREQGCNSQVEMGWAFDTAGFEAIDVHMTDLLSGRIDLAGMQGLVAVGGFSYGDVLGAGEGWARTIRYNDKLSDQFAAYFARPDTFALGVCNGCQMMAALAPMIPGAEHWPRFTRNQSEKYEARLSLVEVTASPSIFFAGMEGARIPVAVAHGEGYADFSQQGDAARALMAVRYIDNHGAATETYPFNPNGSPGGLTAVTTADGRFTVMMPHPERVTRNVMMSWAPAQWGERDAGGAFSPWMRIFRNARVWLK

SEQ ID NO: 52712 - DNA, 4047 bp, Bordetella parapertussis 12822
  CDS (1)..(4047): transl_table=11
gtgtcccttgtccagcatctgcccggttcctccgtcctttccgctttccgtcgcgagcgcctgctggcgcaactgaagaaggccggcctgccggttgccgatatctccgcgcgctacgagcatttcatccataccgacagcgccttgccggccgagcagcaggcgcgtctggcgcaactgctggactacggcacgccggccgccgaggcgccggccaagagcctggagctgctggtcattccgcgcctggggacgatgtcgccgtgggccagcaaggcgaccgatatcgcgcacaactgcggcctggacgccgtgcgccgcatcgagcgcggcgtgcgctacgcgctgacgcccgagcgcggcctgctgggcgccaagtcgttcgacgccggcatgctggcccgcgcggcggcctgcctgcacgaccgcatgaccgagaccgtggtcgacggcaccttcgacggccaggcgctgttcgagacgctggccggcaagccgatgcgcagcgtggcggtgcaggccgagggccgcgccgcgctggagcaggccaacgtggcgctggggctggcgctgtccgaagacgaaatcgattacctggcgcagtcgttcggcgacctggggcgcgatccgaccgacgtcgagctgatgatgttcgcgcaggccaacagcgagcactgccgccacaagatcttcaacgcgcagtgggtcatcgacgggcaggcgcagtccaacaccctgttcggcatgatccgcgccacccacaaggcccagccggccggcaccgtggtggcctactcggacaacgccgccatcatggaaggcggcccggcgcagcgtttccaggccggcgtgccgggcgtcgcgggcgagggcgcgcaggccgcgcgctacgtgcgccgcgacaccaccgtgcacaccctgatgaaggtcgagacgcacaaccacccgaccgcgatcgcgccgtttccgggcgcggccaccggcgccggcggcgagatccgcgacgagggcgccacgggccgcggctccaagcccaaggccggcctgaccggcttcaccgtttcgcacctgcgcttcgacgatgcgctgcaaccgtgggaggacgaccaccacggcctgcccgagcgcatcgcctcgccgctgtccatcatgatcgacggccccatcggcggtgccgccttcaacaacgagttcggccggcccaacctgctgggctatttccgcgccttcgaacagaccgcgggcggcacgcgctggggttaccacaagcccatcatgatcgccggcggcctgggcagcatcgacgccggcctcacgcacaaggaagtgattccgccgggcgcgctgctgatccagctgggcggcccggggctgcgcatcggcatgggcggcggcgccgcctccagcatcagcatgggcagcaattcggccgaactggacttcgattcggtgcagcgcggcaaccccgagctggagcgccgcgcgcaggaggtcatcgaccgctgctggcagcagggcgagcacaaccccatcgtcgcgatccacgacgtgggcgcgggcggcctgtccaacgcgtttcccgaactggtcaatgacgccggccgcggcgcgatcttcgacctcaggcgcgtgccgctggaagagtcgggcatgtcgccggccgagatctggagtaacgagtcgcaagagcgctacgtgttgtcgatcctgccgcaggacctggagcgcttcgacgccatcgcgcggcgcgagcgctgcccgtacgcggtggtcggcgtggcgaccgaagagcgccagctgcgcgtggtcgacggcgagggcctgcccgggctggacacgatccgcgcgcagggcgagaacgaagtgcgtccggtggacgtgcccatcgacgtgatcctgggcaagccgccgcgcatgacgcgcgacgtgcagcgcctgcccggcgtgagcgagccgctcgacctggccggcctggatctcaccgaggcggcctatcgcgtgctgcgccacccgacggtggcgaacaagtcgttcctgatcaccattggcgaccgcaccgtgggcgggctgtccagccgcgaccagatggtcggcccgtggcaggtgccggtggccgattgcgccgtgacgctggccgatttcgaaggcacgcgcggcgaagccatgtccatgggcgagcgcacgccgctggcgatgctggacgcgcccgcttccggccgcatggcggtggccgaggcgctgaccaacctggcggccgccgacgtggcgcgcctcgaagacatcaagctgtcggccaactggatggccgcctgcggcgtgcccggccaggatgccgcgctgtacgacaccgtgtcggcggtcagcgaactgtgccagtcggtgggactgtcgattccggtgggcaaggattcgctgtcgatgaagacgtcctgggacgaggcgggcgagcagcgccaggtggtggcgccggtctcgctcatcgtgacggcgttcgcgccggtgggcgacgtgcgcgccagcctgaccccgcagctgcgcaccgatgccggcgatacggtgctgatcctgatcgacctgggtcgaggccggcaccgcatggccggctccatcctggcgcaggcctacaaccaggtcggcgagacggtgcccgatatcgacgcgccgcaggacctgcgcgccttcttcgtgacgatccgcacgctggccgaggccggcaccatcctggcctaccacgaccgttcggacggcggcctgttcgccacgctggccgaaatggcgttcgccgggcgcaccggcgtgtcggtcaacctggacatgctcaccttcgatccgcagtcggccgactggggcgattacaagatccgtcccgaacaggtggcggtgcagcgcgaagagctcaccctcaaggcgttgttctcggaagaggcgggcgcggtcatccaggtgccggcctcgcagcgcgacgcggtgatgcaagtgctgcgcggcgccggcctgtccgcgcattcgcatgtcatcggcggcctgaacggggccgacgaggtcgagttctaccgcgatggctgcaaggtctggagccagccgcgcgccgacctgggccgcgcctggagcgaggtcagctaccgcatcatggcgcggcgcgacaacccagcctgcgcgcaggccgagctggacatctggaacgacgccaaggacccgggcctggcgccgcgcgtggcgttcgatccgcaggaagacgtggcggctccgttcatcgccaccggcaagcggccgcgcgtggcgattctgcgcgagcaggggtgcaacagccaggtcgagatgggctgggccttcgacaccgccggcttcgaggccatcgacgtgcacatgaccgacctcctgtcggaccgcatcgacctggccggcatgcaggggctggtggccgtgggcggcttcagctacggcgacgtgctgggcgccggcgaaggctgggcccgcaccatccgctacaacgacaagctgtcggatcagttcgcggcctacttcgcccgccccgatacctttgcgctgggcgtgtgcaacggctgccagatgatggcggcgctggcgcccatgatccccggcgccgagcactggccgcgctttacccgcaatcagtccgagaagtacgaggcgcgtctgtcgctggtggaagtcacggcttcgccgtcgatcttcttcgcaggcatggagggcgcgcgtatcccggtggccgtggcgcacggcgagggctacgccgacttcacccagcagggcgacgcggggcgcgcgttgatggcggcccgctatatcgacaaccacggcgcggccaccgaaacctatccgttcaaccccaatggcagccccggcggcctgaccgcggtgacgacggccgacggccgcttcacggtcatgatgccgcaccccgaacgcgtgacccgcaacgtcatgatgtcgtgggcgccggcgcagtggggcgagcgcgatgccggcggcgcgttcagcccctggatgcgtatcttccgcaacgcgcgcgcctggctgaaataa

SEQ ID NO: 52713 - protein, 1348 aa, Bordetella parapertussis 12822
MSLVQHLPGSSVLSAFRRERLLAQLKKAGLPVADISARYEHFIHTDSALPAEQQARLAQLLDYGTPAAEAPAKSLELLVIPRLGTMSPWASKATDIAHNCGLDAVRRIERGVRYALTPERGLLGAKSFDAGMLARAAACLHDRMTETVVDGTFDGQALFETLAGKPMRSVAVQAEGRAALEQANVALGLALSEDEIDYLAQSFGDLGRDPTDVELMMFAQANSEHCRHKIFNAQWVIDGQAQSNTLFGMIRATHKAQPAGTVVAYSDNAAIMEGGPAQRFQAGVPGVAGEGAQAARYVRRDTTVHTLMKVETHNHPTAIAPFPGAATGAGGEIRDEGATGRGSKPKAGLTGFTVSHLRFDDALQPWEDDHHGLPERIASPLSIMIDGPIGGAAFNNEFGRPNLLGYFRAFEQTAGGTRWGYHKPIMIAGGLGSIDAGLTHKEVIPPGALLIQLGGPGLRIGMGGGAASSISMGSNSAELDFDSVQRGNPELERRAQEVIDRCWQQGEHNPIVAIHDVGAGGLSNAFPELVNDAGRGAIFDLRRVPLEESGMSPAEIWSNESQERYVLSILPQDLERFDAIARRERCPYAVVGVATEERQLRVVDGEGLPGLDTIRAQGENEVRPVDVPIDVILGKPPRMTRDVQRLPGVSEPLDLAGLDLTEAAYRVLRHPTVANKSFLITIGDRTVGGLSSRDQMVGPWQVPVADCAVTLADFEGTRGEAMSMGERTPLAMLDAPASGRMAVAEALTNLAAADVARLEDIKLSANWMAACGVPGQDAALYDTVSAVSELCQSVGLSIPVGKDSLSMKTSWDEAGEQRQVVAPVSLIVTAFAPVGDVRASLTPQLRTDAGDTVLILIDLGRGRHRMAGSILAQAYNQVGETVPDIDAPQDLRAFFVTIRTLAEAGTILAYHDRSDGGLFATLAEMAFAGRTGVSVNLDMLTFDPQSADWGDYKIRPEQVAVQREELTLKALFSEEAGAVIQVPASQRDAVMQVLRGAGLSAHSHVIGGLNGADEVEFYRDGCKVWSQPRADLGRAWSEVSYRIMARRDNPACAQAELDIWNDAKDPGLAPRVAFDPQEDVAAPFIATGKRPRVAILREQGCNSQVEMGWAFDTAGFEAIDVHMTDLLSDRIDLAGMQGLVAVGGFSYGDVLGAGEGWARTIRYNDKLSDQFAAYFARPDTFALGVCNGCQMMAALAPMIPGAEHWPRFTRNQSEKYEARLSLVEVTASPSIFFAGMEGARIPVAVAHGEGYADFTQQGDAGRALMAARYIDNHGAATETYPFNPNGSPGGLTAVTTADGRFTVMMPHPERVTRNVMMSWAPAQWGERDAGGAFSPWMRIFRNARAWLK

SEQ ID NO: 52714 - DNA, 3960 bp, Chromobacterium violaceum ATCC 12472
  CDS (1)..(3960): transl_table=11
atgtcttacattaccaagctgcgcggtggcgtcgccctgtcaccgtttcgtctcgaaaaactgcaggcggcagctgccgatgccggtctgaaggatatcgtcctgactgccgagcactggcattttgcggaaagcgacagcgagctttcgctggaggaaatcggcgtgctgggccaattgctcagttacggcgaggcgccgctgaacaccgagcccgaaggcgaactgttcctggtgacgccgcgaatcggcaccttgtcgccatgggcgtccaaggccaccgacatcgcccggcactgcgggttgccgaatatccgcagaatcgaacgcggcaccgctttccgagtaaagtccgccgctaaatctttaagtgaagaggctcgccacaccctggcgggcctcttgcacgataggatgacggaaaccgtgctgtcctcgctggaggacgccgacaagctgttcgtccacttcgatccgcagccgatgaccagcgtggacatcctggccggcggccgcgcggcgctggaggcggctaacgcccagctcggcctcgcgctgtcggacgacgaggtcgaatacctggtcgagaacttcaccaagatgaagcgcaatcccagcgacgtcgagctgatgatgttcgcgcaggccaactccgagcactgccgccacaagatcttcaacgcccagttcatcatcgacggcgtcgaacagggcaaatcgctgttccgcatgatccgcgacacccacgacgccaatccgcagggcacgctggtggcgtacaaggacaacgcctcggtgatcgagggcgccttcatcgaacgcttctacccgcagccgggcagccaccagtacgcgtacaccagcgaacccaccgacatcctgatgaaggtggagacgcacaaccacccgaccgcgatctcgcccttccccggcgcctccaccggcaacggcggcgaaatccgcgacgaaggcgccaccggccgcggctcccgccccaaggccggcctgaccggcttcaccgtgtccaacctcaacatccccggcttcaagcagccgtgggaagcctaccgcgacggccagccggaatacggcaagccgggccgcatcgcctcggcgctgcagatcatgctggagggtccgatcggcggcgcggcattcaacaatgaattcggccgccccaacctggccggctacttccgcgccttcgaggaagaattcaacggcgagatgcgcggctaccacaagcccatcatgctggccggcggcctgggcaacatccagcagcagcagatccacaagaacgagatcccggaaggcgcgctgctgatccagctaggcggccccggcctgctgatcggcctgggcggcggcgcggcctcgtcgatggacaccggcgccaacagcgaaaacctggacttcgactcggttcagcgcggcaacccggaaatcgagcgccgttgccaggaagtgatcgaccgctgctggcagctgggcgaagccaaccccatcgtctccatccatgacgtgggcgcaggcggcctgtccaacgccttccccgagctggtcaacgacgccggccgcggcgcgatcttccacctgcgcaaggtgcacctggaagaaaaaggcatgacgccgatgcagatctggtcgaacgaagcgcaagagcgctacgtgatggccatcctgccggaagacctggaccgcttcaccgcgctgtgcgaacgcgagcgctgcccgttcgcggtgctgggcgtggccaccgacgacggccacctgcaggtgcgcgacgaccacttcggcaacaacccggtggacatgccgctggaagtgctgctgggcaagccgccgcggatgacccgcgacgccaagacgctggaaatcgcgccgcagaccttcgacgcgtccaaatacccgctgcgcgaaaccgcctaccgcgtgctgcgccacccgaccgtggccgacaagtccttcctgatcaccatcggcgaccgcaccgtaggcggcatgaccgcgcgcgaccagatggtgggccgctggcaggtgccggtggcggacgtggccgtcaccaccatgggcttcaacacctatcgcggcgaagcgatggcgatgggcgagcgcaccccggccgcgctgttcgacggcccggcctccggccgcatggccatcggcgaggcgctgaccaacatcgccgccgctttcgtcggccacctgggcaacgtcaagctgtccgccaactggatggcccccgccggccatccgggcgaggacgccaacctgtaccgcaccgtgcaggcggtgtccgagctgagccagagcctgggcgtcagcatcccggtgggcaaggactcgctgtcgatgaagacggtatggcaggaaaacggcgagcagaaggccgtcaccgcgccgctgtcggtggtgatctccgccttctcgccggtggacgacgtgcgcaagaccgtcaccccggatctgaaggacgtcaaggacagcgacctgatcctgatcgacctcggctacggccgctgccgcctgggcggctcgatctacggccaggtgtggaaggacatgaagggccgcgcgccggacgtggaaagcccgctgcagctggccgccttcttcggcgtggtgcagtcgctgctgcgcgacgacaagctgctggcctaccacgaccgctccgacggcggcctgttcgccgcgctggcggaaatgatgttcgccggccacgtcggcgccagcatcgatctgcaggagctggtgatcgagcgccagaacacccagcgcatcatcgacgactacgtgcagccgacaatggaggccgccacccacggccgcatcatgcgcgtgctgttcaacgaggagctgggagcggtgctgcaggtgaagaaggccgacacgccggaagtgatcgcccgcttcatgaaggccggcatcggccgcgagctgttcgtcatcggccgcaccaacggccacgaccgcctggtgatcaagcacaagggcaaggacctgttcagcgaaagccgcagcgagctgttctgcgcctggtccgaaaccagcgcccgcatgcagcgcctgcgcgacaacccggcctgcgccgacagcgagcagctgctgcgcagccacgccaagtcgcgcggcctgttcgcgcagctgtccttcgacgtgcacggcgacccggccgctccctacatcggcaccggcaagcgcccgcgcatggccatcctgcgcgagcagggcgtcaacggccagctggagatggccgcggccttcgaccgcgccggcttcgacgcggtggacgtgcacatgagcgacatcatcgccggccgcgtgcagctggccgacttcaagggcctggcggcctgcggcggcttcagctacggcgacgtgctgggcgccggcgaaggctgggccaagagcatcctgttcaacccgcgcgcgcgcgagcagttcgaggccttcttcggccgcggcgacaccttcgcgctgggcgtgtgcaacggctgccagatgatgtccaacctgtcgtccatcatcccgggcgccgagcactggccgaagttccaccgcaacgcgtcggaacagttcgaggcgcgcttcgcgatggtggaagtcaccgcgtcgccgtccatcttcctgtccgacatggtgggcagccgcctgccggtggtggtcagccacggcgagggccgcgcggtgttcgcgccgggcgcgcaggagcaggcgctgaccgcgctgcgctacatcgacttcgacggccgcgccaccgaaacctacccgttgaaccccaacggctcgcccgccggcatcaccggcgtcaccaccgccgacggccgcttcaccatcatgatgccgcacccggaacgcgtgttccgcaccgtgcagaacagctggcatccggccgaatggggcgagaacggcggctggtaccggatgttcgcgtccgcccgccgctgggtgggctga

SEQ ID NO: 52715 - protein, 1319 aa, Chromobacterium violaceum ATCC 12472
MSYITKLRGGVALSPFRLEKLQAAAADAGLKDIVLTAEHWHFAESDSELSLEEIGVLGQLLSYGEAPLNTEPEGELFLVTPRIGTLSPWASKATDIARHCGLPNIRRIERGTAFRVKSAAKSLSEEARHTLAGLLHDRMTETVLSSLEDADKLFVHFDPQPMTSVDILAGGRAALEAANAQLGLALSDDEVEYLVENFTKMKRNPSDVELMMFAQANSEHCRHKIFNAQFIIDGVEQGKSLFRMIRDTHDANPQGTLVAYKDNASVIEGAFIERFYPQPGSHQYAYTSEPTDILMKVETHNHPTAISPFPGASTGNGGEIRDEGATGRGSRPKAGLTGFTVSNLNIPGFKQPWEAYRDGQPEYGKPGRIASALQIMLEGPIGGAAFNNEFGRPNLAGYFRAFEEEFNGEMRGYHKPIMLAGGLGNIQQQQIHKNEIPEGALLIQLGGPGLLIGLGGGAASSMDTGANSENLDFDSVQRGNPEIERRCQEVIDRCWQLGEANPIVSIHDVGAGGLSNAFPELVNDAGRGAIFHLRKVHLEEKGMTPMQIWSNEAQERYVMAILPEDLDRFTALCERERCPFAVLGVATDDGHLQVRDDHFGNNPVDMPLEVLLGKPPRMTRDAKTLEIAPQTFDASKYPLRETAYRVLRHPTVADKSFLITIGDRTVGGMTARDQMVGRWQVPVADVAVTTMGFNTYRGEAMAMGERTPAALFDGPASGRMAIGEALTNIAAAFVGHLGNVKLSANWMAPAGHPGEDANLYRTVQAVSELSQSLGVSIPVGKDSLSMKTVWQENGEQKAVTAPLSVVISAFSPVDDVRKTVTPDLKDVKDSDLILIDLGYGRCRLGGSIYGQVWKDMKGRAPDVESPLQLAAFFGVVQSLLRDDKLLAYHDRSDGGLFAALAEMMFAGHVGASIDLQELVIERQNTQRIIDDYVQPTMEAATHGRIMRVLFNEELGAVLQVKKADTPEVIARFMKAGIGRELFVIGRTNGHDRLVIKHKGKDLFSESRSELFCAWSETSARMQRLRDNPACADSEQLLRSHAKSRGLFAQLSFDVHGDPAAPYIGTGKRPRMAILREQGVNGQLEMAAAFDRAGFDAVDVHMSDIIAGRVQLADFKGLAACGGFSYGDVLGAGEGWAKSILFNPRAREQFEAFFGRGDTFALGVCNGCQMMSNLSSIIPGAEHWPKFHRNASEQFEARFAMVEVTASPSIFLSDMVGSRLPVVVSHGEGRAVFAPGAQEQALTALRYIDFDGRATETYPLNPNGSPAGITGVTTADGRFTIMMPHPERVFRTVQNSWHPAEWGENGGWYRMFASARRWVG

SEQ ID NO: 52716 - DNA, 3705 bp, Porphyromonas gingivalis W83
  CDS (1)..(3705): transl_table=11
atgattttattctttcaccattcgtccggctctgtctatgccgtggagagtgaagttcagttcagcgaagaagaaatacatcggctggtatggctgtttgggggagccgaaccctgtcagtccgatgttgtaaacggctatcacgtaggccctcgtcgggagatggtaacaccttggagtaccaacgccgtcgagataacgcagaatatgaacgttgcaggcatacgccgtatcgaagagttctttccggtgaaaggtgccgatgcagagttcgatcccatgcttcaagctctctatgagcagctggaccaaaagattttcgatatagatcgtaagcctgagccgatcatttccgtcaaggacattcgcgcttataatgaagctgagggattggctctgagcgaagatgaaatcagttatctgaaaggcgtgtccgaacgcattggcaggcccctcacggacagcgagttgttcggattctcacaggttaattccgaacactgccggcacaagatattcggcggcacgtttattattgatggagaggagaaggaaagctctctcttcaacctgatcaaacgtacctctgctgtcaatcccaatttgcttgtgtccgcatacaaggacaatgtggctttcatccaaggcccgaaggtagagcaatttgccccccgcagtgcagacaaaccggactacttcgaaaccaaaacgatagataccgtactgagtctcaaagccgagacacataatttccctactacggtggagcctttcaatggcgcagccacagggacagggggagagattcgtgaccgaatggccggtggaaagagcagcattccgttggcaggtaccgctgtctatatgacttcttacgcccgtactgatggaacacgaccattcgaaaagaaactatccgaacgccgttggctctatcaatcgccccgtcagatcttgaccaaggcctctaacggtgccagcgatttcggcaataaattcggccagccactcattacaggatccgttctgacctttgaacaccaagaaactcccgatactacctgctatggctatgacaaagtcatcatgcttgccggaggtgtcggctatgccaaacagtcggacgctcttaaaggagagccgtctccgggagaaaaagtagtaatcctgggtggagacaattaccgcataggtatgggtggcggagctgtcagctctgtgaatacgggacaattgtccggcagtatagaactgaatgccatccagcgctctaatcccgagatgcagaagcgtgtacagaatgtgatcagagctatagcggaaaatgacaataacccgatcgtctccatccacgatcacggagccggaggacatctcaactgcctgtccgaattggtggaagcgaccggcggacgaatcgacatggatcggcttcccgtcggagaccctaccctctctgccaaagagataatcggcaacgagagtcaggaacgtatggggatgctgatgcaggagaaagatttggaatatgtacgcaaaatagccgaacgcgaacgcgctcccatgtatgtggtcggagagaccactgacgatatgcgcttcgtcttccgcaaggacaatggcgagtgtcctatcgacatgaagctggacgacatgtttggcaagcctccccgtaccatcatggaggacagaaccatagaacatcgctatcaggcaccgcaatacgaccctgcccgtctggatgaatatctggagcaggtattgcgtatggagtcagtagcttgtaaggattggcttaccaataaggtggacagatctgtgacaggacgagtggctcgccagcagtgtcagggcgaattgcaacttccgctcagcgacctcggtgctatggctctggactatcgcggccatagcggagtggctacttctatcggccatgcccctcaggccgctttggccgatccggcagccggatcggtgctggccatagccgaagctctgaccaatatcgtctttgctccgcttcgtaatggtatcgagggtgtgagcctgtcggccaactggatgtggccctgccgtaacgaaggcgaagatgcccgtctgtaccgtgccgtggaagcctgttcggactttgccgtcgatctgggcatcaacatccctaccggcaaggactctctgtccatgacacagaaatatgaggacaaaaaagtgctgagtcccggtacggtgattatcagtgccgcagccgaagtgacagacattcgtcgcatcgtcagccccgtcctcagccatatagccgctaccgctctctactatatcgatttcagcttctgcccgttctcattgggaggatcggcctttgcccagagcttgggtactatcggtgatgaagtccccactgtacgtgatccggaatacttccgcgatgcgttcaataccgtacaggaactcattgacaagggtctggttctggccggacacgacatatccgcaggcggtctgattacggctcttctggaaatgtgctttgccaatgtagtaggcggtctggaggtggaattggataacctcgtggaagacgacctgatcaaagtcctctttgccgaaaacccgggtatcctcattcaggtaaaggaccgcaaagccgttgataagatcctgaccgatgccggcatcggtttcctcccgatagccaagccgacccaagagcgacacctcttgatacataaagacggagccgaatacctgttcggtatcgaccacatgcgcgacgtttggtatgagtcgtcctacctgctggactgcttccagagtggcaataccttggccggcaaccgcttcgagaactataaggaacaaccggtcgtatatcacttccccaagcaatttacgggtgatctgaaggcgatgggattggatcccgatcgaaagacggcatccggcatccgcgccgccatcattcgcgacaagggaacgaatggagagcgggaaatggcctatgctctctatctggccggcttcgacgtgaaggacgtacacctgacagacctgaccagtggaagagagacactggaagacatccggatgattgtcttctgtggtggattttccaattcggacgtactcggatctgccaaaggatgggccggcggtattctcttcaatgagcaagcgaaagccacgctggatcgtttcttcgcacgacccgatacgctcagcctcggtatctgcaacggctgccagctgatggccgagttggaacttctataccccgaacacgaactcaagcacaagcttgtccacaacgaatcgcagaaattcgaaagcacattcgtcactctcgaaatcccgcataacgactccatcatgctcggcaatctggccggaagcaagatcggtgtatggtgtgctcatggcgagggtcggttcagtctcccgtacgaggagaaagcctaccatgtggtggccaagtacgaatacgacggctatcctgccaatcccaacggatcgccacaccgcatagccggattgtgcagcgcggatggccgccatctgacgatgatgccacatccggagcggagcatattcccctggcagtgcggttattatcccgaatcacaacgacacgaacatcaggtgacaccttggatgcaggctttccgcaacgcttacgagtggatagccaagcaggtgaaaaatggatga

SEQ ID NO: 52717 - protein, 1234 aa, Porphyromonas gingivalis W83
MILFFHHSSGSVYAVESEVQFSEEEIHRLVWLFGGAEPCQSDVVNGYHVGPRREMVTPWSTNAVEITQNMNVAGIRRIEEFFPVKGADAEFDPMLQALYEQLDQKIFDIDRKPEPIISVKDIRAYNEAEGLALSEDEISYLKGVSERIGRPLTDSELFGFSQVNSEHCRHKIFGGTFIIDGEEKESSLFNLIKRTSAVNPNLLVSAYKDNVAFIQGPKVEQFAPRSADKPDYFETKTIDTVLSLKAETHNFPTTVEPFNGAATGTGGEIRDRMAGGKSSIPLAGTAVYMTSYARTDGTRPFEKKLSERRWLYQSPRQILTKASNGASDFGNKFGQPLITGSVLTFEHQETPDTTCYGYDKVIMLAGGVGYAKQSDALKGEPSPGEKVVILGGDNYRIGMGGGAVSSVNTGQLSGSIELNAIQRSNPEMQKRVQNVIRAIAENDNNPIVSIHDHGAGGHLNCLSELVEATGGRIDMDRLPVGDPTLSAKEIIGNESQERMGMLMQEKDLEYVRKIAERERAPMYVVGETTDDMRFVFRKDNGECPIDMKLDDMFGKPPRTIMEDRTIEHRYQAPQYDPARLDEYLEQVLRMESVACKDWLTNKVDRSVTGRVARQQCQGELQLPLSDLGAMALDYRGHSGVATSIGHAPQAALADPAAGSVLAIAEALTNIVFAPLRNGIEGVSLSANWMWPCRNEGEDARLYRAVEACSDFAVDLGINIPTGKDSLSMTQKYEDKKVLSPGTVIISAAAEVTDIRRIVSPVLSHIAATALYYIDFSFCPFSLGGSAFAQSLGTIGDEVPTVRDPEYFRDAFNTVQELIDKGLVLAGHDISAGGLITALLEMCFANVVGGLEVELDNLVEDDLIKVLFAENPGILIQVKDRKAVDKILTDAGIGFLPIAKPTQERHLLIHKDGAEYLFGIDHMRDVWYESSYLLDCFQSGNTLAGNRFENYKEQPVVYHFPKQFTGDLKAMGLDPDRKTASGIRAAIIRDKGTNGEREMAYALYLAGFDVKDVHLTDLTSGRETLEDIRMIVFCGGFSNSDVLGSAKGWAGGILFNEQAKATLDRFFARPDTLSLGICNGCQLMAELELLYPEHELKHKLVHNESQKFESTFVTLEIPHNDSIMLGNLAGSKIGVWCAHGEGRFSLPYEEKAYHVVAKYEYDGYPANPNGSPHRIAGLCSADGRHLTMMPHPERSIFPWQCGYYPESQRHEHQVTPWMQAFRNAYEWIAKQVKNG

SEQ ID NO: 52718 - DNA, 3897 bp, Photorhabdus luminescens subsp. laumondii TTO1
  CDS (1)..(3897): transl_table=11
ttgattactatgaaaattctacgtggttcacctgctttatctgcatttcgtatcactaaactcctttctgtgtgccaagaacagcaacttccggtcaatgatatttatgcggaatatgttcattttgcagagattaatgcatctttgagtgatgttgattcagcaaagttacaacaattactaaaatatggaccttcgctggctgaacatgaaccccaaggtacattgctgttagtgacgcctcgtccgggaacgatttccccttggtcttccaaagcaaccgatattgctcacaattgtggcctgtcccaggttgtgcgtctggagcgtggcgtggcttattacatccaaagtggtgaaatgagtgatacacagtggcaaatattgtcatcattgctgcatgatcggatgatggaaacggtctttactcaattggaacaggcggaaaaattgttttctcgtcagcaaccggttccgttaaagcgcattgatattctgcaagcaggacgcagtgcgttagaaacggccaatattgaacttggattggcgttagcctcagatgaaattgattatctgatggatgctttccagaaattagggcgcaatccaacagatgttgaactttatatgtttgctcaggctaactcagaacattgtcgtcataaaatctttaatgctgattggattattgatagtcaggcgcagccaaaatcgctgttcaaaatgattaaaaacacctatgagcagacacctgattatgtcctgtcagcctataaagataatgccgctgtgatggagggatctgctgttggtcgtttctttgctagcgcggaaaacggttcatatgattaccatcaggagcaggctcatattctgatgaaagtggaaacgcataatcacccgacggcgatttctccttggccgggcgcatcgacaggttcggggggggaaattcgcgatgaaggggcgaccggtcgtggtgctaagccaaaagcgggtctggtgggattttcggtatccaatttgcggataccgggttttgaacagccgtgggaagaggattttggtaaaccagagcgtatcgttagtgctctggatatcatgatggaaggccctttagggggcgcggcatttaataatgaatttggtcgtccggcgttgttgggctatttccgtacctatgaagaaaaagtaaacagtcataacggtagcgaattacgtggttatcacaagccgatcatgctggctggtgggatcggtaatatccgtgatgaacatgtcaaaaagggtgaaatttctgttggcgcaaaattgattgtgcttggtggtccgtccatgaacattggattgggcggaggggccgcatcttctatggcatcggggcaatccgatgctgatctggattttgcttcggttcaacgcgataacccggaaatggagcgccgttgtcaggaggtgatcgatcgctgttggcagttaggcgaaaacaatccgattctgtttattcatgatgtgggtgctggtgggctttccaatgcgatgcctgagctggtcagtgatggtggtcgcggtggacgatttgagttacgtaaaattcttaacgatgagccgggaatgagcccgctggaagtctggtgtaacgaatcacaagagcgttatgtactggcggttgcgccggaacaactcccgctatttgaagagatttgtcggcgtgagcgtgcgccttatgccattatcggcgaggcaacggaagaacgtcatttgctgcttaatgatgaacactttgataaccagccaatcgatatgcctttggatgtactgttaggtaaaacgccaaaaatgttgcgtgatgtcactacattaaaagcgagcggtgagagccttgaacgccgggatatcgatctggcggaagctgttaagcgcatcatgcatttgccggcggtggcggaaaaaaccttcctgatcacgataggcgatcgctctgtcactggcatggtttctcgtgatcaaatggtgggtccgtggcagatcccagttgcggactgcgctgttaccaccgccagccttgatagctactatggcgaagcgatgtctatgggggaacgtgcgccggttgctttgctggattttgcggcttccgcccgaatggcggtcggtgaagcgctgaccaatatcgcttctgcttatattcaggatttaaaacgcattaaactttcagcaaactggatgtctgctgcgggtcacccaggtgaggatgccggtttgtatgcggcggttaaagcggtgggtgaggagctgtgtcctgcgctagggctgacaattccggtgggtaaagactccatgtcgatgaaaacccgttggcatgaccaaggtgaggagcgtgaaatgacggctcctttgtcactggtgattactgcttttgccagagtggaagatgtccgccgtacagtcacgccggagctttctaccgatgaagataatgcgttgttattaatcgatctggggcaaggaaaaaatacgctgggcggtaccgcattggcacaagtttaccgtctactgggtaataaaaccgcggatgtacgtagtgctgaacaattagcgggtttcttcaatgcaattcagcaactgattgcggaacaaaaattgctggcttatcacgaccgctctgatggtggtttactggtaaccttggctgaaatggcttttgccggccattgtggcattgaagctgatatcagtgtatttgatgaagatattctggctgggctctttacagaagagttgggtgctgtagttcagattcgagcatcggatagaggatttgttgaaagcattttggcagaacatggtctggccgattgcgtacattatttgggtaaagcccaagcaggtgatgattttgttatctttagtggtaatactgaagtctatcgccagaatcgcagtaccttgcgcttatggtgggcagaaaccacatggcaaatgcagcgtctgcgcgataacccggcgtgtgcagatcaggaacatcaggctaaacaggataatcaggatcctggactgaatgtaaaactgacctttgatatttcagaagatattgcagcgccttacatcttgcagcaggtaaggccgaaagtggctgtactgcgtgaacagggcgttaactcccatgttgaaatggccgcggcattccaccgagcaggctttgaggcgattgatgttcatatgagtgatttgttgtctggacgtattggattgagccaattccagacactggttgcctgtggtggtttctcgtatggtgacgtattgggggcaggtgaaggttgggcgaaatcaattctgtttaatgaacgtgtccgtgatcagtttgccgttttctttgcacgacctgatacgttagcgctgggtgtttgtaatggttgccagatgatgtctaacttgcgggaattgatcccgggtgcagaacattggccgcgttttgtacgtaaccgctcagagcgatttgaagcacgatttagtttggtggaaattactgacagcccgtcactgttcttacaggatatggtcggttctcgtataccgattgcggtttctcatggggaagggcaagtagaattccgtaatagacagcatcttgagatgcttgaaagcaaccagttagtggctttgcgttatgtgaataactatggtcaggttacggaaaactatcccgctaaccccaatggttcagtgaatggcattaccgcagtgactagccttgatggtcgagcaaccgtgatgatgccgcatccagaaagggtatctcgcacggtgaataactcttggcatccagatgagtggcgcgaagatggcccgtggatgcgaattttccgtaatgctcgtaaacagttagggtag

SEQ ID NO: 52719 - protein, 1298 aa, Photorhabdus luminescens subsp. laumondii TTO1
MITMKILRGSPALSAFRITKLLSVCQEQQLPVNDIYAEYVHFAEINASLSDVDSAKLQQLLKYGPSLAEHEPQGTLLLVTPRPGTISPWSSKATDIAHNCGLSQVVRLERGVAYYIQSGEMSDTQWQILSSLLHDRMMETVFTQLEQAEKLFSRQQPVPLKRIDILQAGRSALETANIELGLALASDEIDYLMDAFQKLGRNPTDVELYMFAQANSEHCRHKIFNADWIIDSQAQPKSLFKMIKNTYEQTPDYVLSAYKDNAAVMEGSAVGRFFASAENGSYDYHQEQAHILMKVETHNHPTAISPWPGASTGSGGEIRDEGATGRGAKPKAGLVGFSVSNLRIPGFEQPWEEDFGKPERIVSALDIMMEGPLGGAAFNNEFGRPALLGYFRTYEEKVNSHNGSELRGYHKPIMLAGGIGNIRDEHVKKGEISVGAKLIVLGGPSMNIGLGGGAASSMASGQSDADLDFASVQRDNPEMERRCQEVIDRCWQLGENNPILFIHDVGAGGLSNAMPELVSDGGRGGRFELRKILNDEPGMSPLEVWCNESQERYVLAVAPEQLPLFEEICRRERAPYAIIGEATEERHLLLNDEHFDNQPIDMPLDVLLGKTPKMLRDVTTLKASGESLERRDIDLAEAVKRIMHLPAVAEKTFLITIGDRSVTGMVSRDQMVGPWQIPVADCAVTTASLDSYYGEAMSMGERAPVALLDFAASARMAVGEALTNIASAYIQDLKRIKLSANWMSAAGHPGEDAGLYAAVKAVGEELCPALGLTIPVGKDSMSMKTRWHDQGEEREMTAPLSLVITAFARVEDVRRTVTPELSTDEDNALLLIDLGQGKNTLGGTALAQVYRLLGNKTADVRSAEQLAGFFNAIQQLIAEQKLLAYHDRSDGGLLVTLAEMAFAGHCGIEADISVFDEDILAGLFTEELGAVVQIRASDRGFVESILAEHGLADCVHYLGKAQAGDDFVIFSGNTEVYRQNRSTLRLWWAETTWQMQRLRDNPACADQEHQAKQDNQDPGLNVKLTFDISEDIAAPYILQQVRPKVAVLREQGVNSHVEMAAAFHRAGFEAIDVHMSDLLSGRIGLSQFQTLVACGGFSYGDVLGAGEGWAKSILFNERVRDQFAVFFARPDTLALGVCNGCQMMSNLRELIPGAEHWPRFVRNRSERFEARFSLVEITDSPSLFLQDMVGSRIPIAVSHGEGQVEFRNRQHLEMLESNQLVALRYVNNYGQVTENYPANPNGSVNGITAVTSLDGRATVMMPHPERVSRTVNNSWHPDEWREDGPWMRIFRNARKQLG

SEQ ID NO: 52720 - DNA, 4056 bp, Vibrio vulnificus YJ016
  CDS (1)..(4056): transl_table=11
gtgacgcaaacggttgcttttggtgttacatcacaaaaacaattgctatataatgcgcccgcaacagagaggtgcaatcggcataagttcgaagtaaaacagtataacccactgaatttattccaatatcaccttaatcaattgcataagagacctaagcacatgagaattttgcgtggctccccagctctttctgagtttcgagttaataaactactggaactttgtcgtgaacaagatctgcctgtaacgggcatttacgccgagtttatgcactttgcggatttgacctctgagttagacgcagaagcgctagaaaagttagagaaacttcttacttacggcccaactatcgaagagcacgagcctcaaggtctcttattgctggtcactcctcgtcctggcaccatctctccttggtcatcaaaagcgacagacattgcacaaaactgtggccttaacgcagtgaagcgtttagagcgcggcacggcgtactatgttgagtcgtcttcagagctttctagcgtacaaatcgacatcgtaaaaagcattattcatgaccgtatgatggaagcggtatttggtgatctagaagcggcagcggcattgttcagcgttgcgcagcctgcaccaatgactcaggtggatatcctttctggaggtcgtctcgcgcttgaagaagccaacgtttcacttggcctagcattggcagaagatgaaattgattacttggtggagaactttacgaagcttggccgtaatccaaatgacatcgaacttatgatgtttgctcaggccaactctgagcactgtcgtcacaagatctttaacgccgattggacgatcgacggtgtggaacagccaaaatcgctgtttaagatgatcaaaaatacctttgaaacaacgccagatcatgtgctgtctgcttacaaagataacgcagcggtaatgacggggtcaaaagtgggtcgtttcttcccagatccagaaacgcgtcaatacaactaccatcacgaagatgcacacatcttgatgaaggtagagacgcacaaccacccaaccgcaatttcaccatggccaggtgcttctactggttctggtggtgaaattcgtgacgaaggcgcaaccggcattggcggtaagccaaaagcgggtctggttggttttaccacctcgaacttgcgcattcctggctttgaacagccatgggaaaccgattttggtaagccaggtcgtatcgtcaacgcccttgacatcatgctagaaggcccgcttggtggcgcggcattcaacaacgaatttggtcgtccaaacctccttggttacttccgcacttacgaagagaaagtgacgtcacacgcaggtgaagaagtgcgtggctaccacaagccaatcatgattgctggtggtatgggtaacattcgtgacgagcacgtacagaagaaagagatccctgtcggtgcgagcttaatcgtgctgggtggcccggcgatgaacattggtctgggtggtggcgccgcttcgtctatggcatcaggtcagtcggcagaagatctggatttcgcttcggtacagcgtgaaaacccagagatggaacgccgttgtcaggaagtgatcgatcgctgttggcagcttggcgacaacaacccaatcgcgtttattcacgacgttggcgcaggtggtatttcaaatgcgttaccagaattggtcaatgatggtgagcgtggcggtaagttccaactgcgtgatgtaccaaacgatgaaccgggaatgagcccattggaaatctggtgtaacgaatctcaagagcgttatgtgctcgcggtcgcaccagaaaacatggcggcatttgatgcaatctgtaaacgtgagcgtgcgccatacgccgtggtcggtgtggcaacggaagagcgtcacctaacgctggaagatgcgcacttcgacaatacaccgattgatatgccaatggacattctgcttggcaaaccaccaaagatgcaccgtgaagcaaccacactcaaagtggacagcccagcgatgacgcgtgatggcatcgaacttaatgaagcggtggatcgtgtacttcgtcttccaaccgtggctgaaaaaactttcttgatcaccattggtgaccgtaccgtcacaggcttagtggcgcgcgatcaaatggtcggtccgtggcaggtgccagttgcaaactgtgcggtaaccgctgccagctacgatacgtaccacggtgaagcgatgtctatgggggaacgtacgcctgttgcgctgcttgactttggcgcgtcagctcgtctagccgttggtgagtctctcactaacatcgcagcgactgacatcggcgatatcaagcgcattaagctgtcggcaaactggatgtcaccagcaggtcacccaggtgaagacgcgggtctttacgaagcggtgaaagcggtgggtgaagaactgtgccctgcattaggtcttactatccctgttggtaaagactcaatgtcaatgaagaccaagtggaatgagaacggtgaagagaaagaagtgacttctccactgtctctgatcatcaccgcgtttgcacgtgttgaagatgtacgtaaaaccattactcctcagctgcgtaccgacaaaggcgagacttcacttgttcttgttgaccttggcaacggtaagaaccgcctaggtgctacggcgctggctcaggtttacaagcaattgggtgataaaccggctgacgtcgacaacgcagaacagttgaaaggcttcttcgatgcgatgcaagctttggttcgtcaagacaaattgcttgcgtaccacgataaaggggatggtggcctattggtgacacttgcagagatggcatttgctggtcactgtggtgtcaacgcgaatatcgctgcgctgggtgacgatgttctggcggcactatttaacgaagagctcggtgcggttgttcaagttaagaacgatgaattggactccgtgctgtcgacgttggcggcaaatggtctagaagcgtgttcacacgtaattggtgcaattgatgcttcagacaactttgtgattcgctctggtgatgttgtggtgctggaacgttcacgcacagatttgcgtgttatctgggcggaaacgacgcataagatgcaggcactgcgtgataaccctgcgtgtgcagaccaagagtttgaagcgaagaaagacaattcagacccaggtctgaatgtatcgctcagctatgaagttaacgaagatatcgcagcgccttacatcgcaaaaggcgcgaaacctaagatggcgatcctgcgtgagcagggggttaactctcacgttgaaatggcagcagcgtttgaccgtgctggctttgaagcgactgacatccacatgagtgacattctgacgggtcaagcagtgctggatgagtaccatggtctagtggcttgtggtggtttctcgtacggtgatgtattaggtgcgggtgaaggttgggcgaaatctgtgctctttaatgcgcaagcacgtgagcagttccaagccttctttaatcgtgaaaacaccttctcactgggtgtatgtaacggctgtcagatgctttcaaacttgaaagaattgatcccaggtgccgacttgtggccacgtttcgttcgcaacgaatcagagcgttttgaagcacgctttagcctagtcgaagtacagaaatcggattccgtcttctttgatggcatggcaggctctcgtatgcctatcgctgtttcgcacggcgaaggtcgtgtggaagtacgcgatgctcaacatctcgctgcgattgaagcatcgggcaccgttgcggtccgctttgttgataacctaggaaatccaacacaacaatacccgaacaacccgaacggttcaccaaatgcgattaccggtttgacgacaaaagatggtcgcgtaaccatcatgatgccacacccagagcgtgtattccgcaccgtagcaaactcatgggcaccagaaggttggggtgaaaatggcgcgtggatgcgtatgttccaaaacgcacgcaaaaatctagcctaa

SEQ ID NO: 52721 - protein, 1351 aa, Vibrio vulnificus YJ016
MTQTVAFGVTSQKQLLYNAPATERCNRHKFEVKQYNPLNLFQYHLNQLHKRPKHMRILRGSPALSEFRVNKLLELCREQDLPVTGIYAEFMHFADLTSELDAEALEKLEKLLTYGPTIEEHEPQGLLLLVTPRPGTISPWSSKATDIAQNCGLNAVKRLERGTAYYVESSSELSSVQIDIVKSIIHDRMMEAVFGDLEAAAALFSVAQPAPMTQVDILSGGRLALEEANVSLGLALAEDEIDYLVENFTKLGRNPNDIELMMFAQANSEHCRHKIFNADWTIDGVEQPKSLFKMIKNTFETTPDHVLSAYKDNAAVMTGSKVGRFFPDPETRQYNYHHEDAHILMKVETHNHPTAISPWPGASTGSGGEIRDEGATGIGGKPKAGLVGFTTSNLRIPGFEQPWETDFGKPGRIVNALDIMLEGPLGGAAFNNEFGRPNLLGYFRTYEEKVTSHAGEEVRGYHKPIMIAGGMGNIRDEHVQKKEIPVGASLIVLGGPAMNIGLGGGAASSMASGQSAEDLDFASVQRENPEMERRCQEVIDRCWQLGDNNPIAFIHDVGAGGISNALPELVNDGERGGKFQLRDVPNDEPGMSPLEIWCNESQERYVLAVAPENMAAFDAICKRERAPYAVVGVATEERHLTLEDAHFDNTPIDMPMDILLGKPPKMHREATTLKVDSPAMTRDGIELNEAVDRVLRLPTVAEKTFLITIGDRTVTGLVARDQMVGPWQVPVANCAVTAASYDTYHGEAMSMGERTPVALLDFGASARLAVGESLTNIAATDIGDIKRIKLSANWMSPAGHPGEDAGLYEAVKAVGEELCPALGLTIPVGKDSMSMKTKWNENGEEKEVTSPLSLIITAFARVEDVRKTITPQLRTDKGETSLVLVDLGNGKNRLGATALAQVYKQLGDKPADVDNAEQLKGFFDAMQALVRQDKLLAYHDKGDGGLLVTLAEMAFAGHCGVNANIAALGDDVLAALFNEELGAVVQVKNDELDSVLSTLAANGLEACSHVIGAIDASDNFVIRSGDVVVLERSRTDLRVIWAETTHKMQALRDNPACADQEFEAKKDNSDPGLNVSLSYEVNEDIAAPYIAKGAKPKMAILREQGVNSHVEMAAAFDRAGFEATDIHMSDILTGQAVLDEYHGLVACGGFSYGDVLGAGEGWAKSVLFNAQAREQFQAFFNRENTFSLGVCNGCQMLSNLKELIPGADLWPRFVRNESERFEARFSLVEVQKSDSVFFDGMAGSRMPIAVSHGEGRVEVRDAQHLAAIEASGTVAVRFVDNLGNPTQQYPNNPNGSPNAITGLTTKDGRVTIMMPHPERVFRTVANSWAPEGWGENGAWMRMFQNARKNLA

SEQ ID NO: 52722 - DNA, 2991 bp, Geobacter sulfurreducens PCA
  CDS (1)..(2991): transl_table=11
atggcgcaacgaatcgaagtcgccctgaaagagggagttcgcgatgcccgcggcgagcgggttcgacgggagattgagcattttctccacctgccggtgcacgaggtgcgtaccatcgacgtctacaccgtggacgccggcctttcgccggacgaattggagaaggccgcctcggaaccgttcagcgacccggtcattcagacctggagcctggatcggcctctggccgatgggttcgactacctggtagaggtgggcttccgccccggtgttaccgacaacgtgggcaggacagccagggaggctattgaatatatcaccggacgcccctttgccgcgggggagggggtctacacctcggtgcagtacctgctttccggagccctgtcgcggaccgatgtggaacggattgcccgcgatctcctctgcaacacgctcatccagcgctacatcattctggatcgggcggaattcgccgctgccggcggggttgcagtcgttgttcccaaggtgacgggagagacccgcgcccaggttcgggagatcgacctgaacgtttccgacgacgaactgatgaggatcagccgtgaaggggtccttgccctcacgctggacgaaatgaaggtgatccaggcccactaccgcaatccggcagtcatagcggaacggtccaaggtcggacttgcggctaagcccaccgacgcggaactggaggccattgcccagacctggtcggagcactgcaagcacaagattttctctggcactatcgaatatatcgacgaaaacggcaatcgcgaggagattcgttccctcttcaagacctttatccagggaaccaccaagacggtgcgtgaacagctcggcgagcgggacttctgtctctcggtcttcaaggataacgccggtgtcatccgctggaatgacgattggtccctggtgttcaaggtggagacccacaactctccgtcggccctggacccctatggcggggcgctcaccggcattgtcggcgtaaaccgggaccccttcggcaccggcaaagggtcaaagctcatctttaataccgatgttttctgctttgcttcgccgttctacgacaagcctttgccaagccggctgttgcacccgcgccgcatctacgagggcgtcgtggagggggtggagcacggcggcaacaagagtggtattcctacggtgaacggctccatcgtctttgacgatcgctttgccggcaagcccctggtcttctgcggtacggcagggctcatgcctgccaccatcaacggagctccggcccacgagaagttcatccgccccggcgacctgatcgtcatgaccggcggccgcatcggcaaggacggcatccacggcgcaaccttctcatccgaagaactccacgaaggttctccggtaacggcggtgcagatcggcgatcccatcacccagaagcggatgaccgatttccttatccgggcacgggacaaggggctctacaactttatcaccgacaacggtgccggcggactctcctcgtctatcggtgagatgtcgggcgagtgcggcggctgccgtatggatctgtccaaagcacctctcaagtatccgggtctcgatccctgggagatcctgatctcagaggcccaggagcggatgagcctcgctgttccgcccgagcacatcgacgagttcatagccatggcccgccgtttcggtgtggaggcaaccatcctcggtgagttcactgattccggctacttccatatcatgtacggggacagaaccatcgcgtatcttcccatggacttcctccatggtggactaccccccatgcagatgcggggggtctgggaagtgaagcgccacgaagagccggcgctggaggtgaagcaagactacgcggccgacctgaagcaactgctcggttcgctcaatatctgctccaaggagtcggtggtccggcgctacgaccacgaggtgcagggggggagcgtggtgaaaccgttcacgggcgttgccaacgacggtccctcggatgcggcggtgatccggccggtgctcgactccttcgagggggtcgtggtgagccacgggatctgcccgcggtacagcgacatcgatgcctatcacatgaccgccaacgccattgatgaggccctgcgcaactatgtggccgtgggcggctccctggatctcgtggcggggctcgacaacttctgctggtgtgacccggtccagtcggacaagacccctgacggcgagtacaagatggcccaactggttcgctccaacaaggccctctacgactattgcgtcgccttcggcatccctctcatctctggcaaggattccatgaagaacgacttctgggacggaaacgtaaagatttccattccgccgaccctcctgttctctgtcatcggcaagatcgacgacatccgtacggcggtcaccatggacgccaagcgtccgggcgacatcgtctacctcctgggcaagaccggctatgaactgggaggctccgagtacatggccctcaagggattagtgggtaacagcgtgccgcaggtgaacaccgccaaggcgctgccgcgctaccgcgccctgcaccgggccatcagccagggcctggttgcttcgtgccacgacctttccgatggcgggctcgccgtggccttggccgaaacggcttttgccggcggatttggcattgtcgccgaactgtcacgggtcctctggagcggtgacgaagccctgaaaggagatgcagctctcctgttctcagagtctgcgtcgcggcacctcgtcacggtccgccccgagaatcgggaggctttcgagtcggtcatggcagcgaattgcttctcctccatcggggtggtgacggaagaggggagggtgacggttaccggtctttcgggcaccagggtcatcgacgcagggatcgacgaactcaagcaagcgtggcagagcccgctgagggagctgtaa

SEQ ID NO: 52723 - protein, 996 aa, Geobacter sulfurreducens PCA
MAQRIEVALKEGVRDARGERVRREIEHFLHLPVHEVRTIDVYTVDAGLSPDELEKAASEPFSDPVIQTWSLDRPLADGFDYLVEVGFRPGVTDNVGRTAREAIEYITGRPFAAGEGVYTSVQYLLSGALSRTDVERIARDLLCNTLIQRYIILDRAEFAAAGGVAVVVPKVTGETRAQVREIDLNVSDDELMRISREGVLALTLDEMKVIQAHYRNPAVIAERSKVGLAAKPTDAELEAIAQTWSEHCKHKIFSGTIEYIDENGNREEIRSLFKTFIQGTTKTVREQLGERDFCLSVFKDNAGVIRWNDDWSLVFKVETHNSPSALDPYGGALTGIVGVNRDPFGTGKGSKLIFNTDVFCFASPFYDKPLPSRLLHPRRIYEGVVEGVEHGGNKSGIPTVNGSIVFDDRFAGKPLVFCGTAGLMPATINGAPAHEKFIRPGDLIVMTGGRIGKDGIHGATFSSEELHEGSPVTAVQIGDPITQKRMTDFLIRARDKGLYNFITDNGAGGLSSSIGEMSGECGGCRMDLSKAPLKYPGLDPWEILISEAQERMSLAVPPEHIDEFIAMARRFGVEATILGEFTDSGYFHIMYGDRTIAYLPMDFLHGGLPPMQMRGVWEVKRHEEPALEVKQDYAADLKQLLGSLNICSKESVVRRYDHEVQGGSVVKPFTGVANDGPSDAAVIRPVLDSFEGVVVSHGICPRYSDIDAYHMTANAIDEALRNYVAVGGSLDLVAGLDNFCWCDPVQSDKTPDGEYKMAQLVRSNKALYDYCVAFGIPLISGKDSMKNDFWDGNVKISIPPTLLFSVIGKIDDIRTAVTMDAKRPGDIVYLLGKTGYELGGSEYMALKGLVGNSVPQVNTAKALPRYRALHRAISQGLVASCHDLSDGGLAVALAETAFAGGFGIVAELSRVLWSGDEALKGDAALLFSESASRHLVTVRPENREAFESVMAANCFSSIGVVTEEGRVTVTGLSGTRVIDAGIDELKQAWQSPLREL

SEQ ID NO: 52724 - DNA, 3099 bp, Wolbachia endosymbiont of Drosophila melanogaster
  CDS (1)..(3099): transl_table=11
atggcaaacattagaatagaagttttaaataaatgcgagcaaattggctgcagatggttagtcaacgtttactcgatttacatacgcaaagaattaccatccaaattatatgaagaaatttgcgggctattttataataaagtcatacaaaactgccgttattattcctacaatgaaaaccttgaagaagttccgtatgatttcatagaaccacaagcaaagtggggcttggaaataagcttcctacctggcatgaccgataatgtaggcaacacagtgaaacaaattgttagagagtatttaataagcaaaggctatatcgaccagcctgtcatcccagccccttcttttgtcatcccagtgcttgacactgggatccagaaagagaaaacgcagattccagcgtcacgcgctggaatgacaccaattgagatcaaagcaagaagttcaaaattgattctaagtcaaggagatttaccaaccgaagatgatataaaacaagagttcaaccccatcactgagtattgcacacttatctgtaaagaaaataataactatagctggaaatattatggtaaatataagtcattaaatacccactccggtgtcattccagcgcgtgaccaggaaaaaaaagaatggatcccagtgtcaagcactgggatgacagaaaaaaaggctgggatgacaaaagagagcactggagtgatatcaagtagtaatggggctaaatctgttgatttaaatgtaagtgaccaagaacttgagaaaatcagcagagatggaatcgatggtaatggcactttagggctctcgctggcagcaatgaaagctataaaggattactttaaaaaacttggtagaaatccatatgatattgaacttgagtctctggcacagacttggtctgaacattgtaaacacaatattttttgctcccctattgatgaaataaaagacggtctatatgctcattatattaagcgtgcaacgcgtgagataaattctgacatatgcgtgtcagttttctccgacaacgcaggaggaataatttttgatgacgattacttgattgtagataaagttgaaactcacaatagcccttcagctcttgatccatttggtggagcaatgaccggagtgcttggagttaatcgcgatatagtgggtttcgggaaaggcgcagagcctataatgaatacctattacttttgctttgccaaagaagcaaaaggcaaattttatagggataaagagcgcactgatgagatcttaccgccaaaatatataatgaaagaagtgattcacggtgttaatgttgctggtaattgctctggtattccaacacaacttggatcggtatatttcgacgatagattttgtggcaagccattagtttttgtcggaagcattggaattattccacgcaatataaataatgcaccttcacacattaaaggaccaaaaaatggcgataagattgtaattattggcggaagagttggaagagatggaattcacggtgcaacgttctcttcagaggctttatcgggaaatagcccttcaacaattgtgcaaattggtgaccctataacacaaaaaaaattatccaatgccgtcataaaagcaagagatcttgatctttataatgcaataacggataacggagcaggtgggctgtcgtcgtctattggtgaaatgggaaaagacggatttgaagttgatttgagcaaggttctccttaaaaacgatggtatggctcagtgggaaatatggatatcagaatcacaagagagaatgaccttagcagtgccagaagaaaatctccctatgtttaagcaaatcatgaaaaaacatgatgtggaggtttgtgtgattggagagtttaatgagagtggtaaagctgttgttaaatgtcctgaagggacagtaataatggacatcgaaactgaatttctgcatgatggtaatcccaaagtgcatttacagacgaaaccgtggtctaaggggcttccagcgctatgcgctggaatgacaacaagttcgccttctttagcaattgaactaaaagaaatgctgagcagaccaaacatttgcagcaaagagttcatagtggtgcaatatgaccatgaggttcaagggtcgtcagtgctgaaaccactgcagggcaagggaagagtgtgcagtgaagctattgtttcaaggccaatcctttcttcaaataaaggtgttgtaaaatcgcaaggatttggctcaagttatggagaaattgacacctaccacatggcagcatgtgcaattgacaccgcgatacgcaactatgtagccgcaggaggaaatataaatcatctagcgttgctcgacaatttttgttggtgtgatgcttataatccagaaaggttgtggcaactaaagaaagctgcagaggcttgttacgacttcgcaactgcatttaaaacaccattcatatccggaaaagacagtatgttcaatgacttcaagggatatgatgaaaatggcgagaaagtgataatctctgcaccaccttcattactcatctcagcaattggaattatagaaaatattgaaaatgcggtatcgcttgatgtaaaaatgccaggggacttgatatatgtgcttggagaaacacttgatgaacttggtagatctgaatatcagttatatagtggaataggtaataacaacgtaccaaaagttgatgcaaagagcgctaggaagttgtatgagcgttacaaccaggcaagaaaagatggcataattgcctctgcaattgcaccaaacttaggcggattagttattgctctggcaaaatcgctaattgcaggagaccttggtgctgaaatcgatctttcactagtgccaataggaaaaatacaaaatacagacataataaacaagataataatgttttctgaatcgcaaagtagaattttggttactattgcaccacaaaatcagaagaggtttgaagaattgtttgaaggtgcagtttattcatgtattggcaaagtaacagagaaaaaggtgctaaacataaaggatgttttcaaagtagatctgaaagatgtggcatgctaa

SEQ ID NO: 52725 - protein, 1032 aa, Wolbachia endosymbiont of Drosophila melanogaster
MANIRIEVLNKCEQIGCRWLVNVYSIYIRKELPSKLYEEICGLFYNKVIQNCRYYSYNENLEEVPYDFIEPQAKWGLEISFLPGMTDNVGNTVKQIVREYLISKGYIDQPVIPAPSFVIPVLDTGIQKEKTQIPASRAGMTPIEIKARSSKLILSQGDLPTEDDIKQEFNPITEYCTLICKENNNYSWKYYGKYKSLNTHSGVIPARDQEKKEWIPVSSTGMTEKKAGMTKESTGVISSSNGAKSVDLNVSDQELEKISRDGIDGNGTLGLSLAAMKAIKDYFKKLGRNPYDIELESLAQTWSEHCKHNIFCSPIDEIKDGLYAHYIKRATREINSDICVSVFSDNAGGIIFDDDYLIVDKVETHNSPSALDPFGGAMTGVLGVNRDIVGFGKGAEPIMNTYYFCFAKEAKGKFYRDKERTDEILPPKYIMKEVIHGVNVAGNCSGIPTQLGSVYFDDRFCGKPLVFVGSIGIIPRNINNAPSHIKGPKNGDKIVIIGGRVGRDGIHGATFSSEALSGNSPSTIVQIGDPITQKKLSNAVIKARDLDLYNAITDNGAGGLSSSIGEMGKDGFEVDLSKVLLKNDGMAQWEIWISESQERMTLAVPEENLPMFKQIMKKHDVEVCVIGEFNESGKAVVKCPEGTVIMDIETEFLHDGNPKVHLQTKPWSKGLPALCAGMTTSSPSLAIELKEMLSRPNICSKEFIVVQYDHEVQGSSVLKPLQGKGRVCSEAIVSRPILSSNKGVVKSQGFGSSYGEIDTYHMAACAIDTAIRNYVAAGGNINHLALLDNFCWCDAYNPERLWQLKKAAEACYDFATAFKTPFISGKDSMFNDFKGYDENGEKVIISAPPSLLISAIGIIENIENAVSLDVKMPGDLIYVLGETLDELGRSEYQLYSGIGNNNVPKVDAKSARKLYERYNQARKDGIIASAIAPNLGGLVIALAKSLIAGDLGAEIDLSLVPIGKIQNTDIINKIIMFSESQSRILVTIAPQNQKRFEELFEGAVYSCIGKVTEKKVLNIKDVFKVDLKDVAC

SEQ ID NO: 52726 - DNA, 3030 bp, Bdellovibrio bacteriovorus HD100
  CDS (1)..(3030): transl_table=11
atgcaaagaatatccgtgcgcagccgctatgatcacagcactgaaaaagctcttaaatcggcgttgtcgctggaagctccagtgaacgaactgcaactgcgccgcgtgtactggctgcttgaaaagaaatccggcgccgccaaagagtttcctcttcaagccgtaatggataaagtcttctttgatcccatctcggaagttcagcaaaccggctttatggactatcaggacggtaaaacttatgtggaagtccgtttcctggccggagtcaccgacaacatggcccgcactgcgaccgaagcgttgatgttgttttctgcgcaacataattcttcctggcaggagttccctctggaagtccacagcgggtgggagatggaaatcagcggggatatttccaaagagcagattcagaaggttctgttccagaatcttgccaatccccttttaaacaaactagaaatccagacgggcgcagccctaaaacaagaaaattcatgggcagcctatccaaacttttggaaggcctctgaacacacgccccagttgcagcttttgaatttggacgttgaaacccttcagcgcatcaacaacgaacgtggactggctctcagtgatgaagagattcaaaccattctgactcatttcagttccccggaagtggctgccgagcgagcttcttatggctggcacggcaagatcacggaagtcgagctggagtgtctggcacaaacctggagtgaacactgcaagcacaagatctttgctgctgaagtggactataccgaggcctgcggcgacttcccggccttgggtgacaagaaaatcaccagtctttataaaagctatatccaaaaagccaccaaagatctggatgactgtggttatctggtttccgtttttaaagacaatgcaggcattgtcgactttgattcaaaattaaatgtgtgtgttaaagtcgaaacacacaatagcccgtcggcgctggatcctttcggcggcgctttgacgggcattttaggtgtgaatcgcgacattctggggtgcggcctgggcgcaaagcccgtcgcgaacacggatgtgttctgtctttccactccgaacttgttccctgcatctgattctccgcaaagacctgagctgttaaaagatcccggtgtcatcttccgcggtgtccatcagggggttgaagagggcgggaatcaaagcggcattccgactatcaacggtgctttctgttttgccagcgagtttgccgcgaagcctttgatttttgtgggctcggtgggcgtgatgcccaaaactgttcacggccgtgccagcgaatccaaagaaatccgtcccggcgatctgattgtggtggccggtggccgtcttggaaaagacggcgtgcatggtgcgacgttcagttcgttggcgttgcatgacaacgtggcttccaacgtcgtgcaaatcggtgacagcatcacgcaaaagcgtctgttggatttcactctgaaagcccgcgacaacggctggattcaagccattacggacaacggggcgggtggggttagttcctcgattggggaaatggcccagtattccggtggcgcgcgcatggatcttggcctgcatccggtgaaatactcgggccttgaatattgggaaatgctggtcagcgaatcccaagagcgcatgtcttacgctgtcagcccgaatcatctgatggactttatgaatctggcccgtcacatgggtgttgaagcgtttgttctgggcgaattcactgattcgggatcttttgacatcttccatggcaaagaacctttggccaaacttaagttggaattcctgcatgaaggtctcagccgcatgaagctgaaagcccacttcgacggaccgaaacaatatcaggaatacttccgcgccgaaggcaaagcacctctgactggcaacgacctggccgcggcactgaaaaaagttctggctaatcccaacgtggcttcgcgcgaacctttagttcggtactatgaccacgaagtgcaaggagccacccgcgtaaaaccttatggtggcaaaacccaatccggagccaacgatgccggtgtgctggatttgtcggtccacggaggggatgacaacaacgccgtggccgtttcaaacggactgtgcccgcagttttcctggtacgacacttatttgatggcacaaaaagcggtggacgaatccgtgcgcaatctggtggcgaccggagcggacccggcgaagatggccttggtcgacaatttctgctggccggacccgactccaaaagcaagcaatcccgatgcggcccacaagatggcgcagctggtgcgtgcgtgtgcggggctttacgatgcggctctggcttaccgcgctccgtttgtcagtggtaaagacagtatgaaaaacgactttatcggaaaaaccaagggcggggacaccgtgaagatttccgtaccgccgaccttgctggtaaccgcgatggcacaggtgccggatgcgacgaaaacagcacccggattcttccagaatgctggggatctgatttatcttttgggcacgccgacacaaagtctttatgcttcagttctttcccaggaattcaccgtgccggaatcagcacccgaatatccgaatctggcccgcaacaaggatctttatttccgtatctttactgcccatcagaaaacacttttgcagtcctgccatgatatttccgagggcggtctgatgactgctttggcggaaagcggctttggcaacaatctgggaatgaagctgaatctggaatcattcacttggaatgaactgtggtctgaaacgggttccttgtttgtggtcagtgtgaagcctgctgataagtctcagtttgaagaacttttcacgcatcagcaaagactgctgggggaagttcaggagaatcctgtgatgagttggcagcatcagggagccactcaaaacaccgctttgtccgaattgcaaaaaatctggtctgaaggagttctgaatgtctatcaagcctaa

SEQ ID NO: 52727 - protein, 1009 aa, Bdellovibrio bacteriovorus HD100
MQRISVRSRYDHSTEKALKSALSLEAPVNELQLRRVYWLLEKKSGAAKEFPLQAVMDKVFFDPISEVQQTGFMDYQDGKTYVEVRFLAGVTDNMARTATEALMLFSAQHNSSWQEFPLEVHSGWEMEISGDISKEQIQKVLFQNLANPLLNKLEIQTGAALKQENSWAAYPNFWKASEHTPQLQLLNLDVETLQRINNERGLALSDEEIQTILTHFSSPEVAAERASYGWHGKITEVELECLAQTWSEHCKHKIFAAEVDYTEACGDFPALGDKKITSLYKSYIQKATKDLDDCGYLVSVFKDNAGIVDFDSKLNVCVKVETHNSPSALDPFGGALTGILGVNRDILGCGLGAKPVANTDVFCLSTPNLFPASDSPQRPELLKDPGVIFRGVHQGVEEGGNQSGIPTINGAFCFASEFAAKPLIFVGSVGVMPKTVHGRASESKEIRPGDLIVVAGGRLGKDGVHGATFSSLALHDNVASNVVQIGDSITQKRLLDFTLKARDNGWIQAITDNGAGGVSSSIGEMAQYSGGARMDLGLHPVKYSGLEYWEMLVSESQERMSYAVSPNHLMDFMNLARHMGVEAFVLGEFTDSGSFDIFHGKEPLAKLKLEFLHEGLSRMKLKAHFDGPKQYQEYFRAEGKAPLTGNDLAAALKKVLANPNVASREPLVRYYDHEVQGATRVKPYGGKTQSGANDAGVLDLSVHGGDDNNAVAVSNGLCPQFSWYDTYLMAQKAVDESVRNLVATGADPAKMALVDNFCWPDPTPKASNPDAAHKMAQLVRACAGLYDAALAYRAPFVSGKDSMKNDFIGKTKGGDTVKISVPPTLLVTAMAQVPDATKTAPGFFQNAGDLIYLLGTPTQSLYASVLSQEFTVPESAPEYPNLARNKDLYFRIFTAHQKTLLQSCHDISEGGLMTALAESGFGNNLGMKLNLESFTWNELWSETGSLFVVSVKPADKSQFEELFTHQQRLLGEVQENPVMSWQHQGATQNTALSELQKIWSEGVLNVYQA

SEQ ID NO: 52728 - DNA, 2301 bp, Treponema denticola ATCC 35405
  CDS (1)..(2301): transl_table=11
atgaacgatgaggaacttttagccctctcaaacgaaaggcgggctgccttggatatttacgagatgagggctatcagggaattctacaagacggaaaaacggccttgtaccgatgcggaatttgaaacgatagcccaaacttggagcgagcactgcgttcataaaacctttaaggcaaaaatagacattgacggcacctctctaacagaggagcaaaaaaaagcctatcccggtctttgcgtaaacagcataatcaaaacttatatcaaaaaggccaccgacgacatcgatgctccttgggtgctttcctcctttgtggacaatgcaggtattatcgaatttgacgaaaaatacgaagtttcctttaaggcggaaactcataaccatccttccgccattgagcccttcggaggagccaatacgggagtcggaggcgttatcagagatgttatgggcgtttcagcccgtcccttcgccgtaaccgatgtcctttgcttcggccatcccgacactccggcagaaaatgttcccaagggaactcttcatcctaaacgcataatctcaggcgttatagaaggagttaaggactacggaaacaagatgggcattccgaccgtaaacggaggcgttcactaccacgaggcctatgcttcaaatcctttagtctactgcggatgtgcaggtatcgctcccagaggcaagcaccgcacaaagccctcggccggcgatcatattatttctttaggcggaaaaacgggacgggacggccttaggggagccacattttcttctatggtaatggatgcaagcaccggcgatgttgcaggctcatcggttcaaattggagaacctataattcaaaaaaaggtagcggaagttcttatagatgcccgcgatcaaggtctttattctgcaattaccgactgcggagcgggaggttattcttctgccgtaggcgaaatggcttcggccctcggctgcgatgtagacctcgcaaaaatccccgtaaaatatcagggccttgccccgtgggagctctggctttcggaggcacaagaaagaatggttatcgccgttcccaatgacaaacttgaagccttacaaaaactttgcgatgccaacgatgttgaattaacaaacctcggccgttttaccggagatgccgttttaagggtacgcttcggcgaaaaggaaataataaatctttcatgcggctttttacattcgggcccgcctcagagaaaactaaaagcggctcctccaaaagatggaaaaccttttataaaatatcctgaatataaggaacccgatctgaatgcggctctaaaggctgtgataaatcatcatgccgtaaattcaaaagaagacatagtaaggctttacgaccatgaggttcaaggcggaacagttctacgcccatatgacggccctgaagggaatgtgcctcaggatgcagccgttataaagcctatggaaacggaagggaaaaaagccgttgctatctcaaatgccttaaatccgaggcaggggcttttggatccttatgcagccgcagcaagtgcgatagacgaagctgtccgaaatgccgttgcagccggagcagaccccgaaaaaacagccatcctcgataacttttgcttaggagatcccaaccgtcccgaaaccatgtgggcactgatagagatggcacgctcttgctataacacagcccttgtctttaaaactccctttatttcggggaaggactcctttaataacgaatacctaagctcggagggaaaaagagtttccattccgccgtcacttttaatatcggcgatgggaatagttcccgacatcggaagggttccgggctcggactttaaaaaagaaggctcggctatttaccttgtaggtaaacctcaattttctttcggcggctcggtctttgcagaacttttcggcattccttcaggagagagcgctgccgttcctccctttaaaaaagaagcagctgagctttataaaaaacttcattccaatataatgaagggcttggtgctttcatgccacgacctaagcgaaggaggccttgctgccgccctctacgaaatgtgtttaagcggcataggagccgaattaaaagaagacttccacacaaggctgggagcttcaaagattgcaagcctctttggggaaaccacaggctgtcttcttgtagaaataaaagaagaaaaccgttcggcctttgaaaaggaaatggaaggtgcttcaatttacgagataggaaaaacctgcggaaaggcaggattaaaactttaa

SEQ ID NO: 52729 - protein, 766 aa, Treponema denticola ATCC 35405
MNDEELLALSNERRAALDIYEMRAIREFYKTEKRPCTDAEFETIAQTWSEHCVHKTFKAKIDIDGTSLTEEQKKAYPGLCVNSIIKTYIKKATDDIDAPWVLSSFVDNAGIIEFDEKYEVSFKAETHNHPSAIEPFGGANTGVGGVIRDVMGVSARPFAVTDVLCFGHPDTPAENVPKGTLHPKRIISGVIEGVKDYGNKMGIPTVNGGVHYHEAYASNPLVYCGCAGIAPRGKHRTKPSAGDHIISLGGKTGRDGLRGATFSSMVMDASTGDVAGSSVQIGEPIIQKKVAEVLIDARDQGLYSAITDCGAGGYSSAVGEMASALGCDVDLAKIPVKYQGLAPWELWLSEAQERMVIAVPNDKLEALQKLCDANDVELTNLGRFTGDAVLRVRFGEKEIINLSCGFLHSGPPQRKLKAAPPKDGKPFIKYPEYKEPDLNAALKAVINHHAVNSKEDIVRLYDHEVQGGTVLRPYDGPEGNVPQDAAVIKPMETEGKKAVAISNALNPRQGLLDPYAAAASAIDEAVRNAVAAGADPEKTAILDNFCLGDPNRPETMWALIEMARSCYNTALVFKTPFISGKDSFNNEYLSSEGKRVSIPPSLLISAMGIVPDIGRVPGSDFKKEGSAIYLVGKPQFSFGGSVFAELFGIPSGESAAVPPFKKEAAELYKKLHSNIMKGLVLSCHDLSEGGLAAALYEMCLSGIGAELKEDFHTRLGASKIASLFGETTGCLLVEIKEENRSAFEKEMEGASIYEIGKTCGKAGLKL

SEQ ID NO: 52730 - DNA, 2970 bp, Methanococcus maripaludis S2
  CDS (1)..(2970): transl_table=11
atgcaaacgattaatgctgaaaacaacggaaaaatatacagaattgagatagatacaaaagaaaaaagttctgaagcaaaggtaatcgaaaaaaagctatttgaacttggatacgatgtatcagtagatgtaagcaaggtctacacgataaactacgatttttcaattgcaaatgttgaaaaaattgcgaattcactccacaatccagtaactgaaatgccaaggattaacgttccgtccaataataaattcgactgggcacttgaacttggatttttaccgggagttacggataacgttgcaaacacgaccactgaaatcattaacgatcttttaaaaatcgatattggactcagcaaggtattttcatcaaaagtagtatatttaagcggaaatttagcgaaacacgacgttgaaaaaattgcagaagaacttatcaacattttaatcgagagataccacataaaaacctatgataattacgttaaaggctgtggaatggactacattatcccaaaagtaaatttaacatctgaaccaaaggttattgaaatcagcctaaatgtcagcgacgatgaattaatcgaaatcggtaaaaagggaatattggatccagaaactggcgaaagaagaggccctcttgcactcgatcttgattacatcactgcaataaaagaatactaccaaaaagaaggtagaaatccaacagatatcgaattagaagcactcgctcaaacatggtctgaacactgtaaacacactatttttgcatcccaaatcgacgatatcgaagaaggaatctttaaaaagtacataagaaatgctacaaatgaaataagggaagaactcggcgaaaaagacttctgtatttcagtattttctgataactccggtggaatcatctttgacgatgaatggatggtaactgacaaagcagaaacccacaacagcccttcagcactcgacccattcggtggtgcgattacgggaatcgttggagttaaccgggataccgtaggatttggtcttggagcacttcctgttgcaaataaatatggattttgcgttggaagacctgaagatacagaaataatctacaggggacaaaataaaacaaacccatcacttctaccaagaagaatactcgatggaatcgttcacggtgtaaatgttggtggaaaccagtcaggaatccctacacctaacggattcgtttactttgatgatacttacaaaggaaaacctctcgtattcgttggaactatcggtttaattccaagaaaactacccgacggaagattaagccatgaaaaagcggctgaaaatggagataatatcgtaattatcggtggaagagttggaaaagatggaattcacggtgcaactttctcatcagaagcaatggatgaaggaagccctgcagctgcagttcagattggagacccaattacccagaaaaaactctctgatgcagtaatcaaggaagcaagagataaaggactttacaacagtattaccgacaacggtgcaggaggaatttcctgttcagttgcagaaatggcagaagaatgcggcggtttcgttgtagaacttgaagaagttcctttaaaataccctggacttgaaccttgggaaatctggataagtgaatcacaagaaagagttacactatccgttccagacgataaattagaagaattcatggatttaatgaaaataaggggtgttgaagctgttgtaattggtaaatttaacaataccgatagagcagttgtaaactacaacggaaagaccataatggatttagaaatggactttttgcacaatggacttccaaaaagaaaattaataacaaaaccctattcctacaggactgaagaaccagaaattactgttgaaaaccagttggaaacttttgaaaaaatacttggaaaccacaacaactgcagttttgagtacatttcaaaacagtacgaccatgaagtgcaaaacaattcagtaataaaaccacttcaaggaaaaggaagagtaaatggaactgcttcagttataaggccccttttgagtagccaaaaagggcttgtaatgagccagtcgcttcttccaagattaagcgaaatcagctgctacgacatggctgcatgtgccatggatactgcaattagaaactgtgttgcagttggcggaaatataaaccacatcgcgataatggacaatttctgctggtgcagttcagatgaacctgaaagattatatcaattaaaagatgctgcaaaatcgtgctacgattacgcgaaaacatatcttactccattgatatcgggaaaagacagtatgtttaacgatttcaaaggatttgatgaaaataacaacccaattaaaatttcagtgcatccaaccctgatgatgtcagctcttggtgtaattgataatatagaacatacaaattcaatggatttaaaattaaaagacgatttaatttacgttatcggagaaactaaagatgaatgcgggggaagtgaattctaccatgcatttggcgaagttggcggaatatctccaaaagttgatgcaaaatcagctagaaaattgtacgaaaaaatgtacgaattaagccagaaaggaatatttagctcatgcgcatcagttgctgctggagggcttgtaattacacttgcaaaaatggcaatttcaggttgccttggattagaagctgatttatcaaaagctccaaatgaaaacatttcttttgaaaaaatcatgtattctgaaacacaatcaagattcatagtaactattgctcctgaaaatgaaaaagaattcgaaaatttaatgaaagaattcaaaataggaaaaataggtaatgttaccgaaaaagacttcgtaattaagaataataaagatattgtgataacttcaagccttgaaagcatggacgaagtatacagaagtagatttgaggatttctag

SEQ ID NO: 52731 - protein, 989 aa, Methanococcus maripaludis S2
MQTINAENNGKIYRIEIDTKEKSSEAKVIEKKLFELGYDVSVDVSKVYTINYDFSIANVEKIANSLHNPVTEMPRINVPSNNKFDWALELGFLPGVTDNVANTTTEIINDLLKIDIGLSKVFSSKVVYLSGNLAKHDVEKIAEELINILIERYHIKTYDNYVKGCGMDYIIPKVNLTSEPKVIEISLNVSDDELIEIGKKGILDPETGERRGPLALDLDYITAIKEYYQKEGRNPTDIELEALAQTWSEHCKHTIFASQIDDIEEGIFKKYIRNATNEIREELGEKDFCISVFSDNSGGIIFDDEWMVTDKAETHNSPSALDPFGGAITGIVGVNRDTVGFGLGALPVANKYGFCVGRPEDTEIIYRGQNKTNPSLLPRRILDGIVHGVNVGGNQSGIPTPNGFVYFDDTYKGKPLVFVGTIGLIPRKLPDGRLSHEKAAENGDNIVIIGGRVGKDGIHGATFSSEAMDEGSPAAAVQIGDPITQKKLSDAVIKEARDKGLYNSITDNGAGGISCSVAEMAEECGGFVVELEEVPLKYPGLEPWEIWISESQERVTLSVPDDKLEEFMDLMKIRGVEAVVIGKFNNTDRAVVNYNGKTIMDLEMDFLHNGLPKRKLITKPYSYRTEEPEITVENQLETFEKILGNHNNCSFEYISKQYDHEVQNNSVIKPLQGKGRVNGTASVIRPLLSSQKGLVMSQSLLPRLSEISCYDMAACAMDTAIRNCVAVGGNINHIAIMDNFCWCSSDEPERLYQLKDAAKSCYDYAKTYLTPLISGKDSMFNDFKGFDENNNPIKISVHPTLMMSALGVIDNIEHTNSMDLKLKDDLIYVIGETKDECGGSEFYHAFGEVGGISPKVDAKSARKLYEKMYELSQKGIFSSCASVAAGGLVITLAKMAISGCLGLEADLSKAPNENISFEKIMYSETQSRFIVTIAPENEKEFENLMKEFKIGKIGNVTEKDFVIKNNKDIVITSSLESMDEVYRSRFEDF

SEQ ID NO: 52732 - DNA, 2340 bp, Prochlorococcus marinus str. AS9601
  CDS (1)..(2340): transl_table=11
atgataaatcatgaaaataatgatctatttgatcttaatgaagcattaaaagttgaaaatttaacacttaatgattacgaagaaatttgcaaaagattaaagagaaaacctaatagaacggaattaggcatgtttggcgttatgtggtctgaacattgttgttatagaaattcaaaacctttactatctaagtttcctactaaaggtaaaaatgttttagttggacctggagaaaatgctggcgttattgatgttggaaataatcaaaaacttgtttttaaaatagaaagtcataatcatccatctgctattgaaccttttcaaggcgcagcaacaggtgtaggaggaattttaagagatatatttacaatgggtgcaaggccaatagcagtgttgaattcattgagatttggtaaccttgataaatcatcaaatgttgatttactacgaggagttgtatcgggtattgcacattatggaaattgtgtaggggtgcctactgttggaggtgaaattgacttcgatgatagttactctggaaatcctctagtgaatgtcatggctttaggacttttagagaccgaggaaatcgtttgttctggagctaaaaatgtaggatcaccagtattatatgttggtaatacaactggcagagacggtgttggaggtgctagttttgctagttcagaattaactacaacttcattggatgatcgacctgcagttcaggtaggtgatccatttattgagaaaagtcttattgaagcttgtttggatgctttcaagacaggggatgtaattgcagctcaagatatgggtgctgcaggtttaacatgcagtagcgcagaaatggccgcaaatggaaatttagggatatctattgatttagatttggtcccttctagagaagatgatatgtcttcatatcaatatttattatctgaatcgcaagaaagaatgttgtttgtggttaaggaagaaaaaattagtgatcttattgaaaaatttaataaatggggattatatgccagtgttattggtgaagttataggaactaatgaggtaattatttctcataaaggtaatattgtggcccaaatacctacttctgccttatctgatgatactcctgtaaattttcacaatgtgattaataatccacccgacgatcttttaaataaatgggaatggaaagaaaatgatttaccagaaattaacgagcaaaaaatattttcattgaaggaaaataaaaaattttctttttcagaaatcattttaaagctactctctaatccatcaatagcttctaaaagatggatttataaacaatatgactctcaagtacaagcaaatacagtatttacacctggaaaatcagatgcagctgtagtaagactaagggaacaaaataaaaaaagtaaaaataaagtattttctggtgttgctgcttcagttgattgtaatagtagatgggttgcgcttgatccttttagaggatctatcgctgctgtagcagaatcagctagaaatgttagttgtgttggtgctgaaccagtagcaattacaaataatttaaatttttcttctcctgagaatgaaataggatattggcaactctcatcttcatgtaatggaattgctgaagcctgtaaagctttagaaactcctgttacaggaggtaatgtatctttatataatgaatcaaaaaataaagataatctaattactcctattaatcctactcctgttattggaatggttggaaagatagataatgtcgaaaaagctataagtagtgaatggaaaaatattgaagatcaaatctggttaattggttcttataaatcagatacgacaactgcagctagttcttatttggaatattttcatggagaaattacaggtcggcctccaaaaatagatttgtcggatgaaaagttttgtcagagttttttaagaaatgcgattttaaacagtcttgtagtttcttctcacgatataagtgacggaggtttagctatagctttagcagagtcttgtattttgtccgcaaggggtgcaactatagaattagagaaagatttaaatagagttgataatttattatttgccgaaggggggtcaagaattattttttcaattagtaaaatgaaacaaaatgaatggtttaattatttaaaacaaaatcaaataaattttccatcaagtgtttatgtaaaaaaaataggatacgtatctagtgatacgctgaagataaaaatcaacgaaaaaaatatttgcaatattagggttgaggaattaaccgaaaaatttaataatagtatttcagattacttttaa

SEQ ID NO: 52733 - protein, 779 aa, Prochlorococcus marinus str. AS9601
MINHENNDLFDLNEALKVENLTLNDYEEICKRLKRKPNRTELGMFGVMWSEHCCYRNSKPLLSKFPTKGKNVLVGPGENAGVIDVGNNQKLVFKIESHNHPSAIEPFQGAATGVGGILRDIFTMGARPIAVLNSLRFGNLDKSSNVDLLRGVVSGIAHYGNCVGVPTVGGEIDFDDSYSGNPLVNVMALGLLETEEIVCSGAKNVGSPVLYVGNTTGRDGVGGASFASSELTTTSLDDRPAVQVGDPFIEKSLIEACLDAFKTGDVIAAQDMGAAGLTCSSAEMAANGNLGISIDLDLVPSREDDMSSYQYLLSESQERMLFVVKEEKISDLIEKFNKWGLYASVIGEVIGTNEVIISHKGNIVAQIPTSALSDDTPVNFHNVINNPPDDLLNKWEWKENDLPEINEQKIFSLKENKKFSFSEIILKLLSNPSIASKRWIYKQYDSQVQANTVFTPGKSDAAVVRLREQNKKSKNKVFSGVAASVDCNSRWVALDPFRGSIAAVAESARNVSCVGAEPVAITNNLNFSSPENEIGYWQLSSSCNGIAEACKALETPVTGGNVSLYNESKNKDNLITPINPTPVIGMVGKIDNVEKAISSEWKNIEDQIWLIGSYKSDTTTAASSYLEYFHGEITGRPPKIDLSDEKFCQSFLRNAILNSLVVSSHDISDGGLAIALAESCILSARGATIELEKDLNRVDNLLFAEGGSRIIFSISKMKQNEWFNYLKQNQINFPSSVYVKKIGYVSSDTLKIKINEKNICNIRVEELTEKFNNSISDYF

SEQ ID NO: 52734 - DNA, 2340 bp, Prochlorococcus marinus str. MIT 9515
  CDS (1)..(2340): transl_table=11
atgatagattctttaaataattataattatgatgttaatgattcacttaaagttgaaaatttaacaaccgaagattatgaagagatatgtaaaagattaggaagaaaacctaatagaacagaattaggaatgtttggagttatgtggtctgaacattgttgttatagaaattcaaaaccattattagctaatttccctactacagggaaaaatgttttggtaggtccaggtgaaaatgctggcgttattgatgttgggaacgaccagaaacttgtttttaaaatagaaagtcacaatcatccttcagcaattgaaccttttcaaggagctgcaacaggcgttggtgggattttaagagatatttttactatgggtgccagacctatagcagtattaaattctttaagatttggtaatcttgataaatcatctaatatttctttattacgcggagtcgtttctgggatatctcattatggcaattgtgtaggtgttcctactgttggaggagaaatatattttgatgatagttattcaggtaatcctttagttaatgtcatggctttaggtctattggaaaccgatgaaattgtttgttcaggggcaaaagaagttggttatcctgttttatacgtaggaaacacaacaggaaaggatggagtaggaggtgctagttttgctagttcggaactgaatactaattctttagataataggcccgcagtacaagtcggtgatccatttattgaaaagagtcttattgaagcttgtctcgatgcttttaaaacaggagatgtaattgcggctcaagatatgggtgctgcgggattaacatgtagtagtgctgaaatggctgcgaatggagggttagggatatctataaacttagatttagttcctgctagagagaatgatatgactgcttaccagtatttattatccgaatcccaagaaaggatgttattggttgttaaagaagaaaaattaaatattctcattgagcaattcaaaaagtggggactctttgcaaatgttataggcgaagtaatttcaaaaaaagaagttattatttctcaaaaaaatcaaatagtcgctcaaattcccacttctgctttatctgatgaaactccaattaatattcataaagttattaaagaacctcctgattatttacaaaagaaatggaaatggtctgaagatgaattgcctattattactaataataaaattttatcttttaaagataaaaaacaatattctttatctgaaattattttaaatcttttatcaaacccttcaattgcttctaaaagttggatttataaacaatatgattcgcaagtgcaatcaaatactgttttcaaacctggggaagctgatgcagctttactaagacttagagcgcaagatgaaagaaataaaaacaataatttttctggtgtagctgcttctgtagattgcaatagcagatgggttttgttagacccttatagaggaagtattgcagccgtcgcagaatccgcaagaaatgtaagttgtgtcggtgctgagcctttagctataactaataatttaaatttttcatcacccaatactgagataggatattggcaactttcatcagcatgtgacggaatttctaaggcttgtatcgctttagaaacccctgttacaggaggaaatgtttctttatataatgaatccaaaaataaaaataatcaagtaaccccgatatatcctacgcctgttattggaatggtaggaaaaattcaaaatgtagataaagctgtaagttcaggatggaagaatataaatgatcaaatttggctgataggttcatatagatcagaatcgtcaattggaggaagttcttatttagattattttcatggtttaattacaggaagacctcctaaaattaatttgcaagatgaaaaatattgtcaaacttttttaagagatgcaatttcaaaaaattatatttcatcctctcacgatattagtgatggcggtttagcaatcgctttatcagaatgttgtattttgtcttctaagggtgcaaatattcagttagaagaaaaaaatgctcgtaaggataatatcttgtttagtgagggaggttcaagaataattttttcactcaataaaatggaagagacaaattttttgaattttgtcagcattaacaataaaaattttggttctaatatatacgtaaaaaagattggatttgtttctgaagcaaaccttactattaacgttcaagatgaagaactttgtaatctaagggttgatgaattagccgaaaaatttaataatagtatttccaacagcttttaa

SEQ ID NO: 52735 - protein, 779 aa, Prochlorococcus marinus str. MIT 9515
MIDSLNNYNYDVNDSLKVENLTTEDYEEICKRLGRKPNRTELGMFGVMWSEHCCYRNSKPLLANFPTTGKNVLVGPGENAGVIDVGNDQKLVFKIESHNHPSAIEPFQGAATGVGGILRDIFTMGARPIAVLNSLRFGNLDKSSNISLLRGVVSGISHYGNCVGVPTVGGEIYFDDSYSGNPLVNVMALGLLETDEIVCSGAKEVGYPVLYVGNTTGKDGVGGASFASSELNTNSLDNRPAVQVGDPFIEKSLIEACLDAFKTGDVIAAQDMGAAGLTCSSAEMAANGGLGISINLDLVPARENDMTAYQYLLSESQERMLLVVKEEKLNILIEQFKKWGLFANVIGEVISKKEVIISQKNQIVAQIPTSALSDETPINIHKVIKEPPDYLQKKWKWSEDELPIITNNKILSFKDKKQYSLSEIILNLLSNPSIASKSWIYKQYDSQVQSNTVFKPGEADAALLRLRAQDERNKNNNFSGVAASVDCNSRWVLLDPYRGSIAAVAESARNVSCVGAEPLAITNNLNFSSPNTEIGYWQLSSACDGISKACIALETPVTGGNVSLYNESKNKNNQVTPIYPTPVIGMVGKIQNVDKAVSSGWKNINDQIWLIGSYRSESSIGGSSYLDYFHGLITGRPPKINLQDEKYCQTFLRDAISKNYISSSHDISDGGLAIALSECCILSSKGANIQLEEKNARKDNILFSEGGSRIIFSLNKMEETNFLNFVSINNKNFGSNIYVKKIGFVSEANLTINVQDEELCNLRVDELAEKFNNSISNSF

SEQ ID NO: 52736 - DNA, 2412 bp, Prochlorococcus marinus str. NATL1A
  CDS (1)..(2412): transl_table=11
atgacagtatcctttgaaaataaagatttcaaccaattcattaattcatcaaaatttcttgttgaatatgatgttatgtccgctcttaagcaagaagggttaaaacaatctgattatgtagaaatttgtagaagacttaatcggggtccaaatagaaatgagttaggaatgtttggtgttatgtggtctgaacattgttgctatcgaaactctcgtcctttactaaaaaacttgcctacaacaggtagtcgaatccttgtagggcctggagaaaatgcaggcgtagttgatattggttttggacaaagattagtttttaaaattgaaagtcataaccatccatcagccgtcgagccttttcaaggagcagcaactggtgtaggtggaattcttagagatatttttactatgggagctaggccaatagccttattgaatgctttaaggtttggtccattagatgatgaaaaaaatattagtttattggaaggtgtcgttgcaggtatttctcactatggaaattgcgtaggagttcctactattggaggagaagtgggatttgatagtagttattcaggtaaccccttagttaatgtaatggggttgggtttgatggaaacagaagaaatagtttgttcaggtgccagtggaatagactttccagttctttacgtaggaaatacaactggtagagatggtatgggaggagcaagctttgctagttctgaactttctaaaacttcaatagatgatcgaccagccgttcaagttggtgatccttttcttgagaaaggattaatagaagcttgtttagaggcttttaaaacaggatatgtaattgctgcacaggatatgggagcggcggggttgacttgtagttgttctgaaatggcttcaaaaggtgaggtaggaattgaattgaatcttgaccttgttccggctagggaaaagggcatgactgcatatgaatttttgttgtctgaatcacaagaacgaatgctgtttgttgtgaagcctggttcagaagaagaattgagagaattatttataagatggggattatatgttgaagttgttggaaaagttttaaaagaaaaagttgttagagtgattcataaaggtgaagttgtagcaaatcttcccgcatctgcgcttgctgatgatacgcctatagaagaacatttattaataaattcaacacctgaatatttgcaagaacattggaaatggactgaagatttattacctaaaactttagataatggaattattaatataaagaataatttatttattagttggaataatgttctattagatttattaagtatgccttcaatagcttcaaaaaattggatttataaacaatatgattatcaagtacaatctaatacagttgtttctcctggagaagctgatgctgctgttattaggattcgatctcaaaatgactttttaaccaagccaaagaaagatagaggaatagcttcagtcgtagattgtaatgatagatgggtttatttagatcctctaagaggaagtatgtctgctgtcgcagaagcagctaggaatttaagttctgtgggagctgaacctatagcaattacaaataatttaaatttttcttctccagacaaaccagttggtttttggcaattatcaatgtcatgtgaagggataactaaagcttgtttagcattgagtactcctgttacaggaggaaatgtgtcattatataatgatactaaattgcaaaataataccgttttacctatacatccaactccagtaattggtatggttgggttaatagaagatatcaataaaatttgtaaaaaatcttgggttaaagctgaagatcaaatatggatgattgggttacctttagaaaataatataaaccaagatgaaagaatttcactatctgcttcttcttttttagagtatattcatggattgaaaacaggaagacctcctgaaatagatttaaatttagaaaaacaagttcatgcatttctaagagaagtaataaaacaaggtattgttaattctgctcatgatttaggtgatggtggtctggcagttgctatagctgaatgttgtatctcttctggctatggagcaaatattattctccctcctagccaatcaaggttagatagacttttatttgctgaaggaggcgcaagagttttagtgagttgttcaactgatcaaagcgaagaattaaagaaatattataaaaatatttccttacaaggatctaatcttttttcaatatctcatttaggtaatgtaaataatcaaaaaaaactattagtgtctcaatcgaataatacaattatagatgttaatattctagacttgaaagatacatataaagatgccatccataaaaaaataactaaataa

SEQ ID NO: 52737 - protein, 803 aa, Prochlorococcus marinus str. NATL1A
MTVSFENKDFNQFINSSKFLVEYDVMSALKQEGLKQSDYVEICRRLNRGPNRNELGMFGVMWSEHCCYRNSRPLLKNLPTTGSRILVGPGENAGVVDIGFGQRLVFKIESHNHPSAVEPFQGAATGVGGILRDIFTMGARPIALLNALRFGPLDDEKNISLLEGVVAGISHYGNCVGVPTIGGEVGFDSSYSGNPLVNVMGLGLMETEEIVCSGASGIDFPVLYVGNTTGRDGMGGASFASSELSKTSIDDRPAVQVGDPFLEKGLIEACLEAFKTGYVIAAQDMGAAGLTCSCSEMASKGEVGIELNLDLVPAREKGMTAYEFLLSESQERMLFVVKPGSEEELRELFIRWGLYVEVVGKVLKEKVVRVIHKGEVVANLPASALADDTPIEEHLLINSTPEYLQEHWKWTEDLLPKTLDNGIINIKNNLFISWNNVLLDLLSMPSIASKNWIYKQYDYQVQSNTVVSPGEADAAVIRIRSQNDFLTKPKKDRGIASVVDCNDRWVYLDPLRGSMSAVAEAARNLSSVGAEPIAITNNLNFSSPDKPVGFWQLSMSCEGITKACLALSTPVTGGNVSLYNDTKLQNNTVLPIHPTPVIGMVGLIEDINKICKKSWVKAEDQIWMIGLPLENNINQDERISLSASSFLEYIHGLKTGRPPEIDLNLEKQVHAFLREVIKQGIVNSAHDLGDGGLAVAIAECCISSGYGANIILPPSQSRLDRLLFAEGGARVLVSCSTDQSEELKKYYKNISLQGSNLFSISHLGNVNNQKKLLVSQSNNTIIDVNILDLKDTYKDAIHKKITK

SEQ ID NO: 52738 - DNA, 2385 bp, Prochlorococcus marinus str. MIT 9303
  CDS (1)..(2385): transl_table=11
ttgagagttgattatgacgtggctgcggctttacgtcatgaaggtctcaaaccagatgattacgacgagatttgtcgtcgtctccaacgtgcacctaaccgagttgagctgggcatgtttggtgtgatgtggtctgaacactgttgttatcgcaattcaaggcctttactcagcagctttcctacaactggtcatcggattttggttggtcctggagaaaatgctggtgtcgtggatttaggagatggacagagtttggctttcaaaattgaaagccacaatcatccttctgcattggaaccttttcaaggagctgctacaggtgttggcggaattttgagagatatttttactatgggtgcaaggcctattgcgcttcttaatgctttgcgttttggacctcttgaagatgaacgtaatgttggtcttatcgagggggtcgttgaaggtattgctcattacggcaattgtgtgggagttcctaccgttggtggtgaggtggcgtttgattccagttattccggtaatccgttagttaatgcaatggctctagggctgatggaaacagacgagattgtctgttctggggctcatggtgttggttatccggtggtttatgtcggtagtacaactggtcgtgatggcatgggtggtgccagttttgctagtgcagagctaacaaaagcttctctggatgatcgtcctgcggttcaggttggtgatccatttttggaaaaaggtttaatcgaagcttgtcttgaagcttttaagagtggcgatgttgttgctgctcaggacatgggtgccgctggtcttacctgcagctgttcggagatggctgctaagggtggtcttggtattgaacttgatcttgatcgagttcctgctcgtgagcttgggatgactccatatgagtttttactctcggaatctcaagagagaatgctttttgtggtgaagcctggacaagagcaatctttgatggagagatttatccgttgggggttgcaagcagcaattgttggttgcgttcttgaaaagaaggtggttcgtgttttgcaaaaaggtgaagttgttgctgaggtgcctgctaatgcgttagctgatgatactccaattgatcgacatgaattagttagtgatcctccgctagagattcaagctaaatgggattggcaggaggatctattaccagttgttggtttaaaagggatcaatttaaattcacaatctcattttggtagtaatttatcatgggatgaaattcttttaaagttacttgatgaccctacgattgcttcaaaacgttgggtttttcgtcaatatgatcatcaggttcaagccaatacagtttcagctccaggagtttctgatgctgctgttgtgagattacgtccacagcaaggtgaaggctctgtagatgaggtgaaccggggagttgcggcagttgttgattgtcctaatcgatgggtttttcttgatccagaacgtggtgctatcgccgctgtcgcagaagcggcccgtaatcttagttgtgtaggtgcggagcctttggctgtcacggacaatctaaattttccttctccggaaacgcctactggttattggcaattggctttagcttgtcgtggtctttctaaggcttgtaagagcttgtcaacaccagtaactggaggaaatgtttctctatataatgagactcgcttagctgatggagaaatacaacctattcacccaacaccagttgttggaatggttgggttagttcatgatcttgcaaatgtgtgtggtcaggcttggcttgagcctggtgatttgatttggcttttaggcgtgcctatcgatacaacagttgcggttgatcctcgcgttagccttgcgggtagtagttatcttgaatgtattcatggtttagttactggtaggcctccggagattgatctgaaacttgagtgtttagttcaatctttcctacgcaattctattaccgagggatttgttcgctctgctcatgatctaagtgatggaggtcttgcagttgcagttgctgagtgctgtatcgctggaaacttgggtgcacatcttgagttaccatccagcgatgctcgattggatcggttgttatttgcggaaggtggttcacgcatcttggtgagtgttccgtcgacgcaggctgttgcctggcaaaaggttttaaatcaggcaaagaccgcatcccctggcgcagtgtttgatcagtaccttggtgttgttacggctgatgaggagttgctgatcactcaggctggcaatcgcttggttcaacttcctttgaatcagctgagggagtgctttgagcaggcaatccctcgtcgtatgggcttggatctctcttcaagcgtctga

SEQ ID NO: 52739 - protein, 794 aa, Prochlorococcus marinus str. MIT 9303
MRVDYDVAAALRHEGLKPDDYDEICRRLQRAPNRVELGMFGVMWSEHCCYRNSRPLLSSFPTTGHRILVGPGENAGVVDLGDGQSLAFKIESHNHPSALEPFQGAATGVGGILRDIFTMGARPIALLNALRFGPLEDERNVGLIEGVVEGIAHYGNCVGVPTVGGEVAFDSSYSGNPLVNAMALGLMETDEIVCSGAHGVGYPVVYVGSTTGRDGMGGASFASAELTKASLDDRPAVQVGDPFLEKGLIEACLEAFKSGDVVAAQDMGAAGLTCSCSEMAAKGGLGIELDLDRVPARELGMTPYEFLLSESQERMLFVVKPGQEQSLMERFIRWGLQAAIVGCVLEKKVVRVLQKGEVVAEVPANALADDTPIDRHELVSDPPLEIQAKWDWQEDLLPVVGLKGINLNSQSHFGSNLSWDEILLKLLDDPTIASKRWVFRQYDHQVQANTVSAPGVSDAAVVRLRPQQGEGSVDEVNRGVAAVVDCPNRWVFLDPERGAIAAVAEAARNLSCVGAEPLAVTDNLNFPSPETPTGYWQLALACRGLSKACKSLSTPVTGGNVSLYNETRLADGEIQPIHPTPVVGMVGLVHDLANVCGQAWLEPGDLIWLLGVPIDTTVAVDPRVSLAGSSYLECIHGLVTGRPPEIDLKLECLVQSFLRNSITEGFVRSAHDLSDGGLAVAVAECCIAGNLGAHLELPSSDARLDRLLFAEGGSRILVSVPSTQAVAWQKVLNQAKTASPGAVFDQYLGVVTADEELLITQAGNRLVQLPLNQLRECFEQAIPRRMGLDLSSSV

SEQ ID NO: 52740 - DNA, 3771 bp, Clostridium thermocellum ATCC 27405
  CDS (1)..(3771): transl_table=11
atggttagaagagtttttgttgaaaagaaaaaaggatttgatctggaagcccagagaatgtacagggatttgaaagaaaacttgagaatcgccggactttccggtgtaaggctaattaacaggtatgatgttgagggaatatccgatgaagagtatgaaagcgcaaagaggactatattttccgagcctccggtggaagaggtttttgacgaaacaataagtatagatgaaaaggacaaaatagttgccatagaatatttgccgggacagtatgaccagagagcagattctgcatctcaatgtattcagatactgacccatggggaaagacccaatgtcaaagttgcaaaacttatagtgcttcagggggatgtatcgcaggaagagtatgaaaaagtaaaaaaatatttgataaaccctgtggaatgtcaggaagcgtctttggaaaaaccgtcaactttggatgtggaagtaaccgttcccgaggatgtaaaagttttaaagggatttgtcaatatgagccgggaagaactcaaagcttttgcggacagcatgggtttggcaatgtctctggaggatctggaattctgccaaaaatatttcagggatgatgaaaagagggacccaaccatcaccgaaataagggttattgacacctattggtccgatcactgccgtcataccacatttcttacaaggatacagaatgtggatattcaagaaggaagatttactgctcctgtaaaggaggcttacgagagttatcttcaatcaagaaagtttgtctatggcgacaaagagaaagatgtctgccttatggacattgcggttatgggcatgagagaattaaagaaaagaggattgcttaacgaccttgatgagtctgatgaggtaaatgcatgcagtatagtggttaatgtggatgtaaacggaaaaaatgaagagtggcttgtgatgttcaaaaatgaaacccacaaccatccaacggaaatagaacctttcggaggagctgccacctgtcttggaggtgccataagagacccgctgtcgggaaggtcttatgtgtaccaggccatgcgtgtaacgggaagcggcgatccgcgtaccagcatagatgatacgctgcccggaaagcttccgcaaagaaagataacaacggaggcggctcagggctacagctcctatggaaaccagataggccttgccacaggacaggttgctgaaatatatgatgaagactttgtggcaaaaagaatggaaataggtgctgtaatcggtgctgctcctagaaaaaatgtaaaaagagaaaagccaaaagcaggagatgtaatcatacttcttgggggaaggacaggccgtgacggctgcggaggtgctaccggttcttcaaaggagcatacggaagagtctttgcttacctgtggagccgaagtgcaaaagggtaatcctataactgaaagaaaaattcaaagactgttccgaaagcccgaggtcagcacgatgattaaaaaatgcaatgactttggtgccggaggagtgtccgttgccataggggagcttgcggaaggacttagaataaatcttgacgcagtgcctaaaaagtatgaaggtcttgacggtactgagcttgccatctcggaatcccaggaaagaatggcggttatggtggcaaaagaaaacgtggatgctttcattaaagcttcaaaagaagagaatcttgaggccacacctgttgcggaagtgacggatgacagaagacttgtaatgtactggagaggcaaggccattgtagatattaagagggatttccttgataccaacggagttaagcaaaataccaatgtcctggttgccgctcctttggaagaagagtattattttgccgggattccaaaagaggctgaggattattcaaaggatcttcgtgatgcatggattcgaaacttgcagagactaaatgtatgcagccagaaaggacttgttgagagatttgacagtaccatcggtgccggaacggtgctgatgcctttcggcggaaaataccagctcacgccttcggaaggaatggcggcaaagattccggtaccggacggagatacaaacaccggtacgcttatggcttttgggtacaatccttccattgcaaaatggagtcccttccatggagccatgtttgccgtgatagaatctgttgccaagattgttgccatgggcggaaatcacaaaaaaataagattgtccctgcaggagtattttgagaaacttggcaaagaccccaaaaagtggggtaagccctttagtgctttgcttggtgcatattatgcccagaccaaaatagggatacctgccattggaggaaaggacagcatgtccggaacctttaaggacatgaacgtgcctccgactttggtttcctttgccgttgcaacaatggacgtaaattatacagtgtcttccgagtttaaaaaggccggaagcaaagtggttctcattcctcttaaaataaatgaaaatggagttccggattttgctcagctggataaaaattatgcggctgtgcatcaaatgattatgaacagaaaagtgcttgcggcccacactgtaagaagcggcggaatttctgaagccataagcaaaatgtgctttggaaacatgataggattcaaatttgaggcatcagtggatgcaagaaggctttttgagccgctttacgggtctattgtgcttgagttggatgaaagcttaaatttggatgagttgttgaaagatgtggaatatgaatttttgggtgttacccaggagaagaggacaattgactttggtaatgtcggccttgacctggtggagctttgccaaaaatggcaggagcctttggagaaggttttcccgacggctactgagcctgtaagcagtactcccaaacagtataaatttgaaaaaagaaacagtataaagccctcggtttcaatagcaaaaccaagaatattcatgccgatattcccgggaaccaactgtgagtatgatactgccagggcttttgaaaaggccggcggggtggtggacatgctcgttattaaaaaccttactccgagcgaaatagatgaatccataagggaaatggcaaaaagaattgacaattcccaaattgtgatgatacccggagggttcagcggcggtgatgagcccgacggttcaggaaaatttattgccacggcgtttagaaatccaagggtaaaagatgcggtaatgaggcttcttaaagagagagacggacttatgctgggtatatgcaacggcttccaggctcttataaagcttggacttgtaccttatggtgaaatcagggaccttaacgaagacagtccaacccttacctttaacacaataggccgtcacgtttcatgtatggttaggacaaaaataacatccactctgtcgccatggtttaacaatgtaaaggtgggagatattcataccatagccgtatcccacggtgaaggaagatttgtggcaagtaaagaagtgcttgaaatgatggaaaagaacggtcagatagcaacccagtatgttgaccttgacggtaatgcaacctatgacataaggtttaatccaaatggctctttcgaagcaattgagggcataacaagcccggacggaagagttctgggtaaaatgggacattctgagagaataggaaccaatgttgccaaaaatgtgccgggggataaggaccaaaagttgtttgaggcaggagtaaactattttaagtaa

SEQ ID NO: 52741 - protein, 1256 aa, Clostridium thermocellum ATCC 27405
MVRRVFVEKKKGFDLEAQRMYRDLKENLRIAGLSGVRLINRYDVEGISDEEYESAKRTIFSEPPVEEVFDETISIDEKDKIVAIEYLPGQYDQRADSASQCIQILTHGERPNVKVAKLIVLQGDVSQEEYEKVKKYLINPVECQEASLEKPSTLDVEVTVPEDVKVLKGFVNMSREELKAFADSMGLAMSLEDLEFCQKYFRDDEKRDPTITEIRVIDTYWSDHCRHTTFLTRIQNVDIQEGRFTAPVKEAYESYLQSRKFVYGDKEKDVCLMDIAVMGMRELKKRGLLNDLDESDEVNACSIVVNVDVNGKNEEWLVMFKNETHNHPTEIEPFGGAATCLGGAIRDPLSGRSYVYQAMRVTGSGDPRTSIDDTLPGKLPQRKITTEAAQGYSSYGNQIGLATGQVAEIYDEDFVAKRMEIGAVIGAAPRKNVKREKPKAGDVIILLGGRTGRDGCGGATGSSKEHTEESLLTCGAEVQKGNPITERKIQRLFRKPEVSTMIKKCNDFGAGGVSVAIGELAEGLRINLDAVPKKYEGLDGTELAISESQERMAVMVAKENVDAFIKASKEENLEATPVAEVTDDRRLVMYWRGKAIVDIKRDFLDTNGVKQNTNVLVAAPLEEEYYFAGIPKEAEDYSKDLRDAWIRNLQRLNVCSQKGLVERFDSTIGAGTVLMPFGGKYQLTPSEGMAAKIPVPDGDTNTGTLMAFGYNPSIAKWSPFHGAMFAVIESVAKIVAMGGNHKKIRLSLQEYFEKLGKDPKKWGKPFSALLGAYYAQTKIGIPAIGGKDSMSGTFKDMNVPPTLVSFAVATMDVNYTVSSEFKKAGSKVVLIPLKINENGVPDFAQLDKNYAAVHQMIMNRKVLAAHTVRSGGISEAISKMCFGNMIGFKFEASVDARRLFEPLYGSIVLELDESLNLDELLKDVEYEFLGVTQEKRTIDFGNVGLDLVELCQKWQEPLEKVFPTATEPVSSTPKQYKFEKRNSIKPSVSIAKPRIFMPIFPGTNCEYDTARAFEKAGGVVDMLVIKNLTPSEIDESIREMAKRIDNSQIVMIPGGFSGGDEPDGSGKFIATAFRNPRVKDAVMRLLKERDGLMLGICNGFQALIKLGLVPYGEIRDLNEDSPTLTFNTIGRHVSCMVRTKITSTLSPWFNNVKVGDIHTIAVSHGEGRFVASKEVLEMMEKNGQIATQYVDLDGNATYDIRFNPNGSFEAIEGITSPDGRVLGKMGHSERIGTNVAKNVPGDKDQKLFEAGVNYFK

SEQ ID NO: 52742 - DNA, 2340 bp, Prochlorococcus marinus str. MIT 9301
  CDS (1)..(2340): transl_table=11
atgataaatcaagaaaataatgatctatatgatcttaatgaagcactacaagttgaaaatttaacacttaatgattacgaagaaatttgcaaaagattaaagaaaaaacctaacagaacagaattaggcatgtttggcgttatgtggtccgaacattgttgttatagaaattcaaaacctttactatctaagtttcccactaaaggtaaaaatgttttagttggacctggagaaaatgctggagttattgatgttggaaataatcaaaaacttgtttttaaaatagaaagtcataatcatccttctgctattgaaccttttcaaggagcagcaacaggggtaggaggaattctaagagatatatttacaatgggtgcaaggcccattgcagtcttgaattcattgagattcggcaatcttgataaatcatcaaatgttgatttactacgaggagttgtatccggtattgcacattatggaaattgcgtaggtgtgccgactgttggaggtgaaattgactttgatgatagttactctggaaatcctttagtgaatgttatggctttaggacttttagagaccgaagaaatcgtttgttctggagctaaaaatgtaggatcaccagtcttatatgttggtaatacaactggcagagatggtgttggtggtgctagttttgctagttcagaattaactacaacttcattggatgatagacctgcagttcaggtaggtgatccatttgttgagaaaagtcttattgaagcttgtttggatgctttcaagacaggggatgttattgcagctcaagatatgggtgctgcaggtttaacatgcagtagcgcggaaatggctgcaaatggaaatttagggatttcaattgatttagatttggtcccttccagagaagatgatatgtcttcataccaatatttattatctgaatcgcaagaaagaatgttgtttgtcgttaaagaagaaaaaattaatgatcttattgaaaaatttaataaatggggattatatgccagtgttattggtgaagtgataggaactaatgaggtaattatttctcataaaggtaaaattgtggctcaaatacctacttctgccttatctgatgatactcctgtaaatttccataatgtgattaataacccacccgacgatcttttaaataaatgggaatggaaagaaaatgatttaccagaaattcatgagcaaaaaatattttcattgaaggaaaataagaaattttcttttcaagaaatcattttaaaactactttctaatccatcaatagcttctaaacgatggatttataaacaatatgactctcaagttcaagcaaatacagtttttaaacctggaaaatcagatgcagccgtagtaagactaagggaacaatataaaaaaaataaaagtaaagtattttctggtgtcgctgcttcagttgattgcaatagtagatgggttgcgcttgatccttttagaggatctatcgctgccgttgcagagtccgctagaaacgttagttgtgttggtgctgaacctgtagcaattacaaataatttaaatttttcttcccctgagagtgaaataggatattggcaactctcatcttcatgtaatggaattacagaagcttgtaaagctttagaaactcctgttacaggaggtaatgtatctttatataatgaatctaaaaacaaagataatctaattactcctatcaatcctactcctgttattggaatggttggaaagatagataatatcgaaaaagctataagttgtgaatggaaaaatattgatgatcaaatctggttaattggctcctataaatcagatacgacaattgcagctagttcttatttggaatattttcatggagaaattactggtcggcctccaaaaatagatttgttggatgaaaagttttgccagagttttttaagaaatgcgattttaaatagtcttgtagtttcttctcacgatattagcgatggcggtttagctatagctttagcagagtcttgtattttatctgcaaaaggtgcaacgatagaattaaaaaaagatataaacagagaagataatttattgtttgcagaaggaggttctagaattattttttcaataaacaaaattaaacaaaatgaatggcttaattatttaaaacaaaatcaaataaactttccatcaagtgtatatgtaaaaaaaataggacatgtgtctagtgaaactcttaagataaatatccaagataaaaatatttgcaatattagggttgaggaattatctgaaaaatttaataatagtatttcagattacttttaa

SEQ ID NO: 52743 - protein, 779 aa, Prochlorococcus marinus str. MIT 9301
MINQENNDLYDLNEALQVENLTLNDYEEICKRLKKKPNRTELGMFGVMWSEHCCYRNSKPLLSKFPTKGKNVLVGPGENAGVIDVGNNQKLVFKIESHNHPSAIEPFQGAATGVGGILRDIFTMGARPIAVLNSLRFGNLDKSSNVDLLRGVVSGIAHYGNCVGVPTVGGEIDFDDSYSGNPLVNVMALGLLETEEIVCSGAKNVGSPVLYVGNTTGRDGVGGASFASSELTTTSLDDRPAVQVGDPFVEKSLIEACLDAFKTGDVIAAQDMGAAGLTCSSAEMAANGNLGISIDLDLVPSREDDMSSYQYLLSESQERMLFVVKEEKINDLIEKFNKWGLYASVIGEVIGTNEVIISHKGKIVAQIPTSALSDDTPVNFHNVINNPPDDLLNKWEWKENDLPEIHEQKIFSLKENKKFSFQEIILKLLSNPSIASKRWIYKQYDSQVQANTVFKPGKSDAAVVRLREQYKKNKSKVFSGVAASVDCNSRWVALDPFRGSIAAVAESARNVSCVGAEPVAITNNLNFSSPESEIGYWQLSSSCNGITEACKALETPVTGGNVSLYNESKNKDNLITPINPTPVIGMVGKIDNIEKAISCEWKNIDDQIWLIGSYKSDTTIAASSYLEYFHGEITGRPPKIDLLDEKFCQSFLRNAILNSLVVSSHDISDGGLAIALAESCILSAKGATIELKKDINREDNLLFAEGGSRIIFSINKIKQNEWLNYLKQNQINFPSSVYVKKIGHVSSETLKINIQDKNICNIRVEELSEKFNNSISDYF

SEQ ID NO: 52744 - DNA, 4011 bp, Herminiimonas arsenicoxydans
  CDS (1)..(4011): transl_table=11
atgctgattttgccaggttccaacgccctgtctgcctttcgtaccgaacgtctcttactgcaactgcaagaaattgatcatgcaattgccggcgtgaccggacagtttctgcatttcgtcgattctccggcagccattgcgccggatgacgtcaagcgcctcaacggtttgctgacctacggcgaaccattttctgcaaaactggaaggcgaggaatttgtcgtgatcccgcgtttcgggacgatttcgccctgggccagcaaggcgaccgatatcgcgcataactgcggcatgactgatattcaccggatagaacgcggcattcgctatatcgtgcacctgaaatccggtttgctcggcggcgtgaaaaaactctccggcgaggctatcgttgcggtgcaagccttgctgcatgaccgtatgacagaaatggtattgcgcagtgccgacgaggcatccggcctgtttcgtgaactgcaagccaagccattggccttcattgatatcgcgcagggcggcaagtcggcgctggagcaagccaataccgaacttggcctggccttgtccgacgatgaaatcgattatctgctgaccgccttcacgacggccaagcgcaatccgaccgacgttgaactgatgatgttcgcgcaagccaatagcgaacattgccgtcacaagatattcaatgccgactggactatcgatggcgtgaaacaggatatgtccctgttcgcgatgatcaagaatacgcatcaactggcgccgcgcggcactgtcgtggcgtatagcgacaactcgtccgtgatcgaaggcgcaaccgtcacgcgcttctatccgcgtggcgctgccagcggcaacgtgtacgctgcgtcggaagagttgacgcatatcctgatgaaggtcgagacgcacaatcatccgactgcgatctcgccgttccccggtgcttctaccggggccggcggtgaaattcgcgatgagggtgcaaccggtcgcggcgccaaacccaaggccggcttgagtggctttaccgtttccaatctgatgttgccggatggcgtacaacagtgggaaaacgatcacgatgtcactgtggcagtaacagacgacacaaaatcgaacgcatacggcaagccggaccgcatcgcttcgccgctgcaaatcatgatcgaaggtccgataggcgcggccgcattcaacaatgaattcggtcgcccgaatctgggcggctatttccgcacctacgaacaaaatgttgcgggtgcggttaacgggtatcacaagccgatcatgatcgcgggcggcataggcagcatcgccgcgattcatacgaagaagcacgacctgccggttggcagtctactgatccagcttggcggccccggcatgcgtatcggtatgggcggcagcgctgcctcgtcgatggcaacgggaacgaatactgccgatctggatttcgattcggtacaacgcggcaatccggaaatggaacgacgcgcgcaggaagtcatcaatgcatgctgggcgatgcaggataacaatcccatcctgtccattcacgacgtaggcgccggcggtttgtcgaacgcctttccggaaatcaccaatgatgcgaaacgcggtgcaatctttgatttgcgcgcggtaccgctggaagaaagcggcatggcgccgaaggaaatctggagcaatgagtcgcaggaacgttatgtactggcgattgcgccggaaagcctgccgcagttccagtatctgtgcgaacgcgaacgctgtctgtttgccgtagtcggcactgctactgaagaacgccagctgaaggtgatcgatccgcagcacggcaacgagccggtcgatatgccgatggatgtcttgctcggcaaaccgccgaaaatgcatagggacgtcagtcacgttaaacaaactttgcctgctgtcgatttgacgggcatcgatttgctggaagcctcgatacgcattttgcgtctgccgacggtagccgacaaatccttcctgatcacgataggcgatcgcacagttggcggcactacggtacgcgatcagatggtcggaccatggcaggtgccggtagccgattgcgcagtgaccaccatgagtttcgaaggctatctgggtgaggcaatggcgatgggcgagcgtaccccgctggctgtcatcaatgccgccgcatcgggccgcatggccgtcggtgaggcgctgaccaatattgctgctgcaccgatcgccgatatctccgatatcaaactgtccgccaactggatggccgcttgcggccagccgggccaggatgccgcgctgttcgatacagtaaaagcagtcgggatggagttgtgtccagccctgggcatcagcatcccggtcggcaaggattcattgtcgatgcgtactacatggaacgatgatggggaagacaaggctgtcatttcaccggtttcgctgatcgtatccgcattcgcaccggttcatgacgtgcgtcagtcgctgacgccgcaactgcgtaccgatgccggcgacaccgtgctgatcgcaatcgatctgggccgcggcaagaatcgtctgggcgcttccgcctttgcacaagtcatacagcagctcgggaacgagacgcctgacgtcgatagcgcagaagatctgaaaggattctttgccgcgatccagcgcttgaacaaggagcagaagctgctcgcgtatcacgacagatccgacggtggcttgttcgcgaccttgtgcgaaatggcgtttgccggtcacagcgggctgtcggtcaatctggatatcctgacgctggaaggcgaacatgccagcgatggcggcgatgcgaaaaactgggctgaccaggtgtccgcgcgccgtaatgacatgaccttgcgcgccttgttcaatgaagagctcggcgccgtgatccaggtacgtgcagagcagaagtcggaggtcatgaatgtgctgcgcgaatacaatctcggcgcctgcagccacatcgtcggcaaactgaatgagaccgacatgatcgaattcacgcgcgatgcgaaggtgatttacagccagtcgcgcatcgatctgcatcgcttctggagcgaaaccagctggcgtattgcgcgtctgcgcgacaatccggattgtgccgatgccgaatatgatcgcatcctcgacaagctggatcctggcatcaagtcggtgctgaccttcgatccgcaggaagatattgctgcaccgttcattgccaagggtgcccggccacgcgtggcgattctgcgcgagcagggtgtcaattcgcaggtggaaaccgcatacgtcatgcacaagtcgggcttcgaagcagtcgacgtgcacatgagcgacctgattaccggccgtgcacatctgagcgatttcaagggcatgatcgccgtcggcggcttctcctacggcgacgtactgggtgcaggcgagggctgggcaaaaacaattctgttcaacatgcaattggcagaagagttcgcaatctacttcgatcgcgccgatacgtttgcactgggcatttgcaacggctgccagatgatgagcaatctgaaatcgatcattccgggagcacaagcctggccgaaatttacgcgcaacaaggcggaacagttccaggcgcgtttctcgatggtcgaagtgacggattcgccgtcgatcttcttcaatgacatggccggtacgcagacaccgatagccatcgcacatggtgaaggttatgcagatttctccctgacgggcgacatcgacaaggcaatcgtggcgatgcgcttcatcgacaacaaggggcaaaccagcgaaacctatccgtacaatccgaacggttcgccggaaggcattacgtcggtgacgacgccggacggccgctttaccgtactgatgccgcatgcagagcgtgtattccgcagcgtccagcagtcatggcatccagagtcgtggggcgaagattcgccgtggatgcgcatgttccgcaatgcgcgcaagtgggtgggctga

SEQ ID NO: 52745 - protein, 1336 aa, Herminiimonas arsenicoxydans
MLILPGSNALSAFRTERLLLQLQEIDHAIAGVTGQFLHFVDSPAAIAPDDVKRLNGLLTYGEPFSAKLEGEEFVVIPRFGTISPWASKATDIAHNCGMTDIHRIERGIRYIVHLKSGLLGGVKKLSGEAIVAVQALLHDRMTEMVLRSADEASGLFRELQAKPLAFIDIAQGGKSALEQANTELGLALSDDEIDYLLTAFTTAKRNPTDVELMMFAQANSEHCRHKIFNADWTIDGVKQDMSLFAMIKNTHQLAPRGTVVAYSDNSSVIEGATVTRFYPRGAASGNVYAASEELTHILMKVETHNHPTAISPFPGASTGAGGEIRDEGATGRGAKPKAGLSGFTVSNLMLPDGVQQWENDHDVTVAVTDDTKSNAYGKPDRIASPLQIMIEGPIGAAAFNNEFGRPNLGGYFRTYEQNVAGAVNGYHKPIMIAGGIGSIAAIHTKKHDLPVGSLLIQLGGPGMRIGMGGSAASSMATGTNTADLDFDSVQRGNPEMERRAQEVINACWAMQDNNPILSIHDVGAGGLSNAFPEITNDAKRGAIFDLRAVPLEESGMAPKEIWSNESQERYVLAIAPESLPQFQYLCERERCLFAVVGTATEERQLKVIDPQHGNEPVDMPMDVLLGKPPKMHRDVSHVKQTLPAVDLTGIDLLEASIRILRLPTVADKSFLITIGDRTVGGTTVRDQMVGPWQVPVADCAVTTMSFEGYLGEAMAMGERTPLAVINAAASGRMAVGEALTNIAAAPIADISDIKLSANWMAACGQPGQDAALFDTVKAVGMELCPALGISIPVGKDSLSMRTTWNDDGEDKAVISPVSLIVSAFAPVHDVRQSLTPQLRTDAGDTVLIAIDLGRGKNRLGASAFAQVIQQLGNETPDVDSAEDLKGFFAAIQRLNKEQKLLAYHDRSDGGLFATLCEMAFAGHSGLSVNLDILTLEGEHASDGGDAKNWADQVSARRNDMTLRALFNEELGAVIQVRAEQKSEVMNVLREYNLGACSHIVGKLNETDMIEFTRDAKVIYSQSRIDLHRFWSETSWRIARLRDNPDCADAEYDRILDKLDPGIKSVLTFDPQEDIAAPFIAKGARPRVAILREQGVNSQVETAYVMHKSGFEAVDVHMSDLITGRAHLSDFKGMIAVGGFSYGDVLGAGEGWAKTILFNMQLAEEFAIYFDRADTFALGICNGCQMMSNLKSIIPGAQAWPKFTRNKAEQFQARFSMVEVTDSPSIFFNDMAGTQTPIAIAHGEGYADFSLTGDIDKAIVAMRFIDNKGQTSETYPYNPNGSPEGITSVTTPDGRFTVLMPHAERVFRSVQQSWHPESWGEDSPWMRMFRNARKWVG

SEQ ID NO: 52746 - DNA, 4065 bp, Burkholderia vietnamiensis G4
  CDS (1)..(4065): transl_table=11
atggctcacttctcgtgttttcccggcgcttcggccctctccgatttccgtcaaacccgtctgctcgacacgctcaggcagatcgacgccaacatcgtcgccgtgcgcggccagttcctgcacttcgtcaatgcgtccgagccgctgtcggccgacgacagcgcgcgcatcgacgcgctgatgcactacggcgcgccgttcgagccggcggccgagaagggcacgacggagaccttcgtcgtgctgccgcgcttcggcacggtttcgccgtgggccagcaaggcgaccgacatcgcgcagcactgcggcctcgtgcaggtgcgccgcatcgagcgcggcgtcgaattcacggtgacgctgaagtcgggcctgctcggcggcaagaaggcgctgtccgacgacgcgcgtgcggccgtcgccgcggcgctgcatgaccggatgaccgagagcgtggtcgccgcgcgcgacgacgcgcggcatctgttcgacgaactgccggccaagccgctcgcgaccgtcgacgtgctgggcgccggccgcgcggcgctcgagcgggcgaacgccgagctgggcctcgcgctcgccgacgacgagatcgactacctggtcgacgcgttccgcaagctcgagcgcaacccgaccgacgtcgagctgatgatgttcgcgcaggcgaacagcgagcactgccgtcacaagatcttcaacgcgcagtggaccatcgacggcgaagcgcaggacatgtcgctgttcgcgatgatccgcaacaccgagaagctgagcccgcagggcacgatcgtcgcgtattcggacaactcgtcgatcatggtcggcgccgaagcggagcgctggttcccgcgcggcgcgggcgcggccggcgagccgggcgaacggtatggccgccataccgagctcacgcacacgctgatgaaggtcgagacgcacaaccatccgacggcgatctcgccgttccccggcgcggcgaccggcgcgggcggcgagatccgcgacgaaggcgcgaccggccgcggcgcgcggccgaaggccgggctgaccggcttcacggtgtcgaacctcgatctgccggacgcacgccagccgtgggaaaacgcccgcgatgcggcgcagccggtcggcgagcgcaacccgaacgagcagcacggcccgtacggtcgtccggaccggatcgcgtcgccgctgcagatcatgatcgacggcccgctcggcggcgccgcgttcaacaacgagttcggccgtccgaacctcggcggctacttccgcgtgtacgagcagaacgtcggcggcacggtgcgcggctatcacaagccgatcatgatcgcgggcggcctcggcaacatcgccgatcaacacacgcacaagcacgacgtgccggcgggttcgctgctgatccagatcggcggccccggcatgcgcatcggcatgggcggcggcgcggcgagctcgatggcgactggcgcgaacaccgccgaactcgacttcgactcggtgcagcgcggcaacccggaaatcgagcggcgcgcgcaggaagtcatcaacggctgctggcagctcggcgcggaaaacccgatcctgagcattcacgacgtcggcgcgggcggcctgtcgaacgcgttccccgagatcgtcgacggcgcgggcaagggcgcgcgcttcgagctgcgcaaggtcgcgctcgaggagtcgggcctgtcgccgcgcgagatctggtcgaacgaagcgcaggagcgctacgtgctggccatcgcgccggccgacctgccgcgcttcgaggcgatctgcgcgcgtgagcgttgcccgttcgccgtggtcggcgtcgcgaccgacgagcgccagctgcagctggtcgacgccgaagcgacgggtgccgacgaatatccggtcgacatgccgatggaagtgctgctcggcaagccgccgcgcatgcatcgcgacgtcgcgcgcgtcgcgaccgagcgtgcgccggtcgacgtgacgggcatctcgctcgcgcaggtcgcgctcgacgtgctcaagcatccgacggtcggcagcaagtcgttcctgatcacgatcggcgaccgctcggtgggcggcacgtcggtgcgcgaccagatggtcgggccgtggcaggttccggtggccgactgcgcgatcaccgcgctcgactacgcgggcttcaagggcgaggcgatgacgatggccgagcgcacgccgctcgcggtgatcgacgcgccggcgtcgggccgcatggcggtcggcgaggcgatcacgaacatcgcgagcgcgccgatcgcgtcgctcgacaagctgaagctgtcggcgaactggatggccgcgtgcggcacggccggcgaggatgccgcgctgttcgacacggtgaaggcgatcggcatggagctgtgcccggcgctcgggatcggcatcccggtcggcaaggactcgctgtcgatgaagacgaagtgggacgagcagggcgtcgcgaaggaagtggtgtcgccggtgtcgctgatcatctccgcgttcgcgccggtcgaggacgtgcgccgccacctgacgccgcaactgcgccgcgtcgccgacgcgggcgacagcgtgctgatcgcgattgatctgggccgcggcaagaaccggatgggcgcgagcatcttcgcgcaggtcacgcagcaggtcggcgacacgacgcccgacgtcgacgatccggaagacctgaagcgcttcttcaacgcgatccagtcgctcaacgcgcaaggcaagctgctcgcctaccacgaccgctcggacggcggcctgtgggcgaccgtctgcgaaatggcgttcgcgggtcacgccggcgtgtcgctgaacgtcgacatgctgacgctcgatcccgaccacgaatccgactacggcgacgcgaaggactgggcgaagcagacgagcggccgccgcgacgaccgcacgctgcgcgcgctgttctccgaagagctcggcgccgtcgtgcaggtgcgtgcgagcgagcgcgacgcggtgctcggcgcgctgcgcgaattcggcctgtcggcatgctcgcacgtgatcggcacggtcaacgatcgcgacgtgatcgaggtgtaccgcgacgcgaagaagatcttcgacgcaccgcgcgtggaactgcatcgcgcgtggagcgaagtgagctggcgcatcgcgcgcctgcgcgacaaccccgcgtgcgccgatgccgaacacgacgcgctgctcgatgcggccgaccccggcatctcgccggtcctcacgttcgatccggccgacgacatcgccgcgccgttcatcgcgacgggcgcgcgcccgcgcgtggcgatcctgcgcgagcagggcgtgaactcgcacctcgaaaccgcgtatgcgttcgaccgcgcgggcttcgatgcgcacgacgtgcacatgagcgacctgctcgccggccgtgcgacgctcgccgatttcgcgggcgcggtcgcgtgcggcggcttctcgtacggcgacgtgctgggcgccggcgaaggctgggccaagacgatccgcttcaacgcgcagctcgccgacatgttctcggcgttcttcgcgcgccccgacacgttcgcgctgggcatctgcaacggctgccagatgctgtcgagcatcgcgtcgatgatcccgggcgcgcaagcgtggccgaagttcacgcgcaacaagtccgagaagttcgaggcgcgtttctcgttcgtcgaagtcgagaagtcgccgtcgatcttcttcgcggggatggaaggctcgcgcattccggtcgcggtcgcgcacggcgaaggctatgccgacttctcgcagcagggcgacatcgaccgcgtcgcggtcgcgatgcgctacgtcgaccatcgcggcgaggcgaccgagcgctatccgttcaacccgaacgggtcgccggccggcatcacgtcggtcacgacggccgacggccgcttctcggtgctgatgccacacatggagcgcgtgcaccgcacggtcacgatgagctggcacccggaaggctggggcgaagcgagcccgtggctgcgcgtgttccgtaacgcgcgccgctggatcggctga

SEQ ID NO: 52747 - protein, 1354 aa, Burkholderia vietnamiensis G4
MAHFSCFPGASALSDFRQTRLLDTLRQIDANIVAVRGQFLHFVNASEPLSADDSARIDALMHYGAPFEPAAEKGTTETFVVLPRFGTVSPWASKATDIAQHCGLVQVRRIERGVEFTVTLKSGLLGGKKALSDDARAAVAAALHDRMTESVVAARDDARHLFDELPAKPLATVDVLGAGRAALERANAELGLALADDEIDYLVDAFRKLERNPTDVELMMFAQANSEHCRHKIFNAQWTIDGEAQDMSLFAMIRNTEKLSPQGTIVAYSDNSSIMVGAEAERWFPRGAGAAGEPGERYGRHTELTHTLMKVETHNHPTAISPFPGAATGAGGEIRDEGATGRGARPKAGLTGFTVSNLDLPDARQPWENARDAAQPVGERNPNEQHGPYGRPDRIASPLQIMIDGPLGGAAFNNEFGRPNLGGYFRVYEQNVGGTVRGYHKPIMIAGGLGNIADQHTHKHDVPAGSLLIQIGGPGMRIGMGGGAASSMATGANTAELDFDSVQRGNPEIERRAQEVINGCWQLGAENPILSIHDVGAGGLSNAFPEIVDGAGKGARFELRKVALEESGLSPREIWSNEAQERYVLAIAPADLPRFEAICARERCPFAVVGVATDERQLQLVDAEATGADEYPVDMPMEVLLGKPPRMHRDVARVATERAPVDVTGISLAQVALDVLKHPTVGSKSFLITIGDRSVGGTSVRDQMVGPWQVPVADCAITALDYAGFKGEAMTMAERTPLAVIDAPASGRMAVGEAITNIASAPIASLDKLKLSANWMAACGTAGEDAALFDTVKAIGMELCPALGIGIPVGKDSLSMKTKWDEQGVAKEVVSPVSLIISAFAPVEDVRRHLTPQLRRVADAGDSVLIAIDLGRGKNRMGASIFAQVTQQVGDTTPDVDDPEDLKRFFNAIQSLNAQGKLLAYHDRSDGGLWATVCEMAFAGHAGVSLNVDMLTLDPDHESDYGDAKDWAKQTSGRRDDRTLRALFSEELGAVVQVRASERDAVLGALREFGLSACSHVIGTVNDRDVIEVYRDAKKIFDAPRVELHRAWSEVSWRIARLRDNPACADAEHDALLDAADPGISPVLTFDPADDIAAPFIATGARPRVAILREQGVNSHLETAYAFDRAGFDAHDVHMSDLLAGRATLADFAGAVACGGFSYGDVLGAGEGWAKTIRFNAQLADMFSAFFARPDTFALGICNGCQMLSSIASMIPGAQAWPKFTRNKSEKFEARFSFVEVEKSPSIFFAGMEGSRIPVAVAHGEGYADFSQQGDIDRVAVAMRYVDHRGEATERYPFNPNGSPAGITSVTTADGRFSVLMPHMERVHRTVTMSWHPEGWGEASPWLRVFRNARRWIG

SEQ ID NO: 52748 - DNA, 2211 bp, Bradyrhizobium sp. ORS278
  CDS (1)..(2211): transl_table=11
atgcgcaatgaaccgcagatcacccccgagctcgtcgccgcccacggcctgaagcccgacgaatatgagcgcatcctgaagctgatcgggcgggagccgactttcaccgagctcggcatcttctcggcgatgtggaacgagcattgctcgtacaagtcgtcgcgcatccatctcaagggcctgccgaccaaggcgccctgggtgatccaggggccgggcgagaatgccggcgtgatcgatatcggcgacggccaggccgtcgtgttcaagatggagagccataaccatccgagctacatcgagccttaccagggtgccactacgggcgtcggtggcatcctgcgcgacgtcttcacgatgggcgcgcgcccgatcgcctgcctgaacgcgctgtcgttcggcgccccggagcaccccaagaccaggcacctcgtatccggcgtcgtcgccggcatcggcggctatggcaactccttcggcgtgcccaccgtgggcggccagacccgcttccacacccgctatgacggcaacatcctggtcaacgccatggccgtcggccttgccgacgccgacaagattttctatgcggccgcttccggcgtgaacatgccgatcgtctatctcggctccaagaccggccgcgacggcatccacggcgcctcgatggcctcggccgagttcgacgattcctccgaggagaagcgcccgacggtgcaggttggcgaccccttcgccgagaagctgttgctcgaggcgtgcctggagatcatggccgccgattgcgtgatcgcgatccaggacatgggcgcggccggcctgacctgctcggcggtcgagatgggcgccaagggtgacctcggcgtcgacctcgatctggactccgtgccgacccgcgagaccggcatgagcgcctatgagatgatgctctccgagagccaggaacgcatgctcatggtgctgaagccggagaaggagaaggaggccgaagcgatcttccgcaaatgggggctcgatttcgccgtggtcggctacaccacgccgagcaagcgcttcgtcgtgaagcatggcggtgacgtcatggccgacctgccgatcaaggagctcggcgacgaggcgccgctctacgatcgtccgcatgtggcgtcgcccgcgctgccggtgatccatgcccgcgaggtcaaggcgccgatggccatcatcccggcgctggagaagctgatcgcgacgccggacctgtgctccaagcgctggatctgggagcagtacgaccacgtcattctcggcaacaccgtacagcgccccggcggcgatgccgcggtcgtgcgcgtgcaggatggcccgaaggggctggcgctcaccgtcgatgtcacgccgcgctattgcgaagccgacccgttcgagggcggcaagcaggcggtggcggaagcctggcgcaacatcaccgcggtcggcggccggccgctcgccatcaccgacaatctcaatttcggcaatccggagcggcccgagatcatgggccagttcgtcggctgcctgaagggcatctcggaggcctgccgggcgctcgacttcccggtcgtgtccggcaacgtctcgctctacaacgagaccaatgggcgggcgatcctgccgacgccctcgatcggcggcgtcggcttgcttgacgactttaccaagtccgccagcatcgccttcaagactgagggcgaggcgatcctgctgatcggcgagacccacggctggctcggccagtcggtctatctgcgcgacgtctgcggccgcgaggagggggctccgccgccggtcgatctcgccgccgagaagcgcatcggcgatgtcgtccgcggcatgatccacgcgggaacggcgactgccgcgcatgatctatccgatggcggcctgctggtcgcgctcgccgagatggccatggcttccggcatcggcgcgcgcctcttggccgcgcctgcctcgatcgttccgcatgcctattggttcggcgaggaccaggcgcgctatctggtgacggtgccggagaccgaggcgggccgcgtcctcgccaagatgcgcggcgccaacgtgccgtgcacgcgcatcggcaccacgggcggcacggccctggcgatcgctggcgaggcctcggtcgaggtcgcgacgctcaggacccggttcgagagctggttgccgggatacatgggcggcgccgccgcttaa

SEQ ID NO: 52749 - protein, 736 aa, Bradyrhizobium sp. ORS278
MRNEPQITPELVAAHGLKPDEYERILKLIGREPTFTELGIFSAMWNEHCSYKSSRIHLKGLPTKAPWVIQGPGENAGVIDIGDGQAVVFKMESHNHPSYIEPYQGATTGVGGILRDVFTMGARPIACLNALSFGAPEHPKTRHLVSGVVAGIGGYGNSFGVPTVGGQTRFHTRYDGNILVNAMAVGLADADKIFYAAASGVNMPIVYLGSKTGRDGIHGASMASAEFDDSSEEKRPTVQVGDPFAEKLLLEACLEIMAADCVIAIQDMGAAGLTCSAVEMGAKGDLGVDLDLDSVPTRETGMSAYEMMLSESQERMLMVLKPEKEKEAEAIFRKWGLDFAVVGYTTPSKRFVVKHGGDVMADLPIKELGDEAPLYDRPHVASPALPVIHAREVKAPMAIIPALEKLIATPDLCSKRWIWEQYDHVILGNTVQRPGGDAAVVRVQDGPKGLALTVDVTPRYCEADPFEGGKQAVAEAWRNITAVGGRPLAITDNLNFGNPERPEIMGQFVGCLKGISEACRALDFPVVSGNVSLYNETNGRAILPTPSIGGVGLLDDFTKSASIAFKTEGEAILLIGETHGWLGQSVYLRDVCGREEGAPPPVDLAAEKRIGDVVRGMIHAGTATAAHDLSDGGLLVALAEMAMASGIGARLLAAPASIVPHAYWFGEDQARYLVTVPETEAGRVLAKMRGANVPCTRIGTTGGTALAIAGEASVEVATLRTRFESWLPGYMGGAAA

SEQ ID NO: 52750 - DNA, 2298 bp, Synechococcus sp. WH 7803
  CDS (1)..(2298): transl_table=11
gtggcctctgcactgcgccaggaagggctaacgcaggaggattacatcgaaattcagcgccgccttgggcgagatcccaacagggcggagctgggaatgttcggcgtgatgtggtccgaacattgctgctaccgcaattcccggccactcctgcgtggttttcccaccgatggacctcgcatcctggtggggccaggagaaaacgctggcgtggtggacctgggggagggtcaccgcctggcgttcaaaattgaaagtcataaccatccgtcggcggtggagcctttccaaggtgccgccacaggggtgggagggatcctccgggacatcttcaccatgggtgctcgaccgatcgctctgctgaatgccttgcgcttcggtccccttgatgaacccgccacccagggacttgtggaaggtgtcgtggcggggatctcccattacggcaattgcgtcggggtgccgaccgtggggggggaggttgccttcgaccccgcctatcgcggcaaccccctggtgaatgcgatggctctgggtctcatggagaccgatgacatcgtgaaatcgggggcctctggtgtgggcaatcccgtggtgtatgtgggcagcaccacgggccgggacgggatgggcggtgccagcttcgccagtgccgagctcagcgccgattccctggatgatcgccctgcggtgcaagtgggcgatccctttctggagaagggattgattgaggcttgcctcgaagccttccagagtggggatgtggtggcggcccaggacatgggcgctgcgggtctcacctgcagctgctcggagatggcggccaaagggaatgtgggggtggagctggatctcgacagggttccagcccgtgaacagggcatgacggcttacgagttcctgctgtctgaatcgcaggagcggatgctgttcgtggtgcaggccggacgggaggaggcgttgatgcagcgtttccgccgctgggggttgcaggcagctgttgttgggcaggtgcttgaagaacccgttgtgcgtgtgctgcagcacggatcggtggctgctgaggttcctgcccgggctctggcggaagacaccccgatcaatcagcacaccttgatctcagagcctccagaggacatccaggagcattggcgctggtcggaaacggatcttccctcggtgtccagggatcacgactggggggcggatctgctggctctgctggatgatcccaccattgccagcaaacgctgggtgtatcgccaatacgaccagcaggtcctcgccaacacggtggtgcccgccggcggcgctgatgctgctgtggtgcgccttcggcctcagcaaggggatgcgtcgcttcggggggcgaatcgaggggtggcggccacggtcgactgccccaatcgttgggtggctctggatcccgaacggggggcgatggccgcggtggcggaggctgcccgcaatctcagttgcgttggggcggttccggtggctgtcaccgacaacctcaattttccgtctccggaaacgcctaagggctactggcagctggccatggcctgccgaggtttatccgaaggctgtcgggtgttgggcactcccgtgaccgggggaaatgtgtcgctctacaacgaaacccgcgctgacgacggcagcctgcaaccgattcatcccacccctgtggtgggcatggtggggctggttgaggaccttggtcgggtgggtggcctggcctggcgtcaagcgggcgatgccgttgtgcttcttggggtctccagcgacgaacgccaggatgatcgggttggtttggccggcagcagctatcagggggtgatccacggactgctgaccggaagacctccgcgggtggatctcgatcttgagcagcgcgttcaggccctggtgcgccaggcctgggagcaaggactgctggcctccgcccacgacagcagcgatggaggtcttgctgttgccttggctgaatgttcgatcgcctcgggtctcggtgtggatggggcattgcctggcgacggcgttgctcctgagcgccgtctttttgctgaggggggagcccggattgttgtgtcggtgcgggcggaatgcatggatgcctggacctccctgctcgctgatgaggcccatgccgctgttccggtaaccatcctcggggctgtggctgatcacggacgtttccggctctccctgggatcgcaacccgtgctggatcaggccgtgcaaaccctgacggagcgttttgatcaggcgcttccccgtcggctgggaacagcgtga

SEQ ID NO: 52751 - protein, 765 aa, Synechococcus sp. WH 7803
MASALRQEGLTQEDYIEIQRRLGRDPNRAELGMFGVMWSEHCCYRNSRPLLRGFPTDGPRILVGPGENAGVVDLGEGHRLAFKIESHNHPSAVEPFQGAATGVGGILRDIFTMGARPIALLNALRFGPLDEPATQGLVEGVVAGISHYGNCVGVPTVGGEVAFDPAYRGNPLVNAMALGLMETDDIVKSGASGVGNPVVYVGSTTGRDGMGGASFASAELSADSLDDRPAVQVGDPFLEKGLIEACLEAFQSGDVVAAQDMGAAGLTCSCSEMAAKGNVGVELDLDRVPAREQGMTAYEFLLSESQERMLFVVQAGREEALMQRFRRWGLQAAVVGQVLEEPVVRVLQHGSVAAEVPARALAEDTPINQHTLISEPPEDIQEHWRWSETDLPSVSRDHDWGADLLALLDDPTIASKRWVYRQYDQQVLANTVVPAGGADAAVVRLRPQQGDASLRGANRGVAATVDCPNRWVALDPERGAMAAVAEAARNLSCVGAVPVAVTDNLNFPSPETPKGYWQLAMACRGLSEGCRVLGTPVTGGNVSLYNETRADDGSLQPIHPTPVVGMVGLVEDLGRVGGLAWRQAGDAVVLLGVSSDERQDDRVGLAGSSYQGVIHGLLTGRPPRVDLDLEQRVQALVRQAWEQGLLASAHDSSDGGLAVALAECSIASGLGVDGALPGDGVAPERRLFAEGGARIVVSVRAECMDAWTSLLADEAHAAVPVTILGAVADHGRFRLSLGSQPVLDQAVQTLTERFDQALPRRLGTA

SEQ ID NO: 52752 - DNA, 3888 bp, Klebsiella pneumoniae subsp. pneumoniae MGH 78578
  CDS (1)..(3888): transl_table=11
atgatggaaattttgcgtggttcacctgcactgtcggcattccgtattaataaactgctggcacgatttcaggcggccaaccttccggtaagcgccatatatgccgaatatattcattttgccgatctgaatgccccgctgagcgctgacgatcgcgagcgcctggcgcgactgcttcagtatggcccgagcttaagcagccataccccgaccggtaaattactgctcgtgacccctcgccctggcaccatctctccctggtcttctaaagctaccgatatcgctcacaactgcggtctggcgcaggttgtgcgtcttgagcgcggcgtggcgtattacgttgaagcctcaaccctgaccgaagcgcagtgggccgcggtggcggcggagctgcatgaccgcatgatggagagcgtcttcgacgagctggaagcgggagagaagctgttcgctcaccatcagccgacgccggtcaccagcgtcgacctgctgggcgaagggcgtcaggcgctgattgacgccaacctccgtctgggtctggcgctggccgacgacgaaattgactacctgcaggacgcgtttacccgcctgggacgcaacccgaacgatatcgagctgtatatgttcgcccaggcgaactcagagcactgtcgccacaagattttcaacgccgactggatcatcgacggcgaacagcagccgaagtcgctgttcaaaatgatcaaaaacacctttgaaaaaacgccggactacgtgctgtcggcctataaagataatgccgcggtgatggaagggtctgaagtcgggcgctatttcgccgaccatcagaccggacgctacgacttccatcaggagccggcgcacattctgatgaaggtggaaacccataaccacccgacggccatctctccatggccgggcgcggcaaccggctccggcggcgaaatccgtgatgaaggcgccaccggccgcggcgcgaagccgaaagcgggcctggtgggcttctcggtttccaacctgcgtatcccgggcttcgaacagccgtgggaagaagatttcggtaaaccggatcgtattgtcaccgccctggacatcatgaccgaaggcccgttgggcggcgcggcgtttaacaacgaatttggtcgtccggcgctgaacggctacttccgcacctatgaagagaaagtcaccagccacaatggcgaagagctgcgtggctaccacaaaccgatcatgctggccggcggtatcggcaacatccgcggtgagcacgtgcagaagggcgagattaccgtcggcgcgaagctgatcgtgctgggcggcccggcgatgaacatcggcctcggcggcggcgcggcgtcttctatggcctccggccagtctgatgccgatctcgatttcgcctccgtacagcgtgacaacccggaaatggagcgccgctgtcaggaagtgatcgaccgctgctggcagttgggcgacgccaacccgatcctctttatccacgacgttggcgccggcggtctctccaacgccatgccggagctggtgagcgacggcggccgcggcggtaaattccagctgcgcgatattctcagcgatgagccagggatgagtccgctggagatctggtgtaacgaatcgcaggaacgttatgttctggcggtcgccccggagcagctgccgctgttcgacgaactgtgccgccgcgagcgcgcgccttatgccgttatcggcgaagccaccgctgagcagcatctgagcctgagcgacagccactttaacgatcagccgatcgacctgccgctggacgtcctgctcggcaaaacgccgaaaatgacccgcgacgtgcagactctgaaagctcagggtagcgcgctggatcgccaaccgattacccttgccgatgcggttaaccgcgttctgcatctgccgacggtggccgagaaaaccttcctcgtcaccatcggcgaccgcaccgtgaccggtatggtcgcccgcgaccagatggttggcccgtggcagatcccggtggccaactgcgcggtgaccaccgccagcctcgacagctactatggcgaagcgatggcgatgggcgagcgcgccccggtcgccctgctggacttcgcggcctctggccgtctggcggtcggcgaagcgctgaccaacatcgccgccacgcagattggcgagctgaaccgcgtgaagctgtcggctaactggatggccgccgccggccacccgggtgaagacgctggcctgtatgaggcggtgaaagcggtaggcgaagagctgtgcccggcgctgggcctgaccattccggtcggtaaagactcgatgtcgatgaaaacccgctggcaggaaggcagcgagcagcgcgagatgacctctccgctgtcgctggtcatctctgccttcgcccgtgtcgaagatgtccgtcataccgtcacgccgcagctttcgacggaagataacgccctgctgctgatcgacctcggtaaagggcacaacgcgctgggcgcgacggcgctggcgcaggtctatcgccagctcggcgacaagccggctgacgtgcgcgatgtcgcgcaactgaaaggcttctggaatgcgatgcaggccctggtggcgcagcgtaaactgctggcctaccacgaccgctccgacggcggtctgcttgtcacgctggcggaaatggcctttaccggccactgcggcgtggaagcggatatcgccgcgctgggcgacgaccatctggccgcgctgttcaacgaagagctgggggcggtgattcaggtccgcgccgcagaccgtgaggcggtggaagccattctggcggttaacggcctggcggactgcgtgcattacctcggtaaagcggttgagggcgatcgcttcgtgctgaccgccggcggtcagacggtgttcagcgaaagccgcaccacgctgcgcatgtggtgggcggaaaccacctggcagatgcagcgtctgcgcgacaacccggcctgcgccgatcaggagcatgaggcgaaagccaatgatgccgacccgggcctcaatgtgaagctctcgtttgatattaacgacgacgtcgccgccccgtacattgccaccggcgcgcggccgaaagtggccgtcctgcgcgagcagggggtgaactcccacgttgaaatggcggccgccttccatcgcgccggctttgacgccatcgacgtgcatatgagcgacctgctggccggccggaccggtctgggcgatttccatgctctggtagcctgcggcggcttctcctacggcgacgtgttgggcgcgggcgagggctgggcgaagtcgattctgttcaacgagcgcgtgcgcgatgagttcgcgaccttcttccatcgtccgcagacgctggcgctcggcgtgtgcaacggctgtcagatgatgtccaacctgcgcgagctgatcccgggcagcgacctgtggccgcgctttgtgcgcaaccagtctgaccgctttgaagcgcgctttagcctggtggaagtgacgcaaagcccatccctgctgctggaaggcatggttggctcacggatgccgattgcggtctcccacggcgaaggtcaggtggaagtgcgcgacagcgcgcatctggctcagctggagagcaaaggtctggtggcgctgcgcttcgtggataacttcggcaaagtgaccgaaacctatccggcgaacccgaacggttccccgaacggtatcaccgcggtgaccagcgaaagcgggcgcgcgaccatcatgatgccgcacccggaacgcgtcttccgcaccgtaagcaactcctggcacccggagaactggggcgaggatagcccgtggatgcgtatcttccgtaacgcgcgtaaacagctgggttaa

SEQ ID NO: 52753 - protein, 1295 aa, Klebsiella pneumoniae subsp. pneumoniae MGH 78578
MMEILRGSPALSAFRINKLLARFQAANLPVSAIYAEYIHFADLNAPLSADDRERLARLLQYGPSLSSHTPTGKLLLVTPRPGTISPWSSKATDIAHNCGLAQVVRLERGVAYYVEASTLTEAQWAAVAAELHDRMMESVFDELEAGEKLFAHHQPTPVTSVDLLGEGRQALIDANLRLGLALADDEIDYLQDAFTRLGRNPNDIELYMFAQANSEHCRHKIFNADWIIDGEQQPKSLFKMIKNTFEKTPDYVLSAYKDNAAVMEGSEVGRYFADHQTGRYDFHQEPAHILMKVETHNHPTAISPWPGAATGSGGEIRDEGATGRGAKPKAGLVGFSVSNLRIPGFEQPWEEDFGKPDRIVTALDIMTEGPLGGAAFNNEFGRPALNGYFRTYEEKVTSHNGEELRGYHKPIMLAGGIGNIRGEHVQKGEITVGAKLIVLGGPAMNIGLGGGAASSMASGQSDADLDFASVQRDNPEMERRCQEVIDRCWQLGDANPILFIHDVGAGGLSNAMPELVSDGGRGGKFQLRDILSDEPGMSPLEIWCNESQERYVLAVAPEQLPLFDELCRRERAPYAVIGEATAEQHLSLSDSHFNDQPIDLPLDVLLGKTPKMTRDVQTLKAQGSALDRQPITLADAVNRVLHLPTVAEKTFLVTIGDRTVTGMVARDQMVGPWQIPVANCAVTTASLDSYYGEAMAMGERAPVALLDFAASGRLAVGEALTNIAATQIGELNRVKLSANWMAAAGHPGEDAGLYEAVKAVGEELCPALGLTIPVGKDSMSMKTRWQEGSEQREMTSPLSLVISAFARVEDVRHTVTPQLSTEDNALLLIDLGKGHNALGATALAQVYRQLGDKPADVRDVAQLKGFWNAMQALVAQRKLLAYHDRSDGGLLVTLAEMAFTGHCGVEADIAALGDDHLAALFNEELGAVIQVRAADREAVEAILAVNGLADCVHYLGKAVEGDRFVLTAGGQTVFSESRTTLRMWWAETTWQMQRLRDNPACADQEHEAKANDADPGLNVKLSFDINDDVAAPYIATGARPKVAVLREQGVNSHVEMAAAFHRAGFDAIDVHMSDLLAGRTGLGDFHALVACGGFSYGDVLGAGEGWAKSILFNERVRDEFATFFHRPQTLALGVCNGCQMMSNLRELIPGSDLWPRFVRNQSDRFEARFSLVEVTQSPSLLLEGMVGSRMPIAVSHGEGQVEVRDSAHLAQLESKGLVALRFVDNFGKVTETYPANPNGSPNGITAVTSESGRATIMMPHPERVFRTVSNSWHPENWGEDSPWMRIFRNARKQLG

SEQ ID NO: 52754 - DNA, 2451 bp, Desulfovibrio vulgaris subsp. vulgaris str. Hildenborough
  CDS (1)..(2451): transl_table=11
gtggccgtcatcccactgctttccatgagcgacgatgaactcatggccttcagccgcgccaacaccctcgccctcagcctcgaagagatgcacgccatccgcgcctactaccagcgcgacgacgtgcgcgccgcccgtgccgccgaagggttgcccgccgaccccaccgacgccgaagtcgaggcactggcgcagacatggtcggagcactgcaagcacaagatattctcttcgcgcatcgactacgagaaccgcgagaccggacgccgcgagaccatcgacagtctcttcaagtcctgcatccaggacaccacgaagaccatccgcgcccgtctcggcgacaaggacttctgccgttcggtgttcaaggacaacgcgggcgtcatcgccttcaacgacacgcatgacatctgcatcaaggtcgagacgcacaacagcccctcggccctcgacccctacggcggtgcgctcaccggcatcgtgggtgtcaaccgcgaccccatgggcacgggcatgggtgccaacctcgtctgtaacaccgacgtgttctgcttcgcctcgcccttctgggaaggtgaactgcccccgcgcctgctgcacccccgccgcgtgcttgaaggcgtccgcgaaggcgtggaacatggcggcaacaagtcgggcattcccaccgtcaacggttccatcgtgttcgaggaccgctacctcggcaagccgctggtctattgcggcacggtgggcatgattcccgcgcaggtcgcaggcaagcccggctacaccaaggaggcgcgtcccggcgacgccatcgtcatggtgggcggccgcatcggcaaggacggcatccacggcgcgaccttctcctccgaagaactgcatgagggctcccccgccacggcagtgcagattggcgaccccatcacccagcgcaagatgtacgactgcatcatgcgcgcccgtgacatgggcctctacaccgccatcaccgacaacggtgcgggcggcctctcgtcgtccgtgggcgagatggcgcaggacacgggcggctgccgcctcgacctcgcccgcgcgcccctgaagtacgacggtctgcgcccgtgggagattctgctctccgaagcgcaggagcgcatgaccctcgccgtgccgcaggacaagctcgaagccttcatgcggctcgcctccgagatggacgtggaggctacggtactcggcgaattcaccgactccggctacttccacatcaccttcggtgacaggcaggtggcctatctcgacatggacttcctgcacgacggcgtgccgcagttgcagctgaaggccgtgtgggaacgccccgcccaccccgaagggcgcatcgacctgcccgaagaggaacagggcccgttcctgcggcgcatgatgggttcgctcaacatctgcagcaaagaatatgtcatccgccagtacgaccatgaggtgaagggcggcagcgtggtgaagcccctcgtgggcgtgaaacgcgatggccccgccgacgcagccgtggtgcgccccctgctggacagcgagtcgggcatcgtgctctcgcacggcatctgccccaagttcagcgactacgacgcctactggatgatggccaacgccatcgacgaggccgtgcgcaacgcggttgccgtgggcggcgaccccgacttcatgtccggcgtcgacaacttctgctggtgcgaccccgtgcagtccgataagacccccgacgggcactacaagctggcgcaactggtgcgcgccaatcgcgccctagagcacttctgcctcgcctacggtgtgccctgcgtctcgggcaaggactccatgaagaacgactacaccggcggcggcaccaagatatccataccgcccacggtgctcttctcggtcatgggcgtcatcgacgacgtgaaccgcaccgtaacctccgacttcaagcgcgcaggtgagcgcatctacctgcttggcctcacccgccgcgagatggccggcagcgaagcggcacaggttcttggcatctcctgcgccgacgtgccgcaggtcgacgcccccgccgccctggcccggtatcgtgccctttacggtgccatccgcgccgggcttgtcaccgcgtgtcacgacctctccgacggcggtcttgccgtggcccttgccgagatgtgcctcggcgggcgtctcggggcccgatgcgacctcgcccgcgtgcctgtctgcggcgacatgacaaccaccgaactcctgtacagcgagtcggccagccgcctgctggtctccgtgcgtcctgccgacgccgacgccttcgaagcggccttcgccggtcagcattacgcctgcgtcggcgaagtgacagccgacggcagactgaccctcgagaccaagggcaccgccatcgtctctgaagaggtggaggcactcgccaccgccttcaaggcgaccctcgactggtag

SEQ ID NO: 52755 - protein, 816 aa, Desulfovibrio vulgaris subsp. vulgaris str. Hildenborough
MAVIPLLSMSDDELMAFSRANTLALSLEEMHAIRAYYQRDDVRAARAAEGLPADPTDAEVEALAQTWSEHCKHKIFSSRIDYENRETGRRETIDSLFKSCIQDTTKTIRARLGDKDFCRSVFKDNAGVIAFNDTHDICIKVETHNSPSALDPYGGALTGIVGVNRDPMGTGMGANLVCNTDVFCFASPFWEGELPPRLLHPRRVLEGVREGVEHGGNKSGIPTVNGSIVFEDRYLGKPLVYCGTVGMIPAQVAGKPGYTKEARPGDAIVMVGGRIGKDGIHGATFSSEELHEGSPATAVQIGDPITQRKMYDCIMRARDMGLYTAITDNGAGGLSSSVGEMAQDTGGCRLDLARAPLKYDGLRPWEILLSEAQERMTLAVPQDKLEAFMRLASEMDVEATVLGEFTDSGYFHITFGDRQVAYLDMDFLHDGVPQLQLKAVWERPAHPEGRIDLPEEEQGPFLRRMMGSLNICSKEYVIRQYDHEVKGGSVVKPLVGVKRDGPADAAVVRPLLDSESGIVLSHGICPKFSDYDAYWMMANAIDEAVRNAVAVGGDPDFMSGVDNFCWCDPVQSDKTPDGHYKLAQLVRANRALEHFCLAYGVPCVSGKDSMKNDYTGGGTKISIPPTVLFSVMGVIDDVNRTVTSDFKRAGERIYLLGLTRREMAGSEAAQVLGISCADVPQVDAPAALARYRALYGAIRAGLVTACHDLSDGGLAVALAEMCLGGRLGARCDLARVPVCGDMTTTELLYSESASRLLVSVRPADADAFEAAFAGQHYACVGEVTADGRLTLETKGTAIVSEEVEALATAFKATLDW

SEQ ID NO: 52756 - DNA, 3888 bp, Escherichia coli K12
  CDS (1)..(3888): transl_table=11
atgatggaaattctgcgtggttcgcctgcactgtcggcattccgaatcaacaaactgctggcacgttttcaggctgccaggctcccggttcacaatatttacgccgagtatgtccattttgctgacctcaatgcgccgttaaacgatgatgagcacgcacaacttgaacgcctgctgaaatatggcccggcactcgccagccacgccccgcaaggcaaactcctgctggtgaccccgcgtcctggcaccatctctccctggtcttcgaaagcgaccgatattgcccataactgcgggctacaacaggtaaaccgccttgagcgcggcgttgcttactatatagaagccggtacgctgaccaatgaacaatggcagcaggttaccgctgaactgcacgaccgcatgatggaaacggtcttttttgctttagatgatgcagagcagttgtttgcccaccatcaaccgactccggttaccagcgttgatttgctggggcagggccgtcaggcgctgatcgacgctaacctgcgtcttggcttggctctggcggaagatgaaattgactatctgcaggatgctttcacaaagcttggtcgtaacccgaacgacatcgaactgtatatgtttgcccaggcgaactccgagcactgccgccacaaaatttttaacgccgactgggttatcgatggtgaacagcagccgaaatcgctgttcaagatgatcaaaaatactttcgaaaccacgccagatcacgttctctctgcttataaagataacgccgccgtaatggaaggttctgaagtgggccgctactttgctgaccacgaaacgggccgctacgatttccatcaggaaccggcgcatattctgatgaaagtcgaaactcacaaccacccgacggcgatttctccgtggccgggcgcggcgaccggttccggcggtgaaatccgcgatgaaggtgccaccgggcgcggcgcaaagccgaaagcgggtctggttggtttctccgtttccaacctgcgaattcctggcttcgaacagccgtgggaagaagatttcggtaagcctgagcgcattgtcaccgcgctggacatcatgaccgaaggcccgctgggcggcgcggcgtttaacaacgaatttggtcgtccggcactgaacggctacttccgtacttatgaagaaaaagtgaacagccacaacggcgaagagctgcgcggttatcacaaaccgatcatgctggcgggcgggatcggcaacattcgcgccgatcacgtacaaaaaggcgagatcaacgtcggtgcgaagctggtcgttctcggcggcccggcaatgaacatcggtcttggcggtggtgcagcgtcttctatggcgtctggtcagtctgatgccgacctcgactttgcttccgtacagcgcgacaacccggagatggagcgtcgctgccaggaagtgatcgaccgttgctggcagcttggtgatgccaacccaatcctgtttatccacgacgttggcgctggcggtctttctaacgccatgccggaactggtgagcgacggcgggcgcggcggtaaatttgaactgcgcgagattctaagcgacgaaccgggcatgagcccgctggaaatctggtgtaacgaatcccaggaacgctacgtgctggcggttgctgccgatcaattaccgctgtttgacgaactgtgtaagcgtgagcgcgcaccctacgcggtgattggtgaagcgaccgaagaactgcatctttctctgcacgatcgtcattttgataatcagccgatcgatctgccgctggacgtcctgcttggtaaaacgccgaagatgacccgcgatgtacaaacgctgaaagcgaaaggcgacgcgctggcccgtgaagggatcaccattgcagacgcggtgaaacgtgtgctgcatctgccgactgtggcggaaaaaaccttcctggtgaccattggcgaccgcagcgtaaccggcatggtagcgcgcgatcagatggtggggccgtggcaggtgccggtcgctaactgcgcggtcactaccgccagcctcgacagctactacggtgaagcgatggcgattggcgagcgtgcgccggttgcgctgctggatttcgccgcctctgcccgtctggcggtcggtgaagcgttaaccaacatcgccgcaacacaaattggcgatatcaaacgcatcaaactttccgccaactggatggcggcggcaggccaccctggtgaagatgcgggcctgtatgaagccgttaaagccgtgggcgaagagctttgtccggcgctgggcctgacgatcccggtgggtaaagactccatgtcgatgaaaacccgctggcaggaaggtaacgaagagcgcgaaatgacgtcgccgctgtcgctggtgatttctgcatttgcccgcgtggaagatgtacgtcacaccatcacgccgcagctttctaccgaagataacgcactgctgctgattgatttgggcaaaggcaataacgcgctgggcgcaacggcgctggcgcaggtttatcgtcagcttggcgacaaaccggcagatgtacgcgatgtcgcgcaactgaaaggcttctatgacgcgattcaggcgctggttgcacagcgtaagctgctggcgtatcacgaccgctctgatggcggcctgctggtaacgctggcggaaatggcctttgctggtcattgtggcattgacgcggatatcgccactctgggtgacgatcgcctggcggcgttgtttaacgaagaactgggtgcggtgattcaggttcgtgccgctgaccgtgaagcggtcgagtccgtactggcacagcatgggcttgctgattgtgtccattatgtagggcaggcggtttccggtgaccgttttgtgattaccgccaacgggcagactgtattcagcgaaagccgcaccacgttgcgtgtctggtgggcagaaactacctggcagatgcagcgcctgcgtgacaacccggagtgtgccgatcaggagcatcaggcgaaatctaacgacgccgatccgggcctgaatgtaaaactgtcgttcgatatcaacgaagatgtggcagcaccgtatattgccactggcgcacgtccgaaagttgccgtactgcgtgagcagggcgtgaactcgcatgttgaaatggcggcagctttccaccgtgcaggctttgatgctatcgacgtgcatatgagtgacctgctgaccggacgcacgggcctggaagatttccacgccctggtcgcgtgcggtggtttctcctacggtgatgtgctgggtgccggtgaaggttgggcgaagtcaatcctgttcaatgaccgtgtacgcgatgagtttgcaaccttcttccaccgtccgcaaacgctggcgctgggggtatgtaacggttgccagatgatgtctaatctgcgtgaactgatcccaggtagtgagttgtggccacgttttgtgcgcaatacctccgatcgctttgaagcgcgtttcagcctggttgaagtaacccaaagcccgtctctgctgttgcaggggatggtgggctcgcaaatgccgattgctgtctctcatggtgaagggcgcgtggaagtgcgtgatgcggcgcatctggcggcactggaaagcaaagggctggtggcactgcgctatgtcgataacttcggcaaagtcactgaaacctacccggctaacccgaacggttcaccgaacggtattacggcagtcacgactgaaagtggtcgagtcaccattatgatgccgcacccggaacgtgttttccgtactgtcagcaactcctggcatccggaaaactggggcgaggatggcccatggatgcgcattttccgcaatgcgcgtaagcagttggggtaa

SEQ ID NO: 52757 - protein, 1295 aa, Escherichia coli K12
MMEILRGSPALSAFRINKLLARFQAARLPVHNIYAEYVHFADLNAPLNDDEHAQLERLLKYGPALASHAPQGKLLLVTPRPGTISPWSSKATDIAHNCGLQQVNRLERGVAYYIEAGTLTNEQWQQVTAELHDRMMETVFFALDDAEQLFAHHQPTPVTSVDLLGQGRQALIDANLRLGLALAEDEIDYLQDAFTKLGRNPNDIELYMFAQANSEHCRHKIFNADWVIDGEQQPKSLFKMIKNTFETTPDHVLSAYKDNAAVMEGSEVGRYFADHETGRYDFHQEPAHILMKVETHNHPTAISPWPGAATGSGGEIRDEGATGRGAKPKAGLVGFSVSNLRIPGFEQPWEEDFGKPERIVTALDIMTEGPLGGAAFNNEFGRPALNGYFRTYEEKVNSHNGEELRGYHKPIMLAGGIGNIRADHVQKGEINVGAKLVVLGGPAMNIGLGGGAASSMASGQSDADLDFASVQRDNPEMERRCQEVIDRCWQLGDANPILFIHDVGAGGLSNAMPELVSDGGRGGKFELREILSDEPGMSPLEIWCNESQERYVLAVAADQLPLFDELCKRERAPYAVIGEATEELHLSLHDRHFDNQPIDLPLDVLLGKTPKMTRDVQTLKAKGDALAREGITIADAVKRVLHLPTVAEKTFLVTIGDRSVTGMVARDQMVGPWQVPVANCAVTTASLDSYYGEAMAIGERAPVALLDFAASARLAVGEALTNIAATQIGDIKRIKLSANWMAAAGHPGEDAGLYEAVKAVGEELCPALGLTIPVGKDSMSMKTRWQEGNEEREMTSPLSLVISAFARVEDVRHTITPQLSTEDNALLLIDLGKGNNALGATALAQVYRQLGDKPADVRDVAQLKGFYDAIQALVAQRKLLAYHDRSDGGLLVTLAEMAFAGHCGIDADIATLGDDRLAALFNEELGAVIQVRAADREAVESVLAQHGLADCVHYVGQAVSGDRFVITANGQTVFSESRTTLRVWWAETTWQMQRLRDNPECADQEHQAKSNDADPGLNVKLSFDINEDVAAPYIATGARPKVAVLREQGVNSHVEMAAAFHRAGFDAIDVHMSDLLTGRTGLEDFHALVACGGFSYGDVLGAGEGWAKSILFNDRVRDEFATFFHRPQTLALGVCNGCQMMSNLRELIPGSELWPRFVRNTSDRFEARFSLVEVTQSPSLLLQGMVGSQMPIAVSHGEGRVEVRDAAHLAALESKGLVALRYVDNFGKVTETYPANPNGSPNGITAVTTESGRVTIMMPHPERVFRTVSNSWHPENWGEDGPWMRIFRNARKQLG

SEQ ID NO: 52758 - DNA, 3837 bp, Acinetobacter sp. ADP1
  CDS (1)..(3837): transl_table=11
atgtttatcgtggccggtgcaccagcacattcttcttttaagaaagctcaactattaacacgtttatcgtcaattagttctgtacaatcttttgacagccaatgggtttatctgtttgatcaagcgctcaacgagcagcagcatcaatctgcattacaactattaaatgatggatcatcgtttgagctacgtcaggcggcaacagatgaaatccaagttttggtgacgccacgtatcggcaccatttctccgtggtcgtctaaagccaccgatattttcaaaaactgtaatacaccgattcatcgtttagagcgtggtattttgtttacccttaaagggatgagcgaaatgaccaatgaagtgaaacaagcacttcatgaccgcatgactgaaacagtttttgcagaaattgacagtgccaatgcattgtttttggaaacttcgccaaaacctcttaactcgattgatattttgggtgagggtaaagcggcactggtcaaagccaacaatgaatttggttttgcattgtctgagcaagaaatcgactaccttaccgatgcctttactcaattgggccgtaacccgaacgatatcgagctgatgatgtttgctcaggcaaactcagagcactgccgtcataaaatctttggttcagaatggacgattgatggtgaagtacagccgttatctttgttccagatgattaaaaacacctataaagagtcaccagacgaagtgttatctgcctataaagataatgcgtctgtgattgtaggctacgatactcagcgtttttatccaaaaaaagacaacgacaccggtcactacatttataaatataaaagtcaggctgcacacatcctgatgaaagttgaaacccataaccatccaactgcaatctcgccatttgcgggtgctgcaacgggttcgggtggtgaaatccgtgatgaaggcgcaacaggccgtgggggtaaacccaaagcaggcttgaccggctttaccgtttcaaacctcaatattccgggctttgaacagccatgggaagaaaactacggtaaaccgtcacgcatggcatctccacttcaaatcatgattgaaggtccattgggtggtgcggcatttaataatgaatttggccgtccggcattaaatggttatttccgtacttttgaacaaaatgtcaatggtgaagtgaaaggcttccataagccaatcatgattgcgggtggttatggcaacattcgtccagatcatgtcgaaaaagatgcaattcaaccaggcgatttactgattgtactgggtggaccagccatgttgattggtttgggtggtggtgcagcatcttctgtagacagcggtaccatgggtgagagccttgattttgcttctgtacagcgtgaaaacccagagatggagcgccgttgccaagaagtgattgatacctgctggcgcctagaagatttcaacccgattgtgtctgttcatgacgttggtgcaggtggtctttcaaatgcaatgcctgaactggtaaacgaccatgaattgggtgcgattttaaatttacgtaaaattccatcgcttgagcctggcatgagcccaatggaaatctggtcaaacgaagcacaagagcgttatgtgcttgcgattcgtccagagtctttggctcagtttgaagaaatctgtgcgcgtgagcgttgtccgtttgctgtactgggtgaagcaactgaagcacgtcatctaacggttgaagatccattgtttgaaaacaatgccgtggatattccaatgcaagtcatgctaggtggtacacctcgtatgcaacgttcttatgaaagcattgaacgtgaaggtactccttttgatacgacacagatcgatttaaaagatgccattttccgtgtacttaaaaatccaaccgtcgcatctaaatcgttcttgatcaccattggtgaccgttcgattacgggtatggtggcacgtgaccaaatggttggtccatggcaggtgcctgttgccgatgctgcggtgaccacaaccagtcttcaagggtacacaggtgaagccatggcaatgggtgaacgcccaccagtggcattgttaaaccctgcggcatctgcacgccttgcggtagctgaagcgattaccaatattgcatcggccaatatcgaacaaattggtgacatcaaactttctgcaaactggatggcagctgcaggtcaaaagggtgaagatcaagctttatttgaaggtgtaaaagccattggtatggaaatgtgtccagcgctgggcattgcgattccggtcggtaaagattcgctttcaatgcgcaccacgtggaatgacgacggcgaagacaaagccgtgacttcgccaatgtcgggtgtgattactgcatttgcacctgtgagtgatgtgcgtaaaaccttaacaccagagctgaaaaaattcgatgaatccgttctggttcgtatcgatttatcgaaaggccagttccgtctcggtgcatcgattctcactcaagtatacaaggcgattggaacggtcacgccagatgttgacagttttgacgacttaaaagcattttttgcgttggtacaagactggaataaccgcagtttaattcaagcctatcacgatattggtgatggtggtttgctcgcaacggttgccgaaatgatgtttgcatcacgtttgggtgttgcatttgaacagcaaagcattgaaagcctgtttgcagaagaaattggtgcagtggttcagttaaaagctgcagattgggatgctgtacaagctgaaattgcggcttctggccttaaagatgcgatttcggtggttggccgtgtgaacagttcagatcaattgagtgtgaacggtttaacgtttgaacgtgccgaattacaacgtgcatgggcagaagtgtctcatcaaatccagcgtttacgtgacaacgttgaaactgctgaccaagagtttgccttgatttcagatcaaaaccacaaaggtttgattgcacaagccacttttgatttaaacgaaccagttgaagcgcctttcattgcgacacgtcgtccaaatatggcgattttgcgtgagcaaggtgtcaatgggcacgttgaaatggcggcggcattcgataaagtcggattcaacaccattgatgttcacatgagtgacttactcgcaggtcgtgttgatcttcaagattttgaaggtttggtggcatgtggtggcttctcgtacggtgatgtcatgggtgcaggtggtggctgggcgaaatcggtgctgtttaatccgaaattacgcgatcagtttgagagcttcttccatcgtgacagtacctttagcctagggatttgtaacggatgccagatgttgtcacagcttgcaccgcttattccgggtgccgatgcatggccacgtttccaccgtaatgtttcagaagtgtttgaggcgcgtagcgtaaacgtgcgtgttgaaaaatcggtgtcggtattgttgcaagatatgcaaggttcgatcttgccaattgccgttgctcacggtgaaggtcgtgtggtgacaaccgatgctcatttggcgagcttaaatgccaatcagcaagtcactttacgttatgttgacagcttaggtaacccaactcagcattatccgctgaatccgaatggctcaccagaagctgttacaggtgtgacctctaaagatggccgtgcaacaattatgatgccgcatcctgagcgtaacttccgtgccattcaacactcttggtcaccagaaaactggactgaagatggtgcatggttacgtatgttccgtaacgcacgtaaatttattgggtaa

SEQ ID NO: 52759 - protein, 1278 aa, Acinetobacter sp. ADP1
MFIVAGAPAHSSFKKAQLLTRLSSISSVQSFDSQWVYLFDQALNEQQHQSALQLLNDGSSFELRQAATDEIQVLVTPRIGTISPWSSKATDIFKNCNTPIHRLERGILFTLKGMSEMTNEVKQALHDRMTETVFAEIDSANALFLETSPKPLNSIDILGEGKAALVKANNEFGFALSEQEIDYLTDAFTQLGRNPNDIELMMFAQANSEHCRHKIFGSEWTIDGEVQPLSLFQMIKNTYKESPDEVLSAYKDNASVIVGYDTQRFYPKKDNDTGHYIYKYKSQAAHILMKVETHNHPTAISPFAGAATGSGGEIRDEGATGRGGKPKAGLTGFTVSNLNIPGFEQPWEENYGKPSRMASPLQIMIEGPLGGAAFNNEFGRPALNGYFRTFEQNVNGEVKGFHKPIMIAGGYGNIRPDHVEKDAIQPGDLLIVLGGPAMLIGLGGGAASSVDSGTMGESLDFASVQRENPEMERRCQEVIDTCWRLEDFNPIVSVHDVGAGGLSNAMPELVNDHELGAILNLRKIPSLEPGMSPMEIWSNEAQERYVLAIRPESLAQFEEICARERCPFAVLGEATEARHLTVEDPLFENNAVDIPMQVMLGGTPRMQRSYESIEREGTPFDTTQIDLKDAIFRVLKNPTVASKSFLITIGDRSITGMVARDQMVGPWQVPVADAAVTTTSLQGYTGEAMAMGERPPVALLNPAASARLAVAEAITNIASANIEQIGDIKLSANWMAAAGQKGEDQALFEGVKAIGMEMCPALGIAIPVGKDSLSMRTTWNDDGEDKAVTSPMSGVITAFAPVSDVRKTLTPELKKFDESVLVRIDLSKGQFRLGASILTQVYKAIGTVTPDVDSFDDLKAFFALVQDWNNRSLIQAYHDIGDGGLLATVAEMMFASRLGVAFEQQSIESLFAEEIGAVVQLKAADWDAVQAEIAASGLKDAISVVGRVNSSDQLSVNGLTFERAELQRAWAEVSHQIQRLRDNVETADQEFALISDQNHKGLIAQATFDLNEPVEAPFIATRRPNMAILREQGVNGHVEMAAAFDKVGFNTIDVHMSDLLAGRVDLQDFEGLVACGGFSYGDVMGAGGGWAKSVLFNPKLRDQFESFFHRDSTFSLGICNGCQMLSQLAPLIPGADAWPRFHRNVSEVFEARSVNVRVEKSVSVLLQDMQGSILPIAVAHGEGRVVTTDAHLASLNANQQVTLRYVDSLGNPTQHYPLNPNGSPEAVTGVTSKDGRATIMMPHPERNFRAIQHSWSPENWTEDGAWLRMFRNARKFIG

SEQ ID NO: 52760 - DNA, 3804 bp, Desulfotalea psychrophila LSv54
  CDS (1)..(3804): transl_table=11
atgggtgtatcagttacacagctgtatagaagaatagatgagagtcgtgcctactgttttaatgttgaatcatccagctctttaacccctgaagagttgaactgtctaaggcttattttagctgagggttttttactcgagacagtatcatttgagccagtgcttgtcggtgatcgagttgttgagctcggaccgcgcatgaactttgccacagcctggtcttctaacatggtttccatctgccaggccacgggccttggcattattagccgtgttgagcgctcccgacgataccttgtacctgctgatgttgatacccaagaatttattgctgctcaccacgatcgaatgaccgaatgtcattacccccagcccattaccacctttgaaaccggaatcaagccagcagaggtctatgatgttgatttgatgagcggcggtgccgatgccctgttgaacattcccggtatctccatggatgagtgggatcgtaacctctattacgactactttgttaaccaagagggacggaatccgagcattgtcgagatcatggatctaaataatgccaactccgagcattcccgccatggctttttcaaggctaagcaggtaattgatggtgaagagcaggagggaaccctttttgatcttgtcaccgatacccttgatgcccatcccgccggttcaatcattgcctttaaagataattccagtgttattgctggccatagcttttcagctcttgttccagagagtccaggccagagttgcccctttgtccgcagggatgtgacctataatcctctccttaccgctgaaacccataactttcccactggtgtggctcccttccccggtgctgaaacaggcacaggcggtagacttcgtgataccatggctaccggtcagggttcaatgtttatagctggtacagcaggttactgtgttggtaatctcaatattcctggttatgagctcagctgggaaaagaactatccatgtcccaccaatcttgcctctgcccttgagattgaaattgaggccagtaacggtgcttctgattatggtaataagttcggcgaacccctgattcagggattcacccgttcctttgatatgcgtcttgaaaacggtgagcgctggggctttcttaagcccatcatgttcaccgccggtattggtcagatgaatgatcaacatactgtaaagtcagctgaagaaaagggcatgatcatcgttcaagttggcggtcctgcctaccgtgttggttttggtggtggtgcagcctcttctatgctgcagggtgagaatgagtctgaattggattttgatgcggttcagcgtggcgatgccgagatggaacagaagatgagtcgtgtcatccgcgcctgtaacgagatgggcgagaagagcctcattgagataattcacgatcaaggttgcggtggtcctgccaacgttatcaaagagctggttgaaaaatcaggtggccgggtagatatcagaaagatacaggtgggtgatcctaccatgtctgttctggaaatctatgttgctgaatatcaagagcgttgtggcttccttattcgtccagagaatattgagcaatttgaaaatatctgtaagcgtgaaaaggtgggctgtgagatcctcggtgaggtgacaggtgatcttcgtttcgttctctttgattccgaaaatggtacaacacccgttgatatcgatcttcctgtgcttcttggcgatatcccgcagaagacctttgaagataaccgtactaagaatacattctcgccattgaaattggcagcagatgctaccattgaaagcagtcttcacgatgttttacgtctggtttccgttggctccaagaggtttctgactaataaggtggatcgtgccgtatccggtcttattgcccagcaacaatgtgtggggcctcttcagttgcctctcagtaacgtggccgtggttgctcaatctcatttttccaagagtggtattgccagtgctattggtgagcagtctattaagatgcttattgatcccgcagccggcgcccgtatggccgtgggcgaggtcttgaccaatatggtctgggctaagattgacgatatggagcagatcaagtgttccgccaactggatgtgggcaccaaagcttgccggcgaaggtgccgctctctacgatgcagccaaggccatgcgcgatactatgattgaagtgggtatggccgtcgatggtggtaaggacagtctctccatggcaaccatggttggtgatgaggtggtcaagtctcctcgtgagttggttatctccacctatgccgccatggccgatctggataagaaggtcacccctgatctcaagcatgtggacagtgaactcttcttcatcgatccaagctgtggcgcggcccgtatgggtggcactgccctggctcaggttaatggccaactgggcgataagagccccgatgttgaggatggcgccttgctcaagaaggcatttcttgccgttcaggagatgattgatgccggtctgatttcagctggacatgatagaagtgacggtggtttagttaccaccatgctcgagatggcctttgccggtaactgtggtttgaaaatagagctcagcggtgatgtttcagcccatgactatctcttcaatgaagagttgggaatgatgatcgaatgtgtgccaggtgccgaggcggaggttgaggaaatcttggtcgcagcaggtatcactccagtagcccttggtttcaccactgccgataagaatatctccatctcctataacggtgagcaggttctaaatcgtgagatgcaggtacttcgttcctggtgggaggagaccagttatcagcttgagcgtcttcaggttaatgtcgcctgtgccgagagtgaaaaagaggtcatctacgatcgcaagggtccagcttatcatctgccatttgcccctgagcctgccacggcagaggtcttggctgcaacggataaaccaaagattgccatcctccgtgacgagggttccaactccgatcgcgagatgaccgcagccttctattccgcgggctttgaggcatgggatgtctgcatgaacgatctgctggccggatcggttgatcttgccgacttcagaggacttgccgcagttggtggtttctcctatgccgatgtaccggagtctgccaagggttgggctgctaccattcagtttaatccgcgtcttaaggagatgtttgataccttctataatcgtccagacacctttacctttggtatctgtaacggttgtcagctcttttctcttcttggttgggtccctcagctgggcacctcggctgaagatcagcctcgttttgctggtaacctctcgggtaggtttgagtctcgctggacaacggtgaaggttcaggccagtacctctatcatgcttcagggtatggaagatctggtctttggtatccatgtggatcatggtgagggacgtctcctcttccccaacgccgatatcatggagcatgtgaaggaacacggcatgacccccatggtctatgttgatgatgagggcgaggccaccgagcagtatccgctcaatcccaacggttctgccgagggacttgccggactctgttcagcagatggtcgccatcttgccctgatgccacatccggagcgctgttttcttccatggcagatgcactacctgccggaggagatgaaggagctggaggtttctccatggttccagatgttcaaaaatgcctatgactggtgtatgagtaactag

SEQ ID NO: 52761 - protein, 1267 aa, Desulfotalea psychrophila LSv54
MGVSVTQLYRRIDESRAYCFNVESSSSLTPEELNCLRLILAEGFLLETVSFEPVLVGDRVVELGPRMNFATAWSSNMVSICQATGLGIISRVERSRRYLVPADVDTQEFIAAHHDRMTECHYPQPITTFETGIKPAEVYDVDLMSGGADALLNIPGISMDEWDRNLYYDYFVNQEGRNPSIVEIMDLNNANSEHSRHGFFKAKQVIDGEEQEGTLFDLVTDTLDAHPAGSIIAFKDNSSVIAGHSFSALVPESPGQSCPFVRRDVTYNPLLTAETHNFPTGVAPFPGAETGTGGRLRDTMATGQGSMFIAGTAGYCVGNLNIPGYELSWEKNYPCPTNLASALEIEIEASNGASDYGNKFGEPLIQGFTRSFDMRLENGERWGFLKPIMFTAGIGQMNDQHTVKSAEEKGMIIVQVGGPAYRVGFGGGAASSMLQGENESELDFDAVQRGDAEMEQKMSRVIRACNEMGEKSLIEIIHDQGCGGPANVIKELVEKSGGRVDIRKIQVGDPTMSVLEIYVAEYQERCGFLIRPENIEQFENICKREKVGCEILGEVTGDLRFVLFDSENGTTPVDIDLPVLLGDIPQKTFEDNRTKNTFSPLKLAADATIESSLHDVLRLVSVGSKRFLTNKVDRAVSGLIAQQQCVGPLQLPLSNVAVVAQSHFSKSGIASAIGEQSIKMLIDPAAGARMAVGEVLTNMVWAKIDDMEQIKCSANWMWAPKLAGEGAALYDAAKAMRDTMIEVGMAVDGGKDSLSMATMVGDEVVKSPRELVISTYAAMADLDKKVTPDLKHVDSELFFIDPSCGAARMGGTALAQVNGQLGDKSPDVEDGALLKKAFLAVQEMIDAGLISAGHDRSDGGLVTTMLEMAFAGNCGLKIELSGDVSAHDYLFNEELGMMIECVPGAEAEVEEILVAAGITPVALGFTTADKNISISYNGEQVLNREMQVLRSWWEETSYQLERLQVNVACAESEKEVIYDRKGPAYHLPFAPEPATAEVLAATDKPKIAILRDEGSNSDREMTAAFYSAGFEAWDVCMNDLLAGSVDLADFRGLAAVGGFSYADVPESAKGWAATIQFNPRLKEMFDTFYNRPDTFTFGICNGCQLFSLLGWVPQLGTSAEDQPRFAGNLSGRFESRWTTVKVQASTSIMLQGMEDLVFGIHVDHGEGRLLFPNADIMEHVKEHGMTPMVYVDDEGEATEQYPLNPNGSAEGLAGLCSADGRHLALMPHPERCFLPWQMHYLPEEMKELEVSPWFQMFKNAYDWCMSN

SEQ ID NO: 52762 - DNA, 4062 bp, Burkholderia mallei ATCC 23344
  CDS (1)..(4062): transl_table=11
atggctcacttctcgtgttttcccggtgcttcggcgctttccgatttccgtcaaacccgcctgctcgacgcgctcaagcaaatcgacggcgacatcgtcgcggttcgcggccagtatctgcatttcgtcaacgcgcatgagccgctcaccgccgacgacgaagcgcgcatcggcgcgctgatgcattacggcgcgccgctcgagcccgccgcggagaagggcgcgaccgagaccttcgtcgtgctgccgcgcttcggcaccgtctcgccgtgggcgagcaaggcgaccgacatcgcgcggcactgcggcctggcgcgcgtgcgccggatcgagcgcggcatcgagttcacggtgacgctgaaggcgggcgtcctgggcgtcggcgcgaagaaggcgctcgccgccgacgcgcgcgcggcggtcgcggccgcgctgcacgaccggatgacggaaagcgtcgtcgcgtcgcgcgaggacgcgcggcacctgttcgacgagctgccggccaagccgctcgcgacggtcgacgtgctcgccgaaggccgagccgcgctcgagcgcgcgaacgccgaactcggcctcgcgctcgccgacgacgagatcgactacctcgtcgacgcgttcatcaagctcgagcgcaacccgaccgacgtcgagctgatgatgttcgcgcaggcgaacagcgaacactgccgccacaagatcttcaacgcgcagtggacgatcgacgggcaggcgcaggacatgtcgctgttcgcgatgatccgcaatacggagaagatgagcccgcaaggcacgatcgtcgcgtattcggacaactcgtcgatcatgagcggcgcgtacgcggagcggtggttcccgcgcggcgcgggcgagccgggcgagcggtatggccggcataccgagctcacgcatacgctgatgaaggtggagacgcacaatcacccgagcgcgatctcgccgttccccagcgcggcgacgggcgcgggcggcgagattcgcgacgaaggcgcgacgggccgcggcgcgcggccgaaggcgggcttgacgggcttcacggtgtcgaacctggatctgccgggcgcgcgcgaatcgtgggaaaacgcgcgcgacgccgcgcagccggcggccgcgcgcaacgcgcagcagccgtgcgcgccgtacggccgcccggaccggatcgcgtcgccgctgtcgatcatgatcgacggcccgctcggcggcgccgcattcaacaacgaattcgggcgcccgaacctgggcggctacttccgcgtgtacgagcagaacgtcggcggccaggtgcgcggctatcacaagccgatcatgatcgcgggcggcatcggcaacatctcggacgcgcacacgcacaagcacgacgtgccggccggctcgctgctcatccagatcggcggcccgggcatgcgcatcggcatgggcggcggcgcggcgagctcgatggccaccggcgcgaacaccgccgagctcgacttcgattcggtccagcgcggcaacccggaaatcgagcggcgcgcgcaggaagtgatcaacggctgctggcagctcggcgagcacaacccgattctcagcattcacgacgtcggcgcgggcggtctgtccaatgcgttccccgagatcgtcgacggcgcgggcaagggtgcgcgcttcgagctgcgcaagatcgcgctcgaggaatcgggcctgtcgccgcgcgagatctggtcgaacgaggcgcaggagcgctacgtgctggcaatttcgcccgccgatctgccgcgcttcgaggcgatctgcgcgcgcgagcgctgcccgttctcggtcgtcggcgtcgcgaccgacgagcgccgcctccagcttgtcgacggcgaggcgacgggcgcggccgcgtatccggtcgacatgccgatggaggtgctgctcggcaagccgccgcggatgcaccgcgacgtgaagcgcgtgcacatcgagcgcgcgggcgtggacgtgacgggcgtcgcgcttgccgacgccgcgcgcgacgtgctccggcacccgaccgtcgcgagcaagtcgttcctcatcacgatcggcgaccgcacggtgggcggcacgtcggtgcgcgaccagatggtcggcccgtggcaggtgcccgtcgccgattgcgcggttaccgcgctcgactacgcgggcttcgccggcgaggcgatgacgatggccgagcgcacgccgctcgcggtgatcgacgcgccggcgtcgggccgcatggcggtgggcgaggcgatcacgaacatcgcggccgcgccgatcgcctcgctcgacaagctgaagctgtccgcgaactggatggccgcgtgcggcaccgagggcgaggacgcgaagctcttcgacacggtcaaggcgatcggcatggagctgtgcccggcgctcggcatcggcattccggtcggcaaggattcgctgtcgatgaagacgaagtggaacgacaacggcgtcgcgaaggaagtggtcgcgccggtgtcgctgatcatctcggcgttcgcgcccgtcgaggacgtgcgccgccatctgacgccgcagctgcgccgcgtcgcggacgtcggcgcgagcgtgctgatcgcgatcgatctcgggcgcgggaagaaccgcctcggcggcagcattctcgcgcaggtcacgcagcaggtcggcgacgcgacgcccgacgtcgacgatccggaagacctgaagcgtttcttcgcggcggtccagtcgctgaatgcgcgggacctgctgctcgcgtaccacgaccgctcggacggcggcctgtgggcgaccgtctgcgaaatggcgctcgccgggcacgcgggcgtgtcgctgaacgtcgacatgctgacgctcgatcagcagcacgaatccgactacggcgacgcgaaggactgggcgaagcagacgagcggccgccgcgaggatcgcacgatccgcgcgctcttctccgaggaactcggcgcggtcgtccaggtgcgcgcggcggaccgcgacgcggtgctcggcgcgctgcgcgagcatggcctgtccgcgtgctcgcacgtgatcggtgcggtcaacgagaccgacgcgatcgaggtgtaccgcgacgcgaagaagatctacgaggcgccgcgcgtcgagctgcagcgcgcatggagcgaggtgagctggcggatcgcgcggctgcgtgacaacccggcgtgcgcggacgccgagtacgacgcgatcctcgacgccggcgatccgggcctctcgcccgtgctgacgttcgatccggcggaggatgtcgccgcgccgttcatcgcgacgggcgcgcgtccgcgtgtcgcgatcctgcgcgagcagggcgtgaactcgcatctcgaaaccgcctacgcgttcgaccgcgcgggcttcgacgcgcatgacgtccacatgagcgacctgctcgccggccgcgcgacgctcgccgatttcgccggcgcggtcgcgtgcggcggcttctcgtacggcgacgtgctcggcgcgggcgagggctgggcgaagacgatccgcttcaacgacaagctcgccgacatgttcgccgcgttcttcgcgcgccccgacacgttcgcgctcggcatctgcaacggctgccagatgatgtcgagcctcgcgtcgatgatcccgggcgcgcaggcgtggccgaagttcacgcgcaacaagtccgagcagttcgaggcgcgtttctcgttcgtcgaagtgcaaagctcgccgtcgatcttcttcgcgggcatggaaggctcgcggattccggtggcggtcgcgcatggcgaaggctacgcggacttctcgcagcagggcgatcagagccgcgtcgcggtcgcgatgcgctacgtcgatcaccgcggcgacgcgaccgagcgctatccgttcaacccgaacggctcgcccgcgggcatcacgtcggtgacgacggcggacggccgcttcacggtgctgatgccgcacatggagcgcgtgcatcgcacggtgacgatgagctggcatccgcagggctggggcgaagcgagcccgtggctgcgcgtgttccgcaacgcgcgccgctggatcggctga

SEQ ID NO: 52763 - protein, 1353 aa, Burkholderia mallei ATCC 23344
MAHFSCFPGASALSDFRQTRLLDALKQIDGDIVAVRGQYLHFVNAHEPLTADDEARIGALMHYGAPLEPAAEKGATETFVVLPRFGTVSPWASKATDIARHCGLARVRRIERGIEFTVTLKAGVLGVGAKKALAADARAAVAAALHDRMTESVVASREDARHLFDELPAKPLATVDVLAEGRAALERANAELGLALADDEIDYLVDAFIKLERNPTDVELMMFAQANSEHCRHKIFNAQWTIDGQAQDMSLFAMIRNTEKMSPQGTIVAYSDNSSIMSGAYAERWFPRGAGEPGERYGRHTELTHTLMKVETHNHPSAISPFPSAATGAGGEIRDEGATGRGARPKAGLTGFTVSNLDLPGARESWENARDAAQPAAARNAQQPCAPYGRPDRIASPLSIMIDGPLGGAAFNNEFGRPNLGGYFRVYEQNVGGQVRGYHKPIMIAGGIGNISDAHTHKHDVPAGSLLIQIGGPGMRIGMGGGAASSMATGANTAELDFDSVQRGNPEIERRAQEVINGCWQLGEHNPILSIHDVGAGGLSNAFPEIVDGAGKGARFELRKIALEESGLSPREIWSNEAQERYVLAISPADLPRFEAICARERCPFSVVGVATDERRLQLVDGEATGAAAYPVDMPMEVLLGKPPRMHRDVKRVHIERAGVDVTGVALADAARDVLRHPTVASKSFLITIGDRTVGGTSVRDQMVGPWQVPVADCAVTALDYAGFAGEAMTMAERTPLAVIDAPASGRMAVGEAITNIAAAPIASLDKLKLSANWMAACGTEGEDAKLFDTVKAIGMELCPALGIGIPVGKDSLSMKTKWNDNGVAKEVVAPVSLIISAFAPVEDVRRHLTPQLRRVADVGASVLIAIDLGRGKNRLGGSILAQVTQQVGDATPDVDDPEDLKRFFAAVQSLNARDLLLAYHDRSDGGLWATVCEMALAGHAGVSLNVDMLTLDQQHESDYGDAKDWAKQTSGRREDRTIRALFSEELGAVVQVRAADRDAVLGALREHGLSACSHVIGAVNETDAIEVYRDAKKIYEAPRVELQRAWSEVSWRIARLRDNPACADAEYDAILDAGDPGLSPVLTFDPAEDVAAPFIATGARPRVAILREQGVNSHLETAYAFDRAGFDAHDVHMSDLLAGRATLADFAGAVACGGFSYGDVLGAGEGWAKTIRFNDKLADMFAAFFARPDTFALGICNGCQMMSSLASMIPGAQAWPKFTRNKSEQFEARFSFVEVQSSPSIFFAGMEGSRIPVAVAHGEGYADFSQQGDQSRVAVAMRYVDHRGDATERYPFNPNGSPAGITSVTTADGRFTVLMPHMERVHRTVTMSWHPQGWGEASPWLRVFRNARRWIG

SEQ ID NO: 52764 - DNA, 4071 bp, Burkholderia pseudomallei K96243
  CDS (1)..(4071): transl_table=11
atggctcacttctcgtgttttcccggtgcttcggcgctttccgatttccgtcaaacccgcctgctcgacgcgctcaagcaaatcgacggcgacatcgtcgcggttcgcggccagtatctgcatttcgtcaacgcgcatgagccgctcaccgccgacgacgaagcgcgcatcggcgcgctgatgcattacggcgcgccgctcgagcccgccgcggagaagggcgcgaccgagaccttcgtcgtgctgccgcgcttcggcaccgtctcgccgtgggcgagcaaggcgaccgacatcgcgcggcactgcggcctggcgcgcgtgcgccggatcgagcgcggcatcgagttcacggtgacgctgaaggcgggcgtcctgggcgtcggcgcgaagaaggcgctcgccgccgacgcgcgcgcggcggtcgcggccgcgctgcacgaccggatgacggaaagcgtcgtcgcgtcgcgcgaggacgcgcggcacctgttcgacgagctgccggccaagccgctcgcgacggtcgacgtgctcgccgaaggccgcgccgcgctcgagcgcgcgaacgccgaactcggcctcgcgctcgccgacgacgagatcgactacctcgtcgacgcgttcatcaagctcgagcgcaacccgaccgacgtcgagctgatgatgttcgcgcaggcgaacagcgaacactgccgccacaagatcttcaacgcgcagtggacgatcgacgggcaggcgcaggacatgtcgctgttcgcgatgatccgcaatacggagaaaatgagcccgcaaggcacgatcgtcgcgtattcggacaactcgtcgatcatgagcggcgcgcacgcggagcggtggttcccgcgcggcgcgggcgagccgggcgagccgggcgagcggtatggccggcataccgagctcacgcatacgctgatgaaggtggagacgcacaatcacccgagcgcgatctcgccgttccccggcgcggcgacgggcgcgggcggcgagattcgcgacgaaggcgcgacgggccgcggcgcgcggccgaaggcgggcttgacgggcttcacggtgtcgaacctggatctgccgggcgcgcgcgaatcgtgggaaaacgcgcgcgacgccgcgcagccggcggccgcgcgcaacgcgcagcagccgtgcgcgccgtacggccgcccggaccggatcgcgtcgccgctgtcgatcatgatcgacggcccgctcggcggcgccgcattcaacaacgaattcggccgcccgaacctgggcggctacttccgcgtgtacgagcagaacgtcggcggccaggtgcgcggctatcacaagccgatcatgatcgcgggcggcatcggcaacatctcggacgcgcacacgcacaagcacgacgtgccggccggctcgctgctcatccagatcggcggcccgggcatgcgcatcggcatgggcggcggcgcggcgagctcgatggccaccggcgcgaacaccgccgagctcgacttcgattcggtccagcgcggcaacccggaaatcgagcggcgcgcgcaggaagtgatcaacggctgctggcagctcggcgagcacaacccgattctcagcattcacgacgtcggcgcgggcggtctgtccaatgcgttccccgagatcgtcgacggcgcgggcaagggtgcgcgcttcgagctgcgcaagatcgcgctcgaggaatcgggcctgtcgccgcgcgagatctggtcgaacgaggcgcaggagcgctacgtgctggcgatttcgcccgccgatctgccgcgcttcgaggcgatctgcgcgcgcgagcgctgcccgttctcggtcgtcggcgtcgcgaccgacgagcgccgcctccagctcgtcgacggcgaggcgacgggcgcggccgcgtatccggtcgacatgccgatggaggtgctgctcggcaagccgccgcggatgcaccgcgacgtgaagcgcgtgcacatcgagcgcgcgggcgtggacgtgacgggcgtcgcgcttgccgacgccgcgcgcgacgtgctccggcacccgaccgtcgcgagcaagtcgttcctcatcacgatcggcgaccgcacggtgggcggcacgtcggtgcgcgaccagatggtcggcccgtggcaggtgcccgtcgccgattgcgcggttaccgcgctcgactacgcgggctttgccggcgaggcgatgacgatggccgagcgcacgccgctcgcggtgatcgacgcgccggcgtcgggccgcatggcggtgggcgaggcgatcacgaacatcgcggccgcgccgatcgcctcgctcgacaagctgaagctgtccgcgaactggatggccgcgtgcggtaccgagggcgaggacgcgaagctcttcgacacggtcaaggcgatcggcatggagctgtgcccggcgctcggcatcggcattccggtcggcaaggattcgctgtcgatgaagacgaagtggaacgacaacggcgtcgcgaaagaagtggtcgcgccggtgtcgctgatcatctcggcgttcgcgcccgtcgaggacgtgcgccgccatctgacgccgcagctgcgccgcgtcgcggacgtcggcgcgagcgtgctgatcgcgatcgatctcgggcgcgggaagaaccgcctcggcggcagcattctcgcgcaggtcacgcagcaggtcggcgacgcgacgcccgacgtcgacgatccggaagacctgaagcgtttcttcgcggcggtccagtcgctgaatgcgcgggacctgctgctcgcgtaccacgaccgctcggacggcggcctgtgggcgaccgtctgcgaaatggcgttcgccgggcacgcgggcgtgtcgctgaacgtcgacatgctgacgctcgatcagcagcacgaatccgactacggcgacgcgaaggactgggcgaagcagacgagcggccgccgcgaggatcgcacgatccgcgcgctcttctccgaggaactcggcgcggtcgtccaggtgcgcgcggcggaccgcgacgcggtgctcggcgcgctgcgcgagcatggcctgtccgcgtgctcgcacgtgatcggcgcggtcaacgagaccgacgcgatcgaggtgtaccgcgacgcgaagaagatctacgaggcgccgcgcgtcgagctgcagcgcgcatggagcgaggtgagctggcggatcgcgcggctgcgtgacaacccggcgtgcgcggacgccgagtacgacgcgatcctcgacgccggcgatccgggcctctcgcccgtgctgacgttcgatccggcggaggatgtcgccgcgccgttcatcgcgacgggcgcgcgtccgcgtgtcgcgatcctgcgcgagcagggcgtgaactcgcatctcgaaaccgcctacgcgttcgaccgcgcgggcttcgacgcgcatgacgttcacatgagcgacctgctcgccggccgcgcgacgctcgccgatttcgccggcgcggtcgcgtgcggcggcttctcgtacggcgacgtgctcggcgcgggcgagggctgggcgaagacgatccgcttcaacgacaagctcgccgacatgttcgccgcgttcttcgcgcgccccgacacgttcgcgctcggcatctgcaacggctgccagatgatgtcgagcctcgcgtcgatgatcccgggcgcgcaggcgtggccgaagttcacgcgcaacaagtccgagcagttcgaggcgcgtttctcgttcgtcgaagtgcaaagctcgccgtcgatcttcttcgcgggcatggaaggctcgcggattccggtggcggtcgcgcatggcgaaggctacgcggacttctcgcagcagggcgatcagagccgcgtcgcggtcgcgatgcgctacgtcgatcaccgcggcgacgcgaccgagcgctatccgttcaacccgaacggctcgcccgcgggcatcacgtcggtgacgacggcggacggccgcttcacggtgctgatgccgcacatggagcgcgtgcatcgcacggtgacgatgagctggcatccgcagggctggggcgaagcgagcccgtggctgcgcgtgttccgcaacgcgcgccgctggatcggctga

SEQ ID NO: 52765 - protein, 1356 aa, Burkholderia pseudomallei K96243
MAHFSCFPGASALSDFRQTRLLDALKQIDGDIVAVRGQYLHFVNAHEPLTADDEARIGALMHYGAPLEPAAEKGATETFVVLPRFGTVSPWASKATDIARHCGLARVRRIERGIEFTVTLKAGVLGVGAKKALAADARAAVAAALHDRMTESVVASREDARHLFDELPAKPLATVDVLAEGRAALERANAELGLALADDEIDYLVDAFIKLERNPTDVELMMFAQANSEHCRHKIFNAQWTIDGQAQDMSLFAMIRNTEKMSPQGTIVAYSDNSSIMSGAHAERWFPRGAGEPGEPGERYGRHTELTHTLMKVETHNHPSAISPFPGAATGAGGEIRDEGATGRGARPKAGLTGFTVSNLDLPGARESWENARDAAQPAAARNAQQPCAPYGRPDRIASPLSIMIDGPLGGAAFNNEFGRPNLGGYFRVYEQNVGGQVRGYHKPIMIAGGIGNISDAHTHKHDVPAGSLLIQIGGPGMRIGMGGGAASSMATGANTAELDFDSVQRGNPEIERRAQEVINGCWQLGEHNPILSIHDVGAGGLSNAFPEIVDGAGKGARFELRKIALEESGLSPREIWSNEAQERYVLAISPADLPRFEAICARERCPFSVVGVATDERRLQLVDGEATGAAAYPVDMPMEVLLGKPPRMHRDVKRVHIERAGVDVTGVALADAARDVLRHPTVASKSFLITIGDRTVGGTSVRDQMVGPWQVPVADCAVTALDYAGFAGEAMTMAERTPLAVIDAPASGRMAVGEAITNIAAAPIASLDKLKLSANWMAACGTEGEDAKLFDTVKAIGMELCPALGIGIPVGKDSLSMKTKWNDNGVAKEVVAPVSLIISAFAPVEDVRRHLTPQLRRVADVGASVLIAIDLGRGKNRLGGSILAQVTQQVGDATPDVDDPEDLKRFFAAVQSLNARDLLLAYHDRSDGGLWATVCEMAFAGHAGVSLNVDMLTLDQQHESDYGDAKDWAKQTSGRREDRTIRALFSEELGAVVQVRAADRDAVLGALREHGLSACSHVIGAVNETDAIEVYRDAKKIYEAPRVELQRAWSEVSWRIARLRDNPACADAEYDAILDAGDPGLSPVLTFDPAEDVAAPFIATGARPRVAILREQGVNSHLETAYAFDRAGFDAHDVHMSDLLAGRATLADFAGAVACGGFSYGDVLGAGEGWAKTIRFNDKLADMFAAFFARPDTFALGICNGCQMMSSLASMIPGAQAWPKFTRNKSEQFEARFSFVEVQSSPSIFFAGMEGSRIPVAVAHGEGYADFSQQGDQSRVAVAMRYVDHRGDATERYPFNPNGSPAGITSVTTADGRFTVLMPHMERVHRTVTMSWHPQGWGEASPWLRVFRNARRWIG

SEQ ID NO: 52766 - DNA, 3867 bp, Methylococcus capsulatus str. Bath
  CDS (1)..(3867): transl_table=11
atggttgtctgcattccgggcccatcggccttgtccatgttccgcgccagccgcctgctggcatccctgcggggagtcgcgccggccgttcgcaaggtcgatgcccgattcgtccatttcgcggcgctggcgcgcggtctggacgatgtggagcaccggctgctgcggcaggtcctgaaccatggtccggtcgagagcgagacggaagccagcgaaactttgctggtgacgccgcggctcgggacgatttcgccctggtccagcaaggccaccgagatcgtccgccgctgtggcctggatgcggtctgccgggtcgagcgcggcattgcctacgcgctgcagctcgacggcgagctgtccgcggcgcagcgtgaagctgtcagggcgctgctgcacgatcgcatgacgcagaccgtcctcagccgcgggcaggaagagatgctgttccgccaacgcgagccggagccgctgcaatacgtcccgctcatgcaggagggccgttgggcgctggtcaaggccaacgccgctctggggctggcgctgtcggaagacgagctggattacctggagcaaagctatcgggcgatgtcgcgcaaccccagtgacatcgagctgatgatgttcgcccaggcgaattcggagcattgccgccacaagatattcaacgcccaatggcggatcgacggcgaggcgcaggatcagaccctgttcggcatgatccgccacaccagccaggcgagtcccgagggcatcatctccgcctacagcgacaacgccgcggtgatccggggcgcgcgggccgaagtgctgctgcgggatcccggcggtttcgcctacggctaccgggaagaaccggcccatctggtgatgaaggtggagacccacaatcacccgactgcgatctcgcccttccccggcgccgccaccggtgtcggcggcgaaatccgcgatgagggcgccaccgggcgcggttcgcacagcaaggcgggcctgtgcggcttcgccgtctcgcacctgcgcattcccgacttcatacagccttgggagaccggcagcggcaggccggggcgcatcgcctcaccgctccagatcatgctggaggggccgatcggcggcgcggcgttcaacaacgaattcggccgtcccaacctgtgcggctacttccggaccttccagcagttggcgccggatggcgcgagcctgtacggctaccacaagccgatcatgctcgccggcggcatgggcaacatccgcgaagtcaatctgggcaagtccgaaatcccgccaggcgctcccatcgtggtactgggcggtccggccatgctgatcgggctgggcggcggcgccgcctcctcggtcgcctccggcgaaagcgccgaagacctcgatttcgcctcggtgcagcgcgacaatccggagatggagcggcgctgccaggaagtcatcgatcattgcgtcgcccttggcgaggacaacccgattctgtcgatccacgacgtcggcgccgggggactgtccaatgccgtgccggaactcatccacgacagcgggcggggcgggcgtttcgagctgcgcgacattccgagcgcggagccgggcctctcgccgatgcagctctggtgcaacgagtcccaggagcgctacgtgctcgcgctgcgaccggagcggctggaacgcttccaggcgctgtgcgaacgcgagcgctgtccgttcgcggtgatcggccacgcgacggcggacgaagacctggtggtcaacgacctccggttcgccaaccatccggtggcgatcccgatgtccctgctgttcggcaaacctccccggatgctgcgcgacgtcgcccggcttccggctgcgaccaagccgctggatttcgccggcttcgactggcgcgacgccgtcaagcgggtactgagtctgccggcggtggccgacaagagtttcctgatccacatcggcgaccgctccgtgggcggattggtggcgcgggatcagctggtcggcccgtggcaggtgccggtggcggacgtggcagtgacggtatcgggtttccgcgccgtcaccggtgaggccatggccctgggcgaacgctcacccatcgccgtgatcgacgcgccggcatccgggcgcatggcggtgggagaggcgttgaccaacattctggcggccccgattgcctcgctgggcgacgtcaagctgtcggcgaactggatggctgcggccggcgcacccggcgaagacgcccgcctgttcgataccgtgcgcgcggtaagtctggagctgtgtccggcgctgggtgtcgccataccggtcggaaaggattcgctgtcgatgcgtaccgtgtggcgcgagagcggcaaggagatggccatgatttcgccgctgtcactgatcgtttcggcattcgcgccggtgaccgacgtgcggcggacattgacgccggaactgcggctcgatggcggcgcttcggtgctggtcctgatcgatctcggccagggccgcaaccgtctcggcggctcggccctggcccaagtgtacggccagatgggggagacctgcccggacctcgacgatccggccttgttccgggcgttcttcggggcagtgcagtcgctcagcagcgatggcttgatcctcgcttatcacgaccgctccgacggcggtctgttcgtcacggcggtggaaatggccttcgccgcgaggactggcatcgatctgcacctcgatcacctgggtgatccggtggcggcggcattcgccgaagagctgggcgcggtcatccaggtggccagcgacgacctgcccgcggtgatggtgaggctcgaggatgccggcctgggtgcctgcagccgggtggtcggagcaccgcgttccgacagcaggatcgtggtgcaccatgggggcatgccgatattcggcgccagccgtgccgaactgcaagggatatggtccgagaccagctaccgtatgcaggcattgcgggacaatccggattgcgcccggcagcagttcgaatccctgttcgacgacggcgacccgggtttgcatgccaaactgagtttcgatccgaacaccgatgttgcggctccctatctcaatctatcgcggccccggatggccatactgcgcgaacagggtgtcaacggtcacatggagatggcggcggcgttcgacgcggcgggtttcgcttgcgtcgacgtgcacatgagcgatctggcggaaggccgcatcggtctagcagacttccggggactggcggcctgcggcggattttcttacggtgacgtactcggcgcgggcggcggttgggccaagtcgatcctttacaacgcccggttgcgcgatgaattcgtggcctttttccggcgggaggacaccttcggactcggggtgtgtaacggctgtcagatgctttcgcaattgcacgaactgatcccgggggccgagaattggccgcgcttcgtgcgcaaccgttccgaacagtacgaggcgcgggtcgccatggtggaaatccagccgtcccggtcgatcttcttcgatggcatgacgggatcgcggctgccggtcgtggtctcgcacggcgagggtcgggtcgaataccgccccggaaccggtaatgggggacagctcgtggcggtcgccttcgtcgacaactatgaccggattaccgaagcctatcccttcaatcccaacggttcgcctcgtggcatcaccggtctgaccacgccggacgggcgtttcaccatcatgatgccgcacccggagcgctgtttccgtaccgtgcagaattcctggcggcccagggattggggcgaatacggtccgtggatgcgaatgttccgcaacgccaggcggtgggtcggataa

SEQ ID NO: 52767 - protein, 1288 aa, Methylococcus capsulatus str. Bath
MVVCIPGPSALSMFRASRLLASLRGVAPAVRKVDARFVHFAALARGLDDVEHRLLRQVLNHGPVESETEASETLLVTPRLGTISPWSSKATEIVRRCGLDAVCRVERGIAYALQLDGELSAAQREAVRALLHDRMTQTVLSRGQEEMLFRQREPEPLQYVPLMQEGRWALVKANAALGLALSEDELDYLEQSYRAMSRNPSDIELMMFAQANSEHCRHKIFNAQWRIDGEAQDQTLFGMIRHTSQASPEGIISAYSDNAAVIRGARAEVLLRDPGGFAYGYREEPAHLVMKVETHNHPTAISPFPGAATGVGGEIRDEGATGRGSHSKAGLCGFAVSHLRIPDFIQPWETGSGRPGRIASPLQIMLEGPIGGAAFNNEFGRPNLCGYFRTFQQLAPDGASLYGYHKPIMLAGGMGNIREVNLGKSEIPPGAPIVVLGGPAMLIGLGGGAASSVASGESAEDLDFASVQRDNPEMERRCQEVIDHCVALGEDNPILSIHDVGAGGLSNAVPELIHDSGRGGRFELRDIPSAEPGLSPMQLWCNESQERYVLALRPERLERFQALCERERCPFAVIGHATADEDLVVNDLRFANHPVAIPMSLLFGKPPRMLRDVARLPAATKPLDFAGFDWRDAVKRVLSLPAVADKSFLIHIGDRSVGGLVARDQLVGPWQVPVADVAVTVSGFRAVTGEAMALGERSPIAVIDAPASGRMAVGEALTNILAAPIASLGDVKLSANWMAAAGAPGEDARLFDTVRAVSLELCPALGVAIPVGKDSLSMRTVWRESGKEMAMISPLSLIVSAFAPVTDVRRTLTPELRLDGGASVLVLIDLGQGRNRLGGSALAQVYGQMGETCPDLDDPALFRAFFGAVQSLSSDGLILAYHDRSDGGLFVTAVEMAFAARTGIDLHLDHLGDPVAAAFAEELGAVIQVASDDLPAVMVRLEDAGLGACSRVVGAPRSDSRIVVHHGGMPIFGASRAELQGIWSETSYRMQALRDNPDCARQQFESLFDDGDPGLHAKLSFDPNTDVAAPYLNLSRPRMAILREQGVNGHMEMAAAFDAAGFACVDVHMSDLAEGRIGLADFRGLAACGGFSYGDVLGAGGGWAKSILYNARLRDEFVAFFRREDTFGLGVCNGCQMLSQLHELIPGAENWPRFVRNRSEQYEARVAMVEIQPSRSIFFDGMTGSRLPVVVSHGEGRVEYRPGTGNGGQLVAVAFVDNYDRITEAYPFNPNGSPRGITGLTTPDGRFTIMMPHPERCFRTVQNSWRPRDWGEYGPWMRMFRNARRWVG

SEQ ID NO: 52768 - DNA, 3051 bp, Anaplasma marginale str. St. Maries
  CDS (1)..(3051): transl_table=11
atgatctgcaataatgtggggctgttcctcaaacacggtggccgccgtatgatattcagaattgcggttgatgacatctttgaccccagcagaaaactcgcatatgttgtccgcaccccaaacaaaataggcacggaagacgttttacgcgtcagaggcctactatcaaacaacacaactagcaagtgctacgcttttatatacgaacacgatatgtacgcacctggagcacacgggtacagaaatatagaatctggcaaaccttatgacttatttgaaattctaggagcaacctggtcagtggagataggataccttcccgggatgaccgacaacgtgggaaactcggcggctcagataattcgtgattttttatgcattgaagacgtcctggtccgaacgtcggagaattttttcttcaaagaagagccagaccgcactgcacgcaactacaatccactggtgcagtactgtaagctggtacacacgaaagcagaaggtgtttttgaagtagaattcctaggcaataaaaatgtgtgcgccattaaccgctcaatagcaaaccctattataaccccgcacccgataccattcatcatggcccctgatgttgtgggcgagggggtagaggaggacgtacgtgcggtagacttgcatgttagcgatgaggagcttgaaaaaattagcaagcacgggattgacggacgcgggccgctcaatttgtccttggaggccatgcacgccattcgcacatactttgatggcgaaaaccgcccaccaaacgacatagagctagaaaccctggcgcagacgtggtcagagcactgcaagcacaatatattttccgcccagatagatgagatcaaagaggggttgtacagacactgcataaagcgcgcaacttccgacataaactcaccgatgtgcatatcggtcttctccgataatgccggagccataacatttgatgacgattttctcgtagtagccaaggtggaaacgcacaatagcccctccgctcttgacccatttggaggagcagaaactggtgttctgggcgtgaacagggacataatcgggttcggtatgggcgcaaaaccgattatgaattcgtaccacttttgttttgcagacaacctggaacaaaagctgtacagagaccgggagtgcttggaggagatactgccaccgcggaaaattgcggatggggtaatacggggagtaaactcgggaggaaattgttcgggcatcccaaccaccattgggacatcatacttcgataacagattctgcggcaagccgctagtttttgtcggcagcattgggattataccacgcacagtctgtgggctgccagcacatgtcaagaccgtgcaggatggagattacatagtggtagttggcggtagagtgggaagagatggaatccacggtgccacgttttcttcacatgcgctaagagagggaataggcgctactgtggtgcaggtaggtagccctatcacacagaaaaaactgtctgatgcaataatcaagcaggcaagggatttggggctgtataatgcaataacagacaacggggcaggcggcctttcttcttccgtcggtgaaatgggcgtgagaggatttaatgttgagctggacaaggtccccctcaaaacacaaagcatgctaccatgggaaatatgggtgtctgaatctcaggagaggatgacgcttgctgtccctcccagcaagtatcaaaaacttgcagaaattatgcaaatgcatgacgtagaaatcagcatcattggagaattcaacagcactggacgggcagttgtcacgtacaatggtaaggtcatcatggacatagacacaagctttctgcacaacggcgttcctagattaacccttactactgaaaaacaattttacacccaacaacagtcagagctaagaacaaacacctcagtagcggaggatttgcgcaacattattgggcgcaaaaatatctgcagcaaagagtatataatctcgcagtacgatcatgaagtacaggggtcttccgtcataaaaccgctacagggcgcgggcagaatatgtggagatgcagtagtccttcgccctgtaccctcatccaaaagaggagtagtcacgtctcaggggtttggatgtagatacggagaggttgatccttacaggatggcagcttgcgccattgataccgcaatacgcaattacgttgcagtagggggcaatatagaccaccttgcactcatcgataacttctgctggtgcagcgcaaccgaacctggcagactctggcaactgaagcaggcagccagggcttgttatgactatgctactgcgtttggtacgcccttcatatctgggaaggatagcatgttcaacgattttcacgggtataacagcgctggccaaccggtgcgtatttccgctccgccctctctgctgatttccacgcttggcattattgaaaatgtagaaaatgccatctcgccccacgtcaagggaatggacccaatctacatcctgggtaccacctataacgagcttggcatgtcagaatatcaggcctatagcggactaaatagtggtagcgttccctcagtagatgcacaaactgccaagttgatgtatcgtaagttccaccatgccacaatccgcggcataatagcctccgcaatcgcgccaggcctcggtggactggcagttggtttggccaaggccctcatagggggcaggcttggcgccgaaatagacctatctgcagtgcctacaagcggaataccgaaagatgaaatgtgggaaaagtctattatgttctcagaatcacaaagcaggataatcgtaactgtgcatgaagaccgcagcgcagagtttgagtcaatcttctcagaagtcccgcatgcgcgcataggcagaactacgaaagattatatgctaaaaattacaaacgttgcggaagtgtgtctgcatgacctcgaagccagctacaaagcgttcagcaatagccattatgccgaccactgtgcggaaaacttatag

SEQ ID NO: 52769 - protein, 1016 aa, Anaplasma marginale str. St. Maries
MICNNVGLFLKHGGRRMIFRIAVDDIFDPSRKLAYVVRTPNKIGTEDVLRVRGLLSNNTTSKCYAFIYEHDMYAPGAHGYRNIESGKPYDLFEILGATWSVEIGYLPGMTDNVGNSAAQIIRDFLCIEDVLVRTSENFFFKEEPDRTARNYNPLVQYCKLVHTKAEGVFEVEFLGNKNVCAINRSIANPIITPHPIPFIMAPDVVGEGVEEDVRAVDLHVSDEELEKISKHGIDGRGPLNLSLEAMHAIRTYFDGENRPPNDIELETLAQTWSEHCKHNIFSAQIDEIKEGLYRHCIKRATSDINSPMCISVFSDNAGAITFDDDFLVVAKVETHNSPSALDPFGGAETGVLGVNRDIIGFGMGAKPIMNSYHFCFADNLEQKLYRDRECLEEILPPRKIADGVIRGVNSGGNCSGIPTTIGTSYFDNRFCGKPLVFVGSIGIIPRTVCGLPAHVKTVQDGDYIVVVGGRVGRDGIHGATFSSHALREGIGATVVQVGSPITQKKLSDAIIKQARDLGLYNAITDNGAGGLSSSVGEMGVRGFNVELDKVPLKTQSMLPWEIWVSESQERMTLAVPPSKYQKLAEIMQMHDVEISIIGEFNSTGRAVVTYNGKVIMDIDTSFLHNGVPRLTLTTEKQFYTQQQSELRTNTSVAEDLRNIIGRKNICSKEYIISQYDHEVQGSSVIKPLQGAGRICGDAVVLRPVPSSKRGVVTSQGFGCRYGEVDPYRMAACAIDTAIRNYVAVGGNIDHLALIDNFCWCSATEPGRLWQLKQAARACYDYATAFGTPFISGKDSMFNDFHGYNSAGQPVRISAPPSLLISTLGIIENVENAISPHVKGMDPIYILGTTYNELGMSEYQAYSGLNSGSVPSVDAQTAKLMYRKFHHATIRGIIASAIAPGLGGLAVGLAKALIGGRLGAEIDLSAVPTSGIPKDEMWEKSIMFSESQSRIIVTVHEDRSAEFESIFSEVPHARIGRTTKDYMLKITNVAEVCLHDLEASYKAFSNSHYADHCAENL

SEQ ID NO: 52770 - DNA, 3933 bp, Azoarcus sp. EbN1
  CDS (1)..(3933): transl_table=11
atggccgaaatcctcaagctgcgcggcgctgcggcgctttcttcctcccgcctcacgcgcctttctcgatccgcagccgaagtgctgccgaagctaaaggggctggccgcggagtactggtatttcgtcgagctcgccgcaccgctggcgacggacgaacgcgaccggctcgtcgacctgctcggggccgtccccgcgtcgccgcaagtgccccacggcacgcagttgctcgtcgtgccgcggctcggaacgatctcgccgtggtcgtcgaaggcgacggatatcgcgcgccagtgtggcttcgacaaggcgatgcgcatcgagcgcggcgtgttgtattcgctcgacatgcgccacgggctcgacgaccgccagtacgcggcggtgctgccgctgctgcacgatcgcatgaccgaatcggtgctggcgaacctcgaggcggccgaagcgctgttccatcactacgagccgaagccgctgatgtcggtggaggtgctcgccggggggcgtgacgcgctcgttgcggcgaacgccgaactcggcctcgcgctgtccgacgacgagatcgactacctcgtcgacaacttcacccgcgtcgcgcgcaatccgaccgacgtcgagctgatgatgttcgcgcaggccaactccgaacattgccgtcacaagattttcaacgccgactgggtcatcgacgcgcggccgatggagaaaacgctgttcggcatgatccgcgacacgcacaatgcgcatcctgaaggcactgtcgtcgcgtattcggacaacgcgtcggtgatcgagggcgcgaccatcgaccgcttctacgcggacgccgacggccagtggcgcttccgcgccgaagagacgcacatcctggcgaaagtggagacgcacaaccacccgacggcgatctcgccgttccccggcgctgcgaccggggcgggtggcgagatccgcgacgaaggagcgaccggccgcggttcgaagccgaaagccggcctgaccgggttttcggtgtcgaacctgaacattccggaattcggacagccgtgggaaaaaccctatggcaagccggaccgcatcgcttcggcgctcgacatcatgatcgaaggcccgatcggcggcgccgcgttcaacaacgaattcggccgtccgaaccttgccggttacttccgcacgttcgagcaggaagtgcagggcgaagtgcgcggctatcacaagccgatcatgatcgcgggcggcctcggcagcatccaggcgcagcagtcgcacaaggtgaagttcgcgcccggcacgctgctgatccaactcggcggcccgggcatgctgatcgggctcggaggcggcgccgcttcgagcatggcgactggcacgaacacggccgatctcgacttcgcctcggtgcagcgcggcaaccccgagatcgagcgccgctgtcaggaagtcatcgactgctgctggcagcgcggtgacgcgaacccgatcctcgcgatccacgacgtcggcgccggcgggctgtcgaatgcgatgccggaactggcggaatcggccggactgggcgcgcatttcgagctgcgcgaagtccatatcgaggagccgggcatgagcccgcgcgagatctggagcaacgagtcgcaggagcgctacgtgctcgcgatcgcgcccgaaagcctcgccgaattccgcgcgatctgcgagcgcgagcgctgcccgttcgccgtgctcggcgaagcgaccgcggacggccgcctgaccgttgccgaccgtcatttcgagaacaagcccgtcgacatggaaatgcaggtgctgctcggcaagccgccgaagatgacccgcaacgtgtcgcgccgcgcggtgcatgtgccgccgttcgacgtcaccgatatcgacctgaaggacgcttgcctgcgcgtgctgcgcctgccggcggtcgcgagcaagaacttcctgatcactatcggcgaccgctcggtcggcggcctgacggcgcgcgaccagatggtcggcccgtggcaggttccggtcgccgatgtcgcggtcaccgcaatgagcttccacggctaccagggcgaagcgttcgcgatgggtgagcgcaccacggttgcgtgcctcgacgcgccggcgtccggacgcatggcgatcggcgaggcggtgacgaacatcgccgccgcggacattgccgacatcggccagctcaagctgtcggcgaactggatggccgcggccgggcatcgcggcgaggatgcgaagctgttcgacaccgtcagcgcggtgtcgcagttttgccagcaggccggtcttgcgatcccggtcggcaaggattcgctgtcgatgaagaccacgtggcaggacgacggcgagagccgccaggtcgtctcgccgctgtcgctcgtcgtcacggcgttcgcgccggtcgcggacatccgccgcacgctcacgccgcagctgcagttccccgaaggtgtcgacaccgaactgctgctgatcgacctcggcaacgacggcaaccgcctcggtggctcggcgttggcgcaggtattcggctcggtcgccgagcacgcgcccgacgtcgatgccgcgcagctcgcaaggttcttcggcctgatccagcagttccgccgcgacggtctgctgctcgcgtatcacgaccgtggtgacggcggcctgttcgcaacgctgtgcgagatggcgttcgcgtcgaaatgcggcctgtcggtggtgctcgacacggtctgctacgaccagtacatgaacgacgtcgacggactcgacaagaagccggacacgatcaagggccgcctcaacgaccggctcttcggcgggctgttcgcggaggaactcggcgcggtaatccagatccgccgcgacgaccgcgcccgcgtcaccgcaccgctgcgcgaagccgggctcacctaccacttcctcggcgagccgaacgcgaaggacgagctccgcttctggcgcaacgcgaagctcgtcttcaacgcgccgcgcgccgaactgctgcaggtctggtccgagacgagctaccgcatcgcgcgcctgcgcgacgacgccgattgcgcgaaggaggagttcgacgcgctcgccgacgcgacgaacccggggctgagcgtcgccctgactttcgatccggccgatgatgtcgccgcgccgatgatcgcgacgggcgcgcggccgaagatcgcaatcctgcgcgagcagggcgtcaattcgcaggccgagatggcagcagcgttcgagcgcgccggtttcgcgccgtacgacgtgcatatgtcggatctgcaggccgggcgccaccagcttggggagtttcacggtctcgcggcctgcggcggtttctcgtacggggacgtgctcggtgcggggcagggttgggccaagtcgatcctgttcaacccggcgctgcgcgcgcaattcgaagcgtttttcacccgccccgacacgttcgcgctcggcgtgtgcaacggctgccagatgatggcgcacctcgcatcgatcatcccgggcgccgaacactggccgactttccaccgcaaccgcagcgagcagttcgaggcgcgtttcgtggtggccgaagtgctcgacagcccgtcgatcctgttcgccggcatggctggcagtcgcatgccgatcgtcgtcagccacggcgaggggcgtgcggtgttccgcgacgctaccgactctgagcgtgtgctgacggcgctgcgccatgtcgacaaccacggcgtgccggccgcgacttatccgttcaacccgaacggttcgccgcaaggatcgaccggtttcacgactgcggacggccgcttcacgatcctgatgccgcacccggaacgcactgcgcggaccgtgcagatgagctggtacccggccgggctcggcgaggattcgccatggatgcgcatgttccgcaacgcgcgacggtggctggggtga

SEQ ID NO: 52771 - protein, 1310 aa, Azoarcus sp. EbN1
MAEILKLRGAAALSSSRLTRLSRSAAEVLPKLKGLAAEYWYFVELAAPLATDERDRLVDLLGAVPASPQVPHGTQLLVVPRLGTISPWSSKATDIARQCGFDKAMRIERGVLYSLDMRHGLDDRQYAAVLPLLHDRMTESVLANLEAAEALFHHYEPKPLMSVEVLAGGRDALVAANAELGLALSDDEIDYLVDNFTRVARNPTDVELMMFAQANSEHCRHKIFNADWVIDARPMEKTLFGMIRDTHNAHPEGTVVAYSDNASVIEGATIDRFYADADGQWRFRAEETHILAKVETHNHPTAISPFPGAATGAGGEIRDEGATGRGSKPKAGLTGFSVSNLNIPEFGQPWEKPYGKPDRIASALDIMIEGPIGGAAFNNEFGRPNLAGYFRTFEQEVQGEVRGYHKPIMIAGGLGSIQAQQSHKVKFAPGTLLIQLGGPGMLIGLGGGAASSMATGTNTADLDFASVQRGNPEIERRCQEVIDCCWQRGDANPILAIHDVGAGGLSNAMPELAESAGLGAHFELREVHIEEPGMSPREIWSNESQERYVLAIAPESLAEFRAICERERCPFAVLGEATADGRLTVADRHFENKPVDMEMQVLLGKPPKMTRNVSRRAVHVPPFDVTDIDLKDACLRVLRLPAVASKNFLITIGDRSVGGLTARDQMVGPWQVPVADVAVTAMSFHGYQGEAFAMGERTTVACLDAPASGRMAIGEAVTNIAAADIADIGQLKLSANWMAAAGHRGEDAKLFDTVSAVSQFCQQAGLAIPVGKDSLSMKTTWQDDGESRQVVSPLSLVVTAFAPVADIRRTLTPQLQFPEGVDTELLLIDLGNDGNRLGGSALAQVFGSVAEHAPDVDAAQLARFFGLIQQFRRDGLLLAYHDRGDGGLFATLCEMAFASKCGLSVVLDTVCYDQYMNDVDGLDKKPDTIKGRLNDRLFGGLFAEELGAVIQIRRDDRARVTAPLREAGLTYHFLGEPNAKDELRFWRNAKLVFNAPRAELLQVWSETSYRIARLRDDADCAKEEFDALADATNPGLSVALTFDPADDVAAPMIATGARPKIAILREQGVNSQAEMAAAFERAGFAPYDVHMSDLQAGRHQLGEFHGLAACGGFSYGDVLGAGQGWAKSILFNPALRAQFEAFFTRPDTFALGVCNGCQMMAHLASIIPGAEHWPTFHRNRSEQFEARFVVAEVLDSPSILFAGMAGSRMPIVVSHGEGRAVFRDATDSERVLTALRHVDNHGVPAATYPFNPNGSPQGSTGFTTADGRFTILMPHPERTARTVQMSWYPAGLGEDSPWMRMFRNARRWLG

SEQ ID NO: 52772 - DNA, 2862 bp, Dehalococcoides ethenogenes 195
  CDS (1)..(2862): transl_table=11
gtgcacaggatagaagtctccctgaaaccggagtggccagacccgaaaggcaacagcatttgccgtgatatacaagaccttggcattacctcagttagcgaagtgcgggtaatagacgttttctggctggagggacagctttcagacagtgaagtcctgaccatttccggggagcttctttcagacaagataatccagacctttaaatatgacgccaactgcccgcaggcggaagctgacggcttttcggctatagaagtcacctataacgccggggtaaccgacccggttcaggaaactatcctcaaagccatttctgatttgggcataaagggcgtaactgccgccaaaacggccaaacgctatctgcttaagggggaaatttcggctgacgaactggataccatcggcagtaagcttcttataaaccccattgtccagcatgtggttaagagcggttcaaaccccttcccccctaacccgaagtatacttttaaactgaggaagattgacctgctggccgaaaagctgaaggacaacatggcctcgctgggcaaggagttcagcctgagccaccaggaactttcggctatttatgaacattacctgaaactggggcgggcacccactgatgccgaactggaaaccctggcccagacctggagcgaacactgctgccataaaacatttaaggctatgctggattatgacggccagattataaataacctgctgaagcagactatagccaaagccactgctgaacttaacaaaccctggtgcttatctgtttttgtagataactccggcgtaatagagtttgatgataaatggggggtctgctttaaggctgaaacccataatcacccgtcagcggttgagccatacggcggggcggctaccggcattggcggggtaatccgtgacatactgggcacgggacttgccgccaaacccattgccaatacagatgtattctgtttcggccaacctgacctgccagaaaatgaactgcccccgggagtgcttcatccccgccgtgttttcaaaggggtacgctccggcgtggcagattacggcaaccgtatgggcatacccacagttaacggggcagtcctttttgatgaacgctataccgccaacccgctggtttactgcggtactataggcctgatacccaaaaaatacgccctgccgggcaagcaatctgccggtgatttggtggtgctgattggcgggcgtaccgggcgtgacggcatacacggggtaacctttgcctccggcgaactgaatgaccgctctaccgagctgtcttttaccgccgtccagataggcaaccccattgtggaaaagcggatgctggatactttgcttgccgcccgtgaccgtgagctgtttgtacgcattacagactgcggcggcgggggtttaagctctgccataggcgaaatggctgaatctaccggggtaaaagtctatctggataaagtacccttgaaatactccggcctgacctactctgaaatatggatatccgaaagccaggaacggatgctgctggcagttaaaaaagaaaaactgagtgagattatggcactctttgaaagcgaaggggtagaagcgtcggtcataggcgaattcagcaatgaccgccacctcaagcttttttacgaagacaatccggtagctgacttgcagatggacttcctgcataacgggcggcctcagctggaattaactgccacccgccacaaacaccgccaccccgaagctgactttgactgcccggaagatttggaaaccgagcttaaaaatatactttcccactggaatgtgtgcagccgggagtggataatccgccagtatgaccatgaagtacagggcgggagcgtcctcaaacccatggcgggggctgaaaatgacgggccgggtgatgccgccgttatccgcccggtgcttggctcaaagaaagcggtagtaatatcaaacggcattaaccccagctacgctgacgtagatgcctacaatatggccgcatcggctatagacgaagccctgcggcagattattgcggtaggcggcaacctggacagggtagccctgctggataacttcagctggggcaatgccagccgccccgaaagcctgggggatttggtacgtgcctgtcaggcctgccatgacctttccctggtctttgaaaccccctttatttcaggcaaagacagcctgaataacgaattccgttataatgacaagctgattaccattccccacaccctgcttatttccgccataggggtaatggaagacggtgagaaggccgtcagtatggatttcaaaaaagccggaaaccttatttatcttgtgggcaaaaccgccgaagaactgggcggttcccattacttcaaaaaccacagctttataggcaaccgggcacccgccgtaaatgcagagcgcgccaaagaaaacatgcaggccctttcttccgctaccgccaaagggctggtggctgcctgccatgacctgtccgaaggcgggctgggagttgcggcggccgaaatggccttcagcggcaaactgggggcaaacatacgtctggcagatgtacctctttctgaaaagatagagcgggaagattacatactcttttcagagtccaacagccgttttctggcagaagtatcacccgaacataaggccgaatttgaaaagctgatgcaggcgggagacttcgggcttataggtgaggtcaccgccgaaccccgtctgaaaataagcgggctgggcggcagggagattattataaacaccccggttagcgaactgaaagaggcctggcaaaggccgatgcgctggtag

SEQ ID NO: 52773 - protein, 953 aa, Dehalococcoides ethenogenes 195
MHRIEVSLKPEWPDPKGNSICRDIQDLGITSVSEVRVIDVFWLEGQLSDSEVLTISGELLSDKIIQTFKYDANCPQAEADGFSAIEVTYNAGVTDPVQETILKAISDLGIKGVTAAKTAKRYLLKGEISADELDTIGSKLLINPIVQHVVKSGSNPFPPNPKYTFKLRKIDLLAEKLKDNMASLGKEFSLSHQELSAIYEHYLKLGRAPTDAELETLAQTWSEHCCHKTFKAMLDYDGQIINNLLKQTIAKATAELNKPWCLSVFVDNSGVIEFDDKWGVCFKAETHNHPSAVEPYGGAATGIGGVIRDILGTGLAAKPIANTDVFCFGQPDLPENELPPGVLHPRRVFKGVRSGVADYGNRMGIPTVNGAVLFDERYTANPLVYCGTIGLIPKKYALPGKQSAGDLVVLIGGRTGRDGIHGVTFASGELNDRSTELSFTAVQIGNPIVEKRMLDTLLAARDRELFVRITDCGGGGLSSAIGEMAESTGVKVYLDKVPLKYSGLTYSEIWISESQERMLLAVKKEKLSEIMALFESEGVEASVIGEFSNDRHLKLFYEDNPVADLQMDFLHNGRPQLELTATRHKHRHPEADFDCPEDLETELKNILSHWNVCSREWIIRQYDHEVQGGSVLKPMAGAENDGPGDAAVIRPVLGSKKAVVISNGINPSYADVDAYNMAASAIDEALRQIIAVGGNLDRVALLDNFSWGNASRPESLGDLVRACQACHDLSLVFETPFISGKDSLNNEFRYNDKLITIPHTLLISAIGVMEDGEKAVSMDFKKAGNLIYLVGKTAEELGGSHYFKNHSFIGNRAPAVNAERAKENMQALSSATAKGLVAACHDLSEGGLGVAAAEMAFSGKLGANIRLADVPLSEKIEREDYILFSESNSRFLAEVSPEHKAEFEKLMQAGDFGLIGEVTAEPRLKISGLGGREIIINTPVSELKEAWQRPMRW

SEQ ID NO: 52774 - DNA, 3033 bp, Ehrlichia ruminantium str. Welgevonden
  CDS (1)..(3033): transl_table=11
atgattatccggattggcatagcagacaagacattactagaaaattatagaaataccacccttaccgtttatacgatagatacccaaaagaacctagaccaagaaactattaataaaataggtactttacttactaatccaataacacaaagattttttacattcatatacaataatgtagaattaaattaccaagaagttaacactacaaataactacaatttgttgaacatatttaatgcaaattggtccttagaaaaaagctttttacctggagtgactgataatgttggcaatacaactaaatgcatgataaaagaagcattaaaatgtgatttcagtttggatgttataacatcacaagtaatattcagtcaagagaccgtaccacaagaaaaagatatactcaagatttacaacccacttatagaatattgtaagttatcaattcgcaaagaaactggatttaatgtacgtttttttggaaataagcaaatattggatcttaataaactatatgacaattccagaacacataatactatatttattataccatatgtaagacaagaagatcttgttcctcaatgcattacacaagatacttgtgtcacagccgtaaatttaaatattcaagatgaagaattaatggaacttagcaaatacggtatccatggtagaggaggcttaaacctgtcattagaagctatgaaagctatacaagcatattttaaaaaaataaaccggaatcctaatgatatagaattagaaacactagcacaaacctggtcagaacattgtaaacacaatatcttctcctctcccatagatgatattatagatgggctgtacaaacattatatcaaacgtgcaacatatgaaataaactcagaaatatgcgtatctacgttctctgataacgcaggagcaataatatttgatgataatttcattattgcagataaagtagaaactcacaatagcccatcagctcttgacccatttggaggagcaatcactggtatactaggagtaaatagagatatcattggatttggtaaaggagctaaaccaatattaaatgcttattacttttgtttttctgaatcagaaaaagagttatatcgagataaaatgtgtacagttagcgtgttaccatctgaaacaataataaatggagtaatcaagggagttaactcaggaggaaattgttctggtatcccaacaggtctaggttcagtatattttgatgatagattccaaagtaaaccattagtatttgttggatgcactggtatcataccacgcattataggtaatactccatcacatctaaagggacctgcagatggagactatatagtaatagctggaggtagaactggacgtgatggcatacacggagccaccttttcatccaatgcactaacagaaaataatagcaacagtactgtggtacagataggtgatccaattacacaaaagaaattgtctgatgctatcattaaagaagcaagagatttaaacttatataatgcaatcactgataatggagccggaggtctatcatcttctataggtgaaatgggaaataatggatttaaagtagaactaaataaagtattattaaaacataaaaacatgctaccttgggaaatttgggtatcagaatcacaagaaagaatgacattagctattcctccaagcaaattcccaatatttgaaaaaattatgaaaaagcatgatgttgaaatcagtattattggaacattcaataatacaaaaaaagcagtagtatcatataatgactccattattatggatatagatataaacttcttacataacggtataccaaaaactcatctaaaaaccataccatggtcaaacataatatcctcagcagtagacacattacataataaaccactagacactgagctaaatgaaatgatgcaaagaatgaatatatgtagtaaagaatttatctctacacaatatgatcatgaagtacagggaacatcagtcataaaacctatacaagggaaaggacgagtagatggagaagcaatagttattagaccaatattatcatcagaaaggggattagtaaaatcacatggattaggatcaagctatggagaaatcagcacataccacatggctgcatgtgctatagatacagcaatacgtaattatatagcaatcgggggaaatttccatcacttagcattattagataatttctgttggtgtgactctacaaatccaaaaagattatggcaattaaaaaatgctgcccaagcatgttatgattacgcaaaaattttcaaaacacctttcatttctggaaaagatagcatgttcaatgattttaaaggttataacaataaaggagaacctattaacatttctgctcctccttcacttttaatttctacagtaggaataatagaaaatattcacaatgccataacacttgatgtaaaaaatccaggagatttaatatacatattaggtgtgacatatgatgaacttggaaggtccgaataccaaaaatatagcggattaggaaataataatgttccacaagtacgtgctaaacatgcaaaaaaactatacaagttatatagcaatgcagttaatacaaatattatatcatctgcaattgcattaaacctaggggggctagttataggtttaataaaatcactaattggaggagaactgggagcaaaaattgacttatcactagtaccaacacataatattgaagataatagcataaaagagaaagtaatcctattttcagaatcacaaagtagaattttagtaacaatagccccacataataaacaaaaatttgaaactattttcaaagacatagcacatgcaaacataggtataatcagtgatacaaataccctgattattaacaatatgcacattattaatttaaatacactaaaacacagttataaaaaattcagcaacatgaaaatacaagcatatgcaaatgcagaatatatttag

SEQ ID NO: 52775 - protein, 1010 aa, Ehrlichia ruminantium str. Welgevonden
MIIRIGIADKTLLENYRNTTLTVYTIDTQKNLDQETINKIGTLLTNPITQRFFTFIYNNVELNYQEVNTTNNYNLLNIFNANWSLEKSFLPGVTDNVGNTTKCMIKEALKCDFSLDVITSQVIFSQETVPQEKDILKIYNPLIEYCKLSIRKETGFNVRFFGNKQILDLNKLYDNSRTHNTIFIIPYVRQEDLVPQCITQDTCVTAVNLNIQDEELMELSKYGIHGRGGLNLSLEAMKAIQAYFKKINRNPNDIELETLAQTWSEHCKHNIFSSPIDDIIDGLYKHYIKRATYEINSEICVSTFSDNAGAIIFDDNFIIADKVETHNSPSALDPFGGAITGILGVNRDIIGFGKGAKPILNAYYFCFSESEKELYRDKMCTVSVLPSETIINGVIKGVNSGGNCSGIPTGLGSVYFDDRFQSKPLVFVGCTGIIPRIIGNTPSHLKGPADGDYIVIAGGRTGRDGIHGATFSSNALTENNSNSTVVQIGDPITQKKLSDAIIKEARDLNLYNAITDNGAGGLSSSIGEMGNNGFKVELNKVLLKHKNMLPWEIWVSESQERMTLAIPPSKFPIFEKIMKKHDVEISIIGTFNNTKKAVVSYNDSIIMDIDINFLHNGIPKTHLKTIPWSNIISSAVDTLHNKPLDTELNEMMQRMNICSKEFISTQYDHEVQGTSVIKPIQGKGRVDGEAIVIRPILSSERGLVKSHGLGSSYGEISTYHMAACAIDTAIRNYIAIGGNFHHLALLDNFCWCDSTNPKRLWQLKNAAQACYDYAKIFKTPFISGKDSMFNDFKGYNNKGEPINISAPPSLLISTVGIIENIHNAITLDVKNPGDLIYILGVTYDELGRSEYQKYSGLGNNNVPQVRAKHAKKLYKLYSNAVNTNIISSAIALNLGGLVIGLIKSLIGGELGAKIDLSLVPTHNIEDNSIKEKVILFSESQSRILVTIAPHNKQKFETIFKDIAHANIGIISDTNTLIINNMHIINLNTLKHSYKKFSNMKIQAYANAEYI

SEQ ID NO: 52776 - DNA, 3957 bp, Neisseria gonorrhoeae FA 1090
  CDS (1)..(3957): transl_table=11
atgtctgttgttttgcccttgcgcggcgttaccgccctttccgatttccgtgtcgaaaaactcttgcaaaaagccgccgcactcggcctgcccgaagtcaaattaagcagcgaattttggtatttcgccggcagcgagaaagcacttgatgccgcgactgtcgaaaaactgcaagccttgttggcggcgcaaagcgttgaacaaacgcccgaagcgcgcgagggtttgcatttgtttttggtaacgccccgtttgggtacgatttcgccgtgggcttccaaggcgaccaatatcgcggaaaactgcggtttggcaggcatcgaacgcatcgagcgcggtatggcggtgtggctggaaggtgcgcttaccgatgaacagaaacagcaatgggcggcgttgctgcacgaccgcatgaccgaatccgtgctgcccgattttcagacggcatccaaattattccaccatctcaaatccgaaaccttctccaccgtcgatgttttgggcggcggtaaagaggctttggtcaaagccaataccgaaacgggtttggcactctccgccgacgaaatcgattatctggttgaaaactatcaggctttgcagcgcaatccgtccgatgtggagctgatgatgttcgcgcaggcaaacagcgaacactgccgccacaaaatcttcaacgccgatttcatcctcaacggcgaaaaacaaccgaaatccctgttcggcatgatacgcgacacgcacaacgcgcatcccgaaggtacggtcgtcgcctataaagacaattcgtccgtgatcaaaggcgcgaaaatcgagcgtttctatccgaatgcagcggaaaaccaaggctaccgtttccacgaggaagacacccacatcatcatgaaagtggaaacgcacaaccacccgaccgccatcgcgccgtttgcgggcgcggcaacaggcgcgggcggcgaaatccgcgacgaaggtgcgacgggcaaaggttcgcgtccgaaagcgggcttgaccggctttaccgtgtccaacctcaacatccccgacctcaaacagccgtgggaacaagactacggcaagccggaacacatttcctcgccgttggacatcatgattgaaggcccgattggcggtgcggcgttcaacaacgaattcggccgcccgaacctcttgggctacttccgcacctttgaagaaaaatttgacggtcaggttcgcggctaccacaaaccgattatgattgccggcggtttgggcagcattcaggcgcagcagacgcacaaagacgaaatccccgaaggcgcactgctgatccaactgggcggcccgggcatgctcatcggcttgggcggcggtgcggcttcttcgatggataccggtacaaatgatgcgtctttggacttcaactccgtacaacgcggcaaccctgaaatcgaacgccgcgcgcaggaagtcatcgaccgctgctggcagctcggcgaccaaaacccgattatctccatccacgacgtgggcgcgggcggcttgtccaacgctttccctgaattggtcaacgatgccggacgcggcgcggtattcgagctgcgcgaagtgccgttggaagaacacggtttaacgcctttgcaaatctggtgtaacgaatcgcaagagcgttatgtcttgtcgattttggaaaaagatttggacaccttccgcgccatctgcgaacgcgaacgctgcccgtttgccgtagtcggcacggcgaccgacgacggtcatttgaaagtgcgcgacgatttgttctccaacaaccccgtcgatttgccgctgaacgtcttgctcggcaaaccgcccaaaaccacgcgtaccgacaaaacggttacgccgtccaaaaaaccgtttcacgcgggcgatatcgacatcaccgaagccgcctaccgcgttttgcgcctgcctgccgtagccgccaaaaacttcctgattaccatcggcgaccgcagcgtcggcggcatgacccaccgcgaccaaatggtcggcaaataccaaacccccgtagccgactgcgccgttaccatgatgggcttcaacacctatcgcggcgaagcgatgtctatgggcgaaaaaccggccgtcgccctgtttgacgcgcccgcctcgggcagaatgtgcgtcggcgaagccatcaccaacatcgcggcagtcaacatcggcgacatcggcaacatcaaactttccgccaactggatggcggcgtgcggcaacgaaggcgaagacgaaaaactctaccgcaccgtcgaagccgtttctaaagcctgccaggcattggatttgagcattcccgtaggtaaagacagcctgtcgatgaaaaccgtgtggcaggacggcgaagagaaaaaatccgtggtttcgccgttgagcctgattatttccgcgttcgcgcctgttaaagacgtgcgaaaaaccgttacgcccgaattgaaaaacgtcgaaggcagcgtattgctgtttatcgatttgggcttcggcaaagcgcgcatgggcggctcggcgttcggtcaggtgtacaacaacatgagcggcgacgcgcccgatttggacgatgcaggccgtctgaaagcgttttacagcgtaattcaacagcttgtcgccgaagacaaacttttggcgtatcacgaccgcagcgacggcggtttgtttgcgacgctggcggaaatggcgtttgcggcacggtgcggtattagtgccgatatagattgcctgatggataaattcctgccgattcatctcccggattttcaaggcgaccctgccgaagacttatctgacgaactttataatcatgccgccattaaaatcttattcaatgaagaattaggcgcggttatccaaatccgccaaaaagatagggattatgttgatgcggcatttgaaacggccggcttaaccgatgcggtcagccggattggctctcctgattttgacaatgagtttatttctttctttggttacggttatttcttggaacaaaaccgcgccgacctgcaacgcgcgtggcaggaaaccagccacgccatccaacgcctgcgcgacaaccctgcctgcgccgacagcgagttcgccctgattggcgacaacgaacgcagcgcattgtttgccgacgtgaagttcgacgtgaacgaagacatcgccgcgccgtttatcaacagtggcgcgaaacctaaaatcgccatcctgcgcgaacagggcgtaaacgggcaaatcgaaatggccgccgccttcacccgcgccggattcgatgcctacgacgtgcatatgtccgacctgatggctggccgcttccgccttgccgacttcaaaatgctggcggcgtgcggcggcttcagctacggcgacgtactcggcgcgggtgaaggctgggcgaaatccatcctgttccaccctgccttgcgcgaccaattcgccgccttctttgccgatccgaacacgctgacattgggcgtgtgcaacggctgccaaatggtcagcaaccttgccgaaattatcccgggcgcagaaacatggccgaagttcaaacgcaacctgagcgagcagtttgaagcgcgcctgaatatggttcacgtccccaaatcagcgtcgctgattttgaacgaaatgcaagactccagcctgcctgtcgtggtcagccacggcgaaggccgcgccgacttcgcgcttcacggcggcaatatttccgccgatttgggcatcgcgctgcaatatgtggacggtcaaaaccaggttacccaaacctatccgctcaaccccaacggctcgccgcagggcatcgccggcattaccaacgccgacggccgcgttaccattatgatgccccaccccgaacgcgtgtaccgtgccgcacaaatgagccggaaaccggaaggctggacggaactgtccggctggtaccgcctctttgccggcgcacgtaaagccttgggctaa

SEQ ID NO: 52777 - protein, 1318 aa, Neisseria gonorrhoeae FA 1090
MSVVLPLRGVTALSDFRVEKLLQKAAALGLPEVKLSSEFWYFAGSEKALDAATVEKLQALLAAQSVEQTPEAREGLHLFLVTPRLGTISPWASKATNIAENCGLAGIERIERGMAVWLEGALTDEQKQQWAALLHDRMTESVLPDFQTASKLFHHLKSETFSTVDVLGGGKEALVKANTETGLALSADEIDYLVENYQALQRNPSDVELMMFAQANSEHCRHKIFNADFILNGEKQPKSLFGMIRDTHNAHPEGTVVAYKDNSSVIKGAKIERFYPNAAENQGYRFHEEDTHIIMKVETHNHPTAIAPFAGAATGAGGEIRDEGATGKGSRPKAGLTGFTVSNLNIPDLKQPWEQDYGKPEHISSPLDIMIEGPIGGAAFNNEFGRPNLLGYFRTFEEKFDGQVRGYHKPIMIAGGLGSIQAQQTHKDEIPEGALLIQLGGPGMLIGLGGGAASSMDTGTNDASLDFNSVQRGNPEIERRAQEVIDRCWQLGDQNPIISIHDVGAGGLSNAFPELVNDAGRGAVFELREVPLEEHGLTPLQIWCNESQERYVLSILEKDLDTFRAICERERCPFAVVGTATDDGHLKVRDDLFSNNPVDLPLNVLLGKPPKTTRTDKTVTPSKKPFHAGDIDITEAAYRVLRLPAVAAKNFLITIGDRSVGGMTHRDQMVGKYQTPVADCAVTMMGFNTYRGEAMSMGEKPAVALFDAPASGRMCVGEAITNIAAVNIGDIGNIKLSANWMAACGNEGEDEKLYRTVEAVSKACQALDLSIPVGKDSLSMKTVWQDGEEKKSVVSPLSLIISAFAPVKDVRKTVTPELKNVEGSVLLFIDLGFGKARMGGSAFGQVYNNMSGDAPDLDDAGRLKAFYSVIQQLVAEDKLLAYHDRSDGGLFATLAEMAFAARCGISADIDCLMDKFLPIHLPDFQGDPAEDLSDELYNHAAIKILFNEELGAVIQIRQKDRDYVDAAFETAGLTDAVSRIGSPDFDNEFISFFGYGYFLEQNRADLQRAWQETSHAIQRLRDNPACADSEFALIGDNERSALFADVKFDVNEDIAAPFINSGAKPKIAILREQGVNGQIEMAAAFTRAGFDAYDVHMSDLMAGRFRLADFKMLAACGGFSYGDVLGAGEGWAKSILFHPALRDQFAAFFADPNTLTLGVCNGCQMVSNLAEIIPGAETWPKFKRNLSEQFEARLNMVHVPKSASLILNEMQDSSLPVVVSHGEGRADFALHGGNISADLGIALQYVDGQNQVTQTYPLNPNGSPQGIAGITNADGRVTIMMPHPERVYRAAQMSRKPEGWTELSGWYRLFAGARKALG

SEQ ID NO: 52778 - DNA, 3750 bp, Bacteroides fragilis NCTC 9343
  CDS (1)..(3750): transl_table=11
ttgcttatctttgcacgcaaagaaaacaaaatcgtatatacacacatgattctttttttcagaaccccttccaagagcgtgattgccgtagagagcaaccacgaacttaacgcgaacgacaacaacaaactctgctggctttttggtgaagccatgccggaaagtgaagaaaacctgcaaggctgcttcgtcgggccacgacgtgaaatgattactccatggagtaccaacgcagtagaaataacccagaacatgggactcgacggcattagccgcatcgaggaatatttccccgtaaaagatgaaaatgcagaccatgatcccatgctgcaacgcatgtacaaaggtcttaaccaaaatgtattcactaccaaccgccagccggaagctattatttatatcgacgatctggaagcctacaatgaaaaagaaggccttgccctgtcaaaagaagaaatggactacctgaaaaaggtagaatctgatttaggacgtcgcctgactgattctgaagtattcggattcgcacaaatcaactcggagcattgccgtcacaaaatctttggcggaacgtttatcatcgatggcgtagaacaggagtcttctctctttcagatgatcaaaaagacgacccaggagaaccccaataagattatctcggcctataaagataatgtggcttttgccgaaggtccggtagtcgagcaattcgctccggcagatcactctaagcccgacttcttccggataaaggacatcaagagtgttatttcactaaaagcggaaactcacaacttccctactaccgtagaacctttcaacggcgcatctaccggtaccggtggtgaaatccgcgaccgtatgggaggaggtaaaggttcatggcccattgccggaactgctgtttacatgacttcttacccgcgcaccgaagaaggacgcgaatgggaagacatcttgccggtacgcaaatggttgtatcagactccggaacagatcctgatcaaggcatccaacggagcaagtgacttcggcaacaagtttggccaaccgctgatctgtggttcggtattaacttttgaacatacagaaaacaacgaaacttatgcctacgacaaagtgatcatgcttgccggtggtgtaggttacggcacacaacgcgactgtttaaaaggacagccggaagccggcaacaaagtagtggtcatcggtggcgacaattaccgcatcggattgggcggtggttctgtttcatcggttgatacaggtcgttacagcagcggaatcgagctgaatgccgtacaacgtgccaatgcagaaatgcagaaacgtgccaacaacgtggttcgtgctctttgcgaagaggatgaaaatccggtggtatcgattcatgaccatggttcggccggacacgtcaactgtctgtctgagttggtagaagaatgtggcggcctgatcgatatgagcaaattgcctatcggcgacaaaacgctgtcggctaaagaaattatagcaaacgaaagtcaggagcgcatgggactccttattaaagaggaagccattgaacacgtacgccaaattgccgaacgtgaacgcgctccgatgtatgtagtaggcgaaacaaccggcgaccatcgttttgcgttccagcaagcggacggtgtgcgtccgttcgatttggctgtggaccagatgttcggttcttctcccaagacctacatgatagacaaaaccgtagaacgtcactatacaatgccggaatatgaaacatctaaacttcacgaatacctgacccaggtgttgcaattggaagcagtagcttgtaaagactggctgaccaataaagtagaccgttccgttaccggtaaagtagcccgtcagcaatgtcagggcgagattcaattgccattgagcgattgtggagtagtagcattggattatcgtggcgaaaaaggtatcgctacttctatcggacatgcccctcaggctgcattggccgatccggcggcaggttctattctttctgtatccgaagcactgaccaatttggtatgggctccgctggccgaaggtttggacagtgtatcactctccgccaactggatgtggccatgccgctcacaggaaggagaagacgcacgcctctacacagctgtaaaagccttaagtgacttctgctgtgcacttcagatcaatgtacctaccggaaaggactctttgtccatgacccagaaatatccgaacggagaaaaagttgtttctcccggaacagttatcgtatcagcaggcggtgaagtctcggacataaagaaagtggtctctccggtactcgtcaacgatgcaaaaaccacactttaccatatcgacttcagtttcgacaacctcaaactgggcggttcggctttcgcacagtcattgggtaaagtcggtagcgaagtaccttgtgtacaggatgccgaatacttccgtgatgcttttctggcagtacaagagttggtaaataaaggactgatccttgccggacacgacatctcagctggtggtctgatcacgactctgctcgaaatgtgctttgccaacgtagaaggcggtctggaaatcagccttgataaaatgaaagagacagatatcgtgaagattctgttcgccgaaaatccgggtatcgttattcagatcagcgacaagcataaggacgaagtgaagaaaatccttgaagatgcaggtgtcggtttcattaaattgggtaaaccgacagacgaacgccatatcttggtaaacaaagagggtgctacttatcagttcggcattgactatatgcgtgatgtatggtattcttcttcttacctgctcgaccgtaaacagtcaatgaacggatgtgctaagaagcgttttgagaactacaagatgcaaccgctcgaatttgcgttcatgccgggattcaaaggaaaactttcacagtatggcatcactcccgaacgtcgcacaccgagcggtatacgtgccgccatcatccgcgagaaaggaaccaacggtgagcgcgaaatggcttactcactctatttggcaggtttcgatgtaaaagacgtgaccatgaccgaccttatcagcggacgtgagacactggaagatgtaaatatgattgtttattgcggcggtttctccaactcggacgtgttgggttctgccaaaggatgggccggaggattcctgttcaacccgaaagcaaaagaggctcttgataaattctatgcccgcgaagacaccctgtcattaggtatctgtaacggttgtcagttgatgatggaactgggattggtaaatccggaacacgagaagaaaggaaagatgttgcacaacgaatcacataagttcgaatcgactttcgtcggtgtcaccatcccgactaaccgtagtgtcatgttcggttcactgagtggcagcaaactgggtatttgggtagcgcacggagaaggaaaattctctctgccatacgatgaagaccaatacaacgtagttgctaaatactcttatgacgaatacccgggcaatccgaacggatcggattattcaatagccgctctggccagtgcagacggacgccatctggccatgatgcctcacctggaacgtgctatcttcccgtggcaaaatgcctgttatcctgccgaccgtgtacacaacgaccaggtaactccttggatcgaagccttcgttaatgcacgtaagtgggtagaagaaaagaaaaaataa

SEQ ID NO: 52779 - protein, 1249 aa, Bacteroides fragilis NCTC 9343
MLIFARKENKIVYTHMILFFRTPSKSVIAVESNHELNANDNNKLCWLFGEAMPESEENLQGCFVGPRREMITPWSTNAVEITQNMGLDGISRIEEYFPVKDENADHDPMLQRMYKGLNQNVFTTNRQPEAIIYIDDLEAYNEKEGLALSKEEMDYLKKVESDLGRRLTDSEVFGFAQINSEHCRHKIFGGTFIIDGVEQESSLFQMIKKTTQENPNKIISAYKDNVAFAEGPVVEQFAPADHSKPDFFRIKDIKSVISLKAETHNFPTTVEPFNGASTGTGGEIRDRMGGGKGSWPIAGTAVYMTSYPRTEEGREWEDILPVRKWLYQTPEQILIKASNGASDFGNKFGQPLICGSVLTFEHTENNETYAYDKVIMLAGGVGYGTQRDCLKGQPEAGNKVVVIGGDNYRIGLGGGSVSSVDTGRYSSGIELNAVQRANAEMQKRANNVVRALCEEDENPVVSIHDHGSAGHVNCLSELVEECGGLIDMSKLPIGDKTLSAKEIIANESQERMGLLIKEEAIEHVRQIAERERAPMYVVGETTGDHRFAFQQADGVRPFDLAVDQMFGSSPKTYMIDKTVERHYTMPEYETSKLHEYLTQVLQLEAVACKDWLTNKVDRSVTGKVARQQCQGEIQLPLSDCGVVALDYRGEKGIATSIGHAPQAALADPAAGSILSVSEALTNLVWAPLAEGLDSVSLSANWMWPCRSQEGEDARLYTAVKALSDFCCALQINVPTGKDSLSMTQKYPNGEKVVSPGTVIVSAGGEVSDIKKVVSPVLVNDAKTTLYHIDFSFDNLKLGGSAFAQSLGKVGSEVPCVQDAEYFRDAFLAVQELVNKGLILAGHDISAGGLITTLLEMCFANVEGGLEISLDKMKETDIVKILFAENPGIVIQISDKHKDEVKKILEDAGVGFIKLGKPTDERHILVNKEGATYQFGIDYMRDVWYSSSYLLDRKQSMNGCAKKRFENYKMQPLEFAFMPGFKGKLSQYGITPERRTPSGIRAAIIREKGTNGEREMAYSLYLAGFDVKDVTMTDLISGRETLEDVNMIVYCGGFSNSDVLGSAKGWAGGFLFNPKAKEALDKFYAREDTLSLGICNGCQLMMELGLVNPEHEKKGKMLHNESHKFESTFVGVTIPTNRSVMFGSLSGSKLGIWVAHGEGKFSLPYDEDQYNVVAKYSYDEYPGNPNGSDYSIAALASADGRHLAMMPHLERAIFPWQNACYPADRVHNDQVTPWIEAFVNARKWVEEKKK

SEQ ID NO: 52780 - DNA, 3963 bp, Haemophilus influenzae 86-028NP
  CDS (1)..(3963): transl_table=11
atgcaaacgtttgctttgttcgttataatacgtctgtttttttatttttcttttatacggaactgcaatatgactgtcaaaacctttcgtggctcgcctgctctttctgaatttcgtttaactcaacttcaacaaaaatgccagcaatatcaattgcctattacgtcagtttatgcagagtatttgcattttgttgaacaaaaaacatcgcttgtagaagatgaaatcgttaaattacaagcattattgcattatgggtcaatgttttctgaactcaagcctgcaggatattgtttaattgtgactccacgagtggggacaatttcctcttggtcttcaaaagcgacagacatcgctcacaattgtggtttgtcgaaggtaaatcgtattgaacgtggtatagcctattacttcaatattgagcgtgatttaaccgaagcagaattggctacgctgaaagatttattacacgaccgtatgttagaaaccgtgttaaatcacgaaacagaagcagccttgctttttactcaacaagaacccaaagcattaactaccattgatattttaaatggtggccgtcaagcattagaacgggcgaatattgccttgggtttagcgttggcagatgatgagatggattatttagtggaaagttttactgccttaaagcgtaatccacaggatgtggagctttatatgtttgcacaagcgaattcagagcattgtcgccataaaatttttaatgccgattggattattgatggcaaaaaacaggataaatcgctgtttaaaatgatcaaaaatacctttgagcaaacgcctgattttgtgctttctgcttataaagataatgctgcagtaatggaaggttcgaaagtcggccgttggtttcctgatcctgatggacaatatcgtgttcatcaagaagatgcgcacattttaatgaaagtggaaacgcataaccatcccacagcaatttcgccatttcctggtgctgcaacaggctctggcggggagattcgtgatgaaggggcaacggggcgtggggcaaaacccaaagcaggtttaacaggtttctcggtgtctaacctcgttattccaaactttgaacaaccttgggaaaatccattgtctaaaccaaatcgcattgcttctgccttagatattatgatagatgcgcctttaggtagtgcggcatttaataatgaatttggtcgcccagcattattaggttatttccgtacttatgaagaaaaagtaaatagttttgcaggaaaagaagtacgcggttatcacaagccgattatgttagcgggaggaatcggtaatattcgtggcgaacaggttcaaaaaggcgaaattccaatcggtgctaaattgatcgtgttgggtggggcagcaatgaacatcggtttaggtggtggtgctgcttcttcgatggacagtggtaaatcaaaagaagatttagattttgcttctgttcaacgtgaaaatccggaaatggaacgccgctgccaagaagttattgaccgctgttggcaattaggcgaagaaaatccaatcctgtttattcacgatgtgggggcgggtggtttatctaatgcaatgcctgaattggtacatgatggcaggcgtggaggaaaattcgatctgcgttctattctttgtgatgaaaaaggtatgtcgccattggaaatttggtgtaatgaatcgcaagaacgttatgtattagccgttgcgccagaaaacctcgaattatttaccgcactttgtgagcgtgaacgtgccccttttgcagtgattggcgaagcaacacaagcagaacatttaatcttgcacgatagtcatttcgataataatccgattgatttaccaatgaatgtgttattaggcaaaacgccgaaaatgacgcgtgaggttttatcaaaaacagtggaaaatcaatcacttaaaacagaaggtattcaattaaaagaagcattccatcgtgtattacgtttacccgttgttgcagaaaaaactttcttaattactattggtgatcgctcggtaacaggaatggtagcccgtgatcaaatggtgggaccttggcaaattcctgtatctgatgtggctgttactactgcttcactggatagctaccacggcgaagcaatggcaatgggcgaacgctctccagttgccttgctaaatttctcggcttcggcacgcttagctgtggcggaggcgattactaacattgctggcacccacattggcgagatgaaacgtattaaactttctgccaactggatgagtgcagcaggtcacacaggcgaagatgcgggactttatgaagcagtaaaagctgtgggcgaagaactttgtcctgcgttaggtttaactattcctgtgggtaaagactcaatgtcgatgaaaaccacttggatcgataatggcgaacaaaaatcagtgactgccccactttcattagtaatttccgcttttgctcgtgtagaagatgtacgtaaaacgcttacgccacaacttcgtaccgacaaaggtttatcgagtttattgctaattgatttaggcgaagggcataatcgattaggtgcgactgcacttgctcaagtgtacaaacagttaggagacaagcctgccgatgtggtaaaggttcaacgcttaaaagatttttacaatgcaatgcaaactttagtggcagaagataaattgttggcttatcacgaccgttcggacggcggtttaatcacaactcttgcagaaatggcgtttgcagggcattgtggggtagaagttgatatttcagctttaggcgacaacgatttagcggtattatttaacgaagaactgggagcggttatccaagttgccgatagccaattagaaagtgtacgtgaggtgttgaaagctcacaatttgcttggtattacccaccaattaggtacggtaactgctgatgatcgctttgagatcagccgcggcagccataaattattcagcgaaaaacgctctgaattacgtagtatttgggcagaattaacttaccaaatgcaacgcttacgcgataatccagagtgtgctgagcaagagtttgaagctaagaaaaaccctgacgacaaaggcttatccgcatttttgacttacgatgtgaatgaagatattactgcgccatttatcaataaaggtgtaaaaccaaccattgcaattttacgtgaacaaggtgtaaatagtcattatgaaatggcagcagcgtttgatcgagcaggctttaatgcaattgacgtgcatatgtctgatttaatgattggtcgtcgtaatttagccgaattcaatgcaatggttgcttgtggcggtttctcttacggcgatgtgcttggcgcagggggcggttgggcaaaatccatcttatttaacccgaaattacacgagcaattcagccagttttttatcaatccaaacacactgaccttaggcgtatgtaacggttgtcaaatgatctctaacttggcggaaattatcccaggtacagaaaactggccgcattttgtacgcaacaaatctgaacgctttgaagcgcgtgtgagtttagtgaaaattaatgaagtggattcagtttggtttgcaggaatggctggctcacatatgcccattgcggtttctcacggggaaggacaagttaagtttaaatcagttgaacagtttgcaggcttaaaagcacaaggcatcattgctgcacaatatattgacaacaacggtagccccaccgaactatatcctgccaatccgaatggttctgcggagggcattactgcaattacaaatcttgatgggcgagttgctattatgatgccacaccctgaacgtgtgttccgtgctgtgagtaactcttggcacccagaaaactggacagaagacggtgcgtggatgagattattcagaaatgcaagaatggtattttag

SEQ ID NO: 52781 - protein, 1320 aa, Haemophilus influenzae 86-028NP
MQTFALFVIIRLFFYFSFIRNCNMTVKTFRGSPALSEFRLTQLQQKCQQYQLPITSVYAEYLHFVEQKTSLVEDEIVKLQALLHYGSMFSELKPAGYCLIVTPRVGTISSWSSKATDIAHNCGLSKVNRIERGIAYYFNIERDLTEAELATLKDLLHDRMLETVLNHETEAALLFTQQEPKALTTIDILNGGRQALERANIALGLALADDEMDYLVESFTALKRNPQDVELYMFAQANSEHCRHKIFNADWIIDGKKQDKSLFKMIKNTFEQTPDFVLSAYKDNAAVMEGSKVGRWFPDPDGQYRVHQEDAHILMKVETHNHPTAISPFPGAATGSGGEIRDEGATGRGAKPKAGLTGFSVSNLVIPNFEQPWENPLSKPNRIASALDIMIDAPLGSAAFNNEFGRPALLGYFRTYEEKVNSFAGKEVRGYHKPIMLAGGIGNIRGEQVQKGEIPIGAKLIVLGGAAMNIGLGGGAASSMDSGKSKEDLDFASVQRENPEMERRCQEVIDRCWQLGEENPILFIHDVGAGGLSNAMPELVHDGRRGGKFDLRSILCDEKGMSPLEIWCNESQERYVLAVAPENLELFTALCERERAPFAVIGEATQAEHLILHDSHFDNNPIDLPMNVLLGKTPKMTREVLSKTVENQSLKTEGIQLKEAFHRVLRLPVVAEKTFLITIGDRSVTGMVARDQMVGPWQIPVSDVAVTTASLDSYHGEAMAMGERSPVALLNFSASARLAVAEAITNIAGTHIGEMKRIKLSANWMSAAGHTGEDAGLYEAVKAVGEELCPALGLTIPVGKDSMSMKTTWIDNGEQKSVTAPLSLVISAFARVEDVRKTLTPQLRTDKGLSSLLLIDLGEGHNRLGATALAQVYKQLGDKPADVVKVQRLKDFYNAMQTLVAEDKLLAYHDRSDGGLITTLAEMAFAGHCGVEVDISALGDNDLAVLFNEELGAVIQVADSQLESVREVLKAHNLLGITHQLGTVTADDRFEISRGSHKLFSEKRSELRSIWAELTYQMQRLRDNPECAEQEFEAKKNPDDKGLSAFLTYDVNEDITAPFINKGVKPTIAILREQGVNSHYEMAAAFDRAGFNAIDVHMSDLMIGRRNLAEFNAMVACGGFSYGDVLGAGGGWAKSILFNPKLHEQFSQFFINPNTLTLGVCNGCQMISNLAEIIPGTENWPHFVRNKSERFEARVSLVKINEVDSVWFAGMAGSHMPIAVSHGEGQVKFKSVEQFAGLKAQGIIAAQYIDNNGSPTELYPANPNGSAEGITAITNLDGRVAIMMPHPERVFRAVSNSWHPENWTEDGAWMRLFRNARMVF

SEQ ID NO: 52782 - DNA, 4029 bp, Psychrobacter arcticus 273-4
  CDS (1)..(4029): transl_table=11
atgatgaccatcgccggacaaccgtttcttaccgattttcagacgcagcaactcatcagtcagtttcagcaaaaaaccgagctaaatgtcagccaaattcatactcagcaagtgtatgtattatcacgagaactcaaaggtgatgagcataaaaaagcgctagacttacttgctgtcgacagtgctacggttcttgcagcccctgaaagcaatcagttacaagttatcgttggaccacgttttggcaccatatcaccatgggcaagtaaagcgaccgatatctttaataactgtgaaattgccatcaatcgtgttgagcgcgtcattgtttatacgctaaccgtcgacggtgaagtcagtgcgaccaataaccagctgtctgctgccgctgagcaattattatttgaccgtatgacgcaaagcttggtttatgatttaaatgacactagtaaattatttgatgatcagcagccagcttcgttaaatcatattgatgtcatcggacaaggtcaggcagcgcttgagtcagccaatactgagtttggctttgcgttatcgagcgaagatattgattatttgatgaatgcttatgtcaatgagctaaagcgcaatccaaccgacgttgagctgatgatgtttgcacaggcgaactctgagcattgccgtcataaaatctttaatgctgaatggaccgttgatggcgcagtacagccaaaatcactgttccaaatgattaaaaatacttataaagccaatccgcaaggtattttatctgcttataaagacaacgcggcggtgatggcaggttctgacggcttgcgtttttacccgattcctactgatgcgatggatgccaattctgcgcatccttacgatttccatcaagaagaaatcgatattttgatgaaagtcgaaactcataaccatccaacggcgattgctccttatgcgggtgcagcgacgggcgcgggtggtgagattcgcgatgaaggcgcaaccggtcgtggtggtaagccaaaagcaggtttgactggcttccatgtgtcacatcttcatatcccagaacttgctgagaaatgggagcagtcaggtcaattaagtacgcaggattatggtacgccggatcgcatggcaaccagccttgagattatgaccgaagccccattaggttcagccaatttctcaaacgaatttggtcgtccaaacctatgcggttatttccgtagcttccaattggacacctcagtggcaaaagatggcagtcaaatgcgcggctatcataagccaatcatgctggcaggtggttatggcaatatcaaacgcaatctcattgaaaaaaacgccattcagcaaggtgatttattaatcgtccttggtggccctgcgatgcagattggtctaggcggcggtgcagcatcttcggtcgatagtggttcactcgatgaaggcttagactttgcttctgtacagcgtgacaatgctgagatggagcgtcgctgtcaagaagtcatcgatcgctgctgggcacttgctggcaacgatatcgatgcaagtaacaacagtaaagacggcaacccaatcgtctcattgcatgacgtcggtgccggtggcttatccaatgccatgcctgagctagtcaatgaccacgaaatgggcgcagtgctcaatctacgtaaaatcccgtcgctagaagcgggcatgtcgccaatggccatctggtcaaacgaagcgcaagagcgttacgtgctagcgattcgtcctgaaagcaaagagcagttcgatgcgatttgtgcccgtgagcgctgcccgtatgcgattttgggtgaagccactgaagtacgtcagctagtggtcgatgacgaattgctccctgagcagccagtcgatatgccgatgcaagtattgctcggtggtacgccgcagatgaagcgtagttttgagcgtcaagagagcaccttgccagcgttagagcttggtgaagtcaatctggccgaatcaatcaaagacgtgctacgtcatccaactgtcgctagcaaatcattcttgattagcattggtgaccgttctatcacgggtatggtcgtgcgtgatcagtatgtgggtcgctaccaagtgcctgtatcagattgcgccgttacggcatcaggcttgctagctctcgatggtcagccaatgagcggtgaggcaatgagtgttggtgaacgtacgcctgttgcacttattagtccaaaagcttctgcacgattggcggttggtgaagccattactaacatcgctggcgcgcgtattactcagctatctgatatcaccatgtcagcaaactggatggcagcgtgtggcgatgatgcagaagatgccgccttgtttgatgcggtatataccgttggtgaagagctatgtccagcactgggtattgctattccagtcggtaaagattcgctatcaatgcgtgccaactggacagacagtagtgacaatgctgaagacagcagcacggataaatcagtggtttcgccaatgagtttggtggtgacagcttttgctcctgttgttgatgtcgcaaaaacgctaactcctgagcttatcaatggtgatagcgccttctaccgtattgacttatctaaaggcaagctacgtttaggcggctcaattctcgcgcaaacgctaagccaattaggtaatgactgcccagatttagcgcagccaagcgacttggtcgacttctttaactttatccaagcgggtaatgagcaaggcgtcatcagtgcctatcacgatatcggtgatggtggactactcgcgactatcgctgagatgcaatttaccagccgtcaaggtatcaagctgtcattgactgatgacaacttattaggtcaattgttcagtgaagagctaggcgcagtcatccaagtattaccagaaaacgtcgctaccctcatggcgttagcagagcagcataacgtcagcgatatgcttagcctcgtcggtcaaagctctgaggaagacagcttgctcatccaaacaccaaccctcatgggtgatgacactctacgctttagccgtagcgagctgcaacaggaatggagtcaggtcagctatcaaatcgctcgccgccgtgacaatccagcgtgcgtccagcaagagtatgacttgattggcgacgccagccatcaaggtcttatcgctgcaccaaacttcgatcttaatcaaaaagttgaagagccttaccttaatagtcgtgctgattcaaataacagcaagccaagagtcgctatcttgcgtgagcaaggcgtcaatggtcagacagagatggcagcaggctttacccaagctggctttgaagcggtcgatgtgcacatgagcgatttgctcagcggtcgcatcaatctacgagacttcgatggtttggtcgcctgtggtggctttagttatggtgacgtactgggcgctggctctggctgggcgaattctatcttgtttcatgacgaattgcgcatgcagtttgtgcgcttctttgcccgtcctgataccttctcactcggtgtctgtaacggttgtcagatgatggcacagttaaaagacctcatcccgggcgcggagaacttcccacgctttatcgccaataagtcggctcgctttgaagcgcgtacggtcaacgtcaaagtcgagcgcaccaaatccatcttgttcaaaggcatgcaagacagtatcttgccaatcgctgtggcgcatggtgaaggctatgccacgctggacaacactgagatcgacggtatggcaaaacatggtcagctcgccatgcgttatgtcgacagccaaggtcatccaactgagacttatccgctcaatccaaacggttcgctcggcggtgtcacgggtctgtgtagcactgacggtcgcgtcaccattatgatgccgcaccctgagcgtacgctacgcgcgtacaatcatagctggaaaccagaagcgtgggatgaggacggcgcgtggatgcgtatgttccgtaatgcgcgggcatgggttagatag

SEQ ID NO: 52783 - protein, 1342 aa, Psychrobacter arcticus 273-4
MMTIAGQPFLTDFQTQQLISQFQQKTELNVSQIHTQQVYVLSRELKGDEHKKALDLLAVDSATVLAAPESNQLQVIVGPRFGTISPWASKATDIFNNCEIAINRVERVIVYTLTVDGEVSATNNQLSAAAEQLLFDRMTQSLVYDLNDTSKLFDDQQPASLNHIDVIGQGQAALESANTEFGFALSSEDIDYLMNAYVNELKRNPTDVELMMFAQANSEHCRHKIFNAEWTVDGAVQPKSLFQMIKNTYKANPQGILSAYKDNAAVMAGSDGLRFYPIPTDAMDANSAHPYDFHQEEIDILMKVETHNHPTAIAPYAGAATGAGGEIRDEGATGRGGKPKAGLTGFHVSHLHIPELAEKWEQSGQLSTQDYGTPDRMATSLEIMTEAPLGSANFSNEFGRPNLCGYFRSFQLDTSVAKDGSQMRGYHKPIMLAGGYGNIKRNLIEKNAIQQGDLLIVLGGPAMQIGLGGGAASSVDSGSLDEGLDFASVQRDNAEMERRCQEVIDRCWALAGNDIDASNNSKDGNPIVSLHDVGAGGLSNAMPELVNDHEMGAVLNLRKIPSLEAGMSPMAIWSNEAQERYVLAIRPESKEQFDAICARERCPYAILGEATEVRQLVVDDELLPEQPVDMPMQVLLGGTPQMKRSFERQESTLPALELGEVNLAESIKDVLRHPTVASKSFLISIGDRSITGMVVRDQYVGRYQVPVSDCAVTASGLLALDGQPMSGEAMSVGERTPVALISPKASARLAVGEAITNIAGARITQLSDITMSANWMAACGDDAEDAALFDAVYTVGEELCPALGIAIPVGKDSLSMRANWTDSSDNAEDSSTDKSVVSPMSLVVTAFAPVVDVAKTLTPELINGDSAFYRIDLSKGKLRLGGSILAQTLSQLGNDCPDLAQPSDLVDFFNFIQAGNEQGVISAYHDIGDGGLLATIAEMQFTSRQGIKLSLTDDNLLGQLFSEELGAVIQVLPENVATLMALAEQHNVSDMLSLVGQSSEEDSLLIQTPTLMGDDTLRFSRSELQQEWSQVSYQIARRRDNPACVQQEYDLIGDASHQGLIAAPNFDLNQKVEEPYLNSRADSNNSKPRVAILREQGVNGQTEMAAGFTQAGFEAVDVHMSDLLSGRINLRDFDGLVACGGFSYGDVLGAGSGWANSILFHDELRMQFVRFFARPDTFSLGVCNGCQMMAQLKDLIPGAENFPRFIANKSARFEARTVNVKVERTKSILFKGMQDSILPIAVAHGEGYATLDNTEIDGMAKHGQLAMRYVDSQGHPTETYPLNPNGSLGGVTGLCSTDGRVTIMMPHPERTLRAYNHSWKPEAWDEDGAWMRMFRNARAWVR

SEQ ID NO: 52784 - DNA, 3972 bp, Colwellia psychrerythraea 34H
  CDS (1)..(3972): transl_table=11
atgacgatgttgattaaaaaccttcgtggcgctccagcactatctgacttcagagttaaaaaactattagctcaatgtgaacagttacaactgccagtaaatgatatttatgctgaatttgcccatttcactaaacttaatgaagaattaagcacaagtgaagagaaagttttacagcaattacttacttacggcccaacaattgaagaacatcaacctgctggtttgtttttattagtgactcctcgtccaggcactatttctccttggtcatcaaaatctaccgatatagcgcacaattgtggtttagctaaagtggagcgtttagagcgtggtattgcttattacgtgacattagaaaatgatgcacaattaagcaccagtcaagaagcacagttaaacacgctattacacgaccgtatgatggaaagtatttttaatgacttcgcccaggcaagcaccttattcgcaagcagtgaaccaggcgagctaacggcaattgatattgaaagcggcggaaaaaatgcgttagttcaagccaatattgaattaggtctcgccttagcagaagacgaagttaattatttattcgaaaacttcaccaaattaggtcgcaaccctcacgacattgagctttatatgtttgcacaagcaaactctgagcactgtcgccataaaattttcaacgcagaatggactattgacggcgttaaacaagaaaaatctttgtttaaaatgatccgtaatactcatgaaatcaatcctgattatgttcttagtgcttacaaagataatgctgcagtaatggttggcaataagggtggtcgtttcttccctaatcctgaaacaaatgtttatggttataaccatgaagacattcaaatattaatgaaggttgaaacccataaccatccaacggcaatttcaccttacccaggtgctgcaacaggctccggtggtgagattcgtgatgaaggcgcaaccggtattggttcaaaacctaaagctggtttagtaggcttttctgtatctaacttacgtattcctgactttgtacaaccttgggaaactgattttggcaaaccaagccgtattgttactgcttttgatatcatgattgaaggcccattaggcggggcagcatttaacaatgaatttggtcgtcctgctattttaggttacttccgtacctatgaagaagaagttaactcgtttaacggtaaagaagtacgtggttaccacaaaccaattatgcttgcgggtggtttaggcaacattcgtgatgaacatgtacaaaaacgtgaaatcatcgttggcgctaaccttattgctttaggtggccctgccatgaacattggtttaggtggcggtgctgcttcatcaatggcatctggtcaatcagctgaaagtttagattttgcttctgttcaacgtgaaaatcctgagatggaacgtcgttgccaagaagttatcgataaatgttggcagctaggcgaagagaacccaatagctttcattcatgatgttggcgcgggcggtttatcaaatgctttccctgagttagttgctgatggcggccgtggtggtatttttgaacttcgtaacgtaccaaatgacgagcgtagcatggcgcctcatgaaatctggtgtaacgagtctcaagaacgttatgttattgcggtatctgacaaaaatttagcaacttttgaacaaatatgtcaacgtgaacgtgcgccttattcagttgttggccgtgctacagaagaagaacacttaaccgttactgattcacattttagcgacaatgaaaaattaaatacgccaattgatttacctcttgacgtattactaggtaaaacacctaaaatatataaagacgttaaaacagcaacggcggctggtgattcattagatcttagtacagtgacattagctgatgctgctgacagaattttaagcttaccaaccgtagctgaaaaaacgttcttaattaccattggcgatcgctcggtaaccggtatggttaatcgagatcaaatggttggtccttggcaggttcctgttgctgactgtggtgtcactgcctcagcacttgattcataccacggcgaagcaatgtctttaggtgaacgtactcccgttgctttactaaactttggcgcttctgctcgtttagccgtagctgaatcactaacgaatattgctggtactgatattggtgatttaaaccgtattaagctttcagctaactggatgtctccagcaggtcacccaggcgaagatgctggtctttatgaagcagttaaagcgattggtgaagagctttgtccagcccttggtttaactattccagtgggtaaagactctatgtcgatgaaaacccaatgggaagaaaatggcgaacaaaaatctgtaacctctcctctttctttagttattactgcttttggtgttgttgaagatatccgtaaaacagttacacctgagctaagaactgataaaggtgacactcgccttgttgctatcgacttgtcaaaaggtaaaaaacgtttaggtggttcatgtttagcacaagtttataaacaacttggtagtgaaactcctgatgttgacgatgcagaagtcttaaaaggtttcttcaatgcgatgcaaacacttgttcgcgctgaaaaggttattgcttatcatgatatttctgatggtggtttattcactaccgttactgaaatggcttttgctggtcataccggtgttgatattgacatcagcaagttatcaaacggtgcaaacgatgatttagccactttatttaatgaagagcttggtggtgtaattcaaattcgtgaaagcgatgttgatgccattcacgctattttagctcagcacggcattttagagaactgtactgatattggtcgccttaataacgaagatactattcgctttagccgtgatggtgaagtggttctagaaaactctcgtacatattatcgtaccgtttgggcacaaacgacttacagaatgcagtcgcttcgtgataacccagaatgtgcacagcaagagcatgatgttaaatttgatactgaagatccaggtttaaacactgaattaacctttgatatcaacgaagatattgttgccgaccttattattagagatgctgttaaagatgcagaaaactctgcaaacgacataactaacccacgtgttgctattttacgtgagcaaggtgttaactcacatgttgaaatggcagccgcttttgatagagcaggctttgttgcaatcgacgtgcatatgtctgacattttatctggccgcgctgatttagcagactttaacggtttagtagcttgtggtggtttctcatacggtgatgtattaggtgctggtgaaggttgggcaaaatcaatcttatttaatgctaacgcacgcactatgtttaaaacattctttgagcgtgaagatactttcaccttaggtgtttgtaacggttgtcagatgttgtctaacttaaaagacattatcccaggctcagaacattggcctcactttgtacaaaacaaatctgagcgttttgaagcacgcttctcattagttgaaattcaagagagtccttcagtgttgtttaaaggcatggaaggttcacgtatgcctatcgctgtttcacacggtgaaggtcatgccgagtttagctctgatgctgctattgatgctgcaaacaactcaggtacggtatcaatgcgttatgtaaataactacggtgacgttacagaaacttacccagctaacccgaatggctctgttgatggtataacctcattaacaaccactgatggtcgtgtaactattatgatgcctcatcctgagcgtgtatttagaacggttgctaactcttggcatccagatagctggggtgaagattcaccttgggtgcgcatgttccgtaacgcgcgtgctttcattggttaa

SEQ ID NO: 52785 - protein, 1323 aa, Colwellia psychrerythraea 34H
MTMLIKNLRGAPALSDFRVKKLLAQCEQLQLPVNDIYAEFAHFTKLNEELSTSEEKVLQQLLTYGPTIEEHQPAGLFLLVTPRPGTISPWSSKSTDIAHNCGLAKVERLERGIAYYVTLENDAQLSTSQEAQLNTLLHDRMMESIFNDFAQASTLFASSEPGELTAIDIESGGKNALVQANIELGLALAEDEVNYLFENFTKLGRNPHDIELYMFAQANSEHCRHKIFNAEWTIDGVKQEKSLFKMIRNTHEINPDYVLSAYKDNAAVMVGNKGGRFFPNPETNVYGYNHEDIQILMKVETHNHPTAISPYPGAATGSGGEIRDEGATGIGSKPKAGLVGFSVSNLRIPDFVQPWETDFGKPSRIVTAFDIMIEGPLGGAAFNNEFGRPAILGYFRTYEEEVNSFNGKEVRGYHKPIMLAGGLGNIRDEHVQKREIIVGANLIALGGPAMNIGLGGGAASSMASGQSAESLDFASVQRENPEMERRCQEVIDKCWQLGEENPIAFIHDVGAGGLSNAFPELVADGGRGGIFELRNVPNDERSMAPHEIWCNESQERYVIAVSDKNLATFEQICQRERAPYSVVGRATEEEHLTVTDSHFSDNEKLNTPIDLPLDVLLGKTPKIYKDVKTATAAGDSLDLSTVTLADAADRILSLPTVAEKTFLITIGDRSVTGMVNRDQMVGPWQVPVADCGVTASALDSYHGEAMSLGERTPVALLNFGASARLAVAESLTNIAGTDIGDLNRIKLSANWMSPAGHPGEDAGLYEAVKAIGEELCPALGLTIPVGKDSMSMKTQWEENGEQKSVTSPLSLVITAFGVVEDIRKTVTPELRTDKGDTRLVAIDLSKGKKRLGGSCLAQVYKQLGSETPDVDDAEVLKGFFNAMQTLVRAEKVIAYHDISDGGLFTTVTEMAFAGHTGVDIDISKLSNGANDDLATLFNEELGGVIQIRESDVDAIHAILAQHGILENCTDIGRLNNEDTIRFSRDGEVVLENSRTYYRTVWAQTTYRMQSLRDNPECAQQEHDVKFDTEDPGLNTELTFDINEDIVADLIIRDAVKDAENSANDITNPRVAILREQGVNSHVEMAAAFDRAGFVAIDVHMSDILSGRADLADFNGLVACGGFSYGDVLGAGEGWAKSILFNANARTMFKTFFEREDTFTLGVCNGCQMLSNLKDIIPGSEHWPHFVQNKSERFEARFSLVEIQESPSVLFKGMEGSRMPIAVSHGEGHAEFSSDAAIDAANNSGTVSMRYVNNYGDVTETYPANPNGSVDGITSLTTTDGRVTIMMPHPERVFRTVANSWHPDSWGEDSPWVRMFRNARAFIG

SEQ ID NO: 52786 - DNA, 3942 bp, Pseudomonas syringae pv. phaseolicola 1448A
  CDS (1)..(3942): transl_table=11
atgtgcggcctcaaagcacacccccttctcgaggctgtcccgaagatgttgatcctgcgcggtgctcctgccctttctgccttccgccacagcaaattactagaacaactgaaacaaaaagtttcagctgtcagtggcttgtacgccgaattcgcccacttcgcggacgtcaacgacgttcttaccagcgaagaacagcaggttctcgaccgtctcctgaaatacggccccagcgtgccggttcaagagccgagcggccgtctgtttctggtgttgccgcgttttggcaccatttcaccttggtcgagcaaggccagcgacatcgcccgcaattgcggcctgacgaaaatccagcgcatcgagcgcgggattgccttctatgtagaaggtcagttcagtgaggcccaggctcaggcaatcgccgacagcctgcacgaccgcatgacgcaactggtgttgggcgatcacgagcaggccgctagcctgttcagccacgcccagcccaaaccgctgaccgcggtggacattctgggtggcggtcgcgcggcgctggaaaaagccaacgtcgaactgggcctggccctcgctgaagatgaaatcgattacctgatcaccagcttcaacggtctcgggcgcaacccgcacgacatcgagctgatgatgtttgcccaggcaaactccgagcactgccgtcacaagattttcaacgccagttgggatatcgacggccagagccaggaaaaaagcctgttcggcatgatcaagaacacctatcagatgcacagcgaaggcgtgctgtccgcctacaaggacaacgcttcggtgatcgtcggcaacgttgccggccgcttcttcccggaccccgaaacccgccagtacggcgcggtgcaggagccggtgcatatcctgatgaaggtcgaaactcacaaccacccgactgccattgcgccgtttcctggcgcagcgaccggttccggcggcgagattcgcgacgaaggtgcaaccggtcgcggtgccaagcccaaggcaggtctgaccggtttcaccgtatccaacctgcagattcccggtttcgtgcaaccttgggaagtgccatacggcaagcccgagcgcatcgtcaccgcgctggacatcatgatcgaaggcccgctgggtggcgcggcgttcaacaacgagttcggccgtccggcgctgaccggctacttccgtacctttgagcagtccattaccacgccgcacggcgatgaggttcgtggttatcacaagccgatcatgctggctggcggtatgggcaacatccgcgaagatcacgtccaaaagggcgagatcactgtgggttccaaactgatcgtgctgggtggcccggcaatgctgatcggcctgggcggcggcgcggcgtcctcgatggcgaccggtacaagttctgccgacctggatttcgcttcggttcagcgtgaaaaccctgagatggagcgtcgctgtcaggaagtgatcgaccgctgctggcagctgggcgaccgtaacccgatcagcttcatccatgacgtcggtgccggtggtctgtccaacgccttccccgaactggtcaacgatggcgatcgtggtgggcgtttcgaactgcgtaacgtgcccaacgacgagccgggcatggccccgctggaaatctggagcaacgaatcccaggagcgttacgtgctggccgtcggcgtcgaagatttcgaccgtttcaaggccatctgcgagcgcgagcgctgcccgtttgcggttgtcggcgaggccactgccgagccgcaattgaccgtgactgacagccatttcggcaacagcccggtggacatgccgctggaagtgttgctgggcaaggtgccgcgcatgcaccgttcggtcgagcgcgaagccgagatcggcgatgacttcgacccgagcacgctggatatcgaagaaagcgtgcaacgtgtactgcgtcacccggcagttgccagcaaaagcttcctgatcaccattggtgaccgcagcattaccggtctggtcgctcgcgatcagatggtcggcccgtggcaggtgcctgtggctgactgcgccgtgaccgcgaccagcttcgacgtcaacacgggcgaagccatggcgatgggcgagcgcacgccgctggctcttctggatgctccggcttcgggccgcatggcgatcggcgaaacgctgaccaacattgcggcctcatgtattgaaaagctgtctgacatcaaactgtcggccaactggatgtcggctgccggtcatcccggagaagacgcgcgtctttatgacaccgtgaaagcggtgggcatggagctgtgtccggagctgggtattaccattccggtgggcaaggactcgatgtccatgaaaacccgctggagcgatgaaggcactgagaagagcgtgacttcgccgctgtcgttgatcgtgaccggctttgcgccagtggtcgacattcgtcagaccctgacgcctgaattgcgcatggacaaaggcatcactgacctgatcctgatcgatctgggccgtggccagaaccgcatgggcgcttctattctcgcccagacccacggcaaactgggtcgtgtggcaccagacgtcgatgacgctgaagacctcaaagccttcttcgccgtgattcagggcctcaattcagacggtcatatcctctcctatcacgaccgttccgacggtggtctgctggtcagtacgctggaaatggcctttgccggtcactgcggcctgaacctgcacctcgacggtgtggccgacaacgtttccgagctaagcgcgatcctcttcaacgaagagctgggcgcggtcatccaggtgcgtcaggacgcgactccgctggtgctggcgcaattcagcgctgccggtctggaagattgcgttgcggtgatcggtcagccgatcaacaacgatgaagtatcgatcagcttccatggcgagccggtattcagtggccagcgtcgtctgcttcaacgtcagtgggccgagaccagctatcagatccagcgcctgcgtgacaacgccgaatgcgctgatcaggaattcgatgcgctgctggaagaagacaatccgggcctgaccgtcaaactgggcttcgacgttaacgaagacatcgctgcgccgtacatcaagacgggcgtccgccctcaggttgccgtgctgcgcgagcagggtgtcaacggtcaggtcgagatggcggcagcctttgatcgcgcaggcttcaatgcgattgacgtgcacatgagcgacatccttgccggtcgtgtcgacttgaacgacttcaagggcatggttgcctgtggcggcttctcctatggcgacgtgctgggtgccggtgaaggctgggccaagtcggcactgttcaatagccgcgcccgcgatgcgttccagggcttcttcgagcgtgccgacagcttcacgctgggtgtgtgtaacggttgccagatgctgtccaacctgcacgagctgattccgggcagcgagttctggccccatttcgtgcgtaaccgctccgagcagttcgaagcgcgcgtggcaatggttcaggttcaggagtcggcgtcgatcttcctgcaaggcatggccggttcgcgcatgccaatcgccatcgcccacggtgaaggtcacgcagagttccgcaatgacgacgcgctgcttgaggcggacgtgtccggtactgtggcactgcgcttcgtcgataaccacggcaaggtcactgaaacctacccggccaacccgaacggctcgccgcgcggtatcggcggcatgaccaccctggacggtcgcgtgacgatcatgatgccgcacccggaacgcgtgttccgcgcggtgcagaactcgtggcgtcccgaggactggaacgaggacgctgcctggatgcgcatgttccgcaacgcacgggcctgggttaactaa

SEQ ID NO: 52787 - protein, 1313 aa, Pseudomonas syringae pv. phaseolicola 1448A
MCGLKAHPLLEAVPKMLILRGAPALSAFRHSKLLEQLKQKVSAVSGLYAEFAHFADVNDVLTSEEQQVLDRLLKYGPSVPVQEPSGRLFLVLPRFGTISPWSSKASDIARNCGLTKIQRIERGIAFYVEGQFSEAQAQAIADSLHDRMTQLVLGDHEQAASLFSHAQPKPLTAVDILGGGRAALEKANVELGLALAEDEIDYLITSFNGLGRNPHDIELMMFAQANSEHCRHKIFNASWDIDGQSQEKSLFGMIKNTYQMHSEGVLSAYKDNASVIVGNVAGRFFPDPETRQYGAVQEPVHILMKVETHNHPTAIAPFPGAATGSGGEIRDEGATGRGAKPKAGLTGFTVSNLQIPGFVQPWEVPYGKPERIVTALDIMIEGPLGGAAFNNEFGRPALTGYFRTFEQSITTPHGDEVRGYHKPIMLAGGMGNIREDHVQKGEITVGSKLIVLGGPAMLIGLGGGAASSMATGTSSADLDFASVQRENPEMERRCQEVIDRCWQLGDRNPISFIHDVGAGGLSNAFPELVNDGDRGGRFELRNVPNDEPGMAPLEIWSNESQERYVLAVGVEDFDRFKAICERERCPFAVVGEATAEPQLTVTDSHFGNSPVDMPLEVLLGKVPRMHRSVEREAEIGDDFDPSTLDIEESVQRVLRHPAVASKSFLITIGDRSITGLVARDQMVGPWQVPVADCAVTATSFDVNTGEAMAMGERTPLALLDAPASGRMAIGETLTNIAASCIEKLSDIKLSANWMSAAGHPGEDARLYDTVKAVGMELCPELGITIPVGKDSMSMKTRWSDEGTEKSVTSPLSLIVTGFAPVVDIRQTLTPELRMDKGITDLILIDLGRGQNRMGASILAQTHGKLGRVAPDVDDAEDLKAFFAVIQGLNSDGHILSYHDRSDGGLLVSTLEMAFAGHCGLNLHLDGVADNVSELSAILFNEELGAVIQVRQDATPLVLAQFSAAGLEDCVAVIGQPINNDEVSISFHGEPVFSGQRRLLQRQWAETSYQIQRLRDNAECADQEFDALLEEDNPGLTVKLGFDVNEDIAAPYIKTGVRPQVAVLREQGVNGQVEMAAAFDRAGFNAIDVHMSDILAGRVDLNDFKGMVACGGFSYGDVLGAGEGWAKSALFNSRARDAFQGFFERADSFTLGVCNGCQMLSNLHELIPGSEFWPHFVRNRSEQFEARVAMVQVQESASIFLQGMAGSRMPIAIAHGEGHAEFRNDDALLEADVSGTVALRFVDNHGKVTETYPANPNGSPRGIGGMTTLDGRVTIMMPHPERVFRAVQNSWRPEDWNEDAAWMRMFRNARAWVN

SEQ ID NO: 52788 - DNA, 3930 bp, Dechloromonas aromatica RCB
  CDS (1)..(3930): transl_table=11
atggccgacattctttgcctcaagggcgacgccgccttttccgccttccgtctgcaacgcctgcaagcccgcctggtcgcggccgtgtcggatatcgaatcggtggtggccgattactggcacgtggtggcgcagaagcgcacgctgaatgccgacgagcgtaccaagctggcaacgctgcttgaagagaaagcagctggcgtcgaagccggcgagttgttcctggttgccccgcgtatcggcaccatttcgccgtggtcctccaaggccaccgacattgcctggaattgcgatctggatgccattgaacgcatcgagcgtgttatcgccttccatgttgtggtcaagggtggccgcgccctgactgctgaggaaaagaaaactgtagccggcctgctgcacgaccggatgactgagtctgtcctgccaggcttcgaggccgctggcgaactgttccgccatttcgagccgaagccgctgaataccgttgatgtgctggctggtggcaaggcggcgctggtcgaagccaacggctcgcttggcttggccctgtccgatgacgaaatcgattacctgctcgacgtgttcaccaaggctggccgtaacccgaccgacgtcgaactgatgatgttcgcccaggccaattccgaacactgccgccacaagattttcaatgcttcctgggtgatcgacgggcaggccaaggacaagacgttgttcggcatgatccgcgaaacccatgccgccgccccgcaaggcacggtcatggcctatgccgacaacgcctcgatcatcgaaggcgcaaccatccagcgtttctacccggatgccgaccgcggctattcctacaaggaagagctgacccacatcctgaccaaggtcgagacgcacaatcacccgaccgccatttccccgttcccgggcgcgtcgaccggttccggcggcgaaatccgcgacgaaggcgctactggcaagggctccaagccgaaggccggcctctgcggtttctcggtctccaatctgaatctgccggatgcgccgcaggcgtgggaaaaggcctacggccgcccgtcgcgcatcgcttcggcgctcgacatcatgctcgaaggtccgatcggtgcagccgccttcaacaacgaattcggccgcccgaacctgaccggctatttccgtacctatgagcaggacgtcgccggcacggtgcgcggctaccacaagccgatcatgatcgccggcggcctgggcagcatccaggccgagcagtcgttcaaggaagaaaccttcccggtcggcacgaaattcatccagctcggtggtccaggcatgttgatcggtctgggcggcggtgctgcctcgtcgatgacggccggtgccaatgccgaagacctcgatttcgcctccgtgcagcgtggcaaccctgaaatccagcgtcgcgcccaagaggtgattgatcgctgctggcagatgggcaagaacaatccgatcctgtcggtgcacgacgtcggtgccggtggcgtctccaacgcgctgccggaactggcccactcgggtggcgtcggtgctgtgttcgacctgcgcaaggtgccgactgaagagccgggcatgtcgccggccgaaatctggtccaacgaatcgcaggaacgctacgtgctggccattccgccgaaccgcatcgccgaattccaggccatgtgcgagcgtgagcgctgcccgtttgccgtggtcggcgaagcgaccggcgacggccatttgaccgtgaccgatgcccatttcggcgtcaatccggtcgatatggaaatggaagcgctgctcggcaagccaccgcgcatgacgcgcgacgtcaagcatgagccggaaaccttcgtttccttcgacgcgactgccatcgaactcaaggacgccgcctatcgcctgatgcgtctgccgaccatcgccgacaagactttcctgatctccatcggcgaccggtccgttggcggtatgactgcccgcgaccagatggtcggcccgtggcaggtgccggtggcagacgtcgcggtgacgacgatgggctaccagggttacctcggcgaggccttcgccatgggcgaacgcacgccgctcgccgtgttcgacgcgccggcttccggccgcatggccatcggcgaggcgctgaccaacctggccgccgccgatgtcggcgaattgggcaaggtcaagctgtcggccaactggatggcgccgtgcggcgttgccggtgaagatgcccgcctgttcgataccgtcgaggctgtttccgacctgtgcaaggcgattggcgtctcgatcccggtcggcaaggattcgctgtcgatgcgcaccgcttgggaagagggcggcgagaagaagcaggtcgtttccccgctgtcgctggtcgtcacctcgtttgctgcggtcgacgacgtgcgcaagaccaaaacgccgcaactggctgtcgatcagggcgaaaccgaactgctgctgctcgatctcggtcagagccgcctcggcggctcctgtctggcccaggtttacaatgccaccggcagcgatgcgccggatgtcgacgatccggccaagctcaagggcctgttcgatgccgtgcagaaactcaaccgcgacggcctgctgcttgcctaccacgaccgttccgacggcggcctgttcgtggccgcctgcgaaatggccttcgccagccgccgtggcgtttcgctcgacctcgacggcatctgttacgacgccggcgccggcgatgtcgatggctcggaaaagctgaccaacctgctggctggccgcgatttcgagaacatcgttcgtgccctgttcaacgaagaacttggtgccctgatccagattcgccgcgccgaccgcgaaaaggtcacgccgatcctgcgtgccctgcgtgtgccttaccattttattggcaccatgaatgagtgggacgaaatccgcgttacccgcaacgccaagcgcgtgctgcgtgaaaagcgtgtcgacctgcagcgtgcctggtcggaaaccagctaccagatgcaggccatgcgcgacaacccgagctgcgcgcagcaggaatttgaccgcatcctcgacgtcgccgaccccggcctgacgccgaagctgacttttgacccgcaggaagatttcaccaaggtctacggccagatcagtggccgtccgcgcgtcgccatcctgcgtgagcagggcgtcaacagccattacgaaatggccgccgccttcgataaggcaggctttgcctcggtcgatgtccatatgagcgacatcctggccggccgcgtcagcctcaaggacttcaagggcctggttgcctgtggcggcttctcctacggcgatgtgctcggtgctggcctcggctgggcgcggaccatcctgatgcatgatggctgccgcgacgaattcgccgccttcttcaaccgtccggacaccttcgcacttggcgtttgtaacggttgccagatgatgagcgcgctgaagtccatcatcccaggcgccgaacactggccggctttccgccgcaacaaggtcgagcagttcgaagcacgcttcgtgatgaccgaaatcctcgactcgccgtcgatcttcttcgccggcatggaaggttcgcaagtccccatcgtcgtctcgcatggcgagggcagggcggtgttcgacaacgctgacgaccaggccaaggtgctttcggccgttcgctacgttgataacaagggcgagccgactgaggtctatccgtacaacccgaacggttcgccgaatggcctgaccgccgtgaccacggccgacggtcgcttcacgatcatgatgccgcaccccgagcgtgtcttccgtaccgtgcagatgtcctggcacccggaaaactggggcgaggattcgccgtggatgcggatgttccgcaatgcccgtcgctgggtgggatga

SEQ ID NO: 52789 - protein, 1309 aa, Dechloromonas aromatica RCB
MADILCLKGDAAFSAFRLQRLQARLVAAVSDIESVVADYWHVVAQKRTLNADERTKLATLLEEKAAGVEAGELFLVAPRIGTISPWSSKATDIAWNCDLDAIERIERVIAFHVVVKGGRALTAEEKKTVAGLLHDRMTESVLPGFEAAGELFRHFEPKPLNTVDVLAGGKAALVEANGSLGLALSDDEIDYLLDVFTKAGRNPTDVELMMFAQANSEHCRHKIFNASWVIDGQAKDKTLFGMIRETHAAAPQGTVMAYADNASIIEGATIQRFYPDADRGYSYKEELTHILTKVETHNHPTAISPFPGASTGSGGEIRDEGATGKGSKPKAGLCGFSVSNLNLPDAPQAWEKAYGRPSRIASALDIMLEGPIGAAAFNNEFGRPNLTGYFRTYEQDVAGTVRGYHKPIMIAGGLGSIQAEQSFKEETFPVGTKFIQLGGPGMLIGLGGGAASSMTAGANAEDLDFASVQRGNPEIQRRAQEVIDRCWQMGKNNPILSVHDVGAGGVSNALPELAHSGGVGAVFDLRKVPTEEPGMSPAEIWSNESQERYVLAIPPNRIAEFQAMCERERCPFAVVGEATGDGHLTVTDAHFGVNPVDMEMEALLGKPPRMTRDVKHEPETFVSFDATAIELKDAAYRLMRLPTIADKTFLISIGDRSVGGMTARDQMVGPWQVPVADVAVTTMGYQGYLGEAFAMGERTPLAVFDAPASGRMAIGEALTNLAAADVGELGKVKLSANWMAPCGVAGEDARLFDTVEAVSDLCKAIGVSIPVGKDSLSMRTAWEEGGEKKQVVSPLSLVVTSFAAVDDVRKTKTPQLAVDQGETELLLLDLGQSRLGGSCLAQVYNATGSDAPDVDDPAKLKGLFDAVQKLNRDGLLLAYHDRSDGGLFVAACEMAFASRRGVSLDLDGICYDAGAGDVDGSEKLTNLLAGRDFENIVRALFNEELGALIQIRRADREKVTPILRALRVPYHFIGTMNEWDEIRVTRNAKRVLREKRVDLQRAWSETSYQMQAMRDNPSCAQQEFDRILDVADPGLTPKLTFDPQEDFTKVYGQISGRPRVAILREQGVNSHYEMAAAFDKAGFASVDVHMSDILAGRVSLKDFKGLVACGGFSYGDVLGAGLGWARTILMHDGCRDEFAAFFNRPDTFALGVCNGCQMMSALKSIIPGAEHWPAFRRNKVEQFEARFVMTEILDSPSIFFAGMEGSQVPIVVSHGEGRAVFDNADDQAKVLSAVRYVDNKGEPTEVYPYNPNGSPNGLTAVTTADGRFTIMMPHPERVFRTVQMSWHPENWGEDSPWMRMFRNARRWVG

SEQ ID NO: 52790 - DNA, 4047 bp, Ralstonia eutropha JMP134
  CDS (1)..(4047): transl_table=11
atggcgcatttttcgtgcttccccggcgctttggcgctttccgccttccgccagcaacgcctgctcaccgccctgcggcagatcgacaccgatatcgaatcggtgcacggccagttcctccatttcgtggattcggacaccgcgctgtccactgaagaccagagccgcattgccgcgctgctgacctacggcgccccgttcgccgagcaggccgagggcgaccgcttcgtcgtgattccccgtttcggcacgatctcgccgtgggccagcaaggcgacggatatcgcgcacaactgcggtctcacgcatgtgcaccgcatcgagcgcggcatcgagatcaccgtgatctgcaagaagggcctgctgcgcgggcgcaagtcgctggacgccggcacgcgcgccgccgtcgccgcgcacctgttcgaccgcatgaccgaagccgtggtcgccacgcgcgaggatgccgccggcctgttcgaggaactgccggccaagccgctgcgcttcatcgacatctccgccggccgcgacgccctggccgctgcgaacgtcgagatgggcctggcattgtccgaagacgaaatcgactacctggtcgacgcctacgcgaagcttgagcgcaatccgaccgatgtcgaactgatgatgttcgcgcaggccaacagtgagcactgccgccacaagatctttaacgccacgtggaccatcgacggcgtgcagcaggacaagtcgctgttcgcgatgatccgcaacacgcaccagctcaatccgcagggctcgatcgtggcctactcggacaattccgccgtgatggaaggtggtgtggccgagcgctggttcccgcgcggcgatgcgcacaaatacgaccgccacgaagcgctgacgcacacgctgatgaaggtggagacgcacaaccacccgaccgcgatctcgccgtttccgggcgcctccaccggcgctggcggtgaaatccgcgacgaaggcgcgacgggccgcggcgccaagccgaaggctggcctgaccggtttcacggtgtccaacctgatgctgcccgaggccgtggagtcgtgggaaaacgaccgcgacgccgcgcagccggtggcgcaccgcaaccccgacgacaagcccggcgtgaccggcaagccggaccgcatcgcctcgccgctgcagatcatgatcgacggcccgctcggcggcgccgcgttcaacaacgaattcggccgtgccaacctgggcggctacttccgtgtctacgagcagaacgtcggcggcaccgtgcgtggctaccacaagccgatcatgatcgcgggcggcattggcaacatcgatgccagccacacacacaagaatgacctgccggccggcacgctgctgatccagctgggcggcccgggcatgcgcattggcatgggtggcggcgcggccagctcgatggcaaccggcacgaacaccgctgatctggactttgactcggtccagcgcggcaacccggaaatggagcgccgcgcccaggaagtcatcaacgcctgctggcagctcggcgacgagaacccgatcctgtcgattcacgatgtcggcgcgggtggcatttccaatgcattccctgaagtggtcgatggcgcgggccgcggcgcgtgcttcgatctgcgcaaggtgcacctcgaggaatccggcctgtcgccggctgaaatctggtgcaacgaatcgcaggagcgttacgtgctggccatcgcgccagacagcttcgcgaagttccaggccatgtgcgagcgcgagcgttcgccgttcgccgtggtcggcatcgccaccgaagagaagcagctgcaactggtcgattcgcacgtcgacgccgcgctcaaggagcactatgcggtcgacatgccgatggaagtgctgctgggcaagccgccgcgcatgcatcgcgacgtgacacgcgtcgagcagtcgctgcctgccgtggatgtcactggcatcgcactggaacaggccgtgcgcgacgtgctgcgccacccgaccgtggccaacaagtcgttcctgatcagcatcggcgaccgtaccgtcggcggcatgaacgcgcgcgaccagatggtcggcccgtggcaggtcccggtggccgacgtggccgtgaccacgctcgactacaagggcaacgccggcgaggcgatgaccatgggcgagcgcacgccgctggccgtgatcaacgcgccggcctccggccgcatggcgatcggcgaagcgctgaccaacctggctgcagcgccggtcacggacctcggcaaggtcaagctgtctgccaactggatggctgcttgcggcgtggaaggcgaggacgccaagctgtacgacaccgtccatgccgtcggcatggagctgtgcccggcactcggcatcagcatcccggtcggcaaggattcgttgtcgatgcgcaccaagtggcaggacgaaggcgtggccaaggaagtcgtcgcgccggtgtcgctgatcatctcggcattcgctgcagtcgatgacgtgaaccgcacgctgacgccgcaactgcgtaccgacgcgggcgacacggtgctgatcggcatcgacctgagccgcggcaagaaccgcatgggcggaagcatcctggcccaggtcacgcagcaggttggcgacagcgcgccggatgtggacagtgccgaggacctgaagaacttcttcaacgtgatccagcgcttgaaccgcgagggcaagctgctggcttaccacgaccgttccgacggcggcttcatggccacgcttgcggaaatggcgtttgccggccactgcggcatctcgctgaacgtcgacatgctggcgctggatccgcagcaggaacaggacttcggcgacgccaagaactgggcccagcagattgccgagcgccgcaacgaccagacgctgcgcgcgctgttctcggaagagcttggtgctgtggtgcaggtgcgcctgcaggaccgcgacacggtgttcgccgtgctgcgtgaagccggcctgtcggcctgcagccacgtggtgggcaagcccaacacgaccgaccagatcgagatttatcgcgatgccaagaaggtgtttggcgcgtcgcgcaccgacctgcagcgcaactggagcgaggtgagctggcgtatcgcgcgcctgcgcgacaacccggcctgcgcggacagtgaatacgatcgtctgctcgatgctgcggaccctggcatcagccctgtgctgacgttcgacgtggccgaggacatcgccgctccgttcatcgcgaccggcgcgcgtccgcgcgtagcgatcctgcgcgagcagggcgtcaactcgcagatcgagatggcgtacagcatggatcgcgcgggctttgacacgcacgatgtccatatgagcgacctgattgccggccgtgcaaatctcgccgacttcaagggctttgtcgcatgcgggggcttcagctacggcgacgtgctgggtgcgggtgaaggctgggccaagaccatcctgttcaacgcgcagatggccgagcagttcgcggcgttcttcaatcgccaggacaccttcgctctaggcgtgtgcaatggttgccagatgatgagcaacctggccccgatcatcccgggtgccggtgcatggccgaagttcacgcgcaaccagtcggagcagtacgaggcacgctacgtcacggtagaagtgcagcagtcgccgtcgatcttcttcgccggcatggaaggcagccgtattcctatcgtcgtggcacacggcgaagggtttgctgatttctcgcagcagggggatatcgggcaggcgaatgtggcgctgcgattcgtggataaccacggcgcggtcacgcagacctatccgctgaacccgaacggttcgccggacggcatcacctcggtgacgacgaccgatggccgctttaccgtgctgatgccgcaccctgaacgcgtgttccgcaccgccaccatgagctgggcgccggatgcctggaagcaggtcgccgacggcgcgagcccgtggatgcgcatgttccgcaatgcgcggaagtgggtggggtaa

SEQ ID NO: 52791 - protein, 1348 aa, Ralstonia eutropha JMP134
MAHFSCFPGALALSAFRQQRLLTALRQIDTDIESVHGQFLHFVDSDTALSTEDQSRIAALLTYGAPFAEQAEGDRFVVIPRFGTISPWASKATDIAHNCGLTHVHRIERGIEITVICKKGLLRGRKSLDAGTRAAVAAHLFDRMTEAVVATREDAAGLFEELPAKPLRFIDISAGRDALAAANVEMGLALSEDEIDYLVDAYAKLERNPTDVELMMFAQANSEHCRHKIFNATWTIDGVQQDKSLFAMIRNTHQLNPQGSIVAYSDNSAVMEGGVAERWFPRGDAHKYDRHEALTHTLMKVETHNHPTAISPFPGASTGAGGEIRDEGATGRGAKPKAGLTGFTVSNLMLPEAVESWENDRDAAQPVAHRNPDDKPGVTGKPDRIASPLQIMIDGPLGGAAFNNEFGRANLGGYFRVYEQNVGGTVRGYHKPIMIAGGIGNIDASHTHKNDLPAGTLLIQLGGPGMRIGMGGGAASSMATGTNTADLDFDSVQRGNPEMERRAQEVINACWQLGDENPILSIHDVGAGGISNAFPEVVDGAGRGACFDLRKVHLEESGLSPAEIWCNESQERYVLAIAPDSFAKFQAMCERERSPFAVVGIATEEKQLQLVDSHVDAALKEHYAVDMPMEVLLGKPPRMHRDVTRVEQSLPAVDVTGIALEQAVRDVLRHPTVANKSFLISIGDRTVGGMNARDQMVGPWQVPVADVAVTTLDYKGNAGEAMTMGERTPLAVINAPASGRMAIGEALTNLAAAPVTDLGKVKLSANWMAACGVEGEDAKLYDTVHAVGMELCPALGISIPVGKDSLSMRTKWQDEGVAKEVVAPVSLIISAFAAVDDVNRTLTPQLRTDAGDTVLIGIDLSRGKNRMGGSILAQVTQQVGDSAPDVDSAEDLKNFFNVIQRLNREGKLLAYHDRSDGGFMATLAEMAFAGHCGISLNVDMLALDPQQEQDFGDAKNWAQQIAERRNDQTLRALFSEELGAVVQVRLQDRDTVFAVLREAGLSACSHVVGKPNTTDQIEIYRDAKKVFGASRTDLQRNWSEVSWRIARLRDNPACADSEYDRLLDAADPGISPVLTFDVAEDIAAPFIATGARPRVAILREQGVNSQIEMAYSMDRAGFDTHDVHMSDLIAGRANLADFKGFVACGGFSYGDVLGAGEGWAKTILFNAQMAEQFAAFFNRQDTFALGVCNGCQMMSNLAPIIPGAGAWPKFTRNQSEQYEARYVTVEVQQSPSIFFAGMEGSRIPIVVAHGEGFADFSQQGDIGQANVALRFVDNHGAVTQTYPLNPNGSPDGITSVTTTDGRFTVLMPHPERVFRTATMSWAPDAWKQVADGASPWMRMFRNARKWVG

SEQ ID NO: 52792 - DNA, 3015 bp, Ehrlichia canis str. Jake
  CDS (1)..(3015): transl_table=11
atgattataagaatcggagtaatagataaagtactcccagaacactatatgagaactaatgctacagtttatacgatagacattaaacatcatctaaatacagaaactattaataaaataggctcactgttgaccaatccaataacacaaaaattctttgcatttatatatgacatcagagaattgaattacaaagaaataactcacaatactaattacaatctactcaatactttcaaagctacttggtcactagagaaaggctttttacctagagtcacagataatgttggcaatactactaagtgcataataaatgaagcattaggaaataactcagaagttagtgtatttacttctcaagtaatatttgggcaagaaccaataccacaagaagatgaagtatctaaattatttaattcattaatagaatactgcaaactatctattgcaaaaggagaactattccaagtacaattctttggaaataaacaaatattagacctaaataaaatctattcaaacccttctaacagcatatttttaattccatacataaaacacgaacatctttttccacaacagaaagcacaaaatacatatgtaacttccgtagatctaaatattcaagaccacaaactaatacaaattagcaaacatggaattaataacagaggtcctttaaacctatcattggaagcaatgaaagctattcaggcatactttaaaaaaattcaacgaaaccctaacgatattgaacttgaaacactagcacaaacctggtcagaacactgtaagcataacattttctcatctcctatagatgaaatcacagatggactatataaacactacataaaacgcgcaacacaagaaataaactcagaaatatgcgtctctacattctctgataatgctggagcaataatatttgatgataactttatcatagcagacaaagtagaaacacataacagtccttcagcacttgatccattcggaggagcaattaccggaatattaggagtaaatagagatattattggatttggtaaaggagcaaaacctatattaaatgcttattatttttgcttttctgaatcagaggaagaattatacagagataaatcatgcacagtaaaagtactaccatccgatgtaataatggatggagtaataaaaggtgtaaattctggaggaaattgttctggaataccaacaagtttaggatccgcatattttgatgatagattccgtagcaaaccacttgtctttgtaggatgtacaggtattatgccacgcacaattaacaatgcactatcacatctaaaaaagccaaataatggagatttcatagttatcgcaggaggtagaacaggaagagatggaatacatggtgctactttttcatcaaacgcattaactgaacataatagtagcagtacagtagtacagataggagaccctataactcaaaaaaaattatctgatgcaataattaaagaagcaagagatttagatctatacaacgcaataactgataatggtgcaggtggattatcttcttctgtaggagaaatgggtaacaatggttttagagtagagctagataaagtattactcaaacatgataatatgttaccttgggaaatttgggtctcagaatctcaagaaagaatgacgtttgccgtccctcctaataaatttacaatgtttgaaaaagtaatgaaaaagcatgacgtagaaatcagtataataggagaattcaacaacactaataaagctgtagtattatataaaggctctgtgatcatggatatggatgtagatttcttgcataatggtgttccaaaaatccatttacaaactaattcatatacacaaactatagaatcaatacctaataaaaagtttaataaaccattagcagttgaattaaatgagatcatacagagaatgaacatatgcagtaaagaatttatatctttacaatatgatcatgaagtacaaggaacatcagtaataaaacctcttcaaggcaaaggcagggtaaatggagatgcaacagttattagaccaatattatcatcaaacagaggaatagtaaaatcacaggggttaggatcaagctatggagaaataagcacatatcatatggcagcgtgtgcaatagatactgctatacgtaactacgttgcagtaggaggaaatttcaatcatttagcattattagataatttctgttggtgtgattcaacaaatccacaaagattatggcaattaaaaaatgcagcaaaagcatgttatgactatgctgtagcatttaaaacaccttttatctctggtaaagatagtatgttcaatgattttaaaggatacaataaaaaaggagaagaaattactatttctgcaccaccttcacttttaatttctacaattggaattatagaaaatgtagaaaacgctgtgacacttgatgtaaaaagccctggagatttaatatatattttaggtattacctacaatgagcttggaggttcagaatatcaaaaatacactggtatagaaaataataatgtaccacaagtacacgctgaacatgctaaaaaattatatacatcttataacaaagcaattagtgcaaaccttatagcatcagccattgctattaatctaggaggtataataattagcttagttaaatcactcattggaggacaacttggagctgaaattagtttatcatcaataccaatatgtaacattgagaacaatcatttacaagaaaaagttatcttgttctcagaatcacaaagtaggatcttagtaacagtaaacgaaaacaaaaaacaagagtttgaaacaatattcaaaaacattccacatgcaaacataggtaaagtcacatctataaatactcttattatagataatatgtgctccattgatttaaacatgcttgaatatagttataaaaaatttagcaacatgaagatacaatcatatgcaacataa

SEQ ID NO: 52793 - protein, 1004 aa, Ehrlichia canis str. Jake
MIIRIGVIDKVLPEHYMRTNATVYTIDIKHHLNTETINKIGSLLTNPITQKFFAFIYDIRELNYKEITHNTNYNLLNTFKATWSLEKGFLPRVTDNVGNTTKCIINEALGNNSEVSVFTSQVIFGQEPIPQEDEVSKLFNSLIEYCKLSIAKGELFQVQFFGNKQILDLNKIYSNPSNSIFLIPYIKHEHLFPQQKAQNTYVTSVDLNIQDHKLIQISKHGINNRGPLNLSLEAMKAIQAYFKKIQRNPNDIELETLAQTWSEHCKHNIFSSPIDEITDGLYKHYIKRATQEINSEICVSTFSDNAGAIIFDDNFIIADKVETHNSPSALDPFGGAITGILGVNRDIIGFGKGAKPILNAYYFCFSESEEELYRDKSCTVKVLPSDVIMDGVIKGVNSGGNCSGIPTSLGSAYFDDRFRSKPLVFVGCTGIMPRTINNALSHLKKPNNGDFIVIAGGRTGRDGIHGATFSSNALTEHNSSSTVVQIGDPITQKKLSDAIIKEARDLDLYNAITDNGAGGLSSSVGEMGNNGFRVELDKVLLKHDNMLPWEIWVSESQERMTFAVPPNKFTMFEKVMKKHDVEISIIGEFNNTNKAVVLYKGSVIMDMDVDFLHNGVPKIHLQTNSYTQTIESIPNKKFNKPLAVELNEIIQRMNICSKEFISLQYDHEVQGTSVIKPLQGKGRVNGDATVIRPILSSNRGIVKSQGLGSSYGEISTYHMAACAIDTAIRNYVAVGGNFNHLALLDNFCWCDSTNPQRLWQLKNAAKACYDYAVAFKTPFISGKDSMFNDFKGYNKKGEEITISAPPSLLISTIGIIENVENAVTLDVKSPGDLIYILGITYNELGGSEYQKYTGIENNNVPQVHAEHAKKLYTSYNKAISANLIASAIAINLGGIIISLVKSLIGGQLGAEISLSSIPICNIENNHLQEKVILFSESQSRILVTVNENKKQEFETIFKNIPHANIGKVTSINTLIIDNMCSIDLNMLEYSYKKFSNMKIQSYAT

SEQ ID NO: 52794 - DNA, 3957 bp, Thiobacillus denitrificans ATCC 25259
  CDS (1)..(3957): transl_table=11
atgtcttccattgtttcgctccccggcagtgccgcgctgtccgctttccgtatcgacaaaatccgcgcgcaggccgcagccatgggagtggcactcggtgaactgagcgcgcgctactggcactttctcgaactcgacggcgaactcgactccgccgccgatcggcagctcgcggcgaccctcgactacggcaccccgaccgacgcgccggctgccgacgcggtgcatctgctcgtcacgccgcgtcccggcacgatttcgccctggtcgtcgaaggcgaccgaaatcctgcgcaacagtggcctcggcatgctgcggcgtatcgagcgcggcgtcgcctatcgcctgtgtaatcccgacggcgaggtgctcgcagccgctgcgcgacagatgctgctgccgcttctgcacgaccgcatgaccgaggccgtcatggccgggctcggcgacgccgcagcgctgttccagcacgtgccgccgcgcccgctcgagacggtcgacctcctcgcgggtgggcgcggcgcgctcgtcgccgccaaccgcagcctcggccttgcgctgtccgacgacgaactcgattatctggtcgagaatttcgtccgccttggacgcaacccgaccgacgtcgaactgatgatgttcgcgcaggccaattcggaacactgccggcacaagatcttcaacgcgtcctgggtcatcgacggcgcggcgcaggacaagtcgctgttcggcatgatccgcgacacccatgccgcgcatccggccggcacggtcgtcgcctattcggacaattcgtcggtcatcgagggggcggacatcgaccgcttctatccgcacgccgacagcagctacggctacaaccgcgaacgcacgcacgtcctgatgaaggtcgagacgcataaccatccgaccgcaatctcgccgtttccgggcgcggcgaccggcagtggcggcgagatccgcgacgagggcgcgaccggcatcggctcgaagccgaaggccggcctgtgcggtttctcggtatccaatctcgatattcccgggtatccgcagccctgggagagcggggcctacggcaagcccgaacgcatcgtcaccccgctcgcgatcatgctcgaaggcccgatcggtgcggcggcgttcaacaacgaattcggccggcccaatctggccggctacttccgtaccttcgaggagaccgtcgccggggagcgccgcggctatcacaagccgatcatgctcgccggcggcgtcggcagtatccgcgacgagcacgtgcacaagaagctgctgccgaccggcacgctgctgatccaactcggcggccccggcatgctgatcggcctcggcggcggcgccgcgtcgtcgatggataccggcgccaacgccgccgacctcgacttcgattcggtacagcgcggcaatccggaaatggagcggcgcgcgcaggaggtgatcgaccgttgctggcagctcggcgagcgcaatccgattctgtcgattcacgacgtcggcgccggcggcctgtcgaacgccctgcccgagctcgtgcacggtggcggtcgcggcggccgtttcgaattgcgcgccgcgccgtccgaggaaagcggcatgtcgccgcgcgagatctggtgcaacgaggcgcaggagcgctacgtgctcgcgatcccgccggcgcggctggccgagttccgcgcgatctgcgagcgcgagcgctgcccgttcgcggtgctcggcgaagcgaccgaagcgaaccatctgctcgtcaccgacacgcatttcgacaatgcaccggtcgacgtcagtctcgacgtcatcctcggcaagccgccgcgcatgacgcgcgaggttgcacatcagcaggcgttgcccgcgcctctcgcgctcgacggcatcgaactccgcgacgcggtctatcgcgtgctcgcgatgcccggggtcgcgtcgaagatgttcctgatttcgattggcgaccgcagcgtcggcggcctgaccgcgcgcgaccagtgcgtcggcccctggcaggtcccggtcgccgactgcgcgatcaccctcgcgggctaccggacgacgcagggggaagtcttttcgatcggcgagaaggcgccgctcgccttgatcgacgcccccgcgtcgggtcggatggcgatcgtcgaggcgatcaccaacctcgccgccgcgcgcgtggagggcctcggcgagatcaaactgtcggcgaactggatggcgcctgccggccatccgggcgaggacgccgcgctgttcgatacggtcgccgcggtgtcgcagtattgccaggcgctcggcgtctcgattccggtcggcaaggactcgatgagcatgaagaccgtgtggcaggacggcgacgagaggaaagccgtgatatcgccgatttcgctggtggtctcggccttcgccacgacacccgacacgaccgctcacctcaccccgcagttgcgcgtcgacgccggcgagaccgatctcgtgctgatcgacctcgggctcggccgcaaccgcctcggcgcctccagcttcgcccaggcctacaagcaggtcggcgaccgctgcccggacgcgccgagccccgatgcgctcaaggcctttttcgacacggtccagtcgctcaacgcggccggccggctgctcgcctaccacgaccgctccgacggcggcctcttcgccgtgctgtgcgaaatggccttcgccggccactgcggggtcgaggtcgacgtcgacgaactctgctcggaaaaaatccgcctcgacgtcgaggacgaaggcctgcccgagcccgatctcaaggacccctgcggctactccgagcggatcttcaacgtcctcttcagcgaggaggccggtgccgtgctgcaggtgcgccgcgccgacagcgccgccgtgatgcaggcgttcttcgacgccggcctgcgcggcgagttctacatcatcggccatcccgccgccagcgaccgcgtgcgcgtgctgcgccgcggccgcgtgatcctcgacgaggcgcgcagcgatctgcaaagcgcctgggcccggaccagctacgaaatggcgaaactgcgcgacaacccggtatgtgcggaacaggaattcgcgcgcaacgccgacgccgacgagcccggcctctactacgcgccgagcttcgatgtcgatgacgacatcgccgtgcccttcgtcgccagcggcaagcgtccgcgcgtcgccgtgctgcgcgagcagggcgtcaacggccaggtcgagatggcggcggccttcgacagcgcgggtttcagcgcggtcgacgtgcacatgagcgacattctggccggacgcgttgacctggccgatttcgccggcctcgcggcctgcggcggcttcagctacggcgacgtgctcggtgcgggcggcggctgggccaagtcgattctgttcaatgcgcgggcgcgcgacgcgttcgcggcgtttttcgcgcgtcccgacagcttcgccctcggcgtgtgcaacggctgccagatgatgagccagctgcacgacctgatccccggcgcggcgtcgtggccgcgcttcgagcgcaacctgtcggagcagttcgaggcgcgcttcgcgctggtcgaggtgctgccgtcgccgtcgatcttcttcgccgacatggccggatcggtgatgccgatcgccgtgtcgcacggcgagggccgggtcgtgttccgcgacccggcgcacgctgcgagggcgcaggcgacgctgcgttacgtcgatcaccgcggcgcgccgaccgagacctacccgttcaatccgaacggttcggccgccggcctgaccggcttcacgaccgccgacggccgcttcagcatcctcatgcctcatccggagcgggtctaccgcgcagcgcagctttcctggcggccgccaggcatgaacgcggcgtcgccctggctgcggatgttccgcaacgcgcgccgcgcggttgggtga

SEQ ID NO: 52795 - protein, 1318 aa, Thiobacillus denitrificans ATCC 25259
MSSIVSLPGSAALSAFRIDKIRAQAAAMGVALGELSARYWHFLELDGELDSAADRQLAATLDYGTPTDAPAADAVHLLVTPRPGTISPWSSKATEILRNSGLGMLRRIERGVAYRLCNPDGEVLAAAARQMLLPLLHDRMTEAVMAGLGDAAALFQHVPPRPLETVDLLAGGRGALVAANRSLGLALSDDELDYLVENFVRLGRNPTDVELMMFAQANSEHCRHKIFNASWVIDGAAQDKSLFGMIRDTHAAHPAGTVVAYSDNSSVIEGADIDRFYPHADSSYGYNRERTHVLMKVETHNHPTAISPFPGAATGSGGEIRDEGATGIGSKPKAGLCGFSVSNLDIPGYPQPWESGAYGKPERIVTPLAIMLEGPIGAAAFNNEFGRPNLAGYFRTFEETVAGERRGYHKPIMLAGGVGSIRDEHVHKKLLPTGTLLIQLGGPGMLIGLGGGAASSMDTGANAADLDFDSVQRGNPEMERRAQEVIDRCWQLGERNPILSIHDVGAGGLSNALPELVHGGGRGGRFELRAAPSEESGMSPREIWCNEAQERYVLAIPPARLAEFRAICERERCPFAVLGEATEANHLLVTDTHFDNAPVDVSLDVILGKPPRMTREVAHQQALPAPLALDGIELRDAVYRVLAMPGVASKMFLISIGDRSVGGLTARDQCVGPWQVPVADCAITLAGYRTTQGEVFSIGEKAPLALIDAPASGRMAIVEAITNLAAARVEGLGEIKLSANWMAPAGHPGEDAALFDTVAAVSQYCQALGVSIPVGKDSMSMKTVWQDGDERKAVISPISLVVSAFATTPDTTAHLTPQLRVDAGETDLVLIDLGLGRNRLGASSFAQAYKQVGDRCPDAPSPDALKAFFDTVQSLNAAGRLLAYHDRSDGGLFAVLCEMAFAGHCGVEVDVDELCSEKIRLDVEDEGLPEPDLKDPCGYSERIFNVLFSEEAGAVLQVRRADSAAVMQAFFDAGLRGEFYIIGHPAASDRVRVLRRGRVILDEARSDLQSAWARTSYEMAKLRDNPVCAEQEFARNADADEPGLYYAPSFDVDDDIAVPFVASGKRPRVAVLREQGVNGQVEMAAAFDSAGFSAVDVHMSDILAGRVDLADFAGLAACGGFSYGDVLGAGGGWAKSILFNARARDAFAAFFARPDSFALGVCNGCQMMSQLHDLIPGAASWPRFERNLSEQFEARFALVEVLPSPSIFFADMAGSVMPIAVSHGEGRVVFRDPAHAARAQATLRYVDHRGAPTETYPFNPNGSAAGLTGFTTADGRFSILMPHPERVYRAAQLSWRPPGMNAASPWLRMFRNARRAVG

SEQ ID NO: 52796 - DNA, 3612 bp, Streptococcus agalactiae A909
  CDS (1)..(3612): transl_table=11
gtgcaggtctatgatgtctttcatttggctgaggatttgctggcgcgtgcggagaagcatattttctctgagcaggtgacagaccgtcttttgacagaagctgaaatcactgcggagcttgataaggttgccttctttgctattgaggcccttcctggtcaatttgaccaacgtgcagctagttcgcaagaagctttgctattgcttggaggtgacagtcaggtcaaggtcaacaccgcccagctttacttggtcaataaggatattgcagaagcagaacttgaagcggttaaaaactatcttttgaatccagttgattcacgtttcaaggacattactttgccgcttgaagagcaggctttctctgtgtctgataagacgatccctaatcttgatttcttcgagacttatacagctgacgattttgtggcctataaggcagagcagggcttggctatggaggtcgatgaccttctcttcatccaagattatttcaaatcaatcgggcgtgtgccaactgagactgagctgaaagttttggacacttactggtcagaccactgccgtcacacaacctttgaaactgaattgaagaacattgatttttcagcttctaaattccaaaaacaattgcaggcgacttatgacaaatatatcgccatgcgtgatgaacttgatcgttctgaaaagccgcagacacttatggatatggcgactatttttggtcgttatgagcgtgccaacggtcgtctggacgatatggaagtctcagatgaaatcaatgcctgctcagttgaaattgaagtagatgttgatggtgtaaaagagccttggctcctcatgtttaagaatgagactcacaatcacccaacagaaattgagccatttggtggcgcagcaacttgtatcggtggtgccattcgtgacccgttgtcaggacgttcatacgtttatcaggctatgcgtatttcaggcgcaggcgatatcacgactccgattgcggaaacacgtgctggaaaattgccacaacaggttatttctaagactgcggcgcacggctattcttcatatggtaaccaaattgggcttgcgacaacgtatgtgcgtgagtacttccaccctggcttcgtagccaaacgtatggagcttggagctgtggttggtgctgcacctaaggaaaatgtggttcgtgaaaaaccagaaacaggcgatgtggtcatcttgctcggtggtaaaacaggtcgtgatggtgtcggtggtgcgacaggttcatctaaggttcaaacggttgaatctgtggaaacagctggcgcagaggtacaaaaagggaatgccattgaagagcgtaagattcaacgtcttttccgtgatggcaatgtcactcgtcttatcaagaaatcaaatgacttcggtgcaggtggtgtctgtgttgccatcggtgaattggctgatggtcttgaaatcgatttggacaaggtgccacttaaataccaaggtcttaatggtactgaaattgcaatctcagaatcacaagagcgtatgtcagtcgttgttcgtccaagtgatgtggatgccttcatcgcagcctgtaacaaggaaaatatcgatgcagtcgtagttgcgactgtgactgaaaaaccaaatcttgtcatgacttggaatggcgaaatcatcgttgacttggaacgccgtttccttgataccaacggtgtccgtgtcgttgttgatgctaaagtcgttgacaaggacttgacagttccagaagcacgcacaacatctgcagagacacttgaagcagatacgcttaaggtcttgtctgacctcaaccatgctagccaaaaaggtcttcaaactatctttgactcatctgttggtcgctcaaccgttaaccacccaatcggtggtcgctaccaaatcacaccgacagaaagttctgttcaaaaattgccagttcaacatggtgtgacgacaacagcctctgttattgctcaaggttataatccttatattgcagagtggtcaccttatcacggtgctgcctatgctgttattgaagcgacagctcgcttggtagcaacgggtgctgactggtctcgtgcacgcttctcttaccaagagtatttcaagcgtatggataaacaggcagagcgttttggtcagccagtatcagctcttcttggttctattgaggctcagattcaacttggcttgccatcaatcggtggtaaggactctatgtctggtactttcgaagacttgacagtaccaccaaccttggtagctttcggtgtgacgaccgcggatagccgcagggttctctctcctgagtttaaagcggctggtgagaacatctactacattccaggtcaagctatttcagaagatattgattttgaccttatcaaggctaactttagccagttcgagactattcaagctcaacataagattactgctgcttcagctgttaaatacggtggtgtcctagaaagtcttgctctcatgacttttggtaaccgtatcggggcctctgttgaaattgcagagcttgacagcagcttgacagctcaactcggaggctttgtttttacatcagctgaggaaatcgctggcgctgtgaaaatcggtcaaactcaggcagactttacagtcactgtcaatggaaatgaccttgctggcgctagccttctagcagccttcgaaggtaaattggaagaggtttatccaacagaattcgaacaggcagacgctcttgaagaagttcctgctgtggtatcagacaccgtcatcaaggctaaggaaacaattgaaaaaccagtggtttacattccagtcttccctggtaccaactcagaatatgattcagctaaggcttttgaacaggttggagctagtgtcaacttggtagcatttgtaaccttgaatgaggctgctattgctgaatcagttgacacaatggtcgctaatattgctaaggcaaatatcatcttctttgctggaggtttctcagcagcggatgaaccagatgggtctgctaagtttatcgtcaatatcttgcttaacgagaaggtccgcgcagctattgacagcttcatcgaaaaaggtggctttatcatcggtatctgtaatggattccaagctcttgttaaatcaggtcttcttccatacggaaacttcgaggaagctggtgagacaagtccaactctcttctataacgatgctaaccagcacgttgcaaagatggttgagactcgtatcgcaaataccaactcaccatggttggcaggagttgaggtcggcgatattcatgccattccagtttcacacggtgaaggtaaatttgttgtcagcgcttctgaatttgcagagctaagagacaatggtcaaatctggagccaatatgtggactttgacggacaaccatctatggattctaaatacaatccaaacggctctgtcaatgccatcgaagggattaccagcaagaatggtcaaatcatcggtaagatggggcactcagaacgctgggaagacggcctcttccaaaatatccctggtaacaaagaccaagccttgtttgctagtgcagtaaaatattttacaggaaaataa

SEQ ID NO: 52797 - protein, 1203 aa, Streptococcus agalactiae A909
MQVYDVFHLAEDLLARAEKHIFSEQVTDRLLTEAEITAELDKVAFFAIEALPGQFDQRAASSQEALLLLGGDSQVKVNTAQLYLVNKDIAEAELEAVKNYLLNPVDSRFKDITLPLEEQAFSVSDKTIPNLDFFETYTADDFVAYKAEQGLAMEVDDLLFIQDYFKSIGRVPTETELKVLDTYWSDHCRHTTFETELKNIDFSASKFQKQLQATYDKYIAMRDELDRSEKPQTLMDMATIFGRYERANGRLDDMEVSDEINACSVEIEVDVDGVKEPWLLMFKNETHNHPTEIEPFGGAATCIGGAIRDPLSGRSYVYQAMRISGAGDITTPIAETRAGKLPQQVISKTAAHGYSSYGNQIGLATTYVREYFHPGFVAKRMELGAVVGAAPKENVVREKPETGDVVILLGGKTGRDGVGGATGSSKVQTVESVETAGAEVQKGNAIEERKIQRLFRDGNVTRLIKKSNDFGAGGVCVAIGELADGLEIDLDKVPLKYQGLNGTEIAISESQERMSVVVRPSDVDAFIAACNKENIDAVVVATVTEKPNLVMTWNGEIIVDLERRFLDTNGVRVVVDAKVVDKDLTVPEARTTSAETLEADTLKVLSDLNHASQKGLQTIFDSSVGRSTVNHPIGGRYQITPTESSVQKLPVQHGVTTTASVIAQGYNPYIAEWSPYHGAAYAVIEATARLVATGADWSRARFSYQEYFKRMDKQAERFGQPVSALLGSIEAQIQLGLPSIGGKDSMSGTFEDLTVPPTLVAFGVTTADSRRVLSPEFKAAGENIYYIPGQAISEDIDFDLIKANFSQFETIQAQHKITAASAVKYGGVLESLALMTFGNRIGASVEIAELDSSLTAQLGGFVFTSAEEIAGAVKIGQTQADFTVTVNGNDLAGASLLAAFEGKLEEVYPTEFEQADALEEVPAVVSDTVIKAKETIEKPVVYIPVFPGTNSEYDSAKAFEQVGASVNLVAFVTLNEAAIAESVDTMVANIAKANIIFFAGGFSAADEPDGSAKFIVNILLNEKVRAAIDSFIEKGGFIIGICNGFQALVKSGLLPYGNFEEAGETSPTLFYNDANQHVAKMVETRIANTNSPWLAGVEVGDIHAIPVSHGEGKFVVSASEFAELRDNGQIWSQYVDFDGQPSMDSKYNPNGSVNAIEGITSKNGQIIGKMGHSERWEDGLFQNIPGNKDQALFASAVKYFTGK

SEQ ID NO: 52798 - DNA, 2241 bp, Rhodobacter sphaeroides 2.4.1
  CDS (1)..(2241): transl_table=11
gtgcgcctccttcccctgatggccgttccgtcctatgaggcgccagacccccaacctctgcccgcggagagatgcgccatgaccgagcccgaaatcacccccgagctgatcgcggcccacggcctgaagcccgacgaataccagcggatcctcgagatcatcggacgcgcgcccaccttcaccgaactcggcatcttctcggccatgtggaacgagcactgctcctacaagtcgtcgaagaaatggctgcgcacgctgcccaccaccggcccgcaggtgatctgcggcccgggcgagaatgcgggcgtggtcgacatcggcgacggtcaggcggtcatcttcaagatggagagccacaaccacccctcctacatcgagccctatcagggggcggcgaccggggtcggcggcatcctgcgcgacgtcttcaccatgggcgcgcgccccatcgccgcgatgaacgcgctcagcttcggggtgccggaccatcccaagaccgcccatatcgtgaagggcgtggtcgagggcatcggcggctacggcaacgccttcggcgtgccgaccgtgggcggcgaggtccgcttccaccgcgcctataacggcaactgcctcgtgaacgccttcgcagccggcctcgcggatgccgacaggatcttctactcggccgcttcgggcgtggggatgccggtggtctatctcggtgccaagaccgggcgcgacggcgtaggcggcgccaccatggcctcggccgagttcgacgacacgatcgaggagaagcgcccgaccgtgcaggtcggcgaccccttcaccgagaagcgcctgctggaagcctgcctcgaactgatggcctcggattcggtgatctcgatccaggacatgggcgccgcaggcctcacctgctcggcggtcgagatgggcgacaagggcgacctcggcatccggctgcaactcgacgccgtgcctcagcgcgaagccaacatgaccgcctacgagatgatgctcagcgaaagccaggagcggatgctcatggtgctgaagcccgagaaggaggccgtggcccgcgcgatcttcgagaagtgggatctcgacttcgccatcgtcggcgagaccatccccgaggaccgcttcctgatcctgcacggcaacgaggtgaaggccgacctgccgctgaaggcgctctcgggcactgcgccggaatatgaccggccctggatcgagacgccggccgcggcaccgctgggcgccgtgccggaggtcgatccgatcgaggggctgaaggcgctgatcggctcgccctcctacgcccacaaggcctgggtctgggagcagtacgacagtcaggtgatggccgacacggtgcgcgccccgggcctcggcgcgggcgtcgtgcgcgtccatggcacgccgaaggcgctggccttcacctccgacgtgaccccgcgctacgtgaaggccaaccccttcgagggcggcaagcaggcagtggccgaggcttaccgcaacctcacggccgtgggcgcaaagccgctcgccaccaccgacaacatgaacttcggcaaccccgaaaagcccgagatcatgggccagttcgtgggcgccatcaaaggcatcggcgcggcggtcgcggcgctcgacatgccgatcgtctcgggcaacgtctcgctctacaacgagaccgacggcgtggggatcctgcccactcccaccatcggcgcggtgggcctcctgacctcgctcgacgagttgatcgcgggccagcccgaagagggcgatctggcgctggtgatcggcacgacggcgggtcatctcggacagtcggcgcttctggccgagatgttcggccgggaagagggcgacgcgcccccggtcgatctcgaggccgagaaacgccatggcgagttcctccgcgcgaaccgcaagctcgtgcgcgcggcggccgacctctcggatggcggtctcgcgctcgcggccttcgagatggccgaagccgcggggctgggcctcaccctgacgcccagcggcacggccgcgctcttcggcgaggatcaggcgcgctatctcgtggcctgcgcgccggaccgggccgaggcactgcaggccgcggccgaggccgcaggcgtgcccctgcaggaggtgggcaggttcggcggcgcgacggtgacgctcgcgggcgcctcggccccgctcgcggacctctcgcgcctctaccgccgcgccttcgccgaggccatcggcggctga

SEQ ID NO: 52799 - protein, 746 aa, Rhodobacter sphaeroides 2.4.1
MRLLPLMAVPSYEAPDPQPLPAERCAMTEPEITPELIAAHGLKPDEYQRILEIIGRAPTFTELGIFSAMWNEHCSYKSSKKWLRTLPTTGPQVICGPGENAGVVDIGDGQAVIFKMESHNHPSYIEPYQGAATGVGGILRDVFTMGARPIAAMNALSFGVPDHPKTAHIVKGVVEGIGGYGNAFGVPTVGGEVRFHRAYNGNCLVNAFAAGLADADRIFYSAASGVGMPVVYLGAKTGRDGVGGATMASAEFDDTIEEKRPTVQVGDPFTEKRLLEACLELMASDSVISIQDMGAAGLTCSAVEMGDKGDLGIRLQLDAVPQREANMTAYEMMLSESQERMLMVLKPEKEAVARAIFEKWDLDFAIVGETIPEDRFLILHGNEVKADLPLKALSGTAPEYDRPWIETPAAAPLGAVPEVDPIEGLKALIGSPSYAHKAWVWEQYDSQVMADTVRAPGLGAGVVRVHGTPKALAFTSDVTPRYVKANPFEGGKQAVAEAYRNLTAVGAKPLATTDNMNFGNPEKPEIMGQFVGAIKGIGAAVAALDMPIVSGNVSLYNETDGVGILPTPTIGAVGLLTSLDELIAGQPEEGDLALVIGTTAGHLGQSALLAEMFGREEGDAPPVDLEAEKRHGEFLRANRKLVRAAADLSDGGLALAAFEMAEAAGLGLTLTPSGTAALFGEDQARYLVACAPDRAEALQAAAEAAGVPLQEVGRFGGATVTLAGASAPLADLSRLYRRAFAEAIGG

SEQ ID NO: 52800 - DNA, 4065 bp, Burkholderia sp. 383
  CDS (1)..(4065): transl_table=11
atggctcacttctcgtgttttcccggcgcttcggccctctccgatttccgtcaaacccgtctgctcgacacgctcaagcaaatcgacgccaacatcgtcgcggtgcgcgggcagttcctgcacttcgtcaatgcggccgagccgctgtcggccgacgacagcgcgcgcatcgacgcgctgatgcactacggcgcgccgttcgagccggcgaccgagaagggcacggccgagaccttcgtcgtgctgccgcgcttcggcacggtctcgccgtgggcgagcaaggcgaccgacatcgcgcagcactgcggcctcacgcaggtgcgccgcatcgagcgcggcgtcgagttcacggtcacgctgaagtcgggcctgctcggcggcaagaaggcgctgtcggacgacgctcgcgcggccgtcgcagccgcgctgcatgaccggatgaccgaaagcgtggtcgcggcgcgtgacgacgcgaagcacctgttcgacgaactgccggccaagccgctcgcgagcgtcgacgtgctgggcgtcggccgtggtgcgctcgaacgcgcgaacgtcgagctgggcctcgcgctcgccgacgacgagatcgactacctggtcgacgcgttccgcaagctcgaacgcaacccgaccgacgtggaactgatgatgttcgcgcaggcgaacagcgagcactgccgccacaagatcttcaacgcgcagtggacgatcgacggcgaagcgcaggacatgtcgctgttcgcgatgatccgcaacaccgaaaagctgaacccgcagggcacgatcgtcgcgtattcggacaactcgtcgatcatggtcggcgccgaagccgaacgctggttcccgcgcaacgcgggcgcggccggcgagccgggcgagcgctacggccgccacaccgagctcacgcacacgctgatgaaggtcgagacgcacaaccacccgacggcgatctcgccgttcccgggtgcggcgaccggcgcgggcggcgagatccgcgacgaaggcgcgacgggccgcggtgcgcgtccgaaggccggcctcacgggcttcaccgtgtcgaacctcgatctgcccgacgcacgccagtcgtgggaaaacgcacgcgacgcggcccagccggtcggcgagcgcaacccgaacgacgcgcacggcccgtacggccgcccggaccgcatcgcttcgccgttgcagatcatgatcgacggcccgctcggcggcgccgcgttcaacaacgaattcggccgtccgaacctcggcggctatttccgcgtgtacgagcagaacgtcggcgggaaggtgcagggctatcacaagccgatcatgatcgcgggcggcctcggcaacatcgccgaccaacatacgcacaagcatgacgtgccggccggctcgctgctgatccagatcggcggccccggcatgcggatcgggatgggcggcggcgccgcgagctcgatggcgaccggcgcgaacacggccgaactcgacttcgactcggtgcagcgcggcaaccccgaaatcgagcgtcgcgcgcaggaagtgatcaacggctgctggcagctcggcgcggaaaacccgatcctgagcatccacgacgtcggcgcgggcggcctgtcgaacgcgttccccgagatcgtcgacggtgcgggcaagggcgcgcgcttcgagctgcgcaaggtcgcgctcgaggaatcgggcctgtcgccgcgcgaaatctggtcgaacgaggcgcaggagcgctatgtgctggcgatcgcgccggccgacctgccgcgcttcgaggcgatctgcgcacgtgagcgctgcccgttcgcggtggtcggtgtcgcaaccgacgaacgccagctgaagctcgtcgacgacgaagcgacgggcgccgacgaatacccggtcgacatgccgatggaagtgctgctcggcaagccgccgcgcatgcatcgcgacgtcacgcgcgtggcgaccgagcgcgtgccggtcgacgtgacgggcatcgcgctgtcggaagtcgcggtcgacgtgctgaagcacccgacggtcggcagcaagtcgttcctgatcacgatcggcgaccgctcggttggcggcacgtcggtgcgcgaccagatggtcggcccgtggcaggtgccggtggccgactgcgcggtcaccgcgctcgactacgcgggcttcaagggcgaagcgatgacgatggccgagcgcacgccgctcgcggtgatcgatgcaccggcatcgggccgcatggcggtcggcgaggcgatcacgaacatcgcgagcgcgccgattgcgtcgctcgacaagctgaagctgtcggcgaactggatggctgcatgcggcacggccggcgaggacgccgcgctgttcgacacggtcaaggcgatcggcatggaactgtgcccggcactcgggatcggcatcccggtcggcaaggattcgctgtcgatgaagacgaagtgggacgagcagggcgtcgcgaaggaagtggtatcgccggtgtcgctgatcatctccgcgttcgcgccggtcgaggatgtgcgccgtcacctgacgccgcaactgcgccgcatcgccgacgcgggcgacagcgtgctgatcgcgatcgatctcggccgcggcaagaaccggatgggcggcagcatcttcgcgcaggttacgcagcaggtcggcgacacgacgccggacgtcgacgacgcagaagacctgaagcgtttcttcaacgcgatccagtcgctcaatgcgcaagacaagctgctggcataccacgaccgctcggacggcggcctgtgggcgacggtgtgcgaaatggcgttcgcgggccacgcgggcgtgtcgctgaacgtcgacatgctgacgctcgacccgaatcacgaatccgactacggcgacgcgaaggactgggcgaagcagacgagcggccgtcgcgaagatcgcacgctgcgcgcgctgttctccgaagaactcggcgctgtcgtccaggtgcgtgcgaccgatcgtgacgcggtgctcggcgcgctgcgcgagttcggcctgtcggcgtgctcgcacgtgatcggctcggtcaacgatcgcgacgtgatcgaggtgtatcgcgacgcgaagaaggtcttcgacgcaccgcgcaccgaactccatcgcgcatggagcgaagtgagctggcgcatcgcgcgcctgcgcgacaaccccgcatgcgcggatgccgaatacgacgcgctgctcgacgtggccgatccgggcatctcgccggtgctgagcttcgatccggccgacgacatcgccgcgccgttcatcgcgacgggcgcacggccgcgcgtcgcgatcctgcgcgagcagggcgtgaactctcacctggaaacggcctacgcgttcgatcgcgcgggcttcgatgcgcacgacgtgcacatgagcgacctgctcgcgggccgtgcgacgctcgccgatttcgcgggtgcggtcgcctgcggcggcttctcgtacggtgacgtgctgggcgcgggcgaaggctgggcgaagacgatccgtttcaacgcgaacctcgccgacatgttctcggcgttcttcgcgcgtccggacacgttcgccctcggcatctgcaacggctgccagatgctgtcgagcatcgcgtcgatgattccgggcgcggaagcgtggccgaagttcacgcgcaacaagtccgagcagttcgaggcgcgcttctcgttcgtcgaagtggaaaagtcgccgtcgatcttcttcgcggggatggaaggctcgcggattccggtcgcggtcgcgcacggcgaaggctatgcagacttctcgcagcagggcgacatcgatcgcgtcgcggtcgcgatgcgtttcgtcgaccaccgcggcgaagcgaccgagggctatccgttcaacccgaacggctcgccggccggcatcacgtcggtcacgacggccgacggccgcttctcggtgctgatgccgcacatggagcgtgtgcatcgtacggtcgcgatgagctggcacccggaaagctggggtgaagcgagcccgtggatgcgcgtgttccgcaacgcgcgccgctggatcggctga

SEQ ID NO: 52801 - protein, 1354 aa, Burkholderia sp. 383
MAHFSCFPGASALSDFRQTRLLDTLKQIDANIVAVRGQFLHFVNAAEPLSADDSARIDALMHYGAPFEPATEKGTAETFVVLPRFGTVSPWASKATDIAQHCGLTQVRRIERGVEFTVTLKSGLLGGKKALSDDARAAVAAALHDRMTESVVAARDDAKHLFDELPAKPLASVDVLGVGRGALERANVELGLALADDEIDYLVDAFRKLERNPTDVELMMFAQANSEHCRHKIFNAQWTIDGEAQDMSLFAMIRNTEKLNPQGTIVAYSDNSSIMVGAEAERWFPRNAGAAGEPGERYGRHTELTHTLMKVETHNHPTAISPFPGAATGAGGEIRDEGATGRGARPKAGLTGFTVSNLDLPDARQSWENARDAAQPVGERNPNDAHGPYGRPDRIASPLQIMIDGPLGGAAFNNEFGRPNLGGYFRVYEQNVGGKVQGYHKPIMIAGGLGNIADQHTHKHDVPAGSLLIQIGGPGMRIGMGGGAASSMATGANTAELDFDSVQRGNPEIERRAQEVINGCWQLGAENPILSIHDVGAGGLSNAFPEIVDGAGKGARFELRKVALEESGLSPREIWSNEAQERYVLAIAPADLPRFEAICARERCPFAVVGVATDERQLKLVDDEATGADEYPVDMPMEVLLGKPPRMHRDVTRVATERVPVDVTGIALSEVAVDVLKHPTVGSKSFLITIGDRSVGGTSVRDQMVGPWQVPVADCAVTALDYAGFKGEAMTMAERTPLAVIDAPASGRMAVGEAITNIASAPIASLDKLKLSANWMAACGTAGEDAALFDTVKAIGMELCPALGIGIPVGKDSLSMKTKWDEQGVAKEVVSPVSLIISAFAPVEDVRRHLTPQLRRIADAGDSVLIAIDLGRGKNRMGGSIFAQVTQQVGDTTPDVDDAEDLKRFFNAIQSLNAQDKLLAYHDRSDGGLWATVCEMAFAGHAGVSLNVDMLTLDPNHESDYGDAKDWAKQTSGRREDRTLRALFSEELGAVVQVRATDRDAVLGALREFGLSACSHVIGSVNDRDVIEVYRDAKKVFDAPRTELHRAWSEVSWRIARLRDNPACADAEYDALLDVADPGISPVLSFDPADDIAAPFIATGARPRVAILREQGVNSHLETAYAFDRAGFDAHDVHMSDLLAGRATLADFAGAVACGGFSYGDVLGAGEGWAKTIRFNANLADMFSAFFARPDTFALGICNGCQMLSSIASMIPGAEAWPKFTRNKSEQFEARFSFVEVEKSPSIFFAGMEGSRIPVAVAHGEGYADFSQQGDIDRVAVAMRFVDHRGEATEGYPFNPNGSPAGITSVTTADGRFSVLMPHMERVHRTVAMSWHPESWGEASPWMRVFRNARRWIG

SEQ ID NO: 52802 - DNA, 2991 bp, Geobacter metallireducens GS-15
  CDS (1)..(2991): transl_table=11
atggcgagacgaattgagattgccctcaaggaaggcgtccgtgacgcccgtggcgagcggatcaaacgcgagatcgagcattttctccatctgccggtggaagcggtgcggaccatcgacgtctacaccgttgatgcgaagctttccgaggaggagcttgtcaaggccgcctcggagcccttctgcgacccggtcatccaggtctggagcatcgaccgtcccctggctgccggtttcgattttctcgtggaggtgggataccgtcccggggttaccgacaacgtggggcgcaccggccgggaagcaatcgagtacatcaccggccggcccatggaggcgggggagggggtctacacctcggtccagtaccttctgagcgggaaactctcccgtgccgacgtggagcggatcgcccgggacctcctcggcaacgcccttatccagcgcttcgtggttctggacagggccgagttcgcggcccaggggggagtgccggtttcggtccccaaagttcagggcgaaaccaaagcccaggtcagggatatcgacctggaggtttccgacgatgagctgctgcgtatcagcaaggacggggttctggccctgaccctggaggagatgaagatcatccaggcccactaccgggatccgaaggtgcaggaggagcgccggaagcagggtctcggcgttagaccgaccgacgtggaactggagtgcctggcccagacctggtccgaacactgcaaacacaagatcttcgccggcacggttcactacgaggatgagcaggggaaccggcaggagatcaagtccctctttaagtcgttcatccagcgcaccacaaaggacgtgcgggaaaagctgggcgacagcgacttttgcctctcggtcttcaaggacaacgccggggtcattcggttcaacgacgactggtccttggtcttcaaggtggagacccacaactctccatcagccctcgacccctacggcggggctctcaccggcatcgtcggcgtgaacagggatcccttcggcaccggcaaaggtgccaagctcatcttcaacacggacgttttctgcttcgccgatcccttctacgataagcccttgccgtcgcggctcctgcatccccggcgcatctacgaaggggtcgtggagggagtcgagcacggtggcaacaagagcggcatccccacggtgaacggctctctcgtttttgacgagcgatttgccggcaagcccctggttttctgcggcacggccgggatcatgccggccaccctgaacggcgagttgggccacgagaaagcaatcaagccgggtgacctgatcgtcatgaccggcggccgcatcggcaaggacggcatccacggcgccaccttctcctccgaggagctgaacgagaattctccggttacggcggtccagatcggcgaccccatcacccagaagcggatgttcgatttcctcatccgtgcccgggacaaggggctctaccgatttatcaccgacaacggcgccggcgggctctcctcatccatcggggaaatgtcgggcgagtgcggcggctgccggatggacctggaaaaggcccccctcaagtatccggggcttgatccgtgggagatcctcatctccgaagctcaggagcggatgagccttgcggtgccccccgagcagatcgacgagtttctggccatggcgaagcgcttcaacgtcgaggcgacggtattgggtgagttcaccgacagcggctacttccatatcctctacggtgaccgcaccgtggcctggctccccatggagttcatgcacgaggggcttccccccatgcagcttccggccaaatgggtgccacctcgccatgccgaaccgacccttcaggtgaaaggtgattacaccgcggacctgaaggcgctcctcggttccctcaacatctgctccaaggagtcggtggtgcgccgttacgaccatgaggtgcaggggggaagcgtcgtgaagcccttcactggcgtggccaacgacggcccctccgatgccgcggtggtccgcccaatcctcgactccttcgagggggtggtggttgcccacggcatctgtccccgctactcggacatcgacacctaccacatgaccgccaacgccattgacgaagccctgcgcaactacgtggccgtgggtggcgccctggatctcgtggcggggctcgataacttctgctggtgcgatccggtgaggtcggaaaagactcccgacggcgagtacaagatggcccaactggtgcgggcgaaccaggccctctacgacgtctgcctcgcctacaacctgccgctcatctcgggcaaggactccatgaaaaacgacttctacgacggggccaccaagatctccatcccgccgaccatcctcttctcggtcatcggcaagatagaagacgcccgcagaagcgtcaccatggatgccaagcgccccggcgacgtcgtttacctcctggggagaaccggcaacgaactggggggctccgaatatctggcattgcagggtgtcatcggcaacaacgtgccgacggtgaaccccgaaaaggccctcaagcgctacaacgccctgcacacggccatcaccggcgggcttgtggcctcctgccacgacctctccgacggcggcctcgccgtggccctggccgagaaggcctttgccggcggttacggtatttccgcggatctgggcaaggttctctggacgggcgacgacgccatgcgcaatgatgcggctctgctcttctccgagtcggcgtcacggcacctggtcacggtgcgtcccgggaaccgcgatgctttcgaggcgatcatggcggggaactgcttctctgccatcggtgtggtgacggaagagggggcggtgcgtatcacgggcctttccggccaggcggtggtcgaagcaagcatcgacgaactgaaagaagcgtggcagagcccgctgagggagctgtaa

SEQ ID NO: 52803 - protein, 996 aa, Geobacter metallireducens GS-15
MARRIEIALKEGVRDARGERIKREIEHFLHLPVEAVRTIDVYTVDAKLSEEELVKAASEPFCDPVIQVWSIDRPLAAGFDFLVEVGYRPGVTDNVGRTGREAIEYITGRPMEAGEGVYTSVQYLLSGKLSRADVERIARDLLGNALIQRFVVLDRAEFAAQGGVPVSVPKVQGETKAQVRDIDLEVSDDELLRISKDGVLALTLEEMKIIQAHYRDPKVQEERRKQGLGVRPTDVELECLAQTWSEHCKHKIFAGTVHYEDEQGNRQEIKSLFKSFIQRTTKDVREKLGDSDFCLSVFKDNAGVIRFNDDWSLVFKVETHNSPSALDPYGGALTGIVGVNRDPFGTGKGAKLIFNTDVFCFADPFYDKPLPSRLLHPRRIYEGVVEGVEHGGNKSGIPTVNGSLVFDERFAGKPLVFCGTAGIMPATLNGELGHEKAIKPGDLIVMTGGRIGKDGIHGATFSSEELNENSPVTAVQIGDPITQKRMFDFLIRARDKGLYRFITDNGAGGLSSSIGEMSGECGGCRMDLEKAPLKYPGLDPWEILISEAQERMSLAVPPEQIDEFLAMAKRFNVEATVLGEFTDSGYFHILYGDRTVAWLPMEFMHEGLPPMQLPAKWVPPRHAEPTLQVKGDYTADLKALLGSLNICSKESVVRRYDHEVQGGSVVKPFTGVANDGPSDAAVVRPILDSFEGVVVAHGICPRYSDIDTYHMTANAIDEALRNYVAVGGALDLVAGLDNFCWCDPVRSEKTPDGEYKMAQLVRANQALYDVCLAYNLPLISGKDSMKNDFYDGATKISIPPTILFSVIGKIEDARRSVTMDAKRPGDVVYLLGRTGNELGGSEYLALQGVIGNNVPTVNPEKALKRYNALHTAITGGLVASCHDLSDGGLAVALAEKAFAGGYGISADLGKVLWTGDDAMRNDAALLFSESASRHLVTVRPGNRDAFEAIMAGNCFSAIGVVTEEGAVRITGLSGQAVVEASIDELKEAWQSPLREL

SEQ ID NO: 52804 - DNA, 2982 bp, Desulfovibrio desulfuricans G20
  CDS (1)..(2982): transl_table=11
atgctacgccgcattgaagttggtctgcgaccccatgtcgcggacaccgtgggccgcaaggtctgcaacaaaattgccgaatctctggatatcactcccgagtccgtgcagatagtcaaagtgttcaccattgacgggctttcggagcagcagcttgacgaagtgctgaaacagggagctctgcacgaccccgttctgcaggaggcatctgccgcccccgccgcgggcgatgccgactggtatctggaagtgggcctgcgccccggcgtgacggacaacgaaggccgcaccgcccgcgaaaccattgccattgtgctgggcatcagcgaccgtcgctcggtcaacgtgtatgtggccaaccagtaccgcatcagcggcgatctttcgcgcgatgatgtggaacgcataggacgcgatctgcttgccaacgaactcatccagcgcttttccgtcaaaagccgcgcccagtggcaggccgagccgggctttcccgccgctgccgcgcaggtactgggacaggcctgcgacgaagtggcctttatcccgctggacaccatggacgacgcggccatggccgctttcagccgcgacaacacgctggctctcagtctggaagaaatgcactgcatacgcgaccattacgcgcaaccggacgtaaaagccgcccgtgaaaaaatgggcctgcccgcacgccccaccgatgccgaagtggaagcgcttgcccagacatggtccgaacactgcaagcacaagattttctctgcacgcatccggtaccgcaacgaagaaaccggcaccggcgagaccatcaacagcctgtacaaaacctgcattcagggttccacaagcctgctgcgcaaacgcatgggcaaaaaagacttctgcctttccgttttcaaggacaacgcaggtgtcatatcctttacggacacgcacagcgtctgcataaaggtggaaacccacaactcgccctcggcgcttgacccctacggcggagcgcttaccggcattgtgggcgtaaaccgcgaccccatgggcaccggcatgggcgccaacatggtgtgcaacaccgatgtgttctgttttgcctcgcccttttatgaagaaaaactgcccccccgactgctgcatccgcgccgcgtgcttgaaggcgtgcgcgaaggtgtggagcacggcggcaacaaatccggtgttcccacggtaaacggctccattgtgttccacgacaggtacctgggaaaaccgctggtctactgcggtacagtgggcatgattccggccacggtggcgggcagacccggtcacgaaaaaaaggctctgccgggcgatatcgtggtgatggccggcggacgcataggcaaggacggcatccacggcgccacgttctcgtccgaggaactgcacgaaggctctcccgccacggcagtacagatcggtgaccccatcacacagcgcaaaacgtatgatttcatcatgcgcgcacgggacaaaggcctgtacaacgccattacagacaacggtgccggagggctttcctcttccgtgggcgaaatggccgaagacaccggcggctgccgcatagacgtttcgcgcgcaccgctcaaatatgacggactgcgcccgtgggaaatactgctttccgaagcgcaggaacggatgacgctggccgtaccgcctgcaaaaatagaagagtttctcgcccttgcacgcgaaatggacgttgaggccacagcactgggcgaattcactgactccggctactttcatgtgacctacggcgaaaagccggtggcctacctttccatggagttcctgcatgacggtgttccgcagatgcagcttgacgccgtgtgggaacgcccgcagctgccggcaccggccatagacgtggacgacgcccatcagagcagcctgcttaaaacaatgctgggacggctgaacatctgctccaaagagtacgtcatccgccagtacgaccacgaagtaaagggcggcagcgtcgtcaaaccgctggtgggcgttctgcgtgacggccccgccgatgcgggcgtcatgcgccccctgctggaaaacgaggcaggcatagtgctctcgcacggcatctgccccaaattcagcgatatcgacacctactggatgatggccaacgccattgacgaagcggtgcgcaacgcggttgcagtgggcggcaacattgatcatatggccggtgtggacaacttctgctggtgcgaccccgtgcagtcggaaaaaactcccgacggccggtacaagctggcgcagctggtacgcgccaacaaagctctggcccatttctgtcaggcctacggcgtaccctgcatatccggcaaagattccatgaaaaatgactacaccggcggcggtaccaaaatatccattccgcccacggtgctgttctccgttctgggggtcatccccgatgtgaacaaaacagtcacttccgacttcaaacaagccggagacggcatatacctgctgggtgtcacccgccgcgaactgggcggatcggaactggcagacgagctgggcattctttccgccgatgtgccgcatgtggacgccgttccggcactcctgcgctaccgcacgctgtacaaagccatcggtgccggacttgtttccggctgtcacgacctgtccgacggcggtctggctgtggctgtggccgaaatggctctggcaggacgcacgggcgccgatgtcaacctgaacgcagtggctcttgcaggcagcctgaacaaggctgaagtgctctactccgaatcggcatcgcgcctgctggtcaccgtgccggcagcacagcagaacgcctttgagcagatgttcaaaggtcagcactgcacccgtatcggacaggtgaccgcacacgattccctgcgcgtgctctccggagactccgtactgcttgccgaacctgtggaagaactggcgcgcagctttaaaggcacgctgaacttctag

SEQ ID NO: 52805 - protein, 993 aa, Desulfovibrio desulfuricans G20
MLRRIEVGLRPHVADTVGRKVCNKIAESLDITPESVQIVKVFTIDGLSEQQLDEVLKQGALHDPVLQEASAAPAAGDADWYLEVGLRPGVTDNEGRTARETIAIVLGISDRRSVNVYVANQYRISGDLSRDDVERIGRDLLANELIQRFSVKSRAQWQAEPGFPAAAAQVLGQACDEVAFIPLDTMDDAAMAAFSRDNTLALSLEEMHCIRDHYAQPDVKAAREKMGLPARPTDAEVEALAQTWSEHCKHKIFSARIRYRNEETGTGETINSLYKTCIQGSTSLLRKRMGKKDFCLSVFKDNAGVISFTDTHSVCIKVETHNSPSALDPYGGALTGIVGVNRDPMGTGMGANMVCNTDVFCFASPFYEEKLPPRLLHPRRVLEGVREGVEHGGNKSGVPTVNGSIVFHDRYLGKPLVYCGTVGMIPATVAGRPGHEKKALPGDIVVMAGGRIGKDGIHGATFSSEELHEGSPATAVQIGDPITQRKTYDFIMRARDKGLYNAITDNGAGGLSSSVGEMAEDTGGCRIDVSRAPLKYDGLRPWEILLSEAQERMTLAVPPAKIEEFLALAREMDVEATALGEFTDSGYFHVTYGEKPVAYLSMEFLHDGVPQMQLDAVWERPQLPAPAIDVDDAHQSSLLKTMLGRLNICSKEYVIRQYDHEVKGGSVVKPLVGVLRDGPADAGVMRPLLENEAGIVLSHGICPKFSDIDTYWMMANAIDEAVRNAVAVGGNIDHMAGVDNFCWCDPVQSEKTPDGRYKLAQLVRANKALAHFCQAYGVPCISGKDSMKNDYTGGGTKISIPPTVLFSVLGVIPDVNKTVTSDFKQAGDGIYLLGVTRRELGGSELADELGILSADVPHVDAVPALLRYRTLYKAIGAGLVSGCHDLSDGGLAVAVAEMALAGRTGADVNLNAVALAGSLNKAEVLYSESASRLLVTVPAAQQNAFEQMFKGQHCTRIGQVTAHDSLRVLSGDSVLLAEPVEELARSFKGTLNF

SEQ ID NO: 52806 - DNA, 2982 bp, Syntrophus aciditrophicus SB
  CDS (1)..(2982): transl_table=11
atgatcagcaggattgagatcggttttctccccggggtgagagacgccctgggagagaaaacccggcgcaggatcttccacgatcttcatctttccgtggaaaatgtggaaacgatcgaggtctacaccctggaaggggatttgacggacgagttattggaacgtattgccgccgggccgttttcggacccggtcattcagcggtacgccgtcaacagaagtctggcttttgatttcgactggctgatcgaagtgggcttccggcccggcgtcacagataacgtcggccgcaccgcgacagaagcggtccggctgctcctggagaaggcggccaacggcggcctgaaggtttatacctcgcggcagtacctgctcaagggaaagttgacccgccgggaagtggaagacattgcctccggactgctggccaatgagctgatccagagatttgaaattattgacggccggacctggaaatccggggagcctgtgaaaccttacgtccccagggtcatcgttgcggatcagccccggacggaatatgtcgatctgcccgatgacgacgctgccctgcaggagatcagcggcagccgcgttctggccttgaccgtggaagaaatgcggattatccggaattattttcaggatgaggctgtgcagcgccggcgccgggaggccggaatcggcgaagggatcactgatgtggaactggagtgtctggcccagacctggtcggagcactgcaagcacaagatcttcaacagcctgatcacctatgaggatgagcatggcaattcccgggttatcgactccctctttaaaagctgtgtcaaggggtcgaccaacgccatacgcgaagagctgggcccggaggactggtgcttatccgtttttgtggataacgccggaatcatcaagttcaatgacgaatacaacctggttttcaaggtagaaacccataattcgccctccgccctcgatccttatggcggcgccctgacgggcatcgtcggggtgaaccgcgaccccttcggggccggaaagggagcgaagctcatcttcaacacggacgtcttctgctttgcctctcccttctatgaccagccgctgccgcctcgcattctccatccccggcgcatctatgaaggggtgcgggaaggagtggagcatgggggaaacaagagcggcattcccaccgtcaacggctgtctcgttttcgatgagcgctttctcggaaaacccctggtttactgcggaacgggggggatcatgcccgcccggatcctgggcgaaccgtctcacatcaaggaagtccagccgggggacatcgtcgtcatgaccggcggacgcatcggcaaggacggcatccacggagcgaccttttcctcggaggaacttcatgagggttcccctgtgacggccgtccagatcggagaccccatcacccagaagcggatgaccgattttctcctgctggctcgagatcaggggctctaccgggccattaccgacaacggcgccggcggtctttcatcgtccgtgggcgagatggccagtctgtccggcggatgcgaaatcgacctgaaaaaggcgcctctgaaatacgcggggcttcatccctgggaaatcctgatttccgaggcccaggagcggatgaccctggcggtgtatccggacaagatcgacgcctttctgaacctggcggccaaaatgggagtggaggcaacggttctgggtcgtttcaccgattcgggaatgtttcatgtatgctacggcgagcagacagtggcctttcttgatatggagtttctccacgaagggctgccccagatgaagttgaatgcccgctggacgccgccggctttcccggagcccgattttcccgagccggccgatctgggacgcgctctgaaagagatgctgggacgactgaacatctgcagcaaggaatccgttgtccggcagtatgatcacgaagttcagggggggagcgccgtcaaacctctggtgggagctgccgatgatggaccgggagatgccgcggtgctgcgtccgatcctggaatccttcgaagggatcgttgtggccagcggtatctgtccgcgctacagtgatatcgacacttatgccatggccgcatgcgccatcgatgaggcaatccggaacgctgtggccgtcggggcttcattgcgccggatggccgggctggacaatttctgctggtgtgaccccgtggagtcggaaaaaacaccggacggacgctacaaactggcccagctggtccgggccaacgaggctctctacgactatacccggatttacggggtgccctgcatctccggaaaggacagcatgaagaacgattacatgatcggaggaacaaagatctccattcccccgacgctgctcttttccgtcatcgccaggatggacgacgtgcgcagggcggtgacgatggatgccaaacagccgggggatctcgtttacgtcctcggggaaacgcggaaagagctgggcggttcggaatggtatgccctgaacggcttcgtgggcaacagtgtgccgcgggttgatgcccgtaaagcccgcagccgctacgaggccctgtgcggtgcgatggaggccggactggtcgcttcctgccatgactgctccgatggcggtctgggggtagccctggcggaaatcgctttcgccggcggtctgggaatggccgtcgatgtttcccttgcgccgtcggcgggaattacgaggaatgacgatctgctcttttccgaatcccagagccggctggtggtgacggtgtcccccgctgatcgggaagccttcgaatcaatgatggccgattcggaaatggcctgtatcggtcgagtcaccgtggagcagacctttgtggtgaccggattgcagggccgcgtcattatcgaggaagagattgcctccctgaaagaggcctggcagcagacgctgcgggagatgtaa

SEQ ID NO: 52807 - protein, 993 aa, Syntrophus aciditrophicus SB
MISRIEIGFLPGVRDALGEKTRRRIFHDLHLSVENVETIEVYTLEGDLTDELLERIAAGPFSDPVIQRYAVNRSLAFDFDWLIEVGFRPGVTDNVGRTATEAVRLLLEKAANGGLKVYTSRQYLLKGKLTRREVEDIASGLLANELIQRFEIIDGRTWKSGEPVKPYVPRVIVADQPRTEYVDLPDDDAALQEISGSRVLALTVEEMRIIRNYFQDEAVQRRRREAGIGEGITDVELECLAQTWSEHCKHKIFNSLITYEDEHGNSRVIDSLFKSCVKGSTNAIREELGPEDWCLSVFVDNAGIIKFNDEYNLVFKVETHNSPSALDPYGGALTGIVGVNRDPFGAGKGAKLIFNTDVFCFASPFYDQPLPPRILHPRRIYEGVREGVEHGGNKSGIPTVNGCLVFDERFLGKPLVYCGTGGIMPARILGEPSHIKEVQPGDIVVMTGGRIGKDGIHGATFSSEELHEGSPVTAVQIGDPITQKRMTDFLLLARDQGLYRAITDNGAGGLSSSVGEMASLSGGCEIDLKKAPLKYAGLHPWEILISEAQERMTLAVYPDKIDAFLNLAAKMGVEATVLGRFTDSGMFHVCYGEQTVAFLDMEFLHEGLPQMKLNARWTPPAFPEPDFPEPADLGRALKEMLGRLNICSKESVVRQYDHEVQGGSAVKPLVGAADDGPGDAAVLRPILESFEGIVVASGICPRYSDIDTYAMAACAIDEAIRNAVAVGASLRRMAGLDNFCWCDPVESEKTPDGRYKLAQLVRANEALYDYTRIYGVPCISGKDSMKNDYMIGGTKISIPPTLLFSVIARMDDVRRAVTMDAKQPGDLVYVLGETRKELGGSEWYALNGFVGNSVPRVDARKARSRYEALCGAMEAGLVASCHDCSDGGLGVALAEIAFAGGLGMAVDVSLAPSAGITRNDDLLFSESQSRLVVTVSPADREAFESMMADSEMACIGRVTVEQTFVVTGLQGRVIIEEEIASLKEAWQQTLREM

SEQ ID NO: 52808 - DNA, 3006 bp, Anaplasma phagocytophilum HZ
  CDS (1)..(3006): transl_table=11
atgatagtaagtatcgtagttgacaatatattgaatcccgaaaataagcaggtttacacagttagcttgcctcatgaagtcaataaagagctggtagtacgcataggacagctactttctaatgccgtaactgacaaattctacgctttcgtttacgaagacgatgtatatgctccagggctccctgggtatagaaacatggcgtcagaagctccgtatgacatgtttgagattttcaatgctgaatcttccatagaaacagcgtatcttcccggaatgacagataatgtcggagatactgccgcacaaattataagagaatcgttgggcattgagaatgtgcgcgtgcatgcctcagagatttctttttacgaaacatgcaatcccccggcaaaaaattataatcccctggtcaagtactgcaaattagtcacgcacaaccccagtaaaaagctatttaacgtacagttttttggcaatcaacatatagaagaactcaatagggtactggctaaccttaacaaaacaccccaccctataccatacctcagagctattgatatcggtggctcagcaccgtactctcacagcgtttgtagtgttgatttgcatgtcagtgacagtgaattaatgcgaattagtaaagatggaatacaaaacagggggccgttaaacctctctttagacgccttaaaagctataagagcttattttgagaagcataaccgatcacccaatgacattgaattggagactcttgctcaaacctggtcagagcactgcaaacacaatatattttctgcctctatagatgaaattgcgtcaggcctatacaagcattatataaagcgtgctaccacagatataaactcaccgatatgtgtatccacgttctctgacaacgcaggtgcaatagtatttgatgatgacttcttagtagtagacaaagtagaaacacataacagcccctctgccttggacccttttggtggagcagaaaccggaatactcggcgtgaatagagacatcatagggttcggtatgggtgcaaagcctatcatgaacgcctactatttttgcttcgctgaatccctggagcagcctttatacagagacaaagaatgtaaagaatctgtgcttgcgcccacacagattatggatggagtaatattgggcgtaaacacaggaggaaactgttcgggtattcccactgccataggctcgatgtattttcataatcgcttctgtggcaagcctctggtttttgttggaagcacaggaattataccgcgtcatattggagaaaagcctgctcatataaaaaccgtgaaaaacggagattatatagtggtcataggcggtagagtaggaagggatgggattcacggcgccacattctcatcgcatgcccttaaggagaacgtagggtgcaccgtagtgcaagtaggaagccctatcactcagaaaaaactctctgatgccattgtaaaggaggccagggatcgtggcttatataatgctattaccgacaatggtgctggtggtctttcttcttccgtaggcgaaatgggtgaaaaggggttcatagtagatttggaaaaagtcccactaaaaactgacaagataatgccttgggaaatatgggtctccgaatcccaagaaaggatgactctagctgtatctcccgagcaatatcccgctttagaagagcttatgctcaagcatgatgtggaaattcgtgttataggagaatttaacaacactggaaaagcagtagtgcgtcataatggcactgtcataatggatattgatacagatttcctacataacgggaatccagcattgaccttgcacacagaaaagtggcaacctgcttatatccacacaacagtgactcatgacgtaagtatagaggacgatctcctaaacatgatgggacgcaaaaacatttgtagtcgggaatttctagtttctcaatacgatcatgaagttcaggggtcgtctgctataaaaccacttcaaggtaagggacgtatatgtggcgatgcagttgtgttacggcctgtattatcatctacccgcggtgtggttaaggcacaaggattcgggtgtgtgtacgctgaaatcgatccgtataacatggctgcgtgcgctatcgacactgcaatacgcaaccatatatccgtaggcggaaacatagaacacatggctttgatagataatttttgctggtgtgatgcaacaaatcccaaaaggttgtggcagttgaagcaagctgctaaagcgtgttatgactatgctactgcttttggcacaccgtttatctccggaaaagatagcatgttcaatgacttccacggatatgatggcagtggtacatccatacatatttccgctctgccctctcttttggtgtcaacattgggtatcatagaagatgtgagtaacgcgattacacaacacgtcaaaggtccaagccttatatatgttcttggaacgacttacaacgaactaggcatgtctgaataccagctctacagtggtatggggaatgaaaatgtacctagtgttaacgctgaaaatgcaatgttgctttacaagaggtttcatcaagcctctatgagaaaagtgattgcttcagcaattgccccaggtttaggaggactagctacaagtctcattaaatctctcataggcggtcatatgggagcagaaattgatcttagcgccgtcattacctctgacgtaccacaaaatgacatgtgggctaaaacggtgctattctctgaatctcagagtcgtattatcgctactgtaagtgttgaaaatcagcatgagtttgagtctctttttgcagatgtgccctacgctttgataggaagggttataccagaatatgtcttaaagatatcaggcatcaccacaatatctctagaactgttggaaaggaagtataaagagtttagcaacagtcggtataatggtgtgcgtgttgatcaactttaa

SEQ ID NO: 52809 - protein, 1001 aa, Anaplasma phagocytophilum HZ
MIVSIVVDNILNPENKQVYTVSLPHEVNKELVVRIGQLLSNAVTDKFYAFVYEDDVYAPGLPGYRNMASEAPYDMFEIFNAESSIETAYLPGMTDNVGDTAAQIIRESLGIENVRVHASEISFYETCNPPAKNYNPLVKYCKLVTHNPSKKLFNVQFFGNQHIEELNRVLANLNKTPHPIPYLRAIDIGGSAPYSHSVCSVDLHVSDSELMRISKDGIQNRGPLNLSLDALKAIRAYFEKHNRSPNDIELETLAQTWSEHCKHNIFSASIDEIASGLYKHYIKRATTDINSPICVSTFSDNAGAIVFDDDFLVVDKVETHNSPSALDPFGGAETGILGVNRDIIGFGMGAKPIMNAYYFCFAESLEQPLYRDKECKESVLAPTQIMDGVILGVNTGGNCSGIPTAIGSMYFHNRFCGKPLVFVGSTGIIPRHIGEKPAHIKTVKNGDYIVVIGGRVGRDGIHGATFSSHALKENVGCTVVQVGSPITQKKLSDAIVKEARDRGLYNAITDNGAGGLSSSVGEMGEKGFIVDLEKVPLKTDKIMPWEIWVSESQERMTLAVSPEQYPALEELMLKHDVEIRVIGEFNNTGKAVVRHNGTVIMDIDTDFLHNGNPALTLHTEKWQPAYIHTTVTHDVSIEDDLLNMMGRKNICSREFLVSQYDHEVQGSSAIKPLQGKGRICGDAVVLRPVLSSTRGVVKAQGFGCVYAEIDPYNMAACAIDTAIRNHISVGGNIEHMALIDNFCWCDATNPKRLWQLKQAAKACYDYATAFGTPFISGKDSMFNDFHGYDGSGTSIHISALPSLLVSTLGIIEDVSNAITQHVKGPSLIYVLGTTYNELGMSEYQLYSGMGNENVPSVNAENAMLLYKRFHQASMRKVIASAIAPGLGGLATSLIKSLIGGHMGAEIDLSAVITSDVPQNDMWAKTVLFSESQSRIIATVSVENQHEFESLFADVPYALIGRVIPEYVLKISGITTISLELLERKYKEFSNSRYNGVRVDQL

SEQ ID NO: 52810 - DNA, 3024 bp, Ehrlichia chaffeensis str. Arkansas
  CDS (1)..(3024): transl_table=11
atgattatacgcatcggcgtagcagataaagtactaccaaaaagctacaaaagtaatgatgtcacagtttatacaattaatgttcaacataacttaagcacagcaattataaaaaaaataggttctctgctaactaattcaataacacaacaattttttgcattcacatatgatactacagagcaaaattacaaagatgttagtactaatactaactataatctactcgatacctttaaagcagactggtcattagaaaaagggttcttacctagagttactgataatgttggcaatactacaaaatgcataataaatgaaatgcttggatataacacagcaacagatgtattaacgtccaaagtaacattcggacaaggaccaataccacaagaagaaaatattctgcagctattcaatccgttaatagaatattgtaaattgtcctttgtaacaggaaaaacattcaaagtaaaattttttggaaataaacagatatcaaacctaaacaacatatatgctgactcttctacatgcagtagcatattcataataccatatgtcaagtatgaggatcttttcccacaaaacaaaaaacaaaacgttactgttacttccatagatctaaatattcaagatcacgaattaattcaaatcagcaaacatggaattaatggtcgcggagctttaaacttatcattagaggcaatgaaagccattcaagcatactttaaaaaaattcaacgcaatcctaatgatattgaacttgaaacactagcacaaacttggtcagagcattgcaaacataacatcttctcctcacctatagatgaaattacagatggactctataaacattacataaaacgtgcaacatatgaaataaactcagaaatatgcgtatccacattttctgataatgcaggagcaatagtatttgatgataacttcattatcgcagataaagtagaaacacacaatagtccttcagcacttgacccttttggaggagcaattactggaatattaggagtaaatagagatataattggatttggaaaaggagcaaaaccgatattaaatgcttactatttctgcttctccgaatcagacgaagaattatacagagacaagtcctgcacaacaaaagtattatcatctaatacaataatggatggagtaataaaaggtgtaaattatggtggaaactgttctggaataccaacaagtctagggtctgcatactttgataatagatttcgcagtaaaccactggtgtttgtaggatgtactggtattatgccacgtacaattaataaatccttatcacatgtaaaaaatcccaataacggagattacatagtaatagcaggaggcagaactggaagagatggtatacatggtgctactttttcatctaacgcattaacagaacataatagcagcagtacagtagtacaaataggagatcctattactcaaaaaaaattatctgacgcaataataaaagaagctagagatttagatttatacaacgcaataaccgataatggagctggaggattatcttcttctataggagaaatgggtaataatggttttatagtagaattagataaagtgttacttaagcacgataatatgtcaccatgggagatttgggtatcagaatcccaagaaaggatgacctttgctgtttcccctaataaattctcaatatttgaaaaagtgatgaaaaaacatgatattgaaattagcattatcggagaattcaataatagcaataaagcagtagtactatttaaagggtctgttattatggatatagatgtagattttctacacaatggtgttccaaaaatccacttacatactagtccatggtcaaaaactacagaatcaatattccctaaaaagcacaataaaccattagaaattgagttgaacgagatgatacaaagaatgaacatatgcagtaaagaattcatatctttacaatatgatcatgaagtacaaggtacatccataatcaaacctattcaaggcaaaggaagagtcaatggtgatgcaacagttattaaaccaatattatcatcaaaaaaaggaatagtgaaatcacacggactaggatcaagttatggagaaataagcacatatcacatggcagcctgtgcaatagacactgccatacgtaactatattgcagtaggaggaaatttcaatcacttagcattattagataacttctgctggtgtgactcaacaaatccacaaagattatggcaattaaaaaatgcagcacaagcatgttatgactatgctatagcatttagaacaccttttatttctggtaaagacagtatgtttaatgactttaaagggtataataacaaaggcaaagaaattaatatttccgcacccccttcattgttaatttctactcttggaatcattgaaaatgttgagaatgctgtaacacttgatgtcaaaagcccaggagacttaatatacatattaggtacaacttatgatgagcttggaagttctgaatatcaaaaatacagtggtctaggaaataataatgtaccacaagtacacgccgaacatgctaaaaaattatacatatcttataacaaagccatcaatacaaatcttatagcatcagcaattgcagtcaacttaggaggcatgataataagtttaataaaatcacttattggaggacaacttggagctgagattagcttatcagcaataccaacatataatattgacaacaacactttaagagaaaaagtcattttattttcagaatcacaaagcaggatcttagtaacaataggagaacacaataagcaaaggtttgaagcaatatttaaagaagttccatatgcaaacataggcaaagtaacctctacaaacactcttattatagaagatatatgttctattgatttaaacatacttgaacacaattacaagaaattcagtaatatgaaaatacaatcatacacaaatatatga

SEQ ID NO: 52811 - protein, 1007 aa, Ehrlichia chaffeensis str. Arkansas
MIIRIGVADKVLPKSYKSNDVTVYTINVQHNLSTAIIKKIGSLLTNSITQQFFAFTYDTTEQNYKDVSTNTNYNLLDTFKADWSLEKGFLPRVTDNVGNTTKCIINEMLGYNTATDVLTSKVTFGQGPIPQEENILQLFNPLIEYCKLSFVTGKTFKVKFFGNKQISNLNNIYADSSTCSSIFIIPYVKYEDLFPQNKKQNVTVTSIDLNIQDHELIQISKHGINGRGALNLSLEAMKAIQAYFKKIQRNPNDIELETLAQTWSEHCKHNIFSSPIDEITDGLYKHYIKRATYEINSEICVSTFSDNAGAIVFDDNFIIADKVETHNSPSALDPFGGAITGILGVNRDIIGFGKGAKPILNAYYFCFSESDEELYRDKSCTTKVLSSNTIMDGVIKGVNYGGNCSGIPTSLGSAYFDNRFRSKPLVFVGCTGIMPRTINKSLSHVKNPNNGDYIVIAGGRTGRDGIHGATFSSNALTEHNSSSTVVQIGDPITQKKLSDAIIKEARDLDLYNAITDNGAGGLSSSIGEMGNNGFIVELDKVLLKHDNMSPWEIWVSESQERMTFAVSPNKFSIFEKVMKKHDIEISIIGEFNNSNKAVVLFKGSVIMDIDVDFLHNGVPKIHLHTSPWSKTTESIFPKKHNKPLEIELNEMIQRMNICSKEFISLQYDHEVQGTSIIKPIQGKGRVNGDATVIKPILSSKKGIVKSHGLGSSYGEISTYHMAACAIDTAIRNYIAVGGNFNHLALLDNFCWCDSTNPQRLWQLKNAAQACYDYAIAFRTPFISGKDSMFNDFKGYNNKGKEINISAPPSLLISTLGIIENVENAVTLDVKSPGDLIYILGTTYDELGSSEYQKYSGLGNNNVPQVHAEHAKKLYISYNKAINTNLIASAIAVNLGGMIISLIKSLIGGQLGAEISLSAIPTYNIDNNTLREKVILFSESQSRILVTIGEHNKQRFEAIFKEVPYANIGKVTSTNTLIIEDICSIDLNILEHNYKKFSNMKIQSYTNI

SEQ ID NO: 52812 - DNA, 3873 bp, Francisella tularensis subsp. holarctica
  CDS (1)..(3873): transl_table=11
atgattacgatttttgaaggtttaagtgcactgtctccttttaagcgagaaaaaattttagcagctgctaaaaaaatatccaataaagttgaatcagtatctgcacagtatatccatgttacagagcttgaatcagagttaaatagtgagcaagaaagaatagttaaatctctacttaactacaatagagagtatggcatagctcaacctatgggtcatacttttatcatagctccaatagttggcactatatcgccttggtcttctaaagctaccgatattatcaaaaatactggtatcaaagctgttaaaaggatagaaagagctattttattcggtgttgagggacaagtttctgctagtgagctaaaacaaatccaagatatcgttcatgaccgtatggttgaggaagtgtttagttgcaaagatgatttatatagactctttagtgtaacagcaccaaaagaacttgaatttgttaatgttttagaaaaaggtgctcaagctatcaaagaagctgatagaaaacttggcttagctctaagtgagcaagagattgaatatctagcagatgaatatacaaagcttggtagaaatcctacagatacagagttatatatgtttgcccaagcaaattcggagcattgtagacataagatttttaatgctaaatggactatagatggtcaggagcaagataaatcattgtttaagatgattagaaatactactgagaaatctccacaaggtgtgctatcagcatataaggataatgctgctgtgatagagggtgcaacggctcaaagattctatccaaatacgcaaaatggtgtctatagtttcaatcaagaagaagttgatatcttgatgaaagttgagactcataatcacccaactgctatagcaccatttagtggctcagctactggtgttggtggtgagattcgtgatgaaggtgcaacaggtcttggagcaaaaccaaaagctggcttgactggttttacagtttcaaatctaaatattccaggttttgaacaggcttgggagactagtaaatatggtaagcctaaccatattgtaacacctttacaaataatgctagaggcgcctattggtggtgctcattactcaaatgaatttggtcgtccaaatttaaatggttatttccgtacctatgagcaagaggtcaatacatctgctggcaaagagatgtttggataccataagccaattatgattgctggtggtatgggtaatatcaaaagaatgcatgttgagaaaggcgatatcaaagttggtgctaagctaatctgtcttggtgggcctgcgatgcgtattggtcttggtggtggtgctgcgtcatctgttgtatcttctgatactaactcagagctggattttgcatcagttcagcgtgataatgccgaaatggagcgccgttgccaagaggtaatcgacagatgttggcaaatgggcgagaataacccaatcacatttatccatgatgttggtgctggcggtatttcaaatgctttcccagagcttgtcaaagatggtggcgtaggcggttattttgagcttagaaaagtaaatgtcggtgaagaggggctttctccactggaaatatggtcaaatgagtcacaagaaagatatgtattatcagttgaccctgagtcactagagctttttgagcagttatgtaatagagaaagatgtccatttgcagtagttggtgaggcgatttctgaaaagcatatcactctaaatgatgagtattttgataataagccggttgatttaccaatgggattattatttggtaatacaccacaaatgcatattgatgtaaaaactgtcaaagttgagcaacaagcttttgatacaagtgctattaagcttgatgaagcgattgagaaagtgctaaaagtaccagctgtagcttctaaatctttcctaatcacaattggtgatagaagtattacaggtatggttgcacgagatcaaatggttggtccatggcaagtgcctgtagctgattgtgctgtgacaactgctactgtagatagtcaagctggtgaggctatggcaatgggcgagagaactcctgttgctgctattaatgctgcggcttctggtagattagcgattgctgagactgtaacaaacttattagctgcggatattgaaaagttgagtgacattcgcctctctgctaactggatggttgctgcaaatcaaggtgacgaaaaccaaaaattatatgaaactgtaagagctgttggtatggaatttgcaccagcgttgggtattgcaataccagttggtaaagattcaatgtcaatgaaaactaagtggtcagataacggtcaagctaaatcagtgacatcgccattatcgttagtgatctcaggtttctcgcctgtgacaaatgcgcgtaagactcttacaccagttttagttgatgataatgatacaactttattacacattgatctatcaaatggtgccggtagacttggggcttcatgtttagctcaagcttataatcaagttggtaatgttgcgccagatattgaagcaagtaaggtaaaagtgctatttgaaaatatcactaaactaaaagctgaaaataaaattttagcatatcatgatgtatctgatggtggtgtgtttgcaactttagcagaaatgtcatttgcagggcgtaaaggtttagatgttaaactacaaactcaagatgtgttagcgaaactctttgccgaggaagttggagttgttatccaagttcgaaatagcgatgtatcactagttgaagagatgtttaaagatactcaaattcacctgtgtgcaatagctaagctaaactctagtgatgagctaaatatctttgcaaatggtgaaaaaatatactcaaacacacgtgtaaatttacaaagatggtgggctgagacttcttatcaaatccaatcaattcgtgataatagcgaatgcgctaaacaagagttcgatagtatcttaaatactaatgataaaggtatccatgttgaggctacatttgatcttgaagaggatatcacagctaagtttgtcaatgttgaaaagccaaaagttataatcttaagagagcaaggtgtcaatggtcaagttgagatggcagcagcatttactacagctggctttgaggctcatgatgtccatatgtcagatttacatgctgggcgtgtaactttggcagatttcaaagtattggtagcttgtggtggtttctcatatggtgatgtcttgggcgctggcggtggctgggcgaagaatatcctctttactgagaagctaagagatgagtttagtagattctttgggcgcgatgatactttagcattaggtgtatgtaatggttgccaaatgcttgcacagcttaaatcactaatcaaaggcgctgaaaactggccgatatttatcaagaataaatcagagcagtttgaggctagagtgtctatggttgagattcaagagtctgactctatttggttcgctgatatggcatgcacaaaagcaccaattgctgtagctcatggtgagggtcgcccattatttgaaaatgacaaccagcaacaagctatgctagcaagtgctcaagtagctcttaaatatattgatgggcaaggtcaagcaactgagatgtatccatacaatccaaatggtgcagtaaatggtctaacagctgtgacagctttagatggtcgtgtccttgcgatgatgccacatccagagcgtgtgtatagagctattacaaactcgcatatcccagcggaatatgatgagtattctgtatggatgagaatgtttagaaatgctaggaagtgggttggataa

SEQ ID NO: 52813 - protein, 1290 aa, Francisella tularensis subsp. holarctica
MITIFEGLSALSPFKREKILAAAKKISNKVESVSAQYIHVTELESELNSEQERIVKSLLNYNREYGIAQPMGHTFIIAPIVGTISPWSSKATDIIKNTGIKAVKRIERAILFGVEGQVSASELKQIQDIVHDRMVEEVFSCKDDLYRLFSVTAPKELEFVNVLEKGAQAIKEADRKLGLALSEQEIEYLADEYTKLGRNPTDTELYMFAQANSEHCRHKIFNAKWTIDGQEQDKSLFKMIRNTTEKSPQGVLSAYKDNAAVIEGATAQRFYPNTQNGVYSFNQEEVDILMKVETHNHPTAIAPFSGSATGVGGEIRDEGATGLGAKPKAGLTGFTVSNLNIPGFEQAWETSKYGKPNHIVTPLQIMLEAPIGGAHYSNEFGRPNLNGYFRTYEQEVNTSAGKEMFGYHKPIMIAGGMGNIKRMHVEKGDIKVGAKLICLGGPAMRIGLGGGAASSVVSSDTNSELDFASVQRDNAEMERRCQEVIDRCWQMGENNPITFIHDVGAGGISNAFPELVKDGGVGGYFELRKVNVGEEGLSPLEIWSNESQERYVLSVDPESLELFEQLCNRERCPFAVVGEAISEKHITLNDEYFDNKPVDLPMGLLFGNTPQMHIDVKTVKVEQQAFDTSAIKLDEAIEKVLKVPAVASKSFLITIGDRSITGMVARDQMVGPWQVPVADCAVTTATVDSQAGEAMAMGERTPVAAINAAASGRLAIAETVTNLLAADIEKLSDIRLSANWMVAANQGDENQKLYETVRAVGMEFAPALGIAIPVGKDSMSMKTKWSDNGQAKSVTSPLSLVISGFSPVTNARKTLTPVLVDDNDTTLLHIDLSNGAGRLGASCLAQAYNQVGNVAPDIEASKVKVLFENITKLKAENKILAYHDVSDGGVFATLAEMSFAGRKGLDVKLQTQDVLAKLFAEEVGVVIQVRNSDVSLVEEMFKDTQIHLCAIAKLNSSDELNIFANGEKIYSNTRVNLQRWWAETSYQIQSIRDNSECAKQEFDSILNTNDKGIHVEATFDLEEDITAKFVNVEKPKVIILREQGVNGQVEMAAAFTTAGFEAHDVHMSDLHAGRVTLADFKVLVACGGFSYGDVLGAGGGWAKNILFTEKLRDEFSRFFGRDDTLALGVCNGCQMLAQLKSLIKGAENWPIFIKNKSEQFEARVSMVEIQESDSIWFADMACTKAPIAVAHGEGRPLFENDNQQQAMLASAQVALKYIDGQGQATEMYPYNPNGAVNGLTAVTALDGRVLAMMPHPERVYRAITNSHIPAEYDEYSVWMRMFRNARKWVG

SEQ ID NO: 52814 - DNA, 3873 bp, Saccharophagus degradans 2-40
  CDS (1)..(3873): transl_table=11
atgctgatcctgcctggcgctcccgccctgtctgattttcgacttcaaaaacttttacagcgttgcaccgatttaggtatagccgttaccggcttaagcgcagactacgtgcaccttatcgatgtggagagcgaacttagccaagatgagcacgaaacattggttaaattgcttacttacgggcctaaaattgaggccgcaagcgtagaaggggtagagctagttgctgtaccgcgcccaggcacaatatctccgtggtcctctaaggcaacagatatcgctaaaaatgcaggtcttaccaaggtacgtcgcattgagcgcggtattcattaccgtattgccgcaggtgccagccaagccgcactagagcaaattaagccactgctatttgaccgcatggtggaatcgttattaaacagccccgaagagggcgctgctttattccgcgcagagtctcctaagcctttaagctacgtagatattcttggtgctggccgccaagcgttggtagaagctaacggtactttaggtttggcgcttgccgaagatgaaatagattaccttgttgaatcgttcgaaggcttgggccgcaaccctaccgatgtagagctgatgatgtttgctcaagcgaactccgagcattgccgccacaaaatattcaatgcgagctggactatcgatggcaaagaaatgccgcgctcactgtttaaaatgatcaaaaacacctacgaactcggtggcgaaaacgtattgtctgcctatgcagataacgcctctgtagtaaccggtagtgtagcggggcgatttttccccaacccagaaactaaaacgtttgcttataccgaagagccaattcatctgttgatgaaagtggaaacgcataaccacccaactgccattgcgcctttccctggtgcgggtactggttcggggggcgagattcgcgacgagggtgcagttggtaaaggctctaagccaaaggcgggcttgagcggctataccgtatcgaacttacaaattccagattacaccttgccttgggaaaccccctacggcaaacccgatcgcattgtgaacgcgctagatattatgattgaaggcccaataggcggcgctgcgtttaacaatgagtttggtcgcccgaatatctgtggttacttccgtacctttgaagaagacttcgacggcgagcgtcgtggttaccacaagcccatcatgttggccggtggttacggcaatattcgcgaagaacatattgcgcaaaccgaatacgatgcgggcagtaagctggttgtattgggcggcccagctatgttgattggcttaggcggtggtgctgcatcttctatggcatctggtagctctagcgaagatctcgattttgcgtcggtacagcgccaaaacccagaaattgaacgtcgttgccaagaagtgatcgaccaatgctggcagctaggtgaaaataacccaatcgcctttattcacgatgtgggtgcaggtggtttatctaacgccttcccagagcttgctaaagatggtggctgcggtgcaatttttgatatccgtaaagtgcctaacgacgagccaggtatgtcgccattagaaatatggtgtaacgaatcgcaagagcgttacgtaatggctataccgccagagcgtttagcccaattcgaggcgatttgtgagcgtgagcgttgcccttacgccgttgtgggcgaagcaataagcgagcaaacactgcaggtaaaagacaccctattgaatgcaaacccagtcgacctgcctatgagtgtgttgtttggcaaagcgcctaaaatgcaccgcacagcagaaacacgcacctataacacgccagaatttgatattactggtttaagtgtacaagacgctgccgagcgcgttattcagcacccagcagtggcaagtaagcagttccttattacaattggtgaccgctccgtaaccggtcaggttgtgcgcgatcaaatggtaggcccgtggcaagtgcccgtggcagactgcgcggtaactacagtaagttacgatagcttcgctggtgaagctatgagcatgggcgagcgtacgccgctggcgcttattgatgctcccgcttctggtcgcatggcggtgggcgaagccattacaaacattgccgccacccgtattggcgacataaaagatattaaactttcagccaactggatgtgtgctgcaggccacccaggtgaagatgccaagctatacgagaccgtagaagctgtaggtatggatatttgcccagcgttgggcttaaccattcctgtgggtaaagactccatgtctatgcgtaccgcatggcaggaaaacggcgaagataaatcggtaacctcaccgctatctgtagtcatttctgcttttgcgcccgttgtcgatgtgcgcaaaacacttactcccgaattaaaaaccgtagccaacaaaatactacttgtagacctcgctgcaggtgagcagcgtttaggcggttctatactggcgcaggtgtacaatcaaataggcaccggcgcgcccgatgtcgataacgccgctagcttaaaagcgttttttaacgcaatgcaggcgtgtttagagcaagacttgctacttgcctatcacgatcgcagcgatggtggcttatatgcagccttagctgaaatgtgttttgctggccgctgcggcgccacagtagatattgccgctcaagtagcgaacggctctgaattaggtgccttgtttaacgaagagttgggcgcgttgctgcaagttgctagcgataaactggctacagtagaagctatattcgagcagcacggcttgggtacatcgcttagcgtattaggtgaagctaccgccaatgaaaatattattttcaataatggtgatgcaacggtacttaatcaaacgcgtgcagcactgcaaaaactgtggagcctgacgagttacaacgtgcaaaagctgcgcgataacccagagtgtgccgagcaagaatttgccgcaatagaagctaagaatacaggcttaataaacaaactaagcttcgacccgcaacaagatattgctgcaccttatattgccaaaggcgttaagcctagcgttgcaattttacgtgagcagggtgtaaacagccaaaacgaaatggctgcagcatttgaccgcgcaggctttagcgccgtagacgttcatatgagcgatatcctaagtggtcgtgttagcttagagcaatttaaaggcctagccgcttgcggtggtttctcttacggtgacgtactgggtgccggcgaaggttgggcaaaaaccattttgtttaatgcccaagcgcgcgatcaattccaagcgttttttaaccgcgaagataccttcagtttaggtgtgtgtaacggttgccaaatgctctctaacttgaagagcttaattcctggtaccgagctgtggccacatttcgtgcgcaacgtatcggagcagttcgaagcgcgctttagcttagttaaagtagagcagtctgcttctgtattgctaggtgatatggcaggctcttatttgcctgttgctgtatctcacggtgagggtcgtgccgagtttgccaatagcgctgctgtaagcgccttagaaagctctggcaccgttggtatgcgctttgttacttccgaccttgcaaccgcaaccacttacccggccaaccccaatggttcgcctaacggcattacagggttgtgttcggcagaaggtcgcaccactattatgatgccgcacccagagcgtgttttccgcaaagttacaaactcgtggaatgatggcgaagcaggcgagtacagcggttggatgcgattattccgcaacgcgagagtatttgtagattaa

SEQ ID NO: 52815 - protein, 1290 aa, Saccharophagus degradans 2-40
MLILPGAPALSDFRLQKLLQRCTDLGIAVTGLSADYVHLIDVESELSQDEHETLVKLLTYGPKIEAASVEGVELVAVPRPGTISPWSSKATDIAKNAGLTKVRRIERGIHYRIAAGASQAALEQIKPLLFDRMVESLLNSPEEGAALFRAESPKPLSYVDILGAGRQALVEANGTLGLALAEDEIDYLVESFEGLGRNPTDVELMMFAQANSEHCRHKIFNASWTIDGKEMPRSLFKMIKNTYELGGENVLSAYADNASVVTGSVAGRFFPNPETKTFAYTEEPIHLLMKVETHNHPTAIAPFPGAGTGSGGEIRDEGAVGKGSKPKAGLSGYTVSNLQIPDYTLPWETPYGKPDRIVNALDIMIEGPIGGAAFNNEFGRPNICGYFRTFEEDFDGERRGYHKPIMLAGGYGNIREEHIAQTEYDAGSKLVVLGGPAMLIGLGGGAASSMASGSSSEDLDFASVQRQNPEIERRCQEVIDQCWQLGENNPIAFIHDVGAGGLSNAFPELAKDGGCGAIFDIRKVPNDEPGMSPLEIWCNESQERYVMAIPPERLAQFEAICERERCPYAVVGEAISEQTLQVKDTLLNANPVDLPMSVLFGKAPKMHRTAETRTYNTPEFDITGLSVQDAAERVIQHPAVASKQFLITIGDRSVTGQVVRDQMVGPWQVPVADCAVTTVSYDSFAGEAMSMGERTPLALIDAPASGRMAVGEAITNIAATRIGDIKDIKLSANWMCAAGHPGEDAKLYETVEAVGMDICPALGLTIPVGKDSMSMRTAWQENGEDKSVTSPLSVVISAFAPVVDVRKTLTPELKTVANKILLVDLAAGEQRLGGSILAQVYNQIGTGAPDVDNAASLKAFFNAMQACLEQDLLLAYHDRSDGGLYAALAEMCFAGRCGATVDIAAQVANGSELGALFNEELGALLQVASDKLATVEAIFEQHGLGTSLSVLGEATANENIIFNNGDATVLNQTRAALQKLWSLTSYNVQKLRDNPECAEQEFAAIEAKNTGLINKLSFDPQQDIAAPYIAKGVKPSVAILREQGVNSQNEMAAAFDRAGFSAVDVHMSDILSGRVSLEQFKGLAACGGFSYGDVLGAGEGWAKTILFNAQARDQFQAFFNREDTFSLGVCNGCQMLSNLKSLIPGTELWPHFVRNVSEQFEARFSLVKVEQSASVLLGDMAGSYLPVAVSHGEGRAEFANSAAVSALESSGTVGMRFVTSDLATATTYPANPNGSPNGITGLCSAEGRTTIMMPHPERVFRKVTNSWNDGEAGEYSGWMRLFRNARVFVD

SEQ ID NO: 52816 - DNA, 3894 bp, Methylobacillus flagellatus KT
  CDS (1)..(3894): transl_table=11
atgtccagcccaatgatcagtcttcgtggcagtgccgctttatctccgttccgtatcgagaaaatcctggctgcgctgaaaggttcagcgccgcgcatcacgcatttgtacgcagaattctggcatttcgcctggtctgaccagccactgagcgaggcgcagcaggaggtgttgaagcagatcctgacctatggaccgcgcatgagcgaagaggcgccggcgggcgagctgttcctggtgattccgcgccccgggacgatttctccctggtcctcacgcgccacggatattgcgcgccattgcggcatcgaggccatccagcgcctggaacgcggcattgcgttttacgctgccactgccgatggcagcccgctcacggatgcggaaaaagctgcattgcgacctttgattcatgaccgcatgacagaggcggtgtttgcctccctgacagatgcgcaaaagctgtatcacacggcagagcccgcgcccttatccactgtggatatcctctccggcggcaaggccgcgctggaggccgcgaatgccgagatgggcctggcgctttccccggatgaggtggattacctgatagagaatttccaacgcatgggccgcaacccgaccgatgtggaactgatgatgtttgcacaggccaattccgagcactgtaggcataagattttcaatgcagactgggtgatcgacggtgtggcacaggcacagtctctgttcggcatgattcgcaatacacacaagctcaaccctggcaagacggtagtggcctatgccgacaatgcatccatcgtcgagggtggcaagaccaagcgcttctatccgctggcggatggccaatacggctttgtggaagaggatatgcatttcctcatgaaagtggaaacccataaccacccgaccgcgatctcgccatttgcgggtgccgcgaccggtgcgggcggagaaatacgcgacgagggtgcgaccggatccggctccaagcccaaggccggcctgaccggtttctcggtgtccaatctgcatatccccggcttcaagcagccctgggagcataacaatggcaagcccgaccgcatcgcttcggcattgcagatcatggtggacggcccgttgggcggggcggcctacaacaatgagttcggccgtccgaatatcgcaggttatttccgcaccctggaaattgagtccgcaggagaaattcgcggctatcacaagcccatcatgcttgcgggcggtgtgggcaatatctctgccaggcatgcgaagaagaacccgattcccccgggggcggcgctgatccaactaggtggccccgcgatgctgatcggcctggggggcggtgcggcatcaagcatggataccggggctaataccgagaacctggatttcgattccgtgcagcgcggcaaccccgagctggagcgccgtgcgcaggaggtcattgaccgttgctggcagttgggcgacaagaacccgatcctgagcatacacgacgtcggcgccggcggcatttccaatgccttccctgagctggtgaacgatgccggcgtgggcgcgaggttccagttgcgcgatgtgcacaacgaggagcccggcatgtcgccgcgcgaaatatggagcaatgaggcgcaggagcgctacgtgatggcggtacgcaaggaggatttgccattgtttgcggaaatctgcgaacgcgagcgctgcccatttgccgtggtaggcgaggcgaccgaggagaagcgcctggtcgtgtccgatcgtcatttcggcaataccccggtggacatggatttgtccgtgttgctgggcaagccgcccaaaatgacgcgggacgtccagcatgtggcgcgtgagctgccagccttcgatcattcccgcatcgacttgaaggaagctgcccagcgtgtgctgcgcctgcctggcgtggcggacaagactttcctgatcaccattggtgaccgctctgtgaccggcatgatcgcgcgcgaccagatggtcggtccctggcaagtgccagtggctgatgtcgcagtgacactggatggtttcgagacttatcgcggcgaggccttcgccatcggtgaaaaagcgcccctggcgctgattgacgcacctgcttcgggccgcatggcgattggcgaggcgattaccaatatcgctgccagcctgatcgaggatattgcagacctcaagctttccgccaactggatggcgcctgccggccacccgggtgaagatgctgccttgttcgataccgtcaaggccgtgggtatggagttgtgtccgcaactgggcatcagcattccggtcggcaaggattccatgtccatgaagaccgtgtgggaagagcgcaatgaaaagaaggcggtgactgcgcctatatcgctggtggtcactgcctttgccccaacggccgatgcgcgtaagaccttgacgccgcagctgcgcactgacttgggcgatacccgcctgctcctgatcgacctgggtgcgggcaggaatcgcctgggtggctctgcccttgcgcaggtctatggcagtgtcggcaatgtggcaccggatgtcgaggatgcggacagcctcaagcattttttcaatgccgtacagaagcttaaccgtgaaggccgcctcttggcctatcatgaccgatccgatggcggcttgtttgccactgtggtggaaatggcctttgccggacgtaccggcctggagctcgacattgccagccttggcgaggatgccgtggcagtgctctataacgaagaactgggtgccgtattgcaggtgcgtgctgccgacctggacgccattaccgccgagctggagacaaccctgcgcggtaaggtccatgtgatcggcgcgcctgccagccatggcgatattgtgatccggcaaggcactaagctggtgtttgccgaaagccgcgtggcattgcaccgtgcctggtcggaaactacctaccagatgcagaagctccgcgacaatccagtatgcgcgcagcaggaatatgaccgcttgttggacgagcgcgatgccggcctgcatgccaagctcaccttcgacatcaacgagaatattgccgcaccttatatcgcttcgggcgcgcgccccaagatggcgatcctgcgcgaacagggcgtcaatgggcaggtggagatggcggcggcattcgatcgcgctggcttcaatgctttcgatgtgcacatgagcgacattatcagcgggcgtgtcagcctcaaggatttcgccggcttcgttgcctgtggcggcttttcctacggagacgtgctcggtgccggtgagggctgggccaagtccatcttgttcaatccgcgtgcgcgcgacgagtttaccgcattcttcaaccggacggattcgttcgcgctgggcgtctgcaacggttgccagatgatgagcaacctgcacagcattattcccggtgccgggcactggccgcattttgtgcgtaaccgttccgagcagttcgaagcacgtgtcgccatggtggaagtgctggactcgccatcgctgttcttcaacggtatggctggcagccggatgccgatcgccgtggcgcatggcgaagggtatgccgaatttgccgatgcagcagcgcagcaacgcgcacaagatgcgcgattggtgacgctgcgctatgtcgataatagcgggcttccgaccgaagtatatccatttaacccgaatggctcgcctcagggaattaccggcctgactaccgctgatggccgtttcagtattatgatgcctcatcctgaacgggttttccgcaccgtgcagcactcctggcatcccgatggttggggtgaggatgggccgtggattcggatgttccgcaatgccaggaagttcattggctag

SEQ ID NO: 52817 - protein, 1297 aa, Methylobacillus flagellatus KT
MSSPMISLRGSAALSPFRIEKILAALKGSAPRITHLYAEFWHFAWSDQPLSEAQQEVLKQILTYGPRMSEEAPAGELFLVIPRPGTISPWSSRATDIARHCGIEAIQRLERGIAFYAATADGSPLTDAEKAALRPLIHDRMTEAVFASLTDAQKLYHTAEPAPLSTVDILSGGKAALEAANAEMGLALSPDEVDYLIENFQRMGRNPTDVELMMFAQANSEHCRHKIFNADWVIDGVAQAQSLFGMIRNTHKLNPGKTVVAYADNASIVEGGKTKRFYPLADGQYGFVEEDMHFLMKVETHNHPTAISPFAGAATGAGGEIRDEGATGSGSKPKAGLTGFSVSNLHIPGFKQPWEHNNGKPDRIASALQIMVDGPLGGAAYNNEFGRPNIAGYFRTLEIESAGEIRGYHKPIMLAGGVGNISARHAKKNPIPPGAALIQLGGPAMLIGLGGGAASSMDTGANTENLDFDSVQRGNPELERRAQEVIDRCWQLGDKNPILSIHDVGAGGISNAFPELVNDAGVGARFQLRDVHNEEPGMSPREIWSNEAQERYVMAVRKEDLPLFAEICERERCPFAVVGEATEEKRLVVSDRHFGNTPVDMDLSVLLGKPPKMTRDVQHVARELPAFDHSRIDLKEAAQRVLRLPGVADKTFLITIGDRSVTGMIARDQMVGPWQVPVADVAVTLDGFETYRGEAFAIGEKAPLALIDAPASGRMAIGEAITNIAASLIEDIADLKLSANWMAPAGHPGEDAALFDTVKAVGMELCPQLGISIPVGKDSMSMKTVWEERNEKKAVTAPISLVVTAFAPTADARKTLTPQLRTDLGDTRLLLIDLGAGRNRLGGSALAQVYGSVGNVAPDVEDADSLKHFFNAVQKLNREGRLLAYHDRSDGGLFATVVEMAFAGRTGLELDIASLGEDAVAVLYNEELGAVLQVRAADLDAITAELETTLRGKVHVIGAPASHGDIVIRQGTKLVFAESRVALHRAWSETTYQMQKLRDNPVCAQQEYDRLLDERDAGLHAKLTFDINENIAAPYIASGARPKMAILREQGVNGQVEMAAAFDRAGFNAFDVHMSDIISGRVSLKDFAGFVACGGFSYGDVLGAGEGWAKSILFNPRARDEFTAFFNRTDSFALGVCNGCQMMSNLHSIIPGAGHWPHFVRNRSEQFEARVAMVEVLDSPSLFFNGMAGSRMPIAVAHGEGYAEFADAAAQQRAQDARLVTLRYVDNSGLPTEVYPFNPNGSPQGITGLTTADGRFSIMMPHPERVFRTVQHSWHPDGWGEDGPWIRMFRNARKFIG

SEQ ID NO: 52818 - DNA, 4086 bp, Burkholderia xenovorans LB400
  CDS (1)..(4086): transl_table=11
atggcccacttctcgtgtttccccggcgcttcggccctttccgatttccgtcaaacccgcctgctcgaaacgcttacgcgcatcgacccgaacatcaccggcgtgcgcggacaatatctgcacttcgtcaacgcccagacaccgctttccgctgaagacaacgcgaagatcgaagcgctgatgcattacggccagccgctcgaagaaagcaaggagcgcggcacggccgaggccttcctcgtggtgccgcgtttcggcacggtgtcgccgtgggcgagcaaggcaacggatatcgcgcatctgtgcggtctcacgcaggtgcgccgcatcgagcgcggcgtcgagtacacggtgacgctgaaaagcggcctgctgggcggcaggaaggcgctttccgacgaagcccgcgcggctgtcgcggcggccttgcacgaccgcatgaccgaaagcgtgtcgccttcgcgcgaccacgcattgcatctgttcgacgaactgccggccaagccgctgcaaaccgtcgacgtgctcggccacggccgcggcgcgctggtcgcggcgaacacggaactgggcctcgcgctcgccgaggacgaaatcgactacctggtcgacgcgttcacgaagctcggccgcaatccgactgacgtcgaactgatgatgttcgcgcaggccaacagcgaacactgccgccacaagattttcaacgccgattggaccatcgacggcgagaagcaggacatctcgctcttcaacatgatccgcaacaccgagaagctgaatccgcagggcacgatcgtcgcgtattcggacaactcggcgatcatggcgggcggcatggccgagcgctggttcccgcgcacgccggccaatctcggcgcgagcgagctgcccgagcactaccgccgcagcaccgaactcacccacaccttgatgaaggtggaaacgcataaccacccgaccgcaatttcaccgttcccgggcgccgcgaccggcgcgggcggcgaaatccgcgacgaaggcgcgaccggccgcggcgcgcgtcccaaagcgggtctggcgggcttcacggtgtcgaatctggaactgccggacggcgtcgaagcatgggaaaacgcacgcgacgccgcgcagccgctcgcgcaccgcaatccgggcgacaagcacgaagcgtacggccggcccgatcgcatcgcttcgccgctgcagatcatgatcgacggcccgctcggcggcgccgcgttcaacaacgaattcggccggcccaacctgggcggctatttccgtgcttacgagcagaacgtcgcgggtctggtgcgcggctatcacaagccgatcatgatcgccggcggcatcggcaatatctcggaccagcacacgcacaagcacgatctgccggagggctcgctgctgatccagatcggcggtcccggcatgcgcatcggcatgggcggcggcgccgcgagctcgatggcgaccggcaccaacaccgctgaactcgatttcgactcggtccagcgcggcaacccggaaatcgaacgccgcgcgcaggaagtcatcaatgcgtgctggcagctcggcgagaagaacccgattctgagcattcacgacgtcggcgcgggcggtctttcgaacgccttcccggaggtggtcgatggcgcgggcaagggggcgcgcttcgacctgcgcaaaatccagctggaagagagcggcctgtcgccgcgcgaaatctggtcgaacgaagcgcaagaacgctacgtgctggccatcgcgccggccgatctgccggcgttcgaggccatgtgccagcgcgagcgctgcccgttcgccgtgatcggcacggccaccgccgagcgtcaactcaagctgatcgactccgaactgaacgacgacaacgcgcaccagccggtcgacatgccaatggaagtgctgctcggcaaggcgccgcgcatgcatcgcgacgtcaaacgcgtcgagcggaagctcgaaccggtggatgtcaccggcctcgtgctggcggatgtcgcgaccagcgtgctgcgtcatcccacggtggcgagcaagtcgttcctgatcacgatcggcgaccgctcggtgggcggcacgaccgcgcgcgaccagatggtcggcccgtggcaggtgccggtggccgacgtcgcgatcacgacgatggactacgcgggctttcgcggcgaagccatgactatggccgagcgcacgccgctcgccgtgatcgacgcgccggcgtcgggccgcatggcggtcggcgaggcggtgaccaacatcgcggcggcgccgatcgcgtcgctcgacaagctcaagctgtcggccaactggatggccgcgtgcggcgcagcgggcgaagacgccgcgctgtacgacacggtcaaggcgatcggcatggaattgtgcccggcgctcggcatcagcattccggtcggcaaggattcgctgtccatgcgcaccaagtgggaagaccgcggcgtcgcgaaagaagtggtcgcaccggtctcgctgatcatctcggcattcgcgccggtcgaagacgtgcgccgccacctcacgccgcaactgcgccgcgcgagcgacgtgggcgagtcggtgctgatcgcgatcgaccttggccgcggcaagcatcgtctgggcggcagcattctcgcgcaggtcacccagcaggtcggtgacacggtgccggacgtggacgacccggaagacctgaagcgtttcttcgccgcgatccaggcgctgaaccaggacggcaagctgctcgcctatcacgaccgttcggatggcggcctgtgggcgaccgtgtgcgaaatggcgttcgcggggcacgtgggcgtgtcgctgaacgtggacatgctggtgctcgatccgaaccacgaatccgactacggcgacgccaaagactgggcgaagcagaccagcggccgccgcgaagaccgcacgatccgcgcgctcttcaccgaggaactcggcgccgtcgtgcaggttcgcgcgtccgagcgcgacgcggtgctggtcgcgttgcgcgaacatggcctgtcggcgtgctcgcatgtgatcggcaagatcaacgagcgcgacaccatcgaaatctatcgcgacgcgaagaagatttacgaagcaccgcgcaccgaactgcatcgcacgtggagcgaagtgagctggcggatttcgcgtctgcgcgacaacccggcttgcgccgacgccgaatacgacgcgctctccgacgcggccgatccgggcattgcgccggtgctgaacttcgatccgacggaagacgtggccgcgccgttcgtcggcaggagcgcgcgtccgcgtgtggcgatcctgcgcgagcagggcgtcaactcgcacctcgaaacggcctatgcattcgaccgcgccggcttcgacgcgcacgacgtacacatgagcgacctgctggcgggccgcgccaatctggcggatttcgccggcgcggtggcatgcggcggcttctcgtacggtgacacgctgggcgctggtgaaggctgggcgaaggcgatccgcttcaacgcgcaactggccgacatgttcgccgcgttcttcggccgcgcagacacgttcgcgctcggcatctgcaacggctgccagatgatgagcagcctggcctccatgattccgggcgccgaagcctggccgaagttcacgcgcaacaaatcggagaagttcgaagcgcgcttctcgctggtcgaagtgcaggcttcgccgtcgatcttcttcaacggcatggaaggctcgcgcattccggtggcgatcgcgcatggcgaaggttacgcggacttctcgcagcagggcgatgcgtcgaaggtcgcggtggcgatgcggtatgtcgatcaccggggtcaggccacggagcagtatccgttcaacccgaacggctcgccgaacggcatcacgtcggtgaccacgccggacgggcgcttcaccgtgctgatgccgcacaccgagcgcgtgcatcgcgcggtgcagatgagctggcatccggaaggctggggcgaaggcggcacggacgcgagcccgtggatgcgcgtattccagaacgcgcgccgctggctgggctga

SEQ ID NO: 52819 - protein, 1361 aa, Burkholderia xenovorans LB400
MAHFSCFPGASALSDFRQTRLLETLTRIDPNITGVRGQYLHFVNAQTPLSAEDNAKIEALMHYGQPLEESKERGTAEAFLVVPRFGTVSPWASKATDIAHLCGLTQVRRIERGVEYTVTLKSGLLGGRKALSDEARAAVAAALHDRMTESVSPSRDHALHLFDELPAKPLQTVDVLGHGRGALVAANTELGLALAEDEIDYLVDAFTKLGRNPTDVELMMFAQANSEHCRHKIFNADWTIDGEKQDISLFNMIRNTEKLNPQGTIVAYSDNSAIMAGGMAERWFPRTPANLGASELPEHYRRSTELTHTLMKVETHNHPTAISPFPGAATGAGGEIRDEGATGRGARPKAGLAGFTVSNLELPDGVEAWENARDAAQPLAHRNPGDKHEAYGRPDRIASPLQIMIDGPLGGAAFNNEFGRPNLGGYFRAYEQNVAGLVRGYHKPIMIAGGIGNISDQHTHKHDLPEGSLLIQIGGPGMRIGMGGGAASSMATGTNTAELDFDSVQRGNPEIERRAQEVINACWQLGEKNPILSIHDVGAGGLSNAFPEVVDGAGKGARFDLRKIQLEESGLSPREIWSNEAQERYVLAIAPADLPAFEAMCQRERCPFAVIGTATAERQLKLIDSELNDDNAHQPVDMPMEVLLGKAPRMHRDVKRVERKLEPVDVTGLVLADVATSVLRHPTVASKSFLITIGDRSVGGTTARDQMVGPWQVPVADVAITTMDYAGFRGEAMTMAERTPLAVIDAPASGRMAVGEAVTNIAAAPIASLDKLKLSANWMAACGAAGEDAALYDTVKAIGMELCPALGISIPVGKDSLSMRTKWEDRGVAKEVVAPVSLIISAFAPVEDVRRHLTPQLRRASDVGESVLIAIDLGRGKHRLGGSILAQVTQQVGDTVPDVDDPEDLKRFFAAIQALNQDGKLLAYHDRSDGGLWATVCEMAFAGHVGVSLNVDMLVLDPNHESDYGDAKDWAKQTSGRREDRTIRALFTEELGAVVQVRASERDAVLVALREHGLSACSHVIGKINERDTIEIYRDAKKIYEAPRTELHRTWSEVSWRISRLRDNPACADAEYDALSDAADPGIAPVLNFDPTEDVAAPFVGRSARPRVAILREQGVNSHLETAYAFDRAGFDAHDVHMSDLLAGRANLADFAGAVACGGFSYGDTLGAGEGWAKAIRFNAQLADMFAAFFGRADTFALGICNGCQMMSSLASMIPGAEAWPKFTRNKSEKFEARFSLVEVQASPSIFFNGMEGSRIPVAIAHGEGYADFSQQGDASKVAVAMRYVDHRGQATEQYPFNPNGSPNGITSVTTPDGRFTVLMPHTERVHRAVQMSWHPEGWGEGGTDASPWMRVFQNARRWLG

SEQ ID NO: 52820 - DNA, 2148 bp, Methanococcoides burtonii DSM 6242
  CDS (1)..(2148): transl_table=11
atgttacctgaaaatgacctgaagatcataacagaagagatgggcagagaaccaaaccttgttgaacagggatgctttttgaatctttggagcgaacactgttcctaccgttccagtgctcccctgctgaaaacctttaccaccgtgggagatcgtgttatcataggtcctggtgacgatgcagcgatcatccgctttggagaaggctgggtacttgctattggaatggaaagccataaccatccttcatatgttgatccttataatggttcagcaacaggtgtcggcggaattgtgcgcgatatcatttctatgggtgctcgtccgatcgcactcatggacccgttgtatttcggtcctttgaacacccctaagaacctctatcttttcgagcacataattgaaggtatcgcaggctatggtaattgtattggcgttcccgttgtcagaggcgaaacatatttcgatgaatcctacagtggaaaccctctggtgaacgttgtttgtgtaggtctggcacgcgaagagaacatagtgaccgcatgtgcacagaaagcaggcaacaagcttgtcctcataggttctaccacaggccgtgacggtcttggcggagcatccttcgcatcccgcgacctttccgaagaagctgaagcagaagaccgtcccagtatacagatcggtgatccattcaccgaaaagcttgcgatcgaagcaacactggaagctatcggtgcaggctatgttctctcatgcagggaccttggtgcagcaggtcttgcaggtgcaagctctgaaatggcatcaaagggtaaactcggtatgcgtcttgaagctgacaaagttatcctcagggaagacggcatgaccccttacgagatcatgatcgccgaatctcaggaacgcatactgatggaagtcgaacctgagaatgtcgatgctgtcctcgcgataggaaagaagtatgatctccatgcaagcatgataggtgaacttacagaacgtctctattatactgttgagttcgaaggtgaaatggtagctgacattccggtaatgcttctcaccgaaggtgcgccaacgttcgaaaggccatccactgctcctccagagcgtgagatcggtgagaaaccagaccttcctgcagatatgaagaaggtcgttcttgatatcctctcctcccacaacatcgcatcaaaagaatggatctatcgccagtatgaccacgaagtacaggtacgtaccgtggaaaaacccggctctgatgcagcagttcttcgaataggcgatggaaagggacttgccatgtcatgcggatgcaatccgcgtcacacacttcttgatccatacgaaggaggaaaaggcacactcatcgagaatagtatgaaccttgcagtaaaaggcgctgaaggtattgcactcgtggattgcctgaacttcggaaatcctgaaagacctgacatctactggcagttcaaacaggccatcctcggtcttggtgacgctgcaagaagcctgtccattccggtggtcggagggaacgtttctctttacaacgaaagcggagaatacggcactgccatcgcaccaacaccttccattggtcttatcggtatcacaggtgaactcgaaacagtccctcaaagccactttgcaggggagggcaacaccatcatcctcgtgggcaacacccttgatgaaatgggtggctcggaatattacaacatggtcgggctaaggctcaacggtaatgtgccaaaggtaaccgatgagtccgtaaaggtcgttgaaacgctcatcaatgtggtgagggatggaaatgtagtggctgctcacgatgtatctgccggtggtcttgctgtggccctttctgagatgtgtgactctatcggtgcagagatcgatctgacctccgtaggcgacaatctgcgtgctgatgatgtccttttctccgaatcccacgcaagagcaattcttgtaacatcctctcctgaaaaggtaaaagaaatgcttgccgatgtacctcatactgtcattggaacagtaggtggcaacaacctgagcataaaaggaaatggatttgatctctccctctcccttgaggagatatcagatgcaagagcatctcttacaaaaatgatgatggaataa

SEQ ID NO: 52821 - protein, 715 aa, Methanococcoides burtonii DSM 6242
MLPENDLKIITEEMGREPNLVEQGCFLNLWSEHCSYRSSAPLLKTFTTVGDRVIIGPGDDAAIIRFGEGWVLAIGMESHNHPSYVDPYNGSATGVGGIVRDIISMGARPIALMDPLYFGPLNTPKNLYLFEHIIEGIAGYGNCIGVPVVRGETYFDESYSGNPLVNVVCVGLAREENIVTACAQKAGNKLVLIGSTTGRDGLGGASFASRDLSEEAEAEDRPSIQIGDPFTEKLAIEATLEAIGAGYVLSCRDLGAAGLAGASSEMASKGKLGMRLEADKVILREDGMTPYEIMIAESQERILMEVEPENVDAVLAIGKKYDLHASMIGELTERLYYTVEFEGEMVADIPVMLLTEGAPTFERPSTAPPEREIGEKPDLPADMKKVVLDILSSHNIASKEWIYRQYDHEVQVRTVEKPGSDAAVLRIGDGKGLAMSCGCNPRHTLLDPYEGGKGTLIENSMNLAVKGAEGIALVDCLNFGNPERPDIYWQFKQAILGLGDAARSLSIPVVGGNVSLYNESGEYGTAIAPTPSIGLIGITGELETVPQSHFAGEGNTIILVGNTLDEMGGSEYYNMVGLRLNGNVPKVTDESVKVVETLINVVRDGNVVAAHDVSAGGLAVALSEMCDSIGAEIDLTSVGDNLRADDVLFSESHARAILVTSSPEKVKEMLADVPHTVIGTVGGNNLSIKGNGFDLSLSLEEISDARASLTKMMME

SEQ ID NO: 52822 - DNA, 2307 bp, Acidobacteria bacterium Ellin345
  CDS (1)..(2307): transl_table=11
atgtcagccattactcctgaagtcgtcaaagagcacggattcacccccgaagagtaccaacgcattctcaaatggcagggccgcgagccctccatgaccgaactcggcatttacagcgtgatgtggagcgagcactgctcctacaagtcgtcgcgcgtgcacctgaagcgcctgcccacgcggtcgaagctcgtgctccagggccccggcgaaaacgccggcatcatcgacattggcgatggctggggctgcgccttcaaaatcgagtcgcacaatcacccgtcgttcatcgagccattccagggcgcgaccaccggcgtcggcggcatcctccgcgacatcttcaccatgggcgcgcgtccctttgccgtcatggacagcctccgctttggccccatcaagcccgacggccagaccgactccgccacgatccaccgcaaccactccatcctcgaaggcgtagtcggcggcgtggcttcgtacggcaattgtttcggcgtgcccaacgtcggcggggaagtgaagttcgagccctgctacaacggcaatccgctggtgaacgccttcgccctcggcctcgtccgccagaacgaaatcttctacgccaaagccagcggcgtcggcaacccggtgatttacgtcggctccaagaccggccgcgacggcatccacggcgcgaccatggccagcgaggaattcagcgaaggctccgaagccaagcgccccaacgtccaggtcggcgaccccttcatggagaagctgctcctcgaggcctgtcttgaagccatgcaaaccggcgccgtcctcggcattcaggacatgggcgctgccggcctcacctgttccacctgcgagatgggcgcgcgcggttgcgttggcgtcgagatcgaactcgaccacgtcccccagcgcgaaaccggcatgaccgcctacgagatcatgctcagcgaatctcaggagcgcatgttgctcgtcgccgaaaaaggccgcgagcacgaagtcttcgccgtcttcaaaaagtggggcctcgacgcctcgcacgtcggccacgtcatcggcgatgccaaaatgcgcgtcctgcaccacggtgtggtcgtcgccgaaatccccaacgaggctctcaccgacgacgccccgctctaccatcgccccatggaaccgtgggtcagcccgcttcccaaggtgaagcccgcgtcaattgcattcggcaagaaatccgatctcaccgccgaattccaaaagctgttagcgtcgcccaacatctgcaacaagagctgggtctacgagcagtacgacagcatggttcagaccaacaccgtggaaggcccgggcctcgaagccggcgtcatccgcgtgaagggcaccaaccgcgccctcgccatggccctcgacggcaatggccgctggtgctatctcgacccgaaacttggcgccatgcacgccgtcgccgaagccgcccgcaacgtcgcctgctccggcgcaaagcctcttgccgcgaccaattgcctgaacttcggcaaccctgaaaagccgcccatcatgcagcagttcgcggagacgatcgacggcctgaccgaagcctgcaccgcgctcaatacgcccatcaccggcggcaacgtcagcttctacaacgagaccctcggcgaaggcatctatcccacgccggtcatcggcatcgttggcgtcctcgaagacgtgcacaaggccgtccagccaaactatcgggccacgaaccaagcgctggtcctcatctccggctcgcccaaacagtcgcagcaagatctcgaaatcaccatcggctccagcgaatacgcgaaagagctcctcggccacgtctggggcaaaccccccgcgctcgacatcgccgacgaggccaatctccacaaggctttagccgagatcgccgaccaccgcctcgccgcttccatcaaagacatcagcgaaggcggcatcgccaccacaatcgccgagcccggcttcgcccgcggcatcggcgccaccatcgacctgagctccaatggccttgccgccgaactggtcctgttctccgagaacgcttcgcaggcggttatttcctgcgacgaaagtaatgtcgaagcaatcaaacaagtagccgtaaaatacggcctccaggcacagctcatcgggcacaccgctgcggacaagctagaaatccgcatcgacggccgcaccgtcatcgctgctcccgtcacccaattgcgcgacgcctggcagaacgcactcaagcaagcgctccacgccgaaacccccgagcacctcgtgcccgaacttctgcagcggagctga

SEQ ID NO: 52823 - protein, 768 aa, Acidobacteria bacterium Ellin345
MSAITPEVVKEHGFTPEEYQRILKWQGREPSMTELGIYSVMWSEHCSYKSSRVHLKRLPTRSKLVLQGPGENAGIIDIGDGWGCAFKIESHNHPSFIEPFQGATTGVGGILRDIFTMGARPFAVMDSLRFGPIKPDGQTDSATIHRNHSILEGVVGGVASYGNCFGVPNVGGEVKFEPCYNGNPLVNAFALGLVRQNEIFYAKASGVGNPVIYVGSKTGRDGIHGATMASEEFSEGSEAKRPNVQVGDPFMEKLLLEACLEAMQTGAVLGIQDMGAAGLTCSTCEMGARGCVGVEIELDHVPQRETGMTAYEIMLSESQERMLLVAEKGREHEVFAVFKKWGLDASHVGHVIGDAKMRVLHHGVVVAEIPNEALTDDAPLYHRPMEPWVSPLPKVKPASIAFGKKSDLTAEFQKLLASPNICNKSWVYEQYDSMVQTNTVEGPGLEAGVIRVKGTNRALAMALDGNGRWCYLDPKLGAMHAVAEAARNVACSGAKPLAATNCLNFGNPEKPPIMQQFAETIDGLTEACTALNTPITGGNVSFYNETLGEGIYPTPVIGIVGVLEDVHKAVQPNYRATNQALVLISGSPKQSQQDLEITIGSSEYAKELLGHVWGKPPALDIADEANLHKALAEIADHRLAASIKDISEGGIATTIAEPGFARGIGATIDLSSNGLAAELVLFSENASQAVISCDESNVEAIKQVAVKYGLQAQLIGHTAADKLEIRIDGRTVIAAPVTQLRDAWQNALKQALHAETPEHLVPELLQRS

SEQ ID NO: 52824 - DNA, 2166 bp, Silicibacter sp. TM1040
  CDS (1)..(2166): transl_table=11
atgcaggaaccagccattacgcctgaagtgatcgaaaaccacggactgaagcccgatgaatacgatctgatcctcgagatcatcggccgcgagccgaccttcaccgagctcggcattttctccgccatgtggaacgagcactgttcctataaatcatcgaaaaaatggctgcgcaccctgccgacctccggcccgcaggtgatctgcggccccggcgagaacgccggcatcgtggacatcggcgatggcgatgcggtcgtcttcaagatggaaagccacaaccacccctcctacatcgagccctatcaaggtgccgccactggtgttggcggcattttgcgtgatgtcttcaccatgggcgcgcggcctatcgcgtcgatgaattcgctgtcctttggtgagcctgcgcatcacaagacccgccaattggtaaacggcgtggttgagggcgtcggcggctacggcaactgttttggtgtgccttgtgtcggcggcgaagtgcgctttcaccccgcctacaatggcaactgcctggtgaacgcctttgcggcaggcctcgtaaaaaccgacatgatcttctactccgccgcctccggtgtgggcatgcccgttgtgtacctcggcgccaagaccggccgcgacggggttggtggtgcaaccatggcgtcggcagaattcgacgacaccatcgaagaaaagcgccccaccgtgcaggttggtgacccgttcaccgaaaaacgcctgatggaagccacgctggagctgatgcagaccggtgccgtgatctccattcaggacatgggcgcggcaggcctcacctgctccgctgtggaaatgggtgacaagggcggccttggcgtgcgtctggatctggaaaaggttccgcagcgcgaagaaaacatgaccgcttacgagatgatgctctcggaatcgcaagagcgcatgctgatggtgctgaagcccgagctggaggccgaggccaaagccgtctttgagaaatgggacctcgattttgccatagtgggtgagaccattgccgaagatcgcttcctcatcatgcacaacggcgaggtcaaagcggatctgccgctgtcaaagctttcgtcctcggcgccggaatacgaccgcccgtggatcgaggtcgaggcccccgcggcgcttacggatgcggatgtgccgaccattgacccgatcgacggcctgaaggcgctgatctccagccccaactatgccggcaaacagtgggtctatgagcaatatgacaccaccgtgatgggcgacaccgcgcgtcgtccgggtctgggtggcggcatggtccgcgtgcatggcaccgacaagaaactggcctttacctctgacgtgaccccgcgttacgtcaaggcgaacccggttgagggcggcaaacaggccgtggccgaagcctatcgcaacctctgcgctgtcggggccaagccattggcgaccaccgacaacctcaatttcggcaaccccgaaaagcccgagatcatgggccaatttgtcggcgcactcaaaggcatcggcgaggcggtctcggcgcttgatatgccaatcgtctcgggcaacgtctcgctttacaacgaaacagacggccaggcgatcctgccgacaccgaccattggcgcggtaggtctggttgcggcgggcgaagagccgatcctgggcgaggcccgcgacggtcatgtgctgctgctggtgggcgaaaccattggtcatcttggccagtcggcgcttctgcacgaggtcttcaaccgcgaggacggcgacgcccccgcagtggatcttgagatcgaaaagcgcaacggcgagttcatccgcaacaaccgcgatttcatcaaggcctgcaccgacatcagcgacggtgggcttgcgctcgcggcgtttgagcttgcagaggccgcaggcgtaggggtgcagatcgacgccagcgacaccccgacgctctttggtgaggatcaggcacgctatctggtggcctgcaacttcgaccaggccgaggcgctgatgatcgctgccggtcaggccggggtgccgcttgagaccgttggcaagtttaccggcgacacggtgaagatgggcggatcggaggcaacgctcgaagagctgagccagatcttccgcacgagctttgccgaagcagtcgcctaa

SEQ ID NO: 52825 - protein, 721 aa, Silicibacter sp. TM1040
MQEPAITPEVIENHGLKPDEYDLILEIIGREPTFTELGIFSAMWNEHCSYKSSKKWLRTLPTSGPQVICGPGENAGIVDIGDGDAVVFKMESHNHPSYIEPYQGAATGVGGILRDVFTMGARPIASMNSLSFGEPAHHKTRQLVNGVVEGVGGYGNCFGVPCVGGEVRFHPAYNGNCLVNAFAAGLVKTDMIFYSAASGVGMPVVYLGAKTGRDGVGGATMASAEFDDTIEEKRPTVQVGDPFTEKRLMEATLELMQTGAVISIQDMGAAGLTCSAVEMGDKGGLGVRLDLEKVPQREENMTAYEMMLSESQERMLMVLKPELEAEAKAVFEKWDLDFAIVGETIAEDRFLIMHNGEVKADLPLSKLSSSAPEYDRPWIEVEAPAALTDADVPTIDPIDGLKALISSPNYAGKQWVYEQYDTTVMGDTARRPGLGGGMVRVHGTDKKLAFTSDVTPRYVKANPVEGGKQAVAEAYRNLCAVGAKPLATTDNLNFGNPEKPEIMGQFVGALKGIGEAVSALDMPIVSGNVSLYNETDGQAILPTPTIGAVGLVAAGEEPILGEARDGHVLLLVGETIGHLGQSALLHEVFNREDGDAPAVDLEIEKRNGEFIRNNRDFIKACTDISDGGLALAAFELAEAAGVGVQIDASDTPTLFGEDQARYLVACNFDQAEALMIAAGQAGVPLETVGKFTGDTVKMGGSEATLEELSQIFRTSFAEAVA

SEQ ID NO: 52826 - DNA, 3909 bp, Myxococcus xanthus DK 1622
  CDS (1)..(3909): transl_table=11
atgtccagcatgcacactctgcgtggggctccggccctttctgacttcaggctcgccaagctcctggcccagtgccgtgagcgggtgccctccgtctcatccatctatgcggagttcgtgcacctcatcgacgctccggcgcccctctccgaggcggacctggccaccctgggccgcctgctcgactacgggccccgcgtggccacgggcgcgcgcatcggcagcctgctgctcgtgctgcctcggccgggcaccatctccccctggtcctccaaggccacggacattgtccacaactgcggcctgggcgaacgggtgcggcgcatggagcgcggcaccgccttcttcatcgcgggccccgacgggcaggcgttgcaggatgcggagctggagcgcctgaagccggtgctgcatgaccggatgacgcaggcggtggtggggcgtctcgaagacgcggccatcctgttcgccgggcacacgccccggcccttcacgacggtggacgtgctgggcggaggccgcgcggcattggtgaccgccaaccgcgagctgggcctggccctggccgacgatgagatggactacctggtggcgcgcttcaccgagctgaagcgcaaccccaccgacgtcgagctgatgatgttcgcgcaggccaacagcgagcactgccggcacaagatcttcaacgcgagttggaccatcgacggcaagccgcaggagcgttcgctcttccaagccatcaagaacacctacgtccagcacaaggaaggcgtgctcggcgcgtacaaggacaacgcggccgtcatcgaaggcttcgaggtggaccgcttcttcccgtcccccgaatccggtgagtggggctccgtgcgcgagccggcccacatcatgatcaaggtggagacgcacaaccacccgacggccatctccccgtacccgggcgccgccaccggcgcgggcggcgagattcgcgatgaaggagccaccggccgtggcgcccggcccaaggccggcctcaccggcttcagcgtgagccacctgcgcatcccgggcttcgagcagccctgggagcagccctacggcaagccggaccgcatcgtctccgcgctggacatcatggtggacggccccctgggcggcgcggccttcaacaacgagttcggccggccgaacctcacgggctatttccgcagctacgaggtgcaggtccccacgcccggtggcgtggaggtgcgcggctaccacaaacccatcatgattgccggtggcctgggcaacatccgcgcgtcgcacgtgcagaagggacgcctgcagccgggcgacaagctcatcgtcctgggtgggcccgcgatgctcatcggcctgggcggtggcgcggcgtcctccatggcgcagggcgcgagcgcggcggacctcgacttcgcctccgtgcagcgggacaacgcggagatggagcgtcgctgtcaggaggtcatcgacagctgctgggcgctgggcgacaagaaccccatccgctccatccacgacgtgggcgccggcggtctgtccaacgcggtgccggagctggcccacgacaacgacctgggcgggcgcctggagctgcgcgcggtgcccaacgcagagccgggcatgtcgccagtggagatctggtgcaacgaggcacaggagcgctacgtgctgggcgtggcgccagaggacctggcccgcttcgccgcgctgtgcgagcgggagcgtgcgcccttctccgtgctgggtgacgccaccgccgagcagaccctgaagctgggggacacgcagttcggcaacgcgcccatcgacctgcccatggacgtgctgttcggcaagccgccgcgcatgcaccgtgacgtgacgtcgcgcccggtgtcgttcgcgccgctgacgctggatggctcgctggcgctgctggcggagcgcgtactgagtcaccccacggtggcggacaagagcttcctcatcaccattggcgaccgcaccgtgtccgggctcagcagccgggaccagatggtgggcccctggcaggtgccggtggcggactgcgcggtgacgctgtccaccgtgacgagcaccacgggcgaggccatggccatgggcgagcgcacgccgctggccctcatcgacgcggcggcctcggcgcgcatggcggtgggcgaggcgctcaccaacatcgccgcggcccgcatcggcaagctgtccgacgtgaagctgtccgccaactggatggccgcggcgggcagcccgggcgaggacgccagcctctacgccgccgtccacgcggtgggcatggagctatgccccgcgctgggcctcaccatccccgtgggcaaggactccatgtccatgcgcaccgtctgggaggaaggcggtgcccgcaaggccgtgacgtcgccggtgtcgctcatcatctccgcgttcgcgccggtgctggacgtgcgcaagtccctgacgccgcagttggtggacgtggcggacgacacgcggctgctcttcatcgacctggcgcgcgggaagcagcggctgggtggctccgtggtggcgcacgtccacgggcaggtggggccggagagcccggacgtggaggaccccgcgctgctgcgtggcttcttcgccgcggtgcaggcgctcagcgaaagcggctcgctgttggcgtaccacgaccgctccgacggtggtctgtgggccacgctgtgcgagatggccttcgcgggtcgctgcggactggatgtggacctggcgccgctgggcggtgacgtgacggcggccctcttcaacgaggagctgggcgcggtggtgcaggtgcgcgcctcggatgtggcgcgggtgcgcgaggtgctggcgcagcacggcctgtcacgggatgtccacgagctgggccgcccggtgacggcgcttcaggtgcgggtgcgccacggcggtgacacgttgatggcggaggacacgttggccttgcgccgcacgtggtcccgcgtcagctacgagatgcagaagctgcgcgacaatcccatctgtgcggaccaggagtccgccgcgaggagtgacgcgtcggacccgggtctgtcgccgaagctgacgttcgacccggcccaggacgtggccgcgcccttcatcgcgaagggggctcgtcctcgggtggccgtgctgcgcgagcagggcgtcaacagccagcaggagatggccgcggccttcacgcgggcgggcttcgccgcggtggatgtccacatgagtgacatcctgtcggggagggtgtcgctcgaaggcttcaagggcgtgctggcgtgcggcggcttctcctacggcgacgtgctcggcgcgggcggcgggtgggcgaagtccatcctcttcaaccctcgcgcgcgggacgccttcgctgccttcttcgcgcggccggacagcttcggcctgggcgtgtgcaacggctgccagatgatgtcgcagctcaaggacatcatcccgggcgcggagcacttcccccgcttcgtgcgcaacgcctccgagcagtacgaggcgcgcctgtcgctggtggaggtgtcgaagacgccgtcgctcttctaccagggcatggaaggcagccggatgctcatcgtcacctcacacggggagggccgcgcggagttccccagtgtggaggacgccgcccgcgtcaacgggctggggctggtgacgacgcgctgggtggacaaccacggacgcgtggcggagtcgtatcccgccaaccccaatggctccccccacggcatcgccggtctgacgacgcgggatgggcgcttcaccatcaccatgccgcacccggagcgcgtgcaccgctccgtgcagcactcgtggcggcctcgcgagtggggcgacgacggcccctggatgcgcatgttccgcaacgcccgcgtctggctgggctga

SEQ ID NO: 52827 - protein, 1302 aa, Myxococcus xanthus DK 1622
MSSMHTLRGAPALSDFRLAKLLAQCRERVPSVSSIYAEFVHLIDAPAPLSEADLATLGRLLDYGPRVATGARIGSLLLVLPRPGTISPWSSKATDIVHNCGLGERVRRMERGTAFFIAGPDGQALQDAELERLKPVLHDRMTQAVVGRLEDAAILFAGHTPRPFTTVDVLGGGRAALVTANRELGLALADDEMDYLVARFTELKRNPTDVELMMFAQANSEHCRHKIFNASWTIDGKPQERSLFQAIKNTYVQHKEGVLGAYKDNAAVIEGFEVDRFFPSPESGEWGSVREPAHIMIKVETHNHPTAISPYPGAATGAGGEIRDEGATGRGARPKAGLTGFSVSHLRIPGFEQPWEQPYGKPDRIVSALDIMVDGPLGGAAFNNEFGRPNLTGYFRSYEVQVPTPGGVEVRGYHKPIMIAGGLGNIRASHVQKGRLQPGDKLIVLGGPAMLIGLGGGAASSMAQGASAADLDFASVQRDNAEMERRCQEVIDSCWALGDKNPIRSIHDVGAGGLSNAVPELAHDNDLGGRLELRAVPNAEPGMSPVEIWCNEAQERYVLGVAPEDLARFAALCERERAPFSVLGDATAEQTLKLGDTQFGNAPIDLPMDVLFGKPPRMHRDVTSRPVSFAPLTLDGSLALLAERVLSHPTVADKSFLITIGDRTVSGLSSRDQMVGPWQVPVADCAVTLSTVTSTTGEAMAMGERTPLALIDAAASARMAVGEALTNIAAARIGKLSDVKLSANWMAAAGSPGEDASLYAAVHAVGMELCPALGLTIPVGKDSMSMRTVWEEGGARKAVTSPVSLIISAFAPVLDVRKSLTPQLVDVADDTRLLFIDLARGKQRLGGSVVAHVHGQVGPESPDVEDPALLRGFFAAVQALSESGSLLAYHDRSDGGLWATLCEMAFAGRCGLDVDLAPLGGDVTAALFNEELGAVVQVRASDVARVREVLAQHGLSRDVHELGRPVTALQVRVRHGGDTLMAEDTLALRRTWSRVSYEMQKLRDNPICADQESAARSDASDPGLSPKLTFDPAQDVAAPFIAKGARPRVAVLREQGVNSQQEMAAAFTRAGFAAVDVHMSDILSGRVSLEGFKGVLACGGFSYGDVLGAGGGWAKSILFNPRARDAFAAFFARPDSFGLGVCNGCQMMSQLKDIIPGAEHFPRFVRNASEQYEARLSLVEVSKTPSLFYQGMEGSRMLIVTSHGEGRAEFPSVEDAARVNGLGLVTTRWVDNHGRVAESYPANPNGSPHGIAGLTTRDGRFTITMPHPERVHRSVQHSWRPREWGDDGPWMRMFRNARVWLG

SEQ ID NO: 52828 - DNA, 2307 bp, Mycobacterium sp. MCS
  CDS (1)..(2307): transl_table=11
gtgacgcaggagcttgcccccacgctggacaccgtcgagcgtgccgcagccacccccgaccagcctcaaccgttccgcgaactgggcctcaaggacgacgagtaccagcgcatacgcgagatcctcgggcgcagacccaccgacgccgaactggcgatgtactcggtgatgtggagcgagcactgctcgtacaagtcctcgaaggtgcacctgcggtacttcggcgagaccaccaccgaaaagatgcgctcgacgatgctcgccggtatcggcgagaacgcgggtgtcgtcgacatcggcgacggctgggcggtgaccttcaaggtcgaatcccacaaccatccctcctacgtcgagccgtaccagggcgcggccaccggcgtcggcggcatcgtccgcgacatcatggcgatgggcgcgcgcccggtggccgtgatggaccagctccgctttggcgccgccgacgcccccgacaccaagcgcgtgctcgacggcgtggtgcgcggggtcggtggatacgggaactcgctcggcctgcccaacatcggcggcgagaccgtcttcgacccctcctacgcgggtaacccgctggtcaacgctctctgcgtcggcgcgatgcgcaaggaggacctgcacctggcattcgcctcgggtgcgggcaacaagatcatcctgttcggtgcgcgcaccgggctcgacggcatcggcggggtgtcggtgctggcctcggacaccttctccggcgacgagtcgggggcgggccgcaagaagctcccctcggtgcaggtcggggaccccttcatggagaaggtgctcatcgaatgctgcctcgagctgtacgccgcggacctcgtggtcggcatccaggacctgggcggcgccggattgtcctgtgccacatctgaactcgcgtcagccggggacggtgggatgcgtgtggaactcgatcaggtcccgctgcgtgcggcgaacatgactcccgccgagatcctgtccagcgagtcgcaggaacgcatgtgcgcggtcgtcacaccggacaacgtcgaggccttcctggcggtctgccgcaaatgggaggtgctcgccaccgtgatcggcgaggtcaccgacggggaccgtctggtgatcacctggcacggcgacaccgtcgtcgacgtgccgccgcgcaccgtcgcccacgagggtccggtgtaccagcgcccggtcacccgccctgacacccaggacgcgctcaacgccgacacgtcggccgatctgccgcgacccgccaccggcgacgaactgcgcgccaccctgctcgccatgatcggcagcccgcacctgtgcagccgcgggtacatcaccgaacagtacgaccgctatgtgcgcggcaacacggtgctggccgaacacgccgacggcggcgtgctgcgcatcgacgaggccaccggccgcggcatcgcggtctcgaccgacgcctccggccgctacaccgcactcgatccctacaccggtgcgcaactggccctcgccgaggcctaccgcaacgtcgcggtcaccggcgccacaccggtcgccgtgacgaactgcctcaacttcggctcccctgaggatccgggtgtcatgtggcagttcagccaggcggtgcgcggtttggccgatggttgtgcggcccttggcatcccggtcaccggtggcaacgtgagcttctacaaccagaccgggtcgaccgcgatcctgcccaccccggtcgtgggggtgctgggcgtgctcgacgacgtcaagcggcgtatcccgaccggtcttggcaccgaacccggcgagacgctgatgctgctcggcgacacccgcgacgagttcgacgggtcgatctgggcgcaggtcaccgccggtcacctcggcgggttgccccccaaagtcgacctcgaacgggagaagctgctcgccgatgtgctcacggccgcctcgcgtgacggattgatctccgccgcacacgatctcagtgagggcgggctgatccaagccgtcgtggaggccgcgctggccggtgaaacgggttgccgggtcctcattcccgagaacttcgagaacggcacaggtccgttcacgttcctcttcagcgaatcggccggccgggtactcgtcgcggtgccccgcaccgaggagagccgcttccgcgcgatgtgcgaagcccgcggcctgcccatcacccgcatcggtgtggtcgatcccggcagcgatgcggtcgaagtgcagggccacttcacggtgccactggcggaactgcggaccacctccgagggcgtgttgcccggactgttcgggtga

SEQ ID NO: 52829 - protein, 768 aa, Mycobacterium sp. MCS
MTQELAPTLDTVERAAATPDQPQPFRELGLKDDEYQRIREILGRRPTDAELAMYSVMWSEHCSYKSSKVHLRYFGETTTEKMRSTMLAGIGENAGVVDIGDGWAVTFKVESHNHPSYVEPYQGAATGVGGIVRDIMAMGARPVAVMDQLRFGAADAPDTKRVLDGVVRGVGGYGNSLGLPNIGGETVFDPSYAGNPLVNALCVGAMRKEDLHLAFASGAGNKIILFGARTGLDGIGGVSVLASDTFSGDESGAGRKKLPSVQVGDPFMEKVLIECCLELYAADLVVGIQDLGGAGLSCATSELASAGDGGMRVELDQVPLRAANMTPAEILSSESQERMCAVVTPDNVEAFLAVCRKWEVLATVIGEVTDGDRLVITWHGDTVVDVPPRTVAHEGPVYQRPVTRPDTQDALNADTSADLPRPATGDELRATLLAMIGSPHLCSRGYITEQYDRYVRGNTVLAEHADGGVLRIDEATGRGIAVSTDASGRYTALDPYTGAQLALAEAYRNVAVTGATPVAVTNCLNFGSPEDPGVMWQFSQAVRGLADGCAALGIPVTGGNVSFYNQTGSTAILPTPVVGVLGVLDDVKRRIPTGLGTEPGETLMLLGDTRDEFDGSIWAQVTAGHLGGLPPKVDLEREKLLADVLTAASRDGLISAAHDLSEGGLIQAVVEAALAGETGCRVLIPENFENGTGPFTFLFSESAGRVLVAVPRTEESRFRAMCEARGLPITRIGVVDPGSDAVEVQGHFTVPLAELRTTSEGVLPGLFG

SEQ ID NO: 52830 - DNA, 2184 bp, Rubrobacter xylanophilus DSM 9941
  CDS (1)..(2184): transl_table=11
ttgagcgtacgggagacctacacctctctggggctctcggacctcgagtacgggcgcatcctggagcttctggggcgggcgccgaacttcctcgagctctcgctcttctccgtgatgtggagcgagcactgcggctacaagaactcccggccgctcctctcgcgcttcccgaacgaggggccgagggtgctgcaggggccgggtgagaacgcgggcgtcgtcgaggtgggggacggctgggcgctcgcgttcaaggtggagagccacaaccacccctcggcggtcgagccctacgagggggcggccacgggggtcggcgggatcatccgggacatcctggcggtgggggcgcggccggtggcgctgctcgactccttgcgcttcgggccgctggaggaggagcgcaaccgctacctcttccgcgaggtcgtgcgcggcatcggcggctacggcaacgccgtcggcgtcccgaccgtcggcggggaggtcgagttcgcccccgcctactcgggcaacccgctggtgaacgcgatgtgcgtcgggctcgtccgggccgagaagctggtgcgctcgcgggccagcggggaggggaacctggtcgtcctgctcggctcgcgcaccgggcgcgacggcatccacggggccaccttcgcctccgacgagctcggcgagggctctggggagcggcgctccaacgtgcaggtcggggacccgttcgcggagaagatgctcatcgagtgctgtctcgcgctcctcgaggaggatctgctcgtcgcgctgcaggatctgggggcggcggggatcacctcttcggcctccgagatggccgccaagggaggggtcgggatcgagatcgagaccgacagggtgcccctgcgggaggaggggatggagccgtgggaggtcatgatctcggagtcccaggagcgcatgctcgcggtagtcgagccggggcggctggagcgggtggcgggcctggcccgccgctacggggtcggggccgccgtgatcgggcgggtggcgggccacggggagctgcgtgtcgtccacgggggcgaggtcgtcggctccgtccccgcccggcacctggccgacgccccggtctacgagcgggaggtcgtgaggccggcgtacctcgacggggcgcgcgcgctggacctcgcgtccgtgccgcctcccggcgactacggcgcggccctgctggggctcctctcccaccccaacctccgctcgcgccgctccgtctacgagcagtacgaccacgaggtcggcacctgcaccgtgctccggcccggggccgacgccgcggtgatgaggataaggggcacgcgccggggctacgccctcaccaccgacgggcgcggccgccactgctacctcgacccgcgcggcggcggggcggccaccgtcgccgaggcgtaccgcaacctctcctgcgtgggggccgagcccgtggccctgaccaactgcctgaacttcggcaaccccgagaaggccgagggctactaccagctcgccgagtgcatcgaggggatggccggggcgtgcgaggcgctcgggacgccggtggtgagcggcaacgtcagcctgtacaacgagacggagaggggcgccgtccaccccacgccggtggtggggatggtggggttgctggaggacgtgcgccggcacgccaccccggagataaagcgggagggggacgcgctggtgctggtgggccgcttccggccctccctcgcgggctcggcctacctggaggcggcgcacggcctggtgcgcggcgctcccccctccccggacctcccctccgagaaggccgccgccgacgcggtgcgcgccgccgtggccgccgggctggtggacaccgcgcacgacctctccgacggggggctcgccgtcgcgctcgcggagatggccgtggggggcggcatcggggccgaggcgcgccttctgcccggcgcgcgccaggacgtcgccctcttcggcgagtgcggcgggtgcatcctggtggcggtgccggaggagcggctggaggagctggagggggcgctggcgggcgtgccgcgcgccaggatcgggcgcaccggcggcgatagaatatccgtcttagggctcgtggacgtagggctttcggagcttgcggaggcgtactttatggatctcttcgaggaggccggagggtag

SEQ ID NO: 52831 - protein, 727 aa, Rubrobacter xylanophilus DSM 9941
MSVRETYTSLGLSDLEYGRILELLGRAPNFLELSLFSVMWSEHCGYKNSRPLLSRFPNEGPRVLQGPGENAGVVEVGDGWALAFKVESHNHPSAVEPYEGAATGVGGIIRDILAVGARPVALLDSLRFGPLEEERNRYLFREVVRGIGGYGNAVGVPTVGGEVEFAPAYSGNPLVNAMCVGLVRAEKLVRSRASGEGNLVVLLGSRTGRDGIHGATFASDELGEGSGERRSNVQVGDPFAEKMLIECCLALLEEDLLVALQDLGAAGITSSASEMAAKGGVGIEIETDRVPLREEGMEPWEVMISESQERMLAVVEPGRLERVAGLARRYGVGAAVIGRVAGHGELRVVHGGEVVGSVPARHLADAPVYEREVVRPAYLDGARALDLASVPPPGDYGAALLGLLSHPNLRSRRSVYEQYDHEVGTCTVLRPGADAAVMRIRGTRRGYALTTDGRGRHCYLDPRGGGAATVAEAYRNLSCVGAEPVALTNCLNFGNPEKAEGYYQLAECIEGMAGACEALGTPVVSGNVSLYNETERGAVHPTPVVGMVGLLEDVRRHATPEIKREGDALVLVGRFRPSLAGSAYLEAAHGLVRGAPPSPDLPSEKAAADAVRAAVAAGLVDTAHDLSDGGLAVALAEMAVGGGIGAEARLLPGARQDVALFGECGGCILVAVPEERLEELEGALAGVPRARIGRTGGDRISVLGLVDVGLSELAEAYFMDLFEEAGG

SEQ ID NO: 52832 - DNA, 2235 bp, Mesorhizobium sp. BNC1
  CDS (1)..(2235): transl_table=11
atgacgatccccaacgatatcaggatcacacccgagctggtggctgcgcacggacttaagccagacgagtatcaacgcatcctcgatctgatcggccgcgagccgaccttcaccgagcttggcatcttctcggccatgtggaacgagcattgctcgtacaaaagttccaagaggtggctcaggacattgcccacctccggcccgcaggtgatccagggacccggcgagaatgccggcgtggtggatatcggtgacggacagtgcgttgtcttcaagatggagagccacaaccacccctcctatatcgagccctaccagggcgcggcgacaggcgtgggcggcatcctccgcgacgtcttcaccatgggcgcgcggccgatcgctgccatgaacgcgctgcgcttcggcgcgcccgatcatcccaagacgcagcatcttgtggcgggcgtcgtggccggcatcggcggctacggcaactccttcggcgtgccgactgtcggcggcgaggtcaatttcgacccgcgctacaacggcaattgcctggtcaacgcctttgcggcaggcctcgcccgcaccgatgggatcttttattccaaggccgagggcgtcggcttgccggtggtctatctgggcgcgaaaaccggccgcgacggggtgggcggcgccaccatggcttcggccgagttcgacgaaaccattgaggagaagcgcccaacggtgcaggtgggcgatccattcaccgagaagtgccttctcgaagcctgcctggagttgatggcgaccggtgccgttatcgcgattcaggatatgggcgcagcgggcctgacctgctcggcggtcgaaatgggcgccaaaggcgatctcggtattgaactcgacctggacaaggtgccggtgcgcgaggagcgcatgtcggcctatgagatgatgctgtcggaaagccaggagcgcatgctcatggtgctcaggcccgaaaaggagccggaggcagaggaaatcttccgcaaatgggggcttgatttcgcgatcgtcggccgcacgacggacgatctacgcttccgcatcctgcatggaggagaggaggtcgcgaaccttcccatcaaggagctgggcgacgaggcgccggaatatgaccggccctgggcggagcctaaaatgccccctgccctcgatgccgccacggtgcccgcagcagatgtcgcggattcgcttctgaagctcctgggttcgcccgatctctcctcacgccgctgggtgtgggaacagtatgacacgctgatccagggcaattcgctgcagatccccggcggcgatgccggtgtcgtgcgcgtggaggatcacccgaccaaagcgcttgccttttcttccgatgtaacgccgcgatactgcgaggccgattccttcgaaggcggcaagcaggcggtggcggagtgctggcgcaacctgaccgccaccggggcggaccctctcgctgtcaccgacaacctcaatttcggcaatccggaacggccggagatcatggggcagttcgtgcgcgccataaagggcataggcgaggcctgccgcgccctctccttccccatcgtttccggcaatgtttcgctctacaacgagacgcttggccaggcgataccgccgacgcccaccattgccggtgtcgggctcattccggattggtctaagatggcccgcatcgcctttgcaggcgaaggccaggcgattcttcttgccggtgccccggaaagctggggaacgcatctcggccaatcggcctatcttcgcgacgtccatggacgcgcggaaggcgcaccgccgcccgtggatctggcacatgaaaagcgcgtgggcgatttcgtgcgcggcgtgatccgctcaggcactgttacggccgctcatgactgctccgacggcggacttgcggtcgccttggcagaaatggcgatggcatccggtatcggcgccaggatcgatgccccggtaaacagcgcatcggcggctttcttcggcgaagatcaaggccgttacgtgcttacggcagcccttgcgcgagaggacgcgcagctggcgacgcttatcgaggacgcaagaaaagcgggggtatcgctgatcgcgatcggcgtcaccggggggcgcgaattgaaactgggcgaggcacgtgccatatcggttgaagaactaaaagaagcccatgagggctggttcccgaggttcatgcaggacggaagcttgcaatga

SEQ ID NO: 52833 - protein, 744 aa, Mesorhizobium sp. BNC1
MTIPNDIRITPELVAAHGLKPDEYQRILDLIGREPTFTELGIFSAMWNEHCSYKSSKRWLRTLPTSGPQVIQGPGENAGVVDIGDGQCVVFKMESHNHPSYIEPYQGAATGVGGILRDVFTMGARPIAAMNALRFGAPDHPKTQHLVAGVVAGIGGYGNSFGVPTVGGEVNFDPRYNGNCLVNAFAAGLARTDGIFYSKAEGVGLPVVYLGAKTGRDGVGGATMASAEFDETIEEKRPTVQVGDPFTEKCLLEACLELMATGAVIAIQDMGAAGLTCSAVEMGAKGDLGIELDLDKVPVREERMSAYEMMLSESQERMLMVLRPEKEPEAEEIFRKWGLDFAIVGRTTDDLRFRILHGGEEVANLPIKELGDEAPEYDRPWAEPKMPPALDAATVPAADVADSLLKLLGSPDLSSRRWVWEQYDTLIQGNSLQIPGGDAGVVRVEDHPTKALAFSSDVTPRYCEADSFEGGKQAVAECWRNLTATGADPLAVTDNLNFGNPERPEIMGQFVRAIKGIGEACRALSFPIVSGNVSLYNETLGQAIPPTPTIAGVGLIPDWSKMARIAFAGEGQAILLAGAPESWGTHLGQSAYLRDVHGRAEGAPPPVDLAHEKRVGDFVRGVIRSGTVTAAHDCSDGGLAVALAEMAMASGIGARIDAPVNSASAAFFGEDQGRYVLTAALAREDAQLATLIEDARKAGVSLIAIGVTGGRELKLGEARAISVEELKEAHEGWFPRFMQDGSLQ

SEQ ID NO: 52834 - DNA, 3696 bp, Cytophaga hutchinsonii ATCC 33406
  CDS (1)..(3696): transl_table=11
atgatcgttttcgctaaaaaaagcacgggcactatctacgccattcacaccgaacattcattttctacagaagataaacaaaaattaaactggttacttgacggcgaagtactttccgatacaacacttgccggtttttacagaggcccgcgtaaggaaatgcttaccccctgggctacgaatgcagttgagatcacacaaaacatgggcattgcaggtattcttcgtattgaagaattttcttctgtagcaaacacagaagcgtcgcatgataaaatgcttgaagtgatctatcagaatttaacacaagatctttataacattcacatacagccggagccgatcaaatacattgatgatattgctgccttcaataaacaggaaggtttggcattaagtcaggaagaaattgattacctggattccgttgcaaaaaaacacaaccgcaaattaaccgattcagaagtgtttggtttttctcaggtaaactctgaacactgcagacataaaatttttaacggacgttttatcattgatggtgtagagaaagaatcttcgcttttcaaactgattaagaaaacgtctgaaacaaatccgaacaaaattgtttccgcatacaaggataacgtttcgtttacgaaaggtccggtgatggaacagtttgcgccggcaacacaggataaacccgattatttcgaacgcaaacatgttgaatctgttttatctttaaaagcagaaacacacaacttccctactacggttgaaccattcaacggagctgcaaccggttcaggcggagagatccgtgaccgtattgcaggtgggatcggcagtgcgccgctggcaggtactgcggtatacatgacagcgtattcccgtttaacaaaagacagaccgtgggagaaaaacggaatgaaagaacgtgactggttataccagacaccaatggatattctgattaaagcatccaatggcgcatctgacttcggtaacaaattcggacagcctgtgatcaacggttcggtgtttacgtttgaacacgaagagaacggcaaacgttacggttttgataaagtgattatgcaggcgggcggtatcgggtatggcgtgttaaaagacgctaagaaaggactgccgaaaacgggagataaaattgttgtgatgggtggtgacaactaccgcatcggtatgggcggcagtgccgtatcttcattggatacaggcgcgctgaacagtgccattgaactgaacgcgatccagcgttcgaatcctgaaatgcagaagcgtgtatacaacgccatccgtgcgatgatggaaagcggtaataatccgattgtttccatacacgatcacggcgcgggcgggcatttaaactgtttgtcggaactggtagaaagcaccggcggtaaaattgatctggctaaattgccggttggagatcctaccctgtctgcaaaagaaattgttggtaatgaatcacaggaacgtatgggccttgtgatcaatcaaaacgacatagctacgcttgagcgtgtggctgcacgtgagcgtgcaccattatatgtagtgggtgacattacaggtgatcatcatttcacgtttgaatcttctgtagatggtgcgaagccgatcgactggccgctggaagacatgttcgggaatccgccgaaaacaattcttcgcgatgaaacaccaacggcaacgttcgaagaaattacatatgagcaatcaaaactaaacgaatatttagaagccgttttacagctcgaagcggttgcttgtaaagactggttaaccaataaagttgaccgttcggttacaggtaaagttgcacagcagcaaaatgttggttcgctgcaattgccgttaagcaacttcggtgccatggcgcttgattataaaggtgtagttggagtggcaactgctgttggacacgctcctgctgttgccttgatcaatccggaagcaggttcgagaattgcgattgcagaagcattggcgaatattgtttttgcgccgattgacggaggcttaagtggtgtatcattgagtgcgaactggatgtggccttgtaaaaataaaggcgaagatgcacgtttatatgcagctgttgaagcggtaagtgattttgcctgcgatcttggaatcaatattcctaccggaaaagattctctttcaatgacgcagaaatacaaagacggcgtggtatatgcacccggaacggtgatcatatctgcttccggtgaagtgagtgatatccgtaaaggtgttacaccgaatgttgttaaagaagccggtacgggtttgatctatattgatcttacgtgtatgccgcttacattaggcggttcatcgtttgcacagattttgaataaacttggaaattcatctccggatattttagatacagaacatttcgaacgtacgtttgatgcgatccaggatttacttcaggatgaattgatccttgccggacacgatgtatcaagcggaggtttaattacgacattgcttgaaatgtgttttcctgaaaatggaatcggcatgaatgtttcattggacttcctgggagaaacagatctggtaaaatgtctgtttgctgagaacccggcattggtgctgcaagtaaaagatgcagtgaaagtacaggacatgcttgtaacaaaaggggttggagcagctattatcggaacagtagagcctggtgcttctgctgtttcaattcaattgaacggtacaacaaccgattttgatattgccgcattacgtacggtctggtacaagacttcttatttattagatgaaaaacaaagcactcctgcctatgcaaaagagcgttttgaaaattatactaaacacgaaatccaattcagcttcccggcaaactttacaggtaagctgaacagttacggattagatgcagcacgcactacgaagagcggtattaaagctgcgatcatccgtgaaaaaggtgtgaacggagaccgtgaaatggcttactccatgtggcttgcaggctttgatgtgaaagatgttcacatgacagatttaattgccggccgcgaagatctgggtgatgtaaactttattgtatttgttggtggtttctctaacagtgatgtgttgggttctgcgaaaggctgggccggtgcattcctgtacaatgaaaaagcgaaaaaagcactggataatttctatgcacgtccggataccttgtcactaggcgtttgtaacggttgccagttgatggttgagttgggactgatcaaccagaaccatgaatcaaaaccaaagatgcatcacaacagctcagggaaatttgaatccatttacctgaatgtggatgtcgcaaaagaaaataaatcgatcttattaaaatctattgagggttctaaattaggaatctgggttgcacacggcgaaggtaaattctacttcccgtacgatgtaacgaaatataatattgtcttaaactacagtcatgcaagctatccggccaatccgaacggttcgcctgtaaatgctgcaggtattgtatcggacgacggcagacatctagcgatgatgcctcacctggaacgttcagtattcccatggcaatgcggctactaccctgctgataaagcgaaggacgaatgtacaccgtggctggaagcctttgttaacgcacgtaagtgggtggaaggaaaaaaataa

SEQ ID NO: 52835 - protein, 1231 aa, Cytophaga hutchinsonii ATCC 33406
MIVFAKKSTGTIYAIHTEHSFSTEDKQKLNWLLDGEVLSDTTLAGFYRGPRKEMLTPWATNAVEITQNMGIAGILRIEEFSSVANTEASHDKMLEVIYQNLTQDLYNIHIQPEPIKYIDDIAAFNKQEGLALSQEEIDYLDSVAKKHNRKLTDSEVFGFSQVNSEHCRHKIFNGRFIIDGVEKESSLFKLIKKTSETNPNKIVSAYKDNVSFTKGPVMEQFAPATQDKPDYFERKHVESVLSLKAETHNFPTTVEPFNGAATGSGGEIRDRIAGGIGSAPLAGTAVYMTAYSRLTKDRPWEKNGMKERDWLYQTPMDILIKASNGASDFGNKFGQPVINGSVFTFEHEENGKRYGFDKVIMQAGGIGYGVLKDAKKGLPKTGDKIVVMGGDNYRIGMGGSAVSSLDTGALNSAIELNAIQRSNPEMQKRVYNAIRAMMESGNNPIVSIHDHGAGGHLNCLSELVESTGGKIDLAKLPVGDPTLSAKEIVGNESQERMGLVINQNDIATLERVAARERAPLYVVGDITGDHHFTFESSVDGAKPIDWPLEDMFGNPPKTILRDETPTATFEEITYEQSKLNEYLEAVLQLEAVACKDWLTNKVDRSVTGKVAQQQNVGSLQLPLSNFGAMALDYKGVVGVATAVGHAPAVALINPEAGSRIAIAEALANIVFAPIDGGLSGVSLSANWMWPCKNKGEDARLYAAVEAVSDFACDLGINIPTGKDSLSMTQKYKDGVVYAPGTVIISASGEVSDIRKGVTPNVVKEAGTGLIYIDLTCMPLTLGGSSFAQILNKLGNSSPDILDTEHFERTFDAIQDLLQDELILAGHDVSSGGLITTLLEMCFPENGIGMNVSLDFLGETDLVKCLFAENPALVLQVKDAVKVQDMLVTKGVGAAIIGTVEPGASAVSIQLNGTTTDFDIAALRTVWYKTSYLLDEKQSTPAYAKERFENYTKHEIQFSFPANFTGKLNSYGLDAARTTKSGIKAAIIREKGVNGDREMAYSMWLAGFDVKDVHMTDLIAGREDLGDVNFIVFVGGFSNSDVLGSAKGWAGAFLYNEKAKKALDNFYARPDTLSLGVCNGCQLMVELGLINQNHESKPKMHHNSSGKFESIYLNVDVAKENKSILLKSIEGSKLGIWVAHGEGKFYFPYDVTKYNIVLNYSHASYPANPNGSPVNAAGIVSDDGRHLAMMPHLERSVFPWQCGYYPADKAKDECTPWLEAFVNARKWVEGKK

SEQ ID NO: 52836 - DNA, 2286 bp, Rhodococcus sp. RHA1
  CDS (1)..(2286): transl_table=11
gtgtcagcacacccggtcgataccgtcaccgccgccaccgcgacccccgacgtcgcacagcccttcaaggaactggggctgaaggacgacgagtacgcccgcatcaaggagatcctgggccgccgccccaccgaggccgagctggcgatgtactcggtgatgtggagcgagcactgctcctacaagtcgtccaaggtgcacctgaagtacttcggtgagaccacgaccgacgagatgcgttcctcgatgctcgcgggcatcggcgagaacgccggcgtcgtcgacatcggcgacggctgggccgtcacgttcaaggtcgagagccacaaccacccctcctacgtggagccctaccagggtgcggccaccggcgtcggcggcatcgtccgcgacatcatggccatgggtgcacggcccatcgccgtcatggaccagctgcgcttcggtgcggcggacgcccccgacacccgacgcgtcgtcgacggtgtggtgcgcggtgtcggcggctacggcaactcgctcggcctcccgaacgtcggcggcgagaccgtgttcgacgagtcgtacgccggtaaccccctggtcaacgctctgtgtgccggcgcgatgcgcgtcgaggacctgcacctcgcgttcgcatccggtgccggcaacaagatcatcctgttcggtgcgcgcaccggcctcgacggcatcggcggcgtgtccgtcctcgcgtcggagacgttcgacggtgatgaatcgggtaccggcaggaagaagcttccggcggtgcaggtgggtgacccgttcaccgagaaggtgctcatcgagtgctgtctggagctgtacgccgcgaagctcgtggtcggtatccaggacctcggcggcgccggcctgtcctgcgccacgtccgagctcgccgcggccggcgacggcggcatgcacatcaacctcgagcaggttccgatgcgcgccaccggcatgaccgcggccgaggtgctgtccagcgagtcccaggaacgcatgtgcgcggtcgtcacccccgacaacgtcgacgcgttcatggaggtctgcaagaagtgggacgtcctcgccaccgtcatcggtgaggtcaccgacggcgagcggctcaccatctcctggcacggcgagaccgtcgtcgacgtgccgccgcgcaccgtcgcccacgagggtcccgtgtacgagcgtcccgtgcagcgtcccgcgagccaggacgccctcgtcgccaacaccaccgccggactgacgcgtcccgaatcggccgacgaactgaaggccaccctgctgaagatgctcgcgtccccggcgctgtgcagccgcaagtggatcaccgagcagtacgaccgctacgtgcgcggcaacaccgtcctggccgagaacgccgactccggcgtgatccgcgtcgacgagaagacgggccgcggcatcgccctcgccaccgacgcgtccggccgctacacggcgctcgacccgtacgccggcgcccagctggcgctcgccgaggccttccgcaacgtcgccgtcaccggcgcgacgccgaaggccgtcagcaactgcctgaacttcgggtcccccgaggatccgggcgtcatgtggcagttccagcaggccgtccgcggcctggcggacggctgcgccaagctcggcatccccgtcaccggcggcaacgtcagcttctacaaccagaccgggtcgaccccgatcctgcccaccccggtggtggccgtgctcggcgtcatagacgacgtgcaccgtcgcatccccaccggtctcggactggaaccgggcgaaacgctgatcctgctcggcgacacccgcgacgagttcgacgggtccatctggtcgcaggtcgagcacggccacctcggcggcgtgccgccgaaggtcgacctcgagcgggagcagttgctggccgacatcctcctcgcggcgtcccgcgacggactggtgtccgcggcgcacgacctgtccgaaggcggtctcgcacagaccgtcgtcgaggccgcgctggccggggagacgggctgccgcatcttgcttcccgacgacgccgatccgttcgtcaccctgttctccgagtcgtcgggccgcgtgctcgtcgcggtcccgcgcaccgaggaaactcgctttaccggtatgtgcacggcccgtaatctcccgtgggtgcgcatcggtgtggtggacgaggggtccgattccgtcgaggtccagggccagttctcggtctcgctggccgagctgcgcacgacgttcgagggaactctgccggcattgttcgggtga

SEQ ID NO: 52837 - protein, 761 aa, Rhodococcus sp. RHA1
MSAHPVDTVTAATATPDVAQPFKELGLKDDEYARIKEILGRRPTEAELAMYSVMWSEHCSYKSSKVHLKYFGETTTDEMRSSMLAGIGENAGVVDIGDGWAVTFKVESHNHPSYVEPYQGAATGVGGIVRDIMAMGARPIAVMDQLRFGAADAPDTRRVVDGVVRGVGGYGNSLGLPNVGGETVFDESYAGNPLVNALCAGAMRVEDLHLAFASGAGNKIILFGARTGLDGIGGVSVLASETFDGDESGTGRKKLPAVQVGDPFTEKVLIECCLELYAAKLVVGIQDLGGAGLSCATSELAAAGDGGMHINLEQVPMRATGMTAAEVLSSESQERMCAVVTPDNVDAFMEVCKKWDVLATVIGEVTDGERLTISWHGETVVDVPPRTVAHEGPVYERPVQRPASQDALVANTTAGLTRPESADELKATLLKMLASPALCSRKWITEQYDRYVRGNTVLAENADSGVIRVDEKTGRGIALATDASGRYTALDPYAGAQLALAEAFRNVAVTGATPKAVSNCLNFGSPEDPGVMWQFQQAVRGLADGCAKLGIPVTGGNVSFYNQTGSTPILPTPVVAVLGVIDDVHRRIPTGLGLEPGETLILLGDTRDEFDGSIWSQVEHGHLGGVPPKVDLEREQLLADILLAASRDGLVSAAHDLSEGGLAQTVVEAALAGETGCRILLPDDADPFVTLFSESSGRVLVAVPRTEETRFTGMCTARNLPWVRIGVVDEGSDSVEVQGQFSVSLAELRTTFEGTLPALFG

SEQ ID NO: 52838 - DNA, 2328 bp, Trichodesmium erythraeum IMS101
  CDS (1)..(2328): transl_table=11
atgtcacaaactcccttttctccagaagaaatagcatctgaaggcatcaaaccagaagaatatcaagaaattctgaaccgcttaggtcgccaccccaataaagcagaactaggaatgttcggagttatgtggtcagaacactgctgctacaaaaactctcggcctctcctcaaacaatttcccaccacaggtaaacgtatccttgttggaccaggagaaaacgccggagtcgtagacttagacaacggactccaacttgctttcaaaattgaatcccacaaccacccatccgctgtcgaaccattccaaggagctgccaccggagtcgggggtatcctccgagacatcttcacaatgggtgcccgacccatcgctgtactcaactctctgcgcttcggttccctaaaagatgccaaaaccaaacgcatttttactggagttatttccggcatttctcattacggtaactgtttcggagtgcctaccgtaggaggagaaatttactttgaccacgcctacacaggtaaccccctagtcaacgtgatggcattaggactaatggaaacccccgaaattgttaaatctggtgcatctggtattggtaacccagtcttatatgttggttccaccacaggtagagacggtatgggtggagccagtttcgccagtgctgaactgagcgcacagtcaatagacgatcgccccgccgtgcaagtaggagacccattcttagaaaaatgtttagttgaagcttgtctagaagcatttaaaacaggggcagtagtcgcagcgcaagatatgggagctgctggcatcacctgttccacctccgaaatggcaacaaacggaggtgtgggcattgaattcgacttagacaaagtaccagtccgagaaactggtatggttccatacgaatacttgctatcagaatctcaagaacggatgttatttgtcgcccagaaaggtcgcgaacaagaattaattgatatttttaaacgttgggaacttcatgcagtagtagcaggtacagtcattgaagaacctattgtgcgaattttatttgagggcaaagttgctgctgaaatacctgctacagctttggcagacaatactcctatttatcaccgggagttattgagcgaaccgccagaatatgtcagaaaagcttgggagtggagtgtggcgttactaccagcatctacagaacgtggtattgaaattaagggaaatttccaaacctggaatgatattttactgactttattagatactccaactattgcttctaaaaattgggtatatcaacaatatgattatcaagtacaaaataatactgttataatacctggtggtgctgatgctgctgtaattcggttacgctcacaaatttctaatattaataacccaataacaaattctggtgttgctgcaacagttgactgtaattcccgtttagtttatctcgatccatatacaggggcaaaggcagtagttgcagaagcagcaaggaatctcagttgtgtgggtgcagaacctgtagcggttacagataatcttaattttggcagtccggaaaaacctgtgggatattggcaactagcagagagttgtcgtggtattgctgaaggttgtcgggagttgggaacccctgttactggggggaatgtctctttatataatgagactttagatgctgatggtcatccccaggcaatttatccgactccagtggtaggaatggtggggttagttcctgatattactagtatttgtggtcaaggttggcaaactgagggtgatgttatctatttaatagggaatttagtgggtgcatctttagctgcttctgaatatttggcaactgttcatgatgtggttgctggtaaaccgatcgaagtagattttgatttggaaaggagggtacaggctgtttgtcgtcatggcatccgacaagggtgggtgcgttctgcccatgatagtgctgagggtggtttagcgatcgctctagctgagtgttgtattagtgggaagttgggctctgaaattatttgggaattgtctgatttttctagttttcgatgggatgagtttctgtttggtgagggtggttgccgaattttggtttctattgcgccggaaaatcagataatttgggagtcatatcttcaggaaaatttggcagatttttggcagaaaattggtctggtgggtaatgctgaaagtggtttgcaaattttagttaatcagggtgtgtgtttgattaatatagatatgggagaaatgagcgatcattttaaaaatgctattgaaagacgtttggatttttag

SEQ ID NO: 52839 - protein, 775 aa, Trichodesmium erythraeum IMS101
MSQTPFSPEEIASEGIKPEEYQEILNRLGRHPNKAELGMFGVMWSEHCCYKNSRPLLKQFPTTGKRILVGPGENAGVVDLDNGLQLAFKIESHNHPSAVEPFQGAATGVGGILRDIFTMGARPIAVLNSLRFGSLKDAKTKRIFTGVISGISHYGNCFGVPTVGGEIYFDHAYTGNPLVNVMALGLMETPEIVKSGASGIGNPVLYVGSTTGRDGMGGASFASAELSAQSIDDRPAVQVGDPFLEKCLVEACLEAFKTGAVVAAQDMGAAGITCSTSEMATNGGVGIEFDLDKVPVRETGMVPYEYLLSESQERMLFVAQKGREQELIDIFKRWELHAVVAGTVIEEPIVRILFEGKVAAEIPATALADNTPIYHRELLSEPPEYVRKAWEWSVALLPASTERGIEIKGNFQTWNDILLTLLDTPTIASKNWVYQQYDYQVQNNTVIIPGGADAAVIRLRSQISNINNPITNSGVAATVDCNSRLVYLDPYTGAKAVVAEAARNLSCVGAEPVAVTDNLNFGSPEKPVGYWQLAESCRGIAEGCRELGTPVTGGNVSLYNETLDADGHPQAIYPTPVVGMVGLVPDITSICGQGWQTEGDVIYLIGNLVGASLAASEYLATVHDVVAGKPIEVDFDLERRVQAVCRHGIRQGWVRSAHDSAEGGLAIALAECCISGKLGSEIIWELSDFSSFRWDEFLFGEGGCRILVSIAPENQIIWESYLQENLADFWQKIGLVGNAESGLQILVNQGVCLINIDMGEMSDHFKNAIERRLDF

SEQ ID NO: 52840 - DNA, 2334 bp, Synechococcus sp. CC9311
  CDS (1)..(2334): transl_table=11
gtgacccagtcctcccatgcggttgcggcatttgatcttggggcggctttgcgccaagaggggctcaccgaaacggattacagcgaaattcagcgtcggcttggacgggatcccaaccgcgctgagttgggcatgtttggtgtgatgtggtcagagcattgctgttatcgcaattccagacccctcttgagtggttttccaacggaaggcccacgcattcttgtcggccctggagagaacgccggtgtggtggatctgggagaaggtcaccatttggcgttcaaagttgaaagccacaaccacccttcagctgttgagccttttcagggtgctgctacgggggttggtggcatccttcgtgacattttcacgatgggcgccaggccgattgcattgctgaatgccttgcgttttggaccgctggacgaaccagcgacccgtggattggtggaaggggttgtggctggcattgcccactacggcaattgcgttggcgtgcccaccgtgggtggagaggttgcattcgatccgtcgtatcgaggcaaccccttggtgaacgccatggccctgggcctgatggaaacggatgaaatcgtccgctcgggagccgcaggggttggtaatccggtggtgtacgtggggagcaccacgggcagagacggcatgggaggtgccagttttgcgagcgctgagctcagtgcggattcactggatgatcgccctgctgtgcaggtcggagatccctttctcgagaagggcttgattgaggcttgtctggaagcctttcaaagcggtgatgttgtcgccgctcaggatatgggtgctgcaggtcttacctgtagttgttcggagatggctgctaagggagatgtcggtgtcgagttggacctcgatcgggtgccagcaagagaaaaagggatgaccgcctacgaattcctactttcggaatcgcaagagcgcatgttgtttgtggtgcgtgctggtcgggaggagcagctgatgcagcgtttccggcgttgggggcttcaggcagcggttgtgggtcgcgtcctggaagagaaggtggtgagggtgctgcaacacggtgctgtggcggcagaagttccggccagggctttggcagaagacacaccgatcaacaagcacgagctgctttccgagcccccagatgacatccagacgcactggacctggcgtgaatctgatcttcctagtcctgccatcgatcgcgattggaatgcagatctgctgcgtttgcttgatgaccccacgattgccagcaagcgctggatttatcgccaatacgaccaacaggtgttggccaatacggtgattcgagccggtggtgctgatgctgctgttgttcgtctccgtcctcaacagggtgatgcatcgctgcaaatgtctcagcgtggcgttgcggccacgctggattgtccaaatcgctgggtggcgcttgacccagagcggggagcgatcgcagcggtggctgaggctgcccgcaatctcagctgtgttggagcccagccgatcgctgtgaccgacaacctcaatttcccatccccggaaacatcaaaggggtattggcagttggcgatggcatgccgtggcctatcccatgcctgtcgctccatgggcacccctgttaccggtggcaacgtctctctctacaacgaaacgagggcagatgatggcagtcttcagcccattcaccccacgcctgttgtgggcatggtgggactggtggaagatctcgaccgctccggaggtttggcttggcgtcaacctggcgattttgtggtgctacttggtgtctccaccgatgaggaggggaatgaaagtgttggcttggcgggcagtagctaccaaggagctgttcatgggttgctcactggccgtccaccgagcgtggatctggaattagagggtcaagttcaagctttggttcggcaggcgtttgcccagggtgtgttggcctcagctcatgacagcagtgatggtggtttagctgtagcgctcgcggaaagtaccctggcctctggcctcggagttgatctcaacctgccccataggtctgctcggctggatcgtgttttgtttgctgaaggtggtgcgcgcattgtcgtttcggttcgcgcagagcagcgcagtgcttggcattctttggtggcctcgcaagagcatcgaagtgttccagtaacagagattggaaccgttgccgaccatggttgttttcggttggcggtggagaaacatccagtaattgatctggccgttgagaccctgcgagagcaatacgaacaagcagttccccgtcgcctcggagcggtttga

SEQ ID NO: 52841 - protein, 777 aa, Synechococcus sp. CC9311
MTQSSHAVAAFDLGAALRQEGLTETDYSEIQRRLGRDPNRAELGMFGVMWSEHCCYRNSRPLLSGFPTEGPRILVGPGENAGVVDLGEGHHLAFKVESHNHPSAVEPFQGAATGVGGILRDIFTMGARPIALLNALRFGPLDEPATRGLVEGVVAGIAHYGNCVGVPTVGGEVAFDPSYRGNPLVNAMALGLMETDEIVRSGAAGVGNPVVYVGSTTGRDGMGGASFASAELSADSLDDRPAVQVGDPFLEKGLIEACLEAFQSGDVVAAQDMGAAGLTCSCSEMAAKGDVGVELDLDRVPAREKGMTAYEFLLSESQERMLFVVRAGREEQLMQRFRRWGLQAAVVGRVLEEKVVRVLQHGAVAAEVPARALAEDTPINKHELLSEPPDDIQTHWTWRESDLPSPAIDRDWNADLLRLLDDPTIASKRWIYRQYDQQVLANTVIRAGGADAAVVRLRPQQGDASLQMSQRGVAATLDCPNRWVALDPERGAIAAVAEAARNLSCVGAQPIAVTDNLNFPSPETSKGYWQLAMACRGLSHACRSMGTPVTGGNVSLYNETRADDGSLQPIHPTPVVGMVGLVEDLDRSGGLAWRQPGDFVVLLGVSTDEEGNESVGLAGSSYQGAVHGLLTGRPPSVDLELEGQVQALVRQAFAQGVLASAHDSSDGGLAVALAESTLASGLGVDLNLPHRSARLDRVLFAEGGARIVVSVRAEQRSAWHSLVASQEHRSVPVTEIGTVADHGCFRLAVEKHPVIDLAVETLREQYEQAVPRRLGAV

SEQ ID NO: 52842 - DNA, 3888 bp, Alkalilimnicola ehrlichei MLHE-1
  CDS (1)..(3888): transl_table=11
atgcacgtgttgcgattgcagggccggccggccctgtcggattttcgactgcagcgcctcctcgaggcgctgcagtccgttcacgccggtgttcaggcggtcgaggcccgtttcgtccacttcgccgccagccgggagccgttggacgacgggcagcaggccctgctgaaccggctgttggactacgggcccgatctgccggaccgtggggtcacagggcgcactgtgctggtgaccccgcgaccgggcaccctgtcgccatggtcgagcaaggccaccgacatcctgcaccactgtgggctggaggccgtgtcccgggtggaacggggcattgcgtacaccgttgccgctggtgatgagcccgacgaggccgcctgggggcagctgggcgcggtgctccatgaccgcatgaccgagactgtctggctggcgggcgagccggagacggcgctgttccgggaggacgagccggccccgttgcagcgggtggccctgctggcgggcgggcgcaatgccctggtacaggccgacaaggccctgggtctggccctggccgacgacgagatcgactacctggtcgagcagtaccaagccctgggccgcgaccccacggacgtggaactgatgatgttcgcccaggccaactccgagcattgccggcacaagatcttcaacgccgactggaccatcgacggcgagcgccaggcacgatcgttgttcgcgatgatccgcaacacccaccagcagcgcccggagggggtgctgtccgcctacgccgacaatgctgcggttgcccgcggccacgaggcccggcggttctttccggacccgagtacgggggtctacggcgagcaccaggagccggcgcacctggtgatgaaggtggagacccacaaccaccccaccgccatcgagccctggtcgggggcagccaccggggccggcggcgagatccgcgacgaggcggccaccgggatcggtgcccgcagcaaggccgggctggtgggcttctcggtctccgacctgcggatccccggttacgaacagccctgggagtccgactacggccgccccgggcgcatcgcctcagcgctggacatcatgctggatgggcccatcggtgcggccgccttcaataacgagttcgggcgcccgaacctggcgggctatttccgcaccctggaggtggaggccggcggcgagcggcgcggctaccataagcccatcatgatcgccggcggcatgggcaacatccgcgacgcccacgtgcagaagggcgcgctgcaggagggcacgccggtggtggtcctgggcggtccggccatgctcatcggcctgggcggcggcgcggcctcctcggtggccagcggtcagggggacgaggcgctggattttgcctctgtgcagcgtgccaacccggagatgcagcgccgcgcccagggcgtcatcgacgcctgctgggcgctgggcggtgacaaccccatcgtctcgatccacgacgtgggtgcgggggggctgtccaacgccgtgccggagatcctcgacgactccggccgggggggggagctggaactgcgtgaggtgcccagtgacgagccgggtatgtcgcccatgcagatctggtgcaacgaatctcaggagcgctacgtgctggcggtggccccggagcggctggacgccttccgcgccctgtgccggcgcgagcgctgcccggtggcggtgatcggccatgccaccgctgagcggcggctgcggctggacgatcgcctgctcggtgagccggcggtggacgtgcccatggagctgctgttcggcaagccgccgaagatgcaccgccaggtggagcgtggcgaggcggtgggttcctccgacgacttcgagatgctggatccggagcaggccggcgagcggctgctgcggctgcccgcggtcgccgccaaggacttcctcatcaccatcggtgaccgctccatcaccggcctggtggcccgcgaccagatggttgggcgctggcagaccccggtggccgacgtggccgtcaccctggccgactaccggggctataccggcgaggccatggccatgggcgagcggtccccgctggcgctgctggacgcgcccgcctcgggccgcatggcggttaccgaggccctgaccaacctggccgcggccaatgtgggtgacatccgccgggtcaacctctccgccaactggatggcggccgccggtcacccgggggaggacgcccggctctacgataccgtgcgggcggtgggcatggagctgtgcgcccaactgggcgtggccatcccggtgggcaaggactccctgtccatgaagaccgtctgggagcaggacggcgagacccgcagtgtcacctcgccgctgtcgctcatcgtctccgcctttgcgccggtgaccaacgcgcgccgcaccgtcacccccgagttgcgcacccggggcggcgacaccgtgctgctactggtcgatctcggtcgaggccgcaaccgcctgggtggctccgccctggcacaggtgcatgggctgctgggcgacaccccgccggacctggacgagccggaactgctggtcggcttctttaatgcggtccaggacctgctgcgcgacgaccgcctgctggcctaccacgaccgctccgatggcgggctgttcgtcaccctggcggagatggccttcgccgcccgctgcggcctggacatccgactggataacctgggcagcggtgtcatcggtgcgcttttcgccgaggagccgggggccgtgctgcaggtccgccgggccgagttggacgccgtgctggaccgcctgggcgaggccggcctcgacgcccacagccataacctgggcacggtgcgcgacgacgaccgcttcctgttccgcttccacgaccaggcggtcatcgaccggccccgggtcgcgctgcagcaggtctgggccgagaccagttaccgcatgcaggccctgcgcgacaacccggcctgcgccgacgaggcctttcagaccctgtccgacccggacgacccggggctgaacccggtgctccgcttcgacccggcggaggacgtggccgccccctatgtcgccgccggcgcccgcccacgggtggcggtgctgcgcgagcagggggtgaacggccacgtggagatggccgccgccttccacgccgccggtttcgaggcggtggacgtgcacatgagcgacatcatcgagggccgcgcgcagttgggcgacttcgccgggctggtggcctgtggcggtttctcctacggggatgtactgggggccggtggtggttgggcgcgctcgatccgctataacgaccgggcccgcgaccagttcgaggccttcttcaaccgtggtgataccttcggtctgggggtctgcaacggctgccagatgctctcccagctcaaggatctgatccccggggcggaactctggccgcgcttcgtgcgcaaccgctccgagcagttcgaggcccggctctcccaggtggaggtgctcccgtcgccatcgctgttcctggacggcatggccggctcgcgcctgcccatcaccgttgcccacggcgagggccgtgccgccttcgggccggagagcgggccgcgcaaggccgcttcagccaacttggtggcgatgcgctatgttgatggtcggggtcgggtcgcggagcagtatccggccaaccccaacggctcccccggcgggatcaccgggctgaccacggtggacggtcgttacaccatcatgatgccgcatccggaacgggtcttccgcaccgtgcagcattcctggcacccggcggactggggggaggatggcccctggctgcggttgttccgcaacgcccggcgctggatcggatga

SEQ ID NO: 52843 - protein, 1295 aa, Alkalilimnicola ehrlichei MLHE-1
MHVLRLQGRPALSDFRLQRLLEALQSVHAGVQAVEARFVHFAASREPLDDGQQALLNRLLDYGPDLPDRGVTGRTVLVTPRPGTLSPWSSKATDILHHCGLEAVSRVERGIAYTVAAGDEPDEAAWGQLGAVLHDRMTETVWLAGEPETALFREDEPAPLQRVALLAGGRNALVQADKALGLALADDEIDYLVEQYQALGRDPTDVELMMFAQANSEHCRHKIFNADWTIDGERQARSLFAMIRNTHQQRPEGVLSAYADNAAVARGHEARRFFPDPSTGVYGEHQEPAHLVMKVETHNHPTAIEPWSGAATGAGGEIRDEAATGIGARSKAGLVGFSVSDLRIPGYEQPWESDYGRPGRIASALDIMLDGPIGAAAFNNEFGRPNLAGYFRTLEVEAGGERRGYHKPIMIAGGMGNIRDAHVQKGALQEGTPVVVLGGPAMLIGLGGGAASSVASGQGDEALDFASVQRANPEMQRRAQGVIDACWALGGDNPIVSIHDVGAGGLSNAVPEILDDSGRGGELELREVPSDEPGMSPMQIWCNESQERYVLAVAPERLDAFRALCRRERCPVAVIGHATAERRLRLDDRLLGEPAVDVPMELLFGKPPKMHRQVERGEAVGSSDDFEMLDPEQAGERLLRLPAVAAKDFLITIGDRSITGLVARDQMVGRWQTPVADVAVTLADYRGYTGEAMAMGERSPLALLDAPASGRMAVTEALTNLAAANVGDIRRVNLSANWMAAAGHPGEDARLYDTVRAVGMELCAQLGVAIPVGKDSLSMKTVWEQDGETRSVTSPLSLIVSAFAPVTNARRTVTPELRTRGGDTVLLLVDLGRGRNRLGGSALAQVHGLLGDTPPDLDEPELLVGFFNAVQDLLRDDRLLAYHDRSDGGLFVTLAEMAFAARCGLDIRLDNLGSGVIGALFAEEPGAVLQVRRAELDAVLDRLGEAGLDAHSHNLGTVRDDDRFLFRFHDQAVIDRPRVALQQVWAETSYRMQALRDNPACADEAFQTLSDPDDPGLNPVLRFDPAEDVAAPYVAAGARPRVAVLREQGVNGHVEMAAAFHAAGFEAVDVHMSDIIEGRAQLGDFAGLVACGGFSYGDVLGAGGGWARSIRYNDRARDQFEAFFNRGDTFGLGVCNGCQMLSQLKDLIPGAELWPRFVRNRSEQFEARLSQVEVLPSPSLFLDGMAGSRLPITVAHGEGRAAFGPESGPRKAASANLVAMRYVDGRGRVAEQYPANPNGSPGGITGLTTVDGRYTIMMPHPERVFRTVQHSWHPADWGEDGPWLRLFRNARRWIG

SEQ ID NO: 52844 - DNA, 2262 bp, Hyphomonas neptunium ATCC 15444
  CDS (1)..(2262): transl_table=11
atgaccgatactgccgccattctctcccatctcacagccgagcaggacgccgcctccggtgtcgggcacggcatcaaggccgatgaatgggaacgcctggtcagccgcctgggccgtaatcccaatctggtggaactcggcatctattcggtgatgtggtcagagcactgctcctacaaatcctcccgccgccacttgtcgaaattcccgaccaaaggcccccgcgtcatccaggggccgggcgaaaacgccggcgtcatcgacatcggcgatggccaggccgccatcttcaagatggagagccacaaccacccctcttacatcgagccgtatcaaggcgcggcgaccggcgtcggcggcatcctgcgcgacgtcttcacgatgggcgcccggcccgttgccctcgtcaacgccctgcgcttcggtgaccccagccatccgaaaacccgccagcttgtggcaggtgtcgtcgctggcatcggtggctatggcaactgtgtcggcgtgcccaccgttgccggtgaaacccagttcgacgaaggctataacggcaacatcctcgtcaatgcgatggctgttggcctcgccgatcaggacaagatcttctacgcccgcggcgccctgcccggcctgcagatcctttatgtcggttccaagacgggccgcgacggcatccacggcgccaccatggcctcggcagaattcaccgaaggcgaggaagacaaccgccccacggtccaggtcggcgaccccttcacggaaaaactgctgatcgaagcctgcctcgaattgatggccaccgacgccatccagtccatccaggacatgggcgctgctggcctcacctcctcctcggtcgaaatggctgataaaggcggcgtcggcatcgagatggatctcgacaaggtgccccagcgcgaaaccggcatgacggcctatgaaatcatgctgtcggaaagccaggagcgtatgctgatgatcctcaagcccggcaaggaagccgtggccaagaagatcttcgacaaatgggacctcgacgccgaagtgatcggcgtgaccacagactccggacgccttgtactcaaacagttcggcgaagtggtgtgcgatattccggtcgcgccgctcggcgaagacgcgcccaactatgaccgtccgtggacggagccgccgaaacgcccggatttcgacatttcaaaacatcctgccccggcgaactatgccgaagtgctgacgaagctgatgtcgacccccgacatggcctccaaacgctgggtctgggaacagtatgaccggcacgtgatgaacgatacgatcgactcgtcacagtcgggcggcgacgccgctatcgtgcgcgttcacggcaccaacaaggccctcgccatctgttcggactgcaacccccattacgttgctgccgacccgtatgaaggcggcaagcaggccgtggccgaagcctaccgcaacctctccgccgtcggcgccacgccgattgcgatcacggacaacctcaacttcggcaaccccgaaaagcccgccacaatgggctatatcgtcaaggccatcgaaggcatggccgaagcgtgccgggtgctgaacttcccggtcgtctcgggcaacgtctcgctctacaacgagaccgatggcaaggccattccgcccacccccgtcgtcggcggcgtcggcctgatcgacgacctctccaaaattgccaccctgaaaggcgcccagccgggcgacgcgctgattatcattggcgaaaacgcagctgactttggcgcctcgctctatgcccgcaaatggcttggcctgaagggcgacgacctcggcccgcccccgccggttgatctcgaagacgaaatccagacctcggccatcgtccgcgagctgattgccaagggactggtccacgcagtccacgacatcagcgatggcggcctggcagtcgccgctgctgaaatggcgctggccggcaatgtcggcatcatgctcgacgcgcaggccgaccgcctaggcagcctcagcccactggcatacctcttcagcgaaacgcagggccgctacctcgttgccgcaaagaatgaagacgaagtgttcgacctgctcggcgacatcccggccctctttgcaggcacagtggaaaataccggcgccatcaccttgatccatgatctgcgcaagagcgaaaaaactgtcctgccgctgcaggatctccgcgcagcccatgaaggctggctgcccggctacatgaacgctgtttga

SEQ ID NO: 52845 - protein, 753 aa, Hyphomonas neptunium ATCC 15444
MTDTAAILSHLTAEQDAASGVGHGIKADEWERLVSRLGRNPNLVELGIYSVMWSEHCSYKSSRRHLSKFPTKGPRVIQGPGENAGVIDIGDGQAAIFKMESHNHPSYIEPYQGAATGVGGILRDVFTMGARPVALVNALRFGDPSHPKTRQLVAGVVAGIGGYGNCVGVPTVAGETQFDEGYNGNILVNAMAVGLADQDKIFYARGALPGLQILYVGSKTGRDGIHGATMASAEFTEGEEDNRPTVQVGDPFTEKLLIEACLELMATDAIQSIQDMGAAGLTSSSVEMADKGGVGIEMDLDKVPQRETGMTAYEIMLSESQERMLMILKPGKEAVAKKIFDKWDLDAEVIGVTTDSGRLVLKQFGEVVCDIPVAPLGEDAPNYDRPWTEPPKRPDFDISKHPAPANYAEVLTKLMSTPDMASKRWVWEQYDRHVMNDTIDSSQSGGDAAIVRVHGTNKALAICSDCNPHYVAADPYEGGKQAVAEAYRNLSAVGATPIAITDNLNFGNPEKPATMGYIVKAIEGMAEACRVLNFPVVSGNVSLYNETDGKAIPPTPVVGGVGLIDDLSKIATLKGAQPGDALIIIGENAADFGASLYARKWLGLKGDDLGPPPPVDLEDEIQTSAIVRELIAKGLVHAVHDISDGGLAVAAAEMALAGNVGIMLDAQADRLGSLSPLAYLFSETQGRYLVAAKNEDEVFDLLGDIPALFAGTVENTGAITLIHDLRKSEKTVLPLQDLRAAHEGWLPGYMNAV

SEQ ID NO: 52846 - DNA, 2235 bp, Rhizobium leguminosarum bv. viciae 3841
  CDS (1)..(2235): transl_table=11
atgaccattccaaacaccatcccgatcacgccggaactcatcgcgagccatggcctgaagccggacgagtaccagcgcattctggatctgatcggccgcgaaccgactttcaccgagctcggcatcttctcggccatgtggaacgagcactgctcctacaaatcctcgaagaagtggctgcgcacgctgccgaccaaggggccgcgcgtcatccagggcccgggcgaaaatgccggcgtggtcgacatcgatgatggcgattgcgtcgtcttcaaaatggagagccacaaccacccctcctatatcgagccttatcagggtgctgcgaccggcgtcggcggcatcctgcgcgacgtcttcaccatgggtgcgcgcccgatcgctgcgatgaacgcgctgcgcttcggcgaaccggatcatccgaagacccgccacctcgtctccggcgtcgtttccggcgtcggcggctacggcaattccttcggcgtgccgacggtcggcggtgaggtcgagttcgacgcccgctacaacggcaacatcctggtcaacgcctttgccgccggcattgcgaaatccaacgccatcttcctctccgaagccaagggcgtcggcttgcccgtggtctatctcggcgccaagaccggtcgcgacggcgtcggcggcgcgacgatggcctcggccgaattcgacgaatcgatcgaggagaagcgcccgaccgtgcaggtcggcgaccccttcactgaaaagtgcctgctggaagcctgcctcgagctgatgcagaccggcgcagttatcgccatccaggatatgggtgccgccggcctcacctgctctgccgtcgaaatgggcgccaagggcgatctcggcatcctgctcgagctcgacaaggtgccggtgcgcgaagagagaatgaccgcctacgaaatgatgctatcggaaagccaagagcgcatgctcatggtgctgcagccggagaaggaagaggaagccaaggcgatcttcgtcaagtggggcctcgactttgccattgtcggctggacgaccgacgatctgcgcttccgcgtcatgcaccagggtgaggaagtcgccaacctgccgatcaaggatctcggtgaccaggcgccggaatatgaccgcccctggcgcgaatccggcaagcgtgcgcctctgcccgcaaatctcgtcgccgcccccgaagactacggccaggcgctgctgcaactcgtcggctccgccaaccagtcgagccgccgctgggtctatgagcagtacgacacgctgatccagggcaattctctgcagcttccgggcggcgacgccggcgtcgtacgcgtcgacggccatccctccaaggcgctcgccttctcctccgacgtcacgccgcgttatgtcgaggcagatcctttcgaaggcggcaagcaggcggtcgccgaatgctggcgcaacatcactgcaacaggcgccgagccgctcgccgccaccgacaatctgaacttcggcaatcccgaaaagcccgagatcatgggccagttcgtcgaggcggtgaaaggcatcggcgaggcctgccgtgcgctcgacttcccgatcgtttccggcaacgtctcgctctacaacgagaccaacggggtcgccatcctgccgaccccgacgatcgcaggtgtcggcctgctgccggattggagcaagatggcccgcatcggcagcgccaacgatggcgataaggtgatcatgatcggcgtcgacggcagccatctcggccagtccgtctatctccgcgacgtgctttccagcagcgaaggtccggctcctgaagtggatctgttcgctgaaagacgcaatggcgatttcgtccgctccgtcatccgcaacggccaggcgaccgcctgccacgacatttcctccggtggccttgccgtggcgctcgccgaaatggcgatggcctcgggcaaaggcctgacgatcgatctgagcgaaggcaagggtgaaccgcatgcgctgctcttcggcgaggatcaggcgcgctacgtgttgacgttgccggccgatgtcgccgattttgtctgcgtcaatgcggaaggcggcggcgttcccttccgccgtctcggcacggtcggaggaacggcgctcgtcgtcggcgatctcatctcgctgccgattcagcaattgcgcgatgcccatgaatcatggttccctgatttcatggaaggccgcggcgaacttgccgctgcggaatga

SEQ ID NO: 52847 - protein, 744 aa, Rhizobium leguminosarum bv. viciae 3841
MTIPNTIPITPELIASHGLKPDEYQRILDLIGREPTFTELGIFSAMWNEHCSYKSSKKWLRTLPTKGPRVIQGPGENAGVVDIDDGDCVVFKMESHNHPSYIEPYQGAATGVGGILRDVFTMGARPIAAMNALRFGEPDHPKTRHLVSGVVSGVGGYGNSFGVPTVGGEVEFDARYNGNILVNAFAAGIAKSNAIFLSEAKGVGLPVVYLGAKTGRDGVGGATMASAEFDESIEEKRPTVQVGDPFTEKCLLEACLELMQTGAVIAIQDMGAAGLTCSAVEMGAKGDLGILLELDKVPVREERMTAYEMMLSESQERMLMVLQPEKEEEAKAIFVKWGLDFAIVGWTTDDLRFRVMHQGEEVANLPIKDLGDQAPEYDRPWRESGKRAPLPANLVAAPEDYGQALLQLVGSANQSSRRWVYEQYDTLIQGNSLQLPGGDAGVVRVDGHPSKALAFSSDVTPRYVEADPFEGGKQAVAECWRNITATGAEPLAATDNLNFGNPEKPEIMGQFVEAVKGIGEACRALDFPIVSGNVSLYNETNGVAILPTPTIAGVGLLPDWSKMARIGSANDGDKVIMIGVDGSHLGQSVYLRDVLSSSEGPAPEVDLFAERRNGDFVRSVIRNGQATACHDISSGGLAVALAEMAMASGKGLTIDLSEGKGEPHALLFGEDQARYVLTLPADVADFVCVNAEGGGVPFRRLGTVGGTALVVGDLISLPIQQLRDAHESWFPDFMEGRGELAAAE

SEQ ID NO: 52848 - DNA, 2205 bp, Pediococcus pentosaceus ATCC 25745
  CDS (1)..(2205): transl_table=11
atgaaggaattaacacctaccgaaattcgagatcaaaaattgtatttgcaatgggggataagcgaagacgaatatcagaaaatcaatgatgctttagggcgcctacctaattttacagaaacgggtttgttcgctgcgatgtggagtgagcattgtgcatataaaaattctaaacccctcttaaaacaatttccaacaacgggttcacagattttacaagggcccggggaaggagctggaattgttgatattggtaacaatcaagcggtggtctttaaagcagaaagtcataatcaccctacggcagtcgagccttatcaaggagcggctactggagttggaggaattattcgtgatattttttccatgggagcgcgtccgattgcattaatggacagtttacatttcggtgaattgaatgatgcccatactaagtatcttgttgaccagacaatagctggaatcggcgattacggtaattgtatgggaatacctacagtaggaggggaaacgaccttcgatacaatttatcaaaacaatccagtcatgaacgcaatgtgtgtggggttattggatatcaacgaccaacaaaaaggagcggctgctggtgtaggtaatgccatttactacgtgggggctaaaacgggacgtgatggaattcaaggagccatttttgcttcaaccaaatttagtgacgaacaagaaacgcaacgttcagccgtccaggttggagatccttttgctgaaaaacaactaatggaagcgtgtctagaactgattcataaccattccgaatatctagtgggaattcaagatatgggagcagcggggttgatttcatcatctgcagaaatggctgctaaagctggatatggaatgcatttgaatttggatttagttccacaacgtgaagaagaaatgatcccttatgaattaatgctatctgaatctcaggaacggatgctgctctgtgtcaaacaaggatttgaacccgcagttgaagcactatttgctaaatacgagagcgaagcagtaaaaattggtgaagttactgcaggtgaccgctatcaattaacctttaagggcgttcaagttgctgatgtaccagtgcatgctttggtggatgaagccccagtttaccatcaaccaagtcagaaacctcagcatatcagtgaaactaaaaagcaacagtatcaacctaaaattgaaaatttaactaaaaccttccaagcgatgttgcaacaacccacaattgcgcataaaggtgctatttttgaacggtatgactctcaagttcaaactaatacaatttcaacgacacaaagtgatgcggcagtggttcgtattcgaggaactcagaaaactttggcgatgacgaccgatgctaatccgcgttatttgtatttagatccctattatggtggacaaatcgcggtcagtgaggccgctcgaaacatagttgctacaggtggaataccattggcaattaccgactgtttgaactttggtagccccgaagacccagaaagtttctatgaattagaacaggctactaaagggatgacggaggcttgtaaattatttgatacacccgtcatttcaggtaatgtctcactttataatgaatccaaccaacaacccatttatccaacaccaatggttggaatggttggtttaattgaaaatccagcttggataacaaccatagattttaaaaaatctggtgatttaatttatattttgggagaaacaacagcagaacttaatggtagtgaattacaaaaaatgcaactcggacatgttgaaggtccattatttaatttcgatttacgctatgaacaggagcaacaagaattgttgactcagttaattcacgcggaacttttgaatagtgcgcatgacttagccgaaggtggcttagccgttggtttagctgaatgcgtgttcgctagtgagttaggatgtgacgtcaagactaatttaacagctacagaactatttgccgaaaatcaggcccgctttattgtgacgattgctccagataaacaaaagatttttgaagcacaagtggcaaacagagcaactttaatcggccaagttggcggtaagcggatcaaaattgcaacgatggatgatgtaattgatgttgatttgaaaaatactaaggagagttggaagggagccctagcatggcagctgaattaa

SEQ ID NO: 52849 - protein, 734 aa, Pediococcus pentosaceus ATCC 25745
MKELTPTEIRDQKLYLQWGISEDEYQKINDALGRLPNFTETGLFAAMWSEHCAYKNSKPLLKQFPTTGSQILQGPGEGAGIVDIGNNQAVVFKAESHNHPTAVEPYQGAATGVGGIIRDIFSMGARPIALMDSLHFGELNDAHTKYLVDQTIAGIGDYGNCMGIPTVGGETTFDTIYQNNPVMNAMCVGLLDINDQQKGAAAGVGNAIYYVGAKTGRDGIQGAIFASTKFSDEQETQRSAVQVGDPFAEKQLMEACLELIHNHSEYLVGIQDMGAAGLISSSAEMAAKAGYGMHLNLDLVPQREEEMIPYELMLSESQERMLLCVKQGFEPAVEALFAKYESEAVKIGEVTAGDRYQLTFKGVQVADVPVHALVDEAPVYHQPSQKPQHISETKKQQYQPKIENLTKTFQAMLQQPTIAHKGAIFERYDSQVQTNTISTTQSDAAVVRIRGTQKTLAMTTDANPRYLYLDPYYGGQIAVSEAARNIVATGGIPLAITDCLNFGSPEDPESFYELEQATKGMTEACKLFDTPVISGNVSLYNESNQQPIYPTPMVGMVGLIENPAWITTIDFKKSGDLIYILGETTAELNGSELQKMQLGHVEGPLFNFDLRYEQEQQELLTQLIHAELLNSAHDLAEGGLAVGLAECVFASELGCDVKTNLTATELFAENQARFIVTIAPDKQKIFEAQVANRATLIGQVGGKRIKIATMDDVIDVDLKNTKESWKGALAWQLN

SEQ ID NO: 52850 - DNA, 2226 bp, Oenococcus oeni PSU-1
  CDS (1)..(2226): transl_table=11
atgtcaatagctgctaatccacaacttaaatcagcagaagaggtcaaatcagaacgcatttatgcacagtggggtcttaccgatcaagaatttaaaataattgaaaatgaaatgggccgtttgccgaattataccgagacaggtttattttcggccatgtggtcggagcatgcttcttataaaaaatccaaaccaattctgaaaactttttggtcaaaaaacgaacgtgttttgcagggacccggggaaggagctggaattctcgatattggcgatggccaggcagttgtttttaaagccgaaagccataaccatccttctcaagttgaaccttaccaaggagctgcgactggagtcggtggtattttacgggatattttttcgatgggtgctcaaccaattgcggttttagattcgctaagattttcagagattaaaaatgaacagaccaaatctttaatcgatggagtaattgacggaattgccggctatggaaatgctatcggtattccaactgttggcggcgatgttgctttcgatgatgcctacgaaggtaatttgctctgcaatgttatgtctatcggtttgcttgatcatcaggatacgatcaaggtcgggcaagcacacggaaaagataattcggtcatttatgttggggccaaaaccggacgcgatggaatcaatggtgctacttttgcctcaactgagttttcttcccaagaagaatctcaacgttccgctgtccaggttggcgatcctttcatggaaaaactagtaatggatgcgactattaaagccgtcagagaaatgccggaagcagtaattgcgattcaggatatgggcgcagccggaatcttgtcctcttcgtctgaaatgggtgaaaaaggcggttctggaatttggcttgatttggataaagttccggtgcgagaaaaaggaatgataccttatgaattgatgctttccgagtcacaggaacgaatgttgttggtcgttgctcaaggccgggaaaaaggagtgattgatctttatagagatgccggcctggatgctgtagtcatcggtaaagtgaccgatgacagtcgttatcgtttatcttttcagggggaaacagttgctgatcttgatataaaactgttaaccaaagcaccttcttacaaactgccaagtaagctgccggtccatattaaaaaggccagtcaacaacaatatcaaccaaaaatttctaacccgcttcaaattattatgcaaattctttctcaaccgacgatttcatcgaaaaagtttttttatcgtcatttcgattcaatggtaagaaccgatactgtcgtgaaaccgggcggtgatgctgccgtaatcagaattcgcggaacaaaaaaagccttgtcgctgacaactgatgttaatgggcgttacgtttacttggatccatatcgtggcgggcagatggcaatcgcagaagcggcccgcaatgttgtttcgaccggtgttttgccaattggaattaccgattgtttgaactttggcaatccggataatcaggaagtttattatgaatcggaacaatctgtcgccggcataaataattttgccaaacagctgaataccccggttgtttccggcaacgtatcgctttataacgaaaccgacaatcgggccatttatccaacgccgatgatcgggatggtcggtttgatcagggataatcgcaaaatcacaacgattaatttcaaaaagaatggtgatctgatttatttaatcggatctaccggcaatgactttaatggatccgagattcaaaagttgcagacgggaaaaatctcgggaaaattattcgactttgatgccgatgctgaattaaacaaccaaaaattaatcttaacagcgattgaggccggcttattgaaatccgctcacgatctaagcgagggaggactgattgtcgctttgcttgaatcggcttttgaaacaagctttgcttttgatgccaacctgaaactcgatgatgcacagctttttgcggaaacgaatggtcgttttattgtcacagttgagcaagaaaaagaaccggtttttgaaaaaatggccggtgatcaggctgaattgattggtcgggtaactgacagaaatcattttcaaatcaaaacggatcaaagcagtttttcgattgataaagaagaagcgaccaaaacctggaaaaattcgatcgcgaatttaatggagtaa

SEQ ID NO: 52851 - protein, 741 aa, Oenococcus oeni PSU-1
MSIAANPQLKSAEEVKSERIYAQWGLTDQEFKIIENEMGRLPNYTETGLFSAMWSEHASYKKSKPILKTFWSKNERVLQGPGEGAGILDIGDGQAVVFKAESHNHPSQVEPYQGAATGVGGILRDIFSMGAQPIAVLDSLRFSEIKNEQTKSLIDGVIDGIAGYGNAIGIPTVGGDVAFDDAYEGNLLCNVMSIGLLDHQDTIKVGQAHGKDNSVIYVGAKTGRDGINGATFASTEFSSQEESQRSAVQVGDPFMEKLVMDATIKAVREMPEAVIAIQDMGAAGILSSSSEMGEKGGSGIWLDLDKVPVREKGMIPYELMLSESQERMLLVVAQGREKGVIDLYRDAGLDAVVIGKVTDDSRYRLSFQGETVADLDIKLLTKAPSYKLPSKLPVHIKKASQQQYQPKISNPLQIIMQILSQPTISSKKFFYRHFDSMVRTDTVVKPGGDAAVIRIRGTKKALSLTTDVNGRYVYLDPYRGGQMAIAEAARNVVSTGVLPIGITDCLNFGNPDNQEVYYESEQSVAGINNFAKQLNTPVVSGNVSLYNETDNRAIYPTPMIGMVGLIRDNRKITTINFKKNGDLIYLIGSTGNDFNGSEIQKLQTGKISGKLFDFDADAELNNQKLILTAIEAGLLKSAHDLSEGGLIVALLESAFETSFAFDANLKLDDAQLFAETNGRFIVTVEQEKEPVFEKMAGDQAELIGRVTDRNHFQIKTDQSSFSIDKEEATKTWKNSIANLME

SEQ ID NO: 52852 - DNA, 2217 bp, Leuconostoc mesenteroides subsp. mesenteroides ATCC 8293
  CDS (1)..(2217): transl_table=11
atgacaacaaatgaattatcacccgaagaagtacgtgacagtaaaatttatatagagtgggggcttacagaacaagaatatgatttgattgttaaggagttaaagcgtctacctaattttactgaaacaggcattttttcaggaatgtggtcggaacacgtttcttataagaaatcaaagccaattttgcgcaaattctggtcatccaacgaacgggttttacagggaccaggtgaaggtgctggaattttagacattggtgacaatcaagcagttgtttttaaggctgaaagtcataatcatccttcatttgttgaaccgtatgagggggcagcaaccggagttggcggtatcttacgtgatattttttcaatgggtgcccaacctattgctgtactggattcgctacgttttggtgaattggacaatgcgcatacaaaacatattgttgacggtgtcatagcaggaattgcgggatacggtaatgcgattggtattcccacagtgggaggcgaaattggtttcgatggcgtttacgctggcaatccattggtaaatgttatggctgttggcttgatggaccaaaatgctatgcaagttggacaagctaaaggcataggaaattcaattatctatgttggtgctaaaactggtcgtgatggtattaatggcgcttcatttgcctctgctgagttttcaagtgcagaaaaatctgatcgttcggctgttcaagttggcgatccattcttggaaaagttggtgatggacgcaacgctccaagcaattcgtgaacattctgatattattgttggcattcaagatatgggtgcagctggactcctatcttcgagttctgaaatggctgctaaagcaggcatgggtattcacttgaacttggatatggtccctcaacgtgaaacaggaatgacgccatatgaactaatgttgtcagagtcgcaagaacgcatggtgctggttgttaaaaagggtgaagaacaagctattattgatttgttccaatcggctgatttagatgctgtaatcattggtcaagttaccgatgatggtcgttatcgattaaacttcaaaaatgaagttgttgcagatgtgcctgttgatttcttaacgcatgcgccaaagcaagacttaccaatgattgaaccggcaagattggcgaactttacagatgaacaatttgagccagacatgggtaacgtcaaagaaacaatattaacattactcgcacaaccaacaattgcttctaaagcatcgttgttccgacactttgattctcaagtgcgcgctgatacggctattaagcctggtggagatgcggcgttgattcgtattcgtgatacgcaaaaggcattagcgatgacaacagatgtcaatgctcgttatttatatctcaatccacgtgtgggtgccaaaatggcagttgctgaagcggctagaaacattgtatccacaggggcaaagccaattggcatcacagatggcttgaactttggttcaccggataatccagaagtttattatgagttggatcaagctgttgctgggattaatgacgtggctaaacagcttgacacaccaattatttctggaaacgtgtctctttacaacgaaacagatgggcaagcaatttatcccacaccaatgattggcatggttggtttgcttgaagatatcacaaaagcaacacgaacggcatttcaaaaagcaggcgataacatttatcttgtagggcgaacgaaagatagctttaacggttcagaaattcaaaagatgcaaacaggacatattgccggtcaattatttgattttaatgatgaggacgagttagcagcgcaacaggtcattctagatgtcactgatcaacgtctgcttaatagtgcgcatgatttatctgaaggtggattaatcgttggtcttcttgagagcgcctttgctggaaatcttggttttgatatctcggtagacttagccgataagtatttattttcggaaacaccaagtcgttttgtagtcagtgtgtcacctgaaaataggacaacatttgaatcactagccggtgaccgagtaataaaattaggtgtggttacagcagatgatacgattaatattacaacgacaacaagcgatattcaattgtcattaatcgaaacgaagaaaatctaccaggagagtatcgcatggaaactaaatgcggagtaa

SEQ ID NO: 52853 - protein, 738 aa, Leuconostoc mesenteroides subsp. mesenteroides ATCC 8293
MTTNELSPEEVRDSKIYIEWGLTEQEYDLIVKELKRLPNFTETGIFSGMWSEHVSYKKSKPILRKFWSSNERVLQGPGEGAGILDIGDNQAVVFKAESHNHPSFVEPYEGAATGVGGILRDIFSMGAQPIAVLDSLRFGELDNAHTKHIVDGVIAGIAGYGNAIGIPTVGGEIGFDGVYAGNPLVNVMAVGLMDQNAMQVGQAKGIGNSIIYVGAKTGRDGINGASFASAEFSSAEKSDRSAVQVGDPFLEKLVMDATLQAIREHSDIIVGIQDMGAAGLLSSSSEMAAKAGMGIHLNLDMVPQRETGMTPYELMLSESQERMVLVVKKGEEQAIIDLFQSADLDAVIIGQVTDDGRYRLNFKNEVVADVPVDFLTHAPKQDLPMIEPARLANFTDEQFEPDMGNVKETILTLLAQPTIASKASLFRHFDSQVRADTAIKPGGDAALIRIRDTQKALAMTTDVNARYLYLNPRVGAKMAVAEAARNIVSTGAKPIGITDGLNFGSPDNPEVYYELDQAVAGINDVAKQLDTPIISGNVSLYNETDGQAIYPTPMIGMVGLLEDITKATRTAFQKAGDNIYLVGRTKDSFNGSEIQKMQTGHIAGQLFDFNDEDELAAQQVILDVTDQRLLNSAHDLSEGGLIVGLLESAFAGNLGFDISVDLADKYLFSETPSRFVVSVSPENRTTFESLAGDRVIKLGVVTADDTINITTTTSDIQLSLIETKKIYQESIAWKLNAE

SEQ ID NO: 52854 - DNA, 2229 bp, Solibacter usitatus Ellin6076
  CDS (1)..(2229): transl_table=11
atgagcggcacggccgccttctcacccgaaatcatcgcccagcatcagttgactgacggcgagtatcagaagatcgtggacattctgggccgcgaacccagctacaccgagctcggaattttcagcgtgatgtggagcgagcactgctcttataagagctcgcggattcacctgaagaagctgcccacgcgcggcaagctggtggtgcaaggccccggcgagaacgcgggcatcatcgatatcgggggcggctacgtgatcgccttcaaaatcgaatcgcacaatcatcccagcttcatcgagccgttccaaggcgccgcgaccggcgtcggcggcatcctgcgcgacatcttcacgatgggggcgcggccgattgcggtgctggattcgctgcgcttcgggcggctggacgatccggaaaccggcgcgcgaaatcgccgcattctcagcggggtggtgagtgggatcgcgcactacggcaactgcttcggcgtgccgacggtgggcggcgaatgcatcttcgagccctgctacgacggcaatccgctggtcaacgtctttgcgctcggcgtctgccgcaaggaggacgtgttctatgcgaaggccgcgggcgtgggcaaccccgtgatctacgtgggcgcgcgcaccgggcgggatgggattcacggcgcgtcgatggcctccgccgagttcaccgaggaatccaagcagaagcggcccaacgtgcagatgggcgacccgttcatggagaagctgctgctggaggcctgcctggaagccatgcaaacgggcgccatcgtgggaattcaggatatgggcgcggccggactgacctgctccacctgcgaaatgggcagccgcggcgaggtcggggtcgaaatcgaattggaccgtgttccgcagcgcgccaccggcatgactccttacgagatcatgctcagcgaaagccaggagcgcatgctgctggtggccgataaagggcgcgaggacgaagtcttccgcgtcttcaagaaatggggattggaagccgtcgagatcggcatcgtgaccgatgacggcaagctgcgggttcgccatcacggcgagatcgtggccgagatccccaatcgcgagctggccgacgaggccccactctacgaccgtccccataccgcgccgcctcccgcgccgctggctcccgcgcctcgaacttccgacgtccccacggtgcaggatgcgctgcccctgctgctggctgcgccggacatctgttccaagcactggatttgggaacagtacgattatcaggtgcgcaccaatacgctcacccgccccgagcagagcgatgcctccatcgtgcggatcaaagagaccgggacggcaatcgcgatgtcgctcgatggcaacggccgctactgccagctctcgccgcgcgaaggcgcgatcctcgccgtggccgaaagctgccgcaatctctcggtggtcggcgcgcagccggtagccgccaccaactgtttgaattttggaaatccggagcggccagagattatggcgcagttggtggaggcgatcgagggcatgtcggatgcctgccgcttcttcgatacgccgatcaccggtggaaacgtcagcctgtacaacgaaacgttgggcgagggaatttatccgacgcccgtgatcggcatcgtcggactcatgaagacggcggctcccgtcacggtgccgttccaacatgccggacgcagtgtgctgctgctgggcggagtgggcacatgcgaggagacgcgcttcggcggcacgcagtacgcaaaggaaatcgaccggcagctctggggactgccgcccgcgctcgacctggagcgcgagaagaatgtgcagagcgcgattcgcgaaatcgtggcggccggactggccgaatcggcgcatgacctgagcgacggcggcctggcggtggcgctggccgagtgcagcttcgggaatgcgggcatcggcgcccaaatcgacctggatagcgatttgcgtccggaatggctggcctttcacgaaggaccgtcgcggattctgatatcgacggcgaacccgaaagaggtggtcgcgatcgcacaaaggcacggcgtcgaggctccggtggtcggcgttacaattgagtcaggaatggaaatccggcagaggggcaatacgctgggttcctgggacatcgcggcactcagggccgcttacgagggggcactcgaggcgcatgttcgataa

SEQ ID NO: 52855 - protein, 742 aa, Solibacter usitatus Ellin6076
MSGTAAFSPEIIAQHQLTDGEYQKIVDILGREPSYTELGIFSVMWSEHCSYKSSRIHLKKLPTRGKLVVQGPGENAGIIDIGGGYVIAFKIESHNHPSFIEPFQGAATGVGGILRDIFTMGARPIAVLDSLRFGRLDDPETGARNRRILSGVVSGIAHYGNCFGVPTVGGECIFEPCYDGNPLVNVFALGVCRKEDVFYAKAAGVGNPVIYVGARTGRDGIHGASMASAEFTEESKQKRPNVQMGDPFMEKLLLEACLEAMQTGAIVGIQDMGAAGLTCSTCEMGSRGEVGVEIELDRVPQRATGMTPYEIMLSESQERMLLVADKGREDEVFRVFKKWGLEAVEIGIVTDDGKLRVRHHGEIVAEIPNRELADEAPLYDRPHTAPPPAPLAPAPRTSDVPTVQDALPLLLAAPDICSKHWIWEQYDYQVRTNTLTRPEQSDASIVRIKETGTAIAMSLDGNGRYCQLSPREGAILAVAESCRNLSVVGAQPVAATNCLNFGNPERPEIMAQLVEAIEGMSDACRFFDTPITGGNVSLYNETLGEGIYPTPVIGIVGLMKTAAPVTVPFQHAGRSVLLLGGVGTCEETRFGGTQYAKEIDRQLWGLPPALDLEREKNVQSAIREIVAAGLAESAHDLSDGGLAVALAECSFGNAGIGAQIDLDSDLRPEWLAFHEGPSRILISTANPKEVVAIAQRHGVEAPVVGVTIESGMEIRQRGNTLGSWDIAALRAAYEGALEAHVR

SEQ ID NO: 52856 - DNA, 3888 bp, Magnetococcus sp. MC-1
  CDS (1)..(3888): transl_table=11
atggacgcaacccacgttttgacccttaatggcagcagcgcatactccagctttcggttggaaaagttattggatgcctgccagggggtggttccccaactgcaaagcgtggaggcttggtttgtccacttcgcccatctacagcgccccttgcagggggatgaacagagcacattggaaaaattgctcacctatgggcccaaagagcagagcctaagccaggttgctcaacctgatctgtggattatcccccgttttggcaccacctcaccttggtcttccaaggccaccgatattgccctgcattgcgggctggatgcggtgatccgtctggaacggggcatggcctttcgctttggtgggcttatggcgggggatctggaaaagctgctaccccttatccatgatcgcatgacccaacaggtggtggtggatgccgccgccctgcctgggctgtttaaaagcttctcaccgggggccttgcggcaggtacccacccagcaggaggggcgtaccgctctggagcgggccaatgcggattggggcttggccctctcggaggatgaaatcgactatctgctggagcagtaccagcgcatgggtcgcaaccccaccgatgtggagttgatgatgtttgcgcaggccaactcagagcactgtcgccataaaatttttaatgcggattggcatattgatggggaggcccgcccccataccctgtttggcatgatccgcaatacccacattcgcgcccccgagggtacggtggtggcctatacagataacagttcggtgatcgaggggggggcaggtcagcggtttcatcccgatacccaagatggggtctaccgttttcatgacgagaccacccatattttaatgaaggtggagacccataaccaccccaccgccatctcgccctttcctggtgcggccaccggttcggggggggagatccgcgatgagggggccacggggcgtggctcatcccccaaggcgggtttaaccggtttttccgtctctaaccttaacttgcccggcgcggtacgcccttgggagcagccctacggcaagccagagcgcattgtttcggccctggatatcatgctggatggcccccttggcggggcggcctttaacaatgagtttggccgtcccaacctctgtggctattttcgcacctttgagcagagcgttgccggtgaggtgcggggctaccataaacccatcatgattgccggtggtttgggcaacattaatgccgaccatgtggaaaaaaagccccttaaagcgggggatctgattattcaactgggtggcccggccatgttgattgggcttggtggcggggcggcctccagccagaccagcggcagctcccatgcggagttggattttgcctcggtgcagcgggataaccccgagatggagcgccgctgtcaggaggtgatcaaccgttgctggcagttgggagaggccaaccccattcgctccatccacgatgtgggggcgggtggtctttctaacgcggtgcccgagctcatccacgatggcggggtgggggggcgctttgatctgcgtcagatcgacaatgccgatccaggcatgtcccccatggagatctggtgtaatgaggcgcaagagcgctatgtgctggccattgatgccaaggatcgtgcccgctttgaggcgatctgccgacgtgagcgctgcccctttagtgtgctgggcgaagccaccacagaagagcagttggtgttgatcgacagtatgaatggagagcgctgtattgatctttccctaaacacactgctgggcaaacccccacgtatgagccgtgatgttagccatcatcggcggcaggttcacccgttgagcatacccactgggctctctttgagtgaaatgtgctaccgggtattgcggctgcccacggtggcggacaagagctttttgatcaccattggcgaccgcagtgtcaccggtatggtaacccgtgatcagatggtgggaccgtggcaggtgccggtggcggatgtcgcggtaaccgcccgaggttataccgggtatgtgggcgaggccatggccatgggtgagcgcacgcccatcgctctgctggatagcccagcggcggggcgtatggcggttggtgaagcattgaccaatatggcggcggcccgggtgggggatttgagccgggtgaagttgtcggcaaactggatggccccagcggggcatcctggggaggatgccaacctctatgagacggtggaggcggtgggtctggagctctgcccggcactgggcatcagcattccggtgggtaaggactccctctccatgaaaacggtgtggaaggatgcccagggcaatccccgtgcggtgacagcaccggtttcattaattatttcagcctttgcgccggtggtggatgtgcgggataccgcaacgccgcaactgcgtaccgatctgggcgaaacccggcttattttggtggatttggcggggggaaaaaaccgtttgggtggctccgcattggctcaggtattggggcaaatgggggatgtgccgccggatttggatgatgcggatagccttaaacagttttttcagaccatacaggtgctgcacgaagctaaaaagattttggcttaccatgaccgctccgatggcggcctgtttgtaaccctctgcgagatggcctttgcggggcactgcggcctggatattcagttggcggggttgggcgcgcaacgggagggtgtgctctttagcgaagagctgggggcggtggtgcaggtgcgtgccgacgacgcaaaaaaaatgcttaagttgctcaactgttgcggcatagccaccgacattggcgcgcccagtgagagtggtcggctgcgttttcggcgtgggcatgagacggtgttggatctaccacgggtagagttacagcgggcttggtcggagacctcgtggcgcatgcagagcctgcgggatcatccccagtgtgcccagcaggcgtatgatgccttgttggatgtgaacgatccgggtttgcatgcccgcttaacgtttgatcctgcacataatgtggcggccccctatatcaatagtggggtgcgtccgtcggtggcgattttgcgggagcagggggttaatgggcatgtggagatggcggcggcctttcaccgtgccgggtttgaggcggtggatgtcaccatggcggcgttggccaagcgtgagcgctttttgtccgattatcagggcttggtggcgtgtggtggtttctcgtttggggatgtgctgggcgcaggggaagggtgggccaaatccattttatttgatgcggctttgcgggagagttttgcgcaattttttggtagctccgatagctttgcgttgggggtatgtaatggctgccaaatgctctctaacctgcatacgttgattcccggtaccgagctgtggccccgttttgtgcgcaaccgctcggagcagtttgaggcgcgttttagcatggttgaggtcaccaaaaccccctccatgttcttgcacggtatgcagggttcgcgcatgccggtggcggttgcccatggcgagggtcgggcggagtttgcccatttggcccaccaggatcgcgctttggccgaggggctggtggcattgcgctttgtggatggttatgggcaggcgacggagcgttatccggccaaccccaacggttcgccccagggtattacgggcctgaccacggcggatggccgggttaccattatgatgccccatcccgagcgggtgtttcgtaccgtacagaacagctggcaccccgatcattggggggaggatggcccctggatggcgatgttccgcaatgcacgtaagtgggtcggctaa

SEQ ID NO: 52857 - protein, 1295 aa, Magnetococcus sp. MC-1
MDATHVLTLNGSSAYSSFRLEKLLDACQGVVPQLQSVEAWFVHFAHLQRPLQGDEQSTLEKLLTYGPKEQSLSQVAQPDLWIIPRFGTTSPWSSKATDIALHCGLDAVIRLERGMAFRFGGLMAGDLEKLLPLIHDRMTQQVVVDAAALPGLFKSFSPGALRQVPTQQEGRTALERANADWGLALSEDEIDYLLEQYQRMGRNPTDVELMMFAQANSEHCRHKIFNADWHIDGEARPHTLFGMIRNTHIRAPEGTVVAYTDNSSVIEGGAGQRFHPDTQDGVYRFHDETTHILMKVETHNHPTAISPFPGAATGSGGEIRDEGATGRGSSPKAGLTGFSVSNLNLPGAVRPWEQPYGKPERIVSALDIMLDGPLGGAAFNNEFGRPNLCGYFRTFEQSVAGEVRGYHKPIMIAGGLGNINADHVEKKPLKAGDLIIQLGGPAMLIGLGGGAASSQTSGSSHAELDFASVQRDNPEMERRCQEVINRCWQLGEANPIRSIHDVGAGGLSNAVPELIHDGGVGGRFDLRQIDNADPGMSPMEIWCNEAQERYVLAIDAKDRARFEAICRRERCPFSVLGEATTEEQLVLIDSMNGERCIDLSLNTLLGKPPRMSRDVSHHRRQVHPLSIPTGLSLSEMCYRVLRLPTVADKSFLITIGDRSVTGMVTRDQMVGPWQVPVADVAVTARGYTGYVGEAMAMGERTPIALLDSPAAGRMAVGEALTNMAAARVGDLSRVKLSANWMAPAGHPGEDANLYETVEAVGLELCPALGISIPVGKDSLSMKTVWKDAQGNPRAVTAPVSLIISAFAPVVDVRDTATPQLRTDLGETRLILVDLAGGKNRLGGSALAQVLGQMGDVPPDLDDADSLKQFFQTIQVLHEAKKILAYHDRSDGGLFVTLCEMAFAGHCGLDIQLAGLGAQREGVLFSEELGAVVQVRADDAKKMLKLLNCCGIATDIGAPSESGRLRFRRGHETVLDLPRVELQRAWSETSWRMQSLRDHPQCAQQAYDALLDVNDPGLHARLTFDPAHNVAAPYINSGVRPSVAILREQGVNGHVEMAAAFHRAGFEAVDVTMAALAKRERFLSDYQGLVACGGFSFGDVLGAGEGWAKSILFDAALRESFAQFFGSSDSFALGVCNGCQMLSNLHTLIPGTELWPRFVRNRSEQFEARFSMVEVTKTPSMFLHGMQGSRMPVAVAHGEGRAEFAHLAHQDRALAEGLVALRFVDGYGQATERYPANPNGSPQGITGLTTADGRVTIMMPHPERVFRTVQNSWHPDHWGEDGPWMAMFRNARKWVG

SEQ ID NO: 52858 - DNA, 3882 bp, Shewanella sp. ANA-3
  CDS (1)..(3882): transl_table=11
atggagatcatccgcggagccccagcactctcgacgtttagagtgcaaaagctaatggaggcctgcgtaaacgctgcgcttccggtacgccaaatctatgctgagtatgttcatttagcggatttgagcgagttgcttgagaccaatgagcgcgagcaacttgaaaaaattctcacctatggacctgctatcgaagcccataccccccaaggttcactcctgtttgttactccccgtcccggcacaatttctccatggtcttctaaagccactgatatcgcccacaattgtggtttaggtaaagtgaagcgcttagagcgtggtgttgcctattatgtggagtcagacactttgactgtcgagcagcaacaaaccctcaaagggttattgcacgaccgtatggttgaagtggttctggacgattttgctaaggccgatgtgctgtttaagcgcactgaacctgcgcctttcaagagtgtgaacgtattggctgaaggccgccgtgcacttgaagtggccaacgtcgaaatgggtctggcgctcgccgaagatgaaatcgattatcttgtcgaaaactttgtgcgtttgaaccgtaatccaaacgatattgaactgatgatgtttgctcaggctaactcagagcactgccgtcacaagatttttaacgcagattggacaattgatggcgaggcgcagcctaagtctctgttcaagatgattaaaaacacctttgaaactacaccagaccacgtgttatctgcctataaagataacgccgctgtgatggaaggttcggttgcgggacgtttcttccccgatccaaacggtgtttacagctatcacactgaaccaatgcacgtactgatgaaagtggaaacccacaaccatcctacggcaatcagtccataccctggtgcggcgacgggttcaggtggtgagatccgcgacgaaggtgcaaccggtcgtggctctaaacctaaagcgggtttaactggctttagcgtatcgaatttaaaaatcccaggttttgtacaaccatgggaaggcaactacggtaagcctgagcgtatcgtcagtgcgctggatatcatgaccgaaggcccacttggcggcgcggcgtttaacaacgagtttggtcgtccagccctgttaggttacttccgtacctatgagcaagaagtctcaagccacaacggcgtagaagtccgtggttatcacaagcccatcatgttagccggtggtttaggtaacatccgcgaagagcacgtacaaaaaggcgaaatcaccgtcggtgctaagcttatcgtactcggtggccctgcgatgaacattggtcttggcggcggcgctgcctcttctatggcgtcgggtcaatcgagcgaagatttagactttgcgtcggttcagcgtgaaaacccagaaatggaacgccgctgtcaagaagtgatcgaccgctgctggcaattaggcgataaaaacccgatccaatttatccacgacgtgggcgcgggtggtttatctaacgctttccctgagttagttaacgatggcggccgtggtggtatcttcaatctgcgcaacgtgccatcggacgagccgggcatgagcccgctggagatctggtgtaacgaatcgcaggaacgttatgtgctttcggttgctgccgaagacctgccgttatttactgcgatttgtgagcgtgagcgcgcaccgtttgcggtagtgggcgaggcaacgcaagagcagcatttaaccctagctgacagccatttcgataacaatcctatcgatttaccactcgaggtgttattaggtaaagcacctaagatgagccgtaatgtggtatccgctaaggcagtttcacctgcacttgagcaaagcaacatcgatgtgaaagaagcggtcaaacgcattcttagcctgccaactgtggcggacaaaaccttccttatcaccattggtgaccgcacggtaacgggtctagtaaaccgtgaccaaatggttggcccatggcaagtccctgtggctgattgcgcggtaacggcggcaagctttgatacctatgctggtgaagccatgtctatgggtgaacgtacgccgctggcactgctcgattttggcgcctctgcccgtatggcggttgccgaatcgattatgaacatcgcgggtgcggatattggttcgttcaaacgtatcaaactgtcggctaactggatgtctgccgcgggccaccctggcgaagatgcgggtctttatgaagcggttaaggccgtgggtgaagagctgtgtccagaactgagcctgaccattcctgtcggtaaagactccatgtcgatgaaaaccgcatggcagcaagacggcgcgaacaaaaccgtgacggcacctatgtcgttggtcatttctgccttcggtgtggtgcaggatatccgtaacacggtaacgcctgaacttcgcagtgataaaggcgaaacctcgctgttattagtcgacttaggcgctggcaaaaatcgtttaggcggttcttgtttggcacaggtttacggtgagttaggcgatatcgcgccagacttagacgatgcagctctgttacgtggtttcttcgaaaccatgcaaaagctggtggcgaagaagtcggttattgcataccacgaccgcagtgacggtggtttattcacgacgttagtggaaatggcctttgcgggtaacacgggtcttgctatcgacttaagtgcactgcaaggtactgacgttgaacgtctattcaatgaagaactcggtggcgtactgcaagtgagccgcgctgatgccgagcttatcgctgcgcaattcgcccaagcaggcgtaccttgccacatgattggtactctggcgaatgaccaacgcgtaaccattaaagatggtgcgcgtgaagtgttcagcgagacacgtgttgcactgcgtactttatggtctgaaaccacttaccgtatgcaagcgctgcgtgataacccagcctgcgcattagaagagtttaagctcaaacaggatgaaaccgacttaggtttaacggttaacttaagcttcgatccaagtgaagacgttgctgcgccgtacatcctcaaaggtgctgcacctaagatggctattctgcgcgagcagggcgttaactcccatgtggaaatggcggccgcgtttgaccgcgcaggttttgagagccgtgacgtgcatatgtctgacattctgtcaggccgcattagcctcgaagagttccaaggtctggtggcctgtggtggcttctcctacggtgacgtattaggtgcgggtgaaggttgggctaagtctatcctgttcaacgcccgtgctcgcgatgagttctcacgcttcttcgagcgcgactcaagctttgccctcggtgtgtgtaacggttgccaaatgctgtcgaacctgaaggaaatcattcctggtagcgagcactggccacgtttcgtgcgtaaccgctctgagcgtttcgaagcgcgtttcagcttagttgaagtgcagcaaagtccatcactgttcttccaaggtatggcgggttcacgtatgcctatcgccgtgtcccacggtgaaggacatgcagagtttgctagtgcgcaggcgctggccttagctgaggcttctggcactatcgcgctgcgttttgtgaatggtaaaggtgaaattgccacccaatacccacaaaacccgaacggttcgccaaacggtttaaccggtatctgtactaccgatggccgtgtgacactgatgatgccacatcctgagcgtgtatttagaacggttgcaaactcttggcacccagataactggggtgaagacagcccatggatgcgtatgttccgcaatgcgcgagttaacttaggctaa

SEQ ID NO: 52859 - protein, 1293 aa, Shewanella sp. ANA-3
MEIIRGAPALSTFRVQKLMEACVNAALPVRQIYAEYVHLADLSELLETNEREQLEKILTYGPAIEAHTPQGSLLFVTPRPGTISPWSSKATDIAHNCGLGKVKRLERGVAYYVESDTLTVEQQQTLKGLLHDRMVEVVLDDFAKADVLFKRTEPAPFKSVNVLAEGRRALEVANVEMGLALAEDEIDYLVENFVRLNRNPNDIELMMFAQANSEHCRHKIFNADWTIDGEAQPKSLFKMIKNTFETTPDHVLSAYKDNAAVMEGSVAGRFFPDPNGVYSYHTEPMHVLMKVETHNHPTAISPYPGAATGSGGEIRDEGATGRGSKPKAGLTGFSVSNLKIPGFVQPWEGNYGKPERIVSALDIMTEGPLGGAAFNNEFGRPALLGYFRTYEQEVSSHNGVEVRGYHKPIMLAGGLGNIREEHVQKGEITVGAKLIVLGGPAMNIGLGGGAASSMASGQSSEDLDFASVQRENPEMERRCQEVIDRCWQLGDKNPIQFIHDVGAGGLSNAFPELVNDGGRGGIFNLRNVPSDEPGMSPLEIWCNESQERYVLSVAAEDLPLFTAICERERAPFAVVGEATQEQHLTLADSHFDNNPIDLPLEVLLGKAPKMSRNVVSAKAVSPALEQSNIDVKEAVKRILSLPTVADKTFLITIGDRTVTGLVNRDQMVGPWQVPVADCAVTAASFDTYAGEAMSMGERTPLALLDFGASARMAVAESIMNIAGADIGSFKRIKLSANWMSAAGHPGEDAGLYEAVKAVGEELCPELSLTIPVGKDSMSMKTAWQQDGANKTVTAPMSLVISAFGVVQDIRNTVTPELRSDKGETSLLLVDLGAGKNRLGGSCLAQVYGELGDIAPDLDDAALLRGFFETMQKLVAKKSVIAYHDRSDGGLFTTLVEMAFAGNTGLAIDLSALQGTDVERLFNEELGGVLQVSRADAELIAAQFAQAGVPCHMIGTLANDQRVTIKDGAREVFSETRVALRTLWSETTYRMQALRDNPACALEEFKLKQDETDLGLTVNLSFDPSEDVAAPYILKGAAPKMAILREQGVNSHVEMAAAFDRAGFESRDVHMSDILSGRISLEEFQGLVACGGFSYGDVLGAGEGWAKSILFNARARDEFSRFFERDSSFALGVCNGCQMLSNLKEIIPGSEHWPRFVRNRSERFEARFSLVEVQQSPSLFFQGMAGSRMPIAVSHGEGHAEFASAQALALAEASGTIALRFVNGKGEIATQYPQNPNGSPNGLTGICTTDGRVTLMMPHPERVFRTVANSWHPDNWGEDSPWMRMFRNARVNLG

SEQ ID NO: 52860 - DNA, 2298 bp, Mycobacterium avium 104
  CDS (1)..(2298): transl_table=11
gtgactgtctccccgacgagtgcgcccacccaggcgatcgacaccgtcgagcgcgccgcgaccacccccgacgagccgcagccattcggcgagttgggcctcaaagacgacgaataccagcgcatccgcgaaatcctgggccgccggcccaccgacaccgagctggcgatgtactcggtgatgtggagcgagcactgctcctacaagtcgtccaaggtgcacctgcgctacttcggggagaccaccaccgacgagatgcgcgccggcatgctggccggcatcggcgagaacgccggcgtcgtcgacatcggcgacggctgggcggtcaccttcaaggtggaatcgcacaaccacccctcctacgtcgagccctatcagggggcggccaccggcgtcggcggcatcgtgcgcgacatcatggcgatgggcgcgcgcccggtggcggtgatggaccagcttcggttcggcgccgccgatgcgccggacacccgccgcgtgctcgacggcgtggtgcgcggcatcggcggctacggcaactcgctgggcctgcccaacatcggcggcgagaccgtcttcgacgcctgctacgccggcaacccgctggtgaacgccatgtgcgtcggcgtgttacgccaggaggacctgcacctggccttcgcctccggcgcgggcaacaagatcatcctgttcggcgcccgcaccgggctggacggcatcggcggggtatcggtgctggcgtcggacaccttcgatgcggagaactcgcgcaagaagctgccctcggttcaggtgggcgacccgttcatggagaaggtgctcatcgagtgctgcctggagctctacgccggtgggctggtgatcggcatccaagacctgggcggtgccggattagcttgcgccacttctgaattggcgtccgccggtgacggggggatggaggtccggctggaggccgtgccgctgcgcaccgccggcatgacgcccgcggaggtgctgtgcagcgaatcccaggagcggatgtgcgcggtggtcacaccggagaacgtcgacgccttcctggcggtgtgccgcaagtgggacgtgctggccaccgtcatcggcgaggtcaccgacggcgaccggctgcggatcacctggcacgggcagacggtggtcgacgtgccgccgcgcaccgtcgcccacgaaggcccggtataccagcgaccgctcgcccgccccgacacccaggacgccctgaacgccgacagctcggcacggctgccccgcccggccaccggcgccgagctgcgggccactttgcttgcgctgcttggcagcccgcacctgtgcagccgcgcgttcatcaccgagcagtacgaccggtatgtgcgcggcaacaccgtgctggccgaacacgccgacggcggcgtgctgcgcgtcgacgagaccaccggccgcggcatcgccgtgtccaccgacgcctcgggccgctacaccatgctcgacccctacgccggtgcgcagctcgcgctcgccgaggcctaccgcaacgtcgccgtcaccggcgccaccccggtcgcggtgaccaactgcctcaatttcggctcgcccgaagaccccgcggtgatgtggcagttcgcccaggcggtacgcggattggcggatggctgtgtggccctggggattccggtgaccggcggcaacgtcagcttctacaaccaaaccgggtcggcggcgatcctgcccaccccggtggtgggagtgctcggcgtcctcgacgatgtgagccgacggctgcccaccgccctgggcgccgagcccggcgaaaccctgatgctgctcggcgagacccgcgacgagttcgacggctcggtgtgggcacaggtgaccgccgaccatctgggcggtctgccgcccaaggtcgacctggcccgcgagaagctgctcgccgaggtgctgcgcgcggcgtcgcgcgacggcctggtgtccgcggcgcacgacctgtccgagggcggcctggcccaggccgtcgtcgaggctgccctggcgggcgaaaccggttgtcgcatcgtgcttcccgaggacgccgacccgttcgtgacgttgttctccgagtcggcgggccgggtgctggtggcggtgccgcgcaccgaggagagccggttccgttccatgtgcgaagcgcggggactgccggcggtgcgcatcggcgtcgtcgaccaggcctccgacgaggtcgaggtgcaggggctgttcacggtttcgttggccgaattgcggcagacctccgagtcggtgctgccccggctgttcggatga

SEQ ID NO: 52861 - protein, 765 aa, Mycobacterium avium 104
MTVSPTSAPTQAIDTVERAATTPDEPQPFGELGLKDDEYQRIREILGRRPTDTELAMYSVMWSEHCSYKSSKVHLRYFGETTTDEMRAGMLAGIGENAGVVDIGDGWAVTFKVESHNHPSYVEPYQGAATGVGGIVRDIMAMGARPVAVMDQLRFGAADAPDTRRVLDGVVRGIGGYGNSLGLPNIGGETVFDACYAGNPLVNAMCVGVLRQEDLHLAFASGAGNKIILFGARTGLDGIGGVSVLASDTFDAENSRKKLPSVQVGDPFMEKVLIECCLELYAGGLVIGIQDLGGAGLACATSELASAGDGGMEVRLEAVPLRTAGMTPAEVLCSESQERMCAVVTPENVDAFLAVCRKWDVLATVIGEVTDGDRLRITWHGQTVVDVPPRTVAHEGPVYQRPLARPDTQDALNADSSARLPRPATGAELRATLLALLGSPHLCSRAFITEQYDRYVRGNTVLAEHADGGVLRVDETTGRGIAVSTDASGRYTMLDPYAGAQLALAEAYRNVAVTGATPVAVTNCLNFGSPEDPAVMWQFAQAVRGLADGCVALGIPVTGGNVSFYNQTGSAAILPTPVVGVLGVLDDVSRRLPTALGAEPGETLMLLGETRDEFDGSVWAQVTADHLGGLPPKVDLAREKLLAEVLRAASRDGLVSAAHDLSEGGLAQAVVEAALAGETGCRIVLPEDADPFVTLFSESAGRVLVAVPRTEESRFRSMCEARGLPAVRIGVVDQASDEVEVQGLFTVSLAELRQTSESVLPRLFG

SEQ ID NO: 52862 - DNA, 2298 bp, Mycobacterium smegmatis str. MC2 155
  CDS (1)..(2298): transl_table=11
gtgacgtcggagctcactcaccagacagataccgttgagcgggcagccgccacccccgatcagccccagccctaccgcgaactcggtctcaaggacgacgagtaccagcggattcgcgacatcctgggcaggcgccccaccgatgcggaactcgcgatgtactcggtgatgtggagtgagcactgctcctacaagtcctccaaggtgcacctgcgctacttcggggagaccaccaccgagaagatgcgcgcgggcatgctcgccggtatcggcgagaacgcaggcgtcgtcgacatcggcgacggctgggccgtcaccttcaaggtcgaatcgcacaaccacccgtcctacgtcgagccctaccagggtgcggccaccggcgtcggcggcatcgtccgcgacatcatggcgatgggcgcccgaccggtcgcggtgatggaccagctgcggttcggtccggccgacgcccccgacacccggcgtgtgctcgacggcgtggtgcgcggtgtcggcggctacggcaactccctgggcctgccgaacatcggtggcgagaccgtgttcgacgcgtcgtacgcgggcaaccccctggtcaacgcgctgtgcgtgggcgcgctgcgcaaggaggacctgcatctggcgttcgcgtccggaaccggtaacaagatcatcctgttcggtgcgcgcacgggtctcgacggcatcggcggtgtgtcggtgctcgcctcggagaccttcggcggcgacgagggttccggccccggccgcaagaagctgccctcggtgcaggtcggcgaccccttcatggagaaggtgctcatcgagtgctgcctcgagctgtactcggccggcctggtggtgggcatccaggacctcggcggtgccggattgtcctgcgccacctcggaactcgcatccgcaggcgacggcggcatgcacatcgagctggacaaggtgccgctgcgcgcggccaacatgaccccggccgaggtgctgtcgagcgagtcccaggaacgcatgtgcgcggtcgtcacacccgagaacgtcgacgcgttcctcgcggtgtgccgcaaatgggaggtgctggccaccgtcatcggtgaggtcaccgacggcgaccggctgcagatcacgtggcacggcgagaccgtggtggacgtgccgccgcgcaccgtggcgcacgagggcccggtgtacgagcggccggtcgaacggcccgagtgccaggacgcgctgatcgccgacacctcggcgaagctgccgcgccccaccaccggcgacgaactcaaggagacgctgctcaagttgctgggcagcccgcacctgtgcagccgcgcgttcatcaccgagcagtacgaccgctacgtgcgcggcaacaccgtgctggccgaacacgccgacggcggtgtgctgcgcatcgacgagaacacgggccgcggcatcgcggtgtccaccgacgcgtcgggccgctacacgcagctcgacccgtacaccggcgcccagctggcgctggccgaggcctaccgcaacgtcgcggtcaccggcgccaccccggtcgcggtgaccaactgtctcaacttcggctcgcccgaggatcccggcgtgatgtggcagttcagccaggccgtgcgcgggctggccgacggctgcgccgcgctgggcatcccggtcaccggcggcaacgtcagcttctacaaccagaccggcagcaccccgatcctgccgacccccgtggtcggcgtgctcggtgtgatcgacgacgtgaaacgccgcatccccacgggtctgggcaccgaacccggcgagacgctgctgctgctcggcgacacccacgacgagttcgacgggtccatctgggcgcaggtcaccgccgaccacctcggtggcgtaccgcccaaggtggacctggaccgcgagaagctgctggccgaggtgctcaccgcggcatcgcgcgacggcctgatctcggcggcgcacgacctggccgagggcggactgatccaggctgtcgtggaatcggcgctcgcgggtgaaaccggttgccgggtcatcattcccgaaggagccgaccccttcgtcttcctgttctccgagtcgtcgggccgcgtgctggtggcggtgccgcgcaccgaggagagccgcttccggtcgatgtgcgaggccaggggacttcccgtcacccgcgtcggcgtcgtcgatcagggaagcgactcggtcgaggtccaggaccagttcagcgttgcgctgtccgagctgcggagcacgtcggagggcgtgctgcccaggctgttcgggtga

SEQ ID NO: 52863 - protein, 765 aa, Mycobacterium smegmatis str. MC2 155
MTSELTHQTDTVERAAATPDQPQPYRELGLKDDEYQRIRDILGRRPTDAELAMYSVMWSEHCSYKSSKVHLRYFGETTTEKMRAGMLAGIGENAGVVDIGDGWAVTFKVESHNHPSYVEPYQGAATGVGGIVRDIMAMGARPVAVMDQLRFGPADAPDTRRVLDGVVRGVGGYGNSLGLPNIGGETVFDASYAGNPLVNALCVGALRKEDLHLAFASGTGNKIILFGARTGLDGIGGVSVLASETFGGDEGSGPGRKKLPSVQVGDPFMEKVLIECCLELYSAGLVVGIQDLGGAGLSCATSELASAGDGGMHIELDKVPLRAANMTPAEVLSSESQERMCAVVTPENVDAFLAVCRKWEVLATVIGEVTDGDRLQITWHGETVVDVPPRTVAHEGPVYERPVERPECQDALIADTSAKLPRPTTGDELKETLLKLLGSPHLCSRAFITEQYDRYVRGNTVLAEHADGGVLRIDENTGRGIAVSTDASGRYTQLDPYTGAQLALAEAYRNVAVTGATPVAVTNCLNFGSPEDPGVMWQFSQAVRGLADGCAALGIPVTGGNVSFYNQTGSTPILPTPVVGVLGVIDDVKRRIPTGLGTEPGETLLLLGDTHDEFDGSIWAQVTADHLGGVPPKVDLDREKLLAEVLTAASRDGLISAAHDLAEGGLIQAVVESALAGETGCRVIIPEGADPFVFLFSESSGRVLVAVPRTEESRFRSMCEARGLPVTRVGVVDQGSDSVEVQDQFSVALSELRSTSEGVLPRLFG

SEQ ID NO: 52864 - DNA, 2256 bp, Nocardioides sp. JS614
  CDS (1)..(2256): transl_table=11
gtgctcgacaccgtcgccgtcgccgccgaggacccccaccacgaccagccgtgggccgacctcggcctcaaggccgacgagtacgcccggatccgcgagatcctcggccgccggcccacgagctccgagctcgcgatgtactcggtgatgtggagcgagcactgctcctacaagagctccaaggtgcacctcaagcagttctccgagctcgccgaggtgctcgctcagcgccagcccgacgccgggcgcctgctcgccggcatcggcgagaacgccggcgtggtcgacatcggccagggctatgcggtcaccttcaaggtcgagtcgcacaaccacccgtcgtacgtcgagccctaccagggcgcggccaccggcgtcggcggcatcgtccgcgacattctggccatgggggcccgccccgtcgccgtgatggatccgctgcggttcgggccgctcgacgcggacgacacgcaccgggtgctgcccgggatcgtcgcgggggtgggtggctacggcaactgtctgggcctgccgaacatcggcggcgaggcggtcttcgacgcgacgtatctcggcaacccgctggtcaacgcgctgtgcgtgggtgtgctccgccacgaggacctgcacctcgccaaggcgtccggcgtcggcaaccaggtgatcctgtacggcgcccgcaccggcggcgacggcatcggcggcgtcagcgtgctcgccagcgagaccttcgacgccgacggccccgccaagcggccgagcgtccaggtcggcgaccccttcatggagaagctgctcatcgagtgcacgctcgagatcttcgccgccggcctggtcgccggcatccaggacctcggcggcgccggcctgtcctgcgccacctcggagctcgcgtccgccggcgacggcggcatgcacgtcgagctcgaccgggtccccctgcgcgactccacgctcgcgccggaggagatcttgatgagcgagtcgcaggagcggatgatggcggtcgtcgagcccgacgacgtcgcggcgttcctcgcgatctgcgcgaagtgggacgtcgaggccgtcgtggtcggcgaggtcaccgacaccgggcggctccagatcgactggcacggcgagcgcgtggtcgacgtcccgccgcggagcgtcgcgcacgacgggccgacgtaccaccgccccttcgcccggcccgcctggcaggacgacctgcaggccgacgccgcggagtcgctgccgcgcccgggctcgggcgacgagctgcgcaagaccctgctgaccctggtcgccagccccaacctgtgcgacaagtcgtggatcaccgaccagtacgaccgttacgtgcgcggcaacaccgtgctcgcgcagcccagcgacagcggcatggtccgcgtcgacgaggagaccgacctcggcgtcgcgctcgcgaccgactgcaacggccggttcgcgctcctcgacccgtacgcaggcgcccagctcgccctcgcggaggcctaccgcaacgtggccaccggcggcgcgacgccgctggcgatctccgactgcctcaacttcggctcacccgaggacccggccgtgatgtggcagttcgccgaggcgtgccgcggcctgaaggacggctgcctcgagctcggcatcccggtcaccggcggcaacgtcagcctctacaaccagacgggcgagaccgcgatcctcccgaccccggtggtcgccgtgctcggcgtgatcgaggacgtcacccgccgtacgccgtcggcctggtcgaccgggggtgagcgggtcttcctgctgggcgagacccgcgaggagctctcggggtcggagtgggcgcacgtcgtccacggccatctcggcgggctcccgccgcagctcgacctggaggccgagcgcaccctcgccgagctgctccacgacgccgtcggcctggtcagctccgcccacgacctctccgacggcgggctcgcgcaggcgctcgtcgagggcgccctgcgccacggcgtgggcgtgtccgtcgaggtccccgacgacgcgttcgtcgggctcttcagcgagtcgccgggccgggtcgtcgtgaccgtccccgacggtgccgccgagcggctggtcgagctcgccgagcgccacggggtcgagctgaccgcgctcggcgtcaccggtggcgacgccctggtggtcgagggccagttcgagatcccgctcgacgagctgcgcgacgcctggaccaccaccctgcccgcggcgctcggctga

SEQ ID NO: 52865 - protein, 751 aa, Nocardioides sp. JS614
MLDTVAVAAEDPHHDQPWADLGLKADEYARIREILGRRPTSSELAMYSVMWSEHCSYKSSKVHLKQFSELAEVLAQRQPDAGRLLAGIGENAGVVDIGQGYAVTFKVESHNHPSYVEPYQGAATGVGGIVRDILAMGARPVAVMDPLRFGPLDADDTHRVLPGIVAGVGGYGNCLGLPNIGGEAVFDATYLGNPLVNALCVGVLRHEDLHLAKASGVGNQVILYGARTGGDGIGGVSVLASETFDADGPAKRPSVQVGDPFMEKLLIECTLEIFAAGLVAGIQDLGGAGLSCATSELASAGDGGMHVELDRVPLRDSTLAPEEILMSESQERMMAVVEPDDVAAFLAICAKWDVEAVVVGEVTDTGRLQIDWHGERVVDVPPRSVAHDGPTYHRPFARPAWQDDLQADAAESLPRPGSGDELRKTLLTLVASPNLCDKSWITDQYDRYVRGNTVLAQPSDSGMVRVDEETDLGVALATDCNGRFALLDPYAGAQLALAEAYRNVATGGATPLAISDCLNFGSPEDPAVMWQFAEACRGLKDGCLELGIPVTGGNVSLYNQTGETAILPTPVVAVLGVIEDVTRRTPSAWSTGGERVFLLGETREELSGSEWAHVVHGHLGGLPPQLDLEAERTLAELLHDAVGLVSSAHDLSDGGLAQALVEGALRHGVGVSVEVPDDAFVGLFSESPGRVVVTVPDGAAERLVELAERHGVELTALGVTGGDALVVEGQFEIPLDELRDAWTTTLPAALG

SEQ ID NO: 52866 - DNA, 3942 bp, Azoarcus sp. BH72
  CDS (1)..(3942): transl_table=11
atgactcaaatcctcaaactgcggggcacgcccgcgctttccgcttcccgtctcgaacggctgtcccgcagcgtgggcgcggccctgccaagactgcgcggtctggcggccgagcactggtacttcatcgaactggatgccgagctcgacgcggatgagcgcggacgtctcgtggacctgctcgacgcacgtccgagcagtgctgaagcgcccgccggcgtggcgctgctggtggtgccgcggctgggcacgatctcgccgtggtcgtccaaggccaccgacatcgcccgccagtgcggtttccacaagatccgccggatcgagcgcggcacctgttacacgctcgacatcaagtcgctcgacgagccgcagcgcgccgccgtgttgccgctgttgcacgaccgcatgaccgaatccgtgctggccagcctggacgaagccggtgccctgttccaccactacgcgccgcagccgctcaccacggtggatgtcatcggcggtggccgcgccgcgctcgaagcggcgaacggcgaactcggcctcgcgctgtcggaagacgagatcgactatctggtcgacaacttcacccgcatcggccgcaacccgaccgacgtcgagctgatgatgttcgcgcaggcgaactccgagcactgccgccacaagatcttcaacgcggactgggtgatcgacgcccggccgatggagaagagcctgttcggcatgatcaaggacacccacaaggcccaccccgaaggcacggtggtggcgtactcggacaacgcctcggtgatcgagggcgcggtcatcgaccgcctgtacccggacgccgacggcgccttccgctaccacaacgaggaaacccacatcctcgccaaggtggaaacccacaaccacccgaccgcgatctcgcccttcccgggcgcctccaccggcgccggcggcgaaatccgtgacgaaggcgccaccggccgcggttcccgtcccaaggcgggcctcgcgggcttctcggtgtccaacctcaacatcccggacttcgtccagccttgggaacagccctacggcaagccggagcgcatcgcctcggcgctcgacatcatgatcgaaggcccgctcggcgcggccgcattcaacaacgagttcggccgtcccaaccttgccggctacttccgcaccttcgagcaggcggtcgaaggcgaggtgcgcggctaccacaagccgatcatgatcgccggcggcgtcggcaacatccaggcgcagcagtcgatgaagccgcagttcccggccggcacgctgctgatccagctcggcggccccggcatgctgatcggtctgggcggcggcgccgcctcgtcgatggccaccggcaccaacaccgccgacctcgacttcgcctcggtgcagcgcggcaacccggaaatcgaacgccgctgccaggaagtcatcgacgcctgctggcagcgcggcgacgccaacccgatcatcgccatccacgacgtcggcgcaggcggtctctccaacgcgatgccggaactcgccgaccacgccggtctgggcgcgaagttcgaattgcgcgaagtgcacatcgaagagccgggcatgagcccgcgcgaaatctggagcaacgaatcgcaggagcgctacgtgctggcgatctcgccggacgatctcgaggtcttccgcgggatctgcgaacgcgaacgctgcccgttcgcggtgctcggcactgccaccgacgacggccacctcacggtcacggaccgccatttcgacaacaagccggtcgatatggacatgcaggtgctgcttggcaagccgccgaagatgacccgtaacgtctcgcgccgcgccacctacctgccgcccttcgacgtcgccgggctggacctgaaggaagcggccctgcgcgtgctgcgcaacccgaccgtggcgagcaagagcttcctgatcaccatcggcgaccgctcggtcggcggcctgaccgcgcgcgaccagatggttggcccgtggcagatgccggtcgctgacgttgccgtcactgcgatgagcttccacggctaccgtggcgaagccttcgcgatgggcgagcgcaccaccgtggcctgcctggacgcgccggcttccggccgcatggcgatcggcgaggcgatcaccaacatcgccgccgccgacatccccaacctcggtgacgtcaaactgtccgccaactggatggccgccgccggccaccgcggcgaagacgccaagctgttcgacaccgtcaaggccgtgtcggagttctgcatcagcgccgggctgtcgatcccggtcggcaaggattcactctcgatgcgcaccgcgtggcaggacgcgggcgagaacaagcaggtggtcgcgccgctgtcgctgatcgccaccgcattcgcgccagtggaagacatccgcaacacgctgaccccgcaactgcagttccccgaaggcgaggaaaccgagctgctgctgctcgacctcggcaacggcaagaaccgcctcggcggttcggtgctggcccaggtctacaactcggtcggcgagcatgcgcccgacgtcgatcccgccgagctggccgcgttctttgccgcggtgcagcgcctgcgccgcgaaggcctgatcctggcctaccacgaccgcggcgacggcggcttgttctccaccgtgtgcgagatggctttcgcgtcccgctgcggcctgtcgctggtgcttgataccgtgtgctacgacctgcacatgaatgacgtcgatggtctcgagaagaaacccgacacgctcaagggccgcttcgacgaccgcctgatcggcggcctgttcgccgaagaactgggtgcggtggtgcagatccgccgggtcgaccgcgcggccgtgaccgagatcctgcgtgccgggaagctcaactaccacttcatcggcgaacccaacgacaaggacgagatccgcttctggcgcagcgcaaagctcgtgttcggtgcgccgcgtgccgagctgctgcaggcctggaccgaaaccagctaccgcatcgcgcgcattcgcgacgacgccgaatccgtccagcaggaattcgacggcctcgccgatgcgacggaccccggcctgtcggtcaagctctccttcgatgtcaccgaagacgttgccgcgcccttcatcgccactggcagccggcccaaggtcgcggtgctgcgcgagcaaggcgtcaattcgcagttcgagatggcggccgccttcgagcgcgccggcttcgaaccggtcgacgtgcacatgtccgatctgcagagcggccgccgcaagctggtcgatttccacggcctcgcggcctgcggcggcttctcctacggcgacgtgctcggcgccggccagggttgggccaagtccatcctgttcaatccggcgctgcgcgcgcagttcgaagccttcttcggccgcagcgacaccttcgcgctcggcgtctgcaatggctgccagatgatggcccacctcgcgcccatcatcccgggcgccgaagcctggcccaccttccaccgcaatcgcagcgagcagttcgaagcccgcttcgtgatggtggaggtgaccgagagcccgtccatcctgctgcagggcatggcgggcagccgtatgcccatcgtggtcagccacggcgagggcagggcggtgttcgcggccgaggccgaccgccagcaggcgctggtcgcgctgcgctacatcgacaaccacggcgcaccggccgtcgcctacccgaagaaccccaacggttcgccggatggcgtgaccggcttcaccaccgccgacggccgcttcaccatcatgatgccgcacccggaacgcaccgcccgcacgctgcagatgtcgtgggcgccgtcgtggctggtcgaaaccagccccgatgcctcgccctggctgcgcatgttccgcaacgcgcgccagtggctgggctga

SEQ ID NO: 52867 - protein, 1313 aa, Azoarcus sp. BH72
MTQILKLRGTPALSASRLERLSRSVGAALPRLRGLAAEHWYFIELDAELDADERGRLVDLLDARPSSAEAPAGVALLVVPRLGTISPWSSKATDIARQCGFHKIRRIERGTCYTLDIKSLDEPQRAAVLPLLHDRMTESVLASLDEAGALFHHYAPQPLTTVDVIGGGRAALEAANGELGLALSEDEIDYLVDNFTRIGRNPTDVELMMFAQANSEHCRHKIFNADWVIDARPMEKSLFGMIKDTHKAHPEGTVVAYSDNASVIEGAVIDRLYPDADGAFRYHNEETHILAKVETHNHPTAISPFPGASTGAGGEIRDEGATGRGSRPKAGLAGFSVSNLNIPDFVQPWEQPYGKPERIASALDIMIEGPLGAAAFNNEFGRPNLAGYFRTFEQAVEGEVRGYHKPIMIAGGVGNIQAQQSMKPQFPAGTLLIQLGGPGMLIGLGGGAASSMATGTNTADLDFASVQRGNPEIERRCQEVIDACWQRGDANPIIAIHDVGAGGLSNAMPELADHAGLGAKFELREVHIEEPGMSPREIWSNESQERYVLAISPDDLEVFRGICERERCPFAVLGTATDDGHLTVTDRHFDNKPVDMDMQVLLGKPPKMTRNVSRRATYLPPFDVAGLDLKEAALRVLRNPTVASKSFLITIGDRSVGGLTARDQMVGPWQMPVADVAVTAMSFHGYRGEAFAMGERTTVACLDAPASGRMAIGEAITNIAAADIPNLGDVKLSANWMAAAGHRGEDAKLFDTVKAVSEFCISAGLSIPVGKDSLSMRTAWQDAGENKQVVAPLSLIATAFAPVEDIRNTLTPQLQFPEGEETELLLLDLGNGKNRLGGSVLAQVYNSVGEHAPDVDPAELAAFFAAVQRLRREGLILAYHDRGDGGLFSTVCEMAFASRCGLSLVLDTVCYDLHMNDVDGLEKKPDTLKGRFDDRLIGGLFAEELGAVVQIRRVDRAAVTEILRAGKLNYHFIGEPNDKDEIRFWRSAKLVFGAPRAELLQAWTETSYRIARIRDDAESVQQEFDGLADATDPGLSVKLSFDVTEDVAAPFIATGSRPKVAVLREQGVNSQFEMAAAFERAGFEPVDVHMSDLQSGRRKLVDFHGLAACGGFSYGDVLGAGQGWAKSILFNPALRAQFEAFFGRSDTFALGVCNGCQMMAHLAPIIPGAEAWPTFHRNRSEQFEARFVMVEVTESPSILLQGMAGSRMPIVVSHGEGRAVFAAEADRQQALVALRYIDNHGAPAVAYPKNPNGSPDGVTGFTTADGRFTIMMPHPERTARTLQMSWAPSWLVETSPDASPWLRMFRNARQWLG

SEQ ID NO: 52868 - DNA, 3978 bp, Neisseria meningitidis FAM18
  CDS (1)..(3978): transl_table=11
ttgagagccgaatccatgtctgtcgttttgcccttgcgcggcgttaccgccctttccgatttccgtgtcgaaaaactcttgcaaaaagccgccgcactcggactgcccgaagtcaaattaagcagcgaattttggtatttcgccggcagcgagaaagcattggatgccgcgactgtcgaaaaactgcaagccttgttggcggcgcaaagcgttgaacaaacgccaaaagcgcgcgagggcttgcatttgtttttggtaacgccccgtttgggtacgatttcgccgtgggcttccaaggcgaccaatatcgcggaaaactgcggtttggcaggcatcgagcgcatcgagcgcggcatggcggtgtggctggaaggtgcgcttaccgatgaacagaaacagcaatgggcggcgttgctgcacgaccgcatgaccgaatccgtgctgcccgattttcagacggcatccaaattattccaccatctcgaatccgaaaccttttccaccgttgatgttttaggcggcggtaaagaggctttggtcaaagccaataccgaaatgggtttggcactctccgccgacgaaatcgattatctggttgaaaactatcaggctttgcaacgcaatccgtccgatgtggagctgatgatgttcgcgcaggcaaacagcgaacactgccgccacaaaatcttcaacgccgacttcatcctcaacggcgaaaaacaaccgaaatcccttttcggcatgatacgcgacacgcacaacgcgcatcccgaaggcacggtcgtcgcttataaagacaattcgtccgtgatcgaaggcgcgaaaatcgagcgtttctatccgaatgcggcggaaaaccaaggctaccgtttccacgaggaagacacgcatatcatcatgaaagtggaaacgcacaaccacccgaccgccatcgcgccgtttgcaggcgcggcaacgggcgcgggcggcgaaatccgcgacgaaggcgcaacgggcaaaggttcgcgtccgaaagcaggcttgaccggctttaccgtgtccaacctcaacatccccggcctcaaacagccgtgggaacaagattacggcaagccggaacatatttcctcgccgctggacatcatgattgaaggcccgatcggcggcgcggcgttcaacaacgaattcggccgccccaacctcttgggctacttccgcacttttgaagaaaaatttgacggtcaggttcgcggctaccacaaaccgattatgattgccggcggcttgggcagcattcaggcgcagcagacgcataaagacgaaatccccgaaggcgcgttgctgatccaactgggcggcccgggcatgcttatcggcttgggcggcggcgcggcttcttcgatggataccggcacgaacgacgcttctttagacttcaactccgtacaacgcggcaaccccgaaatcgaacgccgcgcgcaggaagtcatcgaccgctgctggcagctcggcgacaaaaacccgattatctccatccacgacgtgggcgcaggaggtttgtccaacgccttccccgaactggtcaacgatgccggacgcggcgcggtattcgagctgcgcgaagtgccgttggaagaacacggtttaacgcctttgcaaatctggtgcaacgaatcgcaagagcgttatgtgttgtcgattttggaaaaagatttggataccttccgcgccatctgcgaacgcgaacgctgcccgtttgccgtggtcggtacagcgaccgacgacggtcatttgaaagtgcgcgacgatttgttcgccaacaaccccatcgatttgccgttgaacgtcttgctcggcaaaccgcccaaaaccacgcgtaccgacaaaacagttacgccatctaaaaaaccgtttcacgccgacgatatcgacatcaccgaagccgcctaccgcgttttgcacctgcctgccgtagccgccaaaaacttcctgattaccatcggcgaccgcagcgtcggcggcatgacccaccgcgaccaaatggtcggcaaataccaaacccccgtagccgactgcgccgttaccatgatgggcttcaatacctatcgcggcgaagcaatgtctatgggcgaaaaaccgaccgtcgccctgtttgacgcgcctgcttcgggcagaatgtgcgtcggcgaagccatcaccaacatcgcggcggtcaacatcggcgacatcggcaacatcaagctctccgccaactggatggcggcgtgcggcaacgaaggcgaagacgaaaaactctaccgcaccgtcgaagcggtttccaaagcctgtcaggcattggatttgagcattcccgtgggcaaagacagcctgtcgatgaaaaccgtatggcaggatggcgaagagaaaaaatccgtcgtttcgccgttgagcctgattatctccgcgttcgcgccggttcaagacgtacgcaaaaccgttacgcccgaattgaaaaacgtcgaggacagcgtattgctgtttgtcgatttgggcttcggcaaagcgcgtatgggcggctctgcattcggtcaggtatacaacaacatgagcggcgacgcgcccgatttggacgacacaggccgtctgaaagcgttttacaacgtgattcaacagcttgtcgccgaagacaaactcttggcataccacgaccgcagcgacggcggcttgtttgccgttttggtagaaatggcgtttgcagggcggtgcggcttggatatagatttaaatttattgcttgcacaaacatttattaccaaccataccgctctgtctcaatcattgcggactgaagaggtaaaagcgttggctgaatggcaagaaaccattgcccgcacattatttaatgaagagttgggtgctgttatccaagttagaaaacaagatgttgccgatattatcaatttattctatcaacaacagctgcatcataatgtctttgaaatcggtacgttaactgatgagaacacgttaatcatccgcgacgggcaaacgcaccttatttctgacaacctaatcaaactgcaacaaacctggcaagaaaccagccatcaaatccaacgcctgcgcgacaaccctgcctgcgccgacagcgagtttgccctgattggcgacaacgaccgcagcgcattgtttgccaacctgaaattcgacgtgaacgaagacatcgccgcgccgtttatcaacagcggcgcgaaacccaaaatcgccatcctgcgcgaacagggcgtgaacgggcaaatcgaaatggccgccgccttcacccgcgccggattcgatgcttacgacgtgcatatgtccgacctgatggcaggccgcttccgccttgccgacttcaaaatgctggcggcgtgcggcggcttcagctacggcgacgtactcggcgcgggcgaaggctgggcgaaatccatcctgttccaccctgccttgcgcgaccaatttgccgccttctttgccgatccggacacgctgacattgggcgtgtgcaacggctgccagatggtcagcaacctcgccgagattatcccgggtgcagaggcatggcctaaattcaaacgcaacctgagcgaacagtttgaagcacgcctgagcatggttcacgttccgaaatcagcgtcgctgattctgaacgaaatgcaaggctccagcctgcctgtcgtggtcagccacggcgaaggccgcgccgacttcgcgcttcacggcggcaatatttccgccgatttgggcatcgcgctgcaatatgtggacggtcaaaaccaagtgacccaaacctacccgctcaaccccaacggctcgccgcaaggcatcgccggcgttaccaacgccgacggccgcgtgaccatcatgatgccgcatccggaacgcgtgtaccgtgccgcacaaatgagctggaaaccagaagactggacggaattgtccggctggtaccgcctctttgccggcgcacgtaaagccttgggctaa

SEQ ID NO: 52869 - protein, 1325 aa, Neisseria meningitidis FAM18
MRAESMSVVLPLRGVTALSDFRVEKLLQKAAALGLPEVKLSSEFWYFAGSEKALDAATVEKLQALLAAQSVEQTPKAREGLHLFLVTPRLGTISPWASKATNIAENCGLAGIERIERGMAVWLEGALTDEQKQQWAALLHDRMTESVLPDFQTASKLFHHLESETFSTVDVLGGGKEALVKANTEMGLALSADEIDYLVENYQALQRNPSDVELMMFAQANSEHCRHKIFNADFILNGEKQPKSLFGMIRDTHNAHPEGTVVAYKDNSSVIEGAKIERFYPNAAENQGYRFHEEDTHIIMKVETHNHPTAIAPFAGAATGAGGEIRDEGATGKGSRPKAGLTGFTVSNLNIPGLKQPWEQDYGKPEHISSPLDIMIEGPIGGAAFNNEFGRPNLLGYFRTFEEKFDGQVRGYHKPIMIAGGLGSIQAQQTHKDEIPEGALLIQLGGPGMLIGLGGGAASSMDTGTNDASLDFNSVQRGNPEIERRAQEVIDRCWQLGDKNPIISIHDVGAGGLSNAFPELVNDAGRGAVFELREVPLEEHGLTPLQIWCNESQERYVLSILEKDLDTFRAICERERCPFAVVGTATDDGHLKVRDDLFANNPIDLPLNVLLGKPPKTTRTDKTVTPSKKPFHADDIDITEAAYRVLHLPAVAAKNFLITIGDRSVGGMTHRDQMVGKYQTPVADCAVTMMGFNTYRGEAMSMGEKPTVALFDAPASGRMCVGEAITNIAAVNIGDIGNIKLSANWMAACGNEGEDEKLYRTVEAVSKACQALDLSIPVGKDSLSMKTVWQDGEEKKSVVSPLSLIISAFAPVQDVRKTVTPELKNVEDSVLLFVDLGFGKARMGGSAFGQVYNNMSGDAPDLDDTGRLKAFYNVIQQLVAEDKLLAYHDRSDGGLFAVLVEMAFAGRCGLDIDLNLLLAQTFITNHTALSQSLRTEEVKALAEWQETIARTLFNEELGAVIQVRKQDVADIINLFYQQQLHHNVFEIGTLTDENTLIIRDGQTHLISDNLIKLQQTWQETSHQIQRLRDNPACADSEFALIGDNDRSALFANLKFDVNEDIAAPFINSGAKPKIAILREQGVNGQIEMAAAFTRAGFDAYDVHMSDLMAGRFRLADFKMLAACGGFSYGDVLGAGEGWAKSILFHPALRDQFAAFFADPDTLTLGVCNGCQMVSNLAEIIPGAEAWPKFKRNLSEQFEARLSMVHVPKSASLILNEMQGSSLPVVVSHGEGRADFALHGGNISADLGIALQYVDGQNQVTQTYPLNPNGSPQGIAGVTNADGRVTIMMPHPERVYRAAQMSWKPEDWTELSGWYRLFAGARKALG

SEQ ID NO: 52870 - DNA, 2205 bp, Magnetospirillum magnetotacticum MS-1
  CDS (1)..(2205): transl_table=11
ttgagcaagatcactccggaagtcatcgcccagcacggcatcaagcccgacgagtacaagaagatcctggagatcatgggccgcgagcccaatctcaccgagcttggcatcttctcggtgatgtggtccgagcattgctcgtacaagtcgtcgaagaagtggctgaagacccttcccaccaaggcgccctgggtgatctgcggccccggcgagaatgcgggcatcatcgatatcggcgatggtcaggccatcgtcttcaagatggaaagccacaaccaccccagcttcatcgagccctatcagggcgcggcgaccggcgtgggcggcatcttgcgcgatgtcttcaccatgggcgcgcgtcccatcgccaatatgaacgctctgcgtttcggcgatccctcgcaccccaagacccgtcatctggtggcgggtgtggtggccggtatcggcggctatggcaattgcgtcggcgtgcccaccgtgggcggcgagaccaatttccatcccagctataacggcaatatcctggtcaatgccatgaccgtgggtctggccgacaaggacaagattttctactcggccgccgccggtatcggcaatccggtggtctatttcggctccaagaccggccgcgacggcatccacggcgccaccatggcgagcgcggaattcgacgagaaatccgaggagaagcgtcctaccgtgcaggtgggcgaccccttcaccgagaagctgctgatcgaagcctgcctggaactgatgtccaccgacgccatcgtggccatccaggacatgggcgccgcgggtctgacctcgtcctccttcgagatggcgtccaagggcggcctgggcatcgagatggatctcgacgccgtgcccatgcgcgaagagggcatgagcgcctacgagatcatgctgtcggaatcccaggaacgcatgctgatggtcctcaagcccggtcgcgaggccctggccaaggccatcatggacaagtgggaactggacttcgccgtggtgggcgtgctcaccgataccggccgcatggtgttgaagcgccacggcgcggtggtggccgatctgcccatcgatccgctggctctggcttcgcccgaatatgaccgtccctggaccgcaccggccaagcgcccggtggttgacgccaaggacgtgccccaggtctgcgtcgccgaggcgctgaagaccttggtggcctgtcccgatctggcctccaagcgctggatctattcccagtacgaccacatggtcatgggcgacacggtgggccgtcccggcggcgatgccgccgtggtgcgcatccatggcaccgacaaggcggtgggcatcaccaccgacgtgacgccgcgctatgtgctggctgatccttacgagggcggccgtcaggcggtggccgaggcctatcgcaatttgtcggcggtgggcgccctgcccatggccatcaccgacaatctgaatttcggcaatcccgaaaagcccgagatcatgggccagatcgtcgaggccatccgcggcatgggccaggcctgtaccgagttggacttccccgtcgtctcgggcaatgtctcgctctataacgagacccagggcacggccatcctgccgaccccggcggtgggcggcgtcggccttctggaagacgtcaacaagtcggcgaccgtcgccttcaagcaggcggggtcgtccatcgtgctgatcggcgagaccaagggctggctgggttcgtcgctttacctgcgcgagattgccaagcgcgaagacggcgccccgccgcccgtggctctgcaccgcgagcgccgtgccggtgaactggtccgccagttgatcggcgacggcctcgtcctggcctgccacgacgtttccgatggcggcttgctggtggcggtggccgagatggccatggcgtccgaggacaagatcggcgccaagctggatgcgccccataacctggctctgcacgcctggtgcttcggcgaggatcagggccgctatattctggaagtgtccgacaacgatctggccagcgtgctggaagaggcggccgaacacgatactgcggcccgcgtcatcggcaagaccggcggcccggccatcagcgtcggcggcagcgccgttccggtcttcgaactggctgaagccaacgagggctggctgcccggctatatgggcgaggaaatgtcgggtcactaa

SEQ ID NO: 52871 - protein, 734 aa, Magnetospirillum magnetotacticum MS-1
MSKITPEVIAQHGIKPDEYKKILEIMGREPNLTELGIFSVMWSEHCSYKSSKKWLKTLPTKAPWVICGPGENAGIIDIGDGQAIVFKMESHNHPSFIEPYQGAATGVGGILRDVFTMGARPIANMNALRFGDPSHPKTRHLVAGVVAGIGGYGNCVGVPTVGGETNFHPSYNGNILVNAMTVGLADKDKIFYSAAAGIGNPVVYFGSKTGRDGIHGATMASAEFDEKSEEKRPTVQVGDPFTEKLLIEACLELMSTDAIVAIQDMGAAGLTSSSFEMASKGGLGIEMDLDAVPMREEGMSAYEIMLSESQERMLMVLKPGREALAKAIMDKWELDFAVVGVLTDTGRMVLKRHGAVVADLPIDPLALASPEYDRPWTAPAKRPVVDAKDVPQVCVAEALKTLVACPDLASKRWIYSQYDHMVMGDTVGRPGGDAAVVRIHGTDKAVGITTDVTPRYVLADPYEGGRQAVAEAYRNLSAVGALPMAITDNLNFGNPEKPEIMGQIVEAIRGMGQACTELDFPVVSGNVSLYNETQGTAILPTPAVGGVGLLEDVNKSATVAFKQAGSSIVLIGETKGWLGSSLYLREIAKREDGAPPPVALHRERRAGELVRQLIGDGLVLACHDVSDGGLLVAVAEMAMASEDKIGAKLDAPHNLALHAWCFGEDQGRYILEVSDNDLASVLEEAAEHDTAARVIGKTGGPAISVGGSAVPVFELAEANEGWLPGYMGEEMSGH

SEQ ID NO: 52872 - DNA, 2367 bp, Nostoc punctiforme PCC 73102
  CDS (1)..(2367): transl_table=11
atgaccgccacatctcctgctttcttttcccctcaagaaatcgctgctgaaggtcttaaaccagaagaatacgcagaaattgtccgtcggttaggccgtcatcccaacaaagctgaactgggaatgttcggggtaatgtggtcagagcattgctgttacaaaaattctcggcctctactcaaacaatttcctactgagggaccccgcatcctcgtaggtcctggtgaaaatgctggtgttgtagatttgggtgacggactccaactagcttttaagattgaatctcacaaccacccatcagctgtagaaccatttcaaggtgcagcaactggagtaggtggtattcttagagatatttttacaatgggtgcgcgtcccattgctctattaaattccctgcgcttcggttccctagaagatgccaaaactcaaaggctgttccaaggtgtagtggcgggaatttcacattatggtaattgtgtgggagtacccaccgttggcggcgaagtttattttgatccggcttattctggtaatcccctagtgaatgttatggcactaggattaatggaaacccaggaaatcgttaaatctggggcatctggcttaggaaaccccgtgctgtatgttggttctaccactgggcgcgatggtatgggaggcgcaagttttgccagtgcagaattgagcgatcagtcaatagacgatcgccctgctgtgcaagtgggcgatccatttttggaaaagtcgttaattgaagcttgtctagaggcgtttaaaacgggtgcagttgtcgccgcccaagatatgggagcagcgggtatcacctgttctacctcagaaatggcggcaaaaggtggagtaggaattgaactagatttagataaaattcccgcaagagaaacggggatggttccttatgaatatctactttcggaatctcaagaacgaatgctgtttgttgcccataaagggcgtgagcaagaattaatcgacattttccaccgttgggggcttcaagccgttgtcgctggtactgtcatcgctgaacccattgtgcggattctctttcaaggtggagtagcagcagaaattcccgccgaggctttggcggaaaatacgccattatataaccgtgaattgctggcagaaccgccagaatatgctcgtcaagcttgggaatggactcctgattctttacctgcttgcacaactgctggcatagaaattcaaggagggcagcaaagttggaatgatattctgttaactttgctcgatacacccacgatcgcatctaaaaactgggtatatcgtcaatatgaccatcaagtacagaataatacagtaatactaccaggtggcgctgatgcggctgttatccggttgcgccctcttgaagaaattcccaatctaaaatctaaaatcccaaatctaaaattaggggtggctgcaacagtagattgcaatcctcgttatgtttatcttcacccctacgagggagctaaggcagtggtggcagaagctgcacgcaatcttagctgtgtgggtgcagaacctctggcggtaacggataacctaaattttggctctccagaaaaaccgattggttattggcaattagcagaagcttgtcgcggtttggcggaaggttgccgagaattggcgacaccagtcacaggcggaaatgtttctttatacaatgaaacccttgattctcaaggcattccccaacctatttatcccactcctgtggtggggatggtgggcttgattcccgatatcaccaaaatttgcggacaaggttggcaagcatccggcgacgtgatttatcttctcggattgcctctagcatccaaaatcagtttgggagcatctgagtatttagccactatccacaatactgttgccggaaaaccgccactggtagattttgacttggaacgccgcgtccaaaaagtttgtcgtgaaggaatccgtaatggttggatacgttcagcccatgattctgctgaagggggagtggcgatcgcattagccgaatgttgtattgctggcaaccttggtgctgaaatcaatttagaaatagcaccaatgcagaaccgtgtcgatgagatgctgtttgccgaaggtggtgccaggattttagtttctgtaacatccgcacagcaagcaatttgggaatcatacttacaggaacatctcggtcaacagtggcaaatactaggtacagttggtaattttgagacgggtttgggggttttcaccactgataatcagatcttaatcaaagttagtatcgaagatatgagcgatcgctattcccatgcgatcgctagacgtatcgctaccaacactgctgtttcttag

SEQ ID NO: 52873 - protein, 788 aa, Nostoc punctiforme PCC 73102
MTATSPAFFSPQEIAAEGLKPEEYAEIVRRLGRHPNKAELGMFGVMWSEHCCYKNSRPLLKQFPTEGPRILVGPGENAGVVDLGDGLQLAFKIESHNHPSAVEPFQGAATGVGGILRDIFTMGARPIALLNSLRFGSLEDAKTQRLFQGVVAGISHYGNCVGVPTVGGEVYFDPAYSGNPLVNVMALGLMETQEIVKSGASGLGNPVLYVGSTTGRDGMGGASFASAELSDQSIDDRPAVQVGDPFLEKSLIEACLEAFKTGAVVAAQDMGAAGITCSTSEMAAKGGVGIELDLDKIPARETGMVPYEYLLSESQERMLFVAHKGREQELIDIFHRWGLQAVVAGTVIAEPIVRILFQGGVAAEIPAEALAENTPLYNRELLAEPPEYARQAWEWTPDSLPACTTAGIEIQGGQQSWNDILLTLLDTPTIASKNWVYRQYDHQVQNNTVILPGGADAAVIRLRPLEEIPNLKSKIPNLKLGVAATVDCNPRYVYLHPYEGAKAVVAEAARNLSCVGAEPLAVTDNLNFGSPEKPIGYWQLAEACRGLAEGCRELATPVTGGNVSLYNETLDSQGIPQPIYPTPVVGMVGLIPDITKICGQGWQASGDVIYLLGLPLASKISLGASEYLATIHNTVAGKPPLVDFDLERRVQKVCREGIRNGWIRSAHDSAEGGVAIALAECCIAGNLGAEINLEIAPMQNRVDEMLFAEGGARILVSVTSAQQAIWESYLQEHLGQQWQILGTVGNFETGLGVFTTDNQILIKVSIEDMSDRYSHAIARRIATNTAVS

SEQ ID NO: 52874 - DNA, 3894 bp, Haemophilus somnus 2336
  CDS (1)..(3894): transl_table=11
atgttacacatttttcgtggtacgcccgcattatccaattttcgtttaaatcagttattcagtggttttcagcaagataatttacccattgtgtcttgttatgcagaatttttgcattttgcccatttaagtgaagcattaactgaggtagaaagagaaaaattagaggagcttttgcgttatggtccgactcagaaatcgcaagagccttatggggaatgttttgtggtgattccacgtataggtacgatttcttcttgggcatcaaaagcaactgatattgcacataattgtgatttaaataaggtacttcgtttggaacgtggtatcgcttattatttcaaatttaaccgcactttaacggctgaagaagaacaacaattagtattccgtatctacgaccctatgatggaaagtattgtccgttctccacaagaagcagctgttttatttgaacagcatgacccaaaacctttcaccacggtagatattttaaccggtgggcatgttgcattggaaaaggcgaatgtgactttaggattggcattagcaaaagatgaaattgattatttagtggaaaatttcaccgcactcggtcgcaatcctacagatgttgaactttatatgtttgcacaagcgaactcagaacattgtcgtcataagatttttaatgcagattggattattgatggaaaaaaacaggataaatcgctgtttaaaatgattaaaaacacctttgagaaaacgcctgattatgtattgtcagcttataaagataatgctgcggtgatggaaggttcaaaagtcggacgctttttccctgaccaagacgggcaatatcgttatcatcaagaagacacgcatattttgatgaaagtggaaacccataatcaccctaccgccatttcacctttccccggagctgcaactggttcaggtggcgaaattcgtgatgagggagccacgggacgtggtgcaaaaccgaaagccggtttagtcggtttctccgtgtctaatctttgtattccgaattttccgcaaccttgggaaaatgcgttgagtaaaccgagccgtattgcctccgcactggatattatgattgaaggtccgcttggcggtgctgctttcaataatgaattcgggcgtcctgctttattgggttatttccgtacttatgaagaaaaagtcaacagttttaacggcgaagaagtgcggggctatcataagccgattatgctggcaggcgggataggtaatattcgtcatgaacatgtgcaaaaaggcgaaattcctgttggtgcgaaattaattgtgttaggcggagcagcaatgaatattggtctgggcggtggtgcagcctcgtctatggcatcaggaaagtcaaaagaagatttggattttgcttctgtacaacgggataatccggaaatggagcgtcgctgtcaggaagtaatagaccgttgttggcaattaggttcagaaaaccccattctttttattcatgatgtcggtgccggcgggttatctaatgcgatgcctgaattagttcatgatggtggtcgaggtggtcgattcgagttgcgaaaaattttatgcgatgaaaaaggaatgtcgccgttagaaatttggtgcaatgaatcacaagaacgttatgttttagccgtttcaccagaaaaattaccgctctttgaagcgatttgtcagcgtgagcgagcatcttttgcggtgattggtgaggcaacggaacaacagcagttaactttgcaagatagccattttaataacaatcctattgatttaccaatgaacatcttgttaggtaaaacccctaaaatgatacgtgatgtgaaatccgcaaaagtcaataatccccaattggatcagtctatgatccaaattaaagaagcattgttcagggtattgcggttacctgccgtagcagagaaaacatttttaatcactatcggcgaccgctcagtaacaggtatggtagcacgggatcaaatggtcggtccgtggcaagtacctgtggcggattgtgcggtaacaacagcaagtttagacagttatcacggtgaagcaatgtctatcggagaacgaactcctgttgccttgttggattttgccgcctctgcacgtttagctgtcgcagaaagcattaccaatattgccgcaacggatatcggcaatattagacggattaaattatccgctaactggatggctgccgcaggtcatggcggcgaagatgccggactttatgaggctgtaaaagcaatcggtgaggaattatgccctcaattaggtttaaccattccggttggaaaagattccatgtctatgaaaaccacttggcaggaagaaggatatcaaaaatccgtaaccgcaccgctttccgtaattatcagtgcgtttgctcgtgtagaagatgtgcgtaagacggttacacctcaattacgtctggacaaaggagatagccgattactattaattgatttaggtgagggaaaaaatcgtttaggtgcaaccgcacttgctcaagtgtataagcaattaggcgatgtaccggcagatgtggtaaatgtgtctttgctaaaaggcttttttaatgcaatgcaagctctcgtgaaacaagagaaattgctggcctatcatgatcgttcggacggtggtttgattgttacgcttgcggaaatggcttttgccggtcattgcggtatttccatagacatcagtgcattgggtgacaatgatctcggtgttttattcaatgaagaattaggtgccgtaattcaagtcaaagaaagtgaccttaaagcggtgcgtgccgtattgaccgaacatggattaattcatttaaccaaagaactcggtattgttaccgcagatgatcatatcgagattactcgcagtaccagagtcttattgagtgaaaaacgttccgtattacgtgggatttgggctgaattaacacatcaaatgcaacgtttacgtgataatccggattgtgccgatcaagaatttgagatgaaaaaagatccgaatgataaaggactttccgcttatttgacctatgatctaaatgaaaaaatcaccgcaccttatatccacaaaggaacaaaacctcgtattgctattttacgtgaacaaggggtaaacagccattatgaaatggcggcagcttttgatcgtgctggatttaatgccattgatgttcatatgagtgatttgcaaaaaggacgtcaccatcttcaggatttcaacgcactcgttgcttgtggtggtttttcttatggcgatgtcttgggagccggtggcggttgggctaaatccattctgtttaacactgcacttcgtgatcaattcagtgcatttttccatcgtcaggacacattagccttaggtgtttgtaacggttgtcaaatgttatccaatttagcagaaattatacccggtacggaaaactggggacgatttgtacgaaataaatcagaacgttttgaagctcgtgttgcaatggttcgcattaacgatactcattccgtatggtttaacggaatgtcgggatcacatatgccgattgcggtttctcatggtgaaggacgaattgaatttaagcatgatcagcagttgcaagcattaaaagcacagaatttgattgctgcacaatatatcgacagtcagttaaatccgacagaaatatatccggcaaatccgaacggatctgcggagggaattaccgcactttctaattccaacggacgagtcgctattatgatgccacaccctgagcgtgtatttagagcagtaaacaattcttggtatcctgaaaattggcaagaagacggggcttggatgcgtttattccaaaatgcgagagttgcattaggataa

SEQ ID NO: 52875 - protein, 1297 aa, Haemophilus somnus 2336
MLHIFRGTPALSNFRLNQLFSGFQQDNLPIVSCYAEFLHFAHLSEALTEVEREKLEELLRYGPTQKSQEPYGECFVVIPRIGTISSWASKATDIAHNCDLNKVLRLERGIAYYFKFNRTLTAEEEQQLVFRIYDPMMESIVRSPQEAAVLFEQHDPKPFTTVDILTGGHVALEKANVTLGLALAKDEIDYLVENFTALGRNPTDVELYMFAQANSEHCRHKIFNADWIIDGKKQDKSLFKMIKNTFEKTPDYVLSAYKDNAAVMEGSKVGRFFPDQDGQYRYHQEDTHILMKVETHNHPTAISPFPGAATGSGGEIRDEGATGRGAKPKAGLVGFSVSNLCIPNFPQPWENALSKPSRIASALDIMIEGPLGGAAFNNEFGRPALLGYFRTYEEKVNSFNGEEVRGYHKPIMLAGGIGNIRHEHVQKGEIPVGAKLIVLGGAAMNIGLGGGAASSMASGKSKEDLDFASVQRDNPEMERRCQEVIDRCWQLGSENPILFIHDVGAGGLSNAMPELVHDGGRGGRFELRKILCDEKGMSPLEIWCNESQERYVLAVSPEKLPLFEAICQRERASFAVIGEATEQQQLTLQDSHFNNNPIDLPMNILLGKTPKMIRDVKSAKVNNPQLDQSMIQIKEALFRVLRLPAVAEKTFLITIGDRSVTGMVARDQMVGPWQVPVADCAVTTASLDSYHGEAMSIGERTPVALLDFAASARLAVAESITNIAATDIGNIRRIKLSANWMAAAGHGGEDAGLYEAVKAIGEELCPQLGLTIPVGKDSMSMKTTWQEEGYQKSVTAPLSVIISAFARVEDVRKTVTPQLRLDKGDSRLLLIDLGEGKNRLGATALAQVYKQLGDVPADVVNVSLLKGFFNAMQALVKQEKLLAYHDRSDGGLIVTLAEMAFAGHCGISIDISALGDNDLGVLFNEELGAVIQVKESDLKAVRAVLTEHGLIHLTKELGIVTADDHIEITRSTRVLLSEKRSVLRGIWAELTHQMQRLRDNPDCADQEFEMKKDPNDKGLSAYLTYDLNEKITAPYIHKGTKPRIAILREQGVNSHYEMAAAFDRAGFNAIDVHMSDLQKGRHHLQDFNALVACGGFSYGDVLGAGGGWAKSILFNTALRDQFSAFFHRQDTLALGVCNGCQMLSNLAEIIPGTENWGRFVRNKSERFEARVAMVRINDTHSVWFNGMSGSHMPIAVSHGEGRIEFKHDQQLQALKAQNLIAAQYIDSQLNPTEIYPANPNGSAEGITALSNSNGRVAIMMPHPERVFRAVNNSWYPENWQEDGAWMRLFQNARVALG

SEQ ID NO: 52876 - DNA, 3894 bp, Haemophilus influenzae R2846
  CDS (1)..(3894): transl_table=11
atgactgtcaaaacctttcgtggctcgcctgctctttctgaatttcgtttaactcaacttcaacaaaaatgccagcaatatcaattgcctattacgtcagtttatgcagagtatttgcattttgttgaacaaaaaacatcgcttgtagaagatgaaatcgttaaattacaagcattattgcattatggatcaatgttttctgaactcaagcctgcaggatattgtttaattgtgactccacgagtggggacaatttcctcttggtcttcaaaagcgacggacatcgctcacaattgtggtttgtcgaaggtaaatcgtattgaacgtggtatagcctattacttcaatattgagcgtgatttaaccgaagcagaattggctacgctgaaagatttattacacgaccgtatgttagaaaccgtgttaaatcacgaaacagaagcagccttgctttttactcaacaagaacccaaagcattaactaccattgatattttaaatggtggccgtcaagcattagaacaggcgaatattgccttgggtttagcgttggcagatgatgagatggattatttagtggaaagttttactgccttaaagcgtaatccacaggatgtggagctttatatgtttgcacaagcgaattcagagcattgtcgccataaaatttttaatgccgattggattattgatggcaaaaaacaggataaatcgctgtttaaaatgatcaaaaatacctttgagaaaacgcctgattttgtgctttctgcttataaagataatgctgcagtaatggaaggttcgaaagtcgggcgttggtttcctgatcctgatggacaatatcgtgttcatcaagaagatgctcacattttaatgaaagtggaaacacataaccatcccacagcaatttcgccatttcctggtgctgcaacaggctctggcggggagattcgtgatgaaggggcaacggggcgtggggcaaaacccaaagcaggtttaacaggtttctcggtgtctaacctcgttattccaaactttgaacaaccttgggaaaatccattgtctaaaccaaatcgcattgcttctgccttggatattatgatagatgcgcctttaggtagtgcggcatttaataatgaatttggtcgcccagcattattaggttatttccgtacttatgaagaaaaagtaaatagttttgcaggaaaagaagtgcgcggttatcacaagccgattatgttagcgggaggaatcggtaatattcgtggcgaacaggttcaaaaaggcgaaattccagtcggtgctaaattgatcgttttgggtggggcagcaatgaacattggtttaggtggtggtgctgcttcttcgatggacagtggtaaatcaaaagaagatttagattttgcttctgttcaacgtgaaaatccggaaatggaacgccgctgccaagaagttattgaccgctgttggcaattaggcgaagaaaatccaatcctgtttattcacgatgtgggtgcgggtggtttatctaatgcaatgcctgaattggtacacgatggcaagcgtggaggaaaattcgatctgcgttctattctttgtgatgaaaaaggtatgtcgccattggaaatttggtgtaatgaatcgcaagaacgttatgtattagccgttgcgccagaaaacctcgaattatttaccgcactttgtgagcgtgaacgtgccccttttgcagtgattggcgaagcaacacaagcagaacatttaatcttgcacgatagtcatttcgataataatccaattgatttaccaatgaatgtgttattaggcaaaacgccgaaaatgacgcatgaagttttgtcaaaaacagtagaaaatcaatcacttaaaacagaaggtattcaattaaaagaagcattccatcgtgtattacgtttacccgttgttgcagaaaaaactttcttaattactattggcgaccgttctgtaacaggtatggtggcacgagatcaaatggtgggtccttggcaaatccccgtgtctgatgtggctgttactactgcttcactggatagctaccacggcgaagcaatggcaatgggcgaacgctctccagttgccttgctaaatttctcggcttcggcacgcttagctgtggcggaggcgattactaacattgctggcacccacattggcgagatgaaacgtattaaactttctgccaactggatgagtgcagcaggtcacacaggcgaagatgctggactttatgaagcagtaaaagctgtgggcgaagaactttgtcctgcgttaggcttaactattcctgtgggtaaagactcaatgtcgatgaaaaccacttggatcgataatggcgaacaaaaatcagtgaccgccccactttcattagtaatttccgcttttgctcgtgtagaagatgtacgtaaaacgcttacgccacaacttcgtaccgacaaaggtttatcgagtttattgctaattgatttaggcgaagggcataatcgattaggtgcgactgcacttgctcaagtgtacaaacagttaggagacaagcctgccgatgtggtaaaggttcaacgcttaaaagatttttacaatgcaatgcaaactttagtggcagaagataaattgttggcttatcacgaccgttcggacggcggtttaatcacaactcttgcagaaatggcgtttgcagggcattgtggggtagaagttgatatttcagccttaggcgacaatgatttagcggtattatttaacgaagaattgggagcggttatccaagttaccgatagtcaattagaaagtgtacgtgaggtgttgaaagctcacaatttgcttggtattactcaccaattaggtacggtaactgctgatgatcgctttgagatcagccgcggcagccataaattattcagcgaaaaacgctctgaattacgtagtatttgggcagaattaacttaccaaatgcaacgcttacgcgataatccagagtgtgctgagcaagagtttgaagctaagaaaaaccctgacgacaaaggcttatccgcatttttgacttacgatgtgaatgaagatattactgcgccatttatcaataaaggtgtaaaaccaaccattgcaattttacgtgaacaaggtgtaaatagtcattatgaaatggcagcagcgtttgatcgtgcaggctttaatgcaattgacgtgcatatgtctgatttaatgattggtcgtcgtaatttagccgaattcaatgcaatggttgcttgtggcggtttctcttacggcgatgtgcttggcgcagggggcggttgggcaaaatccatcttatttaacccgaaattacacgagcaattcagccagttttttatcaatccaaacacactgaccttaggcgtatgtaacggttgtcaaatgatctctaacttggcggaaattatcccaggtacagaaaactggccgcattttgtacgcaacaaatctgaacgctttgaagcgcgtgtgagtttagtgaaaattaatgaagtggattcagtttggtttgcaggaatggctggctcacatatgcccattgcggtttctcacggggaaggacaagttaagtttaaatcagttgaacagtttgcaggcttaaaagcacaaggcatcattgccgcacaatatattgacaacaacggtagccccactgaactatatccagccaatccgaatggttctgcggagggcattactgcaattacaaatcttgatgggcgagttgctattatgatgccacaccctgaacgtgtgttccgtgctgtgagtaactcttggcacccagaaaactggacagaagacggtgcgtggatgagattattcagaaatgcaagaatggtattttaa

SEQ ID NO: 52877 - protein, 1297 aa, Haemophilus influenzae R2846
MTVKTFRGSPALSEFRLTQLQQKCQQYQLPITSVYAEYLHFVEQKTSLVEDEIVKLQALLHYGSMFSELKPAGYCLIVTPRVGTISSWSSKATDIAHNCGLSKVNRIERGIAYYFNIERDLTEAELATLKDLLHDRMLETVLNHETEAALLFTQQEPKALTTIDILNGGRQALEQANIALGLALADDEMDYLVESFTALKRNPQDVELYMFAQANSEHCRHKIFNADWIIDGKKQDKSLFKMIKNTFEKTPDFVLSAYKDNAAVMEGSKVGRWFPDPDGQYRVHQEDAHILMKVETHNHPTAISPFPGAATGSGGEIRDEGATGRGAKPKAGLTGFSVSNLVIPNFEQPWENPLSKPNRIASALDIMIDAPLGSAAFNNEFGRPALLGYFRTYEEKVNSFAGKEVRGYHKPIMLAGGIGNIRGEQVQKGEIPVGAKLIVLGGAAMNIGLGGGAASSMDSGKSKEDLDFASVQRENPEMERRCQEVIDRCWQLGEENPILFIHDVGAGGLSNAMPELVHDGKRGGKFDLRSILCDEKGMSPLEIWCNESQERYVLAVAPENLELFTALCERERAPFAVIGEATQAEHLILHDSHFDNNPIDLPMNVLLGKTPKMTHEVLSKTVENQSLKTEGIQLKEAFHRVLRLPVVAEKTFLITIGDRSVTGMVARDQMVGPWQIPVSDVAVTTASLDSYHGEAMAMGERSPVALLNFSASARLAVAEAITNIAGTHIGEMKRIKLSANWMSAAGHTGEDAGLYEAVKAVGEELCPALGLTIPVGKDSMSMKTTWIDNGEQKSVTAPLSLVISAFARVEDVRKTLTPQLRTDKGLSSLLLIDLGEGHNRLGATALAQVYKQLGDKPADVVKVQRLKDFYNAMQTLVAEDKLLAYHDRSDGGLITTLAEMAFAGHCGVEVDISALGDNDLAVLFNEELGAVIQVTDSQLESVREVLKAHNLLGITHQLGTVTADDRFEISRGSHKLFSEKRSELRSIWAELTYQMQRLRDNPECAEQEFEAKKNPDDKGLSAFLTYDVNEDITAPFINKGVKPTIAILREQGVNSHYEMAAAFDRAGFNAIDVHMSDLMIGRRNLAEFNAMVACGGFSYGDVLGAGGGWAKSILFNPKLHEQFSQFFINPNTLTLGVCNGCQMISNLAEIIPGTENWPHFVRNKSERFEARVSLVKINEVDSVWFAGMAGSHMPIAVSHGEGQVKFKSVEQFAGLKAQGIIAAQYIDNNGSPTELYPANPNGSAEGITAITNLDGRVAIMMPHPERVFRAVSNSWHPENWTEDGAWMRLFRNARMVF

SEQ ID NO: 52878 - DNA, 2220 bp, Listeria monocytogenes str. 4b H7858
  CDS (1)..(2220): transl_table=11
atgcctaacatggagccaacgacaaaagaaattaaagaacaaaagatttatcaagaaatgggcttaactgatagtgaatatgagcttgtttgttcgattcttggacgcgagcctaattatacagaaactgggcttttctctgttatgtggtcggaacattgtagctataaaaattctaaaccagtacttcggaaatttcctacagaaggcaaacaagtattacaaggacctggtgaaggcgctgggattgtcgatattggcgatggtttaggtgttgcttttaaagtggagagtcataatcatccatcctacgtggagccgtatcaaggggctgcgactggggtcggcgggattatccgtgatgtgttctcgatgggagctagaccgattgcaatgcttaactcgcttcgttttggtgagttagatacaccccatgcgaaatacttagttagtgaagtcgttgcgggaatcgcaggatacggtaactccattgggattccaacggttggtggcgaaatccaatttgatccttgttatacaaaaaatccgctagttaatgcaatgtgtgttggtttaatcgaggcgaaagatattcaaaaagggcaagcaaaaggaattggtaatccggtgatgtatgttggcgctaaaactggtcgtgacgggattcatggtgctacttttgcttctgtagagtttagtgaagaaggcgaacaacaacgctctgctgtacaggttggcgatccttttatggagaaattgttgcttgaagcatgtttagatgtgattcgtgatcattcagatattttagtgggaattcaagatatgggggctgcaggtctcgttagttcaagttctgaaatggcctcaaaagcgggcgctgggctagaattaattatggatgatgtgccgcaacgagaactaaatatgacgccttatgaaatgttgctttctgaatcgcaagaacggatgcttctatgtgtgaaaaaagggcatgtggaagaaatccaagcgttatttgaacgttatggtttagaggctgttgtgattggtcaagtaacagatgataaaatgtacaaaattattcatcatggtgaagtagttgcgaacgttcctgtagatgcgcttgcagaagatgcgccagtttatcataaaccttccaaagagccagctcgttatcaagctttccaagaagaggaatcgtttgtgccagttatggaagatgtggtcggtgtttggaaggaactgcttgctcagccaacgattgctagtaagcgccatatttatgagcaatatgattatcaagttcggacggatacagctgttgtacctggttcagatgcggcgattgttcgtgtgcgtgggaccgagaaggcaattgccatgacaactgattgtaactcacgctatttgtatcttgatccagaagtaggcggagcgatagcggttgcggaagcggcgcgcaatatcgtttgttctggcgggaaaccactagcgattacagatggactgaactttggaaatcctgaaaaaccagaaattttttgggaaattgaaaaagcggctgatggtattagtgcggcttgtttagaacttgatacgcctgttatctctggtaatgtatcgctttataatgaaacagatggtaccggaatttatccaacgccagtcattggaatggttggtttagtagaagatttggcacatattacgacacaagattttaaaaatagtggcgatgtgattttcttaattggtgaaacaaaagctgaatatagtggttcggaattgcaaaaattgcaacaagggaaaattagcggacgtgcgccggaattagatttaacgacagagaaaaaataccaacaattacttctaacggcgattcaggaaggtctagttgcttctagtcacgatttggcagaaggtggatttggtgttgcccttgcggaagcgacttttaaagcagggcttggtgcggatgtagaagtaccgtttgagttgaatcaactattcagtgaatcgcaatcacgtttcttagtatcggtaaaaccggaaaacgaagcagcttttgcgcaattaatggaactggaaaaagtataccgccttggtgtagtaaccgaggatgatacgattcgtgtgaaacataaggaaaatcaagttacagcgaaaacaacggaattacgatccatttgggaaggggctattccatgcttgctgaagtaa

SEQ ID NO: 52879 - protein, 739 aa, Listeria monocytogenes str. 4b H7858
MPNMEPTTKEIKEQKIYQEMGLTDSEYELVCSILGREPNYTETGLFSVMWSEHCSYKNSKPVLRKFPTEGKQVLQGPGEGAGIVDIGDGLGVAFKVESHNHPSYVEPYQGAATGVGGIIRDVFSMGARPIAMLNSLRFGELDTPHAKYLVSEVVAGIAGYGNSIGIPTVGGEIQFDPCYTKNPLVNAMCVGLIEAKDIQKGQAKGIGNPVMYVGAKTGRDGIHGATFASVEFSEEGEQQRSAVQVGDPFMEKLLLEACLDVIRDHSDILVGIQDMGAAGLVSSSSEMASKAGAGLELIMDDVPQRELNMTPYEMLLSESQERMLLCVKKGHVEEIQALFERYGLEAVVIGQVTDDKMYKIIHHGEVVANVPVDALAEDAPVYHKPSKEPARYQAFQEEESFVPVMEDVVGVWKELLAQPTIASKRHIYEQYDYQVRTDTAVVPGSDAAIVRVRGTEKAIAMTTDCNSRYLYLDPEVGGAIAVAEAARNIVCSGGKPLAITDGLNFGNPEKPEIFWEIEKAADGISAACLELDTPVISGNVSLYNETDGTGIYPTPVIGMVGLVEDLAHITTQDFKNSGDVIFLIGETKAEYSGSELQKLQQGKISGRAPELDLTTEKKYQQLLLTAIQEGLVASSHDLAEGGFGVALAEATFKAGLGADVEVPFELNQLFSESQSRFLVSVKPENEAAFAQLMELEKVYRLGVVTEDDTIRVKHKENQVTAKTTELRSIWEGAIPCLLK

SEQ ID NO: 52880 - DNA, 2220 bp, Listeria monocytogenes str. 1/2a F6854
  CDS (1)..(2220): transl_table=11
atgcctaacatggagccaacgacaaaagaaattaaagaacaaaagatttatcaagaaatgggcttaactgatagtgaatatgagcttgtttgttcgattcttggacgcgagcctaattatacagaaactggacttttctccgttatgtggtccgaacattgtagctataaaaattctaaaccagtacttcgcaaatttcctacagaaggaaaacaagtgttgcaaggaccgggtgaaggtgctgggattgttgatattggcgatggtctaggtgttgcttttaaagtggagagtcataatcatccatcctacgtggagccgtatcaaggtgctgcaactggggtcggtgggattatccgtgatgtgttttcgatgggagctagaccgattgcaatgcttaactcgcttcgtttcggcgaattagatacacctcatgcgaaatacttagttagtgaagtcgtggcgggaatcgcaggatacggtaactccattgggattccaacggttggtggcgaaatccaatttgatccttgttatacgaaaaatccgctagtcaacgcgatgtgcgttggtttaatcgaagcgaaagatattcaaaaaggccaagcaaaaggaattggcaacccggtgatgtacgttggtgctaaaactggtcgtgacgggattcatggtgctacttttgcttctgtagagtttagtgaagaaggcgaacaacaacgttctgctgtacaggtgggcgatccttttatggagaaattgttgcttgaagcatgtttagatgtgattcgtgatcattcagatattttagtgggaattcaagatatgggggctgctggtcttgttagctcgagttccgaaatggcgtcaaaagcgggcgctgggctagaattaattatggatgatgtgccgcaacgggaactacacatgacgccttatgaaatgttgctttctgaatctcaagaacgaatgcttctatgtgtgaaaaaagggcatgtggaagaaatccaagcgttatttgaacgttatggtttagaggctgtcgttataggccaagtaacggatgataaaatgtacaaaatcattcatcacggggaagtggttgcaaacgtaccagttgatgcacttgcggaagacgctccagtttatcataagccttcgaaagaaccagctcgttatcaagctttccaagaagaggaagcatttgtgccagttattgacgacgtggtgggagtttggaaggaactgcttgctcagccaacgattgcaagtaagcgccatatttatgagcaatatgattaccaagtacggacggatacagcggttgtgcctgggtcggatgcggcaattgttcgtgtgcgtggaacagagaaggcaattgcgatgacgacagattgtaactcgcgttatttgtatcttgatcctgaagtgggcggagcgatagcggttgcggaagcggcgcgcaatatcgtatgttctggcggaaaaccactagcgattacagatggacttaacttcggaaatccagaaaaaccagaaatcttttgggaaattgaaaaagcggctgacggtattagtgcagcttgtttagaacttgatacgcctgttatctcagggaatgtatcgctttataatgaaacagatggtaccggaatttatccaacgccagttattggaatggttggtttagtagaagatttggcacatattacgacgcaagattttaaaaatagtggcgatgtgattttcttaattggtgaaacaaaagctgaatatagtggttcggaattgcagaaattacaacaagggaaaattagcggacgtgcgccggaattagatttagcgacagagaaaaaataccaacaattacttctaacggcgattcaggaaggtctagttgcttctagtcacgatttggcagaaggcggatttggtgttgcccttgcggaagcgacttttaaagcagggcttggtgcggatgtagaagtaccgtttgcgttgaatcaactattcagtgaatcgcaatcacgtttcttagtatcggtaaaaccggaaaacgaagcaacttttgcgcaattaatggaactggaaaaagtataccgccttggtgtagtaaccgaggatgatacgattcgtgtgaaacataaggaagacctagtaacagtgaaaacaacggaattacgatccatttgggaaggggctattccatgcttgctgaagtaa

SEQ ID NO: 52881 - protein, 739 aa, Listeria monocytogenes str. 1/2a F6854
MPNMEPTTKEIKEQKIYQEMGLTDSEYELVCSILGREPNYTETGLFSVMWSEHCSYKNSKPVLRKFPTEGKQVLQGPGEGAGIVDIGDGLGVAFKVESHNHPSYVEPYQGAATGVGGIIRDVFSMGARPIAMLNSLRFGELDTPHAKYLVSEVVAGIAGYGNSIGIPTVGGEIQFDPCYTKNPLVNAMCVGLIEAKDIQKGQAKGIGNPVMYVGAKTGRDGIHGATFASVEFSEEGEQQRSAVQVGDPFMEKLLLEACLDVIRDHSDILVGIQDMGAAGLVSSSSEMASKAGAGLELIMDDVPQRELHMTPYEMLLSESQERMLLCVKKGHVEEIQALFERYGLEAVVIGQVTDDKMYKIIHHGEVVANVPVDALAEDAPVYHKPSKEPARYQAFQEEEAFVPVIDDVVGVWKELLAQPTIASKRHIYEQYDYQVRTDTAVVPGSDAAIVRVRGTEKAIAMTTDCNSRYLYLDPEVGGAIAVAEAARNIVCSGGKPLAITDGLNFGNPEKPEIFWEIEKAADGISAACLELDTPVISGNVSLYNETDGTGIYPTPVIGMVGLVEDLAHITTQDFKNSGDVIFLIGETKAEYSGSELQKLQQGKISGRAPELDLATEKKYQQLLLTAIQEGLVASSHDLAEGGFGVALAEATFKAGLGADVEVPFALNQLFSESQSRFLVSVKPENEATFAQLMELEKVYRLGVVTEDDTIRVKHKEDLVTVKTTELRSIWEGAIPCLLK

SEQ ID NO: 52882 - DNA, 2220 bp, Bacillus cereus G9241
  CDS (1)..(2220): transl_table=11
atgtcgttaatgcttgaaccaaatccaacacaaattaaagaagagcgcatatatgcggaaatggggctaacagacgaagagtttgccatggttgaaaagattttaggccgtctgccaaattatacagaaacaggattattctctgttatgtggtctgaacattgtagttataaaaattcaaaaccagtgcttcgaaaattcccaacaacaggtgagcgtgtcttgcaaggacctggggaaggtgctggaattgtagacatcggtgataatcaagcggttgtatttaaaatggaaagtcataaccacccttctgctattgaaccatatcaaggagcagcaacaggcgttggtggtattattcgtgacgtattctctatgggagcacgcccagtcgctctattaaactcacttcgatttggggaattacaatcaccacgtgtgaaatatttatttgaagaagtagtagcaggaattgcaggatacggtaactgtatcggtattccgactgttggcggcgaagtacagtttgatccatgttatgaaggaaatccacttgtaaatgcaatgtgcgtaggcttaattaaccacgaggacattaaaaaagggcaagcgcacggtgctggaaatacagtaatgtacgtaggagcatcaactggtcgtgatggtatccacggtgcaacattcgcatctgaagagttatctgaaagctcagaagcgaagcgtccagcagttcaagtaggagatccatttatggagaaacttcttatcgaagcttgcttagaacttattcaatcggatgcacttgttggaattcaagatatgggtgcggctggtttaacatcatcttctgcagaaatggcaagtaaagcgggcatgggtattgaaatgtacttagatgatgtaccacagcgtgaaacaggaatgacaccatatgaaatgatgctatctgaatcacaagagcgtatgttaattgttgtgaaaaaaggtagagaacaagagatagtagatttatttgagaagtatggtcttgcagccgttacgatggggaaagtaacggaagacaaaatgcttcgtttattccataaaggtgaaatggtagctgaagtaccagcagatgctcttgcagaagaagcaccaatttatcataaaccatcaaaagaagcagcatattttgctgagttccaagaaatgaaaatggaaacgccgaaagtagaaaactataaagaaacgttattcgctctattacaacaaccgacgattgcaagtaaagagtgggtttatgatcaatatgattatcaagttcgcacaagcacagttgttacaccaggttcagatgcagcagttgtacgtgtacgcggtacagaaaaaggattagcaatgacgacagattgtaactctcgctacatttatttagacccagaagtgggcggtaaaatcgcagtagcagaggcagcacgtaatattgtatgttctggcggggagccacttgcaattacagattgcttaaacttcggtaacccagaaaaaccagaaatcttctggcaaattgagaaatcagtagatggtatgagtgaagcttgtcgcacattacaaacaccagttattggcggaaacgtatcaatgtataacgaacgtagtggtgaagcggtatacccaacaccgacagttgggatggttggacttgtacacgatttaaaacatgtaacaacacaagagtttaagcaagctggcgatttagtttatgtcattggagagacgaaagctgagtttggtggaagtgaattacagaaaatgattcacggaaaaattttcggccaatcaccaagtattgatctagatgtagaattaaaacgtcaaaaacaaatattagcagcaatccaagctggccttgttcaatctgcacatgacgttgctgaaggtggtttagcagttgcgatttcagaaagtgcaattggtgctaacggcttaggcgctactgtgaaattagacggggaagcaacagcggcattatttgcggaatcacaatcccgcttcgtaataactgtaaaacgtgaaaataaagaagcgttcgaaaaagcggtagaagcaattcaagttggagaagtaacaagtacaaatgaagtaacaattcataatgaagaaaatgaagtattacttacagcaaatgtagatgaaatgagaaaggcttggaaaggggcaatcccatgcttgctgaaataa

SEQ ID NO: 52883 - protein, 739 aa, Bacillus cereus G9241
MSLMLEPNPTQIKEERIYAEMGLTDEEFAMVEKILGRLPNYTETGLFSVMWSEHCSYKNSKPVLRKFPTTGERVLQGPGEGAGIVDIGDNQAVVFKMESHNHPSAIEPYQGAATGVGGIIRDVFSMGARPVALLNSLRFGELQSPRVKYLFEEVVAGIAGYGNCIGIPTVGGEVQFDPCYEGNPLVNAMCVGLINHEDIKKGQAHGAGNTVMYVGASTGRDGIHGATFASEELSESSEAKRPAVQVGDPFMEKLLIEACLELIQSDALVGIQDMGAAGLTSSSAEMASKAGMGIEMYLDDVPQRETGMTPYEMMLSESQERMLIVVKKGREQEIVDLFEKYGLAAVTMGKVTEDKMLRLFHKGEMVAEVPADALAEEAPIYHKPSKEAAYFAEFQEMKMETPKVENYKETLFALLQQPTIASKEWVYDQYDYQVRTSTVVTPGSDAAVVRVRGTEKGLAMTTDCNSRYIYLDPEVGGKIAVAEAARNIVCSGGEPLAITDCLNFGNPEKPEIFWQIEKSVDGMSEACRTLQTPVIGGNVSMYNERSGEAVYPTPTVGMVGLVHDLKHVTTQEFKQAGDLVYVIGETKAEFGGSELQKMIHGKIFGQSPSIDLDVELKRQKQILAAIQAGLVQSAHDVAEGGLAVAISESAIGANGLGATVKLDGEATAALFAESQSRFVITVKRENKEAFEKAVEAIQVGEVTSTNEVTIHNEENEVLLTANVDEMRKAWKGAIPCLLK

SEQ ID NO: 52884 - DNA, 2892 bp, Wolbachia endosymbiont of Drosophila simulans
  CDS (1)..(2892): transl_table=11
ttgatttacataagcaaagaattaccatcaaaattacatgaagaaatttgtgggctattttataataaagtcatacaagactgccgttattattcctacaatgaaaaccttgaagaagttcaatataacttcatagaaccacaagcaaagtggggcttggagataagctttttacctggcatgactgacaatgtaggcaacacagcgaaacaaattgttagagaatatttaataaacaaggactacattgatgaaaatgtttgtataaaagcaagaagttcaaaattgattctaagtcaagcaactgaagatgatataaaacaagaattcaaccctatcactgagtattgcacacttatctgtaaagaaaataataactatagctggaaatattatggtaaatacaaagcaaactcttcagcgctctcttacttgtcatcccagtgcccagacactgggatccagaaaaaagatgtagattccagtgtcagctactcaaatgacaccattaatggcaaagccaaatctgttaacttaaatgtaattgaccaagaacttgagaaaatcagcagagatggaatcgatggtaacggcactttagggctctcgctggcagcaatgagagctataaaggattactttaaaaaactcggtagaaatccatatgatattgaacttgagtctctggcacagacttggtctgaacattgcaagcataacattttctcctctcccattgatgaaataaaagacggcctatatgagcattatattaagcgtgcaacgcgtgagataaattctgacatatgcgtgtcagttttttccgacaacgccggaggaataatttttgatgacgattacttaattgtagataaagttgaaactcacaatagcccttcggcgcttgatccgtttggtggagcaatgactggagtgcttggagttaatcgcgatatagtgggtttcgggaaaggcgcggagcctataatgaatacctattacttttgctttgccaaagaagcaaaaggcaagttttatagggacaaagagcgcactgatgagatcttaccgccaaaatatataatgaaagaagtgatccacggtgttaatgttgctggtaattgctctggtattccaacgcaacttggatcggtatattttgacgatagattttgtggcaagccgttagtttttgttggcagtgtcggaattattccgcgcaacataaataacgcaccttcacacattaaaggaccaaaaaatggcgataaaatcgtaattattggtggaagagttggaagggacggaattcacggcgcaacgttttcctcagaggctttgtcgggaaacagcccttcaacaattgtgcaaattggtgaccccataacacaaaaaaaactatccaatgccgtcataaaagcaagagatcttggtctttataatgcaataacggacaatggagccggtgggctgtcgtcgtctattggtgaaatgggaaaagacggatttgaagttgatttgagcaaggttctccttaaaaacgatggtatggctccgtgggaaatatggatatcagaatcacaagagagaatgaccttagcagtgccagaagaaaatctccctatgttcaagcaaatcatgaaaaaacatgatgtggaggtttgtgtgattggagagtttaatgagagtggtaaagccgttgttaaatgtcctaaagggacagtaataatggatatcggaactgaatttctgcatgatggtaatcctaaaatgcatttacagacaaagccgtggtctaaggggcttccagcgccacgcgctggaatgacaacaagttcgccttctttagaaattgaattaaaagaaatgttaagcagaccaaacatttgcagtaaagagttcatagtggtgcaatatgatcatgaggttcaaggatcgtcagtgttaaaaccactgcaaggcaagggaagaatgtgcagcgaagctattgtctcaaggcctgttctttcttcaaataaaggtgttgtaaaatcgcaaggatttggctcaagttatggagaaattgacacctaccacatggcagcatgtgcaattgacaccgcgatacgcaactatgtagccgcaggaggaaatataaatcatctagcgttgctcgataatttttgctggtgtgatgcttataatccagaaaggctatggcaactaaagaaagctgcagaggcttgttacgacttcgcaactgcatttaaaacaccattcatatccggaaaagacagtatgttcaatgacttcaagggatatgatgaaaatggcgagaaagtgataatctctgcaccaccttcattactcatctcagcaattggaattatagaaaatattgaaaatgcagtatcgcttgatgtaaaaatgccgggggacttaatatacgtgcttggagaaacacttgatgaacttggtagatctgaatatcagttatatagtggaataggtaataacaacgtaccaaaagttgatgcaaagagcgctaggaagttgtatgagcgttacaaccaggcaataaaagatggcataattgcctctgcaattgcaccaaacttaggcggattagttattgctctggcaaaatcgctaattgcaggagaccttggtgctgaaatcgatctttcactagtgccaataggaaaaatacaaaatacagacataataaacaagataataatgttttctgaatcgcaaagtagaattttggttactattgcaccacaaaatcagaagaggtttgaagaattgtttgaaggtgcagtttattcatgtattggcaaagtaacagagaaaaaggtgctaaacataaaggatgttttaaaagtagatctgaaagatgtggcatgctaa

SEQ ID NO: 52885 - protein, 963 aa, Wolbachia endosymbiont of Drosophila simulans
MIYISKELPSKLHEEICGLFYNKVIQDCRYYSYNENLEEVQYNFIEPQAKWGLEISFLPGMTDNVGNTAKQIVREYLINKDYIDENVCIKARSSKLILSQATEDDIKQEFNPITEYCTLICKENNNYSWKYYGKYKANSSALSYLSSQCPDTGIQKKDVDSSVSYSNDTINGKAKSVNLNVIDQELEKISRDGIDGNGTLGLSLAAMRAIKDYFKKLGRNPYDIELESLAQTWSEHCKHNIFSSPIDEIKDGLYEHYIKRATREINSDICVSVFSDNAGGIIFDDDYLIVDKVETHNSPSALDPFGGAMTGVLGVNRDIVGFGKGAEPIMNTYYFCFAKEAKGKFYRDKERTDEILPPKYIMKEVIHGVNVAGNCSGIPTQLGSVYFDDRFCGKPLVFVGSVGIIPRNINNAPSHIKGPKNGDKIVIIGGRVGRDGIHGATFSSEALSGNSPSTIVQIGDPITQKKLSNAVIKARDLGLYNAITDNGAGGLSSSIGEMGKDGFEVDLSKVLLKNDGMAPWEIWISESQERMTLAVPEENLPMFKQIMKKHDVEVCVIGEFNESGKAVVKCPKGTVIMDIGTEFLHDGNPKMHLQTKPWSKGLPAPRAGMTTSSPSLEIELKEMLSRPNICSKEFIVVQYDHEVQGSSVLKPLQGKGRMCSEAIVSRPVLSSNKGVVKSQGFGSSYGEIDTYHMAACAIDTAIRNYVAAGGNINHLALLDNFCWCDAYNPERLWQLKKAAEACYDFATAFKTPFISGKDSMFNDFKGYDENGEKVIISAPPSLLISAIGIIENIENAVSLDVKMPGDLIYVLGETLDELGRSEYQLYSGIGNNNVPKVDAKSARKLYERYNQAIKDGIIASAIAPNLGGLVIALAKSLIAGDLGAEIDLSLVPIGKIQNTDIINKIIMFSESQSRILVTIAPQNQKRFEELFEGAVYSCIGKVTEKKVLNIKDVLKVDLKDVAC

SEQ ID NO: 52886 - DNA, 2307 bp, Crocosphaera watsonii WH 8501
  CDS (1)..(2307): transl_table=11
atgaatgcaccttttacccccgaagaaatagcagcagaaggtatcaaaccctctgaatatgaagaaattgtccaacggttaggaagacaccccaacagagcagaattagggatgtttggggtcatgtggtccgaacattgttgctataaaaattctcgtcctctactgaaaaactttcccacggaaggcgatcgcattttagtggggccaggagaaaacgctggagtggtggacttaggtaaagggttaagattagcttttaaaattgaatcccataaccatccctcggcagtggaaccgtttcagggtgctgctactggggttggtggtattttaagggatatttttactatgggggcccgtcccattgcctgtttaaattctctacggtttggagagttagaaaatgcgaaaactaggcgcattttttcgggagttgttgaaggtatatctcattatggtaatagcgttggtgtgccaacggttgggggagaaatttattttaattctgcttacaatggcaaccctttagtgaatgctatggctttgggtttaatggagacaaaagatatcgttaaatctggggcttcaggaataggtaatcctgtattatatgtaggctcaactaccggcagagatggtatggggggagcgagttttgccagtgcagaattaacggatcaatccatggatgatcgtccggcagtacaagtgggtgatccgttcttagaaaagtctttaattgaagcttgtttagaggcatttaaaaccggtgcagtggtggcagcacaagatatgggagcagcaggaattacttgctcaacctctgaaatggctgccaatggaggggttggcattgaattggacttagataaaattcccgttagagaaacaggaatggttccctacgaatacttattatctgagtcccaagaaaggatgttatttgtggcacaaaaaggaagagaacaagaattaattgatatttttcagcgttgggaactgcaagcagtggtagctggaaaagttatagaagaacccatagttaggatactatttcaaggagaaattgcagcagaaattccggctaatgctttagcagataatacccctatttaccatcgagagttattagaaaatcctcccgaatacgcccaaaaagcttggcagtggacagaagatagtttacctagttgtacagcagaagggattgaaattaagggagaattgaaaacctggaatgatatattattaaccctcttagatactccttctattgcttctaaaaaatgggtctatcggcaatacgatcatcaggtacaaaataacacggttattataccaggaggagcagacgctgcggtgattcgtgtacgtcctattgatgcgaaaccagatacttgtaaaataggggttgctgctaccactgattgtaattcccgttatgtttatttagaccccttagaaggggcaaaagctgctgtagcagaagcggccagaaaccttagttgtgtcggggctaaacccatagctattactgataatttgaattttgggagtcctgaaaattctatcggttattggcaattagccttagcttgtcagggtatttcggcaggttgtcaagaactaaatacccctgttactgggggtaatgtttctctgtataatgagacagttgatagtgatggaaatcctcagccaatttatcccacacccgtcatcggaatggtgggtttaatagaagatattaccaaggtttgtggacaaggttggcaaaatgaaggggatattatttatttattaggggttgacaataagcccagtttaggcgcatcagaatatttggccactattcatgatattgtggcaggaaaaccgccaaaagttgattttgagcaggaacgtttagtgcagaaaatttgccaagaaggtattagtcaaagttggataaaatcggcccatgattgtgcagaaggtggcttaatggtagctttagctgaatgttgtattagtggaaatttaggggcaaaaattcaactagattatcaagataaaaataggttagatactgtactctttggggaagtatgtgaacaaattattgtttctgttagtgccaacaatcaacaagaatgggaaagttatctacagcaaaatttaggtaataattggcaaaagttaggtcaagtaaaatctaatcaactggatattatcttgtctgatgatgcttcaattattagtgtagaagttaagaggatgattaatgattggtcaaatgccattgagaaaagattgaaaagttaa

SEQ ID NO: 52887 - protein, 768 aa, Crocosphaera watsonii WH 8501
MNAPFTPEEIAAEGIKPSEYEEIVQRLGRHPNRAELGMFGVMWSEHCCYKNSRPLLKNFPTEGDRILVGPGENAGVVDLGKGLRLAFKIESHNHPSAVEPFQGAATGVGGILRDIFTMGARPIACLNSLRFGELENAKTRRIFSGVVEGISHYGNSVGVPTVGGEIYFNSAYNGNPLVNAMALGLMETKDIVKSGASGIGNPVLYVGSTTGRDGMGGASFASAELTDQSMDDRPAVQVGDPFLEKSLIEACLEAFKTGAVVAAQDMGAAGITCSTSEMAANGGVGIELDLDKIPVRETGMVPYEYLLSESQERMLFVAQKGREQELIDIFQRWELQAVVAGKVIEEPIVRILFQGEIAAEIPANALADNTPIYHRELLENPPEYAQKAWQWTEDSLPSCTAEGIEIKGELKTWNDILLTLLDTPSIASKKWVYRQYDHQVQNNTVIIPGGADAAVIRVRPIDAKPDTCKIGVAATTDCNSRYVYLDPLEGAKAAVAEAARNLSCVGAKPIAITDNLNFGSPENSIGYWQLALACQGISAGCQELNTPVTGGNVSLYNETVDSDGNPQPIYPTPVIGMVGLIEDITKVCGQGWQNEGDIIYLLGVDNKPSLGASEYLATIHDIVAGKPPKVDFEQERLVQKICQEGISQSWIKSAHDCAEGGLMVALAECCISGNLGAKIQLDYQDKNRLDTVLFGEVCEQIIVSVSANNQQEWESYLQQNLGNNWQKLGQVKSNQLDIILSDDASIISVEVKRMINDWSNAIEKRLKS

SEQ ID NO: 52888 - DNA, 2220 bp, Exiguobacterium sibiricum 255-15
  CDS (1)..(2220): transl_table=11
atgttaaaacaacagtctgaaccaacgatggagcaaattcaggaacaacggatctacgcaacaatgggacttagtgacgcagaatacgagatggtcgtcaacttactcggacgccaaccgaactatacggaaatcggcttgttttccgtcatgtggtcggaacactgttcatataaaacgtcgaagccagtcttacgccagtttccgacgacaggtccacgcgtcctgcaaggtcccggtgaaggagcaggtgtcgtcgacattggtgacaatcaagccgttgtctttaaaatcgagagccacaatcatccgtcagccgttgaaccgtatcaaggtgcagcaaccggtgtcggtggcatcatccgtgatatcttctcgatgggagcccgtccagtcgcgttgatgaattcacttcggttcggtcatctcgggacgccgcgtgtcaatcaactgtttgaacaggtagtcgccggaatcgccgggtacgggaactgtgtcgggattccgaccatcggaggagaagtcggatttgatcattcgtatgaaggcaacccgctcgttaatgcgatgtgtatcggcttgatcaaccacgaagacattcaaaagggtctcgcaaaaggcgccggtaactcggtcatgtacgtcggtgccgcaaccggtcgtgacggcattcacggagcgacttttgcttcagaagatcttggggaagataccgaagcgaaacgtccggctgttcaggtcggagatccgttcatggagaagttgttgattgaagcctgtcttgaaatcgtcggtcatccggcacttgtcgggatgcaggatatgggcgccgccggactgacgtcctcgtcagccgagatggcttcgaaagccggtatgggcatcgagatgcatcttgatgacgtcccgcaacgggaaaccgggatgacagcttatgaaatgatgttatcggaatcacaggaacggatgttgctcgtcgtcgaacgcggacgcgaagcagagatcgaagccatcgtcagcaaatggggactccatgcggtgcatgtcggagaagttatcgacgagaaagtgcttcgtctcgttcaccacggtaagattgtcgctgaagtaccggtcgatgcactcgcggaagaagcaccggtttataacaaaccatcccgtgtcccggcttattatgaagagttccaagcaatggatgaaacgttaccggtcgtcgaagatgctgttgaaacatggcgggccttgctcaaacagccgacgattgcttcaaaacgttgggtctacgatcaatacgatcatatggttcagacgtcaacggtcgtcgcaccggggtctgatgcagccgtcatccgggttcgcggaacgaacaaagcactcgcgatgacaaccgactgcaacagccggttcgtttacctcgatccgtttgtcggcggacagattgccgtcgccgaagcagcccgcaacatcgttgcgagtggtgcgacaccactggcgattaccgactgcctgaacttcgggaatccggataaaccggaaggcttctggcaactacagcaagcgacggccggaatggccgaagcgtgtcgtgtgctcgagacgccggtcatcggcgggaatgtttccttatacaacgaatctgccggaaaagcagttcatccgacgccggtcgtcgggatggtcggtctccacgaacaaacggagtggattacgacacaacacgtcaagcaagcaggcgacgctgtctacctactcggagagacgacagcggaattcggcggcagtgaactgcaatacctgcaattcgaaaaatcattcggcaaagcaccgcacattgacttagccgtcgaacaagaacggttactcgccttgcaagcggcggttcaagcgggacttgtcacggcgatccatgacgtggcagaaggtggtctcgccgttgccttagccgagatgacattcgggacgacgcttggtcttgacgtgatatttgacggaccagccctgcacctgttcagtgaatcgcaatcacgtttcgtcgtgacggtgaagccggaacaggaagcagccttcgtcaagcagacaggagcgtataaattaggatacgttaccgatcaagatgctttgcaaattaagactaacgatacactcatcgaagcaacacgttcaacactgcaagccgactgggaaggggcgatcgcgtgttatatgacatcaaaggattaa

SEQ ID NO: 52889 - protein, 739 aa, Exiguobacterium sibiricum 255-15
MLKQQSEPTMEQIQEQRIYATMGLSDAEYEMVVNLLGRQPNYTEIGLFSVMWSEHCSYKTSKPVLRQFPTTGPRVLQGPGEGAGVVDIGDNQAVVFKIESHNHPSAVEPYQGAATGVGGIIRDIFSMGARPVALMNSLRFGHLGTPRVNQLFEQVVAGIAGYGNCVGIPTIGGEVGFDHSYEGNPLVNAMCIGLINHEDIQKGLAKGAGNSVMYVGAATGRDGIHGATFASEDLGEDTEAKRPAVQVGDPFMEKLLIEACLEIVGHPALVGMQDMGAAGLTSSSAEMASKAGMGIEMHLDDVPQRETGMTAYEMMLSESQERMLLVVERGREAEIEAIVSKWGLHAVHVGEVIDEKVLRLVHHGKIVAEVPVDALAEEAPVYNKPSRVPAYYEEFQAMDETLPVVEDAVETWRALLKQPTIASKRWVYDQYDHMVQTSTVVAPGSDAAVIRVRGTNKALAMTTDCNSRFVYLDPFVGGQIAVAEAARNIVASGATPLAITDCLNFGNPDKPEGFWQLQQATAGMAEACRVLETPVIGGNVSLYNESAGKAVHPTPVVGMVGLHEQTEWITTQHVKQAGDAVYLLGETTAEFGGSELQYLQFEKSFGKAPHIDLAVEQERLLALQAAVQAGLVTAIHDVAEGGLAVALAEMTFGTTLGLDVIFDGPALHLFSESQSRFVVTVKPEQEAAFVKQTGAYKLGYVTDQDALQIKTNDTLIEATRSTLQADWEGAIACYMTSKD

SEQ ID NO: 52890 - DNA, 2277 bp, Prosthecochloris aestuarii DSM 271
  CDS (1)..(2277): transl_table=11
atgacacagacagaaccagaagtcaatcttaatcttgcaagagaacacggtctgaatgaagacgagtaccgcacgatagtcgacgttctccaaagaacgcccacctttacggaattaggtatttattcagtcatgtggtccgagcactgcagctacaaaaactcaatcgctgtcctgaaaaccctgccaagagaagggggacgcctcctgacaagcgcaggagaagaaaacgcaggacttgtcgatatcggagacaatctggccgtcgccttcaaaattgaatcgcacaatcacccgtccgccgtcgaaccctatcagggagcggcaaccggtgttggcggaattcatcgcgatattttcaccatgggggcgcgccctgtcgctgcactcaactcacttcgcttcggatcccccaaagaccccagagtacgctacctcgtcgacggcgtcgtcaggggaatcggcgattacggcaactcattcggcgttcctaccgtcggcggagaaatctatttcgaagatgcctataccggcaacccgctcgtcaatgccatgtcggtgggcctggtcgaacaccacaaaaccgtcagtgcaaccgctgaagggcaaggcaatccggtcctgattgtcggatcagccaccgggcgggacggcattcatggagcgacattcgcctcggaagatctgagtgaggcatctgaagacaaacggccgagtgttcaggtcggtgaccccttcgcagaaaaactgctgctcgaagcaacattggaagccattgcatccggcttcgttgccggtttacaggatatgggcgcagccggtatcaccagttcgacatcggaaatgagcgcaagagggatcgacaaacacgggcacggaggaatcgacatcaatcttgaccatgttcccacccgtgaagatgccatgtcggcatatgaaatcatgctttctgaatcccaggaacgcatgctgctggtcgcagagaaaggtcatgaagaggatatcatcgatatctatcgcaagtgggatattcacgccgttgttatcggcagcgtgaccaacgacaacatgctgcgtatccgtcatagaggcaaagttgtcgctgaaataccggcaacctcgctcgtgcttggaggaggagctccggtctatatccgtgaagcgaccgaaaagaaacccgaaacacctgatgcacagatcgttgcagacagtgaacttgatctgcatgaaaccacgatacagctcctctcgaggccgaatatagccagcaagcaatgggtctaccagcagtatgattccatggtccagaccaataccgtcaccgcgacaggaacgtccgacgcagcggtcatccgcataaaaggctccaacaagggtctggcaatgcagaccgactgcaatgccagatacgtctatctcaatccccgtgaaggaggcatgattgccgtagctgaatgcgcccgcaacatagcctgctccggagcacggccgctggcaatcaccaactgcctgaacttcggcaatccatacaagcctgaagtatactatcagttcaaaacatcggtcgaaggcatgggtgcagcctgccgggcgttcaacacaccggtcacaggaggaaacgtcagtttctacaatgaatcatcccttaccggcacagcgatttacccgacgcccgtcatcggcatgatcggtcttctcgacaatatcgacaacctgaccggctcgacattccagaacgccggcgatgcgattcttctgcttggagaccccaatctcaccctcgatggatcagaatatcttgtcatgcagtatgcaacgccgggcaaaacgactccaacattcgatcttgaacttgaacaacgactgcaggaactgctgattgaactttccgcagaaggccttctcagctcagctcatgatatttcagacggaggaatgattactgctcttgctgaaaaagccatcatgaaaaaagagagcccgatgggctttgccgttaacctggaaacaagccagcgacatgagagcttcatgcaggaactgttctactcagaagcccagggacgggtactgctgagtctgcccgcagaaaatgccgccagagtaatcgacatggcaatgcaccaccagataccggcaaaagccatcgggaaagtccaggaatcgggagcatcagttgaggtcaacggcaagcccatcgtcagtttttcaactgaagaactcatcgcggcgtactatcctgccctggaaaacgcactgcaccttgacgaactttga

SEQ ID NO: 52891 - protein, 758 aa, Prosthecochloris aestuarii DSM 271
MTQTEPEVNLNLAREHGLNEDEYRTIVDVLQRTPTFTELGIYSVMWSEHCSYKNSIAVLKTLPREGGRLLTSAGEENAGLVDIGDNLAVAFKIESHNHPSAVEPYQGAATGVGGIHRDIFTMGARPVAALNSLRFGSPKDPRVRYLVDGVVRGIGDYGNSFGVPTVGGEIYFEDAYTGNPLVNAMSVGLVEHHKTVSATAEGQGNPVLIVGSATGRDGIHGATFASEDLSEASEDKRPSVQVGDPFAEKLLLEATLEAIASGFVAGLQDMGAAGITSSTSEMSARGIDKHGHGGIDINLDHVPTREDAMSAYEIMLSESQERMLLVAEKGHEEDIIDIYRKWDIHAVVIGSVTNDNMLRIRHRGKVVAEIPATSLVLGGGAPVYIREATEKKPETPDAQIVADSELDLHETTIQLLSRPNIASKQWVYQQYDSMVQTNTVTATGTSDAAVIRIKGSNKGLAMQTDCNARYVYLNPREGGMIAVAECARNIACSGARPLAITNCLNFGNPYKPEVYYQFKTSVEGMGAACRAFNTPVTGGNVSFYNESSLTGTAIYPTPVIGMIGLLDNIDNLTGSTFQNAGDAILLLGDPNLTLDGSEYLVMQYATPGKTTPTFDLELEQRLQELLIELSAEGLLSSAHDISDGGMITALAEKAIMKKESPMGFAVNLETSQRHESFMQELFYSEAQGRVLLSLPAENAARVIDMAMHHQIPAKAIGKVQESGASVEVNGKPIVSFSTEELIAAYYPALENALHLDEL

SEQ ID NO: 52892 - DNA, 3720 bp, Streptococcus suis 89/1591
  CDS (1)..(3720): transl_table=11
atggcaaagcggatttttgttgagaagaaggcggattttcagattaaggcggaggctcttcgcaaggagttgacccataatttgcagctgacaagtttgacgagtgtacgtctggtgcaggtttatgatgtctttcatttggcggaggacttgctggagcaagctattaagcgtatctttaccgagcaggtgacggacaaggttttgtcggatgaagaattaggtctggaaggtgcggtttattttgctattgaggctttacctggtcagtttgaccagcgggctgcaagcagtcaagaggcccttctcttattgggcagtcgtcaggaggtgcgtgtcaatacaggtcagctctatatcttgaacggaaatgtcagcacagaagaattagctgccatcaagaattatttgctcaatcctgtggattcgcgtttcaaggatttggatgctcctttggtggctcaagagttttcggtttcggatgcgaccattccgaccttggacttttttgcaagctatggggcagaggaatttgcgtcttacaagcgtgaggctggtttggctatggaagtggaagacctgctctttattcaggattatttcaagtcaattggtcgagtgccaactgagacagaactcaaggtcttagatacttactggagtgaccactgccgtcatacgacttttgaaacggaactcaagtctattgacttttcagcttcaaaattccacaagcaattgcaggcgacttatgacaagtatttggctatgcggacagaattaggtcggacagataaaccgcagactttgatggatatggcgacgatttttggccgttatgagcgggccaatggtcgtctggatgatatggaagtgtcggacgaaatcaatgcctgctcggtggaaattgaagtggatgtggatggcgtgaaagagccatggctccttatgttcaagaatgaaacccataaccaccctacagaaatcgagccttttggtggtgccgcaacctgtatcggtggagccattcgtgatcctttgtcaggacgttcctatgtctatcaggccatgcgaatttcaggtgcgggcgatatcacccagcctttgacggcgactcgcccagggaaattgccacaacaaatcatttctaaaacagcggcacatggttattcttcatacggaaaccaaatcggtttggcaaccacttatgtgcgtgaatatttccacccaggctttgtcgctaaacgcatggaacttggtgccgtagtcggtgcagctccaaaggaaaatgtggttcgtgaaaaaccagttgcaggcgatgtggtcattttgttgggtggcaaaacaggccgtgacggtatcggtggggcaacaggctcatctaaggtgcagacagttgagtctgtcgaaacggctggtgcggaagtccaaaaaggaaatgctattgaagaacgtaaaatccaacgcttgttccgcaatggtgacgtgactcgcttgattaaaaaatccaatgacttcggtgctggtggtgtctgcgttgccattggagaactggcagacggtcttgaaattgatttggataaggttccgctcaagtatgcgggcttgaatggtacggagattgccatttccgaatcacaggagcggatgagtgtggtggttcgtccagaagacgtagatgcctttatcgcagcctgccgtgaggaaaatatccatgtagttgtcgtagctaaagtgactgaaaaaccaaacctagttatgacttggaatggacaaactattgttgatttggaacgttccttccttgataccaacggtgtgcgtgtagtcgttgatgccaaggtggttgacagctctgtcaacttgccagaaatgcgtagaacatcagctgataccctgcaagaagacttgaaagcactgttgtcagacctcaaccatgctagtcaaaaaggattacagacgattttcgactcatctgttggtcgttcaaccgtcaaccacccactcggaggtcgtcaccaattgacaccgacagaaagttcggtgcaaaagttgcctgtccaacacggtgtgacgacaacggcatccgtcatggctcaggggtatcatccctatctggcagactggtcaccttaccacggtgctgcctatgcggtcatcgaagcgacggctcgcttggtggcaacaggtgctaactggtccaaggctcgcttctcctatcaggagtatttccagcgaatggacaaacaggcagagcgttttggtcagccagtagcagctcttctgggctctatcgaggctcagatccagcttggtttgccgtctatcgggggcaaggattccatgtctggtacctttgaggacttgacagttccgcctaccttggtggcctttggtgtgacaacagcagacagccacaaggttctctcacctgagttcaaggcggctggcgagcacatctattacctaccaggcgaagccttgtcagaagatattgattttgctttgatgaagtctaattttgaagcttttgaaaaatggcagagcgattatgtgattacggctgctagtgcagtcaagtatggaggagttctagaaagtctagcccttatgtcctttggtaaccaagtcggagcaagagttgagcttgcagaccttgaaactagcctgacaggccagctcggaggatttgtcttcacatccaaagaagacattccagatgctgtgaaaatcggtcaaaccaccgctgactttacactccttgtcaacggtgtcaaccttgctggacaggacttgcaggtagcctttgagggtaaactagaagaagtttacccgacagaatttgaacaggcgacggagttgcaggatgttctggcagtcacaagttcagcggttacaaaagcaaaagaagccgttgaagtacctgtggtttacattccagtcttcccaggtaccaactcagaatatgattctgccaaggcctttgaacaggctggtgcaaaagtcaatctggtgccatttgtgactttggatgcggaaagtattgaacagtctgttgacaccatggttgacaatattgacaaggcacatattcttttctttgcaggtggattctccgctgcggatgaaccagatgggtctgctaagtttatcgtgactatcttacgaaacgccaaggtccgctctgctattgactgtttcatcgaaaaaggtggcctcatcatcggtatatgcaatggtttccaggcccttgtcaaatcgggcttgttgccgtatggaaactttgaggaggcaggtgaaagcagtccgaccctcttctacaacgatgccaatcagcacgttgccaaaatggtagagacgcggattgccaatgtcaactctccgtggttggcaggtgttcaagtcggcgatattcacgctatcccagtttcccacggtgaaggaaaatttgtagtgacggacgaggaatttgctactttgcgtgataatgggcaaatcttcagccaatacgttgactttaccggtcagccaagcatggattctaagtacaatccaaatggatccagccatgccattgaaggtattactagccgcaacggtcagattatcgggaaaatggggcattcggagcgatacgaggacggtcttttccaaaacattccaggcaagaaagaccaagggctctttgtttcagcggttcgctattttacaggaaaataa

SEQ ID NO: 52893 - protein, 1239 aa, Streptococcus suis 89/1591
MAKRIFVEKKADFQIKAEALRKELTHNLQLTSLTSVRLVQVYDVFHLAEDLLEQAIKRIFTEQVTDKVLSDEELGLEGAVYFAIEALPGQFDQRAASSQEALLLLGSRQEVRVNTGQLYILNGNVSTEELAAIKNYLLNPVDSRFKDLDAPLVAQEFSVSDATIPTLDFFASYGAEEFASYKREAGLAMEVEDLLFIQDYFKSIGRVPTETELKVLDTYWSDHCRHTTFETELKSIDFSASKFHKQLQATYDKYLAMRTELGRTDKPQTLMDMATIFGRYERANGRLDDMEVSDEINACSVEIEVDVDGVKEPWLLMFKNETHNHPTEIEPFGGAATCIGGAIRDPLSGRSYVYQAMRISGAGDITQPLTATRPGKLPQQIISKTAAHGYSSYGNQIGLATTYVREYFHPGFVAKRMELGAVVGAAPKENVVREKPVAGDVVILLGGKTGRDGIGGATGSSKVQTVESVETAGAEVQKGNAIEERKIQRLFRNGDVTRLIKKSNDFGAGGVCVAIGELADGLEIDLDKVPLKYAGLNGTEIAISESQERMSVVVRPEDVDAFIAACREENIHVVVVAKVTEKPNLVMTWNGQTIVDLERSFLDTNGVRVVVDAKVVDSSVNLPEMRRTSADTLQEDLKALLSDLNHASQKGLQTIFDSSVGRSTVNHPLGGRHQLTPTESSVQKLPVQHGVTTTASVMAQGYHPYLADWSPYHGAAYAVIEATARLVATGANWSKARFSYQEYFQRMDKQAERFGQPVAALLGSIEAQIQLGLPSIGGKDSMSGTFEDLTVPPTLVAFGVTTADSHKVLSPEFKAAGEHIYYLPGEALSEDIDFALMKSNFEAFEKWQSDYVITAASAVKYGGVLESLALMSFGNQVGARVELADLETSLTGQLGGFVFTSKEDIPDAVKIGQTTADFTLLVNGVNLAGQDLQVAFEGKLEEVYPTEFEQATELQDVLAVTSSAVTKAKEAVEVPVVYIPVFPGTNSEYDSAKAFEQAGAKVNLVPFVTLDAESIEQSVDTMVDNIDKAHILFFAGGFSAADEPDGSAKFIVTILRNAKVRSAIDCFIEKGGLIIGICNGFQALVKSGLLPYGNFEEAGESSPTLFYNDANQHVAKMVETRIANVNSPWLAGVQVGDIHAIPVSHGEGKFVVTDEEFATLRDNGQIFSQYVDFTGQPSMDSKYNPNGSSHAIEGITSRNGQIIGKMGHSERYEDGLFQNIPGKKDQGLFVSAVRYFTGK

SEQ ID NO: 52894 - DNA, 3645 bp, Croceibacter atlanticus HTCC2559
  CDS (1)..(3645): transl_table=11
atgaccgtatatgcggtacagactacaaaacaactttctgcagaaacactttctaaactacattggttatttgccaccaagcagcctgacagcaccttgcctaaagactctcttacaggaacttttataggtcctagagctgctatggtaacaccttggagtacgaatgctgttgaaatcacccaaaacatgggcattgaaggcttggtgagaattgaggaattacttcatgtagattcaaattactcagattttgacccaatgatttctcaacgttttgaaaatcctggacaagatatttttacagtaaatatcactccagaatctatcaagaatattgaagatatcgcaagttataatcaacaagaaggcttagcattaaacgctgaggaagtcacatatctagaaaatttatctaaaaaactaagaagaccgcttacagatgcagaggtttttggattttctcaagtaaacagtgaacactgtagacacaaaatatttaatggtacttttattatagatggcaaagaaaaaccatcgtcactatttaagcttataaaaaagacatctgcagagtttcctaatgatattgtttctgcttataaggataatgtagcttttataaaaggaccaaaggcagaacaatttgcgccgaaatctcctgaaaaaccagattattatcaaacttcagattacaattctgttatttcattaaaagcagaaacacataatttcccaacaaccgtagagccatttaatggagctgcaactggaagtggtggagaaataagagacaggcttgccggcggaaaaggctcgttgccgttagcaggaactgctgtttatatgacatcttattcaagattagcagagcaaagaccttgggaacaaggtatggaagagcgccaatggttataccaaacaccaatggatatcttaatgaaggcctcaaatggtgcatcagattttggaaataagttcgggcaaccacttattgcaggatctcttttaacttttgaacatacagaagaagaacgtgcactaggatttgataaagtaattatgcttgctggtggtataggatacggtaaagcagagcaagctctgaaagacaccccacaaaaaggagacaagattgtaatcctaggtggtgataattatagaattggaatgggtggcgctgcagtttcttctgccgatactggtgagtttgaaagcggtattgagctaaatgccatacaacgctctaacccagaaatgcaaaagcgagcagctaatgccattcgaggaatggtagaatgcgaagaaaaccctattgtttctattcatgatcacggcgcaggtggtcaccttaattgtttatctgaattagttgaagatactggcggtaaaattgacctagacaaacttcctgttggagatccaacactttctgctaaagaaattattggtaatgaatcccaagaacgtatgggactagttataggacaaaagcatattgaaaaacttcaaaaaatagcagaacgtgaacgttcaccaatgtatactgttggagatgtagatggtagccatcaatttacttttgaaagcaaaactactggccaaaaaccaatggatttagctttggaagatatgtttggcagctctcctaaaactattatgaatgatactactattaatagaaagtatcatagtattgaataccattctgcagatgttacacattatttagaacaagtgcttcagctagaagccgtagcttgtaaagattggcttaccaacaaagcagaccgttgtgttactggtcgtgtagccacacaacaatgcgttggcccactacagctaccattagccaattgtggtgttatggctttagattataaaaaccatcaaggtgtagctacatctataggtcactctcctattagtggtttaataaatcctaaggcaggttctaaaaactcaattgcagaggcgcttacaaatattgtttgggcaccattagaaaaaggattaacctctatttctctgtctgcaaactggatgtggccttgcaataatccaggcgaagacgcacgtctttatgaagctgttgaagccgtttcagaattcgctatcaatcttggtataaatgttcctacaggtaaagattctttatctatgaaacaaaaatacaaagacagtgaagttatctctccaggtacagttatcatttctgcagcaggacattgtaatgacattagaaaaacagttgttcctgtatttaagaaagatgcaggctcaatttattatataaacttttctcaagacgactttaaattaggtggttcttcatttgggcaaatcttgaataaagtaggaagcaacacgcctaccataactgatgatgctttctttaaaaatgcgttcaacacagttcaagatttgataaaacaagatcttattgttgccggacatgatgttgcttctggcggtttaataactactcttttagaactttgttttgcagaccaagatctttcagctaatatagatttgaccaatttagctgaagcagacgccattaaggttttattttctgaaaatgctggaatagtatttcaagctaaagacaattcagttgaaacaattttaaaatcaaataacatacagtttaacacaataggatctgtagtttctggaaatactatgaccgttacaaatcatagtgaagaatttagtttcgacattccaaaactaagagatatttggtataaaacttcttatcttcatgaccaacgccaaagtggtggcgagcgtgctggtgaacgttatagaaattacaaaaatcaacctcttcaatttaaatttcctgaacactttactggaaaattaccaagtatagacagttctaaaccaagacctaaagctgctattattagagaaaaaggtagcaatagtgagcgtgaaatggctaatgctatgtatttggcaggatttgatgttaaagatgttcatatgacagatttaattagtggccgagaagaccttaaggacattaaatttattgcagctgtaggtggattttcaaactcagatgttttaggtagcgcaaaaggttgggctggcgcatttttatataatgataaagccaacaaagcacttaaagacttttttaatagagaagacacattgtctttaggagtttgtaatggttgccaattatttatagaactaggcttaataaacccagaagatgctcaaaaaccgagcatgcttcacaatgaatcgggtaagtttgagtgcacatttacatctgttaccattcaaaagaacaattctgtgatgctaagcaactttgaaggatctactctaggaatttgggctgcacacggtgaaggaaaatttagttttccaaatcaagaatcacactacaacattgtaggtaaatatggttatgaaggctatccagccaatccaaatggtagtcattttaatgctgcaatgcttacagataaaagcggaaggcatttagtaatgatgcctcacttagaaagaagtactttttcttggaactgggcacactaccctaacactaggaaagatgaagtatctccttggctagacgcttttataaatgcaaaaaattgggtagaaaaaaattaa

SEQ ID NO: 52895 - protein, 1214 aa, Croceibacter atlanticus HTCC2559
MTVYAVQTTKQLSAETLSKLHWLFATKQPDSTLPKDSLTGTFIGPRAAMVTPWSTNAVEITQNMGIEGLVRIEELLHVDSNYSDFDPMISQRFENPGQDIFTVNITPESIKNIEDIASYNQQEGLALNAEEVTYLENLSKKLRRPLTDAEVFGFSQVNSEHCRHKIFNGTFIIDGKEKPSSLFKLIKKTSAEFPNDIVSAYKDNVAFIKGPKAEQFAPKSPEKPDYYQTSDYNSVISLKAETHNFPTTVEPFNGAATGSGGEIRDRLAGGKGSLPLAGTAVYMTSYSRLAEQRPWEQGMEERQWLYQTPMDILMKASNGASDFGNKFGQPLIAGSLLTFEHTEEERALGFDKVIMLAGGIGYGKAEQALKDTPQKGDKIVILGGDNYRIGMGGAAVSSADTGEFESGIELNAIQRSNPEMQKRAANAIRGMVECEENPIVSIHDHGAGGHLNCLSELVEDTGGKIDLDKLPVGDPTLSAKEIIGNESQERMGLVIGQKHIEKLQKIAERERSPMYTVGDVDGSHQFTFESKTTGQKPMDLALEDMFGSSPKTIMNDTTINRKYHSIEYHSADVTHYLEQVLQLEAVACKDWLTNKADRCVTGRVATQQCVGPLQLPLANCGVMALDYKNHQGVATSIGHSPISGLINPKAGSKNSIAEALTNIVWAPLEKGLTSISLSANWMWPCNNPGEDARLYEAVEAVSEFAINLGINVPTGKDSLSMKQKYKDSEVISPGTVIISAAGHCNDIRKTVVPVFKKDAGSIYYINFSQDDFKLGGSSFGQILNKVGSNTPTITDDAFFKNAFNTVQDLIKQDLIVAGHDVASGGLITTLLELCFADQDLSANIDLTNLAEADAIKVLFSENAGIVFQAKDNSVETILKSNNIQFNTIGSVVSGNTMTVTNHSEEFSFDIPKLRDIWYKTSYLHDQRQSGGERAGERYRNYKNQPLQFKFPEHFTGKLPSIDSSKPRPKAAIIREKGSNSEREMANAMYLAGFDVKDVHMTDLISGREDLKDIKFIAAVGGFSNSDVLGSAKGWAGAFLYNDKANKALKDFFNREDTLSLGVCNGCQLFIELGLINPEDAQKPSMLHNESGKFECTFTSVTIQKNNSVMLSNFEGSTLGIWAAHGEGKFSFPNQESHYNIVGKYGYEGYPANPNGSHFNAAMLTDKSGRHLVMMPHLERSTFSWNWAHYPNTRKDEVSPWLDAFINAKNWVEKN

SEQ ID NO: 52896 - DNA, 2160 bp, Sulfitobacter sp. EE-36
  CDS (1)..(2160): transl_table=11
atgaccgaaccagccatcacccaagacctgatttccagccacggcatcaacgccgaagaatatcagcgtattctggatatcatcgggcgcgaacccacctttaccgaactgggcatcttttcggccatgtggaacgaacactgttcctacaagtcgtcaaagaaatggctgcgtaccctaccgaccgaaggcccacaggtgatctgcggaccgggcgagaatgcgggcatcgttgatatcggtgacggccaagcgttggtcttcaaaatggaaagccacaaccacccgtcctacatcgaaccctatcagggtgcggcgactggcgtgggcggcatcctgcgggacgtcttcacgatgggcgcgcgtccgatcgcggcgatgaactctcttagcttcgggtcgcccgaccaccgcaagacccgtcagctggtgcatggcgtggttgcaggcgttggcggctatggtaactgctttggcgtgccgacggtggggggcgaagtgcgctttgacaccgcctatgacggcaactgccttgtgaatgcctttgccgcgggtttggccgacactgacaagatcttctattccgccgcttccggcgttggcatgccagtcgtttaccttggtgcgaaaactggccgcgacggtgtgggcggtgcgacgatggcatcggccgagttcgacgacaccatcgaagacaaacgtcccaccgttcaggttggcgaccccttcaccgaaaaacgcctgatggaagccacgctcgaactgatggcgaccggtgccgtgatctccattcaggatatgggcgctgcaggcctgacctgttcggccgtggaaatgggcgacaagggcaaccttggtgtgcgccttgacctcgaaaaggtcccgacccgcgaacacgccatgaccgcctatgaaatgatgctgtcggaatcccaggaacggatgctgatggtcctgcgccccgagcttgaggcagaggcgaaagccgtcttcgacaaatgggacctcgatttcgccatcgtaggcgaaacaatcgccgaggaccgtttcttgatcgtgcacaatggcgaggtcaaagccgacctgccgcttaaagcgctctcgggcaacgcgcccgaatacgaccgcccctatgtcgagacacccgcagccgaaccgctgtcggatgttcccggcatcgaccccatcgacgggctgagcgcgctgatctccagcccgaactacgcgtccaaagcgtgggtgtttgaacaatacgacacaatggtcatgggcgacagcgcccgcacccccggtctgggatcaggcatcgtacgcgtacatggcaccgacaaggcgatcgcctttacctcggatgtgaccccccgctacgtcaaggcgaaccctgtcgaaggcggcaaacaggccgtggccgaagcctaccgcaacctctgcgccgtgggggcactgccgctggcgaccaccgacaacctcaacttcggcaaccccgaaaagcccgagatcatgggccagttcgttggcgcgctgaaaggcatcggcgaagcggttgccgcgttggacatgccgatcgtatcgggcaacgtgtcgctgtataacgaaaccgacggcaaaggcattctgcccacccccaccatcggcgcggtcggcctgctgaagcacacggacgagatcatcggcaaagaggtccgcgagggccatgtcgctttggttcttggggccaccgaagggcacatcggacaatccgccctgctgcttgaagtgttcaaccgccgcgatggcgacgccccccatgtcgatctggcgctggagaaggcccacggtgaattcatccgtgccaaccgcgcgttgatcaaagcctgcaccgacctgtctgatggcggtctggcactggcagcctttgaactggcggacgaggccggcgtcggcgtgaccctggattctgccgatacgcaggttctgtttggcgaggatcaagcccgctatctgatcgcctgtaacttcgatcaggccgaagccctgatgatcgccgcgcaaaacgccggtctgcatctggaaagcgtcggcaagttcggcggggatcaagtgaacttcggcggcgtcaaagcgcctttggctgacctgtcagcgacctatcgcggggcttttgccgaaaccttcgcctaa

SEQ ID NO: 52897 - protein, 719 aa, Sulfitobacter sp. EE-36
MTEPAITQDLISSHGINAEEYQRILDIIGREPTFTELGIFSAMWNEHCSYKSSKKWLRTLPTEGPQVICGPGENAGIVDIGDGQALVFKMESHNHPSYIEPYQGAATGVGGILRDVFTMGARPIAAMNSLSFGSPDHRKTRQLVHGVVAGVGGYGNCFGVPTVGGEVRFDTAYDGNCLVNAFAAGLADTDKIFYSAASGVGMPVVYLGAKTGRDGVGGATMASAEFDDTIEDKRPTVQVGDPFTEKRLMEATLELMATGAVISIQDMGAAGLTCSAVEMGDKGNLGVRLDLEKVPTREHAMTAYEMMLSESQERMLMVLRPELEAEAKAVFDKWDLDFAIVGETIAEDRFLIVHNGEVKADLPLKALSGNAPEYDRPYVETPAAEPLSDVPGIDPIDGLSALISSPNYASKAWVFEQYDTMVMGDSARTPGLGSGIVRVHGTDKAIAFTSDVTPRYVKANPVEGGKQAVAEAYRNLCAVGALPLATTDNLNFGNPEKPEIMGQFVGALKGIGEAVAALDMPIVSGNVSLYNETDGKGILPTPTIGAVGLLKHTDEIIGKEVREGHVALVLGATEGHIGQSALLLEVFNRRDGDAPHVDLALEKAHGEFIRANRALIKACTDLSDGGLALAAFELADEAGVGVTLDSADTQVLFGEDQARYLIACNFDQAEALMIAAQNAGLHLESVGKFGGDQVNFGGVKAPLADLSATYRGAFAETFA

SEQ ID NO: 52898 - DNA, 2163 bp, Roseovarius nubinhibens ISM
  CDS (1)..(2163): transl_table=11
atgcaagaacctgccatcacgccggaactgatcgacgcgcacgggctcaagcccgatgaatatgatcgcatcctggagatcatcggccgcgagccgacgtttaccgagctgggcatcttctcggccatgtggaacgagcattgctcctataaatcctccaagaaatggttgcgcaccctgccgaccaccggcccgcaggtgatctgcggccccggcgaaaacgccggcgtggtcgatatcggcgatggtcaggccgtggtcttcaagatggaaagccacaaccacccctcctatatcgagccctaccaaggcgcggccaccggcgtcggcggcatcctccgcgatgtcttcaccatgggcgcgcgccccgtggcggcgatgaactcgctgagctttggcgaactgtcgcacccgaaaacccgccagcttgtgcatggcgtggtcgaaggcgtcggcggttacggcaattgctttggcgtgcccacggtgggcggcgaggtccgctttgacccggcctataatggcaactgcctggtgaacgcctttgccgccggtctcgccgatgcggacaagatcttctactccgccgcctcgggcgtcggcatgcccgtcgtctatctcggcgccaagaccggccgcgacggcgtcggcggcgcgaccatggcctcggccgaattcgacgacacgatcgaagagaaacgccccaccgttcaggtcggcgatcccttcaccgaaaaacgcctgatggaggcgacgctcgaactgatggccaccggcgcggtgatctccattcaggacatgggcgccgcaggcctcacctgctcggccgtggaaatgggcgacaagggcgggctcggcgtgcggctcgatctcgattccgtgccgcagcgcgaagccaacatgaccgcttatgagatgatgctctccgagagccaggagcggatgctcatggtcctcaagcccgagctcgaggccgaggcccgcgccgtcttcgagaaatgggatctcgatttcgccatcgtcggcgaaaccatcgacgaagaccgcttcctgatcctgcatcagggcaatgtcatggccgatctgccgctgtcgaaactctcctcgaccgccccggaatatgaccgcccctgggaggaaaccccggcccccgcagccctcaccaccaacctgcccgacagcgaccctgtcgaggccctgcgcaaattggtgagctcgcccaactactgctcgcggcaatgggtctatgaacaatatgacacgatggtcatggccgacacggtgcgcggccccggtctcggcggcggtctgatccgcgtccatggcacggaaaaactgctggccttcacctccgacgtgaccccgcgctacgtcaaggcgaacccggtcgaaggcggcaaacaggcggtggccgaggcctatcgcaacctgaccgccctcggcgcgacgccgctcgccaccaccgacaacatgaatttcggcaaccccgagaaacccgccatcatgggtcagttcgtcggcgccatcaaaggcatcggtgccgcggtcgaagcgctcgacatgccgatcgtctcgggcaacgtgtcgctctataatgaaaccgacggcaaggcgatcctgcccacccccaccattggtgccgtgggtctcatcgccagcgaagacaaggccattctcggcgcggcccagcccggcgacatcgcccttctggtgggcgacacccgcggccacctgggccagtcggcctggcttgccgaggtgcttgagcgcgccgaaggcgacgcgccgccggtcgatctcgccgccgagaaacgcaacggcgatttcatccgcgacaaccacgcctcgatccgcgcctgcaccgacctctccgacggcgggctggccctcgcgggcttcgagatggccgaggccgcaggcaccggcctcgccctcacccccgccagcaccggcgatctcttcggcgaagaccaggcccgctacctgctggccgtcgcccccgatcaactcgccacgctgcaagaggccgcccaggccgccgacgtgccgctcacccaggtgggcagcttcggcggcgaccagatcgccctcggctcggcctctgtgccgctggcagagctcgccacgctctaccgcacgagcttcggccgctatttcgcctga

SEQ ID NO: 52899 - protein, 720 aa, Roseovarius nubinhibens ISM
MQEPAITPELIDAHGLKPDEYDRILEIIGREPTFTELGIFSAMWNEHCSYKSSKKWLRTLPTTGPQVICGPGENAGVVDIGDGQAVVFKMESHNHPSYIEPYQGAATGVGGILRDVFTMGARPVAAMNSLSFGELSHPKTRQLVHGVVEGVGGYGNCFGVPTVGGEVRFDPAYNGNCLVNAFAAGLADADKIFYSAASGVGMPVVYLGAKTGRDGVGGATMASAEFDDTIEEKRPTVQVGDPFTEKRLMEATLELMATGAVISIQDMGAAGLTCSAVEMGDKGGLGVRLDLDSVPQREANMTAYEMMLSESQERMLMVLKPELEAEARAVFEKWDLDFAIVGETIDEDRFLILHQGNVMADLPLSKLSSTAPEYDRPWEETPAPAALTTNLPDSDPVEALRKLVSSPNYCSRQWVYEQYDTMVMADTVRGPGLGGGLIRVHGTEKLLAFTSDVTPRYVKANPVEGGKQAVAEAYRNLTALGATPLATTDNMNFGNPEKPAIMGQFVGAIKGIGAAVEALDMPIVSGNVSLYNETDGKAILPTPTIGAVGLIASEDKAILGAAQPGDIALLVGDTRGHLGQSAWLAEVLERAEGDAPPVDLAAEKRNGDFIRDNHASIRACTDLSDGGLALAGFEMAEAAGTGLALTPASTGDLFGEDQARYLLAVAPDQLATLQEAAQAADVPLTQVGSFGGDQIALGSASVPLAELATLYRTSFGRYFA

SEQ ID NO: 52900 - DNA, 2160 bp, Oceanicola batsensis HTCC2597
  CDS (1)..(2160): transl_table=11
atgcaggaaccggccatcaccgaagagctgatcgcgggccacgggatcaagccggacgaatatgccgagatcctgcgcatcctgaaccgcgaacccaccttcaccgaactgggcatcttctcggccatgtggaacgagcattgttcctacaagtcctcgaaacgctggttgcgcaccctgccgaccgagggttcgcaggtgatctgcggaccgggcgagaatgccggtgtcgtggacatcggcgacggccaggcggtggtcttcaagatggaaagccacaaccacccctcctacatcgaaccctaccagggggcggcgacgggcgtgggcggcatcctgcgcgacgtcttcaccatgggcgcgcgaccgatcgcggcgatgaattcgctgtccttcggggaaaaggatcactggaagacccgccagctcgtccatggcgtggtcgagggcgtgggcggttacggcaactctttcggcgtgccgacggtcggcggcgaggtgcggttcgacccggcctacaacgggaactgtctggtgaacgccttcgccgcgggccttgccgatgcgaacgcgattttctactcggccgcgtcgggcgtggggatgccggtggtgtacctcggcgccaagaccgggcgcgacggggtcggcggggccaccatggccagcgccgagttcgacgagacgatcgaggaaaagcgccccacggtgcaggtgggcgacccgttcaccgaaaagcgcctgatggaagcctgcatggagctgatgcagaccggcgccgtgatctcgatccaggacatgggggccgcggggctgacctgttcggcggtcgagatgggcgacaaggggggcctcgggatccagctggatctggacagcgtgccctgccgggaaaagggcatgaccgcctacgagatgatgctgtcggaaagccaggagcggatgctcatggtgctcgacccggcgaaggaggccgaggccaaggcggtgttcgacaagtgggacctggatttcgccatcgtcggcgagacgatcgaggaagaccggttcctgatcctgcaccagggcaagacctgggccgacctcccgctgtcgaaactgtcgtcgatggcgccggaatacgaccgcccgcacgagccgacgcccgaggccgaggcgctggagccggtggccgcggtcgatcccatcgacgggctgaaggcgctgatcgggtcggtgaactattgctcgcgccagtgggtttatgagcaatacgacagccaggtgatggccgacacgatgcgcaccccgggcttcggcgccggcgtcgtgcgggtgcacggcaccgacaaggcgctggccttcacctctgacgtgacgccccgctatgtccgggcgaacccggtcgagggcggcaagcaggcggtggccgaggcctacaggaacctcgtggcggcgggggccaggccgctcgcctcgaccgacaacctgaacttcggcaaccccgagaagccggggatcatgggccagttcgtcggcgcgatccaggggatcggcgccgcgtgcaaggcgctggacatgccgatcgtgtcgggcaatgtctcgctctacaacgagacggacggacaggcgatcctgccgacgcccaccatcggggcggtcgggctgatcgaccatatcgacaatgccatcaccgggatcgcgcgcgaggggcatgtcgccctgctgatcggcgagacgcgcgggcatctgggccagtccgccctgctggccgaggtcttcggccggatcgagggcgacgccccgccggtcgacctcgaggccgagcggaaggcgggcgatttcatcctcgagaaccgggagttcatcaaggcctgcaccgatctttcggacggcggccttgcgctcgcggccttcgagatggccgaggcctcgggcgtcggcgtggtcctggacgacagcgatcagggcgagcttttcggcgaggaccagggccggtacctcgtggcctgcaacttcgaccaggccgaggcgctgatggtggccgccgggcgcgcccgcgtgccgctgcgcagcgtcggccgctttaccggggagacggtcagcctgggcggcagcgcagcgccgctcgccgagctttcggcgctgtatcgcggaacgttcggggaaaccttcggctga

SEQ ID NO: 52901 - protein, 719 aa, Oceanicola batsensis HTCC2597
MQEPAITEELIAGHGIKPDEYAEILRILNREPTFTELGIFSAMWNEHCSYKSSKRWLRTLPTEGSQVICGPGENAGVVDIGDGQAVVFKMESHNHPSYIEPYQGAATGVGGILRDVFTMGARPIAAMNSLSFGEKDHWKTRQLVHGVVEGVGGYGNSFGVPTVGGEVRFDPAYNGNCLVNAFAAGLADANAIFYSAASGVGMPVVYLGAKTGRDGVGGATMASAEFDETIEEKRPTVQVGDPFTEKRLMEACMELMQTGAVISIQDMGAAGLTCSAVEMGDKGGLGIQLDLDSVPCREKGMTAYEMMLSESQERMLMVLDPAKEAEAKAVFDKWDLDFAIVGETIEEDRFLILHQGKTWADLPLSKLSSMAPEYDRPHEPTPEAEALEPVAAVDPIDGLKALIGSVNYCSRQWVYEQYDSQVMADTMRTPGFGAGVVRVHGTDKALAFTSDVTPRYVRANPVEGGKQAVAEAYRNLVAAGARPLASTDNLNFGNPEKPGIMGQFVGAIQGIGAACKALDMPIVSGNVSLYNETDGQAILPTPTIGAVGLIDHIDNAITGIAREGHVALLIGETRGHLGQSALLAEVFGRIEGDAPPVDLEAERKAGDFILENREFIKACTDLSDGGLALAAFEMAEASGVGVVLDDSDQGELFGEDQGRYLVACNFDQAEALMVAAGRARVPLRSVGRFTGETVSLGGSAAPLAELSALYRGTFGETFG

SEQ ID NO: 52902 - DNA, 2430 bp, Prochlorococcus marinus str. MIT 9211
  CDS (1)..(2430): transl_table=11
ttggatataaaaactatgctagaaaactcctcaatcgaatttgaaaatttagtcaaattatcttcttttaaaaccgattatgatgttttaagttctttatcacatgaaggattaaaaaaggaagattacattgaaatctgcaaacgtctagaacgagctccaaaccggactgaattgggaatgtttggagttatgtggtctgaacattgttgttatagaaattcaaaaccattattacaaaatttgcctacttcaggtaagcgtattcttgtaggtcctggagaaaatgctggagttgttgatataggagatggtcaaaggatagcgtttaaaatagaaagtcataaccatccttctgcagttgaaccatttcaaggtgctgctactggagttggggggattttacgtgatatttttacaatgggtgcacgtcctattgctttattaaatgcacttaggtttggtttgctagaagataaaaaaaatgttggcttattagagggtgttgttgctggaatagcgcattatggcaactgtgttggtgtaccaacaattggaggtgagacatcttttaatacgagctattcaggtaatcctttagtgaatgctatggctattggcttactagaaacaaaagatattgtttgttctggagcaaaaggtatcgattatccagtcatttatgttggtagtactacaggaagagatggaatgggaggtgctagttttgctagtgcggaattaagtaacacttctcttgatgatcgtccagctgttcaagttggtgacccatttcttgagaaaggtttaattgaaggatgtttagaagcttttaaaacaggtaatgttatagctgctcaagatatgggagctgcaggacttacttgtagttgctctgaaatggctgcgaagggagaagtaggtattgagttggatttggaccttgttcctgctcgtgaacaaggtatgacaccatatgaatttttactttcagaatctcaagaaagaatgctttttgtagttaagcctggcaaagaaaatgatgtgatgaaaatttttacaaattggggactaaaagctcaagttgtaggaaaagttctcaaggaaagagttgtaagagttttatatcagaaaaaaatagttgtagatttaccagctgacgctttagctgaagatactccagttaatgaacattctttactatctaatcctccaaaatatatcttagatcattggaaatggactgaagaaaaccttcctttttctaatgaaaaaggtataacagtgcaagataaaataaaaaaagacagattttttacatggaataatatcttattaaaattattagatgatccaacaattgcttctaagaaatggatatataatcagtatgattaccaggttcagaataatacaattattccacctggagctgctgatgcggctgttattcgcgtaagagatatagattcaaaaaaaagtgataaattgattaataaaggtttagcagcagtggttgattgtcctaatcgttgggttgctttagatcctgaacgtggcgctatagcagcagttgctgaagcatcaaggaatatttcttgtgttggaggagaacctttggctttaactgataatttgaatttctcatctcctgatcatgctatcggttattggcaattagctaaagcttgtgaaggtatttctaaagcatccttacatcttgatactcctgtaactggaggaaatgtttccttatataatgagatacgtctttctactggagaaatacaacctattcaaccaacaccagtcataggaatgataggtttaatagacgatattaatactattgtaggtcaatcatggattaatgaaggtgatcttatttggttattaggtgttcctttagaagcatcatcattattagataatagaattagcttatcttgtactgcatatttagagaatatttttaatttacatacaggcagaccccctgaaatagatttgaatttggaaaaattaatacaatcatttctccgaaaatcaatttctaatcaattaatactctctgctcatgatgtcagtgatggaggtatagcgactgctttagcagaatctgttatatcttctggattaggagcaaaatgtatctttcctaatacttcaaatagaattgatagtttattatttgctgaaggtggatctagaattgttataagcatttctcctagtaaactttctgaatggaaattaaatttaaggacttttgctagagagaatagtttttccatacctgctatgcaaataggtcatgttcaacgtgaccctagtctttccatttctcaagctaatgttgaattaatacaattatcaatttctcaattagcatcttcatttaataatgcaattcctcgtagaatgtcgtga

SEQ ID NO: 52903 - protein, 809 aa, Prochlorococcus marinus str. MIT 9211
MDIKTMLENSSIEFENLVKLSSFKTDYDVLSSLSHEGLKKEDYIEICKRLERAPNRTELGMFGVMWSEHCCYRNSKPLLQNLPTSGKRILVGPGENAGVVDIGDGQRIAFKIESHNHPSAVEPFQGAATGVGGILRDIFTMGARPIALLNALRFGLLEDKKNVGLLEGVVAGIAHYGNCVGVPTIGGETSFNTSYSGNPLVNAMAIGLLETKDIVCSGAKGIDYPVIYVGSTTGRDGMGGASFASAELSNTSLDDRPAVQVGDPFLEKGLIEGCLEAFKTGNVIAAQDMGAAGLTCSCSEMAAKGEVGIELDLDLVPAREQGMTPYEFLLSESQERMLFVVKPGKENDVMKIFTNWGLKAQVVGKVLKERVVRVLYQKKIVVDLPADALAEDTPVNEHSLLSNPPKYILDHWKWTEENLPFSNEKGITVQDKIKKDRFFTWNNILLKLLDDPTIASKKWIYNQYDYQVQNNTIIPPGAADAAVIRVRDIDSKKSDKLINKGLAAVVDCPNRWVALDPERGAIAAVAEASRNISCVGGEPLALTDNLNFSSPDHAIGYWQLAKACEGISKASLHLDTPVTGGNVSLYNEIRLSTGEIQPIQPTPVIGMIGLIDDINTIVGQSWINEGDLIWLLGVPLEASSLLDNRISLSCTAYLENIFNLHTGRPPEIDLNLEKLIQSFLRKSISNQLILSAHDVSDGGIATALAESVISSGLGAKCIFPNTSNRIDSLLFAEGGSRIVISISPSKLSEWKLNLRTFARENSFSIPAMQIGHVQRDPSLSISQANVELIQLSISQLASSFNNAIPRRMS

SEQ ID NO: 52904 - DNA, 2244 bp, Erythrobacter sp. NAP1
  CDS (1)..(2244): transl_table=11
atgaccgacatcactcctgaaatcgtcgaacagcacggcctgtcacccgaagaatacgaacgcgtgctttcaggcctcggccgcgaacccaaccttgtcgagctcggcattttctcggtcatgtggtccgagcattgctcctacaaaagctcgcgcctgcacctgaagaaactgccgaccgaggcggattgggtcatctgcggtccgggtgagaatgcgggcgttatcgacattggcgatggtcaggcagcgatcttcaaaatggagagccataaccacccctcgtatatcgaaccgtaccagggcgcggcgaccggagttggcggaatcctgcgcgatgtcttcacgatgggcgcgcggccggttgcgaacatgaacgcgctgcgctttggccgtcccgatcaccccaagatgaagcaccttgtccagggcgtcgtcgccgggattggcggatacggcaattgcgtgggcgtgccgaccgtcggcggggagacgaatttccacccggcgtatgacggcaacatccttgtgaacgcgatgaccgtcgggatcgcggattcggacaagattttctattccgccgcgaccggtgtcgggaacccgattgtctatgtcggctcgaaaaccgggcgcgacggcatccacggtgcgacaatggcgagcgcggatttcgaggaagacgccgaggccaagcgccccaccgtacaggtgggcgatccctttaccgagaaacttctgatcgaggcctgcctcgagctgatggcgaccgatgcaatcgtcgcgatccaggacatgggcgcggcgggcctcacctcctcgagcgtcgaaatggcgaccaatggcaaggcgggcatccggctcgacatgaacaaggtgccatgccgcgaagagggcatgacgccttatgagatgatgctgtcggagagccaggagcggatgctcatggtcctgaagcccggcaaggaggcgatggccgccgcgatcttcgaaaagtgggagctcgatttcgcagtcatcggcgaggtcaccgatacgcagcatatggtgctcgaatggaacggcgaggttgtgtgcgacatcccgcttggccctcttgctgctgatgcgcccgagtatgaccgcccttacttatcgaaggaagagtatgccgagtgggcgcagatcgcgccgatgcaggatgtgcccgataccaacgatcccggagcggacctgctcaagatgctcgctagccccaatctgtcctcgcgcagctggattgccgagcaatatgacagccaggtcatggccgacacgatccagaccggcggcgatgcaagcgtcgtgcgtgtccacggcaccgaaaaggcaatcgcgatcagcaccgattgcacgccgcgctatgtctttgccgacccctatgagggcgggaagcaggcgatcgccgaagcctatcgcaatctttgctctgtcggtgcgcgcccgctcgccgtcaccaactgtctcaactttgccaacccgcagcggcccgaaatcatgagccagttcgtccatgctctcgaaggcatgggcgatgcctgccgcacgctcgatttcccgatcgtgtcgggcaatgtgagcctctacaacgagagcaaagcgacaggcggcggctcggcgatccttcccactcccgcgattggcggcgtgggtatactcgaagatgcatcgaagatggcaacgtccgccttcaagagcgaaggcgacgcgatctacctgcttgcacctgaattctgggcaaagcccgatccgacccgctcgcatctcggcaaatcgatgtggctcgatgtggtgaaaggccgcgatgagggccgcgcgccgccggtcaatctcgcagccgagtatggcgccggacagatcgtgcgcaaactgatcggcgctggcctgctatccgcagttcatgacctttctgatggcggccttgccgtggcgcttgccgaaatggcgcttgccggtgaccttggtgctgacctcgtcgatggctacgaaggctataccgctgcgcagtggtggttcggagaggatcaggctcgctatgtcctgaccgtctctccagaaaacgccgatgccttcaatcgcatggtcgccgaagggccagacattcccgaagctgaaatggtgggtttccaccggatcggcacggtcggcggcgaccgcttgctcagcgtcagcgtcgctgaccttcgcgccgcgcatctgagcttcttcgccaagtggatggaagcatag

SEQ ID NO: 52905 - protein, 747 aa, Erythrobacter sp. NAP1
MTDITPEIVEQHGLSPEEYERVLSGLGREPNLVELGIFSVMWSEHCSYKSSRLHLKKLPTEADWVICGPGENAGVIDIGDGQAAIFKMESHNHPSYIEPYQGAATGVGGILRDVFTMGARPVANMNALRFGRPDHPKMKHLVQGVVAGIGGYGNCVGVPTVGGETNFHPAYDGNILVNAMTVGIADSDKIFYSAATGVGNPIVYVGSKTGRDGIHGATMASADFEEDAEAKRPTVQVGDPFTEKLLIEACLELMATDAIVAIQDMGAAGLTSSSVEMATNGKAGIRLDMNKVPCREEGMTPYEMMLSESQERMLMVLKPGKEAMAAAIFEKWELDFAVIGEVTDTQHMVLEWNGEVVCDIPLGPLAADAPEYDRPYLSKEEYAEWAQIAPMQDVPDTNDPGADLLKMLASPNLSSRSWIAEQYDSQVMADTIQTGGDASVVRVHGTEKAIAISTDCTPRYVFADPYEGGKQAIAEAYRNLCSVGARPLAVTNCLNFANPQRPEIMSQFVHALEGMGDACRTLDFPIVSGNVSLYNESKATGGGSAILPTPAIGGVGILEDASKMATSAFKSEGDAIYLLAPEFWAKPDPTRSHLGKSMWLDVVKGRDEGRAPPVNLAAEYGAGQIVRKLIGAGLLSAVHDLSDGGLAVALAEMALAGDLGADLVDGYEGYTAAQWWFGEDQARYVLTVSPENADAFNRMVAEGPDIPEAEMVGFHRIGTVGGDRLLSVSVADLRAAHLSFFAKWMEA

SEQ ID NO: 52906 - DNA, 2295 bp, Synechococcus sp. RS9917
  CDS (1)..(2295): transl_table=11
gtgacggccgctctccgcaaggagggactcaccgaggaggactaccgcgaaattcagcgccgtctcggtcgtgatcccaaccgggcggaactcggcatgttcggggtgatgtggtcggaacactgctgttaccgcaactccaggccgctcctgcgaggttttccgacggaggggccccgcatcctggtgggaccgggggagaacgccggggtggtggatctgggcgacgggcaccgtctcgcgttcaagatcgaaagtcacaaccatccctcggcggtggagccctttcagggcgcggccacgggggtcggtggcatcctgcgtgacatcttcaccatgggcgcccgtccgatcgccctgctgaatgccctgcgtttcggccccatggaggagccctccaatcggggactgctggagggggtggtggccggcattgcccattacggcaactgcgttggcgtgccgacggtgggcggtgaagtcgcctttgatccctcctacagcggcaacccgctggtgaacgccatggccctggggctgatggaaacggaggagatcgtcaaatccggagcctccggtgtcggcaatcccgtggtgtacgtgggcagcaccaccggtcgtgacggcatggggggtgccagctttgccagcgctgaactcagtggctcctccctcgatgaccgcccggctgtgcaggtgggtgatccctttctggaaaaggggttgatcgaagcctgtctggaggccttccagagtggtgatgtgatcgccgcccaggacatgggagcggccggtctcacctgcagctgtgccgaaatggccgccaaggggcatgtgggcgtggagctcgatctggatcgggtgcccgcacgggaagagggcatgaccgcctacgaatttcttctctccgagtcgcaggagcgcatgctcttcgtggtgcgtgccggtcgcgagcagccgctgatggagcgtttccgccgctgggggctgcaggcggccgtggtgggacaggtgttggcggagcccgtggtgcgggtgttgcagcacggagcggtggccgctgaaattcccgcccgcgccctggcggaagacacgccgatcaattcccacagcctcttggccgatccccccctcgacatccagcagcattggcaatggcaagactccgagcttcccggtgccgcgttggagcacgactggggtgccgatctgctcgccctgctcgatgatccgaccatcgccagcaagcgctgggtgtatcgccagtacgaccagcaggtgctggccaacaccgtgattcaggccggaggcgctgacgccgcggtcgtgcgactccggcctcagcagggggacgggtccctgcagggaactgagcgcgctgtggcggccacggtggattgcccgaatcgctgggtggcgctggatcccgagcgtggtgcgatggcggcggtggcggaagcggcccgcaacctgagttgcgtcggtgccgatccgctcgcggtgaccgacaacctgaactttccctcacccgacaccgatcgcggctactggcaactggccatggcctgccgtggtctggctgaggcctgccgccgactgaacacccccgtgaccggtggcaatgtctccctctacaacgagacccgcagtgatgatggcgcgtccgtgccgatccatcccacgcccgtggtgggcatggtcggggtggtggagtccatcgccaaggtgatcggtctggggtggcggcagccggcggatccagtggtgctgctgggggtgccgatcgatgggcaggccgatgatcggctcgggctggcaggcagtgcgtatcagggggtgatccatggtgccctcaccggccgcccgcctcgtccggatctggatctcgaggtgagagtgcaggccctggtgcgggcggcgattggccaaggcctgttggcgtccgcccacgattgcagcgacggtggcctggcggtggcgttggcggagagttgcctggcggtgggcctgggtgccgcgattgacctgggcagcagcgggtcccgtccggagcagctgttgtttgcggagggtggcgccaggatcatcgtgtcggtgaaggcggaagcccttgaggcctggcaggcgctgttggctggagcgctcggttgtgacgttccggccacgcccctcggcttcgtcacggatcaggggcggttgacgatgcgctcgggagatcaggccctgctggatctcgatgtcgccgcgatgcgcctggctcacgaccaggcactgccccgacgcatggcggcatga

SEQ ID NO: 52907 - protein, 764 aa, Synechococcus sp. RS9917
MTAALRKEGLTEEDYREIQRRLGRDPNRAELGMFGVMWSEHCCYRNSRPLLRGFPTEGPRILVGPGENAGVVDLGDGHRLAFKIESHNHPSAVEPFQGAATGVGGILRDIFTMGARPIALLNALRFGPMEEPSNRGLLEGVVAGIAHYGNCVGVPTVGGEVAFDPSYSGNPLVNAMALGLMETEEIVKSGASGVGNPVVYVGSTTGRDGMGGASFASAELSGSSLDDRPAVQVGDPFLEKGLIEACLEAFQSGDVIAAQDMGAAGLTCSCAEMAAKGHVGVELDLDRVPAREEGMTAYEFLLSESQERMLFVVRAGREQPLMERFRRWGLQAAVVGQVLAEPVVRVLQHGAVAAEIPARALAEDTPINSHSLLADPPLDIQQHWQWQDSELPGAALEHDWGADLLALLDDPTIASKRWVYRQYDQQVLANTVIQAGGADAAVVRLRPQQGDGSLQGTERAVAATVDCPNRWVALDPERGAMAAVAEAARNLSCVGADPLAVTDNLNFPSPDTDRGYWQLAMACRGLAEACRRLNTPVTGGNVSLYNETRSDDGASVPIHPTPVVGMVGVVESIAKVIGLGWRQPADPVVLLGVPIDGQADDRLGLAGSAYQGVIHGALTGRPPRPDLDLEVRVQALVRAAIGQGLLASAHDCSDGGLAVALAESCLAVGLGAAIDLGSSGSRPEQLLFAEGGARIIVSVKAEALEAWQALLAGALGCDVPATPLGFVTDQGRLTMRSGDQALLDLDVAAMRLAHDQALPRRMAA

SEQ ID NO: 52908 - DNA, 2376 bp, Synechococcus sp. WH 5701
  CDS (1)..(2376): transl_table=11
gtggttgccacaccctcctttccggtcgccgaggccctgcgccaggagggcctcagccaggctgattacgaggagatccgccgccggctcggtcgtgaccccaaccgcgccgagctgggcatgttcggggtgatgtggtcggagcattgctgctaccgcaactccaggccactgctgcagggcttccccaccaccggccctcgcatcctggtgggccccggcgagaatgccggcgtggtggacctgggcgagggccagaggctcgccttcaagatcgaaagccacaaccatccctccgccgtggagcccttccagggggcggccaccggagtgggaggcatcctgcgcgacatcttcacgatgggtgcccggccgatcgccctgctcaacgccctgcgctttggtcccctggaagacgagcgcaacgtgggcctgatggagggcgtggtggccggcatcgcccactacggcaactgtgtgggggtgcccaccgtgggcggtgaggtggctttcgaccccagttattccggcaaccccctggtgaacgccatggccctggggctgatggaaaccgaggagatcgtctgctccggggctgtgggggtgggcaatccggtggtgtacgtgggcagcaccaccggccgcgacggcatgggcggcgccagctttgcctcggccgagctgagtgcggcatccctcgatgaccgcccggctgtgcaggtgggcgaccccttcctggagaaggggctgattgaggcctgccttgaggcgtttcagagtggtgatgtgctcgcggctcaggacatgggagccgcgggcctcacctgcagctgctcggagatggccgccaagggggggctgggcatcgagctcgatctcgaccgggtgccggcccgggagagcggcatgagcgcctacgagttcctgctcagcgagtcgcaggagcggatgctgttcgtggtcaaaccgggttgcgaggaggccctgatggcacgcttccgccgttggggtctgcaggctgctgttgtcggccgtgtgctggccgacaacgtggtgcgggtgctccagggaggcttggtggcggcggaggtgcccgccagcgccctcgccgatgacaccccgatcaaccaccatgagctgatcagtgaacctccggccgccatccaggcgcactggcgctggagcgaggccgacctgcccgccgccgccgctgagggcatcacaccggcaggcggaccactggcgggccaggccctgggttggggtgccgtgctcctgcgcctgctcgatgaccccaccattgccagcaagcgctgggtctatcgccagtacgaccaccaggtgcaggccaactcggtgatgccccccggtggcgccgatgcggccgtggtgcgcctgcggccccagcggggcgagggcgccatggaggccgccagtcgcggcgtggccgccactgtcgactgccccaaccgctgggtggccctggatccagagcggggggcggcggcggcggtggccgaagctgcccgcaacctcagctgcgtcggggctgaaccccttgcagtcaccgacaacctcaacttcccctccccggagacccccaccggctactggcagctggccatggcctgccgtggtctgtcggaggcctgccgggcactcgacactcccgttaccggcggcaacgtctccctgtacaacgaaaccaggcggcccgatggcagcctgcagccgatccatcccactcccgtggtggggatggtgggactcgttcacgacctcgatcacgtcaccggcctgggctggcaggctccgggcgatcacctctggctgctgggggtgcccctggccggtagcgacgtcgatgggcggctggctctggccgcctccagttatctggagagtgtccatggtctggccacgggccggccgccgctgaccgacctgaagctcgagcggacagtgcaatccctgctgcgtcaggcgatcacggcgggcctggtggcctccgcccacgatctcagcgacgggggcctggcggtggcggctgccgaggcctgcatcgcctccggcctcggtgccgctctggagcttcccgccgatgcgggccgtctggatcgcttgctcttcgccgaagggggcgccagggtgctggtgtcgctccgaccagctcaggagcaggcctggcaggagctgctggcggtgcagcaggctgtggggccgcaagcactggccacgccgatcggtcgggtgggtgaggccggcacagccctgagcttcgagcagaacggcactgtcctgctggccctggaggtggaggagctgcgcacgagctacgagaacgctctgccgcgccggctggccgcaaccggctga

SEQ ID NO: 52909 - protein, 791 aa, Synechococcus sp. WH 5701
MVATPSFPVAEALRQEGLSQADYEEIRRRLGRDPNRAELGMFGVMWSEHCCYRNSRPLLQGFPTTGPRILVGPGENAGVVDLGEGQRLAFKIESHNHPSAVEPFQGAATGVGGILRDIFTMGARPIALLNALRFGPLEDERNVGLMEGVVAGIAHYGNCVGVPTVGGEVAFDPSYSGNPLVNAMALGLMETEEIVCSGAVGVGNPVVYVGSTTGRDGMGGASFASAELSAASLDDRPAVQVGDPFLEKGLIEACLEAFQSGDVLAAQDMGAAGLTCSCSEMAAKGGLGIELDLDRVPARESGMSAYEFLLSESQERMLFVVKPGCEEALMARFRRWGLQAAVVGRVLADNVVRVLQGGLVAAEVPASALADDTPINHHELISEPPAAIQAHWRWSEADLPAAAAEGITPAGGPLAGQALGWGAVLLRLLDDPTIASKRWVYRQYDHQVQANSVMPPGGADAAVVRLRPQRGEGAMEAASRGVAATVDCPNRWVALDPERGAAAAVAEAARNLSCVGAEPLAVTDNLNFPSPETPTGYWQLAMACRGLSEACRALDTPVTGGNVSLYNETRRPDGSLQPIHPTPVVGMVGLVHDLDHVTGLGWQAPGDHLWLLGVPLAGSDVDGRLALAASSYLESVHGLATGRPPLTDLKLERTVQSLLRQAITAGLVASAHDLSDGGLAVAAAEACIASGLGAALELPADAGRLDRLLFAEGGARVLVSLRPAQEQAWQELLAVQQAVGPQALATPIGRVGEAGTALSFEQNGTVLLALEVEELRTSYENALPRRLAATG

SEQ ID NO: 52910 - DNA, 2388 bp, Synechococcus sp. WH 7805
  CDS (1)..(2388): transl_table=11
atgcggatggtctgcaggccgtcggcaacactggggagagatgaacggttggctgtgactcagtccccttcagtggaaggttcctttgatgtggcctcagcactgcgccaggaagggctgacgcagcaggattacggcgagattcagcgacgactcgggcgagatcccaacagggcggagttgggaatgttcggtgtgatgtggtccgagcattgctgttaccgcaattccaggccactcctgcgtggttttcccacggaaggacctcgcatccttgttggccccggcgagaatgctggagtggtggatctgggggagggacaccgcctggctttcaagattgaaagtcataaccatccttcggcggtggagccctttcaaggcgctgccacaggagtgggaggcatccttcgggacatcttcaccatgggagcccgaccgatcgctttgctgaatgccctgcgtttcggtcccctcgatgaacccatcacccacggattggtggaaggtgttgtggcggggatctcccattacggcaattgcgtcggagtgccgaccgtgggtggggaagttgcgttcgaccctgcttatcgcggcaaccccctggtgaatgccatggctctgggcctgatggaaacggaagacatcgtgaaatcgggggcgtccggtgttggcaatcctgtggtgtatgtgggcagcaccacgggccgcgacgggatggggggtgccagcttcgccagtgccgaactcagcgccgattccttggatgatcgccctgcggttcaggtgggcgatccctttcttgaaaagggactgattgaggcttgcctcgaagccttccagagcggggatgtggtggccgcccaggacatgggggctgcgggactcacctgcagctgctcagagatggccgccaaagggaatgtgggggttgagctggatctcgacagggttccagcccgtgaacagggcatgactgcgtacgagttcctgctgtctgaatcgcaggagcggatgctgtttgtggtgaaggccggtcgtgaggaggcgttgatgcagcgtttccgccgctggggcttgcaggcggccgttgtgggtcaggttctcgcggagcctgttgtacgtgtgcttcagcatggatcggtggctgctgaggttcctgcccgggctcttgcggaagacactcccatcaatcagcacaccttgatctctgaacctccagaggacatccaaaagcattggtgctggtctgagactgatcttccgcaagttcccagcgatcacgactggggagcggatctgctcgctctccttgatgaccccaccatcgccagcaaacgctgggtctatcgccaatacgaccagcaggtgctcgctaataccgttgtgcccgctggtggagcggatgctgctgtggtgcggctcagacctcagcaaggggatggagcgtttcgggggtccaaccgaggggtagcggccacggtcgactgtcccaatcgttgggtggctctggaccctgaacgtggggcgatggccgccgtcgcggaggctgcccgcaatctcagttgcgttggggctgtcccggtggctgtcaccgacaacctcaattttccgtctccagaaacgtccaagggctactggcagttggcgatggcctgccgagggctgtcggagggctgtcgggtgctgggcaccccagtgaccggggggaatgtgtcgctatacaacgagacccgcgccgacgatggccgcctgcaaccgatacaccccacgcccgtggtgggcatggtgggactggttgaggatcttcgcctggtgggtggtttggcctggcgtcaaccgggtgatgccgttgtgcttcttggggtttccactgatgaacgccaggacgaccgggtcggattggccggcagcagctatcagggggtgattcatggtctgttgaccggcagacctccgagggttgaccttgatctggagctgcgcgttcaggctctggttcggcaggctctggctcaagggctgctcgcgtctgcccacgacagcagtgatggtggactggccgttgctttggctgaatgttcgatcgcttcgggcctcggtgtggatgggtcgttgcctggtgatggcgtgcgtccggagcggagtctttttgctgaaggaggagcccgcattctcgtgtccgtgcgggcagagtgcctggacgcctggatgtcgctgctggcctctgatgcccatgttggtgttccggtgaccactctcggagccgtggcggatcacggacgcttccgactctccctgggatcaaaccctgtgctggatcaggcggtgcaaacactgacggagtgttttgagcaggctctcccccgtcggctgggaacagcgtga

SEQ ID NO: 52911 - protein, 795 aa, Synechococcus sp. WH 7805
MRMVCRPSATLGRDERLAVTQSPSVEGSFDVASALRQEGLTQQDYGEIQRRLGRDPNRAELGMFGVMWSEHCCYRNSRPLLRGFPTEGPRILVGPGENAGVVDLGEGHRLAFKIESHNHPSAVEPFQGAATGVGGILRDIFTMGARPIALLNALRFGPLDEPITHGLVEGVVAGISHYGNCVGVPTVGGEVAFDPAYRGNPLVNAMALGLMETEDIVKSGASGVGNPVVYVGSTTGRDGMGGASFASAELSADSLDDRPAVQVGDPFLEKGLIEACLEAFQSGDVVAAQDMGAAGLTCSCSEMAAKGNVGVELDLDRVPAREQGMTAYEFLLSESQERMLFVVKAGREEALMQRFRRWGLQAAVVGQVLAEPVVRVLQHGSVAAEVPARALAEDTPINQHTLISEPPEDIQKHWCWSETDLPQVPSDHDWGADLLALLDDPTIASKRWVYRQYDQQVLANTVVPAGGADAAVVRLRPQQGDGAFRGSNRGVAATVDCPNRWVALDPERGAMAAVAEAARNLSCVGAVPVAVTDNLNFPSPETSKGYWQLAMACRGLSEGCRVLGTPVTGGNVSLYNETRADDGRLQPIHPTPVVGMVGLVEDLRLVGGLAWRQPGDAVVLLGVSTDERQDDRVGLAGSSYQGVIHGLLTGRPPRVDLDLELRVQALVRQALAQGLLASAHDSSDGGLAVALAECSIASGLGVDGSLPGDGVRPERSLFAEGGARILVSVRAECLDAWMSLLASDAHVGVPVTTLGAVADHGRFRLSLGSNPVLDQAVQTLTECFEQALPRRLGTA

SEQ ID NO: 52912 - DNA, 3885 bp, Pseudoalteromonas tunicata D2
  CDS (1)..(3885): transl_table=11
atgttgatcctacgtggtgctccagcactctctgattttagaattcaaaagatcttaaaaagctgtgctgacgcaaatttagctgtcacaaatgtttatgctgagtttatgcattttgctgatctcactgctgatttaaaagcggcagaattagataaactgaaaaaactattaacttatgggccaactgcggttgagcacactccagcaggaacgttaattttagttacaccacgtccaggcactatttctccgtgggcttcaaaagctacggacattgcaaaaaattgtggtttaagtcaggttcatcgtgttgagcgcggtattgcttattatgttgaaggtgatttcactgctgagcaattaaatgaagtggctaaattagttcatgatcgtatgacagaggctacacataattcacttgaagcggcttctgcgctatttaaagttgaagagccacgccctatgtcatcggttgacattttaggcggtggtcgtgaagcgcttgttcgcgcaaacgttgagcaaggttttgcgcttgctgacgatgaaatagactatttagttgagaacttccaaaagttaggtcgtaatcctaacgacatcgaattattcatgtttgctcaggcaaactctgagcattgtcgtcataaaatctttaattctgattggacaattgatggcgagaagcagcctaaatcattgttcaaaatgattaaaaatacctatgaagtgaatcaaacaaacgtattgtcggcatataaagataatgcagcggtaatgaaaggctcgtttgcgggtcgttttttcccaaatgccgaaggtcaatatagctatcatcaagaaaacattgaaattttgatgaaagttgaaacgcataaccacccaactgcgattgctccattttcgggtgcatcaacaggttctggtggtgaaattcgtgatgaaggtgcgaccggtcgtggttcaaaaccaaaagcaggcttagttggttttacggtatcgaatttacgtattccagggtttgaacaaccatgggaaagtgattttggcaaaccggctcgtatcgtaaatgcgcttgatattatggttgaaggcccattaggtggtgctgcatttaataatgaatttggtcgtccaaatttattaggttatttccgtacttatgaagaacaagtaaatagccacaatggtattgaagtgcgtggttaccacaagccgataatgcttgccggtggtttaggtaatattcgtactgatcatgtacaaaaaggtgaaattccagttggcgcaaaactcattgtattgggtggcccagcaatgaacataggtttaggtggtggtgctgcatcaagtatggcatcaggccaatcaaacgaagacttagattttgcttcagtacaacgtgaaaatcctgaaatggaacgtcgttgccaagaagtgatcgataagtgttggcaattaggcgatgaaaatccaattgcgtttatccatgatgtgggcgctggcggtatctcaaatgcgtttcctgagttagttaacgatggtggccgcggtggtaaatttgagcttcgtaatgtaccaaatgatgagccgggcatggcaccgcacgaaatttggtgtaatgaatcgcaagagcgttatgtattagctgttgccgctgaagattttgctcgttttgaagcgatttgtaagcgcgaacgtgcgcaatatgcagtgattggtgaagcgaccgaggagcgtcatttaacagtttctgacagtcattttgataacaacccagttgatttaccgcttgaagttttattgggtaaagcgccaaaaatgcaccgtgatgtaatgacacaaaaagcgacgggtgaagctctaaactttgatggcgtgacattagatgatgcagctaaacgcttattacgtttaccaaccatcgcagaaaaaacatttctaatcactattggtgatcgcactgtaactggcttagtggcacgtgaccaaatggttggcccatggcaagtaccggttgctgattgtgcagtgactgctgcagcatttgatacgtatcatggcgaagcaatgtcattaggcgagcgtacacctgcggcattattaaactttggcgcatcagcacgcttggcggtcgctgaatcgttaacaaatattgctggtgctgatatcggtgatttaaataacattaagttatcagcaaactggatgtctgctgcaggtcacccaggtgaagatgctggtctgtatgaggctgtaaaagccattggtgaagagttatgtcctgcattaggtttaacgattccagtgggtaaagattcaatgtctatgaagacacaatgggaagaaaatggcgagaaaaaagccgttactgcaccattatcattgatcattactgcatttggccgtgttgaagatatccgtaaaacggttacacctcagtttcgcacagataaaggtgattcaagcttaattttacttgatttaggtgccggtcaaaaccgtttaggtgcatcaagccttgcgcaagtttataagcaattaggtgatgtaacgcctgatgttgatagcccagaattattaaaaggcttctttaatgcaatgcaaaccttggttgcagagcaaaaattattagcgtatcacgataaatcagacggtggtttattcacgacagtggctgaaatggcatttgctggacgtgttggtgtgaccattgctatcgatgcgttgggtgactctgatttagcagcattatttaatgaagagctaggcggtgttattcaagttcgcaatagcgataaagatgctgtattagctgttttagcacaacatggtttaagtgcggtaagtcatgagattggttcgttaaacgacactgattcagtggtatttacacgtggtggtactacggtgcttgaacacagccgtgttgaattacgtactatttgggcagaaacaaccttccaaatgcaaacgctgcgagataatccagcgggtgcaaaacaagaacacgaagcaaaatttgatgttaaagatcctggcttaaatgttaagttaacgtttgatatcaatgaagatatcgcagctccttatatccttaaaggtgctgcgcctcgcatggctattttacgtgagcagggtgtaaactcgcacgttgaaatggcggcagcgtttaatcgagctggttttgctgcaattgatgtacacatgagtgatatccttgaaggtcgtatttcacttgatgagtttaaaggcttagtggcttgtggtggattctcctacggtgatgtacttggagcaggtgaaggttgggcgaaatcaattctctttaatgatcaagctcgtgaacaattcatttcgttctttgagcgcacagatacctttagtttaggtgtgtgtaacggttgtcagatgttgtcatcaatgcgtgagttaattccgggtactgagcattggcctcgttttgtaactaataaatcagagcgttttgaagcgcgttttagcttagttgaagtacaagaaaatccatctgtgttctttagtggtatggcgggctcgcgtatgccaattgcggtttcacatggtgaaggtcatgctgagtttaaaaacgcagcggcactacaaactgcaatagcatcgggaacggtagcacttaagtttgttgataattatggtaatccaaccatgcaatatccaaacaacccgaatggttcacctgaaggtataacggctattactagtttagatggccgagcgactgtgatgatgccgcatccagagcgagtatttcgtacagttgcaaactcttggcatccagatgaatggttagaagatagtccatggatgcgtatgttccgtaacgcacgcaaaaatatcggttaa

SEQ ID NO: 52913 - protein, 1294 aa, Pseudoalteromonas tunicata D2
MLILRGAPALSDFRIQKILKSCADANLAVTNVYAEFMHFADLTADLKAAELDKLKKLLTYGPTAVEHTPAGTLILVTPRPGTISPWASKATDIAKNCGLSQVHRVERGIAYYVEGDFTAEQLNEVAKLVHDRMTEATHNSLEAASALFKVEEPRPMSSVDILGGGREALVRANVEQGFALADDEIDYLVENFQKLGRNPNDIELFMFAQANSEHCRHKIFNSDWTIDGEKQPKSLFKMIKNTYEVNQTNVLSAYKDNAAVMKGSFAGRFFPNAEGQYSYHQENIEILMKVETHNHPTAIAPFSGASTGSGGEIRDEGATGRGSKPKAGLVGFTVSNLRIPGFEQPWESDFGKPARIVNALDIMVEGPLGGAAFNNEFGRPNLLGYFRTYEEQVNSHNGIEVRGYHKPIMLAGGLGNIRTDHVQKGEIPVGAKLIVLGGPAMNIGLGGGAASSMASGQSNEDLDFASVQRENPEMERRCQEVIDKCWQLGDENPIAFIHDVGAGGISNAFPELVNDGGRGGKFELRNVPNDEPGMAPHEIWCNESQERYVLAVAAEDFARFEAICKRERAQYAVIGEATEERHLTVSDSHFDNNPVDLPLEVLLGKAPKMHRDVMTQKATGEALNFDGVTLDDAAKRLLRLPTIAEKTFLITIGDRTVTGLVARDQMVGPWQVPVADCAVTAAAFDTYHGEAMSLGERTPAALLNFGASARLAVAESLTNIAGADIGDLNNIKLSANWMSAAGHPGEDAGLYEAVKAIGEELCPALGLTIPVGKDSMSMKTQWEENGEKKAVTAPLSLIITAFGRVEDIRKTVTPQFRTDKGDSSLILLDLGAGQNRLGASSLAQVYKQLGDVTPDVDSPELLKGFFNAMQTLVAEQKLLAYHDKSDGGLFTTVAEMAFAGRVGVTIAIDALGDSDLAALFNEELGGVIQVRNSDKDAVLAVLAQHGLSAVSHEIGSLNDTDSVVFTRGGTTVLEHSRVELRTIWAETTFQMQTLRDNPAGAKQEHEAKFDVKDPGLNVKLTFDINEDIAAPYILKGAAPRMAILREQGVNSHVEMAAAFNRAGFAAIDVHMSDILEGRISLDEFKGLVACGGFSYGDVLGAGEGWAKSILFNDQAREQFISFFERTDTFSLGVCNGCQMLSSMRELIPGTEHWPRFVTNKSERFEARFSLVEVQENPSVFFSGMAGSRMPIAVSHGEGHAEFKNAAALQTAIASGTVALKFVDNYGNPTMQYPNNPNGSPEGITAITSLDGRATVMMPHPERVFRTVANSWHPDEWLEDSPWMRMFRNARKNIG

SEQ ID NO: 52914 - DNA, 3918 bp, Photobacterium sp. SKA34
  CDS (1)..(3918): transl_table=11
atggaaattttgcgtggttcacccgcactgtctgagtttcgcgttaataagctacttgagcgttgccgcgaattcgatctgcctgtgtcaggtatttatgctgagtttatgcactttgctgatgtatctgctgcccttactgctgatgagcatagcaaactagcgagtcttttaacttacggtccaacgattgtagagcacgagccttgtggcacgttgctacttgttacccctcgtccggggacaatttctccttggtcatcaaagtcgaccgatattgcccgtaactgtggcttaaaatcaattaaacgccttgagcgtggtaccgcatattacatcgaatcaacttgtgatctatcagcatcacaattagcgcaagttaaagcgttaatccacgatcgcatgatggaagtgattgttggcgattttgaagctgcggctgctttatttaaacaagcagaaccagcaccggtgaaaagtgttgatattcttgctggtggtcgccaggcattagagcaagccaaccttacgttagggcttgctttagctgaagatgaaattgactatctagttgagaatttcactaagctaggtcgtaaccctaatgacattgagctaatgatgtttgctcaggcgaactcagagcactgtcgacataaaatctttaatgcagattggaccattgatggtgtagatcaagacaaatcattgttcaagatgatcaaaaatacttatgagcaaaatcatgagcacgtattgtcggcatataaagataatgctgcagtaatggaaggttcgaaagtagggcgtttcttccccgatcctgaatctcgtcaatataactaccaccatgaagatacccatatcttaatgaaggtagaaacgcataaccacccaactgctatttcaccgtggcctggtgcatcaacagggtcgggcggtgaaattcgtgatgaaggggcaactggtattggcggtaaacctaaagcaggtttagttggctttactgtatctaaccttaaagttccgggttttgaacaaccttgggaaaccgattttggtaaacccgaccgcattgttacagcgcttgatattatgcttgaaggcccattgggtggcgcggcatttaacaatgaatttggccgtccaaacctactgggttatttccgtacttacgaagaaaaagtgacgtcacatgctggtgaagaagtacgtggttaccataagccaattatgatcgcgggtggtatggggaatatccgtgctgatcacgtacagaaaaaagaaattccagtaggcgcgaagttaattgttcttggcggtcctgcaatgaatatcggtcttggcggtggtgctgcttcatcaatggcatcaggtcaatcggcagaagatctggattttgcctctgtacagcgtgaaaacccagaaatggaacgtcgctgtcaggaagtgattgatcgttgttggcagatgggtgacgctaacccaatcgcctttatccacgatgtgggcgcgggtggcatttcaaacgctttacctgagcttgttgatgatggcgaacgtggcggtaaattccaattgcgtgacgttcctaacgatgagccgggtatgagcccactagagatttggtgtaacgaatctcaagagcgttatgttatggccgttgcaccagaacatatggcagcttttgatgcgatttgtaagcgtgaacgtgcgccttatgctgttgtgggtgaagcaacagaagagcgtcatttaacactcgaagatagccattttgacgatacgccaattgatatgccaatggacattctattgggtaaagcgccgaaaatgcaccgtgatgtgaagtcacaaaaagtagaaggccaagcgattgaccgtagtggcattgacttagttgaagcgactcaacgaatccttcgtctgcctgctgtggctgaaaaaactttcctcattacaattggcgatcgcacagtgacaggcttggttgcacgcgatcagatggttggcccatggcaggtacctgttgctaactgtgcggtgactgctgctagttacgatacctaccatggtgaagcaatgtctatgggtgagcgtacacctgttgcattacttgattttggtgcatcagcacgcttagctgtaggtgaagctgttactaatattgcttgtagtgatattggtgatatgaaacgtatcaatctttcggctaactggatgtcaccagcaggtcaccctggcgaagatgctggcttatatgaagcggtaaaagcggtaggcgaagagctttgtcctgcgttgggtctgacgattccagtgggtaaagactcaatgtcaatgaagactaaatggcaacaagacggtgaagagaaggaagtaacatcgccactttcgttagtcattactgcgtttggtcgcgttgaagatgtacgcaaaactgtgacgcctcagctgcgtactgataaaggcgaaactagcctgttattggtggatttaggttgtggtaaaaaccgtttaggtgcaacagcactggcacaggtttataagcaattgggtgataagccagctgatgtcgatagtcctgagctattaaaaggcttcttctacgcgatgcaatcactggtacgtgatgaaaaactattagcttatcatgaccgtggtgatggtggtttgtacgttactttggctgaaatggcatttgcgggtcacactggtattgaagttgatattaatactggtagtgaagatgcagttgatgacgtattagcttcgctatttaacgaagagttaggtgcggttattcaagtacgtactgacgatcttgatttagttcagtcggtacttgcagcaaacggtcttgaagcatgtagtcatgttattggtactgtggttgaagaagatgttgttcgtatttggaatggcaatgatttagtgcttgagcaaaatcgaacagatattcgtgcagtatgggctgaaacaacctaccaaatgcaagccatgcgtgataacccagcgggcgcattacaagagtttgaagccaagaaagatacgcaagatcctggtttaaatgtgaagctgacgtttgatattaatgaagacgtcgcagccccatttattgcccctgcgattaatcttggtgctaaaccgcaaatggcgattttacgtgagcaaggggttaactctcatgttgaaatggctgctgcctttgatcgcgcaggctttgaagcgaaagatgtccacatgagtgatatcttatctggcaacgctaagctcgatggttttaatggtctggttgcttgtggtggtttctcttacggtgatgtattaggtgcgggggaaggttgggcgaagtcagtgttgtttaacaatattgctcgtgatcaatttgaagctttctttaaccgcaatgatacgttggcattaggtgtttgtaacggttgtcagatgatgtctaaccttcgtgacttaattccaggcgccgatttatggccgcgttttgtacgcaatgaatctgagcgttttgaagctcgctttagtttggttgaagtacaacaaagcccatcgttattctttaatgaaatggctggctctcatatgccaattgccgtttctcatggtgaaggtcgtgttgaagttcgtaatgctgagcatcttgctgcactagagcaagccgatatagttgcattacgatacattgataacttcggtaagctaacagaacggtaccctgcgaacccgaatggttcaccaaacggtattaccagtgtgacgacaactgatggtcgtgtaaccatcatgatgccgcaccctgagcgtgtgtttagaaccgttgcaaactcatggcacccagatgactggagtgaaaatagcccatggatgcgtatgtttagaaatgcacgtgttaatttaagttaa

SEQ ID NO: 52915 - protein, 1305 aa, Photobacterium sp. SKA34
MEILRGSPALSEFRVNKLLERCREFDLPVSGIYAEFMHFADVSAALTADEHSKLASLLTYGPTIVEHEPCGTLLLVTPRPGTISPWSSKSTDIARNCGLKSIKRLERGTAYYIESTCDLSASQLAQVKALIHDRMMEVIVGDFEAAAALFKQAEPAPVKSVDILAGGRQALEQANLTLGLALAEDEIDYLVENFTKLGRNPNDIELMMFAQANSEHCRHKIFNADWTIDGVDQDKSLFKMIKNTYEQNHEHVLSAYKDNAAVMEGSKVGRFFPDPESRQYNYHHEDTHILMKVETHNHPTAISPWPGASTGSGGEIRDEGATGIGGKPKAGLVGFTVSNLKVPGFEQPWETDFGKPDRIVTALDIMLEGPLGGAAFNNEFGRPNLLGYFRTYEEKVTSHAGEEVRGYHKPIMIAGGMGNIRADHVQKKEIPVGAKLIVLGGPAMNIGLGGGAASSMASGQSAEDLDFASVQRENPEMERRCQEVIDRCWQMGDANPIAFIHDVGAGGISNALPELVDDGERGGKFQLRDVPNDEPGMSPLEIWCNESQERYVMAVAPEHMAAFDAICKRERAPYAVVGEATEERHLTLEDSHFDDTPIDMPMDILLGKAPKMHRDVKSQKVEGQAIDRSGIDLVEATQRILRLPAVAEKTFLITIGDRTVTGLVARDQMVGPWQVPVANCAVTAASYDTYHGEAMSMGERTPVALLDFGASARLAVGEAVTNIACSDIGDMKRINLSANWMSPAGHPGEDAGLYEAVKAVGEELCPALGLTIPVGKDSMSMKTKWQQDGEEKEVTSPLSLVITAFGRVEDVRKTVTPQLRTDKGETSLLLVDLGCGKNRLGATALAQVYKQLGDKPADVDSPELLKGFFYAMQSLVRDEKLLAYHDRGDGGLYVTLAEMAFAGHTGIEVDINTGSEDAVDDVLASLFNEELGAVIQVRTDDLDLVQSVLAANGLEACSHVIGTVVEEDVVRIWNGNDLVLEQNRTDIRAVWAETTYQMQAMRDNPAGALQEFEAKKDTQDPGLNVKLTFDINEDVAAPFIAPAINLGAKPQMAILREQGVNSHVEMAAAFDRAGFEAKDVHMSDILSGNAKLDGFNGLVACGGFSYGDVLGAGEGWAKSVLFNNIARDQFEAFFNRNDTLALGVCNGCQMMSNLRDLIPGADLWPRFVRNESERFEARFSLVEVQQSPSLFFNEMAGSHMPIAVSHGEGRVEVRNAEHLAALEQADIVALRYIDNFGKLTERYPANPNGSPNGITSVTTTDGRVTIMMPHPERVFRTVANSWHPDDWSENSPWMRMFRNARVNLS

SEQ ID NO: 52916 - DNA, 3903 bp, Oceanospirillum sp. MED92
  CDS (1)..(3903): transl_table=11
atgctggcactgcgcggagcacctgctctttccgcttttcgtcacgaaaagctactttctggtattcagtctaaagtttcagccgtcactggcctgtatgctgaatttatgcacttttccgatttgtctcaagcattatcggaagaacagacccaagttcttgaacgtattctacgttacggacctaaagcagaagccaaagaacctaatggaaaactgttcctggttgtacctcgcccgggcacgatctcaccttggtcttcaaaagcaactgatatcgcacataactgtggcctagatgcaatcaagcgcctggagcgcggtattgcatactatgtagaagtatccggtgaattgtctgacgaagcttgtcagcaaattaccgcagaacttcatgaccgtatggtagaagctgtattgccaagtatagatgaggcagaaaagcttttctcggaagaagagcctaagccgctaaccacagttgatattctgggcggtggccgtgaagcactggtcagcgcgaatactaacttggggctggcactggcggaagacgagattgactatctggtagctagcttcgttgagcttgatagaaatccgactgacgttgaactgatgatgtttgctcaggcaaactcagagcactgtcgtcataaaatatttaacgcatcatgggatattgatggcgaagcacaggagaagtcgctgtttgccatgattcgtaatacaaatgaaatgggcggtgaaaacgttctttctgcgtataaagacaatgctgcggtgatggttggctccaaagcagggcgtttcttcccgaaaccagattctaaagagtacagctacaatcaggaagatattcagatcctgatgaaagttgagacgcataaccacccaacagctatcgcccctcattcaggtgcggctacaggctccggtggtgaaattcgtgatgaaggtgcgacgggtaaaggttcaaaaccgaaagcgggtctgacaggtttcactgtttctgatttgaatatccctggttttgagcagccttgggaatctaaatacggtaaacctgatcgtattgtgacgcccctggatattatgttggaaggcccaattggcggtgctgcgttcaataacgaatttggccgtcctgcccttacaggttacttccgtacatttgagcagaaagttaatggcgcggcaggtgaggaagttcgtggttaccacaaacccattatgatcgccggtggtctgggtaatatccgtgatgagcatgttgagaagggtgaaattccggttggcgcgaagctgatctgcctgggtggtcctgctatgcagattggtctgggtggtggtgctgcctcttccatgacgtctggttcttctacggctgaccttgattttgcatcagtacagcgtgacaaccctgagttggaacgtcgttgtcaggaagtaatcgatcaatgctggcaactgggtgacgagaaccctattgcatttatccatgatgtaggtgcgggtggtttgtccaatgctttccctgaattggtaggggatggtaatcgcggtgcaaattttgagctgcgtaatgtgaataatgatgagcctggtatgtctccgctggctatctggtgtaatgaggcgcaagaacgttacgttatggccgtagctccagcagatatggctcgttttgaagcgatctgtgaacgtgaacgttgcccttatgctgttgtcggtgaagcgattgaagagatgcacctgacattgggtgatacacacttcgagaacaagccagttgatctaccgatgagcgtgttgtttggtaagccaccaaaaatgcatcgttctgtcgagcgcaagagctaccaggttgcagaattcgataccgcatccatcgatctgaaagatgcagctgagcgcgtaatgaaattgcctgcggttgcgtctaaatcattcttgattacgatcggtgaccgttcgattaccggtcaagtggcacgtgatcagatggttggtccgtggcaggttccagtagctaactgtgcggtaacgactgctgcttacgatacctatgctggtgaagcgatggctatgggtgagcgtacaccgctggctttggttgattcacctgcgtctggacgtatggcgattggtgagacgatcactaatatggcatcagcacgtatctctgagatcaaagatattaaactgtctgcaaactggatgtgtgcagcaggtcatccaggcgaggatgaaaagttatacgatacagttaaggctgtgggtatggagctatgtccacagctggggatcacaatcccagtaggtaaagactcaatgtctatgcgtactgtttgggacgatgagggtgagcagaagtcagtcacagcgccaatgtctctgattatctctggctttgcgccggttacagatacgcgtaaaacgatcactcctcagttgcgtacagatcaaggtgaaacagatcttgttcttttagatctgggtaatggtaagaaccgtattggcctatctgcactagcgcaggtttacaatgaagtaggtcaggatgtaccggacgttgatcagcctgagcaactggttgccttctttgcagctattcaggaattgaatgagcaggggttaatcctggcttatcatgaccgtgcagatggtggtttgtttactactgttgctgaaatggcatttgcaggtaagtctggtgttgatatcaacctggatatgcttgcgggtgaagagtctgaactggctgcggcgctgtttgctgaagaactgggcgccgttgttcaggttaagcgtgatgatctggaaactgtcctgacagagctgaatgcggctggtctgggtgatgtggctcaggttattggttcgctgaatcctgatgatgaaatccgtttccacttcgatgaagaagaagtgtattcagaatcacgcgtccagctacagcgctggtgggctgagacctcttaccagattcaatcactgcgtgataattcggagtgtgctcagcaggaatttgatcgcattctggacaaagaagacccaggtctgcatgctgagttgaccttcgatcagaatgacgatgtggcggcgccgtttattcaaactggcgtacgaccacaaatggccattgttcgtgagcagggtgttaacggtcagatcgagatgggtgcagcatttgatcgcgcaggcttcgcggcggttgatgttcacatgagtgatatcctgtctggtcgtgttgagctggatcaattcaaaggcctggtcgcttgcggtggtttctcttacggtgacgtactgggtgcgggtgagggttgggctaagtcaatcctgtttaatgctcgagcgcgtgatcagttccaggctttcttcaatcgtgaagatacctttgcattaggtatctgtaacggctgtcagatgttgtctaacctgcatgagctgattcctggttcagaaatgtggccgcactttgtgcgcaatgtatctgagcaatttgaagcgcgtgtcgcgatggttgaagttcaggaatctaaatctgtgttcctgcagggtatggctggctctcgtatgccaatcgcagtggcgcatggagagggtcgtgcggagtttaaggacgaagctcacctgtctggcctgaagtcatcgggtactgttgcacttcgttatgtggataactatggccagcctactgaaatgtatccggctaacccgaatggttcaccagcgggtattactggggtaacaaccacagatggtcgagttactattatgatgccgcatcctgagcgtgtgttccgagctgttactaacagttgggcgccggatgaatgggcagaagatggtgcgtggatgcgtatgttccgtaatgcacgtgcttgggttaagtaa

SEQ ID NO: 52917 - protein, 1300 aa, Oceanospirillum sp. MED92
MLALRGAPALSAFRHEKLLSGIQSKVSAVTGLYAEFMHFSDLSQALSEEQTQVLERILRYGPKAEAKEPNGKLFLVVPRPGTISPWSSKATDIAHNCGLDAIKRLERGIAYYVEVSGELSDEACQQITAELHDRMVEAVLPSIDEAEKLFSEEEPKPLTTVDILGGGREALVSANTNLGLALAEDEIDYLVASFVELDRNPTDVELMMFAQANSEHCRHKIFNASWDIDGEAQEKSLFAMIRNTNEMGGENVLSAYKDNAAVMVGSKAGRFFPKPDSKEYSYNQEDIQILMKVETHNHPTAIAPHSGAATGSGGEIRDEGATGKGSKPKAGLTGFTVSDLNIPGFEQPWESKYGKPDRIVTPLDIMLEGPIGGAAFNNEFGRPALTGYFRTFEQKVNGAAGEEVRGYHKPIMIAGGLGNIRDEHVEKGEIPVGAKLICLGGPAMQIGLGGGAASSMTSGSSTADLDFASVQRDNPELERRCQEVIDQCWQLGDENPIAFIHDVGAGGLSNAFPELVGDGNRGANFELRNVNNDEPGMSPLAIWCNEAQERYVMAVAPADMARFEAICERERCPYAVVGEAIEEMHLTLGDTHFENKPVDLPMSVLFGKPPKMHRSVERKSYQVAEFDTASIDLKDAAERVMKLPAVASKSFLITIGDRSITGQVARDQMVGPWQVPVANCAVTTAAYDTYAGEAMAMGERTPLALVDSPASGRMAIGETITNMASARISEIKDIKLSANWMCAAGHPGEDEKLYDTVKAVGMELCPQLGITIPVGKDSMSMRTVWDDEGEQKSVTAPMSLIISGFAPVTDTRKTITPQLRTDQGETDLVLLDLGNGKNRIGLSALAQVYNEVGQDVPDVDQPEQLVAFFAAIQELNEQGLILAYHDRADGGLFTTVAEMAFAGKSGVDINLDMLAGEESELAAALFAEELGAVVQVKRDDLETVLTELNAAGLGDVAQVIGSLNPDDEIRFHFDEEEVYSESRVQLQRWWAETSYQIQSLRDNSECAQQEFDRILDKEDPGLHAELTFDQNDDVAAPFIQTGVRPQMAIVREQGVNGQIEMGAAFDRAGFAAVDVHMSDILSGRVELDQFKGLVACGGFSYGDVLGAGEGWAKSILFNARARDQFQAFFNREDTFALGICNGCQMLSNLHELIPGSEMWPHFVRNVSEQFEARVAMVEVQESKSVFLQGMAGSRMPIAVAHGEGRAEFKDEAHLSGLKSSGTVALRYVDNYGQPTEMYPANPNGSPAGITGVTTTDGRVTIMMPHPERVFRAVTNSWAPDEWAEDGAWMRMFRNARAWVK

SEQ ID NO: 52918 - DNA, 3642 bp, Flavobacteria bacterium BBFL7
  CDS (1)..(3642): transl_table=11
atgattcatttttacggaaatccgtccaagtcagtttacgtagtacaaacccaagcaccgatctctgtagaggatgatcaaaaattacaatggctttttgccgatgctccaaaactagaagccgatacgttatcgggattctttacaggaccacgtgcaactaccattactccatggtctacaaacgctgtagaaattacccaaaacatggaaattaaaggaattctaagaatagaagaattccatgcttgtgaggagaactcgcagtatgataaaatgttattgcaaaaatttgacggtcttaaccagtcacaatttgatatcaatgtaacagcagatggcgtactagaaatagacgatatcgctgcttataacatgcaagaaggattgtcactaagcgatgatgaaattgattacctgatccagctttctgaaaaactagatcgtaagcttacagacagtgaggtttttggattttcacaagtaaatagtgagcactgtcgtcataaaatcttcaacggtacttttatcattgatggagaagagatgcctacttccctattcaaattgatcaaagaaacatctaagcgctggcctaatggtatcgtgagcgcctattctgataatgttgcttttgtagaaggaccacaagcagaacagtttgctcctaaaacagccaacaaaccagacgtttatcaaaccagtttatttgattcggtaatatcattaaaagcagaaacacacaacttccctaccacagtagagccatttaatggtgctgcaaccggttctggtggagaaatacgggatcgacttgctggtggacaaggttctttaccgcttgcaggaacagcggtttatatgaccagctactcgagattaaatgacgaacgaccatgggaaaacggttttgaagcacgcaagtggttgtatcaaacacctatggacatcttaatcaaagcatcaaacggtgcgagtgattttggtaacaaatttggccaaccgttaatcacaggttctgtattgacatttgaacatcaagaaggtgatcaaaacttaggttttgataaagtcatcatgcaagctggtggaataggttatggaaagaaagaacaagccttaaagaaaactccagacgcaggcgatgacatcatcgtaatgggtggagataattatagaataggaatgggtggtgctgccgtaagtagtgcagacactggcgcactagactcaggtctagaattaaacgccgtgcaacgctctaatccagaaatgcaaaaacgtgctgcaaacgcgatacgtggactggtagaaagtgataacaatcctatcaaatcgattcacgatcatggtgctggtggacacttaaactgtctgtcagaactggtagaagaaactggtggtgtgatcgatgtagatgccttaccagtaggtgatcctacactatctcgcaaagagttgatcggtaacgagtcacaggaacgtatgggattagtaatggattcaaacgattcacctgtactagaagaaattgctgctcgcgagcgtgcaccattatataaagtaggtaaagttacaggagataataaattcacctttagtgaaaaagatggtcgcagtcctatggatctagcgctggaagacatgttcggttctagtcctaaaaccattatggatgataaaaccattgatcgcacctatgcaccagtaacttatgaaggtaaagactttaacctttacctctatcaggttttacaactagaagcggttgcctgtaaagattggttgactaataaagtagatcgttgtgtaactggtcgtgtggccaaacaacaaacttgtggtgaactacaacttccattaaataacgtcggtgtgatggcgatggattataatggtaaaaatggagtggcgaccacgataggtcacgcaccagttgccgcattaatcgatccagctgcaggttctcgcaatgccattgcagagtcgcttaccaatctagtatttgcgccattagaaaaaggcctaaaaggcgtgagtctaagtgccaactggatgtggccatgtaacaatcctggtgaagatgcccgtttatacagcgctgtaaaagccgttagtgattttgccattgaattaggaatcaacattcctactggtaaggacagtctttctatgaagcaaaaatatccagatatggatgtgcttgctccaggaacggtgatcatcagtaccgttgggtcatgtgatgatatttctaaagtcgtagagcctgtattacaacgtgatgaaaacgcacctatttactacatcaacatgagtggcgatgaccataaattaggtggatctagttttgcacaaacgcgcaatacgataggtgatgaatgccctacgattgtgaatagtgacgcttttgcgaaagcgtttaccgcaatacaaaatttaataaaacaaggcaaagtgctcgcaggacacgatgttgctagtggtggattgatcaccacattactagagatgtgtttcccatcactaggtgtaggaatggatctagacctgagcggtgtaggccatgatatggtaaaagtcctttttgcagaaaacgcagggatcgtattacaagtaaccgatgaaagtgtggaaagcgagctattaaaagccgaagtacctttctataaaataggtcacgcgattgatgaggctgtactagatattaacgatcatatcattgatgtagatgacatgcgtgatgtgtggtatgaaacctcacgactattagatcaacaacaatcgtttaatggcatggccgatgagcgtgctgtgaactatgtagagcaaccactagaattcaactttccagcgcattttacaggaaaactgcctgaattgccgcaaaaacgcatcaaagcagcggtaatacgtgaaaaaggaagtaattctgaaagagaaatggcacgcgccatgtacctcgcaggatttgaagtaatcgatgtgcacatgaccgacttaattgctggacgtgagacactagaagatgtacagtttatagccgcagtaggtggattctccaacagtgatgtattgggaagtgccaaaggttgggctggtgccttcttatataacgagaaagcaaataccgcattgaaaaacttttttgccagaccagacaccatgagtataggtgtttgtaacggttgccaactctttgtagagctaggattaatcaatccagatcatgacgaaaagcctaagatgttgcacaacgcgagtggtaagtttgaatgtaattttaccagtgtagaaattgccaaaaacaattctattatgttacaatctctagaaggcagcaaactaggaatatgggcagcacacggcgaagggaaatttcaattacctaaagaccgtagtgcttatcaaatcccagcaacttatggatatgacagctatccagcaaaccctaatggatctgactataacgcagcgatgttaaacagtgaagatgggcgtcacctagtaatgatgccacacctagaacgatctacattctcgtggaactgggcacactaccctaccgaccgcaagaatgacgaagtaacgccatggctagaagcatttgtaaatgctcgtatttggttagaaagcaagtaa

SEQ ID NO: 52919 - protein, 1213 aa, Flavobacteria bacterium BBFL7
MIHFYGNPSKSVYVVQTQAPISVEDDQKLQWLFADAPKLEADTLSGFFTGPRATTITPWSTNAVEITQNMEIKGILRIEEFHACEENSQYDKMLLQKFDGLNQSQFDINVTADGVLEIDDIAAYNMQEGLSLSDDEIDYLIQLSEKLDRKLTDSEVFGFSQVNSEHCRHKIFNGTFIIDGEEMPTSLFKLIKETSKRWPNGIVSAYSDNVAFVEGPQAEQFAPKTANKPDVYQTSLFDSVISLKAETHNFPTTVEPFNGAATGSGGEIRDRLAGGQGSLPLAGTAVYMTSYSRLNDERPWENGFEARKWLYQTPMDILIKASNGASDFGNKFGQPLITGSVLTFEHQEGDQNLGFDKVIMQAGGIGYGKKEQALKKTPDAGDDIIVMGGDNYRIGMGGAAVSSADTGALDSGLELNAVQRSNPEMQKRAANAIRGLVESDNNPIKSIHDHGAGGHLNCLSELVEETGGVIDVDALPVGDPTLSRKELIGNESQERMGLVMDSNDSPVLEEIAARERAPLYKVGKVTGDNKFTFSEKDGRSPMDLALEDMFGSSPKTIMDDKTIDRTYAPVTYEGKDFNLYLYQVLQLEAVACKDWLTNKVDRCVTGRVAKQQTCGELQLPLNNVGVMAMDYNGKNGVATTIGHAPVAALIDPAAGSRNAIAESLTNLVFAPLEKGLKGVSLSANWMWPCNNPGEDARLYSAVKAVSDFAIELGINIPTGKDSLSMKQKYPDMDVLAPGTVIISTVGSCDDISKVVEPVLQRDENAPIYYINMSGDDHKLGGSSFAQTRNTIGDECPTIVNSDAFAKAFTAIQNLIKQGKVLAGHDVASGGLITTLLEMCFPSLGVGMDLDLSGVGHDMVKVLFAENAGIVLQVTDESVESELLKAEVPFYKIGHAIDEAVLDINDHIIDVDDMRDVWYETSRLLDQQQSFNGMADERAVNYVEQPLEFNFPAHFTGKLPELPQKRIKAAVIREKGSNSEREMARAMYLAGFEVIDVHMTDLIAGRETLEDVQFIAAVGGFSNSDVLGSAKGWAGAFLYNEKANTALKNFFARPDTMSIGVCNGCQLFVELGLINPDHDEKPKMLHNASGKFECNFTSVEIAKNNSIMLQSLEGSKLGIWAAHGEGKFQLPKDRSAYQIPATYGYDSYPANPNGSDYNAAMLNSEDGRHLVMMPHLERSTFSWNWAHYPTDRKNDEVTPWLEAFVNARIWLESK

SEQ ID NO: 52920 - DNA, 3009 bp, delta proteobacterium MLMS-1
  CDS (1)..(3009): transl_table=11
atgctggcccgcatagaggtaggtcttaaaccccggcttaacgattcctttggcgaacgcacccggcagcggatcgtcaccgacttcaactatccggtggaccggctgcgtaccctcaaggcgttcaccgtcgaagccgatatcaccccggaacaattgcgggccgccgccgccggccctttttgcgatccggtgacccaggatttcgcgctctccgaccaggccccgctggccctggtccaggaactggcctttgactggtgcattgaggtcggcttcaagcccggggtcaccgacaacgaggggcgcaccgccaccgccgccctggaattgctgctggggcgccaactggccgccggtcaggcggtttacaccgccacccagtatctgctgcagggtaccctggaacggcgggaggtggagaccatcgccagccaactgctggccaacgagttgatcgagcggaccaccatcctctcttacgacgagttcatcgccggcggcggagtggcaccccacgccccccgggtaaccggcggcgagcaatggcgggtggccaaaatcgatctcaaggttgccgatgacgagcttatgcggatcagccgcgaaggggtgctggccctgaccttagcggagatgaagctgatccgcgagcatttggccgacccggcggtgatcgccgcccggcaggagcaggggcttgcccaagaaatcaccgatgtggaactggaagtgctggcccagagctggtcggagcactgcaagcacaagatcttcaacggcgagatccactaccaggataccaccagcggcgagcacaccgttttccacagtctttttgacaccttcatccgccaacccaccgccgagatccgtcgccggttgggggacaacgactggtgcctgtcggtcttcaaggacaacgccggggtgatccgcttcaaccaggattggaacctggccttcaaagtggagacccacaacagcccctcggccctggacccctacggcggggcgctcaccggcatcgtcggggtcaaccgcgacccctttggcaccggcatgggggccaagctgatcgccaacaccgatgtcttctgctttgcctcgcccttttatgatcagccgctgccggcccggttgctgcaccccaaacggatcttcgagggggtgcggctgggggtcgagcatggcggcaacaaaagcggcattcccaccgtcaacggctccatcgtcttcgactcccgttttgccggcaagcccctggtcttttgcggtaccgtcggcatcatgccggccctggtgggcggccgcccctcccaggacaaaaaggccaatcccggcgatctcatcgtcatgaccggcggccggataggcaaggacggcatccacggcgccaccttctcctcggaggagctgcatgagggttcgccggccaccgcagtgcagatcggcgatcccttcacccagaagaagatgttcgactgcctgctcaaggcccgtgatcgggggctttacacctgcatcaccgacaacggggccggggggctctcctcgtcggtgggggaaatggccgaggacagcggcggtttccagttgcacctggagcgggcgccactcaagtaccccggcctgcagccctgggagatcatgatctccgaggcccaggagcggatgacgctggcggtaccacctgccaagatcgatgaattcttggccctttgcgccaagatggaggtcgaggccacggtgctgggggaattcaccgactccggcaacttccatgtcctctaccagggccggaccgtggcctgcctggggatggattttatccacaaagggctgccgccgctgcaaatgaccgcccgctgggagccgccaacccacgccgaaccgcaatggcccgagcagccggatctcggggctgaactgcacgccctgctgggccggctcaatatctgcagcaaggagtacgtggtccgccagtacgaccacgaggtccagggcggcagcgtggtcaagccgctgaccggggtcgacaacgacggcccttccgacgcggcggtcctcaggcccctgctcgactcctttgaaggactggtgctggcccacggtatctgccccaaatactccgagatcgacacctaccacatggcggccaacgccatcgacgaggcgatccgcaacgcggtggcggtgggggccgacctggagcatatggccggcctggacaacttctgctggtgcgacccggtactctcggagaaaaccccggatggcccctacaagctggcccaactggtccgggccaaccaggccctggccgactgcgccctggccttcggggtgccctgcatctccggcaaggattcgatgaagaacgactacatgatcgacgatgtcaaaatctcgatcccccccaccctgctcttttccgtggtggccaaaatcgccgatgtcaggcgggcggtcaccatggacgccaaaaagagcggcgatctggtctacctgctggggattacccgccccgagctgggcggctcggaatacgccgcccgccaccagggcgagggcggcatcggcaaccaggtgccgcaggtggaaccggccacggccctgttccgctaccgggccctgcaacaggcgatcgccgccggcctggtggcctcggcccacgatctctccgacggcggcctggcggtggcggcggcggaaagcgcttttgccggtggcctgggactggatctcgatctgggactggtggcctgtgaagggatcgagcgcgacgattttctgctcttcagcgagagccccagccggctgctggtcaccgtggcgccggccgacgccgacgagtttgaacaactgatggccggggccgcggccagccgcctcggggtggtaacctcggagccggttctgcggctttcgggcttaaacggcgagactgtactggtggagcgaatcgacgacctgaaaaagagctggcaacagagtctggatttttaa

SEQ ID NO: 52921 - protein, 1002 aa, delta proteobacterium MLMS-1
MLARIEVGLKPRLNDSFGERTRQRIVTDFNYPVDRLRTLKAFTVEADITPEQLRAAAAGPFCDPVTQDFALSDQAPLALVQELAFDWCIEVGFKPGVTDNEGRTATAALELLLGRQLAAGQAVYTATQYLLQGTLERREVETIASQLLANELIERTTILSYDEFIAGGGVAPHAPRVTGGEQWRVAKIDLKVADDELMRISREGVLALTLAEMKLIREHLADPAVIAARQEQGLAQEITDVELEVLAQSWSEHCKHKIFNGEIHYQDTTSGEHTVFHSLFDTFIRQPTAEIRRRLGDNDWCLSVFKDNAGVIRFNQDWNLAFKVETHNSPSALDPYGGALTGIVGVNRDPFGTGMGAKLIANTDVFCFASPFYDQPLPARLLHPKRIFEGVRLGVEHGGNKSGIPTVNGSIVFDSRFAGKPLVFCGTVGIMPALVGGRPSQDKKANPGDLIVMTGGRIGKDGIHGATFSSEELHEGSPATAVQIGDPFTQKKMFDCLLKARDRGLYTCITDNGAGGLSSSVGEMAEDSGGFQLHLERAPLKYPGLQPWEIMISEAQERMTLAVPPAKIDEFLALCAKMEVEATVLGEFTDSGNFHVLYQGRTVACLGMDFIHKGLPPLQMTARWEPPTHAEPQWPEQPDLGAELHALLGRLNICSKEYVVRQYDHEVQGGSVVKPLTGVDNDGPSDAAVLRPLLDSFEGLVLAHGICPKYSEIDTYHMAANAIDEAIRNAVAVGADLEHMAGLDNFCWCDPVLSEKTPDGPYKLAQLVRANQALADCALAFGVPCISGKDSMKNDYMIDDVKISIPPTLLFSVVAKIADVRRAVTMDAKKSGDLVYLLGITRPELGGSEYAARHQGEGGIGNQVPQVEPATALFRYRALQQAIAAGLVASAHDLSDGGLAVAAAESAFAGGLGLDLDLGLVACEGIERDDFLLFSESPSRLLVTVAPADADEFEQLMAGAAASRLGVVTSEPVLRLSGLNGETVLVERIDDLKKSWQQSLDF

SEQ ID NO: 52922 - DNA, 3888 bp, Oceanobacter sp. RED65
  CDS (1)..(3888): transl_table=11
atgctcaaactgtccggtgctcctgcactctctgcatttcgtcgagaaaaactccttagcaaattgcaattagcgaatcctgaagtgcgttctgtttacgctgaatttgttcattttgcagatgttactgatgccctaacagaccaagagcaaactgtgctcgagcgcttgctgaaatatggtcctagagctgataaacaaaatccaagtggtgaaatggttttggtggtgccgcgcatcggcacgattagcccatggtcatcgaaagcaacggatatcgcacataactgtggtttgaacaaagtgaagcgagtcgagcgtggcatcgcatactggattgagggtgtagattccgctaccgaactccaatcgtatttgtttgatcgaatggtggagacggttcttaaagactttaatgaagcggaaatattatttaagcaggctgagccagcaccaatgtcgcaggttgatattcagacaggcggtcgtgatgcactggttaaagcgaatgccgagttgggtttggcgttggctgacgatgaaattgattaccttgtcgaaaattacaacaagcttggtcgtaatcccaatgacatcgagttaatgatgtttgcgcaagcgaactcagaacactgtcgtcacaaaattttcaacgccagttgggacattgatggtgaagcacaagataagtcgcttttccaaatgatcaagaacacatacgagtgttacagcgaaaatattctatctgcatacaaagataatgcgtccgttattaaaggccatacggcggggcgttttttcccgacacctcaagggaaagattaccagtatcatcaagagccaatgcatatcttgatgaaggttgaaacccataaccaccccacagccattgcgccattctcaggtgcagcgacaggttctggtggcgagattcgtgatgagggtgcaacaggtattggttcaaaacccaaagcgggtttagctggttttaccgtttccgatttacgcattcctggttacgaacaaccttgggaaagcgaatacggacgtccagcgcgcatcgcgtcggcactggatattatgatcgaaggccctattggtggtgctgcatttaataatgagtttggtcgtccaaatttgtgcggttatttccgtacgtacgaagaaaacgtggttagtgcaaacgaagaagaagtgcgtggctaccacaagcccatcatgatcgcaggtggttacggcaatattcgtgaagagcacgtgcaaaagggtgaaattccagtgggcggcaagctcatcgtattgggtggcccagccatgcaaattggtttaggtggtggcgcagcgtcatctgtggatactggcgaatcaaacgaagatttagattttgcttcggtgcagcgcggtaacccagaaatggaacgtcgttgtcaggaagtgattgatcgctgctggcaaatgggtgatgacaatcctattgttttcattcatgacgttggtgccggtggtttgtctaatgcgttccctgaattagtcagtgacgcgggtcgtggtggtcgttttgaattgcgtgaagtaccaaacgacgaacctggcatgtcgccattggctatttggtgtaatgaatctcaagagcgctatgtattatcggtagcgcctgaaaacttgcagcagtttgctgagatttgtgagcgtgaacgatgcccgtttgcggtgattggtgaagccactgaagaagaacacttaaccgttaccgatcgccactttgataattcaccagtggatttgccgttgcaggtgttactgggtaagccaccacgcatgcatcgtgatgtaaaaaccaaaaatctaacgttaccggcagttgagtttaaaggtattgaacttgagcaagcagctgaacgtgttttgcaactaccagcggtagcgagcaaaagtttcttgattaccattggcgatcgctccatcaccggtaccgtcgcacgtgatcaatttgtgggtccttggcaggttccggtagccgatgttgcggttacgacttcctcttatgactcctatacaggcgaagccatggccatgggtgagcgtacaccagcggctattattaatggtcctgcatcaggtcgtatggcggtaggtgaagtggttaccaatattgctgcggccaatatcgaacagcttaaagatgtaaaactgtctgcaaactggatgtgtgcagcgggtcacgatggtgaagatgaaaagctataccaaaccgtaaaagcggtaggtatggagttgtgtcctgagcttggattaaccattcctgtgggcaaagattccatgtccatgaaaaccaaatggaatgaagaatccggtgaagaaaaaactgttactgcgccattgtctttgatagtgacgggttttgcgccagtaaaagatgcacgtaaaacgttgactccgcagctacgtgcggatgatgaagagactgatttgattttgattgacctaggtcgtggtcagaatcgtttgggcgcctcggcgtttgcacaagtatttgatcaggtcggtaatgaagtgccggatgtggatcaggctgaagacttgaaagcattcttcgctgtcattcaggggctaaatcaagacgacaaattactcgcttatcacgatcgcagtgatggtggtttgtgggcgaccttaacggaaatgagtttcgctggccacgtgggtatcgatattaaattagatggcttagtggattcttctgacgatgtgattcctgcgttgtttgctgaagagttgggcggcgtgattcaagtacgtaaggatgatactgaatatgttttggctcaattaagcgcggccggtttgggtgattgcacgcaagttgtggctcaactgaacgatcaagatcaaatcaatgttcaactacaagatgcgacgatttattctcaatctcgtatccagttgcagcgtttgtggtcgcgtacttctcacgagattcaggcgattcgtgacaattcagaatgcgcgaagcaagagtttgaaaacttgcttgatgcggatgatccgggtctgcatgctgaactaacgttcgatgtgaatgacgatattacgtcagcattgtcggcgacagagcgaccaaaagttgccatcgttcgtgagcaaggtgtgaatggtcaaattgaaatggccgcagcgtttgatcgtgcgggcttccaagcggtagatgtgcatatgagtgacatcttaagtggtcgaaccacgttagaatctttccgtggtttggttgcctgcggtggtttctcttatggtgacgtattgggtgccggcgaaggctgggccaagtctattttattcaatgcgcaagcacgtgatcaatttaaagcattctttgagcgtgaagatacatttgccttgggtgtatgtaatggttgtcagatgctttcaaacctacacgaattgatcccaggtgctgaacattggcctcacttcgtgcgtaaccaatcggagcaatttgaagctcgtgttgccatggtagaagttcaagaaacggattccattatgctgcaaggcatgcaaggttctcgtatgccaattgcggttgctcatggtgaaggtcatgctgagtttgccaatgaggttgatcttgaagcagtaaataagcaaggtcaggtcgcactacgctatgttgataactatggcatggtgactgagcgctatccatttaaccctaatggttctactcaaggcattaccggtttaacggctgctaatggtcgtgtgaccattatgatgccgcaccctgagcgtgtattccgagctattcaaaacagctatcaacctgatgaatggtcagaagatggtgcttggatgcgtatgttccgcaatgcacgtaaatggtgtagctaa

SEQ ID NO: 52923 - protein, 1295 aa, Oceanobacter sp. RED65
MLKLSGAPALSAFRREKLLSKLQLANPEVRSVYAEFVHFADVTDALTDQEQTVLERLLKYGPRADKQNPSGEMVLVVPRIGTISPWSSKATDIAHNCGLNKVKRVERGIAYWIEGVDSATELQSYLFDRMVETVLKDFNEAEILFKQAEPAPMSQVDIQTGGRDALVKANAELGLALADDEIDYLVENYNKLGRNPNDIELMMFAQANSEHCRHKIFNASWDIDGEAQDKSLFQMIKNTYECYSENILSAYKDNASVIKGHTAGRFFPTPQGKDYQYHQEPMHILMKVETHNHPTAIAPFSGAATGSGGEIRDEGATGIGSKPKAGLAGFTVSDLRIPGYEQPWESEYGRPARIASALDIMIEGPIGGAAFNNEFGRPNLCGYFRTYEENVVSANEEEVRGYHKPIMIAGGYGNIREEHVQKGEIPVGGKLIVLGGPAMQIGLGGGAASSVDTGESNEDLDFASVQRGNPEMERRCQEVIDRCWQMGDDNPIVFIHDVGAGGLSNAFPELVSDAGRGGRFELREVPNDEPGMSPLAIWCNESQERYVLSVAPENLQQFAEICERERCPFAVIGEATEEEHLTVTDRHFDNSPVDLPLQVLLGKPPRMHRDVKTKNLTLPAVEFKGIELEQAAERVLQLPAVASKSFLITIGDRSITGTVARDQFVGPWQVPVADVAVTTSSYDSYTGEAMAMGERTPAAIINGPASGRMAVGEVVTNIAAANIEQLKDVKLSANWMCAAGHDGEDEKLYQTVKAVGMELCPELGLTIPVGKDSMSMKTKWNEESGEEKTVTAPLSLIVTGFAPVKDARKTLTPQLRADDEETDLILIDLGRGQNRLGASAFAQVFDQVGNEVPDVDQAEDLKAFFAVIQGLNQDDKLLAYHDRSDGGLWATLTEMSFAGHVGIDIKLDGLVDSSDDVIPALFAEELGGVIQVRKDDTEYVLAQLSAAGLGDCTQVVAQLNDQDQINVQLQDATIYSQSRIQLQRLWSRTSHEIQAIRDNSECAKQEFENLLDADDPGLHAELTFDVNDDITSALSATERPKVAIVREQGVNGQIEMAAAFDRAGFQAVDVHMSDILSGRTTLESFRGLVACGGFSYGDVLGAGEGWAKSILFNAQARDQFKAFFEREDTFALGVCNGCQMLSNLHELIPGAEHWPHFVRNQSEQFEARVAMVEVQETDSIMLQGMQGSRMPIAVAHGEGHAEFANEVDLEAVNKQGQVALRYVDNYGMVTERYPFNPNGSTQGITGLTAANGRVTIMMPHPERVFRAIQNSYQPDEWSEDGAWMRMFRNARKWCS

SEQ ID NO: 52924 - DNA, 3855 bp, Desulfitobacterium hafniense DCB-2
  CDS (1)..(3855): transl_table=11
atggaactgcaaagcgtaaagcgtatttatgtggagaagaagcctggttttaatatcgaagcccaggggctgctgcaggatattcaggaaaacctgggcatcaaaaacttggaagatttaaggatcatcaaccgctatgatgtggcaggtattacatctgaagaatacgctcaggccagaaggatcattttttccgaaccgaccgtggattgggtttatgatgaagaacttaagcttgctccccaagaccgtgtatttgccatggagtaccttcccggtcaatatgatcaacgggcggattcagcaaggcaatgcattcagattcttacccaaaaggagcgtccggagattgctgctgcgaaagtgatggttcttaaggggcagatcacagaagctgaactggagcgcatcaagcagtattgcattaatccggtggaatcccgggaggccggtttggagaaacctgaaaacctggcctttgttcctgaactgcctgaggatgtggaaaccattgagggtttcacagggatggcgcaaacagagctggaacagttctatcaaggagcaggcctggccatgagcctggaggatttggctttctgtcaggggtatttccgggatgaagagaaacgggatcccaccattacggagattcgggttatcgatacctattggtcggatcattgccgccatactaccttttttacccaattgcaaaatatcgtcatcgcggaaggggagtttgcggagcctattcgcaaagcctatgaggaatatcaggagtcccgggggttggtttatggggaaaaggctgagagccgggatgtctgtctgatggatttggctgtgatcggcatgaaggagctgaaaaagaagggacttcttcaggatcttgacgagtctgatgaaattaatgcttgcagcattgttgtcaatgtggatgtagatggccggagtgaagaatggcttgtcatgtttaaaaatgaaacccataaccatcctacggaaatcgagccttttggaggcgcggccacctgtctgggcggggccatccgggatcctttatccgggcggacttatgtctatcaggccatgcgggttaccggcagcggcgatccccgggccaaagtagaggaaaccttgcctggaaagctgccgcaacgaaagattactacagttgctgcagccggctatagttcttacggcaaccaaatcggcttagccaccggacaagttgccgaagtttatgacgaaggttttatcgccaagcggatggagatcggcgcggttatcgccgcggcacccagggaaaatgtggtgcgggaagcgcctaaacccggggatgtggtggttttagtgggaggacgtaccggccgggatggttgcggaggggctacgggctcgtccaaagagcatactacggaatctttggccacttgtggagcagaagtgcaaaaggggaatccccccacggagagaaaaatacaacgcctcttccgcaaccctaaagtcagcaggatgattaagaaatgcaatgactttggggcaggtggggtgtcggtagctattggtgaattaaccgatggtttagagatcgatctggacgtagttcccaagaaatatgagggcctggatggtacggagctggctatctctgaatcacaggagcggatggcggtggtcatcgccgcggaaaacctggaagctttcgtcggctatgcggatgaggaaaacctggaggccactttagtggctaaggtcagtgagcatccccggctgaatatgacctggcggggccaaaccattgtggatatcagccgggagtttctgaacacgaacggcgtgaagcaaaagacggatgtatctgtgctgcttccggaaagcagcgagaattatttccgacagcttccccaagggggcagaagcggagagaccgcttcaggtgctgccgccgacagctcatcaggggcagcggcaggtgatatgagtttagcaggaatggccttagaggatgcctggttagccaatctgcaggatctgaatgtctgcagtcaaaaaggcctggtggaacgcttcgatagtaccattggcgcgaatacagtgctgatgccctttggcggaaaatatcaagccaccccggccgaaggaatggtggccaagattcctgtggagtccggagatactcgcacggcgacggcgatgacctacggatataatccccaatgtgcccaatggagtcctttccacggtgccctctatgccgtggtggaggcggttacgaaaatggtggccctgggagccgattatcgaagcattcacttaaccctgcaggagtattttgaaaagctgggcaaggatcctcagaaatggggcaaacctttctctgctcttttaggagccttctatgcccaaaagaagctgggaattcccgctattggcggtaaggacagcatgtccggaaccttcatggatctgcacgtgcctcccactttagtggctttcgcagtaggggtattaaatacagatagagttatttctcaggagtttaaacaggcaggcagccaggtggtcctggttccggcaaagcgggatagggatgaagtgatagattttgaacatctcgccgggaattatgataaagttcatgaactgattcatggaggtaaagtcctgtcttcccacactgtaaaaatgggggggctggctgctgctcttacgaagatggcctttggcaacaggatcggcatgaagttcagctcacctatggccggggcggatttgttccgagcggattatggctccattattttggaaattcccgcagcagttgagcttagggatgcccttggcgaagtcaggtacatggttctgggcagcactcaggaaaagcctgccatcgaactgaatgaagcggaaatcttcctggataaagccttggcaatttgggaaaaacccttggagagaatcttccccaccaaaactgcaaccgtagatcagccgcaaaagatttcttttagtgaacgaaattcacaacggccagccattaaactggccaagccccgggtgtttatccctgtttttccggggacgaattgtgagtatgattcagaacgggctttcaccaaagccggggctgtggtggagaccttagtgattcgcaatctgacccctgaccatgtggaagagtctattgccgggattgtcaaagggatagaaagagcacaaatggttatgctccccggcggtttcagtgccggggatgagccggacggttccggtaaatttatcgccacgatgttccgcaatccccgcatcaaagaagcggtcatgaaactgcttaagcaaagagatggcttaatgctgggaatctgcaacgggttccaggctttgatcaaattaggtttagtgccctatggggaaatcatggatctggatgaagaggcgccaaccttaacctataataaaatcggacgccatgtttcctgtatggtgcagaccaaagtggtctccaccttatctccctggttcagtgggatggagttgggagatattcataccatccctgtatcccatggggaaggccggtttgtggccagcccggatgtggtcaggaagctgatggagaggggacaagtggccactcaatatgtggatcaccaaggatgtcccagcaacgaagttctttacaatcccaacggctcctatgaagccattgaggggatcaccagtccggatggccgtgtcctgggcaagatggggcactccgagcgtgtgggtgaaggtgtggccatcaatatcagcgggaataaatatcagccgatctttgcaggcggcgtgaattattttagaggataa

SEQ ID NO: 52925 - protein, 1284 aa, Desulfitobacterium hafniense DCB-2
MELQSVKRIYVEKKPGFNIEAQGLLQDIQENLGIKNLEDLRIINRYDVAGITSEEYAQARRIIFSEPTVDWVYDEELKLAPQDRVFAMEYLPGQYDQRADSARQCIQILTQKERPEIAAAKVMVLKGQITEAELERIKQYCINPVESREAGLEKPENLAFVPELPEDVETIEGFTGMAQTELEQFYQGAGLAMSLEDLAFCQGYFRDEEKRDPTITEIRVIDTYWSDHCRHTTFFTQLQNIVIAEGEFAEPIRKAYEEYQESRGLVYGEKAESRDVCLMDLAVIGMKELKKKGLLQDLDESDEINACSIVVNVDVDGRSEEWLVMFKNETHNHPTEIEPFGGAATCLGGAIRDPLSGRTYVYQAMRVTGSGDPRAKVEETLPGKLPQRKITTVAAAGYSSYGNQIGLATGQVAEVYDEGFIAKRMEIGAVIAAAPRENVVREAPKPGDVVVLVGGRTGRDGCGGATGSSKEHTTESLATCGAEVQKGNPPTERKIQRLFRNPKVSRMIKKCNDFGAGGVSVAIGELTDGLEIDLDVVPKKYEGLDGTELAISESQERMAVVIAAENLEAFVGYADEENLEATLVAKVSEHPRLNMTWRGQTIVDISREFLNTNGVKQKTDVSVLLPESSENYFRQLPQGGRSGETASGAAADSSSGAAAGDMSLAGMALEDAWLANLQDLNVCSQKGLVERFDSTIGANTVLMPFGGKYQATPAEGMVAKIPVESGDTRTATAMTYGYNPQCAQWSPFHGALYAVVEAVTKMVALGADYRSIHLTLQEYFEKLGKDPQKWGKPFSALLGAFYAQKKLGIPAIGGKDSMSGTFMDLHVPPTLVAFAVGVLNTDRVISQEFKQAGSQVVLVPAKRDRDEVIDFEHLAGNYDKVHELIHGGKVLSSHTVKMGGLAAALTKMAFGNRIGMKFSSPMAGADLFRADYGSIILEIPAAVELRDALGEVRYMVLGSTQEKPAIELNEAEIFLDKALAIWEKPLERIFPTKTATVDQPQKISFSERNSQRPAIKLAKPRVFIPVFPGTNCEYDSERAFTKAGAVVETLVIRNLTPDHVEESIAGIVKGIERAQMVMLPGGFSAGDEPDGSGKFIATMFRNPRIKEAVMKLLKQRDGLMLGICNGFQALIKLGLVPYGEIMDLDEEAPTLTYNKIGRHVSCMVQTKVVSTLSPWFSGMELGDIHTIPVSHGEGRFVASPDVVRKLMERGQVATQYVDHQGCPSNEVLYNPNGSYEAIEGITSPDGRVLGKMGHSERVGEGVAINISGNKYQPIFAGGVNYFRG

SEQ ID NO: 52926 - DNA, 2325 bp, Synechococcus sp. RS9916
  CDS (1)..(2325): transl_table=11
gtggcccagtcctctgattcggcgaagccgtttgatgtggctgctgctctccgccaggagggactcacccaagacgattacaaggaaattcagcgccgtctgggacgggatcccaaccgcgctgaactgggcatgttcggtgtgatgtggtcggagcactgctgctaccgcaactcacgccctctgttgagtggttttcccacggaaggaccgcggattctggtggggcctggtgagaacgccggcgtggtggatctgggggatggtcaccgtctggctttcaagattgagagccacaaccatccctcggcagtggagccctttcagggagcggccacgggtgtgggcggcattcttcgcgacatcttcacgatgggcgcccgtccgatcgcgttgctgaatgccttgcgttttgggcccctggaggaacccgccacccgcgccttggtggaaggggttgtggcggggatttcccactacggcaactgcgtgggggtgcccaccattgggggtgaggtggccttcgatgcctcctacagcggcaaccccttggtcaatgccatggccctgggcctgatggagaccgacgacatcgtcaagtcgggcgcttcaggggtgggcaatcctgtcgtttatgtgggcagcaccaccggccgtgatggcatgggtggtgccagctttgccagtgctgaactcagtgcggcctcgttggatgatcggcctgccgtgcaggtgggtgatcccttcctggaaaaggggttgatcgaggcctgtctggaggcttttcagagtggtgatgtggtggctgctcaagacatgggtgctgccggcctgacctgcagttgctcggagatggcggccaagggagacctgggcattgagctggatctcgatcgggtccctgcccgtgaggaggggatgacggcctacgaatacctcctctccgagtctcaggagcgcatgctctttgtggtgcgtgcgggccgtgaagagcccttgatggagcgcttccgccgttggggcttgcaggcggcggtggtcgggcgtgttctggaagaaccggtggtgcgtgttcttcagcacggtgcggtggctgctgaggtgccctctcgggcgctggcggaagacacgccgatcaaccatcacaccttgatcgctgagccccccagtgacattcagcagcactggacctggcaggagggcgatctgccggtggccgcggctgaccatgactggggcaacgatctgctcaagctgctggatgaccccaccatcgccagcaagcgctgggtctatcgccagtacgaccagcaggtgctggccaacacggtggtcacctccggtgggggcgatgccgctgtagtgcgcctgcgcccccaacagggtgatgggtctctgaacaccacggtgcgaggtgtggctgccaccgtcgattgccccaaccgctcggtggcgctcgatcccgaacgtggatccatggcagcggtggccgaagccgcccgcaacctcagctgcgtcggcgcggaacccctggcggtcaccgacaacctcaatttcccctctcccgaaaccgatcgggggtattggcagttggcactggcgtgtcgtggtctgtcagaagcctgccgcagcctgaacacgccggtcaccggcggcaatgtctccctctacaacgagacccgcggtgatgacggcgttctcacccccattcatcccacgccagtggtgggcatggtgggcatggtcgccgacatcgacaaggtgtgcggcctggcctggcgtcaggccggtgatgcggttgtgttgctgggtgcatccgctgatcagaccgatgatgaccgtcttggtctcgccggcagcagctaccagggcgtgatccatggattgctcaccggtcgtcctcctcgggtggaccttgacctggaggctcgggtgcaggccaccgtgcgcgaggcgatcgacaaaggcctgctggcgtcggcgcatgattgcagtgacggcggcctggctgtggccctggcggagtcgtcgctggcgtcaggccgtggggctgagatccgtctgggcgcgtccaatgcgcgtttggagcggcgcctgttcgctgaaggtggtgctcgcatcgtggtgtcggtgaaggccgagtgtctggccgcttggcagaccttgctggctgcggcccaggtcccgtcccaggagcttggggtggttgctgatcacacccagctgcgcatcgaggcagatgggcaggcggttctcgctctgggtgttgacgctctgcaatccaccttcgagcaggctctgccccgtcgtcttgaggtcgcgtga

SEQ ID NO: 52927 - protein, 774 aa, Synechococcus sp. RS9916
MAQSSDSAKPFDVAAALRQEGLTQDDYKEIQRRLGRDPNRAELGMFGVMWSEHCCYRNSRPLLSGFPTEGPRILVGPGENAGVVDLGDGHRLAFKIESHNHPSAVEPFQGAATGVGGILRDIFTMGARPIALLNALRFGPLEEPATRALVEGVVAGISHYGNCVGVPTIGGEVAFDASYSGNPLVNAMALGLMETDDIVKSGASGVGNPVVYVGSTTGRDGMGGASFASAELSAASLDDRPAVQVGDPFLEKGLIEACLEAFQSGDVVAAQDMGAAGLTCSCSEMAAKGDLGIELDLDRVPAREEGMTAYEYLLSESQERMLFVVRAGREEPLMERFRRWGLQAAVVGRVLEEPVVRVLQHGAVAAEVPSRALAEDTPINHHTLIAEPPSDIQQHWTWQEGDLPVAAADHDWGNDLLKLLDDPTIASKRWVYRQYDQQVLANTVVTSGGGDAAVVRLRPQQGDGSLNTTVRGVAATVDCPNRSVALDPERGSMAAVAEAARNLSCVGAEPLAVTDNLNFPSPETDRGYWQLALACRGLSEACRSLNTPVTGGNVSLYNETRGDDGVLTPIHPTPVVGMVGMVADIDKVCGLAWRQAGDAVVLLGASADQTDDDRLGLAGSSYQGVIHGLLTGRPPRVDLDLEARVQATVREAIDKGLLASAHDCSDGGLAVALAESSLASGRGAEIRLGASNARLERRLFAEGGARIVVSVKAECLAAWQTLLAAAQVPSQELGVVADHTQLRIEADGQAVLALGVDALQSTFEQALPRRLEVA

SEQ ID NO: 52928 - DNA, 3894 bp, Vibrio sp. Ex25
  CDS (1)..(3894): transl_table=11
atgagaattttgcgtggctccccagctctttctgagtttcgtgttaataaactactggaactttgtcgtgaacaagatctgcctgtaactggcatttatgccgagtttatgcactttgccgatctaaagtctgaccttgatgaccaagagttagaaaaacttgaaaagttactaacttacggcccaaccatcgaagagcatgagccagaaggtcttctacttcttgttacgcctcgtccaggcactatctcgccttggtcttctaaatctaccgatatcgctgttaactgtggcttggataaagtgaaacgtctagagcgcggtacggcttattatgtcgaatcttcagttgttctatcagaagctcaagttgacgctgtcaaagcgttaattcatgaccgcatgatggaaacggtatttacagaatttgaagctgcgtcagcgctgtttacagtcgcagagcctaagcctgtggcgcatgttgatatcttagcgggcggtcgtcttgcgcttgaagaagcaaacgtttcccttggcttggcactcgcagaagatgaaattgattacttggtagagaactttactaagcttgggcgtaacccaaacgacattgaattgatgatgtttgctcaggcgaactcagagcactgtcgccacaaaatttttaacgcagattggactatcgacggggtagatcaacctaagtctttgttcaaaatgatcaaaaacacgttcgaaacgacacctgactatgtgctgtctgcatacaaagacaacgcggccgttatgacgggctctaaagcgggtcgtttcttcccagaccctaaatctcgtcaatacacttaccaccatgaagatgcgcacatcttaatgaaggtagagacgcacaaccacccaacggcaatctctccatggccgggcgcatcgactggttcaggcggtgagatccgtgacgaaggcgcgacgggtatcggtggtaagccaaaagcgggtctagttggttttacaacctctaacttacgtattcctggttttgaacagccatgggaaaccgactttggcaagccaggtcgtattgttaacgcgctagacatcatgcttgaaggtcctctaggcggcgcggcattcaacaatgaatttggtcgtccaaatctattgggttacttccgtacttacgaagaaaaagtgacctctcacgcgggtgaagaaatccgtggttaccacaaaccaatcatgattgctggtggtatgggtaacattcgtgacaaacacgtgcagaagaaagaaattccagtgggtgcgagcttaatcgtacttggtggtccggcaatgaacatcggtcttggtggtggcgcggcgtcctcaatggcgtctggtcagtcagcagaagatctggactttgcttcagtacagcgtgaaaacccagagatggagcgtcgctgtcaggaagtgatcgaccgttgttggcagctaggcgacgacaacccaatcgcatttatccacgatgtgggtgcgggcggtatctctaacgcattgcctgaacttgtcgacgacggtgagcgtggcggtaagttccaattacgcgatgtaccaaacgatgagccgggcatgagtccgctagaaatttggtgtaatgaatcacaggaacgttacgttcttgcggtagcgccagaaaacatggaagcattcgatgcaatctgtaagcgtgaacgcgcaccatatgcagtggtgggtgtggcaactgaagagcgtcatctaacgctagaagattcttacttcgacaatacgccaatcgatatgccaatggatatcctgcttggtaagccaccgaagatgcaccgcgacgcaaccacactaaaagtggaaagccctgccattgttcgtgatggtattgagcttaatgaagcggtggatcgcgtacttcgtcttcctgcggttgcagaaaaaacattcctaattactatcggtgaccgaacagtaacgggtctggttgctcgtgatcaaatggttggcccttggcaggtaccagtagcaaactgtgcagtaacagcggcaagctatgacacttaccacggcgaagcaatgtcgatgggtgagcgcacgccagtggcattactagactttggtgcatcggctcgcctagccgttggtgagtcactaacgaacattgcggcaacagacatcggtgatattaaacacattaaactgtctgcgaactggatgtcgccagcgggtcacccaggtgaagatgcaggtctttatgaagcagtcaaagcggtgggtgaagagctctgtcctgcattaggtttgacgatcccagttggtaaagactccatgtcgatgaaaaccaagtgggaggagaacggcgagagtaaagaagtcacttctccactgtcgctagttatcacggcatttggtcgtgtggaagacgtacgtaagaccgtgactccacaactacgcactgacaaaggcgatacttctctagttcttgttgacttgggtaacggcaaaaaccgcttaggtgcgacagcattggcacaagtatacaaacagcttggtgataaacctgctgacgtagataacgctgagcagctaaaaggcttctttgatgcaatgcaagcgttagtacgtgatgacaagctagtggcttaccacgataaaggcgacggcggtctgtttgttacactggctgagatggcgttcgcgggtcattgtggcgtaaaagcgaacatcgctgagctgggtgatgatgcgctagccgttctatttaacgaagagctaggtgcggttgttcaagttaagaatgatgatctggattcagttctatctactctggcggcaaacggtttagaggcatgttcacatgtgattggttctgttgaagcttcagacgactttattatcacttctggtgatgcagttgtgcttgaacgttcacgtaccgaactacgcgttatctgggctgaaacaacgcataagatgcaaggtctacgtgataacccagcgtgtgctgaccaagagcacgaagttaagaaagacaactctgacccgggtctaaacgttaagctcagcttcgacgtaaatgaagacgttgcagcaccgtacattgcgaaaggtgctaaacctaagatggcgattctacgtgagcagggtgttaactcccacgttgaaatggcagcagcgtttgaccgcgcaggctttgaagcaaccgacattcatatgagcgatatcctaacgggtcaagcggtactggatgaataccatggcctagtagcttgtggtggcttctcttatggcgacgtactaggtgcgggtgagggttgggctaagtctatcctgtttaacgcacaagcccgtgaacagttccaagccttcttcaaccgtaaagagacgttctctttaggtgtatgtaacggttgtcagatgctttctaacctgaaagaacttatcccgggtgcagacttgtggccacgttttgttcgtaacgaatctgagcgttttgaagcgcgctttagcctagttgaagttcagaaatctgattctgtattcttcgacggaatggctggttcgcgcatgccaatcgcggtttcccacggtgaagggcgtgtagaagtacgtgatgcagagcacctagcagcgattgaagcatcaggtacggttacggttcgttacgtggataacctcggtaacccaacacaacaatacccgaacaacccgaacggttcgccaaacgcgattactggcttaacaacagcagatggtcgcgtgactatcatgatgcctcacccagagcgcgtattccgcacagttgcaaactcttgggctccggaaggttggggtgaaaatggtgcttggatgcgtatgttccaaaatgcccgtaagaatatcggttaa

SEQ ID NO: 52929 - protein, 1297 aa, Vibrio sp. Ex25
MRILRGSPALSEFRVNKLLELCREQDLPVTGIYAEFMHFADLKSDLDDQELEKLEKLLTYGPTIEEHEPEGLLLLVTPRPGTISPWSSKSTDIAVNCGLDKVKRLERGTAYYVESSVVLSEAQVDAVKALIHDRMMETVFTEFEAASALFTVAEPKPVAHVDILAGGRLALEEANVSLGLALAEDEIDYLVENFTKLGRNPNDIELMMFAQANSEHCRHKIFNADWTIDGVDQPKSLFKMIKNTFETTPDYVLSAYKDNAAVMTGSKAGRFFPDPKSRQYTYHHEDAHILMKVETHNHPTAISPWPGASTGSGGEIRDEGATGIGGKPKAGLVGFTTSNLRIPGFEQPWETDFGKPGRIVNALDIMLEGPLGGAAFNNEFGRPNLLGYFRTYEEKVTSHAGEEIRGYHKPIMIAGGMGNIRDKHVQKKEIPVGASLIVLGGPAMNIGLGGGAASSMASGQSAEDLDFASVQRENPEMERRCQEVIDRCWQLGDDNPIAFIHDVGAGGISNALPELVDDGERGGKFQLRDVPNDEPGMSPLEIWCNESQERYVLAVAPENMEAFDAICKRERAPYAVVGVATEERHLTLEDSYFDNTPIDMPMDILLGKPPKMHRDATTLKVESPAIVRDGIELNEAVDRVLRLPAVAEKTFLITIGDRTVTGLVARDQMVGPWQVPVANCAVTAASYDTYHGEAMSMGERTPVALLDFGASARLAVGESLTNIAATDIGDIKHIKLSANWMSPAGHPGEDAGLYEAVKAVGEELCPALGLTIPVGKDSMSMKTKWEENGESKEVTSPLSLVITAFGRVEDVRKTVTPQLRTDKGDTSLVLVDLGNGKNRLGATALAQVYKQLGDKPADVDNAEQLKGFFDAMQALVRDDKLVAYHDKGDGGLFVTLAEMAFAGHCGVKANIAELGDDALAVLFNEELGAVVQVKNDDLDSVLSTLAANGLEACSHVIGSVEASDDFIITSGDAVVLERSRTELRVIWAETTHKMQGLRDNPACADQEHEVKKDNSDPGLNVKLSFDVNEDVAAPYIAKGAKPKMAILREQGVNSHVEMAAAFDRAGFEATDIHMSDILTGQAVLDEYHGLVACGGFSYGDVLGAGEGWAKSILFNAQAREQFQAFFNRKETFSLGVCNGCQMLSNLKELIPGADLWPRFVRNESERFEARFSLVEVQKSDSVFFDGMAGSRMPIAVSHGEGRVEVRDAEHLAAIEASGTVTVRYVDNLGNPTQQYPNNPNGSPNAITGLTTADGRVTIMMPHPERVFRTVANSWAPEGWGENGAWMRMFQNARKNIG

SEQ ID NO: 52930 - DNA, 3891 bp, Alteromonadales bacterium TW-7
  CDS (1)..(3891): transl_table=11
atgttgatccttcgtggtgcaccagcactgtcagagttcagagttaataaaattttagcgcgttgcaaacaatcgcaacttccagtcaccaacgtatatgccgagtatgctcattttgccgatttaacatcgcctttgagtattgatgagcagaccaagcttgaaaagctattaacttacggtcctactattgccgagcataccccagctggcacacttattttagttacacctcgccctggtaccatttctccttgggcatctaaagcaaccgatatagcgcataactgtggccttaaacaggttcaccgtgtagagcgtggtattgcttattatatagaaggtgaactaagtgcagagcaacttgcacaagcaacggcgttattacacgaccgtatgactgaagctacacacactgagcttgaagctgcagcacagttgttccgtaatgattctcctcgtgaaatgtcatcagttgatattttaggtggcggacgcgaagcattagctgccgcaaatattgagcaaggttttgcccttgccgatgacgaaattgactacctagtagaaaactttaaaaagctaggtcgtaatcctaacgacatagaattatttatgtttgcccaagcaaactcagagcattgtcgtcataaaatatttaatgctgattggacaattgatggcattgaacagccaaaatcgctgtttaaaatgatcaaaaatacatttgagcacaatcctgaaaatgtattgtcggcgtataaagataacgcggcagtaatgaagggctcaaaagctggtcgcttcttcccgaatgcgcaaggtgaatatgcgtatcatcaagaagacatagaaattttaatgaaggtagaaacgcataaccacccaacggctattgcaccgttttcgggggcggctaccggctcaggtggtgaaattcgtgacgaaggtgcaacaggtcgtggttctaagccaaaagccggtttagttggctttacggtttctaacttacgtattccgggttacgagcaaccgtgggaaagcgactttggtaagccaggtcgtatagtcaatgcacttgatattatgatggatggcccactgggcggtgctgcatttaacaacgagtttggacgtcctaacttattaggttacttccgcacgtacgaagaaaaagtaacaagccacaatggtgaagaggtacgtggttaccacaaaccaattatgcttgccggtggattaggtaatattcgtgctgatcatgttcaaaaaggcgagattccagtaggcgcaaaactaattgcgctaggcggccctgctatgaatattggtttaggcggtggtgctgcatcaagtatggcatcgggtcaatcaaacgaagacttagactttgcctctgttcaacgtgaaaaccctgaaatggaacgtcgttgtcaagaagtcatcgacaaatgttggcagttaggcgacgaaaacccaattgcatttatacatgatgtaggcgctggtggtttatcaaatgcgtttcctgaactggtaaacgatggtggccgtggtggtaaattccaactacgtgatatccctaacgatgagcctggcatggcaccacatgaaatttggtgtaacgaatcgcaagagcgctatgtacttgctgtaggtattgaagattttgatcgctttgaagcaatttgtaagcgtgaacgtgcacagtatgcagtaattggtgaagcaactgctgaacctcatttaactgtagcagataaccattttgataataaccctgtcgatttaccgctagatgtattgttaggtaaagcgcctaaaatgcaccgcgatgtaacatctcagcaagtaaatggtactgccatagatgcaagcgctattgacgtagctgatgccgcgcagcgtttgttacgcttacctactattgcagaaaaaacattcttaattaccattggcgaccgctcggttaccggtttagtagcacgcgatcaaatggttggcccttggcaagtacctgtagctaactgtgcggttactgcggcaacgtacgacacttaccacggtgaagctatgtctctgggtgagcgcacgccggcggcactattaaattatggagcttcggcgcgtttggctgtggctgagtcactcactaatattgcttgtgcaaacattggcagccttgagaacattaagctatctgctaactggatggctgcagcgggtcacccaggtgaagacgcaggcctttacgaagccgtaaaagcggtaggcgaagagctttgcccagcacttggtttaactatacctgtaggtaaagattctatgtcgatgaaaacgacatggaaaaacgaagacgatagtgctgagcaatcagtaacgtcgccgttatcgcttattattacagcctttggccgtgttgacgatgtacgtaaaacagtaacgccacagttacgcactgataaaggcgacacttcgcttgttttagttgacttaggtgcgggtaaaaaccgcatgggtgcatcaagccttgcacaggtttataaacagcttggtgatgttacaccagatgtagacagccctgagctacttaaaggcttttacaatgccatgcaagcacttgtcgctgatagcaagttacttgcttatcatgaccgctcagacggtggtttatttactactgtaactgaaatggcgtttgctgggcacaccggtgtgactgttgatttagctggtttaaccgggacagacctagaagcactttataacgaagagcttggcgcggtaattcaagtggctaacagcgatttagatgccgtaaatgctgtatttgagcaacacggtgttgctgcaattagccacgtgattggctcgcttaatagcgacgatagcattgtatttaaccgtggtgagcaaacagtacttaatcatactcgtactgaattacgtactatttgggccgaaacaacgtaccaaatgcaagcacgtcgtgataaccctgattgtgctaagcaagagtttgatgccaagtttgatgcaaaagatccaggcttaaacgtaaaacttaactttgacttaaacgaagatatagccgcaccttacattgcaacgggcgctaagccgcaaatggctattttacgtgagcaaggcgttaactcgcatttagaaatggctgctgcgtttaaccgtgctggttttgccgctgttgatgtacacatgagcgatatcctcgaagggcgtttaactcttgagcagtttaaaggcttagtggcatgtggtggtttctcttatggtgacgtattaggcgccggtgaaggctgggctaagtctatattgtttaacgatatggcacgcgatcagttccaaaacttcttccaccgtgaagacacctttagcttaggtgtgtgtaatggttgtcaaatgttatcaacattgaaagagttaattccgggtactgagcattggcctcgttttgtaacaaataagtcagagcgttttgaagcacgctttagcttagttgaaatacaagaaaacccgtctgtgttctttaatggaatggctggttcgcgtatgccaattgctgtatctcatggtgaaggccatgcagaatttgcaaacgatgccgccactcaagctgcacttgaaagcggcactgttgcggttaaatttgtagataactatggtaacccgacaacgcaatatccggctaacccaaatggttcaccagaaggtattacgggtattacctctactgatggccgtgccactgtaatgatgccgcaccctgagcgtgtgttccgcgctgttgctaactcgtggcacccagatgagtggaaagaggatagcccatggatgcgtatgttccgcaacgcacgtaaaaatgtaggttaa

SEQ ID NO: 52931 - protein, 1296 aa, Alteromonadales bacterium TW-7
MLILRGAPALSEFRVNKILARCKQSQLPVTNVYAEYAHFADLTSPLSIDEQTKLEKLLTYGPTIAEHTPAGTLILVTPRPGTISPWASKATDIAHNCGLKQVHRVERGIAYYIEGELSAEQLAQATALLHDRMTEATHTELEAAAQLFRNDSPREMSSVDILGGGREALAAANIEQGFALADDEIDYLVENFKKLGRNPNDIELFMFAQANSEHCRHKIFNADWTIDGIEQPKSLFKMIKNTFEHNPENVLSAYKDNAAVMKGSKAGRFFPNAQGEYAYHQEDIEILMKVETHNHPTAIAPFSGAATGSGGEIRDEGATGRGSKPKAGLVGFTVSNLRIPGYEQPWESDFGKPGRIVNALDIMMDGPLGGAAFNNEFGRPNLLGYFRTYEEKVTSHNGEEVRGYHKPIMLAGGLGNIRADHVQKGEIPVGAKLIALGGPAMNIGLGGGAASSMASGQSNEDLDFASVQRENPEMERRCQEVIDKCWQLGDENPIAFIHDVGAGGLSNAFPELVNDGGRGGKFQLRDIPNDEPGMAPHEIWCNESQERYVLAVGIEDFDRFEAICKRERAQYAVIGEATAEPHLTVADNHFDNNPVDLPLDVLLGKAPKMHRDVTSQQVNGTAIDASAIDVADAAQRLLRLPTIAEKTFLITIGDRSVTGLVARDQMVGPWQVPVANCAVTAATYDTYHGEAMSLGERTPAALLNYGASARLAVAESLTNIACANIGSLENIKLSANWMAAAGHPGEDAGLYEAVKAVGEELCPALGLTIPVGKDSMSMKTTWKNEDDSAEQSVTSPLSLIITAFGRVDDVRKTVTPQLRTDKGDTSLVLVDLGAGKNRMGASSLAQVYKQLGDVTPDVDSPELLKGFYNAMQALVADSKLLAYHDRSDGGLFTTVTEMAFAGHTGVTVDLAGLTGTDLEALYNEELGAVIQVANSDLDAVNAVFEQHGVAAISHVIGSLNSDDSIVFNRGEQTVLNHTRTELRTIWAETTYQMQARRDNPDCAKQEFDAKFDAKDPGLNVKLNFDLNEDIAAPYIATGAKPQMAILREQGVNSHLEMAAAFNRAGFAAVDVHMSDILEGRLTLEQFKGLVACGGFSYGDVLGAGEGWAKSILFNDMARDQFQNFFHREDTFSLGVCNGCQMLSTLKELIPGTEHWPRFVTNKSERFEARFSLVEIQENPSVFFNGMAGSRMPIAVSHGEGHAEFANDAATQAALESGTVAVKFVDNYGNPTTQYPANPNGSPEGITGITSTDGRATVMMPHPERVFRAVANSWHPDEWKEDSPWMRMFRNARKNVG

SEQ ID NO: 52932 - DNA, 3891 bp, marine gamma proteobacterium HTCC2143
  CDS (1)..(3891): transl_table=11
atgctaattacccgtggcgcatccgccctctctgaatttcgtactcataagctgtttaatacgctcaaagctgctattcctgaattgaatgcggtatcggcagagtttattcatttttctgaattgcaggaagacctgtcgcaagaacagcagagggtgctcggaaggcttctacaatacgggccaaaggctgccgaggtagaggcagcaggagcgttattgttggttgtaccgaggccgggaacgatttctccttggtcaagtaaagcgacggatattgctcacaatgccggcttaacttctgtactgcgcatcgagcggggtattgcctactatattgattctcatacagatcttagcgatgaacacttaaagttggttaaatcggtcattcacgatcgtatggttgaatcggtgctgccgggtttggacgacgcagcggtattgtttcggcacgaacaaccgacaccactaacttcagtggacgtgcttgcgggtgggcaaagcgcattggcggatgccaatgtagccttaggcctagcattggccgaggacgaaattgactatctggtcgatagcttccgggacttgggccgtaatccaacggacgttgagttgatgatgtttgcacaggcaaattcggagcattgtcgccacaaaatttttaatgccagttggaccattgacggggacgagcaggactattcgctgttcaaaatgataaaaaacacctatgaaaaaggtggcgcgggtgtgctatcagcctatgaagataacgcctcagttatggaaggtagctacgcgggacgcttttatccaaatcctgaaaaccaaacgtacagttaccacaacgaagatattcacatactgatgaaggtggaaacccacaatcatccgacggctatcgctcctttttcgggcgccggcacaggctcaggtggagagattcgcgatgaaggtgccgtcggtcgaggctccaagcccaaggtgggtttatcgggttttacggtgtctaacttgaatctcagcggtcatttacaaccatgggaaatcgcctatggcaagcccgatcgaattgtaacggcgctggatattatgattgaggggccggtgggtggtgctgcatttaacaatgaatttggtcggcctaatcttaatggatacttcaggacttatgaagaaagcgtcaacggcgctgatggtattgaacgacgcggttatcacaagccgattatgatcgctggaggttacggcaatatcaaggcagaacatgtcgaaaaacatgaattccccgctggttgcaaattaatcgctttaggtggtcccgcgatgcttatcggtttgggtggaggtgctgcctccagtatggcgtctggaagctccagtgaagacctcgactttgcctcagtgcagcgccagaatcctgagatagagcggcggtgtcaggaagttatcgaccggtgctggggtatggggcaggataatcctattgcgttcatccacgatgtcggcgccggtggcttatcaaatgcatttcccgaattggtcaaagacggtggtcgcggcggtaactttgagttgcgcgcggtgcctaatgatgagcctggtatgtcgcctctcgccatctggtgtaatgagtcacaggaacgctatgtgatggctgttgagcccgatgctctgcccgtatttgaagctatttgtcgacgcgagcgctgcccctatgcagtagttggagaggcaaccgatgagcatcacctgcgtgtaggggatcgctatttcaacaacagtcctgttgatttaccgatgtctattttgtttggtaagccacctaaaatgcaccgtaatgttgatcgcattgcctatgagatgccggcgtttaagacggctgatatagaccttggtgaagctacctcgcgtgttttacagttgccaacggtagcgagtaaaaactttttgatcactataggtgatcgctctataactggcatggtggcgcgcgatcagatggtaggtccgtggcaggttccggtagcagactgcgcagtcacaacagcctcttatgatagctattgcggtgaggtcatggctatgggagagagaacgccaatggccctgattaacgctcctgcatcgggacgcatggcggtaggggaagcaatcacaaatattgccgcaagccgaatcgataaaatatcaaatattaggctttctgcaaattggatgtgtgccgccggtcatccgggcgaggatgagaagctgtatgatacggttaaggccatcggtatggagctgtgtcccgcgcttggtatcacgatacctgtcggcaaggactcaatgtcgatgcgcacggcttggcaggacaatgacgagaataagtcggttacatcaccgatgtcggttgttatttcagcgttttcgccggtgttagatgtgcgtaagacggcaaccccgcaattgaaaacggatcgcggtgtaactgagatattgcttatagaccttggtcttggaaagaaccgtatgggcgcaagctgtctcgcgcaggtttacaaccagattggtaatgttgccccagatgttgatgacccccaattattacgaaacttttttgccgcaattcaaaaactgctagagcagaatttactcctcgcttatcacgatcgatcggacggtggtctgctgacaacagctctggagatggcatttgccggccattgtggaatcgatttagatattgcgggcctaggtgaagacactatcgccggactttttaatgaagagttgggagctgttgtgcagattgccagtggcgaccgcggcgcggtgatggcagtttttgatcagcagggcttgagccaagcagtgtctacgctggggggcgttaatggtgatgaccaaatcagagttcgtagcggttcaaagctactgattgaccgcaaacgagctgattaccaaagaatgtggagcgaaactagcttccgtattcagtctctaagagacaacccagagtgtgcccagcaggaatttgatcagttgattgcgcacgatcccgggctatccgcccgagtgacttttgacgtgaatgataacctcagcgccccatttattaacacaggggttcgtccgcgggcggctattctgagggagcaaggcgtaaacggacagcttgaaatggcagcggcctttgatcgggccggttttgaggctgtcgacgttcacatgagtgatattttggaaggtcgggtcaatctggatacctttaaggcaatggcagcctgcggtggcttctcttacggggatgtattgggtgcaggagaaggttgggccaaaacgattttatttaacaagcgtgcccgagaccaatttcagcagtttttccatcgggtggatacgtttagtctaggcgtgtgtaatggttgccagatgatgtcgaacctgaaatcgctaataccgggagctgagctatggccacgctttgttcgtaatacctccgagcaatttgaagcgagggtggcattggttcaagttcaagagtcgccatcgattctattgcaaggcatggcagggtcacatatgcccgtagctattgcccacggagaagggcgcgttgagtttgctgatagtgctcaccagcaggctgtaatggccagtgatacctcagcacttcgttttattgataatcaattacagtatacggaaacataccctgctaatccaaacggctcaccaatggggttaacgggtatgaccacaactgacgggcgtgtcactattatgatgccgcaccctgaacgcgtttttcgaaccgtacaaaactcgtggcaccccccggaatgggacgaagatagcccgtggattcgcctgtttcgtaatggtcgcgtttggattgattaa

SEQ ID NO: 52933 - protein, 1296 aa, marine gamma proteobacterium HTCC2143
MLITRGASALSEFRTHKLFNTLKAAIPELNAVSAEFIHFSELQEDLSQEQQRVLGRLLQYGPKAAEVEAAGALLLVVPRPGTISPWSSKATDIAHNAGLTSVLRIERGIAYYIDSHTDLSDEHLKLVKSVIHDRMVESVLPGLDDAAVLFRHEQPTPLTSVDVLAGGQSALADANVALGLALAEDEIDYLVDSFRDLGRNPTDVELMMFAQANSEHCRHKIFNASWTIDGDEQDYSLFKMIKNTYEKGGAGVLSAYEDNASVMEGSYAGRFYPNPENQTYSYHNEDIHILMKVETHNHPTAIAPFSGAGTGSGGEIRDEGAVGRGSKPKVGLSGFTVSNLNLSGHLQPWEIAYGKPDRIVTALDIMIEGPVGGAAFNNEFGRPNLNGYFRTYEESVNGADGIERRGYHKPIMIAGGYGNIKAEHVEKHEFPAGCKLIALGGPAMLIGLGGGAASSMASGSSSEDLDFASVQRQNPEIERRCQEVIDRCWGMGQDNPIAFIHDVGAGGLSNAFPELVKDGGRGGNFELRAVPNDEPGMSPLAIWCNESQERYVMAVEPDALPVFEAICRRERCPYAVVGEATDEHHLRVGDRYFNNSPVDLPMSILFGKPPKMHRNVDRIAYEMPAFKTADIDLGEATSRVLQLPTVASKNFLITIGDRSITGMVARDQMVGPWQVPVADCAVTTASYDSYCGEVMAMGERTPMALINAPASGRMAVGEAITNIAASRIDKISNIRLSANWMCAAGHPGEDEKLYDTVKAIGMELCPALGITIPVGKDSMSMRTAWQDNDENKSVTSPMSVVISAFSPVLDVRKTATPQLKTDRGVTEILLIDLGLGKNRMGASCLAQVYNQIGNVAPDVDDPQLLRNFFAAIQKLLEQNLLLAYHDRSDGGLLTTALEMAFAGHCGIDLDIAGLGEDTIAGLFNEELGAVVQIASGDRGAVMAVFDQQGLSQAVSTLGGVNGDDQIRVRSGSKLLIDRKRADYQRMWSETSFRIQSLRDNPECAQQEFDQLIAHDPGLSARVTFDVNDNLSAPFINTGVRPRAAILREQGVNGQLEMAAAFDRAGFEAVDVHMSDILEGRVNLDTFKAMAACGGFSYGDVLGAGEGWAKTILFNKRARDQFQQFFHRVDTFSLGVCNGCQMMSNLKSLIPGAELWPRFVRNTSEQFEARVALVQVQESPSILLQGMAGSHMPVAIAHGEGRVEFADSAHQQAVMASDTSALRFIDNQLQYTETYPANPNGSPMGLTGMTTTDGRVTIMMPHPERVFRTVQNSWHPPEWDEDSPWIRLFRNGRVWID

SEQ ID NO: 52934 - DNA, 3870 bp, marine gamma proteobacterium HTCC2080
  CDS (1)..(3870): transl_table=11
atgtttattcttcccggatcttccgcactgacgccgccgaggtttatggtgttggcgggtgctttgcggtctcttgattccgggctacggcttgatgacgcttatttcttgtatgcgatcgcccaagatggtgaagtcgatcgcggcgaactggcacggttgctgcagccaagcactgccgaaatggcacgaaaagctttgcccgctgacgatcattacctgattgtagtgccccgattgggcacaatttcgccttggtcgagtaaagctaccgatatcgcccataactgtggattcgccgccgttgagcgcatagaacgcggtatttgttacgtaattcatgggctgtctaggctgaattcagaacgtctgagtgagctccgtagtttactgcatgacagaatggtggagtctgtgctggccgacacggcatcgctgacgcagttatttcagaatgctcagccagcgcactttaatcgggtggcgattcttgagcggggccacgcggcattgcgtgaagccaacgaacagctagggcttgcgcttgcagaagatgaaattgactatttagtcaacgcttttcaggatctcaatcgggatcctagcgatattgaacttatgatgttcgctcaggctaattccgagcactgtcggcacaaaatttttaatgcgagttggacgattgatggtgctgactgtgagcactctctgtttggcatgattcgacatacctaccatgtcgggggagagggagtgctctctgcttactccgataacgcggcggtcgtttccggtcacagcgctggacgttggttccccgatcctgaaactggtgaatacgcctatcacgaggagcccattcatttattgatgaaagtggagacccataatcacccaacggctattgccccttttgcgggtgcagctacaggttcagggggagaaattcgcgacgagggtgccgttgggagaggttcaaagcctaaagctggccttgcgggttttacggtttctcatcttgaaatacctgatcagccccaaccatgggagctcggctatggacgccctgggagaatcgtttcaccgctgcaaattatgctcgacggtcctatcggcgcggcggcttttaataatgaatttggtcgaccgaatctcgctgggtatttccgaacctttgaggttgccactgcccaaggcgttaagggttatcacaaacccataatgatcgcgggcggctttggcaatattcgtgaagagcacgttcaaaaaggcgggtttgagccaggcgcccatctggtggttttgggtggtccggccatgttaatcggtttaggcggtggcgccgcatcgtccatggccagtggtgaaagtgatgaggctttggactttgcgtccgttcagcgccataacccagaaatggagcggcgctgtcaggaagtgattgaccgttgctgggccttaggggaaagcagccctattgcctttatccacgatgtcggtgccggtgggcttagcaacgccttgcccgagctggtcaaagatggcggccgaggcggcaagattgatctgcgcaaaattcctagcgatgagccaggtatgagtccgctggaaatttggtgtaacgaggctcaggaacgctatgttctcgctatagagcctgcacatttggcccgctttgaggcgatttgccagcgtgagcgctgcccttacgcggttgttggacaagccacggaggcactgcacctagaagtggcagacagccaattcgcaaatgctcctgttgatttgccgatgggactgctctttggaaagccccctaaaatgcatcgggaggcacaaagaggcgttttcgatggtgataattttgtcgctgatttacgcccggctgaagcccttgagcgagtgctgaaatttcctgcagtggggtcaaaaagttttttaattactattggcgatcgatcggtgacgggtttggtcgctcgggatcaaatggttggcccttggcaggttcctgtggccgactgtgcggtgacgaccgtgtcgatggactcccatctcggcgaggccatgagcatgggagagcgcactcctgtagctctgctcagtggtcctgcctcagctaggctctctattgctgaagctatcaccaatatccttgcatctcctgtagcgcggcttgctgatattcggttgtcagccaattggatgtgcgcttcggggcacgatgataacgatgccatattgtttgatactgtcagagccgtaggtttagagttttgccctcagcttggcattacagtgcctgtgggcaaagattctatgtccatgcgcaccagttggcaggatcaaggcgctgataagtcggtgactgcacctgtctccctcattgtttcagccttcgcacctgttggggacgttaggacaacactcactcccgaacttgtggtcgatgaagctaccgaactactgctggtcgatctgggtcatggccaaaatcgtctgggtggctctgtgctcgctcagtgttgggggcttcttggatctgaagtgcctgatgttgatgcagcagatttaaaggcgctttttgagctcatcagtcagctaaaatctcgggatctgattctcgcctatcacgatcgctcggatggcggagtattaactactttgttggaaatggcttttgctgcgcgctgtggattaaacatagcggtaggagaagaaggctctgcggcgctcgcggcgctgttcagtgaagaagttggcgtcgtattacaagttcacagtgctgatgtgcacgccattgaggcactggcgatcgaagtgggtttggccgggtgtgttaaacacatcgcatcaccgcgtgtagaccagcgggtggtggttaattccccacgatttgagttaatagacagccagcgaggtgcgttacagcagctttggagctctacgagttaccacctacaaaggttacgggataaccctgagtgtgctgatcaggagttcgaaaatatcctgcatgaggcaccggggttgtcggccaagcttagttttgatcccggaagtgattctgcagcgccttatattgctacgggcgccttgccgcgtgtggctgttcttcgggagcagggtgttaacggtcaatctgaaatggccgctgcctttcaccgtgcgggcttcacccctgtcgatgtccatatgagtgacttgctgcaaggctctatgactttggatgggtttcatggctttgctgcctgtggtggattctcctacggggatgtccttggcgcgggtgaaggatgggctaaaacgattttattcaatactgagctacgcaaggtgttcacaacattcttcgagcgccctgacacgttcagcttgggcgtctgtaatggttgtcaaatgctgtccaatttgagtgagctgataccgggagcaacccactggccgcgtttcgctcgcaacacctccgagcagtacgaagctcgtctgaccctggtgcgggttgaggaaagtccttcggtgctgctgtctgatatggcggggtctatgctgcctattgtagtggcccacggagaagggcgcgctcagtttgctaatgacgagcatttgacgcttgccaataattcgggatcggtagggctacgttacgttgatcatgctggtgcggtgacccagcgctacccatacaatcccaacggctcccccagcggtatcgcgggtatgagcagtactgatgggcgagtcactattatgatgccgcaccccgaacgggtctttcgaacatcacaactgtcatgggcgcctgctgattggcctgaagactcgggttggatgcgattatttcggaatgctcgaacttggctaggttga

SEQ ID NO: 52935 - protein, 1289 aa, marine gamma proteobacterium HTCC2080
MFILPGSSALTPPRFMVLAGALRSLDSGLRLDDAYFLYAIAQDGEVDRGELARLLQPSTAEMARKALPADDHYLIVVPRLGTISPWSSKATDIAHNCGFAAVERIERGICYVIHGLSRLNSERLSELRSLLHDRMVESVLADTASLTQLFQNAQPAHFNRVAILERGHAALREANEQLGLALAEDEIDYLVNAFQDLNRDPSDIELMMFAQANSEHCRHKIFNASWTIDGADCEHSLFGMIRHTYHVGGEGVLSAYSDNAAVVSGHSAGRWFPDPETGEYAYHEEPIHLLMKVETHNHPTAIAPFAGAATGSGGEIRDEGAVGRGSKPKAGLAGFTVSHLEIPDQPQPWELGYGRPGRIVSPLQIMLDGPIGAAAFNNEFGRPNLAGYFRTFEVATAQGVKGYHKPIMIAGGFGNIREEHVQKGGFEPGAHLVVLGGPAMLIGLGGGAASSMASGESDEALDFASVQRHNPEMERRCQEVIDRCWALGESSPIAFIHDVGAGGLSNALPELVKDGGRGGKIDLRKIPSDEPGMSPLEIWCNEAQERYVLAIEPAHLARFEAICQRERCPYAVVGQATEALHLEVADSQFANAPVDLPMGLLFGKPPKMHREAQRGVFDGDNFVADLRPAEALERVLKFPAVGSKSFLITIGDRSVTGLVARDQMVGPWQVPVADCAVTTVSMDSHLGEAMSMGERTPVALLSGPASARLSIAEAITNILASPVARLADIRLSANWMCASGHDDNDAILFDTVRAVGLEFCPQLGITVPVGKDSMSMRTSWQDQGADKSVTAPVSLIVSAFAPVGDVRTTLTPELVVDEATELLLVDLGHGQNRLGGSVLAQCWGLLGSEVPDVDAADLKALFELISQLKSRDLILAYHDRSDGGVLTTLLEMAFAARCGLNIAVGEEGSAALAALFSEEVGVVLQVHSADVHAIEALAIEVGLAGCVKHIASPRVDQRVVVNSPRFELIDSQRGALQQLWSSTSYHLQRLRDNPECADQEFENILHEAPGLSAKLSFDPGSDSAAPYIATGALPRVAVLREQGVNGQSEMAAAFHRAGFTPVDVHMSDLLQGSMTLDGFHGFAACGGFSYGDVLGAGEGWAKTILFNTELRKVFTTFFERPDTFSLGVCNGCQMLSNLSELIPGATHWPRFARNTSEQYEARLTLVRVEESPSVLLSDMAGSMLPIVVAHGEGRAQFANDEHLTLANNSGSVGLRYVDHAGAVTQRYPYNPNGSPSGIAGMSSTDGRVTIMMPHPERVFRTSQLSWAPADWPEDSGWMRLFRNARTWLG

SEQ ID NO: 52936 - DNA, 2997 bp, Candidatus Desulfococcus oleovorans Hxd3
  CDS (1)..(2997): transl_table=11
atggcccaccggcttgaaattgccttaaagcccggtttaaccgatgcccagggacagaaagtcaaaaaaagggccgcggactacctgtccatctctctgtccgacgtgcgggtggtccatgtgatcacccttgacgcggcgctgtccgagccccagcagtgggccgtgcaggagatattcaccaacccggtgacccaggtctcttcctttggtcccctggccgtggcctttgactggatcatttgggtggggctgcggcccggcgtcaaggacaatgccggcgacaccgcaaaagaggccatctccgacagcctgggccgcacgtttaccgatgacgagggggtctacacttccaggcggtactgcctgacaggcgacggtctttcccgggagcaggtggagaccattgcaagagagctgctggccaacgacaccattgagcagtggcgcctgttttcaaaagaggagtgggacgatacctccggcatcggcctgatcattcccagagtgcggctggcccacagcccgacagtgaccctgatcccggtggaaagcgacgccgccctgatgaaggtgagcgacgagcgcaacctggccttgaaccccaacgacgtgcccgtgatccgtgaatattttgtgcgaaaagaggtccgggagcggcgccgggccgtgggcctctccgaccccaccgacatcgaggtggagtatatctcccaggcccgcagcgaccactgcaaccacaacacctttggcggccggttctattataaagacctgatcaccggggaaaccctgaagattgacagcctgtttgccacctgtatccggcagcccaccctggacctgcaaaaagaaaaaccgtgggtcgtgtccgtgctgtgggacaatgccggcatggcccggttcgacgaggaccactgctacgtgatcaccggcgagacccacaactccccctccaacatggaggcctacggcggcgccatgaccggtattgtgggcgtctaccgggaccccatgggcacgggcaaaggcgcccggctggtcatggggggctacgggttctgcacgggaaggcgcgactatgacggggaccttaagcccaggctgtctccccgccgcctgctggacggggtgatcgagggggtcaaggacggcggtaacaagagcggcattcccaccacctttggccagctctattttgacgacggttacatgggcaagtgcctggtctttgtcacggccatcggtattctgcccgcctatattaatggtgagccctcggacaaaaagaccacgcggcccgacgacctgatcgtgatgtgcgggggccgggtgggcaaggacggcattcacggcgtgaccgcgtcttccgaggtttactccgagcacacgccggcgggccatgtgcagatcggcgacccctacacccagaagaagatgcacgattttctgctgtgcgccagggacgcggggctgatccagtttatcaccgacaacggcggcggcgggctctcctcgtctgtgggcgagtcggccctctattcaggcgggtgcgaggtgtggctggaaaaggtgccgttgaaatacgcgggcctggaccagtgggagatctgggtctccgagtcccaggagcgcatgaccgtggccgtggccccggaaaacatcgaccgttttttagccctgtccgccgaccatgccgtggagtccacggtaatcggcaaatacaccgattcgggcatgctccatattctttacgatggcgccacctgcgcctatatcgacctggatttcatggcctccgatttcccccagtgggagtttgaggcccactggaccccgccggaagcccggggcctgtgtgagccggtgctgggcggcagcccggattttaacaccctgctgtccgacatgctggcccggcccaatatctgctccagggagtgggtggcccggcagtacgatcacgaggttcagggcggcagtgcggtcaagcccctggtgggcgcggaccgggacattgcctcggacgcggccgtgacccggccggtgcttgcttctgaaaaaggcattgcctttgcccaggccctgctgccggcctattcgaagatcgacgcctaccacatgaccaccgcggtcattgacgaggcggtacggcggctggtggctgtgggcgctgacccggccggcatcggcggggtggacaacttctgctggcccaacatcgcctacaatccggcatccaacccggacggccggttcaaggcggcccagctggtgcgctcctgcctggccctgcgcgacgcgtgcaacgcctttggtatcccccttctttccggtaaggacagcatgtacgtggacggccacctggccggccggtacggcgagacccgcaaggtttcggccctgcccaccatgcagttttccgccacggcagtggttgacgacgtcacggcctgcaccactctggaggccaaggccgaaggggatctggtctatgtggcgggcatcacccggaacgaactgggggcatccgagtattatgagcttctgggatttaccggacttaccatcccccgggttcggtttgacgaaagcagtgccgtgtgccgggccgtggcaaccgccattggccggggtctgtgcgcctcggtacacggcgtctaccgcggcgggctgggggtccacctggcctttgtggccatgggcggcaacctgggcatgaccgttgacctgtcaaagatcgttcaggagccgggtctttccgatcatgccctgcttttttcagaaagcccggcccggtttgttatcaccgtggccccggaaaaccgggccgcctttgaagctttatggcaggacgcgccctgcgcctgtatcggcacggtgaccggtaaaaacgggcgcctgaccctgtccgggcaaaacggcaaaccgctggtggaccgggagggggctacgctcaaacaaacctggaaacaaccattcgggaacctgatatga

SEQ ID NO: 52937 - protein, 998 aa, Candidatus Desulfococcus oleovorans Hxd3
MAHRLEIALKPGLTDAQGQKVKKRAADYLSISLSDVRVVHVITLDAALSEPQQWAVQEIFTNPVTQVSSFGPLAVAFDWIIWVGLRPGVKDNAGDTAKEAISDSLGRTFTDDEGVYTSRRYCLTGDGLSREQVETIARELLANDTIEQWRLFSKEEWDDTSGIGLIIPRVRLAHSPTVTLIPVESDAALMKVSDERNLALNPNDVPVIREYFVRKEVRERRRAVGLSDPTDIEVEYISQARSDHCNHNTFGGRFYYKDLITGETLKIDSLFATCIRQPTLDLQKEKPWVVSVLWDNAGMARFDEDHCYVITGETHNSPSNMEAYGGAMTGIVGVYRDPMGTGKGARLVMGGYGFCTGRRDYDGDLKPRLSPRRLLDGVIEGVKDGGNKSGIPTTFGQLYFDDGYMGKCLVFVTAIGILPAYINGEPSDKKTTRPDDLIVMCGGRVGKDGIHGVTASSEVYSEHTPAGHVQIGDPYTQKKMHDFLLCARDAGLIQFITDNGGGGLSSSVGESALYSGGCEVWLEKVPLKYAGLDQWEIWVSESQERMTVAVAPENIDRFLALSADHAVESTVIGKYTDSGMLHILYDGATCAYIDLDFMASDFPQWEFEAHWTPPEARGLCEPVLGGSPDFNTLLSDMLARPNICSREWVARQYDHEVQGGSAVKPLVGADRDIASDAAVTRPVLASEKGIAFAQALLPAYSKIDAYHMTTAVIDEAVRRLVAVGADPAGIGGVDNFCWPNIAYNPASNPDGRFKAAQLVRSCLALRDACNAFGIPLLSGKDSMYVDGHLAGRYGETRKVSALPTMQFSATAVVDDVTACTTLEAKAEGDLVYVAGITRNELGASEYYELLGFTGLTIPRVRFDESSAVCRAVATAIGRGLCASVHGVYRGGLGVHLAFVAMGGNLGMTVDLSKIVQEPGLSDHALLFSESPARFVITVAPENRAAFEALWQDAPCACIGTVTGKNGRLTLSGQNGKPLVDREGATLKQTWKQPFGNLI

SEQ ID NO: 52938 - DNA, 3888 bp, Escherichia coli B
  CDS (1)..(3888): transl_table=11
atgatggaaattctgcgtggttcgcctgcactgtcggcattccgaatcaacaaactgctggcacgttttcaggctgccaggctcccggttcacaatatttacgccgagtatgtccattttgctgacctcaatgcgccgttaaacgatgatgagcacgcacaacttgaacgcctgctgaaatatggcccggcactcgccagccacgccccgcaaggcaaactcctgctggtgaccccgcgtcctggcaccatctctccctggtcttcgaaagcgaccgatattgcccataactgcgggctacaacaggtaaaccgccttgagcgcggcgttgcttactatatagaagccggtacgctgaccaatgaacaatggcagcaggttaccgctgaactgcacgaccgcatgatggaaacggtcttttttgctttagatgatgcagagcagttgtttgcccaccatcaaccgactccggttaccagcgttgatttgctggggcagggccgtcaggcgctgatcgacgctaacctgcgtcttggcttggctctggcggaagatgaaattgactatctgcaggatgctttcacaaagcttggtcgtaacccgaacgacatcgagctgtatatgttcgctcaggcgaactctgagcactgccgccacaaaatttttaatgccgactggattatcgacggtgaacagcagccgaaatcgctgttcaggatgatcaaaaatactttcgaaaccacgccagatcacgttctctctgcttataaagataacgccgccgtaatggaaggttctgaagtgggccgctactttgctgaccacgaaacgggccgctacgatttccatcaggaaccggcgcatattctgatgaaagtcgaaactcacaaccacccgacggcgatttctccgtggccgggcgcggcgacgggttccggcggcgaaattcgtgatgaaggcgccaccggacgcggtgcgaagccgaaggctggtctggttggtttctccgtttccaacctgcgaattcctggcttcgaacagccgtgggaagaagatttcggtaagcctgagcgcattgtcaccgcgctggacatcatgaccgaaggcccgctgggcggcgcggcgtttaacaacgaatttggtcgtccggcactgaatggctacttccgtacttatgaagaaaaagtgaacagccacaacggcgaagagctgcgcggttatcacaaaccgatcatgctggcgggcgggatcggcaacattcgcgccgatcacgtacaaaaaggcgagatcaacgtcggtgcgaagctggtcgttctcggcggcccggcaatgaacatcggtcttggcggcggagcggcgtcttccatggcgtcaggtcagtctgatgccgacctcgactttgcttccgtacagcgcgacaacccggagatggagcgtcgttgccaggaagtaatcgaccgttgctggcagcttggtgatgctaacccaattctgtttatccacgacgtcggtgcgggcggtctttctaacgccatgccggaactggtgagcgacggcgggcgcggcggtaaattcgaactgcgcgatatcctgagcgacgaaccgggcatgagcccgctggaaatctggtgtaacgaatcccaggaacgctacgtgctggcggttgctgctgatcaattaccgctgtttgacgagctgtgtaagcgtgagcgcgcaccctacgctgtgattggtgaagcgaccgaagaactgcatctttctctgcacgatcgtcattttgataatcagccgatcgatctgccgctggacgtcctgcttggtaaaacgccgaagatgacccgcgatgtacaaacgctgaaagcgaaaggcgacgcgctggcccgtgaagggatcaccattgcagacgcggtgaaacgcgtgctgcatctgccgactgtggcggaaaaaaccttcctggtgaccattggcgaccgcagcgtaaccggcatggtagcgcgcgatcagatggtggggccgtggcaggtgccggtcgctaactgcgcggtcactaccgccagcctcgacagctactacggtgaagcgatggcgattggcgagcgtgcgccggttgcgctgctggatttcgccgcctctgcccgtctggcggtcggtgaagcgttaaccaacatcgccgcaacacaaattggcgatatcaaacgcatcaaactttccgccaactggatggcggcggcaggccaccctggtgaagatgcgggcctgtatgaagccgttaaagccgtgggcgaagagctttgtccggcgctgggcctgacgatcccggtgggtaaagactccatgtcgatgaaaacccgctggcaggaaggtaacgaagagcgcgaaatgacgtcgccgctgtcgctggtgatttctgcatttgcccgcgtggaagatgtacgtcacaccatcacgccgcagctttctaccgaagataacgcactgctgctgattgatttgggcaaaggcaataacgcgctgggcgcaacggcgctggcgcaggtttatcgtcagcttggcgacaaaccggcagatgtacgcgatgtcgcgcaactgaaaggcttctatgacgcgattcaggcgctggttgcacagcgtaagctgctggcgtatcacgaccgctctgatggcggcctgctggtaacgctggcggaaatggcctttgctggtcattgtggcattgacgcggatatcgccactctgggtgacgatcgcctggcggcgttgtttaacgaagaactgggtgcggtgattcaggttcgtgccgctgaccgtgaagcggtcgagtccgtactggcacagcatgggcttgctgattgtgtccattatgtagggcaggcggtttccggtgaccgttttgtgattaccgccaacgggcagactgtattcagcgaaagccgcaccacgttgcgtgtctggtgggcagaaactacctggcagatgcagcgcctgcgtgacaacccggagtgtgccgatcaggagcatcaggcgaaatctaacgacgccgatccgggcctgaatgtaaaactgtcgttcgatatcaacgaagatgtggcagcaccgtatattgccactggcgcacgtccgaaagttgccgtactgcgtgagcagggcgtgaactcgcatgttgaaatggcggcagctttccaccgtgcaggctttgatgctatcgacgtgcatatgagtgacctgctgaccggacgcacgggcctggaagatttccacgccctggtcgcgtgcggtggtttctcctacggtgatgtgctgggtgccggtgaaggttgggcgaagtcaatcctgttcaatgaccgtgtacgcgatgagtttgcaaccttcttccaccgtccgcaaacgctggcgctgggggtatgtaacggttgccagatgatgtctaatctgcgtgaactgatcccaggtagtgagttgtggccacgttttgtgcgcaatacctccgatcgctttgaagcgcgtttcagcctggttgaagtaacccaaagcccgtctctgctgttgcaggggatggtgggctcgcaaatgccgattgctgtctctcatggtgaagggcgcgtggaagtgcgtgatgcggcgcatctggcggcactggaaagcaaagggctggtggcactgcgctatgtcgataacttcggcaaagtcactgaaacctacccggctaacccgaacggttcaccgaacggtattacggcagtcacgactgaaagtggtcgagtcaccattatgatgccgcacccggaacgtgttttccgtactgtcagcaactcctggcatccggaaaactggggcgaggatggcccatggatgcgcattttccgcaatgcgcgtaagcagttggggtaa

SEQ ID NO: 52939 - protein, 1295 aa, Escherichia coli B
MMEILRGSPALSAFRINKLLARFQAARLPVHNIYAEYVHFADLNAPLNDDEHAQLERLLKYGPALASHAPQGKLLLVTPRPGTISPWSSKATDIAHNCGLQQVNRLERGVAYYIEAGTLTNEQWQQVTAELHDRMMETVFFALDDAEQLFAHHQPTPVTSVDLLGQGRQALIDANLRLGLALAEDEIDYLQDAFTKLGRNPNDIELYMFAQANSEHCRHKIFNADWIIDGEQQPKSLFRMIKNTFETTPDHVLSAYKDNAAVMEGSEVGRYFADHETGRYDFHQEPAHILMKVETHNHPTAISPWPGAATGSGGEIRDEGATGRGAKPKAGLVGFSVSNLRIPGFEQPWEEDFGKPERIVTALDIMTEGPLGGAAFNNEFGRPALNGYFRTYEEKVNSHNGEELRGYHKPIMLAGGIGNIRADHVQKGEINVGAKLVVLGGPAMNIGLGGGAASSMASGQSDADLDFASVQRDNPEMERRCQEVIDRCWQLGDANPILFIHDVGAGGLSNAMPELVSDGGRGGKFELRDILSDEPGMSPLEIWCNESQERYVLAVAADQLPLFDELCKRERAPYAVIGEATEELHLSLHDRHFDNQPIDLPLDVLLGKTPKMTRDVQTLKAKGDALAREGITIADAVKRVLHLPTVAEKTFLVTIGDRSVTGMVARDQMVGPWQVPVANCAVTTASLDSYYGEAMAIGERAPVALLDFAASARLAVGEALTNIAATQIGDIKRIKLSANWMAAAGHPGEDAGLYEAVKAVGEELCPALGLTIPVGKDSMSMKTRWQEGNEEREMTSPLSLVISAFARVEDVRHTITPQLSTEDNALLLIDLGKGNNALGATALAQVYRQLGDKPADVRDVAQLKGFYDAIQALVAQRKLLAYHDRSDGGLLVTLAEMAFAGHCGIDADIATLGDDRLAALFNEELGAVIQVRAADREAVESVLAQHGLADCVHYVGQAVSGDRFVITANGQTVFSESRTTLRVWWAETTWQMQRLRDNPECADQEHQAKSNDADPGLNVKLSFDINEDVAAPYIATGARPKVAVLREQGVNSHVEMAAAFHRAGFDAIDVHMSDLLTGRTGLEDFHALVACGGFSYGDVLGAGEGWAKSILFNDRVRDEFATFFHRPQTLALGVCNGCQMMSNLRELIPGSELWPRFVRNTSDRFEARFSLVEVTQSPSLLLQGMVGSQMPIAVSHGEGRVEVRDAAHLAALESKGLVALRYVDNFGKVTETYPANPNGSPNGITAVTTESGRVTIMMPHPERVFRTVSNSWHPENWGEDGPWMRIFRNARKQLG

SEQ ID NO: 52940 - DNA, 3906 bp, Marinobacter sp. ELB17
  CDS (1)..(3906): transl_table=11
atgcttgaacttcgcggcgcaccagcgctttcaccttttcgtttcaataaattgcacgcctgcctgaaaggcagcgtccccgaaattgaccatgtgtacgccgagttcatgcattttgccgatttggatggcgacttgtctgacgcggaacaggcgattctggatcgtctgttgagttacggcccgagtgtgtccgtagagcagcccgaaggcgtgttgtttcttgtggttccccgccccggcacgctttcgccctggtcatccaaggcaaccgacattgtgcgtaactgtggcttgcgtcacgtcctgcgtattgagcggggtattgcttactatgtgcgttcggcgaagaagttaagcctggaacagcgggggaaaattgcggcgcttttgcacgaccgcatgacagaaaaagtatttcacgagatgggcggcgccgagttgctgttcagccacgacgaacctcgcgagttgggttgcgtgggtattcttgccggcggtcgtaaagcactggtggacgccaatcgtcgcttgggtatggcgctggcggacgacgagattgattatctgggggctgcgttctctgatctgaagcgtgaccccacagacgttgaactgatgatgttcgcccaagccaactccgagcactgtcgccataagatcttcaatgcgtcttgggacatcgacggcaaaaatcagcagaaatccctgttcgagatgattcgtaacacctacgaaatgaacagcgaaggcgtgttgtctgcttacaaagacaacgcctctgttattgccgggagtcgtgggggccgcttcttcccggattcgaacaccggtatttacggctacaatcaggaagacatacacatcctgatgaaggtggaaacccacaaccacccaacggcgattgcgccattttccggagctgccacgggcgccggtggagaaattcgtgatgaaggcgcaaccggtcgtggctccaagccaaaagccggcttaagcgggtttaccgtttctaacctaaatttgccgggcgacattcagccttgggaaatcggttatggcaagccagaccgtattgcctccgcgctggatataatgattgaaggcccgatcggcggcgcggcttttaataacgaatttggcaggccaaacctcacgggctatttccgtacctttgaagccaaggttgcaggccctgcaggcgaagaagtgcgcggctaccacaagccgatcatgattgccggcggcctgggtaacattcgagtcgagcacgtagagaagggccacattccggtaggcgccaagcttattgttctgggtggtccgtctatgctgattggcctgggcggcggagcggcatcctctatggattctggttccagcaatgaaaatctggattttgcctcggtacagcgtggcaatccggaaatggagcgccgttgtcaggaggtgattgatcgctgctggcagatgggtgacaccaacccgatttgctttattcacgacgttggcgctggtggcttgtcaaacgccatgccggagctggtgaaagacggtggtcgcggcggtaagtttgagttgcgtgaaatccccagcgacgagccgggtatgtcgccgctggaaatctggtgtaacgagtcccaggaacgttacgttatggccgtggcgccagaaaacctggagttgtttgatgcgctctgtcgtcgtgaacgttgcccttatgcggtgattggcgaagccgctgaagagcaccacctggagttggcggattcgtacttcaatgataagccggtcgatctgccgatggatatgttgtttggcaaggctccgcgtatgcatcgcagcatcacacgctcgtcatttactaaacgcttattcgattccacccgggtggacctgcacgaagcgattcgtcgcgtgttgcgtttgccgtcagtgggttccaagagtttcctgatcaccattggcgaccgcaccattaccgggcttgtagcacgggatcagatggtgggcccgtggcaggttccagtcgcagacgtagcggtaaccgccagttcctttgacgtgcgcagcggcgaagctatggccatgggcgagcgcatgccggttgccgcggtcaacgcgccggcgtctggccgtatggcggtgggtgaaactctgaccaatttagctgcggcgcctatcgccaagttgtcagatgtgcgcttgtcagcaaattggatggccgcggctggccacccgggggaagatgagaatctttatgaaaccgtgcgtgcggtgggaatggaactttgcccagagttgggtattaccattcccgtcggcaaagattcgatgtccatgaaaaccgtgtgggaagaaagcagtggtgagcagaaaagcgttacggcgccactttcgctggtggtcagcggctttgcgccggttaccgatgtggggctgacgctaacgccggagcttcagctggacgctggcgataccgatcttatcctggtagacctcgctgcgggccagaaccgtcttggcggctctgcgttggcccaagtatatggccaggttggcgcagtagcgccggacctggacgatccggaagacatgaaagcgtttttcgcggtgattcagggcctgaacgctgaccgaaaattgctcgcctatcacgatcgctcggatggcggcctttttgtcactctggttgaaatgtgctttgccagtcgtgccggtatcgacatcaagctggacggagtggcggaaaatgcctcgcagtttgtccgcgaactgttcaacgaagaattgggtgcggtgattcaggtgcgccgcgacgataccgaattcgtgctgcagcagttctccgcagctggattaggcaaccatacaatcgttattggtgagccgacttcggaggctcgtgtacagatgagctttaacggcgaatttgtagtagatgagccagtgctcgatttgcagcgcctttggagcgaaaccagcttccgtgttcaatcgttgcgcgacaacgaagactgcgcgcgggaggagtttgataaccttctggatgccaaagacccgggtttgcaggtagtaaccacgtttgatatcaatgaagacatcagtgcgccttttatcaacattggcgcgcgacccaaagtagccgtgttgcgagagcagggcgtaaacggccacgttgaaatggcggcggcgtttgatcgtgccggtttcaccgctgttgacgtacacatgagcgatttgttgtctggtcgaatgtcactggaaggcttcaacagcctggtggcttgtggcggcttttcgtttggtgacgttttgggcgccggcggaggctgggccaaatccatactgttcaacgatcgtgtgcgtgaccagtttgcggctttcttcaaccgtcaggacaccctggctctgggcgtgtgtaacggctgtcagatgctgtccagtctgcatgaactgatccctggcagtgaaggctggccgcgctttgttcgcaatcagtcagagcagttcgaggcgcgcctggctatggtggaggtgttgccttcaccgtcggctttcttcgaaggaatggcgggttcgcgtatgcccattgccgtagcacacggcgagggccagatcgagttgagcagcaacatctcgttggcgtcgctggcagaaagcgaacaaatcgctttgcgctacgtggacaattacggcgccgctactacacgctatccgtttaatcctaacggttctgaggctggcgtgaacggtttcacaactcgtgacggccgggtaacgatcatgatgccgcacccggagcgcgtattccgcgcagtacagcattcctggcaaccaaaaggttgggacgaagacgccccgtggctacggatgttccgtaatgcgcggcgctggtttggctaa

SEQ ID NO: 52941 - protein, 1301 aa, Marinobacter sp. ELB17
MLELRGAPALSPFRFNKLHACLKGSVPEIDHVYAEFMHFADLDGDLSDAEQAILDRLLSYGPSVSVEQPEGVLFLVVPRPGTLSPWSSKATDIVRNCGLRHVLRIERGIAYYVRSAKKLSLEQRGKIAALLHDRMTEKVFHEMGGAELLFSHDEPRELGCVGILAGGRKALVDANRRLGMALADDEIDYLGAAFSDLKRDPTDVELMMFAQANSEHCRHKIFNASWDIDGKNQQKSLFEMIRNTYEMNSEGVLSAYKDNASVIAGSRGGRFFPDSNTGIYGYNQEDIHILMKVETHNHPTAIAPFSGAATGAGGEIRDEGATGRGSKPKAGLSGFTVSNLNLPGDIQPWEIGYGKPDRIASALDIMIEGPIGGAAFNNEFGRPNLTGYFRTFEAKVAGPAGEEVRGYHKPIMIAGGLGNIRVEHVEKGHIPVGAKLIVLGGPSMLIGLGGGAASSMDSGSSNENLDFASVQRGNPEMERRCQEVIDRCWQMGDTNPICFIHDVGAGGLSNAMPELVKDGGRGGKFELREIPSDEPGMSPLEIWCNESQERYVMAVAPENLELFDALCRRERCPYAVIGEAAEEHHLELADSYFNDKPVDLPMDMLFGKAPRMHRSITRSSFTKRLFDSTRVDLHEAIRRVLRLPSVGSKSFLITIGDRTITGLVARDQMVGPWQVPVADVAVTASSFDVRSGEAMAMGERMPVAAVNAPASGRMAVGETLTNLAAAPIAKLSDVRLSANWMAAAGHPGEDENLYETVRAVGMELCPELGITIPVGKDSMSMKTVWEESSGEQKSVTAPLSLVVSGFAPVTDVGLTLTPELQLDAGDTDLILVDLAAGQNRLGGSALAQVYGQVGAVAPDLDDPEDMKAFFAVIQGLNADRKLLAYHDRSDGGLFVTLVEMCFASRAGIDIKLDGVAENASQFVRELFNEELGAVIQVRRDDTEFVLQQFSAAGLGNHTIVIGEPTSEARVQMSFNGEFVVDEPVLDLQRLWSETSFRVQSLRDNEDCAREEFDNLLDAKDPGLQVVTTFDINEDISAPFINIGARPKVAVLREQGVNGHVEMAAAFDRAGFTAVDVHMSDLLSGRMSLEGFNSLVACGGFSFGDVLGAGGGWAKSILFNDRVRDQFAAFFNRQDTLALGVCNGCQMLSSLHELIPGSEGWPRFVRNQSEQFEARLAMVEVLPSPSAFFEGMAGSRMPIAVAHGEGQIELSSNISLASLAESEQIALRYVDNYGAATTRYPFNPNGSEAGVNGFTTRDGRVTIMMPHPERVFRAVQHSWQPKGWDEDAPWLRMFRNARRWFG

SEQ ID NO: 52942 - DNA, 2232 bp, Bacillus sp. SG-1
  CDS (1)..(2232): transl_table=11
atgccgttaatgcttgagccgaatgaaaccagaatcaaagaagagaaaatctaccgcgagatgggtctgacggatgaagagttcataatggtggagaacatccttggaagaacaccgaactatacagagactggacttttctcggtgatgtggtcagagcattgcagctacaagaattcaaagcctgtgctgaaaaagttcccgattacaggagaacgtgtccttcaagggcctggagaaggagctggaatcgttgacatcggagaccaacaagcagttgtattcaagattgaaagccataaccacccgtcagcgatcgagccttatcaaggggcggcaacgggtgtcggcggaattatacgagatgtattttcgatgggggcaagacctgtcgcattactcaactctttacgctttggagaactggattctcctcgtgttaagtacctttttgaagaagtagtcgcagggattgccggctacggtaactgcatcggcattccgactgtaggcggagaagttcaatttgacgctgcctacgaaggcaacccgcttgtcaacgcgatgtgcgtcgggctgatcaaccatgaagacatccaaaagggtgttgctcatggaacaggcaacacggtgatgtacattggggcgaaaacgggccgtgacggaatccatggtgcgacatttgcatcagaagagctcggtgaagaatcagaagagaagcgcccagcggtccaggtaggagacccattcatggaaaaactgcttctcgaggcatgcctggaactggtaaaatccgatgcacttgtaggaattcaggatatgggtgcggcaggtcttacaagttcttcagcagaaatggcgagcaaagcaggttcgggtattgaaatgaaccttgaccttgttcctcagcgtgagaaagatatgactccttatgaaatgatgctgtctgaatctcaagaaagaatgctgattgtcgttgaaaaaggacgcgaggctggtattgaagagatcgtttcaaagtatgatttggatgctgtagcaatcggccgcgtgacagcggataaaacactgagacttcttcacggaggagaaatcgtggctgaagttccagtcgatgccttggctgaagatgcgccggtataccataagccttcccaggagcctgcttatttcagggagtttcaggagatggaggctgaagttcctcaagtgatcgattataaaaatacactaaaagacctgctgtcacagcccacaattgcgagcaaagagtgggtttacgatcaatatgatcaccaggtacgaacgaataccgtcgtttccccgggttctgatgctgcagtcatccgaatcagagggacgaagaaagcacttgcgatgacgacagactgtaactcccgctacctttatcttgatcctgaaatgggagggaagatcgctgtggttgaagcggcacgcaacatcgtctgctctggcgggatgcctttggcgatcacggactgtctcaacttcgggaatcctgaaaagccggaaattttctggcagatcgaaaaatccgttgacgggatgagcgaggcttgccgtacgctttccacaccggtcattggcgggaacgtttccctttacaacgagtcaagaggcaaggcggtttatccaacaccggtcgtcgggatggtcggcttgattgaagatctttcccatattacgactcagcggttcaaggctgcaggtgatttgatttatgtgattggtgatgcccgtgaagaatttggcggaagcgagcttcagaaaatgatgaacggcaagattttcgggaaatctccagcacttgatctggctgttgaacagcaaaggcaggaagcattgctgaatgcgatccgtaaagggtatgcagcatctgctcatgatattgctgaaggcggacttgcggttgcgatggcagaatcgactttcggaacaaaagggttgggagctacaatcagaataggcgacaatctaacggcagaattattcagtgaaacacagtcccgttttatcgtgtcagttaaaaaagaattccaggaacagtttgaacagacgatagcggatgcaaagctggttggtgaagtgaatgattcagcatacctcaaattcgtcgatcaggatgggcaagttgtcctgctttcaacagtggaagaattggaatcagcttggaaaggagctatcccatgcttgctgaaatcaaaggcttaa

SEQ ID NO: 52943 - protein, 743 aa, Bacillus sp. SG-1
MPLMLEPNETRIKEEKIYREMGLTDEEFIMVENILGRTPNYTETGLFSVMWSEHCSYKNSKPVLKKFPITGERVLQGPGEGAGIVDIGDQQAVVFKIESHNHPSAIEPYQGAATGVGGIIRDVFSMGARPVALLNSLRFGELDSPRVKYLFEEVVAGIAGYGNCIGIPTVGGEVQFDAAYEGNPLVNAMCVGLINHEDIQKGVAHGTGNTVMYIGAKTGRDGIHGATFASEELGEESEEKRPAVQVGDPFMEKLLLEACLELVKSDALVGIQDMGAAGLTSSSAEMASKAGSGIEMNLDLVPQREKDMTPYEMMLSESQERMLIVVEKGREAGIEEIVSKYDLDAVAIGRVTADKTLRLLHGGEIVAEVPVDALAEDAPVYHKPSQEPAYFREFQEMEAEVPQVIDYKNTLKDLLSQPTIASKEWVYDQYDHQVRTNTVVSPGSDAAVIRIRGTKKALAMTTDCNSRYLYLDPEMGGKIAVVEAARNIVCSGGMPLAITDCLNFGNPEKPEIFWQIEKSVDGMSEACRTLSTPVIGGNVSLYNESRGKAVYPTPVVGMVGLIEDLSHITTQRFKAAGDLIYVIGDAREEFGGSELQKMMNGKIFGKSPALDLAVEQQRQEALLNAIRKGYAASAHDIAEGGLAVAMAESTFGTKGLGATIRIGDNLTAELFSETQSRFIVSVKKEFQEQFEQTIADAKLVGEVNDSAYLKFVDQDGQVVLLSTVEELESAWKGAIPCLLKSKA

SEQ ID NO: 52944 - DNA, 2235 bp, Erythrobacter sp. SD-21
  CDS (1)..(2235): transl_table=11
atgagcgaaatcacccccgacatcgtcgcccagcacggcctctccgaagaagaatacgaccgcgtcctgcacgccctcggccgcgagcccaacctcgtggaattgggcatcttttcggtcatgtggagcgagcactgctcctacaagtcctcgcggctccaccttaagaagcttccaaccgaggcgccgtgggtgatctgcggaccgggcgagaacgcgggcgtgatcgatatcggcgacgggcaggcggccatcttcaagatggagagccacaaccacccgagctacatcgaaccctatcagggcgcggcgaccggcgtcggcggcatcctgcgcgacgtcttcactatgggcgcgcgcccggtggcgaacgccaacgcgctgcgcttcggccgtcccgaccatcccaagatgaagcacctcgtgcagggcgtggtcgcaggcattggcggctacggcaattgcgttggcgtgccgactgtgtgcggcgagaccaatttcaatccggcctatgatggcaatatcctcgtcaacgcgatgacggtgggcgtcgccgatgccgacaagattttttacagcgcagcgaccggcgtcgggaacccgatcgtctatgtcggctccaagaccgggcgcgacggtatccacggcgcgaccatggcgtccgccgatttcgaggaagacgccgacgccaagcgccccacggtgcaggtgggcgaccccttcaccgagaagctgctcatcgaagcgtgcctcgaactgatggcgaccgacgcgatcgtcgcgatccaggatatgggcgccgcaggcctcacctcctccagcgtcgaaatggcgaccaacggcaaggccggcatccgcctcgacatggacaaggttccctgccgcgaagagggcatgacgccttacgaaatgatgctgagcgagagccaggaacgcatgctcatggtcctgaagcctggcaaggaagcgatggcggcggcgatcttcgagaagtgggagctcgatttcgcagtcatcggcgaagttaccgatacgcagcacatggtcctcgaattcggcggcgaagttgtctgcgacattccgctcggtcctctcgcagccgatgcgcccgaatacgatcgcccttacctttcgaaagaagaatacacgacgtgggctggcgtcgctccgatgaccaatcgcccggacacggacgatgtcggcggcgacctgatgaagctgcttgcctcgcccaacctctcgtcgcgcaagtggatttccgagcagtacgacagccaggtcggcgcggacacgctccagaccggtggcgatgcaggcgtggtgcgcgtgcacggcacgaagaaggcgctggcgatcagcaccgactgcaccccgcgctatgtccacgctgccccttatgaaggcggcaagcaggcaattgccgaggcctatcgcaacctctgcgcagtgggcgcgcgaccgctggcggtgaccaactgcctcaacttcgccaacccgcagcgccccgaaatcatggcgcagttcgtccacgcgctggaaggcatgggccgcgcctgccgcgtgctcgacttccccgtagtgagcggcaacgtcagcctctacaacgagagcaaggcgaccggcggcggttcggccatcctgcctacccccgccatcggcggcgttggcctgatcgacgactacgaccacatgatgaccatgccgttcaaggccgagggcgaggcaatctacctcatccatgccgaggaatgggcaaccgccgatccggaacgttcgcacctcggcaaatcgctttggctcaaggaaatccacggccgcgacgaaggccgtaccccgccaaccgatctcacagtcgagaagaacgcgggcaagatcatcctccagctcattgccgacggtcttgtcagcgcggtccacgatgtctcggacggcggcctcgccatcgcgctggccgaaatggccatagctggcggtatcggcgccgatgtcgattggaacgaggagtattcgaaggctgcatggtggttcggtgaagatcagggccgatacgtgatcactgtccccgacacgcaggcgctcaacgaagcgcttgccgagggtacggagaacgacgagacagcgtccatcggtttccgccgcatcggcaagaccggcggctccacgctgttcggcaattcgatcgacgaaatgcgcgccgcacaccgcagcttcttcgacgagtggatggagaactga

SEQ ID NO: 52945 - protein, 744 aa, Erythrobacter sp. SD-21
MSEITPDIVAQHGLSEEEYDRVLHALGREPNLVELGIFSVMWSEHCSYKSSRLHLKKLPTEAPWVICGPGENAGVIDIGDGQAAIFKMESHNHPSYIEPYQGAATGVGGILRDVFTMGARPVANANALRFGRPDHPKMKHLVQGVVAGIGGYGNCVGVPTVCGETNFNPAYDGNILVNAMTVGVADADKIFYSAATGVGNPIVYVGSKTGRDGIHGATMASADFEEDADAKRPTVQVGDPFTEKLLIEACLELMATDAIVAIQDMGAAGLTSSSVEMATNGKAGIRLDMDKVPCREEGMTPYEMMLSESQERMLMVLKPGKEAMAAAIFEKWELDFAVIGEVTDTQHMVLEFGGEVVCDIPLGPLAADAPEYDRPYLSKEEYTTWAGVAPMTNRPDTDDVGGDLMKLLASPNLSSRKWISEQYDSQVGADTLQTGGDAGVVRVHGTKKALAISTDCTPRYVHAAPYEGGKQAIAEAYRNLCAVGARPLAVTNCLNFANPQRPEIMAQFVHALEGMGRACRVLDFPVVSGNVSLYNESKATGGGSAILPTPAIGGVGLIDDYDHMMTMPFKAEGEAIYLIHAEEWATADPERSHLGKSLWLKEIHGRDEGRTPPTDLTVEKNAGKIILQLIADGLVSAVHDVSDGGLAIALAEMAIAGGIGADVDWNEEYSKAAWWFGEDQGRYVITVPDTQALNEALAEGTENDETASIGFRRIGKTGGSTLFGNSIDEMRAAHRSFFDEWMEN

SEQ ID NO: 52946 - DNA, 3771 bp, unidentified eubacterium SCB49
  CDS (1)..(3771): transl_table=11
atgcaagataacggtttcttaaaaacttatagattgcatgttagattaatatgtcgtaatcaagctaaaataattacatttgtagcacaatttaaccctctaactttaaagagtatgattcacttcttcggaaacgccaaaaataaagtttttgcagtccaaactcaaggagaaataaacgcaatagatagtaaaaaattaacgtggctttttggcgacgtacctcaaatagaccaatccgtacttgcggatttttttattggtcctcgtgccgcaatgattactccttggagtaccaacgccgttgagatcacccaaaatatgggaattgagggaatcattagaattgaagaatttcataatgcttcggaaactcctgataattatgaccctatgctttctcaaaagtataaggaacttggtcaagaaatgttcaccattaatatcgaaccagaacctattttagacatagaagatatttcggcatttaataaagcagaaggtcttgcgcttaatgatgaagaggttgtttatttagaaaacctttctaaaaaactagagcgaccacttacagactcagaggtatttgcttttagtcaggcgaacagtgagcactgtcgtcataaaatttttaatggtacgtttataatagatggagaagaaatgccttcttcattatttaaacttattaagaaaacaagtagtgaaaaccctaacgatattgtctctgcctataaagataacgtagcgtttgtaaaggggccaaaagcaacacagtttgctccagcaagcccagacaaaccagattattataaaaatacagaatttgacagtgtgatttctcttaaagcagaaacacacaacttccctactacggtagagccttttaatggtgctgcaacaggtagcggtggtgagattagagacagacttgccggtggtaaaggttctttacctttagcaggtactgcagtttatatgacttcttactcaagactaaatgatgagaaaccttgggaaaaaacaatgaaaccaagagactggttataccaaacgcctctagacatattaattaaagcaagtaatggagcttcagattttgggaacaaatttggacaacctttaattacaggatctgtacttacttttgaacatcaagatgatgctcgtaaattaggttttgacaaagtaataatgatggctggtggtattggttatggtaaagcagaccaagcactaaaagacacaccaaaaacaggtgataaagttgttattcttggtggagaaaattacagaattggaatgggtggtgctgccgtatctagcgcagatactggtgagttttctagcggtatcgagttaaatgcaatacaacgttctaacccagaaatgcaaaaacgtgctgcaaatgcggtgcgtggtatggtagagagcgacataaaccctattgtgtctattcacgatcacggagctggtggtcaccttaattgtttaagcgaacttgtagaagatactggagggatgattgatcttgataaacttcctgtaggagatcctacgctttctgcaaaagagattattggtaacgaatctcaagaacgaatgggacttgttataggagaagatgatgttgatactcttaaaagagtagcagatagagaacgctcacctatgtatgaagtgggtgaagtaacaggagatcatcgttttacttttaaaagcaaaacaacgggtgcaactcctatggattatgctttagaagacttttttggaagctctccaaaaacaataatgaatgataaaacagtaacacgtgattacacagacgcgagttatgatgtttctgaaataaaaaactatgtaagtcaagtattacaactagaagcagtagcttgtaaagactggcttacaaataaagtagaccgttgtgttacgggtaaagttgcaaaacaacaatgtgctggtccattacaattgcctcttaacaattgtggtgtaatggccttagattataacggaattaacggtgttgctactagtattggacactcccctatttctggattaattgatcctgttgctggtgcacgtaattctatcacagaatctttaacaaacattatttgggctccattagaaaatggacttaaaagtatatcactttctgcaaactggatgtggccttgtaacaatgaaggtgaagatgctagattatatcaagctgtaaaagctgttagtgagtttagtattgatcttggcgtgaatgttcctacgggtaaagattcactgtctatgaaacagaaatacaaaaacgaagaagtaatctcgccaggaacagtcattatttctgcgggtgcacactgtagtaatataaaacaagtagttgagcctgttgctcaattaggaaaaggaaatctttactacattaacatctctcaagacgactttaaattaggaggttcttcttttgggcaaattttaagcgcgatcggaaaccaagcgccaacagttaaaagtgcagcctacgtaaagacggtatttaatacaatacaagcgttaataaaagacaatcaaatagttgctgggcacgatgttgcttctggtggtttaattactactttgttagagttattcttcggaaatactaacaccggagctaaattagatctaacaggacttggtgatgatcttgtaaaaatactttttgcagaaaactgcggaattgtaatccaagcggcagataatacaatatttgaaaaagcactgaatgcaaacgatattagcttccataatttaggtgaagtaactgaaagtaacgcactagaaataacattaggaagtcaagacgtacaatttgatattgccgaaatgcgcgatacttggtatgaaacttcttatttattagacacgaagcaaagcggaaaccaagcaaaagcaaggtttgaaaactataaaaatcaacctttaaacttcacatttccgaagcaatttacaggtaagttacccgaagctcctaaaggcgaacgtataaaagcagccatcattagagaaaaaggtagtaatagtgaacgcgagatggcaaatgcaatgtatttagcaggttttgatgttaaagatgtgcatatgacagatttaataagcggtcgtgaaactcttgaagacattaagtttattgctgctgtgggaggattctcaaacagtgatgtattaggctctgctaaaggttgggctggtgcatttttatataatgaaaaagcaaacaaagcacttaaagacttctttgcaaaagatgacaccttatcattaggtgtttgtaatggttgccaactttttgttgaattaggactattaacaccagaagacacagagaaaccaaaaatgctacataatgatagtggcaaatttgaatgctcatttacttctgtgaaaattcaggaaaataattctgtaatgttatctagtcttgctggtagcacacttggaatttgggcagcacacggtgagggtaaattctcatttccgaaagaagaaaatcactataatattgtaggaaaatatggttatgacgcttttccttcaaaccctaacggaagtgattttaacactgcaatgatgactgataaaactggacgtcacctagtaatgatgccacacttagagcgatcaactttcccttggaactggggtcattacccaagtgatagtaatgatgtcgttacgccttggttagaaggttttgttaacgctagaaaatggttagaaactaaataa

SEQ ID NO: 52947 - protein, 1256 aa, unidentified eubacterium SCB49
MQDNGFLKTYRLHVRLICRNQAKIITFVAQFNPLTLKSMIHFFGNAKNKVFAVQTQGEINAIDSKKLTWLFGDVPQIDQSVLADFFIGPRAAMITPWSTNAVEITQNMGIEGIIRIEEFHNASETPDNYDPMLSQKYKELGQEMFTINIEPEPILDIEDISAFNKAEGLALNDEEVVYLENLSKKLERPLTDSEVFAFSQANSEHCRHKIFNGTFIIDGEEMPSSLFKLIKKTSSENPNDIVSAYKDNVAFVKGPKATQFAPASPDKPDYYKNTEFDSVISLKAETHNFPTTVEPFNGAATGSGGEIRDRLAGGKGSLPLAGTAVYMTSYSRLNDEKPWEKTMKPRDWLYQTPLDILIKASNGASDFGNKFGQPLITGSVLTFEHQDDARKLGFDKVIMMAGGIGYGKADQALKDTPKTGDKVVILGGENYRIGMGGAAVSSADTGEFSSGIELNAIQRSNPEMQKRAANAVRGMVESDINPIVSIHDHGAGGHLNCLSELVEDTGGMIDLDKLPVGDPTLSAKEIIGNESQERMGLVIGEDDVDTLKRVADRERSPMYEVGEVTGDHRFTFKSKTTGATPMDYALEDFFGSSPKTIMNDKTVTRDYTDASYDVSEIKNYVSQVLQLEAVACKDWLTNKVDRCVTGKVAKQQCAGPLQLPLNNCGVMALDYNGINGVATSIGHSPISGLIDPVAGARNSITESLTNIIWAPLENGLKSISLSANWMWPCNNEGEDARLYQAVKAVSEFSIDLGVNVPTGKDSLSMKQKYKNEEVISPGTVIISAGAHCSNIKQVVEPVAQLGKGNLYYINISQDDFKLGGSSFGQILSAIGNQAPTVKSAAYVKTVFNTIQALIKDNQIVAGHDVASGGLITTLLELFFGNTNTGAKLDLTGLGDDLVKILFAENCGIVIQAADNTIFEKALNANDISFHNLGEVTESNALEITLGSQDVQFDIAEMRDTWYETSYLLDTKQSGNQAKARFENYKNQPLNFTFPKQFTGKLPEAPKGERIKAAIIREKGSNSEREMANAMYLAGFDVKDVHMTDLISGRETLEDIKFIAAVGGFSNSDVLGSAKGWAGAFLYNEKANKALKDFFAKDDTLSLGVCNGCQLFVELGLLTPEDTEKPKMLHNDSGKFECSFTSVKIQENNSVMLSSLAGSTLGIWAAHGEGKFSFPKEENHYNIVGKYGYDAFPSNPNGSDFNTAMMTDKTGRHLVMMPHLERSTFPWNWGHYPSDSNDVVTPWLEGFVNARKWLETK

SEQ ID NO: 52948 - DNA, 3894 bp, Moritella sp. PE36
  CDS (1)..(3894): transl_table=11
atgcatataatgcgaggggcgccagcgctttctgagtttcgtactaataaattagtcgaacgttgtaatgatgtaggattatcggatataacaatttacgcggagtacatccattttgccgatgtaacaactccgctcagtgacaatgaacggagcgtcctggaaaaattgttgacctacgggccaagaattgcagagcacgaacccgaaggaactctccttcttgtcactcctcgtcccggcactatctctccttggtcttctaaatctaccgacatcgcaatcaactgcggcctttctaaaataaaacgtcttgaacgtggcatcgcttactacatctcttcatctacaccacttacaccaaaccaattacaaactgctgcaagccttatgcacgaccgtatgatggaagttgtatttgataacttagatgctgcggaacagttatttgtgcaagcacaagcgcgcccattaaagtctgttgatatcttagcgggtggccgtgaggcacttgttgacgcgaatgttaaattaggtttagcactggctgaagatgaaatcgattatttgattgccagctttacgcaattaaagcgtaatccaaatgacatcgaattaatgatgtttgctcaagcaaactcagagcattgtcgtcataagatttttaatgctgactggaccattgatggtcaagagcaagaaaaatcattattccagatgatcaagaacaccttcgcacaaaccggtgatcatgttttatctgcatataaagacaatgcttcggtgatggaaggttcaaaagccggccgtttcttccctgacccacatactctgcagtatgaatatcaccaagaagatattcaaattctgatgaaagttgagacgcacaatcacccaacagcaatctctccttggcctggtgccgcgacaggttctggtggtgaaattcgtgatgaaggcgcaacgggtcgtggttcgaaaccaaaagctggtttagttggttttagcgtatcgaacttacgtattccaggatttgaacagccgtgggaaaccgactttggtaaacctggtcgtatcgttagtgcattagacattatgctagaaggcccacttggtggcgctgcatttaataacgaatttggtcgtcctaacatattaggttatttccgtacttatgaagctgaagttaacagccataacggtgtggaagtacgtggttaccacaagccaattatgctggctggtggtctgggtaatatccgtgaccaacacgttaaaaaaggggatatcccagtaggcgcgaaacttatcgctctgggtggtcctgcaatgaacattggtttaggtggcagtgctgcttcatcaatggattcaggtcaatcacacgaagatttagattttgcttcggtacaacgtgaaaatccagaaatggaacgtcgttgtcaggaagttatcgaccgttgctggcagcttggtgacgacaatccaattgctttcattcacgatgtgggcgcgggcggtttatcaaacgcattccctgaacttgtgcatgacggtggtcgtggcgctaaattcgaattacgtgatatcaacaacgatgaaccaggtatgtcaccgcttgaaatctggtgtaatgaatcacaagaacgttacgttatggctgttgcacctgaaaacctagccacatttgaagcgatttgtaagcgtgaacgcaccccattctctgtggttggcgtagcgactgaagagttgcatttgacggtaacggattcgttattagacgaaacgccgattgatatgccaatggaagtattattaggtaaagcacctaagatgcaccgtgaagcaacaacgctggtaacagaaggtgaaccattagattttactggtgttacggttaaagatgctgcagagcgtctattacgtttacctgcgattgctgagaagacgttcttgatcaccattggtgaccgctcggtaacgggtttagttgcacgtgaccaaatggttggtccttggcaggttccagtagccgattgcgcagtaaccgcagcaagttttgatacttacgctggtgaagcaatggcaattggtgaacgtacgccattagcattgttaaacttccctgcatcaagccgtatggccgttgctgaagcattaaccaatattgcggctactgaaattggtgatttaacccgtattaacttgtctgctaactggatgtctgcagcgggtcaccctggtgaagatgcgggtttatatgcggcggttaaagcggtaggtgaagaactttgccctgaattgaacctgactattccagtgggtaaagattcaatgtcaatgaagacgcgctgggaagataacggtgataataaagaagttacctcaccattatcactgattattactgcattcggccgtgtgactgatgtacgtaaaacagtaaccccgcagctacgcactgataaaggcgcaactgaccttatccttatcgatttaggtaatggcaagaatcgtctaggcgcttcatcattagcacaagtatacaagcagctgggtcaacatacacccgatgtggatagcgctgagcagctgaaaggcttcttcgatgcgatgcaagtattagtgaaagagcaatcattactggcttaccatgaccgtagtgacggtggtttattctcgacagtaacagagatggcatttgctggtcactgtggtgttgatgttgaacttgatatgctaggtactgatgatcttgcggcactgtactcagaagagttaggtgctgtgatccaagttacttcagcaatgaaggaacaagtactcacaacactagcaggccacggtctagctgcatgttgtcatgtgattggttcaaccaatgaagatgatatggttcgcttcacccgtaacggtgaaatcgtattagctgaatcgcgtacttattaccgtgctatgtgggctgaaacaacgctgaaaatgcaagcgctgcgtgacaacccaagttgtgctcaagaagaattcgatcttaaacttgatgtgaaagaccctggtctaaatgttaacttaagcttcgatgtgaaccacgatattgcggcaccttacattgcaacaggcgtacagcctaaaatagcgattttacgtgagcagggtgtaaactcgcaaacagaaatggctgcggcatttgatcgtgctggttttgctgctcaagatattcacatgagtgatattcttagcggtcgcgttaacctagctgacttcgcaggccttgccgcttgtggtggtttctcttacggtgacgtactgggtgcgggtgaaggttgggctaaatcaatcttatttaacccacaagcacgcgatcagtttgcggctttcttcgaacgtgaagacagtttctcactgggtgtatgtaatggttgtcagatgttatctaacttgggtgaacttatcccgggttcagaattatggccacgtttcgtgactaaccaatcggaacgttttgaagcacgtttcagcttggttgaagtaccgaaaaatccgtcaatattcttaggtaacatggctggttcaagaatgcctatcgctgtatctcacggtgaaggtcgcattgaattacgcgatgatgcgcatctgcaagcactacaaaacagtggcaccgtgacacttaacttcgttgataactatggtcaacctacgacgcaatacccatcaaatccaaatggttcgccattaggtattactggtttaacaaccactgatggccgcgtaactatcatgatgccacatccggaacgtgtattccgcagtgtgagcaactcatggcatccagaagagtggggcgaagatagcccctggatgcgtatgttccgcaatgcgcgtgtgaatttaggttaa

SEQ ID NO: 52949 - protein, 1297 aa, Moritella sp. PE36
MHIMRGAPALSEFRTNKLVERCNDVGLSDITIYAEYIHFADVTTPLSDNERSVLEKLLTYGPRIAEHEPEGTLLLVTPRPGTISPWSSKSTDIAINCGLSKIKRLERGIAYYISSSTPLTPNQLQTAASLMHDRMMEVVFDNLDAAEQLFVQAQARPLKSVDILAGGREALVDANVKLGLALAEDEIDYLIASFTQLKRNPNDIELMMFAQANSEHCRHKIFNADWTIDGQEQEKSLFQMIKNTFAQTGDHVLSAYKDNASVMEGSKAGRFFPDPHTLQYEYHQEDIQILMKVETHNHPTAISPWPGAATGSGGEIRDEGATGRGSKPKAGLVGFSVSNLRIPGFEQPWETDFGKPGRIVSALDIMLEGPLGGAAFNNEFGRPNILGYFRTYEAEVNSHNGVEVRGYHKPIMLAGGLGNIRDQHVKKGDIPVGAKLIALGGPAMNIGLGGSAASSMDSGQSHEDLDFASVQRENPEMERRCQEVIDRCWQLGDDNPIAFIHDVGAGGLSNAFPELVHDGGRGAKFELRDINNDEPGMSPLEIWCNESQERYVMAVAPENLATFEAICKRERTPFSVVGVATEELHLTVTDSLLDETPIDMPMEVLLGKAPKMHREATTLVTEGEPLDFTGVTVKDAAERLLRLPAIAEKTFLITIGDRSVTGLVARDQMVGPWQVPVADCAVTAASFDTYAGEAMAIGERTPLALLNFPASSRMAVAEALTNIAATEIGDLTRINLSANWMSAAGHPGEDAGLYAAVKAVGEELCPELNLTIPVGKDSMSMKTRWEDNGDNKEVTSPLSLIITAFGRVTDVRKTVTPQLRTDKGATDLILIDLGNGKNRLGASSLAQVYKQLGQHTPDVDSAEQLKGFFDAMQVLVKEQSLLAYHDRSDGGLFSTVTEMAFAGHCGVDVELDMLGTDDLAALYSEELGAVIQVTSAMKEQVLTTLAGHGLAACCHVIGSTNEDDMVRFTRNGEIVLAESRTYYRAMWAETTLKMQALRDNPSCAQEEFDLKLDVKDPGLNVNLSFDVNHDIAAPYIATGVQPKIAILREQGVNSQTEMAAAFDRAGFAAQDIHMSDILSGRVNLADFAGLAACGGFSYGDVLGAGEGWAKSILFNPQARDQFAAFFEREDSFSLGVCNGCQMLSNLGELIPGSELWPRFVTNQSERFEARFSLVEVPKNPSIFLGNMAGSRMPIAVSHGEGRIELRDDAHLQALQNSGTVTLNFVDNYGQPTTQYPSNPNGSPLGITGLTTTDGRVTIMMPHPERVFRSVSNSWHPEEWGEDSPWMRMFRNARVNLG

SEQ ID NO: 52950 - DNA, 2439 bp, Francisella tularensis subsp
  CDS (1)..(2439): transl_table=11
atgattacgatttttgaaggtttaagtgcactgtctccttttaagcgagaaaaaattttagcagctgctaaaaaaatatccaataaagttgaatcagtatctgcacagtatatccatgttacagagcttgaatcagagttaaatagtgagcaagaaagaatagttaaatctctacttaactacaatagagagtatggcatagctcagcctatgggtcatacttttatcatagctccaagagttggcactatatcgccttggtcttctaaagctaccgatattatcaaaaatactggtatcaaagctgttaaaaggatagaaagagctattttattcggtgttgagggacaagtttctgctagtgagctaaaacaaatccaagatatcgttcatgaccgtatggttgaggaagtgtttagttgcaaagatgatttatatagactctttagtgtaacagcaccaaaagaacttgaatttgttaatgttttagaaaaaggtgctcaagctatcaaagaagctgatagaaaacttggcttagctctaagtgagcaagagattgaatatctagcagatgaatatacaaagcttggtagaaatcctacagatacagagttatatatgtttgcccaagcaaattcggagcattgtagacataagatttttaatgctaaatggactatagatggtcaggagcaagataaatcattgtttaagatgattagaaatactactgagaaatctccacaaggtgtgctatcagcatataaggataatgctgctgtgatagagggtgcaacggctcaaagattctatccaaatacgcaaactggtgtctatagtttcaatcaagaagaagttgatatcttgatgaaagttgagactcataatcacccaactgctatagcaccatttagtggctcagctactggtgttggtggtgagattcgtgatgaaggtgcaacaggtcttggagcaaaaccaaaagctggcttgactggttttacagtttcaaatctaaatattccaggttttgaacaggcttgggagactagtaaatatggtaagcctaaccatattgtaacacctttacaaataatgctagaggcgcctattggtggtgctcattactcaaatgaatttggtcgtccaaatttaaatggttatttccgtacctatgagcaagaggtcaatacatctgctggcaaagagatgtttggataccataagccaattatgattgctggtggtatgggtaatatcaaaagaatgcatgttgagaaaggcgttatcaaagttggtgctaagctaatctgtcttggtgggcctgcgatgcgtattggtcttggtggtggtgctgcgtcatctgttgtatcttctgatactaactcagagctagattttgcatcagttcagcgtgataatgccgaaatggagcgccgttgccaagaggtaatcgacagatgttggcaaatgggcgagaataacccaatcacatttatccatgatgttggtgctggcggtatttcaaatgctttcccagagcttgtcaaagatggtggagtaggcggttattttgagcttagaaaagtaaatgtcggtgaagaggggctttctccactggaaatatggtcaaatgagtcacaagaaagatatgtattatcagttgaccctgagtcactagagctttttgagcagttatgtaatagagaaagatgtccatttgcagtagttggtgaggcgatttctgaaaagcatatcactctaaatgatgagtattttgataataagccggttgatttaccaatgggattattatttggtaatacaccacaaatgcatattgatgtaaaaactgtcaaagttgagcaacaagcttttgatacaagtgctattaagcttgatgaagcgattgagagagtgctaaaagtaccagctgtagcttctaaatctttcctaatcacaattggtgatagaagtattacaggtatggttgcacgtgatcaaatggttggtccatggcaagtgcctgtagctgattgtgctgtgacaactgctactgtagatagtcaagctggtgaggctatggcaatgggcgagagaactcctgttgctgctattaatgctgcggcttctggtagattagcgattgctgagattgtaacaaacttattagctgcggatattgaaaagttgagtgacattcgcctctgtgctaactggatggttgctgcaaatcaaggtggcgaaacccaaaaattatatgaaaccgtaagagctgttggtatggaatttgcaccagagttgggtattgcaataccagttggtaaagattcaatgtcaatgaaaactaagtggtcagataacggtcaagctaaatcagtgacatcgccattatcgttagtgatctcaggtttctcgcctgtgacaaatgcgctgtaa

SEQ ID NO: 52951 - protein, 812 aa, Francisella tularensis subsp
MITIFEGLSALSPFKREKILAAAKKISNKVESVSAQYIHVTELESELNSEQERIVKSLLNYNREYGIAQPMGHTFIIAPRVGTISPWSSKATDIIKNTGIKAVKRIERAILFGVEGQVSASELKQIQDIVHDRMVEEVFSCKDDLYRLFSVTAPKELEFVNVLEKGAQAIKEADRKLGLALSEQEIEYLADEYTKLGRNPTDTELYMFAQANSEHCRHKIFNAKWTIDGQEQDKSLFKMIRNTTEKSPQGVLSAYKDNAAVIEGATAQRFYPNTQTGVYSFNQEEVDILMKVETHNHPTAIAPFSGSATGVGGEIRDEGATGLGAKPKAGLTGFTVSNLNIPGFEQAWETSKYGKPNHIVTPLQIMLEAPIGGAHYSNEFGRPNLNGYFRTYEQEVNTSAGKEMFGYHKPIMIAGGMGNIKRMHVEKGVIKVGAKLICLGGPAMRIGLGGGAASSVVSSDTNSELDFASVQRDNAEMERRCQEVIDRCWQMGENNPITFIHDVGAGGISNAFPELVKDGGVGGYFELRKVNVGEEGLSPLEIWSNESQERYVLSVDPESLELFEQLCNRERCPFAVVGEAISEKHITLNDEYFDNKPVDLPMGLLFGNTPQMHIDVKTVKVEQQAFDTSAIKLDEAIERVLKVPAVASKSFLITIGDRSITGMVARDQMVGPWQVPVADCAVTTATVDSQAGEAMAMGERTPVAAINAAASGRLAIAEIVTNLLAADIEKLSDIRLCANWMVAANQGGETQKLYETVRAVGMEFAPELGIAIPVGKDSMSMKTKWSDNGQAKSVTSPLSLVISGFSPVTNAL

SEQ ID NO: 52952 - DNA, 2199 bp, Magnetospirillum gryphiswaldense
  CDS (1)..(2199): transl_table=11
gtgagccagattacccctgaagtcatcgcccaacacggcatcaagcccgatgagtacaagctgatcctcgagatcatgggccgtgcgcccaatctgaccgagttgggcatcttctcggtcatgtggtccgagcattgctcgtacaaatcgtcgaagaagtggctgaagaccctgccgaccaaggcgccgtgggtcatctgcggcccgggcgagaatgccggcatcatcgatatcggcgacgatcaggccatcgtcttcaagatggaaagccataaccaccccagtttcatcgagccctatcagggcgcggccaccggtgtgggcggcatcctgcgcgacgtcttcaccatgggcgcgcggcccatcgccaacatgaacgcgcttcgtttcggcgacccggccaaccccaagacccgccatctggtggcgggtgtggtcgccggcatcggcggctacggcaattgcgtcggcgttcccaccgtgggcggcgagaccaatttccacaaattctacaacggcaacatcctggtcaacgccatgaccgtgggtctggccgacaagaacaacattttctattcggccgccgccggtgtcggtaatcccgtcgtctatttcggttccaagaccggtcgtgacggcatccacggtgccaccatggcttcggccgaattcgacgaaaagtcggaagaaaagcgcccgaccgtgcaagtcggcgaccccttcaccgaaaagctgctgatcgaagcctgcctggaactgatggccaccgatgtcatcgtcgccatccaggacatgggcgccgccggcctgaccagctcgtcgttcgagatggcgtcgaagggcggcctgggcgtcgagcttgatctggacagtgtccccatgcgcgaagagggcatgagcgcctacgagatcatgctgtcggaatcgcaagaacgcatgctgatgatcctgaagccgggcaaggaagatgttgcccgcgcgatcatggacaagtgggaactggatttcgccgtcatcggcaccctgaccgacactggtcgcatggtgctgaagcgtcatggcgaaatcgtcgccaatctgcccatcgacccgctggcccaggcctcgccggaatatgaccgtccgtggacggccccggccaagctgccggtgatcgccgccgacaaggtggaagcggtcgacccggccagcgccttgaagaccctgctgggctgccccgatctggcctccaagcgttggatctacgagcagtacgaccacatggtcatgggcgacaccgtgcagcgtcccggcggcgatgccgccgtggtccgtatccatggcacgcaaaaggcggtggccatcaccactgattgcaccccgcgttattgtcaggccgatccgcatgaaggcggccgtcaggcggtggcggaagcctatcgcaacatctcggccaccggcgcggtgccgttggcggtgaccgacaatctgaatttcggcaacccggaaaagcacgagatcatgggccagatcgtggaagcgatcaaaggcatgggcgaggcttgccgtgagttggacttccccgtcgtctccggcaacgtgtcgctttacaacgaaacccagggcacggccatccagccgaccccggccatcggcgccgtcggcctgcttgacgacgtgtccaagcacatgaccgtggccttcaaggccggcggtaaccacatcgtgctgttgggcgaaaccaagggttggctgggtgcgtcgctgtacctgcgcgaagtctgtggccgcgaggaaggggcgccgccgccggtggcgctgcaccgcgagcggcgcaagggtgaactggtccgccagttgatccaggacggtcagatcaccgcctgtcacgacgtgtccgatggcggcctgctggtggcggtggcggaaatggccatggccagcggcatcggcgccagcctggaggcgccgtccagcctgccgctgcatgcctggtgcttcggcgaggaccagggccgctatgtgctggaagtgggccaggacgatctggtcgccgtgctggaagcggcgctggaacacgattgcgtcgcccgcgtcatcggcaagaccggtggggccgatatcagcgtcggcggttccagcgttgccgtggccgaactgaaatcggtcaacgagtcctggatgcccaatttcatgggtgcggaaatgtccggtcactga

SEQ ID NO: 52953 - protein, 732 aa, Magnetospirillum gryphiswaldense
MSQITPEVIAQHGIKPDEYKLILEIMGRAPNLTELGIFSVMWSEHCSYKSSKKWLKTLPTKAPWVICGPGENAGIIDIGDDQAIVFKMESHNHPSFIEPYQGAATGVGGILRDVFTMGARPIANMNALRFGDPANPKTRHLVAGVVAGIGGYGNCVGVPTVGGETNFHKFYNGNILVNAMTVGLADKNNIFYSAAAGVGNPVVYFGSKTGRDGIHGATMASAEFDEKSEEKRPTVQVGDPFTEKLLIEACLELMATDVIVAIQDMGAAGLTSSSFEMASKGGLGVELDLDSVPMREEGMSAYEIMLSESQERMLMILKPGKEDVARAIMDKWELDFAVIGTLTDTGRMVLKRHGEIVANLPIDPLAQASPEYDRPWTAPAKLPVIAADKVEAVDPASALKTLLGCPDLASKRWIYEQYDHMVMGDTVQRPGGDAAVVRIHGTQKAVAITTDCTPRYCQADPHEGGRQAVAEAYRNISATGAVPLAVTDNLNFGNPEKHEIMGQIVEAIKGMGEACRELDFPVVSGNVSLYNETQGTAIQPTPAIGAVGLLDDVSKHMTVAFKAGGNHIVLLGETKGWLGASLYLREVCGREEGAPPPVALHRERRKGELVRQLIQDGQITACHDVSDGGLLVAVAEMAMASGIGASLEAPSSLPLHAWCFGEDQGRYVLEVGQDDLVAVLEAALEHDCVARVIGKTGGADISVGGSSVAVAELKSVNESWMPNFMGAEMSGH

SEQ ID NO: 52954 - DNA, 2349 bp, Corynebacterium glutamicum
  CDS (1)..(2349): transl_table=11
atggcctggagctgttcctgtccgccgttggcaccatcgcggcttaagaggagtcaaaatatgagcacttttgtcaatgacaccgtcgaagacgcaatcaagacccctgagctggatcagccatttgaggctcttggtctgaaagacgacgagtacgcgcgcatcaaggaaatccttggccgccgcccaaccgacgccgagctgaccgtttactccgtaatgtggtcggagcactgctcctacaagtcctccaaggttcacctgcgttacttcggtgaaaccaccactgaggaaatggcttccaagattcttgccggcatcggtgagaacgctggtgtggtcgacatcggagacggcaacgccgtgaccttccgcgtggagtcccacaaccacccatccttcgtagagccacaccagggcgctgcgaccggcgtcggcggcatcgtccgcgacattatggctatgggcgcacgcccaatcgctgtgatggatcagctgcgtttcggtgcactggacaacccagacacccagcgtgtgcttcctggcgttgttgacggcatttcccactacggcaactgcctcggcctgccaaacatcggtggcgaaaccgtcttcgacgattcctatgcaggtaacccactggtcaacgcactgtgcgtgggtaccctcaaggtggaagacctcaagctggcattcgcatccggcaccggtaacaaggtgatcctgttcggttcccgcaccggccttgatggcatcggtggcgtgtccgtcctgggttccgcatccttcgaagaaggcgaagagcgcaagctcccagctgttcaggtcggcgatcctttcgcagagaaggtactcatcgagtgctgcctcgagctgtacaaggctggcgtcgtggtcggtattcaggacctcggcggcggcggactggcatgtgcaacctctgagctggcagccgctggcgacggcggcatgcgcgtcaacctggacaacgtcccactgcgcgcagagaacatgtctgcagctgaaatcctggcttccgagtcccaggagcgcatgtgtgctgttgttacccctgaaaacgttgagcgtttcctcgagatctgtgcaaagtgggatgtcacctgcgcagaaatcggcgaagttaccgacgagaaggaccgctacgttgtggtccacaacggtgaagtagttatcgacgcacctccatcaaccatcgatgaaggccctgtctacaaccgcccacttgctcgccctgagaaccaggacgaactgcagctcgaaggcgagatcgctcgcccagtcgacgttgaagagatcaaggctgcttggctgaagcttgtcgcttcaccagcacttgcatcccgcgcgttcatcaccgagcagtacgaccgctacgtccgcggcaacaccgttcaggcaaagaacgccaatgctggcgtcttgcgtatcgacgaagagaccaaccgtggcgttgcgatctccgccgacgcatccggccgttacaccaagctcgagccaaacactggcgcgcagcttgcactggctgaggcttaccgcaacgtggtctccaccggtgcacgcccagtggctgtcaccaactgcctgaacttcggttccccagaaaacgctggtgtcatgtggcagttcaaggaagcagtccacggtctggcagacggatccaagcttctgggcattccagtgtccggcggtaacgtctccttctacaaccagactggtgacgagcccatcctgccaaccccagtcgtgggtgttttgggagtcttggacaacgtcgagcagagcatcggcaacgtcctcccatccgaggacaacgatctctacctcctgggtgagaccttcgatgagttcggtggctccatctggcagcaagtttctggcgctggcctcaacggtctgccaccagtagttgacctgctcaacgagcagcgtcttgcagacctgttcgtcggttctgatctgtttgctgcatcccacgatctgtctgagggcggccttggccagaccctcgcagagcttgcgatccacgcagacaagggcatggatgttgatctctcccagatccacccatccctgttcacctcactgtttgctgagtccgcttcccgcatcgtggttgcaaccaaccgcggcgaagagttggaaaagcgcgcagcagagctgggtgttccagtgttcaagctgggccgcaccaacgattcagccgtcatcgctgtcaagggcgcagacgttgagttcactgtttccgtggaggaactccgcgaagcatggaccaatactttgcctgaggcattcggtcacgcagttggagctaacgcagtagttggataa

SEQ ID NO: 52955 - protein, 782 aa, Corynebacterium glutamicum
MAWSCSCPPLAPSRLKRSQNMSTFVNDTVEDAIKTPELDQPFEALGLKDDEYARIKEILGRRPTDAELTVYSVMWSEHCSYKSSKVHLRYFGETTTEEMASKILAGIGENAGVVDIGDGNAVTFRVESHNHPSFVEPHQGAATGVGGIVRDIMAMGARPIAVMDQLRFGALDNPDTQRVLPGVVDGISHYGNCLGLPNIGGETVFDDSYAGNPLVNALCVGTLKVEDLKLAFASGTGNKVILFGSRTGLDGIGGVSVLGSASFEEGEERKLPAVQVGDPFAEKVLIECCLELYKAGVVVGIQDLGGGGLACATSELAAAGDGGMRVNLDNVPLRAENMSAAEILASESQERMCAVVTPENVERFLEICAKWDVTCAEIGEVTDEKDRYVVVHNGEVVIDAPPSTIDEGPVYNRPLARPENQDELQLEGEIARPVDVEEIKAAWLKLVASPALASRAFITEQYDRYVRGNTVQAKNANAGVLRIDEETNRGVAISADASGRYTKLEPNTGAQLALAEAYRNVVSTGARPVAVTNCLNFGSPENAGVMWQFKEAVHGLADGSKLLGIPVSGGNVSFYNQTGDEPILPTPVVGVLGVLDNVEQSIGNVLPSEDNDLYLLGETFDEFGGSIWQQVSGAGLNGLPPVVDLLNEQRLADLFVGSDLFAASHDLSEGGLGQTLAELAIHADKGMDVDLSQIHPSLFTSLFAESASRIVVATNRGEELEKRAAELGVPVFKLGRTNDSAVIAVKGADVEFTVSVEELREAWTNTLPEAFGHAVGANAVVG

SEQ ID NO: 52956 - DNA, 2319 bp, uncultured archaeon GZfos34H9
  CDS (1)..(2319): transl_table=11
atgaagaagtttgagatacatgatgcgaaagatgatgatttaaagcgaataagtgaacttatgggcctttcgctgaatatagaagagatgcgcacgataaagcgatatttccagttgaagcgcagggcgccaacggatgtggaactgcagagcattgcacaggcatggtcagaacattgctgttacaagagctcgaaaaagatcttgcaaaaatatatcttcggcattgatgcgccgcagagcatattagcggtaaaagaagatgcaggtgtggtagaatttgatgcggatcatgcttatgtcttggcgttcgagagtcataaccacccttcggcgatagagccttacggcggtgcggcaacaggtataggcggtatcgtcagggatgtgatctgcatgggtgcacagcctattgcattgattgaccccttattctttggtcctctggattatagctatgagaagctgcctgcggaggtgaagcatccaaagttcctgtttgatggtgttgttgcgggtataagcgactacgggaatcggataggcattccaacgtgtgcggggatggtatattttgacgatggctacgtgggcaattgcgtagtgaatgtaggctgcgtagggataatgaagaagtccgatttgagcagaagcatagcacgtgaaggcgaggtgcttgttctggtcggaggtaaaaccgggcgagatggcatacacggtgttacctttgcttcggtagagttaacaggggaggaggaattcagaagtgccgttcaagttggcgacccgataacaaaggagccgctaatgcatgcgatattagaatcgaatgataagaagttgataagtgggatgaaggatctcggtggcggcgggttatcctgtgcagtgagcgagatgtgccatgcgggtgggtgtagtgcagagatacatttagatagggtgaagttaaaggaagaagggctaagcgcatgggagatctgggtttcggaatcccaagaacggtttttaatcggaacaccagaagcaaatgtggacgagctgctggcgatatttaataaatgggatgtggacgcggtgattctaggacaaacatttaaaaccctttcctctgaagagaaagcgtcaccaaagaaactaaagattaattaccgtggtgagaatatattcgagctggatacagattttcttgtgtcatgtccgctttatgaacgtacgatgaagataaaggcacgtgatgaggcggaacctttaatgggggcgcctgatgactataatgtcattttaaaacagttgcttgcagcacctaatatcgcatctcgcgaaggtgttataaggcaatatgaccatgaagtgcgagcgtctacggtgataaagccgatgcaggggataatagggaaagagacgcatggcgatgcagcggtgataaagccactggaagaatcttatatgggactcgctattacttctgacctaaatccctcctattgtaagattaatccgttctggggtgctgcgagtgcgatagacgaagtatgtaggaatttgactgctgttggtgcagtgccacattcatttgcagattgcttgaatttcggtaatcctgagaagccggaccggatgggggacttctatgaatgctgtcacggtttaggtcacatggcttcttcgcttggcgtaccgtttgtgagtggtaatgtgagcttatataatgagtccgcagctatgaatgaatctatcccgcccacacccgctattctgggcataggggtatgtgaagatataagggaatgcgttactgtggatttaaaggaagcggggaatttactgtatctgattggcgacacaaagaaggaattgggtggcagtgagtattataagttgcggggtgtggaaggaggaatagtgccgaggaccgacccaaaagtgctgaagaggtctatggatgcgttacgggacacgatgaaggctggattagtagcgagctgtcatgatatttcggaaggtgggctcgcagttgcagtatgcgagatgagtatgggcggcgatagcggcgtttacatcgatattggtgctgtaaatccagaactgaggagcgattacaagttgttctcggaatctaacacgaggtgggtggtggaggtgcagagagcggtagcaggaaggtttgaagcgttgatgactacacgtggcatttgtataattgaagtaggggccgtgttaaaggataagcgggtcggtataagcgacgatggcacggaattggtggatgtttcggtagatgctgtgagagccgcatggggaaatcatcttacgtga

SEQ ID NO: 52957 - protein, 772 aa, uncultured archaeon GZfos34H9
MKKFEIHDAKDDDLKRISELMGLSLNIEEMRTIKRYFQLKRRAPTDVELQSIAQAWSEHCCYKSSKKILQKYIFGIDAPQSILAVKEDAGVVEFDADHAYVLAFESHNHPSAIEPYGGAATGIGGIVRDVICMGAQPIALIDPLFFGPLDYSYEKLPAEVKHPKFLFDGVVAGISDYGNRIGIPTCAGMVYFDDGYVGNCVVNVGCVGIMKKSDLSRSIAREGEVLVLVGGKTGRDGIHGVTFASVELTGEEEFRSAVQVGDPITKEPLMHAILESNDKKLISGMKDLGGGGLSCAVSEMCHAGGCSAEIHLDRVKLKEEGLSAWEIWVSESQERFLIGTPEANVDELLAIFNKWDVDAVILGQTFKTLSSEEKASPKKLKINYRGENIFELDTDFLVSCPLYERTMKIKARDEAEPLMGAPDDYNVILKQLLAAPNIASREGVIRQYDHEVRASTVIKPMQGIIGKETHGDAAVIKPLEESYMGLAITSDLNPSYCKINPFWGAASAIDEVCRNLTAVGAVPHSFADCLNFGNPEKPDRMGDFYECCHGLGHMASSLGVPFVSGNVSLYNESAAMNESIPPTPAILGIGVCEDIRECVTVDLKEAGNLLYLIGDTKKELGGSEYYKLRGVEGGIVPRTDPKVLKRSMDALRDTMKAGLVASCHDISEGGLAVAVCEMSMGGDSGVYIDIGAVNPELRSDYKLFSESNTRWVVEVQRAVAGRFEALMTTRGICIIEVGAVLKDKRVGISDDGTELVDVSVDAVRAAWGNHLT

SEQ ID NO: 52958 - DNA, 2319 bp, uncultured archaeon GZfos33E1
  CDS (1)..(2319): transl_table=11
atgaagaagtttgagatacaggatgcgaaagatgatgatttaaagcgaataagtgaacttatggggctttcactgaatatagaagagatgcacgcgataaagcgatatttcctgttgaaacgcagggcaccaacggatgtggagctgcagagcattgcacaggcatggtcggaacattgctgttacaagagctcgaaaaagatcttgcaaaaatatatcttcggcattgatgcgccgcagagcatattagcggtaaaagaagatgctggtgtggtagaatttgatgaggagcacgcttatgtcgtggcgttcgagagtcataaccacccttcggcgatagagccttacggcggtgcggcaacaggtataggcggtatcgtcagggatgtaatctgcatgggtgcacagcctattgcattgattgaccccttattctttggtcctctggattatagctatgagaagctgcctgcggaggtgaagcatccaaagttcctgtttgatggtgttgttgcgggtataagcgactacgggaatcggataggtattcccacgtgtgcggggatggtatattttgacgatggctacgtgggcaattgcgtagtgaatgtgggctgcgtagggataatgaagaagtcagatttgagcagaagcatagcgcgtgaaggcgaggtgcttgttctggtcggaggtaaaaccgggcgagatggcatacatggcgttacctttgcttcggtagagttaacaggggaggaggaattcagaagtgccgttcaagttggcgatccgataacaaaggagccgctaatgcatgcgatattagaatcgaatgagaagaagttgataagtgggatgaaggatctcggtggcggcgggttatcatgcgcagtgagcgagatgtgccatgcgggtgggtgtggtgcagagatacatttagatagggtaaagttaaaggaagaagggctaagcgcatgggagatctgggtttcagaatcgcaagaacggtttttaatcggaacaccggaagcgaatgtggacgagctgctggcgatatttaataaatgggatgtggatgcggtgattctaggacaaacatttaaaaacctttctcctgaagagaaagcgtcaccaaagaaactaaagattatttaccgtggtgagaatatattcgagctggatacagatttccttgtgtcatgtccgctttatgaacgtacgatggagataaaggcacgtgatgaggtggaacctttaatgggggcgcctgatgactataatggcactttaaaacagttgcttgcagcacctaatatcgcatctcgcgaaggtgttataaggcaatatgaccatgaagtgcgagcgtctacggtgataaagccgatgcaggggataatagggaaagagacgcatggcgatgcagcggtgataaagccactggaagaatcctatatgggactcgctattacttctgacgtaaatccctcctattgtaacattaatccgttctggggtgctgcgagtgcgatagacgaagtatgtaggaatttgactgctgttggtgcagtgccacagtcatttgcagattgcttgaatttcggtaatcctgagaagccagaccggatgggggacttctatgaatgctgtcgcggtttaggccacatggcttcttcgcttggcgtaccgtttgtgagcggtaatgtgagcttatataatgagtccgcagctatgaatgaatctatcccgcccacacccgctattctgggcataggggtatgtgaagatataagagaatgcgttactgtggatttaaaggaagtggggaatttactgtatctgattggcgacacaaagaaggaatttggtggcagcgagtattataagttgcggggtgtggaaggaggattagtgccgaggaccgatccaaaagtgctgaagcggtctatggatgcgttactggacacgatgaaggcggggttagtagcaagctgtcatgacatttcggaaggtgggctcgcagttgcagtatgcgagatgagtatgggcggagatagcggcgtttacattgatattggcgctgtgaatcccgaactgaggagcgattacaagttgttctcggaatctaacacgaggtgggtggtggaggtgccgagagcggaactaggaaggtttgaagcgttgatggctacacatgacgtttgtataattgaaatagggacggtgataacagataagcgggtcagtataagcgacaatggcacagaattggtggatatttcgatagatgctgtgagagcggcatggggtaatcatcttacgtga

SEQ ID NO: 52959 - protein, 772 aa, uncultured archaeon GZfos33E1
MKKFEIQDAKDDDLKRISELMGLSLNIEEMHAIKRYFLLKRRAPTDVELQSIAQAWSEHCCYKSSKKILQKYIFGIDAPQSILAVKEDAGVVEFDEEHAYVVAFESHNHPSAIEPYGGAATGIGGIVRDVICMGAQPIALIDPLFFGPLDYSYEKLPAEVKHPKFLFDGVVAGISDYGNRIGIPTCAGMVYFDDGYVGNCVVNVGCVGIMKKSDLSRSIAREGEVLVLVGGKTGRDGIHGVTFASVELTGEEEFRSAVQVGDPITKEPLMHAILESNEKKLISGMKDLGGGGLSCAVSEMCHAGGCGAEIHLDRVKLKEEGLSAWEIWVSESQERFLIGTPEANVDELLAIFNKWDVDAVILGQTFKNLSPEEKASPKKLKIIYRGENIFELDTDFLVSCPLYERTMEIKARDEVEPLMGAPDDYNGTLKQLLAAPNIASREGVIRQYDHEVRASTVIKPMQGIIGKETHGDAAVIKPLEESYMGLAITSDVNPSYCNINPFWGAASAIDEVCRNLTAVGAVPQSFADCLNFGNPEKPDRMGDFYECCRGLGHMASSLGVPFVSGNVSLYNESAAMNESIPPTPAILGIGVCEDIRECVTVDLKEVGNLLYLIGDTKKEFGGSEYYKLRGVEGGLVPRTDPKVLKRSMDALLDTMKAGLVASCHDISEGGLAVAVCEMSMGGDSGVYIDIGAVNPELRSDYKLFSESNTRWVVEVPRAELGRFEALMATHDVCIIEIGTVITDKRVSISDNGTELVDISIDAVRAAWGNHLT

SEQ ID NO: 52960 - DNA, 3807 bp, Clostridium difficile
  CDS (1)..(3807): transl_table=11
atgttgaatactgaaaataaagactcaatggttagaagagtattggttgaaaaaagagaaggttttgaccttgaggctaaagctttaaaaaaagacttagtagaaagtttacacatagataatatagaaaatttaagaatattaaatagatatgatgtagaaggaatatcagaagaagtttatgaaaatgcagcaaagacaatattctctgaaccaaatttagatgtagtatattatgaagaaataccaaaattaaatgatgaaagagtatttgcaatagaatttcttcctggtcaatacgaccaaagaggtgattgggcagctcaatgtgtacaaattgtaaatcaagggataagacctgctattaatacagcaaaagtttatatattatcaggcaaaataactgatgaagagttttctaaaataaaagattactgtataaatccagtagatagtagagaagcatctttagagaaaccagaaacgttaaaaatggaaactgaaataccaacaacagttgaagtattagatggatttatagatttagatgaaaatggattaagaacatttgtaagtgaaaaaggattagcaatgactttaggagacttacaacacgttcaaaaatactttaaagatacagaaaagagaaatccaactataacagaaataaaagtattagatacttattggtctgatcattgtagacatactacttttatgactgaaatagaaaatgtaaagatagaagatggtaagtttaatgatatagtaaaagaagcgtatcaaatgtatcttaactcaagagacaatgtatatgtgaacagacataaagatatatgtttaatggatatagccactgttgcagtaaaagaattaaagaaaaatgggaaattaaatgacctagatgaaagtgaagaaataaatgcatgtagtataaacgtagatgttgaagttgatggtaagatggaaaaatatctagtaatgtttaaaaatgaaactcacaaccatccaactgaaatagaaccatttggtggagcagctacttgtttaggaggagctataagagacccattatcaggaagaagttatgtttatcaagcaatgcgtgttacaggaagtgctgacccaagaacgactttagaagatactttacctggaaaacttatgcaaagaaaaataactacagaagctgctcatggatatagttcatatggtaaccaaataggtcttacaactggacaagttgcagaagtatatgatgaaaactttgttgcaaagagaatggaaataggtgcagttatagcagcagcaccaaaagagaatgtagtaagagaaagacctgaagcaggagatgtaatcgttcttcttggaggaaaaacaggaagagatggctgtggaggagcaactggttcatctaaagaacatagtgaagagtcaatcttaacttgtagtgcagaagttcaaaaaggagatgctcctaacgaaagaaaaatacaaagattctttagaaataaagaagttgctcaaatgataaaaagatgtaatgattttggagcaggtggagtttgtgttgctataggagagattgctgatagcttagatataaacttagacttagttcctaaaaaatatgatggacttgatggaactgagcttgcaatttcagagtcacaagagcgtatggcagtagccataaaaaaagaaaataaagataaatttatacaattagcagtagaagaaaacttagaagctacgcatgtagctacagtaacagatacaggatatttaagaatgttctggaatggaaaagcaattgtagatataaatagagagtttttagatacaaacggagtaaaacaaactactgatgttcatgttactaaagtagatgaagaaaatacattctttagctctaatgaaatagtaaaagatgttaagtgtgcaagtatgaaagacaagtttacaaaagtactatctgaccttaatgtttgttctcaaaaaggattagtagagatgtttgataatacaattggtggtaatacagtacttatgccatttggaggaaagtatcaagcgactccaacacaaggtatggttgctaagataccagtacttggaggagaaactaatacttctacaataatgacttatggatacaatccaaaggtaggaaaatggagcccattccatggtgccttgtatgcagtagtagaatctgtgtgtaaattggttgctattggaggaaattatagtacaacaagacttacattccaagagtattttgaaaaacttggtaacaatccagaaaaatggggtaaaccattctcagcacttttaggagcgttttatgcacaaagtaaatttgagatacctgctataggtggaaaagacagtatgtctggtacatttaaagatattgaagttccaccaacattagtttcatttgctgttgacacagtagatgcgaagaaagtagtatctccagaatttaaaaaagcagactcaaaagtagtaatgttatgtgtaaacaaggcagaaaatgatgttgtagattttgaggaattaaagagaaacttagataaagtaagagaacttatacatggaaataaagttttatcaacatatgcattaggatttgcaggtgtaggtgaagcaataagtaaaatggcttttggtaataaaataggatttaagtttagtgaagaagctgaaaaagcatttacagataataaattatttgaggctagttatggaaatatagtacttgaattagcaaatgatgatttaagtatgttagaaggatacaattatgttgtgattggaagtacagttaaagaagctagtatatttatcaaaggtgaagaacttgcattagatgaattatataaagcacattgtagtactttagagcctatattcccaactaaaacagaagaagtaaaatcaaagatagaaactataagttatatatcacaaggagaagctaaaaaatcatcattaagtatagctactccaagagtatttataccagcattccctggaacaaactgtgaatatgactctgcaagagcatttgaaagagcaggagctaatgcaagtataagagtatttaagaatttaacttataaagacatagaagattctatagatacaatagtaaacgaaataaaatcttctcaaataataatgttaccaggtggatttagtgctggtgatgagccagatggttctggtaaatttatagctactgtatttagaaatcctagagtgcaagaagctataaatgaatttttaactcaaaaagatggactaatgttaggtatctgtaatggattccaagtattaattaaattagggttagttccatatggagaaataagagttccaagtgaaagtgctccaacacttacttacaataatattggtcgccatcaagctaagattgctagaactagaatttcatctaataaatctccttggttagctcaaactaatgttggagatattcataatatagcaatttctcatggagaaggtaagtttgttgccagtgaagatgttatgagagaattaattgctaatggacaagtagcaactcaatatgttgactttaataatgaagctacttatgatattgagtttaatccaaatggttcattctatgctgttgaaggtataactagtgctgatggtagagtgtttggtaaaatgggacattctgaaagaattggtgaggaagtatataagaatattataggtgaaaaagaccaaaagatatttgaatctggagttaaatattttagataa

SEQ ID NO: 52961 - protein, 1268 aa, Clostridium difficile
MLNTENKDSMVRRVLVEKREGFDLEAKALKKDLVESLHIDNIENLRILNRYDVEGISEEVYENAAKTIFSEPNLDVVYYEEIPKLNDERVFAIEFLPGQYDQRGDWAAQCVQIVNQGIRPAINTAKVYILSGKITDEEFSKIKDYCINPVDSREASLEKPETLKMETEIPTTVEVLDGFIDLDENGLRTFVSEKGLAMTLGDLQHVQKYFKDTEKRNPTITEIKVLDTYWSDHCRHTTFMTEIENVKIEDGKFNDIVKEAYQMYLNSRDNVYVNRHKDICLMDIATVAVKELKKNGKLNDLDESEEINACSINVDVEVDGKMEKYLVMFKNETHNHPTEIEPFGGAATCLGGAIRDPLSGRSYVYQAMRVTGSADPRTTLEDTLPGKLMQRKITTEAAHGYSSYGNQIGLTTGQVAEVYDENFVAKRMEIGAVIAAAPKENVVRERPEAGDVIVLLGGKTGRDGCGGATGSSKEHSEESILTCSAEVQKGDAPNERKIQRFFRNKEVAQMIKRCNDFGAGGVCVAIGEIADSLDINLDLVPKKYDGLDGTELAISESQERMAVAIKKENKDKFIQLAVEENLEATHVATVTDTGYLRMFWNGKAIVDINREFLDTNGVKQTTDVHVTKVDEENTFFSSNEIVKDVKCASMKDKFTKVLSDLNVCSQKGLVEMFDNTIGGNTVLMPFGGKYQATPTQGMVAKIPVLGGETNTSTIMTYGYNPKVGKWSPFHGALYAVVESVCKLVAIGGNYSTTRLTFQEYFEKLGNNPEKWGKPFSALLGAFYAQSKFEIPAIGGKDSMSGTFKDIEVPPTLVSFAVDTVDAKKVVSPEFKKADSKVVMLCVNKAENDVVDFEELKRNLDKVRELIHGNKVLSTYALGFAGVGEAISKMAFGNKIGFKFSEEAEKAFTDNKLFEASYGNIVLELANDDLSMLEGYNYVVIGSTVKEASIFIKGEELALDELYKAHCSTLEPIFPTKTEEVKSKIETISYISQGEAKKSSLSIATPRVFIPAFPGTNCEYDSARAFERAGANASIRVFKNLTYKDIEDSIDTIVNEIKSSQIIMLPGGFSAGDEPDGSGKFIATVFRNPRVQEAINEFLTQKDGLMLGICNGFQVLIKLGLVPYGEIRVPSESAPTLTYNNIGRHQAKIARTRISSNKSPWLAQTNVGDIHNIAISHGEGKFVASEDVMRELIANGQVATQYVDFNNEATYDIEFNPNGSFYAVEGITSADGRVFGKMGHSERIGEEVYKNIIGEKDQKIFESGVKYFR

SEQ ID NO: 52962 - DNA, 3888 bp, Escherichia coli O6; identical to SEQ ID NO: 52690
  CDS (4)..(3888): transl_table=11

SEQ ID NO: 52963 - protein, 1294 aa, Escherichia coli O6
MEILRGSPALSAFRINKLLARFQAARLPVHNIYAEYVHFADLNAPLNDDEHAQLERLLKYGPALASHAPQGKLLLVTPRPGTISPWSSKATDIAHNCGLQQVNRLERGVAYYIEAGTLTNEQWQQVTAELHDRMMETVFFALDDAEQLFAHHQPTPVTSVDLLGQGRQALIDANLRLGLALAEDEIDYLQDAFTKLGRNPNDIELYMFAQANSEHCRHKIFNADWIIDGEQQPKSLFKMIKNTFETTPDHVLSAYKDNAAVMEGSEVGRYFADHETGRYDFHQEPAHILMKVETHNHPTAISPWPGAATGSGGEIRDEGATGRGAKPKAGLVGFSVSNLRIPGFEQPWEEDFGKPERIVTALDIMTEGPLGGAAFNNEFGRPALNGYFRTYEEKVNSHNGEELRGYHKPIMLAGGIGNIRADHVQKGEINVGAKLVVLGGPAMNIGLGGGAASSMASGQSDADLDFASVQRDNPEMERRCQEVIDRCWQLGDANPILFIHDVGAGGLSNAMPELVSDGGRGGKFELRDILSDEPGMSPLEIWCNESQERYVLAVAADQLPLFDELCKRERAPYAVIGEATEELHLSLHDRHFDNQPIDLPLDVLLGKTPKMTRDVQTLKAKGDALAREGITIADAVKRVLHLPTVAEKTFLVTIGDRSVTGMVARDQMVGPWQVPVANCAVTTASLDSYYGEAMAIGERAPVALLDFAASARLAVGEALTNIAATQIGDIKRIKLSANWMAAAGHPGEDAGLYEAVKAVGEELCPALGLTIPVGKDSMSMKTRWQEGNEEREMTSPLSLVISAFARVEDVRHTITPQLSTEDNALLLIDLGKGNNALGATALAQVYRQLGDKPADVRDVAQLKGFYDAIQALVAQRKLLAYHDRSDGGLLVTLAEMAFAGHCGIDADIATLGDDRLAALFSEELGAVIQVRAADREAVEAVLAQHGLADCVHYVGQAVSGDRFVITANGQTVFSESRTTLRVWWAETTWQMQRLRDNPECADQEHQAKSNDADPGLNVKLSFDINEDVAAPFIATGARPKVAVLREQGVNSHVEMAAAFHRAGFDAIDVHMSDLLAGRTGLEGFHVLVACGGFSYGDVLGAGEGWAKSILFNDRVRDEFATFFHRPQTLALGVCNGCQMMSNLRELIPGSELWPRFVRNTSDRFEARFSLVEVTQSPSLLLQGMVGSQMPIAVSHGEGRVEVRDAAHLAALESKGLVALRYVDNFGKVTETYPANPNGSPNGITAVTTESGRVTIMMPHPERVFRTVSNSWHPENWGEDGPWMRIFRNARKQLG

SEQ ID NO: 52964 - DNA, 3888 bp, Escherichia coli; identical to SEQ ID NO: 52756
  CDS (4)..(3888): transl_table=11

SEQ ID NO: 52965 - protein, 1294 aa, Escherichia coli
MEILRGSPALSAFRINKLLARFQAARLPVHNIYAEYVHFADLNAPLNDDEHAQLERLLKYGPALASHAPQGKLLLVTPRPGTISPWSSKATDIAHNCGLQQVNRLERGVAYYIEAGTLTNEQWQQVTAELHDRMMETVFFALDDAEQLFAHHQPTPVTSVDLLGQGRQALIDANLRLGLALAEDEIDYLQDAFTKLGRNPNDIELYMFAQANSEHCRHKIFNADWVIDGEQQPKSLFKMIKNTFETTPDHVLSAYKDNAAVMEGSEVGRYFADHETGRYDFHQEPAHILMKVETHNHPTAISPWPGAATGSGGEIRDEGATGRGAKPKAGLVGFSVSNLRIPGFEQPWEEDFGKPERIVTALDIMTEGPLGGAAFNNEFGRPALNGYFRTYEEKVNSHNGEELRGYHKPIMLAGGIGNIRADHVQKGEINVGAKLVVLGGPAMNIGLGGGAASSMASGQSDADLDFASVQRDNPEMERRCQEVIDRCWQLGDANPILFIHDVGAGGLSNAMPELVSDGGRGGKFELREILSDEPGMSPLEIWCNESQERYVLAVAADQLPLFDELCKRERAPYAVIGEATEELHLSLHDRHFDNQPIDLPLDVLLGKTPKMTRDVQTLKAKGDALAREGITIADAVKRVLHLPTVAEKTFLVTIGDRSVTGMVARDQMVGPWQVPVANCAVTTASLDSYYGEAMAIGERAPVALLDFAASARLAVGEALTNIAATQIGDIKRIKLSANWMAAAGHPGEDAGLYEAVKAVGEELCPALGLTIPVGKDSMSMKTRWQEGNEEREMTSPLSLVISAFARVEDVRHTITPQLSTEDNALLLIDLGKGNNALGATALAQVYRQLGDKPADVRDVAQLKGFYDAIQALVAQRKLLAYHDRSDGGLLVTLAEMAFAGHCGIDADIATLGDDRLAALFNEELGAVIQVRAADREAVESVLAQHGLADCVHYVGQAVSGDRFVITANGQTVFSESRTTLRVWWAETTWQMQRLRDNPECADQEHQAKSNDADPGLNVKLSFDINEDVAAPYIATGARPKVAVLREQGVNSHVEMAAAFHRAGFDAIDVHMSDLLTGRTGLEDFHALVACGGFSYGDVLGAGEGWAKSILFNDRVRDEFATFFHRPQTLALGVCNGCQMMSNLRELIPGSELWPRFVRNTSDRFEARFSLVEVTQSPSLLLQGMVGSQMPIAVSHGEGRVEVRDAAHLAALESKGLVALRYVDNFGKVTETYPANPNGSPNGITAVTTESGRVTIMMPHPERVFRTVSNSWHPENWGEDGPWMRIFRNARKQLG

SEQ ID NO: 52966 - DNA, 3885 bp, Erwinia carotovora subsp
  CDS (1)..(3885): transl_table=11
atggaaatactgcgtggttcacctgctttatcggcttttcgtattaataaattgctggtccgctgcaaagagcaccttttgccggtcagcgatatctatgctgaatacgtacatttcgccgatgtcagcactccgctgaacaatgatgaacaggccaaactgacacgtttgctgaagtatggtccttctctcgcggagcacgagccgcaaggtcatctgttactggtgacgccacgtcccggcaccatttcaccgtggtcttccaaagcgacggatatcgcccataactgtggattaagcaaagtactgcgtctggaacgcggtctggctttctatattcatgcgccaacgctgaacgatgagcagtggcagcaactgggggcactgctgcatgaccggatgatggaaagcgtatttagcgacctgaaacaggctgcagccctgttctctcatcatcagccagcacctttcaagcgcatcgaaattctgctgcaagggcgtcaggcattggaagaagcgaacgtccgtctggggctggcattggcggaagatgaaatcgattatctgctggaagccttcaacaatctgggccgtaacccaaccgatatcgaactgtatatgttcgcacaggcgaactctgagcactgccgccacaagatttttaacgcggattgggtgatcgacggcgtaactcagccgaaatcactgttcaaaatgatcaaaaacacctttgaacacacacccgatcacgttctctctgcctataaagacaacgccgccgttatggaaggctccgctgtcggccgtttctataccgatgccaacggacaatatgattaccatcaggaagacgcacatatcctgatgaaggttgaaacgcataaccacccaaccgcgatttcaccgtggccgggcgcagcaacagggtctggcggtgaaatccgtgacgaaggcgcgacaggccgtggctccaaaccgaaagcgggtctggtgggcttttccgtatcgaacctgcgtattcctggctttatccaaccgtgggaagaagagttcggcaagccagatcgcattgtcagcgcgctggatatcatgaccgaaggcccattgggcggcgcggcattcaacaacgaattcggccgtcctgcactgactggctatttccgtacttatgaagagcgtgtcgatagccacaatggcgaagagctgcgcggttatcataaaccgatcatgctggcaggcggcattggtaacatccgtggcgatcatgtcaaaaaaggcgaaattatcgtcggggccaaactgattgtgctgggcggaccgtccatgaatatcggtctgggcggcggcgcggcctcttccatggcatcgggtcagtccgatgcggatctggattttgcttctgtgcagcgcgataacccagaaatggagcgtcgctgtcaggaagtgatcgaccgctgctggcaattaggcgaagccaacccgatcctgttcatccacgatgttggggcgggcggtttgtctaacgctatgccggaactggtgagtgacggtggtcgcggtggtcgctttgaactgcgcgatattctgaacgacgaaccgggcatgagcccgctggaagtctggtgtaacgaatcgcaggaacgctacgttctggcggttgcccctgaacaactggcacagtttgatgagatttgccgccgtgagcgcgcaccttatgcggtgattggtgaagcgacggaagagctgcatctgacgatgaacgatcgtcacttcaacaaccaacctatcgatttaccgctggatgtgctgctgggtaaaacgccgaagatgctgcgtgacgttgagcgcaaacaggtagagggtacgccgctacagcgtgacgacatctatctggctgaagcggtcgagcgcgtgctgcacttgccagtcgttgcggaaaaaaccttcctgatcactattggtgaccgttctgtcaccggtatggtggcgcgcgatcagatggtcgggccatggcaggtgccggtggctgactgtgctgtgaccaccgccagcctcgacagctattacggcgaagcgatgtctatcggcgaacgtgcgcctgtcgcgctgcgtaacttcgcagcctccgcgcgtttggccgtgggtgaagcgctgactaacattgctgctacgcacattggcccgctgacccgcgtgaagctgtctgcgaactggatggccgcagcagggcatcccggcgaagatgctggactgtacgatgcggttaaagccgtgggtgaggagctgtgtccggcgttgggtctgacgatcccggtgggtaaagactccatgtcgatgaaaacccgctggcaggaagaaggcgaagatcgcgcggtcacctcgccgatgtcgctggtgatttctgcgtttgctcgtgtggaagacgtgcgtaacacggtaacgccacaactgcgcaccgggcaggataatgcgctactgctgatcgatctgggtgcaggcaataaagcgctgggcgcaacggcgctggcacaggtttatcgccagttgggccgtaaaacggcagatgttcatagtccagagcagttggcaggtttctttaatgctatccaagagttggtcgcagctaaggcgctcttggcctaccacgatcgttcagacggtggcttgattgtgacgctggcggagatggcatttgctggccactgcggcgtcactgttgatatcgcgtctcagggcgaggatacgctggcgacgctgtttaacgaagagttgggtgccgttattcagattccggccgcgcgtcgtgccgaagtggacgctattctggcgctgcatggcttggcagattgtgtgcattatctcggtcaggctgaggaaggaacgcgtttcaccatcaatcagggtgcagaagcggtttatcaggaaagccgttcgacgttgcgccgctggtgggctgaaaccagctggcagatgcagcgcctgcgcgataatccacagtgtgccgatcaggaacacatcgccagacaggatgataacgatcccggtctgaatgtatcgctgaccttcgatccgaaggaagatattgccgcaccttacattgctaagaacgtccggcctaaagtggctgtcctgcgtgagcagggtgtgaactcccacgtagaaatggcggcggcgttccaccgtgcaggctttgatgccatcgacatccatatgagcgacctgctggcaaatcgccgtaacttgcaggatttccaagcgctggttgcctgtggtggtttctcttatggtgacgtgctgggcgcgggtgagggctgggctaaatccattctgttcaacgctcgcgtgcgtgatgaatttgctgaattcttcctgcgtccacagacgctggcgctgggcgtatgtaacggctgccagatgatgtcgaacttgcgtgagctgattccgggagccgatctctggccgcgttttgtccgcaataaatccgatcgctttgaagcgcgcttcagtctggtcgaagtggataaaagcccgtcgctgttcatgaacgacatggcagggtcacgtatgccgattgctgtttcacacggcgaagggcaagttgaagtccgcgacgatgcgcatttagcggcgattgaagagcacggtctggtcgcgttgcgttatatcaaccactacggacaggtaaccgaaaactatccggctaacccaaatggctcgtcaaacggtattacggcggtaaccagcaccagcggccgtgcaaccgttatgatgccacaccctgagcgcgtgttccgcaccgtcagtaactcctggcacccagaagaatggggcgaggatggcccgtggatgcgtatgttccgcaacgcacgcagacagctgggctga

SEQ ID NO: 52967 - protein, 1294 aa, Erwinia carotovora subsp
MEILRGSPALSAFRINKLLVRCKEHLLPVSDIYAEYVHFADVSTPLNNDEQAKLTRLLKYGPSLAEHEPQGHLLLVTPRPGTISPWSSKATDIAHNCGLSKVLRLERGLAFYIHAPTLNDEQWQQLGALLHDRMMESVFSDLKQAAALFSHHQPAPFKRIEILLQGRQALEEANVRLGLALAEDEIDYLLEAFNNLGRNPTDIELYMFAQANSEHCRHKIFNADWVIDGVTQPKSLFKMIKNTFEHTPDHVLSAYKDNAAVMEGSAVGRFYTDANGQYDYHQEDAHILMKVETHNHPTAISPWPGAATGSGGEIRDEGATGRGSKPKAGLVGFSVSNLRIPGFIQPWEEEFGKPDRIVSALDIMTEGPLGGAAFNNEFGRPALTGYFRTYEERVDSHNGEELRGYHKPIMLAGGIGNIRGDHVKKGEIIVGAKLIVLGGPSMNIGLGGGAASSMASGQSDADLDFASVQRDNPEMERRCQEVIDRCWQLGEANPILFIHDVGAGGLSNAMPELVSDGGRGGRFELRDILNDEPGMSPLEVWCNESQERYVLAVAPEQLAQFDEICRRERAPYAVIGEATEELHLTMNDRHFNNQPIDLPLDVLLGKTPKMLRDVERKQVEGTPLQRDDIYLAEAVERVLHLPVVAEKTFLITIGDRSVTGMVARDQMVGPWQVPVADCAVTTASLDSYYGEAMSIGERAPVALRNFAASARLAVGEALTNIAATHIGPLTRVKLSANWMAAAGHPGEDAGLYDAVKAVGEELCPALGLTIPVGKDSMSMKTRWQEEGEDRAVTSPMSLVISAFARVEDVRNTVTPQLRTGQDNALLLIDLGAGNKALGATALAQVYRQLGRKTADVHSPEQLAGFFNAIQELVAAKALLAYHDRSDGGLIVTLAEMAFAGHCGVTVDIASQGEDTLATLFNEELGAVIQIPAARRAEVDAILALHGLADCVHYLGQAEEGTRFTINQGAEAVYQESRSTLRRWWAETSWQMQRLRDNPQCADQEHIARQDDNDPGLNVSLTFDPKEDIAAPYIAKNVRPKVAVLREQGVNSHVEMAAAFHRAGFDAIDIHMSDLLANRRNLQDFQALVACGGFSYGDVLGAGEGWAKSILFNARVRDEFAEFFLRPQTLALGVCNGCQMMSNLRELIPGADLWPRFVRNKSDRFEARFSLVEVDKSPSLFMNDMAGSRMPIAVSHGEGQVEVRDDAHLAAIEEHGLVALRYINHYGQVTENYPANPNGSSNGITAVTSTSGRATVMMPHPERVFRTVSNSWHPEEWGEDGPWMRMFRNARRQLG

SEQ ID NO: 52968 - DNA, 3894 bp, Haemophilus somnus
  CDS (1)..(3894): transl_table=11
atgttacacatttttcgtggtacgcccgcattatccaattttcgtttaaatcagttattcagtggttttcagcaagataatttacccattgtgtcttgttatgcagagtttttgcattttgcccatttaagtgaagcattaactgagatagaaagagaaaaattagaggagcttttgcgttatggtccgactcagaaatcgcaagagccttatggggaatgttttgtggtgattccacgtataggtacgatttcttcttgggcatcaaaagcaactgatattgcacataattgtgatttaaataaggtacttcgtttggaacgtggtatcgcttattatttcaaatttaaccgcactttaacggctgaagaagaacaacaattagtattccgtatctacgaccctatgatggaaagtattgtccgttctccacaagaagcagctgttttatttgaacagcatgacccaaaacctttcaccacggtagatattttaaccggtgggcatgttgcattggaaaaggcgaatgtgactttaggattggcattagcaaaagatgaaattgattatttagtggaaaatttcaccgcactcggtcgcaatcctacagatgttgaactttatatgtttgcacaagcgaactcagaacattgtcgtcataagatttttaatgcagattggattattgatggaaaaaaacaggataaatcgctgtttaaaatgattaaaaacacctttgagaaaacgcctgattatgtattgtcagcttataaagataatgctgcggtgatggaaggttcaaaagtcggacgctttttccctgaccaagacgggcaatatcgttatcatcaagaagacacgcatattttgatgaaagtggaaacccataatcaccctaccgccatttcacctttccccggagctgcaactggttcaggtggcgaaattcgtgatgagggagccacgggacgtggtgcaaaaccgaaagccggtttagtcggtttctccgtgtctaatctttgtattccgaattttccgcaaccttgggaaaatgcgttgagtaaaccgagccgtattgcctccgcactggatattatgattgaaggtccgcttggcggtgctgctttcaataatgaattcgggcgtcctgctttattgggttatttccgtacttatgaagaaaaagtcaacagttttaacggcgaagaagtgcggggctatcataagccgattatgctggcaggcgggataggtaatattcgtcatgaacatgtgcaaaaaggcgaaattcctgttggtgcgaaattaattgtgttaggcggagcggcaatgaatattggtctgggcggtggtgcagcctcgtctatggcatcaggaaaatcaaaagaagatttggattttgcttctgtacaacgggataatccggaaatggagcgtcgctgtcaggaagtaatagaccgttgttggcaattaggttcagaaaaccccattctttttattcatgatgtcggtgccggcgggttatctaatgcgatgcctgaattagttcatgatggtggtcgaggtggtcgattcgagttgcgaaaaattttatgcgatgaaaaaggaatgtcgccgttagaaatttggtgcaatgaatcacaagaacgttatgttttagccgtttcaccagaaaaattaccgctctttgaagcgatttgtcagcgtgagcgagcatcttttgcggtgattggtgaggcaacggaacaacagcagttaactttgcaagatagccattttaataacaatcctattgatttaccaatgaacatcttgttaggtaaaacccctaaaatgatacgtgatgtgaaatccgcaaaagtcaataatccccaattggatcagtctatgatccaaattaaagaagcattgttcagggtattgcggttacctgccgtagcagagaaaacatttttaatcactatcggcgaccgctcagtaacaggtatggtagcacgggatcaaatggtcggtccgtggcaagtacctgtggcggattgtgcggtaacaacagcaagtttagacagttatcacggtgaagcaatgtctatcggagaacgaactcctgttgccttgttggattttgccgcctctgcacgtttagctgtcgcagaaagcattaccaatattgccgcaacggatatcggcgatattagacggattaaattatccgctaactggatggctgccgcaggtcatggcggcgaagatgccggactttatgaggctgtaaaagcaatcggtgaggaattatgccctcaattaggtttaaccattccggttggaaaagattccatgtctatgaaaaccacttggcaggaagaaggatatcaaaaatccgtaaccgcaccgctttccgtaattatcagtgcgtttgctcgtgtagaagatgtgcgtaagacggttacacctcaattacgtatggacaaaggagatagccgattactattaattgatttaggtgagggaaaaaatcgtttaggtgcaaccgcacttgctcaagtgtataagcaattaggcgatgtaccggcagatgtagtaaatgtgtctttgctgaaaggcttttttaatgcaatgcaagctctcgtgaaacaagagaaattgctggcctatcatgatcgttcggacggtggtttgattgttacgcttgcggaaatggcttttgccggtcattgcggtatttccatagacatcagtgcattgggtgacaatgatctcggtgttttattcaatgaagaattaggtgccgtaattcaagtcaaagaaagtgaccttaaagcggtgcgtgccgtattgaccgaacatggattaattcatttaaccaaagaactcggtattgttaccgcagatgatcatatcgagattactcgcagtaccagagtcttattgagtgaaaaacgctccgtattacgtgggatttgggctgaattaacacatcaaatgcaacgtttacgtgataatccggattgtgccgatcaagaatttgagatgaaaaaagatccgaatgataaaggactttccgcttatttgacctatgatctaaatgaaaaaatcaccgcaccttatatccaaaaaggaacaaaacctcgtattgctattttacgtgaacaaggggtaaacagccattatgaaatggcggcagcttttgatcgtgctggatttaatgccattgatgttcatatgagtgatttgcaaaaaggacgtcatcatcttcaggatttcaacgcactcgttgcttgcggtggtttttcttatggcgatgtcttgggagccggtggcggttgggctaaatctattctgtttaacactgcacttcgtgatcaattcagtgcatttttccatcgtcaggacacattagccttaggtgtttgtaacggttgtcaaatgttatccaatttagcagaaattatacccggtacggaaaactggggacgatttgtgcggaataaatcagaacgctttgaagctcgtgttgcaatggttcgtattaacaatactcattccgtatggtttgacggaatggcgggatcacatatgccgattgcggtttctcatggtgaaggacgaattgaatttaagcatgatcagcagttgcaagcattaaaagcacagaatttgattgctgcacaatatatcgacagtcaattaaatccgacagaaatatatccggcaaatccgaacggatctgcggagggaattaccgcactttctaattccaacggacgagtcgctattatgatgccacaccctgagcgtgtatttagagcagtaaacaattcttggtatcctgaaaattggcaagaagacggggcttggatgcgtttattccaaaatgcgagagttgcattaggataa

SEQ ID NO: 52969 - protein, 1297 aa, Haemophilus somnus
MLHIFRGTPALSNFRLNQLFSGFQQDNLPIVSCYAEFLHFAHLSEALTEIEREKLEELLRYGPTQKSQEPYGECFVVIPRIGTISSWASKATDIAHNCDLNKVLRLERGIAYYFKFNRTLTAEEEQQLVFRIYDPMMESIVRSPQEAAVLFEQHDPKPFTTVDILTGGHVALEKANVTLGLALAKDEIDYLVENFTALGRNPTDVELYMFAQANSEHCRHKIFNADWIIDGKKQDKSLFKMIKNTFEKTPDYVLSAYKDNAAVMEGSKVGRFFPDQDGQYRYHQEDTHILMKVETHNHPTAISPFPGAATGSGGEIRDEGATGRGAKPKAGLVGFSVSNLCIPNFPQPWENALSKPSRIASALDIMIEGPLGGAAFNNEFGRPALLGYFRTYEEKVNSFNGEEVRGYHKPIMLAGGIGNIRHEHVQKGEIPVGAKLIVLGGAAMNIGLGGGAASSMASGKSKEDLDFASVQRDNPEMERRCQEVIDRCWQLGSENPILFIHDVGAGGLSNAMPELVHDGGRGGRFELRKILCDEKGMSPLEIWCNESQERYVLAVSPEKLPLFEAICQRERASFAVIGEATEQQQLTLQDSHFNNNPIDLPMNILLGKTPKMIRDVKSAKVNNPQLDQSMIQIKEALFRVLRLPAVAEKTFLITIGDRSVTGMVARDQMVGPWQVPVADCAVTTASLDSYHGEAMSIGERTPVALLDFAASARLAVAESITNIAATDIGDIRRIKLSANWMAAAGHGGEDAGLYEAVKAIGEELCPQLGLTIPVGKDSMSMKTTWQEEGYQKSVTAPLSVIISAFARVEDVRKTVTPQLRMDKGDSRLLLIDLGEGKNRLGATALAQVYKQLGDVPADVVNVSLLKGFFNAMQALVKQEKLLAYHDRSDGGLIVTLAEMAFAGHCGISIDISALGDNDLGVLFNEELGAVIQVKESDLKAVRAVLTEHGLIHLTKELGIVTADDHIEITRSTRVLLSEKRSVLRGIWAELTHQMQRLRDNPDCADQEFEMKKDPNDKGLSAYLTYDLNEKITAPYIQKGTKPRIAILREQGVNSHYEMAAAFDRAGFNAIDVHMSDLQKGRHHLQDFNALVACGGFSYGDVLGAGGGWAKSILFNTALRDQFSAFFHRQDTLALGVCNGCQMLSNLAEIIPGTENWGRFVRNKSERFEARVAMVRINNTHSVWFDGMAGSHMPIAVSHGEGRIEFKHDQQLQALKAQNLIAAQYIDSQLNPTEIYPANPNGSAEGITALSNSNGRVAIMMPHPERVFRAVNNSWYPENWQEDGAWMRLFQNARVALG

SEQ ID NO: 52970 - DNA, 3888 bp, Idiomarina loihiensis
  CDS (1)..(3888): transl_table=11
gtggaaatctaccgcggtgcacctgccttatcagccttcaaaacaacgaagcaacttgaacaactgaaacaggcaggaattcctgtcaaagagctttatgccgagtatcagcactttgttgatttgcataatgaactgagcgacgaacaccgttccgtactggttcaattactgaagtacggccctgaaatgccggcacacgagcctcaaggtgctctggtattggttactccccgcattggtactatttccccttgggcttcaaaggccactgacattgcccacaactgtggcttgaaaagtattcatcgtgttgagcgtggcgtggctttctatttgcagggcgacttgtcggctgaagagctgaagcaagcggcgttactgttgcatgatcgtatgaccgaaagtgtattgtacgatatgaacgacgcgcagcagctattccgctcgcaggaaccgcagcctttgtcttcggtggacattctggcaggcggccgtgaagcattggcacaggccaatatcagcttaggtctggctctggccgatgacgaaattgattatctggtagaaaatttccgcaagctggatcgtaaccctaacgacattgagctttatatgtttgcccaggcaaactctgagcactgtcgtcacaagatttttaacgccgactggaccatagacggcgcggaacagcctaagtcgctgttcaaaatgattaaaaacacctttgaaaccacacctgactacgtattgtcggcctacaaagacaacgcggccgttatggaaggccatgaagccggacgtttctatcctcaaccggacagcatgagctatggctacagccacgagccggtgcatattctgatgaaagtggaaactcataaccacccaaccgctatttctccttacccgggtgcggcaaccggctccggcggcgaaattcgcgatgaaggcgctacgggtgttggttctaaacctaaagctggcctggtgggcttcagcgtttctaacctgaacattccgggctttaagcagccgtgggaagagaactacggcaaaccagcgcgtattgtttcggcactggatattatgctggaaggcccattaggcggtgccgcctttaataatgaatttggtcgtccggcgctgaccggttatttccgtacctacgaacaaacggtcgacagccacaatggacgcgagactcgcggttaccataagccaattatgattgccggtggtttgggtaatattcgtgaagcccatgtacaaaaaggtgatattccggttggcgctaagctagttgtactaggtggcccggctatgaacattgggttaggtggcggcgcagcatcgtctatggcgtcgggcgagtcgaccgaagatttagattttgcttcagtgcaacgcgaaaacccggaaatggaacgccgttgtcaggaagtgattgaccgctgctggcagctaggtgccgataaccctattgcctttattcacgacgtaggcgctggtggcctgtcgaatgcgatgccggaactggttagtgatggtggtcgtggtggtcgctttgaactgcgcgaaataccaaacgatgaaccgggtatgacaccgctggaaatttggtgcaacgagtcgcaggaacgttacgttattgccattgcaccggaaaacctggcgcgttttgaagccttgtgtgagcgcgagcgtgcggagtacgcggttattggtgaagcgactgaagagcttactattttactgaacgacgccaagttctcgaatcagccaattgatttgtcgttggacgtgctgttaggcaagccgccgaagatgcaccgcgacgtggctcgcttacagactgagggtacgccactacacctggaagccgctgatttgaatgacgccgctgaccgtttattgcgcttaccggccattgctgagaaaaccttcttaattaccattggtgatcgcagtgtgacaggcctggttgcccgtgaccagatggtgggtccgtggcagataccggtggcggacgttgcggtaaccgcgtccagttatgatagctaccacggtgaagcgatggctatgggtgagcgcacaccgctggcgttactgaactttggtgcttcggcccgcatggcagtagcagagtctttgactaatattgccgctgcggacattggcgatttgaaacgcattaaattatccgccaactggatgtgcgcagctggtcatccgggtgaagacgcaggtctgtatgaggccgttaaagccgtcggtgaagagctgtgtcctgaactgggtattactattccggtaggtaaagattcgatgtcgatgaaaactcagtggcagcaagacggcgaagacaaagctgtgaccgcgccaatgagtctggttattacggcgtttggcagggtgaatgacattcgctcgacgttgacaccgcagttgcgcaccgacaaaggtcagtcgcatctggtgctgattgatttaggtaaaggccagaaccgtttaggcggctctgcactggcgcaggtgtaccagcaactggggcaacacacgccagacttagacgacactgaaacctttaaagccttctttaacaccacacagcaattggtgaccgaagggcgtttactggcctaccacgaccgttcggacggtggtttattcactactgttgcggaaatggcctttgccggtaactgtggtgctaaagtggcactggacgaattaggcgaggataacttagcgactctgttcaacgaagagctgggtgctgttattcaggttagtgacgagcagtaccaaaaagtcatggacgcctataaaaccgctggtttgggcgactgtgtgaaacgcattggtgagccaacgcatgaagatgccattgtctttacccgtgacgaacagaatgtattagcccagagccgtacgcactggcgtacggtatgggcagaaacgacgcaccacatgcagcgcctgcgtgacaacccagtgtgtgctgacgaagaattccgtctgaaacaacgtgccgataacccgggtttactggccgacttaacttttgatccttctgaggatattgctgcgccttatattgctaaaggtgttgcgccgaaagtggcgattctgcgtgagcagggtgtgaattcgcattatgaaatggcagccgcctttgaccgtgctggttttgaagctgttgatgttcatatgagcgatattctggcgggtcgtgtctcgctggaagacatgcaggcactggcggcttgtggtggcttctcttacggtgacgttttaggtgccggtgagggctgggctaaatcgattttattcaacgaccgtgcgcgcgagcagtttgaagctttctttaagcgcaacgatacgttggctctgggtgtgtgtaatggctgtcagatgctgtcgacactgaagcagttaattccgggaaccgagcattggccgcgttttgtaaccaaccgcagtgagcgttttgaagcgcgctttagcctggtggaagtgcaggagtctaagtcgattttcctaggtgacatggcgggttcgcgtatgccaattgccgtgtctcacggcgaaggccgtgctgaatttgctaaccctcagcagcaatcgcagctggagcaaaatagtcaggtggctctgcgttacattgataactggggcgaagtggcggagcagtacccggccaacccgaatggttcacccaaaggcattaccgcagtgaccagtgacgatggtcgtgtgactgcaatgatgccacaccctgagcgtgtgttccgtaccgtagccaacagctggcatccggacgaatggggcgaagacagcccatggatgcgcatgttccgcaacgcccgtaagcacctcggttag

SEQ ID NO: 52971 - protein, 1295 aa, Idiomarina loihiensis
MEIYRGAPALSAFKTTKQLEQLKQAGIPVKELYAEYQHFVDLHNELSDEHRSVLVQLLKYGPEMPAHEPQGALVLVTPRIGTISPWASKATDIAHNCGLKSIHRVERGVAFYLQGDLSAEELKQAALLLHDRMTESVLYDMNDAQQLFRSQEPQPLSSVDILAGGREALAQANISLGLALADDEIDYLVENFRKLDRNPNDIELYMFAQANSEHCRHKIFNADWTIDGAEQPKSLFKMIKNTFETTPDYVLSAYKDNAAVMEGHEAGRFYPQPDSMSYGYSHEPVHILMKVETHNHPTAISPYPGAATGSGGEIRDEGATGVGSKPKAGLVGFSVSNLNIPGFKQPWEENYGKPARIVSALDIMLEGPLGGAAFNNEFGRPALTGYFRTYEQTVDSHNGRETRGYHKPIMIAGGLGNIREAHVQKGDIPVGAKLVVLGGPAMNIGLGGGAASSMASGESTEDLDFASVQRENPEMERRCQEVIDRCWQLGADNPIAFIHDVGAGGLSNAMPELVSDGGRGGRFELREIPNDEPGMTPLEIWCNESQERYVIAIAPENLARFEALCERERAEYAVIGEATEELTILLNDAKFSNQPIDLSLDVLLGKPPKMHRDVARLQTEGTPLHLEAADLNDAADRLLRLPAIAEKTFLITIGDRSVTGLVARDQMVGPWQIPVADVAVTASSYDSYHGEAMAMGERTPLALLNFGASARMAVAESLTNIAAADIGDLKRIKLSANWMCAAGHPGEDAGLYEAVKAVGEELCPELGITIPVGKDSMSMKTQWQQDGEDKAVTAPMSLVITAFGRVNDIRSTLTPQLRTDKGQSHLVLIDLGKGQNRLGGSALAQVYQQLGQHTPDLDDTETFKAFFNTTQQLVTEGRLLAYHDRSDGGLFTTVAEMAFAGNCGAKVALDELGEDNLATLFNEELGAVIQVSDEQYQKVMDAYKTAGLGDCVKRIGEPTHEDAIVFTRDEQNVLAQSRTHWRTVWAETTHHMQRLRDNPVCADEEFRLKQRADNPGLLADLTFDPSEDIAAPYIAKGVAPKVAILREQGVNSHYEMAAAFDRAGFEAVDVHMSDILAGRVSLEDMQALAACGGFSYGDVLGAGEGWAKSILFNDRAREQFEAFFKRNDTLALGVCNGCQMLSTLKQLIPGTEHWPRFVTNRSERFEARFSLVEVQESKSIFLGDMAGSRMPIAVSHGEGRAEFANPQQQSQLEQNSQVALRYIDNWGEVAEQYPANPNGSPKGITAVTSDDGRVTAMMPHPERVFRTVANSWHPDEWGEDSPWMRMFRNARKHLG

SEQ ID NO: 52972 - DNA, 3894 bp, Mannheimia succiniciproducens
  CDS (1)..(3894): transl_table=11
atgttccagattttccgcggctcaccagccctttctgaattccgtttaaaccaactttccgcccgttttcaaaaagcagatttaccggtgaaatcctgctatgcggaatatttacattttgccgacttatcggcaggattaagcgctgaagaaacagatgaattagagcaattattacattatggtccgactttggcgcaacacgaatctaaaggcgaatgctttgtggtgattccgcgggtggggactatttcttcctggtcgtctaaagcgacggacatcgcacataattgcggtttggataaagtcgtgcgtttagagcgcggcatcgcatattattttgaatttgagcgcactttgagcgccgaacaacagcagcgattggtttcccatattcacgaccgtatgatggaaaccgtcgttcgtgcgcctgaacaagccgccgtattatttgattcgcaggatccgaaaccctttaccacagtagatattttaaacggcggtcgcaaagcgttggaaatcgctaacgttgaattaggtttagctctggcttcggatgaaatggattatttggttgaaaatttcaccgcgctcggacgcaatccgaatgacatcgaactttatatgttcgcccaggcgaactcagaacactgccgccataaaatcttcaatgcggattgggtgatcgacggtgagaaacaggaaaaatccttatttaaaatgatcaaaaacaccttcgagaaaaccccggatcatgtgttgtccgcttataaagacaatgcggcggtgatggaaggttcaaaagtagggcgtttctttgcggatcaggacggtcaataccgttatcacaatgaagacgctcatattttaatgaaagtggaaacccacaatcacccgacggctatttcaccgtttccgggggcggcaaccggttccggcggtgaaatccgtgacgaaggggcgaccggtcgcggagccaaaccaaaagcgggcttagtgggcttttccgtgtctaacctggttattccgggttttgaacaaccttgggaaaatgaattatccaaaccaagccgtatttcttccgcattggatattatgatcgaaggcccgcttggcggcgccgcattcaataatgagttcggtcgtccggcattattgggatatttccgtacctatgaagaaaaagtcaacagttttgcgggcgaagaagtgcgcggttaccacaaaccgattatgttagccggcggtatcggcaacatccgtgccgagcacgtgcaaaaaggcgaaatcccggtgggggccaaacttatcgtgcttggcggtccggctatgaatatcggtctgggcggcggtgcggcatcatcaatgacttccggtaaatcgaaagaagatttggattttgcctccgttcaacgggataatccggaaatggaacgacgttgtcaggaagtgatcgaccgttgctggcaaatgggtgaaggcaatccaatcgcttttattcatgacgtgggtgccggcggtttatccaatgcaatgcctgaattagtgcacgacggcggtcgcggcggtaagttcgaattacgcaatattctttgtgacgaacgtggcatgtcgccgttggaaatctggtgtaacgagtcgcaggaacgttacgtactggcggtagcaccggaaaatttagcggtgtttgaagaactttgtcaacgtgaacgcgccccttatgccattatcggcgaagcgacggaagaagaacatttaacgctgcacgataatcattttgacaataatccgattgatttaccaatgagcctgttgttgggtaaaacgccgaaaatgacccgtgatgtgaaatcaacacaggtgaacaatagccccgttgaccaaacaaatattgagttaaaagaagcgttccaccgcgtattacgtttgccggtggtagcggagaaaactttcttaatcaccattggcgaccgtacggtaaccggtatggttgcccgtgatcaaatggtcggaccgtggcaaatccccgtttccgatgtggcggtaaccactgcggcgctggacacttatcacggcgaagccatgtctatcggcgaacgcgcaccggtggcattgctggattttgccgcttccgcgcgtttggctgtggcagaatccatcaccaatattgcagctaccaatatcggcgatatcaagcgtattaaactttccgccaactggatgtccgcagccggtcacgaaggcgaagacgcagggctttatgaagcggtgaaagccgtcggcgaagaactttgccctgctttaggactaaccgtcccggtgggtaaagactccatgtcgatgaaaaccacctggagtgaaaacggcgaacaaaaaaccgttaccgctccgttatcattagtgatttcggctttcgcacgcgtggaagacgtgcgcaaaacagtcactccgcaacttcgtaccgataaaggcgaaaccgcattattattaattgacttaggcgaaggcaaaaatcgcttaggcgccaccgcacttgcacaggtttataaacaattgggtgacaaaccggcggacgtagtgaatgttgagttgctgaaaggcttctataatgcaatgcaaacccttgttcaacaaggtaaattacttgcttaccacgaccgttccgacggcggtttaatcgttaccctggctgaaatggcatttgccggtaattgcggtatccgtgccgaaatcagcgccttaggcgataacgatttaggtattttattcagcgaagaactgggcgccgttattcaggtacgcgaatccgatttagcagcggttcgcgaagtattaacccaacacggcttaattcatttaactaaagatttaggcttagtgacggaatacgacgaatttgaaatcaaacgcggtacaaaagtggtattaagcgaaaaacgttccgaattacgcggaatttgggcggaattaacgcaccaaatgcaacgtttacgtgataatcccgaatgtgcggatcaggaatttgccgctaagaaagatccggcaaatcaaggattcagcgcacatttaacttacgacattaacgaagatgttgccgcgccatatattgcaacaggtaagaaacctcgtattgccgtcttgcgcgaacaaggggtgaacagccatgtcgaaatgggggcagcctttgaccgtgcaggttttgaagccattgacgttcatatgagcgatttacatacggcgcgccaaaacttaaaagatttcaatgcgttagtagcttgcggcggtttctcttacggcgacgtattaggcgcaggcggcggctgggcaaaatctgtcctgtttaacaccgcacttcgcgatcaattccaggcattctttgagcgtgaagatacactggcattgggcgtatgtaacggttgtcaaatgatctcaacccttgccgacattatcccgggtacggaaaactggcctcgttttgtacgtaatacatccgaacgtttcgaggcgcgcgccgcattggtacgaatcaacgaaagcaattccgtttggttccaaggcatggccgggtctcatatgccaattgccgtatctcacggtgaaggcagagtagagttcaaaaacgactcacaactgcaaggcttacgcgaccaaggtctaattatcgctcaatacgtagataacaacatccgaccgacagaagtgtaccccgctaacccgaacggctccgttgacggcattaccgccctaagcaacaccaacggccgcgtcgctatcatgatgccacacccggaacgcgtattccgcaccgtcagcaactcatggcacccggaagactggagcgaagacggcgcctggatgcggttgtttagaaatgcaagggtgttttttaaataa

SEQ ID NO: 52973 - protein, 1297 aa, Mannheimia succiniciproducens
MFQIFRGSPALSEFRLNQLSARFQKADLPVKSCYAEYLHFADLSAGLSAEETDELEQLLHYGPTLAQHESKGECFVVIPRVGTISSWSSKATDIAHNCGLDKVVRLERGIAYYFEFERTLSAEQQQRLVSHIHDRMMETVVRAPEQAAVLFDSQDPKPFTTVDILNGGRKALEIANVELGLALASDEMDYLVENFTALGRNPNDIELYMFAQANSEHCRHKIFNADWVIDGEKQEKSLFKMIKNTFEKTPDHVLSAYKDNAAVMEGSKVGRFFADQDGQYRYHNEDAHILMKVETHNHPTAISPFPGAATGSGGEIRDEGATGRGAKPKAGLVGFSVSNLVIPGFEQPWENELSKPSRISSALDIMIEGPLGGAAFNNEFGRPALLGYFRTYEEKVNSFAGEEVRGYHKPIMLAGGIGNIRAEHVQKGEIPVGAKLIVLGGPAMNIGLGGGAASSMTSGKSKEDLDFASVQRDNPEMERRCQEVIDRCWQMGEGNPIAFIHDVGAGGLSNAMPELVHDGGRGGKFELRNILCDERGMSPLEIWCNESQERYVLAVAPENLAVFEELCQRERAPYAIIGEATEEEHLTLHDNHFDNNPIDLPMSLLLGKTPKMTRDVKSTQVNNSPVDQTNIELKEAFHRVLRLPVVAEKTFLITIGDRTVTGMVARDQMVGPWQIPVSDVAVTTAALDTYHGEAMSIGERAPVALLDFAASARLAVAESITNIAATNIGDIKRIKLSANWMSAAGHEGEDAGLYEAVKAVGEELCPALGLTVPVGKDSMSMKTTWSENGEQKTVTAPLSLVISAFARVEDVRKTVTPQLRTDKGETALLLIDLGEGKNRLGATALAQVYKQLGDKPADVVNVELLKGFYNAMQTLVQQGKLLAYHDRSDGGLIVTLAEMAFAGNCGIRAEISALGDNDLGILFSEELGAVIQVRESDLAAVREVLTQHGLIHLTKDLGLVTEYDEFEIKRGTKVVLSEKRSELRGIWAELTHQMQRLRDNPECADQEFAAKKDPANQGFSAHLTYDINEDVAAPYIATGKKPRIAVLREQGVNSHVEMGAAFDRAGFEAIDVHMSDLHTARQNLKDFNALVACGGFSYGDVLGAGGGWAKSVLFNTALRDQFQAFFEREDTLALGVCNGCQMISTLADIIPGTENWPRFVRNTSERFEARAALVRINESNSVWFQGMAGSHMPIAVSHGEGRVEFKNDSQLQGLRDQGLIIAQYVDNNIRPTEVYPANPNGSVDGITALSNTNGRVAIMMPHPERVFRTVSNSWHPEDWSEDGAWMRLFRNARVFFK

SEQ ID NO: 52974 - DNA, 3963 bp, Neisseria meningitidis serogroup A
  CDS (1)..(3963): transl_table=11
atgtctgtcgttttgcccttgcgcggcgttaccgccctttccgatttccgtgttgaaaaactcttgcaaaaagccgccgcactcggtctgcccgaagtcaaattaagcagcgaattttggtatttcgtcggcagcgagaaagcacttgatgccgcgactgtcgaaaaactgcaagccttgttggcggcgcaaagcgttgaacaaacgccaaaagcgcgcgagggcttgcatttgtttttggtcacgccccgtttgggtacgatttcgccgtgggcttccaaggcgaccaatatcgcggaaaactgcggtttggcaggcatcgaacgcatcgagcgcggcatggcggtgtggctggaaggtgcgcttaccgatgaacagcaacagcaatgggcggctttgctgcacgaccgcatgactgaatccgtgctgcccgattttcagacggcatccaaattattccaccatctcgaatccgaaaccttttccaccgtcgatgttttgggcggcggtaaagaggctttggtcaaagccaataccgaaatgggtttggcactctccgccgacgaaatcgattatctggttgaaaactatcaggctttgcagcgcaatccgtctgatgtggagctgatgatgttcgcgcaggcaaacagcgaacactgccgccacaaaatcttcaacgccgacttcatcctcaacggcgaaaaacagccgaaatcgctcttcggtatgatacgcgacacgcacaacgcgcatcccgaaggcacagtcgttgcctacaaagacaactcatccgtgatcgaaggcgcaaaagtcgaacgtttctatccaaatgcggcagaaaaccaaggctaccgtttccacgaggaagacacgcatatcatcatgaaagtggaaacgcacaaccacccgaccgccatcgcgccgtttgcgggcgcggcaacgggcgcgggcggcgaaatccgcgacgaaggtgcgacgggcaaaggttcgcgtccgaaagcaggcttgaccggctttaccgtgtccaacctcaacatccccggcctcaaacagccgtgggaacaagattacggcaagccggaacatatttcctcgccgctggacattatgattgaaggccccatcggcggcgcggcgttcaacaacgaattcggccgccccaacctcttgggctacttccgcacttttgaagaaaaatttgacggtcaggttcgcggctaccacaaaccgattatgattgccggcggcttgggcagcattcaggcgcagcagacgcataaagacgaaatccccgaaggcgcgttgctgatccaactgggcggcccgggtatgcttatcggcttgggcggcggcgcggcttcttcgatggataccggcacaaacgacgcgtctttagacttcaactccgtacaacgcggcaaccccgaaatcgaacgccgcgcgcaggaagtgatcgaccgctgctggcagctcggcgacaaaaacccgattatctccatccacgacgttggcgcgggcggcttgtccaacgccttccccgaactcgtcaacgatgccggacgcggcgcggtattcaagctgcgcgaagtgccgctggaagaacacggtctcaacccgctgcaaatctggtgcaacgaatcgcaagagcgttatgtattgtcgattttggaaaaagatttggacatcttccgctccatctgcgaacgtgaacgctgcccgtttgcggtagtcggtacggcgaccgacgacggccatttgaaagtacgcgacgatttgttctccaacaaccctgtcgatttgccgttgaacgtcttgctcggcaaaccgcccaaaaccacgcgtaccgacaaaacggttgcgccgtccaaaaaaccgtttcacgcgggcgatatcgacattactgaagccgcctaccgcgttctgcgcctgcctgccgtagccgccaaaaacttcctgattaccatcggcgaccgcagcgtcggcggcatgacccaccgcgaccaaatggtcggcaaataccaaacccccgtagccgactgcgccgttaccatgatgggcttcaacacttatcgcggcgaagcgatgagcatgggcgaaaaaccgaccgtcgccctgtttgacgcgcctgcttcgggcagaatgtgcgtcggcgaagccatcaccaacatcgcggcagccaatatcggcgacatcggcaacatcaaactctccgccaactggatggcggcgtgcggcaacgaaggcgaagacgaaaaactctaccgcaccgtcgaagcggtttccaaagcctgtcaggcattggatttgagcattcccgtgggcaaagacagcctgtcgatgaaaaccgtgtggcaggacggcgaagagaaaaaatccgtcgtttcgccgttgagcctgattatctccgcgttcgcgccggttcaagacgtacgcaaaaccgttacgcccgaattgaaaaacgtcgaggacagcgtattgctgtttgtcgatttgggcttcggcaaagcgcgtatgggcggctcggcgtttggtcaggtgtacaacaatatgagcggcgacgcgcccgatttggacgatacaagtcgtctgaaagcgttttacaacgtgattcagcagcttgtcgccgaagacaaactcttggcgtatcacgaccgcagcgacggcggcttgtttgccgttttggtagaaatggcgtttgcagggcggtgcggcttggatatagatttaaatttattgcttgcacaaacatttattaccaaccataccgctctgtctcaatcattgcggactgaagaggtaaaagcgttggctgaatggcaagaaaccattgcccgcacattatttaatgaagagttgggtgctgttatccaagttagaaaacaagatgttgccgatattatcaatttattctatcaacaacagctgcatcataatgtctttgaaatcggtacgttaactgatgagaacacgttaatcatccgcgacgggcaaacgcaccttatttctgacaacctaatcaaactgcaacaaacctggcaagaaaccagccatcaaatccaacgcctgcgcgacaaccctgcctgcgccgacagcgagtttgccctgattggcgacaacggacgcagcgcattgtttgccaacctgaaattcgacgtgaacgaagacatcgccgcgccgtttatcaacagcggcgcgaaacccaaaatcgccatcctgcgcgaacagggcgtaaacgggcaaatcgaaatggccgccgccttcacccgtgccggtttcgatgcctacgacgtgcatatgtccgacctgatggcaggccgcgtccaccttgccgacttcaaaatgctggcggcgtgcggcggcttcagctacggcgacgtactcggcgcgggcaaaggctgggcgaaatccatcctgttccaccccgccttacgcgaccagttcgccgccttcttcaccgacccgaacacgctgacattgggcgtgtgcaacggctgccagatggtcagcaacctcgccgaaatcatccccggcacggcaggctggccgaagttcaagcgcaacctgagcgaacagttcgaagcgcgcctgagcatggttcacgtccccaaatcagcctccctgattctgaacgaaatgcaaggctccagcctgcccgtcgtcgtcagccacggcgaaggccgcgccgacttcgcgcttcacggcggcaacatttctgccgatttgggcattgcgttgcaatatgtggacggacaaaaccaaattacccaaacctacccgctcaaccccaacggctcgccgcaaggcatcgccggcgtgaccaacgccgacggccgcgttaccatcatgatgccgcatcctgaacgtgtataccgcgccgcacaaatgagctggaaaccggaagactggacggaattgtccggctggtaccgcctcttcgccggcgcacgtaaagccttgggctaa

SEQ ID NO: 52975 - protein, 1320 aa, Neisseria meningitidis serogroup A
MSVVLPLRGVTALSDFRVEKLLQKAAALGLPEVKLSSEFWYFVGSEKALDAATVEKLQALLAAQSVEQTPKAREGLHLFLVTPRLGTISPWASKATNIAENCGLAGIERIERGMAVWLEGALTDEQQQQWAALLHDRMTESVLPDFQTASKLFHHLESETFSTVDVLGGGKEALVKANTEMGLALSADEIDYLVENYQALQRNPSDVELMMFAQANSEHCRHKIFNADFILNGEKQPKSLFGMIRDTHNAHPEGTVVAYKDNSSVIEGAKVERFYPNAAENQGYRFHEEDTHIIMKVETHNHPTAIAPFAGAATGAGGEIRDEGATGKGSRPKAGLTGFTVSNLNIPGLKQPWEQDYGKPEHISSPLDIMIEGPIGGAAFNNEFGRPNLLGYFRTFEEKFDGQVRGYHKPIMIAGGLGSIQAQQTHKDEIPEGALLIQLGGPGMLIGLGGGAASSMDTGTNDASLDFNSVQRGNPEIERRAQEVIDRCWQLGDKNPIISIHDVGAGGLSNAFPELVNDAGRGAVFKLREVPLEEHGLNPLQIWCNESQERYVLSILEKDLDIFRSICERERCPFAVVGTATDDGHLKVRDDLFSNNPVDLPLNVLLGKPPKTTRTDKTVAPSKKPFHAGDIDITEAAYRVLRLPAVAAKNFLITIGDRSVGGMTHRDQMVGKYQTPVADCAVTMMGFNTYRGEAMSMGEKPTVALFDAPASGRMCVGEAITNIAAANIGDIGNIKLSANWMAACGNEGEDEKLYRTVEAVSKACQALDLSIPVGKDSLSMKTVWQDGEEKKSVVSPLSLIISAFAPVQDVRKTVTPELKNVEDSVLLFVDLGFGKARMGGSAFGQVYNNMSGDAPDLDDTSRLKAFYNVIQQLVAEDKLLAYHDRSDGGLFAVLVEMAFAGRCGLDIDLNLLLAQTFITNHTALSQSLRTEEVKALAEWQETIARTLFNEELGAVIQVRKQDVADIINLFYQQQLHHNVFEIGTLTDENTLIIRDGQTHLISDNLIKLQQTWQETSHQIQRLRDNPACADSEFALIGDNGRSALFANLKFDVNEDIAAPFINSGAKPKIAILREQGVNGQIEMAAAFTRAGFDAYDVHMSDLMAGRVHLADFKMLAACGGFSYGDVLGAGKGWAKSILFHPALRDQFAAFFTDPNTLTLGVCNGCQMVSNLAEIIPGTAGWPKFKRNLSEQFEARLSMVHVPKSASLILNEMQGSSLPVVVSHGEGRADFALHGGNISADLGIALQYVDGQNQITQTYPLNPNGSPQGIAGVTNADGRVTIMMPHPERVYRAAQMSWKPEDWTELSGWYRLFAGARKALG

SEQ ID NO: 52976 - DNA, 3963 bp, Neisseria meningitidis serogroup B
  CDS (1)..(3963): transl_table=11
atgtctgtcgttttgcccttgcgcggcgttaccgccctttccgatttccgtgttgaaaaactcttgcaaaaagccgccgcactcggtctgcccgaagtcaaattaagcagcgaattttggtatttcgtcggcagcgagaaagcacttgatgccgcgactgtcgaaaaactgcaagccttgttggcggcgcaaagcgttgaacaaacgccaaaagcgcgcgagggcttgcatttgtttttggtcacgccccgtttgggtacgatttcgccgtgggcttccaaggcgaccaatatcgcggaaaactgcggtttggcaggcatcgaacgcatcgagcgcggtatggcggtgtggctggaaggtcgtctgaacgatgaacagaaacagcaatgggcggctttgctgcacgaccgcatgaccgaaagcgtgctgcccgattttcagacggcctccaaattattccaccatctcgaatccgaaactttctccggcgtcgatgttttgggcggcggtaaagaagctttggtcaaagccaataccgaaatgggcttggcactttccgccgacgaaatcgattatctggtcgaaaactatcaggctttgcagcgcaatccgtccgatgttgaattgatgatgttcgcgcaggcaaacagcgaacactgccgccacaaaatcttcaacgccgatttcatcctcaacggcgaaaagcagcccaaatccctcttcggtatgatacgcgacacacacaacgcgcatcccgaaggcacggtcgttgcctataaagacaattcgtccgtaatcgaaggcgcgaaaatcgagcgtttctatccgaatgcggcggaaaaccaaggctaccgtttccacgaggaagacacgcatatcatcatgaaagtggaaacgcacaaccacccgaccgccatcgcgccgtttgcgggtgcggcgacgggcgcgggcggcgaaatccgcgacgaaggcgcgacgggcaaaggttcgcgtccgaaagcgggcctgaccggctttaccgtgtccaacctcaatattcccgacctcaaacagccgtgggaacaagactacggcaagccggaacatatttcctcgccgctggacatcatgattgaaggcccgatcggcggcgcggcgttcaacaacgaattcggccgccccaacctcttgggctacttccgcacttttgaagaaaaatttgacggtcaggttcgcggctatcacaaaccgattatgattgccggcggcttgggcagcattcaggcgcagcagacgcataaagacgaaatccccgaaggcgcattgctgatccaactgggcggcccgggtatgcttatcggcttgggcggcggcgcggcttcttcgatggataccggcacaaacgacgcgtctttggacttcaactccgtgcaacgcggcaaccccgaaatcgaacgccgcgcgcaggaagtcatcgaccgctgctggcagctcggcggcaaaaacccgattatctccatccacgacgtaggcgcgggcggcctgtccaacgccttccccgaactggtcaacgatgccagacgcggcgcagtattcaagctgcgcgaagtgccgcttgaagaacacggcctcaacccgctgcaaatctggtgcaacgaatcgcaagagcgttatgtgttgtcgattttggaaaaagatttggatgctttccgcgccatctgcgaacgcgaacgctgcccgtttgccgtagtcggcacggcgactgacgacggtcatttgaaagtacgcgacgatttgttcgccaacaatcccgtcgatttgccgttgaacgtcttgctcggcaaactgcccaaaaccacgcgcaccgacaaaacggttgcaccgtccaaaaaaccgtttcacgcgggcgatatcgacattaccgaagccgcctaccgcgttttgcgcctgcctgccgtagccgccaaaaacttcctgattaccatcggcgaccgcagcgtcggcggtttgacgcaccgcgaccaaatggtcggcaaatatcaaactccagtagccgactgcgccgttaccatgatgggcttcaacacctatcgcggtgaagcgatgtctatgggcgaaaaaccgaccgtcgccctgtttgatgcgcctgcttcgggcagaatgtgcgtcggcgaagccatcaccaacatcgcggcggtcaacatcggagacatcggcaacatcaaactctccgccaactggatggcggcgtgcggcaacgaaggcgaagacgaaaaactctaccgcactgtcgaagccgtttccaaagcctgtcaggcattggatttgagcatccccgtgggcaaagacagcctgtcgatgaaaaccgtttggcaggacggcgaggagaaaaaatccgtggtttcaccgttgagcctgattatctcagcgttcgcgcctgtgaaagacgtacgcaagactgttacgcctgagttgaaaaacgtcgaagacagcgtattgttgtttgtcgatttgggcttcggcaaagcgcgtatgggcggttcggcgtttggtcaggtgtacaacaatatgagcggcgacgcgcccgatttggacgatacaggtcgtctgaaagccttttacagtgtgattcagcagcttgttgccgaaaacaaactcttggcgtatcacgaccgcagcgacggcggcttgtttgccgttttggtagaaatggcgtttgcggggcggtgcggcttggatatagatttaaatttattgcttgcacaaacatttattaccaaccataccgctctgtctcaatcattgcggactgaagaggtaaaagcgttggctgaatggcaagaaaccattgcccgcacattatttaatgaagagttgggtgctgttatccaagttagaaaacaagatgttgccgatattatcaatttattctatcaacaacagctgcatcataatgtctttgaaatcggtacgttaactgatgagaacacgttaatcatccgcgacgggcaaacgcaccttatttctgacaacctaatcaaactgcaacaaacctggcaagaaaccagccatcaaatccaacgcctgcgcgacaaccctgcctgcgccgacagcgagttcgcactgattggcgacaacgaacgcagcgcattgtttgccgacgtgaagttcgacgtgaacgaagacatcgccgcgccgtttatcaacagcggcgcgaaacccaaaatcgccatcctgcgcgaacagggcgtaaacgggcaaatcgaaatggccgccgcctttacccgcgccggattcgatgcttacgacgtgcatatgtccgacctgatggcaggccgcatccacctcgccgacttcaaaatgctggcggcgtgcggcggcttcagctacggcgacgtactcggcgcgggcgaaggctgggcgaaatcgattctgttccaccctgctctgcgcgaccagtttgccgccttcttcgccgacccggacacgctgacattgggcgtgtgcaacggctgccaaatggtcagcaaccttgccgaaatcatccccggcacggcaggctggccgaagttcaaacgcaacctgagcgaacagtttgaagcacgcctgagcatggttcacgttccgaaatcagcgtcgctgattctgaacgaaatgcaaggctccagcctgcctgtcgtggtcagccacggcgaaggccgcgccgacttcgcgcttcacggcggcaatatttccgccgatttgggcattgcgctgcaatacatcgacggacaaaaccaagtgacccaaacttatccgctcaaccccaacggctcgcctcaaggcatcgccggcgttactaacgccgacggccgcatcaccatcatgatgccccaccccgaacgcgtgtaccgtgccgcgcaaatgagctggaaaccggaaggctggacggaactgtccggctggtaccgcctctttgccggcgcacgtaaagccttgggctaa

SEQ ID NO: 52977 - protein, 1320 aa, Neisseria meningitidis serogroup B
MSVVLPLRGVTALSDFRVEKLLQKAAALGLPEVKLSSEFWYFVGSEKALDAATVEKLQALLAAQSVEQTPKAREGLHLFLVTPRLGTISPWASKATNIAENCGLAGIERIERGMAVWLEGRLNDEQKQQWAALLHDRMTESVLPDFQTASKLFHHLESETFSGVDVLGGGKEALVKANTEMGLALSADEIDYLVENYQALQRNPSDVELMMFAQANSEHCRHKIFNADFILNGEKQPKSLFGMIRDTHNAHPEGTVVAYKDNSSVIEGAKIERFYPNAAENQGYRFHEEDTHIIMKVETHNHPTAIAPFAGAATGAGGEIRDEGATGKGSRPKAGLTGFTVSNLNIPDLKQPWEQDYGKPEHISSPLDIMIEGPIGGAAFNNEFGRPNLLGYFRTFEEKFDGQVRGYHKPIMIAGGLGSIQAQQTHKDEIPEGALLIQLGGPGMLIGLGGGAASSMDTGTNDASLDFNSVQRGNPEIERRAQEVIDRCWQLGGKNPIISIHDVGAGGLSNAFPELVNDARRGAVFKLREVPLEEHGLNPLQIWCNESQERYVLSILEKDLDAFRAICERERCPFAVVGTATDDGHLKVRDDLFANNPVDLPLNVLLGKLPKTTRTDKTVAPSKKPFHAGDIDITEAAYRVLRLPAVAAKNFLITIGDRSVGGLTHRDQMVGKYQTPVADCAVTMMGFNTYRGEAMSMGEKPTVALFDAPASGRMCVGEAITNIAAVNIGDIGNIKLSANWMAACGNEGEDEKLYRTVEAVSKACQALDLSIPVGKDSLSMKTVWQDGEEKKSVVSPLSLIISAFAPVKDVRKTVTPELKNVEDSVLLFVDLGFGKARMGGSAFGQVYNNMSGDAPDLDDTGRLKAFYSVIQQLVAENKLLAYHDRSDGGLFAVLVEMAFAGRCGLDIDLNLLLAQTFITNHTALSQSLRTEEVKALAEWQETIARTLFNEELGAVIQVRKQDVADIINLFYQQQLHHNVFEIGTLTDENTLIIRDGQTHLISDNLIKLQQTWQETSHQIQRLRDNPACADSEFALIGDNERSALFADVKFDVNEDIAAPFINSGAKPKIAILREQGVNGQIEMAAAFTRAGFDAYDVHMSDLMAGRIHLADFKMLAACGGFSYGDVLGAGEGWAKSILFHPALRDQFAAFFADPDTLTLGVCNGCQMVSNLAEIIPGTAGWPKFKRNLSEQFEARLSMVHVPKSASLILNEMQGSSLPVVVSHGEGRADFALHGGNISADLGIALQYIDGQNQVTQTYPLNPNGSPQGIAGVTNADGRITIMMPHPERVYRAAQMSWKPEGWTELSGWYRLFAGARKALG

SEQ ID NO: 52978 - DNA, 3894 bp, Pasteurella multocida
  CDS (1)..(3894): transl_table=11
atgttacaaatttttcgtggttctcccgcactttctgaatttcgtttaaatcaacttgctgtgcgttttcaaaaagccaatcttcccgtgagcgcgtgttatgcggaatatatccattttgctgacttatctgaccgtttaactgaagaagaaacagcaaaattagaccaactattacactatggtcccactcttgcggggcatgatcctgttggtcactgctttatcgtgattccgcgtattggcactatttcatcttggtcatctaaagcaaccgatattgcgcacaactgtggcttaaacaaagtgaatcgtttagagcgtggattagcattttattttgaatttgaccgcacgttatcgtctgaagagcaacaacgcttggtttcacacattcatgaccgaatgttagaaggcatcattcatacccctgaagaagccaaagtgctgttcgaccaacaagcaccaaaaccatttactacggttgatattttgagcggtgggcgtcaagcgttagaaaatgcaaacgtggaattaggtctggcgctcgcagaagatgaaattgattatttagtcgaaaatttcaccgcactaggtcgcaacccaaatgacatcgaactgtatatgttcgcacaggcaaactctgaacactgccgtcataaaatttttaatgcggattggatcattgatggcgaaaaacaagaaaaatccttgtttaaaatgattaaaaatacctttgagaaaaccccagatcacgtactttcagcctataaagataacgcggcggtgatggaaggctcaaaagtgggacgattcttcccggatcaagatgggcaatatcgctatcacaatgaagatgcgcatatcttaatgaaagtggaaactcacaaccacccaactgcgatttcgcccttcccaggcgcggcaaccggttctggtggtgagatccgtgatgagggcgcaaccggtcgtggtgcgaaaccaaaagccggtttagtgggcttctcggtgtctaacttagtgattccaggttttgaacaaccttgggaaaatccagtgtcgaaaccaaatcgtattgcttcagcactcgatattatgattgaaggacctttaggcggtgccgcatttaacaatgaatttggtcgcccagcgttattaggttatttccgtacttatgaagaaaaagtcaatagctttgcgggtgaagaagtacgtggttaccataaaccgatcatgttagcgggtgggattggcaatatccgtgcagaacatgtacaaaaaggcgaaattcctgtcggggcaaaactgattgtattaggtggacctgccatgaacatcggtttaggcggtggagcagcttcttctatggcttctggtaaatcaaaagaagatttagattttgcctcggtacaacgggataacccagaaatggaacgtcgttgccaagaagtgatcgaccgttgctggcagttaggtgaggacaacccaattctctttattcacgatgtgggggcaggtggtttatccaatgcgatgccagaactcgtacatgatggcggtcgtggcgggaaatttgaactacgcaagatcttaagtgatgagcgtgggatgagcccattagaaatttggtgtaacgaatcgcaagaacgttatgtgttagcagttgcgccagaaaaactcgaattatttaccgcactttgtgaacgtgaacgtgcgccctttgcggtgattggtgaagccaccgagcaagagcatttaaccttacacgatgatcatttcgacaataacccaatcgatttaccgatgaatgtgttgttgggtaaaacgccaaaaatgacccgtgatgtgaaatcaaaaacggtagaaggtagcgctttagatcactctcaaattgacttaaaagaagcgtttcaccgtgtgttacgcttacctgtggtggcagaaaaaaccttcttaattactattggtgaccgttctgtgaccggtatggtggcacgtgatcaaatggtcggtccatggcaaattcctgtggcagactgtgcggttaccacagctagtttagacagctatcacggtgaagctatgtcaatgggtgaacgtgcgcctgtggcattattagattttgctgcatcggcacgtttagcggtagcagaatcgattaccaatattgcagcaactaacattggtgatattaaacgtattaaattatcagcgaactggatgtcagcagcaggtcacgaaggcgaagatgcaggcttatatcaagcggtgaaagccgtcggtgaagagctttgtccacaacttggcttaactattcctgtgggcaaggactccatgtcaatgaaaaccacgtggcacgaaaacggtgaacaaaaaaccgtgacggcgccattatctttagtgattagtgcttttgcacgtgtggaagatgtacgcaaaacagtcacgccacaattacgcaccgacaaaggacacagtcgcttattattaattgacttaggcgaaggcaaaaatcgcttaggtgcgaccgcacttgcgcaagtgtataaacaacttggtgataaacctgcggatgtggtgaacgttgaaagcttgaaaaacttcttcaatgccatgcaagcgttggtggcagagcaaaaactcttggcgtaccacgaccgttcagacggcggtttaattgccacccttgccgaaatggcgtttgcgggtaactgtggtttatcgatccatatcagtgcattaggcgataacgatcttgccgtgttattcaatgaagaattaggcgcggtgattcaagtgcgtgagagcgatttaagctatgtgcgtgatgttttatcacaacatggtttaatccatttaaccaaagagttaggggaagtgaccacagaagatcgtatcgaaatttctcgtggtaccaaattattattcagccaaaaacgttctgaattgcgtggtatttgggcggaattaacccaccaaatgcaacgtttacgtgacaatccagaatgtgccgaccaagagtttgcagcgaaaaaagatccagaaaacaaaggtttctccgcccatttaacctacgacattaacgaagatatcgccgcgccttacattgccacaggcaagaaaccgcgcattgcaatcttacgtgaacaaggggttaacagccattatgaaatggcggcggcatttgaccgtgcagggtttgaggcgattgacgtgcatatgagcgatttacacaacgcacgctaccgcttaaaagacttcaatgccttagtagcctgtggtggtttctcttatggagacgtgcttggcgcgggtggcggttgggcgaaatccatcctatttaacccaatgttgcgtgatcaatttagcgaattctttgccaacccaaataccctcactttaggggtgtgtaatggctgccaaatggtttccaaccttgctgaaattatcccgggtacagatgcttggccacgtttcgtgcgtaataaatccgaacgtttcgaagcgcgtgctgcattagtgcgtattaatgagacaaattcactctggttccaaggcatggcgggttcacatatgccaattgcggtatcgcatggtgaaggacgtgtcgagtttaaacacgatcaacagttacagatgttaaaagatcaaaacttaatcgtggcacaatacatcgacaacaacctcaacccaacggaaatctacccagctaacccgaacggctccgtagaaggcatcaccgcactctccaaccaagacggacgtgtcgctatcatgatgccacacccagagcgtgtattccgcacggtttctaactcatggcatccagaagattggagtgaagatggggcatggatgagattgtttagaaatgctagggtggtgttggagtaa

SEQ ID NO: 52979 - protein, 1297 aa, Pasteurella multocida
MLQIFRGSPALSEFRLNQLAVRFQKANLPVSACYAEYIHFADLSDRLTEEETAKLDQLLHYGPTLAGHDPVGHCFIVIPRIGTISSWSSKATDIAHNCGLNKVNRLERGLAFYFEFDRTLSSEEQQRLVSHIHDRMLEGIIHTPEEAKVLFDQQAPKPFTTVDILSGGRQALENANVELGLALAEDEIDYLVENFTALGRNPNDIELYMFAQANSEHCRHKIFNADWIIDGEKQEKSLFKMIKNTFEKTPDHVLSAYKDNAAVMEGSKVGRFFPDQDGQYRYHNEDAHILMKVETHNHPTAISPFPGAATGSGGEIRDEGATGRGAKPKAGLVGFSVSNLVIPGFEQPWENPVSKPNRIASALDIMIEGPLGGAAFNNEFGRPALLGYFRTYEEKVNSFAGEEVRGYHKPIMLAGGIGNIRAEHVQKGEIPVGAKLIVLGGPAMNIGLGGGAASSMASGKSKEDLDFASVQRDNPEMERRCQEVIDRCWQLGEDNPILFIHDVGAGGLSNAMPELVHDGGRGGKFELRKILSDERGMSPLEIWCNESQERYVLAVAPEKLELFTALCERERAPFAVIGEATEQEHLTLHDDHFDNNPIDLPMNVLLGKTPKMTRDVKSKTVEGSALDHSQIDLKEAFHRVLRLPVVAEKTFLITIGDRSVTGMVARDQMVGPWQIPVADCAVTTASLDSYHGEAMSMGERAPVALLDFAASARLAVAESITNIAATNIGDIKRIKLSANWMSAAGHEGEDAGLYQAVKAVGEELCPQLGLTIPVGKDSMSMKTTWHENGEQKTVTAPLSLVISAFARVEDVRKTVTPQLRTDKGHSRLLLIDLGEGKNRLGATALAQVYKQLGDKPADVVNVESLKNFFNAMQALVAEQKLLAYHDRSDGGLIATLAEMAFAGNCGLSIHISALGDNDLAVLFNEELGAVIQVRESDLSYVRDVLSQHGLIHLTKELGEVTTEDRIEISRGTKLLFSQKRSELRGIWAELTHQMQRLRDNPECADQEFAAKKDPENKGFSAHLTYDINEDIAAPYIATGKKPRIAILREQGVNSHYEMAAAFDRAGFEAIDVHMSDLHNARYRLKDFNALVACGGFSYGDVLGAGGGWAKSILFNPMLRDQFSEFFANPNTLTLGVCNGCQMVSNLAEIIPGTDAWPRFVRNKSERFEARAALVRINETNSLWFQGMAGSHMPIAVSHGEGRVEFKHDQQLQMLKDQNLIVAQYIDNNLNPTEIYPANPNGSVEGITALSNQDGRVAIMMPHPERVFRTVSNSWHPEDWSEDGAWMRLFRNARVVLE

SEQ ID NO: 52980 - DNA, 3969 bp, Photobacterium profundum
  CDS (1)..(3969): transl_table=11
atggaaattttgcgtggttcacccgcactatctgagtttcgcgttaataagctattagagcgttgtcgcgagttagatctacctgtgtccggcatttatgccgagttcatgcactttgctgatgtctctgctcccctgaattcagatgagcaaagcaagcttgcgagcctgcttacatatggtccgacgatcgcagagcatgagcctactggcactatgctccttgttactcctcgtcctggtactatctctccatggtcttctaagtctaccgatattgcgcagaactgtgcgttaggtaacgttaagcgtttagagcgtggtacggcttactacgtagaagtcaccgcagatcttacgaatgcacaacttacagacttaaaagctctgatccatgatcgtatgatggaagttgtctttacggatgtcgattctgcagccgcattatttacccaagcagagccagcacccgttcaaagtgttgatatcttggtgggtggtcgcaaggcgctagaagatgccaacctaaaattgggcttagcattagctgaagatgaaattgactacttagtcgaaaatttcactatgttaggtcgcaatcctaacgatattgaattaatgatgtttgctcaagcgaactctgagcattgtcgccataaaatctttaatgctgactggactatcgacggtgtcgagcaagaaaagtcattgttcaagatgattaagaacacctacgaaaaaaatcacgagcacgttctgtctgcatataaagataatgcggcagtgatggaaggttcagaagtggggcgctttttccctaaccctgaatctcgccaatataactaccatcaggaagcggcccatatcctgatgaaggtagaaacacataaccacccaacggctatttcaccatggcctggtgcatctaccggttctggtggtgaaattcgagatgaaggcgcaacaggtcttggtggtaagccaaaagcaggcttggttggttttacagtctctaacttacgtgttcctggttttgaacagccttgggaaacagatttcggtaagccgggtcgtattgttaatgcattagagattatgctggaagggccactcggtggtgcggcattcaacaatgaatttggtcgtcctaacttattaggctacttccgtacgtacgaagaaaaagtgacgtcgcacaatggcgaagaaattcgcggttaccacaagccaatcatgattgctggtggtatgggtaatattcgtgctgatcacgttcagaaaaaagaaatcccagtcggcgctaagctaattgtacttggtggccctgcaatgaacattggtttgggcggtggtgcagcttcatcaatggcgtctggtcaatcagcagaagatttagatttcgcatcagtacaacgtgaaaaccctgaaatggaacgtcgttgtcaagaagtgatcgaccgttgttggcagatgggtgatgctaacccaatcgcatttattcacgatgtcggtgctggtggtatttcaaacgccttaccagagcttgtcgatgatggtgaacgtggcggtaaattccagctacgcaacgtacccaatgatgaaccgggtatgagcccgctagaaatttggtgtaacgaatcgcaagaacgttatgttatggctgttgcaccagaaaatctggccgtatttgaagcgatttgtaaacgtgaacgcgccccgtttgccgttgttggtgaagccacagaagagcgtcacctaacacttgaagatgaacatttcgataatacgccaatcgacatgcctatggatattctattaggtaaagcaccaaaaatgcatcgtgacgcgaaaacactgaaagttgaaggtcaggcaattgaccgcagtggcatcgaactagaagcggcaacacaacgcgtattacgcttacccgccgttgctgagaaaacattccttatcacgattggtgatcgcagcgtaacaggtttagttgcacgtgatcagatggtcggcccatggcaggtccctgttgctaactgtgcagtaaccgcggcgagttatgacacctatcacggcgaagcaatgtcgatgggtgaacgtacaccggttgcactgcttgattttggcgcatctgctcgtttagccgttggcgaagcgattaccaatatcgcaagtgctgatattggcgatatgaagcgtattaatttatcggcaaactggatgtctccagcgggccaccctggtgaagatgcgggtttatacgaagccgttaaagcagtaggtgaagagttgtgtcctgctcttggcttaacgattccagttggtaaagattcgatgtcgatgaagaccaagtgggagcaagatggcgagcagaaagaagtcacttctccgttatcattggtgattaccgcgtttggtcgtgttgaagatgtccgtaaaacagtaacgcctcagctacgcactgataaaggtgaatcaagcttaatcttgattgatctaggttgtggtcaaaaccgtcttggtgctacggcactggcacaggtttacaagcaactgggtgataagcctgctgatgttgataaccctgaattactcaaaggcttcttctacgctgttcaagcactagtacgtgatgaaaaagtattggcttaccatgaccgtggtgatggtggtttatatgtgactctggctgaaatggcatttgcgggtcacaccggtgttgaagttgacattaatacgtctgaaagcgatgcatgtgacgatgtactagcaatgcttttcaatgaagagctaggtgctgtacttcaagttcgtactgaagacctcgatacggtgaaatcagtacttgccgaacatggcttaacagcatgcagccatgttattggtaccgtggttgatgaagacgtggttcgtatctggaatggcaacgatcgcgttcttgagcaaagccgcactgaccttcgtactgtctgggctgaaacgacttaccagatgcaagcgatgcgtgataaccctgcgggtgccttgcaagagtttgaagcgaagaaagataacagtgacccaggcctaagcgctcagttaaccttcgacattaatgaagatgtagccgccccctttattgctgctccatttattacaaaagcaccaaagactggtgcatcagtagttaatgcaccggcaattaacttaggtgcaaaaccacaaatggccattctacgtgagcagggtgttaactctcatgttgaaatggcagcggcttttgaccgtgctggttttgaagcaacagatgttcatatgagtgatattttgtctggcaacgttcagctagaagggttcaatgggcttgttgcttgtggcggtttctcatacggtgacgtattgggtgctggtgaaggttgggctaaatcagtgttgtttaacaacatcgctcgtgaccaatttgaagcattcttcaagcgtaacgatacattctcattgggtgtgtgtaacggttgtcagatgatgtcgaacttaagtgagcttattcctggttcagatctgtggccacgctttgttcgtaacgagtctgagcgttttgaagcacgtttcagcctagttgaagtacagaagagtgactcgttgttcttcaacgaaatggctggttctcgtatgccaatcgcggtttctcatggtgaaggtcgtgtagaagtgcgtaacggtgagcaccttaatgcgattgagcaatcaggtactgttgcgttacgttaccttgataacttcggtaatgttactcagaactaccctgcgaacccgaacggttcaccaaatggtattacagggttaacaacgatggatggtcgcgtaacgattatgatgcctcaccctgagcgtgtattccgtactgtggctaactcatggcacccagatgactggaatgaaaacagtccttggatgcgcatgttccgtaatgcccgcgtgaatcttggttaa

SEQ ID NO: 52981 - protein, 1322 aa, Photobacterium profundum
MEILRGSPALSEFRVNKLLERCRELDLPVSGIYAEFMHFADVSAPLNSDEQSKLASLLTYGPTIAEHEPTGTMLLVTPRPGTISPWSSKSTDIAQNCALGNVKRLERGTAYYVEVTADLTNAQLTDLKALIHDRMMEVVFTDVDSAAALFTQAEPAPVQSVDILVGGRKALEDANLKLGLALAEDEIDYLVENFTMLGRNPNDIELMMFAQANSEHCRHKIFNADWTIDGVEQEKSLFKMIKNTYEKNHEHVLSAYKDNAAVMEGSEVGRFFPNPESRQYNYHQEAAHILMKVETHNHPTAISPWPGASTGSGGEIRDEGATGLGGKPKAGLVGFTVSNLRVPGFEQPWETDFGKPGRIVNALEIMLEGPLGGAAFNNEFGRPNLLGYFRTYEEKVTSHNGEEIRGYHKPIMIAGGMGNIRADHVQKKEIPVGAKLIVLGGPAMNIGLGGGAASSMASGQSAEDLDFASVQRENPEMERRCQEVIDRCWQMGDANPIAFIHDVGAGGISNALPELVDDGERGGKFQLRNVPNDEPGMSPLEIWCNESQERYVMAVAPENLAVFEAICKRERAPFAVVGEATEERHLTLEDEHFDNTPIDMPMDILLGKAPKMHRDAKTLKVEGQAIDRSGIELEAATQRVLRLPAVAEKTFLITIGDRSVTGLVARDQMVGPWQVPVANCAVTAASYDTYHGEAMSMGERTPVALLDFGASARLAVGEAITNIASADIGDMKRINLSANWMSPAGHPGEDAGLYEAVKAVGEELCPALGLTIPVGKDSMSMKTKWEQDGEQKEVTSPLSLVITAFGRVEDVRKTVTPQLRTDKGESSLILIDLGCGQNRLGATALAQVYKQLGDKPADVDNPELLKGFFYAVQALVRDEKVLAYHDRGDGGLYVTLAEMAFAGHTGVEVDINTSESDACDDVLAMLFNEELGAVLQVRTEDLDTVKSVLAEHGLTACSHVIGTVVDEDVVRIWNGNDRVLEQSRTDLRTVWAETTYQMQAMRDNPAGALQEFEAKKDNSDPGLSAQLTFDINEDVAAPFIAAPFITKAPKTGASVVNAPAINLGAKPQMAILREQGVNSHVEMAAAFDRAGFEATDVHMSDILSGNVQLEGFNGLVACGGFSYGDVLGAGEGWAKSVLFNNIARDQFEAFFKRNDTFSLGVCNGCQMMSNLSELIPGSDLWPRFVRNESERFEARFSLVEVQKSDSLFFNEMAGSRMPIAVSHGEGRVEVRNGEHLNAIEQSGTVALRYLDNFGNVTQNYPANPNGSPNGITGLTTMDGRVTIMMPHPERVFRTVANSWHPDDWNENSPWMRMFRNARVNLG

SEQ ID NO: 52982 - DNA, 3897 bp, Pseudomonas aeruginosa
  CDS (1)..(3897): transl_table=11
atgctgatcctgcgcggcgctcccgccctttccgctttccgccacggcaaactgctcgagcaactgacccagcacgtacctgccgttaccgggctgtacgctgagttcgcgcatttcgccgacgtcaccggcgcgctcaccgccgacgaggagcaggtgctggcgcggctgctgaaatacggcccgagcgtgccggtgcaggagcccagcggacggctgttcctggtggtgccgcgcttcggcaccatctcgccgtggtcgagcaaggcctccgacatcgcccgcaactgcggcctggcgaagatcgaccggctggagcgcggcattgcctactatgtgcagggcgaactgtccgagagcgacgcccagcaggtcgccgcccgcctgcatgaccgcatgacccaactggtgctggaccgcctggaaggcgccgccgagctgttcagccatgcgcagccccgcccgctcaccgccgtcgacgtgcttggcggcggtcgcgccgcgctggagaaggccaacgtcgagttgggcctggccctggccgaggacgagatcgactacctgctgaagagcttcggcgaactggggcgcaacccgcacgacgtcgagctgatgatgttcgcccaggccaactccgagcattgccggcacaagatcttcaatgccagttgggacatcgacgggcaggcccaggacaagagcctgttcggcatgatcaagaacacctacgagatgaaccgcgaaggcgtgctgtccgcatacaaggacaacgccgcggtcatcgtcggccatgtcgccgggcgtttcttccccgatccgcagacccgcgaatacgccgccagccgcgagccggtgcagatcctgatgaaggtggagacccacaaccacccgaccgccatcgcgccgttccccggtgcctccaccggttccggcggcgagatccgcgacgagggcgccaccggccgcggcgccaagccgaaggccggcctgaccggcttcaccgtgtccaacctgcagatccccggtttcgaacagccctgggaagtgccctacggcaagcccgagcgcatcgtcaccgcgctggacatcatggtcgagggcccgctgggcggcgccgcgttcaacaacgagttcggccgtccggcgctgaccggctacttccgtaccttcgagcagaagatcgctacccctcacggcgaggaagtgcgcggctaccacaagccgatcatgctcgccggcggcatgggcaacattcgcgacgaacacgtgcagaagggcgagatcagcgtcggcgccaagctcatcgtccttggcggcccggccatgctgatcggcctgggcggcggcgccgcctcttcgatggccaccggcgccagctccgccgacctcgacttcgcctcggtgcagcgcgacaacccggaaatggagcgacgttgccaggaagtgatcgaccgctgctggcagctcggcgagcgcaacccgatcagcttcatccatgacgtcggtgccggcggcctgtccaacgccctgccggaactgatcaacgacggcggccgcggcggtcgcttcgagctgcgcgcggtgcccaacgacgagccgggcatgagcccgctggaaatctggtgcaacgagtcgcaggagcgctacgtgctgtcggtggacgccgccgacttcgagaccttcaaggccatctgcgagcgcgagcgctgcccgttcgcggtggtcggcgaggccatcgagcagcgccagctgaccgtcgccgacagccatttcgacaacaagccggtggacatgccgctggaagtcctgctcggcaaggcgccgcgcatgcaccgcgcggtcacccgcgaggccgagctgggcgacgatttcgacgccgccgggctggagctgcaggaaagcgtcgagcgcgtcctgcgccatcccgccgtggccagcaagagcttcctgatcaccatcggcgaccgcaccatcaccgggctggtggcccgcgaccagatggtcgggccctggcaggtgccggtggccgactgcgccgtcaccgccaccagcttcgacgtctacaccggcgaggccatggcgatgggcgagcgtaccccgctggcgctgctggacgccccggcttccggacgcatggccatcggcgagacggtcaccaacctggctgccgcgcgtgtcggcaagctgtccgacatcaagctttccgccaactggatggccgccgccggccaccccggcgaggacgcgcgcctgtatgacacggtcaaggccgtgggcatggaactgtgcccggaactgggcatcaccatcccggtgggcaaggactcgatgtccatgaagacccgctggcaggacaatggcgaggacaagagcgtcacttctccggtctcgctgatcgtcaccggcttcgccccggtcgccgacgtgcgccagagcctgaccccgcaactgcgcctggacaagggcgagaccgacctgatcctgatcgatctcggccgcggcaagaaccgtctcggcggctcgatcctggcccaggtccacggcaagctcggccgcgccgtgccggacgtcgacgacgccgaggacctgaaagccttcttcgcggtgatccaggggctcaatgccgacggccatatcctcgcctaccacgaccgttccgacggcggcctgatcaccagcgtgctggagatggccttcgccggtcactgcggcgtcgagctgaacctcgatgccctggccgatagccgcgaagagctggcggccgtgttgttcagcgaggaactgggcgcggtgatccaggttcgcgagggtgccactccggaagtcctcgcgcagttcagcgccgccggtctcgacgactgcgtggcggtgatcggccagccggtcaacggctacgagatcaacctgaactacaacggcgagaccgtctacagcgcccagcgccgcatcctgcaacgcatctggagcgagaccagctaccagatccagcgtctgcgcgacaacgccgactgcgccgagcaggagttcgacgcgctgctggacgaagacaaccccgggctgtcgatcaagctcagctacgacgtcaacgacgacatcgccgcgccctacatcaagaagggcgtgcggccgaaagtggcgatcctccgcgagcagggcgtcaacggccaggtggagatggccgcggcgttcgaccgcgccggcttcgccgcgatcgacgtgcacatgagcgacatcctcgccgggcgggtcgacctggacgccttcaagggcctggtggcctgcggtggcttctcctacggcgacgtgctcggcgccggcgagggctgggccaagtcgatcctcttcaacgcccgcgcccgcgacggcttccaggcgttcttcgcgcgcaaggacagcttcgccctcggcgtctgcaacggctgccagatgatgtccaacctgcacgagctgattcccggcaccgagttctggccgcacttcgtgcgcaaccgttccgagcagttcgaggcgcgggtggcgatggtccaggtgcaggagtcgtcgtcgatcttcctgcagggcatggccggttcgcgcctgccgatcgccatcgcccatggcgaaggccatgcggagttcgagtcggaggaagcgttgctcgaggccgacctttccggctgcgtgtcgctgcgtttcgtcgacaaccacggcaaggtcaccgaagcctacccggccaaccccaacgggtcgccgcgcggcatcaccgggctgagcagccgcgacggccgggtcaccatcatgatgccgcaccccgagcgggtgttccgcgccgtgcagaattcctggcgtccggacgactggcaggaagacggcggctggctgcgcatgttccgcaacgcccgggtctgggtggactga

SEQ ID NO: 52983 - protein, 1298 aa, Pseudomonas aeruginosa
MLILRGAPALSAFRHGKLLEQLTQHVPAVTGLYAEFAHFADVTGALTADEEQVLARLLKYGPSVPVQEPSGRLFLVVPRFGTISPWSSKASDIARNCGLAKIDRLERGIAYYVQGELSESDAQQVAARLHDRMTQLVLDRLEGAAELFSHAQPRPLTAVDVLGGGRAALEKANVELGLALAEDEIDYLLKSFGELGRNPHDVELMMFAQANSEHCRHKIFNASWDIDGQAQDKSLFGMIKNTYEMNREGVLSAYKDNAAVIVGHVAGRFFPDPQTREYAASREPVQILMKVETHNHPTAIAPFPGASTGSGGEIRDEGATGRGAKPKAGLTGFTVSNLQIPGFEQPWEVPYGKPERIVTALDIMVEGPLGGAAFNNEFGRPALTGYFRTFEQKIATPHGEEVRGYHKPIMLAGGMGNIRDEHVQKGEISVGAKLIVLGGPAMLIGLGGGAASSMATGASSADLDFASVQRDNPEMERRCQEVIDRCWQLGERNPISFIHDVGAGGLSNALPELINDGGRGGRFELRAVPNDEPGMSPLEIWCNESQERYVLSVDAADFETFKAICERERCPFAVVGEAIEQRQLTVADSHFDNKPVDMPLEVLLGKAPRMHRAVTREAELGDDFDAAGLELQESVERVLRHPAVASKSFLITIGDRTITGLVARDQMVGPWQVPVADCAVTATSFDVYTGEAMAMGERTPLALLDAPASGRMAIGETVTNLAAARVGKLSDIKLSANWMAAAGHPGEDARLYDTVKAVGMELCPELGITIPVGKDSMSMKTRWQDNGEDKSVTSPVSLIVTGFAPVADVRQSLTPQLRLDKGETDLILIDLGRGKNRLGGSILAQVHGKLGRAVPDVDDAEDLKAFFAVIQGLNADGHILAYHDRSDGGLITSVLEMAFAGHCGVELNLDALADSREELAAVLFSEELGAVIQVREGATPEVLAQFSAAGLDDCVAVIGQPVNGYEINLNYNGETVYSAQRRILQRIWSETSYQIQRLRDNADCAEQEFDALLDEDNPGLSIKLSYDVNDDIAAPYIKKGVRPKVAILREQGVNGQVEMAAAFDRAGFAAIDVHMSDILAGRVDLDAFKGLVACGGFSYGDVLGAGEGWAKSILFNARARDGFQAFFARKDSFALGVCNGCQMMSNLHELIPGTEFWPHFVRNRSEQFEARVAMVQVQESSSIFLQGMAGSRLPIAIAHGEGHAEFESEEALLEADLSGCVSLRFVDNHGKVTEAYPANPNGSPRGITGLSSRDGRVTIMMPHPERVFRAVQNSWRPDDWQEDGGWLRMFRNARVWVD

SEQ ID NO: 52984 - DNA, 3897 bp, Pseudomonas fluorescens
  CDS (1)..(3897): transl_table=11
atgttgatcctgcgcggcgctcctgccctttctgcctttcgccacagcaaactccttgagcaactgagccagaaagtaccggctgtcagtggcttgtatgctgaattcgctcacttcgccgaagtcaccggcgtcctgaccggcgacgaacagcaggtgcttgcgcgccttctgaagtacggccccagcgttccggtacaagagccgaccggccgtctgttcctggtcctgccacgtttcggcaccatttcgccgtggtcgagcaaggccagcgacatcgcccgcaactgtggcctggcgaagatccagcgcctggagcgcggcatcgccttctatgtggccggtgagttcagcgaggccgaggcccaactgatcgccgacgccctgcacgaccgcatgacccagatcgtggtggccaacctggaacaggccgccggcctgttcagccacgccgaacccaagccgctgaccgccatcgacatcctcggcggtggccgggctgcgctggagcaggccaacagcgagctgggcctggccctggccgaagacgaaatcgattacctgatgaacgccttccagggcctcaagcgtaatccccacgacatcgaactgatgatgttcgcccaggccaactccgagcactgccgccacaagatcttcaacgccagttgggatatcgacggccagagccaggaaaaaagcctgttcggcatgatcaagaacacctatcagatgcacaacgaaggtgtgctctccgcctataaggacaacgccgcggtcatcgtcggttcggttgccgggcgtttctatccgaaccctgagacccgccagtacggtgcggtgcaggagccggtgcacatcctgatgaaggtcgagacccacaaccacccgaccgccatcgcgccgttcccgggggcctccaccggttccggcggtgaaatccgcgacgaaggcgccaccgggcgcggcgccaagcccaaggccggcctcaccggtttcaccgtgtccaacctgcagatcccgggcttcgaacagccgtgggaagtgccgtacggcaagcctgagcgcatcgtcaccgccctcgacatcatgatcgaaggcccactgggtggcgcggcgttcaacaacgaattcggccgtccggccctgaccggttatttccgcaccttcgagcaatccattaccacgcctcgtggcgatgaagttcgcggttaccacaagccgatcatgctggcaggcggcatgggcaacatccgtgacgagcacgtgcagaaaggcgagatcaccgtcggctccaagctgatcgtgctcggcggccccgcgatgctcatcggcctgggcggcggcgccgcttcctccatggccaccggcaccagctcggcggacctggattttgcttcggtacagcgtgaaaaccctgagatggaacgccgttgccaggaagtcatcgaccgttgctggcaactgggggataacaaccccatcagcttcatccacgacgtgggcgccggtggcctgtccaacgccttcccggaactggtcaacgatggcggccgtggcggtcgcttcgaactgcgcaacatccccaacgacgagccgggcatggccccgcacgaaatctggtccaacgaatcccaggagcgttatgtcctggcggtaggcgctgcggatttcgaacgtttcaaggccatctgcgagcgtgagcgctgcccgttcgcggtggtcggcgaagccactgccgaaccacagttgaccgtgaccgacagccacttcggcaacagcccggtggacatgccgctggaagtgctgctgggcaaggccccgcgcatgcaccgttcggccgtacgggaaaacgagttgggtgacgatttcgatccaagcaccctggatatcgccgagagcatcgagcgcgtcctgcaccacccggccgtggccagcaagagcttcctgatcaccatcggcgaccgcaccatcaccggcctcgtggcccgcgaccagatggtcggcccatggcaggtgccggtggccgacgtggccgtgaccgccaccagcttcgacgtctacaccggtgaggccatggccatgggcgagcgcacgccgctggccctgctggatgccccggcgtccggccgcatggcgatcggcgagaccctgaccaacatcgcggcctcgcgcatcaacaagatcagcgacatcaagctctccgccaactggatgtccgcagccggccacccgggcgaagacgcgcgcctgtacgacaccgtcaaggcagtgggcatggagctgtgcccagagctgggcatcaccatcccggtgggcaaggactccatgtccatggccacccgctggaacgaagagggcgtggacaagagcgtcacctcgccgctgtcgctgatcgtcactggcttcgcacccgtagcggacattcgccagaccctgaccccgcaactgcgcatggacaagggcaccaccgacctgatcctgatcgacctcggtcgcgggcagaaccgcatgggcgcctcgatcctcgcccagacccacggcaagctcggcagccaggcaccggacgtggatgatgcggaagacctcaaggccttcttcgcggtgatccagggcctcaacgccgacggtcacctgctggcctaccacgaccgttccgatggcggcctgctggtcagcgccgtggaaatggccttcgccggccattgcggcctgaacctgagcctcgacgccgtggcggaaaacaccgccgaaatcgccgccatcctgttcaacgaagagctgggggcggtgatccaggtgcgccaggacgctactccggacgtgctggcccagttcagcgccgccggcctgggcgattgcgtggccgtgatcggccagccgatcaacaacggtgaagtgagcatctcctacaacggcgaaagcgtgttcaccggccagcgccgcctgctgcagcgtcagtgggcagaaaccagctaccagatccagcgcctgcgggacaacgccgactgcgccgagcaggaattcgacgtggtactggaagaagacaacccgggcctgagcgtcaagctgggcttcgacgtcaaccaggacatcgccgcgccttacatcaagaaaggcgtgcgtccacaggtggcggtactgcgtgagcagggcgtcaacggccaggtggaaatggcagcggcctttgaccgcgccggcttcaacgccatcgacgtgcacatgagcgatatcctcgccggtcgtgtcgacctcaacgacttcaagggcatggttgcctgcggcggcttctcctacggcgacgtactgggcgccggtgaaggctgggccaagtcggcgctgttcaacagccgcgcccgcgacgccttccagggcttcttcgaacgtaccgacagcttcaccctgggtgtgtgcaacggttgccagatgatgtccaacctgcacgagctgatcccgggcagcgagttctggccgcacttcgtgcgcaaccgctccgagcagttcgaagcccgggtggccatggtccaggtgcaggagtcgaactcgatcttcctgcagggcatggccggttcgcggatgccgatcgccatcgcccacggtgaaggtcatgcggagttcgaaagcgaagaggcattgctggaagcggacctgtccggttgcgtggccctgcgtttcgtcgacaaccacggcaaggttaccgagcgttacccggccaaccccaacggttcgccgcgcgggatcaccggcctcaccagccgcgacggccgcgtcaccatcatgatgccgcaccctgagcgggtgttccgtgccgtgcagaactcctggcgcccggatgagtggaacgaagatggggcgtggatgcgcatgttccgtaacgctcgggtctgggtgaactga

SEQ ID NO: 52985 - protein, 1298 aa, Pseudomonas fluorescens
MLILRGAPALSAFRHSKLLEQLSQKVPAVSGLYAEFAHFAEVTGVLTGDEQQVLARLLKYGPSVPVQEPTGRLFLVLPRFGTISPWSSKASDIARNCGLAKIQRLERGIAFYVAGEFSEAEAQLIADALHDRMTQIVVANLEQAAGLFSHAEPKPLTAIDILGGGRAALEQANSELGLALAEDEIDYLMNAFQGLKRNPHDIELMMFAQANSEHCRHKIFNASWDIDGQSQEKSLFGMIKNTYQMHNEGVLSAYKDNAAVIVGSVAGRFYPNPETRQYGAVQEPVHILMKVETHNHPTAIAPFPGASTGSGGEIRDEGATGRGAKPKAGLTGFTVSNLQIPGFEQPWEVPYGKPERIVTALDIMIEGPLGGAAFNNEFGRPALTGYFRTFEQSITTPRGDEVRGYHKPIMLAGGMGNIRDEHVQKGEITVGSKLIVLGGPAMLIGLGGGAASSMATGTSSADLDFASVQRENPEMERRCQEVIDRCWQLGDNNPISFIHDVGAGGLSNAFPELVNDGGRGGRFELRNIPNDEPGMAPHEIWSNESQERYVLAVGAADFERFKAICERERCPFAVVGEATAEPQLTVTDSHFGNSPVDMPLEVLLGKAPRMHRSAVRENELGDDFDPSTLDIAESIERVLHHPAVASKSFLITIGDRTITGLVARDQMVGPWQVPVADVAVTATSFDVYTGEAMAMGERTPLALLDAPASGRMAIGETLTNIAASRINKISDIKLSANWMSAAGHPGEDARLYDTVKAVGMELCPELGITIPVGKDSMSMATRWNEEGVDKSVTSPLSLIVTGFAPVADIRQTLTPQLRMDKGTTDLILIDLGRGQNRMGASILAQTHGKLGSQAPDVDDAEDLKAFFAVIQGLNADGHLLAYHDRSDGGLLVSAVEMAFAGHCGLNLSLDAVAENTAEIAAILFNEELGAVIQVRQDATPDVLAQFSAAGLGDCVAVIGQPINNGEVSISYNGESVFTGQRRLLQRQWAETSYQIQRLRDNADCAEQEFDVVLEEDNPGLSVKLGFDVNQDIAAPYIKKGVRPQVAVLREQGVNGQVEMAAAFDRAGFNAIDVHMSDILAGRVDLNDFKGMVACGGFSYGDVLGAGEGWAKSALFNSRARDAFQGFFERTDSFTLGVCNGCQMMSNLHELIPGSEFWPHFVRNRSEQFEARVAMVQVQESNSIFLQGMAGSRMPIAIAHGEGHAEFESEEALLEADLSGCVALRFVDNHGKVTERYPANPNGSPRGITGLTSRDGRVTIMMPHPERVFRAVQNSWRPDEWNEDGAWMRMFRNARVWVN

SEQ ID NO: 52986 - DNA, 3900 bp, Pseudomonas putida
  CDS (1)..(3900): transl_table=11
atgttgatcctgcgcggcgctcctgccctttctgcctttcgccacggtaaattactcgagcaactgagccagaaagtccccgctgttactggtttgtatgccgaatttgcccacttcgccgatgtcgacggcgagctgaccgccgaccagcagcaggtgctgggccgtctgctcaagtacggcccgagcgtgccggtacaggagccgacgggtcgtctgttcctggtggtaccgcgcctgggcaccatttcgccatgggccagcaaggccagcgacatcgcccacaactgcggcctgcagtcgatccagcgcctggagcgcggcatcgcctactacgttgccggcaccctgagcgacgctgatgccgaactgatcgccgccgaactgcacgaccgcatgacccagcgtgtgctcggccagctggagcaggccgctgacctgttcagccacgcccagcccaagccaatgacctcggtcgacatcctggccggcggtcgcgacgccctggccaaggccaacatcgacctgggcctggccctggccgaagacgagatcgactacctggtcaatgccttccagggcctcaagcgcaacccgaacgacatcgaactgatgatgttcgcccaggccaactccgagcactgccgccacaagatcttcaacgccagttgggatatcgacggccaggcccaggaaaaaagcctgttcggcatgatcaagaacacctaccagatgcacaatgaaggtgtgctgtcggcgtacaaggacaacgcctcggtgatcgtcggcaacgttgccggccgtttcttcccgaaccctgaaacccgccagtacggcgcggtgcaggagccggtgcacatcctgatgaaggtggaaacgcacaaccacccgaccgccatcgccccgttctccggcgcctccaccggctccggtggcgaaatccgcgacgaaggtgctaccggccggggcgccaagcccaaggccggcctgaccggcttcaccgtgtccaacctgcgcattccgggcttcgaacagccttgggagcaggcctatggcaagcccgagcgtatcgtcgacgccctcgacatcatgatcgaaggccctcttggcggcgctgcgttcaacaacgaattcggccgcccggccctgaccgggtacttccgtaccttcgagcaagccatcaacaccccgcacggtgaagaagtgcgcggctaccacaagccgatcatgctcgccggcggtatgggcaacatccgtgaagaccacgtgcagaagggcgaaatcactgtcggcgccaagctgatcgtgctcggtggcccggccatgctgatcggcctgggcggcggcgctgcttcgtcggtggctaccggtgccagctcggctgacctggacttcgcttcggtacagcgcgaaaacccggaaatggagcgccgttgccaggaggtcatcgaccgttgctggcagctgggcgacgaaaacccgatcgccttcatccacgacgtgggcgctggcggtatttccaacgccttccctgagctggtcaacgacggtggccgcggtggtcgcttcgagctgcgcaacgtgcccaacgacgagccgggcatggccccgcacgaaatctggagcaacgaatcgcaagagcgttacgtgctggccgtcagcgcggtcgacttcgagcgcttcaaggccatctgcgagcgcgaacgttgcccgtttgccgtggtgggtgaagcgactgaagaacagcacctgaccgtcagcgacagccacttcggcaacaccccggtggacatgccgctggacgtgctgctgggcaagccgccgcgcatgcaccgttcggttacccgcgaagccgagctgggcgatgacttcgacccgagcgagctggacctggacagcgccgtccagcgcgtgctgaaccacccggccgtggccagcaagagcttcctgatcaccattggcgaccgcaccatcaccggcctggttgcccgcgaccagatggtcggcccgtggcaggttccggtggccgactgcgccgttaccgccaccagcttcgacgtctacaccggtgaagccatggccatgggcgagcgtacgccgctggcgctgctggatgccccggcgtccggccgcatggccatcggcgaaaccctgaccaacctggcggcttcgcgcatcgaaaagctgtccgacatcaaactgtcggccaactggatgtccgctgctggtcacccaggtgaagacgcacgcctgtacgacaccgtcaaggctgtcggcatggagctgtgcccggagctgggcatcaccattccggtcggcaaagactcgatgtcgatgaagaccaagtggagcgacgagggcgtcgagaagagcgtcacctcgccgatgtcgctgatcatcaccggcttcgccccggtcaccgacatccgcaagaccctgaccccgcaactgcgcatggacaagggcgagaccgacctgatcctgatcgacctgggccgcggcaaaaaccgcatgggcgcctcgatcctggcccagacctacggcaagatcgcggcccaggcaccggacgtcgacgacgccgaagacctcaaggccttcttcgccgtgatccagggcctgaacgccgacggccacctgctggcctaccacgaccgttccgacggcggcctggtcaccaccgtgctggaaatggccttcgccggccactgcggcctcgacctgcaactcgacccgctgaccgacagcaagggcgaagtgccggccatcctcttcaacgaagagctgggtgcggtgatccaggttcgccaggatgctaccccggacgtgctggcacagttcagcgctgcaggcctgggtgaagagtgcgtcgcggtgatcggcaagccggtcaacaacgctgaagtgaccatcagcctgaacggcgaagtgctgttcgacgatgaccgtcgcatgctgcagcgccagtgggctgaaaccagctaccagatccagcgcctgcgcgacaacgccgactgcgctgatcaggagttcgacctgctgctcgaggaagacaacccgggcctgtcggtgaagctgggcttcgacgtcaacgacgacatcgccgcgccttacatcaagaagggcgtgcgcccgcaagtggccatcctgcgcgagcagggcgtcaacggccaggtcgagatggctgctgccttcgaccgcgccggcttcgccgccatcgacgtgcacatgagcgatattctcgctggccgtgtcgacttcgaagccttcaagggcctggtcgcctgtggcggcttctcgtacggtgacgtgctgggcgctggcgaaggctgggccaagtcggcgctgttcaacgcccgtgcccgtgacgccttccaggccttcttcgagcgtaccgacagcttcgccctgggcgtgtgcaacggttgccagatgatgtccaacctgcacgagctgatcccgggcaccgagtactggccgcacttcgtgcgcaaccgctcggagcagttcgaggcccgcgtggccatggtcgaagtgcagaagtccaactcgatcttcctgcagggcatggccggttcgcgcatgccgatcgccatcgcccacggcgaaggccatgccgagttcgccagcgaagaagcattgctggaagccgatgtgtccggttgcgtggccctgcgctacgtcgacaaccatggcaaggtcaccgaagcctacccggccaacccgaacggctcgccgcgtggtatcaccggcctgaccagccgcgacggccgcgtgaccatcatgatgccgcacccggagcgtgtgttccgcgctgtgcagaactcctggcgcccggacgagtggcaggaagatgctgcgctgatgcgtatgttccgcaacgcgcgggtgtgggtgaactaa

SEQ ID NO: 52987 - protein, 1299 aa, Pseudomonas putida
MLILRGAPALSAFRHGKLLEQLSQKVPAVTGLYAEFAHFADVDGELTADQQQVLGRLLKYGPSVPVQEPTGRLFLVVPRLGTISPWASKASDIAHNCGLQSIQRLERGIAYYVAGTLSDADAELIAAELHDRMTQRVLGQLEQAADLFSHAQPKPMTSVDILAGGRDALAKANIDLGLALAEDEIDYLVNAFQGLKRNPNDIELMMFAQANSEHCRHKIFNASWDIDGQAQEKSLFGMIKNTYQMHNEGVLSAYKDNASVIVGNVAGRFFPNPETRQYGAVQEPVHILMKVETHNHPTAIAPFSGASTGSGGEIRDEGATGRGAKPKAGLTGFTVSNLRIPGFEQPWEQAYGKPERIVDALDIMIEGPLGGAAFNNEFGRPALTGYFRTFEQAINTPHGEEVRGYHKPIMLAGGMGNIREDHVQKGEITVGAKLIVLGGPAMLIGLGGGAASSVATGASSADLDFASVQRENPEMERRCQEVIDRCWQLGDENPIAFIHDVGAGGISNAFPELVNDGGRGGRFELRNVPNDEPGMAPHEIWSNESQERYVLAVSAVDFERFKAICERERCPFAVVGEATEEQHLTVSDSHFGNTPVDMPLDVLLGKPPRMHRSVTREAELGDDFDPSELDLDSAVQRVLNHPAVASKSFLITIGDRTITGLVARDQMVGPWQVPVADCAVTATSFDVYTGEAMAMGERTPLALLDAPASGRMAIGETLTNLAASRIEKLSDIKLSANWMSAAGHPGEDARLYDTVKAVGMELCPELGITIPVGKDSMSMKTKWSDEGVEKSVTSPMSLIITGFAPVTDIRKTLTPQLRMDKGETDLILIDLGRGKNRMGASILAQTYGKIAAQAPDVDDAEDLKAFFAVIQGLNADGHLLAYHDRSDGGLVTTVLEMAFAGHCGLDLQLDPLTDSKGEVPAILFNEELGAVIQVRQDATPDVLAQFSAAGLGEECVAVIGKPVNNAEVTISLNGEVLFDDDRRMLQRQWAETSYQIQRLRDNADCADQEFDLLLEEDNPGLSVKLGFDVNDDIAAPYIKKGVRPQVAILREQGVNGQVEMAAAFDRAGFAAIDVHMSDILAGRVDFEAFKGLVACGGFSYGDVLGAGEGWAKSALFNARARDAFQAFFERTDSFALGVCNGCQMMSNLHELIPGTEYWPHFVRNRSEQFEARVAMVEVQKSNSIFLQGMAGSRMPIAIAHGEGHAEFASEEALLEADVSGCVALRYVDNHGKVTEAYPANPNGSPRGITGLTSRDGRVTIMMPHPERVFRAVQNSWRPDEWQEDAALMRMFRNARVWVN

SEQ ID NO: 52988 - DNA, 4110 bp, Ralstonia solanacearum
  CDS (1)..(4110): transl_table=11
atggcgcatttttcgtgctttcccggcgctctcgcgctgtctgcgttccgccagcaacgcctgctctccaccctcaagcgcatcgatccggagatcgatgccgtcagtgcccagtacctgcacttcgtcgccgccgatgcgccgctgtcggccgatgacgcggcgcgcgtgcaggcgttgctgacctacggctcgcccgcgtcggccgagaccgagggcgaccgcttcgtggtgattccgcgcttcggcacgatctcgccgtgggccagcaaggcgaccgaaatcgcccgccactgcgcgctgccgcagatccaccgcatcgagcgcggcgtggagttcaccgtcacctgcaagaagggcctcctgcgtggcctgaccggcggccgcaagcaactggacgaggccacgcgcgccgccgtcgccgcgcacctgcacgaccgcatgaccgagatcgtggtcgccacgcgcgaagccggctacggcctgttcgacgtgctgccggccaaggcgctgcgcttcgtcgacctgggcagcggcgatgccgccgcgggccgcggcgcgctggaagccgccaacaccgaaatgggcctggcgctgtccgacgacgagatcgactacctggtcgacgcctaccgcaagctcggccgcaacccgaccgacgtcgaactgatgatgttcgcgcaggccaacagcgaacactgccgccacaagatcttcaacgccgactggaccatcgacggcgagacgcaggacaaatcgctgttcgcgatgatccgcaacacgcaccaactggccccacagggcacggtggtggcgtattcggacaacgccgccgtcatggaaggcggcatggccgagcgctggttcccgcacgccggcaccgacggtgagaccggtgtgccgcagtacggccgccgcgaagcgctcacgcacacgctgatgaaggtcgagacgcacaatcacccgaccgccatctccccgttccccggcgcttccaccggtgcgggcggcgagatccgcgacgagggcgcgaccggccgcggtgccaagcccaaggcgggcctgaccggcttcacggtgtcgaacctgctgctgccggaagccgtgcaatcgtgggaaaacgcccgcgacacggcgcagcccgccgcgcagcgcaacccgggcgacaccgcaccgggcccggtcggcaagccggatcgcatcgcctcgccgctgcagatcatgatcgaaggcccgatcggtggcgccgcgttcaacaacgaattcggccggcccaacctgggcggctacttccgcgtctacgagcagaacgtgggcggcaccgtgcgcggttaccacaagccgatcatgatcgccggcggcatcggcaacatcgacgccggccacacccacaagcacgggctgccggcaggcacgctgctggtgcaactgggcggcccgggcatgcgcatcggcatgggcggcggcgctgccagctcgatggcgaccggcaccaacacggccgatctggacttcgactccgtccagcgcggcaaccccgaaatgcagcgccgcgcgcaggaagtcatcaacgcgtgctgggcgctgggcgaggacaatccgatcctgtcgatccacgatgtgggcgcgggcggcatctccaacgcgttccccgagctggtggacggcgccgaccgcggcgcgcgcttcgacctgcgccaggtgcacctggaagagtcgggcctgagcccggccgagatctggtgcaacgaatcgcaggagcgctacacgctggcgatcgccccgggcgatttcccgcgcttccaggccatgtgcgagcgcgagcgcgcgccgttctcggtggtcggcttcgccaccgaggaacagcaactgcaggtggtcgacggtgatgctccggccgatgccgttgagcacttcccggtcaacatgccgatggacgtgctgctcggcaagccgccgcgcatgcaccgcgacgtgcgccgcgtggcgcaggcgctgccggaagtcgacgtgacgggcctggatctggaaaccgtggcgcgcgatgtgctgcgccatccgaccgtcgccagcaagtcgttcctgatcaccatcggtgaccgcaccgtgggcgggctgaacacgcgcgaccagatggtcggcccgtggcaggtgccggtggccgacgtggccgtcaccacgctcgactacaagggctacgccggcgaggccatgacgatgggcgagcgcacgccgctggccgtcatcgacgcgccggcatcgggccgcatggcgatcggcgaggccatcaccaacatcgcggcggcgccgatcgcctcgctcgcgcagctcaagctgtcggccaactggatggccgcgtgcggcgtggacggcgaggacgcgcgcctgtacgacaccgtcaaggcggtcggcatggagctgtgcccggcgctgggcatcagcattccggtcggcaaggattcgctgtcgatgcgcaccaagtgggacgacgcgggcgaggccaaggaagtggtggcgccggtgtcgctgatcgtctcggccttcgcgccggtgacggacgtgcgcaagacgctcacgccgcagctcaagccggtggcgtcggccggcgaggctgccgacaccacgctgatcgtcatcgacctcggccacggcaagcaccgcctgggcggcagcatcctggcgcaggtcacgcagcagatcggcaacagcgtgccggacgtgggtgacgcggaagacctcaagcgcttcttcgccgccatccagcagctgaacgcggccggcatgctgctggcctaccacgaccgctccgacggcggcctgtgggcgacggtgtgcgagatggcctttgccggccactgcggcgtgtcgatcaacgtcgacatgctcacgctcgacggcgcgcacgcgtcggactacggcgatgccaagaactgggcgcagcaggtctccggccgccgcgccgacatgacgctgcgcgcgctgttcgccgaagagttgggtgccgtgatccaggtgccggcggcccagcgcgacgccgtcttcgcggtgctgcgcgagcacggcctggcggcctgcagccacgtgatcggcgcgccgaacgccagcggccagatcgagatctggcgcgacgccaagaaggtcttcagcgccccgcgcatcgagctgcagcgcgcgtggacggatgtctcctggcgcatcgccagcctgcgcgacaaccccgagtgcacgcagagcgagtacgaccgcctgctcgacgccgaagaccccggcatctcgccgaacctcacgttcgacctcgccgaggatgtggctgcgccgttcatcgccacgggtgcgcgtccgcgcatggcgatcctgcgcgagcagggcgtcaactcgcaggtggaaatggcctacgcgatggacaaggccggcttcgacgcctacgacgtgcacatgagcgacctgctggcaggccgcacccgcctcgccgacttcaagggcttcgtggcctgcggcggcttcagctacggcgacgtgctgggcgccggcgagggctgggccaagacgatcctgttcaacggcatgctggccgagcagttcgcggccttcttcaaccgcgccgactcgatcgcgctgggcgtgtgcaacggctgccagatgatggcgaacctcgcaccgatcatccccggcgccggcgcatggccgaagttcacgcgcaaccagtcggagcaatacgaagggcggctggtgaccgtgcaggtcgaggcctcgccgtcgatcttctacgcgggcatggaaggcagccgcatccccatcgtcgtggcgcacggcgagggctatgcggacttctcccagcagggcgatatcggcaaggtggccgtgggcctgcgctatgtcgacaaccgcggtgaggtcacgcagacgtacccgttgaacccgaacggctcgccgcagggcatcgcctcggtgacgacgcacgacggccgcttcaccgtgctgatgccgcacccggagcgcgtgttccgtgcggtgcagatgagttggcatccgaaggattgggcggccgccggcgacggcagcagcccgtggatgcgcatgttccgcaacgcccgcaagcagatgggctga

SEQ ID NO: 52989 - protein, 1369 aa, Ralstonia solanacearum
MAHFSCFPGALALSAFRQQRLLSTLKRIDPEIDAVSAQYLHFVAADAPLSADDAARVQALLTYGSPASAETEGDRFVVIPRFGTISPWASKATEIARHCALPQIHRIERGVEFTVTCKKGLLRGLTGGRKQLDEATRAAVAAHLHDRMTEIVVATREAGYGLFDVLPAKALRFVDLGSGDAAAGRGALEAANTEMGLALSDDEIDYLVDAYRKLGRNPTDVELMMFAQANSEHCRHKIFNADWTIDGETQDKSLFAMIRNTHQLAPQGTVVAYSDNAAVMEGGMAERWFPHAGTDGETGVPQYGRREALTHTLMKVETHNHPTAISPFPGASTGAGGEIRDEGATGRGAKPKAGLTGFTVSNLLLPEAVQSWENARDTAQPAAQRNPGDTAPGPVGKPDRIASPLQIMIEGPIGGAAFNNEFGRPNLGGYFRVYEQNVGGTVRGYHKPIMIAGGIGNIDAGHTHKHGLPAGTLLVQLGGPGMRIGMGGGAASSMATGTNTADLDFDSVQRGNPEMQRRAQEVINACWALGEDNPILSIHDVGAGGISNAFPELVDGADRGARFDLRQVHLEESGLSPAEIWCNESQERYTLAIAPGDFPRFQAMCERERAPFSVVGFATEEQQLQVVDGDAPADAVEHFPVNMPMDVLLGKPPRMHRDVRRVAQALPEVDVTGLDLETVARDVLRHPTVASKSFLITIGDRTVGGLNTRDQMVGPWQVPVADVAVTTLDYKGYAGEAMTMGERTPLAVIDAPASGRMAIGEAITNIAAAPIASLAQLKLSANWMAACGVDGEDARLYDTVKAVGMELCPALGISIPVGKDSLSMRTKWDDAGEAKEVVAPVSLIVSAFAPVTDVRKTLTPQLKPVASAGEAADTTLIVIDLGHGKHRLGGSILAQVTQQIGNSVPDVGDAEDLKRFFAAIQQLNAAGMLLAYHDRSDGGLWATVCEMAFAGHCGVSINVDMLTLDGAHASDYGDAKNWAQQVSGRRADMTLRALFAEELGAVIQVPAAQRDAVFAVLREHGLAACSHVIGAPNASGQIEIWRDAKKVFSAPRIELQRAWTDVSWRIASLRDNPECTQSEYDRLLDAEDPGISPNLTFDLAEDVAAPFIATGARPRMAILREQGVNSQVEMAYAMDKAGFDAYDVHMSDLLAGRTRLADFKGFVACGGFSYGDVLGAGEGWAKTILFNGMLAEQFAAFFNRADSIALGVCNGCQMMANLAPIIPGAGAWPKFTRNQSEQYEGRLVTVQVEASPSIFYAGMEGSRIPIVVAHGEGYADFSQQGDIGKVAVGLRYVDNRGEVTQTYPLNPNGSPQGIASVTTHDGRFTVLMPHPERVFRAVQMSWHPKDWAAAGDGSSPWMRMFRNARKQMG

SEQ ID NO: 52990 - DNA, 3888 bp, Salmonella paratyphi
  CDS (4)..(3888): transl_table=11
atgatggaaattctgcgtggttcgcctgcactgtctgcattccgtatcaataaactgctggcgcgctttcaggctgccaacctccaggtccacaatatatacgctgagtatgtccattttgctgacctgaacgccccgttaaatgatagcgagcaggcgcagcttacccgtctgctacaatacggcccggcgcttaacagccatacgccggcgggtaaactcctgttggtcacaccgcgtcctggtaccatctccccctggtcttcaaaagcaacggatatcgcccacaactgcggcctgcaacaggttgatcggctggagcgcggcgtagcgtactatatcgaggcttcgacgttgacggcggaacagtggcgacaagtggccgcagagctgcacgaccgtatgatggagacggtgttctcttctttaaccgatgcggaaaaactgtttatccaccatcagcctgcgccggtttccagtgtcgatctgctgggagaaggccgtcaggcgttaattgacgccaacctgcgtctcggtctggcgctggcggaagatgaaatcgactatttgcaggaggcgtttaccaaactggggcgcaacccgaacgatatcgaactgtatatgttcgcccaggcgaactccgagcactgccgccacaagatttttaacgccgactggattatcgacggtaaaccgcagccgaagtcgctgtttaaaatgattaaaaacaccttcgaaaccacgccggactatgtgctctctgcctataaagacaatgccgcggtgatggaaggatctgcggtggggcgctacttcgccgaccacaatactggccgttacgattttcatcaggagcccgcacacattctgatgaaggtcgaaacgcataaccatccaaccgccatctctccgtggccgggggcggcgaccggttccggcggcgaaattcgtgatgaaggcgccaccgggcgtggcgcgaaaccaaaagccgggctggtaggcttctccgtttccaacctgcgtattccgggctttgaacagccgtgggaagaggattttggcaagccggaacgtattgtcaccgcgctggatatcatgaccgaaggcccgctgggcggcgcggcgtttaacaacgaatttggtcgcccggcgctgaccggttacttccgtacttatgaagataaagtgaacagccacaacggcgaagagctgcgcggctaccataagccgatcatgctggcgggcgggatcggtaatattcgcgccgatcacgtgcagaaaggcgagatcgtcgtgggcgcgaagctgatcgtccttggcggcccggcgatgaatatcggcctcggcggcggcgcggcatcgtcaatggcttccggccagtctgatgtggatctcgattttgcctctgttcagcgcgacaacccggaaatggaacgccgctgccaggaagtgatcgaccgctgctggcagttgggcgacgccaacccaatcctgtttatccatgatgtgggcgcgggcggtctctccaacgccatgccggagctggtgagcgacggcgggcgcggcgggaaattcgaactgcgcgacattcttagcgacgagccgggcatgagcccgctggaaatctggtgtaacgaatcccaggagcgctacgtactggcggtcgcggctgaccagttgccgctgttcgacgaactgtgtaagcgcgaacgcgcgccgtatgcggtcattggcgatgctaccgaagaacagcatctctcgttgcatgataaccatttcgacaatcagccgatcgacctgccgctggatgtcctgctgggcaaaacgccgaaaatgacccgcgatgtgcaaacattgaaggcgaaaggcgatgcgctgaaccgcgcggatatcacgattgccgacgcggtaaatcgtgttctgcatctgccgaccgtggcggaaaaaaccttccttgtcactattggcgaccgtaccgtcaccggtatggtggcgcgtgaccagatggttggcccgtggcaggttccggtggctgactgcgcggtcactaccgccagcctcgacagctactacggcgaagcgatgtcgattggcgagcgcgcgccggtggcgctgctggactttgccgcctccgcccgtctggccgtcggtgaagcgttgactaacattgccgcgacgcagattggcgatatcaagcgcattaagctttccgctaactggatggcggcagccggtcatcctggcgaagatgccggtttgtatgacgcggttaaagcggtgggagaggaactctgtccgcagcttggcctgacgattccggtgggcaaagattcgatgtcgatgaaaacccgctggcaggaaggcaacgaacagcgcgaaatgacctcgccgctgtcgctggtgatttccgcgtttgctcgcgtggaggacgtgcgtcacacccttacgccgcagctgtcaacggaagataacgccttgctgctgatcgatcttggcaagggccacaacgcgctgggcgcaacggccctggcgcaggtctatcgtcagcttggcgacaaacccgcggacgtgcgtgacgtcgcgcaactgaaaggcttctatgacgccatgcaggcgctggtcgctgcgcgtaaattactggcctggcacgaccgttccgacggcggtctgctggtgacgctggccgagatggcctttgccggccactgcggcgtgcaggtcgatatcgccgcgctgggcgatgaccatctggccgcactgttcaacgaggagctgggcggcgtgattcaggtacgcgctgaagacagagaggcggtcgaagcgctgttggcgcagtacggccttgctgactgcgtccactaccttggtcaggccctggctggcgatcgctttgtgattaccgctaatgaccagacggtattcagcgaaagccgcactacgctgcgtgtctggtgggcggaaaccacctggcagatgcagcgtctgcgcgacaatccgcaatgtgctgatcaggaacatgaggcgaaagcgaatgatgccgatccgggcctcaacgtgaagctgtcgtttgatattaatgaagatatcgccgcgccgtacattgcgacaggcgcacgaccgaaagtcgctgtactgcgcgagcagggggtgaactctcacgtggagatggcggcggcgttccatcgtgcgggctttgacgcgattgacgtccatatgagcgacctgctgggcggtcgtatcggtctgggcaacttccatgcgctggtggcttgcggcggcttttcctacggcgacgtgctgggggcgggcgaaggttgggcgaaatccattctgtttaaccctcgggtgcgcgacgaattcgaaacctttttccatcgtccgcagacgctggcgcttggggtgtgcaacggttgccagatgatgtcgaatctgcgcgagctgatcccgggcagcgaactgtggccgcgttttgtacgtaaccattctgaccgcttcgaagcccgcttcagcctggtagaagtgacgcaaagcccatcgctgctgctgcaaggaatggtaggctcacagatgccgattgcggtttcccatggggaagggcgcgttgaggtgcgggacgatgcgcatcttgccgcgcttgagagcaaaggcctggtcgccctgcgctacgttgataactttggtaaggtgaccgaaacctatccggctaacccgaacggttcgccgaacggcatcacggcggtgacgaccgaaaatggtcgggtgacgattatgatgccgcatccggaacgcgtattccgcaccgtcgccaactcctggcacccggaaaactggggcgaggatagcccgtggatgcgtatcttccgtaatgcgcgtaagcagcttggttaa

SEQ ID NO: 52991 - protein, 1294 aa, Salmonella paratyphi
MEILRGSPALSAFRINKLLARFQAANLQVHNIYAEYVHFADLNAPLNDSEQAQLTRLLQYGPALNSHTPAGKLLLVTPRPGTISPWSSKATDIAHNCGLQQVDRLERGVAYYIEASTLTAEQWRQVAAELHDRMMETVFSSLTDAEKLFIHHQPAPVSSVDLLGEGRQALIDANLRLGLALAEDEIDYLQEAFTKLGRNPNDIELYMFAQANSEHCRHKIFNADWIIDGKPQPKSLFKMIKNTFETTPDYVLSAYKDNAAVMEGSAVGRYFADHNTGRYDFHQEPAHILMKVETHNHPTAISPWPGAATGSGGEIRDEGATGRGAKPKAGLVGFSVSNLRIPGFEQPWEEDFGKPERIVTALDIMTEGPLGGAAFNNEFGRPALTGYFRTYEDKVNSHNGEELRGYHKPIMLAGGIGNIRADHVQKGEIVVGAKLIVLGGPAMNIGLGGGAASSMASGQSDVDLDFASVQRDNPEMERRCQEVIDRCWQLGDANPILFIHDVGAGGLSNAMPELVSDGGRGGKFELRDILSDEPGMSPLEIWCNESQERYVLAVAADQLPLFDELCKRERAPYAVIGDATEEQHLSLHDNHFDNQPIDLPLDVLLGKTPKMTRDVQTLKAKGDALNRADITIADAVNRVLHLPTVAEKTFLVTIGDRTVTGMVARDQMVGPWQVPVADCAVTTASLDSYYGEAMSIGERAPVALLDFAASARLAVGEALTNIAATQIGDIKRIKLSANWMAAAGHPGEDAGLYDAVKAVGEELCPQLGLTIPVGKDSMSMKTRWQEGNEQREMTSPLSLVISAFARVEDVRHTLTPQLSTEDNALLLIDLGKGHNALGATALAQVYRQLGDKPADVRDVAQLKGFYDAMQALVAARKLLAWHDRSDGGLLVTLAEMAFAGHCGVQVDIAALGDDHLAALFNEELGGVIQVRAEDREAVEALLAQYGLADCVHYLGQALAGDRFVITANDQTVFSESRTTLRVWWAETTWQMQRLRDNPQCADQEHEAKANDADPGLNVKLSFDINEDIAAPYIATGARPKVAVLREQGVNSHVEMAAAFHRAGFDAIDVHMSDLLGGRIGLGNFHALVACGGFSYGDVLGAGEGWAKSILFNPRVRDEFETFFHRPQTLALGVCNGCQMMSNLRELIPGSELWPRFVRNHSDRFEARFSLVEVTQSPSLLLQGMVGSQMPIAVSHGEGRVEVRDDAHLAALESKGLVALRYVDNFGKVTETYPANPNGSPNGITAVTTENGRVTIMMPHPERVFRTVANSWHPENWGEDSPWMRIFRNARKQLG

SEQ ID NO: 52992 - DNA, 3882 bp, Shewanella oneidensis
  CDS (1)..(3882): transl_table=11
atggagatcatccgcggagccccagcactctcgacgtttagagtgcaaaagctaatggaggcctgcgtaagcgcggcgcttccggtacgccaaatctatgctgagtatgttcatttagcggatttgagcgagttgcttaagcctactgagcgcgagcaacttgaaaaaattctcacctatggacctgctatcgaagcccataccccccaaggttcactcctgtttgttactcctcgccccggcacaatttccccatggtcctctaaagctactgatatcgcccacaattgtggtcttggtaaggtgaagcgtttggagcgtggtattgcctattatgttgagtcagacactttgaccgctgagcagcaacgaaccttacagggtttattgcacgaccgtatggttgaagtggttctgaacgattttgctaaggccgatgtgctgttcaagcgtacagaacccgcgcctttcaagagtgttaatgtgttggctgaaggtcgccgtgcgctcgaagtggccaacgtcgaaatgggtttggcgcttgccgaagatgaaatcgattatttagtcgaaaattttgtccgtttgaaccgcaatccaaacgatatcgagctgatgatgtttgcccaagcaaactctgagcactgtcgtcacaagatttttaacgctgattggactattgatggtaaggcgcagcctaagtcactgttcaaaatgattaaaaatactttcgaagtcacgcctgatcatgtgttgtctgcctataaagataacgccgctgtgatggaaggctcggtggcgggtcgcttcttccccgatccaaatggggtttacagttaccacactgagccaatgcacgtactgatgaaagtggaaacccacaaccatcctacggcaatcagcccttatccaggtgcggcgactggctctggcggtgaaattcgcgacgaaggcgcaacgggtcgcggctcaaaacctaaagcgggtttaacaggctttagcgtatcgaatttaaaaatccctggctttgttcaaccttgggaaggcaactacggtaagccagatcgcatcgttagcgctctggacattatgaccgaaggcccgctcggcggcgccgcgtttaacaacgagtttggtcgtcctgcgttattaggttatttccgtacctatgagcaagaagtctctagccacaatggtgttgagatgcgtggttaccataagccgattatgttagcgggtggcttaggtaatattcgcgaagagcatgtacaaaaaggtgagatcactgtcggcgctaagctgattgtacttggcggccctgcgatgaacatcggtttgggtggcggcgcggcatcttctatggcatctggccaatcgagcgaagatttagactttgcctcagtacagcgtgaaaaccccgaaatggagcgtcgctgtcaggaagtgatcgaccgctgctggcaattaggtgataaaaaccccattcaatttatccacgacgtgggcgcgggcggtttatccaacgcgttccctgaactggttaacgatggcgaccggggtggcattttcaatctgcgcaatgtgccatcggatgagccgggcatgagcccgctggaaatctggtgtaacgagtcgcaggagcgttatgtattgtcggttgccgccgaagatctacctttatttacggcgatttgtgagcgtgagcgcgcaccgtttgcggtagtgggtgaggcgatacaagagcagcatttaaccttagctgacagtcattttgataataaccccatcgatttaccacttgaagtgttattaggtaaagcacctaagatgagccgtaatgtggtgtctgctaaggcggtttctcctgcgcttgagcaaagtcaaatcgatgtgaaagatgcggttaagcgtgtactgagcttaccgactgtcgcagacaaaaccttccttatcaccattggcgaccgcacggtaacgggtttagttaaccgtgaccaaatggttggcccatggcaggtgcccgtagctgactgcgcggtgactgcggcaagctttgacacctacgctggtgaagccatgtcactgggtgagcgtacgccgctggcgctgctcgattttggtgcttcagcccgtatggcggtggcagagtcgattatgaacattgccggtgctgatattggttcatttaaacgcatcaaattgtctgccaactggatgtcagcagcgggtcacccaggtgaagacgcgggtctttatgaagcggtgaaagccgtcggtgaagaattgtgtcctgagctcagtttgacgattccagtcggtaaagactccatgtcgatgaagaccgcatggcagcaagatggtgtgaataaaaccgtgacctcaccaatgtcattggtcatcacggcctttggtgtggtgcaggatattcgtaataccgtgacgccagaactgcgcagcgataaaggtgaaacctcgttattgttagttgatttgggcgctggccaaaaccgtttaggtggttcttgtttagcgcaggtttacggtgagttaggtgatgtcgcgccagatttagatgatgccgcgctattacgtggtttcttcgaaaccatgcaaaagctggtggctaacaagttagtgattgcttaccacgatcgcagcgatggtggtttattcacgaccttagtggaaatggcctttgcgggtaatattggtttagatatagatgtagaagatctacagggcactgatttagaaagactctttaatgaagagctcggcgctgtgctgcaagtgagtcgtgataatgctgcaaaaattgctgcccagtttgccattgcaggcgtaccttgccatgtgattgggactttggcagatgatcaatgcatcaccattaaagatggcgcgcgtgaaatcttcagcgatacccgtgttgcactgcgtacagtgtggtcagaaaccacctatcgtatgcaagccatgcgtgataaccctgcgtgcgcgcttgaagagttcaagctcaagcaagatgaaacggatttaggcttaaccgttaacttaagctttgacccgagtgaagatgtggctgcgccttatattcttaaaggcgctgcacctaagatggcaattctgcgtgagcagggcgttaactcccatgtcgaaatggcggccgcgtttgatcgcgccgggtttgagagccgcgacgtgcatatgtctgatattctgtcaggtcgcataagtcttgaagagttccaaggtctggtggcctgtggtggcttctcctacggtgacgtattaggtgcaggtgaaggttgggctaagtcgattctgtttaacgagcgtgcccgcaatgagttttcacgtttcttcgaacgtgattcaagttttgcgctcggggtgtgtaacggctgtcaaatgctatcaaacctgaaggaaattattcctggtagcgagcactggccgcgtttcgtgcgtaaccgctctgagcgttttgaggcgcgttttagcttagtcgaagtgcaacaaagtccttcgctgtttttccaaggcatggcgggttcacgtatgccaattgccgtgtctcacggagaagggcatgcggaatttgccagcgctcaagcgttagcgttagcagaagcctcaggcactattgcgctgcgttttgttaatggtaaaggtgagattgcgacccaatatccacaaaacccgaatggttcgcccaatggtttaacggggatctgtactactgatggtcgtgtgacactgatgatgccacatccagagcgtgtatttagaactgtggctaactcttggcaccctgacaactggggtgaagacagtccatggatgcgcatgttccgcaatgcgcgagttaacctaggctaa

SEQ ID NO: 52993 - protein, 1293 aa, Shewanella oneidensis
MEIIRGAPALSTFRVQKLMEACVSAALPVRQIYAEYVHLADLSELLKPTEREQLEKILTYGPAIEAHTPQGSLLFVTPRPGTISPWSSKATDIAHNCGLGKVKRLERGIAYYVESDTLTAEQQRTLQGLLHDRMVEVVLNDFAKADVLFKRTEPAPFKSVNVLAEGRRALEVANVEMGLALAEDEIDYLVENFVRLNRNPNDIELMMFAQANSEHCRHKIFNADWTIDGKAQPKSLFKMIKNTFEVTPDHVLSAYKDNAAVMEGSVAGRFFPDPNGVYSYHTEPMHVLMKVETHNHPTAISPYPGAATGSGGEIRDEGATGRGSKPKAGLTGFSVSNLKIPGFVQPWEGNYGKPDRIVSALDIMTEGPLGGAAFNNEFGRPALLGYFRTYEQEVSSHNGVEMRGYHKPIMLAGGLGNIREEHVQKGEITVGAKLIVLGGPAMNIGLGGGAASSMASGQSSEDLDFASVQRENPEMERRCQEVIDRCWQLGDKNPIQFIHDVGAGGLSNAFPELVNDGDRGGIFNLRNVPSDEPGMSPLEIWCNESQERYVLSVAAEDLPLFTAICERERAPFAVVGEAIQEQHLTLADSHFDNNPIDLPLEVLLGKAPKMSRNVVSAKAVSPALEQSQIDVKDAVKRVLSLPTVADKTFLITIGDRTVTGLVNRDQMVGPWQVPVADCAVTAASFDTYAGEAMSLGERTPLALLDFGASARMAVAESIMNIAGADIGSFKRIKLSANWMSAAGHPGEDAGLYEAVKAVGEELCPELSLTIPVGKDSMSMKTAWQQDGVNKTVTSPMSLVITAFGVVQDIRNTVTPELRSDKGETSLLLVDLGAGQNRLGGSCLAQVYGELGDVAPDLDDAALLRGFFETMQKLVANKLVIAYHDRSDGGLFTTLVEMAFAGNIGLDIDVEDLQGTDLERLFNEELGAVLQVSRDNAAKIAAQFAIAGVPCHVIGTLADDQCITIKDGAREIFSDTRVALRTVWSETTYRMQAMRDNPACALEEFKLKQDETDLGLTVNLSFDPSEDVAAPYILKGAAPKMAILREQGVNSHVEMAAAFDRAGFESRDVHMSDILSGRISLEEFQGLVACGGFSYGDVLGAGEGWAKSILFNERARNEFSRFFERDSSFALGVCNGCQMLSNLKEIIPGSEHWPRFVRNRSERFEARFSLVEVQQSPSLFFQGMAGSRMPIAVSHGEGHAEFASAQALALAEASGTIALRFVNGKGEIATQYPQNPNGSPNGLTGICTTDGRVTLMMPHPERVFRTVANSWHPDNWGEDSPWMRMFRNARVNLG

SEQ ID NO: 52994 - DNA, 3894 bp, Vibrio cholerae
  CDS (1)..(3894): transl_table=11
atgagaattttgcgtggctccccagctctttcagagtttcgtgttaacaagctcctgaccgcgtgtcgtgaacagcaactgcctgtaaccggtatttacgccgagtttatgcactttgccgatctcaaggcagagctcaatccgcaagagttggaaaagctcgaaaaactgctcacttatggtccaaccattcaagagcatgaaccgcaaggtttactgctgttggtgacgccgcgccccggaaccatctcaccttggtcctcaaaagccaccgatattgcacacaactgtggcctgcatggcatcaagcgccttgagcgcggtacggcttattatgttgaagcagaaacggcgctgaccgcagcacaaatcgcaacacttgaggcgctgctgcatgatcgaatgatggaagtcgtgttcgcagaactcaccgatgcccagcaactgttcagcgtagcagagcctgcgcctatgagtcaggtcgatgtattagcgggcggtcgtcgtgcgcttgaagaggcaaacgtttcccttggtctggcattggctgaagatgaaattgattatctggttgagagcttcactaaactgggtcgtaatcctaacgacattgaactgatgatgtttgcacaggcgaactcagagcactgccgccacaagattttcaacgccgattggaccattgatggggttaagcaagacaagtcactgttcaaaatgatcaaaaacacctttgaacagacgccggattatgtgctttcggcttataaagataatgccgcagtaatgacgggctcgaccgttggccgtttcttccccgaccccgagagccgtcagtacacttatcaccatgaagatgcccacattctgatgaaagtggaaacgcataaccacccaacggcgatttcgccttggccgggggcttcgactggttctggcggtgaaattcgtgatgagggcgcaaccggtattggcggcaagcctaaagcgggattggtgggctttaccacctcgaacttgcgtattcccggttttgaacagccatgggaaagcgattttggtaagccaagccgcattgtgaatgcgctggatatcatgctggaagggccactcggcggcgcggcgttcaacaacgaatttggtcgcccgaacctacttgggtatttccgcacttatgaagaaaaagtgacgtcacatgctggtgaagaggtgcgtggttatcacaagccgatcatgattgccggcggtatgggtaacattcgcgccgagcatattcagaagaaagagatcccagtgggggcaaaactgatcgtactcggaggccctgcgatgaacatcggtctcggtggtggcgcagcctcttcgatggcttctggccagtctgctgaagatctggattttgcttctgtgcagcgtgaaaacccagagatggagcgccgctgtcaggaagtgattgaccgttgttggcagctcggtgacaaaaacccgatcgcctttatccacgatgtgggcgcgggtggtatctctaacgctctgcctgagctggtgaatgacggcgatcgcggtggtaaattccagttgcgcaacgtgccgaatgatgagccgggcatgagcccattggaaatctggtgtaatgaatcacaagagcgttatgtgctggcggttgctgcggaagatatgccgctgtttgatgcgatttgccagcgtgaacgcgccccttatgccgtggtaggtgaagcgaccgaagagcgccatttgacgctggaagacagccactttgctaacacgccgattgatatgccaatggatattctgttgggtaagccgccgaaaatgcatcgtgaagcgagcacgctgaaagtttcaagcccagcgctagagcgttcaggcattgagcttaatgaagcggtggatcgcgtactgcgtttaccggcagtcgcagaaaaaacgttcctgatcaccattggtgaccgctcagtgactggcttagtcgcgcgggatcaaatggtcggcccatggcaagttcccgtcgcaaactgcgcagtaacggccgcgagttttgattcttaccacggcgaagcgatgtctatgggtgagcgtacccctgttgcgctgttggatttcggtgcctctgcacgtttagcggtcggtgaagctattaccaacatagccgcaaccgatattggcgagctgaaacgcatcaaactttcggcgaactggatgtctccagcgggccatccgggtgaagatgccggtctgtatgaagcggtgaaagcggtcggtgaagagctttgtcctgcactgggtatcactatcccagtcggtaaagactcgatgtcgatgaaaaccaagtggcaggaaaatggcgagcagaaagaagtgacttcgccgctgtcactcatcatcaccgcctttgcacgtgtggaagacattcgcaagaccgtgaccccacaactgcgtactgaccttggtgagacaagcttaatcttgattgacttggggaatggtcaaaatcgtcttggcgcaaccgcattggcgcaagtgtacaaacagttgggtgataagccggctgatgtggataacgcggcgcagctcaaaggcttttttgatgcagtacaaacgctggtgcgtaacgacaagctggtggcttaccacgacaaaggtgacggcggtttattggtgacgttggcagaaatggctttcgcgggtcactgtggtattaaagccaatattgaaaccttgggtgatgatgcactggcggcactgttcaatgaagagcttggcgccgtggttcaagtgaaaaatgatgagctgaatgctgttctggcaacacttgccgcccatggtttagaagcgtgtgctcacgtgattggtgaagtagaagcatccgatcgtctgctgatcacttgtggtgaggaagtcttgattgagcgctctcgtactgagcttcgcaccatctgggcggaaatgacccataagatgcaagcgctgcgtgataactcggcgtgtgctgatcaagagtttgcggccaaacaagataaccgtgacccgggcttgaatgcgaagttaacttacgatgtgcaagccgacgttgctgcgccgtacatcgccaaaggtgtgcgtccgaaaatggcgattttgcgtgagcaaggcgtcaactcacacgttgagatggcggcagcgtttgaccgcgctggttttgatgcggttgatgtgcatatgagcgacattctgactgggcaaaccgtgctcgatgcttaccaaggtctggtggcttgtggtggcttctcttacggcgacgtactgggtgcgggcgaaggttgggcgaaatcgattctgtttaacgcccaagcgcgtgagcagtttgagcagttcttccaacgtaaagatactttctcacttggggtgtgtaacggctgtcaaatgctgtctaacctgcgtgatttgatcccgggtgctgagctatggccacgttttgtgcgtaacgaatcggatcgttttgaagcgcgctttagcttagtcgaagtgcaaaaatcgccatcgctgttctttagcgagatggcgggctcaagaatgccgattgcggtttctcatggtgaaggtcgtgtggaagtgcgtgatgctcagcatctggcggcaattgagcaatctggcaccgtagcgattcgtttcgtggataactttggtcagccaacccaagcttacccaagcaacccgaacggttcaccgaatgcgattaccggtttaaccactcaagatggccgtgtgacgattatgatgccgcaccctgagcgtgtattccgtaccgtcgccaactcgtggcaccctgataactggggtgagaatggcgcttggatgcgtatgttccagaatgctcgtaaatattttggctaa

SEQ ID NO: 52995 - protein, 1297 aa, Vibrio cholerae
MRILRGSPALSEFRVNKLLTACREQQLPVTGIYAEFMHFADLKAELNPQELEKLEKLLTYGPTIQEHEPQGLLLLVTPRPGTISPWSSKATDIAHNCGLHGIKRLERGTAYYVEAETALTAAQIATLEALLHDRMMEVVFAELTDAQQLFSVAEPAPMSQVDVLAGGRRALEEANVSLGLALAEDEIDYLVESFTKLGRNPNDIELMMFAQANSEHCRHKIFNADWTIDGVKQDKSLFKMIKNTFEQTPDYVLSAYKDNAAVMTGSTVGRFFPDPESRQYTYHHEDAHILMKVETHNHPTAISPWPGASTGSGGEIRDEGATGIGGKPKAGLVGFTTSNLRIPGFEQPWESDFGKPSRIVNALDIMLEGPLGGAAFNNEFGRPNLLGYFRTYEEKVTSHAGEEVRGYHKPIMIAGGMGNIRAEHIQKKEIPVGAKLIVLGGPAMNIGLGGGAASSMASGQSAEDLDFASVQRENPEMERRCQEVIDRCWQLGDKNPIAFIHDVGAGGISNALPELVNDGDRGGKFQLRNVPNDEPGMSPLEIWCNESQERYVLAVAAEDMPLFDAICQRERAPYAVVGEATEERHLTLEDSHFANTPIDMPMDILLGKPPKMHREASTLKVSSPALERSGIELNEAVDRVLRLPAVAEKTFLITIGDRSVTGLVARDQMVGPWQVPVANCAVTAASFDSYHGEAMSMGERTPVALLDFGASARLAVGEAITNIAATDIGELKRIKLSANWMSPAGHPGEDAGLYEAVKAVGEELCPALGITIPVGKDSMSMKTKWQENGEQKEVTSPLSLIITAFARVEDIRKTVTPQLRTDLGETSLILIDLGNGQNRLGATALAQVYKQLGDKPADVDNAAQLKGFFDAVQTLVRNDKLVAYHDKGDGGLLVTLAEMAFAGHCGIKANIETLGDDALAALFNEELGAVVQVKNDELNAVLATLAAHGLEACAHVIGEVEASDRLLITCGEEVLIERSRTELRTIWAEMTHKMQALRDNSACADQEFAAKQDNRDPGLNAKLTYDVQADVAAPYIAKGVRPKMAILREQGVNSHVEMAAAFDRAGFDAVDVHMSDILTGQTVLDAYQGLVACGGFSYGDVLGAGEGWAKSILFNAQAREQFEQFFQRKDTFSLGVCNGCQMLSNLRDLIPGAELWPRFVRNESDRFEARFSLVEVQKSPSLFFSEMAGSRMPIAVSHGEGRVEVRDAQHLAAIEQSGTVAIRFVDNFGQPTQAYPSNPNGSPNAITGLTTQDGRVTIMMPHPERVFRTVANSWHPDNWGENGAWMRMFQNARKYFG

SEQ ID NO: 52996 - DNA, 3909 bp, Vibrio parahaemolyticus
  CDS (1)..(3909): transl_table=11
atgagaattttgcgtggctccccagctctttctgagtttcgtgttaataaactactggaactttgtcgtgaacaagatctgcctgtaactggcatctatgccgagtttatgcattttgcagatctaaagtctgaccttgatgaccaagagttagaaaaacttgaaaagttactaacttacggcccaacaattgaagagcatgagccagaaggtcttctacttcttgtaacgcctcgtccaggcactatctcgccttggtcttctaaatctaccgatatcgctattaactgtggtctggacactgttaagcgtctggagcgcggtacggcttactacgtagaatcttcagttgttctatcagaagctcaagttgacgctgtcaaagcgttaattcacgaccgcatgatggaaacggtgttcacagaacttgaagccgcgtcagcgctgtttacagtcgcagagccaaagcctgtggcgcatgttgatatcttagcgggcggtcgtcttgcgcttgaagaagcaaacgtttcccttggtttggcactcgcagaagatgaaattgattacttggtggagaatttcactaagttaggtcgtaaccctaacgacatcgagctgatgatgtttgctcaggcgaactcagagcactgtcgtcataagatctttaatgcagactggactatcgatggcgtcgaccaagagaagtctctgtttaagatgatcaaaaacacattcgaaacgacaccagaccatgttctgtctgcttacaaagataatgcagcggtaatgacgggctccaaagtgggtcgtttcttcccagatccgaaatctcgtcaatacacttaccaccatgaagatgcgcacatcttgatgaaggtagagacgcacaaccacccaacggctatctctccttggccaggtgcatcaacgggttctggtggtgaaatccgtgacgaaggcgcgacgggtatcggtggtaagccaaaagcgggtctggttggttttacaacgtctaacttgcgtattcctggttttgaacagccttgggaaacggacttcggtaagccgggtcgtatcgtaaacgcactagacatcatgcttgaaggccctttgggtggcgcagcattcaacaacgaatttggtcgtccaaacctattaggttacttccgtacctacgaagagaaagtgacttctcacgcaggtgaagaagtgcgtggttaccacaagccaatcatgattgctggtggtatgggtaacattcgtgacgaacacgtacagaagaaagagatccctgttggtgcgagcctaatcgtacttggtggtcctgcaatgaacatcggtcttggtggcggtgcggcgtcttcaatggcgtcaggtcaatctgcagaagatctggattttgcttcagtacagcgtgaaaacccagaaatggagcgtcgttgtcaggaagtgatcgaccgttgttggcagctaggtgaagagaacccaatcgcatttatccacgatgtgggcgcgggcggtatctctaacgcacttcctgagctttgtgacgacggtgagcgtggcggtaagttccagttacgtgacgtaccaaatgatgaattgagcatgagccctctggaaatctggtgtaacgaatctcaggagcgttatgttcttgcagtagcaccagaaaacatggaagcattcgatgcaatctgtaagcgtgagcgtgcaccttacgcagtagttggtgtggcaacagaagagcgccatctcactctagaagactcccacttcgataacacgccaattgatatgccaatggatatcttgcttggtaaaacaccgaagatgcaccgtgaagcaacaacattgaaagtagatagcccagcgattgcacgtgacggtattgaaatcgatgaagcagcagaccgcgtacttcgcctaccaacggttgctgagaaaacgttcctgatcacgatcggtgaccgctcggtaacgggtctggttgctcgtgatcagatggttggtccttggcaggtgcctgtagcgaactgtgcagttacggcggcaagttacgacacataccacggtgaagcgatgtcgatgggtgagcgcactccggttgctctgctagacttcggagcatctgctcgtctggcggttggtgaatctctgactaacatcgcagcgacagatatcggcgatatcaaacgcattaagctgtcagcgaactggatgtctccagcgggtcacccaggtgaagatgcgggtctttacgaagcagtgaaagcggttggtgaagagctatgtccggcgctaggtctgactatcccggttggtaaagactcaatgtcaatgaagactaagtgggaagagaatggcgaaagcaaagaagtgacttcgccactatcgctagttatcactgcgtttggtcgtgttgaagacgtacgtaagacagtaacgcctcagctacgcacatctgataccttggaaggactaggtgacacttcacttgttcttgtagacctaggtaacggcaaaaaccgtttgggtgcaacagcactggcacaggtttacaagcagctgggtgataagccggcagacgtagacaatgcagagcagctaaaaggcttcttcgatgcaatgcaaaatctcgtacgtaacgacaagctgcttgcttatcacgataaaggtgacggcggtctatttgtaacattggctgagatggcgttcgcgggtcactgtggcgtaaaggcggacatcgcagagctgggtgaagatgcgctggcggttctatttaacgaagaattaggtgcggttgttcaggttaaaaacgacgatctggattcagttctatctacgctagcggcaaacggcttagaagcatgttcacatgtaattggttctgttgaagcttcagacgactttgttttcacttctggtgatgatgttgtgcttaagcgttcacgtaccgaactacgtgttatctgggcagaaacaacgcacaaaatgcaggcgctacgtgataacccagcatgtgcagaccaagaatttgaagcgaagaaagacaacactgaccctggtctgaacgtatctctaagctttgatgtgaatgaagatatcgcagcaccttacattgcgaaaggcgcgaaacctaagatggcgattcttcgtgaacaaggtgttaactctcacgttgaaatggcagcagcctttgaccgtgctggctttgaagcaaccgacatccacatgagcgacattctgacaggccaagcggtacttgatgaataccaaggtctggtagcttgtggtggtttctcttacggtgatgtgctaggtgcgggtgaaggttgggcgaagtctatcctgtttaacgcacaagctcgtgagcagttccaagcgttcttcaaccgtgaagagacattctctctaggtgtttgtaacggttgtcagatgctttctaacctgaaagagcttatcccgggtgcagacttgtggccacgttttgttcgcaacgaatctgagcgttttgaagcacgctttagcctggttgaagtacagaagtctgattctgtgttcttcgacggcatggcgggatctcgtatgcctatcgcggtttctcacggtgaaggtcgtgtcgaagtacgtgacggtgagcacctaaacgcaattgaagcgtcaggtactgtagcgctacgttacgttgataataacggtaacccaacgcaacaatacccgaacaacccgaatggttcgccaaatgcgattaccggtctgactaccgcagatggccgtgtaaccatcatgatgcctcacccagagcgtgtattccgcacagttgcaaactcttgggctccggaaggttggggtgaaaatggcgcttggatgcgtatgttccaaaacgcgcgcaagaacatcggttaa

SEQ ID NO: 52997 - protein, 1302 aa, Vibrio parahaemolyticus
MRILRGSPALSEFRVNKLLELCREQDLPVTGIYAEFMHFADLKSDLDDQELEKLEKLLTYGPTIEEHEPEGLLLLVTPRPGTISPWSSKSTDIAINCGLDTVKRLERGTAYYVESSVVLSEAQVDAVKALIHDRMMETVFTELEAASALFTVAEPKPVAHVDILAGGRLALEEANVSLGLALAEDEIDYLVENFTKLGRNPNDIELMMFAQANSEHCRHKIFNADWTIDGVDQEKSLFKMIKNTFETTPDHVLSAYKDNAAVMTGSKVGRFFPDPKSRQYTYHHEDAHILMKVETHNHPTAISPWPGASTGSGGEIRDEGATGIGGKPKAGLVGFTTSNLRIPGFEQPWETDFGKPGRIVNALDIMLEGPLGGAAFNNEFGRPNLLGYFRTYEEKVTSHAGEEVRGYHKPIMIAGGMGNIRDEHVQKKEIPVGASLIVLGGPAMNIGLGGGAASSMASGQSAEDLDFASVQRENPEMERRCQEVIDRCWQLGEENPIAFIHDVGAGGISNALPELCDDGERGGKFQLRDVPNDELSMSPLEIWCNESQERYVLAVAPENMEAFDAICKRERAPYAVVGVATEERHLTLEDSHFDNTPIDMPMDILLGKTPKMHREATTLKVDSPAIARDGIEIDEAADRVLRLPTVAEKTFLITIGDRSVTGLVARDQMVGPWQVPVANCAVTAASYDTYHGEAMSMGERTPVALLDFGASARLAVGESLTNIAATDIGDIKRIKLSANWMSPAGHPGEDAGLYEAVKAVGEELCPALGLTIPVGKDSMSMKTKWEENGESKEVTSPLSLVITAFGRVEDVRKTVTPQLRTSDTLEGLGDTSLVLVDLGNGKNRLGATALAQVYKQLGDKPADVDNAEQLKGFFDAMQNLVRNDKLLAYHDKGDGGLFVTLAEMAFAGHCGVKADIAELGEDALAVLFNEELGAVVQVKNDDLDSVLSTLAANGLEACSHVIGSVEASDDFVFTSGDDVVLKRSRTELRVIWAETTHKMQALRDNPACADQEFEAKKDNTDPGLNVSLSFDVNEDIAAPYIAKGAKPKMAILREQGVNSHVEMAAAFDRAGFEATDIHMSDILTGQAVLDEYQGLVACGGFSYGDVLGAGEGWAKSILFNAQAREQFQAFFNREETFSLGVCNGCQMLSNLKELIPGADLWPRFVRNESERFEARFSLVEVQKSDSVFFDGMAGSRMPIAVSHGEGRVEVRDGEHLNAIEASGTVALRYVDNNGNPTQQYPNNPNGSPNAITGLTTADGRVTIMMPHPERVFRTVANSWAPEGWGENGAWMRMFQNARKNIG

SEQ ID NO: 52998 - DNA, 4047 bp, Xanthomonas axonopodis pv
  CDS (1)..(4047): transl_table=11
atgatggtcctcgagggcgcttccgccctttcgccgttccgccgcgctcggctcgaaacccgcctgcaaaccctcgttcccgcgctgcgtatcactggcgcctggcacgtgtacttcatccgtcccgaggccgggcaatcgcccgaccaggccaccttgcagcggatcctgcaggccaacgccgcgcccgccgagcgcgatgccgatgcctcctcgcgctacgtggtgccgcgcctgggcaccttgtcgccgtggtcgagcaaggccaccgaactggtgcgcggggctgggcagccgatccagcgcgtggagcgcggcacccgcatcgatctggccggctggccggacgacgcgtccgcccaggccgccgtggccaagttgctgcacgacccgatgacgcaatcgctgctcggttcggccgccgctgccgaagcgctgttcaacgtgcccgacccgggccagctgcggcgcgtgccgctggatgggctggagcaggccaaccgcgacctgggcctggccctggcgcaggacgagatcgactacctgcgcgaacgtttcggcgcgctgggccgcgacccggccgacgtcgagctgatgatgttcgcccaggccaactccgagcattgccggcacaagatcttcaatgccacctggaccatcgacggcaagccgcaggagcgctcgctgttccgcatgatcaagcacacccaccagcagaccccgcagcacaccttgtcggcctacagcgacaacgcggcggtggtggaaggcgtgccggctgcgcgctatcgcccggatccggccaccggccaataccgcagcgaagcggtgctgccgtcggcgtttgcgatcaaggtggaaacgcataaccacccgaccgcgatcgcaccgttccccggcgcggccaccggtgcgggcggcgaaattcgcgacgaaggcgccactgggcgcggcggcaagcccaaggccggcctgaccgggttttcggtctcgcacctgcgcattccgaccctgccgcagccctgggaagcgccgcgcgcgctgaacccgcgcatggcgccggcgctggacatcatgctcgacggccctctcggcggcgcagcgttcaacaacgaattcggccggccgaacctgctcggctatttccgcagcttcgagcttgccgaaggcccgggcctgacccgcgcctacgacaagccgatcatgctggccggtggcctgggcgcgatcgaccgcaaccaggtggaaaagctgcgcctgcagccgggcgatgcggtgatcgtgctcggcggcccggcgatgctgatcggcctgggcggcggtgcggccagttcggtggcggccggcgacagcgccgaggcactggatttcgccagcgtgcaacgcgaaaacccggaaatggaacgtcgctgccaggaggtcatcgaccgctgcgtggcgctgggcgtggacaacccgatccgctggttccacgacgtgggcgcgggtggtttgtccaacgccatccccgagctgctgcacgattcgggcgtgggcggcatcatcgacctgggccgcgtgctcaccgacgacccgtcgctgtcgccgctggaactgtggtgcaacgaatcgcaggagcgctacgtgctcggcgtgccgcaggcgcgccttgaagaattcgccgccatctgcgcccgcgaacgctgcccgttcgccgccgtcggcgtggcgacggccgaggagcggctggtggtgggctatggcgtcctggacgccgggaatcgggaatcgggagtcgggaatcgtaacggcacgcttgtggctgccgacaccgcttcacaccattccccattcccgactcgcgattcccagctcccgatcgatctgcccatggacgtgctgttcggcaaggcgccgaagatgcatcgcgatgcggcgcatccgggtgcgccgcaatggccggtgctgcagaccgcgtcgctggacctgcagcaggcgggcctgcgcgtgttggcgcatcccaccgtggcgtccaagagctttctggtcaccatcggcgatcgcagcgttggcggtctgaccgcacgcgaacagatgatcggtccgtggcagctgccgctggccgattgcgcgatcacgctggccggtttcgataccttcgaaggcgaagcgatgtcgatcggcgagcgcacgccgctggcgctgttgaatgccgccgcatctgcgcgcatggccgtgggcgaagcgatcaccaacctgtgcgccgcaccggtgcagacgctggacagcatcaagctctcggccaactggatggccgccgccggccatagcggcgaagacgcgttgctgtacgacgccgtgcgcgcgatcggcatggagctgtgcccggcactcgaactgagcgtgccggtgggcaaggattcgctgtcgatgcaggcgcagtggcaggtcgggaatcgggaatcgggaatcgggaatggtgaaacgcctcagccctccgcttccaccattcccgattctccattccctattcccggtgaaacgctgaaaagcgtttcgccggtctcgttgatcatcagtgcgttcgccccggttggcgatgtgcgcacgcagctgacgccgttgctgcgcagcggtgaagagagcgagttgtggttgatcgggctgggaggcggcaagcagcggctgggcgggtcggtgctggcgcaggtgtatgccgacgacaccgcgctgccggcgttcggcggcgaggtgccggatctggacgatgcgcagcggctgcgcagcttcttcgaattgattcgcgacgcgcgcgacagcgggctgttgctggcgtatcacgatcgcagcgatggcggtgcgtttgctgcgctgtgcgagatggcgtttgcgtcgcggcagggcctggatatcacgctggatgcatggggcgacgatgcgttccgcagcctgttcaacgaagaattgggcgcagtggtgcagatcgccagcgaagaccgcgccgcgttcgccgacctggtcgagcgccacgcattgaccgaatgcgcgcagcgcattgcacgccccaccggcacgccgcgcatccgcgtgagcgggcagggccgcgtgctggccgaatggcgctgggaagagctgttcgatgcgtggtggtcggtgacccatgcgatgcagaagctgcgcgacaacccggacagcgccgatgaagaacgcgccctggcgcgtgatttcaaggcgtcaggcctgcgcccgaagctggtgttcgacccttccgacgatgtcgcggcgccattcgtggccaccggcacgcggcccaaggtggcgatcctgcgcgagcagggcgtcaacgggcagatcgaaatggcctacaacttcgagcgtgccggtttccgtccctacgacgtgcacatgagcgacctgatcgagggccgcgtggacctgagcgcgttcgtgggctttgcggcgtgcggcggtttcagctacggcgacgtgctgggtgcaggccgcggctgggcgacatccatcctggagcgctcggcgctgcgcgacgcgttcgccgcgttcttcgcacgcagcgatacgttcgcgctgggcgtgtgcaacggatgccagatgctcagccagctcaaggacatcattcccggtgccgagcattggccgcgcttcctgcgtaatcgcagcgagcagttcgaagcgcgcaccgcgctgctggaagtggtggagtcgccgtcgatcttcctgcgcggcatggccggctcgcggattccggtggcggttgcgcatggcgaaggccgcgcagagttcgatagcgccgtggaccaggccgccgcacgcgtggcattgcgttacatcgatggcgacggcgcggtggcgtcgcagtatccgctcaatccgaacggttcccccgacggcatcaccgggctgaccagcagcgacggccgcgtcaccatcctgatgccgcatccggagcgcacgccacgcagcgcaaacctgagctggtacccggtcgactggggcgacgactcgccgtggctgcggatgttccgcaacgcgcgggtgtggtgcggttga

SEQ ID NO: 52999 - protein, 1348 aa, Xanthomonas axonopodis pv
MMVLEGASALSPFRRARLETRLQTLVPALRITGAWHVYFIRPEAGQSPDQATLQRILQANAAPAERDADASSRYVVPRLGTLSPWSSKATELVRGAGQPIQRVERGTRIDLAGWPDDASAQAAVAKLLHDPMTQSLLGSAAAAEALFNVPDPGQLRRVPLDGLEQANRDLGLALAQDEIDYLRERFGALGRDPADVELMMFAQANSEHCRHKIFNATWTIDGKPQERSLFRMIKHTHQQTPQHTLSAYSDNAAVVEGVPAARYRPDPATGQYRSEAVLPSAFAIKVETHNHPTAIAPFPGAATGAGGEIRDEGATGRGGKPKAGLTGFSVSHLRIPTLPQPWEAPRALNPRMAPALDIMLDGPLGGAAFNNEFGRPNLLGYFRSFELAEGPGLTRAYDKPIMLAGGLGAIDRNQVEKLRLQPGDAVIVLGGPAMLIGLGGGAASSVAAGDSAEALDFASVQRENPEMERRCQEVIDRCVALGVDNPIRWFHDVGAGGLSNAIPELLHDSGVGGIIDLGRVLTDDPSLSPLELWCNESQERYVLGVPQARLEEFAAICARERCPFAAVGVATAEERLVVGYGVLDAGNRESGVGNRNGTLVAADTASHHSPFPTRDSQLPIDLPMDVLFGKAPKMHRDAAHPGAPQWPVLQTASLDLQQAGLRVLAHPTVASKSFLVTIGDRSVGGLTAREQMIGPWQLPLADCAITLAGFDTFEGEAMSIGERTPLALLNAAASARMAVGEAITNLCAAPVQTLDSIKLSANWMAAAGHSGEDALLYDAVRAIGMELCPALELSVPVGKDSLSMQAQWQVGNRESGIGNGETPQPSASTIPDSPFPIPGETLKSVSPVSLIISAFAPVGDVRTQLTPLLRSGEESELWLIGLGGGKQRLGGSVLAQVYADDTALPAFGGEVPDLDDAQRLRSFFELIRDARDSGLLLAYHDRSDGGAFAALCEMAFASRQGLDITLDAWGDDAFRSLFNEELGAVVQIASEDRAAFADLVERHALTECAQRIARPTGTPRIRVSGQGRVLAEWRWEELFDAWWSVTHAMQKLRDNPDSADEERALARDFKASGLRPKLVFDPSDDVAAPFVATGTRPKVAILREQGVNGQIEMAYNFERAGFRPYDVHMSDLIEGRVDLSAFVGFAACGGFSYGDVLGAGRGWATSILERSALRDAFAAFFARSDTFALGVCNGCQMLSQLKDIIPGAEHWPRFLRNRSEQFEARTALLEVVESPSIFLRGMAGSRIPVAVAHGEGRAEFDSAVDQAAARVALRYIDGDGAVASQYPLNPNGSPDGITGLTSSDGRVTILMPHPERTPRSANLSWYPVDWGDDSPWLRMFRNARVWCG

SEQ ID NO: 53000 - DNA, 4047 bp, Xanthomonas campestris pv
  CDS (1)..(4047): transl_table=11
atgatggtcctcgagggcgcttccgccctttcgccgttccgccgcgctcggctcgaaacccgcctgcaaacgctcgtccccgcgctgcgtctcactggcgcctggcacgtgtacttcatccgtgccgatgccgggcgcacgcccgaccaggccaccttgcagcgcatcctgcaggccgagccggcgcctgcgccgcgcgatgaggctgcctcttcgcgctacgtggtgccacggctcggcacgctgtcgccgtggtcgagcaaggccaccgagctgatgcgcggagccgggcagccgatccagcgcgtggagcgcggcacccggatcgatctggccgggtggccggaaggcgaggccgatcaggccgcggtggccaagctgttgcacgacccgatgacgcaatcgttgctcggctcggccgcagcggccgaagcgctgttcaacgtgcccgatcccggccagctggaacgcatcccgctggatgcgctggaacaggccaatggcgatctgggcctggcactggcgcaggacgagatcgactacctgcgcgagcgctttgccgcgctcggccgcgacccggccgacgtcgaactgatgatgttcgcgcaggccaactccgagcactgccggcacaagatcttcaacgccagctggaccatcgacggcaagccgcaggagcgctcgctgttccggatgatcaagcacacccaccagcagaccccgcagcacaccttgtcggcctatagcgacaacgcggcggtggtggaaggcgtgccggcggcgcggttccgccccgatccggccaccggcgaataccgcagcgaagcggtggtgccctcggccttcgccatcaaggtggaaacccataaccatcccaccgcgattgcgccgttcccgggcgcggccaccggtgccggcggcgagatccgcgacgaaggtgccactggccgcggtggcaagcccaaggccggcctgaccgggttttcggtgtcgcatctgcgcatcccgaccttgccgcagccgtgggaagcgccgcgcgcgctgaatccgcgcatggcgccggcgctggacatcatgctcgacggcccgctcggcggcgcggcattcaacaacgagttcggccggccgaacctgcttggctacttccgcagttttgagctggccgaaggccagggcctgacccgcgcctacgacaagccgatcatgctggccggcggcctgggcgcgatcgaccgcaaccaggtcgaaaagctgcgcctgcaaccgggcgatgcggtgatcgtgctgggtggcccggcgatgctgatcggtctgggcggcggcgccgccagttcggtggccgccggtgacagcgccgaggcgctggactttgccagcgtgcagcgcgagaacccggagatggaacgccgctgccaggaggtcatcgaccactgcgtggcactgggcaccgataacccgatccgctggttccacgacgtgggcgccggtggcctgtccaacgcgatccccgagttgctgcacgactccggcgtgggcggggtgatcgacctggccagggtgccgagcgacgacccgtcgctgtcgccgctggagttgtggtgcaacgaatcgcaggaacgctacgtgctcggcgtgccgcaggcgcgcctggacgaattcgccgcgatctgcgcacgcgaacgctgcccgttcgccgccgtcggcgtggccacggccgaggaacggctggtggtggggtatggcgtttttgacgcagcgaatcgggaatcgggaatcgggaatcgcaacagcgcgttgccggctgccgaggccgcttccgcccattccctattccccactcccgattctccgctcccgatcaacctgcccatggacgtgctgttcggcaaggcgccgaaaatgcaccgcgatgccgtgcatccggcggcgccgcagtggccggtgctgcagaccggggcgctggatctgcaggaggccgggttgcgcgtgttggcgcatccgaccgtggcgtccaagagctttctggtcaccatcggcgatcgcagcgtgggcgggctgaccgcgcgtgaacagatgatcgggccgtggcagctgccgttggccgattgcgcgatcacgctggccgggttcgagaccttcgatggcgaagcgatgtcgattggcgagcgcacgccgctggcgctgctgaacgccgcggcctcggcgcgcatggcggtaggcgaggcgatcaccaacctgtgtgcggcgccggtgcagacgctggacagcatcaagctttccgccaactggatggctgccgccggacacgccggcgaagacgccttgctgtacgacgcagtgcgcgcggtcggcatggaactgtgcccggcgctggagctcagcatcccggtgggcaaggactcgctgtcgatgcaggcgcagtggcaggtcgggaatggagaatcgggaatcgggaatggtgaaacgccagcaccgtccgcttctgccattcccgattcccgactcccgattcccggtgaaacgctgaaaagcgtttcaccggtatcgttgatcatcagtgcatttgcgcccgtcagcgatgtgcgtacgcagctcactccgttgctgcagcgcgaggatgagagcgagctgtggttgatcggcctgggtggcggcaagcagcgtctgggtgggtcggtgctggcgcaggtgtatgccgatgacagtgcgttgccggccttcggtggtgaaacaccggacctggatgacccgcagcggctgcgccagttctttgaactgatccgcgatgcacgcgagggtggattgttgctggcgtatcacgatcgcagcgatggcggtgcgtttgccgcgctgtgcgaaatggcgtttgcctcgcgccagggcctggatatcacgctcgacgcctggggcgatgatgccttccgcagcctgttcaacgaagaattgggcgcggtggtgcagatcgccaatgaagaccgcgccgcgtttgccgatctggtcgagcggcatgcactgaccgaatgcgcgcaacgcatcgcacgccccaccggcaccccgcgcgtgcgtgtcagcggccagggccgggtgttggccgaatggcgctgggaagcgctgttcgatgcctggtggtcggtgacgcacgccatgcagaagttgcgcgacaacccggacagtgccgacgaagaacgcgcggtggcgcgcaacttccaggcgccggggttgcgcccgaagctggtgttcgacccgtccgaggatgtggccgcgccattcgtggcgaccggtgcacggccgaaggtggcgatcctgcgcgagcagggcgtcaacggccagatcgagatggcctacaacttcgagcgtgccgggttccgtgcgttcgacgtgcacatgagcgacctgatcgaaggccgcgtggacctggcgcagtttgcaggatttgcggcttgcggcggcttcagctacggcgatgtgctgggcgccggccgcggttgggccacctcgatcctggagcgtgcggcactgcgcgatgcgtttgccgcattctttgcgcgcagcgatacctttgcgctgggcgtgtgcaacggttgccagatgctgagccagctcaaggacatcattcccggtgccgagcactggccgcgcttcctgcgcaaccgcagcgagcagttcgaagcacgcacggcgctgctggaagtggtggagtcgccgtcgatcctgctgcggggcatggccggctcgcgcattccggtggcagtggcgcatggcgaaggccgcgccgaattcgacacggcggtggatcaggccgcggcgcgcgtggcactgcgcttcatcgacggtgacggcgcggtggctagtcagtacccgctcaatccgaacgggtcgcccgacggcatcaccggcctgaccagcaccgatgggcgcgccaccatcttgatgccgcatccggagcgcacgccgcgctcggtcaatctgagctggcatccggcgggctggggcgaggactcgccgtggctgcgcatgttccgcaatgcgcgggtgtggtgtggttga

SEQ ID NO: 53001 - protein, 1348 aa, Xanthomonas campestris pv
MMVLEGASALSPFRRARLETRLQTLVPALRLTGAWHVYFIRADAGRTPDQATLQRILQAEPAPAPRDEAASSRYVVPRLGTLSPWSSKATELMRGAGQPIQRVERGTRIDLAGWPEGEADQAAVAKLLHDPMTQSLLGSAAAAEALFNVPDPGQLERIPLDALEQANGDLGLALAQDEIDYLRERFAALGRDPADVELMMFAQANSEHCRHKIFNASWTIDGKPQERSLFRMIKHTHQQTPQHTLSAYSDNAAVVEGVPAARFRPDPATGEYRSEAVVPSAFAIKVETHNHPTAIAPFPGAATGAGGEIRDEGATGRGGKPKAGLTGFSVSHLRIPTLPQPWEAPRALNPRMAPALDIMLDGPLGGAAFNNEFGRPNLLGYFRSFELAEGQGLTRAYDKPIMLAGGLGAIDRNQVEKLRLQPGDAVIVLGGPAMLIGLGGGAASSVAAGDSAEALDFASVQRENPEMERRCQEVIDHCVALGTDNPIRWFHDVGAGGLSNAIPELLHDSGVGGVIDLARVPSDDPSLSPLELWCNESQERYVLGVPQARLDEFAAICARERCPFAAVGVATAEERLVVGYGVFDAANRESGIGNRNSALPAAEAASAHSLFPTPDSPLPINLPMDVLFGKAPKMHRDAVHPAAPQWPVLQTGALDLQEAGLRVLAHPTVASKSFLVTIGDRSVGGLTAREQMIGPWQLPLADCAITLAGFETFDGEAMSIGERTPLALLNAAASARMAVGEAITNLCAAPVQTLDSIKLSANWMAAAGHAGEDALLYDAVRAVGMELCPALELSIPVGKDSLSMQAQWQVGNGESGIGNGETPAPSASAIPDSRLPIPGETLKSVSPVSLIISAFAPVSDVRTQLTPLLQREDESELWLIGLGGGKQRLGGSVLAQVYADDSALPAFGGETPDLDDPQRLRQFFELIRDAREGGLLLAYHDRSDGGAFAALCEMAFASRQGLDITLDAWGDDAFRSLFNEELGAVVQIANEDRAAFADLVERHALTECAQRIARPTGTPRVRVSGQGRVLAEWRWEALFDAWWSVTHAMQKLRDNPDSADEERAVARNFQAPGLRPKLVFDPSEDVAAPFVATGARPKVAILREQGVNGQIEMAYNFERAGFRAFDVHMSDLIEGRVDLAQFAGFAACGGFSYGDVLGAGRGWATSILERAALRDAFAAFFARSDTFALGVCNGCQMLSQLKDIIPGAEHWPRFLRNRSEQFEARTALLEVVESPSILLRGMAGSRIPVAVAHGEGRAEFDTAVDQAAARVALRFIDGDGAVASQYPLNPNGSPDGITGLTSTDGRATILMPHPERTPRSVNLSWHPAGWGEDSPWLRMFRNARVWCG

SEQ ID NO: 53002 - DNA, 3969 bp, Xylella fastidiosa
  CDS (1)..(3969): transl_table=11
atgatcgtcctcaagggtgcatccgctctgtcgccatttcggcttgcccgatttgaatcccgcctacaaaccactgtgcctgaactgcgcattgtcggcgcatggcattgctacctgattcaaatcaaatccggccataccctcgatatgtcggccctgcaccgcatccttcaagccgaatcagtctctgaactaccccagaaacacgtggtatcacgctacgtcatgccgcgcctgggaacacactccccatggtcaagcaaaaccacggaactgcttcatggtgccgaccaacccattgcacgcatcgaacgcggtacccgtatcgacctcctaggctggtcagccaacgctgcgacctgcccggccatcgccaaacaactctacgatccaatgactcaatcactcctggagtcagaggacgaagtcaaaaccttgtttaacgtgcccgaaccacggccactggaacgcattgcgttaattgatttagaacacgccaacacgcgattgggactggcattgactgccgacgaaatcgactacctgcgcacccgttataccgaactaaaccgtgtcccatccgatgtcgaattgatgatgttcgcacaggccaactctgagcactgccgacacaaaatattcaatgccacttggaccattgatgacaaagagcaaccgtactccttgtttcagatgatcaaacacacccaccaacacaccccgcaatacacactcagcgcctatgccgataacgccgccgtcattgagggccatccaacaacacgttaccgcccagaccccatcaccggcgaataccgccatgaagcggtcctgcctggcgcgttccaaatcaaggtagaaacacacaaccacccgaccgcgattgcacccttccctggtgcctccacaggtgccggaggcgagatccgtgatgaaggggccactggtcgcggcggcaaaccaaaagccggattaagcggattctctgtctcccacctacgcattccaacacttccccacccgtgggaaacgccacgtgcactcaacccacgcatggcctcagcactggacatcatgctagaaggcccactcggcagtgccgcgttcaacaacgaatttggcagacccaacctcctgggctacttccgcagctttgaactttccgcaagcaaaacactcacccgcgcctatgacaaacccatcatgctggccggcggcttgggggcgatcgaccgcatacacatcaagaaactccggctacaaccaggcgatgtgatcatcgtattgggtggcccagcgatgctcatcggattgggtggcggtgccgcaagctccgtcacttccggaacgagcacagaagcactagattttgccagcgtccaacgtgataacccggagatgcagagacgctgccaagaagtcattgatcactgtgtggcactgggtacaaacaacccaatccgctcatttcacgacgtcggtgctggtggtttatccaacgcgattcccgaactgctacacgactcggaagtaggcggcgtcatcgacctggccaagatacccagcgatgacccatccctctcccctttagaactgtggtgcaacgaatcccaagagcgctacgtactcggcatctccgcgccacatctgcaagcattcgcagccatctgcagccgtgaacgttgcccgttcgccgcggtcggcgtagccactgcaacagaacagttgattgtgggctatggtgtcaccctccccgcagcgctccacgttacagaacaacagaccccacagagagcaaatcgcactgagacttccccaacacccaacaccctcgtctcccccgtcagggaagcgtttgcaatcgatttaccaatggatgtgctgttcggaaaagcgccaaagatgcaccgcaacacggcacacccgccaccgccgcaatggccaacactagacagtacccaactggatctgcaccacgcagggttacgtgtcctcgcccaccccactgtggcggccaagaacttcctggtgaccatcggtgaccgcagcatcggtggtctcaccgcacgtgaacagatgattggtccatggcaactgccactcgctgactgcgcgatcacccttgccggctttagcagctatgccggcgaagccttcgccattggggaacgcgctccgctagccctattgaactccgccgccgccgcacgtatggcggtcggagaagccatcactaacctatgcgccgctccagtagagtcactgagcatggtgaaactctcggcgaactggatggcagccgcagagtaccccggtgaagacgctctgctatacgacgccgtcaaagctataggaatagaactgtgcccggcactggacatcagcatccccgtgggcaaagactcgctctcgatgcagagccgatggcaaggcgacggcgccacacacacctgcatctctccagtgtcactggtgatctccgcgtttacgcccgtggctgatgcacgcaggcaattaacaccgctgctacatcaccagaccaatagcgaactttggttgattgctctggatggtggcaaacagcggctcggcggctcggtgctggcgcaggtgcatgctgacagcgcagcactccccgccttcggtggggaatgtccggatctggatacaccagagacgctgcgcgcgttcttcgcactgatgaacgatgcgcgcaacgcaggcctgctgctggcctatcacgaccgcagcgatggcggcgcattcgccgcattgtgtgaaatggcatttgcttcacatctgggcctagacattacatgcgacaaccgtaccgaacatctcttccctcacctgttcaacgaagaactgggcgccatcgtacaagtggccgacgagcaccgcaccgctttcgccgatctggtggaacaccatggcttgacggcctacacacagcgcatcgcacaccccacaacagcgccgtctatccgggtgatgcacaacgatcaatgcctcgcccaatggacttgggagacattatttgacgcctggtggtcagtcacgcatgcaatacaacgcctgcgcgacaatccagagtgtgccgacgaagagcgtgaaattgcacggacgttcaccgcaccaggactgaaaccaaccttgagtttcgacccagccgcggatgtagccatgccgttcatctcgaccggcatccggcccaaagtggctattcttcgcgaacaagggatcaatggccacattgagatggcgctgtgctttgagcgcgccggttttcatagtgtcgacatccatatgaacgatctcattaccggccgtgtccatctggatgagttcgtcggcttagccgcctgcggtggcttcagctacggcgacgtgctcggcgccggccgcggctgggccacctcaattctggaacgtaccgcgttacgcgaccagttcgccgcatttttcacacgcaccgatcgtttcgcacttggggtgtgcaacggctgccagatgctaagccaactcaaatcaatgatccctggtgccgaacactggccacgtttcgtacgcaatcgcagcgagcaattcgaagcccgtaccgcactgctagaagtcatccaatccccttctattttcttgagcggtatggccggctcacggctccccgtagcggtggcccacggcgaaggctatgccatgttcgacacccctgcagatcaagcggctgcacacgtcgcgcttcgctatatcaatggacatgggcaagcagcgacacactatccactcaaccccaacggctcacccaacggcatcaccggactgacaaccactgatggccgcatcaccatcctcatgccgcacccggaacgtactccacgcactatcaacctgagctggtgcccgaatgagtggggagaagacgcaccttggttacgactcttccgcaatgcaagagcctgggtgggctga

SEQ ID NO: 53003 - protein, 1322 aa, Xylella fastidiosa
MIVLKGASALSPFRLARFESRLQTTVPELRIVGAWHCYLIQIKSGHTLDMSALHRILQAESVSELPQKHVVSRYVMPRLGTHSPWSSKTTELLHGADQPIARIERGTRIDLLGWSANAATCPAIAKQLYDPMTQSLLESEDEVKTLFNVPEPRPLERIALIDLEHANTRLGLALTADEIDYLRTRYTELNRVPSDVELMMFAQANSEHCRHKIFNATWTIDDKEQPYSLFQMIKHTHQHTPQYTLSAYADNAAVIEGHPTTRYRPDPITGEYRHEAVLPGAFQIKVETHNHPTAIAPFPGASTGAGGEIRDEGATGRGGKPKAGLSGFSVSHLRIPTLPHPWETPRALNPRMASALDIMLEGPLGSAAFNNEFGRPNLLGYFRSFELSASKTLTRAYDKPIMLAGGLGAIDRIHIKKLRLQPGDVIIVLGGPAMLIGLGGGAASSVTSGTSTEALDFASVQRDNPEMQRRCQEVIDHCVALGTNNPIRSFHDVGAGGLSNAIPELLHDSEVGGVIDLAKIPSDDPSLSPLELWCNESQERYVLGISAPHLQAFAAICSRERCPFAAVGVATATEQLIVGYGVTLPAALHVTEQQTPQRANRTETSPTPNTLVSPVREAFAIDLPMDVLFGKAPKMHRNTAHPPPPQWPTLDSTQLDLHHAGLRVLAHPTVAAKNFLVTIGDRSIGGLTAREQMIGPWQLPLADCAITLAGFSSYAGEAFAIGERAPLALLNSAAAARMAVGEAITNLCAAPVESLSMVKLSANWMAAAEYPGEDALLYDAVKAIGIELCPALDISIPVGKDSLSMQSRWQGDGATHTCISPVSLVISAFTPVADARRQLTPLLHHQTNSELWLIALDGGKQRLGGSVLAQVHADSAALPAFGGECPDLDTPETLRAFFALMNDARNAGLLLAYHDRSDGGAFAALCEMAFASHLGLDITCDNRTEHLFPHLFNEELGAIVQVADEHRTAFADLVEHHGLTAYTQRIAHPTTAPSIRVMHNDQCLAQWTWETLFDAWWSVTHAIQRLRDNPECADEEREIARTFTAPGLKPTLSFDPAADVAMPFISTGIRPKVAILREQGINGHIEMALCFERAGFHSVDIHMNDLITGRVHLDEFVGLAACGGFSYGDVLGAGRGWATSILERTALRDQFAAFFTRTDRFALGVCNGCQMLSQLKSMIPGAEHWPRFVRNRSEQFEARTALLEVIQSPSIFLSGMAGSRLPVAVAHGEGYAMFDTPADQAAAHVALRYINGHGQAATHYPLNPNGSPNGITGLTTTDGRITILMPHPERTPRTINLSWCPNEWGEDAPWLRLFRNARAWVG

SEQ ID NO: 53004 - DNA, 3891 bp, Yersinia pseudotuberculosis
  CDS (1)..(3891): transl_table=11
atggaaatactgcgtggttcacccgctttgtcggcttttcgtatcaccaaactgttgtcccgttgccaggatgctcacctgccggtgagtgatatctacgccgaatatgttcactttgctgatgtcagcgccccactgagtgctgatgaacacgccagactccagcggctgcttcaatatggcccatctcttcccgagcatccacccgcagggcgtttactgctggtcaccccaaggccgggtactatttctccatggtcttctaaagccaccgatatcgcacataactgtggattatcacaaattttacgtttagaacgtggtttggctttctctatccaaggcccgaatttgaacgagggtcagtggaaacaattagcggcgttattacatgaccgcatgatggaaactgtcttcaccgatttacagcaagcagagcagctattctctcatcaccaaccggcaccagtacaacgggtcgatattctggggcagggccgcagtgcattggagcaggccaatattaaattgggtctggcactggcgcaggatgagattgactacttactgaccgcttttaccggtttggggcgcaacccaacggatattgagctgtatatgtttgcgcaggcaaactcagagcattgccgccataaaatctttaatgcggattgggtcattgatggtgttgctcagccgaagaccctgttcaagatgatcaaaaacaccttcgaacacacccctgattatgtgctgtctgcatataaagacaacgctgcggtgatggaaggctctcaggtcgggcgtttctatgccacggcggagaaagggatttatgactaccatcaggaagaagcccatatcctgatgaaggttgaaactcataaccacccgacagcgatttcaccgtggcctggggcagcaaccggttcagggggtgaaatccgcgatgaaggtgcaaccgggcgtggtgccaagcctaaagcggggctggtagggttctccgtttcgaacctgcgcattccaggttttgagcagccgtgggaagagaacttcggtaagcctgatcgtatcgtgacggcgctagatatcatgactgaaggcccattaggcggtgccgcgtttaacaatgagtttggtcgcccggcgttgttgggttacttccgcacctatgaagagcgggttaacagccataacggtattgaattacggggttaccataagcctattatgttggcgggtgggttgggtaatattcgtgccgatcatgtgcaaaaaggtgaaatcaccgtgggggccaaattggtcgtactcggtggcccatcgatgaatatcggtttaggggggggcgcggcttcctctatggcatccgggcagtcggatgcggatctggattttgcatcggtacaacgggataacccagaaatggagcgccgttgtcaggaagttatcgaccgctgctggcagttgggcgagtataaccccattctgtttatccatgatgttggcgccggtggcctctctaatgccatgcctgaactggtcaacgatggtggccgtggtggccgctttgaattgcgggatatcctcaacgacgaaccgggtatgagcccgctggaagtgtggtgtaacgagtctcaggagcgttatgtactggcagtcgcacccgcacagatggccctgtttgacgaaatttgccgccgtgaacgcgcaccgtatgctgtcattggtgaagcgacagaagaaaaacatctgctcctgaatgatcgccatttcggcaatcaacccattgatatgccgctggatgtgctattaggcaaaacgccgaagatgctgcgtgatgttacccgcctacaggctaagggtgacgcgctgcaacgggctgatattagccttgccgaggcggtaaaacgcattatgcatttaccggcggtagcggaaaaaaccttcctgatcaccatcggcgaccgcacggtaaccggtatggtcacccgtgatcagatggttggcccttggcagatccccgtggctgattgcgcggtaaccagtgccagccttgatagctattatggcgaagccatgtcgctgggcgagcgcgctccggtggcattgctggactttgccgcctctgcccgcctggcggttggtgaagccttgacgaacatcgcagcaacccaaattggtgaattaaagcgtatcaagttatctgctaactggatgtctgctgctggtcacccaggggaagatgctggtttgtatgacgcggtacgtgcggtaggtgaagagctgtgcccagccctggaaatcacgattcctgtgggcaaagattctatgtcgatgaaaacccgctggcaggaaggtcacgagcagcgcgaaatgacctcaccgctgtcactggtgatcaccgcttttgctcgcatagaagatgttcgccgcaccgtgacaccacaattgcgtacagataaaggtgataacgcgctgttgttgatcgatttgggcgcaggtcataatgcgctcggcgcgactgcgctgacgcaagtttaccgccagttaggtgataaaccagcggatgtccgtaacgtgcagcaactggctggcttcttcaacgccatgcagcgtttagtagccgatcaacatttgttggcgtaccacgaccgctccgatggcggcttgttggtcacgctggccgaaatggcctttgcagggcattgtggcgtaacggttgatattcagtctttgggtaacgatgctctggctgcactgttcaacgaggaactgggtgcagtgattcaagtccgtgctgagcagcgtgccgacgtggagaaattgctggctgaccacggtctggcaaattgtgttcactatctggggcgtgcggttgcgggcgatacctttgatattcgcagtggtactgacgtggtgtacagcgagaaacgcagcactctgcgcttgtggtgggcagaaacgagctggcaaatgcagcgtctgcgtgataatccggattgtgcggatcaagaacatcaggctaaacaggatgaaagtgatcccggcctgaatgtgaaactgacgttcgaccccgctgaagatatcgcggcaccattcatcctcaaacaggcgcggccaaaagttgctgtgctgcgggagcagggcgttaactctcacgttgagatggccgcggctttccaccgtgccgggtttgatgcggtcgacgttcatatgagtgacctgttggcgggtcgcactgatttacaatccttccaaaccttagttgcttgtggcgggttctcttacggtgacgtcttgggggccggtgaaggttgggcaaaatccattctgttcaatgatcgtgttcgtgatgaattcgaggctttcttccatcgcccaacgacattggcgcttggggtttgtaacggctgtcagatgatgtctaatctgcgtgaattaatcccaggtgcggagcattggccacggtttgtacgcaacttatcagatagctttgaagcacgtttcagcctggttgaagtggcaagcagcccatcactgtttatgcaggacatggtcggctcacgtatgccaattgctgtttcacatggtgaagggcaggtggaagtccgtgatgcggcacatttggctgctctggaacagagtcatctggtggcgttacgctttgtgaataaccacggggttgtcactgagcaatatccggctaacccaaatggttccgcgaatggtattacggcggtgaccagtgttagtgggcgggccacggtaatgatgccacaccctgagcgggtgttccgtacggtcagtaattcgtggcacccagaagagtggggcgaggatagcccatggatgcgtatgttccgtaatgcgcgtaagcaattaggttaa

SEQ ID NO: 53005 - protein, 1296 aa, Yersinia pseudotuberculosis
MEILRGSPALSAFRITKLLSRCQDAHLPVSDIYAEYVHFADVSAPLSADEHARLQRLLQYGPSLPEHPPAGRLLLVTPRPGTISPWSSKATDIAHNCGLSQILRLERGLAFSIQGPNLNEGQWKQLAALLHDRMMETVFTDLQQAEQLFSHHQPAPVQRVDILGQGRSALEQANIKLGLALAQDEIDYLLTAFTGLGRNPTDIELYMFAQANSEHCRHKIFNADWVIDGVAQPKTLFKMIKNTFEHTPDYVLSAYKDNAAVMEGSQVGRFYATAEKGIYDYHQEEAHILMKVETHNHPTAISPWPGAATGSGGEIRDEGATGRGAKPKAGLVGFSVSNLRIPGFEQPWEENFGKPDRIVTALDIMTEGPLGGAAFNNEFGRPALLGYFRTYEERVNSHNGIELRGYHKPIMLAGGLGNIRADHVQKGEITVGAKLVVLGGPSMNIGLGGGAASSMASGQSDADLDFASVQRDNPEMERRCQEVIDRCWQLGEYNPILFIHDVGAGGLSNAMPELVNDGGRGGRFELRDILNDEPGMSPLEVWCNESQERYVLAVAPAQMALFDEICRRERAPYAVIGEATEEKHLLLNDRHFGNQPIDMPLDVLLGKTPKMLRDVTRLQAKGDALQRADISLAEAVKRIMHLPAVAEKTFLITIGDRTVTGMVTRDQMVGPWQIPVADCAVTSASLDSYYGEAMSLGERAPVALLDFAASARLAVGEALTNIAATQIGELKRIKLSANWMSAAGHPGEDAGLYDAVRAVGEELCPALEITIPVGKDSMSMKTRWQEGHEQREMTSPLSLVITAFARIEDVRRTVTPQLRTDKGDNALLLIDLGAGHNALGATALTQVYRQLGDKPADVRNVQQLAGFFNAMQRLVADQHLLAYHDRSDGGLLVTLAEMAFAGHCGVTVDIQSLGNDALAALFNEELGAVIQVRAEQRADVEKLLADHGLANCVHYLGRAVAGDTFDIRSGTDVVYSEKRSTLRLWWAETSWQMQRLRDNPDCADQEHQAKQDESDPGLNVKLTFDPAEDIAAPFILKQARPKVAVLREQGVNSHVEMAAAFHRAGFDAVDVHMSDLLAGRTDLQSFQTLVACGGFSYGDVLGAGEGWAKSILFNDRVRDEFEAFFHRPTTLALGVCNGCQMMSNLRELIPGAEHWPRFVRNLSDSFEARFSLVEVASSPSLFMQDMVGSRMPIAVSHGEGQVEVRDAAHLAALEQSHLVALRFVNNHGVVTEQYPANPNGSANGITAVTSVSGRATVMMPHPERVFRTVSNSWHPEEWGEDSPWMRMFRNARKQLG

SEQ ID NO: 53006 - DNA, 2328 bp, Agrobacterium tumefaciens
  CDS (1)..(2328): transl_table=11
ttgccggtaaaactgcgcattttcctgtcgcacggagaggcctcttgcgctaaagaaccggaaactttcctcggctcgaaccgcgtgagacctatgtcgatttcaaactccatcaagatcaccccggaactcgttgcatcccacgggctgaagcccgacgaataccagcgtatcctcgacctgatcggacgggagcccagctttaccgagcttggcattttctcggccatgtggaacgagcactgctcctacaagtcttcgaagaagtggctgaagaccctgccgacaacgggtccgcgcgtcattcagggccccggtgaaaatgccggcgtggtggatattgacgatggcgactgcgtcgtcttcaagatggagagccacaaccacccgtcctatatcgagccctatcagggtgcggcaaccggcgtcggcggcatcctgcgtgacgtcttcaccatgggcgcacgcccgatcgccgccatgaacgccctgcgtttcggtgcgccggatcatccgaagacccgccacctcgtcgccggcgtcgtcgccggtgtcggcggttacggcaactccttcggtgtgccgacagttggcggcgaagtggaattcgacccgcgttataacggcaatatcctcgtcaacgcctttgccgccggtcttgccaagtccaatgcgatcttcctctcggaagccaagggcgtcggcctgccggtcgtttatctcggtgcaaagaccggccgcgacggcgttggcggcgcgaccatggcctctgccgaattcgacgagtccatcgaagaaaagcgcccgacggttcaagtcggcgaccccttcaccgaaaagtgcctgctggaagcctgccttgagctgatgaagaccggtgcggtcatcgccattcaggacatgggtgccgccggcctcacctgctccgccgtcgaaatgggcgccaagggtgatctcggcatcgaactggacctgaacgccgtgccggtgcgcgaagagcgcatgacggcttacgaaatgatgctgtcggaaagccaggagcgcatgctcatggttctcgagccctccaaggaagaagtcgccaaggcgatcttcgtcaaatggggtctggacttcgccatcgtcggcaagaccaccgacgacctgcgcttccgcgtgctgcacaatggcgaagaagtcgccaacctgccgatcaaggaactcggcgacgaggcccccgaatacgaccgcccgtggacgccagccaaggtgcccgcagcgctttcggaaaccgacatccccgaagccgacattgccgatgcgctggtgtcgctcgttggttcggccaacaactcctcgcgccgctgggtttacgaacagtatgacacgctgatccagggcaattccctgcagctgccgggcggtgatgccggcgtggtgcgcgtcgaaggccatgacaagaaggcgctcgctttctcctccgacgtgaccccgcgttatgtcgaggccgatgccttcgaaggcggcaagcaggcggtcgccgaatgctggcgcaacattaccgcaactggtgctctgccgctggcggccaccgacaacctcaatttcggcaatccggaaaagcccgaaatcatgagccagctggtccatgccatcaagggcatcggcgaggcctgccgcgtgctggaattcccgatcgtttccggcaacgtctcgctctacaacgagaccaatggtcaggcgatcctgcccacccccaccatcggcggcgttggcctgctgaaggactggggccgcatggcgcgcatccgtttcgcggctgccgacgaggtggtactcttggttggcgcacctgctggcctcggcacccacattgcccagtcggtctatatgcgtgatgttcacggccgcaccgatggcccggcgccgcatgtcgatctcatcgccgagaagaagaacggcgatttcgtccgtggtctcatcactgaaggtctcaccaccgccgttcacgattgctcctctggcggtctggcactcgctgttgccgaaatggcgatttcatccggcatcggcgcaacgatcgatgcggtcgaaggccataatccgatcctcaccttctatggcgaagatcaggcccgttacgtcctgaccgtcaagaagtccgatctcgacaaggtgcgggcggcggccaaggcggccggtgtttcctgccctcttattggcactaccggtggttccaccgtaaagctgggcacggcgcgcgctgtcgagattaaagaattgcacttggcctatgaatcgtggttccctcagttcatggacggcgaaactttgattgccgcagaatga

SEQ ID NO: 53007 - protein, 775 aa, Agrobacterium tumefaciens
MPVKLRIFLSHGEASCAKEPETFLGSNRVRPMSISNSIKITPELVASHGLKPDEYQRILDLIGREPSFTELGIFSAMWNEHCSYKSSKKWLKTLPTTGPRVIQGPGENAGVVDIDDGDCVVFKMESHNHPSYIEPYQGAATGVGGILRDVFTMGARPIAAMNALRFGAPDHPKTRHLVAGVVAGVGGYGNSFGVPTVGGEVEFDPRYNGNILVNAFAAGLAKSNAIFLSEAKGVGLPVVYLGAKTGRDGVGGATMASAEFDESIEEKRPTVQVGDPFTEKCLLEACLELMKTGAVIAIQDMGAAGLTCSAVEMGAKGDLGIELDLNAVPVREERMTAYEMMLSESQERMLMVLEPSKEEVAKAIFVKWGLDFAIVGKTTDDLRFRVLHNGEEVANLPIKELGDEAPEYDRPWTPAKVPAALSETDIPEADIADALVSLVGSANNSSRRWVYEQYDTLIQGNSLQLPGGDAGVVRVEGHDKKALAFSSDVTPRYVEADAFEGGKQAVAECWRNITATGALPLAATDNLNFGNPEKPEIMSQLVHAIKGIGEACRVLEFPIVSGNVSLYNETNGQAILPTPTIGGVGLLKDWGRMARIRFAAADEVVLLVGAPAGLGTHIAQSVYMRDVHGRTDGPAPHVDLIAEKKNGDFVRGLITEGLTTAVHDCSSGGLALAVAEMAISSGIGATIDAVEGHNPILTFYGEDQARYVLTVKKSDLDKVRAAAKAAGVSCPLIGTTGGSTVKLGTARAVEIKELHLAYESWFPQFMDGETLIAAE

SEQ ID NO: 53008 - DNA, 2349 bp, Anabaena sp
  CDS (1)..(2349): transl_table=11
atgactgccacatctcccttttcccctcaagaaattgctgctgaaggcatcaaaccagaagaatacgcagaaattgtccgaagattaggccgtcatcccaataaagctgaactgggaatgtttggggtgatgtggtcagaacattgttgctacaaaaattctcgccccctactcaaacagtttcccaccacaggcccccgcattctggtaggcccaggggaaaatgctggggttgtggatttaggtgaaggattgcaactggcatttaagattgaatctcacaaccacccttcagcagttgaaccctttcaaggcgctgccactggtgtggggggtattctcagagatatttttacaatgggtgcgcgtcccattgctttgttaaattctttacgttttggttccttagaagaccccaaaacccaaagattattttctggcgtagttgctggaatttcccactatggtaactgtgtcggtgttcctactgtcggtggtgaagtttattttgatcccgcctattcaggaaatcccctagtaaatgtcatggctttgggattaatggaaacaccagaaattgtcaaatctggagctgctggtatcggtaatcctgtattgtacgtgggttccactacgggacgggatggtatgggaggggcgagttttgccagtgcggaattaagtgatgagtcaatcgatgaccgtccggctgtgcaggtgggtgatccttttttggaaaaatcattaattgaagcttgtttagaagcatttaaaacaggtgcagtggtcgcggctcaagatatgggtgcggcgggaattacctgttctacttccgagatggcggctaaaggtggggtagggattgagttagatttggataaaattcctgtgcgggaaacacggatggttccttatgaatatttactatcagaatctcaagaacgaatgttatttgttgctcatcaaggacgagagcaagaattaatcgatatattccaccgttggggactacaggcggttgttgccggtacagtgattgccgaacctattgtcagaattttctttcaaggtgcaattgctgcggaaattccggctgatgctttagcagagaataccccactttacgagcgtgagttattggcagaacccccagaatatgctcgtctagcttgggaatggtcatctgaagccttacctactggtacaactgcgggtattgagattcaaggaaatctgcacagttggcaggatattttgttaactttgctcaatactcccacgatcgcctcgaaaaattgggtgtatcgtcaatatgaccaccaggtgcagaataatacggttttcctccctggtggtgcagatgcggcagttgtgcgcttacgtcccctagaagggcaggggagcagaggagcaggggagcaggggggagttaatagcctcagtggtgttgcggctacggtggattgcaatcctcggtatgtttaccttgatccctatgagggagctaaggcagtggtagcagaagcagcccggaatcttagctgtgtgggggcagaacctttggcggtgacagataacttaaattttggcagtccagaaaaacccattggttattggcaattgtcggaggcttgtcggggtttggcggaaggttgtcgagaattggcaaccccggtcactggtgggaatgtctctctatataacgaaacctttgacactcaaggcaacccccaaccaatttacccaactccagttgtggggatggtggggttgattgctgatttaaccaaaatttgcggtcaaggttggcaaggtgtaggtgatgtgatttaccttttaggcgcatctattaccactttaggcgcatctgaatatttagcgactattcacaacactgtagcaggcagacccccacgggtagattttgatttagaacgccgtgtacaaaaagtttgtcgtgaagggattcatgcaggttcggtacgttcagctcatgattgtgctgaggggggtttagccgtggcgctggcagaatcttgtcttgctggcaacctgggggcagaaattcacctagaagtttctcctactcagttacaacgcctggatgaggtgctgtttggtgagggtggagccagaattttagtatctgtagtatcaacacagcaagcaacttgggaatcctatttacaggaacatctaggacaaaattggcaaaaattaggcatagttggaaataccgatacagatctggcggttttaactactgataatcaaaccttaatccgcgttagcatcgaagaaatgaacgatcgctatcaaaatgcgatcgctagaaggttagccctgtga

SEQ ID NO: 53009 - protein, 782 aa, Anabaena sp
MTATSPFSPQEIAAEGIKPEEYAEIVRRLGRHPNKAELGMFGVMWSEHCCYKNSRPLLKQFPTTGPRILVGPGENAGVVDLGEGLQLAFKIESHNHPSAVEPFQGAATGVGGILRDIFTMGARPIALLNSLRFGSLEDPKTQRLFSGVVAGISHYGNCVGVPTVGGEVYFDPAYSGNPLVNVMALGLMETPEIVKSGAAGIGNPVLYVGSTTGRDGMGGASFASAELSDESIDDRPAVQVGDPFLEKSLIEACLEAFKTGAVVAAQDMGAAGITCSTSEMAAKGGVGIELDLDKIPVRETRMVPYEYLLSESQERMLFVAHQGREQELIDIFHRWGLQAVVAGTVIAEPIVRIFFQGAIAAEIPADALAENTPLYERELLAEPPEYARLAWEWSSEALPTGTTAGIEIQGNLHSWQDILLTLLNTPTIASKNWVYRQYDHQVQNNTVFLPGGADAAVVRLRPLEGQGSRGAGEQGGVNSLSGVAATVDCNPRYVYLDPYEGAKAVVAEAARNLSCVGAEPLAVTDNLNFGSPEKPIGYWQLSEACRGLAEGCRELATPVTGGNVSLYNETFDTQGNPQPIYPTPVVGMVGLIADLTKICGQGWQGVGDVIYLLGASITTLGASEYLATIHNTVAGRPPRVDFDLERRVQKVCREGIHAGSVRSAHDCAEGGLAVALAESCLAGNLGAEIHLEVSPTQLQRLDEVLFGEGGARILVSVVSTQQATWESYLQEHLGQNWQKLGIVGNTDTDLAVLTTDNQTLIRVSIEEMNDRYQNAIARRLAL

SEQ ID NO: 53010 - DNA, 2334 bp, Anabaena variabilis
  CDS (1)..(2334): transl_table=11
atgaccgccacatctcctgctcccttttccccccaagaaattgctgctgaaggcatcaaaccagaagaatacgcagaaattgtccgacgattaggccgtcatcccaataaagctgaactgggaatgtttggggtgatgtggtcagaacactgctgttacaaaaattcccgccccttactcaaacagttccccaccacaggcccccgcattctggtaggcccaggggaaaatgctggagttgtagatttaggtgaaggattgcaactggcatttaagattgaatctcacaaccacccttcagccgttgaaccctttcaaggagccgccactggtgtgggtggcatcctcagagatatttttacaatgggtgcgcgtcccatagctttgttaaattctctccgctttggttctctggaagaccccaaaacccaaagattattctccggcgtagttgctggaatttcccactatggtaactgtgtcggtgttcctactgtcggtggcgaagtttattttgatcccgcctattcaggaaatcccctggtaaatgtcatggcgctaggattaatggaaacaccagaaattgtcaaatctggggcatctggtataggtaatcctgtgttgtacgtgggttccactacgggacgggatggtatgggaggggcgagttttgccagcgcggaattaagtgatgagtccattgatgaccggccagcagtgcaggtgggcgatccttttttggagaaatcactaattgaagcctgtttagaagcatttaaaacaggtgcagtggttgcagcgcaagatatgggtgcggcgggaatcacttgttctacatccgagatggcggctaaaggtggcgtagggattgaactagatttagataaaattcctgtgcgggaaacagggatgattccctatgaatatctcctatcggagtctcaagaaagaatgttatttgttgcccacaaaggacgggaacaagaattaattgatattttccatcgttggggactacaggcggttgttgctggtacagtaatcgccgaacctattgtgcgtattctctttcaaggtgcaattgctgcggaaattccggctgatgccttagctgagaataccccactgtacgagcgtgagttactggcagaacccccagaatatgcccgtcaagcatgggaatggtcatctgactctttacctacttgtacaactgctggtattgagattcaaggaaatctgcaaagttggcaggagattttgttaactttgctcaatactcccacgatcgcctcgaaaaattgggtgtatcgtcaatatgaccaccaagtccaaaataatacggtttttctccccggtggtgcagatgcggcagtcgtgcgcttacgtcccctagaagggcaggggaaaattactaataccctcagtggtgttgcggctacggtggactgcaatcctcggtatgtttaccttgatccctatgagggagctaaggcagtggtggcagaagcagcccggaatcttagctgtgtaggggcagaacctctggcggtgacagataacttaaattttggtagcccagaaaaacccattggttattggcaattgtcggaggcttgtcggggtttagcggaaggttgccgagaattagcaaccccggtcactggtggtaatgtctctctatataacgaaacccttgatcctcaaggcaacccccaaccaatttacccaacgccagttgtggggatggtgggattgattactgatttaaccaagatttgcggtcaaggttggcaaaccccaggtgatgtgatttatcttttaggcgcatctatcaccactttaggcgcatctgaatatttagcgacgattcacgacactgtggcaggtagacccccacgggtagattttgacttagaacgccgtgtgcagaaagtttgtcgtgaggggatttatgctgattgggtacgttcagcccatgattgtgctgaggggggtttagtcgttgcgctcgcagaatcttgtcttgctggtaacctgggggcagaaattcacctagacgcatctggaagtcagttacaacgcctggatgaagtgctatttggtgagggtggagccagaattttagtatctgtagcatcaacacaacaggaaaattgggaatcctatttacaggagcatctaggacaaaattggcaaaaattgggcatagttggaaataccgatgcagatttggcggttttaactaccgataaccaaagcttaatccgagttagtatcgaagaaatgaacgatcgctatcaaaatgcgatcgccagaaggttagccctgtga

SEQ ID NO: 53011 - protein, 777 aa, Anabaena variabilis
MTATSPAPFSPQEIAAEGIKPEEYAEIVRRLGRHPNKAELGMFGVMWSEHCCYKNSRPLLKQFPTTGPRILVGPGENAGVVDLGEGLQLAFKIESHNHPSAVEPFQGAATGVGGILRDIFTMGARPIALLNSLRFGSLEDPKTQRLFSGVVAGISHYGNCVGVPTVGGEVYFDPAYSGNPLVNVMALGLMETPEIVKSGASGIGNPVLYVGSTTGRDGMGGASFASAELSDESIDDRPAVQVGDPFLEKSLIEACLEAFKTGAVVAAQDMGAAGITCSTSEMAAKGGVGIELDLDKIPVRETGMIPYEYLLSESQERMLFVAHKGREQELIDIFHRWGLQAVVAGTVIAEPIVRILFQGAIAAEIPADALAENTPLYERELLAEPPEYARQAWEWSSDSLPTCTTAGIEIQGNLQSWQEILLTLLNTPTIASKNWVYRQYDHQVQNNTVFLPGGADAAVVRLRPLEGQGKITNTLSGVAATVDCNPRYVYLDPYEGAKAVVAEAARNLSCVGAEPLAVTDNLNFGSPEKPIGYWQLSEACRGLAEGCRELATPVTGGNVSLYNETLDPQGNPQPIYPTPVVGMVGLITDLTKICGQGWQTPGDVIYLLGASITTLGASEYLATIHDTVAGRPPRVDFDLERRVQKVCREGIYADWVRSAHDCAEGGLVVALAESCLAGNLGAEIHLDASGSQLQRLDEVLFGEGGARILVSVASTQQENWESYLQEHLGQNWQKLGIVGNTDADLAVLTTDNQSLIRVSIEEMNDRYQNAIARRLAL

SEQ ID NO: 53012 - DNA, 2238 bp, Aquifex aeolicus
  CDS (1)..(2238): transl_table=11
atggaaagggtttgggaagcctacggattgaccgaagaagaatacagaaaaatactaaaaaccttaaaaagggagcccaaccacgttgaactcggcgttttaggagctctgtggtcggaacactgctcttacaagtccagcaaaaagcacctgaaaaagtttcccacaaaagcggaatgggttgttcagggaccgggtgaaaacgccggggttgtaaaaattgacgaaaaggtttgggtagcctttaaagtcgagagccacaaccacccctcttacatagagccctttcacggtgcggctacaggagttggcggtattatcagagacgtactgtccatgggagcgagacccatagccctcgcggacagcctgaggttcggcgagtttaattaccatgaaacgaagaggctcgttaaaggagtagtaagcggtatcagtttctacggaaactgcataggagttcccacggttgccggagaaacggttttcgaaccttcttataaaacgaacccgttggtaaacgccttttgtcttggagttatacccgcagggaggatgtacagggcaagggctactagggaaggacagctcctctttttaataggttcttccacgggaagggacgggatttttggagccgtaatggcctcgggagagttttccgaagacgtggaagaaaagagacctaacgtacagataggggatccgtactttgggaagaagctcgtggaagcaataatggagatagtggagaaggatttaatcgtcggaatgcaggatctgggagctgcagggcttgcaggctctgcttccgaaatagctgcaaagtccgaaaagggtgtggaactttacctagaaaacgtccccttaagggaaaaggatatgaacccctacgagatactcctttcagagagtcaggagaggatgcttctcgttgtggaagaagaaaacgttgaaaaggtcaaagagatagccaataagtggcaccttgagggtgcggtagtaggaaagataaccgatgacgatacattcagggcttactacaaaggagaactggttgcagaactacccgtttcacttatagtagacgaagctcccgtttacgatagaccctacaaagaacccgaatacatgaaggaagtgaggaatttcaatcaagaggagcttcctcaaacagatgtaaaagaagccctcaaaaaactcctatcttcgccaaacatttcgtgcaaggagtgggtttacactcagtacgactatcaagtaggaacgaacaccctccttatccccgggcacgacgcagcggttttaagactcaagtgggttctaagaccggagctcacaacagaaaaaggaatagccatatcttccgaaggaaacggcaggatggtttacctcaatccctacgaaggggggaagttcgtagtcgcggaagtttgcagaaacctcgcgtgtgtaggagcaaaacccttagccataacggactgtcttaacttcggaaatccagaaagaccggagataatgtggcagttcgtaaaggctgtagagggaatggcagaagcgtgtgaggaactcggtattccggtagtgagcgggaacgtatccctttacaatgaaaccgttgagaaaaacgaaatcaggaacgtatttcctactcccatagtcgtaggtgtgggtgtcttagaaaaggcggagaagtatacgccttcaaaagtagaaaaggaaagtgagctgtacctcgttggaaaccttgaggagaacttaagacttgacggaagtgagtacctcaaagtaatccacggacttataaagggagatgtgcctcctgtagaccttgaaaaggaaaagatacttataaaccttctcatctcttttaacaacaaggaattgataacctgtgcccacgacgtttccgtaggaggactgttaatcgcactccttgaaatggtctttagaacaccctacggtcttgaagtggaagtttacaccgatgaaagaccggatgtgttcttcttctcggaaaaccccacaagggtgattataggcgtggaaagtgataaggcggaagaggtaaagaacgccgttgaaaaggctggacttgagtggatgtacataggaaaaacgacggaagagaaaaagataaaagtaaccttcaacggagatactctcttagaggacgagcttgaggagtacgaaaagttatggagaacttccttagaaaaactgcttggctctacttaa

SEQ ID NO: 53013 - protein, 745 aa, Aquifex aeolicus
MERVWEAYGLTEEEYRKILKTLKREPNHVELGVLGALWSEHCSYKSSKKHLKKFPTKAEWVVQGPGENAGVVKIDEKVWVAFKVESHNHPSYIEPFHGAATGVGGIIRDVLSMGARPIALADSLRFGEFNYHETKRLVKGVVSGISFYGNCIGVPTVAGETVFEPSYKTNPLVNAFCLGVIPAGRMYRARATREGQLLFLIGSSTGRDGIFGAVMASGEFSEDVEEKRPNVQIGDPYFGKKLVEAIMEIVEKDLIVGMQDLGAAGLAGSASEIAAKSEKGVELYLENVPLREKDMNPYEILLSESQERMLLVVEEENVEKVKEIANKWHLEGAVVGKITDDDTFRAYYKGELVAELPVSLIVDEAPVYDRPYKEPEYMKEVRNFNQEELPQTDVKEALKKLLSSPNISCKEWVYTQYDYQVGTNTLLIPGHDAAVLRLKWVLRPELTTEKGIAISSEGNGRMVYLNPYEGGKFVVAEVCRNLACVGAKPLAITDCLNFGNPERPEIMWQFVKAVEGMAEACEELGIPVVSGNVSLYNETVEKNEIRNVFPTPIVVGVGVLEKAEKYTPSKVEKESELYLVGNLEENLRLDGSEYLKVIHGLIKGDVPPVDLEKEKILINLLISFNNKELITCAHDVSVGGLLIALLEMVFRTPYGLEVEVYTDERPDVFFFSENPTRVIIGVESDKAEEVKNAVEKAGLEWMYIGKTTEEKKIKVTFNGDTLLEDELEEYEKLWRTSLEKLLGST

SEQ ID NO: 53014 - DNA, 2298 bp, Archaeoglobus fulgidus
  CDS (1)..(2298): transl_table=11
atgtacaggaaggttgacgttcccttcgagctttacgaggttgagattctcgatgccagtgaagaggagctggcgaaaatcagcgaggagatgggcttagctttgagcgttgacgagatgaagcgcattcaggattacttccgccagaagggcagaaatccctacgacatcgagcttcagagccttgcccaagcatggagcgagcactgctgctacaagagctcgaagtattatttgaggcagtaccttctcgaagcttctaaggctgattacgtcatctccgccattgaggaggatgctggagttgtggagtttgatgatgagtatgcctacgttacggcctttgagagtcacaatcatccctcggcaatagagccctacggcggggctgctacaggcattggagggattttgagggacgtcctctgcatgggtgcccagcctattgcactaatagaccccctctttttcgggaatctcgacactccctacgagaagctgccgagggggacgaagcatcccctttacctgcttaagggtgttgttgcggggataagggattacggcaacagagttggaattccaacggttgcgggaatggtgttttttgacaactcctacctgacgaactgccttgttaatgtgggatgtgtgggcatagtgaggaaggacagaatcatccacagccgtgctggaggggctggagacctcttcgtgcttgctggcggcaagacgggaagggatgggattcacggcgtaactttcgcatcagcagagcttgacgagaagagcgaggaggaggcgaggggagcggtgcagctgggaaatcctataatgaaggagcccctcatccacgcctgccttgaggtcgtggagaaaggccttctgacgggaatgaaggatttgggaggaggagggctgagctgcgtcatcggggagatggccctcgccgctggttttggggctgaggtttatctggacaaggttccgctgaaggaggagggaatggccccttgggagatatggatttccgaaagtcaggagaggatgatgctcacagtcaggccggagcacatagacgaagttctttacatcttccagaagtgggatgttccagccactgtcgttggaaaggtgattccagaaaaaatcaccagaatctactacaaaggctacaagatttacgagatggacacggagttcgtcacctcagggcctgaatactgccgtccctacgttgccagaaagcctgagaaggagctgcacgaggaggtcgagccacctgcggactacgttaagaccttcatgaagatgctctcccatccgaacgctgccttcaaggagtggattgtgaggcagtatgaccacgaggtgagggcctcaaccgtcttaaagcctctgcaaggaaaaatgaacttcgaaacgcatggagatgctgccgtcatcaagccaacgagatccttcaggggtctggcaataacggcagatgtgaatccgtggatgtgcaaggttgacccctactggggcgctgccagcagctttgatgagatggtgaggaaccttgttgcggtcaacgccgttccgcactccttcaacgactgcctgaacttcggcaatcctgagaagcctgagaggatgggggagtttgttgaggctgttaaagccttgggatggatggccaaaggtgtgggagttccctgcgtgagcggaaacgtgagcttctacaacgaaaccccctacggggccgttgctcccactccctcactgcttggtgtgggcatagtggaggatgttagaaaggcgataacgagcgagttcaagggcagaggagccgtaattctcgtcggagaaacgcataacgagtttggaggcagcctgtattctgcggtgatggggcagaggtgccacaaagtgccgagaacctcgcctgagaggctgaagacatacagcgatgcgatgcttgagtccttcaggaagtttgaggtcaaagcctgccacgacgtcagcatgggtggattagcagtctgcatcgctgaaatgagctttggcaggggattgggctttgaggctgcgagagagcttagcttcgtcgagcttttctccgagtcgaacacgaggtgggtggtggaggttcccgaaagcgttgcggagggctatgcggagtttttcagggcgaaggagcttaaggctgaagttattggctacagcggtggagaaaggcttgattttggggctttcagcgttgagcttggcgaggcggataaatcctggagggaagggctcacgaagttcctgtaa

SEQ ID NO: 53015 - protein, 765 aa, Archaeoglobus fulgidus
MYRKVDVPFELYEVEILDASEEELAKISEEMGLALSVDEMKRIQDYFRQKGRNPYDIELQSLAQAWSEHCCYKSSKYYLRQYLLEASKADYVISAIEEDAGVVEFDDEYAYVTAFESHNHPSAIEPYGGAATGIGGILRDVLCMGAQPIALIDPLFFGNLDTPYEKLPRGTKHPLYLLKGVVAGIRDYGNRVGIPTVAGMVFFDNSYLTNCLVNVGCVGIVRKDRIIHSRAGGAGDLFVLAGGKTGRDGIHGVTFASAELDEKSEEEARGAVQLGNPIMKEPLIHACLEVVEKGLLTGMKDLGGGGLSCVIGEMALAAGFGAEVYLDKVPLKEEGMAPWEIWISESQERMMLTVRPEHIDEVLYIFQKWDVPATVVGKVIPEKITRIYYKGYKIYEMDTEFVTSGPEYCRPYVARKPEKELHEEVEPPADYVKTFMKMLSHPNAAFKEWIVRQYDHEVRASTVLKPLQGKMNFETHGDAAVIKPTRSFRGLAITADVNPWMCKVDPYWGAASSFDEMVRNLVAVNAVPHSFNDCLNFGNPEKPERMGEFVEAVKALGWMAKGVGVPCVSGNVSFYNETPYGAVAPTPSLLGVGIVEDVRKAITSEFKGRGAVILVGETHNEFGGSLYSAVMGQRCHKVPRTSPERLKTYSDAMLESFRKFEVKACHDVSMGGLAVCIAEMSFGRGLGFEAARELSFVELFSESNTRWVVEVPESVAEGYAEFFRAKELKAEVIGYSGGERLDFGAFSVELGEADKSWREGLTKFL

SEQ ID NO: 53016 - DNA, 2220 bp, Bacillus anthracis
  CDS (1)..(2220): transl_table=11
atgtcgttaatgcttgaaccaaatccaacacaaattaaagaagagcgcatatatgcggaaatggggctaacagacgaagagtttgccatggttgaaaagattttaggccgtctgccaaattatacagaaacaggtttattctctgtaatgtggtcagaacattgtagttataaaaattcaaaaccagtgcttcgaaaattcccaacaacaggtgagcgcgttctgcaaggacctggggaaggtgctggaattgtagatatcggtgataatcaagcggttgtatttaaaatggaaagtcataaccatccttctgctattgaaccatatcaaggagcagcaacaggcgttggtggtattattcgtgacgtattctctatgggggcacgtccagtagctctattaaactcacttcgctttggggaattacaatcaccacgtgtgaaatacttattcgaagaagtagtagcaggaattgcgggatacggtaactgtatcggtattccgactgttggcggcgaagtacagtttgatccatgttatgaaggaaacccacttgtaaatgcaatgtgcgtaggcttaattaaccacgaagacattaaaaaagggcaagcgcacggtgctggaaatacagtaatgtacgtaggcgcatcaactggtcgtgatggtatccacggtgcaacattcgcatctgaagagttatctgaaagctcagaagcgaagcgtccagcagttcaagtaggagatccatttatggagaaacttcttattgaagcttgcttagaacttattcaatcggatgcacttgttggaattcaagatatgggtgcagctggtttaacatcatcttctgcagaaatggcaagtaaagcaggaatgggtattgaaatgtacttagatgatgtaccgcagcgagaaacaggaatgacaccatatgaaatgatgttatctgaatcacaagagcgtatgttaattgttgtgaaaaaaggtagagagcaagaaatagtagatttatttgagaagtatggtcttgcagccgttacgatggggaaagtaacggaagacaaaatgcttcgtttattccataaaggtgaaatggtagctgaagtgccagcagatgctcttgcagaagaagcaccaatttatcataaaccatcaaaagaagcagcatattttgctgaattccagcagatgaaaatggaaacaccaaaagtagaaaattataaagaaacgttattcgctctattacaacaaccgacgattgcaagtaaagagtgggtttatgatcaatatgattatcaagttcgcacaagcacagttgttacaccaggttcagatgcagcagttgtacgtgtacgcggtacagaaaaaggattagcaatgacgacagattgtaactctcgctacatttatttagatccagaagtgggcggtaaaattgcagtagcagaggcagcacgtaatatcgtatgttctgggggagagcctcttgcaattacagattgcttaaacttcggtaatccagaaaaaccagaaatcttctggcaaattgagaaatcagtagatggtatgagtgaagcttgtcgtacgttacaaacaccagttatcggcggaaacgtatcaatgtataacgagcgtagtggtgaagcggtatacccaacaccgacagttgggatggttggacttgtacatgatttaaaacatgtaacaacacaagagtttaagcaagccggcgatttagtttatgtcattggagagacgaaagctgagtttggtggaagtgaattacagaaaatgcttcacggaaaaattttcggccaatcaccaagtatcgatttagacgtagaattaaaacgtcaaaaacaagtattagcagccattcaagctggccttgttcaatctgcacatgacgttgctgaaggtggtttagcggttgcgatttcagaaagtgcaattggtgctaacggcttaggtgctactgtgaaattagacggggaagcaacagctgcattatttgcggaatcacaatctcgcttcgtaataacggtaaaacgtgaaaataaagaagcgttcgagaaagcggtagaagccattcaagttggtgaagtaacaaatacaaatgaagtaacaattcataatgaagaaaatgaagtattacttacagcaaatgtagatgaaatgagaaaggcttggaaaggggcaatcccatgcttgctgaaataa

SEQ ID NO: 53017 - protein, 739 aa, Bacillus anthracis
MSLMLEPNPTQIKEERIYAEMGLTDEEFAMVEKILGRLPNYTETGLFSVMWSEHCSYKNSKPVLRKFPTTGERVLQGPGEGAGIVDIGDNQAVVFKMESHNHPSAIEPYQGAATGVGGIIRDVFSMGARPVALLNSLRFGELQSPRVKYLFEEVVAGIAGYGNCIGIPTVGGEVQFDPCYEGNPLVNAMCVGLINHEDIKKGQAHGAGNTVMYVGASTGRDGIHGATFASEELSESSEAKRPAVQVGDPFMEKLLIEACLELIQSDALVGIQDMGAAGLTSSSAEMASKAGMGIEMYLDDVPQRETGMTPYEMMLSESQERMLIVVKKGREQEIVDLFEKYGLAAVTMGKVTEDKMLRLFHKGEMVAEVPADALAEEAPIYHKPSKEAAYFAEFQQMKMETPKVENYKETLFALLQQPTIASKEWVYDQYDYQVRTSTVVTPGSDAAVVRVRGTEKGLAMTTDCNSRYIYLDPEVGGKIAVAEAARNIVCSGGEPLAITDCLNFGNPEKPEIFWQIEKSVDGMSEACRTLQTPVIGGNVSMYNERSGEAVYPTPTVGMVGLVHDLKHVTTQEFKQAGDLVYVIGETKAEFGGSELQKMLHGKIFGQSPSIDLDVELKRQKQVLAAIQAGLVQSAHDVAEGGLAVAISESAIGANGLGATVKLDGEATAALFAESQSRFVITVKRENKEAFEKAVEAIQVGEVTNTNEVTIHNEENEVLLTANVDEMRKAWKGAIPCLLK

SEQ ID NO: 53018 - DNA, 2220 bp, Bacillus cereus
  CDS (1)..(2220): transl_table=11
atgtcgttaatgcttgaaccaaatccaacacaaattaaagaagagcgcatatatgcggaaatggggctaacagacgaagagttcgccatggttgaaaagattttaggccgtctgccaaattatacagaaacaggattattctctgttatgtggtctgaacattgtagttataaaaattcaaaaccagtacttcgaaaattcccaacaacaggtgagcgagtcttgcaagggcctggggaaggtgctggaattgtagacatcggtgataatcaagcggttgtatttaaaatggaaagtcataaccacccttctgctattgagccatatcaaggagcagcaacaggtgttggcggtattattcgtgacgtattctctatgggagcacgtccagtagctctattaaactcacttcgatttggagaattacaatcaccacgtgtgaaatacttattcgaagaagtagtagcaggaattgcgggatacggtaactgtatcggtattccgactgttggcggcgaagtacagtttgatccatgttatgaaggaaatccacttgtaaatgcaatgtgcgtaggcttaattaaccacgaagacattaaaaaagggcaagcgcacggtgctggaaacacagtaatgtacgtaggagcatcaactggtcgtgatggtatccacggtgctacattcgcatctgaagagttatctgaaagctcagaagcgaagcgtccagcagttcaagtaggagatccatttatggagaaacttcttattgaagcttgtttagaacttattcaatcggatgcacttgttggaattcaagatatgggtgcagctggtttaacatcatcttctgcagaaatggcaagtaaagcaggaatgggtattgaaatgtacttagatgatgtaccacaacgagaaacaggaatgacaccatatgaaatgatgctatctgaatcacaagagcgtatgttaattgttgtgaaaaaaggtagagagcaagagatagtagatttatttgagaagtatggtcttgcagccgttacgatggggaaagtaacggaagacaaaatgcttcgtttattccataaaggtgaaatggtagctgaagtaccagcggatgctcttgcagaagaagcgccaatttatcataaaccatcacaagaagcagcatactttgctgaattccagcagatgaaaatggaaacaccaaaagtagaaaattataaagaaacgttattcgctctattacaacaaccgacgattgcaagtaaagagtgggtttatgatcaatatgattatcaagttcgcacaagcacagttgttacaccgggttcagatgcagcagttgtacgtgtacgcggtacagaaaaaggattagcaatgacgacagattgtaactctcgctacatttatttagatccagaaatgggcggtaaaattgcagtagcagaggcagcacgtaatatcgtatgttctggaggagagccacttgcaattacagattgcttaaacttcggtaatccagagaaaccagaaatcttctggcaaattgagaaatcagtagatggtatgagtgaagcttgtcgcacattacaaacaccagttataggcggaaacgtatcaatgtataacgaacgtagtggtgaagcggtatatccaacaccgacagttgggatggtcggactagtacatgacttaaaacatgtaacaacacaagagtttaagcaagctggcgatttagtttatgttatcggagagacgaaagctgagtttggtggaagtgaattacagaaaatgcttcacggcaaaattttcggccaatcaccaagtatcgatctagacgtagaattaaaacgtcaaaaacaagtattagcagcaattcaagctggccttgttcaatctgcacatgacgttgctgaaggtggtttagcagttgcaatttcagaaagtgcaattggtgctaacggcttaggtgctactgtgaaattagacggggaagcaacagcggcattatttgcggaatcgcaatctcgcttcgtgataactgtaaaacgtgaaaataaagaagcgttcgagaaagcggtagaagcaattcaagttggagaagtaacaaatacaaatgaagtgacaattcataatgaagaaaatgaagtattacttacagcaaatgtagatgaaatgagaaaggcttggaaaggggcaatcccatgcttgctgaaataa

SEQ ID NO: 53019 - protein, 739 aa, Bacillus cereus
MSLMLEPNPTQIKEERIYAEMGLTDEEFAMVEKILGRLPNYTETGLFSVMWSEHCSYKNSKPVLRKFPTTGERVLQGPGEGAGIVDIGDNQAVVFKMESHNHPSAIEPYQGAATGVGGIIRDVFSMGARPVALLNSLRFGELQSPRVKYLFEEVVAGIAGYGNCIGIPTVGGEVQFDPCYEGNPLVNAMCVGLINHEDIKKGQAHGAGNTVMYVGASTGRDGIHGATFASEELSESSEAKRPAVQVGDPFMEKLLIEACLELIQSDALVGIQDMGAAGLTSSSAEMASKAGMGIEMYLDDVPQRETGMTPYEMMLSESQERMLIVVKKGREQEIVDLFEKYGLAAVTMGKVTEDKMLRLFHKGEMVAEVPADALAEEAPIYHKPSQEAAYFAEFQQMKMETPKVENYKETLFALLQQPTIASKEWVYDQYDYQVRTSTVVTPGSDAAVVRVRGTEKGLAMTTDCNSRYIYLDPEMGGKIAVAEAARNIVCSGGEPLAITDCLNFGNPEKPEIFWQIEKSVDGMSEACRTLQTPVIGGNVSMYNERSGEAVYPTPTVGMVGLVHDLKHVTTQEFKQAGDLVYVIGETKAEFGGSELQKMLHGKIFGQSPSIDLDVELKRQKQVLAAIQAGLVQSAHDVAEGGLAVAISESAIGANGLGATVKLDGEATAALFAESQSRFVITVKRENKEAFEKAVEAIQVGEVTNTNEVTIHNEENEVLLTANVDEMRKAWKGAIPCLLK

SEQ ID NO: 53020 - DNA, 2220 bp, Bacillus thuringiensis subsp
  CDS (1)..(2220): transl_table=11
atgtcgttaatgcttgaaccaaatccaacacaaattaaagaagagcgcatatatgcggaaatggggctaacagacgaagagtttgccatggttgaaaagattttaggccgtctgccaaattatacagaaacaggattattctctgttatgtggtctgaacattgtagttataaaaattcaaaaccagtgcttcgaaaattcccaacaacaggtgagcgtgttctgcaaggacctggggaaggtgctggaattgtagacatcggtgataatcaagcggttgtatttaaaatggaaagtcataaccacccttctgctattgaaccatatcaaggagcagcaacaggcgttggtggtattattcgtgacgtattctctatgggggcacgtccagtagctctattaaactcacttcgctttggggaattacaatcaccacgtgtgaaatacttattcgaagaagtagtagcagggattgcaggatacggtaactgcatcggtattccgactgttggcggcgaagtacaatttgatccatgttatgaaggaaacccacttgtaaatgcaatgtgcgtaggcttaattaaccacgaggacattaaaaaagggcaagcgcacggtgctggaaatacagtaatgtacgtaggagcatcaactggtcgtgatggtatccacggtgcaacattcgcatctgaagagttatctgaaagctcagaagcgaagcgtccagcagttcaagtaggagatccatttatggagaaacttcttattgaagcttgcttagaacttattcaattggatgcacttgttggaattcaagatatgggtgcagctggtttaacatcatcttctgcagaaatggcaagtaaagcaggaatgggtattgaaatgtacttagatgatgtaccgcagcgagaaacaggaatgacaccatatgaaatgatgctatctgaatcacaagagcgtatgttaattgttgtgaaaaaaggtagagagcaagaaatagtagatttatttgagaagtatggtcttgcagccgttacgatggggaaagtaacggaagacaaaatgcttcgtttattccataaaggtgaaatggtagctgaagtgccagcagatgctcttgcagaagaagcaccaatttatcataaaccatcaaaagaagcggcatattttgctgaattccagcagatgaaaatggaaacaccaaaagtagaaaattataaagaaacgttattcgctctattacaacaaccgacgattgcaagtaaagagtgggtttatgatcaatatgattatcaagttcgcacaagcacagttgttacaccaggttcagatgcagcagttgtacgtgtacgcggtacagaaaaaggattagcaatgacgacagattgtaactctcgctacatttatttagatccagaagtgggcggtaaaattgcagtagcagaggcggcacgtaatatcgtatgttctgggggagagccacttgcaattacagattgcttaaacttcggtaatccagaaaaaccagaaatcttctggcaaattgagaaatcagtagatggtatgagtgaagcttgtcgtatgttacaaacaccagttattggcggaaacgtatcaatgtataacgagcgtagtggtgaagcggtatacccaacaccgacagttgggatggttggacttgtacatgatttaaaacatgtaacaacacaagagtttaagcaagccggcgatttagtttatgtcattggagagacgaaagctgagtttggtggaagtgaattacagaaaatgcttcacggaaaaattttcggccaatcaccaagtatcgatttagacgtagaattaaaacgtcaaaaacaagtattagcagcaattcaagctgggcttgttcaatctgcacatgacgttgctgaaggtggtttagcggttgcgatttcagaaagtgcaattggtgctaacggcttaggtgctactgtgaaattagacggggaagcaacagcggcattatttgcggaatcacaatctcgcttcgtgataactgtaaaacgtgaaaataaagaagcattcgagaaagcggtagaagcaattcaagttggagaagtaacaaatacaaatgaagtaacaattcataatgaaaaaaatgaagtattacttacagcaaatgtagatgaaatgagaaaggcttggaaaggggcaatcccatgcttgctgaaataa

SEQ ID NO: 53021 - protein, 739 aa, Bacillus thuringiensis subsp
MSLMLEPNPTQIKEERIYAEMGLTDEEFAMVEKILGRLPNYTETGLFSVMWSEHCSYKNSKPVLRKFPTTGERVLQGPGEGAGIVDIGDNQAVVFKMESHNHPSAIEPYQGAATGVGGIIRDVFSMGARPVALLNSLRFGELQSPRVKYLFEEVVAGIAGYGNCIGIPTVGGEVQFDPCYEGNPLVNAMCVGLINHEDIKKGQAHGAGNTVMYVGASTGRDGIHGATFASEELSESSEAKRPAVQVGDPFMEKLLIEACLELIQLDALVGIQDMGAAGLTSSSAEMASKAGMGIEMYLDDVPQRETGMTPYEMMLSESQERMLIVVKKGREQEIVDLFEKYGLAAVTMGKVTEDKMLRLFHKGEMVAEVPADALAEEAPIYHKPSKEAAYFAEFQQMKMETPKVENYKETLFALLQQPTIASKEWVYDQYDYQVRTSTVVTPGSDAAVVRVRGTEKGLAMTTDCNSRYIYLDPEVGGKIAVAEAARNIVCSGGEPLAITDCLNFGNPEKPEIFWQIEKSVDGMSEACRMLQTPVIGGNVSMYNERSGEAVYPTPTVGMVGLVHDLKHVTTQEFKQAGDLVYVIGETKAEFGGSELQKMLHGKIFGQSPSIDLDVELKRQKQVLAAIQAGLVQSAHDVAEGGLAVAISESAIGANGLGATVKLDGEATAALFAESQSRFVITVKRENKEAFEKAVEAIQVGEVTNTNEVTIHNEKNEVLLTANVDEMRKAWKGAIPCLLK

SEQ ID NO: 53022 - DNA, 2229 bp, Bacillus licheniformis
  CDS (1)..(2229): transl_table=11
atgtcgctactgcttgaaccaagtcaagaacaaattaaggaagagaaactttatcagcaaatgggtgtcagcgatgacgagtttgccatgattgaatcgattctcggaaggcttccaaactatacggaaatcgggattttttcagtcatgtggtcagagcactgcagctacaaaaattccaagccgatcctgaaaaagttcccgacaaaaggcgaacgcgtcctgcaaggaccgggggaaggcgcaggaatcgtcgatatcggcgacaatcaggcggttgtcttcaaaatcgaatcgcacaaccatccgtcagcgattgagccttatcagggagctgcaacgggtgtgggcggcatcatccgcgacgtcttttcaatgggcgcgcgtcccatcgctgttttgaactctctccggtttggcgaactcacttcaccgcgtgtgaagtacttgtttgaagaagtagtcgcgggcattgccggatacggaaactgcatcggcattccgaccgttggcggggaagttcagtttgacggctgctatgaaggcaatccgcttgtcaacgcgatgtgtgtcggtttaatcaaccatgaagatattaaaaaagggcaggcgaaaggcgtcggcaataccgtcatgtacgtcggcgcgaaaacggggcgcgacggcatccacggcgcaacgttcgcctcagaggaaatgtctgaccaatcagaagaaaagcgctcggccgttcaagtcggcgatccgttcatggagaagctgcttcttgaagcgtgtctggaagtcatcaaatctgacgctttggtcggtattcaggacatgggtgcggcaggcctgacaagttcaagcgcggaaatggcatccaaagccgggtctgggatcgagatgaaccttgacttgattccgcagcgcgaaacaggcatgacgccgtacgaaatgatgctttcggaatcccaggagcgcatgcttttggttatcgaacgcggccgcgaacaggaaatcatcgatatttttgacaagtacgatcttgaagccgttgctgtcggccatgtgactgatgacaagatgctgcgccttttccataacggagaaatggttgccgagcttccggtcgatgctcttgcagaggaagcgcctgtttaccataagccgtcaaaagtaccggattattacaaagagttccttgaaacagacgtccctgcaccaaaagtcgaagatgcgaaagaaacgcttctcgagctgctaaagcagccgaccattgcgagcaaagaatgggtttatgaccaatatgactacatggtcaggacgaacacggttgtcgcaccgggctctgatgcagccgtcctcaggattcgcggcacgaaaaaagcgctcgccatgacaacggactgcaatgcccgctacttgtaccttgatccggaaacaggcgggaaaatcgccgtcgcagaagcggcccgcaatatcgtctgctccggagcagaaccgcttgccgttacggataacctcaactttggaaatccggaaaagccggagatcttctggcagatcgaaaaagcggcagacgggatcagcgaggcgtgcaacgtgctcagcacaccggtcatcggcggaaacgtctctctctacaacgaatcaaacggaagcgcgatctacccgacgcctgtcatcggaatggtcggactgatcgaagatacggagcatattacgacacagcactttaaagcagcgggcgatttgatttatgtcatcggcgaaacattccctgagttcgccggaagcgagctgcaaaaactgaccgaaggaaagatttacggcaaagcgcctgcgattgacctggaagtcgaacaatcgcgtcaaaaagctcttctgaaagcgatccgctccggactcgttcaatcggcgcatgacgtctcagaaggcggcatcggcgtggcgctggcggaaagcgttatatcttctcaaaggctcggcgcccatgtgacgcttgcaggcgaacctgcattgttattcagcgaaacacaatcacggtttatcgtctctgtgaaaaaagaccatcaagaagcgttcgaaaagcttgtcaaagacgccgatctaatcggtgaagtaacgtcagacagcgtgctggctgttcaaagccaggaaggacaacaatggattcatgcgcagacagaagagctcgaaagcgcatggaaaggagctatcccatgcttgctgaaatcaaaggcttaa

SEQ ID NO: 53023 - protein, 742 aa, Bacillus licheniformis
MSLLLEPSQEQIKEEKLYQQMGVSDDEFAMIESILGRLPNYTEIGIFSVMWSEHCSYKNSKPILKKFPTKGERVLQGPGEGAGIVDIGDNQAVVFKIESHNHPSAIEPYQGAATGVGGIIRDVFSMGARPIAVLNSLRFGELTSPRVKYLFEEVVAGIAGYGNCIGIPTVGGEVQFDGCYEGNPLVNAMCVGLINHEDIKKGQAKGVGNTVMYVGAKTGRDGIHGATFASEEMSDQSEEKRSAVQVGDPFMEKLLLEACLEVIKSDALVGIQDMGAAGLTSSSAEMASKAGSGIEMNLDLIPQRETGMTPYEMMLSESQERMLLVIERGREQEIIDIFDKYDLEAVAVGHVTDDKMLRLFHNGEMVAELPVDALAEEAPVYHKPSKVPDYYKEFLETDVPAPKVEDAKETLLELLKQPTIASKEWVYDQYDYMVRTNTVVAPGSDAAVLRIRGTKKALAMTTDCNARYLYLDPETGGKIAVAEAARNIVCSGAEPLAVTDNLNFGNPEKPEIFWQIEKAADGISEACNVLSTPVIGGNVSLYNESNGSAIYPTPVIGMVGLIEDTEHITTQHFKAAGDLIYVIGETFPEFAGSELQKLTEGKIYGKAPAIDLEVEQSRQKALLKAIRSGLVQSAHDVSEGGIGVALAESVISSQRLGAHVTLAGEPALLFSETQSRFIVSVKKDHQEAFEKLVKDADLIGEVTSDSVLAVQSQEGQQWIHAQTEELESAWKGAIPCLLKSKA

SEQ ID NO: 53024 - DNA, 2229 bp, Bacillus subtilis
  CDS (1)..(2229): transl_table=11
atgtcactactgcttgaaccaagtaaagaacaaataaaagaagagaaactgtatcagcaaatgggtgtcagtgatgatgagtttgcattgatagaatccattcttggaagattgccgaactacacagaaatcggaattttttctgtcatgtggtctgagcattgcagctataaaaactcaaagccgattctgcgtaaattcccgacaagcggcgagcgtgtgctgcaggggccgggggaaggcgccggaatcgttgatatcggtgataaccaagcggttgtgttcaaaattgaatcacataaccacccatcagctctcgagccttaccaaggcgctgcgactggcgtaggcggaattatccgtgatgtattctcaatgggtgcacgcccaatcgctgtattgaactctcttcgatttggtgaactgacttcaccccgcgtgaagtacttgtttgaagaagtagtagcgggtatcgccggatacggcaactgtatcggcatcccgacagtcggcggagaagtgcagtttgacagcagctatgaaggaaatccgctcgtcaacgcaatgtgcgtcggtttaatcaaccatgaagacatcaaaaaaggccaggcaaagggtgtcggcaacacagtaatgtacgtaggagcgaaaacagggcgtgacggcatccacggcgctacgtttgcttctgaagaaatgtcagactcgtctgaagaaaagcgttctgctgtccaagtcggcgatccgtttatggagaagcttttgcttgaagcatgtctggaagtcatccaatgcgacgccttagtcggcattcaggatatgggagctgccggtttaacaagctcaagtgcagaaatggcaagtaaagccggttctggcattgaaatgaatcttgacctgattcctcagcgcgaaacaggcatgaccgcgtatgaaatgatgctttctgaatcacaagaacggatgcttttggttattgagcgcggacgtgagcaggaaatcatcgatatttttgacaagtatgatcttgaagcggtttctgtcggacatgtgacagatgataaaatgcttcgcctgacacataaaggagaggttgtgtgcgagctgcctgttgatgccttggcagaagaagcaccggtttaccataagccttctcaagagcctgcttactatcgcgagtttttggaaacagacgttccggctccgcaaattgaagatgcgaatgaaatgctgaaggcccttcttcagcagccgacgattgcgagtaaagagtgggtttatgatcagtatgactacatggtgcgcacgaatacagttgtcgctcctgggtctgatgctggtgttctcagaatccgcggaacgaaaaaggcgctggcgatgacgacagactgtaacgcgcgttatctctatcttgatcctgaagtcggagggaaaattgctgtcgctgaagcagcgcgcaacatcatttgctcaggcgcagaaccgcttgcggtgacagataaccttaacttcggaaaccctgagaagccggaaatcctctggcagatcgaaaaagcggcagacggcataagcgaagcgtgcaatgttctcagcactccggttatcggcggtaacgtatcgctttataacgaatcaaacggcacggcgatctatccgacaccagttatcggcatggtcggcctaattgaagatacagcgcacattacaacacagcatttcaaacaagcaggagatctcgtatacgtgatcggcgaaacaaaaccagagtttgccggaagcgagctgcaaaaaatgacagaaggccgtatttacggcaaagcgccgcaaatcgatcttgatgtagagctgtctcgtcaaaaagcactgcttgacgcgattaaaaaaggcttcgttcaatctgcgcatgatgtgtctgaaggcggcttaggcgtagcgattgcggaaagtgtcatgacgacggaaaaccttggcgctaatgtgactgtagaaggggaagcggcgttattattctctgaatctcaatctcgcttcgtcgtttcagtgaaaaaagaacatcaagctgcgtttgaagcaactgtcaaagatgcagttcatattggtgaggtaacagctgacggaattctggcgattcaaaaccaagacggacaacaaatgattcatgcgcaaacgaaagagcttgaacgcgtatggaaaggagctatcccatgcttgctgaaatcaaaggcttaa

SEQ ID NO: 53025 - protein, 742 aa, Bacillus subtilis
MSLLLEPSKEQIKEEKLYQQMGVSDDEFALIESILGRLPNYTEIGIFSVMWSEHCSYKNSKPILRKFPTSGERVLQGPGEGAGIVDIGDNQAVVFKIESHNHPSALEPYQGAATGVGGIIRDVFSMGARPIAVLNSLRFGELTSPRVKYLFEEVVAGIAGYGNCIGIPTVGGEVQFDSSYEGNPLVNAMCVGLINHEDIKKGQAKGVGNTVMYVGAKTGRDGIHGATFASEEMSDSSEEKRSAVQVGDPFMEKLLLEACLEVIQCDALVGIQDMGAAGLTSSSAEMASKAGSGIEMNLDLIPQRETGMTAYEMMLSESQERMLLVIERGREQEIIDIFDKYDLEAVSVGHVTDDKMLRLTHKGEVVCELPVDALAEEAPVYHKPSQEPAYYREFLETDVPAPQIEDANEMLKALLQQPTIASKEWVYDQYDYMVRTNTVVAPGSDAGVLRIRGTKKALAMTTDCNARYLYLDPEVGGKIAVAEAARNIICSGAEPLAVTDNLNFGNPEKPEILWQIEKAADGISEACNVLSTPVIGGNVSLYNESNGTAIYPTPVIGMVGLIEDTAHITTQHFKQAGDLVYVIGETKPEFAGSELQKMTEGRIYGKAPQIDLDVELSRQKALLDAIKKGFVQSAHDVSEGGLGVAIAESVMTTENLGANVTVEGEAALLFSESQSRFVVSVKKEHQAAFEATVKDAVHIGEVTADGILAIQNQDGQQMIHAQTKELERVWKGAIPCLLKSKA

SEQ ID NO: 53026 - DNA, 2208 bp, Bartonella henselae
  CDS (1)..(2208): transl_table=11
atgaagccttgcaataacattgccattacaccagaattaattgcacaacacggtttaaaaaatgatgaatatcaacatatcctgaccttgattggaagagaaccaacatttacagagctaggaattttttctgcgatgtggaacgaacattgttcctataaatcatctaaaaaatggctaaaaactcttccaacaaaaggaaactgtgttattcaaggtcctggtgaaaatgctggtgttgttgatattggtgagggacaatgcgtagttttcaaaatggaaagccacaaccatccttcttacattgaaccttaccaaggtgcggcgacaggtgttggtggtattttgcgagatgtctttacaatgggagcacgtcctattgcagcaatgaatgcactacgatttggatctcctgatcatccccgaacacgatatcttgttgctggtgtcgtttctggaatcgggggttacagtaatgcttttggcgttccaaccgttggtggagaaataaattttgatgagcgttataatggcaatatccttgtgaacgcttttgtcgctggtattgcaaagaaggattccattttttattctaaagcgcaaggtgttggacttcctgttgtttatcttggtgccaaaacagggcgtgatggtgttggtggagcaacgatggcttctgccgaatttgatgattcaatcagtgaaaaacgtccaactgttcaagtgggggatccttttacggaaaaatgccttcttgaagcttgcttagaactcatggagctaggagctgtagttgctattcaagatatgggcgcagcaggtttaacatcttctgcagttgaaatgggagcaaaaggagatttagggataaagcttaatcttgataaagtccccgttcgtgaagaaaacatgacagcctatgaaatgatgctttctgaaagtcaagaacgtatgctcatggtgcttaaaccagaattagaaaaacaagcatcagcgatttttcataaatggggacttcatttttccattattggacaaacaactgatgatttacgtttccgtgtgttacatcaaggggaagaagtcgtcaatcttcccatcaaagagctggggaatgaagcacctgtttacgatcgcccttggagtgagcctaccccacaacctattcttaaagtagaagaagttaaaaaagttgaaaatcttggtgatgtactcctaacattattgaactctgcacatcaaagttcacggcgatgggtgtatgaacaatacgatacacttatccaaggaaatactcttgttcgtccaggagctgatgcaggcgtcatccgtgtaagcagtaatgacaaacgtgctcttgctttttcttctgatgtaacgcctcgctattgcgaagcagacccttatgaaggaggaaaacaagcagttgcagagtgctggcgaaatattagcacgacaggtgcaatgccactagcagccacagataatcttaactttggtaatcctgaaaaacctgaaattatggggcaattggtattggctattaaaggtataggtgaagcttgtagagttctcgactttcctatcgtttcaggcaatgtctctctttataatgaaaccaatggagaggcaattcttcctacgccaacaatcgctggtgtaggccttcttgatgactggtccaaaatggtaacaatcagtggtatgcaaaatggagacagtattgttttgattggagattgcggctctcatttagggcaatcaatctacgcgcgtaacgttttgaatattaatacaggtgcaccgcctcatgtagatttacagcttgaaaaaaagcatggacaatttgttcgagatgtcattcatcgtggttttgttcatgccgctcatgatatttctgacgggggattagctattgcacttgcagaaatggtaattaaagcaaagaaaggaattaaagccaaattaagcaacagattaccacatcatgcggagctttttggagaagatcaaggacgttatctcttaagcatcaaaccttatgttctcaatcaccttaaagaacttgcacaagttaacgcagtttctttaacagagattggtagagttgaaggtaattctctcaatatagaagggatattaacactttcagtagacaaactcacacaagcctatgaaagttggtttccgcaatttatgggcgaataa

SEQ ID NO: 53027 - protein, 735 aa, Bartonella henselae
MKPCNNIAITPELIAQHGLKNDEYQHILTLIGREPTFTELGIFSAMWNEHCSYKSSKKWLKTLPTKGNCVIQGPGENAGVVDIGEGQCVVFKMESHNHPSYIEPYQGAATGVGGILRDVFTMGARPIAAMNALRFGSPDHPRTRYLVAGVVSGIGGYSNAFGVPTVGGEINFDERYNGNILVNAFVAGIAKKDSIFYSKAQGVGLPVVYLGAKTGRDGVGGATMASAEFDDSISEKRPTVQVGDPFTEKCLLEACLELMELGAVVAIQDMGAAGLTSSAVEMGAKGDLGIKLNLDKVPVREENMTAYEMMLSESQERMLMVLKPELEKQASAIFHKWGLHFSIIGQTTDDLRFRVLHQGEEVVNLPIKELGNEAPVYDRPWSEPTPQPILKVEEVKKVENLGDVLLTLLNSAHQSSRRWVYEQYDTLIQGNTLVRPGADAGVIRVSSNDKRALAFSSDVTPRYCEADPYEGGKQAVAECWRNISTTGAMPLAATDNLNFGNPEKPEIMGQLVLAIKGIGEACRVLDFPIVSGNVSLYNETNGEAILPTPTIAGVGLLDDWSKMVTISGMQNGDSIVLIGDCGSHLGQSIYARNVLNINTGAPPHVDLQLEKKHGQFVRDVIHRGFVHAAHDISDGGLAIALAEMVIKAKKGIKAKLSNRLPHHAELFGEDQGRYLLSIKPYVLNHLKELAQVNAVSLTEIGRVEGNSLNIEGILTLSVDKLTQAYESWFPQFMGE

SEQ ID NO: 53028 - DNA, 2211 bp, Bartonella quintana
  CDS (1)..(2211): transl_table=11
atgaattcttgcaataacatcgccattacaccagaattgattgcacaacatggcctaaaaagtgatgaatatcagcatatcctaacattaattggtagagagccaacatttaccgaacttggaattttttccgcaatgtggaacgaacattgttcctataaatcatctaaaaaatggcttaaaactctcccaataaaaggaaagtgtgtcattcaaggccctggtgaaaacgctggtgtcattgatatcggtaaggggcaatgtgtggttttcaaaatggaaagccataaccatccttcttacattgaaccttatcaaggtgcagcaacaggtatgggtggtattttgcgtgatgtctttacaatgggagcccgccctgtcgcagctatgaatgcattgcgatttggatctcccaatcatccccgaacacgccatcttgttgctggcgtcgtttctggaatcggtggctacagcaatgcttttggcgttccaaccgttggtggagaagtaaattttgacgagcgctataatggtaatatccttgttaacgcttttgtagctggtattgcaaagacagattccattttttattctaaagcgcaaggagttgggcttccagttgtttatcttggtgccaaaacaggacgtgatggtgttggtggagcaatgatggcttctgccgaattcaatgattcaattgatgaaaaacgtccaactgttcaagtgggtgatccttttattgaaaaatgccttcttgaagcctgtttagagcttatggaactaaaagctatcgttgcgattcaagatatgggcgcagcaggactaacatcttctgcagttgaaatgggggcaaaaggaaatctaggaatacagcttaatctggataaagtccccactcgagaagaaaacatgacagcctatgaaataatgctttctgaaagccaagaacgtatgctcatggtgttaaaaccagaactaaaaaaacgagcagctgcaatttttcaaaaatggggtcttcatttttccatcattggaaaaacaacagatgatttacgtttccgtgtcacgcatcaaggagaagaagtcgtcaatcttcctatcaaagaactcggtgatgaagcaccggtttatgatcgcccttggatagaacctaccctaaaacctacccttaaagcagaagaagtgaaaaaaattgaaaattttgccgatgtactcctgaaattattgaattctgctaatcaaagctcaaggcgatgggtttatgagcaatacgatacacttatccaaggaaatacgcttgttcgtccaggaggcgatgcaggtgtcatccgtgtaagcaataacgataaacgtgctcttgctttttcttgtgatgtgacgcctcgttattgtgaagctgatccctatgaaggaggaaaacaagcagtcgtggaatgttggcgcaacattagcactacgggtgcaacaccactagcagctacagataacctcaatttcggtaatcctgagaatcctaaaattatgggacagctagtttttgccattaaaggtataagtgaagcttgtcgggttctagattttccaatcgtttcaggaaatgtctctctttataatgaaaccaatggagaagcaattcttccgactcctacaatagctggtgtcggacttcttgataactggtctaaaaccgtgacaatcggtggtatgcaaaataaagatagtattgttttaattggaccttgcggctcacatttaggacaatcaatttatgcgcgtaacattttaaatattgatgcgggtgccccaccccatatagatttgcaacttgaaaaaaagcatggacaatttgttcgagatgtcattcatcgtggttttgttaacgctgctcatgatatttctgacggaggattagcacttgcgcttgcagaaatggtgattaaagcaagtaaaggaattagaataaaattaagcaataagtcaccacagcacgcggagctttttggagaagatcaagcacgttatattttagctgttaaacctcatgcacttaatagccttaaagaacttgcacaagtaaacgagatttccttaacagagcttggtacagttgaaggtaattctctcaatatagattcgatattaaacctttcgatagacaaactgacgcaaaactatgaaagctggtttccgcaatttatgaacgaagaatga

SEQ ID NO: 53029 - protein, 736 aa, Bartonella quintana
MNSCNNIAITPELIAQHGLKSDEYQHILTLIGREPTFTELGIFSAMWNEHCSYKSSKKWLKTLPIKGKCVIQGPGENAGVIDIGKGQCVVFKMESHNHPSYIEPYQGAATGMGGILRDVFTMGARPVAAMNALRFGSPNHPRTRHLVAGVVSGIGGYSNAFGVPTVGGEVNFDERYNGNILVNAFVAGIAKTDSIFYSKAQGVGLPVVYLGAKTGRDGVGGAMMASAEFNDSIDEKRPTVQVGDPFIEKCLLEACLELMELKAIVAIQDMGAAGLTSSAVEMGAKGNLGIQLNLDKVPTREENMTAYEIMLSESQERMLMVLKPELKKRAAAIFQKWGLHFSIIGKTTDDLRFRVTHQGEEVVNLPIKELGDEAPVYDRPWIEPTLKPTLKAEEVKKIENFADVLLKLLNSANQSSRRWVYEQYDTLIQGNTLVRPGGDAGVIRVSNNDKRALAFSCDVTPRYCEADPYEGGKQAVVECWRNISTTGATPLAATDNLNFGNPENPKIMGQLVFAIKGISEACRVLDFPIVSGNVSLYNETNGEAILPTPTIAGVGLLDNWSKTVTIGGMQNKDSIVLIGPCGSHLGQSIYARNILNIDAGAPPHIDLQLEKKHGQFVRDVIHRGFVNAAHDISDGGLALALAEMVIKASKGIRIKLSNKSPQHAELFGEDQARYILAVKPHALNSLKELAQVNEISLTELGTVEGNSLNIDSILNLSIDKLTQNYESWFPQFMNEE

SEQ ID NO: 53030 - DNA, 2211 bp, Bradyrhizobium japonicum
  CDS (1)..(2211): transl_table=11
atgaagaacgaacccaagatcacccccgaactggttgccgcccacgggctcaagcccgatgagtacgagcgcatcctgaagctgatcgggcgggagccgaccttcaccgagctcggcatcttctcggcgatgtggaacgagcattgctcgtacaagtcctcgcgcatccatctgcgcggcctgccgaccaaggcgccctgggtgatccagggccccggcgagaatgccggcgtgatcgacatcggcgacggccaggccgtggtcttcaagatggagagccacaaccacccgagctacatcgaaccctaccagggcgcgaccaccggcgtcggcggcattttgcgcgacgtcttcacgatgggcgcacggccgatcgcctgcctcaatgcgctgagcttcggcgcgcccgagcatgccaagacccggcacctcgtctccggcgtcgtcgccggcgtcggcggctacggcaattccttcggcgtgccgacggtcggcggccaggtccgttttcacacccgttatgacggcaacatcctcgtcaacgcgatggccgtgggcctcgccgatgccgacaagatcttctatgcggccgcctccggcgtgaacatgccgatcgtctatctgggctccaagaccggccgcgacggcatccacggcgcctcgatggcctcggccgagttcgacgacaagtccgaggagaagcgccccaccgtgcaggtcggcgatcccttcgccgagaagcttttgctcgaggcgtgcctcgagatcatggagaagggctgcgtcatcgcgatccaggacatgggcgcggcggggctgacctgctcggcggtcgagatgggcgccaagggcgacctcggggtcgatctcgatctcgacgcggtgccgacccgcgagaccggcatgagcgcctatgagatgatgctctcggagagccaggagcgcatgctcatggtgctcaagcccgagaaggagaaggaagccgaggccatcttcaagaagtgggggctcgacttcgccgtggtcggctacaccacgccgagcaagcgtttcgtggtcaagcatggcggcgacgtcatggccgacctgccgatcaaggagctcggcgacgaggcgccgctctatgaccggccgcatgtcccctccgccgcgctgccggtcgtgcacgcgcgcgaggtgatggcaccgatgggcgtaggtagcgcgctggagaagctgatcggcacgcccgacatgtgctctaagcgctgggtctgggagcagtacgaccacgtcatcctcggcaacaccatgcagcgccccggaggcgatgccgccgtggtgcgcgtgcaggatggcccgaagggcctggcgctgaccgtcgacgtcacgccgcgctattgcgaggccgatccgttcgagggcggcaagcaggcggtggcggaagcctggcgcaacatcaccgcggtcggcggcaagccgctcgcgatcaccgacaatctcaacttcggcaatcctgaacggcccgagatcatgggccagttcgtcggctgcctgaagggcatctcggaagcctgccgcacgctggacttcccggtcgtctccggcaacgtctcgctctacaacgagaccaacggccgcgcgatcctgccgacgccctcgatcggcggcgtcggtctgctcgacgatttcaccaagtccgcttcgctcgccttcaaggccgagggcgaggcgatcctcttgatcggcgagacccatggctggctcggccagtcggtgtacctgcgcgacatctgcggtcgcgaggagggcgcgccgccgccggtcgacctcgctgccgagaagcgcaacggcgactgcgtgcgcggcatgatccatgcgggcaccgcgaccgccgtgcacgacctctcggacggcggcctcctgatcgcgctcgccgagatggcgatggcgagcggcatcggcgcaaagctgctggcggcgccgacttcgcttgtctcgcaggcctattggttcggcgaggaccaggcgcgctatctcgtcaccgtgccggaaacggaggccggccgcgtgctcgccaagatgcgcggctgcgaggtgccctgcgtgcggatcggcaccaccgggggcgatgcgatcgcgatcgccggcgaagcgccggtaacgatcgataagctgcgcacctcgttcgagcgctggctgccggagtatatgggcgggaaggcggcgtag

SEQ ID NO: 53031 - protein, 736 aa, Bradyrhizobium japonicum
MKNEPKITPELVAAHGLKPDEYERILKLIGREPTFTELGIFSAMWNEHCSYKSSRIHLRGLPTKAPWVIQGPGENAGVIDIGDGQAVVFKMESHNHPSYIEPYQGATTGVGGILRDVFTMGARPIACLNALSFGAPEHAKTRHLVSGVVAGVGGYGNSFGVPTVGGQVRFHTRYDGNILVNAMAVGLADADKIFYAAASGVNMPIVYLGSKTGRDGIHGASMASAEFDDKSEEKRPTVQVGDPFAEKLLLEACLEIMEKGCVIAIQDMGAAGLTCSAVEMGAKGDLGVDLDLDAVPTRETGMSAYEMMLSESQERMLMVLKPEKEKEAEAIFKKWGLDFAVVGYTTPSKRFVVKHGGDVMADLPIKELGDEAPLYDRPHVPSAALPVVHAREVMAPMGVGSALEKLIGTPDMCSKRWVWEQYDHVILGNTMQRPGGDAAVVRVQDGPKGLALTVDVTPRYCEADPFEGGKQAVAEAWRNITAVGGKPLAITDNLNFGNPERPEIMGQFVGCLKGISEACRTLDFPVVSGNVSLYNETNGRAILPTPSIGGVGLLDDFTKSASLAFKAEGEAILLIGETHGWLGQSVYLRDICGREEGAPPPVDLAAEKRNGDCVRGMIHAGTATAVHDLSDGGLLIALAEMAMASGIGAKLLAAPTSLVSQAYWFGEDQARYLVTVPETEAGRVLAKMRGCEVPCVRIGTTGGDAIAIAGEAPVTIDKLRTSFERWLPEYMGGKAA

SEQ ID NO: 53032 - DNA, 2223 bp, Brucella suis
  CDS (1)..(2223): transl_table=11
atgactatttccaatacgcgagacatcacgccggaactgatcgaagcgcatggtcttaagccggacgagtatcagcgcattcttgagctgatcgggcgcgagccgacttttaccgaactcggcattttctccgccatgtggaatgagcactgctcctacaagtcctccaagaaatggctacgcacacttccgaccagcggaccgcgcgtcattcaaggccccggtgaaaatgcaggcgtggtcgatattggcgatggcgattgcgtcgtcttcaagatggaaagccacaatcacccctcctatatcgagccttatcagggtgccgcgaccggcgtgggcggaatcttgcgcgacgtgttcaccatgggcgcgcgccccgttgcggcaatgaatgcgctgcgctttggcgaacccgaccatccaaaaacccgccacctcgtctcgggcgttgtttccggcgtcggcggctatggcaatgccttcggcgtgccgactgtcggtggcgaggtgaatttcgacaagcgctataacggcaatatcctcgtcaatgcctttgctgccggtcttgcccggcatgatggcattttcctgtcggaagccaagggcgtcggcctgccggtcgtctatctgggtgcaaagactggccgcgatggtgttggcggtgcaacaatggcatcggctgaattcgacgagtcgatcgaggaaaagcgccccaccgttcaggtgggcgatcctttcaccgaaaaatgcctgcttgaagcctgccttgaactcatggcttccggtgcggtcatcgccattcaggacatgggcgctgccggcctcacctgctcggcggtcgagatgggtgccaagggcgatctcggcatcgaactcattctcgaccatgttcccgttcgcgaagagaacatgaccgcctatgaaatgatgctttcggaaagccaggagcgcatgctcatggtgctgaagccggaaaaggaagcagaagcgcaggctatcttccgcaaatggggccttgatttcgcgattgtcggcaagaccacggacgatcttcgtttccgcgtcatccatcagggggaagaggtcgccaatctgccgatcaaggatctgggcgacgaagcgccggaatatgatcgcccgtggatggagccgggcaagcatgcgccgctgcctgccagcaatgtgccgcaggtggaagactattccgcagccctgctgaagctgatcggctcgcccgatctttcctcgcgccgctgggtctatgaacagtacgacacgctcattcagggcaattccttgcaggttccgggcggcgacgccggtgtaatccgtgtcgaaggccatgaaaccaaggctctcgccttctcttccgacgtgacgccgcgctattgcgaagccgatccgtttgaaggcggcaagcaggccgttgccgaatgctggcgcaacatcacggcgaccggcgcggagccgctggcctcgaccgataatctgaacttcggcaatcccgaaaagccggaaatcatgggccagctcgtcaaggctatcgaaggcattggcgaggcctgccgcgcactcgacttcccgatcgtgtccggcaatgtgtcgctttacaatgagaccaacggccaggccattctgccaacgccaacgattgcgggtgttggcctccttcccgactggtcgcaaatggcgaagatcggcggcatgcaggatggcgatacgctggttctgctcggtggtgacggaacgcatctcggccagtcggtctatctgcgtgaccttttcgaccgcgcggacggtcctgcgccttttgtcgatctggcgcttgaaaagcgcaatggcgaatttgtccgttctgccattcgcaacggtcaggtgacggcctgccatgatctttccgatggcggtctggcgattgccgttgccgaaatggcgatcaagtccggcaaaggcgcgacgctggacgctggtgacggcctgccgcacgccctgcttttcggtgaagatcaggcacgctatgttatttccgccacgcctgaaatggcaaagctcatcgcgcttaacgcggaaggcgcaggcgttccattccgcattttgggtacagttggcggcgaccggctgaaaatcagcaagaatgtcgatgtcagcgtggccgatctgacgcaggcttatgaaggttggttcccgaacttcatgaacggcgaactgaccggcaataactga

SEQ ID NO: 53033 - protein, 740 aa, Brucella suis
MTISNTRDITPELIEAHGLKPDEYQRILELIGREPTFTELGIFSAMWNEHCSYKSSKKWLRTLPTSGPRVIQGPGENAGVVDIGDGDCVVFKMESHNHPSYIEPYQGAATGVGGILRDVFTMGARPVAAMNALRFGEPDHPKTRHLVSGVVSGVGGYGNAFGVPTVGGEVNFDKRYNGNILVNAFAAGLARHDGIFLSEAKGVGLPVVYLGAKTGRDGVGGATMASAEFDESIEEKRPTVQVGDPFTEKCLLEACLELMASGAVIAIQDMGAAGLTCSAVEMGAKGDLGIELILDHVPVREENMTAYEMMLSESQERMLMVLKPEKEAEAQAIFRKWGLDFAIVGKTTDDLRFRVIHQGEEVANLPIKDLGDEAPEYDRPWMEPGKHAPLPASNVPQVEDYSAALLKLIGSPDLSSRRWVYEQYDTLIQGNSLQVPGGDAGVIRVEGHETKALAFSSDVTPRYCEADPFEGGKQAVAECWRNITATGAEPLASTDNLNFGNPEKPEIMGQLVKAIEGIGEACRALDFPIVSGNVSLYNETNGQAILPTPTIAGVGLLPDWSQMAKIGGMQDGDTLVLLGGDGTHLGQSVYLRDLFDRADGPAPFVDLALEKRNGEFVRSAIRNGQVTACHDLSDGGLAIAVAEMAIKSGKGATLDAGDGLPHALLFGEDQARYVISATPEMAKLIALNAEGAGVPFRILGTVGGDRLKISKNVDVSVADLTQAYEGWFPNFMNGELTGNN

SEQ ID NO: 53034 - DNA, 2187 bp, Campylobacter jejuni
  CDS (1)..(2187): transl_table=11
atggataaagaaaccataaaagcacataaaatcagcgatgaagaatatgcacaaattttagaaattttaggacgtgagccaaatttattagaacttggggttatttctgcgatgtggagtgagcattgctcttataaatccagtaaaaaatatcttaatggttttccaactaaagcaccttgggtgattcaaggtccaggtgaaaacgcaggggttattgatatcgggcaaggtatggcagcggtttttaaagtggaaagtcacaatcaccctagttttatcgaaccttttgcaggtgcggctacaggagtagggggaattttgcgtgatgtttttactatgggtgcaagagtggttgcggggctaaattctttaaaatttggcgatattcatgatgaaaaatgcggcaaacatcaaaaataccttgttaaaggcgtggtaaatggaatttctcattatggaaattgcatgggtgtgccaactataggcggagaatgtgcttttgatgagtgttttaatggaaatatcttagttaatgcctttgctttaggggtttgtaaaagtgaagatatcttttatgctaaggctgaaggtgtaggaaatcctgtgatttatgtgggttcaaaaacagggcgtgatggacttggtggagcggttatggcaagtgatagcttcaatgaagaaagcaaatctttgcgtcctacagtgcaaattggcgatcctttcagtgaaaaacttcttatggaggcttgtttagagctttttaaaaccgattatattgtgggtattcaagatatgggtgctgcagggcttacttcaagttcttttgaaatggcaggaagaagtggcagtggcatgaaactttacttagataaaactcctatgcgtgaaagcggtatgactccttatgagttaatgcttagcgaatctcaagaaagaatgcttatttgtgcgaaaaaaggctatgaagataaggttatagagattttcaaaaaatgggatttagatgctgtggttatgggtgaagttaccaatacaggaaaaatggagcttttttggcatgatgagcttgtaggacttattcctatcgagcctttaagtgaaaaagcgccgattttaagtcgccctacaagtgaaccaaaatatttaagtgaaattaaaaattataaatttgagttaaaatcaagcgttcaagagctttttatacaaatgcttcaaaatgaaaatattaataataaagcttttatttatgatcaatttgattcaagtgtgcaaaccaataccataaaagctgatggaagattaggtgctagtgttattcgtatcaaagaaaatggtgcaagtgtggctatggctatagaatgtaattcacgcttaaattatgtaaattctaaaataggagcagctttagcagtagcttctgcaggaagaaaagttgcttgtacgggggctaaacctttggcaataagcgattgtttaaattatggaaatccgcaaaatcctgaagtgatgtggcaattcgcacaaggttgcgaaggtattaaagaagcttgtaaagagttaaataccccagtagtaagcggcaatgtttcgctttataatgaaactgaaggcgtaagtatttatccaagtcctactatagtaagtgtaggggttttagaagatgcaaataaaaccctaaaagctagttttgaaaaagaaaatttaagcgtttatcttttgggtgaaagtttaggagaatttagtggatctatggtaatgaaaatccaagataaaaaagtatcaggaagtcttaaagagcttgattataaagctgaacttgcactttgggatttgctttataaagccaatcaaaattctttacttgagtgtgccaatagcgtaggaatagggggtattgctatgactttggcaaaaatgtttgctatttctagtgtgggtgcaaatttaacaagtgattttgatgatgaaaaaatgatttttgatgagagtgcaagtcgtgctataatagggcttagtaaagaaaatgaagaagcttttttaaatttagctaaagaatttggagtaaaagcttataaattaggtgtgagtacaagccaaaaacattttaaacttgatagcattgagttaagcaaggctgaacttgataagctttattttgaaagttttaaagagcaaatccaatga

SEQ ID NO: 53035 - protein, 728 aa, Campylobacter jejuni
MDKETIKAHKISDEEYAQILEILGREPNLLELGVISAMWSEHCSYKSSKKYLNGFPTKAPWVIQGPGENAGVIDIGQGMAAVFKVESHNHPSFIEPFAGAATGVGGILRDVFTMGARVVAGLNSLKFGDIHDEKCGKHQKYLVKGVVNGISHYGNCMGVPTIGGECAFDECFNGNILVNAFALGVCKSEDIFYAKAEGVGNPVIYVGSKTGRDGLGGAVMASDSFNEESKSLRPTVQIGDPFSEKLLMEACLELFKTDYIVGIQDMGAAGLTSSSFEMAGRSGSGMKLYLDKTPMRESGMTPYELMLSESQERMLICAKKGYEDKVIEIFKKWDLDAVVMGEVTNTGKMELFWHDELVGLIPIEPLSEKAPILSRPTSEPKYLSEIKNYKFELKSSVQELFIQMLQNENINNKAFIYDQFDSSVQTNTIKADGRLGASVIRIKENGASVAMAIECNSRLNYVNSKIGAALAVASAGRKVACTGAKPLAISDCLNYGNPQNPEVMWQFAQGCEGIKEACKELNTPVVSGNVSLYNETEGVSIYPSPTIVSVGVLEDANKTLKASFEKENLSVYLLGESLGEFSGSMVMKIQDKKVSGSLKELDYKAELALWDLLYKANQNSLLECANSVGIGGIAMTLAKMFAISSVGANLTSDFDDEKMIFDESASRAIIGLSKENEEAFLNLAKEFGVKAYKLGVSTSQKHFKLDSIELSKAELDKLYFESFKEQIQ

SEQ ID NO: 53036 - DNA, 2187 bp, Campylobacter jejuni
  CDS (1)..(2187): transl_table=11
atggacaaagaaaccataaaagcacacaaaattagcgatgaagaatatacacaaattttagaaattttaggacgtgagccaaatttattagagcttggggttatttctgcgatgtggagtgagcattgctcttataaatctagtaaaaaatatcttaatggttttccaactaaagcaccttgggtgattcaaggcccaggtgaaaatgcaggggttattgatatcgggcaaggtatggcagcagtttttaaagtagaaagtcacaatcaccctagctttattgaaccttttgcaggtgcggctacaggagtagggggaattttacgtgatgtttttactatgggtgcaagagtggttgcagggctaaattctttaaaatttggcaatattcataatgaaaaatgcagcaaacatcaaaaataccttgttaaaggtgtggtaaatggaatttctcattatggaaattgcatgggtgtgccaactataggtggagaatgtgcttttgatgagtgttttaatggaaatatcttagttaatgcctttgctttaggggtttgtaaaagtgaagatatcttttatgctaaggctgaaggtgtaggaaatcctgtgatttatgtgggttcaaaaacagggcgtgatggacttggtggagcggttatggcaagtgatagcttcaatgaagaaagcaaatctttgcgtcctacagtgcaaattggcgatcctttcagtgaaaaacttcttatggaagcttgtttagagctttttaaaactgattatattgtgggtattcaagatatgggtgctgcagggcttacttcaagttcttttgaaatggcaggaagaagtggcagtggcatgaaactttacttagataaaactcctatacgtgaaagcggtatgactccttatgagttaatgcttagcgagtctcaagaaagaatgcttatttgtgcgaaaaaaggctatgaagataaggttatagaaattttcaaaaaatgggatttagatgctgtggttataggtgaagttaccaatacaggaaaaatggagcttttttggcatgatgagcttgtagggcttattcctatcgagcctctaagtgaaaaagcgccgattttaagtcgtcctataagtgagccaaaatatttaagtgaaattaaagattataaatttgagttaaaattaagcattcaagagctttttatacaaatgcttcaaaatgaaaatattaacaacaaagcttttatttatgatcaatttgattcaagtgtgcaaaccaatactataaaagctgatggaagattaggtgctagtgccattcgtatcaaagaaaatggtgcaagtgtggctatggctatagaatgtaactcacgcttaaattatgtaaatcctaaaataggagcagctttagcagtagcttcagcaggaagaaaagttgcttgcacgggggctaagcctttggcaataagtgattgtttaaattatggaaatccgcaaaatcctgaagtgatgtggcaatttgcacaaggttgcgaaggcattaaagaagcttgtaaagagttaaataccccagtagtaagcggcaatgtttcactttataatgaaactgaaggcgtaagtatttatccaagtcctactatagtaagcgtaggggttttagaagatgcaaataaaaccttaaaagctagttttgaaaaagaaaatttaagtgtttatcttttgggtgaaagtttaggggaatttggtggatctatggtaatgaaaatccaagataaaaaagtatcaggaagtcttaaagagcttgattataaagctgaaattgcactttgggatttgctttataaagccaatcaaaattctttacttgagtgtgccaatagcgtaggaatagggggtattgctatgactttggcaaaaatgtttgctatttctagtgtaggtgcaaatttaacaagtggttttgatgatgaaaaaatgatttttgatgagagtgcaagtcgtgctatagtagggcttagtaaagaaaatgaagaagcttttttaaatttagccaaagaatttggagtaaaagcttataaattaggtgtgagtactagccaaaaacattttaaacttgatagcattgagttaagcaaggctgaacttgataagctttattttgaaagttttaaagagcaaatccaatga

SEQ ID NO: 53037 - protein, 728 aa, Campylobacter jejuni
MDKETIKAHKISDEEYTQILEILGREPNLLELGVISAMWSEHCSYKSSKKYLNGFPTKAPWVIQGPGENAGVIDIGQGMAAVFKVESHNHPSFIEPFAGAATGVGGILRDVFTMGARVVAGLNSLKFGNIHNEKCSKHQKYLVKGVVNGISHYGNCMGVPTIGGECAFDECFNGNILVNAFALGVCKSEDIFYAKAEGVGNPVIYVGSKTGRDGLGGAVMASDSFNEESKSLRPTVQIGDPFSEKLLMEACLELFKTDYIVGIQDMGAAGLTSSSFEMAGRSGSGMKLYLDKTPIRESGMTPYELMLSESQERMLICAKKGYEDKVIEIFKKWDLDAVVIGEVTNTGKMELFWHDELVGLIPIEPLSEKAPILSRPISEPKYLSEIKDYKFELKLSIQELFIQMLQNENINNKAFIYDQFDSSVQTNTIKADGRLGASAIRIKENGASVAMAIECNSRLNYVNPKIGAALAVASAGRKVACTGAKPLAISDCLNYGNPQNPEVMWQFAQGCEGIKEACKELNTPVVSGNVSLYNETEGVSIYPSPTIVSVGVLEDANKTLKASFEKENLSVYLLGESLGEFGGSMVMKIQDKKVSGSLKELDYKAEIALWDLLYKANQNSLLECANSVGIGGIAMTLAKMFAISSVGANLTSGFDDEKMIFDESASRAIVGLSKENEEAFLNLAKEFGVKAYKLGVSTSQKHFKLDSIELSKAELDKLYFESFKEQIQ

SEQ ID NO: 53038 - DNA, 2187 bp, Carboxydothermus hydrogenoformans
  CDS (1)..(2187): transl_table=11
gtggctaagtggcgggagatgggcttaaccgacgaagaataccggcgaattgtcgagtatctgggccgcgaaccaaatgaagtggaactgggcatgtgtgcggtgatgtggtcggagcactgcagctataaaagttccaagattcatttaaaaaagcttcccaccaggggtccggcggtggtgcaggggcccggggaaaatgccggagtggtcgatatcggagacggactgggaattgcctttaaaattgaaagccataaccacccgtcagccatcgagccctaccagggagcggcaacgggagtcggggggataatccgggacatctttgccatgggagcgcggccgatagcccttttggattcccttcgctttggcaaacttcactcacccagggttcgccacctttttaccggcgtggtggccgggattgcgggttacggtaactgcatcgggattcctacggtggcgggggatgtttattttcaggaatcgtatgaagaaaatcctctggtaaatgcgatgtgtgtgggcatcgtggagctttccaaactgaaaaaaggtgtagccacgggggtaggcaatcctgttcttttggtaggagcgactaccgggcgcgacgggattcacggagccacctttgcttccgaagagctgtcccaggacggggaggataaacggccttcggtgcaggtgggagacccctttatggaaaagcttttactggaagcatgtctggaagctctggaatacggtcacatcgttggcatgcaggatctgggcgccgccggacttaccagttcttcatcggaaatggccgcccgggggaaatcgggtatccggctctacctggacagggtgcccctccgggaagaggggatgaccccttacgaaattatgctttccgaatcccaggaacggatgcttttagtggtggaaaaagggtatgaggatgaaatcatcaaaatctttaaaaagtgggatttaaatgcggtggtggtgggagaaattaccgatggcgaggaaatcgaggtattttttgacggggaatgcgttgcaaaacttccctaccgcttgctaaccgaggaggctcccgtttacgaccggccttaccggattccggagattaaaaacctgcaaagcataaacccggctggggtggattgcggagaggctctgcgccggcttttacaaagccccaatattgccaggaaaagttatgtgtacgaacagtacgaccaccaggtaggggttaatacggtagtgaaacccggttactccgatgccgcagttttaagaatcaagggtacgaaaaagggcattgccgtaaaaaccgacggcaacggccgctatgtttaccataatccccgggaaggggccaaacgggcggtactggagacggctttaaatttggcggttaccggggcaaaacctctgggtcttaccaactgcttgaactttggcaacccggaaaagccggaaattatggggcagtttgtggaagtaattgcggggatgaaggaagcgtgtgaaattttaaatattcccgtaaccggcggcaacgttagcttttacaacgaaaccggtgaaaaagctatttaccctacaccggttatcgggatggtgggtttaattgacgatttggaaacgggacttattcccatggcttttcagaccgagggagatttaatttacctcctgggtgaacccaccggggagctcgggcaaagcgagtttttaaaggagttttttggggacgttctggttccggtaccaccggtggaccttcaggaagggagaaggataatcgagcttttacccttgttaaaaaagcaaggactcattaactctgctcatgatgttagcgatggcggtttggcggtttccctttgtgaggcagcctttgccggggagctgggggtaaacatcgattttaccacttcccttctgccgcaggagtttcttttttcggaaaaagttggcctggtaatagtatcggtatctccggaaaaagaagaggagtttataaagtcagtaaaaaatgccggggtttttgttttaaagcttggccgggtgaacgggaaggatgagatagaaatttgcctaaacggtcagagggtcatccaagaaaagctatcggagttaaaagccttgtatgaggggggcctaagttgggctttgaaataa

SEQ ID NO: 53039 - protein, 728 aa, Carboxydothermus hydrogenoformans
MAKWREMGLTDEEYRRIVEYLGREPNEVELGMCAVMWSEHCSYKSSKIHLKKLPTRGPAVVQGPGENAGVVDIGDGLGIAFKIESHNHPSAIEPYQGAATGVGGIIRDIFAMGARPIALLDSLRFGKLHSPRVRHLFTGVVAGIAGYGNCIGIPTVAGDVYFQESYEENPLVNAMCVGIVELSKLKKGVATGVGNPVLLVGATTGRDGIHGATFASEELSQDGEDKRPSVQVGDPFMEKLLLEACLEALEYGHIVGMQDLGAAGLTSSSSEMAARGKSGIRLYLDRVPLREEGMTPYEIMLSESQERMLLVVEKGYEDEIIKIFKKWDLNAVVVGEITDGEEIEVFFDGECVAKLPYRLLTEEAPVYDRPYRIPEIKNLQSINPAGVDCGEALRRLLQSPNIARKSYVYEQYDHQVGVNTVVKPGYSDAAVLRIKGTKKGIAVKTDGNGRYVYHNPREGAKRAVLETALNLAVTGAKPLGLTNCLNFGNPEKPEIMGQFVEVIAGMKEACEILNIPVTGGNVSFYNETGEKAIYPTPVIGMVGLIDDLETGLIPMAFQTEGDLIYLLGEPTGELGQSEFLKEFFGDVLVPVPPVDLQEGRRIIELLPLLKKQGLINSAHDVSDGGLAVSLCEAAFAGELGVNIDFTTSLLPQEFLFSEKVGLVIVSVSPEKEEEFIKSVKNAGVFVLKLGRVNGKDEIEICLNGQRVIQEKLSELKALYEGGLSWALK

SEQ ID NO: 53040 - DNA, 2220 bp, Caulobacter crescentus
  CDS (1)..(2220): transl_table=11
atgagcacctcctccacgccctccgcgaagcccatggccgagatggccgccgagttcggcctgaaacccgccgaatatgacgttgtcctcaagcgcctggggcgtgagcccaacctggtggaactgggcgtcttttcggtgatgtggtccgagcactgctcgtacaagtcctcgaagaaccagctgaagaagttcccgatcgacgggccgcgcgtgatctgcggtcctggcgagaacgccggcgtcatcgatatcggcgacggcgacgcgatcatcttcaagatggagagccacaaccacccctcgtacatcgagccctatcagggcgcggcgacgggcgtgggcggcatcatgcgcgacgtcttcacgatgggcgcgcggccgatcgccctcttgaacgccctgcgctttggtgaccccagccatccgaagaccaagcgtctggtcgacggcgtcgtcgccggcatcgccggctacggcaactgcgtgggcgtgcccaccgtcgcgggcgagaccaacttccacaagggctacaacggcaacatcctggtcaacgccatgtgcgtgggcctggccaaggccgacagcatcttctactcggccgccccgggcccgggcctggcggtcgtctatttcggctccaagaccggccgcgacggcatccacggcgcgaccatgtcctcggccgagttctcagaggactccgaagagaagcgccccaccgtccaggtcggcgaccccttcgccgagaagctgctgatcgaggccacgctggagctgatggccaccggcgcggtcgccgccatccaggacatgggcgcggcgggcctgacctcctcgtccgtcgagatggccggcaagggcggcgtcggcatcgagctgaacatggacatggtcccgcagcgcgagaccggcatgtcggcctacgagatgatgctgtcggaaagccaggagcgcatgctggcggtcctcaagcccggccgcgagcaggacggccacgccatcttcgaaaagtggggcctggacgccgccgtcatcggctacaccaccgacaccggccgtctggtgctgaagcaccacggcgagaccgtctgcgacgtgccgctggccccgctgttcgacgacgcgccgctatatgaccgtccgtgggtgcaaccggccctgcagccgcgcctcgacccggccgccgtccccgctccgacgaactggaacgaagcggtgctgaagatcatcggctgcccggacatggcctccaagcgctggctgtgggagcagtacgaccgccacgtcatggccgacacgctggaagacagcgccaccggctgcgacgccggcatcgtgcgcatccacggcacgggcaaggccatcgccgtgaccagcgactgcaccccgcgctatgtccaggcggacccctatgagggcggcaagcaggcggtcgcggaagcctggcgcaacctgacggccgccggcgccctgccgatcgccatcaccgacaacctgaacttcggcagccccgaaaagcccgagaccatgggccagatcgtgcgcgccaccgacggcatggccgaggcctgccgcgcgctggacttcccggtcgtgtcggggaacgtgtcgctctacaacgagaccaacggcgtcgccattccgccgacgcccaccgtcggcggcgtgggcctgctggaggactacgacctgcgcacgggctttggcaatgtggccgagggcgacaccctggtgctggtcggcgagacgcgcggcgaactgggcgcctcgatctatctgcgtgagattctgggtcgcgaagacggcgccccgccgccggtcgacctggctctggagcgcaagaccggcgacttcgtgcgcggcctgatcagctcgggtctcgtcgcgggcgtccacgacctgtcggacggcggtctgctggtcgcggcggccgacgtggccctggccagcaagatcggcgtcaccctgaacgccaccagccagacgcatgctcacgcctatctgctgggcgaagaccaagcccgctatctgatcgccacgcccgatccggacgcggtgctggaagcggcgaaagaggcgggcgtgcacgccaacgtcgcgggcgtcgcgggcggggaagcgttcgcgtcggatggtctgttcagcgtctcgctggacgccctgcgcgccgcgcacgaggcttggctgccgggctatatgagcgcgccgaaggcctga

SEQ ID NO: 53041 - protein, 739 aa, Caulobacter crescentus
MSTSSTPSAKPMAEMAAEFGLKPAEYDVVLKRLGREPNLVELGVFSVMWSEHCSYKSSKNQLKKFPIDGPRVICGPGENAGVIDIGDGDAIIFKMESHNHPSYIEPYQGAATGVGGIMRDVFTMGARPIALLNALRFGDPSHPKTKRLVDGVVAGIAGYGNCVGVPTVAGETNFHKGYNGNILVNAMCVGLAKADSIFYSAAPGPGLAVVYFGSKTGRDGIHGATMSSAEFSEDSEEKRPTVQVGDPFAEKLLIEATLELMATGAVAAIQDMGAAGLTSSSVEMAGKGGVGIELNMDMVPQRETGMSAYEMMLSESQERMLAVLKPGREQDGHAIFEKWGLDAAVIGYTTDTGRLVLKHHGETVCDVPLAPLFDDAPLYDRPWVQPALQPRLDPAAVPAPTNWNEAVLKIIGCPDMASKRWLWEQYDRHVMADTLEDSATGCDAGIVRIHGTGKAIAVTSDCTPRYVQADPYEGGKQAVAEAWRNLTAAGALPIAITDNLNFGSPEKPETMGQIVRATDGMAEACRALDFPVVSGNVSLYNETNGVAIPPTPTVGGVGLLEDYDLRTGFGNVAEGDTLVLVGETRGELGASIYLREILGREDGAPPPVDLALERKTGDFVRGLISSGLVAGVHDLSDGGLLVAAADVALASKIGVTLNATSQTHAHAYLLGEDQARYLIATPDPDAVLEAAKEAGVHANVAGVAGGEAFASDGLFSVSLDALRAAHEAWLPGYMSAPKA

SEQ ID NO: 53042 - DNA, 2280 bp, Chlorobium tepidum
  CDS (1)..(2280): transl_table=11
atgagcaccgaacctgaagtgaacctgaagctggcccaggagcatggcctgaacgaagaggagtacgctaagatttgtgaaatccttggccggacgccctcctttaccgagttgggcatctactcagtgatgtggtccgagcattgcagctacaagaactccatcgccgtgctcaagaccctgccgcgcgacggtgcttcgctgctcacgcaggcaggcgaggagaacgctggccttgtcgatattggcgacaacctcgctgtggcattcaagatcgagtcgcacaaccacccttcagcagtcgaaccttaccagggcgcggccacgggtgtcggtggtatccatcgcgacatcttcacgatgggcgcaaggccggtggcgtcgcttgactcgctgcgcttcggctcgccgcgcgaccctcgtgtgcgttacctcgtggacggcgtggtgcgaggcatcggcgactacggcaactcgttcggggtgccgaccgttggcggcgaaatctacttcgaggattgctacaccggcaacccgctggtcaacgtcatgtcggtcggcctcgtggagcatcacaaaaccgtgagcgccacggcctggggcaagggcaatccggtactgatcgtcggttcatcgactggccgcgacggcatccacggcgcaaccttcgcatcggaagacctcagcgaggcatcggaagacaagcgaccgagcgtgcaggtgggcgatcccttcgccgagaagctgctgctcgaagccacgctcgaagcgatcgcgaccggcgcagtggtaggcttgcaggacatgggcgcagctgggctgaccagctccacctcagagatgagcgcgcgcggcatcgagaaaaccggcagcggcggcatcgagatcgacctcgacttgacgcccgcccgcgaaaagggcatgaccgcctacgagctgatgctttcggagtcacaggagcggatgctgatcgtagccgagaaagggcgcgagcatgagatcatcgacgtctataaaaagtgggatgtgagcgccgtggtgatcggacaggtgacggacgacaacatgctgcgcgtacgccatcacggcgaggtggtcgcagagattccggccacctcactcgtactcggcggcggcgcgccggtctacatccgcgaggcagtcgagaaaaagcctgacactccggcggcagacctcgtggccgacgactcgctcgacttcaaggcgctctcgctgcaactgctctcccgcccgaacatcgccagcaaggcgtgggtctaccagcaatacgactcgatggtgcagaccaacaccgtcaccccggcgggccagaccgacgcggcggtcatccgcatcaagggcaccaaaaagggtctcgcaatgaagaccgactgcaactcgcgctacgtctatctcaatccgaaagcgggcggcgcgatcgccgtggccgagtgcgcgcgcaacatcgcctgcaccggcgcaaaaccgctcgccgtgaccaactgcctgaacttcggcaatccctacaagccggaggtttacttccagttcaaaagcgccgtcgaaggcataggcgatgcctgccgcatgttcgacacacccataaccggcggtaatgtaagcttctacaacgagacctcgcttggcggtggacgcacggcgatctatccgacaccgaccatcggcatgatcggtctgctcgacaatatcgacaatctggtggaatcgaccttccgaaaggcgggcgacgccatcgtgctgctcggcgctccggaactctcgctcgacggctcggagtacctcgtgatgcaatacggcacgccgggcacagactctcccgctgtcgatctgaaccatgagaaaaaccttcaggaactgctcgtcacgctcgcctcaaagaagctcatcaactctgcgcacgacgtttcagatggtggtcttgcggtcacgcttgccgaaaagtcgatcatgaaccgcgagcggatgctcggcttcgaggtcgatctcgaatgctcctgcaaggagggcacggccatccagaagcagctcttctctgaggcgcaggggcgcgtagtgatctcggtcgatcccggcagggtcggggcggtcatcgaagaggccgaccgcctgaacataccaggacgtgttatcggcaaggtgacgccagagggcgcaagcatcgccgtaaacggcaagcctgtggcggagtttatgattgacgaactgctgcacgcttacgggcatgcgcttgaatcggcgttgcatctcgaagaattgtaa

SEQ ID NO: 53043 - protein, 759 aa, Chlorobium tepidum
MSTEPEVNLKLAQEHGLNEEEYAKICEILGRTPSFTELGIYSVMWSEHCSYKNSIAVLKTLPRDGASLLTQAGEENAGLVDIGDNLAVAFKIESHNHPSAVEPYQGAATGVGGIHRDIFTMGARPVASLDSLRFGSPRDPRVRYLVDGVVRGIGDYGNSFGVPTVGGEIYFEDCYTGNPLVNVMSVGLVEHHKTVSATAWGKGNPVLIVGSSTGRDGIHGATFASEDLSEASEDKRPSVQVGDPFAEKLLLEATLEAIATGAVVGLQDMGAAGLTSSTSEMSARGIEKTGSGGIEIDLDLTPAREKGMTAYELMLSESQERMLIVAEKGREHEIIDVYKKWDVSAVVIGQVTDDNMLRVRHHGEVVAEIPATSLVLGGGAPVYIREAVEKKPDTPAADLVADDSLDFKALSLQLLSRPNIASKAWVYQQYDSMVQTNTVTPAGQTDAAVIRIKGTKKGLAMKTDCNSRYVYLNPKAGGAIAVAECARNIACTGAKPLAVTNCLNFGNPYKPEVYFQFKSAVEGIGDACRMFDTPITGGNVSFYNETSLGGGRTAIYPTPTIGMIGLLDNIDNLVESTFRKAGDAIVLLGAPELSLDGSEYLVMQYGTPGTDSPAVDLNHEKNLQELLVTLASKKLINSAHDVSDGGLAVTLAEKSIMNRERMLGFEVDLECSCKEGTAIQKQLFSEAQGRVVISVDPGRVGAVIEEADRLNIPGRVIGKVTPEGASIAVNGKPVAEFMIDELLHAYGHALESALHLEEL

SEQ ID NO: 53044 - DNA, 2277 bp, Corynebacterium ammoniagenes
  CDS (1)..(2277): transl_table=11
atgactgtttccaatgacacagtagataatgcaaaggccactcccgagctagaccagccgtgggaagaactcggcttaaagcaagacgaatacgacaagattgtaggcatcttgggccgccgcccaaccgatgctgagctgacggtttactccgtgatgtggtcggagcactgctcttacaagtcttccaagacccacctacgctactttggcgagaccaccactgaggaaatggcgtcgaagattcttgccggtatcggtgagaacgctggtgtcgttgacatcggcgacggtgacgcagtgaccttccgcgtcgaatcccacaaccacccatccttcgtcgagccttaccagggtgccgcgaccggtgttggcggcatcgtccgcgacatcatggcgatgggtgcacgtccaatcgcagtgatggatcagctgcgcttcggcccagctgatgccccggataccgcacgtgttctgccgggcgttgtttccggcatcggcggttacggcaactccctcggcctgccgaacatcggcggcgagaccgtctttgatgagtcttatgccggcaacccactggtcaacgcactgtgcgtgggtaccttgcgcgtggaagacctgaagctggcttttgcttccggtactggcaacaaggtgatgctctttggctcccgcacgggcctcgacggcatcggcggcgtatccgttttgggttctgcttccttcgaagaaggcgaagagcgcaagcttcctgcagtccaggtcggcgacccattcgcggaaaaagtcctcatcgaatgctgcctggagctctacgctgcgggcgtcgttgtcggtattcaggaccttggtggcggtggcctcgcatgtgcgacctctgagctggcagcagctggcgacggcggcatggtggtcaacctggataatgttccactgcgtgcagagaacatgtccgccgcagaaatcctggcttccgaatcccaggagcgcatgtgtgctgttgtctccccagataacgtggagaagttccgcgagatctgtgaaaagtgggacgtaacgtgtgctgaaatcggtgaagttaccgataagaaagacacctacctcgtgtaccacaacggtgagctggtagtagacgctccgccatcaactatcgatgaaggccctgtctacgagcgcccatacgcacgccctcagtggcaggatgagatccagcaggctccggaaattgcacgtccggaatccttggtacaggcattcaaggacatggtgtcctccccagctctgtcatcgcgtgcatttatcactgagcagtatgaccgctacgtgcgcggtaacaccgtcaaggcgaagcagtctgactccggcgttctgcgtatcaatgaggaaacttctcgcggtgtcgcaatttctgccgatggctccggtcgctacaccaagctggacccaaacatgggtgcacgtttggcgctggctgaggcataccgcaacgttgctgtgaccggcgcacgaccatatgcggtgaccaactgcttgaacttcggttctccagaaaacaccgacgtgatgtggcaattccgcgaggccgttcacggtctggctgacggttctaaggaactgaatatcccagtctccggcggtaacgtctccttctacaaccagactggtgatgagccaattctgccgaccccagttgttggcgtgctcggtgtcattgatgatgttcacaaggcactggcacatgacttgggcggcattgatgagcctgaaaccctgattctgcttggtgagaccaaggaagaattcggcggctccatctggcagcaggtctccggcggcggcctgcagggtctgccaccacaggtggatctggcgaatgaggcaaagctggcggacttcttcgtcggcaacacctccgttgcagcctcccacgacctctctgagggcggtctggctatcgcggcgtttgagatggcgcaaaagaacaacgtcggcgtcgaccttgatttgagcgttgtacacgaggatgcactgaccgcactgtttagtgagtccgcatcgcgtgttctgatttccaccgcgtctgaccacctcgatggaatcttgcagcgtgcttccgagctgggcattccagctgtcgtggtaggaaccaccaatgattccggcaacatcaccttcgctggtgaagaagttgctaccgctgagctgcgcgaggcatggtctgcaaccttgccaaacctgtttggccacgctgttggcgctaattccgtagtcgaataa

SEQ ID NO: 53045 - protein, 758 aa, Corynebacterium ammoniagenes
MTVSNDTVDNAKATPELDQPWEELGLKQDEYDKIVGILGRRPTDAELTVYSVMWSEHCSYKSSKTHLRYFGETTTEEMASKILAGIGENAGVVDIGDGDAVTFRVESHNHPSFVEPYQGAATGVGGIVRDIMAMGARPIAVMDQLRFGPADAPDTARVLPGVVSGIGGYGNSLGLPNIGGETVFDESYAGNPLVNALCVGTLRVEDLKLAFASGTGNKVMLFGSRTGLDGIGGVSVLGSASFEEGEERKLPAVQVGDPFAEKVLIECCLELYAAGVVVGIQDLGGGGLACATSELAAAGDGGMVVNLDNVPLRAENMSAAEILASESQERMCAVVSPDNVEKFREICEKWDVTCAEIGEVTDKKDTYLVYHNGELVVDAPPSTIDEGPVYERPYARPQWQDEIQQAPEIARPESLVQAFKDMVSSPALSSRAFITEQYDRYVRGNTVKAKQSDSGVLRINEETSRGVAISADGSGRYTKLDPNMGARLALAEAYRNVAVTGARPYAVTNCLNFGSPENTDVMWQFREAVHGLADGSKELNIPVSGGNVSFYNQTGDEPILPTPVVGVLGVIDDVHKALAHDLGGIDEPETLILLGETKEEFGGSIWQQVSGGGLQGLPPQVDLANEAKLADFFVGNTSVAASHDLSEGGLAIAAFEMAQKNNVGVDLDLSVVHEDALTALFSESASRVLISTASDHLDGILQRASELGIPAVVVGTTNDSGNITFAGEEVATAELREAWSATLPNLFGHAVGANSVVE

SEQ ID NO: 53046 - DNA, 2292 bp, Corynebacterium efficiens
  CDS (1)..(2292): transl_table=11
atgagcacgattttcaacgacaccgtcgaggcagcagccgagaaccccgatctcgagcagccctacgccgaactcggcctcaaggacgatgagtacgcccgcatcaaggagatcctgggacgccgccccaccgatgcggagctgaccgtctactccgtcatgtggtccgagcactgctcctacaagtcctccaaggtgcacctgcgctacttcggtgagaccaccaccccggagatggccgagaagatcctcgccggcatcggcgagaacgccggcgtggtcgacatcggagacggcaacgccgtgaccttccgcgtggaatcccacaaccacccctccttcgtcgaaccccaccagggtgccgcaaccggcatcggtggcatcgtccgcgacatcatggccatgggtgcacgcccgatcgcagtcatggaccagctgcgtttcggcgccatggacaacccggacacccagcgtgtgctgcccggcgtggtcagcggcatctcccactacggcaactgcctcggcctgcccaacatcggtggcgagaccgtcttcgacgattcctacgccggtaaccccctggtcaacgccctggccgtgggtaccctcaaggtcgatgacctgaagttggccttcgcctccggcgccggcaacaaggtcatgctgttcggttcccgcaccggcctcgacggcatcggtggcgtctctgtcctgggttccgcctccttcgaggagggcgaggagcgcaagcttccggccgtccaggtcggtgaccccttcgccgagaaggtcctcatcgaatgctgcctggagctgtaccaggccggagtggtcgtgggtatccaggacctcggtggcggtggccttgcgtgcgccacctccgagctggccgccgccggtgacggtggcatgcgcgtcaacctcgacgccgtgcccctgcgcgccgagaagatgtccgcagccgagatcctcgcctccgagtcccaggagcgcatgtgcgccgtggtcaccccggagaacgtggagaagttcaagcagatctgtgccaagtgggatgtcaccgtcgccgagatcggtgaggtcaccgacgagaaggaccgctacctcgtggtccacaacggtcagaccgtcatcgacgcaccggcctccaccatcgatgagggcccggtgtacaaccgccccgtcgagcgccccgccaaccaggatgagatccagaccctcggtgggcttgagcgcccggacaccgccgagggtatccgtgacgcctggttcaagctcgtgtcctccccggcactgtgctcccgcgcgttcatcaccgagcagtacgaccgctacgtccgcggcaacaccgtccaggcaaaggatgccaacgccggtgtgctgcgtatcgacgaagagaccaaccgcggcgtcgccatctccgccgacgcctccggccggtacacccgcctcgacccccgcaccggcgcacgcctggcactcgccgaggcctaccgcaacgtggtctccaccggtgcccgtccggtcgccgtgaccaactgcctcaacttcggttcccccgagaacgccggcgtcatgtggcagttcaaggaggccgtccacgggcttgccgacggtgccaaggagatgggtatccccgtctccggcggtaacgtctccttctacaaccagaccggcgacgagccgatcctcccgaccccggtcgtgggtgtcctcggtgtcctggatgatgtggaaaagaccatcggcaaccgcctgcctgccggtgagcaggagctgtacctgctgggtgagaccctcgacgagttcggtggatccatctggcagcaggtctccggcgcgggcctgtccggtctgccgccgcagatcgacctggccaatgagcagcgactggctgacctgctggttccggctgccgacctcgttggcgcagcccatgacctctccgagggtggcctcggccagaccctcgccgagctggcgatccacgccggccgtggcctggatgtggatctcacgcaggtccatgaggacctgttcaccgcactgttctccgaatccgcctcccgcatcgtcgtggccaccacccgtggtgatgaactggttgcgcgcgctcaggagctcggtgtcccggtgaccaggctcggtgtcaccaacgactccggtgtcatcaccgtgcgtggtggcgacctcagcgtcgaggtatccgtcgaggagcttcacgacgcatggtccaacaccctgcccgaggcattcggacatgctgtgggagcgaactccgtcgttgaataa

SEQ ID NO: 53047 - protein, 763 aa, Corynebacterium efficiens
MSTIFNDTVEAAAENPDLEQPYAELGLKDDEYARIKEILGRRPTDAELTVYSVMWSEHCSYKSSKVHLRYFGETTTPEMAEKILAGIGENAGVVDIGDGNAVTFRVESHNHPSFVEPHQGAATGIGGIVRDIMAMGARPIAVMDQLRFGAMDNPDTQRVLPGVVSGISHYGNCLGLPNIGGETVFDDSYAGNPLVNALAVGTLKVDDLKLAFASGAGNKVMLFGSRTGLDGIGGVSVLGSASFEEGEERKLPAVQVGDPFAEKVLIECCLELYQAGVVVGIQDLGGGGLACATSELAAAGDGGMRVNLDAVPLRAEKMSAAEILASESQERMCAVVTPENVEKFKQICAKWDVTVAEIGEVTDEKDRYLVVHNGQTVIDAPASTIDEGPVYNRPVERPANQDEIQTLGGLERPDTAEGIRDAWFKLVSSPALCSRAFITEQYDRYVRGNTVQAKDANAGVLRIDEETNRGVAISADASGRYTRLDPRTGARLALAEAYRNVVSTGARPVAVTNCLNFGSPENAGVMWQFKEAVHGLADGAKEMGIPVSGGNVSFYNQTGDEPILPTPVVGVLGVLDDVEKTIGNRLPAGEQELYLLGETLDEFGGSIWQQVSGAGLSGLPPQIDLANEQRLADLLVPAADLVGAAHDLSEGGLGQTLAELAIHAGRGLDVDLTQVHEDLFTALFSESASRIVVATTRGDELVARAQELGVPVTRLGVTNDSGVITVRGGDLSVEVSVEELHDAWSNTLPEAFGHAVGANSVVE

SEQ ID NO: 53048 - DNA, 2289 bp, Corynebacterium glutamicum
  CDS (1)..(2289): transl_table=11
atgagcacttttgtcaatgacaccgtcgaagacgcaatcaagacccctgagctggatcagccatttgaggctcttggtctgaaagacgacgagtacgcgcgcatcaaggaaatccttggccgccgcccaaccgacgccgagctgaccgtttactccgtcatgtggtcggagcactgctcctacaagtcctccaaggttcacctgcgttacttcggtgaaaccaccactgaggaaatggcttccaagattcttgccggcatcggcgagaacgctggtgtggtcgacatcggagacggcaacgccgtgaccttccgcgtggagtcccacaaccacccatccttcgtagagccacaccagggcgctgcgaccggcgtcggcggcatcgtccgcgacattatggctatgggcgcacgcccaatcgctgtgatggatcagctgcgtttcggtgcactggacaacccagacacccagcgtgtgcttcctggcgttgttgacggcatttcccactacggcaactgcctcggcctgccaaacatcggtggcgaaaccgtcttcgacgattcctacgcaggtaacccactggtcaacgcactgtgcgtgggtaccctcaaggtggaagacctcaagcttgcattcgcatccggcaccggcaacaaggtgatcctgttcggttcccgcaccggccttgatggcatcggtggcgtgtccgtcctgggttccgcatccttcgaagaaggcgaagagcgcaagctcccagctgttcaggttggcgatcctttcgcagagaaggtactcatcgagtgctgcctcgagctgtacaaggctggcgtcgtggtcggtattcaggacctcggtggcggcggacttgcgtgtgcaacctctgagctggcagccgcaggcgacggcggcatgcgcgtcaacctagacaacgtcccactgcgcgcagagaacatgtctgcagctgaaatcctggcttccgagtcccaggagcgcatgtgtgctgttgtcacccctgaaaacgttgagcgtttcctcgagatctgtgcaaagtgggatgtcacctgcgcagaaatcggcgaagttaccgacgagaaggaccgctacgttgtggtccacaacggtgaagttgttatcgacgcacctccatcaaccatcgatgaaggccctgtctacaaccgcccagttgctcgccctgagaaccaggacgaactgcagctcgaaggcgagatcgctcgcccagtcgacgttgaagagatcaaggctgcttggctgaagcttgtcgcttcaccagcacttgcatcccgcgcgtttatcaccgagcagtacgaccgctacgtccgcggcaacaccgttcaggcaaagaacgccaatgctggcgtcttgcgtatcgacgaagagaccaaccgtggcgttgcgatctccgccgacgcatccggccgttacaccaagctcgagccaaacactggcgcgcagcttgcactggctgaggcttaccgcaacgtggtctccaccggtgcacgcccagtggctgtcaccaactgcctgaacttcggttccccagaaaacgctggtgttatgtggcagttcaaggaagcagtccacggtctggcagacggatccaagcttttgggcattccagtgtccggcggtaacgtctccttctacaaccagactggtgacgagcccatcctgccaaccccagtcgtgggtgttttgggagtcttggacaacgtcgagcagagcatcggcaacgtcctcccatccgaggacaacgatctctacctcctgggtgagaccttcgatgagttcggtggctccatctggcagcaggtttctggcgctggcctcaacggtctgccaccagtagttgacctgctcaacgagcagcgtcttgcagacctgttcgtcggttctgatctgtttgctgcatcccacgatctgtctgagggcggccttggccagaccctcgcagagcttgcgatccacgcagacaagggcatggatgttgatctctcccagatccacccatccctgttcacctcactgtttgctgagtccgcttcccgcatcgtggttgcaaccaaccgcggcgaagagttggaaaagcgcgcagcagagctgggtgttccagtgttcaagctgggctgcaccaacgattcagccgtcatcgctgtcaagggcgcagacgttgagttcactgtttccgtggaggaactccgcgaagcatggaccaacactttgcctgaggccttcggtcacgcagttggagctaacgcagtagttgcataa

SEQ ID NO: 53049 - protein, 762 aa, Corynebacterium glutamicum
MSTFVNDTVEDAIKTPELDQPFEALGLKDDEYARIKEILGRRPTDAELTVYSVMWSEHCSYKSSKVHLRYFGETTTEEMASKILAGIGENAGVVDIGDGNAVTFRVESHNHPSFVEPHQGAATGVGGIVRDIMAMGARPIAVMDQLRFGALDNPDTQRVLPGVVDGISHYGNCLGLPNIGGETVFDDSYAGNPLVNALCVGTLKVEDLKLAFASGTGNKVILFGSRTGLDGIGGVSVLGSASFEEGEERKLPAVQVGDPFAEKVLIECCLELYKAGVVVGIQDLGGGGLACATSELAAAGDGGMRVNLDNVPLRAENMSAAEILASESQERMCAVVTPENVERFLEICAKWDVTCAEIGEVTDEKDRYVVVHNGEVVIDAPPSTIDEGPVYNRPVARPENQDELQLEGEIARPVDVEEIKAAWLKLVASPALASRAFITEQYDRYVRGNTVQAKNANAGVLRIDEETNRGVAISADASGRYTKLEPNTGAQLALAEAYRNVVSTGARPVAVTNCLNFGSPENAGVMWQFKEAVHGLADGSKLLGIPVSGGNVSFYNQTGDEPILPTPVVGVLGVLDNVEQSIGNVLPSEDNDLYLLGETFDEFGGSIWQQVSGAGLNGLPPVVDLLNEQRLADLFVGSDLFAASHDLSEGGLGQTLAELAIHADKGMDVDLSQIHPSLFTSLFAESASRIVVATNRGEELEKRAAELGVPVFKLGCTNDSAVIAVKGADVEFTVSVEELREAWTNTLPEAFGHAVGANAVVA

SEQ ID NO: 53050 - DNA, 2244 bp, Deinococcus radiodurans
  CDS (1)..(2244): transl_table=11
atgacctctcaaagtttacgtgaccaggccgccaccttcggcctcaccactgaggaatacgacctgttcgtctcgcaactgggccgcgaacccaatgcgctggaagccgccatcgtcggcgcaatgtggtcggagcactgcggctacaaaaacagccgccccctcttccgcgctttcccgaccaccggcccgcaggtgttgcaaggccccggcgagaacgcgggcgtggtggacatcggcgacggctggggcgtggcgttcaagatggagtcgcacaaccacccctcggcggtggaacccgtgcagggcgcggcgaccggcgtgggcggcatcctgcgcgacatttttgcgatgggggcgcggcccttcgcggtgctcgacagcctgcgtttcggcaaccccgacagcccgcgcacccggtttctggtgaacggtgtggtggacggcatcgcgcactacggcaacgcaatcggcgtgcccacggtgggcggcgaagtgacttttcaccccagctatcaggaaaacccgctggtcaacgtgatggcgctggggctgctgcgccacgaggacctcgccacgggcaccatgggcgaagtcggcaaccagatcgtgtatgtgggctccaagaccgggcgcgacgggctgggcggcgcggtgttctcgtcggcggaccttagcgcggcttcgcaggccgaccgccccgccgtgcaggtgggcgaccccttcatggaaaaactgctgctggaagccaccctggaagccattcaggccggactggtggcgggcgtgcaggacatgggcgcggcgggcctcgtgtcctctacctgtgaaatggcctaccgcgcgagcttgggcatcacgatggacctcgacaaggtgcccacccgcgaggagggcatggtgccgatggaactgtgcctgagcgagtcgcaggagcgcatgattctggtgccggtgccgggcaaggaacaggcgctgcacgacctgctggcgaagtgggaactcgacgtggtcacgattggcgaggtggaagcccatgaccgctaccgcctgacctggaaaggcgaagtggtgtgcgacctgcccgtcgccctgctgaacgaggcgcccaagtacacccgcgagggcgtggaatcggcggacatccgcgccgcccgcgagcgcgacctcagcggcgtgccgctgcccggcgacctcggcgcggtgctgctggagctgctgagtcaccccaccatcgccagcaagcggcccatcttcgagcgctacgaccatcaggtgatgaccaataccgtcgtcgtgcccggagccgccgacgccgccgtgctgcgcgtgaagggcagcccgatgggtgtggccgccacctccgactgcaacccgcgtttcgtgcaactcgacccttacgccggggccgccgccgccgtcgctgaagctgcccgcaacctcgcctgtgtgggtgctacgccgctggcgattaccgacaacctcaacttcggcaacccgcaccgcccggaggtgtactaccagcttcagcaggccgtgcagggcatcgccgacgcctgccgcgccctgaacacgcccgtgaccggcggcaacgtgagcctgtacaaccagtacaccgagggcgaccacaaagtcgcgattcaccccaccccgaccatcggcatggtgggcgtgctgcccgacgtgaccgtgcgcgcctccctgaacctgaaggcggcggggcaaacgctgctgctgctcgggcaccgtgctgaaaaggggtggtcggacagcatcggggcgtcgcagtacctcgaaacggtgcatgggctggaagccgggcaggtaccgccggttgacctcgacctcgcgcagaaggtggtggacggcacgctggccctgattcgcgcgggcctgaccgacaccgcgcacgactgcgccgagggcgggttggccgtcgcgctggcggagatggcgattgccgggggcctgggcctgaacgtgtcgctggacgcccccgcgagtgtccgcgccgacgccctgctgttcggcgaagcgcacagccgcgtgatcgtggccgtggaggacgccgccgctgccggggccaaactggacgagctcggcttgccttacgcggtgctgggcgaaacggtggaagcgccgaaggtcacgattgccgcccccgcgcagcacgtacacttgagcgtgaaccttgagagtttaaaaacggcgtgggaagagcccttgaaggggattttggggtga

SEQ ID NO: 53051 - protein, 747 aa, Deinococcus radiodurans
MTSQSLRDQAATFGLTTEEYDLFVSQLGREPNALEAAIVGAMWSEHCGYKNSRPLFRAFPTTGPQVLQGPGENAGVVDIGDGWGVAFKMESHNHPSAVEPVQGAATGVGGILRDIFAMGARPFAVLDSLRFGNPDSPRTRFLVNGVVDGIAHYGNAIGVPTVGGEVTFHPSYQENPLVNVMALGLLRHEDLATGTMGEVGNQIVYVGSKTGRDGLGGAVFSSADLSAASQADRPAVQVGDPFMEKLLLEATLEAIQAGLVAGVQDMGAAGLVSSTCEMAYRASLGITMDLDKVPTREEGMVPMELCLSESQERMILVPVPGKEQALHDLLAKWELDVVTIGEVEAHDRYRLTWKGEVVCDLPVALLNEAPKYTREGVESADIRAARERDLSGVPLPGDLGAVLLELLSHPTIASKRPIFERYDHQVMTNTVVVPGAADAAVLRVKGSPMGVAATSDCNPRFVQLDPYAGAAAAVAEAARNLACVGATPLAITDNLNFGNPHRPEVYYQLQQAVQGIADACRALNTPVTGGNVSLYNQYTEGDHKVAIHPTPTIGMVGVLPDVTVRASLNLKAAGQTLLLLGHRAEKGWSDSIGASQYLETVHGLEAGQVPPVDLDLAQKVVDGTLALIRAGLTDTAHDCAEGGLAVALAEMAIAGGLGLNVSLDAPASVRADALLFGEAHSRVIVAVEDAAAAGAKLDELGLPYAVLGETVEAPKVTIAAPAQHVHLSVNLESLKTAWEEPLKGILG

SEQ ID NO: 53052 - DNA, 2220 bp, Enterococcus faecalis
  CDS (1)..(2220): transl_table=11
atgatgaatgaaccaacaccaaaagaaatcaaggaaacacggttgtatgcagaatggggactaacagatgaagaatatcatcagattgagaccattttgcaaagagaacctaattatacagaaactggcttattctccgtgatgtggagtgaacattgctcttacaaaaattccaagcccgttttaaaaaagtttccgacggaagggccacaagtgcttcaaggccctggtgaaggagctgggattgtcgatattggtgacggattagctgttgtttttaaagcagagagccataatcatccttctgcagtagaaccttacgaaggagcagctacaggcgttggtggaattattcgcgatattttcagtatgggggcgcggccgattgctttactggattcgctaagatttggcgaactgacggatgcacgaacacgttatttgtttcaagaagttgtggcggggattagcggttatggaaattgtattggtattccaaccgttggcggcgaaattgcttttgagccatgttatcaaggaaacccacttgttaatgctatgtgtgtgggattgattcgtcatgatgagattcaaaaaggccaagcaaaaggcgtcggaaatagcattctttacgtaggtgcgaaaacaggacgagatggaattcatggtgcgacctttgcttcagaagaatttagtgaaggtgaagaacagcaacgatctgcggtacaagtaggtgatccgtttatggaaaaattattattggaagcttgtcttgatttaatcaaaaatcatcaagatattttaatcggcatccaagatatgggggcggctggcttggtttcttcaagtgctgaaatggcatcaaaagcaggttcaggcttgattctagagctagataaagttccgcagagagagacgcagatgagcccctatgaaatgctcttgtctgagtcccaagaacggatgttaatctgtgtggaaaaaggagcagaacagcaagtttgtgaattgtttcaaacgtatgacttagaagcggtagcgattggctccgtaacagatgatggacagtatcgtgtctttcacggtggcaaaatagtcgcagatgtaccagtagatgctttggcagaagaagcccctgtctaccagaaagcctatcaagaaccagagcggatgcgtgcttttaaaaaattagcgcccttcattccagaaattacgaatagtacggaattattaaaacgcctattgcaacagccaacgattgcatcgaaaaaatcagtttacgaaacctatgatagtcaagtacaaacgaatacagtggtgcaaccaggaagtgatgcagctgttttaagagtgcggggcaccaataaagccttagcgatgacgacagattgtaatagccgttatttgtatttaaatcctgaaattggtgggcaaattgcggttgcagaagcagcccgtaatattgtagcgagtggagcacaacctttggctatcactgattgcttgaattatggttccccagataaaccagaaagtttttgggaattatggacgtcggcggatggaatcgccgccgcctgccgtcagctaggaacacccgtgatttcagggaacgtctctctttacaatgaaacagatggtcaagccatttatccaacgccaatgattggcatggtgggagtgattgaagatgtttcacaaattaccacacaagcgtttaaacaagttgatgacttaatttatctcatcggtgaaacccacgcagattttaacggctcagaaattcaaaaaatacaactgggtcgaattgaagggcaattacgctcatttgatttaaaagaggaaaaagcaaaccaagaattagttttaaaagcaattcaagtaggcctagttgctagcgcgcatgattgcgctgaaggtggcgttgccgttgctttagccgagtcggcttttgctaacgaactggggttacaggtgacactgccattaaaaaaagaatatctatttgcggagacgcaatcccgttttattctttcagttagtccccagcatcaagaagcatttgaaacacttatcggaagaaaagctcaacatattgggaaagtgactgaaactggtttggtcattcatgcgttagatgatgtgatcaattgctcaacaaaagaagccaaagccttatgggaggatgcgattccatgtcttatgaagcaaaaagcttaa

SEQ ID NO: 53053 - protein, 739 aa, Enterococcus faecalis
MMNEPTPKEIKETRLYAEWGLTDEEYHQIETILQREPNYTETGLFSVMWSEHCSYKNSKPVLKKFPTEGPQVLQGPGEGAGIVDIGDGLAVVFKAESHNHPSAVEPYEGAATGVGGIIRDIFSMGARPIALLDSLRFGELTDARTRYLFQEVVAGISGYGNCIGIPTVGGEIAFEPCYQGNPLVNAMCVGLIRHDEIQKGQAKGVGNSILYVGAKTGRDGIHGATFASEEFSEGEEQQRSAVQVGDPFMEKLLLEACLDLIKNHQDILIGIQDMGAAGLVSSSAEMASKAGSGLILELDKVPQRETQMSPYEMLLSESQERMLICVEKGAEQQVCELFQTYDLEAVAIGSVTDDGQYRVFHGGKIVADVPVDALAEEAPVYQKAYQEPERMRAFKKLAPFIPEITNSTELLKRLLQQPTIASKKSVYETYDSQVQTNTVVQPGSDAAVLRVRGTNKALAMTTDCNSRYLYLNPEIGGQIAVAEAARNIVASGAQPLAITDCLNYGSPDKPESFWELWTSADGIAAACRQLGTPVISGNVSLYNETDGQAIYPTPMIGMVGVIEDVSQITTQAFKQVDDLIYLIGETHADFNGSEIQKIQLGRIEGQLRSFDLKEEKANQELVLKAIQVGLVASAHDCAEGGVAVALAESAFANELGLQVTLPLKKEYLFAETQSRFILSVSPQHQEAFETLIGRKAQHIGKVTETGLVIHALDDVINCSTKEAKALWEDAIPCLMKQKA

SEQ ID NO: 53054 - DNA, 2286 bp, Frankia sp
  CDS (1)..(2286): transl_table=11
gtgaccggcaaccccgccgcccccgcggccacctccgtgagtccccccgccgagcagccctaccaggagctggggctcaccgacgacgagtacgcccggatcatcgcgaccctcggtcgccggcccagcgacgccgaactcgcgatgtactcggtgatgtggagcgagcactgctcctacaagtcctccaaggtgcatctgcggcagttccgggacaccccgttgacggaccggctgctggtgggcatgggggagaacgcgggcgtcgtcgacgtcggcgaggggctggcggtcaccttcaagatcgagtcgcacaaccaccccagcttcgtcgagccgtaccagggggccgcgacgggtgtaggcggcatcgtccgtgacatcctgaccatgggggcccgcccgatcggcgtgctcgacccgctgcgcttcggcgaggccgacgcggcggacaccgcccgggtcctgcccggggtcgtcgccggcatcggtggctacggcaactgcctcggcctgcccaccatcggcggcgaggtcgtcttcgacccgacctacgcgggtaacccgctggtcaacgccctgtgcgtcggggtcatgccggtcgatcgggtgcagacgtcggcggcgaccggggtcggcaacgccgtcgtcctgctcggcgccaagaccggccgggacggcatcggcggcgtctcgatactggcgtcggcaaccttcgacgagggcggcggcccggcccggcgaccctcggtgcaggtcggcgacccgttcaccgagaagatcctgatcgagacctgcctggagctgttcgaccgcaagctcgtcaccggcatccaggatctcggcggcgccgggctgacctgcgcgctgaccgagaccaccgccgcgggcatcgccaccggccagcccggcggcatggaggtcgacctcgacctcgtgcccctgcgcgaggcgtcgatggcggcgcacgaggtcctcgcgagcgagtcccaggagcgcatgctggcgatcgtcacgcccgaggcgctgcccgaggttctcgccctcgccgagcgctggggtgtgctcgcgaccaggatcggcaccgtcaccaacagcggtcggctgaccgtacgctggcacggcgaggtcgtcgtcgacgttccgcccggatcactcgccgacgatggcccggtctacgagcgccccctgcgccgcccggtcgacttcgacctggtccgggcggacgcacccacgcccgcccggctcgcccggccacggaccgggccggagctgcgggagaccctgctgcggctggtcgcctccccgaacctgtgctcgcgggcctgggtgaccgaccagtacgaccggtacgtgcaggcgggcaccgtgctcgcccagccggaagatgcgggcgtgcttcggctgtcggcggccaccggcctggggatcgcgctcgccaccgacggcaacggacggtacgcacggctcgacccgttcgccggcacccagctcgccctggcggaggcgtgccgcaacgtggccgccgccggatcggtgccgatcgcggtgacgaactgcctgaacttcggctccccagaggaccccgaggtgatgtggcagttcgcccaggcgtgcgcgggcctcgccgagggctgccggcggctcggcctcccggtgacgggcggcaacgtctcgttctacaaccagaccggctcgacgccgatccatccgaccccggtgatcggggtgctcggcctgttcgacgacgtcacgcgccggacgcccatcggcttcgccgaggagggggacgtcctgatcctgctcggcgagaccgccgacgaattcggcggctcggagtgggcgtgggtgacgcatcgccatctcggcggcgagccgccggccgtcgacttcgcccgggagaagctactcggcgagatcctcgtcgccggttcccgcgacggcatgctcaccgccgcgcacgacctctccgacggtgggctcgcccaggcgctcgtcgagtcgtgcctgcgcggcgggcacggcgcccggatcatcctgccggccggatcggacccgttcgtcgagctgttcagcgagtcggccggccgcgccgtcgtcgcggtgccccgcgcggaggaactgcgcttcaccgacatgtgcgaggtgcggggcctgccgtggcggcgtgtcggtgtcgtcgacggggacaccctcgacgtacaggacgccttcaccgtcggcctcgacgagctgcgcgcggcgcacgagggaacgctgccggcactgttcggccggctcacctag

SEQ ID NO: 53055 - protein, 761 aa, Frankia sp
MTGNPAAPAATSVSPPAEQPYQELGLTDDEYARIIATLGRRPSDAELAMYSVMWSEHCSYKSSKVHLRQFRDTPLTDRLLVGMGENAGVVDVGEGLAVTFKIESHNHPSFVEPYQGAATGVGGIVRDILTMGARPIGVLDPLRFGEADAADTARVLPGVVAGIGGYGNCLGLPTIGGEVVFDPTYAGNPLVNALCVGVMPVDRVQTSAATGVGNAVVLLGAKTGRDGIGGVSILASATFDEGGGPARRPSVQVGDPFTEKILIETCLELFDRKLVTGIQDLGGAGLTCALTETTAAGIATGQPGGMEVDLDLVPLREASMAAHEVLASESQERMLAIVTPEALPEVLALAERWGVLATRIGTVTNSGRLTVRWHGEVVVDVPPGSLADDGPVYERPLRRPVDFDLVRADAPTPARLARPRTGPELRETLLRLVASPNLCSRAWVTDQYDRYVQAGTVLAQPEDAGVLRLSAATGLGIALATDGNGRYARLDPFAGTQLALAEACRNVAAAGSVPIAVTNCLNFGSPEDPEVMWQFAQACAGLAEGCRRLGLPVTGGNVSFYNQTGSTPIHPTPVIGVLGLFDDVTRRTPIGFAEEGDVLILLGETADEFGGSEWAWVTHRHLGGEPPAVDFAREKLLGEILVAGSRDGMLTAAHDLSDGGLAQALVESCLRGGHGARIILPAGSDPFVELFSESAGRAVVAVPRAEELRFTDMCEVRGLPWRRVGVVDGDTLDVQDAFTVGLDELRAAHEGTLPALFGRLT

SEQ ID NO: 53056 - DNA, 2229 bp, Geobacillus kaustophilus
  CDS (1)..(2229): transl_table=11
atgtcgttactgcttgagccgagcgcggcgatgatcaaagaacaaaagttgtaccgtgagatggggttaacagatgaagagtttgcgcgcattgaagcgattttggggagactgccgaactacacggaaaccggcatttttgccgtcatgtggtcggagcattgcagctacaaaaactcgaagccggtgctgaaaaaattcccgactgatggtccgcacgtgctgcaagggccgggtgagggtgcgggcattgtcgatattggcgacgggctggcggtggcgtttaaaatcgaaagccataatcacccgtcagcgatcgagccgtaccaaggagcggcgaccggggtcggcggcatcatccgcgacgtcttttcaatgggagcgcggccgattgcgctgctgaactcgcttcgatttggcgaattgacgtcgccgcgcgtcaaatatttgttcgagcaggtcgtcgccggcattgccgggtacggcaactgcgtcggcatcccgaccgtcggcggcgaggtgcagttcgacccggcgtatgaaggcaacccattggtcaacgccatgtgcgtcgggatcatccgccatgaggacattcagcgcggcgtggcgaccggggtcggcaacacggtcatgtacgtcggggcgaaaacgggccgcgacggcatccacggggcgacgtttgcttcggaagagttgagcgaacagtcggaagcaaagcgtcccgccgtgcaagtcggcgacccgtttatggaaaaactgctgcttgaggcgtgtcttgaagcagtcaagtccgatgcgttagtcggcattcaagatatgggggcggcaggactcacgagttcatccgccgagatggcaagcaaaggcggatttggcattgaaatgaatttggatctcgtcccgcagcgtgaggcaggcatgacgccgtacgaaatgatgctgtccgaatcgcaggaacggatgctgcttgttgtcaagcaaggttgtgaagacgaaatcgccgcgatttttgccaaatacggcctcgaggccaaagcaatcggcaaagtgaccgatgacaaaatgctccgcctcttgttccgaggcgaggtggcggcggaaattccggtggacgccttggcgaaagacgcgccggtgtatcataaaccgtctgccgagccggcttattaccgcgagtttcaagcgatgccgccgtatactccgcacatcgaagactacaatcaaacattgctcgggctgctcgcccagccgacgattgcgagcaaagaatgggtgtacgaccagtacgactatatggtgcggacgaatacggtcgtcgccccgggatcggacgcggcggtcgtgcgcatccgcggcatgaacaaggcgctcgcgctgacgacggattgcaactcgcgctacttgtatttggatccggaaacgggcgggaaaatcgcggtcgccgaggcggcgcgcaatgtcatctgctccggagcaaagccgctcgccattacggactgcctcaactttggcagcccggaaaagccggagattttctggcagctcgaaaaagcggtcgacgggatgagcgaagcgtgccgggcgctcgggacgccggtggtgagcggcaacgtctcgctgtacaatgaaacgaacggcgaggccgtgtacccaaccccggtcgttggcatggtcggtctcattgacgatctttcccatattacgactcagtcgtttaaacaagcgggcgacctcatttacgtgatcggcgaggcgaagccggagtttggcggcagcgagttgcaaaaatggctggaaggccgcatttttggaaaagcaccggagattgacttagaggtggaagcaagccgccagcgccagctgcttgcggcgatccgcgcgggggtggtggcgtcagcgcatgatattgccgaaggaggattagccgttgcgcttgctgagtgtgtcatgggtgcctcggggcttggcgccaaggtgacgatcggcggtgacctcgtcagtgaactgttcagcgaaacgcaatcgcgctttgttatttcagtgaaaaaagaacatcaggaagcgtttgaacagctcgtggaagcgaagcgaatcggcgaagtgacaggcgacggcatcttgacagtgaacggggaacagggggaaacggtcatccgcctttcggttgacgagatgcgaaacgtctggaaaggggctattccatgcttgctgaaatcaaaggattga

SEQ ID NO: 53057 - protein, 742 aa, Geobacillus kaustophilus
MSLLLEPSAAMIKEQKLYREMGLTDEEFARIEAILGRLPNYTETGIFAVMWSEHCSYKNSKPVLKKFPTDGPHVLQGPGEGAGIVDIGDGLAVAFKIESHNHPSAIEPYQGAATGVGGIIRDVFSMGARPIALLNSLRFGELTSPRVKYLFEQVVAGIAGYGNCVGIPTVGGEVQFDPAYEGNPLVNAMCVGIIRHEDIQRGVATGVGNTVMYVGAKTGRDGIHGATFASEELSEQSEAKRPAVQVGDPFMEKLLLEACLEAVKSDALVGIQDMGAAGLTSSSAEMASKGGFGIEMNLDLVPQREAGMTPYEMMLSESQERMLLVVKQGCEDEIAAIFAKYGLEAKAIGKVTDDKMLRLLFRGEVAAEIPVDALAKDAPVYHKPSAEPAYYREFQAMPPYTPHIEDYNQTLLGLLAQPTIASKEWVYDQYDYMVRTNTVVAPGSDAAVVRIRGMNKALALTTDCNSRYLYLDPETGGKIAVAEAARNVICSGAKPLAITDCLNFGSPEKPEIFWQLEKAVDGMSEACRALGTPVVSGNVSLYNETNGEAVYPTPVVGMVGLIDDLSHITTQSFKQAGDLIYVIGEAKPEFGGSELQKWLEGRIFGKAPEIDLEVEASRQRQLLAAIRAGVVASAHDIAEGGLAVALAECVMGASGLGAKVTIGGDLVSELFSETQSRFVISVKKEHQEAFEQLVEAKRIGEVTGDGILTVNGEQGETVIRLSVDEMRNVWKGAIPCLLKSKD

SEQ ID NO: 53058 - DNA, 2325 bp, Gloeobacter violaceus
  CDS (1)..(2325): transl_table=11
atgaccgcgccgaccgagtcctccccgtttagccccgccgatctggcccgccaccgcctgagcccccaggagtaccggcgcatcaccgaactgatcggacgccaccccaacctcaacgagttgggcatgttcagcgtgatgtggtctgaacactgctgctataaaaattcccggccgctgcttaaaggatttccgaccaccggcccgcgggtgctggtgggaccgggcgagaacgccggggtgatcgatatcggcgacggcctgcgcgtcgctttcaaaattgaatcgcacaaccacccgagtgcggtggagccgtttcaaggggcagccaccggcgtcgggggcattctgcgcgacatttttacgatgggagcgcggcccatcgcttcgctcaattcgctgcgcttcggaccgctcgaagacgcccgcaaccgggcgctttttcggggcgtcgtccacggcatcggtcactacggcaattgtgtcggggtgcccacggtcgggggcgaggtgtacttcgatccgacctattccggcaacccgctggtgaacgccatggccatcggcgtgctcgaaacgcccgagatcgtccgctccggggcggcgggcatcggcaacccggtgctctatgtcggctccaccaccggccgcgacggcatgggcggggcaagcttcgcctcggcggaactttctgacgcgtcgcaaaaggaccgccctgcggtacaggtgggcgacccgttcaccgaaaaatcgctcatcgaggcgtgtctggaagcttttcgcaccggggcggtggtcgccgcccaggacatgggggcggcggggctcacctgctcgtcttcggagatggccgccaagggtggggtcggtatcgagatggacctcgacctggtgcccgtgcgcgagacgggcatggtgccctacgaatttctgctttctgagtcgcaggagcgtatgctcttcgtggccgaaaagggccgcgaaggcgaactgattgccctgtttgagcgctggggattgcacgcggtggtagtaggccgggtgatcggtgaacccctggtgcgcatttttcacagcggcaaggtcgtggcggaactccccgcccgcgccctcaccgacgatgccccggtctatccccgagcagtgctccccgagcccccggctgcgatcctcaagctcagggccttcgactggcattcgctcgctgaacccaccgactacgccgaagcgctgcttacgctgctcgacagtccgacgattggttccaaaagttgggtctaccgccagtacgaccaccaggtgcagaacaacacggtgatcgtgccgggggcggcggacgctgctgtcattcgggtgcgtccgcagagttttggccccggcgaagtcgaagcggtgccgtttaccgagcggggcatcgccgccacagttgattgcaacagccgctacgtctatctcgacccgtaccggggggcgatgctcgccgtggccgaggcggcccgcaacttgagctgcgtgggagccactccgctcgcggtcaccgacaacctcaatttcggttcccccgaaaagcccgaaggctactggcagttggcgatggcctgccgggggattgcagacgcctgcctcgaactgatgaccccggtcaccggcggcaacgtctcgctctacaacgagacccagagcgacggcaggacaacagccatctacccgactcccacgatcggtatggtcgggctggtggaagatatccaccgcacctgcagccagaatttcaagtcccccggcgatctggtgtatctgctggggggcggcgaaccgaccctgggcggatccgagtacctggcttgtctgcacggcgtggcggcgggcgagcctccggttctggacatggcccttgaaatccaggtgcagtcggtctgccgcctgggtatcgagcgggggttgttcaaatcggcccacgacgttgccgaaggtggtcttgccgttgctctggccgagtgctgcatcacaggtaacttggggctcgacgctgtgctgggggcgaatcacccgcgcgccgatgtggtgtgcttcggggagatggctgccgccatcattgtcaccatcgatccttgtgatcaggtcgcctgcgaactttggctcgaatgctccctagccgagcgctggaaactcctgggcacagtcgccgcgcaaagtttcgatctgcgcgtcgaaaatcgcgattgccgcatctccacttcctgcgagcggctcaagaccaccttcgaacaagccatcccccgccggatggagcacatacctgtcaccgaggcaccccaacgatga

SEQ ID NO: 53059 - protein, 774 aa, Gloeobacter violaceus
MTAPTESSPFSPADLARHRLSPQEYRRITELIGRHPNLNELGMFSVMWSEHCCYKNSRPLLKGFPTTGPRVLVGPGENAGVIDIGDGLRVAFKIESHNHPSAVEPFQGAATGVGGILRDIFTMGARPIASLNSLRFGPLEDARNRALFRGVVHGIGHYGNCVGVPTVGGEVYFDPTYSGNPLVNAMAIGVLETPEIVRSGAAGIGNPVLYVGSTTGRDGMGGASFASAELSDASQKDRPAVQVGDPFTEKSLIEACLEAFRTGAVVAAQDMGAAGLTCSSSEMAAKGGVGIEMDLDLVPVRETGMVPYEFLLSESQERMLFVAEKGREGELIALFERWGLHAVVVGRVIGEPLVRIFHSGKVVAELPARALTDDAPVYPRAVLPEPPAAILKLRAFDWHSLAEPTDYAEALLTLLDSPTIGSKSWVYRQYDHQVQNNTVIVPGAADAAVIRVRPQSFGPGEVEAVPFTERGIAATVDCNSRYVYLDPYRGAMLAVAEAARNLSCVGATPLAVTDNLNFGSPEKPEGYWQLAMACRGIADACLELMTPVTGGNVSLYNETQSDGRTTAIYPTPTIGMVGLVEDIHRTCSQNFKSPGDLVYLLGGGEPTLGGSEYLACLHGVAAGEPPVLDMALEIQVQSVCRLGIERGLFKSAHDVAEGGLAVALAECCITGNLGLDAVLGANHPRADVVCFGEMAAAIIVTIDPCDQVACELWLECSLAERWKLLGTVAAQSFDLRVENRDCRISTSCERLKTTFEQAIPRRMEHIPVTEAPQR

SEQ ID NO: 53060 - DNA, 2205 bp, Gluconobacter oxydans
  CDS (1)..(2205): transl_table=11
atgagtgtgacgattgatgcccagcttgcccagtctttcggactgaccggcgaggaatacgataagcttgtcacgatcatgggacggacgccgagctttacggagctcggaatcttctccgtcatgtggtccgagcactgctcctataaatcgtcccgcatccatctcaagacgctgccgaccaaggcaccgtgggtcatccacggcccgggcgaaaatgcaggtgttgtggatattggcgagggtctggccgccgtcttcaagatggagagccacaaccacccgtccttcatcgagccctatcagggtgcggcaacgggcgttggcggcatcctgcgtgacgtgttcacgatgggcgcacgtccggttgcaaacctcaacgccctgcgtttcggcgatccaaagcatgcgggaacgcgtcgcatcgtcgatggcgttgtccgtggcgtgggcggttatggcaactgcgtcggtgttccgaccgtgggtggcgaggtcaacttccacaaagcctatgacggcaatccgctcgtcaatgccatgacagtgggtgtagccaagcaggacaagatcttcctgtcggctgcggctggcgtgggcaatcctgtagtgtatgtcggctccaagacggggcgtgatggcattcacggcgcgaccatgtcttcggcggagttcgacgaggaagccgcctccaagcgtccgacggttcaggttggcgatccgttcatcgaaaagctgctgatcgaggcctgcctcgaactgatggcaacggatgcgatcgtcgccattcaggacatgggtgccgcgggtctgacgtcttctgccgttgagatggccggcaagggcggcgtgggtatcgagctcaatctcgatgccgttccgcagcgcgagccgaacatgtcggcttacgagatgatgctgtccgagagccaggagcgcatgctcatggtcctcaagcccgagcggaccgaagttgcccgtgcgatcttcgcgaagtgggagctcgatttcgccgtcattggtgaactgactgatacggggcgcattacgatccgccataagggcgaggtcgaggctgatattccgctggccccgctggcagatgaagccccggtttataaccgcccgaccgtgcctctgaaggcaccggcacggatcgagaccccggctgacccggaagggatcgagaaggcgcttctgacgctggtcggctgcccggatctggcgtcccgtgcctgggtctggaaccagtatgacggctcggttggtggcaacaccgcccgtcgcccgggtgcggccgatgcggctgtcgtgcgcgttgaaggcacgcgtctaggtcttgccctgaccacggactgcacgccgcgctactgccaggccgatccgaagacgggtggtgcacaggccgtggccgaggcatggcgcaacatcacggcaacgggcgcaaccccgctggccgtgacggacaacctgaacttcggcaatccggaacgtccggaaatcatggcgcagttcgccgatgccatcaaaggcatgggcgatgcctgccgtgcgctcgacttcccggtcgtgagcggcaacgtctcgctttacaacgagacgcgctctccgtccggtgaagctcaggccatccttccgacgccggcgatcggtgcgctgggtgtgctggcggatgcgtccaagtccatcgggcttgcgatgccggatgcccatgatctggtgctggttggtggcattcgcggcgaactcgggcagtccctgtggctacgcgagatctgccagcgtgaagatggtgcaccgccggtggtcgatcttgcggtcgagcgtcgcaatggtgacttcgtgcgcagccagattggcgcaggtgcggttgcggcctgtcacgacattgccgatggcggactgctggtgacggtggcggaaatggtgatggcgagcggcgttggctgcacgctggaagccgctccgacggacgttgcagcgcatgctttctggttcggtgaggaccagggctgctatgttattgccacttccgatggcgcagcccttgtcgcggcggcggagaaggccaacgttctggcaatgcgcctgggacgttcgggcggcaccgatctggagcttccgggcactgtccgcgtcagtgccgagcgtctccgggagatcaatgccgcattcttcccgcggtttatgggtgagggggcctga

SEQ ID NO: 53061 - protein, 734 aa, Gluconobacter oxydans
MSVTIDAQLAQSFGLTGEEYDKLVTIMGRTPSFTELGIFSVMWSEHCSYKSSRIHLKTLPTKAPWVIHGPGENAGVVDIGEGLAAVFKMESHNHPSFIEPYQGAATGVGGILRDVFTMGARPVANLNALRFGDPKHAGTRRIVDGVVRGVGGYGNCVGVPTVGGEVNFHKAYDGNPLVNAMTVGVAKQDKIFLSAAAGVGNPVVYVGSKTGRDGIHGATMSSAEFDEEAASKRPTVQVGDPFIEKLLIEACLELMATDAIVAIQDMGAAGLTSSAVEMAGKGGVGIELNLDAVPQREPNMSAYEMMLSESQERMLMVLKPERTEVARAIFAKWELDFAVIGELTDTGRITIRHKGEVEADIPLAPLADEAPVYNRPTVPLKAPARIETPADPEGIEKALLTLVGCPDLASRAWVWNQYDGSVGGNTARRPGAADAAVVRVEGTRLGLALTTDCTPRYCQADPKTGGAQAVAEAWRNITATGATPLAVTDNLNFGNPERPEIMAQFADAIKGMGDACRALDFPVVSGNVSLYNETRSPSGEAQAILPTPAIGALGVLADASKSIGLAMPDAHDLVLVGGIRGELGQSLWLREICQREDGAPPVVDLAVERRNGDFVRSQIGAGAVAACHDIADGGLLVTVAEMVMASGVGCTLEAAPTDVAAHAFWFGEDQGCYVIATSDGAALVAAAEKANVLAMRLGRSGGTDLELPGTVRVSAERLREINAAFFPRFMGEGA

SEQ ID NO: 53062 - DNA, 2163 bp, Haloarcula marismortui
  CDS (1)..(2163): transl_table=11
atgagcctgtccgacgcggaccacgaactcgtggtcgaggagatcggtcgggagccgacacgggcggaggccgctctcttcgagaacctctggagcgaacactgcgcgtatcgctcctctcgccccctgctgtcggcgttcgactccgaaggcgatcaggtcgtcatcggccccggcgacgacgcagccgtcgtctccctgccgtcccacggcgacggcgaggagatgtacatcacgatgggcgtcgagtcccacaaccacccgtcctacgtcgacccgttcgacggggcagcgaccggcgtgggcggtatcgtccgcgacacactgtcgatgggggcctaccccatcgcgctggccgactgtctgtacttcggcgactttgaccgggagcactcccgctatctcttcgagggcgtcgtcgagggtatctcccactacgggaactgcatcggcgttccaactgtcaccgggagcgtcgccttccacgacgactacgaggggaacccgctcgtgaacgtatcctgtatcggcctgctggagcccgagcggaccatcactgccgaagcccaggagccgggcaacaagctcgttctcgtcggcaacgcgacggggcgagacgggctcggcggggcgtccttcgccagcgaggacctcgcggaggacgctgaaacggaggaccgaccggccgtgcaggtcggcgacccgtactcggagaagctactcgtcgagtgcaacgaggcgctgctggacgaggaactcgtcgagtcggcccgcgaccttggggccgctggcctcggcggcgcgtcgtccgaactgatcgccaagggcggcctcggtgcacgtatcgaactcgaccgcgtccacgagcgcgagcccaacatgaacgccatggagtacctgctcgccgagagtcaggaacggatggtgtacgaggtcgcgcccgaggacgtcgaccgcgtggccgaactcgccgagcggttcgacctcggctgttcggtcatcggcgaactcaccgagccgggcacaaactacgtctgcacgttcgagggcgagacagtcgtcgacgtggacgcggcgttcctcggggacggtgcgccgatgaacgacctgccgagcgacgcgccaccgaaacaggaacgggacctgccgaccgtgtcgctggacgaggcgttcgagcgcatcgtcagcagcccgaactgcgcctcgaaacggtgggtgtaccgccagtacgaccacgaggtgcaggtccgaacgagtgtcctgcccggcgacgacgccgcactgctcgccatccgtgaggccgggaccggactggcgttctctgccggcgcggaccccaactggaccgacgccgcgccgtacgaaggcgcacgcgccgtcgcgctggaaaacgccacgaacgtcgccgcgaagggcgcgacaccccatgcggctgtggactgtctgaacggcggcaaccccgagaagcctgacgtgtacggcggcttcaaaggcattgtcgacggcctggcggacatgtgcagcgaccttgacgtgccggtggtcggggggaacgtctccttgtacaacgattcccaggacggaccgattccccccacaccgacgctcgcgctggtcggcgtcaaggagggctacgatgccccgccgctgtcgctgtccggcgagggaaggctcgtcgtcgtcggggacaccgcactggagggcaaaaccgacccgcgtctgggcgggtccgagtacaccgcgcagttcggcggcaccgaccgcttccccgccctcccggtggactcaacggacgttgtcgagacgattgccgaggtcgccgacgccgaccacgtgctggcaagccacgacgtgagccacggcggcctcgcggtaacgctggccgagatggtccacgaggacgccggtgcgtcggtcgaaatcgggaccaccgagcacggcactccggctcgactcctgttcaacgagcggcccggccgggtcgtgttcgagacgactgacccggcggcggtccgggaggccttcgacggcgtcgccccagtgacggaactgggcgaggcgaacgactcgaacggactcgatattacggtcaacgacgagacgctggcgtacaacgttgcggacatcgctgacctgcggtcggtcatcgacgacgaactatag

SEQ ID NO: 53063 - protein, 720 aa, Haloarcula marismortui
MSLSDADHELVVEEIGREPTRAEAALFENLWSEHCAYRSSRPLLSAFDSEGDQVVIGPGDDAAVVSLPSHGDGEEMYITMGVESHNHPSYVDPFDGAATGVGGIVRDTLSMGAYPIALADCLYFGDFDREHSRYLFEGVVEGISHYGNCIGVPTVTGSVAFHDDYEGNPLVNVSCIGLLEPERTITAEAQEPGNKLVLVGNATGRDGLGGASFASEDLAEDAETEDRPAVQVGDPYSEKLLVECNEALLDEELVESARDLGAAGLGGASSELIAKGGLGARIELDRVHEREPNMNAMEYLLAESQERMVYEVAPEDVDRVAELAERFDLGCSVIGELTEPGTNYVCTFEGETVVDVDAAFLGDGAPMNDLPSDAPPKQERDLPTVSLDEAFERIVSSPNCASKRWVYRQYDHEVQVRTSVLPGDDAALLAIREAGTGLAFSAGADPNWTDAAPYEGARAVALENATNVAAKGATPHAAVDCLNGGNPEKPDVYGGFKGIVDGLADMCSDLDVPVVGGNVSLYNDSQDGPIPPTPTLALVGVKEGYDAPPLSLSGEGRLVVVGDTALEGKTDPRLGGSEYTAQFGGTDRFPALPVDSTDVVETIAEVADADHVLASHDVSHGGLAVTLAEMVHEDAGASVEIGTTEHGTPARLLFNERPGRVVFETTDPAAVREAFDGVAPVTELGEANDSNGLDITVNDETLAYNVADIADLRSVIDDEL

SEQ ID NO: 53064 - DNA, 2103 bp, Halobacterium salinarium
  CDS (1)..(2103): transl_table=11
atgtctcttggtgactcggatcgggagcgcgtcgtggcagccctcggccgcgaccccacacccgcggaagccgcgctgttcgagaacctctggagcgaacactgcgcgtaccgctcctcacggtcgctgctgtccgcgttcgacagcgacagcgaagccgtggtcgtcggcccgggtgacgacgccgccgtcgtgcgcgtccccggcaccgaccaactcgtgaccgtcggcgtggagagccacaaccaccccagctacgtcgacccctacgatggtgccgccaccggcgtcggcggcatcgtccgggacaccctctcgatgggggcctatcccatcgcgctcgccgacgcgctgtacttcggtgacttcgacgacgagcacgcccgatacctcctggacggcgtggtcgaggggatcagcgactacggcaacgccatcggcgtcccgacggtcgccggggccacgcagttccacgacggctacaccggcaacccgctggtgaacgtcgcgtgcgtcggcctggtgaccgaggaccgactcgtcacggcggcggcgaaatcgcccgggaacaagctcgtgctcgtggggaacgccaccggccgggacggcctcgggggcgcgagcttcgccagcgaggacctcgccgaggacgccgaaaccgccgaccgcccggccgtccaggtgggcgacccctacacggagaaactcctcatcgaggccaacgagacgctgctcgaccgcgacctcgtggtcgccgcccgcgacctcggggccgccgggctcggcggggcgtcctcggagatggtcgcgcagggcgaactcggcgcgcgcatcaccctcgacgcggtccaccagcgcgaaccggagatgaacgccatggagatcctgctggcggagtcccaggagcgcatgtgctacgaggtcgccccagccgacgtcgacgccgtccgcgaggtcgccacgcgatacgacctgggctgctcggtcatcggcgaggtcaccacgggcaactacgtctgcgagttcgacggcgagaccgtcgtcgacgcgcccgcgacggttctcgcggacggagcgccggcaaccgaccagccgtcgacggtaccccaagcgccagccacggaccggccggatccggcgctcgggacggccatcgacgccgtgctctcggcccccaacaccgcgagcaacgagtgggtgtatcgccagtacgaccacgaggtcggcgcgcgaaccgtccagcgccccggggaggacgccgccgggctggcgctgcacgaggccgacgacgggacgacggtcgcgctgtccgcgggcgcgaatccggggtggacggcttgccagccgtacgccggcgcgtacgccaccgccgtcgagaacgccacgaacctcgcggcggccggtgccgagccgctggcggccgtcgactgcctcaacggcggcaaccccgaggaccccgacgtgtacggcggcttcgaggcgatggttgcggggctggcggacggctgtcgtgcgatcgacacgccggtcgtcggcggcaacgtcagcctgtacaacgactccgcgaccggccccatcgcgccgacgccgacgctcgccgtggtcggctaccgcgaccagcaccccgtccccggcagtggcctcgccggcgacggcgatctcgtgctcgtcggcgggcacgccgacggcctcggcgggtcggtctacctccaggcgctgggtggcaccgaccagttcccggccgccgacgcagccggcgtggacgccgtccgcgaggccgccacgcgagcggacacgctggccgtccacgacatcagcgacggtgggctggcggtcacgctcgccgagatggtgaccgcggacgccggcgcgaccgtcaccgtgcccgggttggcggcgctgttctcggaatgccctggtcgtgcggtcgtcgaaacacgcgacgccgacgcgctccaagcggcccttgatgtgcccgtcgtgcgcctcgggtcggcgaccacggacggcacgctgtcggtgaccgtcgacgacgagactgtgacgcgggacgccgccacgatccgggatcaccgcggcgtcatcgcccgcgagctggactga

SEQ ID NO: 53065 - protein, 700 aa, Halobacterium salinarium
MSLGDSDRERVVAALGRDPTPAEAALFENLWSEHCAYRSSRSLLSAFDSDSEAVVVGPGDDAAVVRVPGTDQLVTVGVESHNHPSYVDPYDGAATGVGGIVRDTLSMGAYPIALADALYFGDFDDEHARYLLDGVVEGISDYGNAIGVPTVAGATQFHDGYTGNPLVNVACVGLVTEDRLVTAAAKSPGNKLVLVGNATGRDGLGGASFASEDLAEDAETADRPAVQVGDPYTEKLLIEANETLLDRDLVVAARDLGAAGLGGASSEMVAQGELGARITLDAVHQREPEMNAMEILLAESQERMCYEVAPADVDAVREVATRYDLGCSVIGEVTTGNYVCEFDGETVVDAPATVLADGAPATDQPSTVPQAPATDRPDPALGTAIDAVLSAPNTASNEWVYRQYDHEVGARTVQRPGEDAAGLALHEADDGTTVALSAGANPGWTACQPYAGAYATAVENATNLAAAGAEPLAAVDCLNGGNPEDPDVYGGFEAMVAGLADGCRAIDTPVVGGNVSLYNDSATGPIAPTPTLAVVGYRDQHPVPGSGLAGDGDLVLVGGHADGLGGSVYLQALGGTDQFPAADAAGVDAVREAATRADTLAVHDISDGGLAVTLAEMVTADAGATVTVPGLAALFSECPGRAVVETRDADALQAALDVPVVRLGSATTDGTLSVTVDDETVTRDAATIRDHRGVIARELD

SEQ ID NO: 53066 - DNA, 2238 bp, Helicobacter hepaticus
  CDS (1)..(2238): transl_table=11
atgacaaatattacacatcttttgggtgagattaaagacattgatgagactctaaaggttcataagctttcaaagcaggattatgaggagattcttaagattttaaagcgtcctccaaaccttatagaattagggatttttgcggcaatgtggagtgaacattgtagttacaaatcaagcaaaaaatatcttaatggattccctaccaaagctccttgggttgtacaaggaccaggtgaaaatgcgggcataattgatattggggaaaatctttgtgcggtctttaagatagaatctcataatcacccaagtttcattgagcctcacgcaggggctgctactggcgtaggtgggattatgcgagatatttttacaatgggagcacgtcctgtggcaagccttaattctattcgttttggcgatataagcgataatggcacacttggcaaaaaacatcgttacttattacgaggcgtggtagaaggcatagggagttatggaaattgtatgggagtgcctacaattggcggagaaatgagttttgaatcttgctataatggcaatatcttagtaaatgcattttgtttaggattagtcaaaaaagatgagattttttatggaaaagctgaagggatagggaatcctgttatttatgtagggagtaagacaggacgtgatgggttaggtggagcagtgatgagcagtgatagtttcagctctacttcaaaggctgtgcgttccgcggtgcaagtaggcgacccgtttgcagaaaaacttttgcttgaagcgtgtttagagcttttcaagcaagatttaattgttgggattcaagatatgggtgcagctgggctcacaagctcaagttttgaaatggcaggtcgtagtggcagcggtatgacactgtatcttgataaagtgcctatgcgcgaagaaggaatgaatccttatgaattaatgctaagtgaatctcaagagagaatgcttatttgcgctaaaaaaggttgtgagcaacaggtattagatatttttgccaaatgggaagtagatgcagcaattattggagaagttacaaaaagtggcattatggaacttttttggtatggagagaaatgtgcggagattccaatcgcgcaattaagtgaaaatgctcctatgcttgatatgcccttacgccctgttgcagtgcaaactcataaagctaatcaacttaaaacatctcaaagcgcacaagaaatttttataactctgcttggaagtgtagaggttgcaaataaaagatgggtttatagccaatatgatagtagtgtgcaaagcaatacgattactcctgcaggaagcggtgatgcgagtatgatacgtataaaaggcacaaatagtgcattgagtatgagcgtggattgcaatatgcgctattgttaccttgaccccaaaaatggcgcaaagattgcggtagcaacttcaggacgtaactccatagtcaatggtgcaaagcctttggcaattagtgattgtctgaattttggctcacctcataatcctgaagtgatgtgggcgttcaaggaagtatgtcaaggcattaaagaatcttgtaaagtattaaatactccagtagtaagcggtaatgtttctttgcataatcaaagcgatggcgtggatatttaccctacaccctctattgtaagtgtgggtttgatagatgatgtaagtaaggtagtgtcttcaacattccaaacacaggggaatatgctcgtattacttggcgaaattaaagccgagtttggtggctctttggcacaaaagattttggaaggacatatttatgggcaaattccaagcattgatttaacacaagagtttgctttatggaatttaatgcttgaggcgagtgatgaatgtatgttgagtgctgcaaaagatattggtgaggggggattagctattactcttgcaaaaatggcattaggcaatggcgaatgccaacccataggttgtaatgtccatacgcatttaccctcacagctactttttgcaccttcccaaagctgtatcattgtagaagtagcaggagagcatctcaatacgctaaagcaaaaagcaaaacaacataagattgcttttacagaaattggttgtgtaggaggtgatattttttgtgttgatgagattaatataagccttgaagagatgaaaaagctttattttgagagttttgaaaagttaattgctcaagatttgtga

SEQ ID NO: 53067 - protein, 745 aa, Helicobacter hepaticus
MTNITHLLGEIKDIDETLKVHKLSKQDYEEILKILKRPPNLIELGIFAAMWSEHCSYKSSKKYLNGFPTKAPWVVQGPGENAGIIDIGENLCAVFKIESHNHPSFIEPHAGAATGVGGIMRDIFTMGARPVASLNSIRFGDISDNGTLGKKHRYLLRGVVEGIGSYGNCMGVPTIGGEMSFESCYNGNILVNAFCLGLVKKDEIFYGKAEGIGNPVIYVGSKTGRDGLGGAVMSSDSFSSTSKAVRSAVQVGDPFAEKLLLEACLELFKQDLIVGIQDMGAAGLTSSSFEMAGRSGSGMTLYLDKVPMREEGMNPYELMLSESQERMLICAKKGCEQQVLDIFAKWEVDAAIIGEVTKSGIMELFWYGEKCAEIPIAQLSENAPMLDMPLRPVAVQTHKANQLKTSQSAQEIFITLLGSVEVANKRWVYSQYDSSVQSNTITPAGSGDASMIRIKGTNSALSMSVDCNMRYCYLDPKNGAKIAVATSGRNSIVNGAKPLAISDCLNFGSPHNPEVMWAFKEVCQGIKESCKVLNTPVVSGNVSLHNQSDGVDIYPTPSIVSVGLIDDVSKVVSSTFQTQGNMLVLLGEIKAEFGGSLAQKILEGHIYGQIPSIDLTQEFALWNLMLEASDECMLSAAKDIGEGGLAITLAKMALGNGECQPIGCNVHTHLPSQLLFAPSQSCIIVEVAGEHLNTLKQKAKQHKIAFTEIGCVGGDIFCVDEINISLEEMKKLYFESFEKLIAQDL

SEQ ID NO: 53068 - DNA, 2229 bp, Lactobacillus acidophilus
  CDS (1)..(2229): transl_table=11
atgaaacaagcgatgacaccagaagaaatcaaagaaaagaagccttaccttgattggagcttatcagaacatgaatatgactatatttgtgatcatttgcttcatcgcttgcctaactatactgaaatcggtttgttctccgcaatgtggagtgaacactgttcttacaagaaatccaagccagtactaaagcttttcccaactaagggtaaacgtgttgtccaaggcccaggtgaaggtgccggcgtagttgatattgatgatggacaagcagttgtgttcaaagctgaaagtcacaaccacccaactacagttgaaccttaccaaggtgccgcaactggtgttggcggtattttaagagatgttttcagtatgggagctcgtccagtcgcaatccttgattcgcttcactttggtgaattaaaggataatccaacaatgcgttacaagatggaagaaactatcaagggcgtgggcgactatggcaactgcatgggaatccctaacttaggtggtgaaaccacctttgatccttgctataacggcaacattttgcttaacgcaatgaacgtcggcattatggatatcaaggatatggaacatggggatgccacaggtgtcggcaatgcagtaatgtatgtcggtgctaaaactggtcgtgacggtatccacggtgcaacttttgcttcagccgacttttctgaagaacatgctactcaacgttcagcggttcaagttggtgatccatttatggaaaagcttttgatggaagcctgcctggaattgattttgcatcaccgcgaatggctcgtcggtattcaagacatgggtgcagctggaatcgtatcttcaagtgctgaaatggccactgaaggtaaatctggcatggatcttaatttgaacttggttcctcaacgtgaacctaatatgtcagcttacgagattatgcttagcgaatcgcaagaaagaatgcttctttgcgtgaagaagggtcacgaagaagacgttaaaaagatttttgatgaatataatcttgatgcagtgactattggtcgaattactgatgatggcagatatgttcttcatcatgatgatcaagtagtttgcgacattccagttgtaactttgactgaaaaggttcttgaagaaaaaagcgaagagaaaaagccacaaagaattattgatgtagaacaaagcgaaaactggcaacctgagattgaagatgcaggtcaaaccttaagagctcttttgaatcaaccaactattgctaatgatcaatttgtaacacaacaatatgactcacaggttcgcacagatactattgttggtcctggttcagatagcgggattctgcgtgttcgccatactaagaaggcaatcgccatgacaactgataccaatggtcgttttgtctatcttgatcctaaagttggcggacaaagaacagtccttgaaagtgccacaaacattgtagctagtggtgctttgcctttagctattaccgactgccttaactatggtgatcctaatgatccagaaatcttctgggaattacaccaatcttgccaaggaattgccgatgcatgtgagatcttagaaacaccagttgtttcaggcaatgtttctctttataacgaaaacaacggtaaggcaatttatccatcgccaatgatcggtatggtgggattgatcaaaaactatgatcatgtcattccaatgcatatgcaaacagcaggcgacaagatttatctcgttggtaaaacagatgatgattttgctggttcagaattgcaaaagatgatgacaggtaaaattagcggcttgccacatgcaccaaatttgccaggaatcaaagactacctatataaattgcaaaaattaatggcagaaggacttgtccaaagtgctcatgatttaagcgaaggtggcttaggcgtatccttagctgaaagtgtatttgatactgatcttggcgtaaacgtaaaactcgattttaataaaaatcttttgttcagtgaaactccaggacgcttgatcgtttccgtcgctcctgaaaatgcggcaaagtttgaacaagaaatgggcgatgcagttagcgaaattggtcaagttacagatgacaagcaattaaatatttctcttacaaatgatcaagtaaatgaagatgttgcgaaattgcaaaagatttggaaggagtgcatcccttgtttaatgaaatcaaaagcctaa

SEQ ID NO: 53069 - protein, 742 aa, Lactobacillus acidophilus
MKQAMTPEEIKEKKPYLDWSLSEHEYDYICDHLLHRLPNYTEIGLFSAMWSEHCSYKKSKPVLKLFPTKGKRVVQGPGEGAGVVDIDDGQAVVFKAESHNHPTTVEPYQGAATGVGGILRDVFSMGARPVAILDSLHFGELKDNPTMRYKMEETIKGVGDYGNCMGIPNLGGETTFDPCYNGNILLNAMNVGIMDIKDMEHGDATGVGNAVMYVGAKTGRDGIHGATFASADFSEEHATQRSAVQVGDPFMEKLLMEACLELILHHREWLVGIQDMGAAGIVSSSAEMATEGKSGMDLNLNLVPQREPNMSAYEIMLSESQERMLLCVKKGHEEDVKKIFDEYNLDAVTIGRITDDGRYVLHHDDQVVCDIPVVTLTEKVLEEKSEEKKPQRIIDVEQSENWQPEIEDAGQTLRALLNQPTIANDQFVTQQYDSQVRTDTIVGPGSDSGILRVRHTKKAIAMTTDTNGRFVYLDPKVGGQRTVLESATNIVASGALPLAITDCLNYGDPNDPEIFWELHQSCQGIADACEILETPVVSGNVSLYNENNGKAIYPSPMIGMVGLIKNYDHVIPMHMQTAGDKIYLVGKTDDDFAGSELQKMMTGKISGLPHAPNLPGIKDYLYKLQKLMAEGLVQSAHDLSEGGLGVSLAESVFDTDLGVNVKLDFNKNLLFSETPGRLIVSVAPENAAKFEQEMGDAVSEIGQVTDDKQLNISLTNDQVNEDVAKLQKIWKECIPCLMKSKA

SEQ ID NO: 53070 - DNA, 2223 bp, Lactobacillus casei
  CDS (1)..(2223): transl_table=11
atgtacgtggtgcacgttgagatgagccccgaggctattgcaacccagaaaccttatttagaccttgggctgacagaggctgaatatgatcgttttgcagaactaatcggccatcagccaaacgataccgagatcgggttagctagcggtatgtggagcgaacactgcgcttacaaatatagcaagccggtattacgccaattttggaccaaaaatgagcgcgtgttaatggggccaggtgaaggtgctggcgtgattgatatcggcgaaggcaaagcagtggtcttcaaagccgaaagtcataatcatccctcggcagttgaaccttatgaaggcgcagcaacaggtgtgggcggcataatccgcgacattttctcaattggtgccaagccggttgcgatgttggactcgctagcttttggcgacattgaacagccacatacccaacatttggttgatcggattgtcgcggggattggcggttatggcaatgcaattggcattccgacagttggcggcgaaacaaactttgacgggagctatacccgaaatccgctggtcaatgccatgtgcgttggcatcatggacaaagatcaaattcaaaaaggtaaagctgctggtgttggcaatgctttgatttatgtcggggccaaaacagggcgtgatggtattaacggtgcgagctttgcttctggggatttttctgacgaagaagcagccgatcgctcggcggttcaagttggcgatcccttcatggaaaagctgttgatggatgcttgtctcgaaattaccgggcatcatcaggaggcgcttgttggtattcaagatatgggtgcagctggattggtatcgtcaagcgtggagatggctggtaaggctaacagcgggatggtgttagatctcgatctgattccgcagcgtgaagccgaaatgacgccgtttgaaattatgttgtctgagtctcaggaacggatgctgctatgcgttcgggccggctttgagcaagaagttttggctgttttcgccgattatgatttggatgcggcgattgttggtcatgtgattgctggtcatcagtatcagctttatcaccatggcaaattggtttgcgatgtgcctgtgagttcgttgaccgatgatgcgccgatttatcatcaacaagggaaaatgccaaaacgactggcccaaccggctgcggattttgaccctatcatcactgatccggtgcaaatatggacggacatgatggcgatgccgacgattgctgacaagtcatctttgtacaagcgttacgatgcgcaggtgcaaactaataccgtcgtcttgccaggcagtgatgcagccgtgattcggattcgcggtactcaccgagcactggcgatgaccaccgatagtaaggacgttacttgtatcttgatcgcaggtgggtgcggcaatgagtgttggctgaaacgtgcgcgcaatttggttgccagcggggcggaaccgcttgggatcaccgattgtctcaattttggcgacccaactaagcctgaggccttctacgaactggctgaggcggcgaagggaatcattgcggctaccaaagcctttaacgccccagttatttcaggaaatgtgtcgctgtataacgaaacgaatggtgaggcgatctatccaaccccaatgattggcatggttggcttgattgaggatttgagcacgatcaccacggcggctttcaagcaagcagatgatctgatttatctggtgggggaaactcatggtgattttaacggcagcgaactgcagaagctgcaaacaggagaagtcactggcaagctgttcgattttgatttagaggctgaaaagcagcatcagcactttgttttgaaggccattcgcgagcatctaattactgcagcgcacgatttaagcgatggtgggttgttggtcgccttggcagagatggggtttgatgcccaacttggcgcccagattaacgtcacattgccgactgcttggggattttccgagacgcaaggccgcttcttgctcaccgtgtcccctgaaaatcaggcagcatttgaagcattgcatggcccggcccaattgattggtcgagttcaggccccaccagaatttgaagtcacaaccgttaatcaacatttttctgcatcgttgcaacagctacagacagcattcgaggaggcgctcccatgccacatgaaccaaaaggcttaa

SEQ ID NO: 53071 - protein, 740 aa, Lactobacillus casei
MYVVHVEMSPEAIATQKPYLDLGLTEAEYDRFAELIGHQPNDTEIGLASGMWSEHCAYKYSKPVLRQFWTKNERVLMGPGEGAGVIDIGEGKAVVFKAESHNHPSAVEPYEGAATGVGGIIRDIFSIGAKPVAMLDSLAFGDIEQPHTQHLVDRIVAGIGGYGNAIGIPTVGGETNFDGSYTRNPLVNAMCVGIMDKDQIQKGKAAGVGNALIYVGAKTGRDGINGASFASGDFSDEEAADRSAVQVGDPFMEKLLMDACLEITGHHQEALVGIQDMGAAGLVSSSVEMAGKANSGMVLDLDLIPQREAEMTPFEIMLSESQERMLLCVRAGFEQEVLAVFADYDLDAAIVGHVIAGHQYQLYHHGKLVCDVPVSSLTDDAPIYHQQGKMPKRLAQPAADFDPIITDPVQIWTDMMAMPTIADKSSLYKRYDAQVQTNTVVLPGSDAAVIRIRGTHRALAMTTDSKDVTCILIAGGCGNECWLKRARNLVASGAEPLGITDCLNFGDPTKPEAFYELAEAAKGIIAATKAFNAPVISGNVSLYNETNGEAIYPTPMIGMVGLIEDLSTITTAAFKQADDLIYLVGETHGDFNGSELQKLQTGEVTGKLFDFDLEAEKQHQHFVLKAIREHLITAAHDLSDGGLLVALAEMGFDAQLGAQINVTLPTAWGFSETQGRFLLTVSPENQAAFEALHGPAQLIGRVQAPPEFEVTTVNQHFSASLQQLQTAFEEALPCHMNQKA

SEQ ID NO: 53072 - DNA, 2220 bp, Lactococcus lactis subsp
  CDS (1)..(2220): transl_table=11
atgactttggagatgtcaccagaacagattcaagaaagcaaaatataccgtgagtggggactgacggatgaagaatatttgaaaatcaaggatgagattcttgatggccgtttgccaaactttacggaaactgggatgtatgccgtgatgtggtcagaacattgctgctacaaaaattcaaaacctgtcttaaaaaaatttccgacgactgggccacaagtcttgatggggcctggtgaaggagctggggttgtggatattggtgatgatttagcggttgttttcaaagctgaatctcataatcatccatcttacgttgaaccttatgaaggtgcagcaactggttctggtggtattattcgtgatattttttcaatgggagctcgtccaattgcaattttggatagtttacgttttgggccaattgacaatggtaaaacacgtcatattgtggaccaagtgacagccgggattgcgggatatggaaactgtattggaattccgacggttggtggcgaagtagcctttgatgaatcttacgctggaaaccctttggtgaatgtcatgtgtgtgggtttgattgaacataaacacatacaaaaaggacaagctaaaggtgtgggaaattctattttttatgtcggagcgaaaacaggacgtgacggcattcatggggcgtcttttgcttctaaagaatttggttctggttcagaaacacaacgttcagcggttcaagtcggtgatccatttatggaaaaattattgcttgaagcttgtattgaagtcattcaaaatcatggcgatattttagtcggaattcaagatatgggagcagctggattggtttcatctacatcagaaatggcttcaaaagctgggtcaggtctgcgtcttaacttggataatgtgcctcagcgtgaaacagaaatgattccttatgaaatgatgttgtctgagtcacaagaacgtatggtgctttgtgtcaaaaaaggacatgaacaagaaattattgatttatttaaaaaatacgaccttgatgctgtgaatattgggcaagtgactgatgatggcttttatacgctttatcataaaggggaaatggtggctcatgttccagttgattcattggcggaagatgctccaacttattaccgtgaggcaaaagttcctgagcgaattcaaaaatttactgacagcgaaaaatatcttccagaaattacagacagcgcggtcagtgaaattttcaaaaaacttttggctcaaccgacaattgctagcaagaaatcaatttatgaaacttatgattcgcgcgtgatgaccaacactgttgttgcaccaggctcagatagcgcagttttacgagtgcgtggaactaacaaagcacttgcgatgacaacggactgtaacgctcgctacctctatcttgatccagaaaaaggaggagcaatcgcagttgctgaagcggctcgtaatatcgtggcctctggtggaaaaccgcttgcgattactgactgtttgaactttggaaatccggaaaaaccagaacaattttgggaattaacaacggcggctgacggaatttcacgttcttgtttggctcttgatacaccggttatttcaggaaatgttagtctttacaatgaaacaaacggttcagctattttacctacgccgatgattggaatggttggtttgattgagaatgtaaaaaatattacgactcaagaatttaaaaaagcaggtgatttgattgtgctagtcggtcaaacctttgatgatttttcaggttctgaacttcaaaaaatgctgataggcgaaatttctggaagaattgattttgatttagaaactgaaaaaatcaatcaagattttgttttaaaagcaattactgacggattggtcagctcagcacatgacttggcagaaggaggattggcgattgctctagctgaatctgcttttgcaaatggcttaggcgttgatgtgaaagttgatataaccaatgcccaattattctcagaaacgcaaggtcgctttatactctcaatttcaccagaaaatcaagctacttttgaaaaattactgacagaaagttcggtcagtggcgaagtaatcggaaaagttactgacagcggaattttggaaatgaatgaactttctatttctactgacgaagctgtcagcatttatgaaggagcgttgccagctctgatgaaataa

SEQ ID NO: 53073 - protein, 739 aa, Lactococcus lactis subsp
MTLEMSPEQIQESKIYREWGLTDEEYLKIKDEILDGRLPNFTETGMYAVMWSEHCCYKNSKPVLKKFPTTGPQVLMGPGEGAGVVDIGDDLAVVFKAESHNHPSYVEPYEGAATGSGGIIRDIFSMGARPIAILDSLRFGPIDNGKTRHIVDQVTAGIAGYGNCIGIPTVGGEVAFDESYAGNPLVNVMCVGLIEHKHIQKGQAKGVGNSIFYVGAKTGRDGIHGASFASKEFGSGSETQRSAVQVGDPFMEKLLLEACIEVIQNHGDILVGIQDMGAAGLVSSTSEMASKAGSGLRLNLDNVPQRETEMIPYEMMLSESQERMVLCVKKGHEQEIIDLFKKYDLDAVNIGQVTDDGFYTLYHKGEMVAHVPVDSLAEDAPTYYREAKVPERIQKFTDSEKYLPEITDSAVSEIFKKLLAQPTIASKKSIYETYDSRVMTNTVVAPGSDSAVLRVRGTNKALAMTTDCNARYLYLDPEKGGAIAVAEAARNIVASGGKPLAITDCLNFGNPEKPEQFWELTTAADGISRSCLALDTPVISGNVSLYNETNGSAILPTPMIGMVGLIENVKNITTQEFKKAGDLIVLVGQTFDDFSGSELQKMLIGEISGRIDFDLETEKINQDFVLKAITDGLVSSAHDLAEGGLAIALAESAFANGLGVDVKVDITNAQLFSETQGRFILSISPENQATFEKLLTESSVSGEVIGKVTDSGILEMNELSISTDEAVSIYEGALPALMK

SEQ ID NO: 53074 - DNA, 2220 bp, Lactococcus lactis subsp
  CDS (1)..(2220): transl_table=11
atgactttggagatgtcaccagaacagattcaagaaagcaaaatttaccgtgagtggggattgacggatgaagaatatttgaaaatcaaggatgagattcttggtggacgcttgccaaactttacggaaactgggatgtatgccgtgatgtggtcagaacattgctgctacaaaaattcaaaacctgtcttaaaaaaatttccgacgactgggccgcaagtcttgatgggacctggtgaaggggctggggttgtggatattggtgatgatttggcggttgttttcaaagctgaatctcataatcatccatcttacgttgagccttatgaaggtgcagcaacaggttctggtggtattattcgtgatattttttcaatgggggctcgtccaattgcaattttggatagtttgcgttttggaccaattgacaatggtaaaacacgtcatattgttgaccaagtgacagccggaattgcgggatacggaaactgtattggcattccaacggttggtggcgaagtggcttttgatgaatcatacgctggtaatcctttagtgaatgtcatgtgtgtgggcttaattgagcataaacatattcaaaaaggacaagctaaaggtgtgggaaattctattttttatgtcggagcgaaaacaggacgtgacggcattcatggggcatcttttgcttccaaagaatttggttcgggctcagaaacacaacgttcagccgttcaagttggcgacccttttatggaaaaactattgcttgaagcctgtattgaagttatccaaaatcatggcgatattttagttggaattcaagatatgggtgccgctggcttggtttcatcgacttcagaaatggcttcaaaagctgggtcaggtttgcgtcttaacttggataatgtgccacagcgtgaaacagaaatgattccttatgaaatgatgttgtctgagtcacaagagcgtatggtgctttgtgtcaaaaaaggacatgaacaagaaattattgatttatttaaaaaatacgaccttgatgctgtgaatattggggaagtgactgatgatggcttttatacactttatcataaagggcaaatggttgctcatgttcctgttgattcattggcagaagatgcaccgacttattaccgtgaggcaaaagttcctgagcgcattcaaaaatttactgacagcgagaaatatcttccagaaattactgacagcgcggtcagtgaaattttcaaaaaacttttggctcaaccgacaattgccagcaagaaatcaatttatgaaacttatgattcgcgtgtgatgaccaacaccgttgttgcaccaggctcagatgccgcagttttacgagtgcgtggcacaaacaaagcacttgcgatgacaacggactgtaatgctcgttatctctatcttgacccagaaaaaggtggagcaattgcggttgccgaagcggctcgtaatattgtcgcctctggtggaaaaccacttgcgattaccgactgtttgaactttggaaatccggaaaaaccagaacaattctgggaattgacgactgccgctgatggaatttcacgttcttgtttggctcttgatacgcctgttatttcaggaaatgtcagtctttacaatgaaacgaacggttcagctattttacctaccccaatgattggaatggttggtttgattgaggatgtaaaaaatattacgactcaagaatttaaaaaagcgggtgatttgattgtattagtcgggcaaatttttgatgatttttcaggttctgaacttcaaaaaatgctaacaggcgaaatttctggcaagattgattttgatttagaaactgaaaaagtcaatcaagactttgttttaaaagcaattactgacggattaatcaattcagcgcacgatttgtcagaaggtggtctagcgattgccttagctgaatctgcttttgcaaatggcttaggaattgatgtagaagttgatttaagcaatgctcaattattctcagaaacgcaaggtcgctttgtactctcaatttcaccagaaaatcaagctgcttttgaaaaattactgacagaaagttctgctagtagcgaagtcatcggaaaagttactgacaacggaattttgaaaattaatgaactttctatttctactgacgaagctgtcagcatttatgaaggagcccttccatgtctgatgaaatga

SEQ ID NO: 53075 - protein, 739 aa, Lactococcus lactis subsp
MTLEMSPEQIQESKIYREWGLTDEEYLKIKDEILGGRLPNFTETGMYAVMWSEHCCYKNSKPVLKKFPTTGPQVLMGPGEGAGVVDIGDDLAVVFKAESHNHPSYVEPYEGAATGSGGIIRDIFSMGARPIAILDSLRFGPIDNGKTRHIVDQVTAGIAGYGNCIGIPTVGGEVAFDESYAGNPLVNVMCVGLIEHKHIQKGQAKGVGNSIFYVGAKTGRDGIHGASFASKEFGSGSETQRSAVQVGDPFMEKLLLEACIEVIQNHGDILVGIQDMGAAGLVSSTSEMASKAGSGLRLNLDNVPQRETEMIPYEMMLSESQERMVLCVKKGHEQEIIDLFKKYDLDAVNIGEVTDDGFYTLYHKGQMVAHVPVDSLAEDAPTYYREAKVPERIQKFTDSEKYLPEITDSAVSEIFKKLLAQPTIASKKSIYETYDSRVMTNTVVAPGSDAAVLRVRGTNKALAMTTDCNARYLYLDPEKGGAIAVAEAARNIVASGGKPLAITDCLNFGNPEKPEQFWELTTAADGISRSCLALDTPVISGNVSLYNETNGSAILPTPMIGMVGLIEDVKNITTQEFKKAGDLIVLVGQIFDDFSGSELQKMLTGEISGKIDFDLETEKVNQDFVLKAITDGLINSAHDLSEGGLAIALAESAFANGLGIDVEVDLSNAQLFSETQGRFVLSISPENQAAFEKLLTESSASSEVIGKVTDNGILKINELSISTDEAVSIYEGALPCLMK

SEQ ID NO: 53076 - DNA, 2220 bp, Lactobacillus plantarum
  CDS (1)..(2220): transl_table=11
atgcttaaaaagcaaccattatcacctacagatgttcgcgattctaaggtctatcgggattggggcttaaccgatgctgagtatcaattattaacggataaggtccttcaacgcttacctaacgagactgaaaccgggttgttttccggcatgtggagcgaacattgctcctacaagaattcaaaaccagtcttgaaaaaattttggacgcagggtgaacaggtacttgaagggcctggtgaaggcgccggtattatcgacatcggtgatggtcaggccgtggtctttaaagctgaaagtcataatcatccgtctgcagttgaaccttatgagggtgcggcaacgggtgtgggtggtatcattcgggacatcttttcgatgggggcccggccgattgcgctgctggacagtcttcgctttggggaaccgactgatgctcatacgaaatacttgatttcgcaagtagtcgccggcattggcggttatggcaactgtattggaattccgacaatcggtggtgatacggtatttgatgcgagttatcagaagaacccgttggtgaacgccatgtgtgttggaatcttggatcaagctgatattcagaagggccaagcaacaggaattggcaacgccgttatttatgtcggcgcaaaaacggggcgtgacggcattaacggtgcgtcctttgcctctgctgaatttaatgacgccaatgaaacccagcgttccgcggttcaagttggtgatccctttatggaaaaattattgatggaggcgtgtctcgaggttattcatgaacatcgtgatgttttaatcgggattcaagatatgggcgcggcgggcctagtttcctcctcagccgaaatggcgtccaaagcaggcagtgggttgtcactgaatcttgacttggtaccacaacgtgaaactggcatgacgccgtttgaactgatgctctctgaatcacaggagcggatgttactatgtgtcaaagctggtgccgaagcagaaatttatcaagtctttgaaaagtacggtcttgatgctgtcacaattggtaaagtgacagccggccaccagtatcaattattccatcatggtaagttagttgcagatgttcccgtcgatgcacttgcgaccaaagcgccggtctatgaacgcgaaaagaaacgaccaacgcgcttgaaccatcagagccatcatcaatttatgccacgactagttgatgcaactggcacattgaagaagatgctccaacagccaacgattgcttccaaagcgtcgttatatggaacgtatgactcgcaggtccaaacgaatacggtcgtcaagccgggttccgatgcgggggtcatacggattcgacatacggataaggcgttggcggtcaccaccgatgttaacgggcgatacttatacttaaacccccgtgtcggtggggaaatcgccgttgcggaagctgctcgaaacattgtcgcttccggtgggcaacctttaggcatcactgattgcttgaactatggtaatccagagaaacctgaacaattttacgatttggacgaatcggcgatgggcatcgctcgtgcatgccaattattcaatacgcccgtgatttctggcaatgtctcgttgaacaatgaatcgaacggggaagccatctatcccaccccaatgattgggatggtcgggttaattaagcatcagaaagatattacgactagcgattttaaacacgctggcgatgcagtctacgtgttaggtaccacagaagccgatttcaatggtagtgagctgcaaaagatgttgacgggaacgatcagtggcgagctgtttgattttgaccttgtgactgaaaatcgtaatcagcgtctattgttaactgcgattcaaaaaggactagttgctagtgcccacgatgtttctgaaggtggcttgattacgacgattgccgaatcatgttttccacaaaatatcggggtggaactggccagtgacttgcccgctgccaacttctttgcggaaacgcagtcacgatttgttatctcggtgacaccagcacagcaagccgcgtttgaaagtttaatggaaccatatgtgacctatttaggacgaacaactgcaacggatcggctacacgttcaaactgctgatcaggcgtttgatattaaggttagtttcgccaaacagttgtgggaaggggccttaccatgcctactgaagtaa

SEQ ID NO: 53077 - protein, 739 aa, Lactobacillus plantarum
MLKKQPLSPTDVRDSKVYRDWGLTDAEYQLLTDKVLQRLPNETETGLFSGMWSEHCSYKNSKPVLKKFWTQGEQVLEGPGEGAGIIDIGDGQAVVFKAESHNHPSAVEPYEGAATGVGGIIRDIFSMGARPIALLDSLRFGEPTDAHTKYLISQVVAGIGGYGNCIGIPTIGGDTVFDASYQKNPLVNAMCVGILDQADIQKGQATGIGNAVIYVGAKTGRDGINGASFASAEFNDANETQRSAVQVGDPFMEKLLMEACLEVIHEHRDVLIGIQDMGAAGLVSSSAEMASKAGSGLSLNLDLVPQRETGMTPFELMLSESQERMLLCVKAGAEAEIYQVFEKYGLDAVTIGKVTAGHQYQLFHHGKLVADVPVDALATKAPVYEREKKRPTRLNHQSHHQFMPRLVDATGTLKKMLQQPTIASKASLYGTYDSQVQTNTVVKPGSDAGVIRIRHTDKALAVTTDVNGRYLYLNPRVGGEIAVAEAARNIVASGGQPLGITDCLNYGNPEKPEQFYDLDESAMGIARACQLFNTPVISGNVSLNNESNGEAIYPTPMIGMVGLIKHQKDITTSDFKHAGDAVYVLGTTEADFNGSELQKMLTGTISGELFDFDLVTENRNQRLLLTAIQKGLVASAHDVSEGGLITTIAESCFPQNIGVELASDLPAANFFAETQSRFVISVTPAQQAAFESLMEPYVTYLGRTTATDRLHVQTADQAFDIKVSFAKQLWEGALPCLLK

SEQ ID NO: 53078 - DNA, 2319 bp, Leifsonia xyli subsp
  CDS (1)..(2319): transl_table=11
gtgaccgacaccaccgcccagcacgtcgtcgacacggtcgcgaacgcagccgcaacgccggagagagagcagccgttcgcagcgctcggcctcaaaccggacgagtacgcgagtatccgcgagatcctcggccgccggcccacgaacggcgagctggcgatgtactcggtgatgtggtccgaacactgctcctacaaatcctcgaagatctacctgcggcagttcgggcagaaggtcacaccggcgatgaagaagaacctcatggtcgggatgggcgagaacgcgggcgtcgtggacatcggcgagggctgggccgtcaccttcaaggtggagtcgcacaaccacccctcctacatcgagccgttccagggcgcggcgaccggcgtgggcgggatcgtccgcgacatcatctcgatgggcgcacgcccggtcgcggtgatggaccagctgcgcttcggtgcgatcgacgagccggacaccgcgcacgtggtgcatggcgtcgtctccgggatctcgttctacggcaactgcctcggcctgccgaacatcggcggcgagacgtacttcgacccggtgtaccagggcaacccgctggtcaacgcgctctcggtgggcgtgctgcgccacgaggatctgcacctcgcgaacgcctccggcgtgggcaacaaggtcgtgctgttcggcgcgcggaccggcggcgacgggatcggcggcgcgagcatcctggcgtccgacacgttctccgagggcgggccgaccaagcgcccggccgtgcaggtgggcgacccgttcgccgagaaggtgctcatcgagtgctgcctggagctgtaccgcgacaaactggtcgagggcatccaggacctcggggccgccggtatctcctgcgccaccagcgagctggcctcgaacggcgacggcgggatgttcatcgagctggacagcgtgctgctgcgcgacccgagtctcaccgccgaggagatcctcatgtcggagagccaggagcggatgatggcggtcgtcaagccggagcttctcgaccagttcctcgcggtgacggcgaagtgggatgtcgagaccagcgtcctcggcgaggtgaccggcaccggccgcctggtcatcaactggcacggcgaggagatcgccaacgtcgacccgcgcacggtcgcgatcgacggaccggtctacgagcgtcccgtcgcctacccgtcgtggatcgacgccctgcgggccgactcggcctcagcgctcgccctgccggtctcgggcgacgcgctgcgcgagcaggccctcgccctgctgggcagcgcgaacctggccgacaagtcctggatcacggaccagtacgactacttcgtcggcggcaacaccgcgctcgccttcccggacgacgcgggcatgatccgcgtggacgaggagagcgggctcggcttcgccatcgcgaccgacgcgaacggccgctactgccagctcgacccgaaagagggcgccaagctcgccctcgccgaggcgtaccgcaacgtcgccgcctccggcgcggtgcccgccgcggtcaccgactgcctcaacttcggcagcccggagaaccccgaggtcatgtggcagttctcgcaggccgtcgagggactctccgacgcctgcctggaactgggtatccccgtcaccggcggcaacgtctccttctacaaccagaccggcgatgtccccatcttcccaaccccggtggtcggcgtgctgggcgtgatcgacgatgtggcgcgccgcatcccggccggctggcaggacgagggcgagaacatctacctcctcggcatcacccgcgaagagctcgacggctccgcgtgggcggcgacggtccacggtcaccttggcggacgcccccccgcggtggacctcgccgccgagcgcaggctcgccgagaccctgcacgccgcgtcgcagcagggcctcatctcatccgcccacgacctcgccgacggcggcctcgcccaggccctcaccgagagcgtcctgcgcttcggcgtcggcgctcgcgtctggctgggcgacatcgccgagcgggacggtgtggacgcggcgagcgcgcttttcagcgagtcgaccgcccgcgcgatcgtctccgttccccgcgaggacgacgtgaagttccgcggtctctgcgatgggcgcggcgtccccgcgctccgcatcggcgtcaccgacgccggggccggaacagagccggtgctggagatccaggacctcttcgcgatcgaggtggcggagctgcgcagcgtccaccgttccacgcttgcggaacgcttcggaccggtggtgggctga

SEQ ID NO: 53079 - protein, 772 aa, Leifsonia xyli subsp
MTDTTAQHVVDTVANAAATPEREQPFAALGLKPDEYASIREILGRRPTNGELAMYSVMWSEHCSYKSSKIYLRQFGQKVTPAMKKNLMVGMGENAGVVDIGEGWAVTFKVESHNHPSYIEPFQGAATGVGGIVRDIISMGARPVAVMDQLRFGAIDEPDTAHVVHGVVSGISFYGNCLGLPNIGGETYFDPVYQGNPLVNALSVGVLRHEDLHLANASGVGNKVVLFGARTGGDGIGGASILASDTFSEGGPTKRPAVQVGDPFAEKVLIECCLELYRDKLVEGIQDLGAAGISCATSELASNGDGGMFIELDSVLLRDPSLTAEEILMSESQERMMAVVKPELLDQFLAVTAKWDVETSVLGEVTGTGRLVINWHGEEIANVDPRTVAIDGPVYERPVAYPSWIDALRADSASALALPVSGDALREQALALLGSANLADKSWITDQYDYFVGGNTALAFPDDAGMIRVDEESGLGFAIATDANGRYCQLDPKEGAKLALAEAYRNVAASGAVPAAVTDCLNFGSPENPEVMWQFSQAVEGLSDACLELGIPVTGGNVSFYNQTGDVPIFPTPVVGVLGVIDDVARRIPAGWQDEGENIYLLGITREELDGSAWAATVHGHLGGRPPAVDLAAERRLAETLHAASQQGLISSAHDLADGGLAQALTESVLRFGVGARVWLGDIAERDGVDAASALFSESTARAIVSVPREDDVKFRGLCDGRGVPALRIGVTDAGAGTEPVLEIQDLFAIEVAELRSVHRSTLAERFGPVVG

SEQ ID NO: 53080 - DNA, 2238 bp, Leptospira interrogans serogroup Icterohaemorrhagiae serovar
  CDS (1)..(2238): transl_table=11
atggaaaaagacgtcgtttccttagaagacgccctggagcacgggcttaccaaagaagaatttcaaaagattcaagaaattttaggaagaattccaaattctaccgaacttggaattttttccgcgatgtggtcggaacactgttcttataaaaactcgattctaaaattaaaaactcttccgacaacctcagataaactacttgcaaaagcaggagaagaaaacgctggagcaatggatataggtgacggcttagcagtggttttcaaaatagaaagccataatcatcctacggctgtagaaccgtatcagggagcagcgactggtgtaggtggaattatgagagatatttttacgatgggcgctcgtccgatcgtatctctcaattcacttcgttttggaaatccggatgaacctaaaaataaatatctactttctcgtgcggtaaagggaatcggagactacggaaactcacttggaattgcagtgtcgggtggagaactttttatagatgaatgtttttccaaaaatccactcgtaaatgcaatgaccgtcggggttgtgcgtcatgatcagatggcgagtgcgactacgggtggacaagttggtaactctgtttacatcgtaggagctacgaccggaagggacggaattcacggagcttcttttgcatccaaggatctttccaaagaatctgaatcgaaacgatctgcggtgcaagtaggggatccgtttatggaaaagctcttgatggaagcaagtttagaagcgattcagaaaggacttctcgtaggaattcaagacatgggtgctgccggaatttcttgtgctacttccgaaatgagcgccaaaggaaaaaccggaatgaagatcgatttagatcttgttccatttagagaaaccggaatgaacgcatacgaagcgatgttatccgaatctcaagaaagaatgttggtcgtacctaaaaagggaaaagaatcggaactcgtatcaatattcgaaaaatggaatttaaacgcggtcaagatcggagaagttacagcagatggaatgatcgaaatttatatgggcggaaaactgaaagctaaaattcctgccgaatcacttgtgttaggtggaggagctccccgttacgaaagagaaaccaaacgtccttcatatctggatgcggtcaaaacttggaaaccagatgagattcccgacgtgaccaaaggtgcaaattcaaaagagatattgctcaaaattctttcttcttggaatgtgtgttctagaaaaccgatcacggaacaatatgatagtgaagttggtttagtaaaactcatcggtcccggtttagacgggggactttccgctattcccggtacaaataaagcacttgcaactgcaaccgattgtaattccagatatacgtatttagatccttataaaggtgcggaatttgccgtatgtgaagcagctcgaaatgtgtatgtgaccggtgcaactccttacggagtgactaataatcttaattttgcaaatccttatattcctgaaaactactatatattttctgaatgtattcgtggaatgggcgacgcttgtcgttttctgggacttcctgtgacgggtggtaatgtatctttttacaatgaatctccggaaggtccaatttttccaactcctacgattggtatggtgggaattttagaaaataaggaaaaacttatattcaattttccgaaagaaatcggggttgaacttgcggttctgggaaattttcgtccttctctcgggggaagtgaatatttgaaaaaaatccacggtcaaatcaacggaagtattcccgagttggatattaaagaagaattagaactttgtaaactaatcctttccttgaatgaaagtagaattttaaaatctgcgaaagatctttctttgggaggaattgcagtagcactttctaaaacggtacttttttcggggttaggaattgagtctgacctaacgtctcttagacggaacagattggatttgaccctttttggagaaagttcgacagcggttttggtaggatttgattcgttatcgaaagaagacattcgtaaacagactgaagcttatggattaaagttctatccgataggaaaaacaaattcttccggaattttagaaatcaaagacgccgaaattaaaatttctttccaggaattgagcggaccttatgaaaaaggtttagaggcggtttttgcattataa

SEQ ID NO: 53081 - protein, 745 aa, Leptospira interrogans serogroup Icterohaemorrhagiae serovar
MEKDVVSLEDALEHGLTKEEFQKIQEILGRIPNSTELGIFSAMWSEHCSYKNSILKLKTLPTTSDKLLAKAGEENAGAMDIGDGLAVVFKIESHNHPTAVEPYQGAATGVGGIMRDIFTMGARPIVSLNSLRFGNPDEPKNKYLLSRAVKGIGDYGNSLGIAVSGGELFIDECFSKNPLVNAMTVGVVRHDQMASATTGGQVGNSVYIVGATTGRDGIHGASFASKDLSKESESKRSAVQVGDPFMEKLLMEASLEAIQKGLLVGIQDMGAAGISCATSEMSAKGKTGMKIDLDLVPFRETGMNAYEAMLSESQERMLVVPKKGKESELVSIFEKWNLNAVKIGEVTADGMIEIYMGGKLKAKIPAESLVLGGGAPRYERETKRPSYLDAVKTWKPDEIPDVTKGANSKEILLKILSSWNVCSRKPITEQYDSEVGLVKLIGPGLDGGLSAIPGTNKALATATDCNSRYTYLDPYKGAEFAVCEAARNVYVTGATPYGVTNNLNFANPYIPENYYIFSECIRGMGDACRFLGLPVTGGNVSFYNESPEGPIFPTPTIGMVGILENKEKLIFNFPKEIGVELAVLGNFRPSLGGSEYLKKIHGQINGSIPELDIKEELELCKLILSLNESRILKSAKDLSLGGIAVALSKTVLFSGLGIESDLTSLRRNRLDLTLFGESSTAVLVGFDSLSKEDIRKQTEAYGLKFYPIGKTNSSGILEIKDAEIKISFQELSGPYEKGLEAVFAL

SEQ ID NO: 53082 - DNA, 2238 bp, Leptospira interrogans
  CDS (1)..(2238): transl_table=11
atggaaaaagacgtcgtttccttagaagacgccctggagcacgggcttaccaaagaagaatttcaaaagattcaagaaattttaggaagaattccaaattctaccgaacttggaattttttccgcgatgtggtcggaacactgttcttataaaaactcgattctaaaattaaaaactcttccgacaacctcagataaactacttgcaaaagcaggagaagaaaacgctggagcaatggatataggtgacggcttagcagtggttttcaaaatagaaagccataatcatcctacggctgtagaaccgtatcagggagcagcgactggtgtaggtggaattatgagagatatttttacgatgggcgctcgtccgatcgtatctctcaattcacttcgttttggaaatccggatgaacctaaaaataaatatctactttctcgtgcggtaaagggaatcggagactacggaaactcacttggaattgcagtgtcgggtggagaactttttatagatgaatgtttttccaaaaatccactcgtaaatgcaatgaccgtcgggattgtgcgtcatgatcagatggcgagtgcgactacgggtggacaaattggtaactctgtttacatcgtaggagctacgaccggaagggacggaattcacggagcttcttttgcatccaaggatctttccaaagaatctgaatcgaaacgatctgcggtgcaagtaggggatccgtttatggaaaagctcttgatggaagcaagtttagaagcgattcagaaaggacttctcgtaggaattcaagacatgggtgctgccggaatttcttgtgctacttccgaaatgagcgctaaaggaaaaaccggaatgaagatcgatttagatcttgttccatttagagaaaccggaatgaacgcatacgaagcgatgttatccgaatctcaagaaagaatgttggtcgtacctaaaaagggaaaagaatcggaactcgtatcaatattcgaaaaatggaatttaaacgcggtcaagatcggagaagttacagcagatggaatgatcgaaatttatatgggcggaaaactgaaagctaaaattcctgccgaatcacttgtgttaggtggaggagctccccgttacgaaagagaaaccaaacgtccttcatatctggatgcggtcaaaacttggaaaccagatgagattcccgacgtgaccaaaggtgcaaattcaaaagagatattgctcaaaattctttcttcttggaatgtgtgttctagaaaaccgatcacggaacaatatgatagcgaagttggtttagtaaaactcatcggtcccggtttagacgggggactttccgctattcccggtacaaataaagcacttgcaactgcaaccgattgtaattccagatatacgtatttagatccttataaaggtgcggaatttgctgtatgtgaagcagctcgaaatgtgtatgtgaccggtgcaactccttacggagtgactaataatcttaattttgcaaatccttatattcctgaaaattactatatattttctgaatgtattcgtggaatgggcgacgcttgtcgttttctgggacttcctgtgacgggtggtaatgtatctttttacaatgaatctccggaaggtccaatttttccaactcctacgattggtatggtgggaattttagaaaataaggaaaaacttatattcaattttccgaaagaaatcggggttgagcttgcggttctgggaaattttcgtccttctctcgggggaagtgaatatttgaaaaaaatccacggtcaaatcaacggaagtattcccgagttggatattaaagaagaattagaactttgtaaactaatcctttccttgaatgaaagtagaattttaaaatctgcgaaagatctttctttgggaggaattgcagtagcactttctaaaacggtacttttttcggggttaggaattgagtctgacctaacgtctcttagacgaaacagattggatttgaccctttttggagaaagttcgacagcggttttggtaggatttgattcgttatcgaaagaagacattcgtaaacagactgaagcttatggattaaagttctatccgataggaaaaacaaattcttccggaattttagaaatcaaagacgccgaaattaaaatttctttccaggaattgagcggaccttatgaaaaaggtttagaggcggtttttgcattataa

SEQ ID NO: 53083 - protein, 745 aa, Leptospira interrogans
MEKDVVSLEDALEHGLTKEEFQKIQEILGRIPNSTELGIFSAMWSEHCSYKNSILKLKTLPTTSDKLLAKAGEENAGAMDIGDGLAVVFKIESHNHPTAVEPYQGAATGVGGIMRDIFTMGARPIVSLNSLRFGNPDEPKNKYLLSRAVKGIGDYGNSLGIAVSGGELFIDECFSKNPLVNAMTVGIVRHDQMASATTGGQIGNSVYIVGATTGRDGIHGASFASKDLSKESESKRSAVQVGDPFMEKLLMEASLEAIQKGLLVGIQDMGAAGISCATSEMSAKGKTGMKIDLDLVPFRETGMNAYEAMLSESQERMLVVPKKGKESELVSIFEKWNLNAVKIGEVTADGMIEIYMGGKLKAKIPAESLVLGGGAPRYERETKRPSYLDAVKTWKPDEIPDVTKGANSKEILLKILSSWNVCSRKPITEQYDSEVGLVKLIGPGLDGGLSAIPGTNKALATATDCNSRYTYLDPYKGAEFAVCEAARNVYVTGATPYGVTNNLNFANPYIPENYYIFSECIRGMGDACRFLGLPVTGGNVSFYNESPEGPIFPTPTIGMVGILENKEKLIFNFPKEIGVELAVLGNFRPSLGGSEYLKKIHGQINGSIPELDIKEELELCKLILSLNESRILKSAKDLSLGGIAVALSKTVLFSGLGIESDLTSLRRNRLDLTLFGESSTAVLVGFDSLSKEDIRKQTEAYGLKFYPIGKTNSSGILEIKDAEIKISFQELSGPYEKGLEAVFAL

SEQ ID NO: 53084 - DNA, 2220 bp, Listeria innocua
  CDS (1)..(2220): transl_table=11
atgcctaacatggagccaacgacaaaagaaattaaagaacaaaagatttatcaagaaatgggtttaacggatagtgaatatgagcttgtttgttcgattcttggacgcgagcctaattatactgaaacaggtcttttctctgttatgtggtcggaacattgtagctataaaaattctaaaccagtactcagaaaatttccaacagagggaaaacaagttttgcaaggaccgggtgaaggtgctgggattgttgatattggcgatggtttaggtgttgcttttaaagtcgaaagtcataatcatccatcatacgtggagccgtaccaaggagctgcaactggtgtcggcggaattattcgtgatgttttctcgatgggagctagaccgattgcaatgctgaactcgcttcgttttggtgagctagatactccacatgcgaagtacttagttagtgaagttgttgctgggattgctggatatggtaattcgattgggattccaactgttggcggcgaaatccaatttgatccttgttacacaaaaaatccattagtaaatgcgatgtgtgttggattaattgaagcaaaagatattcaaaaagggcaagcaaaaggaattggcaacccggtgatgtatgttggcgctaaaactggtcgtgacgggattcacggtgccacttttgcatctgtagagtttagtgaagaaggcgaacaacaacgttctgctgtacaagtgggcgatccttttatggagaaattgttgcttgaggcttgtttagatgtgattcgtgatcattcggatattttagttgggattcaagatatgggagctgctgggcttgttagctcaagttctgaaatggcttcaaaagcgggtgctgggctagaattaattatggatgatgtgccgcaacgtgaactacatatgacgccatacgaaatgttactttctgaatctcaagaacggatgcttctatgtgtgaaaaaaggtcatgtagaagaaatccaagctttatttgaacgatatggtttagaagcagttgtgattggaaaagtaacggacgataaaatgtataaaattattcatcacggtgaagtggttgcgaacgttcctgtagatgcgcttgcagaagatgcgccagtttatcataaaccttcgaaagaaccagctcgttatcaagctttccaagaagaggatgcatttgtgccggtgattgatgatgtggttggtgtgtggaaagagttacttgctcagccaacgattgctagtaagcgacatatttatgaacaatatgattatcaagtgcgcacagacacagcagttgtgcccggatcagatgcggcaattgttcgtgtgcgtggaaccgagaaggcgattgcgatgacaactgactgtaactcgcgctatttgtatcttgacccagaagtaggcggagcgatagcggttgcggaagcggcgcgcaatatcgtttgttctggcgggaagccactcgcgattacagatggacttaattttggtaatcctgaaaaacctgaaattttttgggaaattgaaaaagctgctgatggcattagtgcagcttgtctagagcttgatacgccagtcatttcgggaaatgtttcgctttataatgaaacagatggtacaggaatttatccaacgccggtgattgggatggttggtttagtagaggatttggcacacattacgacacaagattttaaaaatagtggcgatgtgattttcttaattggtgaaacaaaagctgaatatagtggctcggaattacagaaattacaacaagggaaaattagcggacgcgcgccagaattagatttagcgacagagaaaaaataccaacaattacttctaaccgcgattcaggaaggattagttgcttccagtcatgatttagcagaaggcgggtttggtgttgctcttgcggaagcgacatttaaagcagggcttggtgcggatgtagaagtaccatttgagttgaatcaactattcagtgaatcacaatcacgtttcttagtatctgtaaaaccagaaaatgaagcagcttttgctaaattaatggaactggaaaaagtatatcgacttggtgtagtaacggcagatgaaacgattcgcgtgaaacataaagaagagctagtaactgcgagtacatctgatttacgatctatttgggaaggggctattccatgcttgctgaagtaa

SEQ ID NO: 53085 - protein, 739 aa, Listeria innocua
MPNMEPTTKEIKEQKIYQEMGLTDSEYELVCSILGREPNYTETGLFSVMWSEHCSYKNSKPVLRKFPTEGKQVLQGPGEGAGIVDIGDGLGVAFKVESHNHPSYVEPYQGAATGVGGIIRDVFSMGARPIAMLNSLRFGELDTPHAKYLVSEVVAGIAGYGNSIGIPTVGGEIQFDPCYTKNPLVNAMCVGLIEAKDIQKGQAKGIGNPVMYVGAKTGRDGIHGATFASVEFSEEGEQQRSAVQVGDPFMEKLLLEACLDVIRDHSDILVGIQDMGAAGLVSSSSEMASKAGAGLELIMDDVPQRELHMTPYEMLLSESQERMLLCVKKGHVEEIQALFERYGLEAVVIGKVTDDKMYKIIHHGEVVANVPVDALAEDAPVYHKPSKEPARYQAFQEEDAFVPVIDDVVGVWKELLAQPTIASKRHIYEQYDYQVRTDTAVVPGSDAAIVRVRGTEKAIAMTTDCNSRYLYLDPEVGGAIAVAEAARNIVCSGGKPLAITDGLNFGNPEKPEIFWEIEKAADGISAACLELDTPVISGNVSLYNETDGTGIYPTPVIGMVGLVEDLAHITTQDFKNSGDVIFLIGETKAEYSGSELQKLQQGKISGRAPELDLATEKKYQQLLLTAIQEGLVASSHDLAEGGFGVALAEATFKAGLGADVEVPFELNQLFSESQSRFLVSVKPENEAAFAKLMELEKVYRLGVVTADETIRVKHKEELVTASTSDLRSIWEGAIPCLLK

SEQ ID NO: 53086 - DNA, 2220 bp, Listeria monocytogenes serotype 4b
  CDS (1)..(2220): transl_table=11
atgcctaacatggagccaacgacaaaagaaattaaagaacaaaagatttatcaagaaatgggcttaactgatagtgaatatgagcttgtttgttcgattcttggacgcgagcctaattatacagaaactgggcttttctctgttatgtggtcggaacattgtagctataaaaattctaaaccagtacttcggaaatttcctacagaaggcaaacaagtattacaaggacctggtgaaggcgctgggattgtcgatattggcgatggtttaggtgttgcttttaaagtggagagtcataatcatccatcctacgtggagccgtatcaaggggctgcgactggggtcggcgggattatccgtgatgtgttctcgatgggagctagaccgattgcaatgcttaactcgcttcgttttggtgagttagatacaccccatgcgaaatacttagttagtgaagtcgttgcgggaatcgcaggatacggtaactccattgggattccaacggttggtggcgaaatccaatttgatccttgttatacaaaaaatccgctagttaatgcaatgtgtgttggtttaatcgaggcgaaagatattcaaaaagggcaagcaaaaggaattggtaatccggtgatgtatgttggcgctaaaactggtcgtgacgggattcatggtgctacttttgcttctgtagagtttagtgaagaaggtgaacaacaacgctctgctgtacaggttggcgatccttttatggagaaattgttgcttgaagcttgtttagatgtgattcgtgatcattcggatattttagtgggaattcaagatatgggagcagctggtctcgttagttcaagttctgaaatggcctcaaaagcgggcgctgggctagaattaattatggatgatgtgccgcaacgagaactaaatatgacgccttatgaaatgttgctttctgaatcgcaagaacggatgcttctatgtgtgaaaaaagggcatgtggaagaaatccaagcgttatttgaacgttatggtttagaggctgttgtgattggtcaagtaacagatgataaaatgtacaaaattattcatcatggtgaagtagttgcgaacgttcctgtagatgcgcttgcagaagatgcgccagtttatcataaaccttccaaagagccagctcgttatcaagctttccaagaagaggaatcgtttgtgccagttatggaagatgtggtcggtgtttggaaggaactgcttgctcagccaacgattgctagtaagcgccatatttatgagcaatatgattatcaagttcggacggatacagctgttgtacctggttcagatgcggcgattgttcgtgtgcgtgggaccgagaaggcaattgccatgacaactgattgtaactcacgctatttgtatcttgatccaaaagtaggcggagcgatagcggttgcggaagcggcgcgcaatatcgtttgttctggcgggaaaccactagcgattacagatggactgaattttggtaatcctgaaaaaccagaaattttttgggagattgaaaaagcggctgatggtattagtgcggcttgtttagaacttgatacgcctgttatctctggtaatgtatcgctttataatgaaacagatggtaccggaatttatccaacgccagtcattggaatggttggtttagtagaagatttggcacatattacgacacaagattttaaaaatagtggcgatgtgattttcttaattggtgaaacaaaagctgaatatagtggttcggaattgcaaaaattgcaacaagggaaaattagcggacgtgcgccggaattagatttaacgacagagaaaaaataccaacaattacttctaacggcgattcaggaaggtctagttgcttctagtcacgatttggcagaaggcggatttggtgttgctcttgcggaagcgacttttaaagcagggcttggtgcggatgtagaagtaccgtttgagttgaatcaactattcagtgaatcgcaatcacgtttcttagtatcggtaaaaccggaaaacgaagcagcttttgcgcaattaatggaactggaaaaagtataccgccttggtgtagtaaccgaggatgatacgattcgtgtgaaacataaggaagatcaagttacagcgaaaacaacggaattacgatccatttggcaaggggctattccatgcttgctgaagtaa

SEQ ID NO: 53087 - protein, 739 aa, Listeria monocytogenes serotype 4b
MPNMEPTTKEIKEQKIYQEMGLTDSEYELVCSILGREPNYTETGLFSVMWSEHCSYKNSKPVLRKFPTEGKQVLQGPGEGAGIVDIGDGLGVAFKVESHNHPSYVEPYQGAATGVGGIIRDVFSMGARPIAMLNSLRFGELDTPHAKYLVSEVVAGIAGYGNSIGIPTVGGEIQFDPCYTKNPLVNAMCVGLIEAKDIQKGQAKGIGNPVMYVGAKTGRDGIHGATFASVEFSEEGEQQRSAVQVGDPFMEKLLLEACLDVIRDHSDILVGIQDMGAAGLVSSSSEMASKAGAGLELIMDDVPQRELNMTPYEMLLSESQERMLLCVKKGHVEEIQALFERYGLEAVVIGQVTDDKMYKIIHHGEVVANVPVDALAEDAPVYHKPSKEPARYQAFQEEESFVPVMEDVVGVWKELLAQPTIASKRHIYEQYDYQVRTDTAVVPGSDAAIVRVRGTEKAIAMTTDCNSRYLYLDPKVGGAIAVAEAARNIVCSGGKPLAITDGLNFGNPEKPEIFWEIEKAADGISAACLELDTPVISGNVSLYNETDGTGIYPTPVIGMVGLVEDLAHITTQDFKNSGDVIFLIGETKAEYSGSELQKLQQGKISGRAPELDLTTEKKYQQLLLTAIQEGLVASSHDLAEGGFGVALAEATFKAGLGADVEVPFELNQLFSESQSRFLVSVKPENEAAFAQLMELEKVYRLGVVTEDDTIRVKHKEDQVTAKTTELRSIWQGAIPCLLK

SEQ ID NO: 53088 - DNA, 2148 bp, Methanosarcina acetivorans
  CDS (1)..(2148): transl_table=11
atgttacctgaagaagatctgaagattattcgaaaagaacttgggagagagcctaccctggtagagcagggctgttttttaaatctgtggagcgaacactgttcataccgctcgagcgcccctctccttaaaactttcacaagcactggcgaaaatgtactgatcggtcccggagacgatgctgcaatcattaaattcgaagacggatatgtgcttgccataggcatggaaagccacaaccacccttcatatgtagacccctacaacggggcagctaccggaattggaggaatcgtgagggacatcatatctatgggggcccgtccgatcgctcttatggaccccctctatttcgggcctctggacaccccgaaaaaccttttccttttcgaacagatcattaaaggaatcgcagggtacgggaattgcataggagtgccagttgtaaacggagagactttttttgatcgccgttacagcggaaacccgctggtaaacgttgttgcagtcgggctctgtaaggaagaaaatgttaccacctcccgctcccagaaagccgaaaacaagctcattcttgcaggttcaagcaccggaaaagacggattaggaggcgcttcctttgcttccagagacctgtccgaatccgctgaagccgaagaccgcccgagcgttcaggtcggggacccctacactgaaaagcttgtcatggaaatgaccctcgaagccatagaaaaaggctatgtgaaatcctgcaaagaccttggggctgcagggcttgggggagcaagctcggaactggctgcaaaaggaggccttggagcccgcattattgcagatgcggtccctcagcgcgaacccaatatgaatgcctacgaaatcctgcttgccgagtctcaggaacgcatgctttttgaagtagctcctgaagatgtcgatgcagtccttgccctggtccagaaatatgacctgaacggggctgtggtcggataccttacgaaagagcccacctataccgttgagttcggaggggaaatcgttgccgatattccaatagcttttctgacgggaggcgcccctacctgcgaaaagccctcagaagcccccactctgagggaggaaggcaaaaaaccagaaactccggaagacctgaaagtggctttcctgaaagtcctgtcttcctacaacattgcctcaaaggaatggatctacaggcagtacgaccatgaggtccagctcagaaccgttgtcaagcccggagaagattccggagtgctaagaatcaccggtacaaaaggaattgcacttacctgcggctgccagcccagagccaccctgcttgacccctacaacggaggaaagactgcaattattgaaaactccatgaatcttgcagtaaaaggggcagaacctctggcaatcgtaaattgccttaacttcggaaacccggagcgccctgaaacatactggcagttcgaaaacgccgttctcgggcttggagatgaagccagaaagctttcaatcccggttgtcggaggaaatgtttctctctataacgagagcgatgagttcaagactgcaatccctcccaccccatcgataggcatgatcgggaaagtggatctcgaaattcctctcccttcaggcttctttgcaaaagacggagatagcattatccttgtaggggagacaactcctgaaatgggaggctccgaatactatgcctgcatggattcaggaaacgccggaatggttcccgcagttccggagaatgcccctgagcttataaaagccataatcgaagctgttaaaagcggaaagctgagctctgcacatgacctctccctcggaggaatcggggcagggcttgcaaggatgtgcaggagcatgggtgcaaaagtagacctcagtgaacttgcaggagaaacccaggcagacgaattactgttttcagaagctcccgcaagggccctgcttgcaatctccgagcctgaagccgtacgggaaatccttaaagacgtgccccatgcagtaatcggtaaagtgggcggtgagacccttgaaatcaaaggaaagaatttcgagctttccgtttccttaaaagaaatcgcagaagcttacggcagcctcactcgattcatgatgggatga

SEQ ID NO: 53089 - protein, 715 aa, Methanosarcina acetivorans
MLPEEDLKIIRKELGREPTLVEQGCFLNLWSEHCSYRSSAPLLKTFTSTGENVLIGPGDDAAIIKFEDGYVLAIGMESHNHPSYVDPYNGAATGIGGIVRDIISMGARPIALMDPLYFGPLDTPKNLFLFEQIIKGIAGYGNCIGVPVVNGETFFDRRYSGNPLVNVVAVGLCKEENVTTSRSQKAENKLILAGSSTGKDGLGGASFASRDLSESAEAEDRPSVQVGDPYTEKLVMEMTLEAIEKGYVKSCKDLGAAGLGGASSELAAKGGLGARIIADAVPQREPNMNAYEILLAESQERMLFEVAPEDVDAVLALVQKYDLNGAVVGYLTKEPTYTVEFGGEIVADIPIAFLTGGAPTCEKPSEAPTLREEGKKPETPEDLKVAFLKVLSSYNIASKEWIYRQYDHEVQLRTVVKPGEDSGVLRITGTKGIALTCGCQPRATLLDPYNGGKTAIIENSMNLAVKGAEPLAIVNCLNFGNPERPETYWQFENAVLGLGDEARKLSIPVVGGNVSLYNESDEFKTAIPPTPSIGMIGKVDLEIPLPSGFFAKDGDSIILVGETTPEMGGSEYYACMDSGNAGMVPAVPENAPELIKAIIEAVKSGKLSSAHDLSLGGIGAGLARMCRSMGAKVDLSELAGETQADELLFSEAPARALLAISEPEAVREILKDVPHAVIGKVGGETLEIKGKNFELSVSLKEIAEAYGSLTRFMMG

SEQ ID NO: 53090 - DNA, 2148 bp, Methanosarcina barkeri
  CDS (1)..(2148): transl_table=11
atgttacctgaagaagaccttaagatcattaaaaaagaactcgggcgagagcccacccttgtagaacagggctgctttttaaacttatggagcgaacactgttcctaccgctcaagtgcccctctcctgaaaacttttaccagtaagggtgaaaacgtaattattggcccgggggacgatgctgcaattataaaattcgatgatggctatgtgcttgccataggtatggaaagccataaccacccttcatatgttgacccctacaacggagctgctaccgggataggaggcatcgtaagagatataatctccatgggagcccgcccaatagccctcatggacccactctatttcgggcctctggacactccaaaaaatatgtttctctttgaacagataattaagggaattgcagggtatggaaactgcataggagtgccagtggtcaatggtgagactttctttgaccgaagatacagtggaaaccctcttgtaaatgtggttgcagtagggctctgccgggaagaagaggtcataactgcccgctcccagaaagccggaaacaagcttgtgctcgcaggctccagcacaggaaaagacggacttggaggagcttcctttgcctccagagacctttccgaatcagccgaagctgaagaccgcccgagcgtccaggtgggagacccatatactgaaaagctcgtaatcgaaatgacgctggaagccatggagaagggttatataaaatcctgcaaagacctgggagccgctggtctaggaggggcaagcgcggaactggctgcaaagggaggacttggagcccacattactgcagatgccgtgacccagcgcgaacccaatatgaatgcttatgaaatcctgcttgcggaatctcaggaacgcatggtctttgaagtagcccctgaagacgtcgatgccgtacttgctctggtagcaaagtacgaccttaatggggccgtagtggggtacttaacagagaaaccaaactacacagttgaattcaaaggggaagtcgttgtagatattccgattgatttcctgacaggtggagctccgacctgcgagaaatcctcagtagctcctattcctcaggttgaagaaggtaaagcccccaaaactccggaagaccttaaggcagccttcctgaaagttatctcttcttacaatattgcctcaaaggaatggatctacaggcagtacgatcatgaggtccagttaagaacagttatcaaacccggagaagacgctggcgtgctcaagataactgataaaaaaggactcgtactttcctgcggctgccagccaagagctacccttcttgacccatataacggaggaaagaatgtagtaattgaaaacgccatgaaccttgcagtaaaaggggccgacgggcttgcgattgtaaactgcctgaactttggaaacccggatcgtccggagatctactggcaactcaaaaactccgtacttgggcttggagatggagcaagggaactctcaattccggttgtgggaggaaatgtttccctgtataacgaaagcgatgaatttaagaccgcaattctcccaaccccttcgataggaataataggaaaagttaactttgaaactcctcttccttcaagcttctttgcaaaatccggagacgctatcattttggtaggagagacaactgcagatatgggaggttccgaatactatgcctgtttcgaggccctgaatgccggaaaagttccttctgtcccgaaaaatgctcctgagataataaaagccgtaatcgaagctgcaaggagcggaaaactcagctcggcacacgacctttccctgggaggaattgccgcaggacttgcgaggatgtgcaggaattccggtgcaaaggtagacctgagtgaagtttcagaattaaaagctgaggaactattattctcagaagctccagcaagagcgctgcttgctacaagtgaaccagaggctgtactcgaaatcctcaaagatgtgcctcatatggtaatcggcaaagtcgaaggcaattcccttgaagttaaaggaaaagactttgagatttccctctccctcaaagaaatctccgatgcatacagcagcctgacaaggtttatgatgagataa

SEQ ID NO: 53091 - protein, 715 aa, Methanosarcina barkeri
MLPEEDLKIIKKELGREPTLVEQGCFLNLWSEHCSYRSSAPLLKTFTSKGENVIIGPGDDAAIIKFDDGYVLAIGMESHNHPSYVDPYNGAATGIGGIVRDIISMGARPIALMDPLYFGPLDTPKNMFLFEQIIKGIAGYGNCIGVPVVNGETFFDRRYSGNPLVNVVAVGLCREEEVITARSQKAGNKLVLAGSSTGKDGLGGASFASRDLSESAEAEDRPSVQVGDPYTEKLVIEMTLEAMEKGYIKSCKDLGAAGLGGASAELAAKGGLGAHITADAVTQREPNMNAYEILLAESQERMVFEVAPEDVDAVLALVAKYDLNGAVVGYLTEKPNYTVEFKGEVVVDIPIDFLTGGAPTCEKSSVAPIPQVEEGKAPKTPEDLKAAFLKVISSYNIASKEWIYRQYDHEVQLRTVIKPGEDAGVLKITDKKGLVLSCGCQPRATLLDPYNGGKNVVIENAMNLAVKGADGLAIVNCLNFGNPDRPEIYWQLKNSVLGLGDGARELSIPVVGGNVSLYNESDEFKTAILPTPSIGIIGKVNFETPLPSSFFAKSGDAIILVGETTADMGGSEYYACFEALNAGKVPSVPKNAPEIIKAVIEAARSGKLSSAHDLSLGGIAAGLARMCRNSGAKVDLSEVSELKAEELLFSEAPARALLATSEPEAVLEILKDVPHMVIGKVEGNSLEVKGKDFEISLSLKEISDAYSSLTRFMMR

SEQ ID NO: 53092 - DNA, 2202 bp, Methanococcus jannaschii
  CDS (1)..(2202): transl_table=11
atggatgagaatgatttaaagtatatagaaaaagttttaggaagaaagccaaaccacatagagttagcaatgtttgaaaacttatggagtgagcactgtgcttatagaacctcaaaaaagctcttaagaatgtttgctaaaacagttaatgaaaagacctctaaaaatatagttgttggaattggagatgatgccgctgtaattagattgaaaaatgatatctgcttagcaatagctatggaaagccataaccacccatcatacatagacccatataatggagctgctacaggagttggtgggattgttagagatgttttgtcaatgggagctaagccaatagctttattagacccattaaggtttggagatatatttggaaaggaaggggataaagttagatggctaattgaaggagttgttaaaggtattggagattatggaaataggattggagtcccaacagttggaggagagtgtgagtttgatagctcttttgattacaacaacttagtaaatgttgtttgtgtcggcttagttaaggagaatgaaatcattacaggtaaagctaaagagccaggattgtctttaatattaatcggctcaacaggaagggatggaataggaggagcttcatttgcatcaaaggatttaactgaggaaagtgaggaagaaaggccaagtgttcaggttggggatgcattttctgaaaaatgtttaattgatgctgttttagaggcagtaaaaacaggaaaagttaaagctatgaaggatttaggggctgcggggctttcaggagcttcatctgagatgtgttatggtggaggagtaggatgtgagctttacttagaaaatgttgtattgagagagccattaactccttacgaaattatggtttctgagagtcaggagaggatgttattagctgttgaaccaggaagtgaggaggaaataattgaaatatttaaaaagtatgaactacctgcatcagttattggaaaaacaattccagagaagaggattattgccaaatacaaaggagaagttgttgttgatttaccattagatttgttatgtgaagctcctttatatgatagggaaggtaaagaggacttaaaagaaaaagaggatgataaggaaaaaataaagatgccagaagatttaaatgctgtgttattaaaactcttagagagtccaaatatttgctcaaaggaatggatttatcagcagtatgaccacgaagttcaaataagaactgttgtaaagccaggaaaagatgccgctgttttaagaataaatgaagtttatccaatgggaattgccttaacaactgactgtaactcaagatactgcaaactaaacccttatgtaggggcagtaaatgctgtagctgaagctgtgagaaatttagcaacagttggagctgaaccaatagctatgcttgataatctaaactttggaaatcctgaaagaccagagagattttggcagttggcagaatgcattaaaggtttagcagatgccgctgaattctttgaaatcccagttgttggaggaaacgtaagtttatacaatgaaacagttattgaaggtaaagaacatccaataaacccaactcccgcaatatttgtattaggtaaagttgaggatgttgaaaaagttccgggagttttagataacaagattaaggaaggagatatattaataattacaaatgaaacaaaagatgaaatgggaggaagcgaatattataaagttatacacaatactgaagagggaagagtgccaagagttgatttagagaaagagaagaagatttatgaagaagttagggaagttgtaaaagaaggattggttagtgaggcagtagattgctcaagaggaggtttagctgtagctttagccaaaatggctgtattaaacaatattggtttagaagttgatttaactgagtataataaaaataatttaagggacgatattttactgttctcagaaacttctggaaggataatattggcagttagagatgaaaataaagataaagttttaagtaaattaagttctgcttatataattggaaaagttggaggaagcagattgaaaataaagattaacgaaaaggatgttgttaatttggatgtggaagagatgaaaaagaggtattatgaagcatttccaaagatgatgggagagctttag

SEQ ID NO: 53093 - protein, 733 aa, Methanococcus jannaschii
MDENDLKYIEKVLGRKPNHIELAMFENLWSEHCAYRTSKKLLRMFAKTVNEKTSKNIVVGIGDDAAVIRLKNDICLAIAMESHNHPSYIDPYNGAATGVGGIVRDVLSMGAKPIALLDPLRFGDIFGKEGDKVRWLIEGVVKGIGDYGNRIGVPTVGGECEFDSSFDYNNLVNVVCVGLVKENEIITGKAKEPGLSLILIGSTGRDGIGGASFASKDLTEESEEERPSVQVGDAFSEKCLIDAVLEAVKTGKVKAMKDLGAAGLSGASSEMCYGGGVGCELYLENVVLREPLTPYEIMVSESQERMLLAVEPGSEEEIIEIFKKYELPASVIGKTIPEKRIIAKYKGEVVVDLPLDLLCEAPLYDREGKEDLKEKEDDKEKIKMPEDLNAVLLKLLESPNICSKEWIYQQYDHEVQIRTVVKPGKDAAVLRINEVYPMGIALTTDCNSRYCKLNPYVGAVNAVAEAVRNLATVGAEPIAMLDNLNFGNPERPERFWQLAECIKGLADAAEFFEIPVVGGNVSLYNETVIEGKEHPINPTPAIFVLGKVEDVEKVPGVLDNKIKEGDILIITNETKDEMGGSEYYKVIHNTEEGRVPRVDLEKEKKIYEEVREVVKEGLVSEAVDCSRGGLAVALAKMAVLNNIGLEVDLTEYNKNNLRDDILLFSETSGRIILAVRDENKDKVLSKLSSAYIIGKVGGSRLKIKINEKDVVNLDVEEMKKRYYEAFPKMMGEL

SEQ ID NO: 53094 - DNA, 2175 bp, Methanopyrus kandleri
  CDS (1)..(2175): transl_table=11
ttgacgttggacgaacgcgatctggagctcatccgggaggaactaggcagggaccccaacgccacggagcgagccatgttcgagaacatgtggtcggaacactgcgcctaccgtagcactcgccacttacttcgacagctccccagcgaggcggatcacgtcatcgtgggtcccggcgatgacgccgccgtggtcgccatcgacgacgagtgggccgtagtagtcggtatagaaagccacaaccacccctcctacgtagatccgtacaacggggcggcgaccggtgtcggcgggatagtccgagacgttctgtccatgggagcgttcccgatagctctcctggatccgcttcgcttcggcccgctggacggagaacgcgtcccctacctcgtcgacggtgtcgtccgcgggatctcggattacggtaaccgcatcggagtcccgacggtaggtggagagctggagttcgatccttcttacgagcgcaaccccctcgtcaacgtgatgtgtgtgggtatagttcgcaggagtgagatcgtacgaggtcgtgcggaccgccccggggacgtactggtactagtcggcgctcgaacgggccgtgacgggatcggcggtgcggccttcgcttccgaagagctgggcgaggaatcggaggaagaagacaggccggcggtccaaatcggcgacccgttcacggagcgtcaactgatcatcgccatccgggaagccgtcgagcgtggcctagtcaaagggtgcaaggacctaggtgccgccggtctgacgtgcgccgcgaccgagatggccgccgacggggggaccggcgtcgagatcgacgtctttaaggtcccgctccgggaggaggggatggaaccgtgggagatcatgctctcggaatcccaggagagaatgctgctcgtcgtggcccctgaggatgtggacgaggtgatagagatctgccgtaagtacggtctcgaggcgtcggtcgtcggcagggttactgacgacggctacctcacggttaaggacggtgacgacgtcatcgctcgggttcccgccgagttcctggccgacggtgctcccgaggtcgagtgggaggaggagccttattcgtaccccgagaacgtggacgtgccggagccggaccccgaggatctagtgcgctcagtcctgagctcccccaacgtttcgccggcgcttcgcgagtgggtttaccggcagtatgaccatgaggtgcaaggacgcaccgtcgtgaaaccgggtcacgatgctgccgtgatgtggttgcagcacgaaggcctggaagacgtggccctggccctgacgactgattcgaatccgcggcacgtgctcatcgatccgaaaacgggtacggaagggtgcgtcgccgaagcgttacgtaacctcgccaccgtcggagcggagccgctctgtctggttgactgcttgaacttcggaagcccggaaaacccgcgggtctattaccagcttcgccggtcgatcgaggggctcggaaaagcagcccgcgagttcgaggttcctgtagtcggcggaaacgtgagcctgtacaacgaacacgaggtcgacggcccggtgaatcccacgcccgtgataggcgccgtgggagtgatccggggattggactatctagaagacttccctcgagagcccgaagaaggcgaggcggtgatagtcttaggggagacccgggaggagctcggcgggtccctgtacctcatcgagtaccatggtattaagggaggtaaggtaccacgcgtgaggtacagggaggagcgagccctgcacgacctgctccgccgtatcgcgaggaagaatatggtttcttcagtcactgacgtgtccaccgggggacttctagctgccgtagccgagctactgggacctgtcggagcctccctgagcctgtccgaagtcccgaattccgtgtcacggtgggacttcctgctgttgtccgagagccacggtcgggctatcgtgactacggaccgacccgacgatgtgttgggggctgctgaagaggccggtgtaccggctcaggtggtaggggaggtcaccggagacggcgtcctgcggatctcggtgggacccgtggacgtatcactggatcgagaggagctggaagagctgtggagatccccgttgcactacttggagtag

SEQ ID NO: 53095 - protein, 724 aa, Methanopyrus kandleri
MTLDERDLELIREELGRDPNATERAMFENMWSEHCAYRSTRHLLRQLPSEADHVIVGPGDDAAVVAIDDEWAVVVGIESHNHPSYVDPYNGAATGVGGIVRDVLSMGAFPIALLDPLRFGPLDGERVPYLVDGVVRGISDYGNRIGVPTVGGELEFDPSYERNPLVNVMCVGIVRRSEIVRGRADRPGDVLVLVGARTGRDGIGGAAFASEELGEESEEEDRPAVQIGDPFTERQLIIAIREAVERGLVKGCKDLGAAGLTCAATEMAADGGTGVEIDVFKVPLREEGMEPWEIMLSESQERMLLVVAPEDVDEVIEICRKYGLEASVVGRVTDDGYLTVKDGDDVIARVPAEFLADGAPEVEWEEEPYSYPENVDVPEPDPEDLVRSVLSSPNVSPALREWVYRQYDHEVQGRTVVKPGHDAAVMWLQHEGLEDVALALTTDSNPRHVLIDPKTGTEGCVAEALRNLATVGAEPLCLVDCLNFGSPENPRVYYQLRRSIEGLGKAAREFEVPVVGGNVSLYNEHEVDGPVNPTPVIGAVGVIRGLDYLEDFPREPEEGEAVIVLGETREELGGSLYLIEYHGIKGGKVPRVRYREERALHDLLRRIARKNMVSSVTDVSTGGLLAAVAELLGPVGASLSLSEVPNSVSRWDFLLLSESHGRAIVTTDRPDDVLGAAEEAGVPAQVVGEVTGDGVLRISVGPVDVSLDREELEELWRSPLHYLE

SEQ ID NO: 53096 - DNA, 2145 bp, Methanobacterium thermoautotrophicum
  CDS (1)..(2145): transl_table=11
atggttttaaccgattctgaaatggaatttataaggaaggagcttgggagggaccccaaccccctcgagtacgggatgctggatgtcatgttctcggagcactgctcctacaagagcagccgaccggtcctgggcctcttccctacagagggcgaggatgtcataatcggcccgggtgatgatgcaggtgttgtggagataaccgatgaactggcactggtcatcggaattgaaagtcacaaccacccctcagccatagaaccctatggtggcgcaggtacaggtatagggggcatattaagggatataatctcaatgggggccatgccggtggctctcctggactcactccgtttcggataccttgaggaccagaagtcaaggtacctctttgagcacgttgtcaggggaatatcagactacgggaaccgtgtgggcgtaccaacagttgctggcgaggtcgaattcgatgaaaacttccagctgaaccccctcgtaaatgttatgtgcgcgggacttgtacctaagaatgatataaagcggggaatcgccccccgccccggcgacgtcttcctcctcatggggggaaggacaggaagggacgggatacatggggtcaccttcgcatccgaggagctcacaagttcctctgaactcgaggaccgccccgcggtccaggtgggggatcccttcacaaagaagatggtcatggaggcaagcttcgagataatggatgagatagaggtctcaggagtcaaggaccttggagggggaggtctgacctgctgcatctccgaactggtcgccaagtgtgacaacggtgcaagggtcagcctcgaggccataccactgcgggaggaggggatgaccccctatgagatcatgctatcagagtcacaggagcgcatgatcttcgtgatggcaccagatgatgttgaggctgcaatggaaatctgcaggaaatatgagttaccagcagcggttataggtgaggttacagacacaggcaggatgatcgttgagagcgagggcgaggtcatagctgatctaccagcaaagctcctggcggaccctccagtggttgagagggaagccagaaagccccagctaccggagggacaggtggaggttaagcatcccccccttaaggacacactcctgaagctgatatcatcaccaaacattgcaagcaagcgctgggtttacaggcagtacgaccatgaggtccagataaggaccgtcgtaaaaccaggggacgatgcagccgtcctgagggttgatggcacaacaggggttgcactcaccgtcgactgcaacagcatccacacgaagctcgacccctacggtggaggcgcggcctcggtcggggaggccataaggaacgttgtatcaatgggggcctggcctgtctgcatagttgactgcctcaacttcggcaacccagagaagcctgaggtattctggcagttcagggaatgtgtgaggggcatggctgatatggcagaaaccttcagcacccccgttataagtggtaacgtgagcttctacaatgagacagagggcgtcaccgtgaacccatcccctgtggtgggtgtggcaggtaaactatcccttgatagcataaagaccttggacttcaaggacgagggggaggagatagtggtcatcggggaaacagggccggaactgggcgcatcagagtacctgaggacagttcatggtatcgtggatggaaaaccccctgaaacagatcttaaggcagagtttgaagctgcaaaggcagttaaggagataatcgacgggtccggaaataaggtgacagcggtccatgactgctcagccgggggaatagctgtggcagtggctgagatggccataaagtcaggcatcggggccaggatagaccccatgaagatccctggcagattcaggaacatccacgaggccctcttctcagagtccaatggaaggtacataatgaccgtgaggggatcagccagggacatactgggcgggctggatgtcccatgggctgttattggaaccaccggcggcaggacccttgaattcggcgatgtggccctggacatctcggaacttgatgatgcctatcacggcgtgattgaggcatacatgtccacatag

SEQ ID NO: 53097 - protein, 714 aa, Methanobacterium thermoautotrophicum
MVLTDSEMEFIRKELGRDPNPLEYGMLDVMFSEHCSYKSSRPVLGLFPTEGEDVIIGPGDDAGVVEITDELALVIGIESHNHPSAIEPYGGAGTGIGGILRDIISMGAMPVALLDSLRFGYLEDQKSRYLFEHVVRGISDYGNRVGVPTVAGEVEFDENFQLNPLVNVMCAGLVPKNDIKRGIAPRPGDVFLLMGGRTGRDGIHGVTFASEELTSSSELEDRPAVQVGDPFTKKMVMEASFEIMDEIEVSGVKDLGGGGLTCCISELVAKCDNGARVSLEAIPLREEGMTPYEIMLSESQERMIFVMAPDDVEAAMEICRKYELPAAVIGEVTDTGRMIVESEGEVIADLPAKLLADPPVVEREARKPQLPEGQVEVKHPPLKDTLLKLISSPNIASKRWVYRQYDHEVQIRTVVKPGDDAAVLRVDGTTGVALTVDCNSIHTKLDPYGGGAASVGEAIRNVVSMGAWPVCIVDCLNFGNPEKPEVFWQFRECVRGMADMAETFSTPVISGNVSFYNETEGVTVNPSPVVGVAGKLSLDSIKTLDFKDEGEEIVVIGETGPELGASEYLRTVHGIVDGKPPETDLKAEFEAAKAVKEIIDGSGNKVTAVHDCSAGGIAVAVAEMAIKSGIGARIDPMKIPGRFRNIHEALFSESNGRYIMTVRGSARDILGGLDVPWAVIGTTGGRTLEFGDVALDISELDDAYHGVIEAYMST

SEQ ID NO: 53098 - DNA, 2202 bp, Moorella thermoacetica
  CDS (1)..(2202): transl_table=11
ttggagcctgaaatctaccggagaatgggcctcactgatgcagaatttgagaaagttaaggccatcctgggccgggaacccaactacgtcgaactgggcatgtttgccgttatgtggtcagagcactgcggctataaaagctcccgttcggtactgaagctgttcccgacgaaggccccctgggtcctccagggcccgggggagaacgccggcatcgtggacatcggtgacggccaggccgtggtctttaaaatcgaaagccacaaccatccctcggccatagaacccttccagggggcggccaccggggtggggggcatcgtccgcgacatctttgccatgggggcgcggcccattgccgtcctcaattccttacgtttcggacccctggacgactcccgcacccggtacctcatgggcggggtggtgggcggcatcgccttttacggcaactgcctgggcctgcccacggtggccggggaggtttattttgaaccctcgtatgcctgtaaccccctggtcaacgtcatggccgtgggcttaatcgagcaaaagaatatccgccggggtacggctgccggagtgggcaacgccgtcatgctaataggtgctcgcaccggccgcgacggcatccacggggccaccttcgcctccgaggaattgagcgaggcttccgaggagcgacggccctccgtccaggtaggcgaccccttccgggaaaagctcctcatcgaagcctgcctggaaataataaatgaagatttaatcatcggcatgcaggatatgggcgccgccggtattaccagctcctcctgcgagatggcggcccgggccggcaccggcatggagattgacatcgccctggtgccgcggcgggaagaaggtatgaccccctacgaggtcatgctgtcggaatcccaggaacggatgctcttggtacccaaaaaaggcgctgaagagaggatccgggccatctgccggcgctggggcctggaagcggtaatcatcggccgggtaacgggcgacggcctgatgcgcatcatggagaacggccgggtggtggccgaggtgccggccaaggccctgacggaccagtgcccggtctatgaacgggaacgccgccggccggcctacctggatgaagtacggcaaagggacttaagccgcctgccggaaccggaggattacggccgggtgctcctggggctgctggcggcgccgaacctggccagtaaagagtgggtttaccgccagtatgattatatggtccggacggatacggtggccgggcccgggggagacgccgcgatcttaagggttaaaggcacgagcaaaggcctggccctgacggtggacggcaatggtcgctactgttacctggacccggagcggggcggggccatcgccgttgccgaggcggcccggaacctcgcctgtgtgggggcgcggcccctggccatcaccgattgcctgaacttcggtaatcccgaaaagcccgaggtggcctggcagttctatcaggccgtgagcggcatgagccgggcctgtgaggttttgcggaccccggtaaccggcggtaacgtcagcttttataacgaaaccgaaagcggagctatctaccccaccccggtggtgggcatggtcggcctgctgccggatatagaaaaacgctgtggcattggtttccgccgggaaggcgacctgttgatccttatgggcgagacttacccggagataggcggcagcgagtacctggccacattccatggcctggtggccggagaaccgcctgccctggacctggagcgggaaaaggccgtccaggccctggtccgggaggttatcgccgccgggctagcaacagcagcccatgactgcgccgaagggggtctggccgtggccctggcggaaagcgccctggccggaggcctgggggcggaggtggaactggcgagcgacctgcggcccgattttctcctcttcagtgagagccagtccaggatactgctggcggtagcacctgaggccagggacagggtgctggatctggcccgagaaaagggcgtgcgggcatcggtcattggccggtgcgggggccacagcctggtggtaaggataaacggcaggacattgttcaatctaagccttgaggagatggggaaacaatggcgggagagcataccggtgctgatggcccggtaa

SEQ ID NO: 53099 - protein, 733 aa, Moorella thermoacetica
MEPEIYRRMGLTDAEFEKVKAILGREPNYVELGMFAVMWSEHCGYKSSRSVLKLFPTKAPWVLQGPGENAGIVDIGDGQAVVFKIESHNHPSAIEPFQGAATGVGGIVRDIFAMGARPIAVLNSLRFGPLDDSRTRYLMGGVVGGIAFYGNCLGLPTVAGEVYFEPSYACNPLVNVMAVGLIEQKNIRRGTAAGVGNAVMLIGARTGRDGIHGATFASEELSEASEERRPSVQVGDPFREKLLIEACLEIINEDLIIGMQDMGAAGITSSSCEMAARAGTGMEIDIALVPRREEGMTPYEVMLSESQERMLLVPKKGAEERIRAICRRWGLEAVIIGRVTGDGLMRIMENGRVVAEVPAKALTDQCPVYERERRRPAYLDEVRQRDLSRLPEPEDYGRVLLGLLAAPNLASKEWVYRQYDYMVRTDTVAGPGGDAAILRVKGTSKGLALTVDGNGRYCYLDPERGGAIAVAEAARNLACVGARPLAITDCLNFGNPEKPEVAWQFYQAVSGMSRACEVLRTPVTGGNVSFYNETESGAIYPTPVVGMVGLLPDIEKRCGIGFRREGDLLILMGETYPEIGGSEYLATFHGLVAGEPPALDLEREKAVQALVREVIAAGLATAAHDCAEGGLAVALAESALAGGLGAEVELASDLRPDFLLFSESQSRILLAVAPEARDRVLDLAREKGVRASVIGRCGGHSLVVRINGRTLFNLSLEEMGKQWRESIPVLMAR

SEQ ID NO: 53100 - DNA, 2265 bp, Mycobacterium bovis
  CDS (1)..(2265): transl_table=11
gtgctggacaccgtcgaacacgccgcgaccacacccgaccaaccacaaccgtatggtgagctgggcctcaaagacgacgagtaccggcggattcgccagatcctgggccgccggcccaccgacaccgagctggccatgtactcggtgatgtggagcgaacactgttcgtacaagtcctccaaggtgcacctgcgctacttcggtgagaccacctccgacgagatgcgcgcggccatgctggccggcatcggcgagaacgccggcgtcgtcgacatcggcgacggctgggcggtcaccttcaaggtggagtcacacaaccacccgtcctacgtcgagccctaccagggcgcggccaccggggtgggcggcatcgtccgcgacatcatggccatgggcgcccgaccggtcgccgtgatggaccagcttcggttcggcgccgccgacgcccccgatacccgccgcgtgctcgacggcgtggtccgcggcatcggcggatacggcaactccctgggcctgcccaacattggcggagagaccgtcttcgacccgtgctacgccggcaaccccttagtgaacgcgttgtgtgtcggcgtattacggcaggaggacctgcatttggcgttcgcctccggcgccggcaacaagatcatcctgtttggcgcgcgcaccgggctcgacggtatcggcggggtgtcggtgctggcgtcggacaccttcgatgccgagggatcccgcaagaagctgccctcggtgcaggtcggcgacccgttcatggagaaggtgctcatcgaatgctgtctcgagctctacgcgggcggcctggtgatcggcatccaagacctgggcggagccggattatcttgtgccacatcggagttagcatccgccggtgatggcggaatgacgatccagctggacagcgtcccgctgcgggccaaggagatgacgcccgccgaggtgctctgcagcgaatcgcaggagcggatgtgcgcggtggtctccccgaagaacgtcgacgcattcctggcggtgtgccgcaagtgggaggtgctggcgacggtgatcggcgaggtcaccgacggcgaccggctgcagatcacctggcacggcgagacggtggtcgacgtgccgccgcgcaccgtagctcacgaaggtccggtatatcagcgcccggtcgcccgccccgatacgcaggacgcgctgaacgccgaccgctcggccaagctgtcacggccggtcaccggcgacgagctgcgcgcgactttgcttgcgttacttggcagcccgcacctgtgcagccgcgcgttcatcaccgagcagtacgaccgctatgtgcgcggcaacacggtgctcgccgagcacgccgacggcggcatgctgcgcatcgacgagtcgaccggccggggcatcgcggtatcgaccgacgcgtcgggacgctacacgctgctggatccctacgctggcgcgcaactcgcgttggccgaggcgtaccgcaacgtcgccgtcaccggcgccaccccggtcgcggtgaccaactgcctgaacttcggttcccccgaggaccccggcgtgatgtggcagttcacgcaggcggtccgcggtctggccgatggctgtgcggacctcgggattccggtgaccggtggcaacgtgagtttctacaaccaaaccggttcggcggcaatcctgcccacgccggtggtcggggtgctcggcgtcatcgacgatgtgcgtcggcgcatccctaccggcctgggcgccgagcccggggaaacgttgatgctgttgggcgacacccgcgacgagttcgacggttccgtgtgggcgcaggtgaccgcagaccacctgggtggattgccgccggtagtcgatctggcgcgggagaagctgctggccgcggtgctgagctcggcgtcgcgggacgggctagtgtccgcggcgcacgatctgtccgagggtgggctggcccaagccatcgtggaatcggcgttagcgggtgaaaccggttgccgcatagtgcttcccgaaggggctgacccgtttgtgctgctgttctccgagtcggcgggtcgggtgctggtcgcggtgccacgcaccgaggagagccggtttcgcgggatgtgtgaggcgcggggacttcccgcggtccgcatcggcgtcgtcgatcaaggttcggacgcggttgaggtgcagggcttgttcgcggtgtcgttggccgaactgcgtgcgacatccgaggcggtgttgccgcgatacttcggatga

SEQ ID NO: 53101 - protein, 754 aa, Mycobacterium bovis
MLDTVEHAATTPDQPQPYGELGLKDDEYRRIRQILGRRPTDTELAMYSVMWSEHCSYKSSKVHLRYFGETTSDEMRAAMLAGIGENAGVVDIGDGWAVTFKVESHNHPSYVEPYQGAATGVGGIVRDIMAMGARPVAVMDQLRFGAADAPDTRRVLDGVVRGIGGYGNSLGLPNIGGETVFDPCYAGNPLVNALCVGVLRQEDLHLAFASGAGNKIILFGARTGLDGIGGVSVLASDTFDAEGSRKKLPSVQVGDPFMEKVLIECCLELYAGGLVIGIQDLGGAGLSCATSELASAGDGGMTIQLDSVPLRAKEMTPAEVLCSESQERMCAVVSPKNVDAFLAVCRKWEVLATVIGEVTDGDRLQITWHGETVVDVPPRTVAHEGPVYQRPVARPDTQDALNADRSAKLSRPVTGDELRATLLALLGSPHLCSRAFITEQYDRYVRGNTVLAEHADGGMLRIDESTGRGIAVSTDASGRYTLLDPYAGAQLALAEAYRNVAVTGATPVAVTNCLNFGSPEDPGVMWQFTQAVRGLADGCADLGIPVTGGNVSFYNQTGSAAILPTPVVGVLGVIDDVRRRIPTGLGAEPGETLMLLGDTRDEFDGSVWAQVTADHLGGLPPVVDLAREKLLAAVLSSASRDGLVSAAHDLSEGGLAQAIVESALAGETGCRIVLPEGADPFVLLFSESAGRVLVAVPRTEESRFRGMCEARGLPAVRIGVVDQGSDAVEVQGLFAVSLAELRATSEAVLPRYFG

SEQ ID NO: 53102 - DNA, 2298 bp, Mycobacterium paratuberculosis
  CDS (1)..(2298): transl_table=11
gtgactgtctccccgacgagtgcgcccacccaggcgatcgacaccgtcgagcgcgccgcgaccacccccgacgagccgcagcccttcggcgagttgggcctcaaagacgacgaataccagcgcatccgcgaaatcctgggccgccggcccaccgacaccgagctggcgatgtactcggtgatgtggagcgagcactgctcctacaagtcgtccaaggtgcacctgcgctacttcggggagaccaccaccgacgagatgcgcgccggcatgctggccggcatcggcgagaacgccggcgtcgtcgacatcggcgacggctgggcggtcaccttcaaggtggaatcgcacaaccacccctcctacgtcgagccctatcagggggcggccaccggcgtcggcggcatcgtgcgcgacatcatggcgatgggcgcgcgcccggtggcggtgatggaccagcttcggttcggcgccgccgatgcgccggacacccgccgcgtgctcgacggcgtggtgcgcggcatcggcggctacggcaactcgctgggcctgcccaacatcggcggcgagaccgtcttcgacgcctgctacgccggcaacccgctggtgaacgccatgtgcgtcggcgtgttacgccaggaggacctgcacatggccttcgcctccggcacgggcaacaagatcatcctgttcggcgcccgcaccgggctggacggcatcggcggggtatcggtgctggcgtcggacaccttcgatgcggagaactcgcgcaagaagctgccctcggttcaggtgggcgacccgttcatggagaaggtgctcatcgagtgctgcctggagctctacgccggtgggctggtggtcggcatccaagacctgggcggtgccggattagcttgcgccacttctgaattggcgtccgccggggacggggggatggaggtccggctggaggccgtgccgctgcgcaccgccggcatgacgcccgcggaggtgctgtgcagcgaatcccaggagcggatgtgcgcggtggtcacaccggagaacgtcgacgccttcctggcggtgtgccgcaagtgggacgtgctggccaccgtgatcggcgaggtcaccgacggcgaccggctgcggatcacctggcacgggcagacggtggtcgacgtgccgccgcgcaccgtcgcccatgaaggcccggtataccagcgaccgctcgcccgccccgacacccaggacgccctgaacgccgacagctcggcacggctgccccgcccggccaccggcgccgagctgcgggccactttgcttgcgctgcttggcagtccgcacctgtgcagccgcgcgttcatcaccgagcagtacgaccggtatgtgcgcggcaacaccgtgctggccgaacacgccgacggcggcgtgctgcgcgtcgacgagaccaccggccgcggcatcgccgtgtccaccgacgcctcgggccgctacaccatgctcgacccctacgccggtgcgcagctcgcgctcgccgaggcctaccgcaacgtcgccgtcaccggcgccaccccggtcgcggtgaccaactgcctcaatttcggctcgcccgaagaccccgcggtgatgtggcagttcgcccaggcggtacgcgggttggcggatggctgtgtggccctggggattccggtgaccggcggcaacgtcagcttctacaaccaaaccgggtcggcggcgatcctgcccaccccggtggtgggagtgctcggcgtcctcgacgatgtgagccgacggctgcccaccgccctgggcgccgagcccggcgaaaccctgatgctgctcggcgagacccgcgacgagttcgacggctcggtgtgggcacaggtgaccgccgaccatctgggcggtctgccgcccaaggtcgacctggcccgcgagaagctgctggccgaggtgctgcgcgcggcgtcgcgcgacggcctggtgtccgcggcgcacgacctgtccgagggcggcctggcccaggccgtcgtcgaggctgccctggcgggcgaaaccggttgtcgcatcgtgcttcccgaggacgccgacccgttcgtgacgttgttctccgagtcggcgggccgggtgctggtggcggtgccgcgcaccgaggagagccggttccgttccatgtgcgaggcgcggggactgccggcggtgcgcatcggcgtcgtcgaccaggcctccgacgaggtcgaggtgcaggggctgttcacggttccgttggccgaattgcggcagacctccgagtcggtgctgccccggctgttcggatga

SEQ ID NO: 53103 - protein, 765 aa, Mycobacterium paratuberculosis
MTVSPTSAPTQAIDTVERAATTPDEPQPFGELGLKDDEYQRIREILGRRPTDTELAMYSVMWSEHCSYKSSKVHLRYFGETTTDEMRAGMLAGIGENAGVVDIGDGWAVTFKVESHNHPSYVEPYQGAATGVGGIVRDIMAMGARPVAVMDQLRFGAADAPDTRRVLDGVVRGIGGYGNSLGLPNIGGETVFDACYAGNPLVNAMCVGVLRQEDLHMAFASGTGNKIILFGARTGLDGIGGVSVLASDTFDAENSRKKLPSVQVGDPFMEKVLIECCLELYAGGLVVGIQDLGGAGLACATSELASAGDGGMEVRLEAVPLRTAGMTPAEVLCSESQERMCAVVTPENVDAFLAVCRKWDVLATVIGEVTDGDRLRITWHGQTVVDVPPRTVAHEGPVYQRPLARPDTQDALNADSSARLPRPATGAELRATLLALLGSPHLCSRAFITEQYDRYVRGNTVLAEHADGGVLRVDETTGRGIAVSTDASGRYTMLDPYAGAQLALAEAYRNVAVTGATPVAVTNCLNFGSPEDPAVMWQFAQAVRGLADGCVALGIPVTGGNVSFYNQTGSAAILPTPVVGVLGVLDDVSRRLPTALGAEPGETLMLLGETRDEFDGSVWAQVTADHLGGLPPKVDLAREKLLAEVLRAASRDGLVSAAHDLSEGGLAQAVVEAALAGETGCRIVLPEDADPFVTLFSESAGRVLVAVPRTEESRFRSMCEARGLPAVRIGVVDQASDEVEVQGLFTVPLAELRQTSESVLPRLFG

SEQ ID NO: 53104 - DNA, 2295 bp, Nocardia farcinica
  CDS (1)..(2295): transl_table=11
gtgactccgcaggtcgacaccgtcagcgcagccgcagcaacccccgatgtggcgcaaccgtacaaagagctgggcctcaaggacgacgagtacgcccgcatcaaggagatcctcggccgcaggcccaccgacgccgaactggcgatgtactcggtgatgtggagcgagcactgctcctacaagtcgtccaaggtgcacctgcgctacttcggtgagaccaccaccgaggagatgcgcaagtcgatgctcgccggtatcggcgagaacgccggtgtggtcgacgtgggcgacggctgggcggtcaccttcaaggtggaaagccacaaccatccctcctacgtcgagccgtaccagggtgcggccaccggcgtcggcggcatcgtgcgcgacatcatggcgatgggcgcccgcccggtcgcggtgatggaccagctgcgcttcggcgccgccgaccaccccgacacccgccgcgtcgtcgacggggtggtgcgcggcatcggcggctacggcaactccctcggcctgcccaacgtgggcggcgagaccgtgttcgacgcctcctaccagggcaacccgctggtcaacgcgctgtgcgcgggcgtgatgcgggtcgaggacctgcacttggcgttcgcctcgggcaccggcaacaagatcatcctgttcggcgcgcgcaccggactcgacggcatcggcggcgtgtcggtgctcgcctcggacaccttctccggtgacgagtccggcgcgggccgcaagaagctgcccagcgtccaggtgggcgatccgttcaccgagaaggtgctcatcgagtgctgtctcgagctctacgccgccaagctggtggtcggcatccaggatctcggcggcgccgggctgtcctgcgcgacctccgaactcgccgcggcgggcgacggcggcatgcgcatcgagctggacaaggtgccgctgcgcgcggccgacatgacccccgccgagatcctgtcctcggagtcgcaggagcgcatgtgcgcggtggtcaccccggagaacgtcgaggcgttcatggccgtctgccgcaagtgggacgtgctggccacggtgatcggtgaggtcaccgacggcgaccggctcgtggtcacctggcacggcgagaccgtggtggacgtgccgccgcgcaccgtcgcgcacgagggcccggtctacgagcggccggtgcagcgccccgactaccaggacgcgctgatcgccgacacccccgacacgctgccccgcccggcgaccgccgacgaactgcgcgagaccctgctgcggatgatctccagcccgcagctgtgcagccgcaagtggatcaccgagcagtacgaccgctacgtgcgcggcaacaccgtcctcgccgaggacgccgacgccggggtcatccgcatcgacgagcagaccggccgcgggatcgccctggccaccgacgcctccggccgctacaccaagctcgacccctacgccggtgcgcagctggcgctggccgaggcgttccgcaatgtcgccagcaccggtgccacccccaaggccgtcaccaactgcctgaacttcggctccccggaggacccgggcgtgatgtggcagttccagcaggccgtgcgcggcctcgccgacggctgtgtcgccctgggcattccggtgaccggcggcaacgtcagtttctacaaccagaccgggcaggacgccatcctgccgacgcccgtggtcggtgtgctcggcgtgatcgacgacgtgcaccgccgcatccccaccggcatcggcctcgaacccggcgagacgctgatcctgctcggcgacacccgcgacgagttcggcggctcgatctgggcgcaggtcgtgcacgaccacctcggcggcgtgcccccgaaggtcgacttcgcccgcgagcagttgctcgccgaggtgctcaccgccggctcgcgcgacggcatgatcagcgccgcgcacgacctgtccgagggcggcctggcgcaggccgtcgtggaggccgcgctggcgggggagaccggctgccgcatcctgctgcccgaggacgccgacccgttcgtcacgctgttctccgagtcggcgggccgcgtgctggtggcggtgccgcgctcggaggagacccgcttcacccgcatgtgcgaggccaggcagctgccgtgggtgcgcatcggcgtggtcgaccagggctcggatgcgctggaggtccaggggcacttctcgatcccgttgaccgagctgcgggcggccttcgagggcaccctgccgaagctgttcggcgccgaaaccgcctga

SEQ ID NO: 53105 - protein, 764 aa, Nocardia farcinica
MTPQVDTVSAAAATPDVAQPYKELGLKDDEYARIKEILGRRPTDAELAMYSVMWSEHCSYKSSKVHLRYFGETTTEEMRKSMLAGIGENAGVVDVGDGWAVTFKVESHNHPSYVEPYQGAATGVGGIVRDIMAMGARPVAVMDQLRFGAADHPDTRRVVDGVVRGIGGYGNSLGLPNVGGETVFDASYQGNPLVNALCAGVMRVEDLHLAFASGTGNKIILFGARTGLDGIGGVSVLASDTFSGDESGAGRKKLPSVQVGDPFTEKVLIECCLELYAAKLVVGIQDLGGAGLSCATSELAAAGDGGMRIELDKVPLRAADMTPAEILSSESQERMCAVVTPENVEAFMAVCRKWDVLATVIGEVTDGDRLVVTWHGETVVDVPPRTVAHEGPVYERPVQRPDYQDALIADTPDTLPRPATADELRETLLRMISSPQLCSRKWITEQYDRYVRGNTVLAEDADAGVIRIDEQTGRGIALATDASGRYTKLDPYAGAQLALAEAFRNVASTGATPKAVTNCLNFGSPEDPGVMWQFQQAVRGLADGCVALGIPVTGGNVSFYNQTGQDAILPTPVVGVLGVIDDVHRRIPTGIGLEPGETLILLGDTRDEFGGSIWAQVVHDHLGGVPPKVDFAREQLLAEVLTAGSRDGMISAAHDLSEGGLAQAVVEAALAGETGCRILLPEDADPFVTLFSESAGRVLVAVPRSEETRFTRMCEARQLPWVRIGVVDQGSDALEVQGHFSIPLTELRAAFEGTLPKLFGAETA

SEQ ID NO: 53106 - DNA, 2160 bp, Novosphingobium aromaticivorans
  CDS (1)..(2160): transl_table=11
atgtctcagatcactcctgatgtcgtcgccgcccatgggctgtccgaggaagaataccagcgcgtgctgcacgcgctcgggcgcgagccgaaccttgtcgagctcggcatcttctcggtcatgtggtcggagcattgctcctacaagtcgagccgcatccacctcaagaaactgccgacttcggccccctgggtgatctgcgggcccggcgagaacgctggcgtgatcgacatcggcgatggccaggccgccatcttcaagatggagagccacaaccacccgtcgtacatcgaaccctaccagggcgcggcgacgggcgtcggcggcatcctgcgcgacgtgttcacgatgggcgcccgcccggtggcgaacatgaacgccctgcgcttcggccgcccggatcacccgaagatgaagcacctcgtgcagggcgtcgtcgcgggcatcggcggctacggcaactgcgtcggcgtgccgacggtgggtggcgagaccaacttccacaaggcctatgacggcaacatcctcgtcaacgcgatgaccgttggcgtggcggacaccgacaagatcttctattcggccgccaccggcctcggtaacccgatcgtctacgtcggctccaagaccgggcgcgacggcatccacggcgcgaccatggcctcggccgacttcgacgagaagtccgacgagaagcgcccgaccgtgcaggtaggcgaccccttcaccgagaagctgctgatcgaggcctgcctcgaactgatggcgaccgacgcgatcgtggccatccaggacatgggcgctgcgggcctcacctcgtcgtcggtcgaaatggcgaccaacggcaaggccggcatcatcctcgacatggacaaggtgccgtgccgcgaagaaggcatgacgccttacgagatgatgctctcggaaagccaggagcgcatgctcatggtcctgaagcccggcaaggaagccatggccgaagccatcttccgcaagtgggagctggacttcgcggtgatcggcgaagtgaccgacaccggccacatggtcctgaagttccagggcgaaaccgtctgcgacattccgctcggcccccttgccgaagacgccccgctctatgaccgccccgccctttcgctggccgactacaaggcctgggccaatgtcgcaccgctcggcaccgtgccggaaagcacggatcttggcgcggatctggtgaagctgatcggctgccccgacctcgccaaccgccgctggatcttcgagcagtacgacagccaggtcggcgccgacacgctgcagaagtccggcggagatgcggcggtcgtgcgcatccacggcaccagcaaggctctcgcgatcagcaccgactgcacgccgcgctattgctatgccgatccctatgaaggcggcaagcaggccgtcgcggaaacgtggcgcaacatctgcgcggtgggcgcgcgtccgctggcgatcaccaattgcctcaacttcgccaacccgcagcgccccgagatcatggcccagatcgtccaggcgctgaacggcatgggcgatgcgtgccgcgcgctggattacccgatcgtctcgggcaacgtctcgctctacaacgaatcgaaggccaccggcggcggctcggccatcctgcccacgcccgccatcggcggcgtcggcctgatgctcgaccacgaagtgatgaccacggtcgcgttcaaggatgaaggcgatgcgatctggctggtgggcggcgaaggcacccaccttggtcagtcgctctacctgcgcgaaatccacggccgcgaggatggcgatgcaccgtcggtcgatctggcggtcgagcgcaggaacggcgagcaggtccgcgaatggatcgccgccggcaggctgagcgccgtgcacgatatttccgacggtggccttctggtcgcgctgaccgaaatggcgctggccggaaacaagggctgcaccctcgacatcgccctcaccaccgccgccgcattcggtgaagaccagtcgcgctacgtcgtcacgacgcgggcgggcgaagtgctggaaggtgcgacccgcctcggcacggtcggcggctcgcaggttgcaggcgtcgaactcgccgcgctgcgcgaagcaaacgaggccttcttccgcgactggatggaaggctaa

SEQ ID NO: 53107 - protein, 719 aa, Novosphingobium aromaticivorans
MSQITPDVVAAHGLSEEEYQRVLHALGREPNLVELGIFSVMWSEHCSYKSSRIHLKKLPTSAPWVICGPGENAGVIDIGDGQAAIFKMESHNHPSYIEPYQGAATGVGGILRDVFTMGARPVANMNALRFGRPDHPKMKHLVQGVVAGIGGYGNCVGVPTVGGETNFHKAYDGNILVNAMTVGVADTDKIFYSAATGLGNPIVYVGSKTGRDGIHGATMASADFDEKSDEKRPTVQVGDPFTEKLLIEACLELMATDAIVAIQDMGAAGLTSSSVEMATNGKAGIILDMDKVPCREEGMTPYEMMLSESQERMLMVLKPGKEAMAEAIFRKWELDFAVIGEVTDTGHMVLKFQGETVCDIPLGPLAEDAPLYDRPALSLADYKAWANVAPLGTVPESTDLGADLVKLIGCPDLANRRWIFEQYDSQVGADTLQKSGGDAAVVRIHGTSKALAISTDCTPRYCYADPYEGGKQAVAETWRNICAVGARPLAITNCLNFANPQRPEIMAQIVQALNGMGDACRALDYPIVSGNVSLYNESKATGGGSAILPTPAIGGVGLMLDHEVMTTVAFKDEGDAIWLVGGEGTHLGQSLYLREIHGREDGDAPSVDLAVERRNGEQVREWIAAGRLSAVHDISDGGLLVALTEMALAGNKGCTLDIALTTAAAFGEDQSRYVVTTRAGEVLEGATRLGTVGGSQVAGVELAALREANEAFFRDWMEG

SEQ ID NO: 53108 - DNA, 2229 bp, Oceanobacillus iheyensis
  CDS (1)..(2229): transl_table=11
atgcaattaacgcatgatatacaaccagagaaaattgagaaggaccgtctttacctagatatgggattaagtgatgaagagtttcaacgaattaaacaaatactcggacgtcatccgaattttacagagacaggtattttttccgtaatgtggtcagagcattgtagctataaaacgtcaaaaccactgttgaaaaagtttcctacagatggaccacatgtcttacaaggacctggtgaaggtgctggcgtaattgatattggtgacgagcaagcagtcgtatttaaaatcgaaagtcataatcatccatcagcagttgaaccctaccaaggagctgctactggagtaggtggaatcattcgtgatgtattttcaatgggggcacgaccaattgcttcgcttaattcattacgatttggaccattaacgaataatcgtacgaagtatctcttttctgaagtagtcgctggaatagctggatatggtaactgtgtcggtgttccgacagttggcggagaagtacaattcgatgaaagttatgaagataatcctcttgtgaatgcgatgtgtgtcggattaattaatcataaagatgtgcaaaaagggatagcagcggggattggaaataccattctttatgcaggaccaccaactggtcgtgatggaatccatggcgctacgtttgcctctgatgatctagcggaagattcgaataaagacagacctgctgtccaggtcggagatccatttatggaaaaattattaatcgaagcttgtttagaggtaatacaatcggatgcattagtcggcattcaagatatgggtgcggcaggactgacatcctctgccagtgaaatggcaagtaaagctggaactggtttagagatgaatcttgatcttgttccccaacgtgaacaaggaatgacagcatatgaaatgatgctttctgagtctcaagagcgtatgttgctttgtgtgcaagcaggccgtgaacaagaaattatcgatatattcgaaaaatacggacttaaatctgtaccagtaggaaaagtaattgaagaaaaagtattccgtattaagcaccttgatgaagtggtcgctgacatccctgttgattcattagcagacgatgctcctgtctataatatgccatccaaggaggcggcttactacagagcttttcaacaaatggatatagcaacaccggctattgaagattatgcaaatacgttaaaacaactattacaacaaccgacaatcgcgaacaaagagtgggtttatgatcaatatgattccatggtgcaaaccaataccgtcgttacccctggttcagatgctgcagttgttcggattaaaggaacggaaaaagcacttgcaatgacaacagattgtaattcgagatacatctatctagatccagaaacaggtggaaaaatcgcagtagcagaagcagcgagaaacatcgtgtgctcaggagcaaaaccactaggattaacagatggattaaactttggtaatccgacgaatccagagatcttttggcaaatggagaagagtgtagaaggaatgagtgctgcatgtgatgcactgcatacgccggtaattagtggaaatgtttctttatacaatcaatcaaaaggaaaatctatttatccaacaccaattgtaggaatggttggtttgcatgaatcgacgcaacatattacacctagttattttcaagagaaagaggatgtaatttattgtattggtgaagcaaaagcagaattcggaggttcagaattacaacatttatactctggaaaatatgaaggaaaagcaccacatattgatttagatgtggaggcagaacgtcaagaaaaactactttcagctattaaagaaggaattatttcgtctgcacatgacatatctgaaggtggtctagcgattgccttagctgagtctttattcaatggtcaaggccttggagcggaaattaatgtagtaggagatgcaaccgtagaactatttagtgaatctcaatcacggttccttgtttccgtcaacaagaaacatgcgaatgcatttgagtctcattttccagaagcagctaagttaggcaaggttactgatcaagggcaactaactatttctattagcgataaaacaattattcacgaacgtgtcgaagaattagagaatctttggaagggagctattccatgcttgctgaaatcaaaggcataa

SEQ ID NO: 53109 - protein, 742 aa, Oceanobacillus iheyensis
MQLTHDIQPEKIEKDRLYLDMGLSDEEFQRIKQILGRHPNFTETGIFSVMWSEHCSYKTSKPLLKKFPTDGPHVLQGPGEGAGVIDIGDEQAVVFKIESHNHPSAVEPYQGAATGVGGIIRDVFSMGARPIASLNSLRFGPLTNNRTKYLFSEVVAGIAGYGNCVGVPTVGGEVQFDESYEDNPLVNAMCVGLINHKDVQKGIAAGIGNTILYAGPPTGRDGIHGATFASDDLAEDSNKDRPAVQVGDPFMEKLLIEACLEVIQSDALVGIQDMGAAGLTSSASEMASKAGTGLEMNLDLVPQREQGMTAYEMMLSESQERMLLCVQAGREQEIIDIFEKYGLKSVPVGKVIEEKVFRIKHLDEVVADIPVDSLADDAPVYNMPSKEAAYYRAFQQMDIATPAIEDYANTLKQLLQQPTIANKEWVYDQYDSMVQTNTVVTPGSDAAVVRIKGTEKALAMTTDCNSRYIYLDPETGGKIAVAEAARNIVCSGAKPLGLTDGLNFGNPTNPEIFWQMEKSVEGMSAACDALHTPVISGNVSLYNQSKGKSIYPTPIVGMVGLHESTQHITPSYFQEKEDVIYCIGEAKAEFGGSELQHLYSGKYEGKAPHIDLDVEAERQEKLLSAIKEGIISSAHDISEGGLAIALAESLFNGQGLGAEINVVGDATVELFSESQSRFLVSVNKKHANAFESHFPEAAKLGKVTDQGQLTISISDKTIIHERVEELENLWKGAIPCLLKSKA

SEQ ID NO: 53110 - DNA, 2226 bp, Picrophilus torridus
  CDS (1)..(2226): transl_table=11
atggacataataaactgttctgacaatgatcttgatttaattggaaagtcgcttgcgctcagccatgatgaaatgctattaattaaaaaatacttcacagaaataaaaagaaatcccagtgatgtggagctgcaggcaatagcacagtcatggagcgagcattcatgttataagagctccaaattttatcttaaaaagtatctatcaaatttaagaaatgagagaacgatacttgccatggaagatgacgctggcgttgtaaaatttaatgatgattacgtctatgttgttaaaatggagagccataaccacccaagcgcagttgaaccatacggtggtgctgcaacaggtgtgggtggaatcataagggacgtgctatgcatgggtgcccagcctgttgcacttgtcgattcactttactttggcgacccggataacaaatccggttttttatctgagaggtttataataaacggcgttgtttccggcataagggactatggtaacaggcttggaataccaaatgtcgcgggttcaatttatttccatgagggctataatacctcaccaattgtcaatgccggatgtataggcatatcaagaaaggataaaattgtgagaagcagggtccagaaggcgcgtgacatattaatactatgcggagggcgtaccggccgtgatggcattcatggcgtcaattttgcatcaagggtcctcgatttaaaaaatggtgaaaacagaaacgctgttcagcttggaaatccaatagtcgaggagcctttgatacacgcaatacttgaacttaatgaccttggcctgataacaggtatgaaggatcttggtggcggcggcctttcaagtgctgttacagagatgctctacgccggaaaccttggcggcaccataaatcttgattccgttcttttaaaggatgataacatgcttccatgggagatctggatcagtgaatcacaggagaggatgttaatatcctctgatgaaagaaatcttccacagataaaggatgttcttgataaatggaacattgagttctcagtcataggaagggccgaggagaagaaaaatcttgagatatactataaaaatgagaaggtttttgatcttccactggaattcatatcaaagactcctgtgtatcagaggccatacaaaaagccaaggaacagatgcaaaagcgaaccatttagggacgatgatataaataaatcgataatatcattaatatcatccataaatgtttgctcacgtgcaccggttataaggcagtatgatcatacggttcgcggtgcaaccatagtaagaccgcttacaggtttgccaaataatgaaacacactcagatgccgctgttataaaacccgttgatgatagcttcgcaggaatagcggttacatccggatcaaagcccatgctgtgcacaatagatccatacggtggtgcacttgaatcgcttatagaggcatacaaaaatattattgtaacaggtgccgagcctgatgccatagtcgattcacttaattttggtaaccctgaaaacgaggaaacaatgtactcatttgttgaaacattaaaggcaatacgtgattttacattgaaatttaagctgcagctcgtttcaggtaacgtgagcttttacaataaaaacgtaagcgacatcatgccgactccaaacattatgatgaccggaatcattgatgatgtaagaaaggccataacaacagaatttaaaaataaaaattcattgatatatctaatagggagcatcaatggaagcctggcaggcacggtttactcaaaattgaaggatataaaatgctatgattatcataattcaaatataaatgatctttgcaatgtttataatataataaaggaaaataaagaaaaaatactcgcagcacacgatgtatcagacggtggcataatagcagcattgattgaaatgtcatttggcaaaaacataggtttcaatgtaaatctaaaggatataaaaatgaatcttgaaaacaagctgttctcagagcatggcactgcaatagtaattgaggttccattggaatcagaaattgtatttaacaatcttggaataaagcttggatatacatgcgacgacattaccgtgatggacggtgagaacatggtatttaatgcaagaataagcgaactcaaaaatctctgggattcaggcctgggcaagtatttataa

SEQ ID NO: 53111 - protein, 741 aa, Picrophilus torridus
MDIINCSDNDLDLIGKSLALSHDEMLLIKKYFTEIKRNPSDVELQAIAQSWSEHSCYKSSKFYLKKYLSNLRNERTILAMEDDAGVVKFNDDYVYVVKMESHNHPSAVEPYGGAATGVGGIIRDVLCMGAQPVALVDSLYFGDPDNKSGFLSERFIINGVVSGIRDYGNRLGIPNVAGSIYFHEGYNTSPIVNAGCIGISRKDKIVRSRVQKARDILILCGGRTGRDGIHGVNFASRVLDLKNGENRNAVQLGNPIVEEPLIHAILELNDLGLITGMKDLGGGGLSSAVTEMLYAGNLGGTINLDSVLLKDDNMLPWEIWISESQERMLISSDERNLPQIKDVLDKWNIEFSVIGRAEEKKNLEIYYKNEKVFDLPLEFISKTPVYQRPYKKPRNRCKSEPFRDDDINKSIISLISSINVCSRAPVIRQYDHTVRGATIVRPLTGLPNNETHSDAAVIKPVDDSFAGIAVTSGSKPMLCTIDPYGGALESLIEAYKNIIVTGAEPDAIVDSLNFGNPENEETMYSFVETLKAIRDFTLKFKLQLVSGNVSFYNKNVSDIMPTPNIMMTGIIDDVRKAITTEFKNKNSLIYLIGSINGSLAGTVYSKLKDIKCYDYHNSNINDLCNVYNIIKENKEKILAAHDVSDGGIIAALIEMSFGKNIGFNVNLKDIKMNLENKLFSEHGTAIVIEVPLESEIVFNNLGIKLGYTCDDITVMDGENMVFNARISELKNLWDSGLGKYL

SEQ ID NO: 53112 - DNA, 2253 bp, Propionibacterium acnes
  CDS (1)..(2253): transl_table=11
gtggcagacacagtggagaacgccgtcagcacccccgacgttgagcagccctgggctgagttggggttgtccgccgacgagtaccagcgcatccgggagatcctgggacgccgcccgaccggcggcgagctcgccatgtactcggtgatgtggtcggagcattgctcctacaaatcatcgaagaaatacctgcgccgattcggtgacctgcctcagcagacgccgctcggcccgctgctagctggcatcggggacaatgctggtgtcgtcgatattggcaacggactggccgtcacttttaaggcggagtcccacaaccacccctcctacgtcgagccccaccagggcgcagctaccggagtcggtggcatcgttcgcgacatcatggcgatgggtgctcgcccggtcggcgtcatgaatgctttggctttcggcccgctggatgctccagataccgcacgtgtgctgcccggtgttgtttctgggatcgccgactatggcaactgcctcggcctgcccacgatcggcggccagaccctcttcgaccccacctattacggcaatccgctcgtcaacgccctgtgcgtcggggtgctgcgtcatgaggacctacagttcgccaaagcctcgggtgtaggcaatctcgtcgttctctttggtgcggccaccggtggcgacggtatcggtggcgcgtcgatccttgcctcggaatctttcgctgcagagggcgagtcgaagcgacccagcgtccaggtgggcgacccgttcatggagaagctgctcatcgagtgcacccttgacctcttcaacgccggggtagttgaggctttgcaggatttcggtgccgccggaatctcctgtgccacctccgagctggccagtgctggcgacggtggcatgcacgtcgagctcgaccgcgttccgctgcgcgacccgaacctcgcccctgaagagatcctcatgagcgagtcccaggagcggatggcggcggtggtgcgccccgatcagcttgaccgcttcatggagatctgcgcccattggggtgtcgctgccactgtcattggcgaggtcaccgataccggtcgacttcacattgattggcagggcgagcggattgtcgacgtcgatccgcggacggttgctcacgacggacctgttctcgacatgccggccgcccgtccgtggtggattgatgagctcaacgaggacgacgccaacgcgttgccgcgcgataactctggtgagggtcttgccggggccctgctggcccttgttggctccgcccagctgtgcgaccgttcctggatcaccgaccagtatgaccggttcgtgcgtggcaatactgtgctcgctcagccgaacgatgccggcatgattcgtattgacgacaacctcggcatcgcgctgtccttggacgctaacggacgccagaccacccttaacccgtatcttggcgcccagctggctctttgcgaggcttaccggaatgtggctgtctctggcgcaactccggtggctgtcactgattgcctcaattatggctccccgtacgatcccgatgtcatgtggcaattcgacgagaccatccttggtctggttgacggctgccgcgagcttggcgtgccggttacgggcggtaacgtttccctgcacaaccgcactggagatgagtcgattcggcctactccgctcgttggtgtgctcggcgttattgatgacgtgcatcgtcgtatcccgtcggccttcgcacacgacggcgacgctgtcttgctgctaggaacgacgaagtgcgagttcggcggatcggtctatgaggacgtcatccacgctggccacctaggtggtatgcccccgatgcccgacctgaatgccgagaaggctctggccgcggtgatggtggaagcgtcgaagcgcggcctgctgtctagcgctcacgacctgtccgacggtggcctggcgcaggcgcttgtggaaagctgcctacaggggggtcttggcgtgtcggtgagtctgcccgagggtgaaccgtcggtgatgttgttctctgagaccccggcccgagcgatcgtttcgctgtgcggtaacggctaccgtgagttcaaggagctgtgccaggagcacggtgtgccgactgcccgtattggcgaggtcatagatcacggtgagatcgaggttaacggtctgttcagcctcccccttgacgagatcgaacgagcctggcgcaagccgattccaactgctatgggggagtga

SEQ ID NO: 53113 - protein, 750 aa, Propionibacterium acnes
MADTVENAVSTPDVEQPWAELGLSADEYQRIREILGRRPTGGELAMYSVMWSEHCSYKSSKKYLRRFGDLPQQTPLGPLLAGIGDNAGVVDIGNGLAVTFKAESHNHPSYVEPHQGAATGVGGIVRDIMAMGARPVGVMNALAFGPLDAPDTARVLPGVVSGIADYGNCLGLPTIGGQTLFDPTYYGNPLVNALCVGVLRHEDLQFAKASGVGNLVVLFGAATGGDGIGGASILASESFAAEGESKRPSVQVGDPFMEKLLIECTLDLFNAGVVEALQDFGAAGISCATSELASAGDGGMHVELDRVPLRDPNLAPEEILMSESQERMAAVVRPDQLDRFMEICAHWGVAATVIGEVTDTGRLHIDWQGERIVDVDPRTVAHDGPVLDMPAARPWWIDELNEDDANALPRDNSGEGLAGALLALVGSAQLCDRSWITDQYDRFVRGNTVLAQPNDAGMIRIDDNLGIALSLDANGRQTTLNPYLGAQLALCEAYRNVAVSGATPVAVTDCLNYGSPYDPDVMWQFDETILGLVDGCRELGVPVTGGNVSLHNRTGDESIRPTPLVGVLGVIDDVHRRIPSAFAHDGDAVLLLGTTKCEFGGSVYEDVIHAGHLGGMPPMPDLNAEKALAAVMVEASKRGLLSSAHDLSDGGLAQALVESCLQGGLGVSVSLPEGEPSVMLFSETPARAIVSLCGNGYREFKELCQEHGVPTARIGEVIDHGEIEVNGLFSLPLDEIERAWRKPIPTAMGE

SEQ ID NO: 53114 - DNA, 2385 bp, Prochlorococcus marinus
  CDS (1)..(2385): transl_table=11
ttgagagttgactatgacgtggctgcggctttacgtcatgaaggtcttaaaccgcatgattacgacgagatttgtcgtcgtctccaacgtgcacctaaccgagttgagctgggaatgtttggtgtgatgtggtctgaacactgttgttatcgcaattcaaggcctttgctcagcagctttcctacaagtggtcatcggattttggttggtcctggagaaaatgctggtgtcgtggatttaggagatgggcagagcttggctttcaaaatcgaaagccacaatcatccttctgcattggaaccttttcaaggagctgctacaggtgttggcggaatcttgagagatatttttactatgggtgcaaggcctattgcgcttcttaatgctttacgttttggacctcttgaagatgaacgtaatgttggtcttatggagggggtcgttgaaggtatagctcattacggcaattgcgtgggagttcctaccgttggtggtgaggtggcgtttgattccagttattccggcaacccgttagttaatgcaatggctcttgggctgatggaaacagatgagattgtttgttctggggctcatggtgttggttatccggtgatttatgtcggtagtacaactggtcgtgatggtatgggtggtgccagttttgctagtgcagagctcacaaaagcttctttggatgatcgtcctgcggttcaggttggtgatccatttttggaaaaaggtttaattgaagcttgtcttgaagcttttaagagtggcgatgttgttgctgctcaggatatgggtgcggctggtcttacttgtagctgttcggagatggctgctaagggtggtcttggtattgaactcgatcttgatcgagttcctgctcgtgagcttgggatgactccatatgagtttttactttcggaatctcaagagagaatgctttttgtggtgaagcctggacaagagcaatctttgatggagagatttattcgttgggggttgcaagcagcaattgttggttgcgttcttgaagagaaggtggttcgtgttttgcaaaaaggagaagttgttgctgaggtgcctgctaatgcattagctgatgacactccaattgatcgacatgaattagtgagtgatcctccgctagagattcaggccaaatgggactggcaggagaatctattaccagttgttggtttaaaagggatcaatttaaattcacaatctcattttggtagtaatatttcatgggatgaaattcttttaaagttacttgatgaccctacgattgcttcaaaacgttgggtttatcgtcaatatgaccatcaggttcaagctaatacagtttcagccccaggagtttctgatgctgctgttgtgagattacgtccacagcaaggtaagggctctgtagatgaggtaaagcggggagttgcggcagttgttgattgtcctaatcgatgggtttttcttgatccagaacgtggtgctatggccgctgtagcagaagcggccagaaatcttagttgtgttggtgcggagcctttggctgtcacagataatctcaattttccttctccggaaacgcctactgggtattggcaattggctttagcttgtcgtggtctttctaaggcttgcaagactttttcaacaccagtaactggaggaaatgtttctctatataatgagactcgcttagctgatggaaaaatacaacctattcacccaacaccagttgttggaatggttggtttagttcataatcttgtaaatgtgtgtggtcaggcttggcttgagcctggtgatttgatttggcttttaggcgtgcctatcgatacaacagttgctgttgatcctcgcgttagccttgcgggtagtagttatcttgaatgtattcatggtttagttacggggaggcctccggagattgatctgaaacttgagtgtttagttcaatctttcctacgcaattctattactgagggatttgttcgctctgctcatgatctaagtgatggaggtcttgcagttgcagttgctgagtgttgtatcgctgcaaatttgggtgcacatattgagttaccatccagcgatgctcgattggatcgcttgttatttgctgaaggtggttcacgcatcttggtgagtgttccatccacgcaggctgttgcctggcaaaaggttttaaatcaggcaaagaccacagcccctggctcagtgtttgatcagtaccttggtgttgttacggctgatgatgagttgttgatcactcaggctggcaatcgcttggttcagcttcctttgaatcagctgagggagtgctttgagcaggcaatccctcgtcgtatgggcttggatctctcttcaagcgtctga

SEQ ID NO: 53115 - protein, 794 aa, Prochlorococcus marinus
MRVDYDVAAALRHEGLKPHDYDEICRRLQRAPNRVELGMFGVMWSEHCCYRNSRPLLSSFPTSGHRILVGPGENAGVVDLGDGQSLAFKIESHNHPSALEPFQGAATGVGGILRDIFTMGARPIALLNALRFGPLEDERNVGLMEGVVEGIAHYGNCVGVPTVGGEVAFDSSYSGNPLVNAMALGLMETDEIVCSGAHGVGYPVIYVGSTTGRDGMGGASFASAELTKASLDDRPAVQVGDPFLEKGLIEACLEAFKSGDVVAAQDMGAAGLTCSCSEMAAKGGLGIELDLDRVPARELGMTPYEFLLSESQERMLFVVKPGQEQSLMERFIRWGLQAAIVGCVLEEKVVRVLQKGEVVAEVPANALADDTPIDRHELVSDPPLEIQAKWDWQENLLPVVGLKGINLNSQSHFGSNISWDEILLKLLDDPTIASKRWVYRQYDHQVQANTVSAPGVSDAAVVRLRPQQGKGSVDEVKRGVAAVVDCPNRWVFLDPERGAMAAVAEAARNLSCVGAEPLAVTDNLNFPSPETPTGYWQLALACRGLSKACKTFSTPVTGGNVSLYNETRLADGKIQPIHPTPVVGMVGLVHNLVNVCGQAWLEPGDLIWLLGVPIDTTVAVDPRVSLAGSSYLECIHGLVTGRPPEIDLKLECLVQSFLRNSITEGFVRSAHDLSDGGLAVAVAECCIAANLGAHIELPSSDARLDRLLFAEGGSRILVSVPSTQAVAWQKVLNQAKTTAPGSVFDQYLGVVTADDELLITQAGNRLVQLPLNQLRECFEQAIPRRMGLDLSSSV

SEQ ID NO: 53116 - DNA, 2412 bp, Prochlorococcus marinus
  CDS (1)..(2412): transl_table=11
atgacagtatcttttgaaaataaagattttaaccagttcattaattcatcaaaatttcttgttgaatatgatgttacgtccgctcttgagcaagaagggttaaaacaatctgattatgcagaaatttgtagaagacttaatcgggctccaaacagaaatgaattaggaatgtttggtgttatgtggtctgaacattgttgctatcgaaactctcgtcctttacttaaaaactttcctacaacaggtagtcgaatccttgtaggtcctggagaaaatgcaggcgtagttgatattggttttggtcaaagattagtgtttaaaattgaaagtcataaccatccatcagctgtcgagccttttcaaggagcagcaactggtgtaggtggaattcttagagatatttttactatgggagctaggccaatagccttattgaatgctttaaggtttggtccattagatgatgaaaaaaatattagtttattagaaggtgtagttgcaggtatttctcactatggaaattgtgtaggagttcctactattggaggagaagtgggatttgatagtagttattcaggtaaccctttagttaatgcaatggcgttgggtttgatggaaacagaagaaatagtttgttcaggtgctagtggaataggttttccagttctttacgtaggaaatacaactggtagagatggtatgggaggagcaagctttgctagttctgaactttctaaaacgtcaatagatgatcgaccagccgttcaagttggtgatccttttcttgaaaaaggattaatagaagcttgtttagaggcttttaaaacaggatatgtaattgctgcacaggatatgggagcggcggggttgacttgtagttgttctgaaatggcgtcaaaaggtgaggtaggaattgaattgaatcttgaccttgttccagctagggaaaagggcatgactgcatatgagtttttgttatctgaatcgcaagaacgaatgctttttgttgtgaaacctggttcagaagaagaattgagagaattatttataagatggggattatatgttgaagttgttggaaaagttttaaaagaaaaagttgttagagtgattcataaaggtgaagttgtagcaaatctgcccgcatctgcgcttgctgatgatacgcctattgaagaacatttattaataaattcaacacctgaatatttgcaagaacattggaaatggactgaagatttattacctaaaactttagatgatggaattattaatataaaaaataatttatttattagttggaataatgttctattagagttattaagtataccttcaatagcttcaaaaaattggatttataaacaatatgattttcaagtacaatctaatacagttgtttctcctggagaagctgatgctgctgttattaggattcgatctcaaaatgacttttcaactaagccaaagaaagatagaggaatagcttcagtcgtagattgtaatgatagatgggtttatttagatcctcaaagaggaagtatgtctgctgttgcagaagccgctaggaatttaagtgctgtgggagctgaacctatagcaattacaaataatttaaatttttcttctccagacaaagcagttggtttttggcaattatcaatgtcatgtgaaggtataactaaagcttgtttagcattgaatactccagttacaggaggaaatgtgtcattatataatgatactaaattgccaaataataccgttatacctatacatccaacgccagtaattggtatggttggattaatagaggatattaataaaatttgtaaaaaatcttgggttaaagctgaagatcaaatatggatgattggattacctttggaaaataatataaatcaagatgaaagaatttcactatctgcttcttcttttttagagtatattcatggattgaaaacaggtagacctccagaaatagacttaaatttagaaaaacaagttcatgcatttttaagagaagtaataaaacaaggtattgttaactctgctcatgatttaggtgatggtggtctgacagttgccatagctgactgttgtatctcttctggctatggagcaaatattattctccctcctagccaatcaaggttagatagactcttatttgctgaaggaggtgcaagagttttagtgagctgttcaactgatcaaagcgtagaattaaagaaatattataaaaatatttccttacaaggatctattcttttttcaatatctcatttaggtaatgtaaataatcaaaaaaaactattagtgtctcaatctaataatacaattatagatgttaatattctagacttgaaagatacatataaagatgccatccataaaaaaataactaaataa

SEQ ID NO: 53117 - protein, 803 aa, Prochlorococcus marinus
MTVSFENKDFNQFINSSKFLVEYDVTSALEQEGLKQSDYAEICRRLNRAPNRNELGMFGVMWSEHCCYRNSRPLLKNFPTTGSRILVGPGENAGVVDIGFGQRLVFKIESHNHPSAVEPFQGAATGVGGILRDIFTMGARPIALLNALRFGPLDDEKNISLLEGVVAGISHYGNCVGVPTIGGEVGFDSSYSGNPLVNAMALGLMETEEIVCSGASGIGFPVLYVGNTTGRDGMGGASFASSELSKTSIDDRPAVQVGDPFLEKGLIEACLEAFKTGYVIAAQDMGAAGLTCSCSEMASKGEVGIELNLDLVPAREKGMTAYEFLLSESQERMLFVVKPGSEEELRELFIRWGLYVEVVGKVLKEKVVRVIHKGEVVANLPASALADDTPIEEHLLINSTPEYLQEHWKWTEDLLPKTLDDGIINIKNNLFISWNNVLLELLSIPSIASKNWIYKQYDFQVQSNTVVSPGEADAAVIRIRSQNDFSTKPKKDRGIASVVDCNDRWVYLDPQRGSMSAVAEAARNLSAVGAEPIAITNNLNFSSPDKAVGFWQLSMSCEGITKACLALNTPVTGGNVSLYNDTKLPNNTVIPIHPTPVIGMVGLIEDINKICKKSWVKAEDQIWMIGLPLENNINQDERISLSASSFLEYIHGLKTGRPPEIDLNLEKQVHAFLREVIKQGIVNSAHDLGDGGLTVAIADCCISSGYGANIILPPSQSRLDRLLFAEGGARVLVSCSTDQSVELKKYYKNISLQGSILFSISHLGNVNNQKKLLVSQSNNTIIDVNILDLKDTYKDAIHKKITK

SEQ ID NO: 53118 - DNA, 2118 bp, Pyrococcus abyssi
  CDS (1)..(2118): transl_table=11
atgcttcctcgtgaagagaagataatccgtgagaggcttggtagggagcctaacgaagttgaaaaggcaatgctcgaggtaatgtggagcgagcacgtctcctataaatcaagcaggaagtggcttaagctcttaccgacgaagaatgaacacgttatcttgggtcctggggaagatgctggtgttgtaaagttcgatgagagcacttggatagtaattggaattgaaagtcacaatcatccctcagccgtggaaccctatggtggagctgctactggaataggtggaatagtcagggatatactttgcatgggggctagaccaatagccctgctcgatccaataaggtttggacctctggagaaggagaagaacaggtacctcttcgagtatgtagttaagggaatagcggattacggaaataggataggcgtcccaacggttggaggtgaaaccgagtttgatgagagcctagataattataccctcgttaacgttgtgtgcgttggaattatgaagccagaacatttagttcatagttacgtaaccaagccaggattaaagctggttttagttggaaacagaactggaagggatggaatccatggggtaacctttgcgagtgaagagctgagcgagaacgctgaggaagaggatcgctcagctgttcaaattccagatccattcacggagaagctcttaatagaggcgacgcttgaagcggtatacacgggaaaagttaaggcgttgaaggatcttggtgggggaggtttaacctgtgcagcctccgagatggctggaaagaagggcctgggggctgtgatatatgccgatagggttccccttagagaaccgggaatgacgcctctcgaggttatgatatcggaaagccaggagagaatgctcttcgcggtcgagcctgaggacgttgaagagctcgctaagatatttgaaaagtacgaacttgaatgggcggttgttggtgagataatagaggaacctcgctttgtagtctattggaagggggataaggtcgctgaccttccaatagagcttttaacgaatgttccaacgatagagtggcctatgaaggagtacaagctcgaggaagatgttgaaactccagacatagctttatcgaaagcgttcgacctggtttggagtagtccaaatatagttgccaagaggtgggtttgggagcagtacgaccatgaagttcaggggagaaccgtggttaagccaggattcgatgcagctgttcttaagataaacggcgagtatgggcttgcaataacatctgacggtaatccaagttactgttatttgaacccctaccatggtgcgatgggaacggttgccgaggtcgttaggaacttggttagcgtcggtgctaaacctttggcactagttgataacttgaactttgcgtcccctgagaggcctgaagtttactggagcttcgttgaaaccgtgaagggtttagccgatgccgctaaagcttttgacctggcctacgttagtggtaacgtcagcttttacaatgaggttgttgataggccagtgaagccaactcccgtagttgccggaattgggaaagttaagctgaaggacattccaaggggccccagggatggggatgtaatagccttgattgggagcacgaggagggaactgggtggttctgagctatacagggttctaggaattaaaggaggaatagcgcctagggttaacttggaggaggagaagggaaatgcccttgcaattctaaatctcatagagaatgacctagtaaccttcgttcacgacgtctcaaggggaggggttgcggtggctctagcggaactttcggcctggttcaacgttggcgttaaagcgaagttcacatcgagcttcaagtcaattgactttgcgttcagcgagagtcacgggaggtacataataaccctacctgaggataaggttgaggaagccaaggaaatagcgaagatatccatagtgggaagggttgggggagacaacttcgcgctagaggttaatggtgaaaaagttgagaaggacattgaggagctctccagaatttactggaactacatgtacgacctgctagagctctag

SEQ ID NO: 53119 - protein, 705 aa, Pyrococcus abyssi
MLPREEKIIRERLGREPNEVEKAMLEVMWSEHVSYKSSRKWLKLLPTKNEHVILGPGEDAGVVKFDESTWIVIGIESHNHPSAVEPYGGAATGIGGIVRDILCMGARPIALLDPIRFGPLEKEKNRYLFEYVVKGIADYGNRIGVPTVGGETEFDESLDNYTLVNVVCVGIMKPEHLVHSYVTKPGLKLVLVGNRTGRDGIHGVTFASEELSENAEEEDRSAVQIPDPFTEKLLIEATLEAVYTGKVKALKDLGGGGLTCAASEMAGKKGLGAVIYADRVPLREPGMTPLEVMISESQERMLFAVEPEDVEELAKIFEKYELEWAVVGEIIEEPRFVVYWKGDKVADLPIELLTNVPTIEWPMKEYKLEEDVETPDIALSKAFDLVWSSPNIVAKRWVWEQYDHEVQGRTVVKPGFDAAVLKINGEYGLAITSDGNPSYCYLNPYHGAMGTVAEVVRNLVSVGAKPLALVDNLNFASPERPEVYWSFVETVKGLADAAKAFDLAYVSGNVSFYNEVVDRPVKPTPVVAGIGKVKLKDIPRGPRDGDVIALIGSTRRELGGSELYRVLGIKGGIAPRVNLEEEKGNALAILNLIENDLVTFVHDVSRGGVAVALAELSAWFNVGVKAKFTSSFKSIDFAFSESHGRYIITLPEDKVEEAKEIAKISIVGRVGGDNFALEVNGEKVEKDIEELSRIYWNYMYDLLEL

SEQ ID NO: 53120 - DNA, 2094 bp, Pyrobaculum aerophilum
  CDS (1)..(2094): transl_table=11
atggccttgagcccgggggagttggagctgattagaagcgccttggggagggagccgacagaagtggaatacgccttgttccgctcccactggtctgagcactgttcttataaatccactaggatgtggcttaggcggcttccctccaaggcgccgtgggtcgtgaggggccccggcacagatgcgcctctagtggagatagccgaggggctatacgccacttttaaaattgagtctcacaaccacccaagcgccgtggatccgtacaacggcgcggccacgggggtaggcggcattattagggatattctaaccgtgggggccaggcccattgccctgttggtcaatttacacttcgggcctccgtcccacccccacgcgcggtggatcgcggtaaacgtaataaggggcatctcagactacggcaatagagtaggcgtgccggtggtggggggagagacgtggtttcacgaggacttcacctacacccccatcgtcttggccacgtgcgtgggcatagtggaaaaagacggcgtccccccaggcggggctgagcccggcgatttaatcattgtggcagggctaggcgctgataaaagcggcttgggggggtcagccttcgcgagcaagacgctgagcgaagaggccgaggaggacttgggcgcggtgcaagtggcagatcctctaatggggaaaaagctaatagacctcgtcagagaggcccggagttgcgttaagtttataaaagacctgggcgggggcgggctcgcgacagccctcgcggagctcgccgagtggttccagctgggagtagtggccgagttggacaaaatccacatggcggatagggagatgggacccgccgaggtgctgacaagcgagacccaggagaggatggtgttcgtgacaagcccctcaaagctggagtgcttagagcggctgttagagaaattcgaagtgccgtattcaatagtggggcgtttcacggcagaggggagagttgttttaaaatggcgcggcgaagttgtcggcgacttgccgctgagccttgtggcgaaagcccccgaaacgccctggccgcaagagccgtatgccccgcccccgctcccccacgtcccagagccgcctattgaaaaggccatagacgccgtgttgtcctccccaaacgtggcgtttaaacaggcaatatacgagaggtttgatttcgacgtcggggtgcggaccgtcctaaagcccggcgagggcgacgccgctgtgttgaaaatatacgagagggggaatttaggcctagcggttaagggagacgccaacccccgctttacttacctcaacccacgcctgggtgccgccaatgcctttataaaggcgtatagaaacgtggcagtggtaggcgggaggcccctcgccgccgtcgactctatcaacgtggggagcccctccaggcccagcgcctactggcagttcgtagaggccgtggagggcttgagggaggcggctgaggccctcggcgtgccgatagtgggaggcaaggttagtctgtacaatgaatacaagggcaagccggtggcgcccacggtggccgtggtggtcctcggcgtagttgaagacgtctctaaagtcaataaggcggtgtggaaagaaggcgacggcgtctacgtctggggcgtgacgaaagatgaggtgggaggcagcgagtacttacaccgcgtccacggcctcgtggcggggcagccgccgtcaattgactacagcgtagaaaaagagctcgcggccgttgtgagaaagtgggcggggaggcttaccggggcaaaggacgtgggcctcggcggcttggcggcggcgctggccaaaatggccgcggccagcgggataggcgcagatattgatatctgcaaggccccctcaactaccgccaggctagactacttgctcttcagcgagtctaacggcaggtttatcgcggccggcgaggaggggccggggactagggtgggcgccgcgggcggggattatttcaccctccggtgcggctcgacgatagtatacaagaggaaagtggaggaactagcagagttgatgagccttaagatttaa

SEQ ID NO: 53121 - protein, 697 aa, Pyrobaculum aerophilum
MALSPGELELIRSALGREPTEVEYALFRSHWSEHCSYKSTRMWLRRLPSKAPWVVRGPGTDAPLVEIAEGLYATFKIESHNHPSAVDPYNGAATGVGGIIRDILTVGARPIALLVNLHFGPPSHPHARWIAVNVIRGISDYGNRVGVPVVGGETWFHEDFTYTPIVLATCVGIVEKDGVPPGGAEPGDLIIVAGLGADKSGLGGSAFASKTLSEEAEEDLGAVQVADPLMGKKLIDLVREARSCVKFIKDLGGGGLATALAELAEWFQLGVVAELDKIHMADREMGPAEVLTSETQERMVFVTSPSKLECLERLLEKFEVPYSIVGRFTAEGRVVLKWRGEVVGDLPLSLVAKAPETPWPQEPYAPPPLPHVPEPPIEKAIDAVLSSPNVAFKQAIYERFDFDVGVRTVLKPGEGDAAVLKIYERGNLGLAVKGDANPRFTYLNPRLGAANAFIKAYRNVAVVGGRPLAAVDSINVGSPSRPSAYWQFVEAVEGLREAAEALGVPIVGGKVSLYNEYKGKPVAPTVAVVVLGVVEDVSKVNKAVWKEGDGVYVWGVTKDEVGGSEYLHRVHGLVAGQPPSIDYSVEKELAAVVRKWAGRLTGAKDVGLGGLAAALAKMAAASGIGADIDICKAPSTTARLDYLLFSESNGRFIAAGEEGPGTRVGAAGGDYFTLRCGSTIVYKRKVEELAELMSLKI

SEQ ID NO: 53122 - DNA, 2115 bp, Pyrococcus furiosus
  CDS (1)..(2115): transl_table=11
atgtttccccatgaggaaaagttaattcgtgagaagcttggaagagagcctaacgatctcgaaaaagccatgctcgaggtcatgtggagtgagcatgtctcctataagtcgagcagaaaatggttgaagctgttacccacaaaaaatgagcacgtcattttgggcccgggagaagatgctggaataattaaatttgacgataaaacttggatcgtaattggaatagagagtcacaatcacccttccgcagttgaaccttacggtggtgctgctactggggttggtggaatagttagggatattttatgtatgggggccaggccaatagctcttcttgacccgataaggtttggccccttggagaaggagaagaacagatatctctttgaatacgtggttaagggaatagctgattatggaaatagaataggtgtccccactgtggggggagaaactgaatttgatgaaagcttagataactacactttagttaacgttgcttgtattggaataatgagacccgagcatctcgttcatagctatgtaactgagcctggtttaaagctggttatagttgggaataggactggtagagatggtattcacggggtcacatttgctagcgaagagttgggtgaaaatgctgaagaggaggataggtcagccgttcagattccagatccattcactgagaaactcttaattgaagcaacgcttgaagccgtttacactggaaaggtcaaagctcttaaggacttaggtgggggaggattgacctgtgccgcttcagaaatggttggcaagagaggctttggtgcaataatatatgctgacaaagtgccccttagagaacccgggatgactcctcttgaggtaatgatttctgaaagccaggagagaatgctcttcgccattaaacctgaggacgttgaagagttggggaagatatttgagaagtatgagctagaatggagtgttgtcggggaggttatagaggagcctaagtttatagtttattggaaggggagaaaagttgcagagctcccaatagagcttctaacaaatgtaccgactattgaatggccgatgaaagaatatagaatcgaagaagacgttgaaactcctcaaatctccctagaagaagccttcgaaaaagtttggagaagtcccaatgtaatatcaaagagatgggtttgggagcagtatgatcatgaagttcaaggtagaactgttataaagccggggtttgactcggcagttttgaagataaacgaagagtacggtctagcaattacagctgatggaaatccgactcactgctatctaaatccctatcacggtgcaatgggagttgtagttgaggtagttaggaatcttgttagtgtaggtgcaaaacctttagcccttgtagacaatctaaatttcgcttctccagagagacctgaagtttattggagcttcgtcgagacgataaaaggtctagcagacgcagctaaagcttttggattggcatatgttagtgggaatgtcagcttttacaacgaggtcgtaaataaacctgtaaagccaacccctgtagttgcgggtgttggaaaggtaaagcttgaaaagattccgagggggcctagagagggagatttgattggtttaataggggagaccagaaaggaattaggaggctcagagctatacagagttttgggggtatctaaaggaattgctcctagggtggacttggaggttgagaagagaaatgcagaaagtgttcttaaattgattgaagagggtttagtgagctttgttcatgatgtttcacgtggtggggtagcagttgctttggcagagctttctacatggtttaatgtaggaataaaatccgagataacaacatctctccttccactggactttgccttcagcgagagccatggaaggtatatagtgacttttccagaagagaaccttgaggctgtgaagaaaatagctccaataaccctcctgggaagaattggaggagagaagtttgaattgaagataaatggtgaaaaagttagtaagacagtaaagtggctgtccgatgtgcactggaatgagctgtataggattatggattga

SEQ ID NO: 53123 - protein, 704 aa, Pyrococcus furiosus
MFPHEEKLIREKLGREPNDLEKAMLEVMWSEHVSYKSSRKWLKLLPTKNEHVILGPGEDAGIIKFDDKTWIVIGIESHNHPSAVEPYGGAATGVGGIVRDILCMGARPIALLDPIRFGPLEKEKNRYLFEYVVKGIADYGNRIGVPTVGGETEFDESLDNYTLVNVACIGIMRPEHLVHSYVTEPGLKLVIVGNRTGRDGIHGVTFASEELGENAEEEDRSAVQIPDPFTEKLLIEATLEAVYTGKVKALKDLGGGGLTCAASEMVGKRGFGAIIYADKVPLREPGMTPLEVMISESQERMLFAIKPEDVEELGKIFEKYELEWSVVGEVIEEPKFIVYWKGRKVAELPIELLTNVPTIEWPMKEYRIEEDVETPQISLEEAFEKVWRSPNVISKRWVWEQYDHEVQGRTVIKPGFDSAVLKINEEYGLAITADGNPTHCYLNPYHGAMGVVVEVVRNLVSVGAKPLALVDNLNFASPERPEVYWSFVETIKGLADAAKAFGLAYVSGNVSFYNEVVNKPVKPTPVVAGVGKVKLEKIPRGPREGDLIGLIGETRKELGGSELYRVLGVSKGIAPRVDLEVEKRNAESVLKLIEEGLVSFVHDVSRGGVAVALAELSTWFNVGIKSEITTSLLPLDFAFSESHGRYIVTFPEENLEAVKKIAPITLLGRIGGEKFELKINGEKVSKTVKWLSDVHWNELYRIMD

SEQ ID NO: 53124 - DNA, 2118 bp, Pyrococcus horikoshii
  CDS (1)..(2118): transl_table=11
atgtttccccaggaggaaaagttaattcgtgagagacttggaagggaaccgaacgatgttgaaagggcaatgcttgaggtaatgtggagtgagcacgtctcctataagtcgagcagaaaatggttgaagttattacctacaaaaaacgagcacgttgttttgggcccaggagaggatgctggaataattaaatttgatgataaaacttggatcgtaattggaatagagagtcataatcatccttccgctgttgaaccctatggcggtgctgccactggtgttggtggaatagttagggatattttatgtatgggggctaggccgatagctctgctcgacccaataaggttcggccctttggagaaggagaagaacaggtatctcttcgaatacgtggttaagggaatatctgattatggaaacagaataggagttcccactgtgggaggggagactgaatttgacgaaagcttagacaactacactctagttaacgttgcttgtgttggaataatgaaacctgaacacctcgtccacagctacgtaacagagccgggcttaaagctaatcatagtgggaaataggactggaagggatggcattcatggggtcacctttgctagcgaagagttaagtgaaaatgctgaagaagaagataggtcagctgtccaaattccagatccctttacggagaagctattaattgaggcaacgcttgaagctgtctatactggaaaggttagggccctcaaggatttaggtgggggaggattaacctgtgccgcttcagagatggttgggaagagaggctttggcgcaataatttatgctgacaaagttctcttaagggagcctggaatgacccctcttgaagttatgatatcagaaagccaggagagaatgcttttcgcggtaagacctgaagatgttgaagagcttgcaaggatctttgagaagtacgagcttgagtggagcgtcgttggtgaggttatagaggaacctaaattcatagtttattggaagggaagtaaagttgcggagcttccaattgatctactaacggaagttccaactattgagtggccaatgaaggaatataaaattgaagaggaagttgggatccctaggatatctcttcaggaggcctttgagaaggtctggagaagtcctaacatagtagcaaagagatggatatgggaacaatatgaccatgaagttcagggtaggactgttgtgaagcctggatttgactctgcagtgctgaagataaatgaggaatatgggatcgctattacggcagatggaaatccgaatcattgttacttgaatccttaccatggtgcgatgggcctcgtcgctgaagttgtaaggaacctagtaagtgtcggtgctaaacctttagccctcgtagataatctaaactttgcttcccctgaaaggccagaggtttactggagctttgctgaaacggtgaagggattagctgatgctgctaaggcttttaacttagcttacgtcagcggaaacgttagcttttacaatgaaatcgttgataagccgataaagcctacccctgtagttgcaggtgttggaaaggtaaagctaagtaaaatacctaagggacctaataagggagatgttgtaaccttggttggggaaaccaagagggagcttgggggatccgagctctacagggttctcggaataaggaagggtattgctcccagggtaaatttagaggtggagaggaaaaatgctgaaagcattttaaggcttataaatgcctctctcgttagtttcgtgcacgatttatctaggggaggactccttgtagcattagctgaggtagctgcattgttcaacgttgggatggaagttactattaaaaccgatatgaaccctgtagagttcgcgttcagtgaaagtcatggtagatatctagttgttcttccagagaggaaacttgaagaggctagggagataacggatcttaaggttatcggaaggataataggatctaattcgttcagcgttaagataaatgacgaagttttactctggaatctagataagctcaaggatgtttattggaacaccctttataggttaatggattaa

SEQ ID NO: 53125 - protein, 705 aa, Pyrococcus horikoshii
MFPQEEKLIRERLGREPNDVERAMLEVMWSEHVSYKSSRKWLKLLPTKNEHVVLGPGEDAGIIKFDDKTWIVIGIESHNHPSAVEPYGGAATGVGGIVRDILCMGARPIALLDPIRFGPLEKEKNRYLFEYVVKGISDYGNRIGVPTVGGETEFDESLDNYTLVNVACVGIMKPEHLVHSYVTEPGLKLIIVGNRTGRDGIHGVTFASEELSENAEEEDRSAVQIPDPFTEKLLIEATLEAVYTGKVRALKDLGGGGLTCAASEMVGKRGFGAIIYADKVLLREPGMTPLEVMISESQERMLFAVRPEDVEELARIFEKYELEWSVVGEVIEEPKFIVYWKGSKVAELPIDLLTEVPTIEWPMKEYKIEEEVGIPRISLQEAFEKVWRSPNIVAKRWIWEQYDHEVQGRTVVKPGFDSAVLKINEEYGIAITADGNPNHCYLNPYHGAMGLVAEVVRNLVSVGAKPLALVDNLNFASPERPEVYWSFAETVKGLADAAKAFNLAYVSGNVSFYNEIVDKPIKPTPVVAGVGKVKLSKIPKGPNKGDVVTLVGETKRELGGSELYRVLGIRKGIAPRVNLEVERKNAESILRLINASLVSFVHDLSRGGLLVALAEVAALFNVGMEVTIKTDMNPVEFAFSESHGRYLVVLPERKLEEAREITDLKVIGRIIGSNSFSVKINDEVLLWNLDKLKDVYWNTLYRLMD

SEQ ID NO: 53126 - DNA, 2142 bp, Pyrococcus kodakaraensis
  CDS (1)..(2142): transl_table=11
atgttcccccacgaggagaagctcatccgggagaggctcgggagggagccgaacgaagtggaaaaggccatgctcgaagtaatgtggagcgagcacgcctcgtacaagtctagcaggccgttccttaagctccttccaacggagaacgagcacgtggttctgggcccgggagaggatgctggaatagtgaagttcgacgatgaaacctggatagcggttggaatcgagagccacaaccacccttcagccgttgagccctacggcggtgccgccacgggtgtcggcggaattgtcagggatatactctgtatgggcgcccgtccgatagccctcctcgacccgatacgcttcgggccgcttgagaaggagcgcaaccgctacctcctccagggcgtcgtgaagggcatagcggactacggcaacaggataggagttccgacggttggcggcgagacagagttcgacgagagcctggataactacacgctcgtgaatgttgcctgcgttgggataatgaggccggagcacttcgtccacagctacgttgaggaagccgggttaaagctcgtcctcgtcggtaacaggaccggcagggacggaatccacggcgtgaccttcgcaagcgaggaactgagcgagaacgcggaggaggaagaccgctcggcggtccaaattcccgaccccttcaccgagaagcttctaattgaagccacgcttgaggccgtctacacagggaaagttagagcgctcaaagacctcggcggcggcggacttacctgcgcttcctcggagatggccgggaagaagggcttcggtgccgttatctacgccgaccgcgtccccctaagggagccaaacatgacaccgacggaggtaatgatatccgagagccaggaaaggatgctctttgcagtcagggaagaggacgttgaagaaatcgggaaaattttcgagaagtacggcctcgaatggacggtcgttggagagattataaaagaaccgcgctacatcgtttactggaagggcgagaaggttgctgacctcccaatagatctccttacggaagttccaacgatcgagtgggagacgaggccctacagcctcgaaagggacgttgagacacccaagataagcttttctgacgccttcgagctcgtctggagcagtccgaacgttctgaacaagcgctgggtatgggagcagtacgaccacgaggttcagggcaggacagtggtaaagccaggaagagatgctgcagtgctcaagataaacgagcgctacgggctggccttcgtggccgacggtaatcctaaccacagccacctcaacccctaccacggagcgatgggggctgttgctgaagtcgtgagaaacctcgtcagtgtgggtgccgagcccttagccctggtggacaacctcaacttcgcctccccagagagacccgaggtctactggagctttgcggagacagtcaggggactggcggatgctgcaagagccttcggtttagcgtacgtgagcggaaacgtcagcttctacaacgaggtcgttgacaggcccataaagccgactccagtcgttgctggcctcggaaaggtggagcttgagaaaatacctggctttggcctcgaagaggggctccttataggcgtcgttgggagcactaagagggagctcggaggaagtgagctatacgtgaggctcggtctgaaaggcggaatcgctccgcgcgtgaaccttgaggaggaaaaggcgaacgccgagggaatccttgaggcgatcagaaggggactcttgaaggccgtccacgacgttagcaagggcggaatagcggtggccctggcggagatggcagttttgggcaacacgggcttcaccgctgacctctcgaaggtgcccgccgagacttctaacccgcttgaggttgccttcagcgagagccacggccgctacatcgtagtcttccccgaggaaagacttgaggagcttaaggcgctcttcaggcacttcgcagtaatcggcagagcaggaggaagcggtgccgtcttcctctggaatggagatgagctcctgaggaagccgatcaccaagctgagggaagttcacgagtcctttccgaagctcctgggtgaggaggaatga

SEQ ID NO: 53127 - protein, 713 aa, Pyrococcus kodakaraensis
MFPHEEKLIRERLGREPNEVEKAMLEVMWSEHASYKSSRPFLKLLPTENEHVVLGPGEDAGIVKFDDETWIAVGIESHNHPSAVEPYGGAATGVGGIVRDILCMGARPIALLDPIRFGPLEKERNRYLLQGVVKGIADYGNRIGVPTVGGETEFDESLDNYTLVNVACVGIMRPEHFVHSYVEEAGLKLVLVGNRTGRDGIHGVTFASEELSENAEEEDRSAVQIPDPFTEKLLIEATLEAVYTGKVRALKDLGGGGLTCASSEMAGKKGFGAVIYADRVPLREPNMTPTEVMISESQERMLFAVREEDVEEIGKIFEKYGLEWTVVGEIIKEPRYIVYWKGEKVADLPIDLLTEVPTIEWETRPYSLERDVETPKISFSDAFELVWSSPNVLNKRWVWEQYDHEVQGRTVVKPGRDAAVLKINERYGLAFVADGNPNHSHLNPYHGAMGAVAEVVRNLVSVGAEPLALVDNLNFASPERPEVYWSFAETVRGLADAARAFGLAYVSGNVSFYNEVVDRPIKPTPVVAGLGKVELEKIPGFGLEEGLLIGVVGSTKRELGGSELYVRLGLKGGIAPRVNLEEEKANAEGILEAIRRGLLKAVHDVSKGGIAVALAEMAVLGNTGFTADLSKVPAETSNPLEVAFSESHGRYIVVFPEERLEELKALFRHFAVIGRAGGSGAVFLWNGDELLRKPITKLREVHESFPKLLGEEE

SEQ ID NO: 53128 - DNA, 2232 bp, Rhizobium fredii
  CDS (1)..(2232): transl_table=11
atgacgatttccaacacccgccccatcaccccggagctcatcgcctcgcacgggctgaagcccgacgaatacgagcgcatcctgagcctgatcaggcgcgagccgaccttcaccgaactcggcattttctcggcgatgtggaacgaacactgctcgtacaaatcctcgaagaaatggctgcgcacacttccgaccaagggaccgcgcgtcatccagggcccgggtgagaacgccggggtggtcgacatcgatgacggcgactgcgtggtcttcaagatggagagccacaatcatccctcctatatcgagccctaccagggcgcggcgaccggcgtcggcggcatcctgcgcgacgtcttcaccatgggagcgcgtccgatcgccgcaatgaacgcgctgcgcttcggggcgccggatcatccgaagacccgtcacctcgtttccggcgtcgtggccggcgtcggcggctatggcaactccttcggtgtgccgaccgtcggcggcgaggtcgagttcgacgcgcgctataacggcaacatcctcgtcaacgcctttgcggccggcctcgcaaggagcgatgccatcttttactcgaaggcggagggcgtgggcctccccgtcgtctatctcggcgccaagacgggccgcgacggcgtcggcggcgccacaatggcatcggccgaattcgacgagtcgatcgaagagaagcgcccgaccgtgcaggtcggcgaccccttcacggagaaatgcctgctcgaggcctgcctcgaactgatgcagaccggcgcggtgatcgccatccaggacatgggtgccgccggcctcacctgctcggccgtcgagatgggcgccaagggcgacctcggcatcgaactcgatctcgacaaggtgccggtgcgcgaggagcgcatgacggcctacgagatgatgctctcggaaagccaggagcgcatgctgatggtgctgcgcccggagaaggaagaggaagccaaggcgatcttcgtcaagtgggggctcgatttcgcgatcgtcggcaagacgaccgacgacctgcgcttccgcatcctgcatcagggtgaggaagtggcgaacctgccgatcaaggagctcggtgacgaagcaccggaatatgatcgcccctggaccccggccaagagcccctcgccgctcgccaccaacgacatcccccgggccgatgtcgccgaagcgcttctgaagctcgtgggttccgccaacaactcctcgcgccgctgggtctacgagcagtatgacacgctgatccaaggcaattcgctgcagcttcctggcggcgacgccggggtggtccgcgtcgaaggccatgcgaccaaggcactcgccttctcctccgatgtcacgccgcgctatgtcgaggccgatccgttcgagggtggcaagcaggctgtcgccgagtgctggcgcaacctcaccgccaccggtgcgctgccgcttgccgcgacggacaatctgaacttcggcaaccccgaacgtccggagatcatgagccagttcgttcacgccatcaaaggcatcggcgaggcttgccgcgctctcgatttcccgatcgtctccggcaacgtctcgctctacaacgagacgaatggccagggaatcctgccgaccccgactatcggcggtgtgggcctgatcagcgattgggcaaggatggcgcgcatccgtttcgcggccgccgatgaggcgatcctgcttgccggcgcgccggaaggctggggaacgcacatcgcccagtcggtctacatgcgcgatgtccacggccgcaccgatggtccggcaccgcatgtcgatctggcgcatgagcgcaaggtcggcgacttcgttcgcggcctgatcgcggatgggctggttacggccgtgcatgactgctcttcgggtggcctcgcccttgccgtagcggaaatggcaatggcctccggcatcggtgcaacgattgaagcgcccgccggacacgatccgattgcggccttctacggggaagaccagggccgctatgtcgtgacggttacggccgagaagctggaagcgatcgcctcaagggcgagagatgctggcctgtccttgccggtcatcggcacgaccggcggcagcgcggtgaagctcggcgacgccaaggcagtctcagtcgaggagttgcgttccacccacgaagcctggttccccacctatatgggcggcgatctcgcaccggacaattga

SEQ ID NO: 53129 - protein, 743 aa, Rhizobium fredii
MTISNTRPITPELIASHGLKPDEYERILSLIRREPTFTELGIFSAMWNEHCSYKSSKKWLRTLPTKGPRVIQGPGENAGVVDIDDGDCVVFKMESHNHPSYIEPYQGAATGVGGILRDVFTMGARPIAAMNALRFGAPDHPKTRHLVSGVVAGVGGYGNSFGVPTVGGEVEFDARYNGNILVNAFAAGLARSDAIFYSKAEGVGLPVVYLGAKTGRDGVGGATMASAEFDESIEEKRPTVQVGDPFTEKCLLEACLELMQTGAVIAIQDMGAAGLTCSAVEMGAKGDLGIELDLDKVPVREERMTAYEMMLSESQERMLMVLRPEKEEEAKAIFVKWGLDFAIVGKTTDDLRFRILHQGEEVANLPIKELGDEAPEYDRPWTPAKSPSPLATNDIPRADVAEALLKLVGSANNSSRRWVYEQYDTLIQGNSLQLPGGDAGVVRVEGHATKALAFSSDVTPRYVEADPFEGGKQAVAECWRNLTATGALPLAATDNLNFGNPERPEIMSQFVHAIKGIGEACRALDFPIVSGNVSLYNETNGQGILPTPTIGGVGLISDWARMARIRFAAADEAILLAGAPEGWGTHIAQSVYMRDVHGRTDGPAPHVDLAHERKVGDFVRGLIADGLVTAVHDCSSGGLALAVAEMAMASGIGATIEAPAGHDPIAAFYGEDQGRYVVTVTAEKLEAIASRARDAGLSLPVIGTTGGSAVKLGDAKAVSVEELRSTHEAWFPTYMGGDLAPDN

SEQ ID NO: 53130 - DNA, 2232 bp, Rhizobium loti
  CDS (1)..(2232): transl_table=11
atgaccatttccaattccgtgccgatcacccccgagctcattgccgcgcatgggctgaagccagacgagtatcagcgcatcctcgatctcgttgggcgcgaaccgagttttaccgagctcggcattttctcggcgatgtggaacgagcactgctcctacaaatcctcgaagaagtggctgcgcacactgcccacgacggggccacaagttatccaggggccgggcgagaatgccggcgtggtcgacatcggcgacggcgattgcgtcgtcttcaagatggaaagccacaaccacccctctttcatcgagccctaccagggcgcggcgaccggcgtcggcggcattttgcgcgacgtcttcaccatgggcgcacggccgatcgcggcgatgaatgcgctgcgcttcggcgcgcctgaccaccccaagaccaggcatctcgtcgccggtgtggtttcaggcgtcggcggttacggcaattccttcggcgtgccgacggtaggcggtgaggtcaacttcgacgcccgctacaacggcaacatcctggtcaacgccttcgccgccggcctcgccaagaccaatgccatcttcctgtcggaagccaagggcgtcggcctgccggtcgtctatctcggcgccaagactggccgcgacggcgtcggcggcgccaccatggcgtcggccgagttcgacgacaagatcgacgagaagcgcccgaccgtgcaggtcggcgaccctttcaccgaaaagtgcctgctcgaggcctgcctcgagctgatggcatcgggcgccgtcatcgccatccaggacatgggtgcggccggcctcacctgctcggcggtcgagatgggcgccaagggcgatctcggcatcgagctcgacctcgacaaggtgccggtgcgcgaggagcgcatgagcgcctatgagatgatgctgtcggaaagccaggagcgcatgctgatggtgctgcgccccgagaaggaaaaggaagccgaggcgatcttccacaaatggggcctcgacttcgccattgtcggcaagaccaccgacgatctgcgttttcgcgtgctgcatcagggcgaccaggtcgccgatctgccgatcaaggatctcggcgacaaggcgccggaatatgaccgcccctggatcgagccgaagaagccggcaccgcttgccgccaacgacattccgcaggccgatgtcgcggacgcgctgctgaaactactcggcggaccggacctgtcgtcgcgccgctgggtctgggagcagtatgacacgctgattcagggcaattcgctgcagcttcccggcggcgatgccggcgtggtgcgggtggaaggccatgcgaccaaagcgctcgccttctcctcggatgtgacgccgcgttattgcgaagccgatccctatgaaggcggcaagcaggccgtggccgaatgctggcgcaatctcaccgccaccggcgcgctgccgctggccgcgaccgacaacctcaatttcggcaatccggaacggcccgagatcatgggccagctggtcggcgcggtgaaaggcatcggcgacgcctgccgcgcgctcggcttcccgatcgtgtctggcaatgtctcgctctacaacgagaccaacggccagggcatcctgccgacaccgaccatcggcggcgtcgggctgatcgccgactggtcgaagatggtgcgcaccggttttgccgcgcaagaccagatgatcctgctggtcggcgcgcccgcctcctggggcacgcatcttggccagtccgtctatttcagggacatccatggccgcaccgacggtccgccgccgccggtcgacctcgcgcatgagaagcgcgtcggcgaccacgtgcgctcgctgatcgcctccggcatcgtcaccgcggcgcatgacgtttcagatggcggtatcgccgtggcgctggccgaaatggcgatggcgtcgggcatcggcgcgaccgttcccggccttgtcggcaccgatcccatcccggtctggttcggcgaggatcagggccgctatctgctgacactgtcgatcgacccgcatggcgatgaatgggacgccatccgcaagcagcagggcgaactcggcatcttcgcgccgtggatcggctcgaccggaggcgatgcgctgaagctcggcgatgccaaggcgatcccggtcggcgatctgaaggccgcccatgaaggctggttcccccgcttcatggaccaggccagttga

SEQ ID NO: 53131 - protein, 743 aa, Rhizobium loti
MTISNSVPITPELIAAHGLKPDEYQRILDLVGREPSFTELGIFSAMWNEHCSYKSSKKWLRTLPTTGPQVIQGPGENAGVVDIGDGDCVVFKMESHNHPSFIEPYQGAATGVGGILRDVFTMGARPIAAMNALRFGAPDHPKTRHLVAGVVSGVGGYGNSFGVPTVGGEVNFDARYNGNILVNAFAAGLAKTNAIFLSEAKGVGLPVVYLGAKTGRDGVGGATMASAEFDDKIDEKRPTVQVGDPFTEKCLLEACLELMASGAVIAIQDMGAAGLTCSAVEMGAKGDLGIELDLDKVPVREERMSAYEMMLSESQERMLMVLRPEKEKEAEAIFHKWGLDFAIVGKTTDDLRFRVLHQGDQVADLPIKDLGDKAPEYDRPWIEPKKPAPLAANDIPQADVADALLKLLGGPDLSSRRWVWEQYDTLIQGNSLQLPGGDAGVVRVEGHATKALAFSSDVTPRYCEADPYEGGKQAVAECWRNLTATGALPLAATDNLNFGNPERPEIMGQLVGAVKGIGDACRALGFPIVSGNVSLYNETNGQGILPTPTIGGVGLIADWSKMVRTGFAAQDQMILLVGAPASWGTHLGQSVYFRDIHGRTDGPPPPVDLAHEKRVGDHVRSLIASGIVTAAHDVSDGGIAVALAEMAMASGIGATVPGLVGTDPIPVWFGEDQGRYLLTLSIDPHGDEWDAIRKQQGELGIFAPWIGSTGGDALKLGDAKAIPVGDLKAAHEGWFPRFMDQAS

SEQ ID NO: 53132 - DNA, 2232 bp, Rhizobium meliloti
  CDS (1)..(2232): transl_table=11
atgacgatttccaacacccgcccaatcaccccggacctgatcgcctcgcacgggctcaagcccgacgaatacgaacgcatcctgaacctgatcgggcgcgagccgacctttacggagcttggcatcttctcggcgatgtggaacgagcattgctcctacaaatcctcgaagaaatggctgcgcacgcttccgaccaaggggccgcgcgtcatccagggccctggcgagaacgccggcgttgtcgacatcgacgacggtgactgcgtcgtcttcaagatggagagccacaaccatccctcctacatcgaaccctaccagggagcggcaacgggcgtcggcggcatcctgcgtgatgtcttcacgatgggtgcgcgtccggtagcggcgatgaacgcgctgcggttcggttcgccggatcacccgaagacccgccacctcgtctcgggcgtcgttgcaggcgtcggcggctacggcaattccttcggcgtgccgacggtcggcggcgaagtcgagttcgacgcgcgctacaatggcaacatcctcgtcaatgccttcgcggcggggctcgccaagaccgacgcgatcttctactcgaaggcggaaggcgtcggcctcccggtcgtgtatctcggcgccaagaccggacgcgacggtgtcggcggtgcgacgatggcatcggccgagttcgacgagtcgatcgaggagaagcgcccgaccgttcaggttggcgaccccttcaccgagaaatgcctgctcgaagcctgcctggagctgatgcagaccggcgcggtcattgcgatccaggacatgggcgctgccggcctcacctgctcggccgtcgaaatgggcgccaagggcgatctcggcatcgaactcgatctcgacaaggtgccggtgcgcgaagagcgcatgacggcttacgagatgatgctttccgaaagccaggagcgcatgctgatggtgctgcgcccggaaaaggaagaggaagccaaggcgatcttcgtcaaatggggcctcgatttcgcgatcgtgggcaagaccaccgacgatctgcgtttccgcatcctgcaccagggcgaagaagtggcgaacctgccgatcaaggagctcggcgacgaggcgccggaatacgaccgcccctggacgccggcaagggcaccctcgccgctcgccaccaacgacgtcccgcaggctgatgtttccgatgcgcttctgaagctcgtcggctccgccaacaattcctcgcgccgctgggtctatgagcaatatgacacgctgatccagggcaattcgctgcagctgccgggcggcgacgccggcgtgatccgcgtcgagggccatgagacgaaggcacttgccttttcttcggacgttacgccgcgctatgtcgaagccgatccgttcgagggcggcaagcaggcggtcgccgagtgctggcgaaacctgactgcgaccggcgcgctgccgctcgccgcgaccgataatttgaacttcggtaatcccgaacggccggagatcatgagccagctcgtccatgcgatcaaaggcatcggcgaagcctgccaggcactcgacttcccgatcgtctccggcaacgtctcgctctacaacgagaccaacggccaggcgatcctgccgacccccaccatcggaggcgtcggcctcgtccgcgactggtcgaagatggcgcggattcgctttgcggcggcgaacgaaaccatcctgctcgccggcgctccggagagctggggaacgcatatcggccagtcggtctacatgcgcgatatacacggccgcaccgacggtccggcgccgcatgtcgacctcggccatgaacgcaaggtcggcgatttcgttcgcggcttgatcgaggacggcctggttacggccgtgcacgattgttcctcgggcggacttgcgctcgccgtcgccgagatggccatcgcttccggcatcggcgcgacgatcgatgcacctgcggaacacgacccgatcccggtcttctacggcgaagaccagggccgctatgtcgtaaccgtggccgagggttcggccgagacggtggccgcacgtgcaaaagccgccggcgttgcgctgccggtgatcggcaggacaggcgggaatgcggtgcagctcggagacgccaggcccgtatccgtcgatgaattgcgttccgcacatgaagcgtggttccccaattacatgggcggcgatctcgcaccggacaattga

SEQ ID NO: 53133 - protein, 743 aa, Rhizobium meliloti
MTISNTRPITPDLIASHGLKPDEYERILNLIGREPTFTELGIFSAMWNEHCSYKSSKKWLRTLPTKGPRVIQGPGENAGVVDIDDGDCVVFKMESHNHPSYIEPYQGAATGVGGILRDVFTMGARPVAAMNALRFGSPDHPKTRHLVSGVVAGVGGYGNSFGVPTVGGEVEFDARYNGNILVNAFAAGLAKTDAIFYSKAEGVGLPVVYLGAKTGRDGVGGATMASAEFDESIEEKRPTVQVGDPFTEKCLLEACLELMQTGAVIAIQDMGAAGLTCSAVEMGAKGDLGIELDLDKVPVREERMTAYEMMLSESQERMLMVLRPEKEEEAKAIFVKWGLDFAIVGKTTDDLRFRILHQGEEVANLPIKELGDEAPEYDRPWTPARAPSPLATNDVPQADVSDALLKLVGSANNSSRRWVYEQYDTLIQGNSLQLPGGDAGVIRVEGHETKALAFSSDVTPRYVEADPFEGGKQAVAECWRNLTATGALPLAATDNLNFGNPERPEIMSQLVHAIKGIGEACQALDFPIVSGNVSLYNETNGQAILPTPTIGGVGLVRDWSKMARIRFAAANETILLAGAPESWGTHIGQSVYMRDIHGRTDGPAPHVDLGHERKVGDFVRGLIEDGLVTAVHDCSSGGLALAVAEMAIASGIGATIDAPAEHDPIPVFYGEDQGRYVVTVAEGSAETVAARAKAAGVALPVIGRTGGNAVQLGDARPVSVDELRSAHEAWFPNYMGGDLAPDN

SEQ ID NO: 53134 - DNA, 2211 bp, Rhodopseudomonas palustris
  CDS (1)..(2211): transl_table=11
atgtccgctcccgagccgaagatcaccccggaactgatcgccagccatggcctcaaaccggatgaatatcagcgcattctcgatctgatcgggcgcgagccgactttcaccgagctcggcatcttctcggcgatgtggaacgagcactgctcgtacaagtcgtcgcgcattcatctgaaagggctgcccaccaaggcgccgtgggtgctgcaggggccgggcgagaacgccggcgtgatcgacatcggcgacaatcaggcggtggtcttcaagatggagagccacaaccacccgagctacatcgagccgtatcagggtgcgaccaccggcgtcggcggcatcctgcgcgacgtcttcaccatgggggcgcgcccgatcgcttgcctcaacgcgctgagcttcggcgacccgagccatcccaagacccggcacctggtgtccggcgtcgtcgccggcgtcggcggctatggcaattcgttcggcgtgccgacggtcggcggccagacccggttccacacccgctatgacggcaacatcctggtcaacgccatggcggtcggccttgcggacgccgacaagatcttcctcgccgcggcaagcggcgtcggcatgccgatcgtctatctcggctccaagaccggccgcgacggcatgggcggcgccaccatggcgtcggccgaattcgacgagggctcggatgagaagcgcccgaccgtgcaggtcggcgacccgttcgccgagaagctgctgctggaggcctgcctcgagatcatggccaaggactgcgtgatcgcgatccaggacatgggcgcggccggcctgacctgctcggcggtcgagatgggcgccaagggcgacctcggcgtcgaactcgatctcgacgcggtgccgacccgcgagaccggcatgaccgcctacgagatgatgctctccgaaagccaggagcgcatgctcatggtgctgaagccggagaaggaaaaggaagccgaagagatcttcaagaagtggggcctcgacttcgcgatcgtcggctacaccacgccgaccaagcgcttcgtggtcaagcatggcgggcaggtgaaggccgacctgccgatcaaggagctcggtgacgaggcgccgctgtatgaccggccgtgggtggaaagcgagaggctgccggtgatccacgcccgcgacatcaacgcgccgatgggcgctgccgaggcgctggaaaagctgctggcgacgccggacctgtgcagcaagcgatgggtgtgggagcagtacgaccacgtcatcggcggcaacaccgtgcagcgtcccggtggcgacgccgcggtggtgcgtatcgaggacggcccgaagggcctcgcgctcaccgtcgacgtcacgccgcgctactgcgaggccgatccgttcgagggcggcaagcaggcggtggcggaagcttatcgcaacatcaccgcggtcggcggcaagccgctggcgatcaccgacaacttgaacttcggcaatccggagcggcccgagatcatgggccaactcgtcggctgcctgaagggcatttcggaagcctgcatcgcgctcgattcgccgatcgtctccggcaacgtctcgctctacaacgagacctcgggccgcggcatcctgccgaccccgtcgatcggcggcgttggcgtgctcgatgacttcactaagtcggcgaccttggccttcaaggccgaaggcgaggcgatcctgctgatcggtgagaccaagggctggctcggccagtcggtgtacttgcgcgagatctgcggccgtgaagaaggcgcaccgccgccggtcgatcttgcggtcgagaagcgccacggcgacgtcgtgcgcggcatgatccacgccggcaccgcgaccgccgtgcacgatgtgtcagatggcggcctgctggttgcgatcgccgagatggcgatcgccggcaacatcggcgcctcgctcgacgcgcctcccggcgagaccgtgtcgcacgcttggtggttcggtgaagatcaggcccgctacgtcgtcacggtgaaggaagccgatctgctcgcggtgaagaccaagctgaagacgatcggcgtgccttgcacccagatcggcgtcaccggcggccacgcgctgaagatcgaaggtgaacgcaccgtcgacctcaaggccctgcgccacgcccacgagcattggctgccggactatatgggcgggaagaactaa

SEQ ID NO: 53135 - protein, 736 aa, Rhodopseudomonas palustris
MSAPEPKITPELIASHGLKPDEYQRILDLIGREPTFTELGIFSAMWNEHCSYKSSRIHLKGLPTKAPWVLQGPGENAGVIDIGDNQAVVFKMESHNHPSYIEPYQGATTGVGGILRDVFTMGARPIACLNALSFGDPSHPKTRHLVSGVVAGVGGYGNSFGVPTVGGQTRFHTRYDGNILVNAMAVGLADADKIFLAAASGVGMPIVYLGSKTGRDGMGGATMASAEFDEGSDEKRPTVQVGDPFAEKLLLEACLEIMAKDCVIAIQDMGAAGLTCSAVEMGAKGDLGVELDLDAVPTRETGMTAYEMMLSESQERMLMVLKPEKEKEAEEIFKKWGLDFAIVGYTTPTKRFVVKHGGQVKADLPIKELGDEAPLYDRPWVESERLPVIHARDINAPMGAAEALEKLLATPDLCSKRWVWEQYDHVIGGNTVQRPGGDAAVVRIEDGPKGLALTVDVTPRYCEADPFEGGKQAVAEAYRNITAVGGKPLAITDNLNFGNPERPEIMGQLVGCLKGISEACIALDSPIVSGNVSLYNETSGRGILPTPSIGGVGVLDDFTKSATLAFKAEGEAILLIGETKGWLGQSVYLREICGREEGAPPPVDLAVEKRHGDVVRGMIHAGTATAVHDVSDGGLLVAIAEMAIAGNIGASLDAPPGETVSHAWWFGEDQARYVVTVKEADLLAVKTKLKTIGVPCTQIGVTGGHALKIEGERTVDLKALRHAHEHWLPDYMGGKN

SEQ ID NO: 53136 - DNA, 2223 bp, Rhodospirillum rubrum
  CDS (1)..(2223): transl_table=11
gtgagccagtctgcgagcactccggcgacgcccatcacggcgaagatcgtcgccgagcacgggttgaccgaggccgaatacgccaaggtcctcgccatcatggggcgcgagcccaatctggtcgaactgggcatcttctcggtcatgtggtcggagcattgctcctacaagtcctcgaagaagtggctcaagaccctgccgaccacggcgccctgggtgatccagggaccgggcgagaacgccggggtcatcgacatcggcgatggcctgaccgccatcttcaagatggaaagccataaccaccccagctacatcgagccctatcagggcgcggcgacgggcgttggcggcatcttgcgcgatgtcttcaccatgggcgcccggccggtggccaatctcaacgccttgcgctttggcgatccctccgacccgcgcacccgccacctgatctcgggcgtcgtcgccggcatcggcggctatggcaattgcgtcggcgtgcccaccgttggcggcgaggtcaatttccacgccagcttcaacggcaataatctggtcaacgccatgaccgtcggcgtcgcccgcgccgaccgcatcttctattcggccgccgccggcatcggcaattcggtggtctatgtcggttcgaagaccggccgcgacggcatccacggcgccaccatggcctcggccgagttctccgaggactccgaggaaaagcgccccaccgttcaggtcggcgacccgttcaccgaaaagctgctgatcgaagcctgcctggaactgatgaacaccgacgccatcgtcgccattcaggacatgggggcggccggtctgacctcctcatgcttcgagatggcctcgaagggcggcatgggcgtcgatctggcccttgaccgcgtgccgatgcgcgaagagggcatgaccccttacgaactgatgctgtcggaaagccaggagcgcatgctcatggtgctcaagcccggcaaggaggacatggcgcgcgccctgttcgagaagtgggagcttgatttcgccatcatcggcaccctgaccgacagcggccgcatggtgctgacttggcatggcgaggttgtcggcgatctgccgatcgatccgctggccgccgccagccccgaatacgaccggccctgggaaccgacgccgatggccgccgccgccgatctcagcggcgccgaggacacgccgtggagcgaggccctgctgcgcctgatcggctgccccgatgtcgccagccggcgctggatctgggagcagtatgaccatctggtgatgggcaataccctgcagcgtcccggtggcgacgccgcggtgatccgccttgacgaggcgccgggcaagggtctggcgatgaccaccgattgcacgccgcgctacgtccacgccgatccggtcgaaggcggcaagcaggcggtggccgaggcttggcgcaatctgaccgccgtcggcgcccggcccttggccatcaccgacaacatgaacttcggcaatcccgaaaagccgcggatcatgggccagttcgtcggcgcctgccaggggatcagcgaggcctgtctggccctcgacttcccggtggtctcgggcaatgtctcgctctacaacgagaccaacggtcaggcgattttaccgaccccgaccatcggcggcgtcggcgtgcttgataacgtcgaagccagcgtctccatcgccctcaaggcggccggcgaggccatcctggtggccggcggcttccatggctcgaccggggcatggcttggccagtcgctgttcctgcgcgaaatcctgggccgcgaagaaggcgcgccgccgcccgtcgatctggcggccgagcgcaaggttggcgatttcgtccgtgggctgatccttggcgcgagcgtcaccgcctgccacgatctgtccgatggcggcctgctggtcgccctggccgaaatggccatggccggcgacctgggggccgagctgacgctggagggccatcccgacaatggccggctgtttggcgaggatcagggccgctatctgctgacggtcgccgaaggcgaccgcgacgcggtggtcgcggcggccgaggccgccggcgtgccgctgcgggtggtcggcaccaccggcggcgacgccctggtggtcaacggctttgtcggacccagcgtggcagccttgcgcaaggttcacgaggagtggctgcccacctatatggcgggttag

SEQ ID NO: 53137 - protein, 740 aa, Rhodospirillum rubrum
MSQSASTPATPITAKIVAEHGLTEAEYAKVLAIMGREPNLVELGIFSVMWSEHCSYKSSKKWLKTLPTTAPWVIQGPGENAGVIDIGDGLTAIFKMESHNHPSYIEPYQGAATGVGGILRDVFTMGARPVANLNALRFGDPSDPRTRHLISGVVAGIGGYGNCVGVPTVGGEVNFHASFNGNNLVNAMTVGVARADRIFYSAAAGIGNSVVYVGSKTGRDGIHGATMASAEFSEDSEEKRPTVQVGDPFTEKLLIEACLELMNTDAIVAIQDMGAAGLTSSCFEMASKGGMGVDLALDRVPMREEGMTPYELMLSESQERMLMVLKPGKEDMARALFEKWELDFAIIGTLTDSGRMVLTWHGEVVGDLPIDPLAAASPEYDRPWEPTPMAAAADLSGAEDTPWSEALLRLIGCPDVASRRWIWEQYDHLVMGNTLQRPGGDAAVIRLDEAPGKGLAMTTDCTPRYVHADPVEGGKQAVAEAWRNLTAVGARPLAITDNMNFGNPEKPRIMGQFVGACQGISEACLALDFPVVSGNVSLYNETNGQAILPTPTIGGVGVLDNVEASVSIALKAAGEAILVAGGFHGSTGAWLGQSLFLREILGREEGAPPPVDLAAERKVGDFVRGLILGASVTACHDLSDGGLLVALAEMAMAGDLGAELTLEGHPDNGRLFGEDQGRYLLTVAEGDRDAVVAAAEAAGVPLRVVGTTGGDALVVNGFVGPSVAALRKVHEEWLPTYMAG

SEQ ID NO: 53138 - DNA, 2241 bp, Rhodobacter sphaeroides; identical to SEQ ID NO: 52798
  CDS (79)..(2241): transl_table=11

SEQ ID NO: 53139 - protein, 720 aa, Rhodobacter sphaeroides
MTEPEITPELIAAHGLKPDEYQRILEIIGRAPTFTELGIFSAMWNEHCSYKSSKKWLRTLPTTGPQVICGPGENAGVVDIGDGQAVIFKMESHNHPSYIEPYQGAATGVGGILRDVFTMGARPIAAMNALSFGVPDHPKTAHIVKGVVEGIGGYGNAFGVPTVGGEVRFHRAYNGNCLVNAFAAGLADADRIFYSAASGVGMPVVYLGAKTGRDGVGGATMASAEFDDTIEEKRPTVQVGDPFTEKRLLEACLELMASDSVISIQDMGAAGLTCSAVEMGDKGDLGIRLQLDAVPQREANMTAYEMMLSESQERMLMVLKPEKEAVARAIFEKWDLDFAIVGETIPEDRFLILHGNEVKADLPLKALSGTAPEYDRPWIETPAAAPLGAVPEVDPIEGLKALIGSPSYAHKAWVWEQYDSQVMADTVRAPGLGAGVVRVHGTPKALAFTSDVTPRYVKANPFEGGKQAVAEAYRNLTAVGAKPLATTDNMNFGNPEKPEIMGQFVGAIKGIGAAVAALDMPIVSGNVSLYNETDGVGILPTPTIGAVGLLTSLDELIAGQPEEGDLALVIGTTAGHLGQSALLAEMFGREEGDAPPVDLEAEKRHGEFLRANRKLVRAAADLSDGGLALAAFEMAEAAGLGLTLTPSGTAALFGEDQARYLVACAPDRAEALQAAAEAAGVPLQEVGRFGGATVTLAGASAPLADLSRLYRRAFAEAIGG

SEQ ID NO: 53140 - DNA, 2160 bp, Silicibacter pomeroyi
  CDS (1)..(2160): transl_table=11
atgcaagagcccgcaatcactccggacctgatcgccgcgcacgggctgaagcccgaggaatacgacatgatcctcgagatcatcgggcgcgaaccgacctttaccgagctgggcatcttctcggccatgtggaacgagcactgctcgtacaaatcctccaagaaatggctgcgcaccctgccgaccagcggcccgcaggtgatctgcggcccgggcgaaaacgcgggcgtcgtcgatatcggtgacggtcaggcggtggtcttcaagatggagagccacaaccacccctcctatatcgaaccctatcagggcgcggccaccggcgtgggcggcatcctgcgcgatgtgtttaccatgggcgcgcgccccatcgcctcgatgaacgcgctgtcctttggcgagccttcccatcccaagacccgccagctggtcaatggcgtggtcgagggcatcggcggctatggcaactgtttcggggttccctgtgtcggtggcgaggtgcgctttcaccccgcctataacggcaactgccttgtgaacgcctttgccgccggtctggccgacagcgacaagatcttctactccgccgcctcgggcgtcggcatgccggtggtttacctcggtgcgaagaccgggcgcgacggcgtcggcggcgccaccatggccagcgccgagttcgacgacaccatcgaggaaaagcgccccaccgtgcaggtgggcgacccgttcaccgaaaagcgcctgatggaggcgacgctggagctgatgcagaccggcgccgtgatctcgatccaggacatgggcgctgcgggcctgacctgttcggccgtcgaaatgggcgacaagggcggtctgggtgtgcgtctggacctggaaaacgtgccccagcgcgaagagaacatgaccgcttacgagatgatgctgtcggaatcccaggaacggatgctgatggtattgaagcccgagctcgaggccgaggcccgcgccgtgttcgagaaatgggatctggatttcgccatcgtgggcgaaaccatcgccgaagaccgctttctgattatgcatcatggcgaggtgaaggccgatctggtcctgtcgaaactctcgtcaaccgcaccggaatacgaccgcccctgggtgccgaccccggccgccgaaccgctggccgaagtgccccagatcgacccgatcgacggtctgcgcgcgctgctggcctcgcccaactatggcggcaagcagtgggtctatgaacagtatgacaccatggtcatggccgacagcgcccgcacaccgggcctgggcgccgggatcgtgcgcgtgcacggcaccgacaaggcactcgcctttaccagcgatgtgacgccccgctacgtgcgcgccaaccccgaggaaggcggcaagcaggcggtggccgaagcttatcgcaacctgaccgccgtcggcgcccggccgctggccaccaccgacaacctgaatttcggcaatcccgaaaagcccgagatcatgggccagttcgtcggtgcgatcaaaggcatcggcgccgcctgtgccgcgctggacatgcccatcgtctcgggcaacgtctcgctttataacgagaccgatggcaccgcgatcctgcccacccccaccatcggcgctgtgggcctgctggcctcgaccgacgagatcatcggcaaggaggtccgagagggccatgtggctctggtggtcggcgagaccaccggccatctgggtcaatcggcgctgctggccgaggtgttcaaccgcgaggatggcgacgccccccacgtggatctcgaggccgagcgccgcaacggcgacttcatccgtgccaaccgcgcgctgatcaaggcctgtaccgatctgggcgatggcggtctggcgctggcggcgtttgaactggccgagggcgccggtgtgggcctgcatctggacgacgccccgaccgaaatcctgttcggcgaggatcaggcccgctatctggtcgcctgcaacttcgaccaggccgaggcgctgatgtcggcggcgggccagaccggcgtcaccgtcacctcggtgggccgcttcaccggcgatacggtacgcatcggcggctctgaggcgctgctggcggatctggctgccaccttccgcgccagctttgccgccgcggtggcctga

SEQ ID NO: 53141 - protein, 719 aa, Silicibacter pomeroyi
MQEPAITPDLIAAHGLKPEEYDMILEIIGREPTFTELGIFSAMWNEHCSYKSSKKWLRTLPTSGPQVICGPGENAGVVDIGDGQAVVFKMESHNHPSYIEPYQGAATGVGGILRDVFTMGARPIASMNALSFGEPSHPKTRQLVNGVVEGIGGYGNCFGVPCVGGEVRFHPAYNGNCLVNAFAAGLADSDKIFYSAASGVGMPVVYLGAKTGRDGVGGATMASAEFDDTIEEKRPTVQVGDPFTEKRLMEATLELMQTGAVISIQDMGAAGLTCSAVEMGDKGGLGVRLDLENVPQREENMTAYEMMLSESQERMLMVLKPELEAEARAVFEKWDLDFAIVGETIAEDRFLIMHHGEVKADLVLSKLSSTAPEYDRPWVPTPAAEPLAEVPQIDPIDGLRALLASPNYGGKQWVYEQYDTMVMADSARTPGLGAGIVRVHGTDKALAFTSDVTPRYVRANPEEGGKQAVAEAYRNLTAVGARPLATTDNLNFGNPEKPEIMGQFVGAIKGIGAACAALDMPIVSGNVSLYNETDGTAILPTPTIGAVGLLASTDEIIGKEVREGHVALVVGETTGHLGQSALLAEVFNREDGDAPHVDLEAERRNGDFIRANRALIKACTDLGDGGLALAAFELAEGAGVGLHLDDAPTEILFGEDQARYLVACNFDQAEALMSAAGQTGVTVTSVGRFTGDTVRIGGSEALLADLAATFRASFAAAVA

SEQ ID NO: 53142 - DNA, 2190 bp, Staphylococcus aureus
  CDS (1)..(2190): transl_table=11
atgtctaaatttatcgaaccaagcgttgaagaaattaaacttgaaaaagtatatcaagatatgggattaagtgatcaagaatatgaaaaagtttgcgatattttaggcagacaacctaactttacagaaacaggtatcttttctgttatgtggagtgaacattgctcttataaacattctaaaccgtttttaaagcaatttcctacgtcaggtgagcatgtgcttatgggtccaggtgaaggtgcaggggtagtcgatataggtgataatcaagccgtagtatttaaagtagagtctcacaatcatccatcagcaattgaaccatatcaaggggctgctacaggcgttggtggaatcattcgtgacattgtttctattggggctagacctattaatttgttaaacagtcttagatttggagaattagataataaacaaaaccaaagattacttaaaggggttgtaaagggtatcggaggttatggtaactgcattggtattccaacaactgctggtgaaatcgaatttgatgaacgttatgatggcaatccacttgttaatgcaatgtgtgttggtgttatcaatcacgacatgattcaaaaaggcacagcaaaaggtgtaggtaattcggtcatttatgttggtttgaaaactggtcgagatggtattcatggtgctacttttgcatctgaagaattgacggaagaaagcgaaagtaaacgaccttctgtacaaatcggtgatccatttgtaggtaaaaaattaatggaagcaacacttgaagcaattacatttgatgaattagttggtattcaagatatgggtgctgctggtttaacatcttcatcgtctgaaatggcggcaaaaggtggtagtgggttacatttgagattagaacaagtgccaacacgtgagccaggtatttctccttatgaaatgatgctttcagaaactcaagaacgtatgttactagttgttgaaaaaggtaatgaacaaaaattcttagatttatttgataagcacgaattggatagtgctgttataggtgaagttacagatacaaatcgttttgttttaacatatgatgatgaagtttatgctgacattccagttgaaccactagctgatgaagcacctgtatatattttagaaggagaagaaaaagattataatacttctaaaaatgattatacacacatcgatgttaaagatactttctttaaattacttaagcatccgactatagcatctaaacactatttatatgatcaatacgaccaacaagttggtgccaatacgataattaagccaggacttcaagcatcggtagtacgtgtggaaggcacaaataaggcaattgcttcaacaattgatggtgaagcgcgttatgtatataacaatccatatgaaggtggaaagatggtagtagctgaagcttatcgaaatttaattgccgtgggtgcaacaccattagcaatgacagattgtttaaattatggttctcctgaaaagaaagaaatctatcaacagttgatagattcaacgaaaggtatggcagaagcatgcgacattcttaagacaccagtagtttctggaaatgtatctttatataacgaaacgaaaggtacttctattttcccaacaccagttgttggaatggtaggtttgattgaaaatgtaaattatttaaatgattttgaacctcaagttggagataaattatatttaatcggtgatactaaggacgactttggtggtagtcaacttgaaaagttaatttatggcaaagttaatcatgaatttgagtcattagatttgagttcagaagttgaaaaaggtgaatcaatcaagaccgctattcgtgaaggactattatcacatgttcaaacagttggtaaaggtggcttactgattaccttagctaaactaagtgcgcattacggtttaggattaaaatcttcaatagatataacaaatgcacaattgtttagtgagacacaaggccgatatgttgtttctgttaaatcaggtaaaactttaaatattgataatgcaatagaaattggacttttaacagatagtgataatttcaaagtaacaacaccatatacagagattagtgaaaatgtttcagatattaaacaaatatgggaaggggcaattgctcaatgtttaactactcaggattaa

SEQ ID NO: 53143 - protein, 729 aa, Staphylococcus aureus
MSKFIEPSVEEIKLEKVYQDMGLSDQEYEKVCDILGRQPNFTETGIFSVMWSEHCSYKHSKPFLKQFPTSGEHVLMGPGEGAGVVDIGDNQAVVFKVESHNHPSAIEPYQGAATGVGGIIRDIVSIGARPINLLNSLRFGELDNKQNQRLLKGVVKGIGGYGNCIGIPTTAGEIEFDERYDGNPLVNAMCVGVINHDMIQKGTAKGVGNSVIYVGLKTGRDGIHGATFASEELTEESESKRPSVQIGDPFVGKKLMEATLEAITFDELVGIQDMGAAGLTSSSSEMAAKGGSGLHLRLEQVPTREPGISPYEMMLSETQERMLLVVEKGNEQKFLDLFDKHELDSAVIGEVTDTNRFVLTYDDEVYADIPVEPLADEAPVYILEGEEKDYNTSKNDYTHIDVKDTFFKLLKHPTIASKHYLYDQYDQQVGANTIIKPGLQASVVRVEGTNKAIASTIDGEARYVYNNPYEGGKMVVAEAYRNLIAVGATPLAMTDCLNYGSPEKKEIYQQLIDSTKGMAEACDILKTPVVSGNVSLYNETKGTSIFPTPVVGMVGLIENVNYLNDFEPQVGDKLYLIGDTKDDFGGSQLEKLIYGKVNHEFESLDLSSEVEKGESIKTAIREGLLSHVQTVGKGGLLITLAKLSAHYGLGLKSSIDITNAQLFSETQGRYVVSVKSGKTLNIDNAIEIGLLTDSDNFKVTTPYTEISENVSDIKQIWEGAIAQCLTTQD

SEQ ID NO: 53144 - DNA, 2190 bp, Staphylococcus epidermidis
  CDS (1)..(2190): transl_table=11
atgtctaaatttatcgaaccaagtaatgaagagattaaacttgaaaaactttatcaagatatgggattaagtgataaagaatatgacaaagtggttgaaattcttggtagagaacccaacttcacagaagtaggaattttctcagtgatgtggagcgaacattgctcatataaacattctaaaccatttttaaaacaatttcctacgacaggagagcacgtattaatgggaccaggagaaggtgcaggtgttgtagatataggcgataatcaagccgtagtatttaaagttgagtctcacaatcatccatctgcaattgaaccatatcaaggtgcggcaactggagtcggaggtattattagagatattgtttcaattggtgcccgtccaattaatttactaaatagtcttcgttttggtgagttaactgtaaaacaaaatcaacgattacttaaaggtgttgtaagtggtattggtggatatggcaactgtattggtattcctactacggctggtgagattgaatttgatgaacgctatgatggcaatccattagtcaatgctatgtgtgtaggaatcattgatcatgatatggtccaaaaaggaacagctaagggtgttggtaattccgttatatatgtaggtttaaaaactgggcgtgacggtattcatggtgcaacatttgcatctgaagaacttactgaggaaagtgaaagtaaaagaccttcagtacaaattggagatccatttgtaggcaaaaagctaatggaagcaacattagaagcaattacttttgatgaactagtaggtatacaagatatgggagcagctggtttaacttcatcttcatctgaaatggcagctaaaggtggtagtggtttacatttaagacttgatcaagttccaacaagagaacctggaatttccccatatgaaatgatgctttcagaaacgcaagaaagaatgctgttagttgtagaaaaaggtacagaacaaaagtttttagatttattcaataaacacgaactagatagtgcagtaatcggtgaagtaacagacactgatagattcgtgcttacatacgatgatgaagtgtatgcagacattcctgtgcaacctcttgctgatgaggcaccagtgtatattttagaaggagaagaaaaggaatataatacatcaaaaaacgattacagcaatatagatgtacatgatacatttatcaagttattacaacacccaacaatagcatctaaacatcatttatatgaacaatacgatcaacaagtaggagcaaatacaattattaagccaggtttacaagcttcagttgtgcgcgtagaaggaacacaaaaagctattgcttcaactatagatggtgaagcacgttatgttttcaaccaaccttatgaaggtggaaaaatggttgttgctgaagcctatcgaaatttaattgcagtaggggcgacaccattggctatgactgattgtctaaactatggttctccagagaagaaagaaatctatcaacaattaatagattcaacaaaaggtatgtcagaagcttgtaaagtgcttcaaactcctgtagtttcaggaaatgtttcattatataacgagacacgtggaacctctatcttccctacacctgtcgtaggtatggttggtcttattgaagacgtgagctatctaaaagagtttaaacctaaagcaggagataagatttatttagttggtgaaacgcgtgatgactttggtggtagtcaattggaaaaattgttgtatggatcagttaatcatgagtttgaatctattgatttaagtgatgaagtttcaaaaggaaaattaatcaaacaggctattcgtaatggcattgcatctcatgtacaaacagttggtaagggcggcttattagttactttagctaaaattagtgcccattatgatttaggtatgcaagctcaattggatgttaccaatgcacaattatttagtgaaactcaaggacgatatattgttgttgttaaagaagggcaaactttggatatagatcaagctcaagaaattgggcatttaactcatcagcagttatttgatatatctaattcagacgtaaaaatgaaagaaaacgtttcagatatcaaacaaaaatgggaaggggctatagttcaatgtctaactactcaggattaa

SEQ ID NO: 53145 - protein, 729 aa, Staphylococcus epidermidis
MSKFIEPSNEEIKLEKLYQDMGLSDKEYDKVVEILGREPNFTEVGIFSVMWSEHCSYKHSKPFLKQFPTTGEHVLMGPGEGAGVVDIGDNQAVVFKVESHNHPSAIEPYQGAATGVGGIIRDIVSIGARPINLLNSLRFGELTVKQNQRLLKGVVSGIGGYGNCIGIPTTAGEIEFDERYDGNPLVNAMCVGIIDHDMVQKGTAKGVGNSVIYVGLKTGRDGIHGATFASEELTEESESKRPSVQIGDPFVGKKLMEATLEAITFDELVGIQDMGAAGLTSSSSEMAAKGGSGLHLRLDQVPTREPGISPYEMMLSETQERMLLVVEKGTEQKFLDLFNKHELDSAVIGEVTDTDRFVLTYDDEVYADIPVQPLADEAPVYILEGEEKEYNTSKNDYSNIDVHDTFIKLLQHPTIASKHHLYEQYDQQVGANTIIKPGLQASVVRVEGTQKAIASTIDGEARYVFNQPYEGGKMVVAEAYRNLIAVGATPLAMTDCLNYGSPEKKEIYQQLIDSTKGMSEACKVLQTPVVSGNVSLYNETRGTSIFPTPVVGMVGLIEDVSYLKEFKPKAGDKIYLVGETRDDFGGSQLEKLLYGSVNHEFESIDLSDEVSKGKLIKQAIRNGIASHVQTVGKGGLLVTLAKISAHYDLGMQAQLDVTNAQLFSETQGRYIVVVKEGQTLDIDQAQEIGHLTHQQLFDISNSDVKMKENVSDIKQKWEGAIVQCLTTQD

SEQ ID NO: 53146 - DNA, 2190 bp, Staphylococcus epidermidis
  CDS (1)..(2190): transl_table=11
atgtctaaatttatcgaaccaagtaatgaagagattaaacttgaaaaactttatcaagatatgggattaagtgataaagaatatgacaaagtggttgaaattcttggtagagaacccaacttcacagaagtaggaattttctcagtgatgtggagcgaacattgctcatataaacattctaaaccatttttaaaacaatttcctacgacaggagagcacgtattaatgggaccaggagaaggtgcaggtgttgtagatataggcgataatcaagccgtagtatttaaagttgagtctcacaatcatccatctgcaattgaaccatatcaaggtgcggcaactggagtcggaggtattattagagatattgtttcaattggtgcccgtccaattaatttactaaatagtcttcgttttggtgagttaactgtaaaacaaaatcaacgattacttaaaggtgttgtaagtggtattggtggatatggcaactgtattggtattcctactacggctggtgagattgaatttgatgaacgctatgatggcaatccattagtcaatgctatgtgtgtaggaatcattgatcatgatatggtccaaaaaggaacagctaagggtgttggtaattccgttatatatgtaggtttaaaaactgggcgtgacggtattcatggtgcaacatttgcatctgaagaacttactgaggaaagtgaaagtaaaagaccttcagtacaaattggagatccatttgtaggcaaaaagctaatggaagcaacattagaagcaattacttttgatgaactagtaggtatacaagatatgggagcagctggtttaacttcatcttcatctgaaatggcagctaaaggtggtagtggtttacatttaagacttgatcaagttccaacaagagaacctggaatttccccatatgaaatgatgctttcagaaacgcaagaaagaatgctgttagttgtagaaaaaggtacagaacaaaagtttttagatttattcaataaacacgaactagatagtgcagtaatcggtgaagtaacagacactgatagattcgtgcttacatacgatgatgaagtgtatgcagacattcctgtgcaacctcttgctgatgaggcaccagtgtatattttagaaggagaagaaaaggaatataatacatcaaaaaacgattacagcaatatagatgtacatgatacatttatcaagttattacaacacccaacaatagcatctaaacatcatttatatgaacaatacgatcaacaagtaggagcaaatacaattattaagccaggtttacaagcttcagttgtgcgcgtagaaggaacacaaaaagctattgcttcaactatagatggtgaagcacgttatgttttcaaccaaccttatgaaggtggaaaaatggttgttgctgaagcctatcgaaatttaattgcagtaggggcgacaccattggctatgactgattgtctaaactatggttctccagagaagaaagaaatctatcaacaattaatagattcaacaaaaggtatgtcagaagcttgtaaagtgcttcaaactcctgtagtttcaggaaatgtttcattatataacgagacacgtggaacctctatcttccctacacctgtcgtaggtatggttggtcttattgaagacgtgagctatctaaaagagtttaaacctaaagcaggagataagatttatttagttggtgaaacgcgtgatgactttggtggtagtcaattggaaaaattgttgtatggatcagttaatcatgagtttgaatctattgatttaagtgatgaagtttcaaaaggaaaattaatcaaacaggctattcgtaatggcattgcatctcatgtacaaacagttggtaagggcggcttattagttactttagctaaaattagtgcccattatgatttaggtatgcaagctcaattggatgttaccaatgcacaattatttagtgaaactcaaggacgatatattgttgttgttaaagaagggcaaactttggatatagatcaagctcaagaaattgggcatttaactcatcagcagttatttgatatatctaattcagacgtaaaaataaaagaaaacgtttcagatatcaaacaaaaatgggaaggggctatagttcaatgtctaactactcaggattaa

SEQ ID NO: 53147 - protein, 729 aa, Staphylococcus epidermidis
MSKFIEPSNEEIKLEKLYQDMGLSDKEYDKVVEILGREPNFTEVGIFSVMWSEHCSYKHSKPFLKQFPTTGEHVLMGPGEGAGVVDIGDNQAVVFKVESHNHPSAIEPYQGAATGVGGIIRDIVSIGARPINLLNSLRFGELTVKQNQRLLKGVVSGIGGYGNCIGIPTTAGEIEFDERYDGNPLVNAMCVGIIDHDMVQKGTAKGVGNSVIYVGLKTGRDGIHGATFASEELTEESESKRPSVQIGDPFVGKKLMEATLEAITFDELVGIQDMGAAGLTSSSSEMAAKGGSGLHLRLDQVPTREPGISPYEMMLSETQERMLLVVEKGTEQKFLDLFNKHELDSAVIGEVTDTDRFVLTYDDEVYADIPVQPLADEAPVYILEGEEKEYNTSKNDYSNIDVHDTFIKLLQHPTIASKHHLYEQYDQQVGANTIIKPGLQASVVRVEGTQKAIASTIDGEARYVFNQPYEGGKMVVAEAYRNLIAVGATPLAMTDCLNYGSPEKKEIYQQLIDSTKGMSEACKVLQTPVVSGNVSLYNETRGTSIFPTPVVGMVGLIEDVSYLKEFKPKAGDKIYLVGETRDDFGGSQLEKLLYGSVNHEFESIDLSDEVSKGKLIKQAIRNGIASHVQTVGKGGLLVTLAKISAHYDLGMQAQLDVTNAQLFSETQGRYIVVVKEGQTLDIDQAQEIGHLTHQQLFDISNSDVKIKENVSDIKQKWEGAIVQCLTTQD

SEQ ID NO: 53148 - DNA, 2259 bp, Streptomyces avermitilis
  CDS (1)..(2259): transl_table=11
atgagccgcacgcctctggacacggtcgagcacgcggccgcgacccccgacgtcgagctgccctgggccgaactcggcctgaagaaggacgagtacgagcgggtcgtggagatcctcggccgccggcccaccggtgccgagctcgccatgtactcggtcatgtggtccgagcactgttcgtacaagtcgtccaaggtccacctgcgccagttcggcgagaaggccccgcagagcgacgccctcctcgtcggtatcggtgagaacgcgggcgtggtggacgtcggccaggggtacgcggtcaccttcaaggtcgagtcgcacaaccacccctcgtacgtcgagccctaccagggtgcggccaccggcgtcggcggcatcgtgcgcgacatcatcgcgatgggcgcccggccggtcgccgtggtggacccgctgcgcttcggtgcggccgaccaccccgacaccaagcgcgtgctgcccggtgtcgtcgcgggcatcggcggctacggcaactgcctcggcctgcccaacatcggcggcgaggtcgtcttcgacgcctgctaccagggcaacccgctcgtcaacgccggtgccatcggcgtcatgcggcacgaggacatccacctcgccaaggcgtccggtgccggcaacaaggtcatcctgtacggggcccgtacgggcggcgacggcatcggcggcgcctccatcctggcctccgagaccttcgacgacgccaagccgtcgaagcgccccgcggtccaggtcggcgaccccttccaggagaagctgctcatcgagtgcaccctggaggccttcgccgagaagctcgtcgtcggcatccaggacctgggcgcggccggtctgtcgtgcgcgacgagcgagctggcgtccaacggctccggtggcatgcgcgtgacgctggacgacgtaccgctgcgcgactccaccctctcgcccgaggaaatcctcatgagcgagtcgcaggaacgcatgtgcgcggtcgtcgagccggagaaggtcgaccgcttcctcgcgatctgcgagaagtgggacgtcatcgccaccgtcatcggtgaggtgacggacggcgaccgcctcgagatctactggcacggcggcaagatcgtcgacgtcgacccgcgcacggtcgcgcacgacggtccggtctacgagcgcccgtacgcccgtccggagtggcaggacgccctccaggccgacgacgcgaacaagctgcccaggccgtcttcgagcgaggaactgagggatcaggtcctcaagctggtcgcctccccgaaccaggcctccaagtcctggatcacctcccagtacgaccacttcgtgcagggcaacacggttctcgcccagcccgaggactccggcatgatccgcatcgacgcggagtccgggctcggcgtcgccatcgccaccgacggcaacggccggtacgcgaagctcgacccgtacgcgggcgcgcagctcgccctctccgaggcgtaccgcaacgtggcgacgaccggtgccaagccgctcgccgtttccgactgcctgaacttcggctcgcccgaggacccggccgtcatgtggcagttcgccgaggccatccgcggactcgccgacgcctgccagcagctgggcaccccggtgaccggcggcaacgtctcgctctacaaccagacgggcgaggtggccatccaccccacgccggtcgtggccgtgctgggcgtcatcgacgacgtcgcccgccgcacccccgtcgccttccaggaggaggggcagctgctctacctcctcggcgacacgcgtgaggagttcggcggttcggcctggtcgcaggtcgtgcacgaccacctcggcgggctgccgccgcaggtcgacctggagcgcgagcggctgctcggcgagatcctcatctcggcctcccgcgacggcatgatcgacgccgcgcacgacctgtccgacggcggtctgatccaggccgtggtggagtcggcgctgctcggcggcaagggcgcgcggctggtcgttcccgatggtctggacgctttcaccttcctgttctcggagtcggcgggccgtgcggtcgtcgccgtcccgcgctcggaggagctccggttcaacgacatgtgcggggcgcgcgggctgcccgtcacccgtatcggtgtcgtcgacggcgattcggtggaggtgcagggcgagttcacgctcccgctggccgagctgcggaaggcgcacgaggagacgatcccggcgctgctggcctga

SEQ ID NO: 53149 - protein, 752 aa, Streptomyces avermitilis
MSRTPLDTVEHAAATPDVELPWAELGLKKDEYERVVEILGRRPTGAELAMYSVMWSEHCSYKSSKVHLRQFGEKAPQSDALLVGIGENAGVVDVGQGYAVTFKVESHNHPSYVEPYQGAATGVGGIVRDIIAMGARPVAVVDPLRFGAADHPDTKRVLPGVVAGIGGYGNCLGLPNIGGEVVFDACYQGNPLVNAGAIGVMRHEDIHLAKASGAGNKVILYGARTGGDGIGGASILASETFDDAKPSKRPAVQVGDPFQEKLLIECTLEAFAEKLVVGIQDLGAAGLSCATSELASNGSGGMRVTLDDVPLRDSTLSPEEILMSESQERMCAVVEPEKVDRFLAICEKWDVIATVIGEVTDGDRLEIYWHGGKIVDVDPRTVAHDGPVYERPYARPEWQDALQADDANKLPRPSSSEELRDQVLKLVASPNQASKSWITSQYDHFVQGNTVLAQPEDSGMIRIDAESGLGVAIATDGNGRYAKLDPYAGAQLALSEAYRNVATTGAKPLAVSDCLNFGSPEDPAVMWQFAEAIRGLADACQQLGTPVTGGNVSLYNQTGEVAIHPTPVVAVLGVIDDVARRTPVAFQEEGQLLYLLGDTREEFGGSAWSQVVHDHLGGLPPQVDLERERLLGEILISASRDGMIDAAHDLSDGGLIQAVVESALLGGKGARLVVPDGLDAFTFLFSESAGRAVVAVPRSEELRFNDMCGARGLPVTRIGVVDGDSVEVQGEFTLPLAELRKAHEETIPALLA

SEQ ID NO: 53150 - DNA, 2259 bp, Streptomyces coelicolor
  CDS (1)..(2259): transl_table=11
atgagccggacgcctctggacacggtcgagcacgcgaccgcgacccccgacgtcgagctgccctgggccgagctgggcctgaagaaggacgagtacgagcgggtcgtcgagatcctcggccgccgccccaccggggcggagctggccatgtactccgtcatgtggtccgagcactgctcgtacaagagcagcaaggtgcacctgcgccagttcggcgagaaggccccccagtccgacgccatgctcgtcggcatcggcgagaacgccggcgtcgtcgacgtcggccagggctacgcggtcaccttcaaggtcgagtcgcacaaccacccgtcgtacgtcgagccctaccagggcgcggccacgggagtcggcggcatcgtccgcgacatcatcgcgatgggcgcgcggccggtggccgtggtcgaccccctgcgcttcggtgccgcggaccaccccgacaccaagcgcgtcctgccgggcgtcgtggccggcatcggcggctacggcaactgcctgggcctgcccaacatcggcggcgaggtcgtcttcgacgcctgctaccagggcaacccgctggtcaacgccggcgccatcggcgtcatgcggcacgaggacatccacctcgcgaaggcgtccggcgcgggcaacaaggtcatcctgtacggcgcccgcaccggcggcgacggcatcggcggcgcgtcgatcctggcgagcgagaccttcgacgacgcgaagccctccaagcgccccgccgtccaggtcggcgaccccttccaggagaagctcctcatcgagtgcaccctggaggcgttcgccgagaagctggtcgtcggcatccaggacctcggcgcggcgggcctgtcctgcgcgaccagcgaactggcgtcgaacggttcgggcggcatgcgcgtcaccctggacgacgtcccgctgcgcgactcgaccctctcgcccgaggaaatcctcatgagcgagtcgcaggaacgcatgtgtgcggtcgtcgagccggagaaggtcgaccgcttcctggaaatctgcgacaagtgggacgtcatcgccacggtgatcggtgaggtcacggacggcgaccgcctcgagatcttctggcacggcggcaagatcgtcgacgtcgacccgcgcaccgtcgcccacgacggcccggtctacgagcgcccctacgcccgccccgactggcaggacgccctccaggccgacgacgcgaacaagctgccccggccgggcacgtccgacgagctgaaggctcaggtcctcaaactggtcggctcgcccaaccaggcgtccaagcagtggatcacccagcagtacgaccacttcgtgcagggcaacaccgtcctcgcccagcccgaggactcgggcatgatccgggtggacgaggagtccggcctcggcgtcgccatcgccacggacggcaacggccgctacgccaagctcgacccgtacacgggcgcgcagctggcgctcgcggaggcctaccgcaacgtggcgacgaccggcgcgaagccgctcgcggtctccgactgcctgaacttcggctcgccggaggacccggcggtcatgtggcagttcgcggaggccgtgcgcggcctggccgacggttgcctccagctcggcaccccggtgaccggcggcaacgtctcgctctacaaccagacgggcgaggccgccatccacccgacccccgtggtcgcggtcctcggcgtcatcgacgacgtggcccgccgcacgccggtcgccttccaggaggacggccagctgctgtacctgctgggcgacacgcgtgaggagttcggcggctcggcctggtcccaggtgatccacgaccacctcggcggcctgcccccgaaggtcgacctggagcgcgagcgtctgctgggcgagatcctgatctccgcctcccgcgacggcatgatcgactccgcgcacgacctgtccgacggcggtctggtccaggcggtcgtcgagtcggcactgctgggcggcaagggcgcgcgcctggtcgtaccggacgggctggacgccttcaccttcctgttctcggagtcggcgggccgcgcggtcgtcgccgtcccgcgctcggaggaggtccggttcaacgacatgtgcggcgcccgcggcctgccggtcacccgcatcggcgtggtcgacggcgacgcggtcgaggtccagggcgagttcaccctccccctgaccgacctgcgcgaggcgcacgagagcacgatcccagggctgctggcgtag

SEQ ID NO: 53151 - protein, 752 aa, Streptomyces coelicolor
MSRTPLDTVEHATATPDVELPWAELGLKKDEYERVVEILGRRPTGAELAMYSVMWSEHCSYKSSKVHLRQFGEKAPQSDAMLVGIGENAGVVDVGQGYAVTFKVESHNHPSYVEPYQGAATGVGGIVRDIIAMGARPVAVVDPLRFGAADHPDTKRVLPGVVAGIGGYGNCLGLPNIGGEVVFDACYQGNPLVNAGAIGVMRHEDIHLAKASGAGNKVILYGARTGGDGIGGASILASETFDDAKPSKRPAVQVGDPFQEKLLIECTLEAFAEKLVVGIQDLGAAGLSCATSELASNGSGGMRVTLDDVPLRDSTLSPEEILMSESQERMCAVVEPEKVDRFLEICDKWDVIATVIGEVTDGDRLEIFWHGGKIVDVDPRTVAHDGPVYERPYARPDWQDALQADDANKLPRPGTSDELKAQVLKLVGSPNQASKQWITQQYDHFVQGNTVLAQPEDSGMIRVDEESGLGVAIATDGNGRYAKLDPYTGAQLALAEAYRNVATTGAKPLAVSDCLNFGSPEDPAVMWQFAEAVRGLADGCLQLGTPVTGGNVSLYNQTGEAAIHPTPVVAVLGVIDDVARRTPVAFQEDGQLLYLLGDTREEFGGSAWSQVIHDHLGGLPPKVDLERERLLGEILISASRDGMIDSAHDLSDGGLVQAVVESALLGGKGARLVVPDGLDAFTFLFSESAGRAVVAVPRSEEVRFNDMCGARGLPVTRIGVVDGDAVEVQGEFTLPLTDLREAHESTIPGLLA

SEQ ID NO: 53152 - DNA, 2133 bp, Sulfolobus acidocaldarius
  CDS (1)..(2133): transl_table=11
ttgaggcttagtttatcctctcaggaaatggagctagtgaggaagtttttagggagggagccgaaagaggaggaatggttagttgtagatgccctatggtcagagcattgttcatataaatcgtcaaaaatattcttgaggagttttcccagtgagggcgaaagagtagtaatgggtatagaggattggcaagacgcaggggcgttggacgtaggcgatggatgggctgtagtcctcaaactggagagccataatcatccatctgctattgatccttttaacggagcagccacaggaattggaggaataatacgagatataatcagtaaaggcgctagacctatagccttacttgatatgataagggttggtaatcttaataattcaagaaatagatggctgttaaagaacataatagcaggtataggattttatggaaatagtataggtgttcctgtagttgcaggtgagctagcgtttgacgaaacgtataatgataatccattagttgatgtagctggactaggtgttgtaaagaaggataagatcgtaccaagtgtagtaaaggaggcagggctaaagatcgttcttgttggtttaactggtctggatggacttggtggtgcatcctttgcatctaggaaacttagcggagaagatgagataggtgcagttcagattgcagatccctttgctgggaaaatagttttagatgtaactcttcaaatcgctgataaagtagaggcaattaaggacttaggtggtggtgggctagttgtcggaatcactgaaatggctaacggattaggtgtagaggtcgagctggataagatacccttgcgtgtcaaggatttaacacctggagaaattctagtctcggaaacccaggagagaatggtatttgctgtaaaaccagagagagtaaaggaggtttgtgaagcctttgagtattatgaatatccttgcgcagttattggagagttcactaatgatactagtattagattcttatacaaggggaaagaggttgtgaatttaccctcgagtttactcttgaatccacctagatataagtggggtgttaaaaaaactaagtactcagtatattatgaaaaacccaatataaacctagaagtagctgtgaaggagattctgtcttatccagaccttgtaagcaagttctgggcatattcccagttcgattatgaggtaggaacatctacagtgctcaaacccggagaggctgattcaggcttaatatctttaccaaatggtaagctattagcaatcaagggtgatgctaaccctgatttatgcgcagaagattcttatgagtgtggtagatatattgtagcagaagcatatagaaatctagccacagtgggcgctaagggaataggtgttgtagatcatttacagttcggagatcctaagaaacctgaagtatactatcaatttgttgaggcagtaaggggtatagcagaggcttcaaagtatttcggtacccctatagttgggggtaaggtctcattttacaacgagaataaggaggggaaaccaattaagccaacaccattggttgtcatggctggattagtacaggacaagtttttgagacctaagattactgagggtgcgtcaataattatgattggatttaccagggaggagatgggaggttcactattggctaaaatatttggaaattatggagacgtacctaagactaggttaaatgaggaacttctgtcaagcgaacttgtgattaaggcaataaatgatgggaaaataatcttcgcaaaagacattagtaaaggcggtttagtaggagcgttgctacctatacttgtaaggggattcggcgtctcaattgatactaatttaataccttcagataccgatgacgtaatttccaagctgttttctgaaaatggaggaagattcattgttttgagtgaaagagaagatgatattaattggctcgaaagccaaagtagaggaatttatgtatctaagataggagaagtcactagagaacaatacgtaatgtggttaagggaaggaaagaaaatagacctgactaaagaagtaaataattatcatagatatctagaagaggtgacaagtgattag

SEQ ID NO: 53153 - protein, 710 aa, Sulfolobus acidocaldarius
MRLSLSSQEMELVRKFLGREPKEEEWLVVDALWSEHCSYKSSKIFLRSFPSEGERVVMGIEDWQDAGALDVGDGWAVVLKLESHNHPSAIDPFNGAATGIGGIIRDIISKGARPIALLDMIRVGNLNNSRNRWLLKNIIAGIGFYGNSIGVPVVAGELAFDETYNDNPLVDVAGLGVVKKDKIVPSVVKEAGLKIVLVGLTGLDGLGGASFASRKLSGEDEIGAVQIADPFAGKIVLDVTLQIADKVEAIKDLGGGGLVVGITEMANGLGVEVELDKIPLRVKDLTPGEILVSETQERMVFAVKPERVKEVCEAFEYYEYPCAVIGEFTNDTSIRFLYKGKEVVNLPSSLLLNPPRYKWGVKKTKYSVYYEKPNINLEVAVKEILSYPDLVSKFWAYSQFDYEVGTSTVLKPGEADSGLISLPNGKLLAIKGDANPDLCAEDSYECGRYIVAEAYRNLATVGAKGIGVVDHLQFGDPKKPEVYYQFVEAVRGIAEASKYFGTPIVGGKVSFYNENKEGKPIKPTPLVVMAGLVQDKFLRPKITEGASIIMIGFTREEMGGSLLAKIFGNYGDVPKTRLNEELLSSELVIKAINDGKIIFAKDISKGGLVGALLPILVRGFGVSIDTNLIPSDTDDVISKLFSENGGRFIVLSEREDDINWLESQSRGIYVSKIGEVTREQYVMWLREGKKIDLTKEVNNYHRYLEEVTSD

SEQ ID NO: 53154 - DNA, 2112 bp, Sulfolobus tokodaii
  CDS (1)..(2112): transl_table=11
atgaaaataacactttcttcgtacgaaatggaactagtaagaaagaagcttgcaagagaacctaatgaggctgaatggctaactatagatgcattatggagtgaacattgctcttataagtcgtctaaagttttcttaagaagttttcctagtgagggagaaaaggtattaatgggtattgaagattggcaagacgctggagcattagatgttggagatgggtgggcaattgtgttaaaacttgaaagccataatcatccttcagctattgatccctttaatggtgcagctactggagttggaggtataattagggatataataagtaaaggagcgaagccaattgccttattagatatgattagggttggtaatttatctaatccaagaaataaatggttgctaaagaatataattgctggaattggattttatgggaatagtattggtgtaccagtagttggtggagaattagattttgacgattcatataatgataatcctttagtggatgttgctggtgtaggtatagtaagaaaagataagattgtaccaagtgttgttaaggagcctggattaaagatagtcatagttggcttaactggtttagatggtttaggaggagcttcttttgcttcaagaaaattaagtggagaggatgaaataggtgctgtacaaattgccgacccatttgctggaaaaatagttttagacgttactcttgaaattgctgataaagtagaggctattaaggacctaggcggtggtggattagtagttggagttactgaaatggctaatggtttaggggcaatagttaatttagataaggttcccttaagggttaaagaccttaaaccagaagagattttggtatcagaaacccaagagagaatgctttttgctgttaaagaagaaaatgttaatgaagtttgtaaagcatttgaatattacgattatccttgtgctgtaataggtgaattcgtaaaagaaccatacattaagtttctttatggaggtaaagagattgtttccttaccatcagatttacttttatctccaccaagatttatatgggaaattaaaaagcctaaactaattaaaagtgataaaaaacctgaagttgggttagaagaaagtattagagcaatactctctagaataataagtaaagaatgggcttactcacaatttgactatgaagtaggtacttctactgttttaaagcctggagaagccgattctgctttaatatcacttccgaatggtaagcttttagcattaaagggtgatgctaatccagacttatgtgctgaagattcttatgaatgtggcaaatctattgttgctgaagcatatcgtaacttagcatctgtcggtgcaattggtataggagtagttgatcatcttcaatttggtgatcctaaaaaaccagaagtttactattcttttgtagaagctattagaggtatagctgaagcatcaaagttcttttctaccccaatagttggcggaaaagtatcattttataatgaaaataaagaaggtaaggcaattaaacccactcctttgatagtcatggcaggcttaattaaggataaattcttacgtaataaggtcgttgaagatagttatatcactttaataggttttacaagggacgagatgagggggtctttatttggtaaaatatttggaaattatggcgaggttccaaaagcgaggttaaatgaagactatttagcgagtcagttagttgtaaatttaataaacgacgagaaaatattctttgctaaggacattaataaaggaggtctaattgcctcgttattttcaatactagttaaaggtatgggcgtagagattgaaacgtcttcaattccttcggatactgatgattggattcctaaactttattctgaaaatggtggtaggtttattgtattaactaacgatccagagtacataatacgtaagtccaaaggaattcatatatcagtaattggaaagataactaaggaccaaggtataataaaaattgataataaagagattaatgtaaataaagagattgataattattataactacttatatgaggtgatgtcatga

SEQ ID NO: 53155 - protein, 703 aa, Sulfolobus tokodaii
MKITLSSYEMELVRKKLAREPNEAEWLTIDALWSEHCSYKSSKVFLRSFPSEGEKVLMGIEDWQDAGALDVGDGWAIVLKLESHNHPSAIDPFNGAATGVGGIIRDIISKGAKPIALLDMIRVGNLSNPRNKWLLKNIIAGIGFYGNSIGVPVVGGELDFDDSYNDNPLVDVAGVGIVRKDKIVPSVVKEPGLKIVIVGLTGLDGLGGASFASRKLSGEDEIGAVQIADPFAGKIVLDVTLEIADKVEAIKDLGGGGLVVGVTEMANGLGAIVNLDKVPLRVKDLKPEEILVSETQERMLFAVKEENVNEVCKAFEYYDYPCAVIGEFVKEPYIKFLYGGKEIVSLPSDLLLSPPRFIWEIKKPKLIKSDKKPEVGLEESIRAILSRIISKEWAYSQFDYEVGTSTVLKPGEADSALISLPNGKLLALKGDANPDLCAEDSYECGKSIVAEAYRNLASVGAIGIGVVDHLQFGDPKKPEVYYSFVEAIRGIAEASKFFSTPIVGGKVSFYNENKEGKAIKPTPLIVMAGLIKDKFLRNKVVEDSYITLIGFTRDEMRGSLFGKIFGNYGEVPKARLNEDYLASQLVVNLINDEKIFFAKDINKGGLIASLFSILVKGMGVEIETSSIPSDTDDWIPKLYSENGGRFIVLTNDPEYIIRKSKGIHISVIGKITKDQGIIKIDNKEINVNKEIDNYYNYLYEVMS

SEQ ID NO: 53156 - DNA, 2337 bp, Symbiobacterium thermophilum
  CDS (1)..(2337): transl_table=11
gtgtctgagatgcagcagccctggagtctggtgggtctcacggaggcggagtaccgccgggtggtggagatcctggggcgggagccgaaccccaccgaactgcacatgttcggcgtgatgtggtccgaacactgcgcgtacaagcactcgaaggccgcgctgcggcggcttcccacccgcggcgagcacgtattgcaggggccgggcgagaacgccggcgtcgtccggatcgacgacgacctggccgtggccttcaagctcgagtcccacaaccacccctccttcgtggaccccttcaatggcgcggccacgggcgtggggggcatcctgcgggacgtcttcaccatgggcgcccgcccggtggcgaccctgaactccctgcgcttcggcccgctggacgagcccaagcagcgggaactgctcaggggtgtggtggccggcatcggccattacggcaacacggtgggcgtgccctgcatcggcggggaggtctacttcgacgagtcctaccggggcaactgcctggtcaacgccatgtgcatcggcatcctccggccggaccgcatccaccggggcatcgccgccggcccgggcaacgccatcatggtggtgggcaacccgaccggtcgggacggcatccacgccgcgtcgctgctggcctcggccgagttcagcggcagcgaggcggaggcggcgctgcccacggtgcccgtgggcgaccccttcgccgagaagatgctgatggaggcctgcctggaactgttcgagaccgacgcggtggtgggtatccaggacatgggcgccgccggcctcatctcctcgtcctcggagatggcagcccggggcggcgtgggcgtggagctggacgtgcgcaaggtgccggcccgggaggagggcatggagccctgggagttcctcctctccgagtcacaggagcggatgctcgtctgcgtgaagaaggggcgggaggccgaggtcgaggcgatctgccggaagtggggcgtgggctgcgccgtgatcggccgggtgaccgacgacggcatggtgcgggtgctggacgacgggcgagtcgtggccgaggtgccggccagggcgcttgccgaagcgccggtctaccacccggccaaggccgagcccgcctacctggcggagctgcgggccttcgactggtcccggctgcccgagccggaggattggaatgagacgctgctccggctgctgggctcgcccaacatcggcgcgcgggcctggatctacgagcagttcgaccacatggtgcaggcgggtaccgtcctggggcccggcggagacgccggggtcatccggctcggcgcggccgtcgcgccgggggcgcacggcctcacccggcagccgccgggggagggcctgcccggccggtccggccaggcggggcccccgaagggcatcgccgcctcagtggactgcaacggccgctacgtctacctgaacccccggcggggcaccgccatcgccgtggcggaggcggcccgcaactgcgtggtcaccggcgcccggcccgtggccatcaccaacaactgcaacttcggcaaccccgagaagccggagatcttctggaccttcgacgaggccatcaccggcatggccgaggcctgcgaggcgctgggcacacccgtgaccggcggcaacgtctccttctacaacgagaccagcggggaggccattcacccgaccccgaccatcggcatgatcgcggtgcacgagaacctggaccggctgaccaccccgggcttcaagcaggtgggtgacgtgatcctcctgctgggcgagacccgggacgagctgggcggctccgagtacgccaggctgatccacggcgtgctggccggcgacgccccggccctggacctcgccttcgagaagcggctgcaggacgtggtgctgcgggcgatccacgaggggctggtgaccgccgcccacgacgtggcggagggcggcctcgcggtcgccctggcggagatggccatcgccgccgcggagccgtccctgggctgccaggtgagcatcttcctcggcgagggccgggtagacggccagctcttcggcgagtcccagtcccgcatcctggtcacggccacccgggagcaggtggggcggctgcaggccctcctgatggtggagcagatccccttccgggtgctgggcgacgtgaccgccgacggccggttccggctggccgcgctggctccgggcagcgggtcggcccacgtctaccggcgtcaggagctgatcgacctgccggtcgcggacctggtgcgtgcgcacaaggaggcgatccccaggtggatggacgcgtga

SEQ ID NO: 53157 - protein, 778 aa, Symbiobacterium thermophilum
MSEMQQPWSLVGLTEAEYRRVVEILGREPNPTELHMFGVMWSEHCAYKHSKAALRRLPTRGEHVLQGPGENAGVVRIDDDLAVAFKLESHNHPSFVDPFNGAATGVGGILRDVFTMGARPVATLNSLRFGPLDEPKQRELLRGVVAGIGHYGNTVGVPCIGGEVYFDESYRGNCLVNAMCIGILRPDRIHRGIAAGPGNAIMVVGNPTGRDGIHAASLLASAEFSGSEAEAALPTVPVGDPFAEKMLMEACLELFETDAVVGIQDMGAAGLISSSSEMAARGGVGVELDVRKVPAREEGMEPWEFLLSESQERMLVCVKKGREAEVEAICRKWGVGCAVIGRVTDDGMVRVLDDGRVVAEVPARALAEAPVYHPAKAEPAYLAELRAFDWSRLPEPEDWNETLLRLLGSPNIGARAWIYEQFDHMVQAGTVLGPGGDAGVIRLGAAVAPGAHGLTRQPPGEGLPGRSGQAGPPKGIAASVDCNGRYVYLNPRRGTAIAVAEAARNCVVTGARPVAITNNCNFGNPEKPEIFWTFDEAITGMAEACEALGTPVTGGNVSFYNETSGEAIHPTPTIGMIAVHENLDRLTTPGFKQVGDVILLLGETRDELGGSEYARLIHGVLAGDAPALDLAFEKRLQDVVLRAIHEGLVTAAHDVAEGGLAVALAEMAIAAAEPSLGCQVSIFLGEGRVDGQLFGESQSRILVTATREQVGRLQALLMVEQIPFRVLGDVTADGRFRLAALAPGSGSAHVYRRQELIDLPVADLVRAHKEAIPRWMDA

SEQ ID NO: 53158 - DNA, 2286 bp, Synechococcus elongatus
  CDS (1)..(2286): transl_table=11
atgagccaaacacccctcgtcactgaggctgagattactgccgaaggcctcaagccccaagaatacaccgaaattgtccgccgccttggtcgccatcccaaccgcgcagaattgggcatgtttggcgtgatgtggtcagagcattgctgctacaaaaactcgcgtctcctgctgaagcagtttccaacccaagggccacgagtccttgtcggccccggtgagaatgccggtgttgtggacttaggggatggcttgcgccttgcctttaagattgagtcccacaaccatccctcggccattgaaccctttcagggagcagcgactggcgtgggggggattctgcgggatatttttacgatgggggcgcgtcccattgccctgctgaacgccctgcgctttggtgatctcaaggaagcaaaaacccaacaattggtgaaaggggtagtggcgggtattgcccactatggtaactgtgttggcgtgcccacggtggggggggaggtctattttgacccctgctatgccggtaaccccttggtgaatgccatggccctgggtcttatggaaaccccagagattgttaaatcggcagccagtggtattggcaatccagtcctctacgttggctccaccacggggcgggatggcatggggggagccagttttgccagtgctgagctgacggatgagtcaatgagcgatcgcccggctgtccaagtgggggatccctttgtggaaaaatgcctcattgaggcctgtctggaagcctttcaaactggagcagttgtggccgcccaagatatgggggcagcaggattgacctgctcgacctcggaaatggctgccaaggggggtgttggcattgaactggacctggacaaagtgcccgtccgcgaacaggggatggtgccctatgagtttttgctctcggaatcccaagagcgaatgctgtttgtggccgctcaagggcgagaagcagaactgattgagattttccagcgttggggcctgcaggcagtggtggtgggtcgtgtcattgccgaacccctggtgcgggtgctttaccggggtgaggtggccgcagaggtgcctgcccgtgcccttgccgaagagacccccctctatgagcgagaatgccccaaggagccgccagcctatgtccaacaggcgcggcagtggtcggtggatcaattgccgctaccggcgcgatcgcccgcggagattttgctgactctcctcgccacccccagtattgcctctaaagcatgggtctatcgtcagtacgatcacgaagtccaaaacaacaccctggttttccccggcgatggggatgccgcagtaattcgcctgcggggcactgccaaagggattgcggccaccgtagattgccccagccgctatgtgtatctggatccctacgaagggggcaaagccgctgtcgctgaagccgctcgcaatcttagttgtgtgggggcagagcctctggctgtcaccgataacctcaactttggtagcccagaaacacccgtgggttactggcagttggccaatgcctgccgcggtcttgccgaggcttgtcgggccctacaaacgccggtcacgggggggaatgtttccctctacaacgaaacaattgatagcaatggccagccacagcccatttatccaaccccagtggtggggatggtggggttgattgccgacctgcagcgggttgtcggtcagggctggcgagcgaccggcgatgccatctacctattggggttgcctctgactacccctttgagtgatccgcgcctgagcctaggcgggtcagaataccttgctcagattcatggccttgtggcgggttgtccacctcagattgatttagaccttgagcagcgagtgcaggcggtgtgtcgctatggcattcaacaggggtggattgccagtgcccacgatctcagtgaaggtggtttggctgtggccttggcagaaagctgtctgagtgggcagcggggggcgacgatacaattgccagagggcacctatccccgctgggatgcgctgctatttgctgaggggggggcgcgaattctggtgtctgtaccgcctagggaacaggtggcatgggaagcctatgcccaggcacaactgcccaatgcttggacccgcctaggggttgttaatggtgaagatacggaactgtgtattgacagctgtaacaattctcccctcatcagggttacgataaaggagttagatcttgcgtggcgatcgcccctaccgaagtatttggactaa

SEQ ID NO: 53159 - protein, 761 aa, Synechococcus elongatus
MSQTPLVTEAEITAEGLKPQEYTEIVRRLGRHPNRAELGMFGVMWSEHCCYKNSRLLLKQFPTQGPRVLVGPGENAGVVDLGDGLRLAFKIESHNHPSAIEPFQGAATGVGGILRDIFTMGARPIALLNALRFGDLKEAKTQQLVKGVVAGIAHYGNCVGVPTVGGEVYFDPCYAGNPLVNAMALGLMETPEIVKSAASGIGNPVLYVGSTTGRDGMGGASFASAELTDESMSDRPAVQVGDPFVEKCLIEACLEAFQTGAVVAAQDMGAAGLTCSTSEMAAKGGVGIELDLDKVPVREQGMVPYEFLLSESQERMLFVAAQGREAELIEIFQRWGLQAVVVGRVIAEPLVRVLYRGEVAAEVPARALAEETPLYERECPKEPPAYVQQARQWSVDQLPLPARSPAEILLTLLATPSIASKAWVYRQYDHEVQNNTLVFPGDGDAAVIRLRGTAKGIAATVDCPSRYVYLDPYEGGKAAVAEAARNLSCVGAEPLAVTDNLNFGSPETPVGYWQLANACRGLAEACRALQTPVTGGNVSLYNETIDSNGQPQPIYPTPVVGMVGLIADLQRVVGQGWRATGDAIYLLGLPLTTPLSDPRLSLGGSEYLAQIHGLVAGCPPQIDLDLEQRVQAVCRYGIQQGWIASAHDLSEGGLAVALAESCLSGQRGATIQLPEGTYPRWDALLFAEGGARILVSVPPREQVAWEAYAQAQLPNAWTRLGVVNGEDTELCIDSCNNSPLIRVTIKELDLAWRSPLPKYLD

SEQ ID NO: 53160 - DNA, 2334 bp, Synechococcus sp
  CDS (1)..(2334): transl_table=11
atgacggcgatctcctctgctcctttttcggccgatgaaattgctggtgagggcatcaaacccgaggagtacgatgcgatcgtcgagcgactgggtcggcaccccaacaaagccgagctaggaatgttcggcgtgatgtggtcagagcattgttgctacaaaaactcacgaccgctgctcagtcaatttccgacagagggcctgcgtatcctcgttggtcctggtgagaatgccggtgttgtcgatctgggtgatggactgcatctggccttcaaagtcgagtctcacaatcacccctctgctgtagagccgttccaaggggcagcaacgggtgtaggcggtattctccgcgatattttcacgatgggagctcgcccgatcgcgattctcaactccctgcgctttggcgacctcgagcaaccccgaacgcggcgactgttccacggcgtggtctcgggaattagccactacggcaactgcgtcggcgtgccgacggtgggtggtgaagtcgcctttgacccggcttacaacggcaatcccttggtgaatgccatggccttggggctgatggaaaccgacgagattgtcaaagcaggtgcttcaggcattggtaatccggtgctgtatgtcggctccacaaccggtcgcgacggcatggggggggccagctttgccagcgctgagctgagcgatgaatcgctggatgatcgccccgcggtgcaggttggtgatcccttcctcgaaaaatcgctgattgaagcttgcttagaagcgttcaaaacaggtgctgttgttgctgcgcaggacatgggtgcggcggggctgacctgctccacggcagaaatggcggccaaaggtggtgtcggcgttgagctggatctggacctgattcccgtgcgcgaaagcggcatggtgccctacgagtatctgctctcggaatcccaggaacggatgctgttcgtggctgcagctggtcgcgagcaagagctaatcgacatcttccatcgctgggggctgcaagcggtcgtcgctggcaaaatcatcgctgagccgatcgtgcggattttctggcaaggcgcgatcgcagcggaaattcccgctactgccctctccgacaacacgccgatctatcaccggcaactccccgacgaaccgcctgcttacgctcaacaggcttggcagtggacgattgatcagcttccggcagctaccgaagttggctgtggtgatcgcagttggaatgatttgctgctgactctgctggatagccccacgatcgcctctaagcgctgggtctatcgccagtacgaccaccaagtccagaacaacacggttgtcttgccgggggcagcagatgccgctgtggtgcggttacgaccgcagatgggcgctgctgcgctgaaaacctccaacaagggtgtggcagccaccaccgactgcaatgctcgttactgctacctgcagccctacgagggggcaaaagcagcggttgcagaggcggcccgcaacctcagctgtgttggtgctgagccgctagctgtgaccgataacctcaacttcggtagccctgagaagccgatcggctactggcagttggcggaagcttgtcggggtctctcggaagcctgccgcgaattttccacgccagtgacgggcggcaacgtctcgctctataacgaaacgctggattcagacgggaaaccccagccgatttacccgacgccggtggtcggcatggtcggcttggtgcccaacctcgatcgcgtctgtggtcagggtttccaatccgttggcgatcgcctctatctgcttggtctgccaacccaagcggctgacgatcgcctcagtttgggggggagtgaatatctcgcgatcgcccatcaaaccgtagcggggctgccgcctcggatcgattttgatctagagcggcgggtgcaggcggtctgtcgtcttggcattcaccaaggctggattcgatcggcccacgacagtgcggaaggcggcttggctgtggcgatcgcggaatcggcgatcgcaggttccctcggtgctcgggtcaatctgggtgaactggttggccatcgtcccgactggttgctatttgccgagggcggtgcgcggatccttgtttccgtcgatccggcacatgtcgcggtttgggaagccgagctacaggcacaaattccggcagcttggcaagcgatcggcacggttactgaagccgatgctggactggcgatcgccgctggaaaccagcccctcgtccagctttccgtcgatcagctccagcagacttggggcggggcgatcgaacgtcgtttggctaaagactaa

SEQ ID NO: 53161 - protein, 777 aa, Synechococcus sp
MTAISSAPFSADEIAGEGIKPEEYDAIVERLGRHPNKAELGMFGVMWSEHCCYKNSRPLLSQFPTEGLRILVGPGENAGVVDLGDGLHLAFKVESHNHPSAVEPFQGAATGVGGILRDIFTMGARPIAILNSLRFGDLEQPRTRRLFHGVVSGISHYGNCVGVPTVGGEVAFDPAYNGNPLVNAMALGLMETDEIVKAGASGIGNPVLYVGSTTGRDGMGGASFASAELSDESLDDRPAVQVGDPFLEKSLIEACLEAFKTGAVVAAQDMGAAGLTCSTAEMAAKGGVGVELDLDLIPVRESGMVPYEYLLSESQERMLFVAAAGREQELIDIFHRWGLQAVVAGKIIAEPIVRIFWQGAIAAEIPATALSDNTPIYHRQLPDEPPAYAQQAWQWTIDQLPAATEVGCGDRSWNDLLLTLLDSPTIASKRWVYRQYDHQVQNNTVVLPGAADAAVVRLRPQMGAAALKTSNKGVAATTDCNARYCYLQPYEGAKAAVAEAARNLSCVGAEPLAVTDNLNFGSPEKPIGYWQLAEACRGLSEACREFSTPVTGGNVSLYNETLDSDGKPQPIYPTPVVGMVGLVPNLDRVCGQGFQSVGDRLYLLGLPTQAADDRLSLGGSEYLAIAHQTVAGLPPRIDFDLERRVQAVCRLGIHQGWIRSAHDSAEGGLAVAIAESAIAGSLGARVNLGELVGHRPDWLLFAEGGARILVSVDPAHVAVWEAELQAQIPAAWQAIGTVTEADAGLAIAAGNQPLVQLSVDQLQQTWGGAIERRLAKD

SEQ ID NO: 53162 - DNA, 2307 bp, Synechococcus sp
  CDS (1)..(2307): transl_table=11
gtgtcctcccctgcctacgacgttattgcggctctgaaacaggaaggtctgaaaccgtcggattggcaggagatctgtcggcggcttggacgggagcccaaccgtgccgagctgggaatgttcggggtgatgtggtcggaacactgctgctatcgcaactccaggccgctgttgcgggggtttccaacggaaggacctcgaattttggtgggtcctggcgaaaatgccggtgtggtcgacctgggggaaggccatcgcttggccttcaagattgaaagccacaaccacccctcggctgtggagcccttccaaggtgccgccaccggcgtcggcggcatcctgcgggacatcttcaccatgggagctcgcccgatcgcgttgctgaatgcattgcgtttcggccccctagaggaccccgtcaacgttgggctgatcgaaggcgttgtggccggcatcgcccattacggcaattgcgttggtgtgcccaccgttggtggtgaagtggctttcgatccctcctacggggggaatcctctggtgaacgccatggcgttgggtctgatggagaccgaagagatcgtcaagtccggcgcccagggggtggggaatcctgtggtttacgtgggcagcaccaccggtcgggatggcatgggcggcgccagtttcgccagtgctgaactcagtgccgattctctggatgaccgccccgccgttcaggtgggcgatcccttcctggaaaaagggttgatcgaggcctgtctggaggcattctccggtggtgatgtggtggctgctcaggacatgggggctgccggactcacctgcagctgttcggaaatggcggccaaaggtggtctgggggttgagctcgacctcgatcgggttccggcccgcgaagagggcatgacggcctacgaatttctgctctcggagtcccaggagcggatgttgtttgtggtgaaggccggccgtgaagaggcgctgatgcagcgcttccgacgctggggtctgcaggccgctgtggtgggtcaggtgctgcaggaacccttggtgcgcgtgctgcatcacggcgaggtggccgccgaggtgccggccaccgctttggcggatgacacgcccattgagcagcacgagctgttgcaggagcctcctgcggatcttcaggagctttggcaatggcaggagagtcaactccctgctttggacgaccctgcaagcgttctgttgaccttgcttgatgatccgaccatcgccagcaagcggtgggtgcatcgccagtacgaccagcaggtgctcgccaatacggtggtttcttctggagcagcggatgccgctgtggtgcgcttgcggccgcagcagggtcagggatccatggaatctgtgcagcggggtgtggctgccacggtggattgccccaaccgttgggtggctttggatcccgagcgtggtgctcaggcggccgttgctgaagctgcccgcaacctgagttgcgtcggtgcagaaccattggcgatcaccgacaaccttaatttcccttcgccggaaacacccaaggggtactggcagctggccatggcttgccgtgggatcgcggaggcctgccgtgctctgaacacaccggtcaccggcggcaacgtctccctctacaacgagacccgccgtgatgacggcacgcttcaacccatccatccgaccccggtggtgggcatggtcggcttggtggagaacatcgagcgggtggttggtctgggttggcgacaacccggtgatgcggtgttgttgctgggtgtggcacccgatgaacagggagatgaccgccttggtcttgccggcagcagctatcagatgctggtcagcggggtgttggcgggtcggccaccacgggtggatttcgagttggaacgtggggttcagcagttgttgcggcaggcgattgatgctgggttgttggcctcggcccacgacagcagcgatggcggtctcgctgtagcccttgcggaaagcagcattgcgtcatctcttggcgttgaactgaagctcaatgggcgacctgagggcctgacgcgaacgttgtttgctgaaggtggtgcccgggtggcgatttcagtgaaagctgaatgccggccgcagtgggatcagcttgcggctgagtcgacggttcccatcactgaactcggtgtggtgaacgatggttcaacattccggatccactgcggtgagaaggatgtccagtggtcgttggctgatctgaagcgggcccatcaggagggtttgccgcgccggatcgggggtgaggcagaatcctga

SEQ ID NO: 53163 - protein, 768 aa, Synechococcus sp
MSSPAYDVIAALKQEGLKPSDWQEICRRLGREPNRAELGMFGVMWSEHCCYRNSRPLLRGFPTEGPRILVGPGENAGVVDLGEGHRLAFKIESHNHPSAVEPFQGAATGVGGILRDIFTMGARPIALLNALRFGPLEDPVNVGLIEGVVAGIAHYGNCVGVPTVGGEVAFDPSYGGNPLVNAMALGLMETEEIVKSGAQGVGNPVVYVGSTTGRDGMGGASFASAELSADSLDDRPAVQVGDPFLEKGLIEACLEAFSGGDVVAAQDMGAAGLTCSCSEMAAKGGLGVELDLDRVPAREEGMTAYEFLLSESQERMLFVVKAGREEALMQRFRRWGLQAAVVGQVLQEPLVRVLHHGEVAAEVPATALADDTPIEQHELLQEPPADLQELWQWQESQLPALDDPASVLLTLLDDPTIASKRWVHRQYDQQVLANTVVSSGAADAAVVRLRPQQGQGSMESVQRGVAATVDCPNRWVALDPERGAQAAVAEAARNLSCVGAEPLAITDNLNFPSPETPKGYWQLAMACRGIAEACRALNTPVTGGNVSLYNETRRDDGTLQPIHPTPVVGMVGLVENIERVVGLGWRQPGDAVLLLGVAPDEQGDDRLGLAGSSYQMLVSGVLAGRPPRVDFELERGVQQLLRQAIDAGLLASAHDSSDGGLAVALAESSIASSLGVELKLNGRPEGLTRTLFAEGGARVAISVKAECRPQWDQLAAESTVPITELGVVNDGSTFRIHCGEKDVQWSLADLKRAHQEGLPRRIGGEAES

SEQ ID NO: 53164 - DNA, 2307 bp, Synechococcus sp
  CDS (1)..(2307): transl_table=11
gtggtttcctcccctgcgtacgacatagctgcagccctgaagcaggaagggctcaagcccagtgactgggatgagatctgtcggcggctcggccgcgagccgaatcgagccgaactgggcatgttcggcgtgatgtggtccgaacactgctgttatcgcaattcccggccgttgctgagtggcttccccacggaggggccacgcatcctggtgggtcccggtgaaaacgctggcgtggtcgatctcggagggggccatcggttggccttcaagatcgaaagccacaaccacccctccgccgttgaaccctttcagggggccgcaacaggggtgggcggcatcctgcgcgacattttcacgatgggagctcgtccgatcgcgttgttgaatgccctgcgcttcggtccccttgaggatcccgccaacgttggcctgatggaaggtgttgtggcgggcattgcccattacggcaactgcgttggggtgccgacggtgggtggtgaggtggcttttgatccctcctattccggcaatccgctggtgaatgccatggccctcgggttgatggagaccgaggagatcgtcaaatccggcgcgatcggcgtcggcaatcctgtggtgtacgtgggcagcaccaccggccgggacggtatggggggagccagctttgccagcgctgagctcagtgctgattccctggatgatcgccccgccgttcaagtgggtgatccgtttctggagaaagggctgatcgaagcctgtcttgaggcgttcgccagtggtgatgtggtggccgctcaggacatgggcgccgctggtctcacctgcagctgttcggaaatggctgcgaaagggggcctgggggtggaactggacctggaccgagttccggcccgtgaaaccgggatgacggcctacgagttcctgttgtcggaatcccaggaacggatgttgtttgtggtgaaggctggccgggaggatgccttgatgcagcggttccgtcgctggggcttgcaggcggcgcttgtgggcaaggtgctccaggaaccgattgtgcgggtgttgcatcacggtgccgtcgccgctgaggtgccggccacggctcttgccgatgacacgccgattgaaaaacatgccctcttgcaggagcccccggcagatcttcaggcgctctggggttggaccgagcaggagcttccggtgctgagcgatgccgcggcagccctgctgcagcttctggatgaccccaccattgcgagcaagcagtgggttcaccgtcagtacgaccagcaggtgctggccaacacggtggtctcgtccggtgccgctgatgccgctgtggtgcgtttgagaccccagcagggcaatggatccatggctgcatccaatcgtggtgttgccgccacggtggactgccccaaccgttgggttgccctggatcccgaacgcggcgctcaggcggccgtcgccgaagcagcacgcaacctgagttgtgtgggggcggagcccctggcggtgaccgacaacctcaatttcccctcaccggaaacacccaaggggttctggcagctggccatggcctgccgcgggatctccgatgcctgccgcaccctcaacacccccgtcaccggcggcaatgtctcgctctacaacgagaccaaacaggacgacggcacgatgcaaccgatccaccccacgccggtgatcggcatggttggtggtgtggatgacatcagccgtgtgacttgcttggcctggcaacagcccggcgatgcgatcttcctcatcggtgttccgccggaggatggtgctgatcccagccttggtttggcgggcagtgcctatcagcagcagacccttggatccttggccggacgaccgcccaagcccgatcttgccattgaagcagcggtggggagtctggtgcgcgaggccattgcccaaggtctgttggcctccgctcacgactgcagtgatggcggcctcgcggtggcgttggctgaatcctgcatcgcctctgatctgggcatcagtgtgacgctgtccacaggttcggcacgcctggagcgggtgctgttcgccgaaggcggcagccgggtgattgtgtcggtgaatgcagcatccttccctgcatgggagcagttgatcggatccaatccagcgctctgcgtcacccaactcggcagcgtcaccctggaggctcgattggtgatccgatcggaatcagctgttcagctcgatcttgaggtggaacgctgtgctgctgttttccgtgatgcgttgccccgacggatgcattcggagtga

SEQ ID NO: 53165 - protein, 768 aa, Synechococcus sp
MVSSPAYDIAAALKQEGLKPSDWDEICRRLGREPNRAELGMFGVMWSEHCCYRNSRPLLSGFPTEGPRILVGPGENAGVVDLGGGHRLAFKIESHNHPSAVEPFQGAATGVGGILRDIFTMGARPIALLNALRFGPLEDPANVGLMEGVVAGIAHYGNCVGVPTVGGEVAFDPSYSGNPLVNAMALGLMETEEIVKSGAIGVGNPVVYVGSTTGRDGMGGASFASAELSADSLDDRPAVQVGDPFLEKGLIEACLEAFASGDVVAAQDMGAAGLTCSCSEMAAKGGLGVELDLDRVPARETGMTAYEFLLSESQERMLFVVKAGREDALMQRFRRWGLQAALVGKVLQEPIVRVLHHGAVAAEVPATALADDTPIEKHALLQEPPADLQALWGWTEQELPVLSDAAAALLQLLDDPTIASKQWVHRQYDQQVLANTVVSSGAADAAVVRLRPQQGNGSMAASNRGVAATVDCPNRWVALDPERGAQAAVAEAARNLSCVGAEPLAVTDNLNFPSPETPKGFWQLAMACRGISDACRTLNTPVTGGNVSLYNETKQDDGTMQPIHPTPVIGMVGGVDDISRVTCLAWQQPGDAIFLIGVPPEDGADPSLGLAGSAYQQQTLGSLAGRPPKPDLAIEAAVGSLVREAIAQGLLASAHDCSDGGLAVALAESCIASDLGISVTLSTGSARLERVLFAEGGSRVIVSVNAASFPAWEQLIGSNPALCVTQLGSVTLEARLVIRSESAVQLDLEVERCAAVFRDALPRRMHSE

SEQ ID NO: 53166 - DNA, 2280 bp, Thermoplasma acidophilum
  CDS (1)..(2280): transl_table=11
atgattttcaggaccatcaggatcagggatgcggatgatgccaggctaaaggcaataagcaagaggctcgggttggctctctctctggatgagatgaaagccgtcagatcgtattttgagaggcttggcagggatccaatagatgccgaaatccatgccgttgcccaatcctggagtgaacactgttcatacaagtcatctaagtactatctcaagaaatatcttggttcgttgaagacagattacacgatccttgcgatggaggatgatgcaggcgtcgtggattttgatggggaatacgcttatgtgctgaagatggagagccacaatcatcccagcgccgttgaaccctacggcggcgcagcaacaggaatcggaggaatagtccgggatgtactctgcatgggagcacagccggttgcccttatagattccctgttcttgggcgatgtttcgtcggatcgctatgaggggctgctctcaccgagatacatattcggcggtgtggtaggaggcataagggactacggtaacagaataggcattccaaacgttgccggttcgctttacttcgataagctctacaactcaaaccctcttgtcaatgccggttgtgtaggtatagtgcggagggacaggatcgtcaggtcaaaatcctacaagccgggcgacgtcctggtactcatggggggcaaaaccggaagggatggcatacatggcgtgaattttgcgagcacaaccctgggcaaggtcacaaagagcagcaggctggccattcagctgggaaatccaatagtggaacagccgatgataaaggccgttctggaggcaaacgacgcggggctgatacgtgcgatgaaggatctcggaggcggagggctatcgagtgcggccacggagatggtttatgctggcgggttcggggccgaaataactctggatgacataaagctcaaggagtcaaacatgtcaggatgggagatatggataagcgagagccaggaacgcatgctcatggagtgctaccctgaagacgtggaaaagataaggcagatagccgaaaagtggaacctcgatttctccgtgataggacaggtaacagcggatcgcaggataagggtgtattacaagaagagaaagatcatcgacatggatatagaatttctcgacgattcgcccgtctatcagaggccataccggattaaggaagtggaaaaatccgtgacggttccgcaggagccggaggatctgaacagcttcgtcagggatttcatggcaaggttgaacacatgtgcgaggttcaacgttgtgaggcagtacgatcacaccgtcagaggatctacgatagtgacaccattcgtgggccggccaaacaaggagacgcatgcagatgcaaccgtcataaagcctctggaaaactcgatgcgtgggcttgttctgacttcaggatcaaggccaaacatggtcagcgttgatccgtatgccggaacgcttctgacgctggcagaggcatacaagaacatactctcaacggggggaaggccacactccgttgtagacgccctgaatttcgggaatccggagcgcgaggagatcatggggcagttcgtagagtccgtcagggcaattggtgacttctgcaggaagatggggttgccagttgttgctggaaacgtgagcttttacaacgaatacaggaagaccgatataatgcccacgccgacgataatgatggtcggcctcatagatgatgtgcggcgatctcggacaacttacatgaagggatctggcaacgcgatctatctcataggcgaaccgtgcgacaacttaaccggaagcgaatacagcaggatgcatggatatacagatggatttttaccggcgcctgatctggatgagctgacgcgcatacgtgattttctctcatcgaaggctgacatgatcctatcaagccacgatgtgtcatccggcgggctgttcgctgcactttcagagatgtccttcggttctggtataggattccacgtggacataagcaatgtatcggcagccaggcccactgtgaagctgttttcggaatgcggaaatggtcttgtcctggagatagccaaggataaggaagaacagttcgtcgatggttctaacggactggccatcaagcgcctaggtgaaaccggtggtgaccggataatcgtggacgaggccggcctgaacattatagatgttgcagtagatgatctcagaggggcctgggaacatggcctcgataggtatatctga

SEQ ID NO: 53167 - protein, 759 aa, Thermoplasma acidophilum
MIFRTIRIRDADDARLKAISKRLGLALSLDEMKAVRSYFERLGRDPIDAEIHAVAQSWSEHCSYKSSKYYLKKYLGSLKTDYTILAMEDDAGVVDFDGEYAYVLKMESHNHPSAVEPYGGAATGIGGIVRDVLCMGAQPVALIDSLFLGDVSSDRYEGLLSPRYIFGGVVGGIRDYGNRIGIPNVAGSLYFDKLYNSNPLVNAGCVGIVRRDRIVRSKSYKPGDVLVLMGGKTGRDGIHGVNFASTTLGKVTKSSRLAIQLGNPIVEQPMIKAVLEANDAGLIRAMKDLGGGGLSSAATEMVYAGGFGAEITLDDIKLKESNMSGWEIWISESQERMLMECYPEDVEKIRQIAEKWNLDFSVIGQVTADRRIRVYYKKRKIIDMDIEFLDDSPVYQRPYRIKEVEKSVTVPQEPEDLNSFVRDFMARLNTCARFNVVRQYDHTVRGSTIVTPFVGRPNKETHADATVIKPLENSMRGLVLTSGSRPNMVSVDPYAGTLLTLAEAYKNILSTGGRPHSVVDALNFGNPEREEIMGQFVESVRAIGDFCRKMGLPVVAGNVSFYNEYRKTDIMPTPTIMMVGLIDDVRRSRTTYMKGSGNAIYLIGEPCDNLTGSEYSRMHGYTDGFLPAPDLDELTRIRDFLSSKADMILSSHDVSSGGLFAALSEMSFGSGIGFHVDISNVSAARPTVKLFSECGNGLVLEIAKDKEEQFVDGSNGLAIKRLGETGGDRIIVDEAGLNIIDVAVDDLRGAWEHGLDRYI

SEQ ID NO: 53168 - DNA, 2298 bp, Thermobifida fusca
  CDS (1)..(2298): transl_table=11
atgtctgaagagcccaggttcgatactgtcgccaaggccgcggccaccccggacctcccgcagccctacaccgaactcggtatgaaggacgaggagtacgcgcgggtccgggagatcctcggccgccgtcccacctccgccgagttggccatctactcggtcatgtggagcgagcactgctcctacaagagttccaaagtccacctccgccagttcggggagaaagcgcccgacaccgacgtgctgctcgtcgggatcggcgagaacgcgggcgtggtggacgtcggcgacggctacgcggtcaccttcaagatcgagtcgcacaaccacccctcctacgtggagccgcaccagggggcggcgaccggtgtcggcggtatcgtgcgcgacatcctctccatgggtgcccgcccggtcgcggtgatggactcgctgcggttcgggcccgccgacgcccccgacacccagcgggtgctgcccggggttgtctccgggatctcctcctacggcaactgcctggggcttcccaacatcggcggtgaggtcggcttcgacgcgggatacgccagcaacccgctggtcaacgccctctgcgtgggcgtgctcaagcacgagaacatcaagctcgcccaggcgtccggaccgggcaaccacgtcgtgctgttcggcgcggccaccggccccgacggtatcggcggcgcgtccgtcctcgccagcgcgagcttcgacgaggaaagccaggccaagcggcccagtgtccaggtcggcgacccgttcctggagaagctcctcatcgaatgctgcatggagctgtacgccaaagacctcgtcgtcggcatccaggacctgggtgccgcgggcgtgtcctgcgcgaccaccgaactcgcggcgggaggcaccggcggcatgcggatcgaactggaccgggtcccgctccgcgaccctcggctcacccccgaggaaatcctgatgagcgagtcgcaggagcggatgatggcgatcgtcgagcccgacaagctcgacgagttcctcgccgtctgcgccaagtgggacattctcgccagcgtgatcggcgaagtgaccgacgtcaccccagaggaagaggcgcggggtggacgcctcgtcatgacctggcgcggggagacgatcgtggacctgccgccccggaccgctgccgaccaggggccggtgtaccaccggccgattgagcggcccgccgaccaggacgccctgctcgccgacgaccctgcggcactgccccgccccagcagcgacgaagagctccgcgaccaggtgctgcgagtgctggccgcccccggcatctgcgactcgagctggatcacagaccagtacgaccggtacgtgatggggaacacggtcctggccatgccgcacgacagcggcatgatccggatcgccgaggacaccgaccgcggggtggcgctggccaccgacggcaacggccgctacacccgtctcgacccctacgtcggtacccagctcgcctacgccgaggcgtaccgcaacgtcgcggccacgggggcccgccctctcgccgtcaccaactgcctcaacttcggctctcctgaggacccgggggtgatgtggcagttcgccgaagctacccgcggcctggcggacgcctgtcaggcgctcggcactccggtgaccggcggcaacgtcagcttctacaaccagaccgggagcaccgcgatcaaccccactccggtgatcggcgtgctcggggtcatcgacgacgttcacaagcgggtgaccagcgcattcagcgctgaaggcgagagtgtggtcttcctgctcggcgagacccggctggaactgggcggttcggcatgggcggatgtcatccacgggcacctgggcggccgcccgccccagatcgacctcgacgctgaggcggccctcggccgggtgctcatcgacggcgccgcagcggaactgctggtttcggcgcacgacctttccgacggcgggctcgcggtggcgctcgccgagtcctgcctgcgcggcggcgtcggctgcgaagtcgacctcggcgatgacgcgttcaccgcactgttcagcgaatccgcggcgcgcgccgtggtgagtgtgcggcccgagcacgagaccgccctggtggacctgtgcgccaagcacggggttccggtcaggaggctgggtactgtcggtgggtccgcgctgaccatggtccaccgcaccgggcggatcagcattgaggtggccgagctgcgcgacgcgtacgagtcgacgctgcccgcgctcttcgggaacaagtag

SEQ ID NO: 53169 - protein, 765 aa, Thermobifida fusca
MSEEPRFDTVAKAAATPDLPQPYTELGMKDEEYARVREILGRRPTSAELAIYSVMWSEHCSYKSSKVHLRQFGEKAPDTDVLLVGIGENAGVVDVGDGYAVTFKIESHNHPSYVEPHQGAATGVGGIVRDILSMGARPVAVMDSLRFGPADAPDTQRVLPGVVSGISSYGNCLGLPNIGGEVGFDAGYASNPLVNALCVGVLKHENIKLAQASGPGNHVVLFGAATGPDGIGGASVLASASFDEESQAKRPSVQVGDPFLEKLLIECCMELYAKDLVVGIQDLGAAGVSCATTELAAGGTGGMRIELDRVPLRDPRLTPEEILMSESQERMMAIVEPDKLDEFLAVCAKWDILASVIGEVTDVTPEEEARGGRLVMTWRGETIVDLPPRTAADQGPVYHRPIERPADQDALLADDPAALPRPSSDEELRDQVLRVLAAPGICDSSWITDQYDRYVMGNTVLAMPHDSGMIRIAEDTDRGVALATDGNGRYTRLDPYVGTQLAYAEAYRNVAATGARPLAVTNCLNFGSPEDPGVMWQFAEATRGLADACQALGTPVTGGNVSFYNQTGSTAINPTPVIGVLGVIDDVHKRVTSAFSAEGESVVFLLGETRLELGGSAWADVIHGHLGGRPPQIDLDAEAALGRVLIDGAAAELLVSAHDLSDGGLAVALAESCLRGGVGCEVDLGDDAFTALFSESAARAVVSVRPEHETALVDLCAKHGVPVRRLGTVGGSALTMVHRTGRISIEVAELRDAYESTLPALFGNK

SEQ ID NO: 53170 - DNA, 1812 bp, Thermotoga maritima
  CDS (1)..(1812): transl_table=11
atgaagttgagatatctgaacattctcaaggagaagcttggaagagaacccaccttcgtcgagcttcaggctttttcagtcatgtggagcgaacactgtggatactcccacacgaagaaatacataagaagattaccgaaaacgggttttgagggaaacgcgggtgtggtgaacctggatgattactattccgttgctttcaagatagagagccacaatcacccgagtgcgatagaaccttacaacggtgcagcaacgggtgtcggtggaatcatcagagacgtcctcgcgatgggagcccgcccaacggccatattcgattcactccacatgtcccgaatcatagacggtatcatagagggaatagccgattacggtaattccataggcgttccaacggtcggtggagaactcaggatctcctcactatacgcgcacaaccccctcgtgaacgtgctcgcagcgggtgttgtgagaaacgacatgctggtcgattcgaaagcatcgagaccgggacaggtcatagtgatcttcggaggagccacaggaagggacggaatccacggggcgtctttcgcttcggaggatctcacgggtgataaggcaaccaagctttcaattcaggttggtgacccgttcgctgaaaagatgctcatagaagcgttcctggagatggtggaagagggactcgtggaaggagctcaggatctgggagcgggcggtgtgctgtccgcaacttcggaactcgtagcgaaggggaatctcggagcgatcgttcatctggaccgtgttcccctgagagaaccggatatggagccctgggaaatcctcataagcgaaagccaagaaagaatggcggtcgtcacatcacctcagaaggcgagccgcattctggaaatagccaggaagcaccttcttttcggcgatgtcgttgccgaagtgatagaagaaccagtttacagggtgatgtacagaaacgatctcgtcatggaagttcccgtccagctcctcgcaaacgccccagaagaggacatagtcgaatacacacccggaaagatcccagagttcaaaagggtggaattcgaagaggtgaacgcgagggaagtcttcgagcagtacgatcacatggtcggaacggataccgtggttccacccggattcggcgcggccgtgatgagaataaagagagacggggggtactccctcgtcacacacagcagggcggatctggctcttcaggatacctactggggaaccctcatagccgtgctcgagagtgtgagaaagacgctcagcgttggtgcggaacccctcgctataacgaactgcgtgaactacggggatcccgatgttgatccggtgggactttcggccatgatgaccgctctcaagaacgcttgcgaattctccggtgttcccgttgcatcgggaaacgcttctctctacaacacgtaccagggaaaacccattccacccaccctggttgtgggaatgttggggaaggtgaacccgcagaaagtggcaaaaccgaagccttcgaaggtgttcgcggtgggatggaacgacttcgaactcgaaagggaaaaagaactctggagagccataagaaaactctcagaagaaggtgctttcatcctctcttcgtcacagcttctgacgagaactcacgtggagactttcagagagtacggcttgaagatcgaagtgaaactgccagaagtgaggccggcgcatcagatggtgctcgtcttctctgagagaactcccgtagtcgatgttcctgtgaaggagatcggaacgctctcgaggtga

SEQ ID NO: 53171 - protein, 603 aa, Thermotoga maritima
MKLRYLNILKEKLGREPTFVELQAFSVMWSEHCGYSHTKKYIRRLPKTGFEGNAGVVNLDDYYSVAFKIESHNHPSAIEPYNGAATGVGGIIRDVLAMGARPTAIFDSLHMSRIIDGIIEGIADYGNSIGVPTVGGELRISSLYAHNPLVNVLAAGVVRNDMLVDSKASRPGQVIVIFGGATGRDGIHGASFASEDLTGDKATKLSIQVGDPFAEKMLIEAFLEMVEEGLVEGAQDLGAGGVLSATSELVAKGNLGAIVHLDRVPLREPDMEPWEILISESQERMAVVTSPQKASRILEIARKHLLFGDVVAEVIEEPVYRVMYRNDLVMEVPVQLLANAPEEDIVEYTPGKIPEFKRVEFEEVNAREVFEQYDHMVGTDTVVPPGFGAAVMRIKRDGGYSLVTHSRADLALQDTYWGTLIAVLESVRKTLSVGAEPLAITNCVNYGDPDVDPVGLSAMMTALKNACEFSGVPVASGNASLYNTYQGKPIPPTLVVGMLGKVNPQKVAKPKPSKVFAVGWNDFELEREKELWRAIRKLSEEGAFILSSSQLLTRTHVETFREYGLKIEVKLPEVRPAHQMVLVFSERTPVVDVPVKEIGTLSR

SEQ ID NO: 53172 - DNA, 2178 bp, Thermus thermophilus
  CDS (1)..(2178): transl_table=11
atggaagccctcgccaaggagatcgggatcccggaaggggagtaccgggagatcgtccagaggctcgggcgggagccgaaccgggtggagctcctcctcttcaaggtgatgtggagcgagcactgcgcctacaagaactcccgccccctcctcaaggccctccccaaggagggggaggccgtcctccagggccccggggagaacgccggcgtggtgcgggtgggcgagggttgggccgtggccttcaagatagagagccacaaccacccctcggcggtggagcccttccagggggcggccacgggggtcggggggatcctccgggacatcatgagcatgggagctcgccccatcgccctcctggactccctccgcttcgggccgcccgaggaggcgagaagccgctacctcctcaagggggtggtctcgggcatcgccttttacggcaacgccatcggggtgcccacggtgggcggggacctctacttccacgagggctaccgggaaaaccccctggtgaacgccatgtgcctcggcctcctgagggaggagcacctgaagcgaagccgggcttccttgggccgccccatctactacgccggggccaagacgggccgggacgggatcggcggggcggccttcgcgagccgggagctcaaggaggagaaggccgaggaccggcccgcggtccaggtgggggaccccttcctgggcaagctcctcatggaggccaccctcgaggccatagagctggacctggtggaaggcgtccaggacatgggggcggcggggctcaccagtagcctctcggagctcgcccacaagtcgggcctcggggtggagctccacctggacctcgtccccacccgggaggaggggatgaccccggaggagctcctcctctcggaaagccaggagcggatggtcctcgttcccaaggaggggaaggaaaaggccctggaggaggtcttcggaaggtggggcctagactgcgtccccgtggccaggaccatcccggaaagggtcttccgggtcctctttaggggcgaggtggtggcggaggtgcccacggaggccttggccgaagcccccacctacgtgcgggtggggcgggaggaccccgaggtgcggaggcttagggaaacccccatcccccccttagaggccgacccccaggaggtcctaaggaggctcctcgcctcccccaacctggcgagccgggaggcggtctacgagcggtacgaccaccaggtggggacccgcaccgccctcctccccggcaaaggggacgccgcggtcctctggatcaagggcacccgcctcggcgtcgccgccaaggtggaccaaaacccccgctatagccgcctccacccccgccttggggccatgcacgccctggcggaggcctgccggaacgtcagcgtggtgggggcgaagcccctcgcctacaccgacggcctcaacctgggaagcccggagaccccggagggctaccacgagctcgccgagaccatcgccgggctcaaggaggcgagcgaggccttgggcgtccccgtggtctcggggaacgtctccctctacaacgaaagcgggggcaagcgcatcccccccacggccatggtgggggtggtgggggtcctggaggtggacaagcgggcggagatgggctttaggcgcccgggggaggtcctcctcctcatcggggaggaacggggggagcttggggcgagcgaggtcctctacctcctcacgggaaaggagttcggccaccccccaaggcttgacctcgggcgggaaaaggcggtgcaggaggcgatccgggacctcatccaaaggggcctcacccgaacggcccacgacgtggcggaaggggggcttcttctggccctcgccgagatgaccttcccctacggggtgggggccacggtggaggtgcgggaggagggcctcgaggccctcttcggcgaggccccaagccgcgtcctcttcaccgtggagaagacccgcctccaggaggccaccctcctcctggaggagcggggcctcccctaccgggtcctgggggagacgggggggaagagcctcacggtcctcaccccggggggtgtcctagagtggagcctggaggaactgctttccgcctggaaagcgcccctcagggaggtgctggatggataa

SEQ ID NO: 53173 - protein, 725 aa, Thermus thermophilus
MEALAKEIGIPEGEYREIVQRLGREPNRVELLLFKVMWSEHCAYKNSRPLLKALPKEGEAVLQGPGENAGVVRVGEGWAVAFKIESHNHPSAVEPFQGAATGVGGILRDIMSMGARPIALLDSLRFGPPEEARSRYLLKGVVSGIAFYGNAIGVPTVGGDLYFHEGYRENPLVNAMCLGLLREEHLKRSRASLGRPIYYAGAKTGRDGIGGAAFASRELKEEKAEDRPAVQVGDPFLGKLLMEATLEAIELDLVEGVQDMGAAGLTSSLSELAHKSGLGVELHLDLVPTREEGMTPEELLLSESQERMVLVPKEGKEKALEEVFGRWGLDCVPVARTIPERVFRVLFRGEVVAEVPTEALAEAPTYVRVGREDPEVRRLRETPIPPLEADPQEVLRRLLASPNLASREAVYERYDHQVGTRTALLPGKGDAAVLWIKGTRLGVAAKVDQNPRYSRLHPRLGAMHALAEACRNVSVVGAKPLAYTDGLNLGSPETPEGYHELAETIAGLKEASEALGVPVVSGNVSLYNESGGKRIPPTAMVGVVGVLEVDKRAEMGFRRPGEVLLLIGEERGELGASEVLYLLTGKEFGHPPRLDLGREKAVQEAIRDLIQRGLTRTAHDVAEGGLLLALAEMTFPYGVGATVEVREEGLEALFGEAPSRVLFTVEKTRLQEATLLLEERGLPYRVLGETGGKSLTVLTPGGVLEWSLEELLSAWKAPLREVLDG

SEQ ID NO: 53174 - DNA, 2202 bp, Thermoanaerobacter tengcongensis
  CDS (1)..(2202): transl_table=11
atgaataaaatatggagagagttaggacttactgatgaggagtatgagaaaattatttcgatattaggaagagaacctaatataactgaattaggtatgtatagtgttatgtggtctgaacattgttcctataaaaactctaaacctcttttaaaatatctacctacaaaaggcgaaagagtaatacaagggccgggagaaaatgcaggagtattggatattggagataatctggcagttgtgatgaagatagaaagccataaccatccttctgcgattgaaccctatcaaggagcagctacaggtgttggaggaataataagagatatatttacaatgggggcaaggccgattgctcttttggattctttgagatttggaattcctgatgataaaaggactaaatatctcattgaaaacgtggtagccggtatagcggattatggaaattgcataggaattcctacagtgggtggggatacctattttgaagaaagttacaaagggaatcctttagtaaatgcgatgtgtgtaggaatagtggaaaaagacaaaataaaaaaagggatagcaaaaggtataggtaatcctgttatggtagtaggtgctaccacggggagagacggtatcggaggtgcaagctttgcttctcaggagttaagcgaggaatcagaagaaaaaaggccttctgttcaagttggtgacccatttatggaaaaactgcttttagaggcttgtttagaactttttgaaacagatgccgtagttgctatacaagatatgggagcggcaggtcttacctcttcttcttgcgagatggcttcccgcggtggagttggaatggagattgaccttgataaagtgcctttgagagaagagggaatgacaccttatgaaataatgctttctgaatctcaagagaggatgttggttgtagtaaagaaaggcaaggaagaagatgtgcaaaagatatttaaaaaatggggactgaatgccgccacaatagggaaaatcactgatgatggaatgataagagtgattaaagatggaaaaatagttgcggaagttccagccaagtctttaacggaagatgctccacaatatgtgagagaagaagaagtgcctaaatggcaagaagaggtcaagaaattggatataaatgaagtaaaacctccagaggatatgaataaagttctaaaagatgtaatttcttctttaaatattgcaagtaaagaatggatatacagtcaatatgattacatggtgaggacagacacagtaataactccaggaatggatgcggctgttgtgaggataaaaggtacaagaaaagctattgcattaacaacggattgcaatggtaggtattgttatttagatccctatataggttctcaaattgctgtagcggaggcagctcgaaatctttgtatggttggtgctaagcctataggggttacggattgtttgaattttggcaatccagaaaagaaagaaatatattggcagttaaaaaattctatatttggaatagctaaagcctgcgaaacttttcaaatccctgtggtaagcggaaatgtcagtctttacaatgaaaatgagggagaggccatttatcctactcctgtaataggaatggcaggccttatagaggatgtatcaaaaatctgtacaatggactttaaaaaagaaagagatgtaattataattttaggtgagaataaaggagagattggaggaagtgagtatcttaaagtttgctttggaatggtaaaagggcaaccacctcaaatagacttggaaaaggaaaaaagattgcaagaattggtgctaaaacttattgatgaaggcttaattaactcttctcatgacatatcagagggcggttttgcggctgccttggttgaaagtgcaattgcaggcaaaaaaggtgcaaaaatttcgctacaaacttctctgagagcagatatagagttgttctctgaatctcaatcgagagcattaattactgtaagtcctgaaaaagtagatgaagtgttaaaaatagcttatgaacaccaagttccagcgcaaaaagtaggagttgtagagggtaaagatattgtaattgatgtaaatggcaaaagaataatagaccttcctttagaagtcttagaggaaagctggagagggagaataaaatgggaaatggagagaaattaa

SEQ ID NO: 53175 - protein, 733 aa, Thermoanaerobacter tengcongensis
MNKIWRELGLTDEEYEKIISILGREPNITELGMYSVMWSEHCSYKNSKPLLKYLPTKGERVIQGPGENAGVLDIGDNLAVVMKIESHNHPSAIEPYQGAATGVGGIIRDIFTMGARPIALLDSLRFGIPDDKRTKYLIENVVAGIADYGNCIGIPTVGGDTYFEESYKGNPLVNAMCVGIVEKDKIKKGIAKGIGNPVMVVGATTGRDGIGGASFASQELSEESEEKRPSVQVGDPFMEKLLLEACLELFETDAVVAIQDMGAAGLTSSSCEMASRGGVGMEIDLDKVPLREEGMTPYEIMLSESQERMLVVVKKGKEEDVQKIFKKWGLNAATIGKITDDGMIRVIKDGKIVAEVPAKSLTEDAPQYVREEEVPKWQEEVKKLDINEVKPPEDMNKVLKDVISSLNIASKEWIYSQYDYMVRTDTVITPGMDAAVVRIKGTRKAIALTTDCNGRYCYLDPYIGSQIAVAEAARNLCMVGAKPIGVTDCLNFGNPEKKEIYWQLKNSIFGIAKACETFQIPVVSGNVSLYNENEGEAIYPTPVIGMAGLIEDVSKICTMDFKKERDVIIILGENKGEIGGSEYLKVCFGMVKGQPPQIDLEKEKRLQELVLKLIDEGLINSSHDISEGGFAAALVESAIAGKKGAKISLQTSLRADIELFSESQSRALITVSPEKVDEVLKIAYEHQVPAQKVGVVEGKDIVIDVNGKRIIDLPLEVLEESWRGRIKWEMERN

SEQ ID NO: 53176 - DNA, 2280 bp, Thermoplasma volcanium
  CDS (1)..(2280): transl_table=11
atgatatatcgacacatcaagattagggacatgaatgacgatgacttaatcaacatgagcaagaggcacggcctctcgctatcactcgatgagatgaaagctgtgagagattattttattaaggaaggccgtgatccaatagatgcagaaatacacgcgatagcgcagtcatggagcgaacattgctcatacaagtcatcaaaattttatctgaaaaagtacctcacaaacttgaaaacagattacacaatattggctatggaagatgatgcaggtgttgttgagttcgataaggactacgcctacgttttgaagatggaaagccataaccacccgagtgctgttgaaccttatgggggagctgcaacgggtataggcgggatagtaagggacgttgtatgtatgggagcacaacctatcgcgctggtagattctctatttatgggcgatgtggcttcacaaaaatacgacgcactgctttcgccaagatatatatttcagggagttgttggaggcataagagattacgggaacaggattggtgtacctaatgtggccggatcggtctactttgaccagtcatataactcaaacccgttggtaaatgccggttgtattggcatagtaaggaaggacaggatagtaagatcgaagtcctataaagcaggggacaaactccttcttgtaggaggaaagacaggtagggatggaatacacggagttaacttcgcctcagctaccttaacgaggatttcaaagagcagcagaaacgcaatacagcttggcaaccctatcgtagagcaccctatgatgagggctgtgcttgaagctaacgaactgggtataatcaaagctatgaaggatctgggaggcggcggcctttctagtgctgccactgagatggtattcgctggtggatttggagcagagatatccctagacgacataaaacttaaagacaccgacatgtccggatgggagatatggataagcgagagccaggagaggatgctcgtagaggtgctgcctgaagacgttgaaaagatgaaggaaatagcagaaaaatggtcacttgatttttcgatcctcgggacagtagttgaaggaaagaaaataactgttagatataaaaataagaagataatagacatggacatagaatttctcgacaaagcaccagtataccagagaccgttcgaaagaaaaaatatagagaaaaaagtatctataccaagtgaacctgaagatctcaacgatttcgccttaaactttgtttccaggctgaacaacagtgcaaggttcaacgttgttaggcagtatgatcatacagtacgtggttccaccatcgttggcccattttcaggaaggcctaacttagagactcattctgatgccaccgtaattaagcctctagaggattcaatgcgaggacttctaataacctctggttctaggccaaactttgtatctatagatccatataatggtacgctagaaactctgtctgaagctgttagaaatatagtgtcgacaggtggaaagccaaactcagtcgttgatgcactaaactttgggaatccggagaggcaagatataatgggccaatttgttgaatccgtcagggcgataggagatttttgccgaaaattctcgttgcctgtagtggctggcaacgttagtttttacaacgaattcagaaataaagatataatgccaacaccaactataatgatggttggtatcatcgacgacgtgaccaaggcaagaacaacctactttaagaaaaataagagccagatataccttgttggaacaccatgcgacaacctttctggaagtgaatacgccagaatgaacaacatatttgatggcttcctgccagctcctaacctctccgagcttcagcttgaaatagaaaagatcggaaaattctcgccctacatactttcggcacacgacgtatcagatggaggcttattcatggcccttgccgagatgtcatttggaagtggaataggcttcaacatcgatcttggaaacgtatcggcttcgcgatcttcagtgaagctcttctcggagtgcggaaaccaaatagtgcttgagattgatccgatacatgaagaagaattcactgcggaatttaaagatttaaagatagtgcgaataggagaaactggaggagaccgaataattatcgacgaatacggaatgaatttggtggatctgcctgttcaagatctcagggaaagatgggaacatgggctggacgcatacatatga

SEQ ID NO: 53177 - protein, 759 aa, Thermoplasma volcanium
MIYRHIKIRDMNDDDLINMSKRHGLSLSLDEMKAVRDYFIKEGRDPIDAEIHAIAQSWSEHCSYKSSKFYLKKYLTNLKTDYTILAMEDDAGVVEFDKDYAYVLKMESHNHPSAVEPYGGAATGIGGIVRDVVCMGAQPIALVDSLFMGDVASQKYDALLSPRYIFQGVVGGIRDYGNRIGVPNVAGSVYFDQSYNSNPLVNAGCIGIVRKDRIVRSKSYKAGDKLLLVGGKTGRDGIHGVNFASATLTRISKSSRNAIQLGNPIVEHPMMRAVLEANELGIIKAMKDLGGGGLSSAATEMVFAGGFGAEISLDDIKLKDTDMSGWEIWISESQERMLVEVLPEDVEKMKEIAEKWSLDFSILGTVVEGKKITVRYKNKKIIDMDIEFLDKAPVYQRPFERKNIEKKVSIPSEPEDLNDFALNFVSRLNNSARFNVVRQYDHTVRGSTIVGPFSGRPNLETHSDATVIKPLEDSMRGLLITSGSRPNFVSIDPYNGTLETLSEAVRNIVSTGGKPNSVVDALNFGNPERQDIMGQFVESVRAIGDFCRKFSLPVVAGNVSFYNEFRNKDIMPTPTIMMVGIIDDVTKARTTYFKKNKSQIYLVGTPCDNLSGSEYARMNNIFDGFLPAPNLSELQLEIEKIGKFSPYILSAHDVSDGGLFMALAEMSFGSGIGFNIDLGNVSASRSSVKLFSECGNQIVLEIDPIHEEEFTAEFKDLKIVRIGETGGDRIIIDEYGMNLVDLPVQDLRERWEHGLDAYI

SEQ ID NO: 53178 - DNA, 2202 bp, Wolinella succinogenes
  CDS (1)..(2202): transl_table=11
atggagaatctcgcgtcactgcttaaatcccataaactctctcaggcggactatgaacatatcgtccagattctaggtcgagagcccaatctcgtggagctcggagtcttttcggcgatgtggagtgagcactgcagctataaatcgagcaagaaatatctgcgaggctttccaacggaggcagcttgggtgatccaaggaccgggagagaatgcgggcgtgattgatattggcgaagggtatgcggccgtctttaagatggaatcgcacaatcaccccagctttattgagccctaccaaggcgcagccacgggcgtgggcggaatcatgcgagatgtctttacgatgggagctaggcccgtagcgagcctcaatgcgattcgatttggggatatcaggcgccaagatgagatcggcaagaagcatcgctatcttcttaaaggggtggtcgcgggaatcggtggatatggaaattgcatgggggttcccacagtggggggcgagatgagctttgaggattgctacaatggcaacattcttgtgaatgccttcaccttgggaatcgccaagagcgatgagatattctatggtcgcgccgaaggaatcggaaaccctgtcatctatgtaggaagtaaaacagggcgagatggcctagggggagcggtcatgagcagtgatagctttgatgatgccgccaaccagcttcgacctaccgtgcaagtgggagacccttttgcagagaagcttcttcttgaggcgtgcctagagctcttcaaaacgaattatattgtgggtatccaagacatgggggctgcgggactcacaagctcctcttttgagatggcgggacgctcgggaagtgggatgatcatgcacctagatcgcgtaccgatgcgagagcagggaatgactccctatgagttgatgctgagcgaatcgcaagagcgaatgcttatttgcgccaaaaagggttacgaagagaaggtgcttgagattttccgcaaatgggagcttgatgctgaagtgattggcgaagtgaccagtagtggcaagatggagctcttttggcatggagagaagtgcgcagagattcctgttctgcccgtgagtgaagaggcacccatgctcgatcgtcccacaaaagagcccgcctatttggcagagattcgatccaaaggggctcaagcccccaaagagattgacctcaaagaggcttttatgaagctttggagcgcacctgagacgatggataagtcatgggtctatagccaatacgattcgatggtgcagaccaacactatcgtgggccccggcgggggtgatggtagcttggtgagggttaaagaaaatggggcagctcttgcgatgagtgcggattgcaatccgcgatactgctatctaaacccaagagagggggcaaaacttgccgtggcggagtcgggacgaaatgtcgctgtgcgtggagctagacccttagcgatcacggattgtctcaactttgggagccctgagaatcctgaggtgatgtggcagtttgctgaggcgtgcgagggaatcaaggaggcgtgtaaagtacttttgacgcctgtggtgagcgggaatgtctcgctctataaccagaccaatggtgtggatatcttccccaccccctccatcgctaccgtagggcttcttcctaaggctcaaaaggcgcttttgggcgcgttcaaaaaagagggaaatctccttcttcttgtgggcgaaaccaagagcgagtttggcggaagtctctaccaaaaagaggtcgaaggattccttggcggggatgcgcctgtgattgatcttcatcgtgagctagcgttgtggagattccttgaggaggccaatgaggcaggattccttgagagtgccaaagatgtgaatgtcgggggattggctatagcccttggcaaaatgagcgtgctgggtcaaaaagggtgcaaagtcaaaaccgcgctcaaaggggtcgatctctttagtgagagcccctcgcgcgcagtgcttgaggtctctagcgaacatctagctgcccttgaatcgctcgcccaaaaagggggtgtagcgcttggtgtgattggaagcgtgggaggagagaatctagagattgattccctttcgcttcctttgcaaacacttcaagagatctatcttcgcggttttgctaagattgtcgaaaacctctaa

SEQ ID NO: 53179 - protein, 733 aa, Wolinella succinogenes
MENLASLLKSHKLSQADYEHIVQILGREPNLVELGVFSAMWSEHCSYKSSKKYLRGFPTEAAWVIQGPGENAGVIDIGEGYAAVFKMESHNHPSFIEPYQGAATGVGGIMRDVFTMGARPVASLNAIRFGDIRRQDEIGKKHRYLLKGVVAGIGGYGNCMGVPTVGGEMSFEDCYNGNILVNAFTLGIAKSDEIFYGRAEGIGNPVIYVGSKTGRDGLGGAVMSSDSFDDAANQLRPTVQVGDPFAEKLLLEACLELFKTNYIVGIQDMGAAGLTSSSFEMAGRSGSGMIMHLDRVPMREQGMTPYELMLSESQERMLICAKKGYEEKVLEIFRKWELDAEVIGEVTSSGKMELFWHGEKCAEIPVLPVSEEAPMLDRPTKEPAYLAEIRSKGAQAPKEIDLKEAFMKLWSAPETMDKSWVYSQYDSMVQTNTIVGPGGGDGSLVRVKENGAALAMSADCNPRYCYLNPREGAKLAVAESGRNVAVRGARPLAITDCLNFGSPENPEVMWQFAEACEGIKEACKVLLTPVVSGNVSLYNQTNGVDIFPTPSIATVGLLPKAQKALLGAFKKEGNLLLLVGETKSEFGGSLYQKEVEGFLGGDAPVIDLHRELALWRFLEEANEAGFLESAKDVNVGGLAIALGKMSVLGQKGCKVKTALKGVDLFSESPSRAVLEVSSEHLAALESLAQKGGVALGVIGSVGGENLEIDSLSLPLQTLQEIYLRGFAKIVENL

SEQ ID NO: 53180 - DNA, 2205 bp, Zymomonas mobilis
  CDS (1)..(2205): transl_table=11
atgaccgaagaaaacagcagcataaccgccgagactgtggccagtcatggcttatcccccgaagaatatgacaccattaagcaggcactgggcagaacgcctaatttggtggaattaggcattttttctgccatgtggtcagaacattgctcttataaaagttcaaggaaacatttaagagagctgccgaccacaggttcgcaagtcatttgcggccccggtgagaatgccggtgttgtcgatattggtgatgggcaagccgccattttcaaaatggaaagccataatcatcccagttatatcgaaccctatcagggtgccgccaccggcgttggtggtattttacgagacgtctttacgatgggcgcccgtccggttgcgaatttgaacgcgcttcgctttggcagcccgaaacacccgaaaacaccgcatttggtttcaggcgttgtcgctggtattggcggctatggcaactgtgttggtgttccaacggttggcggtgaagtcaattttcatccggcttatgatggcaataatctggtgaacgccatgacggttggcgtcgccgaaacgaacaagattttctattctgctgcatcgggcgcaggaaacccgattgtttatgttggttctaaaacgggtcgtgacggtattcacggcgcaacgatggcttctgccgattttggtaaagatgccgaagaaaaacgtccaacggtgcaggtgggcgatcccttctctgaaaaactccttattgaagcctgcttggaattgatggcgtctgatgccatcgtcgctattcaggatatgggcgccgctggtctcacttcctctgccgttgaaatggcttccaagggtgaagtcggcattgaattagacatggatatggtgccttgccgcgaagaaggcatgactccttatgaaatgatgctttccgaatcacaggaacgcatgttgatggtcttaaagcccggacgggaagccgaggcagaagccatcttcaaaaaatgggaacttgattttgctatcatcggtcgcgtcaccgacagcaaacatatggttctgacatggaaaggggatattgtttgcgatattcctttggcaccgctcgccgataatgctccttgctacgatcgcccttgggttgcaacgcccaaagccaaggccttaggcgctgttcctgcatccggttctatcactgacaatctggtaaccttggtcggttctccagatcttgccagccgccgctggatctgggaacaatatgataatatggtcggtgccgacaccgttcaatgtccgggtggtgatgccgcggttgtccgagtccacggcaccgagaaagccttggcgatgagtgttgatgtcacgccgcgctattgccgggctgatcccgaagaaggcggcaaacaggccgttgccgaatgctatcgcaatattacagcggtgggtgctttgcctttggcttcaacggactgcttgaatttcggtaatcctgaacgccctgaaattatgggtcaaatcgtcggtgcgattaaaggaatcggtgaagcctgccgcgccttggatatgcccatcgtttcaggcaatgtttcgctctataatgaaacacgtcaggatgatggtagcagccttgccattttgccaacgcccacaatcggtggtgtcggccttctgcaggattggcgggatagcacaaccattgcctttaaaaataccggcgaagaaatctatcttgtcggtaatagcggtcaaggccatttaggtcagtcgatctggctacgtgaaatagccggtcgtgaggaaggtaccgccccatccgttgatctggcacaggaaaaagccacgggcgattttatccgtgctatgattcaggacggaatgctctgcgctgttcatgacatcagtgatggcggcttggcagttgctttggctgaaatggctttggcgggtaatataggcgctactgtcgaagcgcatgataaagccattgcagaacatgcctattatttcggtgaagatcagggacgctatttggtctcttcgaccaatgccgtagctttggtttctgccgctgaaaaagcaggtattccagtattccgtttgggtgtcacgggtggcgatgctgtggtcttaaacagccagtcggtttcacttgaaaaattacggaaatctcatgaggcttttctgcccgaattaatgcaataa

SEQ ID NO: 53181 - protein, 734 aa, Zymomonas mobilis
MTEENSSITAETVASHGLSPEEYDTIKQALGRTPNLVELGIFSAMWSEHCSYKSSRKHLRELPTTGSQVICGPGENAGVVDIGDGQAAIFKMESHNHPSYIEPYQGAATGVGGILRDVFTMGARPVANLNALRFGSPKHPKTPHLVSGVVAGIGGYGNCVGVPTVGGEVNFHPAYDGNNLVNAMTVGVAETNKIFYSAASGAGNPIVYVGSKTGRDGIHGATMASADFGKDAEEKRPTVQVGDPFSEKLLIEACLELMASDAIVAIQDMGAAGLTSSAVEMASKGEVGIELDMDMVPCREEGMTPYEMMLSESQERMLMVLKPGREAEAEAIFKKWELDFAIIGRVTDSKHMVLTWKGDIVCDIPLAPLADNAPCYDRPWVATPKAKALGAVPASGSITDNLVTLVGSPDLASRRWIWEQYDNMVGADTVQCPGGDAAVVRVHGTEKALAMSVDVTPRYCRADPEEGGKQAVAECYRNITAVGALPLASTDCLNFGNPERPEIMGQIVGAIKGIGEACRALDMPIVSGNVSLYNETRQDDGSSLAILPTPTIGGVGLLQDWRDSTTIAFKNTGEEIYLVGNSGQGHLGQSIWLREIAGREEGTAPSVDLAQEKATGDFIRAMIQDGMLCAVHDISDGGLAVALAEMALAGNIGATVEAHDKAIAEHAYYFGEDQGRYLVSSTNAVALVSAAEKAGIPVFRLGVTGGDAVVLNSQSVSLEKLRKSHEAFLPELMQ

SEQ ID NO: 53182 - DNA, 21 bp, Artificial sequence
  primer
atgcctgacccttttaccctc

SEQ ID NO: 53183 - DNA, 20 bp, Artificial sequence
  primer
ttaggattttagccgacggg

SEQ ID NO: 53184 - protein, 1204 aa, Artificial sequence
  consensus sequence
  Variant (2)..(14): Xaa in position 2 to 14 is any amino acid
  Variant (15)..(28): Xaa in position 15 to 28 is any or no amino acid
  Variant (30)..(30): Xaa in position 30 is any amino acid
  Variant (32)..(34): Xaa in position 32 to 34 is any amino acid
  Variant (36)..(43): Xaa in position 36 to 43 is any amino acid
  Variant (48)..(49): Xaa in position 48 to 49 is any amino acid
  Variant (51)..(67): Xaa in position 51 to 67 is any amino acid
  Variant (68)..(125): Xaa in position 68 to 125 is any or no amino acid
  Variant (127)..(139): Xaa in position 127 to 139 is any amino acid
  Variant (140)..(165): Xaa in position 140 to 165 is any or no amino acid
  Variant (167)..(167): Xaa in position 167 is any amino acid
  Variant (169)..(169): Xaa in position 169 is any amino acid
  Variant (174)..(177): Xaa in position 174 to 177 is any amino acid
  Variant (179)..(180): Xaa in position 179 to 180 is any amino acid
  Variant (186)..(186): Xaa in position 186 is any amino acid
  Variant (189)..(190): Xaa in position 189 to 190 is any amino acid
  Variant (193)..(195): Xaa in position 193 to 195 is any amino acid
  Variant (196)..(196): Xaa in position 196 is any or no amino acid
  Variant (198)..(208): Xaa in position 198 to 208 is any amino acid
  Variant (210)..(218): Xaa in position 210 to 218 is any amino acid
  Variant (219)..(264): Xaa in position 219 to 264 is any or no amino acid
  Variant (266)..(270): Xaa in position 266 to 270 is any amino acid
  Variant (272)..(273): Xaa in position 272 to 273 is any amino acid
  Variant (275)..(275): Xaa in position 275 is any amino acid
  Variant (277)..(279): Xaa in position 277 to 279 is any amino acid
  Variant (281)..(299): Xaa in position 281 to 299 is any amino acid
  Variant (300)..(311): Xaa in position 300 to 311 is any or no amino acid
  Variant (313)..(325): Xaa in position 313 to 325 is any amino acid
  Variant (326)..(331): Xaa in position 326 to 331 is any or no amino acid
  Variant (333)..(338): Xaa in position 333 to 338 is any amino acid
  Variant (340)..(344): Xaa in position 340 to 344 is any amino acid
  Variant (345)..(345): Xaa in position 345 is any or no amino acid
  Variant (347)..(348): Xaa in position 347 to 348 is any amino acid
  Variant (350)..(351): Xaa in position 350 to 351 is any amino acid
  Variant (352)..(353): Xaa in position 352 to 353 is any or no amino acid
  Variant (356)..(366): Xaa in position 356 to 366 is any amino acid
  Variant (367)..(373): Xaa in position 367 to 373 is any or no amino acid
  Variant (376)..(378): Xaa in position 376 to 378 is any amino acid
  Variant (380)..(381): Xaa in position 380 to 381 is any amino acid
  Variant (383)..(400): Xaa in position 383 to 400 is any amino acid
  Variant (401)..(416): Xaa in position 401 to 416 is any or no amino acid
  Variant (418)..(418): Xaa in position 418 is any amino acid
  Variant (421)..(421): Xaa in position 421 is any amino acid
  Variant (423)..(428): Xaa in position 423 to 428 is any amino acid
  Variant (430)..(433): Xaa in position 430 to 433 is any amino acid
  Variant (434)..(441): Xaa in position 434 to 441 is any or no amino acid
  Variant (443)..(446): Xaa in position 443 to 446 is any amino acid
  Variant (448)..(459): Xaa in position 448 to 459 is any amino acid
  Variant (460)..(460): Xaa in position 460 is any or no amino acid
  Variant (462)..(465): Xaa in position 462 to 465 is any amino acid
  Variant (471)..(497): Xaa in position 471 to 497 is any amino acid
  Variant (499)..(519): Xaa in position 499 to 519 is any amino acid
  Variant (520)..(553): Xaa in position 520 to 553 is any or no amino acid
  Variant (555)..(594): Xaa in position 555 to 594 is any amino acid
  Variant (595)..(629): Xaa in position 595 to 629 is any or no amino acid
  Variant (631)..(632): Xaa in position 631 to 632 is any amino acid
  Variant (634)..(645): Xaa in position 634 to 645 is any amino acid
  Variant (646)..(655): Xaa in position 646 to 655 is any or no amino acid
  Variant (657)..(665): Xaa in position 657 to 665 is any amino acid
  Variant (666)..(692): Xaa in position 666 to 692 is any or no amino acid
  Variant (694)..(713): Xaa in position 694 to 713 is any amino acid
  Variant (715)..(716): Xaa in position 715 to 716 is any amino acid
  Variant (718)..(720): Xaa in position 718 to 720 is any amino acid
  Variant (722)..(736): Xaa in position 722 to 736 is any amino acid
  Variant (737)..(738): Xaa in position 737 to 738 is any or no amino acid
  Variant (740)..(770): Xaa in position 740 to 770 is any amino acid
  Variant (771)..(780): Xaa in position 771 to 780 is any or no amino acid
  Variant (782)..(783): Xaa in position 782 to 783 is any amino acid
  Variant (785)..(817): Xaa in position 785 to 817 is any amino acid
  Variant (818)..(927): Xaa in position 818 to 927 is any or no amino acid
  Variant (929)..(935): Xaa in position 929 to 935 is any amino acid
  Variant (936)..(1119): Xaa in position 936 to 1119 is any or no amino acid
  Variant (1121)..(1124): Xaa in position 1121 to 1124 is any amino acid
  Variant (1125)..(1126): Xaa in position 1125 to 1126 is any or no amino acid
  Variant (1128)..(1162): Xaa in position 1128 to 1162 is any amino acid
  Variant (1163)..(1173): Xaa in position 1163 to 1173 is any or no amino acid
  Variant (1175)..(1183): Xaa in position 1175 to 1183 is any amino acid
  Variant (1184)..(1203): Xaa in position 1184 to 1203 is any or no amino acid
LXXXXXXXXXXXXXXXXXXXXXXXXXXXRXPXXXEXXXXXXXXSEHCXXKXXXXXXXXXXXXXXXXXXXXXXXXXXXXXXXXXXXXXXXXXXXXXXXXXXXXXXXXXXXXXXXXXXXXXXXXXXXAXXXXXXXXXXXXXXXXXXXXXXXXXXXXXXXXXXXXXXXKXEXHNHPXXXXPXXGAATGXGGXXRDXXXXGXXXXXXXXXXXFXXXXXXXXXXXXXXXXXXXXXXXXXXXXXXXXXXXXXXXXXXXXXXXXXXXXXXXGXXXXXNXXGXPXXXGXXXXXXXXXXXXXXXXXXXXXXXXXXXXXXXGXXXXXXXXXXXXXXXXXXXGXXXXXXGXXXXXXGXXGXXXXASXXXXXXXXXXXXXXXXXXVQXXXPXXEXXXXXXXXXXXXXXXXXXXXXXXXXXXXXXXXXXDXGAXGXXXXXXEXXXXXXXXXXXXGXXXXLXXXXXXXXXXXXXEXXXXESQERXXXXXXXXXXXXXXXXXXXXXXXXXXXGXXXXXXXXXXXXXXXXXXXXXXXXXXXXXXXXXXXXXXXXXXXXXXXXXXXXXXXPXXXXXXXXXXXXXXXXXXXXXXXXXXXXXXXXXXXXXXXXXXXXXXXXXXXXXXXXXXXXXXXXXXXXXXXXXXXDXXVXXXXXXXXXXXXXXXXXXXXXXVXXXXXXXXXXXXXXXXXXXXXXXXXXXXXXXXXXXXAXXXXXXXXXXXXXXXXXXXXAXXEXXXNXXXXXXXXXXXXXXXXXNXXXXXXXXXXXXXXXXXXXXXXXXXXXXXXXXXXXXXXXXXGXXSXXXXXXXXXXXXXXXXXXXXXXXXXXXXXXXXXXXXXXXXXXXXXXXXXXXXXXXXXXXXXXXXXXXXXXXXXXXXXXXXXXXXXXXXXXXXXXXXXXXXXXXXXXXXXXXXXXXXXXXXXXXXXXXXXXXXXXXXXXXXXXXGXXXXXXXXXXXXXXXXXXXXXXXXXXXXXXXXXXXXXXXXXXXXXXXXXXXXXXXXXXXXXXXXXXXXXXXXXXXXXXXXXXXXXXXXXXXXXXXXXXXXXXXXXXXXXXXXXXXXXXXXXXXXXXXXXXXXXXXXXXXXXXXXXXXXXXXXXXXXXXXXXXXXXXXXXXXXXXXXXXXXXXXXXXXXXXXPXXXXXXEXXXXXXXXXXXXXXXXXXXXXXXXXXXXXXXXXXXXXXXXXXXXXXGXXXXXXXXXXXXXXXXXXXXXXXXXXXXXF

SEQ ID NO: 53185 - protein, 28 aa, Artificial sequence
  protein pattern
  Variant (2)..(2): Xaa in position 2 is any amino acid
  Variant (4)..(4): Xaa in position 4 is Ser or Thr
  Variant (7)..(7): Xaa in position 7 is Phe or His
  Variant (9)..(9): Xaa in position 9 is Ser or Thr
  Variant (10)..(10): Xaa in position 10 is any amino acid
  Variant (11)..(11): Xaa in position 11 is Ile, Leu or Val
  Variant (12)..(12): Xaa in position 12 is Ala, Asp, Glu or Ser
  Variant (14)..(15): Xaa in position 14 to 15 is any amino acid
  Variant (16)..(16): Xaa in position 16 is Gly or Ser
  Variant (18)..(18): Xaa in position 18 is Ala, Gly, Asn, Ser or Thr
  Variant (21)..(21): Xaa in position 21 is any amino acid
  Variant (24)..(24): Xaa in position 24 is any or no amino acid
  Variant (26)..(26): Xaa in position 26 is any or no amino acid
KXEXHNXPXXXXPXXXAXTGXGGXIXRD

SEQ ID NO: 53186 - protein, 10 aa, Artificial sequence
  protein pattern
  Variant (2)..(4): Xaa in position 2 to 4 is any amino acid
  Variant (5)..(5): Xaa in position 5 is Asn or Ser
EXXXXESQER

SEQ ID NO: 53187 - protein, 12 aa, Artificial sequence
  protein pattern
  Variant (3)..(3): Xaa in position 3 is Ala or Gly
  Variant (5)..(5): Xaa in position 5 is Ile, Leu or Val
  Variant (6)..(6): Xaa in position 6 is Cys, Ser, Thr or Val
  Variant (7)..(7): Xaa in position 7 is Cys, Asn, Ser or Val
  Variant (8)..(8): Xaa in position 8 is Ala or Ser
  Variant (9)..(10): Xaa in position 9 to 10 is any amino acid
  Variant (12)..(12): Xaa in position 12 is Ile, Leu, Met or Val
GAXGXXXXXXEX

SEQ ID NO: 53188 - protein, 12 aa, Artificial sequence
  protein pattern
  Variant (2)..(2): Xaa in position 2 is Gly, Ile or Val
  Variant (3)..(4): Xaa in position 3 to 4 is any amino acid
  Variant (7)..(7): Xaa in position 7 is Asp or Asn
  Variant (8)..(8): Xaa in position 8 is any amino acid
  Variant (9)..(9): Xaa in position 9 is Phe, Ile, Leu, Met or Val
  Variant (11)..(11): Xaa in position 11 is Ala, Ile, Leu or Val
  Variant (12)..(12): Xaa in position 12 is Gly or Pro
GXXXYGXXXGXX

SEQ ID NO: 53189 - DNA, 1023 bp, Synechocystis sp.
  CDS (1)..(1023): transl_table=11
atgaccgtctctcccacaacccagccccaaactaatcattccttgcccccggcggacgctaaacagcgggtcagccaatttatgcaaactcttcaagacgaaatttgtcagggtctagaggccttggatggcaagggcaaattccaggaagatagttggcaacgggaagaagggggcggtggccgttcccgggtgttggcggacggagattttttggaacagggcggagtcaatttttccgaagtctggggcaaatccctacctccttcaattttgaagcaacgccccgaagcggaaggccacgaattttatgccacgggcacttccatggtgttgcacccaaaaaatccctacattcccacggtgcatcttaattaccgctactttgaagcaggcccggtgtggtggttcggaggtggagccgatttaactccctactatccctttgctgaagatgcggcccatttccatcacacgttaaaaaatgcctgtgaccaaacccatggggaattttatccggtatttaaacgctggtgcgacgagtatttttacctcaaacatcgccaggaaatgcggggtattggcggcatcttttttgattaccaagatggcaatgctcccctgtaccgtggccctgaccccaatggcccggcggcccagtacagcaaccaattagcccccattgaacccctgggttgggaggatttatttagttttgcccaacgctgtggtcgggcctttttacctgcttacagtcccattgtggaaaaacgtcgcaatactgaatatggcgatcgccaacggcagttccagttatatcgccggggtcggtatgtggaatttaacttggtctatgaccggggcaccattttcggtttgcaaaccaatggccgcactgagtccattttgatgtctttacctcccttagtacgttggcaatattgctacagtcccgaagccggtagtcccgaggcggaattaacggaaaaattcttagttccccaggactgggttaatagttaa

SEQ ID NO: 53190 - protein, 340 aa, Synechocystis sp.
MTVSPTTQPQTNHSLPPADAKQRVSQFMQTLQDEICQGLEALDGKGKFQEDSWQREEGGGGRSRVLADGDFLEQGGVNFSEVWGKSLPPSILKQRPEAEGHEFYATGTSMVLHPKNPYIPTVHLNYRYFEAGPVWWFGGGADLTPYYPFAEDAAHFHHTLKNACDQTHGEFYPVFKRWCDEYFYLKHRQEMRGIGGIFFDYQDGNAPLYRGPDPNGPAAQYSNQLAPIEPLGWEDLFSFAQRCGRAFLPAYSPIVEKRRNTEYGDRQRQFQLYRRGRYVEFNLVYDRGTIFGLQTNGRTESILMSLPPLVRWQYCYSPEAGSPEAELTEKFLVPQDWVNS

SEQ ID NO: 53191 - DNA, 1161 bp, Arabidopsis thaliana
  CDS (1)..(1161)
  misc_feature (1124)..(1124): w is a or t
atggcttctcactcgtcgactctcctctcttctcctactttcgctcctttctcctctcatcgtcttcattattctcccaatccctctactctcagattctcccgtccaatcagaaataaacctaatctcgccttgcgatgttcagtctcaattgagaaagaagttcccgaaactgaacgaccctttactttccttagggattctgatgacgtcactccatcttcttcttcttcttccgtcagggctcgtttcgagactatgattagggctgctcaagacagtgtttgtgatgcaattgaagctatagaaggcggtcctaagtttaaagaagatgtttggtctcgacctggtggtggcggtggaatcagtcgtgtgttgcaggacgggaatgtctttgagaaagctggtgttaatgtctctgtggtttatggtgttatgcctcctgaagcttatagagctgcaaagggctcagcttctgatcagaaacctggtcctgttccgttcttcgctgctggagtcagctcggttttgcatcccaagaacccttttgccccaaccctgcatttcaattatcgctatttcgagacagatgctccaaaggatgttcctggagctccaaggcaatggtggtttggtggtggcactgatttcactcctgcttacatctttgaagaagatgtcaagcatttccattcgattcaaaagcaagcctgtgacaaatttgacccttccttctatccccgattcaagaagtggtgtgatgactacttttacatcaagcaccgtgatgagagacgaggacttggagggatattttttgatgatcttaatgactatgatcaggaaatgcttctgtcatttgccactgaatgcgcaaactcagtggtgccggcttatatacctatagtagagaaaaggaaagacatggaatttacagagcagcacaaggcatggcaacagttgcgacgagggcgatatgtcgaattcaacttggtatatgatcggggaacgacatttggtctgaagacaggaggacgaatagagagcattctcgtctctcttccgctttcagcaagatgggaatatgaccataaaccggaagaggggaccgaagagtggaagcwattggatgcttgcatcaacccgaaggagtggatctag

SEQ ID NO: 53192 - protein, 386 aa, Arabidopsis thaliana
  misc_feature (375)..(375): The Xaa at location 375 stands for Gln, or Leu.
MASHSSTLLSSPTFAPFSSHRLHYSPNPSTLRFSRPIRNKPNLALRCSVSIEKEVPETERPFTFLRDSDDVTPSSSSSSVRARFETMIRAAQDSVCDAIEAIEGGPKFKEDVWSRPGGGGGISRVLQDGNVFEKAGVNVSVVYGVMPPEAYRAAKGSASDQKPGPVPFFAAGVSSVLHPKNPFAPTLHFNYRYFETDAPKDVPGAPRQWWFGGGTDFTPAYIFEEDVKHFHSIQKQACDKFDPSFYPRFKKWCDDYFYIKHRDERRGLGGIFFDDLNDYDQEMLLSFATECANSVVPAYIPIVEKRKDMEFTEQHKAWQQLRRGRYVEFNLVYDRGTTFGLKTGGRIESILVSLPLSARWEYDHKPEEGTEEWKXLDACINPKEWI

SEQ ID NO: 53193 - DNA, 1176 bp, Bombyx mori
  CDS (1)..(1176)
atgtcgttcaatatactttttcgaagttttcaaacgctaagttatgttggaacttataagaagattaaaaatcgaccattaagattatactgtgctgctgtccttggcacaggtattgtagcttacaatcaataccaaagtaaagcaaaaatgaaagaaataatgcaacttaagaactatatggcaaacccaatcacaccagttgaacaattagagcaaaacaaagatgatatgaagacacaaatggaattactcatcatgaggattcaagcagaattctgcagggctttggagaaagaggaagacaaggaagcaaagtttacagtagacagatggacccgtaaagaaggaggtggtggaatcacttgtgttctacaagacggcagagtctttgagaaagcaggagtgaatatatcagttgtctccgggaaacttcctccagctgccattcagcagatgcggagcagaggcaagaatctacaaaacgcagagctcccgttttttgcagccggtgtgagtgccgtcatccacccaaggaaccccatggtccccaccatccacttcaactatagatactttgaggtccaggataagaatggggtccagtggtggttcggaggcggcaccgatctgaccccgtattatctgaacgaggacgacgctcttcacttccatctaaccttgaagcacgcgtgtgacgatcacgattcatcgtattatgctagattcaagaaatggtgcgatgattacttctacattccccaccgcggtgaaaggcgaggggtcggagggatattctttgatgacctggacactcccaaccagcaagctgccttcgccttcgtcacctcctgcgctgaagcagtcatacccagctacgtgcctctagttaagaagcacaaagacgacgcttacggctaccacgagcgtcaatggcagtggctcagacgagggagatatgtggagttcaatctcatatacgacagaggaacaaagttggggctgcacactcctgaagctagatacgaatcaatactgatgtcgcttccccttaacgctaaatgggaatatatgcaccaagtccaaccgaactctgaagaagaaaaactgttgaaaatcctaaaagaacctaaagatgggcttcaaatagaggataaaaagcggtctaatgcatag

SEQ ID NO: 53194 - protein, 391 aa, Bombyx mori
MSFNILFRSFQTLSYVGTYKKIKNRPLRLYCAAVLGTGIVAYNQYQSKAKMKEIMQLKNYMANPITPVEQLEQNKDDMKTQMELLIMRIQAEFCRALEKEEDKEAKFTVDRWTRKEGGGGITCVLQDGRVFEKAGVNISVVSGKLPPAAIQQMRSRGKNLQNAELPFFAAGVSAVIHPRNPMVPTIHFNYRYFEVQDKNGVQWWFGGGTDLTPYYLNEDDALHFHLTLKHACDDHDSSYYARFKKWCDDYFYIPHRGERRGVGGIFFDDLDTPNQQAAFAFVTSCAEAVIPSYVPLVKKHKDDAYGYHERQWQWLRRGRYVEFNLIYDRGTKLGLHTPEARYESILMSLPLNAKWEYMHQVQPNSEEEKLLKILKEPKDGLQIEDKKRSNA

SEQ ID NO: 53195 - DNA, 933 bp, Oryza sativa (japonica cultivar-group)
  CDS (1)..(933)
atgatccgccgcgtgcagggggaggtgtgcgcggcgctggaggaggccgacgggagcggcgcccggttcgtggaggacgtgtggtcgcgccccggcggcggcgggggcatcagccgggtgctccaggacggccgcgtgttcgagaaggccggggtcaacgtctccgtcgtgtacggcgtcatgccccccgacgcgtaccgcgccgccaagggggaggccggcaagaacggcgcggcggcagatggccccaaggctgggcccgtgcccttctttgccgctggcattagctcggttcttcaccccaagaacccatttgctccaacattgcattttaactaccgctattttgagacagatgcaccgaaagatgctcctggtgcaccaaggcaatggtggtttggaggtggtactgatttgactccttcatatatcattgaagaggatgtgaagcatttccattctgttcaaaaacaagcgtgtgataagtttgacccaagtttttacccgagattcaaaaaatggtgtgatgattatttctatattaagcaccgtaatgagcgtcgggggcttggtggaatattttttgatgatcttaatgactatgatcaagaaatgcttctcaactttgctacagaatgtgcggattctgttgttcctgcatacataccaatcattgaacgccggaaggacactccatttactgaggaacacaaggcatggcaacaactgaggagaggtcgctatgtggagttcaaccttgtatatgatcgcggtaccacatttggcctcaagactggggggaggattgagagtattctggtttctcttccactgactgcacgatggcagtatgatcatacacctgaagagggaactgaagaacggaaacttcttgacgcgtgcataaacccaaaggaatggctcgatctctga

SEQ ID NO: 53196 - protein, 310 aa, Oryza sativa (japonica cultivar-group)
MIRRVQGEVCAALEEADGSGARFVEDVWSRPGGGGGISRVLQDGRVFEKAGVNVSVVYGVMPPDAYRAAKGEAGKNGAAADGPKAGPVPFFAAGISSVLHPKNPFAPTLHFNYRYFETDAPKDAPGAPRQWWFGGGTDLTPSYIIEEDVKHFHSVQKQACDKFDPSFYPRFKKWCDDYFYIKHRNERRGLGGIFFDDLNDYDQEMLLNFATECADSVVPAYIPIIERRKDTPFTEEHKAWQQLRRGRYVEFNLVYDRGTTFGLKTGGRIESILVSLPLTARWQYDHTPEEGTEERKLLDACINPKEWLDL

SEQ ID NO: 53197 - DNA, 1089 bp, Arabidopsis thaliana
  CDS (1)..(1089)
atggcttctcactcgtcgactctcctctcttctcctactttcgctcctttctcctctcatcgtcttcattattctcccaatccctctactctcagattctcccgtccaatcagaaataaacctaatctcgccttgcgatgttcagtctcaattgagaaagaagttcccgaaactgaacgaccctttactttccttagggattctgatgacgtcactccatcttcttcttcttcttccgtcagggctcgtttcgagactatgattagggctgctcaagacagtgtttgtgatgcaattgaagctatagaaggcggtcctaagtttaaagaagatgtttggtctcgacctggtggtggcggtggaatcagtcgtgtgttgcaggacgggaatgtctttgagaaagctggtgttaatgtctctgtggtttatggtgttatgcctcctgaagcttatagagctgcaaagggctcagcttctgatcagaaacctggtcctgttccgttcttcgctgctggagtcagctcggttttgcatcccaagaacccttttgccccaaccctgcatttcaattatcgctatttcgagacagatgctccaaaggatgttcctggagctccaaggcaatggtggtttggtggtggcactgatttcactcctgcttacatctttgaagaagatgtcaagcatttccattcgattcaaaagcaagcctgtgacaaatttgacccttccttctatccccgattcaagaagtggtgtgatgactacttttacatcaagcaccgtgatgagagacgaggacttggagggatattttttgatgatcttaatgactatgatcaggaaatgcttctgtcatttgccactgaatgcgcaaactcagtggtgccggcttatatacctatagtagagaaaaggaaagacatggaatttacagagcagcacaaggcatggcaacagttgcgacgagggcgatatgtcgaattcaacttggtatatgatcggggaacgacatttggtctgaagacaggaggacgaatagagagcattctcgtctctcttccggctttcagcaagatgggaatatga

SEQ ID NO: 53198 - protein, 362 aa, Arabidopsis thaliana
MASHSSTLLSSPTFAPFSSHRLHYSPNPSTLRFSRPIRNKPNLALRCSVSIEKEVPETERPFTFLRDSDDVTPSSSSSSVRARFETMIRAAQDSVCDAIEAIEGGPKFKEDVWSRPGGGGGISRVLQDGNVFEKAGVNVSVVYGVMPPEAYRAAKGSASDQKPGPVPFFAAGVSSVLHPKNPFAPTLHFNYRYFETDAPKDVPGAPRQWWFGGGTDFTPAYIFEEDVKHFHSIQKQACDKFDPSFYPRFKKWCDDYFYIKHRDERRGLGGIFFDDLNDYDQEMLLSFATECANSVVPAYIPIVEKRKDMEFTEQHKAWQQLRRGRYVEFNLVYDRGTTFGLKTGGRIESILVSLPAFSKMGI

SEQ ID NO: 53199 - DNA, 900 bp, Escherichia coli O157:H7 EDL933
  CDS (1)..(900): transl_table=11
  misc_feature (669)..(669): k is g or t
atgaaacccgacgcacaccaggttaaacagtttctgctcaaccttcaggatacgatttgtcagcagctgaccgccgtcgatggcgcagaatttgtcgaagatagctggcagcgcgaaggtggcggcggcgggcgtagtcgggtgttgcgtaatggtggtgttttcgaacaggcaggcgtcaacttttctcacgtccacggcgaggcgatgcctgcttccgccaccgctcatcgcccggaacttgccgggcgcagtttcgaggcgatgggcgtttctctggtagtgcatccgcataatccgtatgttcccaccagccacgcgaatgtgcgcttttttattgccgaaaaaccgggtgcagagccagtctggtggtttggcggcggcttcgatttaacccctttctatggttttgaagaagacgccattcactggcaccgcaccgcccgtgacctgtgcctgccatttggtaaagacgtttatccccgttacaaaaagtggtgcgacgattacttctacctcaaacatcgcaacgaacagcgcggtattggcgggctgttctttgatgatctaaacacgccagatttcgaccactgttttgcctttatgcaggcggtaggcaaaggctacaccgacgcttatttaccaattgtagagcgacgtaaagcgatkgcctacggcgagcgcgagcgcaattttcagctctaccgtcgcggtcgttatgtcgagttcaatctggtctgggatcgcggcactctgtttggcctgcaaactggcgggcgcaccgagtcgatcctgatgtcaatgccgccactggtacgctgggagtatgattatcagccaaaagatggcagcccagaagcggcgttaagtgagtttattaaggtcagggattgggtgtaa

SEQ ID NO: 53200 - protein, 299 aa, Escherichia coli O157:H7 EDL933
  misc_feature (223)..(223): The Xaa at location 223 stands for Ile, or Met.
MKPDAHQVKQFLLNLQDTICQQLTAVDGAEFVEDSWQREGGGGGRSRVLRNGGVFEQAGVNFSHVHGEAMPASATAHRPELAGRSFEAMGVSLVVHPHNPYVPTSHANVRFFIAEKPGAEPVWWFGGGFDLTPFYGFEEDAIHWHRTARDLCLPFGKDVYPRYKKWCDDYFYLKHRNEQRGIGGLFFDDLNTPDFDHCFAFMQAVGKGYTDAYLPIVERRKAXAYGERERNFQLYRRGRYVEFNLVWDRGTLFGLQTGGRTESILMSMPPLVRWEYDYQPKDGSPEAALSEFIKVRDWV

SEQ ID NO: 53201 - DNA, 1023 bp, Brucella melitensis 16M
  CDS (1)..(1023): transl_table=11
gtgaattcgtctcaacagcccaggctggacgatagtagctcaatccatttccccttgactgcgcgatcctgtcagccttgtcgggcaggcttcgccggaaggaaaagcacaatgaaacgcgaagacatccctgcgatcatcccggccgatatcgaagaaaagaaaaaggcggcgcaaagctggttcgaggagttgcgcgaccgcatctgcgcaagttacgagcaactggaagacgaattgcagggcccgctttcggatcgtgaaccgggccgtttcgtacgcacgccctggcagaaggatgacggcaatggcggcggtgtgatgtcgatcatgcatggccgcgtctttgaaaaagtgggggttcacgtttcgactgtccatggcgagttctcaccggaattccgcaagcagattcccggagccgaggaggacccgcgctattgggcaagcggcatttcgctcatcgcccatccgcaaaatcccaacgtgccagccgttcatatgaacacacgcatgatcgtgactacccgccagtggttcgcgggcggggcggacctgacgcccgttctcgaccgccgccgcacacaggaagaccccgatacgctcgcctttcacaaagcgttccgcttcatttgcgaaaagcacaaggatatcgtcgattatcaacgcctcaaggagtggtgcgacgaatatttcttcctgccgcaccgcgacgaaccgcgcggtattggcggcattttttatgactggctgcattcaccggaagaaaaaggcggatgggatagcgacttcgcctttacgcgcgatgtcgggcgcggcttctccgtggtttatccgcatctggtgcgccagaacttcaacaaggactggaccgaagccgaccgtgacgaacagctcatccgccgtggccgttatgtcgaattcaacctgctttatgatcgcggcacaatcttcggcctcaagaccggcgggaatatgaatgccatcctgtcttccatgccgcccgtggtgaaatggccctga

SEQ ID NO: 53202 - protein, 340 aa, Brucella melitensis 16M
MNSSQQPRLDDSSSIHFPLTARSCQPCRAGFAGRKSTMKREDIPAIIPADIEEKKKAAQSWFEELRDRICASYEQLEDELQGPLSDREPGRFVRTPWQKDDGNGGGVMSIMHGRVFEKVGVHVSTVHGEFSPEFRKQIPGAEEDPRYWASGISLIAHPQNPNVPAVHMNTRMIVTTRQWFAGGADLTPVLDRRRTQEDPDTLAFHKAFRFICEKHKDIVDYQRLKEWCDEYFFLPHRDEPRGIGGIFYDWLHSPEEKGGWDSDFAFTRDVGRGFSVVYPHLVRQNFNKDWTEADRDEQLIRRGRYVEFNLLYDRGTIFGLKTGGNMNAILSSMPPVVKWP

SEQ ID NO: 53203 - DNA, 1059 bp, Thermosynechococcus elongatus BP-1
  CDS (1)..(1059): transl_table=11
gtggacactaaaagaccgtttattaggattccgctattgactatgactgttgcaacttctgcgagcaccgctgtgcccagtgactcccgccaacgggtggccacctttctcaaggatctacaggatcagatttgtcagggcctagaggctgccgatggcggtgcccagtttcaagaagacacttggcagcgtccggaagggggcggcgggcgatcgcgggtgatgaaaaatggccagcttctggagcaggggggcgtgaatttctcggaagtgtggggggagcagttgccgccttcgatcttggcgcagcgtcctgaggcggcagggtacggcttctatgccacgggtacctccatggtgctccatccccgcaacccctatgtgccaacggtgcatttgaactaccgctactttgaagccggaccggtgtggtggtttggcggtggggcagatctaaccccctactacccctttgccgaggatgccaaacatttccatcaggtgcatcaggcggcctgcgatcgccaccaccgcgaatactatcccgtgtttaagcgctggtgtgatgaatacttttacctaaagcaccgcggcgaaacccgcggcgtcggcggtattttctttgactaccaagatggcagcgatcgcgagctataccgcggtcccaatcccgatggcgaagcggctcgctatagccaaagggtaggttcgattggcagtcggtcctgggaagacctctttgccttcattcaaagctgtggccaagccttcctcgaggcctacctacccattgtggaacggcggcgtcacctaacctatggcgatcgcgagcggcagtttcagctctatcgccgcgggcgctatgtggaattcaaccttgtctatgaccgcggcaccatctttggcctccaaaccaatggccgcaccgagtccattttgatgtctttgccccccctggtgcgctgggaatatggctatacccccgaacccaacagccgcgaagcggaactctatagcacctttctcaagccccaagactgggtcaattggccagtctaa

SEQ ID NO: 53204 - protein, 352 aa, Thermosynechococcus elongatus BP-1
MDTKRPFIRIPLLTMTVATSASTAVPSDSRQRVATFLKDLQDQICQGLEAADGGAQFQEDTWQRPEGGGGRSRVMKNGQLLEQGGVNFSEVWGEQLPPSILAQRPEAAGYGFYATGTSMVLHPRNPYVPTVHLNYRYFEAGPVWWFGGGADLTPYYPFAEDAKHFHQVHQAACDRHHREYYPVFKRWCDEYFYLKHRGETRGVGGIFFDYQDGSDRELYRGPNPDGEAARYSQRVGSIGSRSWEDLFAFIQSCGQAFLEAYLPIVERRRHLTYGDRERQFQLYRRGRYVEFNLVYDRGTIFGLQTNGRTESILMSLPPLVRWEYGYTPEPNSREAELYSTFLKPQDWVNWPV

SEQ ID NO: 53205 - DNA, 1167 bp, Synechococcus sp. WH 8102
  CDS (1)..(1167): transl_table=11
gtgacagtccctgacggagtgttgtcttgggctggcatcacctgtttaggttcttcgatcgaatggtctgccttcatggttcgctccctggttcgacgcctgcttggccgctcacagaacaatgggaccgcagcgccggctttggagctgccgcctgaggattcccgggcccgggctcgggccatggtgatgggattgcaggatgagatctgcgcaggtctggagtccctcgatggtgaagggacattcgtcgaagagagctgggagcggcctgagggaggcggcgggcgatcccgggtgatgcgcgagggccttgtcttcgagcagggcggcgtgaacttctcggaagtgcagggtcaggagctgccaccgtcaatcctcaagcaacgtcctgaggccaagggacatccgtggtttgccacgggcacctcgatggtgctgcacccgcacaacccttacatccctacggttcatctcaattaccgctacttcgaggctggtccggtgtggtggttcggcggtggggcagacctcacgccctactacccctttctggaggatgcccgtcacttccatcgcacccatcaggcggcctgcgattcggtccatccagacctgcacaaggtgttcaagccctggtgcgatgagtacttcttcttgaagcaccgcggtgagacccgcggcgtcggtggcatcttctacgactatcaggattccagcggtgtgctctacaaaggacaggacccttcaggtcccgcggcaggggtatcggctcagctgggggctcgccccctgggctgggagcaactgttcgccctggggcaggccaatggccgggcctttcttccgtcctatgcgccgatcgtggagaagcgccatccgatggcctatggcgatcgcgagcgtcaattccagctctatcgccgtggccggtacgtggaattcaacctcgtgtgggatcggggaacgatctttggccttcagaccaacggccgtaccgagtccatcctgatgtcgctgccgccgttggtgcgctgggaatacggctacaaggccgaggccggctccagagaagctctgctgacggagctgttcaccaaaccccaggactggcttggtgatgcatccctggaggaccgctgccgcccccacggcgccatcaactga

SEQ ID NO: 53206 - protein, 388 aa, Synechococcus sp. WH 8102
MTVPDGVLSWAGITCLGSSIEWSAFMVRSLVRRLLGRSQNNGTAAPALELPPEDSRARARAMVMGLQDEICAGLESLDGEGTFVEESWERPEGGGGRSRVMREGLVFEQGGVNFSEVQGQELPPSILKQRPEAKGHPWFATGTSMVLHPHNPYIPTVHLNYRYFEAGPVWWFGGGADLTPYYPFLEDARHFHRTHQAACDSVHPDLHKVFKPWCDEYFFLKHRGETRGVGGIFYDYQDSSGVLYKGQDPSGPAAGVSAQLGARPLGWEQLFALGQANGRAFLPSYAPIVEKRHPMAYGDRERQFQLYRRGRYVEFNLVWDRGTIFGLQTNGRTESILMSLPPLVRWEYGYKAEAGSREALLTELFTKPQDWLGDASLEDRCRPHGAIN

SEQ ID NO: 53207 - DNA, 912 bp, Rhodopseudomonas palustris CGA009
  CDS (1)..(912): transl_table=11
atgaccatcgacaccgacctcgaccgcacgcccgctgcttcctctgaaaatcccgtcgaggcccgccggactcaggcgcgggcttggttcgaggggctgcgcgacaggatctgcgccgagatcgaaacgctggagcgcgaagcgccggcggagctgtttcccggtgagccggcgaccttcacctacaagccgtggcagcggaagaccggtgccggcggcggtgtcggcggattcttgtcgaacgggcggctgttcgaaaagatcggcatccacacctcgtcggcgaacggcaagctgaccccggagatggccaagaacgtgccgggcgatggcagcctggactacgtctccaccagcatcagcctgatcatgcatccgcgtagcccgcgggtgccgaccgtgcatatgaatacgcgatttttgtcgacctcgcaggggtggttcggcggcggtgccgacctgacgccgatgctgccggagcagcgcagccaggacgccgaagacgcggtgatcttccacaccgcgatgaagcacgcctgcgacgctcacgatccggcctattacgacaagttcaagccctgggccgacacctacttcttcctgccgcatcgcggcgtcgcacgcggcgtcggcggaatcttcttcgactatctcaacagtggcgatttcgatcgcgactttgccttcacccgcgccgtcggttcagcgctgctcgacgtctatcccaagatcgtgcgcaagcgcatgatcgaaccgtggaccgacgcggagcgggcgcagcagctcgcctgccgcgggctctatgtcgagttcaacctgctctacgatcgcggcacgatgttcggtttgcagaccggcggcaataccgagaccatcatgagctcgatgccgccgctggtgagctggagctga

SEQ ID NO: 53208 - protein, 303 aa, Rhodopseudomonas palustris CGA009
MTIDTDLDRTPAASSENPVEARRTQARAWFEGLRDRICAEIETLEREAPAELFPGEPATFTYKPWQRKTGAGGGVGGFLSNGRLFEKIGIHTSSANGKLTPEMAKNVPGDGSLDYVSTSISLIMHPRSPRVPTVHMNTRFLSTSQGWFGGGADLTPMLPEQRSQDAEDAVIFHTAMKHACDAHDPAYYDKFKPWADTYFFLPHRGVARGVGGIFFDYLNSGDFDRDFAFTRAVGSALLDVYPKIVRKRMIEPWTDAERAQQLACRGLYVEFNLLYDRGTMFGLQTGGNTETIMSSMPPLVSWS

SEQ ID NO: 53209 - DNA, 1167 bp, Nasonia vitripennis
  CDS (1)..(1167)
atggcatttaaagctctgagaaattggaatcggttttattcaatggtaaataatgaaacctttagggctacaacctataaacttagatatgttggtgctggactggttgccacaagtgttgttgtctatagcaccaaagaatccaacgtccatgcagcacaaccagaactgaacctcaagcatttcatggcagaaccgattaccagtgtagagcatttaaagaaacatcgcaatgatatgaagacaaaaatggaacttcttattatgaagattcaggcagactttgtaaaatctctggaatccttggaagaggatgacactagattcaaaattgatagatggtcaaggaaagaaggtggaggaggcattacttgtgtaatgcaagatggtcaggtatttgagaaagctggagttaatatttctgttgtcactggaacgttgcctccaagtgctgtgcaacaaatgagggccagaggaaaacaaatggatgagggatctctacctttctttgcagctggtgttagtgcagttattcatcctagaaatccaatggtgccaacaatccattttaactatcgctattttgaagtgacaaataaggatggttctacacagtggtggtttggaggtggcacagatctaacaccgtattacctgaatgaagaggatgccacacattttcatcgtactctgcagcaagcctgtgataagcatgatccaacttactattcaaaattcaaaaaatggtgcgatgactattttcacataccacatagaggagagagaagaggagttgggggtattttctttgatgatttggacacccccagtcagcaagaagcttataaatttgttgaatcatgtgctcacgctgtaatcccatcttacataccactggttgaaaagcacaagaatgatggctatggctatgctgaaagacagtggcagttgttaaggagaggcagatatgtagaattcaatcttatttacgatagaggaactaaatttggactttatacacctggtgctcgttatgaaagtattctgatgtctctacctctaactgctaggtgggaatacatgcatgaacccaagccagattcaagggaaggcaaactgattgacgttttgaagaatcctaggaattggcttgacattaaggcttag

SEQ ID NO: 53210 - protein, 388 aa, Nasonia vitripennis
MAFKALRNWNRFYSMVNNETFRATTYKLRYVGAGLVATSVVVYSTKESNVHAAQPELNLKHFMAEPITSVEHLKKHRNDMKTKMELLIMKIQADFVKSLESLEEDDTRFKIDRWSRKEGGGGITCVMQDGQVFEKAGVNISVVTGTLPPSAVQQMRARGKQMDEGSLPFFAAGVSAVIHPRNPMVPTIHFNYRYFEVTNKDGSTQWWFGGGTDLTPYYLNEEDATHFHRTLQQACDKHDPTYYSKFKKWCDDYFHIPHRGERRGVGGIFFDDLDTPSQQEAYKFVESCAHAVIPSYIPLVEKHKNDGYGYAERQWQLLRRGRYVEFNLIYDRGTKFGLYTPGARYESILMSLPLTARWEYMHEPKPDSREGKLIDVLKNPRNWLDIKA

SEQ ID NO: 53211 - DNA, 1257 bp, Magnaporthe grisea 70-15
  CDS (1)..(1257)
atggcgtccccttttcgtcaggctgccaggctgctcagtcagtccaaggcacgccctcaacttaacaccccctcgttttcttttgttgcgaaaacatctaggatatcccaacgtggtatcaccagatcggctacctctggggcttcctccacagctgcgacatatatcccctgggctgctgcaggccttgttgccacatccctgggagcatactggtacaagatgactgcagaggagcccatacggatggaccctgcatccctcgctgagcgtgacgctcagatgatgcgtgagtctggtgtgacggagcaatcccccatgcggctccggatggaggagttcatcaaggagcagcagcgtctgattgtgcagggcctcgaggaggtcgacggcaaaaagttccgtatcgacgagtggcaacgcaaggagggcggtggcggcatcacgtgcgtcctacaagacggcaacgtctttgagaaggctggtgtcggcgtttcggtcgtctacggttcgctccccagggctgccattgagaagatgcgtgtcaaccaccgcaacattaccggtggatccgacaccatcccggaaaagcttgacttctttgccgccggtctcagtctcgtcgtgcacccgagcaaccctatggctccgacggtgcactgcaactaccgctactttgaaactgcattccctgacggtacctccggggcgtggtggttcggcggcggtgcggacctgacgccttcgtacctgttcgacgaggacgccatccacttccaccgcacgctcaaggacgtatgcgacaagcacgacaaggattacttccccaggttcaagaagtggtgcgacgagtacttcttcaacaagcaccggggcgagtcccgtggcattggcggcatcttctttgacgacctggatgagtccgtgtctgatagggacaacacgtttgcctttatccaggacggcctccgcgcattcctgcccagctacgtgcccataatcaaccggcgcaaggacatgcccttcacccccgaggagaaggagtggcagcagctgaggcgcggcaagtacgtcgagttcaacctggtccacgatcgtggtaccgcctttgggctcaacagccccggcgccagggtcgagagtatcctcatgagcctgcccaggacggccagctggcagtacatgcacgagccggctcccaagagccgcgaggcaaggttgacggagattttgaggtccccgaaggagtgggtatag

SEQ ID NO: 53212 - protein, 418 aa, Magnaporthe grisea 70-15
MASPFRQAARLLSQSKARPQLNTPSFSFVAKTSRISQRGITRSATSGASSTAATYIPWAAAGLVATSLGAYWYKMTAEEPIRMDPASLAERDAQMMRESGVTEQSPMRLRMEEFIKEQQRLIVQGLEEVDGKKFRIDEWQRKEGGGGITCVLQDGNVFEKAGVGVSVVYGSLPRAAIEKMRVNHRNITGGSDTIPEKLDFFAAGLSLVVHPSNPMAPTVHCNYRYFETAFPDGTSGAWWFGGGADLTPSYLFDEDAIHFHRTLKDVCDKHDKDYFPRFKKWCDEYFFNKHRGESRGIGGIFFDDLDESVSDRDNTFAFIQDGLRAFLPSYVPIINRRKDMPFTPEEKEWQQLRRGKYVEFNLVHDRGTAFGLNSPGARVESILMSLPRTASWQYMHEPAPKSREARLTEILRSPKEWV

SEQ ID NO: 53213 - DNA, 1227 bp, Gibberella zeae PH-1
  CDS (1)..(1227)
atggctgccagacagccagcccggcgccttgctgcgcaccttgcttctccttccgtacgcttctcacgaactcaatccgcctctacgagacgctggctgtctagttccgccggtcctaaagcttctcgatcatcttattccaactactccccgctgtggctcactgctgtcgcacttggtgtcgccgctcccttagcctacaagatgtctgatatcgaacctatcaatgccgatccttcaaccctggccgaccgcgatgcccagaagaagcgcgagtcgggcgttaacgaggactcgcccatgcgactgcgaatggaaaagtttattcgggagcaacaagcccagatcgtagccgagcttgagagacttgacggcaaaaagttccgtaaggacgagtgggagcgccccaacggtggaggcggcacgacctgcgttctccaagaaggaaatgtcttcgagaaggctggccttggtgttagtgttgtctacggctcgcttcccaagcctgccattgagaagatgcgagccaaccacaagacaatggatcccaacatggaatcaattgacttctttgccgcaggactcagcatggttcttcacccttataaccctatggccccaaccgtgcatcttaactaccgatacttcgaaacggcgaaccctgatggtacatctcaagcttggtggttcggcggcggttgcgatttgacaccatcatacctcttcgatgaggacgctattcactttcacaagacgatcaagaccgcttgcgatgctcacgacaaggaatactacccccgattcaagaagtggtgtgatgagtactttttcaacaagcaccgtggcgaggcacgtggtattggtggcatcttctttgatgacttggacgagacggagcgtgatcgcgagaacaccttttcgttcgtccaagactgtctcaaggcgttcctcccctcctacattcccatcatcgagaagcgaaaggacatgccttacactgaggcagagaaagactggcaacagcttcgacgtggcaagtacgtcgagttcaaccttgtccacgatcgcggtacagcattcggactcaacacacccggctcaagggttgagagtattctcatgagtttgccattgacagctggctggaagtacatgcacgagcccgagcccaagagcagggagcagcgccttgtagatgtcctcagagatcccaaggagtgggtctga

SEQ ID NO: 53214 - protein, 408 aa, Gibberella zeae PH-1
MAARQPARRLAAHLASPSVRFSRTQSASTRRWLSSSAGPKASRSSYSNYSPLWLTAVALGVAAPLAYKMSDIEPINADPSTLADRDAQKKRESGVNEDSPMRLRMEKFIREQQAQIVAELERLDGKKFRKDEWERPNGGGGTTCVLQEGNVFEKAGLGVSVVYGSLPKPAIEKMRANHKTMDPNMESIDFFAAGLSMVLHPYNPMAPTVHLNYRYFETANPDGTSQAWWFGGGCDLTPSYLFDEDAIHFHKTIKTACDAHDKEYYPRFKKWCDEYFFNKHRGEARGIGGIFFDDLDETERDRENTFSFVQDCLKAFLPSYIPIIEKRKDMPYTEAEKDWQQLRRGKYVEFNLVHDRGTAFGLNTPGSRVESILMSLPLTAGWKYMHEPEPKSREQRLVDVLRDPKEWV

SEQ ID NO: 53215 - DNA, 984 bp, Candida glabrata CBS 138
  CDS (1)..(984)
atgactgccccacaagacccaaagcacttgccaatcaggcaacaaatggaagctttgatccgtagaaagcaaaaagagatcactgagggtctagaatctatcgataccgttaagttcaccgctgacacctgggaacgtggtaacgatggtggtggtggtacttccatggttatccaaaacggttccactttcgaaaagggtggtgtcaacgtttccgttgtctacggtgagctgactccaggtgctgttttggctatgaaacaagaacacaaggacttgaaattgccagagtccgccaacggcttgccaaactctgaaggtgtcaagttcttcgcctgtggtttgagtatggtcatccacccagtcaacccattggccccaactactcacttgaactaccgttacttcgagacctggaacccagacggtaccccacaaacctggtggttcggtggtggtgccgacttgaccccattctacttgttcgaagaagatgctgagcacttccacaagttgcacaaggccgctctagacaagcacgacaccgctttgtaccctcgtttcaagaagtggtgtgacgagtacttctacatcgcccacagaggtgaaacccgtggtatcggtggtatcttcttcgatgactacaacgagaaggacccacaagaaattctaaagatctgcgaggactgtttcgacgctttcttgccatcttacttgaccatcatgaagagaagaaaggacttgccatacaacgaaaagcaaaagaactggcaattgatcagacgtggtagatacgctgaattcaacttgatctacgacagaggtactcaattcggtttgagaaccccaggctccagagttgaatctatcctaatgagtttgcctttgcacgcctcttgggtttacaaccaccacccagaaccaggttctgaggaggctaagttgctagaagtgaccaccaagccaagagaatgggttaactaa

SEQ ID NO: 53216 - protein, 327 aa, Candida glabrata CBS 138
MTAPQDPKHLPIRQQMEALIRRKQKEITEGLESIDTVKFTADTWERGNDGGGGTSMVIQNGSTFEKGGVNVSVVYGELTPGAVLAMKQEHKDLKLPESANGLPNSEGVKFFACGLSMVIHPVNPLAPTTHLNYRYFETWNPDGTPQTWWFGGGADLTPFYLFEEDAEHFHKLHKAALDKHDTALYPRFKKWCDEYFYIAHRGETRGIGGIFFDDYNEKDPQEILKICEDCFDAFLPSYLTIMKRRKDLPYNEKQKNWQLIRRGRYAEFNLIYDRGTQFGLRTPGSRVESILMSLPLHASWVYNHHPEPGSEEAKLLEVTTKPREWVN

SEQ ID NO: 53217 - DNA, 1128 bp, Kluyveromyces lactis NRRL Y-1140
  CDS (1)..(1128)
atgagaagagaagcattggatctatactgcccttttctctccaatcaagcagaatcattgataaaactttacatccagtatacttgtctggtaaagcaaacagaaactcaacgaccggttcatcttaacacacattctaaatattatcattgtgcgatgacagattcacaagtgccaattagagagagaatggaggccttagtgcgccggaaacagcaagaaattaccaagggtctggaaactttggatactgtaaagtttcaagccgattcttgggatcgtggcaacaacggtggtggcggtgtctcgatggtgttgcagaatggtactacgtttgagaaaggtggtgttaatgtcagtgtggttcatgggaacttgagtccacctgctatcaaggctatgaaagcggaccacaaaaatttgcatctgcctattgatcctgcaactggtgaaccagatgcaacaggagtaaaattcttcgcctgtggtctctctatggttattcatccaattaatccacatgcgccaaccacccatttgaattataggtatttcgaaacctggaatgcggacggtacaccacaagcttggtggttcggtggtggtgctgatttaactccttcttatttgtacgaggaagacgctaaattgttccatcaattgcacaaggatgctttggacaaaacggacgttgccttgtacccaaaatacaagaaatggtgcgatgagtatttctatatcaaacacagagaagaaaccagaggtatcggtggtattttctttgatgatgtcgatgatcgtgatccaaacgaaatcttgcaaatggttgaaaactgttttgatgccttcttgccatcttacctcgaaatcatcaaaagaagaaaggatatgccttacactgaagaagaaagacaatggcaacaaattagacgtggcagatacgttgaattcaacctagtccttgacagaggtactcaattcggtttaagaactccaggatcccgtgtcgaaagtattttgatgtctttgcctgtgactgcttcgtggttgtatgaccatcatcctgaagtagactctagagaagataaattactccaagtattgaagaaccctgttgaatgggtttga

SEQ ID NO: 53218 - protein, 375 aa, Kluyveromyces lactis NRRL Y-1140
MRREALDLYCPFLSNQAESLIKLYIQYTCLVKQTETQRPVHLNTHSKYYHCAMTDSQVPIRERMEALVRRKQQEITKGLETLDTVKFQADSWDRGNNGGGGVSMVLQNGTTFEKGGVNVSVVHGNLSPPAIKAMKADHKNLHLPIDPATGEPDATGVKFFACGLSMVIHPINPHAPTTHLNYRYFETWNADGTPQAWWFGGGADLTPSYLYEEDAKLFHQLHKDALDKTDVALYPKYKKWCDEYFYIKHREETRGIGGIFFDDVDDRDPNEILQMVENCFDAFLPSYLEIIKRRKDMPYTEEERQWQQIRRGRYVEFNLVLDRGTQFGLRTPGSRVESILMSLPVTASWLYDHHPEVDSREDKLLQVLKNPVEWV

SEQ ID NO: 53219 - DNA, 972 bp, Debaryomyces hansenii CBS767
  CDS (1)..(972)
atggcatcgcctaatgatatacacaacattgaaatacctattagacatcgtatggaagcactcgttaggttaaagcaacgagaaatcactgcagctatagaaaacatcgatcaggccaaatttcacatagatgcgtgggaaagaggtgataaaggtggtggtggccaatcaatggtattgcaaaacggtgaagtatttgagaagggaggtgttaacatttcaattgttcacggaacgttacctgctcaagccgtaactagaatgagggtcaaccacaagaatttgaagggatgcggcgaagatggcagtgtcaagttctttgcgtgtggattatccttagttatccatcctacgaacccgcatgcccctaccacacatgcaaattataggtactttgaaactactgaccccgaaactaacgaagtccagacgtggtggtttggaggtggtgcagacttgacaccttcatacttgtacgaggaagactgcaagctcttccaccaaagccataaggatgcgttggataagtacgatgacacgttgtaccccaaatacaagaaatggtgtgacgaatacttctacattaaacacagacaggaaacaagaggtgtgggaggaatttttttcgacgattttgacgatagaccggccgacgacatcttgtacatcatcgaatcgtgtttcgatgctttcttgccctcgtacattccatcggtcttgaaaaggatgaacacccccttcacagacgaacagaaacaatggcaacagatcagaagaggtagatacgttgaattcaacttggtattggacagaggtactcaatttggcttacagacccctggttcccgagtagagagtatattgatgtctttaccagccacggccagctgggtctatgatcatcatccagaggaggggagcgaagaggacaaattggtaaaagtattgcagaatcctatcgactgggtttag

SEQ ID NO: 53220 - protein, 323 aa, Debaryomyces hansenii CBS767
MASPNDIHNIEIPIRHRMEALVRLKQREITAAIENIDQAKFHIDAWERGDKGGGGQSMVLQNGEVFEKGGVNISIVHGTLPAQAVTRMRVNHKNLKGCGEDGSVKFFACGLSLVIHPTNPHAPTTHANYRYFETTDPETNEVQTWWFGGGADLTPSYLYEEDCKLFHQSHKDALDKYDDTLYPKYKKWCDEYFYIKHRQETRGVGGIFFDDFDDRPADDILYIIESCFDAFLPSYIPSVLKRMNTPFTDEQKQWQQIRRGRYVEFNLVLDRGTQFGLQTPGSRVESILMSLPATASWVYDHHPEEGSEEDKLVKVLQNPIDWV

SEQ ID NO: 53221 - DNA, 1365 bp, Yarrowia lipolytica CLIB122
  CDS (1)..(1365)
atgcacatggctcacaatcgaaccatccgaaccttatgcatgtatggccttatttcaaatcctcttcggggcactataagtctcgaagctaaacccacatatctcaacttgcacaaactgcaaccccacatttcgcctacctgtgcaacaatgttccgttttgctcgtaaaatcaaagtcggagccccttcgctgaccccctcgctcaccaagaaggctggcgcctttgctttcggtgctgtcaccggaaccgtgctagctgtgaccttccctcttaacgtggagaagcccaagttcactgaggatcttacccagctgatccgagagttcaaggcttctcagcctattagcaacgatgctgtcaaggccgctgctgtgccccagttcccccagcttgacgagttcgactttggtaacgatcaacgacccatcaagctccgaatggaggacttcatcaagaagatgcaaaaggagatcgtggccgagcttgagactcttgatgacacctccaccttccgagttgatgagtggcagcgtgggctcaatggcgagggaggaggaggaatttcttgtgttctgcaggatggtaaggtgtttgagaaggccggtgttaacatatctattgttcacggcctgttgccccccatggctgtccagaagatgaaggctgatcacaagagtattcgaccttccaacgatggaaacctccccttttatgcctgtggtctgtctatggttctccacccagtcaaccccatggctcctactgtccacctcaactatcgatactttgaaaccatgaactccgatggtaccacccaggcttggtggttcggtggaggaagcgatcttaccccctcttacctgtttgaggaggacgctgttcacttccacaagactctcaaggaagcttgcgacaagcacgacaaggactactaccggaagtttaagaagtggtgtgatgagtacttcgtcattaagcaccgacaggaggcccgaggtgtcggaggtatcttcttcgatgatctcgagaacaaggatcccgaggagctctttggtttcatccggtcttctcttcgatctttcctgccctcttacatgcccatcatccagcgacgaaaggatctcccttacactcccgaggagaagcagtggcagcaactccgacgaggtcgatacgtcgagttcaaccttgtcaacgatcgaggaaccgcgttcggtctgcagactccttctgctcgcatcgaatccattctcatgtctcttcctcttactgcgtcttggatgtacgaccacagaccctctgagggatctcgagaggagcgactgctcaagattctcaaagagccccgtgagtgggtctaa

SEQ ID NO: 53222 - protein, 454 aa, Yarrowia lipolytica CLIB122
MHMAHNRTIRTLCMYGLISNPLRGTISLEAKPTYLNLHKLQPHISPTCATMFRFARKIKVGAPSLTPSLTKKAGAFAFGAVTGTVLAVTFPLNVEKPKFTEDLTQLIREFKASQPISNDAVKAAAVPQFPQLDEFDFGNDQRPIKLRMEDFIKKMQKEIVAELETLDDTSTFRVDEWQRGLNGEGGGGISCVLQDGKVFEKAGVNISIVHGLLPPMAVQKMKADHKSIRPSNDGNLPFYACGLSMVLHPVNPMAPTVHLNYRYFETMNSDGTTQAWWFGGGSDLTPSYLFEEDAVHFHKTLKEACDKHDKDYYRKFKKWCDEYFVIKHRQEARGVGGIFFDDLENKDPEELFGFIRSSLRSFLPSYMPIIQRRKDLPYTPEEKQWQQLRRGRYVEFNLVNDRGTAFGLQTPSARIESILMSLPLTASWMYDHRPSEGSREERLLKILKEPREWV

SEQ ID NO: 53223 - DNA, 1071 bp, Apis mellifera
  CDS (1)..(1071)
atggtaccccgtacattattaagaaattgggtttctttactttatagtacttcaggaattacagtattagcagcccaaaatgagttagatataaaaagatttatggcacaacctattactgatgttaaagaattaagaaaaagacaggatatgagaaagaaaatggaattattagtaatgacaactcaagcagatttttgtaaagctctggagtctttagaagatccaaatcatcgttttaaagttgatagatggattagaaaggaaggtggtggaggaattacttgtgttttacaagatggagttgtttttgaaaaagctggtgtaaatgtatctgttgtcactggtacattaccaccaggtgcagtacagcaaatgagagcacgtggaaaaaatatgcaagaaggatctgtaccattttttgcagctggtgtaagtgctgtaattcatcctcgtaatcccatgatcccaacaatacattttaactatcgctactttgaagtagaaaattcagatggttcaattcaatggtggtttggaggtggtactgatcttacaccttattatttaaatgaagatgatataaaacaatttcataagactttaaaaattgcatgtgataaacatgatctttcattttatccaaaatataaaaaatggtgtgatgattatttttttattacacatagaggagaacgtagaggagtaggtggtatcttttttgatgacattgatacacctagccaagaagaggcatttcaatttgtaaaatcttgtgcagaagctgtaattccttcttacattccattagttgaaaaacataaaaatgatagatatggatatgctgaaaggcaatggcaattattacgtagaggaagatatgttgaatttaatttaatatatgatcgtggtacaaaatttggtttatatacacctggagcacgatatgaaagtatattaatgtctttgcctttatcagcaaaatggcattatatgcatgaaccagaacctgattcaaaagaagcagaacttgttaatgtattgagaaatcctaaagaatggttaaagtaa

SEQ ID NO: 53224 - protein, 356 aa, Apis mellifera
MVPRTLLRNWVSLLYSTSGITVLAAQNELDIKRFMAQPITDVKELRKRQDMRKKMELLVMTTQADFCKALESLEDPNHRFKVDRWIRKEGGGGITCVLQDGVVFEKAGVNVSVVTGTLPPGAVQQMRARGKNMQEGSVPFFAAGVSAVIHPRNPMIPTIHFNYRYFEVENSDGSIQWWFGGGTDLTPYYLNEDDIKQFHKTLKIACDKHDLSFYPKYKKWCDDYFFITHRGERRGVGGIFFDDIDTPSQEEAFQFVKSCAEAVIPSYIPLVEKHKNDRYGYAERQWQLLRRGRYVEFNLIYDRGTKFGLYTPGARYESILMSLPLSAKWHYMHEPEPDSKEAELVNVLRNPKEWLK

SEQ ID NO: 53225 - DNA, 1464 bp, Aspergillus nidulans FGSC A4
  CDS (1)..(1464)
atgttactaagaactgataagacggcggtctcacggggcggaggcggtgaagccccacacgtacgacttgagcctccactggacccgcggctaaaggagctgttccagactgaacaggcgccggcatgcgccttttcgcaggtcgctttcccggttttcagcgccctgtcgcaaaccaaacaatcaccaaacacccttccaccgattctactcggagagaacatcacaatcagagaaatcaacacgatcatcgcacccgggaaagacacaagacaaacggggcaagaaagaatttacagtttggcgtccgtacctgcgactcgcgattggcatcccctttgtaacgctgcttgtctgggacatggtctgcgccgaccaatacctacaatttggggctcgctaaccattgatgaggctctcaagaaacaagcatctgtcaacgaaacttcgccaatgcggctgcgaatggaaaaattgataaaggatcaccaacagaagattgtggaggaactcagccggatagatggaaaacaattcagagcagacacctggactcgacctaatggaggaggcggtatatcttgcgtccttcaagatggcaatgtattcgaaaaagccggagtcaatgtatctatcgtctacggagacctaccccgagcagcgattgagaagatgcgagcagatcacaagtccttcgtcggtgctgacgtggaatctttgagtttcttcgctgccgggctttctcttgtcctacacccccataatcctatggcgccaacggtccatctaaactaccgctatttcgagacatcagacccaaaagaccccatcaacggcgacaaaaactggtggtttggcggcggtacagacctcaccccgtcctacctcttccctgaggatgttcaacacttccataaaacgatcaaagaggcttgcgatcgccatgacgcaacctactatcccagattcaaagaatggtgcgacaagtacttctacatcccgcaccgtcgtgagtgccgcggtgtcggcgggatcttcttcgacgaccttgacgccaacttcttggaaagctcctccacctcctctcaaaatccgcaagaaaccctcttctccttcgtctctgatgctctcgcctccttccttccctcctacgtcccgattgtcgaacgtcgcaaagacatgccgttcaccccagctcagaaggaatggcaacaactccgccgcggccgctatgtggaattcaacctcgtctatgaccgcggcacgagcttcggactgagaacccctagtgcccgtatcgaaagtatcctcatgagtcttcctcgcacagcatcatgggcgtacatggatcccgtgtcgggaacacggaccgagcatatggataatgaagaggagctcggcgaggataaggcccatgagaaggaaatgatggatgtgctgagacatcccagacaatgggtttga

SEQ ID NO: 53226 - protein, 487 aa, Aspergillus nidulans FGSC A4
MLLRTDKTAVSRGGGGEAPHVRLEPPLDPRLKELFQTEQAPACAFSQVAFPVFSALSQTKQSPNTLPPILLGENITIREINTIIAPGKDTRQTGQERIYSLASVPATRDWHPLCNAACLGHGLRRPIPTIWGSLTIDEALKKQASVNETSPMRLRMEKLIKDHQQKIVEELSRIDGKQFRADTWTRPNGGGGISCVLQDGNVFEKAGVNVSIVYGDLPRAAIEKMRADHKSFVGADVESLSFFAAGLSLVLHPHNPMAPTVHLNYRYFETSDPKDPINGDKNWWFGGGTDLTPSYLFPEDVQHFHKTIKEACDRHDATYYPRFKEWCDKYFYIPHRRECRGVGGIFFDDLDANFLESSSTSSQNPQETLFSFVSDALASFLPSYVPIVERRKDMPFTPAQKEWQQLRRGRYVEFNLVYDRGTSFGLRTPSARIESILMSLPRTASWAYMDPVSGTRTEHMDNEEELGEDKAHEKEMMDVLRHPRQWV

SEQ ID NO: 53227 - DNA, 972 bp, Candida albicans SC5314
  CDS (1)..(972): transl_table=12
atggtcaccactgaacaaattcatgacacgtctttcccaattagagaaagaatggaagcacttatccgtttgaaacaacaacaaatcaccgatgctattgccgaattagacacagttaaatttcacaccgatacttggttaagaggtgacaatggtggtggtggtcaatcaatggttttacagaatggtactacatttgaaaagggtggagtgaatatctcaattgtgcacggaaaattaccaccacaggctgttgaaagaatgagagctgatcactctaatttgaaaggatcatccaaggatggtagtgtcaactttttcgcttgtggattatcattggttattcatccaattaaccctcatgccccaactactcatgccaactatagatattttgaaaccagtgatcctgaaactaatgaaatccaaacatggtggtttggtggtggggccgatttaactccatcttatttgtatgaagaagatgccaaatggttccatcaacaacataaagatgccttggataaatttgatccggaattgtaccctaaatacaaaaaatggtgtgatgaatatttctttatcaaacatcgtggtgaaactagaggtattggtgggatctttttcgatgatttcgatagtaaacctgctgatgaaatattgaaaattgttgaatcatgttttgatgcatttatcccagcctatgccccaatcgttgctaaaagaaaagacactccttatactccagaacagaaaaattggcaacaaattagaagaggaagatacgttgaatttaatttggtcttagatcgtggtactcaatttggattgcaaactccagggtctcgagttgaaagtattttaatgtcattaccagcaaccgcaagttgggtgtacgaccatcatcctgaaccaggatcagaggaagacaaattattgcaagttttgaaaaaacctattgaatgggtttga

SEQ ID NO: 53228 - protein, 323 aa, Candida albicans SC5314
MVTTEQIHDTSFPIRERMEALIRLKQQQITDAIAELDTVKFHTDTWLRGDNGGGGQSMVLQNGTTFEKGGVNISIVHGKLPPQAVERMRADHSNLKGSSKDGSVNFFACGLSLVIHPINPHAPTTHANYRYFETSDPETNEIQTWWFGGGADLTPSYLYEEDAKWFHQQHKDALDKFDPELYPKYKKWCDEYFFIKHRGETRGIGGIFFDDFDSKPADEILKIVESCFDAFIPAYAPIVAKRKDTPYTPEQKNWQQIRRGRYVEFNLVLDRGTQFGLQTPGSRVESILMSLPATASWVYDHHPEPGSEEDKLLQVLKKPIEWV

SEQ ID NO: 53229 - DNA, 1404 bp, Ustilago maydis 521
  CDS (1)..(1404)
atggctctggcatcctcagccgctgccattctgggaggcttggctctgtacgctgctttggcccccaaagcctccttgtcctcctcggctttagagtgtgaagctgccaagcccacacccgcctcggccatcaagggcggcaaccagtccgatctgccagaaatctcccatctcgatcccaagatactcaccaatgcctcggctcccatgcgaaagcgcatggagacgtacatcaagctgcttcagtacaacatcgtctctgctctttcgcaggaagagccaaaggcgcgattcttgatcgacagctggctccgaaaggaaggcggagagggcatttcgtgcgttcttcaagacggctcgacattcgaaaaggcgggtgtcaacatctcggtcgtgcatgggatgcttccgcccgcagcagtgaggcagatgagtgccgaccatgcaggtctcatggacaagactggatacaagctcgagggcaaggatgcggatgtcaaaggactgcccttctacgcggctggtttgagcctggtggttcaccccaggaacccatttgctccaacggtgcacttcaactaccgctactttgagctcacccatccggaaacgctcgcggatggatcgcccaatccacgacacccgaacaaccgcaaggacggaaagcatgaccacgagccgatcgcatggtggttcggcggtggaaccgacttgactcctatctacctatttgacgaggatgccgagcatttccacaagacactgaaatcggcagccgatcagcacgatgcggcgttctatccaacgtggaaaaagtggtgcgacaaatactttttgatccctcatcgcggtgaagcgcgcggtgtaggagggatctttttcgacgatctcactctgccacaatgggcgtctacgcactctggaaaagcgtttattccgttatcggacggcagcaagcctacgtcttctcagccactcgttgcgtccatctcgtcgaccaagcagcacgatcaggactcgctgtttgccacggtccgttcgatgggtgacgccttcatcccggcgtacgtgcctcttgtacaaaaacgcaagaacacgcccttcacacaagcgcacgagcgatggcagcagatccgacgtggacgatacgtcgagttcaacctggtatacgatcgagggaccaagttcggtctgcagacaccaggcgcaaggattgagagcatcttgatgagtctgccgctgaaggcgaggtgggaatacatggagcggtacagcggcggcggtgcgcagggtagggatggaaaggctaccaagagtgcagatgccggccagaccgccgagcatgacggcgccatggagaagcatacgcaacaagcgctcagacaccctagagattgggcttaa

SEQ ID NO: 53230 - protein, 467 aa, Ustilago maydis 521
MALASSAAAILGGLALYAALAPKASLSSSALECEAAKPTPASAIKGGNQSDLPEISHLDPKILTNASAPMRKRMETYIKLLQYNIVSALSQEEPKARFLIDSWLRKEGGEGISCVLQDGSTFEKAGVNISVVHGMLPPAAVRQMSADHAGLMDKTGYKLEGKDADVKGLPFYAAGLSLVVHPRNPFAPTVHFNYRYFELTHPETLADGSPNPRHPNNRKDGKHDHEPIAWWFGGGTDLTPIYLFDEDAEHFHKTLKSAADQHDAAFYPTWKKWCDKYFLIPHRGEARGVGGIFFDDLTLPQWASTHSGKAFIPLSDGSKPTSSQPLVASISSTKQHDQDSLFATVRSMGDAFIPAYVPLVQKRKNTPFTQAHERWQQIRRGRYVEFNLVYDRGTKFGLQTPGARIESILMSLPLKARWEYMERYSGGGAQGRDGKATKSADAGQTAEHDGAMEKHTQQALRHPRDWA

SEQ ID NO: 53231 - DNA, 1149 bp, Tribolium castaneum
  CDS (1)..(1149)
atgttcctcaaagtcttaattaaaaactgctcattaatttattaccaacgtcaacgcgacttatcaaagttaaggcgttatggcccggtttttatcggaggcttcgccctattctcttcccacaaagtaaaaatagacactagcacgttcatggcatcgcctataacccccttgtcgcaactggagcaagcccccgatgacatgaagacccgtatggagctgatggtgctccgggtccaggcggaggcttgccgagctctggaggaggaagacaattgtaacaagttcctagtggataagtgggagcgccacgacggccgcggcggtggtatcacttgtgtgctccaagaaggcaaagtttttgagaaagctggagtcaacatttccgttatttccggaaatttgactccagggattgtggcacaaatgcgtgcaagggggaagaaattgaaacgggatagtcccccgtttgccgttatagggatcagtgctgtgattcaccccaaaaatccgatggtgccaactgttcatttcaattaccggtattttgaaatccaggatgaggatcaggttgtgtggtggtttgggggcgggagtgacctcactccctactatttgaataaggctgatgctatacatttccattcggcgctcaaggatgcttgtgataaacatgacaaaagttattatcctaagtttaagaagtggtgcgatgagtatttcacgattaaacatcgcaaggagaggaggggcattggggggatatttttcgatgatttggatactcccgatcgggagtcctgtttcaaatttgccacggattgtgcagacgcgttcattccctcctacattcctttggtgcaaaggcataaacacgccatgtacaccgagactgaaagaaactggcaattattgagacggggacgttacgttgagtttaacttggtttgggatagaggtactaagttcggatttaatacacctgatgctaggtttgaaagtattttaatgtcattgcctctcttggcgagatgggaatacatgcaccaaccagctcccgaatcacctgaaggagagctacttgaggttttaaaaaatcccagagactggattgaagagtgttcttgcacagaccaccagaaaaaatga

SEQ ID NO: 53232 - protein, 382 aa, Tribolium castaneum
MFLKVLIKNCSLIYYQRQRDLSKLRRYGPVFIGGFALFSSHKVKIDTSTFMASPITPLSQLEQAPDDMKTRMELMVLRVQAEACRALEEEDNCNKFLVDKWERHDGRGGGITCVLQEGKVFEKAGVNISVISGNLTPGIVAQMRARGKKLKRDSPPFAVIGISAVIHPKNPMVPTVHFNYRYFEIQDEDQVVWWFGGGSDLTPYYLNKADAIHFHSALKDACDKHDKSYYPKFKKWCDEYFTIKHRKERRGIGGIFFDDLDTPDRESCFKFATDCADAFIPSYIPLVQRHKHAMYTETERNWQLLRRGRYVEFNLVWDRGTKFGFNTPDARFESILMSLPLLARWEYMHQPAPESPEGELLEVLKNPRDWIEECSCTDHQKK

SEQ ID NO: 53233 - DNA, 1047 bp, Prochlorococcus marinus str. NATL1A
  CDS (1)..(1047): transl_table=11
ttgtcctcctcacaagataaagccaatttaccggcaaacaattcaagagctcgagcaaaaaagcttgttttagagcttcaagatgaaatttgcgctggcttagagactattgatggtgaaggcaaattcctagaagaatcttgggagagaccagagggtggtggtggacgctcaagagtcttgaaagatggaaaaatctttgagcagggaggggtgaatttttctgaagtacatggcaatgaacttccaccctcaatcattagccaaagaccagaagcaaaaggtcactcttggtttgcgacaggaacctcaatggttcttcaccccaaaaatccttacatacctactgttcatcttaattacagatatttcgaagcaggtcccgtttggtggtttgggggaggggctgatttaacacctttctatccatatctatctgacacgcgtcactttcactcatgccataaaaatgcatgtgacacaattgacaaagatctacataaggttttcaaaccttggtgtgacgaatatttctttctaaaacatagaaatgagactagaggagttggaggtatcttttatgactatcaagacggatccggcttgctttataaaggacaaaatgccaatgggaaggcctctaaaatcgcaaaagagctaggggaatattctttgaattgggaaaatcttttttcacttgccaaagcatgcgggcaggcatttctgccctcctatgagccaataataaaaaagcgaaaaaatcaaagcttttcaaccaaagaacgagactttcaactttataggcgaggtagatatgctgagttcaatttggtatgggatagaggaaccatttttggattacaaacgaatggaagaacggagtcaatattgatgtcattacctcccttagcaagatgggagtatggatataagccagaagaaaattcacgtgaggctctattaacagatttatttactaagcctcaagattggtttacagataaatctctggaaaagaggtgtttaactcatcaagcattggattag

SEQ ID NO: 53234 - protein, 348 aa, Prochlorococcus marinus str. NATL1A
MSSSQDKANLPANNSRARAKKLVLELQDEICAGLETIDGEGKFLEESWERPEGGGGRSRVLKDGKIFEQGGVNFSEVHGNELPPSIISQRPEAKGHSWFATGTSMVLHPKNPYIPTVHLNYRYFEAGPVWWFGGGADLTPFYPYLSDTRHFHSCHKNACDTIDKDLHKVFKPWCDEYFFLKHRNETRGVGGIFYDYQDGSGLLYKGQNANGKASKIAKELGEYSLNWENLFSLAKACGQAFLPSYEPIIKKRKNQSFSTKERDFQLYRRGRYAEFNLVWDRGTIFGLQTNGRTESILMSLPPLARWEYGYKPEENSREALLTDLFTKPQDWFTDKSLEKRCLTHQALD

SEQ ID NO: 53235 - DNA, 1074 bp, Prochlorococcus marinus str. MIT 9303
  CDS (1)..(1074): transl_table=11
atggttcctactttgattggcaaggttatgggtgcttctgagaatgttggccaaggtcctcctcctcactcgcgcgaacgtgtacgtgaattggtactcggattgcaagatgagatcagtaatgaactggagagtcttgatggtggccaatcttttagaactgatagttgggagcggcctgaagggggtggtgggcgatccaaggtgatgcgtgagggccgagtttttgaacagggcggcgttaatttctctgaggtgcacggcgaggagttgcctccgtcgattctgaatcagcgacctgaggcaaaggggcatccctggttcgctaccggcacttcgatggtgctacacccgcgcaatccctatgtgcctacgatccaccttaattaccgctatttcgaggcggggccggtgtggtggtttggcggtggcgctgacctcacgccgttttatccctacctggaagatgcccgccattttcatcgcgttcacaagcaggcttgcgatacggttggacctgagctccataaggtctttaaaccttggtgtgacgaatatttctatctgaagcaccgtggtgagacccgtggtgtgggtgggattttttacgactaccaggatggatctggagtgctttacaaaggtcaaaaccctgagggtccagctgcacaggtctcacgggagttagggcctcatccgaagagctgggaacagttatttgagctggccaaggcttgtgggaaggctttcttgccggcttatgtgccgattgtggagaaacgtcagcagcaggcctatggcgatcgagaacgtcaattccagttgtatcgccgtgggcgatatgcggagttcaatctggtctgggatcggggcacgattttcggattgcaaaccaatggccgaacggagtcgatcttgatgtctttgccaccactggctcgttgggagtatggatatgccgcaccagctgattcaagggaggctttgctcactgatttgtttactcgacctcagaattggtttgaggattcgacgttggatgagcgttgtcgaccacaccaggcggtggattag

SEQ ID NO: 53236 - protein, 357 aa, Prochlorococcus marinus str. MIT 9303
MVPTLIGKVMGASENVGQGPPPHSRERVRELVLGLQDEISNELESLDGGQSFRTDSWERPEGGGGRSKVMREGRVFEQGGVNFSEVHGEELPPSILNQRPEAKGHPWFATGTSMVLHPRNPYVPTIHLNYRYFEAGPVWWFGGGADLTPFYPYLEDARHFHRVHKQACDTVGPELHKVFKPWCDEYFYLKHRGETRGVGGIFYDYQDGSGVLYKGQNPEGPAAQVSRELGPHPKSWEQLFELAKACGKAFLPAYVPIVEKRQQQAYGDRERQFQLYRRGRYAEFNLVWDRGTIFGLQTNGRTESILMSLPPLARWEYGYAAPADSREALLTDLFTRPQNWFEDSTLDERCRPHQAVD

SEQ ID NO: 53237 - DNA, 981 bp, Acinetobacter sp. ADP1
  CDS (1)..(981): transl_table=11
ttgatgtcattagtcctttcgctctttcccaagaggctcatcatgcagaacccaacttcagctgatattcaacgcgtccgtgaatttcttctcggtttacaagcccgcatttgctcaagccttgaacagcaagaacaacttggtggcggtacagcagagttcgtcattgacgactgggaacgcccagaaggcggtggtggtcgttcacgcgttttacaaaatggcgaagtgattgaaaaaggcggtgtgatgttttcgcacattaacatcagtaaacttccagcttctgcaacagaacgacacccacaaattgctggcgcaaaagctcaggcactgggggtatctctcgtcatccaccctaaaaatccacatattcccacttcacatgccaatgtacgtttatttgtcgctgagccagaaggacaagatccaatctggtggtttggtgggggcttcgacctcacaccgttctacccagatgaacaagatattaaaaactggcatcagacagctcatgatctttgccaaccgtttggagaagatgtgtatgccgagcataaacagtggtgtgatgattatttctatttgaaacatcgtgatgaacagcgcggtgtggggggtctgtttttcgatgacctgaattgctgggattttgaaacctgcttccaatatatgcaagctgtaggaaatggttatcttgaagcaattgtgcctatttttgaaaagcaccgtgatcaaccttacaccgaagcgcaacgtgaatttcagttatatcgtcgtggtcgttatgttgaatacaatctggtctatgaccgcggtacgttatttggattacaaacaggcggccgtattgaatccattttagtcagcctgccaaatctggcagggtggtcttatcgtcctgaatgggatgcagattctgccgaaaaaaagctcaccgactactaccttaaaccgcaggactggttaaatacactgtaa

SEQ ID NO: 53238 - protein, 326 aa, Acinetobacter sp. ADP1
MMSLVLSLFPKRLIMQNPTSADIQRVREFLLGLQARICSSLEQQEQLGGGTAEFVIDDWERPEGGGGRSRVLQNGEVIEKGGVMFSHINISKLPASATERHPQIAGAKAQALGVSLVIHPKNPHIPTSHANVRLFVAEPEGQDPIWWFGGGFDLTPFYPDEQDIKNWHQTAHDLCQPFGEDVYAEHKQWCDDYFYLKHRDEQRGVGGLFFDDLNCWDFETCFQYMQAVGNGYLEAIVPIFEKHRDQPYTEAQREFQLYRRGRYVEYNLVYDRGTLFGLQTGGRIESILVSLPNLAGWSYRPEWDADSAEKKLTDYYLKPQDWLNTL

SEQ ID NO: 53239 - DNA, 951 bp, Legionella pneumophila subsp. pneumophila str. Philadelphia 1
  CDS (1)..(951): transl_table=11
atgcagagtctcatcatgccaatctcaaagacacttccttataatgcaatagagcaaattaaatcttatctgctccaactccaaaacacaatttgtgtctcactggagtcaattgatggcaaaaccagattccatgaggattcctggcagcgagctgctggaggtggaggaaaaacaagaataatggcgaatgggaatgtctttgaaaaagccggcgtcaatttttcacatgtttcaggggaacaattaccagcatcagccagtgcacatagagaagaattggcaggaagacatttcagcgcattaggggtatctctggtcattcatcctcaaaacccctatgtgccaacaacacatgccaatgttcgattttttgtcgctgaaaaggaggattcagaaccagtctggtggtttggtggaggatttgatttaaccccttattatggatttgttgaagactgtgagcattggcatcaaacggcattaaatgcctgtttaccttttggagaaacgatttacccaaaattcaagcgttggtgcgatgattatttttttattaagcacagaaatgaagcacgtgggattggcggcttattttttgatgattacaatgaaatcagctttgatcacagctttgaactcatgcgtagcataggcgatcattttattctggcttatgaacccatagtggctcgccgtaaagacatcccttttggcaacagggaaaaagcatttcagaattaccgcagaggccgttatgcggagttcaatttagtctatgatcgaggcactttatttggtctgcaatctggcggaaggactgagtccatattgatgtccctgcctcccattgttcattgggaatacaattggcatcctgaaaaaggcagtgatgaagaaaaattatacacggattttttacctgcaaaagattggttgaaaaaggagtaa

SEQ ID NO: 53240 - protein, 316 aa, Legionella pneumophila subsp. pneumophila str. Philadelphia 1
MQSLIMPISKTLPYNAIEQIKSYLLQLQNTICVSLESIDGKTRFHEDSWQRAAGGGGKTRIMANGNVFEKAGVNFSHVSGEQLPASASAHREELAGRHFSALGVSLVIHPQNPYVPTTHANVRFFVAEKEDSEPVWWFGGGFDLTPYYGFVEDCEHWHQTALNACLPFGETIYPKFKRWCDDYFFIKHRNEARGIGGLFFDDYNEISFDHSFELMRSIGDHFILAYEPIVARRKDIPFGNREKAFQNYRRGRYAEFNLVYDRGTLFGLQSGGRTESILMSLPPIVHWEYNWHPEKGSDEEKLYTDFLPAKDWLKKE

SEQ ID NO: 53241 - DNA, 879 bp, Anaplasma marginale str. St. Maries
  CDS (1)..(879): transl_table=11
ttgtgcttgaaatttgtatacgctttacgtgttgataataatcggacttatatgaacgaaaaaaaggaaagggttgcagggtggtttcacgagttgcgcgataggattgttgatcaatttttagcgatcgaagaggagttttctgatagccgtccggagattaagcgtaggacctgggacagagaaggtggtggaggtggtgagtcagtcgtgattgttggcaaagtgtttgagaaggccggggtaaacttttcaacggtgtacggcgtaatggatagtaactttgcgtgtgagatacctggagcgcaggagagtgggggcgacttttgggcaagtggcatttccgtggttgcacacatgcagtctccatttgtacctgcggtgcacatgaataccaggtttatgtgcacttcgaaaagttggtttggtggcggcatggatctgacccctacatattatgatgaagatgacaaaaccacattccacgagggcatacgtgctgcgtgcgataagtttaatcccgaatactatcccaagtttaagcaaagatgtgatgagtatttttacctccctcacagaaaagaaatgcgcggtgtaggcgggatattttacgataacctatgcactggaaactgggagcaggattttgcattcacgcaggaggttggaaaatgctttttgcgggtgtattctgccattgtcaggagaaacatgcacaaaacatggggggcagaggagcgtaattttcaattattgaagcgtggcaggtacgttgagtttaatcttatatacgacagaggaacaagattcggcctcatgaccaatgggaacccggatgcaataatgatgtccatgcctcctctggtgcgatgggaatag

SEQ ID NO: 53242 - protein, 292 aa, Anaplasma marginale str. St. Maries
MCLKFVYALRVDNNRTYMNEKKERVAGWFHELRDRIVDQFLAIEEEFSDSRPEIKRRTWDREGGGGGESVVIVGKVFEKAGVNFSTVYGVMDSNFACEIPGAQESGGDFWASGISVVAHMQSPFVPAVHMNTRFMCTSKSWFGGGMDLTPTYYDEDDKTTFHEGIRAACDKFNPEYYPKFKQRCDEYFYLPHRKEMRGVGGIFYDNLCTGNWEQDFAFTQEVGKCFLRVYSAIVRRNMHKTWGAEERNFQLLKRGRYVEFNLIYDRGTRFGLMTNGNPDAIMMSMPPLVRWE

SEQ ID NO: 53243 - DNA, 885 bp, Silicibacter pomeroyi DSS-3
  CDS (1)..(885): transl_table=11
atgttcgagaccgagaaatccaccgcctctgcctggttccgcgacttgcgcgaccagatcgtcgccgccttcgaggggctggaggacagccatgccgaggggccgttcagcgagatggcgccgggccggttcgaagtgaccgagaccacgcggcaatccgacgacggttcggacgcgggcggcgggctgatgagcgtgatgcgcggcgggcgcgtgttcgaaaaggtcggcgtgaacatctcgaccgtctatggcacgctgggcgagcgggcgcaggcggcgatggccgcgcgcaagggcattcccgggatggcggacgatccgcgcttctgggcctcgggcatcagcctggtggcacatatgcagaacccgcatgtgccggcggtgcatatgaacacgcggatgttctggactccacatgcctggtggttcgggggcggttcggacctgaacccctgtatcgaatacgccgaggacacggcgcatttccacgccacgcaaagggcgcatctggatccgcatgggagcgagcattacccgcgtctgaaggcctgggcggacgagtatttctatatcccgcaccgcaagcgggcgcgcggcgtcggcggcatcttcatggatgatctctgcactggcgactggcaggcggatttcgcgctgacccaggatatcgggcgcgcctttctgccggcctatctgtcgttggtggaacgccgccgggtacagcctttcgacgaggccgagaaagaggcacagctggtgcatcgcgggctctatgccgaatacaacctcgtctatgaccggggcaccaaattcgggctagagacaggtcacgatgccaacgcggtgctgatgagcctgccgccgctggcgaaatggatctga

SEQ ID NO: 53244 - protein, 294 aa, Silicibacter pomeroyi DSS-3
MFETEKSTASAWFRDLRDQIVAAFEGLEDSHAEGPFSEMAPGRFEVTETTRQSDDGSDAGGGLMSVMRGGRVFEKVGVNISTVYGTLGERAQAAMAARKGIPGMADDPRFWASGISLVAHMQNPHVPAVHMNTRMFWTPHAWWFGGGSDLNPCIEYAEDTAHFHATQRAHLDPHGSEHYPRLKAWADEYFYIPHRKRARGVGGIFMDDLCTGDWQADFALTQDIGRAFLPAYLSLVERRRVQPFDEAEKEAQLVHRGLYAEYNLVYDRGTKFGLETGHDANAVLMSLPPLAKWI

SEQ ID NO: 53245 - DNA, 867 bp, Ehrlichia ruminantium str. Welgevonden
  CDS (1)..(867): transl_table=11
atgaatgaattgtctatgaaagataaacaaaaaatggctgttaattggtttaaggaattacaaaataaacttctttctgcatttttatcagtggaagaaaaattttcttcttcagtaccagaagttcaatataaagattggacaagatctgaaggtggaggaggacattctataatattacaaggtaatgtttttgaaaaggctggtataaatgtatcagaagtatatggtaatattacacaaaattctgaattattaagtgttatgaattctcataaatttaatgcttcttatgtggaaggtacagaattttgggcaagtggaatttctgttgttgcacatatgtgttctccatttgttccagctgttcatatgaatactagatttatttctatatgtgacaagaattggtttggtggtgggatagatttaactcctacatatgaaaataaagaagatgaagaattttttcatgctaatttgcgtacaatgtgtgataggcataatcagaaatattatccaaaattcaagcaacaatgcgatgaatattttttcctgcatcatagaaaagaaccacgtggtattggtggaatattttatgataatatcaactctggagattgggaatctgatttttattatactaaggaagttggtaaatttttattagatatttatccagttattgtcatgagaaatatgtataaaagttggagtcaagatgagcgtgagtatcaattacttaagcgtggtaggtatgtagagtttaatctgatttatgacagaggtacaagatttggtttattaactaatggaaatcctgatgcaattatgatgtctatgcctcctgtggtaaaatggaaatga

SEQ ID NO: 53246 - protein, 288 aa, Ehrlichia ruminantium str. Welgevonden
MNELSMKDKQKMAVNWFKELQNKLLSAFLSVEEKFSSSVPEVQYKDWTRSEGGGGHSIILQGNVFEKAGINVSEVYGNITQNSELLSVMNSHKFNASYVEGTEFWASGISVVAHMCSPFVPAVHMNTRFISICDKNWFGGGIDLTPTYENKEDEEFFHANLRTMCDRHNQKYYPKFKQQCDEYFFLHHRKEPRGIGGIFYDNINSGDWESDFYYTKEVGKFLLDIYPVIVMRNMYKSWSQDEREYQLLKRGRYVEFNLIYDRGTRFGLLTNGNPDAIMMSMPPVVKWK

SEQ ID NO: 53247 - DNA, 1011 bp, Psychrobacter arcticus 273-4
  CDS (1)..(1011): transl_table=11
atgagcatcccaaatatagacaacgatatcaaagtgtcatcgaccgatgcaacaacgataccaagtcatcatgacatcatgcgtgtgcgtgaatttctagtcgatttgcaagcacgtatctgccaagcgttagaagcacaagagcgcgatggctgcgctgatgcgcataaagccgctaccttttttcctgatgattgggagcgccctgaaggcggcgggggtcgctcgtgcgtattggcagatggcgaggtgattgaaaaagccggcgtcatgtttagccatattcacgtccaaaacctgcctgcttcagcaaccgcccgtcatcctgatattgccggtcgtaaagcacaggcgatgggtgtctcattggttgtccatccaaaaaaccctaacgtccccactagccatgccaatgtgcggttatttattgccgaagcagaaggcaaagaccctatttggtggtttggtggcggttttgatttaaccccattttatcctgtgcttgctgactgcatccattggcatcaggtttgtcatgatctttgtgcgccttttggcgatactgtctatcctgattttaagcagtggtgcgatgagtatttccacctacgtcaccgcgatgagcagcgtggtatcggcggcttgttttatgacgacgtcaatactgagagccgcggttgggattttgaaacctgctttaaatttatgcaagcggttggtaacggctaccttgagggtatcctgccaatttttgagcagcgtaaaaatgcgccctataccgaagcgcagcgtgaatttcagctctatcgccgtggccgctatgttgaatacaacctcgtttatgaccgcggcaccctatttggactacaaagcaatggacgtattgaatccatcttagtcagtatgcctccgcttgctagctggcattatcgctttgagccaattgagggtacacctgagtttgaattgactgatttttatctaaaaccacgcgattggttgattttatag

SEQ ID NO: 53248 - protein, 336 aa, Psychrobacter arcticus 273-4
MSIPNIDNDIKVSSTDATTIPSHHDIMRVREFLVDLQARICQALEAQERDGCADAHKAATFFPDDWERPEGGGGRSCVLADGEVIEKAGVMFSHIHVQNLPASATARHPDIAGRKAQAMGVSLVVHPKNPNVPTSHANVRLFIAEAEGKDPIWWFGGGFDLTPFYPVLADCIHWHQVCHDLCAPFGDTVYPDFKQWCDEYFHLRHRDEQRGIGGLFYDDVNTESRGWDFETCFKFMQAVGNGYLEGILPIFEQRKNAPYTEAQREFQLYRRGRYVEYNLVYDRGTLFGLQSNGRIESILVSMPPLASWHYRFEPIEGTPEFELTDFYLKPRDWLIL

SEQ ID NO: 53249 - DNA, 939 bp, Colwellia psychrerythraea 34H
  CDS (1)..(939): transl_table=11
atggactcacaactaagctcgactgcgaacattgaaatcacgccaatcatcgcgtttttcaaaagcctccaagataaaatttgtcaggcattagaagaagctgacggtactggaaaatttgttgaagataactggaagcgcaaagaaggcggcggcggtagaactcgcgtgatgaccgatggcacggttgttgagcaaggaggcgtaaatttttctgtggtatcaggtgataaattaccaccatcagccacggctcatcgtcctgagcttgccggcagaacgtggcaagcttgtggtgtttcactcgttatccacccaaaaaaccctaacattccgacttcacacgctaatgtgcgcttttttattgctgagaaagaaggtgaaaaacccgtatggtggtttggtggtggttttgatttaacacctttttatccaaacgatgaagatattcagcattggcatcaaacagcgcacgacttatgtcagccatttggtgacaatgtttataacgatcataaaaaatggtgtgatgagtatttctatttaaagcaccgtgatgaaacccgcggtgttggtggtttattctttgatgatttaaatcagtgggatttcgatacctgttttgattacgtcaaagccgttggccaaggttttatcgatgcttatgtgcctattatgcagcgtcgcaaagatgaggcttttggtgaacaagagcgtcaatttcaattgtatcgccgtggtcgttatgtcgagttcaatttggtattcgatagaggcacgttatttggcttacaatctggtggtagaactgaatcaattttgatgtctatgccaccacttgcacgttgggaatataacttccaagctgatgaaggtagtgcagaagctaaattagcggattacttaagtccaaaagattggcttaacgtattgaaataa

SEQ ID NO: 53250 - protein, 312 aa, Colwellia psychrerythraea 34H
MDSQLSSTANIEITPIIAFFKSLQDKICQALEEADGTGKFVEDNWKRKEGGGGRTRVMTDGTVVEQGGVNFSVVSGDKLPPSATAHRPELAGRTWQACGVSLVIHPKNPNIPTSHANVRFFIAEKEGEKPVWWFGGGFDLTPFYPNDEDIQHWHQTAHDLCQPFGDNVYNDHKKWCDEYFYLKHRDETRGVGGLFFDDLNQWDFDTCFDYVKAVGQGFIDAYVPIMQRRKDEAFGEQERQFQLYRRGRYVEFNLVFDRGTLFGLQSGGRTESILMSMPPLARWEYNFQADEGSAEAKLADYLSPKDWLNVLK

SEQ ID NO: 53251 - DNA, 915 bp, Pseudomonas syringae pv. phaseolicola 1448A
  CDS (1)..(915): transl_table=11
atgagtacccgtaccgaggccgtaaaagcctacctgctcgacctgcaagaccggatctgcaccgcgctcgagcaggaagatggcaacgcacactttgtggaagatgcctggacgcgtccggcgggcggcggtggtcgcacgcgggtgatcgagaatggtgcggtcatcgagaaaggtggtgtcaatttttcccacgtgttcggcagcaacctgccgccgtcggccagtgcccatcggcctgagctggccgggcgtggtttcgaggcgctgggcgtgtcgctggtgattcacccgcacaacccgcatgtgccgacgtcccacgccaatgtgcggttcttcattgccgagaaagaaggcgaggagccggtctggtggtttggtggtggtttcgatttgacgccctactatggcgtcgaggaagactgcgtacactggcaccgggtggccgaacgcgcctgtgcgccgttcggcgacgatgtctacccgcgctacaaggcatggtgcgacagttacttccacctcaagcatcgtgatgagccacgcggtatcggtggtctgtttttcgatgacgtgaaccagtgggatttcgataccagctttgccttcatccgcgccatcggtgatgcgtttatcaatgcctacctgccgatcgtgcgtcgtcgcaaggctgcggcctatacggcgcagcagcgcgagtttcaggaattccgtcgggggcgctacgtcgagttcaacctggtgtacgaccgcggcacgctgttcggtctgcaatcgggtggccgtaccgaatcgatcctcatgtcgctgccgccgcaagtgcgctggggttatgactggaaagccgctccgggcagtgaagaggcgcgtctgaccgaatacttcctgactgatcgcgactggctggcggacaactga

SEQ ID NO: 53252 - protein, 304 aa, Pseudomonas syringae pv. phaseolicola 1448A
MSTRTEAVKAYLLDLQDRICTALEQEDGNAHFVEDAWTRPAGGGGRTRVIENGAVIEKGGVNFSHVFGSNLPPSASAHRPELAGRGFEALGVSLVIHPHNPHVPTSHANVRFFIAEKEGEEPVWWFGGGFDLTPYYGVEEDCVHWHRVAERACAPFGDDVYPRYKAWCDSYFHLKHRDEPRGIGGLFFDDVNQWDFDTSFAFIRAIGDAFINAYLPIVRRRKAAAYTAQQREFQEFRRGRYVEFNLVYDRGTLFGLQSGGRTESILMSLPPQVRWGYDWKAAPGSEEARLTEYFLTDRDWLADN

SEQ ID NO: 53253 - DNA, 897 bp, Dechloromonas aromatica RCB
  CDS (1)..(897): transl_table=11
atggataccacccgcctcaaggattttttcaccggcctgcaaagccgcatcgtcgccgaactggaggccttcgacgggcaacctttccgtacggactcctgggttcgcccggaaggcggcggtggcatttcccgactgatcgaggaaggcgatttcttcgaacgcggcggcgtcaatttttcgcacgtcaccggcaagtcgttgcctgcgtcggccaccgccgtccgcccgcaactggccgggcgctcgtgggaagcgatgggcgtttcgctggtgctgcatccgcgcaacccttactgcccgacggcacatatgaacgtgcgctgtttcgtggccagcaaggaaggcgaagaagatgtctggtggttcggcggcggcatggacatgacgccttactacggccagcgtgaggatgtcgtgcacttccaccagacctgcaaggatgcactggcaccgttcggcgacgaggtctatccgaaatacaagcattggtgcgacgaatactttttcctgaaacatcgcaacgaaccgcgcggtgtcggcggcgtgtttttcgacgaccttaacgaaggcggtttcgagcgttgtttcgagctaacccaggccgtcggcaatgccttcaccaaggcctacctgcctgttctcgccaagcgccgcgagatgccttacgacgagcgcgaacgcgacttccaggcttaccgtcgaggtcgttacgttgaattcaatctggtctgggaccgcggcacgctgtttggcctgcaatccggcgggcgcaccgaatcgatcctgatgtcactgcccccgatcgtcaaatggcgctacgactggcaaccggaagccggcagcccggaggccgagttgtacgaagtattcctcaagccgcaggactgggcctga

SEQ ID NO: 53254 - protein, 298 aa, Dechloromonas aromatica RCB
MDTTRLKDFFTGLQSRIVAELEAFDGQPFRTDSWVRPEGGGGISRLIEEGDFFERGGVNFSHVTGKSLPASATAVRPQLAGRSWEAMGVSLVLHPRNPYCPTAHMNVRCFVASKEGEEDVWWFGGGMDMTPYYGQREDVVHFHQTCKDALAPFGDEVYPKYKHWCDEYFFLKHRNEPRGVGGVFFDDLNEGGFERCFELTQAVGNAFTKAYLPVLAKRREMPYDERERDFQAYRRGRYVEFNLVWDRGTLFGLQSGGRTESILMSLPPIVKWRYDWQPEAGSPEAELYEVFLKPQDWA

SEQ ID NO: 53255 - DNA, 1047 bp, Prochlorococcus marinus str. NATL2A
  CDS (1)..(1047): transl_table=11
ttgtcctcctcacaagataaagccaatttaccggcaaacaattcaagagctcgagcaaaaaagcttgttttagagcttcaagatgaaatttgcgctggcttagagactattgatggtgaaggcaaattcctagaagaatcttgggagagaccagagggtggtggtggacgctcaagagtcttgaaagatggacaaatctttgagcagggaggggtgaatttttctgaagtacatggcaatgaacttccaccctcaatcattagccaaagaccagaagcaaaaggtcactcttggtttgcgacaggaacctcaatggttcttcaccccaaaagtccttacatacctactgttcatcttaattacagatatttcgaagcagggcctgtttggtggtttgggggaggggctgatttaacacctttctatccatatctatctgacacgcgtcactttcactcatgccataaaaatgcatgtgacacaattgacaaagatctacataaggttttcaaaccttggtgtgacgaatatttcttcctaaaacatagaaatgagactagaggagttggaggtatcttttatgactatcaagacggatccggcttgctttataaaggacaaaatgcaaatgggaaggcctctaaaatcgcaaaagagctaggggaatattctttgaattgggaaaatcttttttcacttgccaaagcatgcgggcaggcatttctgccctcctatgagccaataataaaaaagcgaaaaaatcaaagtttttcaaccaaagaaagagactttcaactttataggcgaggtagatatgctgagttcaatttagtatgggatagaggaaccatttttggattacaaacgaatggaagaacggagtcaatattgatgtcattacctcccttagcaagatgggagtatggatataagccagaagaaaattcacgtgaggctctattaacagatttatttactaagcctcaagattggtttacagataaatctctggaaaagaggtgtttaactcatcaagcattagattag

SEQ ID NO: 53256 - protein, 348 aa, Prochlorococcus marinus str. NATL2A
MSSSQDKANLPANNSRARAKKLVLELQDEICAGLETIDGEGKFLEESWERPEGGGGRSRVLKDGQIFEQGGVNFSEVHGNELPPSIISQRPEAKGHSWFATGTSMVLHPKSPYIPTVHLNYRYFEAGPVWWFGGGADLTPFYPYLSDTRHFHSCHKNACDTIDKDLHKVFKPWCDEYFFLKHRNETRGVGGIFYDYQDGSGLLYKGQNANGKASKIAKELGEYSLNWENLFSLAKACGQAFLPSYEPIIKKRKNQSFSTKERDFQLYRRGRYAEFNLVWDRGTIFGLQTNGRTESILMSLPPLARWEYGYKPEENSREALLTDLFTKPQDWFTDKSLEKRCLTHQALD

SEQ ID NO: 53257 - DNA, 849 bp, Ehrlichia canis str. Jake
  CDS (1)..(849): transl_table=11
atggaagaaaagcaaaaaagagcagttaattggtttacaacattacaaaatcagcttctctccaaatttatatcaatagaaaaagaattctcttctttctctccgcaagtagataataaaaattgggaaaggccaggtggtggaggagggcattcaataataatatatggtaaggtttttgaaaaagctggaataaacgtttcagaagtatatggagatattacaaaaactcacgaattatctaatgtattaaataattctgagattttcaattcctcttcagaaaaaaaattttgggcaagtggaatttctgttgttgcacatatgtgttctccttttgtacctgcaatacatatgaatacaagatttatttgcatatcagataaaagctggtttggtggtggggtagatttaactcctacatataaaaatacacaagatcaagaacttttccatgatagtttacgtaaaatttgtgatcaacataacaaagagtattatagtaaatttaaacaacaatgtgatgagtacttttttttacatcatagacaagagccacgtggtataggtggaatattttatgacaatataaattcaggaaactgggaagatgactttcaatatactcaagcagtaggtaaatttttattggatatatacccaattattataagaagaaatttgaataagaagtggactgtagaagaacgtgaatatcaattaattaaacgtggaagatatgtagaatttaatttaatttatgacagaggtactaaatttggtttattaacaaacggaaatcctgatgcaataatgatgtctatgcctcctgtagtgaaatggaagtga

SEQ ID NO: 53258 - protein, 282 aa, Ehrlichia canis str. Jake
MEEKQKRAVNWFTTLQNQLLSKFISIEKEFSSFSPQVDNKNWERPGGGGGHSIIIYGKVFEKAGINVSEVYGDITKTHELSNVLNNSEIFNSSSEKKFWASGISVVAHMCSPFVPAIHMNTRFICISDKSWFGGGVDLTPTYKNTQDQELFHDSLRKICDQHNKEYYSKFKQQCDEYFFLHHRQEPRGIGGIFYDNINSGNWEDDFQYTQAVGKFLLDIYPIIIRRNLNKKWTVEEREYQLIKRGRYVEFNLIYDRGTKFGLLTNGNPDAIMMSMPPVVKWK

SEQ ID NO: 53259 - DNA, 912 bp, Thiobacillus denitrificans ATCC 25259
  CDS (1)..(912): transl_table=11
atgtctgtcaccgcctgcgatccctccgccgtcaaaacctggctgctcgacctgcagtcgcgcatcgtcgccgcgctcgaagccgccgacggcctgcccttccgtaccgattcctgggatcgcccggagggcggcggcgggatttcgcggctgatcgaggaaggcaacgtgctcgagcgcggcggcgtcaatttctcgcacgtcaccggcgtccagctgccgccttcggccagcgcgcaccgccccgaactcgccgggcgccgctgggaggcaatgggcgtctcgctggtcttgcacccgcgcaacccctacgtgccgacggtccacatgaacgtgcgctgcttctccgcgctcaaggacggtgaagcaccggtatggtggttcggcggcggcatggacctgaccccgtattacggcttcgaacaggatgcccgccacttccacctcgcctgcaagagcgcgctcgatccgttcgggcccgggctgcatgcgcgcttcaaggactggtgcgaccgttacttcttcctcaaacatcgcaacgaggcgcgcggggtgggcggcatcttcttcgacgacttttccgaaggcggtttcgatcacgccttcgcgatgacgcggagcgtcggcgacgccttcatcgacgcctacctgccgatcctggaacgccgcaaggacatcgcctacggcgagcgcgaacgcgatttccaggcctaccgccgcggccgctacgtcgaattcaatctcgtgctcgaccgcggcaccctgttcggcctgcagtcgggcgggcgcaccgagtcgatcctgatgtcgctgccgccgctcgtgaagtggcgctacgactggcagcccgcgcccggcacgcccgaggccgagctttacaccgcgttcctgccggcgtgcgactgggtctga

SEQ ID NO: 53260 - protein, 303 aa, Thiobacillus denitrificans ATCC 25259
MSVTACDPSAVKTWLLDLQSRIVAALEAADGLPFRTDSWDRPEGGGGISRLIEEGNVLERGGVNFSHVTGVQLPPSASAHRPELAGRRWEAMGVSLVLHPRNPYVPTVHMNVRCFSALKDGEAPVWWFGGGMDLTPYYGFEQDARHFHLACKSALDPFGPGLHARFKDWCDRYFFLKHRNEARGVGGIFFDDFSEGGFDHAFAMTRSVGDAFIDAYLPILERRKDIAYGERERDFQAYRRGRYVEFNLVLDRGTLFGLQSGGRTESILMSLPPLVKWRYDWQPAPGTPEAELYTAFLPACDWV

SEQ ID NO: 53261 - DNA, 1044 bp, Anabaena variabilis ATCC 29413
  CDS (1)..(1044): transl_table=11
atggtgacaaactcgcaaaccccaacggtaaaggcaaaaatatccccgtctctaccagccactgacgctaaagctagagtcagtaattttatgaaacagttgcaagatgaaattacacaagccttaacaaaacttgatggtgtgggtcagtttcatgaagatagttgggaacgtcctgaggggggtggcgggcgatcgcgtgtgctacgtgatggtgcaatatttgagcaagctggggtaaatttttctgaagtttggggttctcatctccctccttcaattttagcccagcgtcctgaagcggaaggacatggcttttatgccacaggtacatcgttggttttacatccacgcaacccctatgttcccacagttcacctaaattaccgttattttgaagctggcccagtttggtggtttggtggcggtgctgacctcacaccttattacccctttgcagaagatgcggctcatttccatcagaccctgaagggagcttgtgacgaacatcacccagagtattacccagtctttaaacgctggtgtgatgaatacttctatcttaaacaccgcgatgaaactaggggtgtaggtggtctatttttcgattatcaagatggacaaggtgttttatatcgcggccccaaccctaaaggcgaagcagccaattacagtaatcaagtaggagaaccagcaccacgggactgggaagatttgtttagttttgtccaaggttctggtaaggcttttttacccgcctacgtccccattgtagagcgccgtcatggaatagagtatggcgatcgccaacggaacttccaactttatcgtcgtggtcggtatgtcgaatttaacttggtttatgaccgaggcacaatttttggcttgcaaaccaacggacgtactgaatctattttgatgtctttaccacctttggttcgttgggaatacggttatcaacccgaacccaactctccagaagcagagttatatgatacattcctcaagccccaagattggagcaactggacagcaaaacagtaa

SEQ ID NO: 53262 - protein, 347 aa, Anabaena variabilis ATCC 29413
MVTNSQTPTVKAKISPSLPATDAKARVSNFMKQLQDEITQALTKLDGVGQFHEDSWERPEGGGGRSRVLRDGAIFEQAGVNFSEVWGSHLPPSILAQRPEAEGHGFYATGTSLVLHPRNPYVPTVHLNYRYFEAGPVWWFGGGADLTPYYPFAEDAAHFHQTLKGACDEHHPEYYPVFKRWCDEYFYLKHRDETRGVGGLFFDYQDGQGVLYRGPNPKGEAANYSNQVGEPAPRDWEDLFSFVQGSGKAFLPAYVPIVERRHGIEYGDRQRNFQLYRRGRYVEFNLVYDRGTIFGLQTNGRTESILMSLPPLVRWEYGYQPEPNSPEAELYDTFLKPQDWSNWTAKQ

SEQ ID NO: 53263 - DNA, 1044 bp, Anabaena variabilis ATCC 29413
  CDS (1)..(1044): transl_table=11
atgggtcgtcattccgataattctctgcaagaatctccaaatcacacagaattgctgatatcacctaccaatacaatacccaaggattcacggcagcgatcgcagcaattcatgcagaacttacaggatgagatttgcacagcgttagagcaaattgacgggaaagcaagctttcaccaagactattgggagcgagcagaagggggagaaggacgtacccgcgtgattcgagaaggacgggtgtttgaacaaggtggcgtgaacttttccgcagtgtggggaaatagcctacctgcttcaattttggcgcaacgtccagaagcagccggacatgagttttttgccacaggaacttcaatggtgttgcatcctcgcaatccttatgtaccaacagtacatctcaactatcgctactttgaagctggccctatttggtggtttggtggtggggcggatttaaccccatactacgcctttgaagaggatgcggttcactttcatcagacgctaaaaaatgcttgtgatgtccataatccagagtattatccagcatttaaacgctggtgtgatgaatacttctatttacgacatcgccaagaacagcgaggtattggcggtattttcttcgactatcaagatgctagcggtaagctttacattggcactcaagcagatagtccagccgcaatttacagccagaaagtgggaaatgtgacgcggaattgggaggatatttttgcgtttgtccagtcttgcggtcaggctttcttacctgcttacttgcctattgtagaacgcaggcaagcaactgagtacggcgatcgccaacgtaatttccaactataccgccgtggtcgttatgttgaatttaatttagtttacgaccggggaactgtgtttggcttgcaaactaagggacggacagaatcgattctcatgtctttaccacccttagcacgttgggaatattgctacgaaccgaaagctggaagcccagaagcggaactaacagaagtttttctccagcctagagattgggcgtag

SEQ ID NO: 53264 - protein, 347 aa, Anabaena variabilis ATCC 29413
MGRHSDNSLQESPNHTELLISPTNTIPKDSRQRSQQFMQNLQDEICTALEQIDGKASFHQDYWERAEGGEGRTRVIREGRVFEQGGVNFSAVWGNSLPASILAQRPEAAGHEFFATGTSMVLHPRNPYVPTVHLNYRYFEAGPIWWFGGGADLTPYYAFEEDAVHFHQTLKNACDVHNPEYYPAFKRWCDEYFYLRHRQEQRGIGGIFFDYQDASGKLYIGTQADSPAAIYSQKVGNVTRNWEDIFAFVQSCGQAFLPAYLPIVERRQATEYGDRQRNFQLYRRGRYVEFNLVYDRGTVFGLQTKGRTESILMSLPPLARWEYCYEPKAGSPEAELTEVFLQPRDWA

SEQ ID NO: 53265 - DNA, 915 bp, Pseudomonas fluorescens PfO-1
  CDS (1)..(915): transl_table=11
atgacgacccgcaccgacgccgtaaaggcctatctgctcgacctgcaagaccgcatctgcgccgcgctggaaactgaagacggcggcacgcgcttcgtcgaagacgcctggacccgtccggccggcggtggcggtcggacccgggtgatcgagaacggcacggtgatcgaaaagggcggcgtcaacttttcccacgtcttcggcagtggcctgccaccgtctgccagcgcccatcggccggaactggccgggcgtggtttcgaagcccttggtgtgtcgctggtgatccacccgcacaacccgcatgtgccgacgtcccacgccaacgtgcgctttttcatcgccgagaaggaaggtgaagaaccggtctggtggttcggcggtggtttcgacctgaccccgtactacggcaacgaagaagactgcatacactggcaccgcgtcgccgaaaaggcgtgcgcgccgttcggtccggacgtctacccgcgctacaaggcctggtgcgacacctatttccacatcaagcatcgccacgagccgcgcggcatcggcggcctgttcttcgatgacctgaacgagtgggatttcgacaccagtttcgccttcatgcgcgccatcggcgatgcgtacatcgacgcttacctgccgatcgtgcagcgccgcaagaacgacgccttcaccgccaggcagcgtgagttccaggaattccgccgcggccgctacgtcgagttcaacctggtttacgaccgtggcaccctgttcggcctgcaatcgggcgggcgcaccgagtcgatcctgatgtcgctgccgccgcaagtgcgctgggcctacgactggaaagccgaaccgggcagcgaagaagcgcgcctgaccgagtacttcctgcaagatcgcgactggctagcccaggcctga

SEQ ID NO: 53266 - protein, 304 aa, Pseudomonas fluorescens PfO-1
MTTRTDAVKAYLLDLQDRICAALETEDGGTRFVEDAWTRPAGGGGRTRVIENGTVIEKGGVNFSHVFGSGLPPSASAHRPELAGRGFEALGVSLVIHPHNPHVPTSHANVRFFIAEKEGEEPVWWFGGGFDLTPYYGNEEDCIHWHRVAEKACAPFGPDVYPRYKAWCDTYFHIKHRHEPRGIGGLFFDDLNEWDFDTSFAFMRAIGDAYIDAYLPIVQRRKNDAFTARQREFQEFRRGRYVEFNLVYDRGTLFGLQSGGRTESILMSLPPQVRWAYDWKAEPGSEEARLTEYFLQDRDWLAQA

SEQ ID NO: 53267 - DNA, 876 bp, Rhodobacter sphaeroides 2.4.1
  CDS (1)..(876): transl_table=11
atgaatgacgcgatggacggacagaaggcgcgggcctcggagtggttccgcgagctgaggaaccgcatcctcgcggccttcgagggactcgaggatgcggccacaggcggctctcccgcggatgccgcgcccggccggttcgagatgaccgagacgagccgcgaggcgggcggcggcgggctcatgagcgtgatgcgcggcgggcgcgtattcgagaaggtgggcgtgaatgtctcgaccgtccatggcacgctggcgagccgggcgcagcaggcgatggccgcccgcggtgtgccgggcatggccgaggatccgcgcttctgggcctcgggcatcagcctcgtggcgcatatgcagaacccgcatgcgccggctgtccacatgaacacccgcatgttctggaccccgcacgcctggtggttcggcggcggctcggacctcaacccctgcctcgattatcccgaggataccaagcatttccacgccacgctgcgccatgcctgcgaggcgcacggggcggactactatccgcgcttcaaagcctgggccgacgaatatttcttcatcccccaccggggccgggcccgcggcgtgggcgggatcttcttcgacgacctgaataccgacgactgggaggccgatttcgccttcacccgcgcggtgggcgaggccttcctgccggccttcgtgcccctcgtcgagcggcgcatggaaacgccctggaccgaggccgaccgcgaggcgcagctcatccaccgcgggctctatgcggaatacaacctcgtctatgaccggggcacgaaattcggcctcgagaccggccacgacgccaacgccgtgctgatgagcctgcccccgctggccaagtgggtctga

SEQ ID NO: 53268 - protein, 291 aa, Rhodobacter sphaeroides 2.4.1
MNDAMDGQKARASEWFRELRNRILAAFEGLEDAATGGSPADAAPGRFEMTETSREAGGGGLMSVMRGGRVFEKVGVNVSTVHGTLASRAQQAMAARGVPGMAEDPRFWASGISLVAHMQNPHAPAVHMNTRMFWTPHAWWFGGGSDLNPCLDYPEDTKHFHATLRHACEAHGADYYPRFKAWADEYFFIPHRGRARGVGGIFFDDLNTDDWEADFAFTRAVGEAFLPAFVPLVERRMETPWTEADREAQLIHRGLYAEYNLVYDRGTKFGLETGHDANAVLMSLPPLAKWV

SEQ ID NO: 53269 - DNA, 924 bp, Burkholderia sp. 383
  CDS (1)..(924): transl_table=11
atgaccgattcgacctacgacgtagcgcgcgtgcgcacgtacctccaggacctgcagacacgcatcgccgacgcgctcggcgcgctcgacggcacgccgctcgcgaccgacgcatggcagcgcgggccggccgaacgcctgcgcggcggcggctgcacgcggattctcgaaggcggccgcgtgttcgaacgcgcggggatcggcttttccgacgtcgcgggcgatgcgctgccgccgtcggcgagcgcggcgcgcccgcagcttgccggccgcggcttcgaggcgctcggcgtgtcgctggtgctgcacccgcgcaatccgtactgcccgaccgtgcacatgaacgtgcggatgctgatcgcgacgaaaccgggcgaggagcccgtgttctggttcggcggcggcatggatctgacaccggtttacggtttcgaggacgatgcccggcatttccaccagacctgcaaggatgcgctcgacccgttcggcgtcgagctctacccgcgcttcaagaaatggtgcgacgagtatttcttcctgaagcaccgcaacgagatgcgcggcatcggcgggatcttcttcgacgatttttcggagcccggtttcgaacgctcgtttgacatgatgcaaagtgtcggcgacgcgttcctgcaggcctacctgccgatcgtcgaacgccgcgccgagctgccgtacggcgagcgcgagcgcgacttccaggcgtaccgccgcggccgctacgtcgaattcaacctcgtgttcgaccgcggcacgctgttcggcctgcaaagcggtggccggaccgagtcgatcctgatgtcgatgccgccggtcgcgaactggcgctataactggcaacccgaaccgggttcgccggaagcgcgcctgtacagcgacttcatcgtgccgcgcgactggatctga

SEQ ID NO: 53270 - protein, 307 aa, Burkholderia sp. 383
MTDSTYDVARVRTYLQDLQTRIADALGALDGTPLATDAWQRGPAERLRGGGCTRILEGGRVFERAGIGFSDVAGDALPPSASAARPQLAGRGFEALGVSLVLHPRNPYCPTVHMNVRMLIATKPGEEPVFWFGGGMDLTPVYGFEDDARHFHQTCKDALDPFGVELYPRFKKWCDEYFFLKHRNEMRGIGGIFFDDFSEPGFERSFDMMQSVGDAFLQAYLPIVERRAELPYGERERDFQAYRRGRYVEFNLVFDRGTLFGLQSGGRTESILMSMPPVANWRYNWQPEPGSPEARLYSDFIVPRDWI

SEQ ID NO: 53271 - DNA, 1029 bp, Prochlorococcus marinus str. MIT 9312
  CDS (1)..(1029): transl_table=11
atgttgaaagaacctcctaaaaactcgagagaaaaaactaaaaatctcttattaactctacaagacaaaatttgttcagggcttgaaaatatagatggaaaagggaaatttacagaagaatcctggctaagagacgaaggtggcggtggaagatcaagagtattgaaaaatggttctatttttgagcaagcaggagtaaatttttcggaagtacagggaaaagaattacctcaatctataatctcccaaaggcccgaagcaaaaggtcatgaatggtttgctacgggaacttctatggttttgcatcctaagaatccctttattccaacagttcatctgaattatcgatatttcgaagctggtcctgtttggtggtttggcggaggtgcagacttaacccctttttatccatatctttctgatgtgagaaattttcataaagaacataaaaaagcttgtgaaaaagttgataaagacttacataaagtttttaaaccatggtgtgatgaatatttcttcttaaagcacagaaatgaatctagaggaataggtggtattttttatgactatcaagatggttcaggcaatatttatagaggaaataatcaaaatggagaggcatcaaaagtttcagaaaatattggcaaatctaatttaaattgggataatttattttctttagcggaaaactgtgggcaggcattcctcccttcatatctgcctattattgaaaaaagagctaataaaacatatacatcaaaagaaagagaattccagctatatcgaagaggtagatatgtcgaattcaatttagtttgggatagagggacaatttttggattacaaacaaacgggaggactgaatcaatattaatgtcattaccacctttagccagatgggagtatggatataaagctaaaaagggttctagagaggaatttcttacatcaatctttacaaaaccgcaagattggttaaatgataaagatttagaaaatttctgtatggagaataatatttttgattaa

SEQ ID NO: 53272 - protein, 342 aa, Prochlorococcus marinus str. MIT 9312
MLKEPPKNSREKTKNLLLTLQDKICSGLENIDGKGKFTEESWLRDEGGGGRSRVLKNGSIFEQAGVNFSEVQGKELPQSIISQRPEAKGHEWFATGTSMVLHPKNPFIPTVHLNYRYFEAGPVWWFGGGADLTPFYPYLSDVRNFHKEHKKACEKVDKDLHKVFKPWCDEYFFLKHRNESRGIGGIFYDYQDGSGNIYRGNNQNGEASKVSENIGKSNLNWDNLFSLAENCGQAFLPSYLPIIEKRANKTYTSKEREFQLYRRGRYVEFNLVWDRGTIFGLQTNGRTESILMSLPPLARWEYGYKAKKGSREEFLTSIFTKPQDWLNDKDLENFCMENNIFD

SEQ ID NO: 53273 - DNA, 954 bp, Synechococcus elongatus PCC 7942
  CDS (1)..(954): transl_table=11
atgcagaccctgcaagacgagatttgcgcaggtctagaagcgctcgatggcggtggccaatttcgagaggacagctgggagcgtcctgaagggggtggcgggcgatcgcgcgtcatccgtgaaggtaatgtcttcgagcagggcggcgttaacttctcggaagtctggggcgaaaaactgccgccttcgatcctggcgcagtatcccgaagctgccggccatggctactttgcgacgggcacctcgatggtgctgcacccgcgcaatccctacatcccaacggtgcacctcaactatcgctacttcgaggcagggcctgtctggtggtttggcggcggcgctgacctaacgccctactatccctttgcggaagacgccaagcacttccacagcagctttaaggctgcttgcgatcgccactacccgcagttctacgacgtcttcaaactgtggtgtgatgagtacttcttcctcaagcatcgcggtgaaacgcgcggcattggcggcatcttcttcgactaccaagacgggcgtggcgacctctacaacaaggggcccgctccttccggccctgcgggtcaaaaagcggctgaagtcggcattgtttccgatctcaactgggaaaaactgtttgcttttgcccaagattgcggtcgtaccttcctgccagcctacagtccgatcgtggaacgtcgcaaagataccccttggggcgatcgcgagcgccaattccagctctaccgtcgaggccgctacgtcgaattcaaccttgtttacgatcgcggcacgattttcgggctgcaaactaacggccgcaccgagtcgatcctgatgtccttgccgccgctggtgcgctgggaatacatgtatcaaccggaggccggcagtcgcgagcaagagctctacgatgtcttcctcaagccccaagactgggtcaactggccgaccgcctag

SEQ ID NO: 53274 - protein, 317 aa, Synechococcus elongatus PCC 7942
MQTLQDEICAGLEALDGGGQFREDSWERPEGGGGRSRVIREGNVFEQGGVNFSEVWGEKLPPSILAQYPEAAGHGYFATGTSMVLHPRNPYIPTVHLNYRYFEAGPVWWFGGGADLTPYYPFAEDAKHFHSSFKAACDRHYPQFYDVFKLWCDEYFFLKHRGETRGIGGIFFDYQDGRGDLYNKGPAPSGPAGQKAAEVGIVSDLNWEKLFAFAQDCGRTFLPAYSPIVERRKDTPWGDRERQFQLYRRGRYVEFNLVYDRGTIFGLQTNGRTESILMSLPPLVRWEYMYQPEAGSREQELYDVFLKPQDWVNWPTA

SEQ ID NO: 53275 - DNA, 864 bp, Novosphingobium aromaticivorans DSM 12444
  CDS (1)..(864): transl_table=11
atgagcaactggaccgaccacaccgcccgcgcccgcacctggttcgaaagcctgcgtgaccgcatctgcgcggagttcgaagcgatcgagcgcgaggcgggctcggacgcgcgcttcgcctacactccgtggaaccgcgagcacgaaggcgagaccgtggagaacgggggcggcggggtccagggcctgatgaagggccgggtcttcgagaaggtcggcgtcaacgtatcgaccgtgcagggggaattctcgaaggagttcgctggcacgatcaacggggcgagcgcggacgcgccgggcttcaccgcaaccggcatcagccttgtcgcccacatggccaatccgcacgtgcccgccgtccacatgaacacccgcttcctcaccaccagcaaggcatggttcggcggcggcggcgatctcaatccgccgatcccctatgaagaggatacggtagagttccatgccgagtacaaggcggcctgcgacaggcacgatccggaatactatccccggttcaagaagtgggcggacgactacttctggattccccaccgcaaggtccatcgcggcgttggcggcatcttctacgaccaccttgaatgtgccgacgatgcggcgttcgaggcgaacttcgccttcacccgcgacgtgggcgaggctttcatcaacgtgttcccgcgcctcgtgcggcggcggatgggcatggatttcacgcccgccgaaaagctgacccagctcgagtatcgcgggcgctatgccgagttcaaccttgtctgggaccggggcacgctgttcgggctcaagaccggcggcaacatcgacgcgatcctgatgagtctgccgccggaagccgtctggagctga

SEQ ID NO: 53276 - protein, 287 aa, Novosphingobium aromaticivorans DSM 12444
MSNWTDHTARARTWFESLRDRICAEFEAIEREAGSDARFAYTPWNREHEGETVENGGGGVQGLMKGRVFEKVGVNVSTVQGEFSKEFAGTINGASADAPGFTATGISLVAHMANPHVPAVHMNTRFLTTSKAWFGGGGDLNPPIPYEEDTVEFHAEYKAACDRHDPEYYPRFKKWADDYFWIPHRKVHRGVGGIFYDHLECADDAAFEANFAFTRDVGEAFINVFPRLVRRRMGMDFTPAEKLTQLEYRGRYAEFNLVWDRGTLFGLKTGGNIDAILMSLPPEAVWS

SEQ ID NO: 53277 - DNA, 825 bp, Anaplasma phagocytophilum HZ
  CDS (1)..(825): transl_table=11
atggacgagaaaaaagatctagttactgagtggtttgctgttttaagggataaaatagttagtgcatttcttgcagtagaggcagatttttctgacaatgctcccacaattaagaaaagaaaatgggaaagagaaggtggcggtggcggggagtcagttatcattctaggatctgtatttgaaaaagcgggtgttaatttttctatagtgcacggaaagctgaaaagcgactttgctgcagaaattccaggtgcacgagaaagtaatggtgaattttgggcgagtggcgtttctattgttgcacatatgtgttcaccatttgttccagcgatacacatgaatacaaggtttatttgtacttcaaagagttggtttggtggtggtatcgaccttactcctgtgtatcacaatgatgatgacactattttcttccatgatgccttgaaagccatgtgtaataagtttgatgcgcactactacgatcagtttaaaaagaactgtgacgaatatttctatcttccgcataggaaggagcctaggggagtcggcggaatattctacgattatctgcagactggctttgagaaggactttgcctttactcgcgcggttggggaatgttttctagaggtttatccggcgatagtgagacggaatatgcataaggagtggagtgaagaagagcgagattatcagcttatcagtcgtggtcgctatgtagagttcaatttgctttacgaccgtggtaccaggtttggattaatgacggacggtaattccgatgccataatgatgtctatgcctccgcttgcgaaatgggtttag

SEQ ID NO: 53278 - protein, 274 aa, Anaplasma phagocytophilum HZ
MDEKKDLVTEWFAVLRDKIVSAFLAVEADFSDNAPTIKKRKWEREGGGGGESVIILGSVFEKAGVNFSIVHGKLKSDFAAEIPGARESNGEFWASGVSIVAHMCSPFVPAIHMNTRFICTSKSWFGGGIDLTPVYHNDDDTIFFHDALKAMCNKFDAHYYDQFKKNCDEYFYLPHRKEPRGVGGIFYDYLQTGFEKDFAFTRAVGECFLEVYPAIVRRNMHKEWSEEERDYQLISRGRYVEFNLLYDRGTRFGLMTDGNSDAIMMSMPPLAKWV

SEQ ID NO: 53279 - DNA, 921 bp, Neorickettsia sennetsu str. Miyayama
  CDS (1)..(921): transl_table=11
atgtactctcgaattcttttgggtttgggggaaccaatgtatcattactgtttgggcaatattcataattgtgaggtccgtgtgttaagtgagaaaaaagaaacagcagctgcctggtttagggagttaagagattgtatcagggatgagtttgtcgctatagaaaaagagtttgatcacaattttcggtcgggttttgcagtagaatcttgggaacgagaaggtggcggaggcggtgaaatgagcctcatgtacggtactgtatttgagaagataggtgtgaatatatcaaccgtgcatggagttttcagcgaagattttgcatctaaaattcctggtgcactagaaagtggggggaatttctgggctagtggtatttcattggtggcgcatatgagttctccacttgttcctgcagtgcatatgaatacacgcatgatagttactgataaatactggtttggtggtggtgcagatttgactcctatgtactacaacgaggaggatgcaaaaaccttccacgctgagtttaaagaaacgtgtgatagacatgatagcaagtattacaacgaattcagtaagtgggcggatgaatatttttacgtaaaacataggaatgaacctaggggaatagggggaatattctacgattacttaagaacagatgattgggagaaggattttgctttcacaaaagatgttggtaagtgctttctttctgtatatccaaagatagtgaggagaaatatgcatctttcttatacaaatgagcaaaggcagtttcagcttctcaagaggggcaggtatgttgaatttaatcttctgtatgatagaggtaccgagttcgggctcaagactggtggtaacgtgaaggcaatcctgatgtctttgccccctgtggtggagtggagagatttttaa

SEQ ID NO: 53280 - protein, 306 aa, Neorickettsia sennetsu str. Miyayama
MYSRILLGLGEPMYHYCLGNIHNCEVRVLSEKKETAAAWFRELRDCIRDEFVAIEKEFDHNFRSGFAVESWEREGGGGGEMSLMYGTVFEKIGVNISTVHGVFSEDFASKIPGALESGGNFWASGISLVAHMSSPLVPAVHMNTRMIVTDKYWFGGGADLTPMYYNEEDAKTFHAEFKETCDRHDSKYYNEFSKWADEYFYVKHRNEPRGIGGIFYDYLRTDDWEKDFAFTKDVGKCFLSVYPKIVRRNMHLSYTNEQRQFQLLKRGRYVEFNLLYDRGTEFGLKTGGNVKAILMSLPPVVEWRDF

SEQ ID NO: 53281 - DNA, 927 bp, Francisella tularensis subsp. holarctica
  CDS (1)..(927): transl_table=11
atgcaagaaaaaatttcaaaatttgaagattttctaacacaacttcaacaaaatattaccacagctctagagcagcatgaaacaaatgctgcaaaatttatttctgacaaatggcaaaaaccagatactcccgatcaaaaacttaaaggctatggtaactctatgattatagaaggtggcgaaatatttgaaaaaggtgtagtagctttttctagagtccacggtagtgagctaccaccatctgctacagcaaaaagacaagaattagctggtaaatcttttatagctacagggctttcattagttatccacccccgcaatccttttgtgccaacatctcatgctaattttagaatttttattgctggtgctgatactgataatccaatatggtggtttggtggaggttttgatctaacaccatactatccttttgaggaggatgcgattcactggcatcaaacagcaaaaaatatttgtgacaagcatgataaaacctattatccaaaattcaaaaaatggtgtgatgagtatttttatctcaaacatcgtgatgagtatcgtggggttggtggtttattttttgatgatttaaatgataaatcttttgatgaatgctttaattttgtaactgactgtgcaaattcttatttagatgcttatattccaatagtagcacaaagaaaaaatattgaatattcacaaaagcataaagattttcaactttatcgtcgtggtagatatgttgaatttaacttagtgtttgatagaggtacgatatttggcttacaaagtggtggacgaactgagtcaatactctcatcaatgccaccaatggcaacttggaaatataattggcaacctgaaccaggttctgaagaagaaaaagtttaccaatatataaaacctcgcgattggattaaataa

SEQ ID NO: 53282 - protein, 308 aa, Francisella tularensis subsp. holarctica
MQEKISKFEDFLTQLQQNITTALEQHETNAAKFISDKWQKPDTPDQKLKGYGNSMIIEGGEIFEKGVVAFSRVHGSELPPSATAKRQELAGKSFIATGLSLVIHPRNPFVPTSHANFRIFIAGADTDNPIWWFGGGFDLTPYYPFEEDAIHWHQTAKNICDKHDKTYYPKFKKWCDEYFYLKHRDEYRGVGGLFFDDLNDKSFDECFNFVTDCANSYLDAYIPIVAQRKNIEYSQKHKDFQLYRRGRYVEFNLVFDRGTIFGLQSGGRTESILSSMPPMATWKYNWQPEPGSEEEKVYQYIKPRDWIK

SEQ ID NO: 53283 - DNA, 912 bp, Saccharophagus degradans 2-40
  CDS (1)..(912): transl_table=11
atgactgcatccaataagcaagccgttaaagcctacctattaaacctgcaggacaaaatctgccaagtcttggctgcggtggacggcaaagaaacttttgttgaagattcttggcaaaggccagaaggcggcggcggtcgctctagggtgctcaccaatggcgccgtaatagaaaaaggtggggtaaacttttcccacgtgcacggctcctcaatgcctgcatcggctactgcgcacaggccagagcttgccggccgcagtttcgaagcaatgggggtatcgctggttattcaccccaataacccacatgtaccaaccagccacgccaatgtacggttttttatcgccgaaaaagagggcgccgagcctgtttggtggtttggtggtggttatgatttaaccccttattacggcaacgatgaagactgtcgccactggcacaatacggccaaggccgcttgcgcgccttttggtgaagataaatacccgcgctacaaaaaatggtgtgatgaatacttttacttgaaacaccgcgatgagccgcgcggtgtgggtggtttattttttgacgacctgaatgagctgggctttgaccagagctttgcttttatgcaggctgtgggcgacagctacacccaagcctatgtgcccattgtagagcgcagaaaagacgagccctataaccaagcgcaacgggattttcagctctaccgtcgcggtcgttatgtggaatttaatttggtgtacgatcgcggtacgctattcggcttacaaaccggtggtcgcacagagtctattcttatgagcttaccgccccttgtgcgctgggaatacgattggcaaccacagcccaatacaccagaagcgcgtttatacgaacattatttgcagccgcaagactgggctgaatag

SEQ ID NO: 53284 - protein, 303 aa, Saccharophagus degradans 2-40
MTASNKQAVKAYLLNLQDKICQVLAAVDGKETFVEDSWQRPEGGGGRSRVLTNGAVIEKGGVNFSHVHGSSMPASATAHRPELAGRSFEAMGVSLVIHPNNPHVPTSHANVRFFIAEKEGAEPVWWFGGGYDLTPYYGNDEDCRHWHNTAKAACAPFGEDKYPRYKKWCDEYFYLKHRDEPRGVGGLFFDDLNELGFDQSFAFMQAVGDSYTQAYVPIVERRKDEPYNQAQRDFQLYRRGRYVEFNLVYDRGTLFGLQTGGRTESILMSLPPLVRWEYDWQPQPNTPEARLYEHYLQPQDWAE

SEQ ID NO: 53285 - DNA, 909 bp, Methylobacillus flagellatus KT
  CDS (1)..(909): transl_table=11
atgaacccaactgcaatcttcgactaccttcaaggcctgcaaacccgcatcgtggaagccatcgagctggtggatggcaaacgtttcctgcacgatagctggcagcgcgcagaaggcggtggcgggacatcctgcatgctggaagaaggcaatgtgttcgaacgggccgggatcggcttctcccatgtcattggcaacaagctcccgccgtctgcgagtgtcgcccaccccgaggcggcaggtcgcagctggcaggccatgggcgtctcgctggtgttccacccgcgtaacccctatgtgccgaccgtgcatatgaacgtgcgcttcttcgtggcggaaaaacccggcgaggaaccgatctggtggttcggcggcggtatggacctgacaccctactacggttttgaagaggatgcggtgcatttccatcgcacctgtcgcgatgcggtggcgccgttcggcgagcagtactatcctcgcttcaagaaagagtgcgacgattacttctacctcaagcaccgcaaggaagcgcgcggcattggcggcattttttttgatgatttcaacgaactgggcttcgagcagagtttcgcgttccagcgcagcgtgggcgatgccttcatcaatgcctacctgcccattgtgcagcgacgtaaggatatcccatacagcgaacgcgaacgcgacttccaggcctaccgccgtggtcgctatgtggagttcaacctgatctatgaccgcggcaccattttcgggctgcagtccaatggccgtaccgaatccatcctgctgtccatgccgcccatcgtcaaatggcgctacgactggaagccggaagcgggctcacccgaagccaggctctatagcgacttcattaccggacgcgactggctcacggaacacaaataa

SEQ ID NO: 53286 - protein, 302 aa, Methylobacillus flagellatus KT
MNPTAIFDYLQGLQTRIVEAIELVDGKRFLHDSWQRAEGGGGTSCMLEEGNVFERAGIGFSHVIGNKLPPSASVAHPEAAGRSWQAMGVSLVFHPRNPYVPTVHMNVRFFVAEKPGEEPIWWFGGGMDLTPYYGFEEDAVHFHRTCRDAVAPFGEQYYPRFKKECDDYFYLKHRKEARGIGGIFFDDFNELGFEQSFAFQRSVGDAFINAYLPIVQRRKDIPYSERERDFQAYRRGRYVEFNLIYDRGTIFGLQSNGRTESILLSMPPIVKWRYDWKPEAGSPEARLYSDFITGRDWLTEHK

SEQ ID NO: 53287 - DNA, 912 bp, Ralstonia metallidurans CH34
  CDS (1)..(912): transl_table=11
atgatcgattcccaggcagtccgtgactatctgctcggcctgcaagaccgcatcaccgacgccatcgccgctgtcgacggccaggcgttcctgaccgataactgggagaagccccccaccgagcgcctgcgcggcagtggccgcacgcgcatcctggagggcggcgccgtgatggagcgggctggcgtggggttctcgcacgtgcgcggtgacacgctgccgccgtcggccagcgccaaccggcctgaactggccggccgcagcttcgaggcgatgggcgtctcgctggtattccatccgcgcaacccgtacgtgcccaccgtgcacatgaacgtgcgctgcttcatcgccgtgaagcccgacgcggaaccggtctggtggttcgggggtggcatggatctgacgccgtactacggcaacgccgacgactgcgcgcacttccaccgcacctgcaaggattcgctggccccgttcggcgacgacctgtatccgcgcttcaagcagtggtgcgacgagtattttttcctccgccatcgtggcgaggcacgcggcatcggcggcatcttcttcgatgatttctcggcgctcggcttcgaccgcagcttcgagatgctgcgctcggtcggcgatgcgttcctcgccgcctacctgccgatcctcaccgcacgcaaggacgccgcctatggcgagcgcgagcgcgatttccaggcctatcgccgcggccgctacgtcgaattcaatctggtgttcgaccgtggcacgctgttcggcctgcagtcgggcggtcgcacggagtcgatcctgatgtcgatgccaccgcaggtatcgtggcgctacgactggcagcccgagccgggcaccccggaagccgcgctctataccgatttcctgccggcgcgggactgggcctga

SEQ ID NO: 53288 - protein, 303 aa, Ralstonia metallidurans CH34
MIDSQAVRDYLLGLQDRITDAIAAVDGQAFLTDNWEKPPTERLRGSGRTRILEGGAVMERAGVGFSHVRGDTLPPSASANRPELAGRSFEAMGVSLVFHPRNPYVPTVHMNVRCFIAVKPDAEPVWWFGGGMDLTPYYGNADDCAHFHRTCKDSLAPFGDDLYPRFKQWCDEYFFLRHRGEARGIGGIFFDDFSALGFDRSFEMLRSVGDAFLAAYLPILTARKDAAYGERERDFQAYRRGRYVEFNLVFDRGTLFGLQSGGRTESILMSMPPQVSWRYDWQPEPGTPEAALYTDFLPARDWA

SEQ ID NO: 53289 - DNA, 903 bp, Silicibacter sp. TM1040
  CDS (1)..(903): transl_table=11
atggcacagaacacggcagaaatgcgtgacgagaaggcgcgcgcggcggcgtggtttcgagagctgcgagatcagatcgttgctgcattcgaagggcttgaggacagccaccacgaaggtccctttaccgagatgggcgccgggcggtttgatgtgagcgacaccaaacgcaccgccgaggatggttccgacgcgggtggtggccttatgagcgtgatgcgtggcgggcgcgtttttgaaaaggtcggtgtcaatatctccgaggtctacggcacgctgggagcacgcgcgcaacaggcgatggcggcgcgcaaggggctgcctggcatgaaggaagatccgcgcttctgggcctctggcatttccctcgtggcgcatatgcgcaatccgcatgtgcctgcggttcacatgaacacccgcatgttctggacccctcatggctggtggttcgggggtggctcagacctcaatccctgcatcgagtacgacgaggatacggcgcatttccatgaggtgcagcagacgcatctcgacccccatggagcggatctttatccccgcctcaaggcttgggcggatgagtatttctttattccccatcgcggtcgggcgcggggtgttggcgggatctttctggatgaccacaacacgggtgactgggcgcaggattttgcattgattcaggacattggccgcgcctttttgcccgcctttttgcctttggtggagcggcgacgggggcatgcgtgctctgcggatgacaaagaggctcagctcattcatcgcggtctctatgccgaatataacctcgtctacgaccgcggcacaaaatttggtctcgagaccgggcacgatgccaatgcagtcctgatgagcctgcctccgctggcgaaatggatttga

SEQ ID NO: 53290 - protein, 300 aa, Silicibacter sp. TM1040
MAQNTAEMRDEKARAAAWFRELRDQIVAAFEGLEDSHHEGPFTEMGAGRFDVSDTKRTAEDGSDAGGGLMSVMRGGRVFEKVGVNISEVYGTLGARAQQAMAARKGLPGMKEDPRFWASGISLVAHMRNPHVPAVHMNTRMFWTPHGWWFGGGSDLNPCIEYDEDTAHFHEVQQTHLDPHGADLYPRLKAWADEYFFIPHRGRARGVGGIFLDDHNTGDWAQDFALIQDIGRAFLPAFLPLVERRRGHACSADDKEAQLIHRGLYAEYNLVYDRGTKFGLETGHDANAVLMSLPPLAKWI

SEQ ID NO: 53291 - DNA, 906 bp, Myxococcus xanthus DK 1622
  CDS (1)..(906): transl_table=11
atgaagacggtggacgttgagagcctcaaggagcggatgacgggcttcatccggtcgctgcaggacgacatctgcggcggcctggagcggctggacggctcgacgcgtttccgcgaggactcctggacccggccgggcggcggcggtggacgcagccgggtgctggaggacggcgccgtgctggagaaggccggcgtcaatacgtccgtggtgtacggcgaactggaggagcagttcgcgcagaagctccagggcgagggccgccacttctgggcgggcggcatctccctggtgctgcacccgcgcaacccgcatgtgcccaccgtgcacgccaactaccgcttcatccagcagggcgggaaggcgtggttcggcggcggcgcggacctgacgccctactacctctatgaagaggacgcggcgcacttccaccgcgtgcaccaggccgcctgtgacaagcacgacgcgggctactacccgcgcttcaagagcgcctgtgacaagtacttctacctgcgccaccgcgaggagacgcgcggggtaggcggcatcttcttcgagaacatgggcggggagctggagaaggagttcgccttcgtccaggactgcggccgggccttcctggacgcgtacctgcccatcgccgagcggcgcaaggacacgccggcgacggaggggcagcgcttctggcaggaggtgcggcgcgggcgctacgtggagttcaacctcgtctatgaccggggcaccgtcttcggcctggagacgcgcgggcgcaccgagtccatcctcatgtccctgccgccgcaggtccgctggcgctacgactaccaccccgagcccggcacgccggaggcacggctggtggaggtgttgcgccagccacgcgactgggcgagaggaggctga

SEQ ID NO: 53292 - protein, 301 aa, Myxococcus xanthus DK 1622
MKTVDVESLKERMTGFIRSLQDDICGGLERLDGSTRFREDSWTRPGGGGGRSRVLEDGAVLEKAGVNTSVVYGELEEQFAQKLQGEGRHFWAGGISLVLHPRNPHVPTVHANYRFIQQGGKAWFGGGADLTPYYLYEEDAAHFHRVHQAACDKHDAGYYPRFKSACDKYFYLRHREETRGVGGIFFENMGGELEKEFAFVQDCGRAFLDAYLPIAERRKDTPATEGQRFWQEVRRGRYVEFNLVYDRGTVFGLETRGRTESILMSLPPQVRWRYDYHPEPGTPEARLVEVLRQPRDWARGG

SEQ ID NO: 53293 - DNA, 915 bp, Mesorhizobium sp. BNC1
  CDS (1)..(915): transl_table=11
atggaacaaccccatatcccggcgggactgcccgaagacgtcgaaaacaagaaggaagcggcgcgggcgtggttcgaaacgctgcgcgacaaaatctgcgccgcgctggaaggattggaggacgagctttccggccctcattcgtcctatgctcccggacgcttcgagcaaacgccctggctgcgccaggagggcgcgggcgggggcggcgtaatgtccatcatgcatggccgcgtgtttgagaaagtgggcgtgcacacctcaaccgtgcatggggagttttcgcccgaattccgccggcagattccgggagcggaggaggatccgcgcttctgggcctccggtatttccgttatcgcccacccgcaaaatcctcatgtccccacagtgcatatgaacacgcgcatggtggtgacaacccggcaatggtttggaggcggggccgacctcacgccgatgctcaaccgccggcgcagccaggaggacccggacgcaattgcctttcacaaggcaatgcgtttcgtctgcgaacggcacgcagcggtggccgactacgagaaattcaaaaactggtgcgaggaatatttcttcctgccgcacaggaacgagccacgcgggatcggcggcattttttacgattggctcaagagcccggaagagaatggagggtgggatgcggatttcgccttcacccaggatgtcgggcgcgcctttgtgatggtctatcagcacatcgtgcggaagaacttcaacaccaactggaccgaggccgaccgggaagaacagctcattcgccgcgggcgctatgtcgaattcaacctgctctacgaccgcggcacgattttcgggctcaagaccggcgggaatgtcaactctatcctgtccagcctgccgcccgtggtgaagtggccgtag

SEQ ID NO: 53294 - protein, 304 aa, Mesorhizobium sp. BNC1
MEQPHIPAGLPEDVENKKEAARAWFETLRDKICAALEGLEDELSGPHSSYAPGRFEQTPWLRQEGAGGGGVMSIMHGRVFEKVGVHTSTVHGEFSPEFRRQIPGAEEDPRFWASGISVIAHPQNPHVPTVHMNTRMVVTTRQWFGGGADLTPMLNRRRSQEDPDAIAFHKAMRFVCERHAAVADYEKFKNWCEEYFFLPHRNEPRGIGGIFYDWLKSPEENGGWDADFAFTQDVGRAFVMVYQHIVRKNFNTNWTEADREEQLIRRGRYVEFNLLYDRGTIFGLKTGGNVNSILSSLPPVVKWP

SEQ ID NO: 53295 - DNA, 900 bp, Cytophaga hutchinsonii ATCC 33406
  CDS (1)..(900): transl_table=11
atgcttacaaaagaacacatcgaaaacgaatttcagaaaattcagcagcacatttgccgcgcgcttgaaacagctgacggcaaggcgacatttaaaacagatgaatggacacggccggaaggcggcggcggaaaaagtaaaatcattacagatggaaacactcttgaaaaaggcggtgtaaacttttctgccgtacatggcgaaacaccggataatatattacatgcgctgaagctttctaaagcagaattctatgcaacgggcgtatctattgtaatgcatacaacaaatccatgggtacccattattcacatgaacatccgttactttgaaatgagtaacggtatctggtggtttggcgggggtattgatctcacgccccattatgtgataaaggaagaagcggttgcttttcatcagtcactgaaagatttgtgtgatcagtttcatgaaagtttttatacgacattcaaagagtgggccgataactatttttacattaaacaccgcggggaatcaagaggtgtcggtgggattttctttgaccggcagggaaacgatgcaccggttagcaaagaatcattatttgaatttgtttgtgcgctcgggtatttatttccaaagatctatacaaaactgattgcagacaacaactccaaaaccttcacagaagcagaacgtaactggcagaagctgcgcagaggcagatacgtagagtttaacctggtgtatgataaaggaacgaaattcggactggataccaacggccggattgaatcaatcttaatgagcctgccacctgaagcaaactggacatacgactttcagcctgcagccggaagcaaagaagcacagacaattgaatggcttaaagctcaacctaactggcttgcactgtaa

SEQ ID NO: 53296 - protein, 299 aa, Cytophaga hutchinsonii ATCC 33406
MLTKEHIENEFQKIQQHICRALETADGKATFKTDEWTRPEGGGGKSKIITDGNTLEKGGVNFSAVHGETPDNILHALKLSKAEFYATGVSIVMHTTNPWVPIIHMNIRYFEMSNGIWWFGGGIDLTPHYVIKEEAVAFHQSLKDLCDQFHESFYTTFKEWADNYFYIKHRGESRGVGGIFFDRQGNDAPVSKESLFEFVCALGYLFPKIYTKLIADNNSKTFTEAERNWQKLRRGRYVEFNLVYDKGTKFGLDTNGRIESILMSLPPEANWTYDFQPAAGSKEAQTIEWLKAQPNWLAL

SEQ ID NO: 53297 - DNA, 1032 bp, Trichodesmium erythraeum IMS101
  CDS (1)..(1032): transl_table=11
atggtagtttcgagtaaggaccaagaaatatctttatctgtaccagcgagtgacacaaaagaacgagtcagtcaatttatgcagactctacaagatgaaatttgccaaggactagaagaattagatggagttagtaagttcaaggaagactcttggaaacgtccaggtggcggcggaggaaagtctcgtgtaataagagacggtggagtttttgaacaagggggagttaatttttcagaagtatggggagataaattacctccaagtgtactgaagcaaagaccagaagcggcaggtaatagtttctatgccacaggaacctctatggtgctgcaccctaaaaatccttatgtaccaacagtacatcttaactatcgttattttgaagctggatctgtatggtggtttggtggtggtgtagatttaacaccttactatccttatgccgaagacgcagcgcactttcatcaaacgattaaggcagcctgtgacaaaagccataaagagtattatcctatatttaaaagatggtgtgatgaatatttttacttaaagcatcgtcaagaaacgcggggtgtaggaggtatcttttttgattatcaagatggtcaaggagaattatacaaagggcctgataatcaaggaccagcagcaacctatagtaaggatttaggaattcttgaatctcgtagttgggaatctttatttacatttgtacaaaattgtggtgtatcatttttaccagcatacaagataatagtagagagacggcaacccatgaaatatggtgaccgggaacgcaactttcagctataccgacgtggccgttatgttgaatttaatttagtatatgataggggtacaatttttggtttgcaaaccaatggtcgtacagaatcaatcttgatgtctttaccacctttagttcgttgggagtatggttacaacccagaacccaacacaccagaagctgaactatatgaagtattcttaaaacctcatgactgggctgactggaaaccaaatcattag

SEQ ID NO: 53298 - protein, 343 aa, Trichodesmium erythraeum IMS101
MVVSSKDQEISLSVPASDTKERVSQFMQTLQDEICQGLEELDGVSKFKEDSWKRPGGGGGKSRVIRDGGVFEQGGVNFSEVWGDKLPPSVLKQRPEAAGNSFYATGTSMVLHPKNPYVPTVHLNYRYFEAGSVWWFGGGVDLTPYYPYAEDAAHFHQTIKAACDKSHKEYYPIFKRWCDEYFYLKHRQETRGVGGIFFDYQDGQGELYKGPDNQGPAATYSKDLGILESRSWESLFTFVQNCGVSFLPAYKIIVERRQPMKYGDRERNFQLYRRGRYVEFNLVYDRGTIFGLQTNGRTESILMSLPPLVRWEYGYNPEPNTPEAELYEVFLKPHDWADWKPNH

SEQ ID NO: 53299 - DNA, 909 bp, Shewanella sp. MR-4
  CDS (1)..(909): transl_table=11
atgagcgtgccagatgcgacagtggtaaaagcatttttactcgatctacagaatcgaatttgtgcgggtcttgagcagttggatgggcaagcaagctttgcggccgattcatggacacgcaccgaaggcggtggcggtaccagtcgtgttttaacccaaggtgcggtattcgagcaagctggggtgaacttttcccatgtaacaggtgcggccatgcctgcatcggcaacggctcatcgcccagaattggcggggcgtagttttgaggccatgggcgtttctttagtgattcaccctaaaaacccttatattccaactacccatgctaacgtgcgtttctttattgcccataaagacggtgcggatcccgtttggtggtttggtggtggttttgacttaacgccttactatcctttcgaagaagatgtgcgcgagtggcatcaaaccgctaaaaatctgtgtctgccctttggcgacgacatatatcctaaatataagaagtggtgtgatgagtatttcttcctgccacatcgtaatgaaacccgcggcgtgggcggactgtttttcgatgacttgaatcaagctggcttcgataagagtttcgattttatgcaagcggtggggaatggcttcttaaccgcttatgcgccgattgttgagcgccgtaaagagacgccttatggcgaacgtgagcgtgagttccagttatatcgtcgcggccgttatgttgagttcaatctggtatacgacagaggtaccttgttcggcctgcaaactggtggtcgcactgagtccattttgatgtcaatgccgccattggtacgctggcaatatgcttatacgccagaggcgggtagcccagaggcagatctatacgataactacctcaaacctcgagattgggtataa

SEQ ID NO: 53300 - protein, 302 aa, Shewanella sp. MR-4
MSVPDATVVKAFLLDLQNRICAGLEQLDGQASFAADSWTRTEGGGGTSRVLTQGAVFEQAGVNFSHVTGAAMPASATAHRPELAGRSFEAMGVSLVIHPKNPYIPTTHANVRFFIAHKDGADPVWWFGGGFDLTPYYPFEEDVREWHQTAKNLCLPFGDDIYPKYKKWCDEYFFLPHRNETRGVGGLFFDDLNQAGFDKSFDFMQAVGNGFLTAYAPIVERRKETPYGEREREFQLYRRGRYVEFNLVYDRGTLFGLQTGGRTESILMSMPPLVRWQYAYTPEAGSPEADLYDNYLKPRDWV

SEQ ID NO: 53301 - DNA, 915 bp, Alkalilimnicola ehrlichei MLHE-1
  CDS (1)..(915): transl_table=11
atgagcgtagacaccccagccgtcctcgactacctcaaggagctccaggaccgcatctgccacgagctggcagagctggacgggggccccggcttcgaggaggagacctgggagcgggaggaagggggcgggggtcgcagccgggtgctcaagcacggaaacctcttcgagcaggccggggtcaacttctcccacgtcttcggcaagcgcctgcccgacagcgccacggcccggcgcccagaactggcgggccgcggcttccaggccatgggggtctccctggtcctgcatccggagaacccccacgtccccaccacccacgccaacgtccgctactttgtggcggacaaggccggcagcgaaccggtctggtggttcgggggcggcttcgacctcacgccctattacggctaccaggaggacgccgtccactggcaccgcaccgcccgcgccgcctgcgagcccttcggtgccgaggtctacccccgctacaaacagtggtgcgacgagtacttctacctgccccaccgcggcgagacccggggcattggcgggctgttcttcgatgacctggacgactggggctttgagcgcagcttcgccttcatgcgcagcgtcggcgaccacttcctgcccgcctaccgccccatcgccgagcgccgccgccaccagccctggggcgagcgcgaacgcgcctttcagctctaccgccggggccgctacgccgagttcaacctactctacgaccgcggcacccggttcggcctgcaatccggcgggcgcaccgagtcgattctcatgtcgatgccacccatggcccgctgggagtacaattggcacccggagcccggcagcccggaggcgcagctctatgaccgcttcctgggcgcacgcaactggctggacggagactga

SEQ ID NO: 53302 - protein, 304 aa, Alkalilimnicola ehrlichei MLHE-1
MSVDTPAVLDYLKELQDRICHELAELDGGPGFEEETWEREEGGGGRSRVLKHGNLFEQAGVNFSHVFGKRLPDSATARRPELAGRGFQAMGVSLVLHPENPHVPTTHANVRYFVADKAGSEPVWWFGGGFDLTPYYGYQEDAVHWHRTARAACEPFGAEVYPRYKQWCDEYFYLPHRGETRGIGGLFFDDLDDWGFERSFAFMRSVGDHFLPAYRPIAERRRHQPWGERERAFQLYRRGRYAEFNLLYDRGTRFGLQSGGRTESILMSMPPMARWEYNWHPEPGSPEAQLYDRFLGARNWLDGD

SEQ ID NO: 53303 - DNA, 894 bp, Hyphomonas neptunium ATCC 15444
  CDS (1)..(894): transl_table=11
atgaccgatacagagactgccggctttaccggccgcaaggcgcaggcgagcgcctggttccgcgcccttcaggaagagatcattggccgcttcgaggcgatcgaagacgcggctgtgccaccgctctatcgcggcgaggccgggcgattcgatctgaaggcgtggcgccggggcgatggcagcgaagacctgggcgggggccggatgggcctgatgcgcggcaaggtgttcgagaaggtgggcgtccacttctcagaggtgcacggcacgttttccgaagcgtttgcggcgcagatacccggcgcggacaagtccggcggacggttctgggccagtggcatctccttgattgcgcatcctttgaacccgcgcgtgcccgccgcgcacatgaacacgcgcatgctggtgaccagtgaagcctggtttggcgggggcggcgacctcacccccctgctcgcctatcagcgcgatcaggactttgtggatacggtggattttcacgccgcgatgaaggcggcctgcgatacccatcccggcgccgattacgcgcacatgaaagagcattgcgagacctatttccacctgccccatcgcagcgagccgcggggcacgggcggcatcttctatgaccggttcaataccggcgactgggaggccgattttgccttcactcaggaagtggggcggaaatttgccgatatatatccgggccttgtacgccgccggatgatcgagccgtggagtgaggccgagcgcgaggcgcagctgatccagcgggggcggtatgtggaatataacctgctctatgaccggggcacgacctttggcctgaagaccggcggaaacatcgagagcattctttcttcgatgccgccggtggtgaaatggccctga

SEQ ID NO: 53304 - protein, 297 aa, Hyphomonas neptunium ATCC 15444
MTDTETAGFTGRKAQASAWFRALQEEIIGRFEAIEDAAVPPLYRGEAGRFDLKAWRRGDGSEDLGGGRMGLMRGKVFEKVGVHFSEVHGTFSEAFAAQIPGADKSGGRFWASGISLIAHPLNPRVPAAHMNTRMLVTSEAWFGGGGDLTPLLAYQRDQDFVDTVDFHAAMKAACDTHPGADYAHMKEHCETYFHLPHRSEPRGTGGIFYDRFNTGDWEADFAFTQEVGRKFADIYPGLVRRRMIEPWSEAEREAQLIQRGRYVEYNLLYDRGTTFGLKTGGNIESILSSMPPVVKWP

SEQ ID NO: 53305 - DNA, 912 bp, Rhizobium leguminosarum bv. viciae 3841
  CDS (1)..(912): transl_table=11
atggaacgaccggaactgccgatcggcttgcctgacgatatcgaagagaagaaggctgccgcccgcaattggttcgagggattgcgcgatacgatctgcgcctccttcgaagccatcgaggatgacttggaagggccgctttccgatcaggagcccggccgcttcgtcgccaaggactggtcacgcgaaaacggcgccggcggcggtggccggatgtcgatgatggaaggccgcgtcttcgaaaaggtcggcgtccatacctccactgtctacggcgaattcgccccggatttccgcgcccagatacccggcgccaaggacgatccgcgtttttgggcctcgggcatctcgctgatcgcccatcccgtcaaccccaacgttccggccgtgcacatgaacactcgcatggtcgtcaccaccagccgctggttcggcggcggcgccgacctgacgccggtgctgtcgcgccgccgcacgcaggaggacgaggatagccagctcttccacaaggccatggaaatcgcctgccgcaatcatgccgtcgccgactacgatgcgtacaaaacctggtgcgacgaatatttcttcctgaaacaccgtaacgaggcccgcggcatcggcggcatcttctatgactggctgcattcaagcgaggaagccggcggctgggacgccgatttcgctttcacgcgcgatgttggccgagccttcgccatggtttatccgaagatcgttcgctccaacttcaataagttgtggacagaggccgaccgcgacgaacaattgatccgccggggccgctacgtcgaattcaatctgctgtatgatcgtggcacgatcttcggcctgaagaccggcggcaacgtcgaatccattctctcctcgctgccccctgtcgtccgctggccatga

SEQ ID NO: 53306 - protein, 303 aa, Rhizobium leguminosarum bv. viciae 3841
MERPELPIGLPDDIEEKKAAARNWFEGLRDTICASFEAIEDDLEGPLSDQEPGRFVAKDWSRENGAGGGGRMSMMEGRVFEKVGVHTSTVYGEFAPDFRAQIPGAKDDPRFWASGISLIAHPVNPNVPAVHMNTRMVVTTSRWFGGGADLTPVLSRRRTQEDEDSQLFHKAMEIACRNHAVADYDAYKTWCDEYFFLKHRNEARGIGGIFYDWLHSSEEAGGWDADFAFTRDVGRAFAMVYPKIVRSNFNKLWTEADRDEQLIRRGRYVEFNLLYDRGTIFGLKTGGNVESILSSLPPVVRWP

SEQ ID NO: 53307 - DNA, 909 bp, Shewanella sp. ANA-3
  CDS (1)..(909): transl_table=11
atgagcgtgccagatgcgacagtggtaaaagcatttttactcgatctacagaatcgaatttgtgcgggtcttgagcaattggatggacaggcaagctttgctgccgattcatggacgcgcaccgaaggcggtggcggtaccagtcgtgtcttaacccaaggtgcggtattcgagcaagccggggtgaacttttcccatgtaacaggtgcggccatgcccgcatcggcaacggctcatcgcccagaattggcgggtcgtagttttgaggccatgggcgtttctttagtgattcaccctaaaaacccttatattccaactacccatgctaacgtgcgtttctttattgcccataaagacggcgcggatcccgtttggtggtttggtggtggttttgacttaacgccttactatcctttcgaagaagatgtgcgtgagtggcatcaaaccgctaaaaatctgtgtctgccctttggtgacgacgtatatcctaaatataagaagtggtgtgatgagtatttcttcctgccacatcgtaatgaaacccgcggtgtgggcggattgtttttcgatgacttgaaccaagcaggcttcgataagagtttcgattttatgcaggcggtggggaatggcttcttaaccgcttatgcgccgattgttgagcgtcgtaaagaaactccctatggcgagcgtgagcgtgatttccagttatatcgtcgcggccgttatgttgagttcaatctggtatacgacagaggtaccttgtttggcctgcaaactggtggtcgtactgagtctattttgatgtcaatgccgccattggtacgctggcagtatgcttatacgccagaggcgggtagccctgaggcagagctttacgataactacctcaagcctcgagattgggtataa

SEQ ID NO: 53308 - protein, 302 aa, Shewanella sp. ANA-3
MSVPDATVVKAFLLDLQNRICAGLEQLDGQASFAADSWTRTEGGGGTSRVLTQGAVFEQAGVNFSHVTGAAMPASATAHRPELAGRSFEAMGVSLVIHPKNPYIPTTHANVRFFIAHKDGADPVWWFGGGFDLTPYYPFEEDVREWHQTAKNLCLPFGDDVYPKYKKWCDEYFFLPHRNETRGVGGLFFDDLNQAGFDKSFDFMQAVGNGFLTAYAPIVERRKETPYGERERDFQLYRRGRYVEFNLVYDRGTLFGLQTGGRTESILMSMPPLVRWQYAYTPEAGSPEAELYDNYLKPRDWV

SEQ ID NO: 53309 - DNA, 915 bp, Azoarcus sp. BH72
  CDS (1)..(915): transl_table=11
atggtcgtcgatctcaccgccatcaagcagtatttcaccggcctgcagggccgcatcgtcgccgggctcgaagccttcgacggccagaccttccgcagcgacggctgggagcgcccgggcggtggcggcggcctgacccgtgtgatcgaggaaggcaacttcttcgagcgcggcggggtgaatttttcgcacgtgatgggcgacggcctgccggcgtcggccagcgcgcaccggcccgaactcgcggggcgccgcttcgaggcgatgggcgtgtcgctcgtattgcatccgcgcaacccctactgccccaccgtgcacatgaacgtgcgctgcttcgtcgcgctcgccgacggcaagcctccggtgtggtggttcggtggcggcatggatctgacgccctattacggcttcgaagacgacgttcgccacttccacgccacctgcaaggaagcggtgctgcccttcggcggcgaagccgagtaccagcgctacaaggcctggtgcgaccgctacttcttcctcaagcaccgcaatgagccgcgcggcgttggcggactgttcttcgacgatctcggcgccgacggcgaaaccgatttcgacaccgccttcggcctcacccgctcggtcggcaacgccttcctcgacgcctacatccccatcgtcgaacgccgtcgcgactacggctacggcgagcgcgaacgcgacttccaggcctaccggcgcggccgctacgtcgagttcaacctggtgttcgaccgcggcaccctgttcggcctgcaatcgggcgggcgtaccgagtccatcctgatgtcgatgccgcccatcgtgaagtggcgctacgactggcagccggagccgggctccgccgaagcagcgctgtacgaacaattcctcgtcccgcgcgactgggcctga

SEQ ID NO: 53310 - protein, 304 aa, Azoarcus sp. BH72
MVVDLTAIKQYFTGLQGRIVAGLEAFDGQTFRSDGWERPGGGGGLTRVIEEGNFFERGGVNFSHVMGDGLPASASAHRPELAGRRFEAMGVSLVLHPRNPYCPTVHMNVRCFVALADGKPPVWWFGGGMDLTPYYGFEDDVRHFHATCKEAVLPFGGEAEYQRYKAWCDRYFFLKHRNEPRGVGGLFFDDLGADGETDFDTAFGLTRSVGNAFLDAYIPIVERRRDYGYGERERDFQAYRRGRYVEFNLVFDRGTLFGLQSGGRTESILMSMPPIVKWRYDWQPEPGSAEAALYEQFLVPRDWA

SEQ ID NO: 53311 - DNA, 924 bp, Magnetospirillum magnetotacticum MS-1
  CDS (1)..(924): transl_table=11
atggctgacgcgcaggcttccccgctcccctcacccgacgatctcgccgcgctgaagagcgaggcgggggcatggttcgccaccctgcgcgaccggatcgtggcggcgctggaaaccctggaggacgaggccgagggcccgttcgatcccgacgccccggcggaagcgggccggttcatcaagacgccgtggcagcgcaccgaccatagcggcgcgccgggcggcggcggcgtcatggcgatgctgaagggccgcgtgttcgagaaggcgggcgttcacatctccaccgtccacggcgagttcgcaccggaattccgggcgcagatgccgggcgcggcggaggatccgcgcttcttcgccaccggcatctcgctgatcgtccacccctggaacccgaacgtgccgacggtgcacatgaacacgcgcttcgtcgtcacgacgaaggcgtggttcggcggcggggccgatctgacgcccgtcctcgaccggcggcgtacccaggaagacccggacacgcagcacttccacgcctgcctgcgggaggcctgcgaggcgcatgccccggccgcgaactacgagaagtacaaggcgtggtgtgacgagtatttccatctgaagcaccgcaacgaaccgcggggcatcggcggcatcttctacgattatcactggaccggtgagccgcaggcggatctcgccttcacgcgcgatgtcgggcaggccttcctgaaggcttatcccgagatcgtccggcgcaacctcgcccgagcctggaccgaggccgaccggcttgagcagcaggtgcggcgcgggcgctacgtcgagttcaacctgctctacgaccgcggcaccatcttcggcctgaagaccggcggcaacgtcgcctcgatcctgtcctccctgcccccgaccgtgcgctggccgtaa

SEQ ID NO: 53312 - protein, 307 aa, Magnetospirillum magnetotacticum MS-1
MADAQASPLPSPDDLAALKSEAGAWFATLRDRIVAALETLEDEAEGPFDPDAPAEAGRFIKTPWQRTDHSGAPGGGGVMAMLKGRVFEKAGVHISTVHGEFAPEFRAQMPGAAEDPRFFATGISLIVHPWNPNVPTVHMNTRFVVTTKAWFGGGADLTPVLDRRRTQEDPDTQHFHACLREACEAHAPAANYEKYKAWCDEYFHLKHRNEPRGIGGIFYDYHWTGEPQADLAFTRDVGQAFLKAYPEIVRRNLARAWTEADRLEQQVRRGRYVEFNLLYDRGTIFGLKTGGNVASILSSLPPTVRWP

SEQ ID NO: 53313 - DNA, 981 bp, Burkholderia vietnamiensis G4
  CDS (1)..(981): transl_table=11
atggccggcagacgtccttttttgcgactcccgcctgcggcgggagcgcccagtccagacatgaccgattcgacctacgacgtagcgcgcgtgcgcacgtatctccagggcctgcagacacgcatcgccgacgcgctcggcgcgctcgacggcacgccgctcgcgaccgacgcgtggcagcgcggccctgaagagcggctgcgcggcggcggctgcacgcggattctcgaaggcggccgcgtgttcgagcgcgcgggcatcggtttttccgacgtcgcgggcgatgcgctgccgccgtcggcgagcgccgcgcgcccgcagctggccggccgcggcttcgaggcgctcggcgtgtcgctggtgctgcacccgcgcaacccgtactgcccgaccgtccacatgaacgtgcgcatgctgatcgcgacgaagcccggcgaagcgccggtcttctggttcggcggcggcatggatctgacaccggtttatccgttcgaggacgacgcgcggcatttccaccagacctgcaaggccgcgctcgacccgttcggcgccgagctctacccgcgcttcaagacctggtgcgacgagtacttcttcctgaagcaccgcaacgagacgcgcggcatcggcgggatcttcttcgacgatttctcggaacccggtttcgaacgctcgtttgagatgatgcaaagcgtcggcgacgcgttcctgaacgcgtatctgccgatcgtcgagcgccgcgcggcgctgccgtacggcgagcacgagcgcgagttccaggcgtaccggcgcggccgctacgtcgaattcaacctggtgttcgaccgcggcacgctgttcgggctgcaaagcggcggccggaccgagtcgatcctgatgtcgatgccgccggtggccacctggcgctacgactggcaaccggcgcccggctcggcggaagcgcgtctcgcggaattcctcgtgccgcgcgactgggtctga

SEQ ID NO: 53314 - protein, 326 aa, Burkholderia vietnamiensis G4
MAGRRPFLRLPPAAGAPSPDMTDSTYDVARVRTYLQGLQTRIADALGALDGTPLATDAWQRGPEERLRGGGCTRILEGGRVFERAGIGFSDVAGDALPPSASAARPQLAGRGFEALGVSLVLHPRNPYCPTVHMNVRMLIATKPGEAPVFWFGGGMDLTPVYPFEDDARHFHQTCKAALDPFGAELYPRFKTWCDEYFFLKHRNETRGIGGIFFDDFSEPGFERSFEMMQSVGDAFLNAYLPIVERRAALPYGEHEREFQAYRRGRYVEFNLVFDRGTLFGLQSGGRTESILMSMPPVATWRYDWQPAPGSAEARLAEFLVPRDWV

SEQ ID NO: 53315 - DNA, 1032 bp, Crocosphaera watsonii WH 8501
  CDS (1)..(1032): transl_table=11
atgagcccaataacagcagacgttaccactcctcaacaaacttctttaccccccacagacgcgaaaacaagggttagtgattttatgaaaacccttcaagatgaaatttgtcagggactcgaaacagcagacggcgggagtacctttcgtcaggatagttgggacagagaagaaggtggaggtggccgttcccgtgttatcagagatggtaattttttagaacaaggtggggttaatttttcagaagtatggggaaaacagttacccccatccatcttaaaacagcgtcccgaagcagagggacacggtttttacgccacagggacttctatggtattgcatccccgtaacccttatgttcccacggttcacctcaactatcgttattttgaagcggggcctgtttggtggtttgggggtggtattgacttaactccttattacccatttgctgaagatgtaaaacagtttcatcaaactttaaaggaaacttgtgataaacatcaccctgaatattattcggtgtttaaaccttggtgtgatgaatatttctatcttaaacaccgtcaagaaacccgcggtgtaggtggtcttttctttgactatcaggatggaaccgatcccttatatcgtggtccccatgctgataaggcagcagccaaatatagcaatcaattaccccctcaagaaaaccgtacttgggaagatttatttgcttttgttaatgactgtggacgggcttttttaactgcttatcttcccattgttgagaagcgtcgtaacacagaatatgaggacaaacaaagacagttccaattgtatcgtcggggacggtatgtagagtttaatttagtgtacgatcgcggcacaattttcggtttacaaactaatggtcgtacagaatctattttaatgtctttacctcctttggttcgttgggaatactgttatgatcccgaaccaaatacccccgaagctgagttatataataccttcttgaaacctcaagattgggttaactggaacgtttaa

SEQ ID NO: 53316 - protein, 343 aa, Crocosphaera watsonii WH 8501
MSPITADVTTPQQTSLPPTDAKTRVSDFMKTLQDEICQGLETADGGSTFRQDSWDREEGGGGRSRVIRDGNFLEQGGVNFSEVWGKQLPPSILKQRPEAEGHGFYATGTSMVLHPRNPYVPTVHLNYRYFEAGPVWWFGGGIDLTPYYPFAEDVKQFHQTLKETCDKHHPEYYSVFKPWCDEYFYLKHRQETRGVGGLFFDYQDGTDPLYRGPHADKAAAKYSNQLPPQENRTWEDLFAFVNDCGRAFLTAYLPIVEKRRNTEYEDKQRQFQLYRRGRYVEFNLVYDRGTIFGLQTNGRTESILMSLPPLVRWEYCYDPEPNTPEAELYNTFLKPQDWVNWNV

SEQ ID NO: 53317 - DNA, 996 bp, Xylella fastidiosa Ann-1
  CDS (1)..(996): transl_table=11
atgaccctccaaacttcgatacatccgctgtgttgtgtgtctggtgcgaccttttcttttctttcacttcagattgctatgagccatttcgaccgcgtccgcgattacctgactgccctacaagatcgtatttgcaatgtggtcgagaccatcgatggtcaatcgcattttcacgaagaccactggcagcgtacggaagggggcggtggacgtacccgtctcttgcgtgatggtgccgtcttcgaacaggcaggtattggcttctccgatgtctgcggtacacatttaccaccatcggccagcgtgcgccgtcctgaactggctggtgccaattggtgtgcctgtggcgtgtcactggtattccatcccaaaaatcctttcgtccctaccacgcatctcaatgtgcgctactttcgtgctgagcgtgatggcaaacaggttgctgcttggtttggcggtggttttgacctcaccccgttttatccctttgatgaagatgtcgtgcactggcacacagttgctcgtgacctatgcgccccatttggcgacgaacgttatgcagcgcataaacggtggtgtgacgaatactttgtactgcgtcaccggaatgaaacacgcggtgttggcggcttgttctttgatgaccttgataaggattttgagcgcgattttgcttaccagcgtgcggtgggggatggcttcctcgacgcttattttccgattgtgactcgtcgtcatgacaccccctacggtgatcgcgagcgcgcgtttcagctgtatcgacgtggtcgctacgtagaattcaatttgttatttgatcgcggcacattattcggcttgcagagtggcgggcgtgctgaaagcattttgatcagtctgccgccgttggtacgctgggaatatggttaccaccctttaccaggcagtgccgaggcgcgtttggctgactatctattgccgcgtgactggctggaggaaagtcgcatttgcgaatga

SEQ ID NO: 53318 - protein, 331 aa, Xylella fastidiosa Ann-1
MTLQTSIHPLCCVSGATFSFLSLQIAMSHFDRVRDYLTALQDRICNVVETIDGQSHFHEDHWQRTEGGGGRTRLLRDGAVFEQAGIGFSDVCGTHLPPSASVRRPELAGANWCACGVSLVFHPKNPFVPTTHLNVRYFRAERDGKQVAAWFGGGFDLTPFYPFDEDVVHWHTVARDLCAPFGDERYAAHKRWCDEYFVLRHRNETRGVGGLFFDDLDKDFERDFAYQRAVGDGFLDAYFPIVTRRHDTPYGDRERAFQLYRRGRYVEFNLLFDRGTLFGLQSGGRAESILISLPPLVRWEYGYHPLPGSAEARLADYLLPRDWLEESRICE

SEQ ID NO: 53319 - DNA, 903 bp, Croceibacter atlanticus HTCC2559
  CDS (1)..(903): transl_table=11
atgaaagaacagttttttaactacatacaaacattacaagataccattactgcaaagctagaagcggttgatggcaaagccaagtttaaagaagacctttgggagcgcgaagaaggtggcggtggcagaagccgagttatagaaaatggagatgtatttgaaaaaggcggtgtgaatatttctaaagttcacggaccgttaaacccagcaatgcaaaaatactttaacgttggcgatgttaatttttttgcgtgtggcttaagtttagtattacatcctaaaaatccttttgcgcctactgtacatgcaaactggcgttatttcgaaatgtatgagaaagacggcactttggtagatagttggtttggtggcggtcaagatttaacaccgtattatttgtttgaggaagacgctattcattttcatagcatttgcaaatctgtttgtgatgctcacgacccttctttttatgcgctatacaaaaaacaatgcgacgactatttttataatgctcaccgcgatgaagctagaggtttaggtggtttgttttttgatcattgtaaagccacaccagaacgaagtatgacagattggtataactttgttacacaagtgggtgatagttttttagatgcttatgtgcctattgtagagaaaagaaaagatataccgtttacaccagaacaacgcgattggcaagaaataagacgcggtcgttatatagagtttaatttaatacatgataaaggcacgttgtttggcttaaaaacaaacggccgtatagaaagtatttttatgagctttccgcctcacgtacaatggcgctataattacaaaccagaaaaaggtaccaaagaagacaaattattacacgtattaaaacaccccaaagattgggtttaa

SEQ ID NO: 53320 - protein, 300 aa, Croceibacter atlanticus HTCC2559
MKEQFFNYIQTLQDTITAKLEAVDGKAKFKEDLWEREEGGGGRSRVIENGDVFEKGGVNISKVHGPLNPAMQKYFNVGDVNFFACGLSLVLHPKNPFAPTVHANWRYFEMYEKDGTLVDSWFGGGQDLTPYYLFEEDAIHFHSICKSVCDAHDPSFYALYKKQCDDYFYNAHRDEARGLGGLFFDHCKATPERSMTDWYNFVTQVGDSFLDAYVPIVEKRKDIPFTPEQRDWQEIRRGRYIEFNLIHDKGTLFGLKTNGRIESIFMSFPPHVQWRYNYKPEKGTKEDKLLHVLKHPKDWV

SEQ ID NO: 53321 - DNA, 894 bp, Sulfitobacter sp. EE-36
  CDS (1)..(894): transl_table=11
atgaccgttgatttcgaggcggagaagacccgcgccgctgagtggttccgcagcctgcgcgaccagatcgtggaggcattcgagacgctggagcgtgaccacgccgagggcccgctgtctgatgccgcgcccggcacgttcgaggtgaccccgaccaaacgcagcagcgacgacggcagtgacgcgggcggcggtctgatgagcgtgatgcgtggcgggcgtgtgttcgaaaaggtcggcgtcaacgtctctacagtgttcggcaccctgggagagcgcgcgcaggtcgcgatggcggcgcgtaagggcatccccggcatggccgaagacccgcggttctgggcgtcgggcatcagtctggtcgcgcatatgcagaacccccatgccccggcggtccatatgaacacccgcatgttctggaccccccatgccagctggttcgggggcgggtcggatctgaatccctgcatcgaatatgacgaagacaccgcgcatttccacgctgtgcaaaaggcgcatctggaccctcatggcagcgatctgtacccgcggctgaaggcctgggcggacgagtatttctatatcccgcaccgtcaccgcgcgcgcggggtcggcggtatctttatggatgatcacgcgacaggcgattgggaggcggattttgccctgacacaggatatcggccgcgccttcctgcccgcctatctgccgctggtgcaaaagcggatcacgcaagactggtcagaggcagacaaagaagcgcagttggtgcatcgcgggctttatgccgaatataaccttgtctatgaccgcggtacgaaattcgggctggaaaccggccatgacgccaatgcggttctcatgagcctgccgcctttggcaaagtggatctag

SEQ ID NO: 53322 - protein, 297 aa, Sulfitobacter sp. EE-36
MTVDFEAEKTRAAEWFRSLRDQIVEAFETLERDHAEGPLSDAAPGTFEVTPTKRSSDDGSDAGGGLMSVMRGGRVFEKVGVNVSTVFGTLGERAQVAMAARKGIPGMAEDPRFWASGISLVAHMQNPHAPAVHMNTRMFWTPHASWFGGGSDLNPCIEYDEDTAHFHAVQKAHLDPHGSDLYPRLKAWADEYFYIPHRHRARGVGGIFMDDHATGDWEADFALTQDIGRAFLPAYLPLVQKRITQDWSEADKEAQLVHRGLYAEYNLVYDRGTKFGLETGHDANAVLMSLPPLAKWI

SEQ ID NO: 53323 - DNA, 891 bp, Roseovarius nubinhibens ISM
  CDS (1)..(891): transl_table=11
atgacccaagatcttcccgaagaaaaatcccgcgccgccgcgtggttccgcgcattgcgcgacgagatcgtcgatgccttcgaagaggtggagacccgacatgaggacggcccgcgcgcggatcagcctgcgggacggttcgagctgcgtgacaccaaacgcacggctgaggacgggtcggacgcgggtggcggcctgatgagcgtgatgcgcaacggacgggtcttcgaaaaagtgggcgtcaatgtctcggaagtgcatggcaggctgagccctgcggcgcagaaatccatggcggcgcgtggcgtgccggggatcgcagagaacccgagcttttgggcgtcggggatttcgctggtggcgcatatgcagaacccgcatgtgcccgcggtccatatgaacacgcggatgttctggacgcccggggcatggtggtttggcggcggggcggacctcaacccctgtctcgaatatgacgaggacacggcgcatttccacagcacgctgcaatcccatctcgacccgcatgatccggcgctttaccccgatctcaaacgctgggcggatgaatatttctatatcccccatcgtggacgggcgcggggcgtgggcggcgttttcatggatgaccgcaacagcggtgattgggaggcggatttcgcgctcacccaagacatcggccgcgccttcttgcccgcctatctgccgctggtcgagcggcgccggggtcagacctggaccgaggctgacaaagaggcgcagctcgtccatcgtgggctctatgcggaatataacctcgtctatgaccggggcacgaaattcggcctcgccaccgggcacgacccggatgcggtgctgatgtcactgccgccgctggccaagtgggtctga

SEQ ID NO: 53324 - protein, 296 aa, Roseovarius nubinhibens ISM
MTQDLPEEKSRAAAWFRALRDEIVDAFEEVETRHEDGPRADQPAGRFELRDTKRTAEDGSDAGGGLMSVMRNGRVFEKVGVNVSEVHGRLSPAAQKSMAARGVPGIAENPSFWASGISLVAHMQNPHVPAVHMNTRMFWTPGAWWFGGGADLNPCLEYDEDTAHFHSTLQSHLDPHDPALYPDLKRWADEYFYIPHRGRARGVGGVFMDDRNSGDWEADFALTQDIGRAFLPAYLPLVERRRGQTWTEADKEAQLVHRGLYAEYNLVYDRGTKFGLATGHDPDAVLMSLPPLAKWV

SEQ ID NO: 53325 - DNA, 894 bp, Oceanicola batsensis HTCC2597
  CDS (1)..(894): transl_table=11
gtgaccgaggaactcacagccgagagaacacgcgccgccgactggttccgcggcctgcgggacgagatcgtcgcggccttcgaagggctcgaggacgcgcaggcggagggccccctctccgaccgggagccgggccgcttcgacgtgaccgagacgcggcgcgccacgcccgatggcagcgatgcgggcggcggcctgatgagcgtcatgcgcgggggccgcgtcttcgagaaggtcggcgtcaacgtctcgacggtctacggcgaactgggccccgaggcgcaggcggccatggccgcgcgcaagggcctgccgggaatgcaggaggatccccgcttctgggccagcggtatcagcctcgtcgcccatatgcagaacccgcactgcccggccgtgcacatgaacacgcgcatgttctggacgccgcatgggtggtggttcggcggcggcgccgacctgaacccctgcatcgaatatgacgaggacacggcgcatttccaccgtgtgctcgaagaccattgcgatccgcacggcgcggggcaatacgaccgcctcaaggcctgggccgacgagtatttctacatcccgcaccggggccgcgcgcgcggggtcggcggcatatttctcgacgatcactgctcgggcgactgggaggccgatttcgccttcatccgggatatcggccgcgcctttctgcccgcctacctgccgctggtcgaaaaacggcgccggagcccgtggagcgatgccgacaaggaggtccaactcgtccaccggggcctctatgccgagtacaacctcgtctacgaccgcggcacgaagttcgggctggccacgggccatgacgccaatgccgtgctgatgagcctgccgcccatggccaagtggatctga

SEQ ID NO: 53326 - protein, 297 aa, Oceanicola batsensis HTCC2597
MTEELTAERTRAADWFRGLRDEIVAAFEGLEDAQAEGPLSDREPGRFDVTETRRATPDGSDAGGGLMSVMRGGRVFEKVGVNVSTVYGELGPEAQAAMAARKGLPGMQEDPRFWASGISLVAHMQNPHCPAVHMNTRMFWTPHGWWFGGGADLNPCIEYDEDTAHFHRVLEDHCDPHGAGQYDRLKAWADEYFYIPHRGRARGVGGIFLDDHCSGDWEADFAFIRDIGRAFLPAYLPLVEKRRRSPWSDADKEVQLVHRGLYAEYNLVYDRGTKFGLATGHDANAVLMSLPPMAKWI

SEQ ID NO: 53327 - DNA, 1128 bp, Prochlorococcus marinus str. MIT 9211
  CDS (1)..(1128): transl_table=11
gtggtcataatttgcaatctgaattcaataatcctaaatgggtattctgatgtcctagcctcaactagaaaatacagatatagcccagtgtcattggaacacctttctcagcctcctgcaaattcgagacagagggccaaagaacttgtactttcgctacaagatcaaatatgtaatggccttgaagcagtagatggtgaaggaactttcaaggaagagacatgggaaagacctgaaggaggcgggggcaggtcaagagtaatgagtgaaggaagagttcttgaacaaggaggggtcaacttctctgaagtacaaggacaggaactccccccatcaataattaatcaacgacctgaagccaaagggcatccctggtttgcaactgggacttctatggtccttcatccaaaaaatccctatattccaactgttcatctcaattaccgttatttcgaagctggtccagtttggtggtttggcggtggtgcagatctaacaccttactatccatacttaagcgataccaagcatttccacaaaactctccagcaagcttgtgattccataaatcccttactgcataaggttttcaagccatggtgtgatgaatatttctttctaaagcacaggaatgaaacaagaggcgtaggtggtattttctttgactaccaagatggatcaggaaatttatataagggtcaagaccctaaagggcccgctgcaaaaattgcaaatgaactaggcaagcatcctatgaattgggaggaactctttgcattggcaaaagcatgcgggaatgcttttctaccttcttatatcccaatcatcgaaaagcgacagaatcaatcatttacggagcgagaaagacaatttcagctgtatagacgaggaagatatgttgaatttaatttggtatgggatagaggaacaattttcggtcttcagacaaacggtagaacggagtcaatactaatgtctctccctcctttagcaagatgggaatatggctacaaggcagagaagggatcaagagaagaactactcactaatgtgtttactaagcctcaagaatggtttaacgataagactttggaagaaaaatgtcatccgttagaagctgtggattaa

SEQ ID NO: 53328 - protein, 375 aa, Prochlorococcus marinus str. MIT 9211
MVIICNLNSIILNGYSDVLASTRKYRYSPVSLEHLSQPPANSRQRAKELVLSLQDQICNGLEAVDGEGTFKEETWERPEGGGGRSRVMSEGRVLEQGGVNFSEVQGQELPPSIINQRPEAKGHPWFATGTSMVLHPKNPYIPTVHLNYRYFEAGPVWWFGGGADLTPYYPYLSDTKHFHKTLQQACDSINPLLHKVFKPWCDEYFFLKHRNETRGVGGIFFDYQDGSGNLYKGQDPKGPAAKIANELGKHPMNWEELFALAKACGNAFLPSYIPIIEKRQNQSFTERERQFQLYRRGRYVEFNLVWDRGTIFGLQTNGRTESILMSLPPLARWEYGYKAEKGSREELLTNVFTKPQEWFNDKTLEEKCHPLEAVD

SEQ ID NO: 53329 - DNA, 858 bp, Erythrobacter sp. NAP1
  CDS (1)..(858): transl_table=11
atgagcgaatgggcaggccatacgggccgcgcgaaggaatggtttgaaagtctgcgcgaccagatctgcgcggctttcgaaagtatcgagcgcgaggccggctcggatgcgagctttcagtacacgccgtggaaccgcgaagaagaaggcaatgacgaccccggcggcggtgtgcagggcctgatgaagggcaaggtgttcgagaaggtcggggtcaatgtctcgaccgttcgcggacgcttctccgaacagttcgcaaaccaggtcaacggcgcgagtgtcgagcatcccgagtttaccgcgaccggcatcagtctggtcgctcacatgcacaatccgcatgtgcccgccgtgcacatgaacacgcgcttcttgaccacgcaggccgcatggttcggcggcggcgcggacctcaacccgccgattccctacgaggaagataccgaggaatttcacgcgagcatgcgggccgcctgcatggctcataatccgacctactacgaacgctacaagaagtgggcggatgattacttctacatcccccaccgcgaagttcatcgcggcgtgggcgggatcttctacgaccacctcgaatgtgaggacgaccagagcttcgaccgcaattttgcctttacgcaggacgtagggaaggcgtttctcgacatctatcccaagcttgtgcgcaagcggatggagagcgacttcgacgatgccgacgttgcgcagcagctcgaatatcgcgggcgctatgccgagttcaatctggtctatgaccggggcacgatcttcggcctcaagaccggcggcaatatcgacgccatcctgatgagcctgccgccgcgcgccacctggagctga

SEQ ID NO: 53330 - protein, 285 aa, Erythrobacter sp. NAP1
MSEWAGHTGRAKEWFESLRDQICAAFESIEREAGSDASFQYTPWNREEEGNDDPGGGVQGLMKGKVFEKVGVNVSTVRGRFSEQFANQVNGASVEHPEFTATGISLVAHMHNPHVPAVHMNTRFLTTQAAWFGGGADLNPPIPYEEDTEEFHASMRAACMAHNPTYYERYKKWADDYFYIPHREVHRGVGGIFYDHLECEDDQSFDRNFAFTQDVGKAFLDIYPKLVRKRMESDFDDADVAQQLEYRGRYAEFNLVYDRGTIFGLKTGGNIDAILMSLPPRATWS

SEQ ID NO: 53331 - DNA, 1056 bp, Synechococcus sp. RS9917
  CDS (1)..(1056): transl_table=11
atggtccattcaccccaccagcccggcagcgttctgacgcctcctgcggggtcccgcgaccgggcccgggccctcgtgctcgaccttcaggatgaaatctgcgcaggcctggagcgtctcgacggtctcggtcgttttcaggaggagagctgggagcggccggaagggggcggcgggcgttcccgggtgatgcgcgacgggcgcgtcttcgagcagggcggcgtcaacttctctgaagtgcatggccaggagttgcccccctcaatcctgcgccagcgccccgaggcgaaggggcatgcctggtttgccaccggcacctcgatggtgctgcatccgcgcaatccctatgtgcccacggtgcacctcaactaccgctatttcgaggcggggccggtgtggtggttcggcggtggtgccgatctcacgcccttctatcccttccttgacgacgcccgccacttccatcggcaacacaaacaggcctgcgatcaggtgagcccggatctctatccggtgttcaagccctggtgcgacgagtatttcttcctcaagcaccgcggcgaaacccgcggcatcggagggattttttacgactaccaagacggcaacggccagctctacaagggtcaggatcccgaggggcccgctgccgccatggcccaaacgattggctcccgtcccctcgactgggacgccttgcatgatctggcgcgggcctgcgggcaggctttcctgccggcctatgccccgatcgtggagaaacggcatcacctcccctatggcgagagggagcgtcagttccagctctaccgccgcggtcggtacgttgaattcaacctggtgtgggatcggggcacgattttcgggttgcagacgaacggtcgcaccgagtcgattctgatgtccttgccgcccctggcccgatgggaatacggctacgccgctccggaagggtcgagggaagcgctgctcacggatctgttcacccggccccagaactggctggaggatccgtctctggacgagcgctgccgtccccatcaggccctgaactga

SEQ ID NO: 53332 - protein, 351 aa, Synechococcus sp. RS9917
MVHSPHQPGSVLTPPAGSRDRARALVLDLQDEICAGLERLDGLGRFQEESWERPEGGGGRSRVMRDGRVFEQGGVNFSEVHGQELPPSILRQRPEAKGHAWFATGTSMVLHPRNPYVPTVHLNYRYFEAGPVWWFGGGADLTPFYPFLDDARHFHRQHKQACDQVSPDLYPVFKPWCDEYFFLKHRGETRGIGGIFYDYQDGNGQLYKGQDPEGPAAAMAQTIGSRPLDWDALHDLARACGQAFLPAYAPIVEKRHHLPYGERERQFQLYRRGRYVEFNLVWDRGTIFGLQTNGRTESILMSLPPLARWEYGYAAPEGSREALLTDLFTRPQNWLEDPSLDERCRPHQALN

SEQ ID NO: 53333 - DNA, 1086 bp, Synechococcus sp. WH 5701
  CDS (1)..(1086): transl_table=11
gtggagcaggggcagacggacgtggctgatggggagaagggccaggggggagctcagcccctggagcatccgccggccgactcccgcgcccgtgcccgcaccctgttgatgggtcttcaggacagcatctgcgctggcctgcaggcccttgatggcgaaggggtgttccaggaggagagctgggagcggccggagggcggcggcggccgctcgcgggtgatgaaggccggccggatcttcgagcagggcggggtgaatttttccgaggtggaaggcgatcagctgcccccctcgattctcagccagcggccggaggccgccggccagcgctggttcgccactggtacgtcgatggtgctccatccccgcaacccttacgtgcccacggtgcacctcaactaccgctacttcgaggcggggccggtctggtggttcggcggtggcgccgatctcaccccctactaccccttcctggcggatgcccgtcactttcaccgcagcctgcagggggcctgtgacagtgtcgatcccaccctgtatcccgtcttcaagccctggtgcgatgaatacttcttcctgaagcaccgcaatgaaacccggggtgttggcggcatcttctacgactaccaggatcctgccggtgcgctctacaaaggtcagaatcccagcggcccggccgcggccgtggcagctgccacaggcgcggtgccccgcagctgggagcagctgtttcagctggcgagcgcctgcggcaatgccttcctacccagctatgttccgatcgtggggaagcgccatggcagcgcctacggggagcgggagcgccagttccagctttaccgccgtggccgctacgtggagttcaatctggtgtttgatcgcggcacgatcttcggtctgcagaccaacggccgcaccgaatcgatcctgatgtcgctgccaccgctggttcgctgggaatacggctatagccccgagcccggcagtcgcgaagctctggtcactgaggtgttcaccaagccgcaggactggttcggggatgccgcgctggaggatctctgccgggcccggggtgctttcgactga

SEQ ID NO: 53334 - protein, 361 aa, Synechococcus sp. WH 5701
MEQGQTDVADGEKGQGGAQPLEHPPADSRARARTLLMGLQDSICAGLQALDGEGVFQEESWERPEGGGGRSRVMKAGRIFEQGGVNFSEVEGDQLPPSILSQRPEAAGQRWFATGTSMVLHPRNPYVPTVHLNYRYFEAGPVWWFGGGADLTPYYPFLADARHFHRSLQGACDSVDPTLYPVFKPWCDEYFFLKHRNETRGVGGIFYDYQDPAGALYKGQNPSGPAAAVAAATGAVPRSWEQLFQLASACGNAFLPSYVPIVGKRHGSAYGERERQFQLYRRGRYVEFNLVFDRGTIFGLQTNGRTESILMSLPPLVRWEYGYSPEPGSREALVTEVFTKPQDWFGDAALEDLCRARGAFD

SEQ ID NO: 53335 - DNA, 912 bp, Pseudoalteromonas tunicata D2
  CDS (1)..(912): transl_table=11
atggcaaacttaaccttagaaacagttaaatcttttttactcgacttacaagaccgtatttgtgcaggtttagagcaagccgatggtgatgctaaatttgttgaagatgcatggcaacgagctgaaggtggtggggggcgtacgcgtgttatcaccaatggcgctgtgattgagcaaggaggtgtgaattactctcacgtatttggcgcttctatgccagcctcggcaacagcccatcgaccagagttagctgggcgcagttttcatgcctgcggggtttcattagtgatccaccctaagaaccctcacattcctactagccatgccaacgtaaggttttttatcgcagaaaaagaaggtgaagagcccatttggtggtttggtggtggatttgacttaaccccattttatccagtgctcgaagatgttaagcattggcatcaagttgcaaaaaatctttgctcgccatttggtgaaacggtttatgatgattataaaaaatggtgtgatgagtatttttatttaaaacatcgaggcgagactcggggtgtcggtgggttatttttcgatgacttgaatacttggggttttgataaaagttttgcgtttatgcaggcggtaggcaatggatttttggatgcttacataccaattattgaaaagcgtaaaaatacacccgtaacacaaatacagcgtgattttcagttgtaccgccgtggtcgttatgttgagtttaatctagtgtgggatcgaggcaccttatttgggttacaaaccggtggtcgcacagaatcgattttaatgtcaatgccgccacttgcccgctgggaatacaattattcaccagaagctgaatctaccgaagcaatgctttataacgattatttaaaaccacgcgattggctcgcgtaa

SEQ ID NO: 53336 - protein, 303 aa, Pseudoalteromonas tunicata D2
MANLTLETVKSFLLDLQDRICAGLEQADGDAKFVEDAWQRAEGGGGRTRVITNGAVIEQGGVNYSHVFGASMPASATAHRPELAGRSFHACGVSLVIHPKNPHIPTSHANVRFFIAEKEGEEPIWWFGGGFDLTPFYPVLEDVKHWHQVAKNLCSPFGETVYDDYKKWCDEYFYLKHRGETRGVGGLFFDDLNTWGFDKSFAFMQAVGNGFLDAYIPIIEKRKNTPVTQIQRDFQLYRRGRYVEFNLVWDRGTLFGLQTGGRTESILMSMPPLARWEYNYSPEAESTEAMLYNDYLKPRDWLA

SEQ ID NO: 53337 - DNA, 909 bp, Photobacterium sp. SKA34
  CDS (1)..(909): transl_table=11
atggatagccaagtagataaaagtgcagttaaagcttttttgttggatttacaagatcgtatttgccaagcattagagcaacaagaaacaaccgtcgcgtttgaacaagaccaatggcagcgtgaagaaggtggcggtggtcgtagtcgtgtattacgtgatggcgaaatcttcgaacaagcgggtgtgaatttttctcatgtttatggtgctgaaatgccagcttctgcaacagcacatcgcccagaattagcaggtcgtcgttttgaagcaatgggcgtgtcattggttattcaccctcgcaacccttatgtgccaacctctcatgccaatgttcgcttcttcatcgcagaaaaagacggtgaagctccggtttggtggtttggtggtggctttgatcttacccctttctatcctttcgaagaagattgccaacactggcatgatacagctaaacagttgtgtgcgccgtttggtgatgatgtttatcaagaacacaaagcatggtgtgataaatatttcttcttaccgcatcgtaatgaaacccgcggtgtgggtggtttattctttgatgatctcaatcaatggggatttgataagagctttgcttatatgcaagcggtcggtaatggttttatcaatgcctacatgccgatagtaaaacagcgttatcatctatcctatggtgaacgtgagcgggagtttcagttataccgtcgtggacgttatgtcgaatttaatttggtttatgatcgtggcaccttgtttggcttacagagtggcggaagaacagagtctattttaatgtcgatgccaccattagtgcgttgggagtattgctatgaaccagaacctaattcagcagaagcgcgattgtatcaagattatttaaagccacgagagtggtaa

SEQ ID NO: 53338 - protein, 302 aa, Photobacterium sp. SKA34
MDSQVDKSAVKAFLLDLQDRICQALEQQETTVAFEQDQWQREEGGGGRSRVLRDGEIFEQAGVNFSHVYGAEMPASATAHRPELAGRRFEAMGVSLVIHPRNPYVPTSHANVRFFIAEKDGEAPVWWFGGGFDLTPFYPFEEDCQHWHDTAKQLCAPFGDDVYQEHKAWCDKYFFLPHRNETRGVGGLFFDDLNQWGFDKSFAYMQAVGNGFINAYMPIVKQRYHLSYGEREREFQLYRRGRYVEFNLVYDRGTLFGLQSGGRTESILMSMPPLVRWEYCYEPEPNSAEARLYQDYLKPREW

SEQ ID NO: 53339 - DNA, 915 bp, Oceanospirillum sp. MED92
  CDS (1)..(915): transl_table=11
atgtccgcaccaaatattgaagcagtaaaagagtaccttttggggttgcaggatgctatctgtgatgcattagagcaagctgatggcggtgggaaatttattgaggatgcctggcaacgtgaagctgggggtggagggcgcactcgtgttttaaataatggcagtatcatcgaaaaaggcggagtgaatttctcccatgtttttggtgataagttacccggttctgcaacggctcatcgaccagaactggccggtagaagcttccaggctatgggtgtgtcattggttattcatcctcacaacccatacattcctacttcccatgccaatgtccgtttctttattgccgaaaaagagggcgaggaaccggtttggtggtttggcggaggttttgatctgacgccctactacggtaatgatgaagattgtaagttttggcacgaaaccgctaaagaagcatgcgatccttttggcgaagatatatacccccgctttaaagagtggtgcgatgaatatttctatctgaagcatcgcgatgagcctcgaggtgttggcggtcttttctttgatgatttgaatgagcttggttttgagaagagctttgcgctgatgcaatccattggtaatgcctacactaaagcttatctgccgatcattgagaagaataaagataaagaatatggcgagcgccagcgagattttcagctacatcgccgtggtcgttatgttgaatttaatctggtgtttgatcgaggcacgctgtttggtttgcaatcaggtggccgtaccgagtcgattcttatgtcgttacctcctgaggtccgttggggctacgactggaaaccagaagatggaactgaagaagcggtgttatacgagcgatatttaaaaccgcgtaactggcttgaagtttaa

SEQ ID NO: 53340 - protein, 304 aa, Oceanospirillum sp. MED92
MSAPNIEAVKEYLLGLQDAICDALEQADGGGKFIEDAWQREAGGGGRTRVLNNGSIIEKGGVNFSHVFGDKLPGSATAHRPELAGRSFQAMGVSLVIHPHNPYIPTSHANVRFFIAEKEGEEPVWWFGGGFDLTPYYGNDEDCKFWHETAKEACDPFGEDIYPRFKEWCDEYFYLKHRDEPRGVGGLFFDDLNELGFEKSFALMQSIGNAYTKAYLPIIEKNKDKEYGERQRDFQLHRRGRYVEFNLVFDRGTLFGLQSGGRTESILMSLPPEVRWGYDWKPEDGTEEAVLYERYLKPRNWLEV

SEQ ID NO: 53341 - DNA, 948 bp, Xanthobacter autotrophicus Py2
  CDS (1)..(948): transl_table=11
atgtgcccctcgacctcagcgcccgacgcggcgtccgcacccgaagccgccggcgatgggatcctggaggagcgacgcagccgcgcccgctgctggttcgaggacctgcagggccgcatcatcgccgccttcgaggcgctggagaatgaggcggacgccgccctctatgccggcgcgcccggccgattcgcccgcaccccgtggtcgcgcaccgaccatacgggcgcgccaggcggcggcggcaccatggcgctcatgcgcggacgcctgttcgagaaggtgggggtgcacacctccaccgtgttcggggagttcgcacccgaattccgcagccagatccccggcgcggcggaggatccgcgcttctgggcgtcgggcatctccctcattgcccacatggccaacccgcacgtgcccgcggtgcacatgaacacgcgcttcgtggtcaccaccaaggcatggttcggcggcggcgccgaccttacccccgtgctcgaccgccgccgcacccaggacgacccggacacggtagccttccacgccgccatggcaggtgcctgcaccgcccacacggtggccgactacgcgcgctacaagacgtggtgcgacgactatttcttcctgaagcacaggaacgagatgcgcggcatcggcggcatcttctacgattatctcgacagcgcctcctccggcaccgggacctgggacaacgatttcgcctttacccgcgacgtggggctcgccttcctcgacatctatccgaagctggtacgggccaacatgggccagccgtggagcgcggcggaccgcgaggaacagctggtgcggcgcgggcgctatgtggaattcaacctgctgtacgaccggggcaccattttcggcctgaagaccggcggcaacgtggattcgatcctctcctccatgccgccggtggtgaagtggccgtga

SEQ ID NO: 53342 - protein, 315 aa, Xanthobacter autotrophicus Py2
MCPSTSAPDAASAPEAAGDGILEERRSRARCWFEDLQGRIIAAFEALENEADAALYAGAPGRFARTPWSRTDHTGAPGGGGTMALMRGRLFEKVGVHTSTVFGEFAPEFRSQIPGAAEDPRFWASGISLIAHMANPHVPAVHMNTRFVVTTKAWFGGGADLTPVLDRRRTQDDPDTVAFHAAMAGACTAHTVADYARYKTWCDDYFFLKHRNEMRGIGGIFYDYLDSASSGTGTWDNDFAFTRDVGLAFLDIYPKLVRANMGQPWSAADREEQLVRRGRYVEFNLLYDRGTIFGLKTGGNVDSILSSMPPVVKWP

SEQ ID NO: 53343 - DNA, 906 bp, Flavobacteria bacterium BBFL7
  CDS (1)..(906): transl_table=11
atgattaagacacaattttataattttataaaagaacttcaagacactataactagtcgtcttgaacaaattgacggtaaggctgtttttcaagaagaccaatggcatcgagaagaaggtggcggtggttttacaagagttattgagaacgggaccgtttttgaaaaaggtggagtgaatattagtgaggttcatggtccactgcctgttgccatgcagtcttatttcaatgtaggagatgttgatttttatgccacaggattaagtctagttattcacccagtaaatcctcatgttcctacagttcatgcaaattttagatactttgaaatgtatgataaagaaagcgttatagtagattcatggttcggtggtggactggatttaacgccttattatctttatgatgaagatgcttctcattttcatcaggtttgtaagactgtttgtgatcgtcatagcgttgcagattattccttatttaaagagaagtgtgatacctattttcataattcccatcgtggagaaggacgtggtataggtggtctattctatgattattgtaaggctaataaagaatacactatggaagagtggctagcatttcaaaaggatatagcttcccactttctagatgcttatgcacctatagcaactaaacgtaaggatttaaagtatactagtgaccaacgtgactggcaagaaatacgtcgcggtcgctatgtagaatttaatttagttcatgacaagggcacattatttggattaaaaactaatggacgtattgaaagtatattgatgagtttgccaccacatgtacaatggcgttacgattatcatccagaacctaatactccagaagctgatcttatagaggtactgaagagtcctaaggattgggtctaa

SEQ ID NO: 53344 - protein, 301 aa, Flavobacteria bacterium BBFL7
MIKTQFYNFIKELQDTITSRLEQIDGKAVFQEDQWHREEGGGGFTRVIENGTVFEKGGVNISEVHGPLPVAMQSYFNVGDVDFYATGLSLVIHPVNPHVPTVHANFRYFEMYDKESVIVDSWFGGGLDLTPYYLYDEDASHFHQVCKTVCDRHSVADYSLFKEKCDTYFHNSHRGEGRGIGGLFYDYCKANKEYTMEEWLAFQKDIASHFLDAYAPIATKRKDLKYTSDQRDWQEIRRGRYVEFNLVHDKGTLFGLKTNGRIESILMSLPPHVQWRYDYHPEPNTPEADLIEVLKSPKDWV

SEQ ID NO: 53345 - DNA, 918 bp, marine gamma proteobacterium HTCC2207
  CDS (1)..(918): transl_table=11
gtgaaggttgagggtcaggtgatagacaaacaggcggtcaaagaatacttactcggattgcaggatagcatctgtgcgcaactcggggccgttgactctggcgagtggaaggaagatcgctgggttcgtgaagaaggtggtggtggtcgcagtcgcgtattggtggatgacgcgataatcgaaaaaggtggggttaacttttcccatgtcttcggtaccgaaatgcccgcctcagccactcagcatcgtccagaattagccggccgtcggtttgaagccatgggggtgtctctggttattcacccacaaaacccttatgccccaacttctcatgccaatgtgcgcttttttattgctgaaaaagacggtgcggaaccggtttggtggtttggcggtggctatgatctgacaccctattacggcaatgaagaagactgcagtcactggcatcaaacagccaagtccgcctgcgacaggttttctaaagactattattcgcgctttaaaaactggtgcgatgactacttttatttaaaacaccgcagtgaaccgcggggtattggcggtctgtttttcgatgacttcaatgagttgggttttgagcagagctttgcctttatgcgcggtgttggcgatagctttagttccgcctacatccctattttagagcgccgccataatatcgctttcggcgaggctgagcgccagtttcaactgtatcgccgcggccgctatgtggaatttaatctggtttgggatcgcggtacattattcggtctgcagaccggtggccgcaccgaatcaatcttgatgtcgatgccaccgctggtgcgctgggaatacgattggacgccagagccaggtagtgccgaggcagagctctacactaaataccttattcaacgagactgggtctga

SEQ ID NO: 53346 - protein, 305 aa, marine gamma proteobacterium HTCC2207
MKVEGQVIDKQAVKEYLLGLQDSICAQLGAVDSGEWKEDRWVREEGGGGRSRVLVDDAIIEKGGVNFSHVFGTEMPASATQHRPELAGRRFEAMGVSLVIHPQNPYAPTSHANVRFFIAEKDGAEPVWWFGGGYDLTPYYGNEEDCSHWHQTAKSACDRFSKDYYSRFKNWCDDYFYLKHRSEPRGIGGLFFDDFNELGFEQSFAFMRGVGDSFSSAYIPILERRHNIAFGEAERQFQLYRRGRYVEFNLVWDRGTLFGLQTGGRTESILMSMPPLVRWEYDWTPEPGSAEAELYTKYLIQRDWV

SEQ ID NO: 53347 - DNA, 918 bp, Rickettsiella grylli
  CDS (1)..(918): transl_table=11
atgaattatgacgtaattatcccaacaatcaaagattatttactggcattacaaaccaaaatttgtttatgtttagaaaaagaagaaaaccacgaaaaatttataaccgataagtggattcatcctcaaggagggggtggaaaaacgtgtattttatcaggtcatcttatcgaaaaaggagcggttaatttttctcacgtgtggggtgaagcattacccgccagtgtgagccaacgatatccttctctaggcgcaactgcatttcaggcgatgggaatttcgttggtgattcatccacgaaatccttacgttcccacggtacatatgaacttacgttttattgccttgccaccaggacgggaaccgcaatggtggtttggtggaggttttgatttaactccctattatccttttttagaagattgccagcattggcatcgtgtggctaagcaaagctgtgatccgtttggtttatcgctttatcagcgttacaaaaaaaattgtgatgattatttttatttaaaacatcgacaggaagcacgaggtatcggtggacttttttttgatgatttgaatgcgtggccgttcgatcgatgttttgcgtttgttcaaagtgtgggtgatcattttttaaaagcgtatttaccgattgtacaacgacgtaaaaacgatgcttatggtgaacgcgaacgccaatttcaagctttacgacgaagccgttatgtagaatttaatttgatttatgatagagggacattatttggtttacaaagtaatggacggactgagtctatattaagcacaatgccgccgcacgcacattggaaatataattggcagccggataaaggatctaaagaagcagaactgaccgaaaaatttttaatcgcaagagattggctctgcctaaaaacttag

SEQ ID NO: 53348 - protein, 305 aa, Rickettsiella grylli
MNYDVIIPTIKDYLLALQTKICLCLEKEENHEKFITDKWIHPQGGGGKTCILSGHLIEKGAVNFSHVWGEALPASVSQRYPSLGATAFQAMGISLVIHPRNPYVPTVHMNLRFIALPPGREPQWWFGGGFDLTPYYPFLEDCQHWHRVAKQSCDPFGLSLYQRYKKNCDDYFYLKHRQEARGIGGLFFDDLNAWPFDRCFAFVQSVGDHFLKAYLPIVQRRKNDAYGERERQFQALRRSRYVEFNLIYDRGTLFGLQSNGRTESILSTMPPHAHWKYNWQPDKGSKEAELTEKFLIARDWLCLKT

SEQ ID NO: 53349 - DNA, 900 bp, Oceanobacter sp. RED65
  CDS (1)..(900): transl_table=11
gtgaatatagaagcagttaagcaatacttattagctcttcaggatgacatttgccggcagttatccgaagaagacggcggaactgagtttcgcgaagaaagttggacacgggaagagggcggcggtggccgaagtcgtgttattgaaaatggcaatgtcattgaaaaaggcggggttaactttagtcatgttcatggcaaaaccttgcctgccagtgccacggccaatcgccctgagttagccggtcgcagttttcaggccatgggtgtcagtttggtaatccatccgcataacccttatgttccaactagtcatgccaacgtacgcttttttattgccgagaaagaaggcgaagaaccggtatggtggtttggtggtggtttcgatctgacaccttattacggatttgaagaggatgttcggtattggcaccaaaccgccaagcaagcgtgtgatccttttggaaatgatttgtatgagaagtacaaaaattggtgcgatgactatttttatattaagcaccgccaagagcctcgtggtgtgggtggcttgttctttgatgatttaaatgacggagacttcgagaatagctttgcctttatgcgcagcgtgggggatcactatattaaggcttatcgccccattatagctaaacggaaaaatactgactttgacgagcaagagcgcaagttccaatgctaccgtagaggtcgctacgttgaattcaatctggtacaggaccgcggcaccatattcggcttgcaaacgggcggtcgcacagaatcgatattgatgtcattgccaccagtggtgcattgggattacaactggcagccaaaagacggtagcccagaatcaaaactatacactgactttttgataaaaaaggactggctataa

SEQ ID NO: 53350 - protein, 299 aa, Oceanobacter sp. RED65
MNIEAVKQYLLALQDDICRQLSEEDGGTEFREESWTREEGGGGRSRVIENGNVIEKGGVNFSHVHGKTLPASATANRPELAGRSFQAMGVSLVIHPHNPYVPTSHANVRFFIAEKEGEEPVWWFGGGFDLTPYYGFEEDVRYWHQTAKQACDPFGNDLYEKYKNWCDDYFYIKHRQEPRGVGGLFFDDLNDGDFENSFAFMRSVGDHYIKAYRPIIAKRKNTDFDEQERKFQCYRRGRYVEFNLVQDRGTIFGLQTGGRTESILMSLPPVVHWDYNWQPKDGSPESKLYTDFLIKKDWL

SEQ ID NO: 53351 - DNA, 978 bp, Synechococcus sp. RS9916
  CDS (1)..(978): transl_table=11
atggggctccaggacgagatttgtgcaggtctggaggccctcgatggtgtgggccgcttccaggaggaaagctgggatcgccccgagggcggcggtggccgctctcgtgtcatgcgcgaggggcgcatttttgaacaaggcggcgtgaacttttcggaggttcacggccaggagttgccgccgtccatcctcaagcagcgtcctgaggcgaaggggcatccctggttcgccaccggcacctcgatggtgttgcacccccgcaacccctatgtgcccacggtgcacctcaattaccgctacttcgaggcaggaccggtgtggtggttcggcggtggtgccgatctcacgcccttctatccgttcctcgaagacgcccgccatttccatcgcacccataagcaagcgtgtgattcggtgagcaccgacctgtatccggtgttcaagccctggtgtgacgagtatttcttcctcaagcaccgcaatgaaacccgcggtgtgggcggaattttttacgactaccaggacggcaacggccagctttacaagggtcagaacccttcaggacctgctgcagacgttgccaaggccacggggtctcgtcctctcaactgggagcagctccatgacttggccaaggcctgtggtcagggattcctgccggcctacaccccgatcgttgagaagcggcaccctctggcctatggcgaacgggagcgtcagttccagctctaccgccgtggccgttacgtcgagttcaacctggtgtgggaccgcggcacgatctttggcctgcagaccaacggccgcacggagtcgatcctgatgtcactgccacccctggcacgctgggagtacggcttcacggcagaagaggggtcgcgcgaggctctgctcacggacgtgttcacccgtcctcagaactggttcgaggatccttctctggaggagcgttgccgtccacatcaggcggtgaactga

SEQ ID NO: 53352 - protein, 325 aa, Synechococcus sp. RS9916
MGLQDEICAGLEALDGVGRFQEESWDRPEGGGGRSRVMREGRIFEQGGVNFSEVHGQELPPSILKQRPEAKGHPWFATGTSMVLHPRNPYVPTVHLNYRYFEAGPVWWFGGGADLTPFYPFLEDARHFHRTHKQACDSVSTDLYPVFKPWCDEYFFLKHRNETRGVGGIFYDYQDGNGQLYKGQNPSGPAADVAKATGSRPLNWEQLHDLAKACGQGFLPAYTPIVEKRHPLAYGERERQFQLYRRGRYVEFNLVWDRGTIFGLQTNGRTESILMSLPPLARWEYGFTAEEGSREALLTDVFTRPQNWFEDPSLEERCRPHQAVN

SEQ ID NO: 53353 - DNA, 951 bp, Alteromonadales bacterium TW-7
  CDS (1)..(951): transl_table=11
atgcaaagcgaattattagaacaagtaaaagcctactttatggctttgcaagataccatttgccaagggctagaagctgcagatggcagtgctaaatttgtcgaagatagctggcaaagagctgaaggcggtggtggccgtactcgagtaactactgatggtaacgtaattgagcaggggggcgtaaattactctcatgtatttggcgcatccatgccaggttctgcaaccgcccataggccagagcttgcagggcgtagttttcatgcttgtggggtttcacttgttattcatcccaaaaatccgcacgtaccaacaagtcatgccaacgtacgcttttttatagccgaaaaagagggcgaagagccaatatggtggtttggtggaggttttgatttaacccctttttacccggtatttgaagacgtacagcattggcatcaagttgcacacgatatatgtgtgccgtttggtagtgatgtttattcaaaatacaaaacatggtgcgatgagtacttttaccttaaacatcgtgatgaaacacgtggggtgggtggtttatttttcgatgatttaaatgaactaggctttgagcaaagctttgcatttatgcagtcagtcggcaatggctttttagatgcctatattccgattattgaacgtcgcaaaaacgatgagtacactgaacagcaacgtgactttcagctctaccgccgtggtcgttacgttgagtttaacctagtgtgggatagaggcacattatttggattgcaaagtggcgggcgaacagagtctattttaatgtcgatgccaccactggctcgctgggagtataactttacaccagctgaaaacagccttgaggcaaacttatatcagtattacttgcgaccacaagcttggctttcaagtaaaccagaagagctaatagcccgagagtggcaaatataa

SEQ ID NO: 53354 - protein, 316 aa, Alteromonadales bacterium TW-7
MQSELLEQVKAYFMALQDTICQGLEAADGSAKFVEDSWQRAEGGGGRTRVTTDGNVIEQGGVNYSHVFGASMPGSATAHRPELAGRSFHACGVSLVIHPKNPHVPTSHANVRFFIAEKEGEEPIWWFGGGFDLTPFYPVFEDVQHWHQVAHDICVPFGSDVYSKYKTWCDEYFYLKHRDETRGVGGLFFDDLNELGFEQSFAFMQSVGNGFLDAYIPIIERRKNDEYTEQQRDFQLYRRGRYVEFNLVWDRGTLFGLQSGGRTESILMSMPPLARWEYNFTPAENSLEANLYQYYLRPQAWLSSKPEELIAREWQI

SEQ ID NO: 53355 - DNA, 927 bp, marine gamma proteobacterium HTCC2080
  CDS (1)..(927): transl_table=11
atggacatcaatgcggttgagcagtatctgagaagtctgcaaaagagtatttgtgaccggttaacgactattgatgggtcgggatcctttgaggaagaaacctgggaccgccctgagggtggtggtggggtcagtcgtgtacttgctgagggtgcagtttttgaaaaggcgggggtcaatttttcgcatgtgagaggcgaaagtttgcccggctctgccacagctgttcgaccgcaattagctggacgtagttttcaggcgatgggtgtctctctggtgattcacccgcacaacccttacgtcccgacagcccatgccaacgttcgcttgtttgtggctgagcagccaggaaaggagccaatttggtggatgggtggtggttttgatctgaccccatattatggcttttttgatgatgccgttcactggcaccaaacagcggcagcagcctgtgagccttatggacctgaggtttatcctaagtataaggcgtggtgtgatgagtattttcatctaaaacaccgcaatgagccccggggtgtcggagggcttttttttgatgatctcaacgaatggggctttgataagaccttttcgtttatgcgcaatgtaggcgaccactttctcgagggttatgtgcccattgtagagcgtagaaaggatgaattctggggcgagcgtgagcgccagtggcagctgtatcgccgtggccgttacgttgaattcaatcttgtttatgatcgcggaactttatttgggctgcagtctaatggccgtacagagtctattttgatgtctttaccgccattggtgcgatgggagtatgggcataaggccgagcctaaaagccccgaggccgatttaacggattattttttggtgccccgggattggatgtctgctgataaagcgggagcgccttcttga

SEQ ID NO: 53356 - protein, 308 aa, marine gamma proteobacterium HTCC2080
MDINAVEQYLRSLQKSICDRLTTIDGSGSFEEETWDRPEGGGGVSRVLAEGAVFEKAGVNFSHVRGESLPGSATAVRPQLAGRSFQAMGVSLVIHPHNPYVPTAHANVRLFVAEQPGKEPIWWMGGGFDLTPYYGFFDDAVHWHQTAAAACEPYGPEVYPKYKAWCDEYFHLKHRNEPRGVGGLFFDDLNEWGFDKTFSFMRNVGDHFLEGYVPIVERRKDEFWGERERQWQLYRRGRYVEFNLVYDRGTLFGLQSNGRTESILMSLPPLVRWEYGHKAEPKSPEADLTDYFLVPRDWMSADKAGAPS

SEQ ID NO: 53357 - DNA, 1323 bp, Aspergillus niger
  CDS (1)..(1323)
atggctgttccccgaccatatatgcctcttcggaggtcgctctgccaattctcatctcggacctgtcacacacctcgcaacctctcagcgccctttcgcagatactcctcggaacagaagcctccttccgaacccaaaccattcactgtctggagaccatacctacggctggccattggtgtgccctttatcggtgctttggtgtattccatgatgacggaagaagtgaccgaactcgactcgccatccctcgtggagctcgatgaaacgcttaagaagcaagccacaatcagcgaacaatctcccatgcgcctgcgcatggagaagctgatcaaagaccaccagcagaaaatcattgaagagctaagccggatagatggaaagcaattcaagactgatacctggtcgcgccccaacggcggaggtggaatatcctgtgtccttcaagacggaaacgtcttcgagaaagccggagtcaacgtgtccatcgtctacggcgaactcccccggccagccattgagaagatgcgcgcggaccacaagtccttcgtcggcgccgacgtggactccttgagcttcttcgccgccggcctgtccctcgttctccacccccacaaccccatggccccaaccgtccacctgaactaccggtacttcgagacatccgatcctaaagaccccctcaacggcgacaagaactggtggttcggtggcggcaccgatctgaccccaacttacctattccccgaagacgccagacatttccaccagaccatcaaagatgcttgtgatcgtcacgacgccacatactacccgaagttcaaagcctggtgcgataagtacttctatatcccccaccgccgcgaatgccgcggcgtaggaggtatcttcttcgacgacctggaccccagcttcctccagtcctcgtcgacctcatcccaaaatccccaagagactctcttctccttcgtctcagacggtctcgcttctttcctcccctcttatgtccccatcatcgaacgccggaaggacatgcccttcacgcctgagcaaaaggaatggcaacagctccgacgcggtcgctacgtcgagttcaacctcgtctatgaccgcggtactagcttcggtctccgcactcctaatgcccgcatcgagagtattctgatgagtttgccccgcacggcaagctgggcttacatggaccccgtatcgggaacccggacggaggattccgtagatggtgatgaggcgcttctgggcgagggcaaggagcgcgagaaggagatcatggatgttttgaaacatcccagacaatgggtgtaa

SEQ ID NO: 53358 - protein, 440 aa, Aspergillus niger
MAVPRPYMPLRRSLCQFSSRTCHTPRNLSAPFRRYSSEQKPPSEPKPFTVWRPYLRLAIGVPFIGALVYSMMTEEVTELDSPSLVELDETLKKQATISEQSPMRLRMEKLIKDHQQKIIEELSRIDGKQFKTDTWSRPNGGGGISCVLQDGNVFEKAGVNVSIVYGELPRPAIEKMRADHKSFVGADVDSLSFFAAGLSLVLHPHNPMAPTVHLNYRYFETSDPKDPLNGDKNWWFGGGTDLTPTYLFPEDARHFHQTIKDACDRHDATYYPKFKAWCDKYFYIPHRRECRGVGGIFFDDLDPSFLQSSSTSSQNPQETLFSFVSDGLASFLPSYVPIIERRKDMPFTPEQKEWQQLRRGRYVEFNLVYDRGTSFGLRTPNARIESILMSLPRTASWAYMDPVSGTRTEDSVDGDEALLGEGKEREKEIMDVLKHPRQWV

SEQ ID NO: 53359 - DNA, 1200 bp, Oryza sativa
  CDS (1)..(1200)
atggcgccctctctcctcaccaccccgtcccaggccctggccctcgcccccggcgccgccgccagccgcgtcggcggcggcggcggcgggtcggcgcgggtgagcttcccgtccggccgcgtccagcgccgaggcgcgctggggatgcgggtgcgggcgtcggtggcgatcgagaaggagacgcccgagagcgagccgccgccgacgttcctgcgggaggacgggtccggggcggggtccgggtcggtgcgggagcggttcgaggccatgatccgccgcgtgcagggggaggtgtgcgcggcgctggaggaggccgacgggagcggcgcccggttcgtggaggacgtgtggtcgcgccccggcggcggcgggggcatcagccgggtgctccaggacggccgcgtgttcgagaaggccggggtcaacgtctccgtcgtgtacggcgtcatgccccccgacgcgtaccgcgccgccaagggggaggccggcaagaacggcgcggcggcagatggccccaaggctgggcccgtgcccttctttgccgctggcattagctcggttcttcaccccaagaacccatttgctccaacattgcattttaactaccgctattttgagacagatgcaccgaaagatgctcctggtgcaccaaggcaatggtggtttggaggtggtactgatttgactccttcatatatcattgaagaggatgtgaagcatttccattctgttcaaaaacaagcgtgtgataagtttgacccaagtttttacccgagattcaaaaaatggtgtgatgattatttctatattaagcaccgtaatgagcgtcgggggcttggtggaatattttttgatgatcttaatgactatgatcaagaaatgcttctcaactttgctacagaatgtgcggattctgttgttcctgcatacataccaatcattgaacgccggaaggacactccatttactgaggaacacaaggcatggcaacaactgaggagaggtcgctatgtggagttcaaccttgtatatgatcgcggtaccacatttggcctcaagactggggggaggattgagagtattctggtttctcttccactgactgcacgatggcagtatgatcatacacctgaagagggaactgaagaacggaaacttcttgacgcgtgcataaacccaaaggaatggctcgatctctga

SEQ ID NO: 53360 - protein, 399 aa, Oryza sativa
MAPSLLTTPSQALALAPGAAASRVGGGGGGSARVSFPSGRVQRRGALGMRVRASVAIEKETPESEPPPTFLREDGSGAGSGSVRERFEAMIRRVQGEVCAALEEADGSGARFVEDVWSRPGGGGGISRVLQDGRVFEKAGVNVSVVYGVMPPDAYRAAKGEAGKNGAAADGPKAGPVPFFAAGISSVLHPKNPFAPTLHFNYRYFETDAPKDAPGAPRQWWFGGGTDLTPSYIIEEDVKHFHSVQKQACDKFDPSFYPRFKKWCDDYFYIKHRNERRGLGGIFFDDLNDYDQEMLLNFATECADSVVPAYIPIIERRKDTPFTEEHKAWQQLRRGRYVEFNLVYDRGTTFGLKTGGRIESILVSLPLTARWQYDHTPEEGTEERKLLDACINPKEWLDL

SEQ ID NO: 53361 - DNA, 1444 bp, Zea mays
  CDS (4)..(1266)
aaaatgatccgtttccttatcgccttggaggcccggcagggcagaaccccgggagctcgctcccaccacctccctccccccttgaccctgccagccgcaaaaccgcaggccgcatcccgcccgccgcccaccgcccacctgtggcaagtggcaaccgccgcctacataaaccaccaatcgaccactcgccgaaccaagccacccacccgaaacccaatggcgtccaacctcctatccgcggtggcaatcgagaaggagacgccggagagcgagctgcccccgacgttcctccgcgaggacgggcgcggcgccgggtccgtgcgggcgcggttcgagtccatgatacggcgggtgcagggggaggtctgcgccgcgctcgaggaggcagatggcggtggggcgcgcttcgtcgaggacgtctggtcgcgccccggcggcggcggcggcatcagccgggtcctgcaggacggccgcgtcttcgagaaggccggggtcaacgtctccgtcgtctacggggtcatgccacccgacgcctaccgcgccgccaagggggaggccggcaagaacgaggccgccgcggatggccacaagcctggtcccgtgccattcttcgccgcgggtattagctcggtgcttcaccccaaaaatccatttgctccaacattgcattttaactaccgttactttgagacagatgcacccaaagatgcacctggtgcaccaagacaatggtggttcggcggtggtactgacttgactccctcatacatcattgaagaggacgtgaagcattttcattctgttcaaaagcaagcatgtgataaatttgatccaagttttcacccaagattcaaaaaatggtgtgatgattatttctatattaagcaccgtaacgagcggcgtgggcttggtggaatattttttgatgaccttaatgattacgatcaagaaatgcttctcaacttcgctacagaatgtgcggactctgtacttcctgcctacataccgatcatagaacggcggaaggacaccccattcaatgaggagcacaaggaatggcagcagttgaggagaggtcgttatgtggagttcaaccttgtctacgaccgcggtacaacattcggcctaaagactggaggaagaattgagagcatactcgtgtcccttccactcacagcacggtggcagtatgatcataaaccagaagaagggactgaagaatggaaacttctggacgcgtgcataaatccgaaggattggatctgattagccgaagtttctttattcttgagatcttttgttagttttcccttgtgtagcgctaagatatcagatcacgtgtagtttctttatttcttttgtatatctgtaggatcgtgaacaaatctgatataattctgcagctgtttgtatctaatctgctgcttttcccgcaaagaaaaaa

SEQ ID NO: 53362 - protein, 420 aa, Zea mays
MIRFLIALEARQGRTPGARSHHLPPPLTLPAAKPQAASRPPPTAHLWQVATAAYINHQSTTRRTKPPTRNPMASNLLSAVAIEKETPESELPPTFLREDGRGAGSVRARFESMIRRVQGEVCAALEEADGGGARFVEDVWSRPGGGGGISRVLQDGRVFEKAGVNVSVVYGVMPPDAYRAAKGEAGKNEAAADGHKPGPVPFFAAGISSVLHPKNPFAPTLHFNYRYFETDAPKDAPGAPRQWWFGGGTDLTPSYIIEEDVKHFHSVQKQACDKFDPSFHPRFKKWCDDYFYIKHRNERRGLGGIFFDDLNDYDQEMLLNFATECADSVLPAYIPIIERRKDTPFNEEHKEWQQLRRGRYVEFNLVYDRGTTFGLKTGGRIESILVSLPLTARWQYDHKPEEGTEEWKLLDACINPKDWI

SEQ ID NO: 53363 - DNA, 1645 bp, Zea mays
  CDS (232)..(1434)
aacatgatccgtttccttatccccttggagcagaggaggagcagcatagcataacccggggagctcgctctcgctcccacctccccctccctccccttttgaccctccctcccagctgcaaaaccgcgggccgcatcccgcccgcgccgcccaccggcggccacagccgcctacataaaccactattcgaccactcgccgaaccaagccacccacccaccacccaaacccaatggcgtccaacctcctctccgccccgtcccgaaccctagctccgtcgccggcgccggcccccgcgggcttccgcgggcgcgtgccggtgcaggcgcacttcccgcgccgcggcggcttcggcttcggcttcgccccccgccgcagcagccgcgcgctccgcgtgcgcgcgtcggtggcgatcgagaaggagacgccggagagcgagccgcccccgacgttcctccgcgaggacgggcacgggtccgggtccgtgcgggcgcggttcgagtccatgatccggcgggtacagggggaggtctgcgccgcgctcgaggaggccgacggcggcggcgcgcgcttcgtcgaggacgtctggtcgcgcccctgcgggggcggtggtatcaatcctgtcctgcaggacggtcgcgtcttcgagaaggccggggtcaacgtctccgtcgtctacggggtcattccgcccgacgcctaccgcgacggcaagggggaggccgacaagaacggggccgccgccggggatggacacaagcctggcccggtgccattcttcgcgggggggattagttcggtgcttcaccccaagaacccatttgctccaacattgcattttaactaccgttactttgagacggatgcaccaaaaggtgcacctggtgcaccaagacaatggtggttcggcggtggtactgacttgactccttcatacatcattgaagaggacgtgaagcatttccattctgttcaaaagcaagcatgtgataaatttgatccaagttttcacccaagattcaaaaaatggtgtgatgattatttctatattaagcaccgtaatgagcggcgtgggctaggtggaatattttttgatgaccttaatgattacgatcaagaaatgcttctcaactttgctacagaatgtgcggactctgtacttcctgcgtacataccgatcatagaacggcggaagaacactccgttcaatgaggagcacagggcatggcagcaattgcggagaggtcgttatgtggagttcaaccttgtctacgaccgtggtacaacatttggcctaaagactggaggaagaattgagagcatacttgtgtcccttccgcttacagcacgatggcagtatgatcataaaccggaagaaggaaccgaggaatggaaacttctggaagcctgcataaacccgaaggattggatctgattagccgttattcttgagatcttttgttagagttttcccttctgtagggctaagaccacgtgcagtttcattatatattttgcatctgtagaatcgtgaataaatatgatgtagtgatgttgtagctgtttgtatctatctgctgtttttcccccatgtgaatgagagaaccattggcttctgtatttacgaaaaaaaaaaaaaaaaaaaa

SEQ ID NO: 53364 - protein, 400 aa, Zea mays
MASNLLSAPSRTLAPSPAPAPAGFRGRVPVQAHFPRRGGFGFGFAPRRSSRALRVRASVAIEKETPESEPPPTFLREDGHGSGSVRARFESMIRRVQGEVCAALEEADGGGARFVEDVWSRPCGGGGINPVLQDGRVFEKAGVNVSVVYGVIPPDAYRDGKGEADKNGAAAGDGHKPGPVPFFAGGISSVLHPKNPFAPTLHFNYRYFETDAPKGAPGAPRQWWFGGGTDLTPSYIIEEDVKHFHSVQKQACDKFDPSFHPRFKKWCDDYFYIKHRNERRGLGGIFFDDLNDYDQEMLLNFATECADSVLPAYIPIIERRKNTPFNEEHRAWQQLRRGRYVEFNLVYDRGTTFGLKTGGRIESILVSLPLTARWQYDHKPEEGTEEWKLLEACINPKDWI

SEQ ID NO: 53365 - DNA, 1314 bp, Aspergillus oryzae
  CDS (1)..(1314)
atgaccttgtcccggcaatatatgcctcttcggaggtcactctgccacttctcagcgcagaccagacgcgcaccttgcaactttcagaatacatttcgcagatactcagcggaaaagcgatccagcgaaccgaaatcttttgtcgtgtggaggccatacctccggctggccattggtgtcccattcatcggagctctgatatattccatgatgacaggtgaagtgaccgaactcgactccccgtccatcgtggagctcgacgaagcgttgaagaaacaagcaacgattagcgaaaactctccaatgcgtttacgaatggagaaattgatcaaagaacatcaaaagaaaatcgtagatgagttaagcaggattgacggtactcatttcaaaacggatacctgggcacgtcccaatgggggtggcggcatatcctgtgtgctccaagatggtaatgttttcgagaaagcaggtgtcaatgtatcggttgtctatggtgaattgccccgggctgctattgagaaaatgagggcagatcacaagtcattcgttggcgcagacgtggaatctttggagttttttgctgccggcttgtcactggttctgcacccccataatcccatggcaccaacagtccatctcaactaccgttactttgagacgtcagaccctaaggatcctatcaatggagataagaattggtggttcggcggtggtacagacttaacaccctcctacctgttccccgaggatgtcaagcattttcaccagaccatcaaagacgcttgcgataggcatgatgcaacatattaccctcgattcaaggcctggtgcgataagtatttctatcttccacatcgccgagagtctcgtggtgttggtggtatctttttcgacgatcttgatgccagtttcttggagtcatctgccacttcatcacagaatcctcaggaaactctattctcgttcgtctccgatagtctggcttccttccttccctcttatgttcctatcattgaacgccgaaaggatacgccattcacacctgctcagaaagaatggcagcagcttcgacgtgggcgctatgtggaattcaacctggtttatgaccgtggcaccagctttggcctgcgcacccccaacgctcgtatcgaaagcatattgatgagcctccctcgcacagcaagctgggcctatatggatccggtgtcgggaacccggaccgaggcttctgcggaggaaaagaatccgggcgaggacaaggagcgtgaaaaggaattaatggatgttctcagacatccccggcaatgggtgtaa

SEQ ID NO: 53366 - protein, 437 aa, Aspergillus oryzae
MTLSRQYMPLRRSLCHFSAQTRRAPCNFQNTFRRYSAEKRSSEPKSFVVWRPYLRLAIGVPFIGALIYSMMTGEVTELDSPSIVELDEALKKQATISENSPMRLRMEKLIKEHQKKIVDELSRIDGTHFKTDTWARPNGGGGISCVLQDGNVFEKAGVNVSVVYGELPRAAIEKMRADHKSFVGADVESLEFFAAGLSLVLHPHNPMAPTVHLNYRYFETSDPKDPINGDKNWWFGGGTDLTPSYLFPEDVKHFHQTIKDACDRHDATYYPRFKAWCDKYFYLPHRRESRGVGGIFFDDLDASFLESSATSSQNPQETLFSFVSDSLASFLPSYVPIIERRKDTPFTPAQKEWQQLRRGRYVEFNLVYDRGTSFGLRTPNARIESILMSLPRTASWAYMDPVSGTRTEASAEEKNPGEDKEREKELMDVLRHPRQWV

SEQ ID NO: 53367 - DNA, 1011 bp, Cryptococcus neoformans
  CDS (1)..(1011)
atgcgcatccgcatggccacgtgggtcaagtcgctgcaggaccacatcgtccgcacgatggaacagatcgaggccgccgccccgcccaacgagttcgccccgtcgcccgccccgcccacctttctccgcgacgcctggatccgccccgaaggcggcgaaggctcctcctgcgtcctcgccgacggacgcgtctttgaaaaggccggcatcaacgtctccgtcgtgcacggcaagctcccgcccaaggcccaaatggccatgctgccggaccacccgagcctgccggagcccaccggcaccgtccccttcttcgcaaccggcctcagcatcgtcatccacccccggaacccacacgtgcccaccgtccatctcaactacaggtactttgagattgaagatcccgagaccgggaaaccgaaagcgtggtggtttggcggcgggtccgacctcaccccgtcctacctcgacgaggccgacgccgtccatttccacaagacgctcaagcacgcctgcgaccagcacgacgagcgctactggcccgactttaagcggcagtgcgacaggtatttcaccatcacccaccgcggcgagtgcagaggtctcggcggcatcttctttgacgatctcaccaccacgtcccccgtccatgccccgccggacggcgcccagggaccaagcgctgaaaagattttcgaatttgtaaaatccgcttctgccgccttcctccccgcctacgtgcccatcgtctacaagcacatgaacgacagctggacgcccgaggagaagaggtggcagcagctcaggagagggaggtatgtcgagttcaacttggtctatgatagaggtaccaagtttgggttgaacacccccggcgcgaggatagagagtatcttgatgtcgttgccggaaacggcgcgatgggaatacatgtcccccttgggcagggaagggtccggaacacgcgaagaaaagctcatggaggttttgaaaaatcctcgtgactgggtctaa

SEQ ID NO: 53368 - protein, 336 aa, Cryptococcus neoformans
MRIRMATWVKSLQDHIVRTMEQIEAAAPPNEFAPSPAPPTFLRDAWIRPEGGEGSSCVLADGRVFEKAGINVSVVHGKLPPKAQMAMLPDHPSLPEPTGTVPFFATGLSIVIHPRNPHVPTVHLNYRYFEIEDPETGKPKAWWFGGGSDLTPSYLDEADAVHFHKTLKHACDQHDERYWPDFKRQCDRYFTITHRGECRGLGGIFFDDLTTTSPVHAPPDGAQGPSAEKIFEFVKSASAAFLPAYVPIVYKHMNDSWTPEEKRWQQLRRGRYVEFNLVYDRGTKFGLNTPGARIESILMSLPETARWEYMSPLGREGSGTREEKLMEVLKNPRDWV

SEQ ID NO: 53369 - DNA, 1809 bp, Ostreococcus tauri
  CDS (1)..(1149)
atgacgtcgaacgcgcgcgcgttcgacgcgcgagcgctcgcgcgatggacggttgcggataaacctcgagcgcggcgccatcgcgcggtggcgcggacgacggcggtgcgtgggattcgaatgggcgcgcgcgcggcggcgcaagggatcgaggatgaagtgaagattgatcgcgcgccgacgacgctgctgcgagagggggcgtcggaggcgggggacgatacgcaaatgcgggcgaggtttgagaagatgattcgcgcggcgcaggatgagatctgcgcggcgatctccgagttggatgggaagccgttccatgaggacgcgtggacgagacctgggggaggcggtgggatctctcgagtgctccaagatgggaacgtgttcgaaaaggctggcgtgaacgtgtcggtggtgtacggacaaatgccgcccgaggcgtatcgcgcggcgacgggcgaagagggcgcgtcgaaggagatgattccgttctttgcggcgggtatctcctctgttatgcacccgcacaacccgatggcgccgacggtgcacttcaactaccgctactttgagacggacgctccgaagggcgccgccggggcgccgcgcgcctggtggttcggcggcgggaccgacttgacgccgtcgtacattttcgatgaagacgtctcttacttccaccaaacgctcaaggacacgtgcgataagcatgataaggatttctaccccaagttcaagcaatgggcggacgattacttcatgatcaagcaccgaggcgagcgacgcggcgtcggcggcgtcttcttcgacgacatgaacgaccgcagcaaggacgatctcctcgccttcgcgacagacatggcgggtgccgtcgttccggcgtacgtcccgctcgtcgccaagcacaaagatgacgagttcaccccggaacaacgcgcgtggcagcaaatgcgccgcggtcgctacgtcgagttcaacctcgtctacgaccgaggcacgactttcggcctcaagacgggtggtcgcatcgagtccatcctcatgtctctcccgcgttactgcgagttccagtacgatcacaatccggcgccgggctctcgcgaggccgacgccctggacgcgttcaagaacccccgaacgtggtgcgcctaagccttccgttctccgctctcgcgttccgtcgcgtctcgcgagctctttcacccactcgctcatcctcaatcgtcgacgaacgctcgagttattgataatgatctacgctctaccgtttacgttcggccctcgcctcgcgcgtcgcttctcgcggcgtcgtcctcgcgcgccgcccgccgcccgatgactctcaacgagtccgcactcacgcggagtgcgttcggcgcacgtcgtggtctccgcgcccccctcgcggtcgtcgtcactcgtcgagcgcgaccgacggtcgagctcgcgcttcgaactcgagcgtctgcgcgctcgatcgggatcgcgcgcgcgcggacggtgggcgaacgcgacgcggcgcgggagacggctgagaggctcggacgtttaaatcttccagcacgtcatggcgaacgattccgtcgtgattgtgccctcgggcgagctcccgttcgactgtgcgttcgtgaacgacgcgcgtgtgccgcggtaccggttgaacgcgggatggagggggtaggggtggctaggggcgaacgcggggggtggacggaggcgcgatctcgagagacgcgcggcgagacgatcgcgcgcgtcgaacacgcgatggacgatgatgggagagcgatgggcgtgggagagggcgagtga

SEQ ID NO: 53370 - protein, 382 aa, Ostreococcus tauri
MTSNARAFDARALARWTVADKPRARRHRAVARTTAVRGIRMGARAAAQGIEDEVKIDRAPTTLLREGASEAGDDTQMRARFEKMIRAAQDEICAAISELDGKPFHEDAWTRPGGGGGISRVLQDGNVFEKAGVNVSVVYGQMPPEAYRAATGEEGASKEMIPFFAAGISSVMHPHNPMAPTVHFNYRYFETDAPKGAAGAPRAWWFGGGTDLTPSYIFDEDVSYFHQTLKDTCDKHDKDFYPKFKQWADDYFMIKHRGERRGVGGVFFDDMNDRSKDDLLAFATDMAGAVVPAYVPLVAKHKDDEFTPEQRAWQQMRRGRYVEFNLVYDRGTTFGLKTGGRIESILMSLPRYCEFQYDHNPAPGSREADALDAFKNPRTWCA

SEQ ID NO: 53371 - DNA, 1173 bp, Aplysia californica
  CDS (1)..(1173)
atggcacaggtcctccgtcagtgtgtggtgacttttgtccgtctgggatccaccaaagttgctcattctaccccaggcattaggctgaataatcacagactctacttgaaactgttaggaggtggagttttatgccagttttccttgttcagttggaagggttccagaaagcctgatgtggactccagtgactcttggatgtctgagcccatcacgtcccttgatgagttgaaacagaacggagatgacatgaagtgcaagatggaagccatgatcatgcggattcagtctgagtttgttcacgctgtggagaaagaggagttagaggagggtgggaaaaagtttctagttgacaggtggctgcgagagcagggtggtggtggaattacgtgtgtcttgcaagacggcaccgtgtttgaaaaggctggagtgaacatctctgtggtcagtggcatcctgccccccaacgctgtgcaacagatgagagccagaggaaagaaaatgaagggagcaaacctcaagttttttgctgcgggcgtcagttctgtggtccatcctcgcaatcctcatataccaactgttcacttcaactaccgctactttgaggtggagaatgatgatggggagaaacactggtggtttggtggaggcaccgacctcacgccctactatctagaagaaaaggatgtcgtccatttccacaagaccttgaaaaaagcatgcgatggtcacgggaagcagttgtaccccaagtacaagaagtggtgcgacgattacttccgcgtgcctcacagaggtgagagtcgaggagtgggtggaatcttctttgacgatgttgacgagccatcccaagacaagtgttttgagtttgtcactgactgtgccgagtctgtggtcccgtcatatttgccccttgtccaaaaacacaagaaagatggagtcagctatcctgaaagagagtggcagctgctgagaagaggccgctatgttgagttcaatctgatctatgacagaggaacaaaatttggcctgtacacccccggagccagatatgagagcatcttgatgtccctgcccctcacagcgagatgggagtacaagcactcccctcctgaaggctcccgggaggctcagctgactgaggttttgaagaatccgcgcgagtgggtgtga

SEQ ID NO: 53372 - protein, 390 aa, Aplysia californica
MAQVLRQCVVTFVRLGSTKVAHSTPGIRLNNHRLYLKLLGGGVLCQFSLFSWKGSRKPDVDSSDSWMSEPITSLDELKQNGDDMKCKMEAMIMRIQSEFVHAVEKEELEEGGKKFLVDRWLREQGGGGITCVLQDGTVFEKAGVNISVVSGILPPNAVQQMRARGKKMKGANLKFFAAGVSSVVHPRNPHIPTVHFNYRYFEVENDDGEKHWWFGGGTDLTPYYLEEKDVVHFHKTLKKACDGHGKQLYPKYKKWCDDYFRVPHRGESRGVGGIFFDDVDEPSQDKCFEFVTDCAESVVPSYLPLVQKHKKDGVSYPEREWQLLRRGRYVEFNLIYDRGTKFGLYTPGARYESILMSLPLTARWEYKHSPPEGSREAQLTEVLKNPREWV

SEQ ID NO: 53373 - DNA, 2028 bp, Chlamydomonas reinhardtii
  CDS (160)..(1257)
gcatagagcaagtcacagacagagttgtcttgcttctttcacgaacttcttcactcttgagcctcacccagcctagcccgccctattagcggtctagtgcaaccttctttcatcttcgcctcgaggatctagctcaggatctaggcaaaagcttccgcgatggcactgcaagcctcaacccgctcgctccagcagcgccgcgccttctcttcggcccagacctccaagcgtgtgtctgtgaccaaggtccgcgcgacggctatcgaggcggagaactatgtgaagcaggctccccagtcgctggtccgcccgggcatcgacactgaggactctatgcgcgctcgcttcgagaaggtgatccgcaacgcccaggactccatctgcaatgctatctccgagatcgatggcaagccgttccaccaggacgcctggacccgccccggcggcggtggcggcatcagccgcgtgctgcaggacggcaacgtgtgggagaaggccggcgtcaacgtgtccgtggtctacggcaccatgccccctgaggcctaccgcgctgccactggcaacgccgagaagctgaagaacaagggtgacggtggccgcgtgcccttcttcgccgccggcatctcgtcggtgatgcacccccgcaacccccactgccccaccatgcacttcaactaccgctacttcgagactgaggagtggaacggcatccccggccagtggtggttcggcggcggcaccgacatcacccccagctatgtggtgcccgaggacatgaagcacttccacggcacctacaaggcggtgtgcgaccgccacgatcccgcttactacgagaagttccgcacctggtgcgatgagtacttcctcatcaagcaccgcggcgagcgccgcggcctgggcggcatcttcttcgatgacctgaacgaccgcaaccccgaggacatcctgaagttctcgaccgacgccgtgaacaacgtggtggaggcatactgccccatcatcaagaagcacatgaacgacccctacacccccgaggagaaggagtggcagcagatccgccgcggccgctacgtggagttcaacctggtctatgaccgcggcaccaccttcggcctgaagaccggcggccgcattgagtcgatcctcatgtccatgccccagaccgcctcatggctgtacgaccaccagcccaaggccggctcgcccgaggccgagctgctcgacgcctgccgcaacccccgcgtctgggtgtaatcgcgccctagctgtgacggcttgagccacgctgcatgcaagctgctgatgctgcggattggtgttgcgcatgggagctctcgcggggagcgacgcagcatgggcgcttgcgtgctagcaggcgtggtggacgcgcgcggcctttgcttggggcggtggggcaggatgtgtgggaggtagttttcgatgcccgcagctgcattgcgcgcattggcataccagttacatagtttgacccactgagtggatgatggttgacgcccgcgatgccttgtatggcctgagttctgccgaaatgctagcgatggcagcacaaagcagactgcagatagagaagagccctgactacgcagcttgatcttaggtagatttgaacaagagtgacgacgcattggggacgagaagtcttccagactgaccgcagcaggtttggagcctcggaggacgctccgcaggctcctatgacgtgtgtatggtgtaccgtgtgcgtgtgtgcgtgccgtcattctttcttgttccctgttcctgttggaacccgtggtatgacctgtccagtgtggactgactgcactctggacccccgagttacacacctaggaagaggtaaacgaggacgattgttgcacctgattgcagtgtgattgcggcatggcctgtgagtgcgatataaagcgggcgaaatggcaaggctgggtgcctgtcaattcaactcccgacgcaatcagaatcagagcaacgagtgtaaaatccactgccccgaaaaaaaaaaaa

SEQ ID NO: 53374 - protein, 365 aa, Chlamydomonas reinhardtii
MALQASTRSLQQRRAFSSAQTSKRVSVTKVRATAIEAENYVKQAPQSLVRPGIDTEDSMRARFEKVIRNAQDSICNAISEIDGKPFHQDAWTRPGGGGGISRVLQDGNVWEKAGVNVSVVYGTMPPEAYRAATGNAEKLKNKGDGGRVPFFAAGISSVMHPRNPHCPTMHFNYRYFETEEWNGIPGQWWFGGGTDITPSYVVPEDMKHFHGTYKAVCDRHDPAYYEKFRTWCDEYFLIKHRGERRGLGGIFFDDLNDRNPEDILKFSTDAVNNVVEAYCPIIKKHMNDPYTPEEKEWQQIRRGRYVEFNLVYDRGTTFGLKTGGRIESILMSMPQTASWLYDHQPKAGSPEAELLDACRNPRVWV

SEQ ID NO: 53375 - DNA, 912 bp, Agrobacterium tumefaciens
  CDS (1)..(912): transl_table=11
atggaacggccaatcttgccgaagggcttgcccgaggacattgaagacaagaaggccgttgcccaggcgtggttccagcatctgcgcgacaccatcgtcgcctccttcgaaaccctagaagacgaactcactggcccgctttccgatcaggagcctggtcgcttcgtgcagaaggactggctgcgcgacaatggcgagggcggcggcggcaagatgtcgatgatggaaggtcgcgtcttcgaaaaggtcggcgtgcacacctccaccgtctatggcgaattctcgcccgagttccgcaagcagatacccggtgcggaagaagacccgcgcttctgggcctccggcctttcgcttatcgcccatccggtcaatcccaatgtgccggccgtgcacatgaacacccgcatggtcgtcaccaccagccattggttcggcggcggtgcggatctgacgccggtgctcggccgcaggcggacacagcaggacccggatacccagctgttccaccgcgccttcgagattacctgcaaccgtcatccgatcgccgattatccgcgatacaagagctggtgcgacgagtatttcttcctgaagcaccgcgacgagccgcgtggcaccggcggcatctttttcgactggctgcaccctgacgaggagaaaggtggctgggacgccaatttcaccttcgtgcaggatgtcggccgcgccttcaacctcgtctatccgaaaatcgtccgcgccaatttcaaccagaactggacggaagaggaccgcgacgagcagctcatccgccgcggccgctacgtggaattcaacctgctttacgatcgcggcacgatcttcggtctgaagaccggaggtaacgtcgaatcaatcctgtcatcgctgccgccggtggtgcgctggccttaa

SEQ ID NO: 53376 - protein, 303 aa, Agrobacterium tumefaciens
MERPILPKGLPEDIEDKKAVAQAWFQHLRDTIVASFETLEDELTGPLSDQEPGRFVQKDWLRDNGEGGGGKMSMMEGRVFEKVGVHTSTVYGEFSPEFRKQIPGAEEDPRFWASGLSLIAHPVNPNVPAVHMNTRMVVTTSHWFGGGADLTPVLGRRRTQQDPDTQLFHRAFEITCNRHPIADYPRYKSWCDEYFFLKHRDEPRGTGGIFFDWLHPDEEKGGWDANFTFVQDVGRAFNLVYPKIVRANFNQNWTEEDRDEQLIRRGRYVEFNLLYDRGTIFGLKTGGNVESILSSLPPVVRWP

SEQ ID NO: 53377 - DNA, 1161 bp, Arabidopsis thaliana
  CDS (1)..(1161)
atggcttctcactcgtcgactctcctctcttctcctactttcgctcctttctcctctcatcgtcttcattattctcccaatccctctactctcagattctcccgtccaatcagaaataaacctaatctcgccttgcgatgttcagtctcaattgagaaagaagttcccgaaactgaacgaccctttactttccttagggattctgatgacgtcactccatcttcttcttcttcttccgtcagggctcgtttcgagactatgattagggctgctcaagacagtgtttgtgatgcaattgaagctatagaaggcggtcctaagtttaaagaagatgtttggtctcgacctggtggtggcggtggaatcagtcgtgtgttgcaggacgggaatgtctttgagaaagctggtgttaatgtctctgtggtttatggtgttatgcctcctgaagcttatagagctgcaaagggctcagcttctgatcagaaacctggtcctgttccgttcttcgctgctggagtcagctcggttttgcatcccaagaacccttttgccccaaccctgcatttcaattatcgctatttcgagacagatgctccaaaggatgttcctggagctccaaggcaatggtggtttggtggtggcactgatttcactcctgcttacatctttgaagaagatgtcaagcatttccattcgattcaaaagcaagcctgtgacaaatttgacccttccttctatccccgattcaagaagtggtgtgatgactacttttacatcaagcaccgtgatgagagacgaggacttggagggatattttttgatgatcttaatgactatgatcaggaaatgcttctgtcatttgccactgaatgcgcaaactcagtggtgccggcttatatacctatagtagagaaaaggaaagacatggaatttacagagcagcacaaggcatggcaacagttgcgacgagggcgatatgtcgaattcaacttggtatatgatcggggaacgacatttggtctgaagacaggaggacgaatagagagcattctcgtctctcttccgctttcagcaagatgggaatatgaccataaaccggaagaggggaccgaagagtggaagctattggatgcttgcatcaacccgaaggagtggatctag

SEQ ID NO: 53378 - protein, 386 aa, Arabidopsis thaliana
MASHSSTLLSSPTFAPFSSHRLHYSPNPSTLRFSRPIRNKPNLALRCSVSIEKEVPETERPFTFLRDSDDVTPSSSSSSVRARFETMIRAAQDSVCDAIEAIEGGPKFKEDVWSRPGGGGGISRVLQDGNVFEKAGVNVSVVYGVMPPEAYRAAKGSASDQKPGPVPFFAAGVSSVLHPKNPFAPTLHFNYRYFETDAPKDVPGAPRQWWFGGGTDFTPAYIFEEDVKHFHSIQKQACDKFDPSFYPRFKKWCDDYFYIKHRDERRGLGGIFFDDLNDYDQEMLLSFATECANSVVPAYIPIVEKRKDMEFTEQHKAWQQLRRGRYVEFNLVYDRGTTFGLKTGGRIESILVSLPLSARWEYDHKPEEGTEEWKLLDACINPKEWI

SEQ ID NO: 53379 - DNA, 912 bp, Bordetella bronchiseptica
  CDS (1)..(912): transl_table=11
atgaccgccgtagccattcccgccgtacgcgactacctcaccgacctgcaaggccgcatcgtcgccgcgctcgagcaggccggcggcgaggcgtttcgcaccgatgcctggcaacgcgccgagggcggcggcggcgtgtcgcgcctgctcgagggcggccaactgttcgaacgcgccggcgtgctgttcagccatgtcaagggcacgcgcctgccgccatcggccagcgcccaccgccccgagctggccggccgcggctgggaagccatgggcgtctccatggtcctgcacccgcgcaacccctatgtgcccaccacgcacatgaacgtgcgcatgttcgtggccgccgcgcgccccgggcatgccgaatccgacgtcttctggttcggcggcgggctcgacctcaccccgtactacccgttcgaggacgacgcgcgccatttccaccgcgcctgccgcgacgcgctggacccgcacggcgccgattactacccgcgctacaagcagtggtgcgacgaatacttcttcctcaagcaccgcaacgaaacccgcggcatcggcggcatcttcttcgacgacctgaacgaccccggtttcgacgcctcgttcgcgctcacgcgctcggtcggcgacagcttcctgcccgcctacctgcccatcgtccaggcccgccgcgacatgccctacggcgaacgcgagcgcgacttccaggcctaccggcgcggccgctacgtcgaattcaacctggtgttcgaccgcggcaccctgttcggcctgcaatcgggcggccgcaccgaatccatcctgctgtccatgccgccgctggcgcaatggcgctacgactggcagccgcaggccggcacgcccgaagccgccctggccgagttcctgcggccccgggaatgggtgtga

SEQ ID NO: 53380 - protein, 303 aa, Bordetella bronchiseptica
MTAVAIPAVRDYLTDLQGRIVAALEQAGGEAFRTDAWQRAEGGGGVSRLLEGGQLFERAGVLFSHVKGTRLPPSASAHRPELAGRGWEAMGVSMVLHPRNPYVPTTHMNVRMFVAAARPGHAESDVFWFGGGLDLTPYYPFEDDARHFHRACRDALDPHGADYYPRYKQWCDEYFFLKHRNETRGIGGIFFDDLNDPGFDASFALTRSVGDSFLPAYLPIVQARRDMPYGERERDFQAYRRGRYVEFNLVFDRGTLFGLQSGGRTESILLSMPPLAQWRYDWQPQAGTPEAALAEFLRPREWV

SEQ ID NO: 53381 - DNA, 951 bp, Bradyrhizobium japonicum
  CDS (1)..(951): transl_table=11
atggtgggcacggcgcaagggcgcctttgcccaccctacggcaggtccgttcgggaattgaatatggacgtttcgacaatcgaagaccgcaagacgcgcgcccgcgcctggttcgaagctttgcgcgacgacatctgcgcgagcttcgagcggctggaggacgacgccccgcaaggcctctatccgggcgaggctggccgcttcacgcggacgccctggcagcgcaccgatcatagcggtgcggccggcggcggcggtgtgatgtcgatgatgtcgggccggctgttcgagaaggtcggcgtgcattgctcgaccgtgcacggcgagttcgcgcccgagtttcgcgctcagattccgggcgcggcggacgatccgcggttctgggcctccggcatctcgctgatcgcgcacttacgcaatccgcacgtgcccgccgtgcacatgaacacgcgcttcgtcgtcaccaccaaggcctggttcggcggcggcgccgatctcacgccggtgctggatcgccggcgcacgcaggacgacgccgacagcatcgccttccacgccgcgatgaaagaggcctgcgtgcagccgaacggcgttgccgattacgacaagtacaagaaatggtgcgacgagtatttctacctgccgcaccgcaaagaggcgcgcggcatcggcggcatcttctacgactggcacgacagcggcgactgggacgccgacctcgccttcacccaggacgtcggccgcgccttcctgaagatctaccctgatatcgtcaggcgcaatttcgcgagcgcctggaccgctgcggaccgcgaggagcaactgatccggcgcggccgctatgtcgagttcaacctgctctacgatcgcggcaccatcttcgggctcaagaccggcggcaatgtggattcgatcctgtcgtcgctgccgccggaggtgaaatggccatga

SEQ ID NO: 53382 - protein, 316 aa, Bradyrhizobium japonicum
MVGTAQGRLCPPYGRSVRELNMDVSTIEDRKTRARAWFEALRDDICASFERLEDDAPQGLYPGEAGRFTRTPWQRTDHSGAAGGGGVMSMMSGRLFEKVGVHCSTVHGEFAPEFRAQIPGAADDPRFWASGISLIAHLRNPHVPAVHMNTRFVVTTKAWFGGGADLTPVLDRRRTQDDADSIAFHAAMKEACVQPNGVADYDKYKKWCDEYFYLPHRKEARGIGGIFYDWHDSGDWDADLAFTQDVGRAFLKIYPDIVRRNFASAWTAADREEQLIRRGRYVEFNLLYDRGTIFGLKTGGNVDSILSSLPPEVKWP

SEQ ID NO: 53383 - DNA, 909 bp, Chromobacterium violaceum
  CDS (1)..(909): transl_table=11
atgagccacccgcacagcaacgccgtcaaatcctttctgctggacctgcaggaccgcatttgcgcggcgctggagcaggctgacggcaaggcgcagttcgccgaagacgcctggagccgcgaggccggcggcggcgggcgcagccgggtgctgaccggcggcgaggtgttcgagcaggccggcgtcaacttctcccatgtccacggcgacgcgctgccgccctccgccagcgcccaccggccggagctggccggccgccgcttcgaggcgatgggcgtgtcgctggtgatccacccgtccaatccgcacgtgcccaccagccacgccaacgtgcgtttcttcatcgcggaaaaggacggcgaggcgccggtatggtggttcggcggcggtttcgacctgacgccgttctacccgcaggaagaggacgccgtgcactggcacacggtggcccgcgacctgtgcgcgccgttcggcggcgacgtctatccccgctacaagaaatggtgcgacgaatatttccacctgaagcaccgcaatgaggcccgcggcatcggcggcctgttcttcgacgacctcaacgaatggggcttcgacaagagcttcgccttcacccgcgcggtcggcgacggctacctggacgcctatctgcccatcgtcgcgcggcgcaaggaacaagcctggggcgaccgcgagcgccagttccagctgtaccggcgcggccgctacgtcgaattcaacctggtctgggaccgtggcacgctgttcggcctgcagtcaggcggccgcaccgaatcgatactgatgtcgatgccgccgctggtgcgctgggaatacggctaccagccggaaccgggcagcccggaagccaggctgtacaccgactttctgccgccgcgcgactgggtgtga

SEQ ID NO: 53384 - protein, 302 aa, Chromobacterium violaceum
MSHPHSNAVKSFLLDLQDRICAALEQADGKAQFAEDAWSREAGGGGRSRVLTGGEVFEQAGVNFSHVHGDALPPSASAHRPELAGRRFEAMGVSLVIHPSNPHVPTSHANVRFFIAEKDGEAPVWWFGGGFDLTPFYPQEEDAVHWHTVARDLCAPFGGDVYPRYKKWCDEYFHLKHRNEARGIGGLFFDDLNEWGFDKSFAFTRAVGDGYLDAYLPIVARRKEQAWGDRERQFQLYRRGRYVEFNLVWDRGTLFGLQSGGRTESILMSMPPLVRWEYGYQPEPGSPEARLYTDFLPPRDWV

SEQ ID NO: 53385 - DNA, 933 bp, Coxiella burnetii
  CDS (1)..(933): transl_table=11
atgagaaaagatcgtcaaaataaaataaccgaagtgggtatttatttaaaggacttgcaaaatcgcctctgtcgcgctttcgaaaaagaagaaggagagagtcgatttcaagagactttgtgggaaaagcccaatggtggtggcggtcgaacgcgtcttttgacggaagggcatgtcatcgagcaaggtggcgtgaacttctcgtgcgtctatggaaatcaattgcctccagccgccacccaaaaacaccctgaaattagcggctttgcttttcaagcagaaggtctttctttggtgattcatccccgcaatccttatgtaccaaccgttcatgctaattttcgcttttttatagccggaaaagacgaggctgaccctcgctggtggtttggcggcggttacgatttaactccttattatggctttgaagaagattgccgtcattggcacagggttgccaaaaaagcttgcgatcgatttggcgaagcgatttacccacgattcaaagcggcttgtgatgactatttttatttaaaacatcgaaatgagccgcgcggaattggcggtttattttttgatgatttaaatgaatgggaatttaagcgttgttttgaatttatcaaaattctaggcgatagctttttagaagcttatttgccgattatgcaaaaccgtaaaaatcatccatacggtgagcgtcaacgcgaatttcaattgtatcgtcgaggccgttatgtggaatttaacttactgtatgatcgaggaacccgttttggcttagaattcggcggacgaacggaatcgatcttaatgtcgctcccgccccgcgtcgtctggcggcccaattgggaacccgaacccggcagcgaagaagcacggctgtatgaagactatttagtgcgccgaaactgggtatcagtttcgggcgcttga

SEQ ID NO: 53386 - protein, 310 aa, Coxiella burnetii
MRKDRQNKITEVGIYLKDLQNRLCRAFEKEEGESRFQETLWEKPNGGGGRTRLLTEGHVIEQGGVNFSCVYGNQLPPAATQKHPEISGFAFQAEGLSLVIHPRNPYVPTVHANFRFFIAGKDEADPRWWFGGGYDLTPYYGFEEDCRHWHRVAKKACDRFGEAIYPRFKAACDDYFYLKHRNEPRGIGGLFFDDLNEWEFKRCFEFIKILGDSFLEAYLPIMQNRKNHPYGERQREFQLYRRGRYVEFNLLYDRGTRFGLEFGGRTESILMSLPPRVVWRPNWEPEPGSEEARLYEDYLVRRNWVSVSGA

SEQ ID NO: 53387 - DNA, 1173 bp, Drosophila melanogaster
  CDS (1)..(1173)
atgaacgcactccgtcacacgatatccctggtatcgctgggcacctttcaactggtgcgccggaccagggggccgcacgccagaggctttctcctcggcacgggattgggcctggccagcttttcggcggtcacgtacgcacattccgcggaggctgtcgacccaaaggtcaacggggtgcagatgaacacctcgcggttcatggccgagcccatcaccgactccaaggcactgctgggggacaaggagaacatgcgtcatcgcatggagatcctgatcatggagatccaggcggagttttgccgcgccctggaggcggaggagaactgtggccagaagttcaaggtggaccggtgggagcggcctgagggcggaggcggcatcacttgcgtcctgcaggatggcgatgtgttcgagaaggcaggcgtcaatatatccgtggtcaccggttcgttgcccccggctgcagtacaacagatgcgggctcgcggcaagaatctgaaggagggcgcctcgttgccgttctttgccagcggtgtgagtgccgtgatccatccgaggaatccccatgtccccaccattcacttcaactatcgttattttgaagtggaaactgccaagggggagaagcagtggtggtttggtggcggcacggatctgacgccctattacctctgcgagaaggacgcctcccacttccaccagacgctgaagtccgcctgcgatgagcacgatcccacctactacccgcgctttaagaagtggtgcgacgactacttccgcatcaagcatcgcaacgagagccgcggcattggcggaatctttttcgacgacatcgattcgcccaaccaggaggcggccttcaactttgtgtcaagctgcgccagggccgtgattccctcctacgtgccgctggtacgaaagcacaaaaatcgggagtatggcaacaacgaacgacagtggcaattgctgcgccgcgggcgctacgtggagttcaatttgatctacgatcgtggcaccaagttcggtctatacacgcctggagcccggtacgagagcatcctgatgtccctgcccctgcacgcccgctgggagtacatgcacgagcccaagtcccagtccgaggagggcaaactgatgaaggtcctgaagaaccccaaggattgggtctaa

SEQ ID NO: 53388 - protein, 390 aa, Drosophila melanogaster
MNALRHTISLVSLGTFQLVRRTRGPHARGFLLGTGLGLASFSAVTYAHSAEAVDPKVNGVQMNTSRFMAEPITDSKALLGDKENMRHRMEILIMEIQAEFCRALEAEENCGQKFKVDRWERPEGGGGITCVLQDGDVFEKAGVNISVVTGSLPPAAVQQMRARGKNLKEGASLPFFASGVSAVIHPRNPHVPTIHFNYRYFEVETAKGEKQWWFGGGTDLTPYYLCEKDASHFHQTLKSACDEHDPTYYPRFKKWCDDYFRIKHRNESRGIGGIFFDDIDSPNQEAAFNFVSSCARAVIPSYVPLVRKHKNREYGNNERQWQLLRRGRYVEFNLIYDRGTKFGLYTPGARYESILMSLPLHARWEYMHEPKSQSEEGKLMKVLKNPKDWV

SEQ ID NO: 53389 - DNA, 900 bp, Escherichia coli O6
  CDS (1)..(900): transl_table=11
atgaaacccgacgcacaccaggttaaacagtttctgctcaaccttcaggatacgatttgtcagcagttgagcgccgtcgatggcgcagaatttgtcgaagatagctggcagcgcgaagctggcggcggcgggcgtagtcgggttttgcgtaatggtggtgttttcgaacaggcaggcgtcaacttttcacatgtccacggtgaggcgatgcctgcttccgccaccgctcatcgtccggaacttgccgggcgcagtttcgaggcgatgggcgtttcactggtagtgcatccgcataatccgtatgtccccaccagccacgcgaatgtgcgcttttttattgccgaaaagccgggtgcagagcccgtctggtggtttggcggcggcttcgatttaacccctttctatggttttgaagaagacgccattcactggcaccgcaccgcccgtgacctgtgcctgccatttggcgaagacgtttatccgcgttacaaaaagtggtgcgacgaatacttctacctcaaacatcgtaacgaacagcgcggcattggcgggctgttctttgatgatctgaacacgccagatttcgaccactgttttgcctttatgcaggcggtaggcaaaggctacaccgacgcttatttaccaattgtagagcgacgaaaagcgatggcctacggcgagcgcgagcgcaattttcagctctaccgtcgcggtcgttatgtcgagttcaatctggtctgggatcgcggcacgctgtttggcctgcaaactggcgggcgcaccgagtcgatcctgatgtcaatgccgccactggtacgctgggagtatgattatcagccaaaagatggcagcccggaagcggctttaagtgagtttattaaggtcagggattgggtgtaa

SEQ ID NO: 53390 - protein, 299 aa, Escherichia coli O6
MKPDAHQVKQFLLNLQDTICQQLSAVDGAEFVEDSWQREAGGGGRSRVLRNGGVFEQAGVNFSHVHGEAMPASATAHRPELAGRSFEAMGVSLVVHPHNPYVPTSHANVRFFIAEKPGAEPVWWFGGGFDLTPFYGFEEDAIHWHRTARDLCLPFGEDVYPRYKKWCDEYFYLKHRNEQRGIGGLFFDDLNTPDFDHCFAFMQAVGKGYTDAYLPIVERRKAMAYGERERNFQLYRRGRYVEFNLVWDRGTLFGLQTGGRTESILMSMPPLVRWEYDYQPKDGSPEAALSEFIKVRDWV

SEQ ID NO: 53391 - DNA, 900 bp, Escherichia coli
  CDS (1)..(900): transl_table=11
atgaaacccgacgcacaccaggttaaacagtttctgctcaaccttcaggatacgatttgtcagcagctgaccgccgtcgatggcgcagaatttgtcgaagatagttggcagcgcgaagctggcggcggcgggcgtagtcgggtgttgcgtaatggtggtgttttcgaacaggcaggcgtcaacttttcgcatgtccacggtgaggcgatgcctgcttccgccaccgctcatcgcccggaacttgccgggcgcagtttcgaggcgatgggcgtttcactggtagtgcatccgcataacccgtatgttcccaccagccacgcgaatgtgcggttttttattgccgaaaaaccgggtgccgatcccgtctggtggtttggcggtggcttcgacttaaccccattctatggttttgaagaagatgctattcactggcatcgcaccgcccgtgacctgtgcctgccatttggcgaagacgtttatccccgttacaaaaagtggtgcgacgaatacttctacctcaaacatcgcaacgaacagcgcggtattggcgggctgttctttgatgacctgaacacgccagatttcgaccgctgttttgcctttatgcaggcggtaggcaaaggctacaccgacgcttatttaccaattgtcgagcgacggaaagcgatggcctacggcgagcgcgaacgcaatttccagttatatcgtcgcggtcgttatgtcgagttcaatctggtctgggatcgcggcacgctgtttggcctgcaaactggcgggcgcaccgagtctatcctgatgtcaatgccgccactggtacgctgggaatatgattatcagccaaaagatggcagcccagaagcggcgttaagtgagtttattaaggtcagggattgggtgtaa

SEQ ID NO: 53392 - protein, 299 aa, Escherichia coli [sequence omitted]

SEQ ID NO: 53393 - DNA, 870 bp, Gloeobacter violaceus
  CDS (1)..(870): transl_table=11
atgcagtcgctccaggacaacatcaccagccgccttgaagcggtcgatggagaagggcgctttgttgaagatctctgggagcgcgaggaagggggcgggggccgctcgcgaatactcaccgagggccgcgtcttcgagcgcgctgggatcggtttttcggaagtgcacggctcccacctgcccccctcgatcctccaacagcgcccggaggccgaagggcaccctttttatgtgaccggcacctcgatggtgctccacccgcgcaatccctacgtcccgacggtgcacctcaactaccgctacttcgaggcggggccggtctggtggttcgggggcggtgcggatctgacgccctactacggctttgttgaggatgcggcccactttcacgccaccctcaaggccgcctgcgacgcccacgaccccgagtactatccgcgcttcaaaaagtggtgcgacgagtacttttatctcaaacaccgccaggagccgcgcggggtgggagggatcttcttcgattacgtgcagggcgattgggaaaaaatcttcgcctttgcccagtcctgcggcaacgcctttttgcccgcctacctgccgattgtcgagcggcgccacaccctgccctacgcagagcgcgagcgaaactttcagctctaccgccgcggacgttacgtcgaattcaaccttgtctgggatcgcggcaccatcttcggtctgcagaccaacggccggatcgaatcgatcttgatgtcgatgccgccgctggtgcgctgggagtataattaccgccccgagcccggtacagcggaggctgaactgtacgaagtgttcctggtgccccaggattgggccagccaggcgaagcgctga

SEQ ID NO: 53394 - protein, 289 aa, Gloeobacter violaceus
MQSLQDNITSRLEAVDGEGRFVEDLWEREEGGGGRSRILTEGRVFERAGIGFSEVHGSHLPPSILQQRPEAEGHPFYVTGTSMVLHPRNPYVPTVHLNYRYFEAGPVWWFGGGADLTPYYGFVEDAAHFHATLKAACDAHDPEYYPRFKKWCDEYFYLKHRQEPRGVGGIFFDYVQGDWEKIFAFAQSCGNAFLPAYLPIVERRHTLPYAERERNFQLYRRGRYVEFNLVWDRGTIFGLQTNGRIESILMSMPPLVRWEYNYRPEPGTAEAELYEVFLVPQDWASQAKR

SEQ ID NO: 53395 - DNA, 1456 bp, Hordeum vulgare
  CDS (59)..(1234)
cgttgctgtcgctccatctcgcaagcaaccggcgcacaccacccacccccacccagccatggcgtcctctctcctcaccaccccgtcccagaccctcgcccccaatcccgccgcggcgcgcgcccgcaggtcctcgccggcggcggcccaggtgtccttctcctccccactcctccccggccgccgcgcgctgcggtgcgcgcgtccggtcgcgatcgagaaggaggtgccggagaaggaggcgccgacgacgttcctgcgggaggacggctcgggcgccgggtccgggtccgtgcgcgagcggttcgagggcatgatccggcgggtgcagggagagatctgcgccgcgctcgaggaggccgacggcagcggaaagcggttcgtggaggacgtctggtcgcgccccgggggcgtgtgtgtgcatagccgggtgctccaggacgggaacgtgttcgagaaggccggggtgaacgtgtccgctgtgatcggggtatgcccccggtccgcctaccgcgccgccaagggggctgcgaagaacggggcagcggacgggcacaaggctgggcccgtgcccttcttttccgctggcatcagctcggttcttcatcccaagaatccgtttgctccaacattgcatttcaactatcgctattttgaaacagatgcaccaaaagatgtgcctggtgcgccaagatcatggtggtttggaggtggtactgatttgactccttcctatctcattgaagaggatgtgaagcattttcattctgttcaaaaacaaacttgtgataagttcgatccaagtttttacccaagattcaaaaaatggtgcgatgattatttctatattaagcatcgtaatgagagacgtgggcttggcggaatattttttgatgatcttaatgattatgaccaagacatgcttctgaactttgccacagaatgtgccggttctgtaattcctgcatacatacccatcatagaacgccgcaaagacactccattcaatgaggagcagaaggcatggcagcaagtgcggagaggtcgctatgtggagttcaaccttgtctacgatcgtggcaccacatttggactcaagaccgggggaaggatcgaaagtatactcgtctccctaccactcactgcacgatgggagtatgaccataaacccgaagaagggagcgaagagtggaagcttctcgacgcgtgcataaacccaaaggagtggctgtgattagctgaggttgtttgttttttcagtcgttttgttagtgttcctcactctgtgtagccatgtgtagttccttttttgctctgtagagtttttgataagcacatggaggtgtaacgacggtttagttcaatcaagctttgtacctgctgtgcctcttcccttccgagatgaatgaaggataaaccgtgcggttggaaaaaaaaaaaaaaaacgacagcaacg

SEQ ID NO: 53396 - protein, 391 aa, Hordeum vulgare
MASSLLTTPSQTLAPNPAAARARRSSPAAAQVSFSSPLLPGRRALRCARPVAIEKEVPEKEAPTTFLREDGSGAGSGSVRERFEGMIRRVQGEICAALEEADGSGKRFVEDVWSRPGGVCVHSRVLQDGNVFEKAGVNVSAVIGVCPRSAYRAAKGAAKNGAADGHKAGPVPFFSAGISSVLHPKNPFAPTLHFNYRYFETDAPKDVPGAPRSWWFGGGTDLTPSYLIEEDVKHFHSVQKQTCDKFDPSFYPRFKKWCDDYFYIKHRNERRGLGGIFFDDLNDYDQDMLLNFATECAGSVIPAYIPIIERRKDTPFNEEQKAWQQVRRGRYVEFNLVYDRGTTFGLKTGGRIESILVSLPLTARWEYDHKPEEGSEEWKLLDACINPKEWL

SEQ ID NO: 53397 - DNA, 915 bp, Idiomarina loihiensis
  CDS (1)..(915): transl_table=11
atgcataatgattacttgaagcaggtaaaaagctacctgatgtcgttgcaggatgccatttgtcagcagttggcgcaggcggacggtgagcagagctttcaggaagacagctgggaccggccgggaggcggcggtggtcgctcgaggatcatgaaaaacggtgcggtttttgaacagggtggtgtaggcttttcgcacgtttatggtgagaaaatgcctgcctcggcaacggcacaccgaccagagctggaaggtcgcgacttcaatgcttgtggtgtttctctggtaatgcatccggaaaaccctatggtgccaacggtccatatgaatgtgcgttttttcattgcgcaaaaagaaggtgaagagcctgtctggtggtttggcggcggctttgatttaacgccgttttacccttttgaccaagacattatcgaatggcatcaacaggcgaaaaatgcgctagatagcgtcgatgaaaagctctatccggaatataaagcctggtgcgacgattactttttccttaagcatcgcgatgaagcgcgcggtgtgggcggcatattctttgatgaccttaacgaccgttcatttgacgagtgcttttcggttataaaagcggtgggtgatgctttcaccaaagcttatttgcctattgtcgaacgtcgcaaaaacctggcttatactcagcaacaaagagacttccagctatatcgccgcgggcgttatgtggagtttaatctggtctgggataggggaactttgtttggcctgcaaaccggtggcagaaccgagtctattttaatgtcgatgccaccgctggcgcgttgggagtacaactggcaagctgagccaggctctgcagaagagcagcttaccgagtattatttaaaacccagagactggctgtcagtatga

SEQ ID NO: 53398 - protein, 304 aa, Idiomarina loihiensis
MHNDYLKQVKSYLMSLQDAICQQLAQADGEQSFQEDSWDRPGGGGGRSRIMKNGAVFEQGGVGFSHVYGEKMPASATAHRPELEGRDFNACGVSLVMHPENPMVPTVHMNVRFFIAQKEGEEPVWWFGGGFDLTPFYPFDQDIIEWHQQAKNALDSVDEKLYPEYKAWCDDYFFLKHRDEARGVGGIFFDDLNDRSFDECFSVIKAVGDAFTKAYLPIVERRKNLAYTQQQRDFQLYRRGRYVEFNLVWDRGTLFGLQTGGRTESILMSMPPLARWEYNWQAEPGSAEEQLTEYYLKPRDWLSV

SEQ ID NO: 53399 - DNA, 915 bp, Methylococcus capsulatus
  CDS (1)..(915): transl_table=11
atggccggccccgacatcgaagccgtcaagtcctatctgctggatcttcaggagagcatctgcaatgcgctggaaacggaagagccgcgcgcccgtttcgtcgaggaccgctgggagcacgccgccggcggcggcggtcggacccgtgtcctgagcggcggagaaaccttcgaacagggcggcgtcaacttctcccatgtccgcggcgccagcctgccggcctcggcgacggcacaccggccggaactggccggccgcggattccaagccaccggcgtgtcgctggtcatccatccgctgaatccctatgtccccacctcgcacgccaatgtgcggttcttcctggccgagaaggaaggcgagacaccgatctggtggttcggaggcggcttcgacctcacacctttctatccgttcgaggaagacgtgatccattggcacaggacggcccggaacgcctgccttccgttcggagaagacgtctatccccggttcaagcgctggtgcgacgagtatttcttcctgaaccatcgcaacgagacccgcggcgtgggcggcctgttcttcgacgacctgaacgaatggggattcgaacgcagcttcgctttcctccgcagcgtgggcgaccattacctgaaggcttacctccccatcgtccaacggcggaaggcgataccttacggggaacgggagcgggagttccagctttaccggcgcggacgctacgtcgaattcaacctggtttacgatcgcggaaccctgttcggactccagtcgggggggagaaccgagtccatcctcatgtcactgccccccgtcgcccattggcgctacgactggcggccggagcgaggcagtgccgaggaaaacctctatctcaactacctgaaacccaaggagtggctcgaatcatga

SEQ ID NO: 53400 - protein, 304 aa, Methylococcus capsulatus
MAGPDIEAVKSYLLDLQESICNALETEEPRARFVEDRWEHAAGGGGRTRVLSGGETFEQGGVNFSHVRGASLPASATAHRPELAGRGFQATGVSLVIHPLNPYVPTSHANVRFFLAEKEGETPIWWFGGGFDLTPFYPFEEDVIHWHRTARNACLPFGEDVYPRFKRWCDEYFFLNHRNETRGVGGLFFDDLNEWGFERSFAFLRSVGDHYLKAYLPIVQRRKAIPYGEREREFQLYRRGRYVEFNLVYDRGTLFGLQSGGRTESILMSLPPVAHWRYDWRPERGSAEENLYLNYLKPKEWLES

SEQ ID NO: 53401 - DNA, 906 bp, Nitrosomonas europaea
  CDS (1)..(906): transl_table=11
atgaattttgcacaggtcaaggattacctggttgatttgcagaacagaattgtgactggactggagcaggtcgatggccagtcgttccgccgtgatacctgggaccgcccggaaggcgggggagggaccagttgtgtgatcgaggaaggcaacgtactggaacgcgggggagtcaatttctcgcatgtgttcggtaaggggctgcccgcctcggccactgcagcccggcccgaactggccggcagagcatttgaagcagcaggtgtttcgctggtgctgcatccgcgtaatccttatgcgcctaccgtccacatgaatgtccgtttttttgcagccaccaaagaaggagcggagccggtgtggtggtttggcggcgggatggatctcaccccttactatggttttgaagaagatgctgtccattttcatcaggcttgcaaggatgcactccagccttcgggtgaagagtactacccgcgtttcaagaaatggtgtgatgaatacttttatctgaaacaccgcaaggaaccacgcggaattggcggggtattttttgacgacctcaaccagccggattttgccacttgcttcaacctgaccagaagtgtcggtgatcatttcctcgcagcgtatgttccgattctgcaaaagcgccgcgatcttccctatggcgaacgtgaacgggattttcaggcgtatcgccgtggccgttatgtggaattcaatctggtatgggatcgcggaacgctgttcggtttgcagtcgggagggcgtaccgaatccatcctgatgtcgctgccgcctgtcgtcaaatggcgttacgactggtcacccgcggcgggcagcccggaagcgaagctctatactgatttccttacgggtagagactggttgccgcttggctga

SEQ ID NO: 53402 - protein, 301 aa, Nitrosomonas europaea
MNFAQVKDYLVDLQNRIVTGLEQVDGQSFRRDTWDRPEGGGGTSCVIEEGNVLERGGVNFSHVFGKGLPASATAARPELAGRAFEAAGVSLVLHPRNPYAPTVHMNVRFFAATKEGAEPVWWFGGGMDLTPYYGFEEDAVHFHQACKDALQPSGEEYYPRFKKWCDEYFYLKHRKEPRGIGGVFFDDLNQPDFATCFNLTRSVGDHFLAAYVPILQKRRDLPYGERERDFQAYRRGRYVEFNLVWDRGTLFGLQSGGRTESILMSLPPVVKWRYDWSPAAGSPEAKLYTDFLTGRDWLPLG

SEQ ID NO: 53403 - DNA, 906 bp, Photobacterium profundum
  CDS (1)..(906): transl_table=11
atggaacatgttgataagcacgcagtgaaagcttttttattatcacttcaagatcaaatatgccaaagcttggaaagccaagataagagcgcagcatttgagcaagatgaatggcaacgtgaacaaggtggcggcggccgtagtcgtgttcttcgtcaaggaagtgtgtttgagcaagctggcgttaatttttctcatgtttttggtacgaaaatgccggcttctgctactgctcatcgtcctgaactcgccggacgtagctttgaagcgatgggcgtgtcattagttatccaccctaataacccttatatcccgacctctcatgccaatgtacgtttctttattgcagaaaaagagggggaagcgcctgtatggtggtttggtggtggttttgacttaacccctttttatccttttgaagaagattgtcagcactggcataacacagcaaagtatttgtgtgccccatttggtgatgatatttatgagcagcataaagtatggtgcgataaatactttttcttacctcatcgtaatgaaacgcgcggtgtcggtggtttgtttttcgatgatttgaatgagtggggctttgaaaaaagttttgcttatacacaagctgtgggaaatggctttattgacgggtacttgcctattgttcaacgtcgtcaagataccccttatggtgagagagagcgggaatttcagctatatcgtcgagggcgctatgttgaatttaacttggtgtatgaccgaggcacgctgtttggactacaaagtggtgggcggacagaatcaatattaatgtcaatgccgccattagctcgatgggaatactgttatgagcctaaggcgggatcggctgaagcggatttgtatgaaaactacctgcagccgcgagaatggtaa

SEQ ID NO: 53404 - protein, 301 aa, Photobacterium profundum
MEHVDKHAVKAFLLSLQDQICQSLESQDKSAAFEQDEWQREQGGGGRSRVLRQGSVFEQAGVNFSHVFGTKMPASATAHRPELAGRSFEAMGVSLVIHPNNPYIPTSHANVRFFIAEKEGEAPVWWFGGGFDLTPFYPFEEDCQHWHNTAKYLCAPFGDDIYEQHKVWCDKYFFLPHRNETRGVGGLFFDDLNEWGFEKSFAYTQAVGNGFIDGYLPIVQRRQDTPYGEREREFQLYRRGRYVEFNLVYDRGTLFGLQSGGRTESILMSMPPLARWEYCYEPKAGSAEADLYENYLQPREW

SEQ ID NO: 53405 - DNA, 1032 bp, Prochlorococcus marinus
  CDS (1)..(1032): transl_table=11
atgagccttagccaaccatcaacacaatcaagagttaaggtaaaaagttttctcacaggtcttcaagatgacatatgcaaaggacttgaaaatatagatggtgagggtacttttcaagaagaatcatgggaacgacctgaaggcggtggtgggcgatctagagtcatgagagaagggaggatttttgaacagggtggagtaaatttttcagaagtacacggtgaagaattacctccctcaatcctgaaccaacgaccagaagcaaaaggtcataagtggttcgcgactgggacttcaatggtcctacatcctagaaatccttatataccaactgttcatctaaattatcgttactttgaagcaggcccagtttggtggtttgggggaggggcagatcttactccttactatccctatttaaaagatactcgtcattttcacaaaattcatcaagaagcatgcgactctatcaatcctaaacttcacaaagtttttaaaccatggtgtgatgaatatttcttcttaaagcaccggaatgaaagtagaggcgtaggaggaatattttttgattatcaagatgggtctgggaaattatataaaggacaaaatcctaatggactttcttcaattgcttctaaagagcttggagaatacaaactatcttgggaagatcttttctcgctcgcaaaggcatgtggcaatgcattcctaccctcttacattccaattattgaaaaacgtcataatcaaacgtttagtgatagagagaggaacttccagttataccgacgtggaagatacgttgaatttaatttggtttgggatagagggactatttttggactgcaaactaatggaagaacagaatctatcctcatgtctttaccaccactggcacgatgggaatatggatttaaagctcctccagaatcaagagaatctctactcactgacgtctttacaaaaccacaagaatggtttacagatgagagtctggaagaaaaatgtcgtcctcatcacgcagtggattaa

SEQ ID NO: 53406 - protein, 343 aa, Prochlorococcus marinus
MSLSQPSTQSRVKVKSFLTGLQDDICKGLENIDGEGTFQEESWERPEGGGGRSRVMREGRIFEQGGVNFSEVHGEELPPSILNQRPEAKGHKWFATGTSMVLHPRNPYIPTVHLNYRYFEAGPVWWFGGGADLTPYYPYLKDTRHFHKIHQEACDSINPKLHKVFKPWCDEYFFLKHRNESRGVGGIFFDYQDGSGKLYKGQNPNGLSSIASKELGEYKLSWEDLFSLAKACGNAFLPSYIPIIEKRHNQTFSDRERNFQLYRRGRYVEFNLVWDRGTIFGLQTNGRTESILMSLPPLARWEYGFKAPPESRESLLTDVFTKPQEWFTDESLEEKCRPHHAVD

SEQ ID NO: 53407 - DNA, 1050 bp, Prochlorococcus marinus
  CDS (1)..(1050): transl_table=11
atgggcgcttctgagaatcttggccaaggtcctcctcctcctcactcgcgcaaacgtgcacgtgaattggtactcggcttgcaagatgagatctgtaatgaactggagagtctggatggtggccaatcttttagaactgacagttgggagcggcctgaagggggtggtgggcgatccaaggtgatgcgtgagggccgagttttcgagcagggcggcgttaatttctctgaggtgcacggcgaggagttgcctccgtcgattttgaatcagcggcctgaggcaaaggggcatccctggtttgctaccggcacttcgatggtgctacacccgcgcaatccctatgtacctacgatccacctgaattaccgctatttcgaggcggggccggtttggtggtttggtggtggcgctgacctcacgccgttttatccctacctggaagatgcccgccatttccatcgcgttcacaagcaggcttgtgacacggttggacctgagctccataaggtctttaaaccttggtgtgacgaatatttctatctgaagcaccgtggtgagacacgtggagtgggtggaattttttacgactatcaggatggatctggagtgctttacaaaggtcaaaactctgaggggcccgctgcacaggtctcacgggagttagggcctcatccgaagagctgggaacagttgtttgagctggccaaggcttgtgggaaggctttcttgccggcttatgtgccgattgtggagaaacgtcaggagcaggcctatggcgatcgagaacgtcaattccagttgtatcgccgtgggcgatatgcggagttcaatctggtctgggatcggggcacgattttcggattgcaaaccaatggtcgaactgagtcgatcttgatgtctttgccaccactggctcgttgggagtatggatatgtcgcaccagctgattcaagggaggctttgctcactgatttgtttactcgacctcagaattggtttgaggatgcgacgttggaggagcgttgtcgaccacaccaggcggtggattag

SEQ ID NO: 53408 - protein, 349 aa, Prochlorococcus marinus
MGASENLGQGPPPPHSRKRARELVLGLQDEICNELESLDGGQSFRTDSWERPEGGGGRSKVMREGRVFEQGGVNFSEVHGEELPPSILNQRPEAKGHPWFATGTSMVLHPRNPYVPTIHLNYRYFEAGPVWWFGGGADLTPFYPYLEDARHFHRVHKQACDTVGPELHKVFKPWCDEYFYLKHRGETRGVGGIFYDYQDGSGVLYKGQNSEGPAAQVSRELGPHPKSWEQLFELAKACGKAFLPAYVPIVEKRQEQAYGDRERQFQLYRRGRYAEFNLVWDRGTIFGLQTNGRTESILMSLPPLARWEYGYVAPADSREALLTDLFTRPQNWFEDATLEERCRPHQAVD

SEQ ID NO: 53409 - DNA, 912 bp, Pseudomonas putida
  CDS (1)..(912): transl_table=11
atgactagccgcaccgaggccgtgaaagcctacctgctcgacctgcaagaccgcatctgctctgccctcgaaacagaagacggcggtgcccgcttcgtcgaggacgcctgggtgcgcgaagccggtggcgggggccgcacgcgggttatcggtgagggcaacgtgatcgaaaaaggcggggtcaacttctcccatgtgtttggtagcggcctgccgccgtcggccagtgcccaccgtcccgaactggcaggccgtggcttcgaagccttgggtgtgtcgctggtgatacacccgcacaacccgcatgtgcccacttcccacgccaacgttcgcttcttcatcgccgaaaaggaaggtgaagaggccgtatggtggtttggcggcggctttgacctgacgccatactatggcaacgaagaagactgcattcactggcaccgagtggccgagcaggcttgcgcgccgtttggcgccgacgtgtacccgcgctacaaagcctggtgcgatcgctacttccacctcaagcaccgtggcgagccacgcggtatcggcggcttgttcttcgatgacctgaacgagtgggacttcgacacttgcttcgccttcatccgcgccattggcgatgccttcgtcgacgcctacctgccaatcgtccagcgccgcaagaacacgccctacaccccgcagcagcgcgagttccaggaataccgccgtggccggtacgtggagttcaacctggtctatgaccgcggcaccctgttcggtctgcagtccggtggccgcaccgaatccatcctcatgtcgctgccaccgcaggtgcgttggggttatgactggaaggccgcgcccggcagtgaagaagcgcgcctgacagagtacttcctgcaagaccgcgactggctcggccagtaa

SEQ ID NO: 53410 - protein, 303 aa, Pseudomonas putida
MTSRTEAVKAYLLDLQDRICSALETEDGGARFVEDAWVREAGGGGRTRVIGEGNVIEKGGVNFSHVFGSGLPPSASAHRPELAGRGFEALGVSLVIHPHNPHVPTSHANVRFFIAEKEGEEAVWWFGGGFDLTPYYGNEEDCIHWHRVAEQACAPFGADVYPRYKAWCDRYFHLKHRGEPRGIGGLFFDDLNEWDFDTCFAFIRAIGDAFVDAYLPIVQRRKNTPYTPQQREFQEYRRGRYVEFNLVYDRGTLFGLQSGGRTESILMSLPPQVRWGYDWKAAPGSEEARLTEYFLQDRDWLGQ

SEQ ID NO: 53411 - DNA, 909 bp, Ralstonia solanacearum
  CDS (1)..(909): transl_table=11
atggatacccaagccgtccgagcctacctgctggatctgcaggaccgcatcaccaccgccgtcggcacgctcgacggcggcacgttcgtcaccgacacgtgggacaagccgcccaccgaacgcctgcgcggcagcggccgcacctgcatcctggagaacggcgccgtgctggagcgcggcggcgtgggcttctcgcacgtgatgggcgacaccctgccgccgtcggccacggccaaccggcccgagctggccgggcgcggcttcgaagcgatgggcgtgtcgctggtgttccacccgcgcaacccgtacgcgccgaccgtgcacatgaacgtgcgctgcttcgtcgcgcagcggcccgacgccgagccggtctggtggttcggcggcggcatggacctgaccccctactacggcttcgcggaagacgccgcgcatttccaccgcacctgcaagcaggcgctggagccgttcggtgaagagctctacccgcgcttcaagcagtggtgcgacgactacttttacctgaagcaccgcaaggaagcgcgcggcgtcggcggcatcttcttcgacgatttcgccgagctcggcttcgagcgcagcttcgagatgatgcgcgcggtcggcgacgcgctgctgccggcctggctgccgatcgccgagcagcgccacgccacgccgtacggcgagcgcgagcgcgcgttccaggcctatcgccgcggccgctatgtcgaattcaacctggtgttcgaccgcggcacgctgttcggcctgcagagcggtgggcgaaccgagtcgatcctgatgtcgatgccgcccgtggccaactggcgctacgactggcagccggagccgggctcgccggaagcggcgctctacaccgacttcctgccggcgcgcgattgggtatga

SEQ ID NO: 53412 - protein, 302 aa, Ralstonia solanacearum
MDTQAVRAYLLDLQDRITTAVGTLDGGTFVTDTWDKPPTERLRGSGRTCILENGAVLERGGVGFSHVMGDTLPPSATANRPELAGRGFEAMGVSLVFHPRNPYAPTVHMNVRCFVAQRPDAEPVWWFGGGMDLTPYYGFAEDAAHFHRTCKQALEPFGEELYPRFKQWCDDYFYLKHRKEARGVGGIFFDDFAELGFERSFEMMRAVGDALLPAWLPIAEQRHATPYGERERAFQAYRRGRYVEFNLVFDRGTLFGLQSGGRTESILMSMPPVANWRYDWQPEPGSPEAALYTDFLPARDWV

SEQ ID NO: 53413 - DNA, 912 bp, Rhizobium meliloti
  CDS (1)..(912): transl_table=11
atggaaagaccgcaactgccacagggcctgccggccgacatcgaagacaagaaggcagcggcaaaggcttggttcgaaagccttcgcgacacgatctgcgccgccttcgaggcgatagaggacgaattgacgggtccgctgtcggatcgtccggcaggccggttcgtcgccaaggactggctgcgcgaggaaggcgccggcggcggcggtcgcatgtccatgatggaaggacgcgtcttcgagaaagtgggggttcacacctccaccgtcttcggcgagttctcgccggagttccgcgaacagatacccggcgcgagcgaagatccgcgcttctgggcatcgggcatttcgctgatcgcccacccggtcaaccccaatgtccccgccgtgcacatgaacacgcgcatggtcgtgaccaccagcaactggttcggcggcggtgcggacctcacgccggtcctcgaccgccggcgcatcatgaccgatccggataccgtgctctttcatcgtgccatggagatcgcctgcaatcggcatcccgtcgccgatcatgcaaaattcaagcagtggtgcgacgagtatttctacctgaagcaccggaacgagccgcgcggcaccggcgggattttctacgattggctgcgttctgcggaggagctcggcggctgggatgcggatttcgccttcacgcgcgatgtcggcaaggccttcgcactcgtctatccgagaatcgtccggacgaatttcaacaagccctggaccgagcaggatcgaaacgagcagctcgtgcgccgtggccggtacgtcgagttcaaccttctttacgaccgtggcacgatcttcggtctcaagaccggtggcaatgtggagtcgattctctcctccctgcccccactcgtacgctggccgtga

SEQ ID NO: 53414 - protein, 303 aa, Rhizobium meliloti
MERPQLPQGLPADIEDKKAAAKAWFESLRDTICAAFEAIEDELTGPLSDRPAGRFVAKDWLREEGAGGGGRMSMMEGRVFEKVGVHTSTVFGEFSPEFREQIPGASEDPRFWASGISLIAHPVNPNVPAVHMNTRMVVTTSNWFGGGADLTPVLDRRRIMTDPDTVLFHRAMEIACNRHPVADHAKFKQWCDEYFYLKHRNEPRGTGGIFYDWLRSAEELGGWDADFAFTRDVGKAFALVYPRIVRTNFNKPWTEQDRNEQLVRRGRYVEFNLLYDRGTIFGLKTGGNVESILSSLPPLVRWP

SEQ ID NO: 53415 - DNA, 840 bp, Rickettsia felis
  CDS (1)..(840): transl_table=11
atgaaaatagaaaataaagagatagctagtaattggtttactgatttacgtgatttattgtgcaaagaatttgaaaaaatcgaagaagaatatgcacagacaaaaggtttaaaaccggctaagtttgtacgtacaagctggcaacgtaacggcggtggcggcggtattatgtctctcatgaaaggagaagtatttgaaaaagtcggggttaatatatctaccgtattcggtgaattttctcccgaattccgtagtgaaattccaggagcagagctagacgggaaattctttgcaacaggcatttcattagtcgcacatcttaaatcgccactaattcccgctatgcattttaatactcgttatatagaaacttctaaaagttggtttggcggcggtggcgatttaacacctttctatccgaaagaaaacgaaactgcaaagtttcatgcagcttttaaagaagcgtgcgataagtatgattctagctattatcctaaattcaaaaagcaatgtgacgaatatttttatctaaagcatcgaaaagagccgagaggagtaggcggaatattctatgattacttaaatagtggtaattttgaacaggattttgcttttacgcaggatgtaggtagagctttattgtcggtatatcctgaaatcgttagaagtaagttatttttaccttggacaactgagcagaaagaataccaacttataaggcggggtagatatgtagaatttaatttgctatatgaccgcggtactaaattcggcttaatgaccgatggaaatgttgaagcaatattaatgtcgctaccacctgaagtaaagtttaattga

SEQ ID NO: 53416 - protein, 279 aa, Rickettsia felis
MKIENKEIASNWFTDLRDLLCKEFEKIEEEYAQTKGLKPAKFVRTSWQRNGGGGGIMSLMKGEVFEKVGVNISTVFGEFSPEFRSEIPGAELDGKFFATGISLVAHLKSPLIPAMHFNTRYIETSKSWFGGGGDLTPFYPKENETAKFHAAFKEACDKYDSSYYPKFKKQCDEYFYLKHRKEPRGVGGIFYDYLNSGNFEQDFAFTQDVGRALLSVYPEIVRSKLFLPWTTEQKEYQLIRRGRYVEFNLLYDRGTKFGLMTDGNVEAILMSLPPEVKFN

SEQ ID NO: 53417 - DNA, 840 bp, Rickettsia typhi
  CDS (1)..(840): transl_table=11
atgaacacagaaaataaagaaataacaagtaattggtttactaatttacgtgatttgttgtgcaaagaatttgaaaaaattgaagaaaaatatgcacagataaaagggttaaaaccagctaagtttgtacgcacaagctggaaacgtaatggtggtggatgcggtattatgtctctcatgaaaggagaagtatttgaaaaagttggtgttaatatatctaccgtattcggtgaattctctcaagaatttcgctctgagattctgggagcagaactagatggaaaattctttgcaacaggcatatcagtagttgctcatcttaaatctccgttaattcctgctatgcatttcaatactcgttatatagaaacttctaaaaactggtttggtggtggtagtgatttaacacctttttatccagaagaaaacgaaactgcaaagtttcatacagcttttaaagaagcatgcgataagtatgattctagctattatcctaagttcaaaaggcaatgtgatgaatatttttatttaagacatagaaaagagccaagaggagtagggggaatattttatgattatttaaatagcggtaattttgaacaggattttgcatttacaagggacataggtaaggctttgttgtcagtatatcctgaaattgttagaagtaagttatttctaccttggacagatgagcagaaagaatatcaacttataaaacgaggtagatacgtagaatttaatttactatatgatcgcggcactaaattcggcttgatgaccgatggaaatattgaagcaatattaatgtcactaccacctgtagtaaagtttaattga

SEQ ID NO: 53418 - protein, 279 aa, Rickettsia typhi
MNTENKEITSNWFTNLRDLLCKEFEKIEEKYAQIKGLKPAKFVRTSWKRNGGGCGIMSLMKGEVFEKVGVNISTVFGEFSQEFRSEILGAELDGKFFATGISVVAHLKSPLIPAMHFNTRYIETSKNWFGGGSDLTPFYPEENETAKFHTAFKEACDKYDSSYYPKFKRQCDEYFYLRHRKEPRGVGGIFYDYLNSGNFEQDFAFTRDIGKALLSVYPEIVRSKLFLPWTDEQKEYQLIKRGRYVEFNLLYDRGTKFGLMTDGNIEAILMSLPPVVKFN

SEQ ID NO: 53419 - DNA, 927 bp, Salmonella paratyphi
  CDS (1)..(927): transl_table=11
atgaaacccgatgcacatcacgtaaaacagtttctgctacgcctgcaggatgatatttgccaaacgttatccgctgtggatggcgcaaactttgtcgaagatagctggcgacgcgaagcgggcggcggcggacgcagccgggtattacgcaacggcgggattttcgaacaggcgggcgttaatttctctcacgttcacggcgatgcaatgcccgcgtccgccaccgcgcatcggccagaactcgccgggcgtagctttgaagcgatgggcgtatcgctggtggtgcatccgcacaatccgtatattcccaccagccatgctaacgtgcgcttttttattgccgaaaaaccgggcgccgatccggtgtggtggtttggcggcgggttcgatttaacgccctactacggctttgaagaggatgccgttcactggcaccgcaccgcccgcgacctgtgccagccgtttggcgacgatgtgtatccgcgctataaaaagtggtgcgatgactactttttcctcaagcatcgtaacgagcagcgcggtatcggcggcctgttttttgacgatttgaatacgccggatttcgaccactgttttgcttttatgcaggcggtcggtaacggctacaccgaggcgtatttaccgattgtcgaacgacgcaaagcgatggtctggggagagcgggagcgtaattttcaactttatcgccgtggtcgctacgtggagttcaatctggtatgggacagaggcaccctgtttggtctgcaaaccggcgggcgcactgaatctatcctgatgtcgatgccgccgctggtgcgctgggagtacgactggcagccagaagcgggtagcccggaagcggcgctgagcgagtttattcaggtacgcgactgggtgtcgttacctgataatagttccgtttcgtag

SEQ ID NO: 53420 - protein, 308 aa, Salmonella paratyphi
MKPDAHHVKQFLLRLQDDICQTLSAVDGANFVEDSWRREAGGGGRSRVLRNGGIFEQAGVNFSHVHGDAMPASATAHRPELAGRSFEAMGVSLVVHPHNPYIPTSHANVRFFIAEKPGADPVWWFGGGFDLTPYYGFEEDAVHWHRTARDLCQPFGDDVYPRYKKWCDDYFFLKHRNEQRGIGGLFFDDLNTPDFDHCFAFMQAVGNGYTEAYLPIVERRKAMVWGERERNFQLYRRGRYVEFNLVWDRGTLFGLQTGGRTESILMSMPPLVRWEYDWQPEAGSPEAALSEFIQVRDWVSLPDNSSVS

SEQ ID NO: 53421 - DNA, 939 bp, Schizosaccharomyces pombe
  CDS (1)..(939)
atgtctgacattaccgttgagcctattggcaagcagatggagaagcttattctcgatgttcagcaagaaattgttgctggtctcgaagctgtcgatggacaaaaattcttccaagacaagtggaccaagggagaaggtggttatggtatcagttgtgttattcaagatggcaacgtttttgaaaagggtggtgtcaacacaagtattgttcaaggaaaattgaatcaagacgctgtccaaagaatgcgtgctaatcatgaaggtattgatcgtactgccaaagagcttccattctttgctgctggtatcagtatggttattcaccctcgcaaccccatggcccctactactcacttgaactatcgttactttgaacttgtaaacagtgatggtaagaagatttggtggtttggtggtggagccgatttgactcctagcattctctttgaagaagatggcaagcatttccacaaattgcataaagaagcttgcgatcgccatgaccccactttctatcctcgcttcaagaaatgggctgatgaatacttcctcatcaagcacagaaaggagactcgtggcattggcggtattttctttgatgatctttctgagaaagatcctcaagagttatttgctttcgtcaaggattgtgcccataccttccttcctgcctatgtccctattatggaaaagagaaagaacatggaattcactgaagatgataaggaattccaactcattcgtcgtggatactatgccgagtttaacgttatgtatgacagaggtacttggtttggtcttcaagctcctgaaccccgtgttgaatctattcttatgacccttccattacatgcttcctggcgttacaagtatgagcctaaacaagagcgtcacaaggctctccttaaagtaacgcatacccctattgaatggtgctag

SEQ ID NO: 53422 - protein, 312 aa, Schizosaccharomyces pombe
MSDITVEPIGKQMEKLILDVQQEIVAGLEAVDGQKFFQDKWTKGEGGYGISCVIQDGNVFEKGGVNTSIVQGKLNQDAVQRMRANHEGIDRTAKELPFFAAGISMVIHPRNPMAPTTHLNYRYFELVNSDGKKIWWFGGGADLTPSILFEEDGKHFHKLHKEACDRHDPTFYPRFKKWADEYFLIKHRKETRGIGGIFFDDLSEKDPQELFAFVKDCAHTFLPAYVPIMEKRKNMEFTEDDKEFQLIRRGYYAEFNVMYDRGTWFGLQAPEPRVESILMTLPLHASWRYKYEPKQERHKALLKVTHTPIEWC

SEQ ID NO: 53423 - DNA, 909 bp, Shewanella oneidensis
  CDS (1)..(909): transl_table=11
atgagcttgcctgatgcgacagtagtaaaagcattcttactcgatctgcaacatcgaatttgtgcgggtcttgagcagttggatgggcaagcaagctttgctgctgattcatggactcgcgccgagggtggtggtggcacgagtcgtgtcttaacccaaggtgccgtattcgagcaagctggggttaacttttcccatgtgacgggggcggcgatgcccgcatcggcgacggcgcatcgccctgagttggcggggcgcagttttgaggcgatgggcgtttcgttagtgattcacccaaaaaatccttatattccgaccacccatgccaacgtgcgcttttttattgcccataaagacggcgctgagcctgtatggtggtttggcggtggtttcgacttaacgccttattatccttttgaagaagatgtgcgcgagtggcatcaaagtgctaaaaatctgtgccagccttttggtgacgatgtttaccctaaatataagaaatggtgtgatgagtatttctttttgccacaccgtaacgaaacccgtggcgtgggcggactgttcttcgatgatttgaatcaagcaggcttcgataaaagtttcgactttatgcaggcggtcgggaatggcttcttaacggcttatgcgccgattgttgagcgccgtaaggatactgattatggcgagcgtgaacgtgattttcaattgtatcgccgtggtcgttatgttgagttcaatcttgtgtatgaccgaggcaccttgtttggcctgcaaacgggtggtcgcactgaatcaatcttaatgtcaatgccgccattagtgcgttggcagtatgcctatacgcctgcggcgggtagccctgaggcagatctgtacgataactacctcaaacctcgcgactgggtgtag

SEQ ID NO: 53424 - protein, 302 aa, Shewanella oneidensis
MSLPDATVVKAFLLDLQHRICAGLEQLDGQASFAADSWTRAEGGGGTSRVLTQGAVFEQAGVNFSHVTGAAMPASATAHRPELAGRSFEAMGVSLVIHPKNPYIPTTHANVRFFIAHKDGAEPVWWFGGGFDLTPYYPFEEDVREWHQSAKNLCQPFGDDVYPKYKKWCDEYFFLPHRNETRGVGGLFFDDLNQAGFDKSFDFMQAVGNGFLTAYAPIVERRKDTDYGERERDFQLYRRGRYVEFNLVYDRGTLFGLQTGGRTESILMSMPPLVRWQYAYTPAAGSPEADLYDNYLKPRDWV

SEQ ID NO: 53425 - DNA, 900 bp, Shigella flexneri
  CDS (1)..(900): transl_table=11
atgaaacccgacgcacaccaggttaaacagtttctgctcaaccttcaggatacgatttgtcagcagctgaccgccgtcgatggcgcagaatttgtcgaagatagttggcagcgcgaagctggcggcggcgggcgcagtcgggtgttgcgtaatggtggtgttttcgaacaggcgggcgtcaacttttctcacgtccacggtgaggcgatgcctgcttccgccaccgctcatcgcccggaacttgccgggcgcagtttcgaggcgatgggcgtttcactggtagtgcatccgcataacccgtatgttcccaccagccacgcgaatgtgcgtttttttattgccgaaaaaccgggtgcagagcccgtttggtggtttggcggcggcttcgatttaacccctttctatggttttgaagaagacgccattcactggcaccgcaccgcccgtgacctgtgccagccatttggtgaagacgtttatccccgttacaaaaagtggtgcgacgattacttctacctcaaacatcgcaacgaacagcgcggcattggcgggctgttctttgatgatctgaacacgccagatttcgaccactgttttgcctttatgcaggcggtaggcaaaggctacaccgacgcttatttaccaattgtagagcgacgtaaagcgatggcctacggcgagcgcgagcgcaattttcagctctaccgtcgcggtcgttatgtcgagttcaatctggtctgggatcgcggcacgctgtttggcctgcaaactggcgggcgcaccgagtcgatcctgatgtcaatgccgccactggtacgctgggagtatgattatcagccaaaagatggcagcccagaagcggcgttaagtgagtttattaaggtcagggattgggggtaa

SEQ ID NO: 53426 - protein, 299 aa, Shigella flexneri
MKPDAHQVKQFLLNLQDTICQQLTAVDGAEFVEDSWQREAGGGGRSRVLRNGGVFEQAGVNFSHVHGEAMPASATAHRPELAGRSFEAMGVSLVVHPHNPYVPTSHANVRFFIAEKPGAEPVWWFGGGFDLTPFYGFEEDAIHWHRTARDLCQPFGEDVYPRYKKWCDDYFYLKHRNEQRGIGGLFFDDLNTPDFDHCFAFMQAVGKGYTDAYLPIVERRKAMAYGERERNFQLYRRGRYVEFNLVWDRGTLFGLQTGGRTESILMSMPPLVRWEYDYQPKDGSPEAALSEFIKVRDWG

SEQ ID NO: 53427 - DNA, 1158 bp, Glycine max
  CDS (1)..(1158)
atgatgcattgtgcgagcattgtctcggctccgtcctacgcgttcccttttcgctctggctccgcttccactactccaactgcgatctcgctcactaagcgcagttggaagccacctccgagcatggcaaaaggcccagtcagagccaccgtttctatagagaaagagaccccggaggccaatcgtcccgaaacgtttctcagaggagtggacgaggcccagtcttccacttcggttcgggcccgcttcgagaagatgataagggaggcccaggacaccgtgtgcagtgccctcgaggccgctgatggtggggcccagttcaaggaggacgtttggtccaggcccggtggcggcggtggcattagcagggtccttcaagacggtgccgtttgggagaaggctggggttaatgtctctgttgtttacggtgtcatgccacctgacgcatatcgtgctgccaagggtgttcctaccgatcaaaaacctggtcctgtgcctttcttcgctgctggaatcagctccgttttacacccaaagaacccgtttgcccctaccctacatttcaactatcgctattttgaaaccgatgctcctaaagatgctcctggagcacctagacaatggtggtttggtgggggaactgacttgacaccagcttacatttttgaggaggatgttaagcacttccattcaattcaaaaacaagcctgtgacaagtttgaacctactttttacccccgattcaagaaatggtgtgatgattacttttatatcaagcatcgaggtgaaaggagagggcttggaggaatattttttgatgatcttaatgactatgatcaggagatgctcctttcctttgctactgaatgtgcaaattctgttattcctgcttatttacctatcatagagaaaaggaaggatttgcccttcaatgatcatcagaaagcatggcaacaattgcgaaggggacgatatgttgaattcaatttggtatatgataggggtacaacatttggactgaaaactggagggagaatagagagtatacttgtttctctcccactgactgctcggtgggaatacgatcataaaccggaagaaggaagcgaagaatggaaactcttggacgcatgcatcaaccccaaggaatggatctaa

SEQ ID NO: 53428 - protein, 385 aa, Glycine max
MMHCASIVSAPSYAFPFRSGSASTTPTAISLTKRSWKPPPSMAKGPVRATVSIEKETPEANRPETFLRGVDEAQSSTSVRARFEKMIREAQDTVCSALEAADGGAQFKEDVWSRPGGGGGISRVLQDGAVWEKAGVNVSVVYGVMPPDAYRAAKGVPTDQKPGPVPFFAAGISSVLHPKNPFAPTLHFNYRYFETDAPKDAPGAPRQWWFGGGTDLTPAYIFEEDVKHFHSIQKQACDKFEPTFYPRFKKWCDDYFYIKHRGERRGLGGIFFDDLNDYDQEMLLSFATECANSVIPAYLPIIEKRKDLPFNDHQKAWQQLRRGRYVEFNLVYDRGTTFGLKTGGRIESILVSLPLTARWEYDHKPEEGSEEWKLLDACINPKEWI

SEQ ID NO: 53429 - DNA, 1534 bp, Nicotiana tabacum
  CDS (19)..(1212)
ccacactattaatcagcaatgcttactccaattctctcttcggcttcatgctcttggactcccacttcccaatttcctcattcttggcattcttcaccttcatttttaactaaacccctaaacttaccctttactgaatcctataaaacagctaaaaggccaacacccaactattcttttaaagttcaagcaatgattgagaaagaagtagctgtttcccataagccagatgcatttcttcgagaatcggatatggggtccaatgttacttcaaattcgagttccgttagaggtcgatttgagaaaatgagaagagaagctcaagacagtgtgtgtttggcaatagaaaaagcggacggaggagcaaagtttaaggaagatgtttggtcaaggcctggtggtggcggtggccattcgtcggtcttgcaagatggggctgtttttgaaaaggctggtgttaatgtttctgttgtttatggtgttatgcctcctgaagcttatcgggctgctagacccactgataatggaaatgtcaagcccggccctatccctttttttgctgctggagttagctctgtgctgcatccaaaaaatccatttgcaccaactttgcattttaattatcgttactttgagactgatgcgccaaaagatgcaccaggagcaccaaggcaatggtggtttggtggtggtactgactttacacctgcttacattttcgaggaggatgtcaagcacttccattcggtgcaaaaagctgcttgtgataaatttgatgctagcttctaccctcggtttaagaaatggtgtgtagactatttctatattaagcatcgtgatgagaggcgaggtcttggaggaatattttttgatgatttcaacgactacgatcaagaaatgcttctttccttttctacagagtgtgcaaattccgtcattccagcatatatacctatcgtggagaagaggaaggatacccctttcacggacaaacacaaagcatggcaacaactacggaggggccgctatgtggaattcaacttggtttatgaccgtggaactacatttggtctcaagacaggaggcaggattgagagcattcttgtatctcttccattaacggcacgatgggagtatgaccataaaccagaagaagggactgaagaatggaaactcttggatgcttgtatcaaccctaaagaatggatctgataattgccaaatcaatgtaaaagtttgcctgtgttggtcttatgttatttcgccctctgttatcaaatttcctttcttatgctttcttttgttctttttgttggtttggaggcacgagcaaggtcaggaattacttatgtagaattttgttaggattcttagttgtacaatgggattgcatttaacctaatatgatagagagagaatttcttatgtgagttatgtatcttattctcaaattttctattccactatctgaacctgctgttgtagcaagggcaggagaaatagtatgaagtttcagttaaaaaaaaaaaaaaaa

SEQ ID NO: 53430 - protein, 397 aa, Nicotiana tabacum
MLTPILSSASCSWTPTSQFPHSWHSSPSFLTKPLNLPFTESYKTAKRPTPNYSFKVQAMIEKEVAVSHKPDAFLRESDMGSNVTSNSSSVRGRFEKMRREAQDSVCLAIEKADGGAKFKEDVWSRPGGGGGHSSVLQDGAVFEKAGVNVSVVYGVMPPEAYRAARPTDNGNVKPGPIPFFAAGVSSVLHPKNPFAPTLHFNYRYFETDAPKDAPGAPRQWWFGGGTDFTPAYIFEEDVKHFHSVQKAACDKFDASFYPRFKKWCVDYFYIKHRDERRGLGGIFFDDFNDYDQEMLLSFSTECANSVIPAYIPIVEKRKDTPFTDKHKAWQQLRRGRYVEFNLVYDRGTTFGLKTGGRIESILVSLPLTARWEYDHKPEEGTEEWKLLDACINPKEWI

SEQ ID NO: 53431 - DNA, 918 bp, Vibrio parahaemolyticus
  CDS (1)..(918): transl_table=11
atgtcagcaatcgataagtacgccgtaaagcagttcctgatgtcacttcaggactccatttgtcagcagttagaacaagaagatggaaaggccgtctttgtcgaagatgcatggcatcgtgaaccgggcgaacgtcttggtggcggtgggcgctcacgtgttctgcgtgatggtcttgttttcgagcaaggtggggtgaacttctcgcatgtggaagggaaagaaatgccagcatctgcgacggctcatcgtccggagctagctggtcgccgctttgaagcgatgggggtctctttggttatccatcccaaaaacccttacgtcccaacttctcatgcgaatgtacgtttctttatcgcagagaaagagggcgaagagccaatttggtggtttggtggtggtttcgacctgactcctttctatcctttcgaagaagattgtcagtcatggcacgatacagctaaggcaatctgtgccccatttggtgaagatgtgtatgccgagcacaaagcgtggtgtgataagtacttcttcttgccacatcgaaacgaaactcgtggtgtcggtggtttgttctttgatgatttgaatcactgggagtttgataagtgttttgattacatcaaagcggtgggtgaaggctattgccaagcttacttgccgattgtgtctcgtcgtaaagacatcgaatatggcgagcgtgaacgtgaattccaactttaccgtcgtggtcgttatgttgagttcaacttagtctacgaccgtggcaccttatttggtttacaaagtggtgggcgtaccgagtcgattctgatgtcgatgccgccgttagcgcgatgggagtaccgctacgaaccagaagcaggaacgcctgaagccgaactttacgagcgatacctgaaaccacgcgaatggtaa

SEQ ID NO: 53432 - protein, 305 aa, Vibrio parahaemolyticus
MSAIDKYAVKQFLMSLQDSICQQLEQEDGKAVFVEDAWHREPGERLGGGGRSRVLRDGLVFEQGGVNFSHVEGKEMPASATAHRPELAGRRFEAMGVSLVIHPKNPYVPTSHANVRFFIAEKEGEEPIWWFGGGFDLTPFYPFEEDCQSWHDTAKAICAPFGEDVYAEHKAWCDKYFFLPHRNETRGVGGLFFDDLNHWEFDKCFDYIKAVGEGYCQAYLPIVSRRKDIEYGEREREFQLYRRGRYVEFNLVYDRGTLFGLQSGGRTESILMSMPPLARWEYRYEPEAGTPEAELYERYLKPREW

SEQ ID NO: 53433 - DNA, 918 bp, Vibrio vulnificus
  CDS (1)..(918): transl_table=11
atgtccacaatagataaagaagccgtcaagctttacttgatgcagttacaagatcaaatttgtcaacgacttgaacaagaagatggcaaagcaacatttatagaagacgcttggtatcgagagccaggagatcgattgggtggcggtggccggacgcgcgttatgcgtgatggtaacgtgtttgagcaagggggggttaacttctcccatgtgcagggtaatgcaatgccagcttctgcaacggcgcatcgtccagaattggctgggcgccgattcgaagccatgggcgtttcgctcgtcatgcatcctcacaatccttacgttccgacatcgcatgcaaacgtgcgtttcttcattgctgaaaaagagggggaagcaccgatctggtggtttggtggtgggtttgacttaactcccttctatccgtttgaagaggattgccaattttggcacaacaccgccaaggaagtgtgcgcgccttttggtgctgatgtgtatgcgcagcataaagcttggtgtgatgactatttttatttgcctcaccgcggtgaaactcgaggcatcggcggcctgttttttgatgacctcaatcagtgggagtttgataagtgctttgactacatcaaagccgttggtgaagggtattgcgatgcttacttacccattgttgagcgtcgtaaagtgacagaatatggcgagcgtgaacgcgaattccagttgtatcgccgtggccgctatgttgagtttaacctagtgtatgatcgcgggactttgtttggcttacaaagtggggggcgtacggagtcgattttgatgtcgatgccaccactggctcgctgggaatacagctatgaaccgcaggctgattcgccagaagcaagcctttaccagcattacttaaaaccgagagaatggtaa

SEQ ID NO: 53434 - protein, 305 aa, Vibrio vulnificus
MSTIDKEAVKLYLMQLQDQICQRLEQEDGKATFIEDAWYREPGDRLGGGGRTRVMRDGNVFEQGGVNFSHVQGNAMPASATAHRPELAGRRFEAMGVSLVMHPHNPYVPTSHANVRFFIAEKEGEAPIWWFGGGFDLTPFYPFEEDCQFWHNTAKEVCAPFGADVYAQHKAWCDDYFYLPHRGETRGIGGLFFDDLNQWEFDKCFDYIKAVGEGYCDAYLPIVERRKVTEYGEREREFQLYRRGRYVEFNLVYDRGTLFGLQSGGRTESILMSMPPLARWEYSYEPQADSPEASLYQHYLKPREW

SEQ ID NO: 53435 - DNA, 912 bp, Wigglesworthia glossinidia brevipalpis
  CDS (1)..(912): transl_table=11
atgacaataataaaacaagaaaaaactttatttttttttaaaaatttacaaaatataatttgtaatactttttctaaaatagatggtaaatctttatttaaagaagacatgtggaatacgaaaaaaggatatggaagaactagaattttaaaaaaaggaaaagtatttgaacaagttagtgtgaatttttctcatgtttttggaaaatcacttccaaaatcctctagtaataaaaaaagagatctagaaaattgttcttatcaagcctctggaatatctgtcgtttctcatcctaaaaatccttatgtacctactagccatttaaacataagatttttcttagctaaaaataaaaaaagaaaaacaatatggtggtttggaggagggtttgatttaactccatattatggattttatcaagacgttatacattggcatacaatagctaaaaaaatttgtcaaccatttggtgatgatatttattttaaatacaaaaagtggtgtgatgattatttttttatcaaacatagaaatgaatctcgtggaataggaggattgttttttgatgatttatgcttgccagattttcatagtgcttttttatttagcaaatcaataggaaaagggtatatagatgcttatttcccaatagtaaatttaagaaaatcttattcttggggtagtagagaacgtaactttcaattatatagaagaggaagatatgttgaattcaatcttttattagatagaggtactctatttggtatccagtctaatggaagaatagaatctatattatcctctatgcctccattagtaaaatgggaatatggatggcatcctaaacctaatagccctgagtcaaaattatatactgattttttaccaattaaagattggattgataaataa

SEQ ID NO: 53436 - protein, 303 aa, Wigglesworthia glossinidia brevipalpis
MTIIKQEKTLFFFKNLQNIICNTFSKIDGKSLFKEDMWNTKKGYGRTRILKKGKVFEQVSVNFSHVFGKSLPKSSSNKKRDLENCSYQASGISVVSHPKNPYVPTSHLNIRFFLAKNKKRKTIWWFGGGFDLTPYYGFYQDVIHWHTIAKKICQPFGDDIYFKYKKWCDDYFFIKHRNESRGIGGLFFDDLCLPDFHSAFLFSKSIGKGYIDAYFPIVNLRKSYSWGSRERNFQLYRRGRYVEFNLLLDRGTLFGIQSNGRIESILSSMPPLVKWEYGWHPKPNSPESKLYTDFLPIKDWIDK

SEQ ID NO: 53437 - DNA, 918 bp, Xylella fastidiosa
  CDS (1)..(918): transl_table=11
atgagcgatttcgaccgcgtccgcgattaccttactgccctacaagatcgcatttgcaatgtggtcgagaccattgatggtcaatcacattttcacgaagaccactggcagcgtacggaagggggcggtggacgtacccgtctcttgcgtgatggtgccgtcttcgaacaggcaggtattggcttctccgatgtctgcggtacacatttaccaccatcggccagcgtgcgccgtcctgaactggctggtgccaattggcgtgcctgtggcgtgtcactggtattccatcccaaaaatcctttcgtccctaccacgcatctcaatgtgcgctactttcgtgctgagcgtgatggaaaacaggttgctgcttggtttggcggtggttttgacctcaccccgttttatccctttgatgaagatgtcgtgcactggcacacagttgctcgtgacctatgcgccccatttggcgacgaacgttatgcagcgcataaacggtggtgtgacgaatacttcgtactgcgtcaccgcaatgaaacacgcggtgtgggcggcttattctttgatgaccttgataaggattttgagcgcgattttgcttaccagcgtgcggtaggggatggcttcctcgacgcttattttccgattgtgacgcgtcgtcatgacaccccctacggtgatcgcgagcgcgcgtttcagctgtatcgacgtggtcgctacgtagaattcaatttgttatttgatcgcggcacattattcggcttgcagagtggcgggcgtgctgaaagcatcttgatcagtctgccgccgttggtacgctgggaatatggttaccaccctttaccaggcagtgccgaagcgcgtttggctgactatctgttgccacgtgactggctgaatgaaagtcgcatttgcgaatga

SEQ ID NO: 53438 - protein, 305 aa, Xylella fastidiosa
MSDFDRVRDYLTALQDRICNVVETIDGQSHFHEDHWQRTEGGGGRTRLLRDGAVFEQAGIGFSDVCGTHLPPSASVRRPELAGANWRACGVSLVFHPKNPFVPTTHLNVRYFRAERDGKQVAAWFGGGFDLTPFYPFDEDVVHWHTVARDLCAPFGDERYAAHKRWCDEYFVLRHRNETRGVGGLFFDDLDKDFERDFAYQRAVGDGFLDAYFPIVTRRHDTPYGDRERAFQLYRRGRYVEFNLLFDRGTLFGLQSGGRAESILISLPPLVRWEYGYHPLPGSAEARLADYLLPRDWLNESRICE

SEQ ID NO: 53439 - DNA, 987 bp, Saccharomyces cerevisiae
  CDS (1)..(987)
atgcctgcccctcaagatccaaggaatcttccaattagacaacaaatggaagcccttatccgtcgcaaacaagctgaaatcacgcaaggtttggaatccatcgatactgttaagttccacgctgatacttggacccgtggtaacgatggtggtggtggtacctctatggttatccaagacggtacaactttcgaaaaaggtggtgttaatgtctccgttgtttatggtcaattgagcccagcggccgtttcagccatgaaagctgatcataagaatctgcgtctaccagaagatccaaagactggtttgccagttaccgacggtgtcaagttcttcgcttgtggtttaagtatggtcattcatcccgttaacccacacgctccaaccacgcacttaaactaccgttacttcgaaacttggaaccaagatgggaccccacaaacttggtggtttggtggtggtgctgatttgacaccttcttacttatacgaagaagacggtcaattattccaccaactgcacaaggatgccttggacaagcacgacactgctttgtacccacgtttcaagaaatggtgtgatgagtacttctacattacccaccgtaaggaaacacgtggtattggtggtatattctttgacgattatgatgaacgtgacccacaagaaatattgaagatggttgaagactgtttcgatgctttcttgccatcctacttgactatcgtcaagagaagaaaagatatgccatatacaaaggaagaacaacaatggcaggccattagacgtggtagatacgttgaattcaacttaatctacgatagaggtacccaattcggtttgagaaccccaggctctagagttgagtcaattttgatgagtttgcctgaacatgcttcatggttatacaaccaccaccctgctcctggttccagagaagctaaattactagaagttaccaccaaaccaagagagtgggttaaataa

SEQ ID NO: 53440 - protein, 328 aa, Saccharomyces cerevisiae
MPAPQDPRNLPIRQQMEALIRRKQAEITQGLESIDTVKFHADTWTRGNDGGGGTSMVIQDGTTFEKGGVNVSVVYGQLSPAAVSAMKADHKNLRLPEDPKTGLPVTDGVKFFACGLSMVIHPVNPHAPTTHLNYRYFETWNQDGTPQTWWFGGGADLTPSYLYEEDGQLFHQLHKDALDKHDTALYPRFKKWCDEYFYITHRKETRGIGGIFFDDYDERDPQEILKMVEDCFDAFLPSYLTIVKRRKDMPYTKEEQQWQAIRRGRYVEFNLIYDRGTQFGLRTPGSRVESILMSLPEHASWLYNHHPAPGSREAKLLEVTTKPREWVK

SEQ ID NO: 53441 - DNA, 930 bp, Yersinia pestis
  CDS (1)..(930): transl_table=11
atgaactcacccgatatagccctaatcaaaacctacctgctcactttgcaggataacatctgtgcggccctggctcaggccgatggccacgccgaattcacggaagagtgctgggtccgcgaagaaggtggcggtggccgcagccgggtcttggttaatggcgctgtattcgaacaagctggggttaacttctcccatgtgtccggggcgatgttacccgcctctgccactgctcaccggccagagttggcgggccgcagttttcaggcgctgggcgtatcgctggttattcatccgctaaatccttatctgcctaccagccacgccaatgtgcggttctttattgctgagaaacccggtgaagacgccgtgtggtggtttggcggtggttttgatttaaccccgtactacggctttgaagaagatgccattcattggcatcaggtagcgcatagcctttgccagccattcggcgagcaaatctatccgcgctataaaaaatggtgtgatgactatttttatattaaacatcgccaggaagcccgtggtattggcggcctgttttttgacgatctgaatagtcctgattttatgacctgctttaatttcacccaagccgttggcgatggcttcctggcggcttatatgccaatcgtcgcgcggcgtaaagcgctgggctggggtgatcgagagcgtcaattccagctttatcgccggggccgctatgtcgagttcaatctggtctgggatcgcggtacgttgttcggcctgcaaacgggtgggcgcactgaatctattttgatgtccctgccgccgttggtgcgctgggaatataactatcagccagaggcagatagtgcagaagccgcgttgtaccgcgattttctgccggtaaaagactggttagcaattaaaggagaaacacactaa

SEQ ID NO: 53442 - protein, 309 aa, Yersinia pestis
MNSPDIALIKTYLLTLQDNICAALAQADGHAEFTEECWVREEGGGGRSRVLVNGAVFEQAGVNFSHVSGAMLPASATAHRPELAGRSFQALGVSLVIHPLNPYLPTSHANVRFFIAEKPGEDAVWWFGGGFDLTPYYGFEEDAIHWHQVAHSLCQPFGEQIYPRYKKWCDDYFYIKHRQEARGIGGLFFDDLNSPDFMTCFNFTQAVGDGFLAAYMPIVARRKALGWGDRERQFQLYRRGRYVEFNLVWDRGTLFGLQTGGRTESILMSLPPLVRWEYNYQPEADSAEAALYRDFLPVKDWLAIKGETH

SEQ ID NO: 53443 - DNA, 1194 bp, Zea mays
  CDS (1)..(1194)
atggcgtccaacctcctctccgccccgtcccgaaccctagctccgtcgccggcgccggcccccgcgggcctccgcgggcgtgtgccggtgcaggcgcacctcccgcgcggcggcctcggcctcgccccccgccgcagcagccgcgcgctccgcgtgcgcgcgtcggtggcgatcgagaaggagacgccggagagcgagccgcccccgacgttcctccgcgaggacgggcacgggtccgggtccgtgcgggcgcggttcgaggccatgatccggcgggtgcagggggaggtctgcgccgcgctcgaggaggccgacggcggcggcgcgcgcttcgtcgaggacgtctggtcgcgccctggcgggggcggtggcatcagccgcgtcctgcaggacggccgcgtcttcgagaaggccggggtcaacgtctccgtcgtctacggggtcatgccgcccgacgcctaccgcgccgccaagggggaggccgccaagaacggggccgccgccgcggatggccacaagcctggccccgtgccattcttcgccgcggggattagttcggtgcttcaccccaagaacccatttgctccaacattgcattttaactaccgttactttgagacggatgcaccaaaagatgcacctggtgcaccaagacaatggtggttcggcggtggtactgacttgactccttcatacatcattgaagaggacgtgaagcatttccattctgttcaaaagcaagcatgtgataaatttgatccaagttttcacccaagattcaaaaaatggtgtgatgattatttctatattaagcaccgtaatgagcggcgtgggctaggtggaatattttttgatgaccttaatgattacgatcaagaaatgcttctcaactttgctacagaatgtgcggactctgtacttcctgcgtacataccgatcatagaacggaggaagaacactccgttcaacgaggagcacagggcatggcagcaattgcggagaggtcgttatgtggagttcaaccttgtctacgaccgtggtacaacatttggcctaaagactggaggaaggattgagagcatacttgtgtcccttccacttacagcacgatggcagtatgatcataaaccggaagaaggaaccgaggaatggaaacttctggaagcctgcataaacccgaaggattggatctga

SEQ ID NO: 53444 - protein, 397 aa, Zea mays
MASNLLSAPSRTLAPSPAPAPAGLRGRVPVQAHLPRGGLGLAPRRSSRALRVRASVAIEKETPESEPPPTFLREDGHGSGSVRARFEAMIRRVQGEVCAALEEADGGGARFVEDVWSRPGGGGGISRVLQDGRVFEKAGVNVSVVYGVMPPDAYRAAKGEAAKNGAAAADGHKPGPVPFFAAGISSVLHPKNPFAPTLHFNYRYFETDAPKDAPGAPRQWWFGGGTDLTPSYIIEEDVKHFHSVQKQACDKFDPSFHPRFKKWCDDYFYIKHRNERRGLGGIFFDDLNDYDQEMLLNFATECADSVLPAYIPIIERRKNTPFNEEHRAWQQLRRGRYVEFNLVYDRGTTFGLKTGGRIESILVSLPLTARWQYDHKPEEGTEEWKLLEACINPKDWI

SEQ ID NO: 53445 - DNA, 1158 bp, Glycine max
  CDS (1)..(1158)
atgatgcattgtgcgagcattgtctcggctccgtcctacgcgttcccttttctctctggctccgcttccactactccaactgcgatctcgctcactaagcgcagttggaagccacctccgagcatggcaaaaggcccagtcagagccaccgtttctatagagaaagagaccccggaggccaatcgtcccgaaacgtttctcagaggagtggacgaggcccagtcttccacttcggttcgggcccgcttcgagaagatgataagggaggcccaggacaccgtgtgcagtgccctcgaggccgctgatggtggggcccagttcaaggaggacgtttggtccaggcccggtggcggcggtggcattagcagggtccttcaagacggtgccgtttgggagaaggctggggttaatgtctctgttgtttacggtgtcatgccacctgacgcatatcgtgctgccaagggtgttcctaccgatcaaaaacctggtcctgtgcctttcttcgctgctggaatcagctccgttttacacccaaagaacccgtttgcccctaccctacatttcaactatcgctattttgaaaccgatgctcctaaagatgctcctggagcacctagacaatggtggtttggtgggggaactgacttgacaccagcttacatttttgaggaggatgttaagcacttccattcaattcaaaaacaagcctgtgacaagtttgaacctactttttacccccgattcaagaaatggtgtgatgattacttttatatcaagcatcgaggtgaaaggagagggcttggaggaatattttttgatgatcttaatgactatgatcaggagatgctcctttcctttgctactgaatgtgcaaattctgttattcctgcttatttacctatcatagagaaaaggaaggatttgcccttcaatgatcatcagaaagcatggcaacaattgcgaaggggacgatatgttgaattcaatttggtatatgataggggtacaacatttggactgaaaactggagggagaatagagagtatacttgtttctctcccactgactgctcggtgggaatacgatcataaaccggaagaaggaagcgaagaatggaaactcttggacgcatgcatcaaccccaaggaatggatctaa

SEQ ID NO: 53446 - protein, 385 aa, Glycine max
MMHCASIVSAPSYAFPFLSGSASTTPTAISLTKRSWKPPPSMAKGPVRATVSIEKETPEANRPETFLRGVDEAQSSTSVRARFEKMIREAQDTVCSALEAADGGAQFKEDVWSRPGGGGGISRVLQDGAVWEKAGVNVSVVYGVMPPDAYRAAKGVPTDQKPGPVPFFAAGISSVLHPKNPFAPTLHFNYRYFETDAPKDAPGAPRQWWFGGGTDLTPAYIFEEDVKHFHSIQKQACDKFEPTFYPRFKKWCDDYFYIKHRGERRGLGGIFFDDLNDYDQEMLLSFATECANSVIPAYLPIIEKRKDLPFNDHQKAWQQLRRGRYVEFNLVYDRGTTFGLKTGGRIESILVSLPLTARWEYDHKPEEGSEEWKLLDACINPKEWI

SEQ ID NO: 53447 - DNA, 20 bp, Artificial sequence
  primer
atgaccgtctctcccacaac

SEQ ID NO: 53448 - DNA, 21 bp, Artificial sequence
  primer
ttaactattaacccagtcctg

SEQ ID NO: 53449 - protein, 363 aa, Artificial sequence
  consensus sequence
  Variant (2)..(3): Xaa in position 2 to 3 is any amino acid
  Variant (5)..(9): Xaa in position 5 to 9 is any amino acid
  Variant (10)..(29): Xaa in position 10 to 29 is any or no amino acid
  Variant (31)..(34): Xaa in position 31 to 34 is any amino acid
  Variant (36)..(36): Xaa in position 36 is any amino acid
  Variant (38)..(39): Xaa in position 38 to 39 is any amino acid
  Variant (41)..(41): Xaa in position 41 is any amino acid
  Variant (42)..(47): Xaa in position 42 to 47 is any or no amino acid
  Variant (51)..(56): Xaa in position 51 to 56 is any amino acid
  Variant (57)..(57): Xaa in position 57 is any or no amino acid
  Variant (59)..(61): Xaa in position 59 to 61 is any amino acid
  Variant (63)..(64): Xaa in position 63 to 64 is any amino acid
  Variant (68)..(68): Xaa in position 68 is any amino acid
  Variant (70)..(70): Xaa in position 70 is any amino acid
  Variant (72)..(72): Xaa in position 72 is any amino acid
  Variant (74)..(74): Xaa in position 74 is any amino acid
  Variant (75)..(76): Xaa in position 75 to 76 is any or no amino acid
  Variant (78)..(89): Xaa in position 78 to 89 is any amino acid
  Variant (90)..(109): Xaa in position 90 to 109 is any or no amino acid
  Variant (111)..(111): Xaa in position 111 is any amino acid
  Variant (113)..(113): Xaa in position 113 is any amino acid
  Variant (115)..(115): Xaa in position 115 is any amino acid
  Variant (117)..(117): Xaa in position 117 is any amino acid
  Variant (119)..(119): Xaa in position 119 is any amino acid
  Variant (122)..(122): Xaa in position 122 is any amino acid
  Variant (125)..(126): Xaa in position 125 to 126 is any amino acid
  Variant (129)..(129): Xaa in position 129 is any amino acid
  Variant (131)..(131): Xaa in position 131 is any amino acid
  Variant (133)..(133): Xaa in position 133 is any amino acid
  Variant (135)..(135): Xaa in position 135 is any amino acid
  Variant (137)..(141): Xaa in position 137 to 141 is any amino acid
  Variant (142)..(169): Xaa in position 142 to 169 is any or no amino acid
  Variant (175)..(175): Xaa in position 175 is any amino acid
  Variant (180)..(180): Xaa in position 180 is any amino acid
  Variant (182)..(185): Xaa in position 182 to 185 is any amino acid
  Variant (186)..(190): Xaa in position 186 to 190 is any or no amino acid
  Variant (192)..(195): Xaa in position 192 to 195 is any amino acid
  Variant (197)..(202): Xaa in position 197 to 202 is any amino acid
  Variant (204)..(210): Xaa in position 204 to 210 is any amino acid
  Variant (211)..(211): Xaa in position 211 is any or no amino acid
  Variant (213)..(215): Xaa in position 213 to 215 is any amino acid
  Variant (217)..(217): Xaa in position 217 is any amino acid
  Variant (221)..(221): Xaa in position 221 is any amino acid
  Variant (224)..(226): Xaa in position 224 to 226 is any amino acid
  Variant (229)..(229): Xaa in position 229 is any amino acid
  Variant (231)..(231): Xaa in position 231 is any amino acid
  Variant (234)..(234): Xaa in position 234 is any amino acid
  Variant (237)..(237): Xaa in position 237 is any amino acid
  Variant (239)..(239): Xaa in position 239 is any amino acid
  Variant (241)..(263): Xaa in position 241 to 263 is any amino acid
  Variant (264)..(300): Xaa in position 264 to 300 is any or no amino acid
  Variant (302)..(302): Xaa in position 302 is any amino acid
  Variant (305)..(320): Xaa in position 305 to 320 is any amino acid
  Variant (322)..(323): Xaa in position 322 to 323 is any amino acid
  Variant (334)..(335): Xaa in position 334 to 335 is any amino acid
  Variant (340)..(340): Xaa in position 340 is any amino acid
  Variant (344)..(346): Xaa in position 344 to 346 is any amino acid
  Variant (348)..(348): Xaa in position 348 is any amino acid
  Variant (350)..(350): Xaa in position 350 is any amino acid
  Variant (355)..(355): Xaa in position 355 is any amino acid
  Variant (357)..(357): Xaa in position 357 is any amino acid
  Variant (359)..(362): Xaa in position 359 to 362 is any amino acid
QXXIXXXXXXXXXXXXXXXXXXXXXXXXXFXXXXWXRXXGXXXXXXXGGGXXXXXXXGXXXEXXGVNXSXVXGXXXPXXXXXXXXXXXXXXXXXXXXXXXXXXXXXXXXFXAXGXSXVXHPXNPXXPTXHXNXRXFXXXXXXXXXXXXXXXXXXXXXXXXXXXXXXXXXWFGGGXDLTPXYXXXXXXXXXDXXXXHXXXXXXCXXXXXXXXYXXXKXWCDXYFXXXHRXEXRGXGGXFXDXXXXXXXXXXXXXXXXXXXXXXXXXXXXXXXXXXXXXXXXXXXXXXXXXXXXXXXXXXXXYXPIXXXXXXXXXXXXXXXXQXXRRGRYVEFNLXXDRGTXFGLXXXGXRXESILXSXPXXXXW

SEQ ID NO: 53450 - protein, 22 aa, Artificial sequence
  protein pattern
  Variant (4)..(4): Xaa in position 4 is Ala or Val
  Variant (9)..(9): Xaa in position 9 is Ile, Leu or Val
  Variant (10)..(10): Xaa in position 10 is any amino acid
  Variant (15)..(15): Xaa in position 15 is any amino acid
  Variant (19)..(19): Xaa in position 19 is any amino acid
  Variant (20)..(20): Xaa in position 20 is Ser or Thr
  Variant (21)..(21): Xaa in position 21 is any amino acid
GRYXEFNLXXDRGTXFGLXXXG

SEQ ID NO: 53451 - protein, 25 aa, Artificial sequence
  protein pattern
  Variant (2)..(3): Xaa in position 2 to 3 is any amino acid
  Variant (6)..(6): Xaa in position 6 is Asp, Glu or Lys
  Variant (9)..(11): Xaa in position 9 to 11 is any amino acid
  Variant (14)..(14): Xaa in position 14 is any amino acid
  Variant (16)..(16): Xaa in position 16 is any amino acid
  Variant (19)..(19): Xaa in position 19 is any amino acid
  Variant (22)..(22): Xaa in position 22 is Ile, Leu or Val
  Variant (24)..(24): Xaa in position 24 is Phe or Tyr
KXXCDXYFXXXHRXEXRGXGGXFXD

SEQ ID NO: 53452 - protein, 26 aa, Artificial sequence
  protein pattern
  Variant (2)..(2): Xaa in position 2 is any amino acid
  Variant (4)..(4): Xaa in position 4 is any amino acid
  Variant (6)..(6): Xaa in position 6 is any amino acid
  Variant (7)..(7): Xaa in position 7 is Ile or Val
  Variant (8)..(8): Xaa in position 8 is any amino acid
  Variant (11)..(11): Xaa in position 11 is any or no amino acid
  Variant (13)..(13): Xaa in position 13 is any or no amino acid
  Variant (15)..(16): Xaa in position 15 to 16 is any amino acid
  Variant (18)..(18): Xaa in position 18 is Ala or Thr
  Variant (19)..(19): Xaa in position 19 is any amino acid
  Variant (21)..(21): Xaa in position 21 is any amino acid
  Variant (23)..(23): Xaa in position 23 is any amino acid
  Variant (25)..(25): Xaa in position 25 is any amino acid
  Variant (26)..(26): Xaa in position 26 is Phe, Ile, Leu or Val
AXGXSXXXHPXNXPXXPXXHXNXRXX

SEQ ID NO: 53453 - protein, 19 aa, Artificial sequence
  protein pattern
  Variant (6)..(6): Xaa in position 6 is any amino acid
  Variant (11)..(13): Xaa in position 11 to 13 is any or no amino acid
  Variant (15)..(17): Xaa in position 15 to 17 is any amino acid
  Variant (18)..(18): Xaa in position 18 is Ala, Asp, Glu, Asn, Gln, Ser or Thr
  Variant (19)..(19): Xaa in position 19 is Asp, Glu, Lys or Arg
WFGGGXDLTPXXXYXXXXX

SEQ ID NO: 53454 - protein, 16 aa, Artificial sequence
  protein pattern
  Variant (2)..(2): Xaa in position 2 is any amino acid
  Variant (3)..(3): Xaa in position 3 is Phe, Ile, Leu or Val
  Variant (4)..(4): Xaa in position 4 is any amino acid
  Variant (6)..(6): Xaa in position 6 is any amino acid
  Variant (7)..(7): Xaa in position 7 is Ala, Gly, Ile or Val
  Variant (10)..(11): Xaa in position 10 to 11 is any amino acid
  Variant (13)..(13): Xaa in position 13 is any amino acid
  Variant (15)..(15): Xaa in position 15 is any amino acid
GXXXEXXGVXXSXVXG

SEQ ID NO: 53455 - protein, 13 aa, Artificial sequence
  protein pattern
  Variant (5)..(5): Xaa in position 5 is any amino acid
  Variant (7)..(7): Xaa in position 7 is Leu or Met
  Variant (9)..(10): Xaa in position 9 to 10 is any amino acid
  Variant (11)..(11): Xaa in position 11 is Ala, Cys or Val
  Variant (12)..(12): Xaa in position 12 is any amino acid
  Variant (13)..(13): Xaa in position 13 is Phe or Trp
ESILXSXPXXXXX

SEQ ID NO: 53456 - DNA, 1476 bp, Synechocystis sp.
  CDS (1)..(1476): transl_table=11
atgtacatcgttcaaattgcctcagaatgcgcccccgtcattaaggctgggggattgggggatgttatttacggcctaagccgtgaattggaactgcggggccattgcgtcgagctaatcctacccatgtacgattgcatgcgctatgaccacatctggggtttacacgatgcttaccgcaacctagaggtgccctggtatggaagctcaatcttctgtgatgttttttgtggctgggttcacggtaggctctgcttcttcattcagcccaaatcttctgataactttttcaatcggggtcattattatggcgctctagacgaccatatgcgctttgcctttttctccaaggcggccatggagtttttgctacgcagtaacaaacgcccagacattatccactgccacgattggcaaacgggactggtgccggtgttgttgtatgaaatttaccgtttccatggcatggaccatcaacgggtttgttacaccatccacaatttcaaacaccagggtattgctggagccaatattctccacgccactgggctcaataatgacagttattatttcagctacgatcgcctgcaggataatttcaatcccaatgcgattaacttcatgaaggggggcattgtctactccaactatgtcaacaccgtttccccccaccatgcttgggaagcccgtttttccgatatttcctgtggcttgggccataccctggaaatccatcagcaaaaattcggcggtattttgaacggtttggattacgaagtgtggaacccagaaattgatcctttactggcgagtaacttcagtgtcaaaacctttggcgataaggcaaaaaataagcaagcgttacgggaaagattactgttagaaacggatgataaaaaacccatgctctgctttattggccgcttggatggacaaaaaggtgtgcacttggtgcatcactccatctactacgccctcagccagggagcgcaatttgtcctgctcggctccgccaccgaacccaatctgagcaaatggttctggcatgaaaaacaacatctcaacgataaccccaatgtccatctagagttgggctttgacgaggagctggcccacttaatttacggagcggcggacattattgtggtgcccagtaactacgaaccctgtggtttgacccaaatgattggtctgcgttatggggccgttccggtggtgcggggagtaggcggtttggtaaatactgttttcgaccgggattatgaccagaaccatcccccggagaaacgtaatggttttgttttctatcaaccggatgagtatgccctggaaacggccctcagtcgggcgatcgccttgtataaggatgatcccgtggcttttaaaaccttggccttgcagggcatggcctacgactactcttggaataaaccagggctccaatatgtggaagcctacgaatacatccgggcttaa

SEQ ID NO: 53457 - protein, 491 aa, Synechocystis sp.
MYIVQIASECAPVIKAGGLGDVIYGLSRELELRGHCVELILPMYDCMRYDHIWGLHDAYRNLEVPWYGSSIFCDVFCGWVHGRLCFFIQPKSSDNFFNRGHYYGALDDHMRFAFFSKAAMEFLLRSNKRPDIIHCHDWQTGLVPVLLYEIYRFHGMDHQRVCYTIHNFKHQGIAGANILHATGLNNDSYYFSYDRLQDNFNPNAINFMKGGIVYSNYVNTVSPHHAWEARFSDISCGLGHTLEIHQQKFGGILNGLDYEVWNPEIDPLLASNFSVKTFGDKAKNKQALRERLLLETDDKKPMLCFIGRLDGQKGVHLVHHSIYYALSQGAQFVLLGSATEPNLSKWFWHEKQHLNDNPNVHLELGFDEELAHLIYGAADIIVVPSNYEPCGLTQMIGLRYGAVPVVRGVGGLVNTVFDRDYDQNHPPEKRNGFVFYQPDEYALETALSRAIALYKDDPVAFKTLALQGMAYDYSWNKPGLQYVEAYEYIRA

SEQ ID NO: 53458 - DNA, 3602 bp, Oryza sativa
  CDS (268)..(3186)
gtcttgcgccgctgagtttctgaccccgccgcggcctccgccgtttcgtacgccttctcctctcccgcgcgcacccgcctccgcctccgccttccccggccgccgccgccgccgcaggagaggagacgcaggccgcggcggcgtcaaccgccgctctccctttgccaccatctccgctcccgacacacactccactccactccagtccacagcactaacccatcggtcccggcgatccccactagtgcccctcctcgcccgcttgccatggcggcttgcggcgccgcggcggcggagtattcagctctcctgtccctctcatgtgggcctatcactcgccgccgtttcgccgtctcctgccgcgctcgaccgcccggcaacctcagtgcacagcagaagaagaagcgagggaaaaacattgctccaaaacagcgctcttcaaatgcaaaactcttgcttactactgaggaaaatggacagcttccaagtaccagtttgaggacttctatggaacgtcctcagaagagtacatccagtgaggacgataccaatggggctattagccagatagatgaaaaaattgcagccattggtaatgaacagcaagagaggtcaaaggataaacatttcgaatcagactttcaacttgaagattttggggaaatgatacaaaacatggaaaagaatattctgctcctaaatcaagctcgtctccaagcaattgaagatgttgacaaaattcttactgaaaaggaagctttgcagaaaaaggttgacactctagagatgaatttgtcaaaagcacttgcaaccaaagggaacataaatacagatatccctggtgatcatttagagaaatttacaaaagaaattttgatagagagtgctctaagtggaggcaatccagcacatttgtgtgagtctccacttttcatggagctgactgttctaaaagaagagaatatgctacttaaggctgacgcacaatttcttaaagcaaagattgttgagtttgctggaacagaggaattcctattcaaattggagaaagaaaggtcactgttagacgctacagttagggagctggaagctaggtttctagttgctcaaactgatatctggaaagttgtccctctgcaatatgatgtttggatggagaaagtagaaaatctgcaacacatgcttggatgtttgaaaaatcatgtagagaagtatgctgcattgttggatcagcatgatgatctgcatgacaagattgatgagctagaagcatcactaaaagaagggaaaacatctgagttttctccttatgttgttgaacttctgcaacagaagttgaaagcagcaaaaagccatcaccaagcaggccatcaagaaacaaacactcacattcaagtatatcagcagttaactgaggaatttcaagataacctaggtaaactaatagaagaaagtggcagactggagcattctgcaaatagtatgccatcagaattctggagtcacatcctgctcatgattgatggttggttccttgagcggaaaataccaaatactgatgcacgtatgctgagagaaatggcatggaagagagatgaccgtatctgtgaagcctactttgcttgcaagggtgcagaagaaagtgatgttatggaaactttcctaaagctatcgttatcaggaaacagttctggcttgcacattgtccatatagcagcagagatggctccagtggcaaaggttggcggtctggcagatgtagttgctggtcttggcaaggcacttcagactaagggacatttagtagagattgttcttcccaaatacgactgtatgcaacttgaccagattactaatcttaaggttttagatgttgtcatacaatcctattttgatggaaatctattcagcaacaacgtgtggacaggaactgttgaaggtcttccagtctattttattgagccacagcatccttcaaaattcttctggagggcccaatactatggagagcatgacgattttaaacgttattcatactttagccgtgcagcactggaattactttaccaatctgggaagaaaattgatataatccactgccatgactggcaaactgcatttgttgcacctctatattgggatatatatgcaactcgaggcttcagctcagctagaatttgtttcacttgccacaacttcgaataccaaggtacagcacctgctcctgatttatcatattgcggccttgatgttgagcagttggatagaccagacaggatgcaagacaatgcacatggaagaataaatgttgccaagggtggaattgtttattccaatattgtgacaactgtatcaccaacatatgctttagaagtgcgctcagagggtggtcgtggtctccaagatacacttaaaatgcattccaggaaatttgtggggatacttaatggaatcgacacaggaacatggaacccttccacagacagatttcttgctgtgcaatatagtgctactgatcttcaggggaaagcagcaaacaaagcatttctcaggaagcagctagggctgtattctgaggatgcctctcaaccactggtagcctgcattacgaggctagttcctcaaaagggtctacatcttatcaggcatgcaatatacaaaacagctgagttaggaggacagtttgtactcctgggttcaagtccagttccacatattcagagggaatttgagggtgttgcagaccaattccagaagaataacaatattaggttaattctgaaatatgatgaagctttgtctcattgtatttatgcggcatctgacatgtttatcattccatcaatgtttgagccttgtggccttactcagatgatagctatgagatatggttctgtgccaattgttcgacaaactggtggattgtgtgatagtgtttttgattttgatgatgaaactatacctgtggagctgcggaatggctttacatttgctaggactgatgagcaggatctaagcagttgcttggaaagggcattcagctactacagcagaaaacctatggtttggaaacagttagtgcagaaggatatgcagattgatttcagctgggattctccagcttcacagtacgaaaacctttatcagagtgctgttgctcaggcaaggggagcggctcaaacataaaccttttcatgatgacattgtgagcttagattctcccaagcgcagagacaatcgtcagttttatcatatctgaaccaggcatatgctgaagaaatattgttcttctcacattcacagaattcacacatcgtgatccttgctgttgccattcccgaaagaactgagaaagagtagtcttacagttgatcaagatattgcattttgcagtcagtgcacggaactagttctgggtttaatggggatgagtaatcataatctatactggattgcccccctctaaattccccccaaccgttagtttttgtgggaatgcaagaagtaaatatgtgcactgtagggtgacattcgcatacatgatactgtacggtttattcagatcaacgtttgggtaatgtgactacttttgagtttgagag

SEQ ID NO: 53459 - protein, 972 aa, Oryza sativa
MAACGAAAAEYSALLSLSCGPITRRRFAVSCRARPPGNLSAQQKKKRGKNIAPKQRSSNAKLLLTTEENGQLPSTSLRTSMERPQKSTSSEDDTNGAISQIDEKIAAIGNEQQERSKDKHFESDFQLEDFGEMIQNMEKNILLLNQARLQAIEDVDKILTEKEALQKKVDTLEMNLSKALATKGNINTDIPGDHLEKFTKEILIESALSGGNPAHLCESPLFMELTVLKEENMLLKADAQFLKAKIVEFAGTEEFLFKLEKERSLLDATVRELEARFLVAQTDIWKVVPLQYDVWMEKVENLQHMLGCLKNHVEKYAALLDQHDDLHDKIDELEASLKEGKTSEFSPYVVELLQQKLKAAKSHHQAGHQETNTHIQVYQQLTEEFQDNLGKLIEESGRLEHSANSMPSEFWSHILLMIDGWFLERKIPNTDARMLREMAWKRDDRICEAYFACKGAEESDVMETFLKLSLSGNSSGLHIVHIAAEMAPVAKVGGLADVVAGLGKALQTKGHLVEIVLPKYDCMQLDQITNLKVLDVVIQSYFDGNLFSNNVWTGTVEGLPVYFIEPQHPSKFFWRAQYYGEHDDFKRYSYFSRAALELLYQSGKKIDIIHCHDWQTAFVAPLYWDIYATRGFSSARICFTCHNFEYQGTAPAPDLSYCGLDVEQLDRPDRMQDNAHGRINVAKGGIVYSNIVTTVSPTYALEVRSEGGRGLQDTLKMHSRKFVGILNGIDTGTWNPSTDRFLAVQYSATDLQGKAANKAFLRKQLGLYSEDASQPLVACITRLVPQKGLHLIRHAIYKTAELGGQFVLLGSSPVPHIQREFEGVADQFQKNNNIRLILKYDEALSHCIYAASDMFIIPSMFEPCGLTQMIAMRYGSVPIVRQTGGLCDSVFDFDDETIPVELRNGFTFARTDEQDLSSCLERAFSYYSRKPMVWKQLVQKDMQIDFSWDSPASQYENLYQSAVAQARGAAQT

SEQ ID NO: 53460 - DNA, 3608 bp, Oryza sativa
  CDS (936)..(3197)
ggtcttgcgccgctgagtttctgaccccgccgcggcctccgccgtttcgtacgccttctcctctcccgcgcgcacccgcctccgcctccgccttccccggccgccgccgccgccgcaggagaggagacgcaggccgcggcggcgtcaaccgccgctctccctttgccaccatctccgctcccgacacacactccactccactccagtccacagcactaacccatcggtcccggcgatccccactagtgcccctcctcgcccgcttgccatggcggcttgcggcgccgcggcggcggagtattcagctctcctgtccctctcatgtgggcctatcactcgccgccgtttcgccgtctcctgccgcgctcgaccgcccggcaacctcagtgcacagcagaagaagaagcgagggaaaaacattgctccaaaacagcgctcttcaaatgccaaactcttgcttactactgaggaaaatggacagcttccaagtaccagtttgaggacttctatggaacgtcctcagaagagtacatccagtgaggacgataccaatggggctattagccagatagatgaaaaaattgcagccattgataatgaacagcaagagaggtcaaaggataaacatttcgaatcagactttcaacttgaagattttggggaaatgatacaaaacatggaaaagaatattctgctcctaaatcaagctcgtcttcaagcaattgaagatgttgacaaaattcttactgaaaaggaagctttgcagaaaaaggttgacactctagagatgaatttgtcaaaagcacttgccaaccaaagggaacataaatacagatatccctggtgatcatttagagaaatttacaaaagaaattttgatagaaagtgctctaagtggaggcaatccagcacatttgtgtgagtctccacttttcatggagctgactgttctaaaagaagagaatatgctacttaaggctgacgcacaatttcttaaagcaaagattgttgagtttgctgaaacagaggaattcctattcaaattggagaaagaaaggtcactgttagacgctacagttagggagctggaagctaggtttctagttgctcaaactgatatctggaaagatgtccctctgcaatatgatgtttggatggagaaagtagaaaatctgcaacacatgcttggatgtttgaaaaatcatgtagagaagtatgctgcattgttggatcagcatgatgatctgcatgacaagattgatgagctagaagcatcactaaaagaagggaaaacatctgagttttctccttatgttgttgaacttctgcaacagaagttgaaagcagcaaaaagccatcaccaagcaggccatcaagaaacaaacactcacattcaagtatatcagcagttaactgaggaatttcaagataacctaggtaaactaatagaagaaagtggcagactggagcattctgcaaatagtatgccatcagaattctggagtcacatcctgctcatgattgatggttggttccttgagcggaaaataccaaatactggtgcacgtatgctgagagaaatggcatggaagagagatgaccgtatctgtgaagcctactttgcttgcaagggtgcaaaagaaagtgatgttatggaaactttcctaaagctatcgttatcaggaaacagtcaatgcagttctggcttgcacattgtccatatagcagcagagatggctccagtggcaaaggttggcggtctggcagatgtagttgctggtcttggcaaggcacttcagactaagggacatttagtagagattgttcttcccaaatacgactgtatgcaacttgaccagattactaatcttaaggttttagatgttgtcatacaatcctattttgatggaaatctattcagcaacaacgtgtggacaggaactgttgaaggtcttccagtctattttattgagccacagcatccttcaaaattcttctggagggcccaatactatggagagcatgacgattttaaacgttattcatactttagccgtgcagcactggaattactttaccaatctgggaagaaaattgatataatccactgccatgactggcaaactgcatttgttgcacctctatattgggatatatatgcaactcgaggcttcagctcagctagaatttgtttcacttgccacaacttcgaataccaaggtacagcacctgctcctgatttatcatattgcggccttgatgttgagcagttggatagaccagacaggatgcaagacaatgcacatggaagaataaatgttgccaagggtggaattgcttattccaatattgtgacaactgtatcaccaacatatgctttagaagtgcgctcagagggtggtcgtggtctccaagatacacttaaaatgcattccaggaaatttgtggggatacttaatggaatcgacacaggaacatggaacccttccacagacagatttcttgctgtgcaatatagtgctactgatcttcaggggaaagcagcaaacaaagcatttctcaggaagcagctagggctgtattctgaggatgcctctcaaccactggtagcctgcattacgaggctagttcctcaaaagggtctacatcttatcaggcatgcaatatacaaaacagctgagttaggaggacagtttgtactcctgggttcaagtccagttccacatattcagagggaatttgagggtgttgcagaccaattccagaagaataacaatattaggttaattctgaaatatgatgaagctttgtctcatggtatttatgcggcatctgacatgtttatcattccatcaatgtttgagccttgtggccttactcagatgatagctatgagatatggttctgtgccaattgttcgacaaactggtggattgtgtgatagtgtttttgattttgatgatgaaactatacctgtggagctgcggaatggctttacatttgctaggactgatgagcaggatctaagcagttgcttggaaagggcattcagctactacagcagaaaacctatggtttggagacagttagtgcagaaggatatgcagattgatttcagctgggattctccagcttcacagtacgaaaacctttatcagagtgctgttgctcaggcaaggggagcggctcaaacataaaccttttcatgatgacattgtgagcttagattctcccaagcgcagagacaatcgtcagttttatcatatctgaaccaggcatatgctgaagaaatattgttcttctcacattcacagaattcacacatcgtgatccttgctgttgccattcccgaaagaactgagaaagagtagtcttacagttgatcaagatattgcattttgcagtcagtgcacggaactagttctgggtttaatggggatgagtaatcataatctatactggattgcccccctctaaattccccccacccgttagtttttgtgggaatgcaagaagtaaatatgtgcactgtagggtgacattcgcatacatgatactgtacggtttattcagatcaacgtttgggtaatgtgactacttttgagttt

SEQ ID NO: 53461 - protein, 753 aa, Oryza sativa
MELTVLKEENMLLKADAQFLKAKIVEFAETEEFLFKLEKERSLLDATVRELEARFLVAQTDIWKDVPLQYDVWMEKVENLQHMLGCLKNHVEKYAALLDQHDDLHDKIDELEASLKEGKTSEFSPYVVELLQQKLKAAKSHHQAGHQETNTHIQVYQQLTEEFQDNLGKLIEESGRLEHSANSMPSEFWSHILLMIDGWFLERKIPNTGARMLREMAWKRDDRICEAYFACKGAKESDVMETFLKLSLSGNSQCSSGLHIVHIAAEMAPVAKVGGLADVVAGLGKALQTKGHLVEIVLPKYDCMQLDQITNLKVLDVVIQSYFDGNLFSNNVWTGTVEGLPVYFIEPQHPSKFFWRAQYYGEHDDFKRYSYFSRAALELLYQSGKKIDIIHCHDWQTAFVAPLYWDIYATRGFSSARICFTCHNFEYQGTAPAPDLSYCGLDVEQLDRPDRMQDNAHGRINVAKGGIAYSNIVTTVSPTYALEVRSEGGRGLQDTLKMHSRKFVGILNGIDTGTWNPSTDRFLAVQYSATDLQGKAANKAFLRKQLGLYSEDASQPLVACITRLVPQKGLHLIRHAIYKTAELGGQFVLLGSSPVPHIQREFEGVADQFQKNNNIRLILKYDEALSHGIYAASDMFIIPSMFEPCGLTQMIAMRYGSVPIVRQTGGLCDSVFDFDDETIPVELRNGFTFARTDEQDLSSCLERAFSYYSRKPMVWRQLVQKDMQIDFSWDSPASQYENLYQSAVAQARGAAQT

SEQ ID NO: 53462 - DNA, 3430 bp, Zea mays
  CDS (229)..(2958)
gcacgagccgcctctggctctccttcctccgccttccgcgcgcagcgcagagcgcacgggacacccgccgcccacgccttccgccccagacccactgcacgtgcacggacacgcgacctagcccacacatccactccgctttttccaaccgccgcccacgcgaaccccgacgcggtcgcctcgagctccactccgtttaccctgcaaccccatcctcctcggcttcccatgtcgtgctcggcggcggcgggcgccgaggccaccgctctcctgttccgcagcgccgctccgtccacgatcgtcgggcgtcaccgcctcgctatgtctcgccggacttcgcgccgaaacctcaggactggtgtgcaccctcatcagaagagtgcacctagtgctaaccatcgtaacagggctagcattcagagagatagagcatcagcttccattgatgaagaacagaaacagatgtctgaagatgaaaatggcctactagacattcaactggaagatctggtaggaatgatacagaatacccagaagaatatattgcttctgaatcaagctcgtcttcaagcattggaacgtgctgacaaaattcttaaagagaaagaaactttgcaacagaagataaacattttagagatgaaactgtcagaaacaggtaaacaatctgtgctttctagtgaagtaaagtctgatgaagagagtctggagtttgatgtcgtaaaggaagagaatatgctactgaaggatgagatgaattttctaaaaggaaagcttattgagataactgagacagaggagagtctattcaagttggagaaagagtgtgctcttctaaatgcttcccttagggagctcgagtgtacatccacttctgcccaatctgatgtgttgaaacttggccctctgcaacaagatgcctggtgggagaaagtagaaaatttggaagacttgcttgattccacagcaaaccaagtggagcatgcttctttgacgctagatggttaccgtgatttccaggataaggttgacaaactaaaagcatcattgggaacaacaaacgtatcagagttctgtctttatttggttgatattttgcagcaaagggtaaaatcagtagaagagcgctttcaagcatgtaatcatgaaatgcattcacaaattgaactttatgaacactcaatagtggagtttcatggtactctcagcaaactaataaatgaaagtgagaaaaagtcaatggagcattatgcagaaggcatgccatcagagttctggagtaggatctctcttctgattgatgggtggtcgcttgagaagaaaatatccattaatgatgcaagtatgttgagagaaatggcttggaaaagggataatcgcctccgggaagcttacttgtcatccagaggaatggaagagagggaactgatagatagttttctaaagatggcactaccaggaacaagttctggtttgcacattgtccacatagcagcagagatggctcctgtcgcaaaggttggtggtctggcagatgtgatctctggtcttgggaaggcacttcaaaaaaaggggcaccttgtagagattattcttcccaaatatgattgcatgcagcataaccaaataaataatcttaaggttctagatgttgtggtgaagtcttactttgaaggaaatatgtttgccaacaagatatggactggaactgttgaaggtcttccggtctactttattgaaccgcaacatccaggtaagttcttctggagggcacaatactacggagagcatgatgacttcaaacgtttttcgtactttagccgtgttgcactggaattgctttaccaatctgggaagaaagttgacataattcactgccatgactggcagactgcatttgttgcacctctttactgggatgtatatgcaaacctgggcttcaactcagctagaatttgttttacctgtcacaattttgaatatcaaggaatcgctccagctcaggacttagcatattgtggtcttgatgttgatcacctggatagaccagacagaatgcgggataattcacatggcagaataaatgttgttaagggtgcagttgtatattccaacattgtgacaactgtatcaccaacatatgcacaagaggttcgctcagagggtgggcgtgggctccaagatacactcaaagtgcactccaagaaatttgttggaatacttaatggcattgacacagatacttggaatccgtctacggataggtttctcaaggttcaatacagtgctaatgatctatatggaaagtcagcaaacaaagcagctcttaggaagcagttgaagcttgcttccacacaagcttctcaaccattagttggttgcattacgaggctagttcctcaaaagggtgtacatctcatcaggcatgcaatatataaaataactgagttgggtggtcaatttgttctgctgggttcaagtccagtacagcatatccagagagagttcgagggtattgcggaccaatttcagaacaacaacaatgtcaggctgcttttgaagtatgatgatgctctggcacatatgatctttgcagcatcagacatgttcattgttccttctatgtttgaaccatgtggcctcactcagatggtagctatgcgatatggttctgtgccagttgttcggagaaccggcggtttgaatgacagtgtcttcgatttggacgatgaaacgatacccatggaggtgcgaaatggcttcacctttttgaaggctgatgagcaggattttggtaatgcactggaaagagctttcaactactaccacagaaaacctgaagtttggaaacagttggtgcagaaagacatgaagatagatttcagctgggatacttcagtttctcaatacgaagaaatctatcagaaaacagccactcgagccagggcagcggcataaacagcagagacattgagacagttccctgctgtctccatgaagtctcctagatgctgtgcttaaccgtatggtaaagaaatatggtctgtatcagctcagaattaagcatctgccgaggaagcgcggtgcatccggactcgggtgtacaaggggcgacgtggcgttacgtgcagtccccaacgaagcaaagagacagaagtacagctgtacagaacggatatcttgtgaagcacacattgggatcaggacgtttggtgctgcagctactttcggtgcagaagcacatatatacgagacctgccagggcgagcaaatacccagttatacacgcgattgctcagctctatcaagctgtgaattgaaagatttctatagtgtattcacgcgacgttttcataaactagtgtgagttatgtactctgaccagtgaccagtgcgaagtctgtgttgtctcaaaaaaaaaaaaaaaaag

SEQ ID NO: 53463 - protein, 909 aa, Zea mays
MSCSAAAGAEATALLFRSAAPSTIVGRHRLAMSRRTSRRNLRTGVHPHQKSAPSANHRNRASIQRDRASASIDEEQKQMSEDENGLLDIQLEDLVGMIQNTQKNILLLNQARLQALERADKILKEKETLQQKINILEMKLSETGKQSVLSSEVKSDEESLEFDVVKEENMLLKDEMNFLKGKLIEITETEESLFKLEKECALLNASLRELECTSTSAQSDVLKLGPLQQDAWWEKVENLEDLLDSTANQVEHASLTLDGYRDFQDKVDKLKASLGTTNVSEFCLYLVDILQQRVKSVEERFQACNHEMHSQIELYEHSIVEFHGTLSKLINESEKKSMEHYAEGMPSEFWSRISLLIDGWSLEKKISINDASMLREMAWKRDNRLREAYLSSRGMEERELIDSFLKMALPGTSSGLHIVHIAAEMAPVAKVGGLADVISGLGKALQKKGHLVEIILPKYDCMQHNQINNLKVLDVVVKSYFEGNMFANKIWTGTVEGLPVYFIEPQHPGKFFWRAQYYGEHDDFKRFSYFSRVALELLYQSGKKVDIIHCHDWQTAFVAPLYWDVYANLGFNSARICFTCHNFEYQGIAPAQDLAYCGLDVDHLDRPDRMRDNSHGRINVVKGAVVYSNIVTTVSPTYAQEVRSEGGRGLQDTLKVHSKKFVGILNGIDTDTWNPSTDRFLKVQYSANDLYGKSANKAALRKQLKLASTQASQPLVGCITRLVPQKGVHLIRHAIYKITELGGQFVLLGSSPVQHIQREFEGIADQFQNNNNVRLLLKYDDALAHMIFAASDMFIVPSMFEPCGLTQMVAMRYGSVPVVRRTGGLNDSVFDLDDETIPMEVRNGFTFLKADEQDFGNALERAFNYYHRKPEVWKQLVQKDMKIDFSWDTSVSQYEEIYQKTATRARAAA

SEQ ID NO: 53464 - DNA, 2951 bp, Hordeum vulgare
  CDS (107)..(2548)
gtgcgtttaccccacacagagtacactccaactccagtccagtccagcccactgccgcttctgcccgcccatcgtaccgtcgcccgccccgatcccggccgccgccatgtcgtcggcggtcgcgtcccccgcgtccttcctcgcgctcgcgtccgcctcgcccgggagatcatcacggaggagggcgagggtgggcgcgtcgccaacccgcgctggggccggcaggctgcaatggcggccgtcgccgctgcagcgcacggctcgcgacggagcggtggccgcgcgcgccgccgggatcgacgacgccgcgcccggtaggcagccccgcgctcgccgctatggcgccgccaccaaggtcgcggatcccgtcaagacgctcgatcgcgacgccgcggaaggtggtgggccgtccccgccggcaccgaggcaggacgccgcccgtctgccgagtaagaacggcacgctgatcaacggtgagaacaaacctaccggcggcggtggcgcgactaaagacagcgggctgcccacacccgcacgcgcgccccatctgtcaatccagaacagagtaccggtgaacggtgaaaacaaacataaggtcgcctcgccgccgaccagcatagtggatgtcgcgtctccgggttccgcagctaacatttccatcagtaacaaggtgccgccgtccgttgtcccagccaagaagacgccgccgtcgtccgttttcccggccaagaaggcgccgccgtcgtccgttgtcccggccaagaagacgctgccgtcgtccggctcaaattttgtgtcctcggcctctgctcccaggctggacactgtcagcgatgtggaacttgcacagaagaaggatgcgctgattgtcaaagaagctccaaaaccaaaggctctttcggcccctgcagcccccgctgtacaagaagacctttgggatttcaagaaatacattggtttcgaggagcccgtggaggccaaggatgatggctcggctgttgcagatgatgcgggttcctttgaacatcaccagaatcatgattccggacctttggcaggggagaacgtcatgaacgtggtcgtcgttgctgctgaatgttctccctggtgcaaaacaggtggtcttggagatgttgcgggtgctttgcccaaggctttggctaagagaggacatcgtgttatggttgtggtaccaaggtatggggactatgaggaagcctacgatgtcggagtccgaaaatactacaaggctgctggacaggatatggaagtgaattatttccatgcttatatcgatggagtggattttgtgttcattgacgctcctctcttccgacaccgtcagcaagacatttatgggggcagcagacaggaaattatgaagcgcatgattttgttctgcaaggccgctgtcgaggttccttggcacgttccatgcggcggtgtcccttacggggatggaaatctggtcttcattgcaaatgattggcacacggcactcctgcctgtctatctgaaagcatattacagggaccatggtttgatgcaatacagtcgctccgttatggtgatacataacatcgctcaccagggccgtggccctgtagatgaattcccgttcaccgagttgcctgagcactacctggaacacttcagactgtacgaccccgtcggcggtgagcacgccaactacttcgccgccggcctgaagatggcggaccaggttgtcgtcgtgagccccgggtacctgtgggagctgaagacggtggagggcggctgggggcttcacgacatcatacggcagaacgactggaagacccgcggcatcgtgaacggcatcgacaacatggagtggaaccctgaggtggacgtccacctgaagtcggacggctacaccaacttctccctgaagacgctggactccggcaagcggcagtgcaaggaggccctgcagcgcgagctggggctgcaggtccgcggcgacgtgccgctgctcgggttcatcgggcggctggacgggcagaagggcgtggagatcatcgcggacgcgatgccctggatcgtgagccaggacgtgcagctggtgatgctgggcacggggcgccacgacctggagagcatgctgcagcacttcgagcgggagcaccacgacaaggtgcgcgggtgggtggggttctccgtgcgcctggcgcaccggatcacggcgggcgccgacgcgctcctcatgccctcccggttcgagccgtgcgggctgaaccagctctacgcgatggcctacggcaccatccctgtcgtgcacgccgtcggcggcctgagggataccgtgccgccgttcgaccccttcaaccactccgggctcgggtggacgttcgaccgcgccgaggcgcacaagctgatcgaggcgctcgggcactgcctccgcacctaccgggaccacaaggagagctggaggggcctccaggagcgcggcatgtcgcaggacttcagctgggaacatgccgccaagctctacgaggacgtcctcgtccaggccaagtaccagtggtgaacgctgctacccggtccagccccgcatgcgtgcatgagaggatggaaatgcgcattgcgcacttgcagatttggcgcatgcaggaacgtgccgtccttcttgatgggaacgccggcatccgcgaggttgagacgctgattccgatctggtccgtcgcagagtagagtgaaacgctccttgttgcaggtatatgggaatgttttttttttccttttttttttttgcgagggaggtatatgggaatgttaacttggtattgtaatgtggtatgctgtgtgcattattacatcggttgttgttgcttattcttgctagctaagtcggaggccaagagcgaaagctagctcacatgtctgatgtatgcaagtgacatggttggtttggttgtgcagtgcaaacggca

SEQ ID NO: 53465 - protein, 813 aa, Hordeum vulgare
MSSAVASPASFLALASASPGRSSRRRARVGASPTRAGAGRLQWRPSPLQRTARDGAVAARAAGIDDAAPGRQPRARRYGAATKVADPVKTLDRDAAEGGGPSPPAPRQDAARLPSKNGTLINGENKPTGGGGATKDSGLPTPARAPHLSIQNRVPVNGENKHKVASPPTSIVDVASPGSAANISISNKVPPSVVPAKKTPPSSVFPAKKAPPSSVVPAKKTLPSSGSNFVSSASAPRLDTVSDVELAQKKDALIVKEAPKPKALSAPAAPAVQEDLWDFKKYIGFEEPVEAKDDGSAVADDAGSFEHHQNHDSGPLAGENVMNVVVVAAECSPWCKTGGLGDVAGALPKALAKRGHRVMVVVPRYGDYEEAYDVGVRKYYKAAGQDMEVNYFHAYIDGVDFVFIDAPLFRHRQQDIYGGSRQEIMKRMILFCKAAVEVPWHVPCGGVPYGDGNLVFIANDWHTALLPVYLKAYYRDHGLMQYSRSVMVIHNIAHQGRGPVDEFPFTELPEHYLEHFRLYDPVGGEHANYFAAGLKMADQVVVVSPGYLWELKTVEGGWGLHDIIRQNDWKTRGIVNGIDNMEWNPEVDVHLKSDGYTNFSLKTLDSGKRQCKEALQRELGLQVRGDVPLLGFIGRLDGQKGVEIIADAMPWIVSQDVQLVMLGTGRHDLESMLQHFEREHHDKVRGWVGFSVRLAHRITAGADALLMPSRFEPCGLNQLYAMAYGTIPVVHAVGGLRDTVPPFDPFNHSGLGWTFDRAEAHKLIEALGHCLRTYRDHKESWRGLQERGMSQDFSWEHAAKLYEDVLVQAKYQW

SEQ ID NO: 53466 - DNA, 2826 bp, Triticum aestivum
  CDS (162)..(2561)
cttcggcctgaccccgttcgtttacccccacacagagcacactccagtccagtccagcccactgccaccgcgctactctccactcccactgccaccacctccgcctgcgccgcgctctgggcggaccaacccgcgaaccgtaccatctcccgccccgatccatgtcgtcggcggtcgcgtccgccgcatccttcctcgcgctcgcgtcagcctcccccgggagatcacgcaggcgggcgagggtgagcgcgcagccaccccacgccggggccggcaggttgcactggccgccgtggccgccgcagcgcacggctcgcgacggagctgtggcggcgctcgccgccgggaagaaggacgcggggatcgacgacgccgccgcgtccgtgaggcagccccgcgcactccgcggtggcgccgccaccaaggtcgcggagcgaagggatcccgtcaagacgctcgaccgcgacgccgcggaaggcggcgggccgtccccgccggcagcgaggcaggacgccgcccgtccgccgagtatgaacggcatgccggtgaacggcgagaacaaatctaccggcggcggcggcgcgactaaagacagcgggctgcccacgcccgcacgcgcgccccatccgtcgacccagaacagagcaccggtgaacggtgaaaacaaagctaacgtcgcctcgccgccgacgagcatagccgaggccgcggcttcggattccgcagctaccatttccatcagcgacaaggcgccggagtccgttgtcccagctgagaagacgccgccgtcgtccggctcaaatttcgagtcctcggcctctgctcccgggtctgacactgtcagcgacgtggaacaagaactgaagaagggtgcggtcgttgtcgaagaagctccaaagccaaaggctctttcgccgcctgcagcccccgctgtacaagaagacctttgggatttcaagaaatacattggtttcgaggagcccgtggaggccaaggatgatggccgggctgtcgcagatgatgcgggctcctttgaacaccaccagaatcacgactccggacctttggcaggggagaatgtcatgaacgtggtcgtcgtggctgctgagtgttctccctggtgcaaaacaggtggtctgggagatgttgcgggtgctctgcccaaggctttggcaaagagaggacatcgtgttatggttgtggtaccaaggtatggggactatgaagaagcctacgatgtcggagtccgaaaatactacaaggctgctggacaggatatggaagtgaattatttccatgcttatatcgatggagttgattttgtgttcattgacgctcctctcttccgacaccgtcaggaagacatttatgggggcagcagacaggaaattatgaagcgcatgattttgttctgcaaggccgctgttgaggttccatggcacgttccatgcggcggtgtcccttatggggatggaaatctggtgtttattgcaaatgattggcacacggcactcctgcctgtctatctgaaagcatattacagggaccatggtttgatgcagtacactcggtccattatggtgatacataacatcgctcaccagggccgtggccctgtagatgaattcccgttcaccgagttgcctgagcactacctggaacacttcagactgtacgaccccgtgggtggtgaacacgccaactacttcgccgccggcctgaagatggcggaccaggttgtcgtggtgagccccgggtacctgtgggagctgaagacggtggagggcggctgggggcttcacgacatcatacggcagaacgactggaagacccgcggcatcgtcaacggcatcgacaacatggagtggaaccccgaggtggacgcccacctcaagtcggacggctacaccaacttctccctgaggacgctggactccggcaagcggcagtgcaaggaggccctgcagcgcgagctgggcctgcaggtccgcgccgacgtgccgctgctcggcttcatcggccgcctggacgggcagaagggcgtggagatcatcgcggacgccatgccctggatcgtgagccaggacgtgcagctggtgatgctgggcaccgggcgccacgacctggagagcatgctgcagcacttcgagcgggagcaccacgacaaggtgcgcgggtgggtggggttctccgtgcgcctggcgcaccggatcacggcgggggcggacgcgctcctcatgccctcccggttcgagccgtgcgggctgaaccagctctacgccatggcctacggcaccgtccccgtcgtgcacgccgtcggcggcctcagggacaccgtgccgccgttcgaccccttcaaccactccgggctcgggtggacgttcgaccgcgccgaggcgcacaagctgatcgaggcgctcgggcactgcctccgcacctaccgagacttcaaggagagctggagggccctccaggagcgcggcatgtcgcaggacttcagctgggagcacgccgccaagctctacgaggacgtcctcgtcaaggccaagtaccagtggtgaacgctagctgctagccgctccagccccgcatgcgtgcatgacaggatggaactgcattgcgcacgcaggaaagtgccatggagcgccggcatccgcgaagtacagtgacatgaggtgtgtgtggttgagacgctgattccaatccggcccgtagcagagtagagcggaggtatatgggaatcttaacttggtattgtaatttgttatgttgtgtgcattattacaatgttgttacttattcttgttaaaaaaaaaaaaaaaaaaa

SEQ ID NO: 53467 - protein, 799 aa, Triticum aestivum
MSSAVASAASFLALASASPGRSRRRARVSAQPPHAGAGRLHWPPWPPQRTARDGAVAALAAGKKDAGIDDAAASVRQPRALRGGAATKVAERRDPVKTLDRDAAEGGGPSPPAARQDAARPPSMNGMPVNGENKSTGGGGATKDSGLPTPARAPHPSTQNRAPVNGENKANVASPPTSIAEAAASDSAATISISDKAPESVVPAEKTPPSSGSNFESSASAPGSDTVSDVEQELKKGAVVVEEAPKPKALSPPAAPAVQEDLWDFKKYIGFEEPVEAKDDGRAVADDAGSFEHHQNHDSGPLAGENVMNVVVVAAECSPWCKTGGLGDVAGALPKALAKRGHRVMVVVPRYGDYEEAYDVGVRKYYKAAGQDMEVNYFHAYIDGVDFVFIDAPLFRHRQEDIYGGSRQEIMKRMILFCKAAVEVPWHVPCGGVPYGDGNLVFIANDWHTALLPVYLKAYYRDHGLMQYTRSIMVIHNIAHQGRGPVDEFPFTELPEHYLEHFRLYDPVGGEHANYFAAGLKMADQVVVVSPGYLWELKTVEGGWGLHDIIRQNDWKTRGIVNGIDNMEWNPEVDAHLKSDGYTNFSLRTLDSGKRQCKEALQRELGLQVRADVPLLGFIGRLDGQKGVEIIADAMPWIVSQDVQLVMLGTGRHDLESMLQHFEREHHDKVRGWVGFSVRLAHRITAGADALLMPSRFEPCGLNQLYAMAYGTVPVVHAVGGLRDTVPPFDPFNHSGLGWTFDRAEAHKLIEALGHCLRTYRDFKESWRALQERGMSQDFSWEHAAKLYEDVLVKAKYQW

SEQ ID NO: 53468 - DNA, 2748 bp, Oryza sativa (japonica cultivar-group); identical to SEQ ID NO: 52370
  CDS (1)..(2748)

SEQ ID NO: 53469 - protein, 915 aa, Oryza sativa (japonica cultivar-group); identical to SEQ ID NO: 52371

SEQ ID NO: 53470 - DNA, 3078 bp, Arabidopsis thaliana
  CDS (1)..(3078)
atggctgcttcaggaccaaaaagctcaggtcccagaggttttgggcgacgaacaacagtaggaagtgctcagaaaagaactcagaagaagaatggtgaaaaagatagtaatgccacttctacagcaacaaacgaggtttcagggattagtaagttgcccgcagctaaagtggatgtacagaagcaaagctctgttgttttgaatgagagaaatgtgttagataggtcggatattgaggatggaagtgatcgtttggacaagaaaacaaccgatgatgatgatttgttagaacaaaagttaaaacttgaaagagagaatcttcgtaggaaggaaatagaaacgcttgcagcggaaaatttggcgagaggtgatagaatgtttgtgtatcccgttattgtgaaacctgatgaagacatagaagtgtttctcaacaggaatctgtcgactctgaataacgaacccgatgttttgatcatgggggcgtttaacgaatggagatggaagtctttcacaaggagattggaaaagacctggatccatgaagattggttgtcatgtctccttcatatccccaaagaagcgtataagatggacttcgtgtttttcaatgggcaaagtgtatatgacaacaatgactcaaaagatttttgtgtagagataaaaggtgggatggataaagttgactttgagaattttcttctagaagagaaactgcgagagcaagagaagttagccaaggaagaagctgagagggagaggcaaaaagaagagaagagaagaatcgaagctcaaaaggctgcaattgaagctgatagagcacaagcaaaggcggagactcagaagagacgtgaattgcttcaaccggctattaagaaagctgtagtctcggctgagaatgtttggtacattgagccgagtgatttcaaggctgaagatacagtgaagctatattacaataaaaggtcaggtcctctgactaattccaaagaactgtggttacatggagggtttaataattgggttgatggattatctatcgttgtaaagcttgttaatgctgagttaaaggatgttgatccaaagagcggaaattggtggttcgctgaagttgtagtgcctggcggtgcactagtcattgactgggtctttgctgatggaccacctaaaggagcgtttctgtatgacaataatggttaccaagacttccacgcacttgttcctcaaaaacttcctgaagaactttactggttagaggaagaaaatatgatttttagaaaacttcaggaggataggcggttaaaagaggaagttatgcgtgccaagatggaaaaaacagctcgcttgaaagctgaaactaaggaaagaacactgaaaaagtttctgctatcccagaaagacgtggtttacaccgagcctctagagattcaagcaggaaaccctgtgactgtattgtacaatcctgcaaacacggttttgaatggaaaacctgaagtttggtttagaggctcttttaatcgttggactcaccgcttgggccctttgccacctcagaaaatggaagcaacagatgatgaaagctcacatgtgaagactacggctaaggtcccattggatgcttacatgatggactttgtgttctctgagaaagaggatggcggaatatttgataacaaaaatggtctggattaccatttaccagtcgtgggaggtatttcaaaggaaccaccattgcacattgttcatattgctgttgaaatggcacccatcgcaaaggttggtggcctaggtgatgttgtcactagtctatctcgcgctgttcaagaattaaaccataatgtggatatagtttttccaaagtatgattgcataaagcacaattttgtgaaggacttgcaatttaacagaagctatcactggggaggaactgaaataaaagtttggcatggaaaagtagaaggcctttcggtttacttcttagatccacaaaatggattgtttcagcgaggatgtgtttacggttgtgcagatgatgcaggaagattcggtttcttctgtcatgcggctcttgaatttcttctccaaggaggtttccatccagacattcttcactgtcatgactggtctagtgctccggtttcatggttattcaaggatcattacacacagtacggtttaattaaaacccgtattgtcttcacaattcataatttggaatttggagcgaatgccattggtaaagcaatgacatttgcagacaaagccacaacggtttcaccaacttatgctaaggaagttgctggaaactctgtaatctctgcacatttatacaaatttcacggaattataaacgggattgacccagatatatgggatccatataacgataactttattcccgtaccttatacttcagagaacgttgtagaaggcaaaagagcagccaaggaagaattgcaaaacaggcttggactaaagagtgccgattttccagtagtaggaattattacgcgcttaacacaccagaagggaatacatttgatcaagcacgctatttggcgtaccttggaacggaatggacaggttgtcttattaggttcagctccagatcctcggatccaaaatgattttgtaaacttggcaaaccaattacattcttctcatggtgaccgggctcggcttgttctaacctacgatgaacctctttcccatttgatttatgctggggctgactttattcttgtaccgtcgatatttgagccatgtggactgacacagctcatagccatgagatacggcgctgttcctgttgttagaaaaactggaggactctttgatacggtttttgatgttgaccacgataaagaaagggcacaagctcaagttctagaacctaatggtttcagcttcgacggagctgatgctcctggtgttgattatgctctcaatagggcgatatcggcgtggtacgatggtagagagtggtttaactcgctgtgcaagacggtgatggagcaagactggtcatggaaccgtcctgcacttgagtatcttgagctctatcactctgcacgcaagtaa

SEQ ID NO: 53471 - protein, 1025 aa, Arabidopsis thaliana
MAASGPKSSGPRGFGRRTTVGSAQKRTQKKNGEKDSNATSTATNEVSGISKLPAAKVDVQKQSSVVLNERNVLDRSDIEDGSDRLDKKTTDDDDLLEQKLKLERENLRRKEIETLAAENLARGDRMFVYPVIVKPDEDIEVFLNRNLSTLNNEPDVLIMGAFNEWRWKSFTRRLEKTWIHEDWLSCLLHIPKEAYKMDFVFFNGQSVYDNNDSKDFCVEIKGGMDKVDFENFLLEEKLREQEKLAKEEAERERQKEEKRRIEAQKAAIEADRAQAKAETQKRRELLQPAIKKAVVSAENVWYIEPSDFKAEDTVKLYYNKRSGPLTNSKELWLHGGFNNWVDGLSIVVKLVNAELKDVDPKSGNWWFAEVVVPGGALVIDWVFADGPPKGAFLYDNNGYQDFHALVPQKLPEELYWLEEENMIFRKLQEDRRLKEEVMRAKMEKTARLKAETKERTLKKFLLSQKDVVYTEPLEIQAGNPVTVLYNPANTVLNGKPEVWFRGSFNRWTHRLGPLPPQKMEATDDESSHVKTTAKVPLDAYMMDFVFSEKEDGGIFDNKNGLDYHLPVVGGISKEPPLHIVHIAVEMAPIAKVGGLGDVVTSLSRAVQELNHNVDIVFPKYDCIKHNFVKDLQFNRSYHWGGTEIKVWHGKVEGLSVYFLDPQNGLFQRGCVYGCADDAGRFGFFCHAALEFLLQGGFHPDILHCHDWSSAPVSWLFKDHYTQYGLIKTRIVFTIHNLEFGANAIGKAMTFADKATTVSPTYAKEVAGNSVISAHLYKFHGIINGIDPDIWDPYNDNFIPVPYTSENVVEGKRAAKEELQNRLGLKSADFPVVGIITRLTHQKGIHLIKHAIWRTLERNGQVVLLGSAPDPRIQNDFVNLANQLHSSHGDRARLVLTYDEPLSHLIYAGADFILVPSIFEPCGLTQLIAMRYGAVPVVRKTGGLFDTVFDVDHDKERAQAQVLEPNGFSFDGADAPGVDYALNRAISAWYDGREWFNSLCKTVMEQDWSWNRPALEYLELYHSARK

SEQ ID NO: 53472 - DNA, 3123 bp, Arabidopsis thaliana; identical to SEQ ID NO: 52374
  CDS (1)..(3123)

SEQ ID NO: 53473 - protein, 1040 aa, Arabidopsis thaliana; identical to SEQ ID NO: 52375

SEQ ID NO: 53474 - DNA, 1452 bp, Lactococcus lactis subsp. lactis Il1403
  CDS (1)..(1452): transl_table=11
atgaaagagagaaaaatgaaagttttatttgcatcgagtgaatgtgcccccttttttaagacgggaggacttggagatgtagctggagcactgcccaaagaattggctaaaaaaagtgaaatagattcagttgctgtgatccttccttattttaagaatgaaatgaaagaagaatatcgttcacttttaaaagatgaattttatgattttgttgatgttggttggcggcacgaatatgttggagttaaaagtctagaaaaagagggtgtgaagtattattttctagataatgaacattattttggtagggggcaactctatggttatggcgatgatggagagcgctttgccttttttgacttggctctttgccaactcttagaaaagttagatttcattccagatgttttgcatgtcaatgattggcagactgcaatggttccctttttacttaaagaaaaatacaactggattaaggcctatgaaaaaattaaaacagtactgaccattcataatattgaatttcaaggcttgatgcatggagatgctttaagtgagctttttggtatgggaatggagcgctattttgaaggagtggtccgtcataatggtatgctaaatatgttaaaaacaggaattttatatgcggatcgggttaatacagtttcgccaacttacgctaaggaaatccagacctcagaatttggttgtggtttagaatcgattttgcaatatgtagatggaaaagtttctggaattttaaatgggatagattatgatatttataatcccgaaaatgatatattaattccttaccatttcagcgaggaagagctttctggtaaaggtcaaatgaaagcagagctccaaaagcgaacaggattaccattgaatccaaatgttccattgattgggatggtttcccgtttaacgaatcaaaaaggatttgatttagttttgagtcagttggaaaaagtattggaagaaaatgtgcaaattgtcctattaggaacaggtttccctgaaattgaagaaggttttagatatttttctcaaaaatatccagataagttgtcagcaaatattgcatttgacattcaatttgcacaggaaatttatgctggttctgatttcttcttgatgccatctgcttttgaaccttgtggcctatcacagatgattgcaatgagatatggaactttaccaatcgttcatgaaattggtggtttgaaagatactgtgattccatttaatcctattagcaaagaaggaacaggatttggttttgttgattttgaaggacagattttagtggagacgattaatcgtgcacttgaagtttatggaaaagaaccagaagtcttaaataaaatggttttatcagcaatgagtaaagatttttcttggggaacgaaggctcagcaatacattgaactctatcaagaattataa

SEQ ID NO: 53475 - protein, 483 aa, Lactococcus lactis subsp. lactis Il1403
MKERKMKVLFASSECAPFFKTGGLGDVAGALPKELAKKSEIDSVAVILPYFKNEMKEEYRSLLKDEFYDFVDVGWRHEYVGVKSLEKEGVKYYFLDNEHYFGRGQLYGYGDDGERFAFFDLALCQLLEKLDFIPDVLHVNDWQTAMVPFLLKEKYNWIKAYEKIKTVLTIHNIEFQGLMHGDALSELFGMGMERYFEGVVRHNGMLNMLKTGILYADRVNTVSPTYAKEIQTSEFGCGLESILQYVDGKVSGILNGIDYDIYNPENDILIPYHFSEEELSGKGQMKAELQKRTGLPLNPNVPLIGMVSRLTNQKGFDLVLSQLEKVLEENVQIVLLGTGFPEIEEGFRYFSQKYPDKLSANIAFDIQFAQEIYAGSDFFLMPSAFEPCGLSQMIAMRYGTLPIVHEIGGLKDTVIPFNPISKEGTGFGFVDFEGQILVETINRALEVYGKEPEVLNKMVLSAMSKDFSWGTKAQQYIELYQEL

SEQ ID NO: 53476 - DNA, 1419 bp, Deinococcus radiodurans R1; identical to SEQ ID NO: 52376
  CDS (1)..(1419): transl_table=11

SEQ ID NO: 53477 - protein, 472 aa, Deinococcus radiodurans R1; identical to SEQ ID NO: 52377

SEQ ID NO: 53478 - DNA, 1542 bp, Methylococcus capsulatus str. Bath
  CDS (1)..(1542): transl_table=11
atgccggaaagccgggccgaggttgcgccggagccgtcgcccccgcctcacatccagcaccggcccgccctgttcgtggtccatgtcacgccggaactggcgccggtggcgaaggtcggcgggctggcggatgtggtgttcggactcgggcgggagctggagatccgcggcaatcacgtcgaaatcattttgcccaagtacgactgcatgcgctacgaccaaatctggggtctgcagcgcaccttcgatgacctgtgggtgccctggtatggtggagccatccactgctctgtctatttcggcttcgtccacgggcgcaagtgctttttcatcgagccgcactcccaggacaatttcttcaaccgcggtgcggtgtacggcttccatgacgacattttccgtttcgcgttcttttcgcgggcggcgatggagttcctctggaaggccggcaagaatcccgacatcattcattgccatgattggcagacggcactggtgccggtctatctgtacgaaatctatcagccgatggggatgaggcatccccgggtctgcttcaccatccacaatttcaagcatcagggcgtcaccggggcgcaggtgctgcacgcctccggactcgaccggccggaatactatttccactatgaccgtcttcgcgacaaccataatccccatgccatcaatctgatgaagggcggcatcgtctatgccaatttcgtgaccacggtttcgccgcgctatgcgatggaggccaaggatcagggccagggcttcggactcgagccgaccctgcacatccatcacatgaagtacggcggggtggtgaatggcatcgactacgacgtctggaatccggagatcgacccgcacatccccgtgcacttcaacgtggacacgatcgaaggcaaatatgccgacaagaaggcgctgcgcgaccggctgctgctcgccgacaacgagaaacccatcgtgtccttcgtcggccggctcgatccgcagaagggcatcgagctgatccgccatgccttgttctatacgttagggcaaggcggccagttcgtcctgctcggctccagtcccgacggggcgatcaacggctatttctggggcctgaagcggcagttcaacgacaatccggactgtcacctggaaatcggctacaacgaagagctggcgcatctggtctatgccggctcggacgtgatggtggtgcccagtcgctttgagccctgcggactgacccagctgatcgccatgcgctatggcaccattccggtggtgcgcgaaatcggcggtctggcggataccgtgatcgacaaggatttctcgcaccgcccgttgcatgagcgcaacggttacgtattccgcgattacgatgagcgcggactggaatcggcgctgggccgggcgatcgcctgctactatcagtatccggaccacttccgcgagctgatgaagaatgccatgcgctacgactattcctggaaccatccggggcaggactatctcaacatttaccactatatccgggacaaatag

SEQ ID NO: 53479 - protein, 513 aa, Methylococcus capsulatus str. Bath
MPESRAEVAPEPSPPPHIQHRPALFVVHVTPELAPVAKVGGLADVVFGLGRELEIRGNHVEIILPKYDCMRYDQIWGLQRTFDDLWVPWYGGAIHCSVYFGFVHGRKCFFIEPHSQDNFFNRGAVYGFHDDIFRFAFFSRAAMEFLWKAGKNPDIIHCHDWQTALVPVYLYEIYQPMGMRHPRVCFTIHNFKHQGVTGAQVLHASGLDRPEYYFHYDRLRDNHNPHAINLMKGGIVYANFVTTVSPRYAMEAKDQGQGFGLEPTLHIHHMKYGGVVNGIDYDVWNPEIDPHIPVHFNVDTIEGKYADKKALRDRLLLADNEKPIVSFVGRLDPQKGIELIRHALFYTLGQGGQFVLLGSSPDGAINGYFWGLKRQFNDNPDCHLEIGYNEELAHLVYAGSDVMVVPSRFEPCGLTQLIAMRYGTIPVVREIGGLADTVIDKDFSHRPLHERNGYVFRDYDERGLESALGRAIACYYQYPDHFRELMKNAMRYDYSWNHPGQDYLNIYHYIRDK

SEQ ID NO: 53480 - DNA, 1497 bp, Thiobacillus denitrificans ATCC 25259; identical to SEQ ID NO: 52398
  CDS (1)..(1497): transl_table=11

SEQ ID NO: 53481 - protein, 498 aa, Thiobacillus denitrificans ATCC 25259; identical to SEQ ID NO: 52399

SEQ ID NO: 53482 - DNA, 1437 bp, Desulfitobacterium hafniense Y51; identical to SEQ ID NO: 52404
  CDS (1)..(1437): transl_table=11

SEQ ID NO: 53483 - protein, 478 aa, Desulfitobacterium hafniense Y51; identical to SEQ ID NO: 52405

SEQ ID NO: 53484 - DNA, 1455 bp, Acidobacteria bacterium Ellin345; identical to SEQ ID NO: 52406
  CDS (1)..(1455): transl_table=11

SEQ ID NO: 53485 - protein, 484 aa, Acidobacteria bacterium Ellin345; identical to SEQ ID NO: 52407

SEQ ID NO: 53486 - DNA, 1434 bp, Myxococcus xanthus DK 1622; identical to SEQ ID NO: 52408
  CDS (1)..(1434): transl_table=11

SEQ ID NO: 53487 - protein, 477 aa, Myxococcus xanthus DK 1622; identical to SEQ ID NO: 52409

SEQ ID NO: 53488 - DNA, 1557 bp, Synechococcus sp. CC9311; identical to SEQ ID NO: 52414
  CDS (1)..(1557): transl_table=11

SEQ ID NO: 53489 - protein, 518 aa, Synechococcus sp. CC9311; identical to SEQ ID NO: 52415

SEQ ID NO: 53490 - DNA, 1452 bp, Alkalilimnicola ehrlichei MLHE-1; identical to SEQ ID NO: 52416
  CDS (1)..(1452): transl_table=11

SEQ ID NO: 53491 - protein, 483 aa, Alkalilimnicola ehrlichei MLHE-1; identical to SEQ ID NO: 52417

SEQ ID NO: 53492 - DNA, 1470 bp, Magnetococcus sp. MC-1
  CDS (1)..(1470): transl_table=11
atgaagatcttgatggtggcatcggagtgtgccccggtcgctaaagtgggtgggctgggggatgtggtgcatgggctgagtcgtgagttgcaccagcgtggtcacgatgttgcggttattttacccaagtacgactgtatgcgttatgatcatatctgggatctggccattagctatgaaaatttgtgggtgccctggaacggtggggtgatcaactgcaccatctggtttggtcatgtggatggtttggcgagctactttattgaaccccatgcagaagagcagttttttaaccggggtacctactacgggttttgggacgacgcccaccgttttggctttttctctcgggcggcgctggagtttatgcttaaggctaatctgcgcccagacatcatccatacccatgattggcagacggcgttgatccccgttatgctttatgaaatctatgaatctctaggattggatcgacaacgggtgtgtcacaccatccataattttaaacaccagggcaccacaggacgggatctcctgtatgccacagggctgcaccgtgccgactattttggggatgttcactgtatgggggatgatttcacccctggggccatcaaccataccaaaggggcgataacctacgccaattttgtcaccacggtttcgcccaagcatgcctttgaagcccgccacagcgaccaaggctatggattgggacacaccctctaccgttttcaggataaatttggcggtatcctgaacggtttggattatgacacctggaaccccatgaccgacccctatcttagggtccactatgatcgcgatacgttggaacgcaagagcgacaataaacaggctctgcgtgaacggctgatgctacaacaggtgtataaacccatggtcgcctatgtggggcgcttggatacccaaaaaggggtgcatctcatccgtcatgcgctgttccgcaccttggagatgggcgggcagtttgtgctgcttggggcggcctcggaacggggtataaacgacgatttttggcatttaaaaaacgatcttaatgacaatcccgactgtcatttggaaattgggtttgatgaagctttggcccatcaaatctatgctggggtcgatctgtttgtggtgcccagcctgtttgaaccgtgcggtctcacccaaatgatcgcgctacgctacggtacggtaccggtggtgcgtcaagtcgggggattggccgataccgtttttgattggaaccatagtgatctgccactctccaagcgcaatggctttgtgtttgaagaggcctcctttgcggggttagaatccgcactggatcgagggattgcgttgtggaaacaggatccccatgggttccaaatgcttatgcaggcgggtatgcgctacgattattcgtggcggttgcccgtggaacactatctgaacatctaccgctacatccgctgttga

SEQ ID NO: 53493 - protein, 489 aa, Magnetococcus sp. MC-1
MKILMVASECAPVAKVGGLGDVVHGLSRELHQRGHDVAVILPKYDCMRYDHIWDLAISYENLWVPWNGGVINCTIWFGHVDGLASYFIEPHAEEQFFNRGTYYGFWDDAHRFGFFSRAALEFMLKANLRPDIIHTHDWQTALIPVMLYEIYESLGLDRQRVCHTIHNFKHQGTTGRDLLYATGLHRADYFGDVHCMGDDFTPGAINHTKGAITYANFVTTVSPKHAFEARHSDQGYGLGHTLYRFQDKFGGILNGLDYDTWNPMTDPYLRVHYDRDTLERKSDNKQALRERLMLQQVYKPMVAYVGRLDTQKGVHLIRHALFRTLEMGGQFVLLGAASERGINDDFWHLKNDLNDNPDCHLEIGFDEALAHQIYAGVDLFVVPSLFEPCGLTQMIALRYGTVPVVRQVGGLADTVFDWNHSDLPLSKRNGFVFEEASFAGLESALDRGIALWKQDPHGFQMLMQAGMRYDYSWRLPVEHYLNIYRYIRC

SEQ ID NO: 53494 - DNA, 1440 bp, Nostoc punctiforme PCC 73102; identical to SEQ ID NO: 52426
  CDS (1)..(1440): transl_table=11

SEQ ID NO: 53495 - protein, 479 aa, Nostoc punctiforme PCC 73102; identical to SEQ ID NO: 52427

SEQ ID NO: 53496 - DNA, 1473 bp, Crocosphaera watsonii WH 8501
  CDS (1)..(1473): transl_table=11
atgtatattgtccaagtagcctcggaatgcgccccggtcattaagtcagggggtttaggtgatgttgttttcgggctgagtcgcgaactcgaaaaccagggtcatgctgtagatgttattcttcccaaatatgattgtatgcgttatgaccatatctcgggattacaccaagcctatgatgatttatcagtaccttggggcaatggctccatccgctgtactgtgttgggtggtaaagttcatggacttaactgcttctttattgaacctcattctaatgagaatttctttaaccgaggcaaatactatggggacaatgatgacaacttacgctttgctttctttagtagagcggttttagaatatatgtgtatgcacaataagcgtcctgagattattcattgccatgattggcaaacgggactgctacctgtgatgttatttgaacagtataaatatcgtggcatggatggtcaacgggtttgttacaccatccataattttaaacatcaaggagggggtagtgttggtattttaggggcaactcagttgaataatgagggttattatctgagtcccgatcgcctcaaagatagcagtatccccaatcatattaattttatgaaggctggcatcgtttattctaatgcagttaatacagtctctcctcaccatgcttgggaagcccgttttagcaatgagggttatgggttaggtcatacccttgccgttcatcaagataagtttaaaggtattctcaacggtttagactatgaggtatggaacccagaagtagatgagcatatttcgatgctctttggtccagatgattttgaattaaaagaccttaacaaaaaaggattacgagaacggctatggttagaggagaaagatagaccgatcattgcctatattggtcgtctggatgaccaaaaaggagtgggtttagttctccatgctttagagtacgctctgaggcggagcgcacagtttgttctattgggatcagctacttctgaccacttaaaaaatctgttttggcagacaaaaaatcgtttaaatgatcatcctgacgtacatcttgaactgagttttaatgaagaattatcccatctcatttatgccggggcagatatgatggtggttccgagtaattatgaaccctgtggcctaacccaaatgatttccctcaaatatggaactgttcccattgtgcgtggggttggtggcctggttaatacagtgtttgactacgacaatgacgaaaatcatctgcccgaagagcgcaatggctttgtcttccatcaaaccgatcccggagccttagaatcagccatgcaccgttccttagagctatggtacaccgatcgccaagcattcaataaattagctattcagggaatgcgttgtgactattcttggcggaagcccgtagaacagtatattgaagtttatgaaacaatcaaagcctaa

SEQ ID NO: 53497 - protein, 490 aa, Crocosphaera watsonii WH 8501
MYIVQVASECAPVIKSGGLGDVVFGLSRELENQGHAVDVILPKYDCMRYDHISGLHQAYDDLSVPWGNGSIRCTVLGGKVHGLNCFFIEPHSNENFFNRGKYYGDNDDNLRFAFFSRAVLEYMCMHNKRPEIIHCHDWQTGLLPVMLFEQYKYRGMDGQRVCYTIHNFKHQGGGSVGILGATQLNNEGYYLSPDRLKDSSIPNHINFMKAGIVYSNAVNTVSPHHAWEARFSNEGYGLGHTLAVHQDKFKGILNGLDYEVWNPEVDEHISMLFGPDDFELKDLNKKGLRERLWLEEKDRPIIAYIGRLDDQKGVGLVLHALEYALRRSAQFVLLGSATSDHLKNLFWQTKNRLNDHPDVHLELSFNEELSHLIYAGADMMVVPSNYEPCGLTQMISLKYGTVPIVRGVGGLVNTVFDYDNDENHLPEERNGFVFHQTDPGALESAMHRSLELWYTDRQAFNKLAIQGMRCDYSWRKPVEQYIEVYETIKA

SEQ ID NO: 53498 - DNA, 1452 bp, Exiguobacterium sibiricum 255-15; identical to SEQ ID NO: 52434
  CDS (1)..(1452): transl_table=11

SEQ ID NO: 53499 - protein, 483 aa, Exiguobacterium sibiricum 255-15; identical to SEQ ID NO: 52435

SEQ ID NO: 53500 - DNA, 1578 bp, Synechococcus sp. RS9917; identical to SEQ ID NO: 52440
  CDS (1)..(1578): transl_table=11

SEQ ID NO: 53501 - protein, 525 aa, Synechococcus sp. RS9917; identical to SEQ ID NO: 52441

SEQ ID NO: 53502 - DNA, 1407 bp, Flavobacteria bacterium BBFL7
  CDS (1)..(1407): transl_table=11
atgagaatcttacatataagtgcagagtgctatccagttgctaaagtaggcggactagctgatgtagtcggtgcattacctaaatatttaaataattcgggacagcagtgtagtgtcattatgcctttttacgatgtacgctttacacaaaaccatcagtttgaaacaatatatgaagatgctgtttttgtagcagcagataattttcattttaaaatcttgaagttagctgatcaatcaaaggattttgatttgtttctggttgatattccacaattactatataaaaattacgtgtattctcatgacgatgctgaacgttttacagcttttcaaatcgcagtattgcaatggatacagactcatcaacataaaccagatgttatacattgtcatgaccatcatactggtttagtgcctttcatgatacaatattgctatagatttgaaaatttaaaaaatattcctagtgtgttaaccattcataatgcgcaatatcaagggtggttttctcatgatcgcatagcgatgattcctgattttgataaacaacatgtagggttgttagattgggatggttcaataaatcctctcgcaacagctattaagtgcgcgtggaaagttaatacagtatcacctagttatatggtggaattacagcaaaaagctaatggtctagaagctttattgagtcacgagagtgtaaaatgtctagggatacttaatggaattgatactacagtttggaaccctacaacggatgcttttataaaaaaacagtactctagtagctcacacattagtggtaaaaaagtaaataaaaaatggttgtgtgatacttacggattagatttcaataaaccattatttgtttttatcggtagactggtttatgaaaaaggatctgatttatttcctcaggtatttaaagagatacttcaggaaaatgatgtgtctattttgttattgggatctggagactcagatactgaaaacaaacttattgcactaagagagaagtttaagggccatttcaatgcctacataggatacgatgaagaactgtcccacttaatatatgctggtgcagattttcttttaatgccatcgcgagtagaaccttgtggtttaaatcaaatgtattccttaacttacggtactattcctatagtgcgcagtataggtggtttgaaagatacaatcgttgatatcgataatgatggttatggatttgtacatgaggatactagtgtagaccagattaaaaatgcgatgcagcgagcagccgctttttatgacaacacgctagagtttaaaaaaataagaacacgtattatgaaaatcgatcactcttgggataactcggcacaacaatacattagtttatataatactcttaaaaactga

SEQ ID NO: 53503 - protein, 468 aa, Flavobacteria bacterium BBFL7
MRILHISAECYPVAKVGGLADVVGALPKYLNNSGQQCSVIMPFYDVRFTQNHQFETIYEDAVFVAADNFHFKILKLADQSKDFDLFLVDIPQLLYKNYVYSHDDAERFTAFQIAVLQWIQTHQHKPDVIHCHDHHTGLVPFMIQYCYRFENLKNIPSVLTIHNAQYQGWFSHDRIAMIPDFDKQHVGLLDWDGSINPLATAIKCAWKVNTVSPSYMVELQQKANGLEALLSHESVKCLGILNGIDTTVWNPTTDAFIKKQYSSSSHISGKKVNKKWLCDTYGLDFNKPLFVFIGRLVYEKGSDLFPQVFKEILQENDVSILLLGSGDSDTENKLIALREKFKGHFNAYIGYDEELSHLIYAGADFLLMPSRVEPCGLNQMYSLTYGTIPIVRSIGGLKDTIVDIDNDGYGFVHEDTSVDQIKNAMQRAAAFYDNTLEFKKIRTRIMKIDHSWDNSAQQYISLYNTLKN

SEQ ID NO: 53504 - DNA, 1458 bp, Vibrio sp. Ex25
  CDS (1)..(1458): transl_table=11
ttggctactaacaacttatctattctgtttgtagcttctgaggtcgaaggtctcattaaaagtggtggcttggcagacgttgccaaggcactaccggaagcccttcaaaacctacagcaagacgtaagaattaccatccctgcgtacagcagtattgataaactcgctgacgcagaagttgtattagaaacagaactaacatcatggccgcatacggagtatcgagttctgcggctcatgctaggtcaaaatcctgtttatctgattgattgtcagccgtatttcaatcgaccatcgatgtatgcggagaacaaccaagcgtataccgataacggtgagcgctttgcgttttttagtgcagcatgtttagacatgttgccgaagcttgcttttcagccagatatcatacacgcgaacgattggcacactggtcttgttccatttttgctcaagcacaggtatggcaatgatccgttttttgctcatactaaaagtgtcatttctatacataatgcggtttttaaaggcgtatttagttatgaagacgtgcagtgcttgccagagtttcattgtcgaaacgttcccgatgctgcggtgagtacaacgcatattactatgctcaaagctggtgtaatgaatgccgataagataaacgctgtcagccctacgtacgcagaggaactcaaaacagagcttggcagtcatggaatggcttgggagtttcagcaacgcgagcaggacttagttggtattttgaacggttgtgattacagtgcttggaacccggaaacggatacttacttgccagttaattactgcgctaaccaacaaagtatgacgcaaggcaagaaagcgtgtaaacaagcattacaactgcggctaaatttgcctgaaaaagatgtagccatgttcggtatggtttgtcggttgacccagcaaaaaggtgtgcattacttgttgcctgctttggccgattttttgaagcacgatgttcaactagttgtcgttgggaccggagaccctgtactagccgctcagctagaagaggttgctgcacagttttctagtaaatttgtcttcgtagaagcttatgataatgaacttgcgcatatcgttgaagcgggttctgatttctttctgatgccttctgagtttgagccgtgtggtttgaatcaaatctatagtatggcttatgggacattaccgatagtacgtggtgtcggtggtctaaaggacagcgtcaacgattatgatgtgaacccttctgaagcgacggggtttgtttttttcgaaccgacaccgcaggcattgttgttaacgatgctaagggcactgttgctctatgctcaaaacgaacctgaagtgaataaagtacagttgcatgcgatgcaacaagatttttgttggcaaaaggccgcagaagcttatttgcaactttacaattcggcgttaaattga

SEQ ID NO: 53505 - protein, 485 aa, Vibrio sp. Ex25
MATNNLSILFVASEVEGLIKSGGLADVAKALPEALQNLQQDVRITIPAYSSIDKLADAEVVLETELTSWPHTEYRVLRLMLGQNPVYLIDCQPYFNRPSMYAENNQAYTDNGERFAFFSAACLDMLPKLAFQPDIIHANDWHTGLVPFLLKHRYGNDPFFAHTKSVISIHNAVFKGVFSYEDVQCLPEFHCRNVPDAAVSTTHITMLKAGVMNADKINAVSPTYAEELKTELGSHGMAWEFQQREQDLVGILNGCDYSAWNPETDTYLPVNYCANQQSMTQGKKACKQALQLRLNLPEKDVAMFGMVCRLTQQKGVHYLLPALADFLKHDVQLVVVGTGDPVLAAQLEEVAAQFSSKFVFVEAYDNELAHIVEAGSDFFLMPSEFEPCGLNQIYSMAYGTLPIVRGVGGLKDSVNDYDVNPSEATGFVFFEPTPQALLLTMLRALLLYAQNEPEVNKVQLHAMQQDFCWQKAAEAYLQLYNSALN

SEQ ID NO: 53506 - DNA, 5025 bp, Zea mays
  CDS (1)..(5025)
atggagatggtcctacggtcgcagagccctctctgccttcggagtgggccggtgctcatttttcgaccaaccgtcgcgggcggaggagggggcactcagtctttgttgaggactaccagatttgcgagaagaagggtcattcgatgcgttgtagcaagtccaggttgtcctaataggaaatctaggacagcgtctcccaacgtaaaagtagctgcttatagcaactatgcgccaagactcctcgttgagtcaagctccaagaagagcgaacaccatgatagcagcagacaccgtgaagaaactattgatacatacaatgggctgtcaggttctgatgcagcagaattgacaagtaatagagatgtagaaattgaagtggatttgcagcacatttctgaggaggaattgccaggaaaagtatcgattaatgcatcattaggagaaatggaaacagtggatgaagctgaggtcgaggaggataagtttgaggtagatacctcaggaattgtattgcgcaatgttgcagttcgggaagtggatccaaaggatgaacataatgctaaagatgtatttgtggtagattcgtcaggaactgcaccagataatgctgcagtggaggaagtggtagatgaagctgaggttgaagaggatatggttgatgtggatatcttgggacttgacttgaataatgcaacgatcgaggaaattgatttgatggaagaggctttactggagaacttcgacgtggattcaccaggcaatgcttctagtggtcgaacctatgggggtgtggatgagttgggtgagctgccttcaacatccgtggattgcatcgccattaacggaaaacgtagaagtttgaagcctaagcccttgccaattgtcaggttccaggaacaagaacagatagttttaagcattgttgacgaagaagggttgattgctagttcatgtgaagaaggccaaccggtggtagattacgataagcaagaggaaaactctaccgctttcgatgaacagaagcaattaactgatgatttccctgaagaaggcatatctatagttcacttccctgagccaaacaatgatattgttggatcctcaaaattcttggagcaaaaacaagaattggatggttcttataaacaagatcgatcaaccactggattgcatgaacaagatcagtctgttgttagttcacacggacaagataaatcaattgttggtgtgcctcagcaaatccagtacaatgatcaatctattgctggttctcatagacaagatcaatcaattgccggtgcacctgagcaaatccaatccgttgctggctatataaaaccaaatcaatctattgttggttcttgtaaacaacatgaattgattattcctgagcctaagaaaatcgaatccatcatcagttacaatgaaatagatcaatctattgttggttctcacaaacaagacaaatctgttgttagtgtgcctgagcaaatccaatccattgttagtcacagcaaaccaaatcaatctactgttgattcttatagacaagctgaatcaattattggtgtgcctgagaaagtccaatccatcaccagttacgataaactagaccagtccattgttggttctcttaaacaagatgagcctattattagcgtgcctgagaaaatccaatccattgtccattacactaaaccaaatcagtctattgttggcttgcccaaacaacaacaatcaattgttcatatcgttgaaccaaaacagtccatagatggtttccctaaacaagatctatcaatcgttggtatctccaatgagtttcaaacaaagcaactggctactgttgggactcatgatggattgcttatgaagggtgtggaagctaaggagacatctcaaaagactgaaggggatacacttcaggcaacgttcaatgtcgacaacttgtcacagaaacaggaaggcttaactaaagaagcagacgagataacaattattgagaaaatcaatgatgaagaccttgtgatgattgaagaacagaaaagcatagccatgaatgaagaacagacgattgttaccgaagaagacattccaatggctaaggttgagataggaattgacaaggccaaatttttacatctgctttctgaagaagagagttcatgggatgaaaatgaagtgggaataattgaggctgatgaacagtatgaagtcgatgagacatctatgtccactgaacaagatatccaggaatcacctaatgatgatttggatccacaagcactatggagtatgcttcaagagcttgctgaaaaaaattattcgctgggaaacaagttgtttacttatccagatgtattgaaagctgattcaacaattgatctctatttcaatcgtgatctatcagctgtggccaatgagcctgatgtacttatcaaaggagcattcaatgggtggaagtggagatttttcactgaaaaattgcacaagagcgagctggcaggggactggtggtgctgcaaactatacattcctaagcaggcatacagaatggactttgtgttttttaacggacacacggtatatgaaaataataacaataatgatttcgtgatacaaatagaaagcaccatggatgaaaatttatttgaggatttcttggctgaagaaaagcaacgagaacttgagaaccttgcaaatgaggaagctgaaaggaggagacaaactgatgagcagcggcgaatggaggaagaaagggccgcagataaagctgacagggtacaagccaaggttgaggtagagacgaagaagaataaattgtgcaatgtattgggtttagccagagctcctgttgataatttatggtacattgagcccatcacgactggacaagaggctactgtcagattgtattataacataaactcaagacctctagttcacagtactgagatatggatgcatggtggctataacaattggattgatggactctcttttgctgaaaggcttgttcatcatcatgacaaagattgtgattggtggtttgcagatgttgtcgtgcctgaaagaacatatgtattggactgggtttttgctgacggcccaccagggagtgcaaggaattatgacaacaatggaggacatgattttcatgctacccttccaaataacatgactgaggaagagtattggatggaagaagaacaaaggatctatacaaggcttcaacaagagaggagggaaagggaggaggctattaaaaggaaggctgagagaaatgcaaaaatgaaagctgagatgaaggaaaagactatgagaatgttcctggtttctcagaaacacattgtttacaccgaaccacttgaaatacatgctggaactactattgatgtgctttataatccttctaatacagttctaactggaaagccagaggtttggtttcgatgttcctttaatcgttggatgtatccaggtggggtgttgccacctcagaagatggtacaagcagaaaatggttcacacctaaaagcaacagtttacgttccacgagatgcctatatgatggacttcgttttctcggagtcagaagaaggtggaatttatgataacagaaatgggttagactatcatattcctgtttttgggtcaattgcaaaggaaccacctatgcacattgtccacattgctgttgagatggcaccaatcgcaaaggttggaggtcttggtgatgttgtcactagtctttcacgtgctgtgcaagatttaggacacaatgtggaggttattcttccaaagtacggttgcttgaatctaagcaatgtcaagaatctacaaatccatcagagtttttcttggggtggttctgaaataaatgtgtggcgtggactagtcgaaggcctttgtgtttacttcctggaacctcaaaatgggatgtttggagtcggatatgtatatggcagggacgatgaccgccgatttggcttcttctgtcgttctgctctagagtttctcctccaaagtggatcttctccgaacataatacattgccatgattggtcaagtgctcctgttgcctggctacacaaggaaaactacgcgaagtctagcttggcaaacgcacgggtggtattcaccatccacaatcttgaatttggagcgcatcatattggcaaagcaatgagatattgtgataaagcaacaactgtctctaatacatattcaaaggaagtgtcaggtcatggtgccatagttcctcatcttgggaaattctatggcattctcaatggaattgatccggatatatgggatccgtacaatgacaactttatcccggtccactacacttgtgagaatgtggttgaaggcaagagggctgctaagagggcactgcagcagaagtttgggttacagcaaatcgatgtccccgtcgtaggaatcgtcactcgcctgacagcccaaaaggggatccacctgatcaagcatgcgattcaccgtacactcgaacggaacggacaggtggttttgcttggttcagcgccggactctcgaatccaagctgattttgtcaacctggcgaatacgctccacggcgtaaaccatgggcaagtgaggctttccttgacctacgacgagcctctctcgcatctgatatacgctggctctgacttcattctggtcccatctatatttgagccttgcggcctaactcagctcgtcgccatgcggtatggaaccatcccgattgtccgcaagactggagggctcttcgacactgtcttcgatgtggacaatgacaaggaacgagcccgagatcgaggccttgagcccaacgggtttagctttgacggagctgatagcaacggtgttgactacgcgctgaacagggcgatctcagcttggttcgatgcccggagctggttccactccctttgcaagagagtcatggagcaggactggtcgtggaaccgacctgccctcgactacatcgagctctaccgttcagcgtccaaattgtaa

SEQ ID NO: 53507 - protein, 1674 aa, Zea mays
MEMVLRSQSPLCLRSGPVLIFRPTVAGGGGGTQSLLRTTRFARRRVIRCVVASPGCPNRKSRTASPNVKVAAYSNYAPRLLVESSSKKSEHHDSSRHREETIDTYNGLSGSDAAELTSNRDVEIEVDLQHISEEELPGKVSINASLGEMETVDEAEVEEDKFEVDTSGIVLRNVAVREVDPKDEHNAKDVFVVDSSGTAPDNAAVEEVVDEAEVEEDMVDVDILGLDLNNATIEEIDLMEEALLENFDVDSPGNASSGRTYGGVDELGELPSTSVDCIAINGKRRSLKPKPLPIVRFQEQEQIVLSIVDEEGLIASSCEEGQPVVDYDKQEENSTAFDEQKQLTDDFPEEGISIVHFPEPNNDIVGSSKFLEQKQELDGSYKQDRSTTGLHEQDQSVVSSHGQDKSIVGVPQQIQYNDQSIAGSHRQDQSIAGAPEQIQSVAGYIKPNQSIVGSCKQHELIIPEPKKIESIISYNEIDQSIVGSHKQDKSVVSVPEQIQSIVSHSKPNQSTVDSYRQAESIIGVPEKVQSITSYDKLDQSIVGSLKQDEPIISVPEKIQSIVHYTKPNQSIVGLPKQQQSIVHIVEPKQSIDGFPKQDLSIVGISNEFQTKQLATVGTHDGLLMKGVEAKETSQKTEGDTLQATFNVDNLSQKQEGLTKEADEITIIEKINDEDLVMIEEQKSIAMNEEQTIVTEEDIPMAKVEIGIDKAKFLHLLSEEESSWDENEVGIIEADEQYEVDETSMSTEQDIQESPNDDLDPQALWSMLQELAEKNYSLGNKLFTYPDVLKADSTIDLYFNRDLSAVANEPDVLIKGAFNGWKWRFFTEKLHKSELAGDWWCCKLYIPKQAYRMDFVFFNGHTVYENNNNNDFVIQIESTMDENLFEDFLAEEKQRELENLANEEAERRRQTDEQRRMEEERAADKADRVQAKVEVETKKNKLCNVLGLARAPVDNLWYIEPITTGQEATVRLYYNINSRPLVHSTEIWMHGGYNNWIDGLSFAERLVHHHDKDCDWWFADVVVPERTYVLDWVFADGPPGSARNYDNNGGHDFHATLPNNMTEEEYWMEEEQRIYTRLQQERREREEAIKRKAERNAKMKAEMKEKTMRMFLVSQKHIVYTEPLEIHAGTTIDVLYNPSNTVLTGKPEVWFRCSFNRWMYPGGVLPPQKMVQAENGSHLKATVYVPRDAYMMDFVFSESEEGGIYDNRNGLDYHIPVFGSIAKEPPMHIVHIAVEMAPIAKVGGLGDVVTSLSRAVQDLGHNVEVILPKYGCLNLSNVKNLQIHQSFSWGGSEINVWRGLVEGLCVYFLEPQNGMFGVGYVYGRDDDRRFGFFCRSALEFLLQSGSSPNIIHCHDWSSAPVAWLHKENYAKSSLANARVVFTIHNLEFGAHHIGKAMRYCDKATTVSNTYSKEVSGHGAIVPHLGKFYGILNGIDPDIWDPYNDNFIPVHYTCENVVEGKRAAKRALQQKFGLQQIDVPVVGIVTRLTAQKGIHLIKHAIHRTLERNGQVVLLGSAPDSRIQADFVNLANTLHGVNHGQVRLSLTYDEPLSHLIYAGSDFILVPSIFEPCGLTQLVAMRYGTIPIVRKTGGLFDTVFDVDNDKERARDRGLEPNGFSFDGADSNGVDYALNRAISAWFDARSWFHSLCKRVMEQDWSWNRPALDYIELYRSASKL

SEQ ID NO: 53508 - DNA, 2716 bp, Chlamydomonas reinhardtii; identical to SEQ ID NO: 52458
  CDS (93)..(2048)

SEQ ID NO: 53509 - protein, 651 aa, Chlamydomonas reinhardtii; identical to SEQ ID NO: 52459

SEQ ID NO: 53510 - DNA, 1893 bp, Ipomoea batatas
  CDS (1)..(1893)
atgcctcgtaagggggcaaccttgaacaaagattcagacaaaaaaactacaaaaagaaatccaaagactgtgggatctactgaaaggccagctgtgaaatcaaaagtgtctttgagtccaagtcaagtgacttcttcaacagtaaattctcaggagccagcaaaagctacctatgaaactgtgaagtccagtcaagtgatgccactggacgtggattcacaaaagaatgtgacatccttttctagggagattcttttgtctgaggttccttcctcctcttcaatggcatctgcatctactttagaggatgagaaaagagatcatagagagtcaagttcaaaggagatagatgttgggactgaagatcctgtaaatgaagacttgaagccacctccattggcgggaaccaatgtcatgaatgttatattagtttgtgcagagtgtgctccatggtcaaaaacaggtgggcttggtgatgttgctggagcactacccaaggctttggctcggcgtggacacagagttatggttgtggttcctctttatggaaactatgctgaacctcaacatactggagttcgaaaaatgtttaagattgatggtcaggatatggaggtgaattactttcatgcctacatcgataatgtggattttgtcttcattgatagtcctatattccagcatagaggaaacaatatatatggaggaaatcgtgtggacattttgaagcgcatggacttattttgcaaagcagctattgtggttccgtggcatgttccgtgcggtggtatttgctatggagatggaaacttagtgttcattgcaaatgattggcatactgcattactgccagtctatctgaaagcatatttccgtgacaatggagtaatgaaattcactcgatccgtgcttgtcattcataacatagctcaccagggtcgcgggcctatggatgatttttccattgtggacctaccagctcaatatgcagacctttttaagctgtatgatccagtaggaggtgatcatttcaacatatttgcagctggtctaaagacagctgaccgtgtagtcacagtgagtcatggatatgcctgggagcttaaaacttctgaaggtggatggggtttgaatgggatcaggaatgagaatgagtggaaactgcaggggattgtcaatgggattgatattgaagagtggaatccccaattggatgtttacttgaaatctgatggctatgccaactattccctggacaccttgcagactggtaaacctcagtgcaaggcagcattgcaaaaggaaatgaatttgcctgttcgcgatgatgtcccactaattggtttcattgggaggcttgaccaccaaaaaggtgttgatttgatagccgaggcaatcccttggatgatgggccaagatgtgcagctggttatgctgggcacaggcaggcctgaccttgaacagatgctcaagcagattgaaggtcaatacggtgacaaagtaagaggatgggttggtttctcagtaaagactgcacaccggataactgcgggtgcagacattctgctgatgccatcaagatttgagccttgtggactgaaccagctgtatgctatgagctatgggacagtcccagttgtccatgctgtgggtggacttagagatacggtgcagccttttgatcctttcaatgaatcagggtatggatggacattcggtagggctgaggcaaatcagctgattgatgcactagggaattgcttattaacataccggcagtacaagcagagttgggaggggctccagaggcgtggaatgatgcaagacttaagctgggatcacgctgccgagaagtacgaggaagttcttgttgctgcaaagtatcagtggtga

SEQ ID NO: 53511 - protein, 630 aa, Ipomoea batatas; identical to SEQ ID NO: 52461

SEQ ID NO: 53512 - DNA, 2745 bp, Triticum aestivum; identical to SEQ ID NO: 52466
  CDS (1)..(2745)
  misc_feature (1081)..(1081): y is t or c

SEQ ID NO: 53513 - protein, 914 aa, Triticum aestivum; identical to SEQ ID NO: 52467

SEQ ID NO: 53514 - DNA, 3729 bp, Chlamydomonas reinhardtii
  CDS (1)..(3729)
atgtccggcgcgcagcgcagcgtccgaaagggcgcgaacaggatccgcggtgcccaggggccccgcaccgttcctctgctgggcctgaaggcgctgcgtaaggaggacgcggagctgctgaaggaggctgagtcgtacatgtcgcctgaggagcacgccgagctgcgccgcctgctggaggagaaccagcggctgcgccaggttgtgaccaccagcgccagccagatgtcggcgcagcagctggagcgcttcacggccgagtacagcaacctggcggcggcggcggagcaggcggggctggcggtggaccagcagctcaagcagcagatcacggcgccccaggccgcctccgcctcgcgctcgtccgccgcctccagcaccggccgcttcgaggccgcggccggcggcagcggctacggctacggccgctccagcgtgtccgtgcttgtggcagagccgccctctgcgccgcccgccgccgcctcgccgccctcgtacggcgcctccggctcgggcggcggcggcggctcgcccaagggcggcgccacggcgttcgaggtgtccagccgcgactacgccaaagacatggccagcctgagtgtggagctggacgccaccattgacgacgaggaggaggaggcgccgccgcgccaggtgccggaggcttccacgcgcacccagccctacgcggccgccgccagccgtttcgaggcgctgctgtccgaacgtcgccccgccggcgccaccgtgaacggtgcacaggcacagatgctggaggcccgagagaagaaggcggcgtcgtcttcgtcgtcggccggcggcgtgaacggcgcagccgtgaacggcgccgcggccgcggacgagcaggcggcgaaggaggccgcgcgcgcggcggcggtggcggaggtggagggccaccgcgctgtggacgtggtggcgggccgcgagcactggagtatcatcacggtgcctgagaagccggtggcgggcgcgccgctgcagatgtacttcaaccgcaaccagagcgagaagctcaggaaccggccccacatcgtgatgcagtacggcttcaaccactgggagctgcagcccgaggccggcaacagcctggacctgttccccgcgcccacgcccaagtcggacgtcacggacttctggacgtgccgcatgcaggtgcctgaggagacgtacgagctcaacttcatcctgcacgacaaggccggcgcctacgagaacaacaacggcatggacttcacctacccggtggaggccggcattgactacgacacctgggtggacacagcggcggagcgcatcgtggccaaggagctggcgcgccgggaggcggaggccaaggccgctgaggaggagcgcaaggcagcggaggcggccatggaggagcaggccaaggagtttggggagaggaaggcggcggagcttaagaacaacctgggcagcctgcaggagggcggcacggcggcgctgctgcgcaacggcgtgcctgtctacaaggtgacgccggcgctgcccgtggcgggcggcaaggcggtggtgcagtacaaccgcaggggcggctccttccacgccttccccatccccgagggcgagtccgtgaagctgctgtacggcttcaacggctggcaggagagcggcaaggcggccatgacccgggtgcccgtgcccgccaagcccgcggccggcgccgaggacgaggagtggtgggaggtggaggtggacatccccaacatcgccgtggccatgaacttcgtgttcaactactacgagcactacgacaacaacggcaaggccgactacaaggccaaggtgggtctgccggccggcaccaccctggaggcctgggcggcggggctgggcgagcagtaccgcgtcatggagctggccaagcggcgggcggagcgggcggagaaggaggagaggcagcgccgtgctgatgagaagaagaagctggcccaggacctggtgaaggccgtcgagcggcgcaaggtgcgtcacgtgttgtacacggtgcccgaggtggtggaggcgggcgaggaggtgaccatctactacaacccgcgcgacacgccgctcaacggccgccagcagctctacctcatgggcggctggaaccgctggacgcacaagcgctcgttcggccccgtggccatgcacccgccggaggcgggcggcgagcactggcaggccactgtcatggtgcccaaggacgcctacaagatggactttgtgtttgcggacgtggcgggcggcgacggcacgtacgacaaccgcggcggctttgactaccacctgcctgtggagggcagcccggtgcgcgagagcccgctgtacgtggcgcacattgcggtggagatggcgcccatcgccaaggtgggcggcctgggcgacgtggtgacggcccttggccgcgccgtgaaggaccagggccacatcgtggaggtcatcctgccccgctacgagttcttcctgcactcgcccgtgctgcaaggccagctcaagtacgagacggagtttgactggggcggcacccgcatctacgtgaccaccgcggtggtggagaacctgcgcgtgttcttcatcgagcccaagaacggcttcttcgctacgcccaccgtctacggccgctacgacgacgaggtgcgctttgacttcttctgcaaggcggcgctggagttcctgctcaagaccggccgccagcccgacatcctgcactgccacgactggtccacggcgcacgtggcgcagtcctactggagtgactaccacccgtacggcctgcacaagccgcgggtcatcttcaccatccacaacctcaactacggccagaagaagatcggcgaggccgcacacgcctgccagaagttcaccaccgtgtcgcctacttacgcatacgaggtcggcggcgcgcccatcatcgcgccgcacgggcacaagttcatgggcatccgcaatggcatcgaccccgagctgtggagcccggaggagaacatcttcctgcccgtcaagtacagctcggaggacgtggtggagggcaagaaggcggcgcgcgccgcgctgcgccagcgcctcaacctcacgggctggaacgacaagttcatcgtggcggtggtgtcgcgcctgacgggccagaagggcgtgccgttgatcaagcacgccgcctaccgcgccatcgagcgcggcggccaattcgtgctgctgggctccgcgcccgaccccaaggtacaggcggacttcaacgccctggcccagtccatgggcggccaggacgcggcgttctgcttcaagtacgacgagccgctgagccacctcatctacgccgccgccgacatgatcgtggtgccgtccatgttcgagccctgcggcctgacgcagatgatcgccatgcgctacggcaccgtgcccatcgtgcgccacaccggcggcctgcgcgacaccgtgttcgacgtggactttgacaaggagcgcgccgcctgggagctgtacggcagcagcgactggcagcgcgacggcatcgacgccaccaacggcttcgcgttcacgggcactgacggcggcgcgctggactacgccatgaaccgcgccatcgacgcctggtacaacgaccgcgcctggttccacagcctgcagcgccgcatcatggagcaggactggagctggaaccgcccagccatcgactacatcgagctctacttctcagcgctgaaggcgtaa

SEQ ID NO: 53515 - protein, 1242 aa, Chlamydomonas reinhardtii
MSGAQRSVRKGANRIRGAQGPRTVPLLGLKALRKEDAELLKEAESYMSPEEHAELRRLLEENQRLRQVVTTSASQMSAQQLERFTAEYSNLAAAAEQAGLAVDQQLKQQITAPQAASASRSSAASSTGRFEAAAGGSGYGYGRSSVSVLVAEPPSAPPAAASPPSYGASGSGGGGGSPKGGATAFEVSSRDYAKDMASLSVELDATIDDEEEEAPPRQVPEASTRTQPYAAAASRFEALLSERRPAGATVNGAQAQMLEAREKKAASSSSSAGGVNGAAVNGAAAADEQAAKEAARAAAVAEVEGHRAVDVVAGREHWSIITVPEKPVAGAPLQMYFNRNQSEKLRNRPHIVMQYGFNHWELQPEAGNSLDLFPAPTPKSDVTDFWTCRMQVPEETYELNFILHDKAGAYENNNGMDFTYPVEAGIDYDTWVDTAAERIVAKELARREAEAKAAEEERKAAEAAMEEQAKEFGERKAAELKNNLGSLQEGGTAALLRNGVPVYKVTPALPVAGGKAVVQYNRRGGSFHAFPIPEGESVKLLYGFNGWQESGKAAMTRVPVPAKPAAGAEDEEWWEVEVDIPNIAVAMNFVFNYYEHYDNNGKADYKAKVGLPAGTTLEAWAAGLGEQYRVMELAKRRAERAEKEERQRRADEKKKLAQDLVKAVERRKVRHVLYTVPEVVEAGEEVTIYYNPRDTPLNGRQQLYLMGGWNRWTHKRSFGPVAMHPPEAGGEHWQATVMVPKDAYKMDFVFADVAGGDGTYDNRGGFDYHLPVEGSPVRESPLYVAHIAVEMAPIAKVGGLGDVVTALGRAVKDQGHIVEVILPRYEFFLHSPVLQGQLKYETEFDWGGTRIYVTTAVVENLRVFFIEPKNGFFATPTVYGRYDDEVRFDFFCKAALEFLLKTGRQPDILHCHDWSTAHVAQSYWSDYHPYGLHKPRVIFTIHNLNYGQKKIGEAAHACQKFTTVSPTYAYEVGGAPIIAPHGHKFMGIRNGIDPELWSPEENIFLPVKYSSEDVVEGKKAARAALRQRLNLTGWNDKFIVAVVSRLTGQKGVPLIKHAAYRAIERGGQFVLLGSAPDPKVQADFNALAQSMGGQDAAFCFKYDEPLSHLIYAAADMIVVPSMFEPCGLTQMIAMRYGTVPIVRHTGGLRDTVFDVDFDKERAAWELYGSSDWQRDGIDATNGFAFTGTDGGALDYAMNRAIDAWYNDRAWFHSLQRRIMEQDWSWNRPAIDYIELYFSALKA

SEQ ID NO: 53516 - DNA, 2928 bp, Oryza sativa; identical to SEQ ID NO: 52586
  CDS (1)..(2928)

SEQ ID NO: 53517 - protein, 975 aa, Oryza sativa; identical to SEQ ID NO: 52587

SEQ ID NO: 53518 - DNA, 2939 bp, Colocasia esculenta; identical to SEQ ID NO: 52480
  CDS (220)..(2634)

SEQ ID NO: 53519 - protein, 804 aa, Colocasia esculenta; identical to SEQ ID NO: 52481

SEQ ID NO: 53520 - DNA, 4239 bp, Oryza sativa
  CDS (90)..(3734)
gggagtcagctctgaggagggagagggagagggagggaggaggaggggatcagggggagaggagggaggttttggcgctggcaatggagatggcgcatagcccgctctgctcccggagccggccggtgctcgtcgtccgcccggcgacggccgccactggcttcgcgcagccgatcataaggtgcaggagatttacaaggacaaggcttctccgatgcttggtggcaagtgcagattattctaagagaaacccaaggagagcctccactccgaaacctaaaggtgctgcctctagaacatatgctccgagacctactgttgaatccagcatgaagaagattggacaaagcggcacagatgaaggtgatcttggcacaagcaatgggaagctcagtagtgaagcaacagagcaaactagtaatgtagaagaatcatcggaggtggacttctctggaaatgtatcgagcagtgtattcttggagggaatggatgatgcttttgaagctgagactgaagaagaggtcgagcaaaatcagtctccagaactgtcttctgaatctatggatgatgatgcaattgacagaaaacttgatgaataccgtggtaaaataagtgcactaataagttcgaaacctgaacctacatcagtttctagcactcatgtacaggacagatcaattgttggttttcatgaacaagaaaaatctgtagttagtttccatgagcaagatagatcaattgtctctgttcccgaacaaagccagccaagtagtggtgtcagtggacaaaatccaacagaagagaaaaccattattagtggacaagatgtcaccgaagaagcaccagaagagataactggcaagagtattgagagggaaccattaagtagagaaactgagaaagttctgtttgctgatgatgaccctaggataatcaaggatgaacagtatgaacctgatatagcaccagtacaggatgatgtggatccacaagtgctcaggaggcggcttgaagagcttgctgagaaaaattatttggctgggaataagtgttttgtttttcctgaagtagtacaggcggattcggtcattgatctttacttgaaccatagcatgtcagccttagccagtgagcctgatattcttatcaaaggggcattcaatggttggagatggaaaaaatttacccaaaaaatgcataaaagtgagttaacaggggattggtggtgctgcaaactccatatacccaagcaggcttacagattagattttgtattctttaatggtgacaccatctacgaaaataacaatcataatgatttcgtcctacaaatagaaagcgaaatcaatgaacactcatttgaggacttcttggttgaagaaaaacaaagagagcttgaaaggcttgctgcagaagaagctgaaaggaaaagacaggctgaggaggagcgtcgtaaggaggaagaaagggctgcaatggaggctgacagggcacaagcaaaggctgaagtcgagatgaacaagaataagttgcaaaatttattaaattcagccagcagatatgctgataatctatggtatatagagcctcacacatacaaagcaggggatagggtcaaattgttctacaacagaagctcaagaccgctaatgcataacactgagatttggatgcatggcggttacaataattggagtgatgggctctctattgctgaaaaattaatcaaatcatatgaaaaggatggtgattggtggtatgcagatgttactctacctgaaggggcattggtgttagactgggtttttgctgatgggccacctgggaatgcaaggaattatgataacaatggacgccaggatttccatgctgttgttccaaataacatatctgaggacctgttttgggtggaagaagagcacatgatatttaaaaggcttcagaaagaaaggaaagaaagggaggatgctgatcgaagaaagtctgagataactgcaaaaatgaaagctgagatgaaggaaaagactatgagagactttcttctctcgcagaaacacattgtgtacactgagcctctcgaagtacgtgcaggaaccaccgtggatgttctatacaatccgtctaacacggtgctgaacggaaagccagaggtttggttcagatgttcctttaatcgttggactcatccaagtggtcctttgccgccacagaagatggtgaatgcggagaatggttcacacttaagagcaacagttagggttcctttggatgcatatatgatggactttgttttctctgagtcggaagaaggtggaatatatgacaacaggaatggcatggactatcatagtcctgtgactgattccgttgcaaaagaacctcctatgcatattgtgcacattgcagtagaaatggctcctattgcaaaggttgggggtcttggtgatgttgttacaagtctttcacgagccgttcaagatttaggccacaatgttgaggttattcttcccaagtatgactgtttaaacctaagcaatgtgaaagatttacattaccgtcaaagttttacttggggtaatacagagataaaagtatggtttggaaaagttgaagacgtccctgtttacttcttggaaccacagaatgggatgttttgggttggatgtgtctatggaagaaatgacgagagtagatttggcttcttctgccattctgctctagagtttctccgccaaaatggatcttctcctgatattatacattgtcatgattggtcaagtgctccagttgcttggctattcaaggaacaatatgctcaaaatggactgtcaaatgggcgggttgtatttaccatccacaaccttgaatttggtgcacatcacatcggcaaagcaatggcacgttgtgataaggctacaactgtttcatatacgtattcaagggaagtgtcaggacatggtgctattgcccctcacttttccaaattccacggtattcgtaacggaattgatccagatatttgggatccatacagtgacaattttatcccggtccactatacctctgagaatgttgttgagggcaagagtgctgccaaaaaggcattgcaacagaggcttggactacagcaaactgatacccctgttgttggaattatcagtcgtctgacagtccagaagggaattcaccttatcaaacatgcaatttatcgaactcttgaacgcaatgggcaggtggttttactaggctcagctccagatcatcgcatacaaggtgactttaccaacttagctagtaaactgcatggcgaataccatggtcgtgtaaagctttgtttaacctatgatgagccactatctcatttgatttatgctggtgccgacttcatccttgttccttccatgtttgaaccttgtggtttaacccagcttactgctatgcgttatggatctatcccaatagttcggaaaactggaggcctttatgacaccgtttttgacgtcgacgatgataaggatcgagctcgagaacaaggtcttgagccaaacgggttcagtttcgaaggagctgacagcaacggtgtggattacgcccttgacagagcgatcaccacatggtatgatgctcgcgattggttccactccctctgcaagagggtgatggagcaagattggacatggaaccgacctgctctggactatatggaattgtaccattccgctcgcaagaactgagacctttctagccccaagaacacatggattttgggaagtaggtttccccaggtttctgggacatgccggcatcccagtacataccctttctctgggtaccattctttagacagaaagaaaatgaggagaatccaatcccggcttctacattgatctccagcgtcagtaagagatcaattaatctttccgttatcctgcggttgtgagttcgccatcgtacggcgcccgtgcgtatgtgacatgcaggaagctcatcgtgcttaaagccagttttgcaaacatgtaccatgcaaatatgttccattttacgattctgcagtgtttcggatgtacatatgtaaggcagattagatttgtagggcggatgttctctctggtttattttctgctcactcggagaaggaatgaagtgcgagcagaatggcatgtgacggcctgtgtagctttttaatttctcgtgctgacatctcaaaattgatttcaaattggcagcgtgaaccaaacc

SEQ ID NO: 53521 - protein, 1214 aa, Oryza sativa
MAHSPLCSRSRPVLVVRPATAATGFAQPIIRCRRFTRTRLLRCLVASADYSKRNPRRASTPKPKGAASRTYAPRPTVESSMKKIGQSGTDEGDLGTSNGKLSSEATEQTSNVEESSEVDFSGNVSSSVFLEGMDDAFEAETEEEVEQNQSPELSSESMDDDAIDRKLDEYRGKISALISSKPEPTSVSSTHVQDRSIVGFHEQEKSVVSFHEQDRSIVSVPEQSQPSSGVSGQNPTEEKTIISGQDVTEEAPEEITGKSIEREPLSRETEKVLFADDDPRIIKDEQYEPDIAPVQDDVDPQVLRRRLEELAEKNYLAGNKCFVFPEVVQADSVIDLYLNHSMSALASEPDILIKGAFNGWRWKKFTQKMHKSELTGDWWCCKLHIPKQAYRLDFVFFNGDTIYENNNHNDFVLQIESEINEHSFEDFLVEEKQRELERLAAEEAERKRQAEEERRKEEERAAMEADRAQAKAEVEMNKNKLQNLLNSASRYADNLWYIEPHTYKAGDRVKLFYNRSSRPLMHNTEIWMHGGYNNWSDGLSIAEKLIKSYEKDGDWWYADVTLPEGALVLDWVFADGPPGNARNYDNNGRQDFHAVVPNNISEDLFWVEEEHMIFKRLQKERKEREDADRRKSEITAKMKAEMKEKTMRDFLLSQKHIVYTEPLEVRAGTTVDVLYNPSNTVLNGKPEVWFRCSFNRWTHPSGPLPPQKMVNAENGSHLRATVRVPLDAYMMDFVFSESEEGGIYDNRNGMDYHSPVTDSVAKEPPMHIVHIAVEMAPIAKVGGLGDVVTSLSRAVQDLGHNVEVILPKYDCLNLSNVKDLHYRQSFTWGNTEIKVWFGKVEDVPVYFLEPQNGMFWVGCVYGRNDESRFGFFCHSALEFLRQNGSSPDIIHCHDWSSAPVAWLFKEQYAQNGLSNGRVVFTIHNLEFGAHHIGKAMARCDKATTVSYTYSREVSGHGAIAPHFSKFHGIRNGIDPDIWDPYSDNFIPVHYTSENVVEGKSAAKKALQQRLGLQQTDTPVVGIISRLTVQKGIHLIKHAIYRTLERNGQVVLLGSAPDHRIQGDFTNLASKLHGEYHGRVKLCLTYDEPLSHLIYAGADFILVPSMFEPCGLTQLTAMRYGSIPIVRKTGGLYDTVFDVDDDKDRAREQGLEPNGFSFEGADSNGVDYALDRAITTWYDARDWFHSLCKRVMEQDWTWNRPALDYMELYHSARKN

SEQ ID NO: 53522 - DNA, 3386 bp, Triticum aestivum; identical to SEQ ID NO: 52498
  CDS (251)..(2995)

SEQ ID NO: 53523 - protein, 914 aa, Triticum aestivum; identical to SEQ ID NO: 52499

SEQ ID NO: 53524 - DNA, 1932 bp, Hordeum vulgare
  CDS (1)..(1932)
atggcggcgacgggcgtcggcgccgggtgcctggcccccagcgtgcgcctgcgcgccgatccggcggcgcgggcgaccgcctgcgtcgtccgcgcgcggctccggcgcgtggcgcggggccgctacgtcgccgagctcagcagggagggcccggcggcgcgccccgcgcagcagctggccccgcccgtcgtgccaggcttcctcgcgccgccgccgcccgcgcccgcacagtcgccggccccgacgcagccgcccctgccggacgccggcgtgggggaacttgcccccgacctcctgctcgaagggattgctgaggattccatcgacaccatagttgtggctgcaagtgagcaggattctgagatcatggatgccaacgaccaacctctagctaaagttacacgtagcatcgtgtttgtgactggtgaagctgctccttatgcaaagtcaggggggctgggagatgtttgtggttcgttgccaattgctcttgctgctcgtggtcaccgtgtgatggttgtaatgccgagatacttaaatgggacctctgataaaaactatgcaaaggcattatacaccgggaagcacattaagattccatgcttcgggggatcacatgaagtcaccttttttcatgagtatagagacaacgtcgattgggtgtttgttgatcatccatcatatcatagaccaggaagtttgtatggagataattttggtgcttttggtgataatcagttcagatacacactactttgctatgctgcttgtgaggccccactaatccttgaattgggaggatatatttatggacagagttgcatgtttgttgtgaacgattggcatgccagccttgtgccagtccttcttgctgcaaagtatagaccatatggagtttacagagattctcgcagcactcttgttatacataatttagcacatcagggtgtggagcctgcaagtacatatcctgatctgggattgccacctgaatggtatggagctttagaatgggtatttccagaatgggcaagaaggcatgcccttgacaagggtgaggcggttaactttttgaaaggtgcagttgtgacagcagatcgaattgtgaccgtcagtcagggttattcatgggaggtcacaactgctgaaggtggacagggcctcaatgagctcttaagctcccgaaaaagtgtcttgaatggaattgtaaatggaattgacattaatgattggaaccccaccacggacaagtgtctccctcatcattattctgtcgacgacctctctggaaaggccaaatgtaaagctgaattgcagagggagctgggtttacctgtaagggaggatgttccactgattggctttattggaagactggattaccagaaaggcattgatctcattaaaatggccattccagatctcatgagggaagacgtacagtttgtcatgcttggatcgggggatccagtttttgaaggctggatgagatctaccgagtcgagctacaaggataaattccgtggatgggttggatttagtgttccagtttcccacagaataactgcaggttgcgatatattgttaatgccatccagatttgaaccttgcggtcttaatcagctatatgctatgcaatatggtacagttcctgttgttcatggaactgggggccttcgagacacggtggagaccttcaacccttttggtgcaaaaggagaggagggtacagggtgggcgttctcaccactaaccgtggaaaaaatgttgtgggcattgcgaaccgcgatttcgacgtttagggagcacaagccctcctgggaggggctcatgaagcgaggcatgacgaaagaccatacgtgggaccatgccgccgagcagtacgagcagatcttcgagtgggccttcgtggaccaaccctacgtcatgtag

SEQ ID NO: 53525 - protein, 643 aa, Hordeum vulgare
MAATGVGAGCLAPSVRLRADPAARATACVVRARLRRVARGRYVAELSREGPAARPAQQLAPPVVPGFLAPPPPAPAQSPAPTQPPLPDAGVGELAPDLLLEGIAEDSIDTIVVAASEQDSEIMDANDQPLAKVTRSIVFVTGEAAPYAKSGGLGDVCGSLPIALAARGHRVMVVMPRYLNGTSDKNYAKALYTGKHIKIPCFGGSHEVTFFHEYRDNVDWVFVDHPSYHRPGSLYGDNFGAFGDNQFRYTLLCYAACEAPLILELGGYIYGQSCMFVVNDWHASLVPVLLAAKYRPYGVYRDSRSTLVIHNLAHQGVEPASTYPDLGLPPEWYGALEWVFPEWARRHALDKGEAVNFLKGAVVTADRIVTVSQGYSWEVTTAEGGQGLNELLSSRKSVLNGIVNGIDINDWNPTTDKCLPHHYSVDDLSGKAKCKAELQRELGLPVREDVPLIGFIGRLDYQKGIDLIKMAIPDLMREDVQFVMLGSGDPVFEGWMRSTESSYKDKFRGWVGFSVPVSHRITAGCDILLMPSRFEPCGLNQLYAMQYGTVPVVHGTGGLRDTVETFNPFGAKGEEGTGWAFSPLTVEKMLWALRTAISTFREHKPSWEGLMKRGMTKDHTWDHAAEQYEQIFEWAFVDQPYVM

SEQ ID NO: 53526 - DNA, 3444 bp, Vigna unguiculata
  CDS (1)..(3444)
atggagatgtcgttgcagctaaactacaaaacgccgttttgtttcaagctcactccattttctgttttaacaccttcttcatggcacaaagcaagtattcgagtttcttgcgttaatgctagtgcagatttttctaggaagagacaacagaagaagagttcaattgcgaagccaaagggttctaatccaaagggttttgttccaaaatcatctattggatcaagcagtaagaaaaatcctagagtcagtaagaagggagattctttagctccagttgttagtgaggttttggaggatgataataaacaaacacttgatgttattattgatgatgatgaagatgaattttcggtggaggaaaattgtggtgtggatgataaaattaataaaattgctcgagagttcggggaatcgtccttgatagatgagacattcgatgttgaaaacattcctataattgatgatgttcaattatatgaggagggaaattcttacgttggagatgatgggaatgttaaagattcagagggaaggagattatactatgctgaaattgatggaaatcttagaggtacatatactgatactaatggggaaatagctgggaatatcgttgaggaaacaagtgctgctatcgatgatgttaaaattaacgaggaagcttctcggatgttgaagttgaagttggaagaaaatttgcgaaaacaggaaatagagaggattgcggaggaaaattttttacgaggggcaaagttgtttgtatatcctcctgtggttaaacctgatgaagatatagaggtgtttcttaacaagaacctttcgacactaagtgatgaacctgatattttgattttgggggcgtttaatgattgggagtggaaatcttttaccattagattgaataaaacacatcttaaagatgattggtggagttgccaattgtatgtgccaagagaagcctataaaatagactttgtgttctttaatggacaaagtgtttatgacaataatgaccaaaaagacttttgtataccagttgttggtggaatggatgcattggtgttcgaagattttttgctcgaggagaagcgtaaagaattagaaaaacttgctaaggagcaggctgaaagggaaagacaggctgaagagcaaaggcgaatagatgcagacaaagctgtaaagggagaggacaggttgcaggcaaggatggaggttgaaaaaatgcaagatacgttgctgcagttgatgaaaaatgctgtaacctctattgataatgtttggtatattgagcctagtgagtttaacagcaatgactcagtcagattatattataatggaaactcgggtcctcttcaacatgctaaggaagtatgggttcatggcggtcacaacaattggaaggatggattaacaattgttgaaaggcttgtcaaatcaggtttgaaaggtggtgcttggtggtatgctgatgttgttgtacctgaccaagctcttgtcctggattgggtctttgctgatggtccacctcaaaatgcagttgtgtatgataacaaccgtatgcaagatttccatgctattgtccctatggctacacccgacgcacagtattgggttgaggaagagcagctaatatacagaaaacttcaggaggagaggaagttgaaagaggaagttatacgggcgaaggctgaaaaaacagcacaaatgaaagccgaaacaaaggaaaaaactttgaaaaagtttttactatctcaaaagcatatcgtctacactgagccgcttgatattcaagcagggagtacagtgacggtgttttataacccctcaaacacaaatctgaatggaagacctgaggtttggtttagaggctcatttaatcgttggtctcatcgtaatggtccattgccacctcagagaatgttgcctgctgagagtggcacacatgtcaaagcctctgttaaagttccattggatgcatacatgatggactttgtattctctgagagtgaaaatggtggagtttttgataacaaatttggaatggattaccacatacctgtttttggaggtattgtgaaggaacctcctatgcatattgttcatattgctgttgagatggccccaattgcaaaggttggaggccttggtgatgttgttactagtctttcccgagctgttcaagatttaaatcataatgtggatatcattcttccaaaatatgactgcttgaaccttagcaatgtaaaggacttgcaatttcacaaaagctatttctggagtgggactgaaataaaagtatggcacggaaaggtcgagggcctctcggtctactttttggagcctcagaatggattattttgggtgggctgtgtatatggtcgtgcaaatgatgcagagagatttggttttttttgccatgccgctcttgaatttctactccaaaatggaagtcatcctgatatcatccactgccatgactggtcgagtgctccagttgcatggctatttaaagaacagtatacacattatggtcttagtaaggctcgagttgtcttcacaattcataaccttgaatttggtgccaatctcattggaaaagctatggcatacgctgacaaggctacaactgtctcccccacttattcaagggagattgctgggaatcatgcagttgctactcatcttcacaagtttcatggtataataaatggaatcgacccagatatatgggacccatttaatgataactccattcctgtaccatacacagcagaaaatgttgttgaaggaaaaagagcgtccaaggaagccttacaacaaaagcttggtttgaaaaaagctgatcttcctttggtgggagttattactcgattgactcatcaaaaagggatccatctcatcaaacatgccatatggcgtaccctagaacgcggtggacaggtcgtattacttggttcggctcctgatcaccgtatacaaaatgattttgtgaatttggccaatcaattgcattccagtcataatgatcgggcaagactttgccttgcatatgatgaacctctttcccacatgatatatgctggtgctgatttcattcttgttccttcaatctttgagccatgtggactcactcaactcacagcaatgagatacggttcaataccaattgttcgaaaaactgggggactttatgatacggtgtttgacgttgataatgataaggatagagcacaagtgcaaggtcttgagccaaatggattcagttttgatggggctgatgcgggaggtgttgattatgctcttaatagggcaatatctgcttggtatgatggccgtgagtggtttaacacattatgcaagacagtaatggagcaagattggtcttggaaccgccctgctctcgactatttggagctttaccatgcagcatgcaagttggaatga

SEQ ID NO: 53527 - protein, 1147 aa, Vigna unguiculata
MEMSLQLNYKTPFCFKLTPFSVLTPSSWHKASIRVSCVNASADFSRKRQQKKSSIAKPKGSNPKGFVPKSSIGSSSKKNPRVSKKGDSLAPVVSEVLEDDNKQTLDVIIDDDEDEFSVEENCGVDDKINKIAREFGESSLIDETFDVENIPIIDDVQLYEEGNSYVGDDGNVKDSEGRRLYYAEIDGNLRGTYTDTNGEIAGNIVEETSAAIDDVKINEEASRMLKLKLEENLRKQEIERIAEENFLRGAKLFVYPPVVKPDEDIEVFLNKNLSTLSDEPDILILGAFNDWEWKSFTIRLNKTHLKDDWWSCQLYVPREAYKIDFVFFNGQSVYDNNDQKDFCIPVVGGMDALVFEDFLLEEKRKELEKLAKEQAERERQAEEQRRIDADKAVKGEDRLQARMEVEKMQDTLLQLMKNAVTSIDNVWYIEPSEFNSNDSVRLYYNGNSGPLQHAKEVWVHGGHNNWKDGLTIVERLVKSGLKGGAWWYADVVVPDQALVLDWVFADGPPQNAVVYDNNRMQDFHAIVPMATPDAQYWVEEEQLIYRKLQEERKLKEEVIRAKAEKTAQMKAETKEKTLKKFLLSQKHIVYTEPLDIQAGSTVTVFYNPSNTNLNGRPEVWFRGSFNRWSHRNGPLPPQRMLPAESGTHVKASVKVPLDAYMMDFVFSESENGGVFDNKFGMDYHIPVFGGIVKEPPMHIVHIAVEMAPIAKVGGLGDVVTSLSRAVQDLNHNVDIILPKYDCLNLSNVKDLQFHKSYFWSGTEIKVWHGKVEGLSVYFLEPQNGLFWVGCVYGRANDAERFGFFCHAALEFLLQNGSHPDIIHCHDWSSAPVAWLFKEQYTHYGLSKARVVFTIHNLEFGANLIGKAMAYADKATTVSPTYSREIAGNHAVATHLHKFHGIINGIDPDIWDPFNDNSIPVPYTAENVVEGKRASKEALQQKLGLKKADLPLVGVITRLTHQKGIHLIKHAIWRTLERGGQVVLLGSAPDHRIQNDFVNLANQLHSSHNDRARLCLAYDEPLSHMIYAGADFILVPSIFEPCGLTQLTAMRYGSIPIVRKTGGLYDTVFDVDNDKDRAQVQGLEPNGFSFDGADAGGVDYALNRAISAWYDGREWFNTLCKTVMEQDWSWNRPALDYLELYHAACKLE

SEQ ID NO: 53528 - DNA, 3519 bp, Vigna unguiculata; identical to SEQ ID NO: 52508
  CDS (386)..(3010)

SEQ ID NO: 53529 - protein, 874 aa, Vigna unguiculata; identical to SEQ ID NO: 52509

SEQ ID NO: 53530 - DNA, 1479 bp, Anabaena variabilis
  CDS (1)..(1479): transl_table=11
atgtacattgtacagattgcctcggaatgcgctcctgtaattaaggcagggggtttgggggatgttgtctatggattgagtcgggaattagagattcggggcaattgcgtcgaactaattctgcccaagtatgattgtatgcgctacgaccatatttggggattacatgaggcttatttaaacctgtgggttccctggtttggtgcagcaattcactgtactgtttactgcggttgggtacatggacgggtgtgtttcttcattgaaccccattccgaggacaatttctttaatcggggttgctattacggttgtgatgatgatgatatgcgctttgccttctttagcaaagccgctttagaatttctccatcaaagcaataagcgtcctgatattatccattgtcatgattggcaaacaggcttagttcctgtgatgctctatgagatttacaagtatcatggtatggacactcaaagggtttgctacaccatccacaactttaaacatcaaggaattggtggtgtcaaaactctctgggcgacagggttaaacagagaagcttattacttccaaaatgataagttacaggatgactttaacccctttgccttaaattacatgaaaggcggtatagtctactccaatgctgttaccacagtttcaccaaaccacgctttagaagcacaatatactgatgttggttgtggcttaggtcatactttgtatcaacacaaagataaatttagtgggattctcaacggtattgattacgatttctggaacccagaaattgatcgttacatcccctacaactacaaccaagaagactttgaacaaaaactatataacaaaaaagctttacgcgagcgcttgttgctgcaagctgctgataaaccaatcattgcttacattgggcgtttagataatcaaaaaggtgtacatcttgtccaccacgccatttatcattccttgaataaaggagcgcaatttgtattattgggttcagcaacagaagcaggaatcaatgctcatttccggcatgaaaaacagtttttaaataacaatcctgatgtccatttagaattgggctttaacgaagaattgtcccatttgatttacgccggggctgatatgattgttgttcccagcaattatgaaccctgcggcttaacacaaatgattggtttgaagtatggtactgttcccattgtgcgcggtgttggtgggttagtaaacacggtatttgaccgagattatgaccaaaatttaccaccagaaaaacgcaatggttacgtattttatcaatctgataaccaagctttagaatcagcaatgaatcgggcaattgatttgtggtatcagtctcctgaaaaattccaacaattggcaattcagggcatgaaatatgactactcatggaataatccaggcaaggaatatttagatatttacgaatggattaagtacaaatggtag

SEQ ID NO: 53531 - protein, 492 aa, Anabaena variabilis
MYIVQIASECAPVIKAGGLGDVVYGLSRELEIRGNCVELILPKYDCMRYDHIWGLHEAYLNLWVPWFGAAIHCTVYCGWVHGRVCFFIEPHSEDNFFNRGCYYGCDDDDMRFAFFSKAALEFLHQSNKRPDIIHCHDWQTGLVPVMLYEIYKYHGMDTQRVCYTIHNFKHQGIGGVKTLWATGLNREAYYFQNDKLQDDFNPFALNYMKGGIVYSNAVTTVSPNHALEAQYTDVGCGLGHTLYQHKDKFSGILNGIDYDFWNPEIDRYIPYNYNQEDFEQKLYNKKALRERLLLQAADKPIIAYIGRLDNQKGVHLVHHAIYHSLNKGAQFVLLGSATEAGINAHFRHEKQFLNNNPDVHLELGFNEELSHLIYAGADMIVVPSNYEPCGLTQMIGLKYGTVPIVRGVGGLVNTVFDRDYDQNLPPEKRNGYVFYQSDNQALESAMNRAIDLWYQSPEKFQQLAIQGMKYDYSWNNPGKEYLDIYEWIKYKW

SEQ ID NO: 53532 - DNA, 1455 bp, Geobacter metallireducens; identical to SEQ ID NO: 52520
  CDS (1)..(1455): transl_table=11

SEQ ID NO: 53533 - protein, 484 aa, Geobacter metallireducens; identical to SEQ ID NO: 52521

SEQ ID NO: 53534 - DNA, 1458 bp, Bacillus stearothermophilus; identical to SEQ ID NO: 52524
  CDS (1)..(1458): transl_table=11

SEQ ID NO: 53535 - protein, 485 aa, Bacillus stearothermophilus; identical to SEQ ID NO: 52525

SEQ ID NO: 53536 - DNA, 1428 bp, Chlamydophila caviae; identical to SEQ ID NO: 52530
  CDS (1)..(1428): transl_table=11

SEQ ID NO: 53537 - protein, 475 aa, Chlamydophila caviae; identical to SEQ ID NO: 52531

SEQ ID NO: 53538 - DNA, 1425 bp, Chlamydia muridarum
  CDS (1)..(1425): transl_table=11
atgaaaattactcacacagctatcgaatttgctccggtaatcaaagccggtggcttaggagacgcactatacggactagcaaaagctttagccgtcaatcatacaacagaagtcgttatccctttatatcccaaattattcacttcgctccacgagcaggatcttttcgcaactcaaaaaatcccttatttttttgccggagaacaagaagcaacagccttctcttatttttatgaaggaatcaaagtaactctactcaaattagactcgcagccagaactatttgaagaagcagaaacgatctatacaaacgatgatgcttttcgtttttgtgctttttctgctgctgctgctgcttacattcaaaaagaaggagcagacattgttcacctgcatgattggcatgttggattagtcgcagggttactcaaacaacagccttgcccccagctacaaaaaatcgtgcttaccttacataattttggctatcggggatatacaacacgagaagtattagaagcgtcttctttgaacgaattttacttgagccactatcaactatttcgcgatccacaaacctgcgtcttattaaaaggagctttatactgttcggactttgtgactacagtttctcctacatatgccaaagaaatccttcaagactattcggactatgaaattcatgacgccattaccgctagacaacatcatcttaaagggatcctgaatggaatagactatacgattttggaccctgaaacagacccccatttagctaagaactatagtaaagtccttttcgaggatcctaaagctttcttcgaagcaaaagcggaaaataaaaaagctctgtacgaaacgttaggactgtctttagacaaatccccctgcatgtgcatcatttctagaattgctgagcaaaaaggcccagaatttatgaagcaagcaattcttcatgcactagaaaacgcctataccctgatcattataggcacctgctatggaggccagatacataaagaattttctaatcttcaagaatctttagcagactcccctaacgtgcggattcttttaacctatagcgatgtactagcacggcaaatttttgctgcagcagatatgatctgcattccctctatgtttgaaccatgcggactcacccaaatgattggcatgcgctatgggaccgtccccgtagtaagagctacaggaggtctggctgacaccgtaacagatggagtaaatggattctctttctctaaccctcatgatttccacgagtttcgaaatatgctttcaaaagcgattgccacctaccgagacgaccaagataagtggcaacagattgttcgctcttgcttagagttttcttcggacttagaaactgcagccaataaatatttagaaatttatcaacaataa

SEQ ID NO: 53539 - protein, 474 aa, Chlamydia muridarum
MKITHTAIEFAPVIKAGGLGDALYGLAKALAVNHTTEVVIPLYPKLFTSLHEQDLFATQKIPYFFAGEQEATAFSYFYEGIKVTLLKLDSQPELFEEAETIYTNDDAFRFCAFSAAAAAYIQKEGADIVHLHDWHVGLVAGLLKQQPCPQLQKIVLTLHNFGYRGYTTREVLEASSLNEFYLSHYQLFRDPQTCVLLKGALYCSDFVTTVSPTYAKEILQDYSDYEIHDAITARQHHLKGILNGIDYTILDPETDPHLAKNYSKVLFEDPKAFFEAKAENKKALYETLGLSLDKSPCMCIISRIAEQKGPEFMKQAILHALENAYTLIIIGTCYGGQIHKEFSNLQESLADSPNVRILLTYSDVLARQIFAAADMICIPSMFEPCGLTQMIGMRYGTVPVVRATGGLADTVTDGVNGFSFSNPHDFHEFRNMLSKAIATYRDDQDKWQQIVRSCLEFSSDLETAANKYLEIYQQ

SEQ ID NO: 53540 - DNA, 1464 bp, Moorella thermoacetica; identical to SEQ ID NO: 52536
  CDS (1)..(1464): transl_table=11

SEQ ID NO: 53541 - protein, 487 aa, Moorella thermoacetica; identical to SEQ ID NO: 52537

SEQ ID NO: 53542 - DNA, 1500 bp, Prochlorococcus marinus; identical to SEQ ID NO: 52548
  CDS (1)..(1500): transl_table=11

SEQ ID NO: 53543 - protein, 499 aa, Prochlorococcus marinus; identical to SEQ ID NO: 52549

SEQ ID NO: 53544 - DNA, 1560 bp, Pseudomonas putida
  CDS (1)..(1560): transl_table=11
atgatcagtgccgctgtcgagcctcacgtagacgctttcaaaccggataaccgcgagccgctcaccccggatttcgccacgacaggcaaggcacccggcgcccagcgccagcacaacccgaacaagcgcaagattctgttcgtgacctcggaaatcgccgacctggtgaaaaccggtggcctgggtgacgtgtccgctgccctgccccgtgccctggcgcacctgcacgatgtgcgggtcctcatccccggctaccgccaggtgatggaaagcgacaaccctatacatatcgtgggtgaactgggcggccatgcggccctgccgccctgcaagatcgggcgcatggacatggccgacggcctggtcatctatgtgttgatctgcccagaactgtaccagcgcgacggcacaccctatggtgccaacaatggccgcgactggcccgacaaccacatccgcttcgcccgcctgggcctggctgccgccgaaatcgcggccggcgaaggcaagatccactggacgccggaagtggtgcacgcgcatgactggccggccggcctggccccggcctacatgcactggcgtggcctgaatacgcccacgctgttcaccatccacaacctggcgtaccaaggtgtgtacagccgcggctgcagcccggagctggcaatacccgaacatgccatgcagcaagaaggcatggaattctacggcaagctgtcgttcctcaaggccggcctggcctactccagccacatcaccacagtcagcgccacctatgcccgggaaatcaccacccctgaatttggctgcggcctggacggtttcctcgccagcaaggcccagcaaggcctgctcggtggcatccccaacggcatcgacgaaagctgggactcggctaccgacaagcacctgcaacacaacttcagcatcaatgactgggagggcaaagcgcgtaacacccaggaggtgcgcgagctgttcggcctggacgattccgaaggcccgctgttcgccgtggtgtcacggctggtctatcaaaagggcctggacctgaccctgggcgtggccgactacatcgtcgagcaaggcgggcagatcgcgatcatcggccgcggcgagccggaagaggaacaggccatgcgcgagctggcgctgcgccacccaggccgcatcggtgtgcgtatcggcttcaatgaaaccgatgcccggcgcatgttcgccggcagcgatttcctgctgatgccgtcgcgctacgagccgtgcggcctcagccagatgtacgcgcaacgcttcggctcgctgccggtagcacgtaataccggtggcctggccgacaccatcgagtgcggcgtgacgggcttcctgttcaacgagtccaccgtcgagagctaccgcgaggcactcagccgcgccttctatgtttacggcaagaaggacctgctgaacgccatgcgctgcctgtcgatgacccagccgttcaactggtgccaggcggttgaaccctatgcccgcctgtacgaggacctggtcaagcagacacaactgagccattactga

SEQ ID NO: 53545 - protein, 519 aa, Pseudomonas putida
MISAAVEPHVDAFKPDNREPLTPDFATTGKAPGAQRQHNPNKRKILFVTSEIADLVKTGGLGDVSAALPRALAHLHDVRVLIPGYRQVMESDNPIHIVGELGGHAALPPCKIGRMDMADGLVIYVLICPELYQRDGTPYGANNGRDWPDNHIRFARLGLAAAEIAAGEGKIHWTPEVVHAHDWPAGLAPAYMHWRGLNTPTLFTIHNLAYQGVYSRGCSPELAIPEHAMQQEGMEFYGKLSFLKAGLAYSSHITTVSATYAREITTPEFGCGLDGFLASKAQQGLLGGIPNGIDESWDSATDKHLQHNFSINDWEGKARNTQEVRELFGLDDSEGPLFAVVSRLVYQKGLDLTLGVADYIVEQGGQIAIIGRGEPEEEQAMRELALRHPGRIGVRIGFNETDARRMFAGSDFLLMPSRYEPCGLSQMYAQRFGSLPVARNTGGLADTIECGVTGFLFNESTVESYREALSRAFYVYGKKDLLNAMRCLSMTQPFNWCQAVEPYARLYEDLVKQTQLSHY

SEQ ID NO: 53546 - DNA, 1458 bp, Rhodospirillum rubrum; identical to SEQ ID NO: 52558
  CDS (1)..(1458): transl_table=11

SEQ ID NO: 53547 - protein, 485 aa, Rhodospirillum rubrum; identical to SEQ ID NO: 52559

SEQ ID NO: 53548 - DNA, 1431 bp, Streptococcus mutans
  CDS (1)..(1431): transl_table=11
atgaaaatcttatttgtagcagcggaaggggctccttttgcaaagacaggcggtctgggcgatgttattggtgccttgcccaaatcccttgtgaaaaataataatgaagtcagtgttatccttccttattatgatgttgttgatgctaaatttggtgaccaaatagaagatctgttctactttttcaccaatgtcggctggcgtcgtgaatatgttggtatcaaacatatcttcagagatggcgttgacttttactttattgacaataagcattatttttatcgtggtcaaatctatggtgaatttgatgatggtgaacgctttgcttacttccaattagctgctttagaagctatggaaaaaattcaatttattccggatattcttcatgtccatgattatcacaccgccatgattccttacttgctaaaggaaaaatatcattggattaatgcttatcatgggattaagacagtatttaccattcataatatcgagtttcaaggtcaattcaatccttctatgttaggagagctttttggagttggtgatgagcgttatcgtgatgggacgctgcggtggaatgattgcctcaactggatgaaggcagcggtgctctatgcagatcgtgtcaccactgtttcaccatcttatgctaaagaaattatgactcctgaatttggtaaaggactggatcaaattatgcggatggaatcaggtaagttaagtggtgttgtcaatggtattgacacggacttatttgatccggaaacagatccacatctggcagtgcatttttcaaaagatgatctgtcaggtaaagctaaaaataaagcagccttgcaggagcgtgttggtttaccagtacgtgaggatgttcctttggttggtattgtctctcgtctgacagatcagaagggttttcagttggttgttgatcaacttaatacaatgatgcaactggatttacagattgttttactaggaacaggctatgctgattttgaaaatgcttttgcttggttcggtcatgcttatccagacaaaatgtcagccaatatcacttttgatttagaattagctcagcaaatttatgctgccagcgatattttcttaatgccgagtgcatttgagccttgtggcttgtcacaaatgatggctatgcgttatggtaccttaccgcttgtacatgaagtaggcggacttcgggatactgttattccttataatgagtttgaaaagacaggaacaggttttggtttccaagacttctcaggttattggctgaccaaaacgcttgaagctgcgctagatgtctattataatagaaaagaagactggaaaattctccaaaaaaatgcgatgacaactgacttctcttgggatacagccagtcaatcttatgaacatctatataaagaactagcttag

SEQ ID NO: 53549 - protein, 476 aa, Streptococcus mutans
MKILFVAAEGAPFAKTGGLGDVIGALPKSLVKNNNEVSVILPYYDVVDAKFGDQIEDLFYFFTNVGWRREYVGIKHIFRDGVDFYFIDNKHYFYRGQIYGEFDDGERFAYFQLAALEAMEKIQFIPDILHVHDYHTAMIPYLLKEKYHWINAYHGIKTVFTIHNIEFQGQFNPSMLGELFGVGDERYRDGTLRWNDCLNWMKAAVLYADRVTTVSPSYAKEIMTPEFGKGLDQIMRMESGKLSGVVNGIDTDLFDPETDPHLAVHFSKDDLSGKAKNKAALQERVGLPVREDVPLVGIVSRLTDQKGFQLVVDQLNTMMQLDLQIVLLGTGYADFENAFAWFGHAYPDKMSANITFDLELAQQIYAASDIFLMPSAFEPCGLSQMMAMRYGTLPLVHEVGGLRDTVIPYNEFEKTGTGFGFQDFSGYWLTKTLEAALDVYYNRKEDWKILQKNAMTTDFSWDTASQSYEHLYKELA

SEQ ID NO: 53550 - DNA, 1434 bp, Streptococcus pneumoniae; identical to SEQ ID NO: 52564
  CDS (1)..(1434): transl_table=11

SEQ ID NO: 53551 - protein, 477 aa, Streptococcus pneumoniae; identical to SEQ ID NO: 52565

SEQ ID NO: 53552 - DNA, 1461 bp, Thermotoga maritima; identical to SEQ ID NO: 52566
  CDS (1)..(1461): transl_table=11

SEQ ID NO: 53553 - protein, 486 aa, Thermotoga maritima; identical to SEQ ID NO: 52567

SEQ ID NO: 53554 - DNA, 1482 bp, Thiobacillus denitrificans
  CDS (1)..(1482): transl_table=11
atgaaggtgctgttcgtcgcgagcgaggcctttcccctggtcaagacgggcggactcggcgacgtcctgcacggacttccccaggccttgcacggcctcggcgtcggcgtccgactcctgctgcccggctatcgtacgctcctgcgccagctcgaccaggtgcggatagtcgcctggttcgacgtgcgcggggcggaggggccggtcgccgcgcgcgtgctcgagacgcgtcatccggggttcgatttcccgctgtggatcgtcgattgcccgccgctgttcgatcgcccgggcaatccttacgtcgacgtcacgggctatgactggcccgacaatgccgagcgtttcgcggtgttcgcgcgcgtcgccgcgctgctcgcacaggatgcccacgaggccggctggctgccggacgtcgtgcacacccacgactggcagaccggactcgtgccggctttcctcgccgacctgccggcacgtccgcggacggtgttcacgatccacaacctcgcctacggcggccacttcccgcacggcgacttcctgcgcctgcaactgccggcgcattggtggtcgcacgagggcgtcgagtttcacggcggcttttcgatgctgaaggcgggcatcgtctacgccgacgcggtcaccaccgtaagcccgacctatgccgaggaaatctgcacgccggccttcggctacggactcgacggcctgctgcgctcgcgccgccacaagctgcacggaattctcaacggcatcgatagcgcgacctgggacccggctgacgacccgcatctacgcgcgcgctacaccgcgggacgcattctgccgggcaagcggcgcgacaagcaggcgctgctcgaacgttttctgccggcggccgacgaagccgcgctgcaggcgccgctcgtcggcctggtcggccgcctcgtcgagcagaagggcatcgactgggtgctcgcggcgatgccgctgctgctcgccgaaaccgatgcgcgtttcgtgttgctcggcagcggccaggccgcctacgagcagaggctcacccggctggcccgccagcacccgacgcgcgtcttcgtcgagatcggctacgacgaggcgctggcgcaccagatcgaggccggcgccgacatgttcctgatgccgtcgcgcttcgaaccctgcggcctgaaccagatgtacagcctgcgttacggcaccttgccgatcgtgttcaagacgggcggcctcgccgacaccatcgtcgacaccaacgaagcgagcctggcggacggcagcgcgaatggcttcgtcttcgacacgccggacgtggcgcatttcgtcgacgcggtccgccgcgcgcttgccctctaccgtcagccctcgctgtggcgccgcgtgcagcagaccggaatgcgcctgtccttcgactggcgggaaagcgccggccactacctcgcgctctacgcggccgattccgccggagaacccgatgtctga

SEQ ID NO: 53555 - protein, 493 aa, Thiobacillus denitrificans
MKVLFVASEAFPLVKTGGLGDVLHGLPQALHGLGVGVRLLLPGYRTLLRQLDQVRIVAWFDVRGAEGPVAARVLETRHPGFDFPLWIVDCPPLFDRPGNPYVDVTGYDWPDNAERFAVFARVAALLAQDAHEAGWLPDVVHTHDWQTGLVPAFLADLPARPRTVFTIHNLAYGGHFPHGDFLRLQLPAHWWSHEGVEFHGGFSMLKAGIVYADAVTTVSPTYAEEICTPAFGYGLDGLLRSRRHKLHGILNGIDSATWDPADDPHLRARYTAGRILPGKRRDKQALLERFLPAADEAALQAPLVGLVGRLVEQKGIDWVLAAMPLLLAETDARFVLLGSGQAAYEQRLTRLARQHPTRVFVEIGYDEALAHQIEAGADMFLMPSRFEPCGLNQMYSLRYGTLPIVFKTGGLADTIVDTNEASLADGSANGFVFDTPDVAHFVDAVRRALALYRQPSLWRRVQQTGMRLSFDWRESAGHYLALYAADSAGEPDV

SEQ ID NO: 53556 - DNA, 4127 bp, Solanum tuberosum
  CDS (143)..(3835)
gaattcgcggccgcagatagtgtgttgatgaaggagaagagagatatttcacatgggatgttctatttgattctgtggtgaacaagagttttacaaagaacattcctttttcttttttccttggttcttgtgtgggtcagccatggatgttccatttccactgcatagatcattgagttgcacaagtgtctccaatgcaataacccacctcaagatcaaacctattcttgggtttgtctctcatggaaccacaagtctatcagtacaatcttcttcatggaggaaggatggaatggttactggggtttcattttccatttgtgcaaatttctcgggaagaagacggagaaaagtttcaactcctaggagtcaaggctcttcacctaaggggtttgtgccaaggaagccctcagggatgagcacgcaaagaaaggttcagaagagcaatggtgataaagaaagtaaaagtacttcaacatctaaagaatctgaaatttccaaccagaagacggttgaagcaagagttgaaactagtgacgatgacactaaaggagtggtgagggaccacaagtttctggaggatgaggatgaaatcaatggttctactaaatcaataagtatgtcacctgttcgtgtatcatctcaatttgttgaaagtgaagaaactggtggtgatgacaaggatgctgtaaagttaaacaaatcaaagagatcggaagagagtggttttataattgattctgtaataagagaacaaagtggatctcagggggaaactaatgccagtagcaagggaagccatgctgtgggtacaaaactttatgagatattgcaggtggatgttgagccacaacaattgaaagaaaataatgctgggaatgttgaatacaaaggacctgtagcaagtaagctattggaaattactaaggctagtgatgtggaacacactgaaagcaatgagattgatgacttagacactaatagtttctttaaatcagatttaattgaagaggatgagccattagctgcaggaacagtggagactggagattcttctctaaacttaagattggagatggaagcaaatctacgtaggcaggctatagaaaggcttgccgaggaaaatttattgcaagggatcagattattttgttttccagaggttgtaaaacctgatgaagatgtcgagatatttcttaacagaggtctttccactttgaagaatgagtctgatgtcttgattatgggagcttttaatgagtggcgctataggtcttttactacaaggctaactgagactcatctcaatggagattggtggtcttgcaagatccatgttcccaaggaagcatacagggctgattttgtgttttttaatggacaagatgtctatgacaacaatgatggaaatgacttcagtataactgtgaaaggtggtatgcaaatcattgactttgaaaatttcttgcttgaggagaaatggagagaacaggagaaacttgctaaagaacaagctgaaagagaaagactagcagaagaacaaagacgaatagaagcagagaaagctgaaattgaagctgacagagcacaagcaaaggaagaggctgcaaagaaaaagaaagtattgcgagaattgatggtaaaagccacgaagactcgtgatatcacctggtacatagagccaagtgaatttaaatgcgaggacaaggtcaggttatactataacaaaagttcaggtcctctctcccatgctaaggacttgtggatccacggaggatataataattggaaggatggtttgtctattgtcaaaaagcttgttaaatctgagagaatagatggtgattggtggtatacagaggttgttattcctgatcaggcacttttcttggattgggtttttgctgatggtccacccaagcatgccattgcttatgataacaatcaccgccaagacttccatgccattgtccccaaccacattccggaggaattatattgggttgaggaagaacatcagatctttaagacacttcaggaggagagaaggcttagagaagcggctatgcgtgctaaggttgaaaaaacagcacttctgaaaactgaaacaaaggaaagaactatgaaatcatttttactgtctcagaagcatgtagtatatactgaacctcttgatatccaagctggaagcagcgtcacagtttactataatcccgccaatacagtacttaatggtaaacctgaaatttggttcagatgttcatttaatcgctggactcaccgcctgggtccattgccacctcagaaaatgtcgcctgctgaaaatggcacccatgtcagagcaactgtgaaggttccattggatgcatatatgatggattttgtattttccgagagagaagatggtgggatttttgacaataagagcggaatggactatcacatacctgtgtttggaggagtcgctaaagaacctccaatgcatattgtccatattgctgtcgaaatggcaccaattgcaaaggtgggaggccttggtgatgttgttactagtctttcccgtgctgttcaagatttaaaccataatgtggatattatcttacctaagtatgactgtttgaagatgaataatgtgaaggactttcggtttcacaaaaactacttttggggtgggactgaaataaaagtatggtttggaaaggtggaaggtctctcggtctattttttggagcctcaaaacgggttattttcgaaagggtgcgtctatggttgtagcaacgatggtgaacgatttggtttcttctgtcacgcggctttggagtttcttctgcaaggtggatttagtccggatatcattcattgccatgattggtctagtgctcctgttgcttggctctttaaggaacaatatacacactatggtctaagcaaatctcgtatagtcttcacgatacataatcttgaatttggggcagatctcattgggagagcaatgactaacgcagacaaagctacaacagtttcaccaacttactcacaggaggtgtctggaaaccctgtaattgcgcctcaccttcacaagttccatggtatagtgaatgggattgacccagatatttgggatcctttaaacgataagttcattccgattccgtacacttcagaaaacgttgttgagggcaaaacagcagccaaggaagctttgcagcgaaaacttggactgaaacaggctgaccttcctttggtaggaattatcacccgcttaactcaccagaaaggaatccacctcattaaacatgctatttggcgcaccttggaacggaacggacaggtagtcttgcttggttctgctcctgatcctagggtacaaaacaattttgttaatttggcaaatcaattgcactccaaatataatgaccgcgcacgactctgtctaacatatgacgagccactttctcacctgatatatgctggtgctgattttattctagttccttcaatatttgagccatgtggactaacacaacttaccgctatgagatatggttcaattccagtcgtgcgtaaaactggaggactttatgatactgtatttgatgttgaccatgacaaagagagagcacaacagtgtggtcttgaaccaaatggattcagctttgatggagcagatgctggcggagttgattatgctctgaatagagctctctctgcttggtacgatggtcgggattggttcaactctttatgcaagcaggtcatggaacaagattggtcttggaaccgacctgctcttgattatttggagctttaccatgctgctagaaagttagaatagttagtttgtgagatgctagcagaaaaattcacgagatctgcaatctgtacaggttcagtgtttgggtctggacagctttatcatttcctatatcaaagtataaatcaagtctacactgaggatcaatagcagacagtcctcaagttcatttcattttttggggcaaacatatgaaagagcttagcctcttaataatgtcggcctattgatgattatttgttttgggaagaaatgagaaatcaaaggatgcaaaataaaaaaaaaaaaaaaaaaaaaaactcgtgccgaattc

SEQ ID NO: 53557 - protein, 1230 aa, Solanum tuberosum
MDVPFPLHRSLSCTSVSNAITHLKIKPILGFVSHGTTSLSVQSSSWRKDGMVTGVSFSICANFSGRRRRKVSTPRSQGSSPKGFVPRKPSGMSTQRKVQKSNGDKESKSTSTSKESEISNQKTVEARVETSDDDTKGVVRDHKFLEDEDEINGSTKSISMSPVRVSSQFVESEETGGDDKDAVKLNKSKRSEESGFIIDSVIREQSGSQGETNASSKGSHAVGTKLYEILQVDVEPQQLKENNAGNVEYKGPVASKLLEITKASDVEHTESNEIDDLDTNSFFKSDLIEEDEPLAAGTVETGDSSLNLRLEMEANLRRQAIERLAEENLLQGIRLFCFPEVVKPDEDVEIFLNRGLSTLKNESDVLIMGAFNEWRYRSFTTRLTETHLNGDWWSCKIHVPKEAYRADFVFFNGQDVYDNNDGNDFSITVKGGMQIIDFENFLLEEKWREQEKLAKEQAERERLAEEQRRIEAEKAEIEADRAQAKEEAAKKKKVLRELMVKATKTRDITWYIEPSEFKCEDKVRLYYNKSSGPLSHAKDLWIHGGYNNWKDGLSIVKKLVKSERIDGDWWYTEVVIPDQALFLDWVFADGPPKHAIAYDNNHRQDFHAIVPNHIPEELYWVEEEHQIFKTLQEERRLREAAMRAKVEKTALLKTETKERTMKSFLLSQKHVVYTEPLDIQAGSSVTVYYNPANTVLNGKPEIWFRCSFNRWTHRLGPLPPQKMSPAENGTHVRATVKVPLDAYMMDFVFSEREDGGIFDNKSGMDYHIPVFGGVAKEPPMHIVHIAVEMAPIAKVGGLGDVVTSLSRAVQDLNHNVDIILPKYDCLKMNNVKDFRFHKNYFWGGTEIKVWFGKVEGLSVYFLEPQNGLFSKGCVYGCSNDGERFGFFCHAALEFLLQGGFSPDIIHCHDWSSAPVAWLFKEQYTHYGLSKSRIVFTIHNLEFGADLIGRAMTNADKATTVSPTYSQEVSGNPVIAPHLHKFHGIVNGIDPDIWDPLNDKFIPIPYTSENVVEGKTAAKEALQRKLGLKQADLPLVGIITRLTHQKGIHLIKHAIWRTLERNGQVVLLGSAPDPRVQNNFVNLANQLHSKYNDRARLCLTYDEPLSHLIYAGADFILVPSIFEPCGLTQLTAMRYGSIPVVRKTGGLYDTVFDVDHDKERAQQCGLEPNGFSFDGADAGGVDYALNRALSAWYDGRDWFNSLCKQVMEQDWSWNRPALDYLELYHAARKLE

SEQ ID NO: 53558 - DNA, 2919 bp, Oryza sativa; identical to SEQ ID NO: 52588
  CDS (1)..(2919)

SEQ ID NO: 53559 - protein, 972 aa, Oryza sativa; identical to SEQ ID NO: 52589

SEQ ID NO: 53560 - DNA, 2085 bp, Oryza sativa; identical to SEQ ID NO: 52590
  CDS (1)..(2085)

SEQ ID NO: 53561 - protein, 694 aa, Oryza sativa; identical to SEQ ID NO: 52591

SEQ ID NO: 53562 - DNA, 3651 bp, Oryza sativa; identical to SEQ ID NO: 52592
  CDS (1)..(3651)

SEQ ID NO: 53563 - protein, 1216 aa, Oryza sativa; identical to SEQ ID NO: 52593

SEQ ID NO: 53564 - DNA, 1830 bp, Oryza sativa; identical to SEQ ID NO: 52594
  CDS (1)..(1830)

SEQ ID NO: 53565 - protein, 609 aa, Oryza sativa; identical to SEQ ID NO: 52595

SEQ ID NO: 53566 - DNA, 1926 bp, Oryza sativa; identical to SEQ ID NO: 52598
  CDS (1)..(1926)

SEQ ID NO: 53567 - protein, 641 aa, Oryza sativa; identical to SEQ ID NO: 52599

SEQ ID NO: 53568 - DNA, 2433 bp, Oryza sativa; identical to SEQ ID NO: 52600
  CDS (1)..(2433)

SEQ ID NO: 53569 - protein, 810 aa, Oryza sativa; identical to SEQ ID NO: 52601

SEQ ID NO: 53570 - DNA, 1827 bp, Oryza sativa; identical to SEQ ID NO: 52372
  CDS (1)..(1827)

SEQ ID NO: 53571 - protein, 608 aa, Oryza sativa; identical to SEQ ID NO: 52373

SEQ ID NO: 53572 - DNA, 5325 bp, Oryza sativa
  CDS (1)..(5325)
atggagatggctctccggcctcaaagccttctatgccctcggagcaggctgaaggtcgtcatccggccagctagcagtgccagcggtggtggcctcgcgcagtatttcttaatgaccaggagatatactggaagcagaattgttcgatgcatggtttcaagttcagactgtcctaataggaaagcaaagaggacgatttcccttcatacggaagtcgcttcttctaggggatatgctccgagaattgctgctgaatcaagtattcaggagcgagaacatattaatagtgatgaagaaacatttgatacgtacaacagattactacgtaatgagtcaacagagtggaaaaagttagatactactgaagtggatttgtcacaagatgtttcaagcagttcaatgaggaaagtggatgcgacggatgaagctaagctagatatacttgaggatgatttgcccagaaatttgttgaacggtgtaacaatgggggaagtagatatgttggatgaagctggggcagaagatgatgtatttgaggtggacttgtcagccttgcataattccacagtggggaaaatggatgcggtaaatgaagttgggactgaaaatgacttatttgaggtggatctgtcagcattgcatagtgctgcagtggggaaggtggatgtagtagatggagctaaagctaaagaagatttgtttgagatggattcattagcattgcacagtgttacaatggggaaggtggatgcaataaatgcagctggagctgaaggagacaaatttgaggtggatctgtctgcgctcgcgtcgaacaattcaatgatagaggcagttaatgtgatggatgaagctaaggctatagaagacacactcgaggtggatttgtcaggaaatgctacaagcagttcaacatatggggaagttaaatttgaggtggattcattaggaaatacttcaagcactgtaatgtatgggccagcggatggagcgtatgaacctcggtccgatgaagtcacttttaaggtggattcatcagaaaatgcgtcaaacaatgtaatgtatgggagagcagatgtggtggatgaatcttgggctgatgaaggcatatttgaggtggatttttttacaaatgcttcaagcggcgcagaatatggaaaagtggatgtggtggatgaagctaaaactgatgatttcacatttgagattgattcattagaaaaagattcaaacaataaaatgcatgggaaagctcatatggtggatgaagcttgggacgatgaagccatatttgaggttgatttgtttggaaatgcttcaagcattccgatatatggggaggtgaatgtgttggatgaagctcgggctgatgatggaaaatttgaggttgacttattagggaatacttctagcaattcaacacatgaggaagtggatgtggtagatgaagctcaaacaggtgaagccacatttgaggtggatttgcttggaaatgctttaagcagtgcaatatataaagaagtgcctgtcatgggtggagctcaggatgatgaagttgatgtagatttctcaataaatgcttcaatcaccgaaacagaaaaggaagcagatgcagttgatgaagctagagttgaagatgagacatttgatatggatttagtaggtaaacagatatcaatcgattctatgaatgatgatgtagttgaagaagggactaaacatcacagatatccaatgttgtcttcagcattcatagaagtcaagaccattcatgaaacacctgtaagtttaaagcctgaacttatgtcagttgtcatggatcaggaacaagacaaaccaatttccagcgtttatcaacaagaaggatcaatttttaatttgcatgcagaaaaccaatcaacggtagattttcatgaacgggagcaaatggctattacttttgataaacaaaaggaatcagttgctaaactctctaaagaagaccaacagactgctggtttacctgagcaaaacatgtcctttgatggtgtccataggaaaagccagtcaattattgggctcccatttcaacaccaatcaattgttagttcccctgaaaaataccgatcaattgtgggttttcatggacaaaatcaatcaatcatcagctctcataaacaagacaaatcaattgttggtgttcctaaaaaaattcaatccattgttggttccactaagcatgatgattcaattgttggtttccgcaaacaagacagatcaattgttagtgtgcctgagcaaaaacaatcaatagttggttttcataaacaagatctatcaattgttgctgtcagcgaacaaaatctatcaattgttgctatacctagagagagtcaatcaaagcaaatttctattgttcggagacatgatccactacatttgaaggaagtggaaacaaaggatagagatggcatatctaaaaaatctggtggtgacgatgatttgccacatatgctcttcgaagaagagctttcacaggttgaagatgtagcaagggcaatcgcctataaaaagcagcatgaagttgatgtaatctctttgactccagatatccaggagtcaccacaggacaatatcgacccacaagaactccgaaggatgctccaagaacttgctgaccagaattgttcaatgggtaacaagcttttcgtttttccagaggcagtgaaggctaattcgacaattgatgtatatttgaatcgtaacctatcggctttggcgaatgagcctgatgtccacatcaaaggagcattcaatagttggagatggaggcctttcaccgaaagactgcacaagagtgaattgagtggggattggtggtcttgcaaactgcacatacccaaggaagcttatagattagactttgtgttcttcaatggtcgtttagtctatgataacaatgatagtaatgattttgtgctgcaagtagaaagtacaatggatgaagattcctttgaggagttcttggttgaagaaaagaaaagagaacttgagagagttgccactgaagaagctgaaaggaggaggcatgctgaagagcagcagcgaatgggagaacaaagggctgcagaacaagctgccagggaacaggctaagaaggagatagagttgaagaagaacaaattgcaaaatctgttgagttcagccagaacacatgttgataatttgtggcacatagagcctagcacatatagacaaggggacactgtcagattgtactataacagaaactcaaggccgcttatgcatagtactgagatctggatgcatggtggttgcaatagttggactgatggactctctattgttgaaagacttgtcgaatgtgatgacgaaaatggtgattggtggtatgctaatgttcatatacctgaaaaggcctttgtattggactgggtttttgctgacgggccacctggaaatgcaaggaattatgacaacaatggtcgacaagattttcatgctattcttccaaatgccatgactaacgaagaatattgggttgaagaggaaaactgtatctatacaaggcttctccacgagatcagagaacgggaggaagctattaaaataaaggttgagaaaagagcaaaaatgaaatctgagatgaaggaaaagactatgagaatgtttctactttctcagaaacacattgtttatactgaaccacttgaaatacgtgctggaacaactgtggatgttctatataatccttctaatacggtgctgaatggaaagccagaggtttggtttaggtggtcctttaaccgatggatgcatccaagtggtgttttaccacccaagaagatggtgaaaacagaagatggttgtcacttaaaagcgacagttagtgttccatcggatgcttatatgatggactttgttttctctgagtcggaagaaggtggaatctatgacaacaggaatgggacagactatcatattcctgtttctggttccaatgcaaaggagcctcccattcatattgtccatatagcggttgagatggcacccattgcaaaggttggaggccttgctgacgttgtcacaagtctttcacgtgcaattcaagagttaggccatcatgttgaggttattctcccgaaatataattttatgaatcaaagcaatgtgaagaatttgcatgtacgtcaaagcttttctttgggtggtacagaaattaaagtgtggtttggactagttgaagacctgtctgtttacttcttggaacctcaaaatgggatgtttgggggtggatgggtatatggagggaacgatgctggcagatttggcttgttctgtcagtctgctctagagttcctccttcagagtggatcttctccacatataatacactgccatgattggtcaagtgcaccagttgcctggctatacaaggaacactatgcagaatccaggttggcaactgcccggattatatttaccatccataatcttgagtttggagcacattttattggaaaagcaatgacatactgcgacaaagccacaactgtttctcacacgtattcaaaggaagtcgcaggtcatggtgccatagctcctcatcgtggaaaattctatggaattctcaatggaattgatccagatatctgggatccatatactgataacttcatcccgatgcattatacttctgaaaatgtggttgaaggcaagaatgctgcaaagagagcattgcagcagaggtttggactgcagcagactgatgtccccattgttggaatcatcactcgtctgacagcccagaagggtatccacctcattaaacatgcacttcatcggacacttgaacgcaatggacaggtggttttgcttggttcagctccagatcctcggatacagagtgatttctgcagattggctgatagtcttcatggtgaaaaccatggcaggatatatgctggctctgacttcatccttgttccatccatctttgaaccttgcggtttgactcaacttgttgccatgcgctatggatccatccctattgttcggaaaaccggaggactttacgacactgttttcgacgtagaccatgacaaagaccgggctcgagttctaggccttgaaccaaatgggttcagctttgatggagctgactgtaatggtgtggattacgccctgaacagagcaatctcttcttggtttgaagcccgcggttggttccactccctctgcaaaagggtcatggagcaagactggtcctggaaccggcctgccctggactacattgaactgtaccattcagctcacaaattttga

SEQ ID NO: 53573 - protein, 1774 aa, Oryza sativa
MEMALRPQSLLCPRSRLKVVIRPASSASGGGLAQYFLMTRRYTGSRIVRCMVSSSDCPNRKAKRTISLHTEVASSRGYAPRIAAESSIQEREHINSDEETFDTYNRLLRNESTEWKKLDTTEVDLSQDVSSSSMRKVDATDEAKLDILEDDLPRNLLNGVTMGEVDMLDEAGAEDDVFEVDLSALHNSTVGKMDAVNEVGTENDLFEVDLSALHSAAVGKVDVVDGAKAKEDLFEMDSLALHSVTMGKVDAINAAGAEGDKFEVDLSALASNNSMIEAVNVMDEAKAIEDTLEVDLSGNATSSSTYGEVKFEVDSLGNTSSTVMYGPADGAYEPRSDEVTFKVDSSENASNNVMYGRADVVDESWADEGIFEVDFFTNASSGAEYGKVDVVDEAKTDDFTFEIDSLEKDSNNKMHGKAHMVDEAWDDEAIFEVDLFGNASSIPIYGEVNVLDEARADDGKFEVDLLGNTSSNSTHEEVDVVDEAQTGEATFEVDLLGNALSSAIYKEVPVMGGAQDDEVDVDFSINASITETEKEADAVDEARVEDETFDMDLVGKQISIDSMNDDVVEEGTKHHRYPMLSSAFIEVKTIHETPVSLKPELMSVVMDQEQDKPISSVYQQEGSIFNLHAENQSTVDFHEREQMAITFDKQKESVAKLSKEDQQTAGLPEQNMSFDGVHRKSQSIIGLPFQHQSIVSSPEKYRSIVGFHGQNQSIISSHKQDKSIVGVPKKIQSIVGSTKHDDSIVGFRKQDRSIVSVPEQKQSIVGFHKQDLSIVAVSEQNLSIVAIPRESQSKQISIVRRHDPLHLKEVETKDRDGISKKSGGDDDLPHMLFEEELSQVEDVARAIAYKKQHEVDVISLTPDIQESPQDNIDPQELRRMLQELADQNCSMGNKLFVFPEAVKANSTIDVYLNRNLSALANEPDVHIKGAFNSWRWRPFTERLHKSELSGDWWSCKLHIPKEAYRLDFVFFNGRLVYDNNDSNDFVLQVESTMDEDSFEEFLVEEKKRELERVATEEAERRRHAEEQQRMGEQRAAEQAAREQAKKEIELKKNKLQNLLSSARTHVDNLWHIEPSTYRQGDTVRLYYNRNSRPLMHSTEIWMHGGCNSWTDGLSIVERLVECDDENGDWWYANVHIPEKAFVLDWVFADGPPGNARNYDNNGRQDFHAILPNAMTNEEYWVEEENCIYTRLLHEIREREEAIKIKVEKRAKMKSEMKEKTMRMFLLSQKHIVYTEPLEIRAGTTVDVLYNPSNTVLNGKPEVWFRWSFNRWMHPSGVLPPKKMVKTEDGCHLKATVSVPSDAYMMDFVFSESEEGGIYDNRNGTDYHIPVSGSNAKEPPIHIVHIAVEMAPIAKVGGLADVVTSLSRAIQELGHHVEVILPKYNFMNQSNVKNLHVRQSFSLGGTEIKVWFGLVEDLSVYFLEPQNGMFGGGWVYGGNDAGRFGLFCQSALEFLLQSGSSPHIIHCHDWSSAPVAWLYKEHYAESRLATARIIFTIHNLEFGAHFIGKAMTYCDKATTVSHTYSKEVAGHGAIAPHRGKFYGILNGIDPDIWDPYTDNFIPMHYTSENVVEGKNAAKRALQQRFGLQQTDVPIVGIITRLTAQKGIHLIKHALHRTLERNGQVVLLGSAPDPRIQSDFCRLADSLHGENHGRIYAGSDFILVPSIFEPCGLTQLVAMRYGSIPIVRKTGGLYDTVFDVDHDKDRARVLGLEPNGFSFDGADCNGVDYALNRAISSWFEARGWFHSLCKRVMEQDWSWNRPALDYIELYHSAHKF

SEQ ID NO: 53574 - DNA, 2250 bp, Oryza sativa; identical to SEQ ID NO: 52602
  CDS (1)..(2250)

SEQ ID NO: 53575 - protein, 749 aa, Oryza sativa; identical to SEQ ID NO: 52603

SEQ ID NO: 53576 - DNA, 1800 bp, Triticum aestivum; identical to SEQ ID NO: 52604
  CDS (1)..(1800)

SEQ ID NO: 53577 - protein, 599 aa, Triticum aestivum; identical to SEQ ID NO: 52605

SEQ ID NO: 53578 - DNA, 1848 bp, Brassica napus; identical to SEQ ID NO: 52606
  CDS (1)..(1848)

SEQ ID NO: 53579 - protein, 615 aa, Brassica napus; identical to SEQ ID NO: 52607

SEQ ID NO: 53580 - DNA, 1860 bp, Glycine max; identical to SEQ ID NO: 52608
  CDS (1)..(1860)

SEQ ID NO: 53581 - protein, 619 aa, Glycine max; identical to SEQ ID NO: 52609

SEQ ID NO: 53582 - DNA, 1479 bp, Hordeum vulgare; identical to SEQ ID NO: 52610
  CDS (1)..(1479)

SEQ ID NO: 53583 - protein, 492 aa, Hordeum vulgare; identical to SEQ ID NO: 52611

SEQ ID NO: 53584 - DNA, 1800 bp, Triticum aestivum; identical to SEQ ID NO: 52612
  CDS (1)..(1800)

SEQ ID NO: 53585 - protein, 599 aa, Triticum aestivum; identical to SEQ ID NO: 52613

SEQ ID NO: 53586 - DNA, 1815 bp, Triticum aestivum; identical to SEQ ID NO: 52614
  CDS (1)..(1815)

SEQ ID NO: 53587 - protein, 604 aa, Triticum aestivum; identical to SEQ ID NO: 52615

SEQ ID NO: 53588 - DNA, 2745 bp, Triticum aestivum; identical to SEQ ID NO: 52616
  CDS (1)..(2745)

SEQ ID NO: 53589 - protein, 914 aa, Triticum aestivum; identical to SEQ ID NO: 52617

SEQ ID NO: 53590 - DNA, 1830 bp, Zea mays; identical to SEQ ID NO: 52618
  CDS (1)..(1830)

SEQ ID NO: 53591 - protein, 609 aa, Zea mays; identical to SEQ ID NO: 52619

SEQ ID NO: 53592 - DNA, 2730 bp, Zea mays; identical to SEQ ID NO: 52620
  CDS (1)..(2730)

SEQ ID NO: 53593 - protein, 909 aa, Zea mays; identical to SEQ ID NO: 52621

SEQ ID NO: 53594 - DNA, 5025 bp, Zea mays; identical to SEQ ID NO: 52622
  CDS (1)..(5025)

SEQ ID NO: 53595 - protein, 1674 aa, Zea mays; identical to SEQ ID NO: 52623

SEQ ID NO: 53596 - DNA, 2199 bp, Zea mays; identical to SEQ ID NO: 52624
  CDS (1)..(2199)

SEQ ID NO: 53597 - protein, 732 aa, Zea mays; identical to SEQ ID NO: 52625

SEQ ID NO: 53598 - DNA, 1821 bp, Zea mays; identical to SEQ ID NO: 52626
  CDS (1)..(1821)

SEQ ID NO: 53599 - protein, 606 aa, Zea mays; identical to SEQ ID NO: 52627

SEQ ID NO: 53600 - DNA, 1830 bp, Zea mays; identical to SEQ ID NO: 52628
  CDS (1)..(1830)

SEQ ID NO: 53601 - protein, 609 aa, Zea mays; identical to SEQ ID NO: 52629

SEQ ID NO: 53602 - DNA, 20 bp, Artificial sequence
  primer
atgtacatcgttcaaattgc

SEQ ID NO: 53603 - DNA, 22 bp, Artificial sequence
  primer
ttaagcccggatgtattcgtag

SEQ ID NO: 53604 - protein, 536 aa, Artificial sequence
  consensus sequence
  Variant (2)..(3): Xaa in position 2 to 3 is any amino acid
  Variant (5)..(6): Xaa in position 5 to 6 is any amino acid
  Variant (8)..(8): Xaa in position 8 is any amino acid
  Variant (12)..(12): Xaa in position 12 is any amino acid
  Variant (15)..(17): Xaa in position 15 to 17 is any amino acid
  Variant (19)..(20): Xaa in position 19 to 20 is any amino acid
  Variant (23)..(25): Xaa in position 23 to 25 is any amino acid
  Variant (27)..(28): Xaa in position 27 to 28 is any amino acid
  Variant (29)..(30): Xaa in position 29 to 30 is any or no amino acid
  Variant (32)..(33): Xaa in position 32 to 33 is any amino acid
  Variant (34)..(35): Xaa in position 34 to 35 is any or no amino acid
  Variant (37)..(37): Xaa in position 37 is any amino acid
  Variant (39)..(86): Xaa in position 39 to 86 is any amino acid
  Variant (87)..(110): Xaa in position 87 to 110 is any or no amino acid
  Variant (112)..(114): Xaa in position 112 to 114 is any amino acid
  Variant (116)..(122): Xaa in position 116 to 122 is any amino acid
  Variant (124)..(138): Xaa in position 124 to 138 is any amino acid
  Variant (139)..(151): Xaa in position 139 to 151 is any or no amino acid
  Variant (154)..(172): Xaa in position 154 to 172 is any amino acid
  Variant (173)..(180): Xaa in position 173 to 180 is any or no amino acid
  Variant (184)..(187): Xaa in position 184 to 187 is any amino acid
  Variant (189)..(203): Xaa in position 189 to 203 is any amino acid
  Variant (204)..(241): Xaa in position 204 to 241 is any or no amino acid
  Variant (245)..(246): Xaa in position 245 to 246 is any amino acid
  Variant (248)..(249): Xaa in position 248 to 249 is any amino acid
  Variant (251)..(253): Xaa in position 251 to 253 is any amino acid
  Variant (254)..(260): Xaa in position 254 to 260 is any or no amino acid
  Variant (262)..(271): Xaa in position 262 to 271 is any amino acid
  Variant (272)..(275): Xaa in position 272 to 275 is any or no amino acid
  Variant (278)..(278): Xaa in position 278 is any amino acid
  Variant (281)..(281): Xaa in position 281 is any amino acid
  Variant (283)..(284): Xaa in position 283 to 284 is any amino acid
  Variant (285)..(285): Xaa in position 285 is any or no amino acid
  Variant (287)..(287): Xaa in position 287 is any amino acid
  Variant (289)..(290): Xaa in position 289 to 290 is any amino acid
  Variant (292)..(295): Xaa in position 292 to 295 is any amino acid
  Variant (296)..(312): Xaa in position 296 to 312 is any or no amino acid
  Variant (314)..(316): Xaa in position 314 to 316 is any amino acid
  Variant (318)..(319): Xaa in position 318 to 319 is any amino acid
  Variant (321)..(325): Xaa in position 321 to 325 is any amino acid
  Variant (327)..(330): Xaa in position 327 to 330 is any amino acid
  Variant (331)..(335): Xaa in position 331 to 335 is any or no amino acid
  Variant (337)..(342): Xaa in position 337 to 342 is any amino acid
  Variant (345)..(346): Xaa in position 345 to 346 is any amino acid
  Variant (350)..(364): Xaa in position 350 to 364 is any amino acid
  Variant (365)..(367): Xaa in position 365 to 367 is any or no amino acid
  Variant (369)..(369): Xaa in position 369 is any amino acid
  Variant (371)..(371): Xaa in position 371 is any amino acid
  Variant (374)..(398): Xaa in position 374 to 398 is any amino acid
  Variant (399)..(408): Xaa in position 399 to 408 is any or no amino acid
  Variant (410)..(412): Xaa in position 410 to 412 is any amino acid
  Variant (414)..(414): Xaa in position 414 is any amino acid
  Variant (416)..(417): Xaa in position 416 to 417 is any amino acid
  Variant (419)..(422): Xaa in position 419 to 422 is any amino acid
  Variant (425)..(425): Xaa in position 425 is any amino acid
  Variant (432)..(432): Xaa in position 432 is any amino acid
  Variant (434)..(438): Xaa in position 434 to 438 is any amino acid
  Variant (441)..(442): Xaa in position 441 to 442 is any amino acid
  Variant (444)..(444): Xaa in position 444 is any amino acid
  Variant (446)..(448): Xaa in position 446 to 448 is any amino acid
  Variant (452)..(452): Xaa in position 452 is any amino acid
  Variant (456)..(460): Xaa in position 456 to 460 is any amino acid
  Variant (461)..(484): Xaa in position 461 to 484 is any or no amino acid
  Variant (486)..(487): Xaa in position 486 to 487 is any amino acid
  Variant (489)..(502): Xaa in position 489 to 502 is any amino acid
  Variant (503)..(503): Xaa in position 503 is any or no amino acid
  Variant (505)..(520): Xaa in position 505 to 520 is any amino acid
  Variant (521)..(522): Xaa in position 521 to 522 is any or no amino acid
  Variant (524)..(525): Xaa in position 524 to 525 is any amino acid
  Variant (527)..(527): Xaa in position 527 is any amino acid
  Variant (530)..(532): Xaa in position 530 to 532 is any amino acid
  Variant (534)..(535): Xaa in position 534 to 535 is any amino acid
EXXPXXKXGGLXDVXXXLXXALXXXGXXXXVXXXXPXYXXXXXXXXXXXXXXXXXXXXXXXXXXXXXXXXXXXXXXXXXXXXXXXXXXXXXXXXXXXXXXXXXXXXXXXXDXXXRXXXXXXXAXXXXXXXXXXXXXXXXXXXXXXXXXXXXDWXXXXXXXXXXXXXXXXXXXXXXXXXXXIHNXXXXGXXXXXXXXXXXXXXXXXXXXXXXXXXXXXXXXXXXXXXXXXXXXXXXXXXXXXTVSXXYXXEXXXXXXXXXXLXXXXXXXXXXXXXXGIXNGXDXXXWXPXXDXXXXXXXXXXXXXXXXXXXXXKXXXKXXLXXXXXLXXXXXXXXXPXXXXXXRLXXQKGXXXXXXXXXXXXXXXXXXQXVXLGXXXXXXXXXXXXXXXXXXXXXXXXXXXXXXXXXXXLXXXIXAXXDXXXXPSXFEPCGLXQXXXXXYGXXPXVXXXGGLXDTVXXXXXXXXXXXXXXXXXXXXXXXXXXXXXGXXFXXXXXXXXXXXXXXXAXXXXXXXXXXXXXXXXXXMXXDXSWXXXAXXY

SEQ ID NO: 53605 - protein, 22 aa, Artificial sequence
  protein pattern
  Variant (2)..(3): Xaa in position 2 to 3 is any or no amino acid
  Variant (5)..(6): Xaa in position 5 to 6 is any amino acid
  Variant (8)..(9): Xaa in position 8 to 9 is any amino acid
  Variant (11)..(11): Xaa in position 11 is Ala, Ser, Thr or Val
  Variant (14)..(14): Xaa in position 14 is Leu or Met
  Variant (15)..(15): Xaa in position 15 is Ala or Gly
  Variant (18)..(18): Xaa in position 18 is Ala, Ile, Leu or Val
  Variant (19)..(19): Xaa in position 19 is any amino acid
  Variant (20)..(20): Xaa in position 20 is Ala, Gly or Ser
  Variant (21)..(21): Xaa in position 21 is Leu or Val
  Variant (22)..(22): Xaa in position 22 is Ala, Gly, Pro, Ser or Thr
AXXEXXPXXKXGGXXDVXXXXX

SEQ ID NO: 53606 - protein, 14 aa, Artificial sequence
  protein pattern
  Variant (2)..(2): Xaa in position 2 is Ile, Leu, Met or Val
  Variant (3)..(3): Xaa in position 3 is Phe, Ile, Leu or Val
  Variant (4)..(4): Xaa in position 4 is Ala, Cys, Gly, Ser or Val
  Variant (5)..(5): Xaa in position 5 is any amino acid
  Variant (6)..(6): Xaa in position 6 is Ile or Val
  Variant (7)..(7): Xaa in position 7 is Gly, Ser or Thr
  Variant (10)..(11): Xaa in position 10 to 11 is any amino acid
PXXXXXXRLXXQKG

SEQ ID NO: 53607 - protein, 16 aa, Artificial sequence
  protein pattern
  Variant (3)..(3): Xaa in position 3 is any amino acid
  Variant (6)..(6): Xaa in position 6 is Ile, Leu, Met or Val
  Variant (8)..(10): Xaa in position 8 to 10 is any amino acid
  Variant (12)..(12): Xaa in position 12 is Asp, Asn or Ser
  Variant (14)..(15): Xaa in position 14 to 15 is any amino acid
GIXNGXDXXXWXPXXD

SEQ ID NO: 53608 - DNA, 1080 bp, Synechocystis sp.
  CDS (1)..(1080): transl_table=11
atgcgtctagaaatttcatcgcctcaaacaaagcttccttaccccaaaactgaagaattaccatttaccctccaagagctcagaaacgctattccagcggattgttttgagccatcggtagtccggtccttgggctacttttttttggatgttggtttaattgccgggttttatgctctagcggcctaccttgattcctggttcttctatccgattttttggttaattcagggaaccctattctggtccctgtttgtggtgggccatgattgtggccatggctccttttccaaatccaaaacccttaataattggattggtcatctcagccacacgccaattttggtgccttaccatggctggcgtattagtcatcgtactcaccatgccaacacgggcaatatcgacaccgacgaaagttggtatccagtgtcggagcaaaaatataaccaaatggcctggtatgaaaaacttctacgtttttacttgcctctgatcgcctaccccatttatctatttcggcgatcgccaaaccggcaaggctcccatttcatgcccggcagtcccctattccgtcccggagaaaaagcagctgttctcaccagcacctttgcccttgcagcctttgtcggcttccttggctttttaacttggcaatttggctggctatttttgctgaaattttatgttgccccctacctcgtgtttgtggtgtggttagatttggtcacatttttacatcacactgaagacaatatcccttggtatcgtggtgatgactggtattttctcaaaggtgccctctccaccattgatcgggattacggcttcattaaccccattcaccatgacattggcacccacgtcgcccaccatattttctcgaatatgccccactacaagttacgccgggcgactgaagccatcaagcccattttaggggaatattatcgatattctgacgagccaatttggcaagctttttttaagtcctactgggcttgccattttgttcctaatcaaggttcaggggtctattaccaatccccatccaatggtggatatcaaaagaaaccttaa

SEQ ID NO: 53609 - protein, 359 aa, Synechocystis sp.
MRLEISSPQTKLPYPKTEELPFTLQELRNAIPADCFEPSVVRSLGYFFLDVGLIAGFYALAAYLDSWFFYPIFWLIQGTLFWSLFVVGHDCGHGSFSKSKTLNNWIGHLSHTPILVPYHGWRISHRTHHANTGNIDTDESWYPVSEQKYNQMAWYEKLLRFYLPLIAYPIYLFRRSPNRQGSHFMPGSPLFRPGEKAAVLTSTFALAAFVGFLGFLTWQFGWLFLLKFYVAPYLVFVVWLDLVTFLHHTEDNIPWYRGDDWYFLKGALSTIDRDYGFINPIHHDIGTHVAHHIFSNMPHYKLRRATEAIKPILGEYYRYSDEPIWQAFFKSYWACHFVPNQGSGVYYQSPSNGGYQKKP

SEQ ID NO: 53610 - DNA, 1434 bp, Glycine max
  CDS (98)..(1228)
aaaagatttcattcttcctcttctaggttattacgcaccacccaccacgtatccctgaaaagagagaaaaacacactaagccaaagccaaagcagcaatggttaaagacacaaagcctttagcctatgctgctaataatggataccaaaaggaagcttttgatcccagtgctcctccaccgtttaagattgcagaaatcagagttgcaataccaaaacattgctgggtcaagaatccatggagatccctcagttatgttctcagggatgtgcttgtaattgctgcattgatggctgctgcaagtcacttcaacaactggcttctctggctaatctattggcccattcaaggaacaatgttctgggctctgtttgttcttggacatgattgtggccatggaagcttttcagacagcccttttctaaatagcctggtgggacacatcttgcattcctcaattcttgtgccataccatggatggagaattagccacagaactcaccatcaaaatcatggacacattgagaaggatgaatcctgggttccattaaccgagaagatttacaagaatctagacaacatgacaagacttgttagattcactgtgccatttccattgtttgtgtatccaatttatttgttctcaagaagccccggaaaggaaggttctcacttcaatccctacagcaatctgttcccacccagtgagagaaagggaatagcaatatcaacactgtgttgggttaccatgttttctatgcttatctatctctccttcataactagtccagttctattgctcaagctctatggaattccatattggatatttgttatgtggctggactttgtcacatacttgcatcaccatggtcatcatcagaaactgccttggtatcgcggcaaggaatggagttatttaagaggtggtctcacaactgtggatcgtgactatggttggatcaataacattcaccatgacattggcacccatgttattcaccatcttttccctcaaattcctcattatcacctcgttgaagcgacacaagcagcaaaatcagttcttggagagtattaccgtgagccagaaagatctgcaccattaccatttcatctaataaagtatttaattcagagtatgagacaagaccacttcgtaagtgacactggagatgtggtttattatcagactgattctctgcaccttcactcgcaccgagactgagtttcaatttttgggttatttattggattctagctactcaaattactttttttttaatgttacgtttttggagttttaacgttttctgaacaacttgcaaattacatgcatagagagacaggaattcatagtgggcctcaatggaatatttatttgaaattagtaaggtggtaattaataaatattgaattgtcagtttcatttgt

SEQ ID NO: 53611 - protein, 376 aa, Glycine max
MVKDTKPLAYAANNGYQKEAFDPSAPPPFKIAEIRVAIPKHCWVKNPWRSLSYVLRDVLVIAALMAAASHFNNWLLWLIYWPIQGTMFWALFVLGHDCGHGSFSDSPFLNSLVGHILHSSILVPYHGWRISHRTHHQNHGHIEKDESWVPLTEKIYKNLDNMTRLVRFTVPFPLFVYPIYLFSRSPGKEGSHFNPYSNLFPPSERKGIAISTLCWVTMFSMLIYLSFITSPVLLLKLYGIPYWIFVMWLDFVTYLHHHGHHQKLPWYRGKEWSYLRGGLTTVDRDYGWINNIHHDIGTHVIHHLFPQIPHYHLVEATQAAKSVLGEYYREPERSAPLPFHLIKYLIQSMRQDHFVSDTGDVVYYQTDSLHLHSHRD

SEQ ID NO: 53612 - DNA, 1768 bp, Zea mays subsp. mays
  CDS (160)..(1491)
  misc_feature (57)..(57): n is a, g, c or t
aagccaggccactctaccaccgcacgctcaactcaaacccccgtcccgaacgcagangaccggcggcagcggcggggtgtgtgtggactggactgaaaccaattgccatcaatccaggcatccatccatccacccgcacccgccccgctgacggcggcaatggcccggctcgtgctctccgagtgctgcggcctcgcgccgctccgccgcctgcgcgccggccggggcgccattgcggcgccgtcaccccccgcgctctccgcggcgccgcgccgtcgtcccgcgtccgcgtccatccaccgcgactgggcgctccgcgtctccgcgcccacccgcctcgcctccgccgccgtcgaggaggacaagccgagcgccgcgccggggcaggaggagggcgcggcggccggcggggagttcgacccgggggcgccgccgccgttcgggctggccgagatccgcgccgccatccccaagcactgctgggtcaaggacccctggcgctccatgagctacgtgctgcgcgacgtcgccgtcgtcctgggcctcgccgcagcggccgcgcgcctcgacagctggctcgtctggccgctctactgggccgcgcagggcaccatgttctgggcgctcttcgtcctcggccacgactgtggacacgggagcttctcgaacaaccccaagttaaacagcgtcgtcggccacatactccattcctccattcttgtgccataccacggatggaggattagccacaggacgcaccatcaaaaccacggtcacgttgagaaggacgagtcctggcacccgctaccagagaggctgtacaaaagcctggactttatgactaggaaactgcggttcaccatgccgttccccttgctcgcgttcccgttatacttgtttgcgaggagtccagggaagtcaggatcacacttcaacccaggcagtgatctgttccaacctactgaaaagaatgatatcataacatccacggcgtcctggctggccatggttggtgttctggccggtctcacctttctgatgggtcctgttccgatgctaaagctctacggagtcccatacttggtatttgttgcttggctagatatggtcacatacttgcaccatcatggccacgaagacaagcttccctggtaccgtggaaaggagtggagttatctgcgtggaggactgacgacgctcgaccgggactacggatggatcaacaacatccatcacgacatcggaactcatgtcatccatcacctcttccctcagatcccgcattaccatctcatcgaggcgaccgaggcagcaaagccggttcttggcaagtactacaaagagccgaagaactcgggtgctctgccgtggcatctattccgggtgctggcacagagcttgaagcaagaccactatgtcagtcacaccggagatgtggtctactaccaagctgagtcgaaaacgagcacctctgcacaaaaatccgattgacagggagtatagagcgtgtagagtgttcttcatttttctcggggagggcctgtgcctgaagacctgaccagcctccacctctgattagcgtgagtacatgggtacgtcgactcaagaacgtaagctggcgaagtagtgccatgtatgtatggagagggttaaatgtaattctttccaatggtccaaggcggatgctgcttccgatgtagcagcatgcgattctttggacaagatgtatactattacagtgaagagtgaaaaaaagagagagttagct

SEQ ID NO: 53613 - protein, 443 aa, Zea mays subsp. mays
MARLVLSECCGLAPLRRLRAGRGAIAAPSPPALSAAPRRRPASASIHRDWALRVSAPTRLASAAVEEDKPSAAPGQEEGAAAGGEFDPGAPPPFGLAEIRAAIPKHCWVKDPWRSMSYVLRDVAVVLGLAAAAARLDSWLVWPLYWAAQGTMFWALFVLGHDCGHGSFSNNPKLNSVVGHILHSSILVPYHGWRISHRTHHQNHGHVEKDESWHPLPERLYKSLDFMTRKLRFTMPFPLLAFPLYLFARSPGKSGSHFNPGSDLFQPTEKNDIITSTASWLAMVGVLAGLTFLMGPVPMLKLYGVPYLVFVAWLDMVTYLHHHGHEDKLPWYRGKEWSYLRGGLTTLDRDYGWINNIHHDIGTHVIHHLFPQIPHYHLIEATEAAKPVLGKYYKEPKNSGALPWHLFRVLAQSLKQDHYVSHTGDVVYYQAESKTSTSAQKSD

SEQ ID NO: 53614 - DNA, 1336 bp, Brassica napus
  CDS (79)..(1212)
accacatttcactcagagcccacacagttttagagagagagagaaacatccctcaaagctctctctctttctccggcgatggttgtcgctatggaccagcgtagcaatgcgaacggagacgaaaggtttgatccgagcgcacaaccaccgttcaagatcggagatataagggcggccattcctaagcattgttgggtaaagagtcctttgagatccatgagctatgtcgccagagacattttcgccgtcgtggctcttgccgtcgccgccgtgtattttgatagctggttcttttggcctctttattgggccgcccaaggaaccctgttctgggctatcttcgtactcggccacgactgtggacatgggagcttctcagacattccccttctgaatactgcggttggtcatattcttcattccttcattctcgttccataccatggttggagaataagccatcggacacaccaccagaaccatggccatgttgaaaacgacgagtcttgggttccgttgccagaaaaattatacaagaatttgtcccacagtacacggatgctcagatacactgtccctctccccatgctcgcttaccctctctatctgtggtacagaagtcctggtaaagaagggtcacattataacccatacagtagtttatttgccccaagcgagagaaagcttattgcaacttcaactacttgctggtcgatcatgttggccactcttgtttatctatcattcctcgttggtccagtcacagttctaaaagtctatggtgttccttacattatctttgtaatgtggttggacgctgtcacgtacttgcatcatcatggtcacgatgataagttgccttggtacagaggcaaggaatggagttatttacgtggaggattaacaactattgatagagattacgggatcttcaacaacattcatcacgatattggaactcacgtgatccatcatcttttcccacaaatccctcactatcacttggttgatgccacgaaatcagctaaacatgtgttgggaagatactacagagaaccaaagacgtcaggagcaataccgatccacttggtggaaagtttggtggcaagtattaagaaagatcattacgtcagtgacactggtgatattgtcttctacgagacagatccagatctctacgtttatgcttctgacaaatccaaaatcaactaacctttcttcctagctctatttaggaataaaacagtcctttggtttttacttatttctggttgtttttaagttaaaaatgtactcgtgaaactttttttaattaaatgtatttacattacaaatc

SEQ ID NO: 53615 - protein, 377 aa, Brassica napus
MVVAMDQRSNANGDERFDPSAQPPFKIGDIRAAIPKHCWVKSPLRSMSYVARDIFAVVALAVAAVYFDSWFFWPLYWAAQGTLFWAIFVLGHDCGHGSFSDIPLLNTAVGHILHSFILVPYHGWRISHRTHHQNHGHVENDESWVPLPEKLYKNLSHSTRMLRYTVPLPMLAYPLYLWYRSPGKEGSHYNPYSSLFAPSERKLIATSTTCWSIMLATLVYLSFLVGPVTVLKVYGVPYIIFVMWLDAVTYLHHHGHDDKLPWYRGKEWSYLRGGLTTIDRDYGIFNNIHHDIGTHVIHHLFPQIPHYHLVDATKSAKHVLGRYYREPKTSGAIPIHLVESLVASIKKDHYVSDTGDIVFYETDPDLYVYASDKSKIN

SEQ ID NO: 53616 - DNA, 2181 bp, Glycine max
  CDS (855)..(1997)
acaataataaatccatatttttataattaaaagtagtagattacagcgatgcacttgagaaacatattaagtggactaattctccctggtcaagcaagaaaaaaaccagctatgacccaaggtagagagagattatacacagaatactagtaattaactaagactggctctgcaattgccaaaaactccattgcagtagcagccacctgagaagacactaagacctagactagaccatacatatgaagattaatacgcttacataacaacataggacactaagaaaacacggcttacagagaatccagctgactctataagaggggtacttctggagattaaaattatccgaatcaccttcccactgcggctgctgacgtcagcgaaagtcagaaccgaaagcggcgaagaaccttcagaagaggaggaagcacttcgaccttacaagagttgttgtcgttgttgttgtcgttctctggcggagaagcgagtttggatcgcgttttcctcggaggcttctcggtcttcccctgtttctgcagctcagccaggccctcgcaaatggcctgaagcttggcgtcaacggcggaatgaagaggctaatactccccgaagtcaccaccgacggaggaaccctggtgtcggaggttggggaagttgagcctggcgaagtcacctcggagcttgtacgcggccttgtggtacgccagagcggcttcctcggcggtgtcgaaggttcccagccatagcctggtccggattcttcgggagtctaatctcagccacccacttcccccctgagaaaagagaggaaccacactctctaagccaaagcaaaagcagcagcagcagcaatggttaaagacacaaagcctttagcctatgctgccaataatggataccaacaaaagggttcttcttttgattttgatcctagcgctcctccaccgtttaagattgcagaaatcagagcttcaataccaaaacattgctgggtcaagaatccatggagatccctcagttatgttctcagggatgtgcttgtaattgctgcattggtggctgcagcaattcacttcgacaactggcttctctggctaatctattgccccattcaaggcagaatgttcttggctctctttgttcttggacatgattgtggccatggaagcttttcagatagccctttgctgaatagcctggtgggacacatcttgcattcctcaattcttgtgccataccatggatggagaattagccacagaactcaccatcaaaaccatggacacattgagaaggatgagtcatgggttccattaacagagaagatttacaagaatctagacagcatgacaagactcattagattcactgtgccatttccattgtttgtgtatccaatttatttgttttcaagaagccccggaaaggaaggctctcacttcaatccctacagcaatctgttcccacccagtgagagaaaaggaatagcaatatcaacactgtgttgggctaccatgttttctctgcttatctatctctcattcataactagtccacttctagtgctcaagctctatggaattccatattggatatttgttatgtggctggactttgtcacatacttgcatcaccatggtcaccaccagaaactgccttggtaccgcggcaaggaatggagttatttaagaggtggcctcaccactgtggatcgtgactatggttggatctataacattcaccatgacattggcacccatgttatccaccatcttttcccccaaattcctcattatcacctcgttgaagcgacacaagcagcaaaaccagttcttggagattactaccgtgagccagaaagatctgcgccattaccatttcatctaataaagtatttaattcagagtatgagacaagaccacttcgtaagtgacactggagatgttgtttattatcagactgattctctgctcctccactcgcaacgagactgagtttcaaactttttgggttattatttattggattctagctactcaaattactttttttttaatgttatgttttttggagtttaacgttttctgaacaacttgcaaattacttgcatagagagacatggaatatttatttgaaattagtaaggtagtaataataaattttgaattgtcagtttca

SEQ ID NO: 53617 - protein, 380 aa, Glycine max
MVKDTKPLAYAANNGYQQKGSSFDFDPSAPPPFKIAEIRASIPKHCWVKNPWRSLSYVLRDVLVIAALVAAAIHFDNWLLWLIYCPIQGRMFLALFVLGHDCGHGSFSDSPLLNSLVGHILHSSILVPYHGWRISHRTHHQNHGHIEKDESWVPLTEKIYKNLDSMTRLIRFTVPFPLFVYPIYLFSRSPGKEGSHFNPYSNLFPPSERKGIAISTLCWATMFSLLIYLSFITSPLLVLKLYGIPYWIFVMWLDFVTYLHHHGHHQKLPWYRGKEWSYLRGGLTTVDRDYGWIYNIHHDIGTHVIHHLFPQIPHYHLVEATQAAKPVLGDYYREPERSAPLPFHLIKYLIQSMRQDHFVSDTGDVVYYQTDSLLLHSQRD

SEQ ID NO: 53618 - DNA, 1462 bp, Glycine max
  CDS (108)..(1247)
ccatatactaatatttgcttgtattgatagcccctccgttcccaagagtataaaactgcatcgaataatacaagccactaggcatgggtctagcaaaggaaacaacaatgggaggtagaggtcgtgtggccaaagtggaagttcaagggaagaagcctctctcaagggttccaaacacaaagccaccattcactgttggccaactcaagaaagcaattccaccacactgctttcagcgctccctcctcacttcattctcctatgttgtttatgacctttcatttgccttcattttctacattgccaccacctacttccacctccttcctcaacccttttccctcattgcatggccaatctattgggttctccaaggttgccttctcactggtgtgtgggtgattgctcacgagtgtggtcaccatgccttcagcaagtaccaatgggttgatgatgttgtgggtttgacccttcactcaacacttttagtcccttatttctcatggaaaataagccatcgccgccatcactccaacacaggttcccttgaccgtgatgaagtgtttgtcccaaaaccaaaatccaaagttgcatggttttccaagtacttaaacaaccctctaggaagggctgtttctcttctcgtcacactcacaatagggtggcctatgtatttagccttcaatgtctctggtagaccctatgatagttttgcaagccactaccacccttatgctcccatatattctaaccgtgagaggcttctgatctatgtctctgatgttgctttgttttctgtgacttactctctctaccgtgttgcaaccctgaaagggttggtttggctgctatgtgtttatggggtgcctttgctcattgtgaacggttttcttgtgactatcacatatttgcagcacacacactttgccttgcctcattacgattcatcagaatgggactggctgaagggagctttggcaactatggacagagattatgggattctgaacaaggtgtttcatcacataactgatactcatgtggctcaccatctcttctctacaatgccacattaccatgcaatggaggcaaccaatgcaatcaagccaatattgggtgagtactaccaatttgatgacacaccattttacaaggcactgtggagagaagcgagagagtgcctctatgtggagccagatgaaggaacatccgagaagggcgtgtattggtacaggaacaagtattgatggagcaaccaatgggccatagtgggagttatggaagttttgtcatgtattagtacataattagtagaatgttataaataagtggatttgccgcgtaatgactttgtgtgtattgtgaaacagcttgttgcgatcatggttataatgtaaaaataattctggtattaattacatgtggaaagtgttctgcttatagctttctgcctaaaaaaaaa

SEQ ID NO: 53619 - protein, 379 aa, Glycine max
MGGRGRVAKVEVQGKKPLSRVPNTKPPFTVGQLKKAIPPHCFQRSLLTSFSYVVYDLSFAFIFYIATTYFHLLPQPFSLIAWPIYWVLQGCLLTGVWVIAHECGHHAFSKYQWVDDVVGLTLHSTLLVPYFSWKISHRRHHSNTGSLDRDEVFVPKPKSKVAWFSKYLNNPLGRAVSLLVTLTIGWPMYLAFNVSGRPYDSFASHYHPYAPIYSNRERLLIYVSDVALFSVTYSLYRVATLKGLVWLLCVYGVPLLIVNGFLVTITYLQHTHFALPHYDSSEWDWLKGALATMDRDYGILNKVFHHITDTHVAHHLFSTMPHYHAMEATNAIKPILGEYYQFDDTPFYKALWREARECLYVEPDEGTSEKGVYWYRNKY

SEQ ID NO: 53620 - DNA, 1790 bp, Zea mays
  CDS (165)..(1328)
cggcctctcccctccctcctccctgcaaatcctgcagacaccaccgctcgtttttctctccgggacaggagaaaaggggagagagaggtgaggcgcggtgtccgcccgatctgctctgccccgacgcagctgttacgacctcctcagtctcagtcaggagcaagatgggtgccggcggcaggatgaccgagaaggagcgggagaagcaggagcagctcgcccgagctaccggtggcgccgcgatgcagcggtcgccggtggagaagcctccgttcactctgggtcagatcaagaaggccatcccgccacactgcttcgagcgctcggtgctcaagtccttctcgtacgtggtccacgacctggtgatcgccgcggcgctcctctacttcgcgctggccatcataccggcgctcccaagcccgctccgctacgccgcctggccgctgtactggatcgcgcaggggtgcgtgtgcaccggcgtgtgggtcatcgcgcacgagtgcggccaccacgccttctcggactactcgctcctggacgacgtggtcggcctggtgctgcactcgtcgctcatggtgccctacttctcgtggaagtacagccaccggcgccaccactccaacacggggtccctggagcgcgacgaggtgttcgtgcccaagaagaaggaggcgctgccgtggtacaccccgtacgtgtacaacaacccggtcggccgggtggtgcacatcgtggtgcagctcaccctcgggtggccgctgtacctggcgaccaacgcgtcggggcggccgtacccgcgcttcgcctgccacttcgacccctacggccccatctacaacgaccgggagcgcgcccagatcttcgtctcggacgccggcgtcgtggccgtggcgttcgggctgtacaagctggcggcggcgttcggggtctggtgggtggtgcgcgtgtacgccgtgccgctgctgatcgtgaacgcgtggctggtgctcatcacctacctgcagcacacccacccgtcgctcccccactacgactcgagcgagtgggactggctgcgcggcgcgctggccaccatggaccgcgactacggcatcctcaaccgcgtgttccacaacatcacggacacgcacgtcgcgcaccacctcttctccaccatgccgcactaccacgccatggaggccaccaaggcgatcaggcccatcctcggcgactactaccacttcgacccgacccctgtcgccaaggcgacctggcgcgaggccggggaatgcatctacgtcgagcccgaggaccgcaagggcgtcttctggtacaacaagaagttctagccgccgccgctcgcagagctgaggacgctaccgtaggaatgggagcagaaaccaggaggaggagacggtactcgccccaaagtctccgtcaacctatctaatcgttagtcgtcagtcttttagacgggaagagagatcatttgggcacagagacgaaggcttactgcagtgccatcgctagagctgccatcaagtacaagtaggcaaattcgtcaacttagtgtgtcccatgttgtttttcttagtcgtccgctgctgtaggctttccggcggcggtcgtttgtgtggttggcatccgtggccatgcctgtgcgtgcgtggccgcgcttgtcgtgtgcgtctgtcgtcgcgttggcgtcgtctcttcgtgctccccgtgtgttgttgtaaaacaagaagatgttttctggtgtctttggcggaataacagatcgtccgaacgaaaaaaaaaaaaaaaaaaaa

SEQ ID NO: 53621 - protein, 387 aa, Zea mays
MGAGGRMTEKEREKQEQLARATGGAAMQRSPVEKPPFTLGQIKKAIPPHCFERSVLKSFSYVVHDLVIAAALLYFALAIIPALPSPLRYAAWPLYWIAQGCVCTGVWVIAHECGHHAFSDYSLLDDVVGLVLHSSLMVPYFSWKYSHRRHHSNTGSLERDEVFVPKKKEALPWYTPYVYNNPVGRVVHIVVQLTLGWPLYLATNASGRPYPRFACHFDPYGPIYNDRERAQIFVSDAGVVAVAFGLYKLAAAFGVWWVVRVYAVPLLIVNAWLVLITYLQHTHPSLPHYDSSEWDWLRGALATMDRDYGILNRVFHNITDTHVAHHLFSTMPHYHAMEATKAIRPILGDYYHFDPTPVAKATWREAGECIYVEPEDRKGVFWYNKKF

SEQ ID NO: 53622 - DNA, 1353 bp, Brassica napus
  CDS (87)..(1238)
aatccatcaaacctttattcaccacatttcactgaaaggccacacatctagagagagaaacttcgtccaaatctctctctccagcgatggttgttgctatggaccagcgcagcaatgttaacggagattccggtgcccggaaggaagaagggtttgatccaagcgcacaaccaccgtttaagatcggagatataagggcggcgattcctaagcattgctgggtgaagagtcctttgagatctatgagctacgtcaccagagacattttcgccgtcgcggctctggccatggccgccgtgtattttgatagctggttcctctggccactctactgggttgcccaaggaacccttttctgggccatcttcgttcttggccacgactgtggacatgggagtttctcagacattcctctgctgaacagtgtggttggtcacattcttcattcattcatcctcgttccttaccatggttggagaataagccatcggacacaccaccagaaccatggccatgttgaaaacgacgagtcttgggttccgttgccagaaaagttgtacaagaacttgccccatagtactcggatgctcagatacactgtccctctgcccatgctcgcttacccgatctatctgtggtacagaagtcctggaaaagaagggtcacattttaacccatacagtagtttatttgctccaagcgagaggaagcttattgcaacttcaactacttgctggttcataatgttggccactcttgtttatctatcgttcctcgttgatccagtcacagttctcaaagtctatggcgttccttacattatctttgtgatgtggttggacgctgtcacgtacttgcatcatcatggtcacgatgagaagttgccttggtacagaggcaaggaatggagttatttacgtggaggattaacaactattgatagagattacggaatcttcaacaacatccatcacgacattggaactcacgtgatccatcatcttttcccacaaatccctcactatcacttggtcgatgccacgagagcagctaaacatgtgttaggaagatactacagagagccgaagacgtcaggagcaataccgattcacttggtggagagtttggtcgcaagtattaaaaaagatcattacgtcagtgacactggtgatattgtcttctacgagacagatccagatctctacgtttatgcttctgacaaatctaaaatcaattaacttttcttcctagctctattaggaataaacactccttctcttttacttatttgtttctgctttaagtttaaaatgtactcgtgaaaccttttttttattaatgtatttacgttac

SEQ ID NO: 53623 - protein, 383 aa, Brassica napus
MVVAMDQRSNVNGDSGARKEEGFDPSAQPPFKIGDIRAAIPKHCWVKSPLRSMSYVTRDIFAVAALAMAAVYFDSWFLWPLYWVAQGTLFWAIFVLGHDCGHGSFSDIPLLNSVVGHILHSFILVPYHGWRISHRTHHQNHGHVENDESWVPLPEKLYKNLPHSTRMLRYTVPLPMLAYPIYLWYRSPGKEGSHFNPYSSLFAPSERKLIATSTTCWFIMLATLVYLSFLVDPVTVLKVYGVPYIIFVMWLDAVTYLHHHGHDEKLPWYRGKEWSYLRGGLTTIDRDYGIFNNIHHDIGTHVIHHLFPQIPHYHLVDATRAAKHVLGRYYREPKTSGAIPIHLVESLVASIKKDHYVSDTGDIVFYETDPDLYVYASDKSKIN

SEQ ID NO: 53624 - DNA, 1525 bp, Arabidopsis
  CDS (61)..(1368)
agagagtgcaaatagaacgacagagactttttcctcttttcttcttgggaagaggctccaatggcgagctcggttttatcagaatgtggttttagacctctccccagattctaccctaaacacacaacctcttttgcctctaaccctaaacccactttcaaattcaatccaccacttaaacctccttcttctcttctcaattcccgatatggattctactctaaaaccaggaactgggcattgaatgtggcaacacctttaacaactcttcagtctccatccgaggaagacacggagagattcgacccaggtgcgcctcctcccttcaatttggcggatataagagcagccatacctaagcattgttgggttaagaatccatggatgtctatgagttatgttgtcagagatgttgctatcgtctttggattggctgctgttgctgcttacttcaacaattggcttctctggcctctctactggttcgctcaaggaaccatgttctgggctctctttgtccttggccatgactgcggacatggtagcttctcgaatgatccgaggctgaacagtgtggctggtcatcttcttcattcctcaattctggtcccttaccatggctggaggattagccacagaactcaccaccagaaccatggtcatgtcgagaatgacgaatcatggcatcctttgcctgaaagcatctacaagaatttggaaaagacgactcaaatgtttaggtttacactgccttttccaatgctcgcataccctttctacttgtggaacagaagtccagggaaacaaggttctcattatcatccggacagtgacttgtttcttccaaaagagaagaaagatgttctgacatcaactgcctgttggactgcaatggctgctttgcttgtttgtctcaactttgtcatgggtccaatccagatgctcaaactatatggcatcccttattggatatttgtaatgtggttggacttcgtcacttacttgcaccaccatggacatgaagacaagctcccttggtatcgtggaaaggaatggagttacctgagaggagggctcacaacattagatcgtgactacggatggatcaataacatccaccacgatattggaactcatgtgatacatcatcttttcccgcagatcccacattatcatctagtagaagcaacagaagcagctaaaccagtactaggaaagtactacagagaaccgaaaaactctggacctctgccacttcacttactgggaagcctcataaagagtatgaaacaagaccatttcgtaagcgatacaggagatgtcgtgtactatgaggcagatccaaaactcaatggacaaagaacatgaggacatactgcagtgaaccaggcagacaagttacataaattcatcttggcccattcattatgttctttttgttttggtgtaaagccttttcgagattaaaaaagcattaatttgtagaaacctgtggtaaaactctcgatcaaatgaaataagatat

SEQ ID NO: 53625 - protein, 435 aa, Arabidopsis
MASSVLSECGFRPLPRFYPKHTTSFASNPKPTFKFNPPLKPPSSLLNSRYGFYSKTRNWALNVATPLTTLQSPSEEDTERFDPGAPPPFNLADIRAAIPKHCWVKNPWMSMSYVVRDVAIVFGLAAVAAYFNNWLLWPLYWFAQGTMFWALFVLGHDCGHGSFSNDPRLNSVAGHLLHSSILVPYHGWRISHRTHHQNHGHVENDESWHPLPESIYKNLEKTTQMFRFTLPFPMLAYPFYLWNRSPGKQGSHYHPDSDLFLPKEKKDVLTSTACWTAMAALLVCLNFVMGPIQMLKLYGIPYWIFVMWLDFVTYLHHHGHEDKLPWYRGKEWSYLRGGLTTLDRDYGWINNIHHDIGTHVIHHLFPQIPHYHLVEATEAAKPVLGKYYREPKNSGPLPLHLLGSLIKSMKQDHFVSDTGDVVYYEADPKLNGQRT

SEQ ID NO: 53626 - DNA, 1900 bp, Glycine max
  CDS (138)..(1499)
attcggctcgagcttctttgtctctcatctgtctgaggatttttccatcttagttcctggaggcaccaggaacctgacccaataaacaaacccttttttttctttctaatttttctaaagtttcattttttaatccaatggcaacttgggtattatcagaatgtagcttgaagcctcttgctccagtaatccctagacctagaactggggcagttttgtccagcacctcaaaggttggatttttggagacaaacaaggtattggaaggttctaagtttcaacctttgaggtgtaaccttagggagaggaattgggggttaaaagtgagtgtccctttgaggattgcttccattgaagaggaggagcaaaagagtgtcgatgtaatcaatgggagtaatggggttgagcatgagaagcttccagaatttgaccctggtgctccaccaccattcaacttagctgatattagagcagcaattccaaagcattgctgggtgaaggaccctttgaagtccatgagctatgtggtgagggatgtcattgctgtctttggtttggcttctgctgctgcttatctcaataattggttggtttggcctctctattgggctgctcaaggcactatgttctgggctctgtttgttcttggtcatgattgtggtcatgggagcttttcaaacaaccccaaattgaacagtgttgttgggcatctgctgcattcttcaattctagtgccatatcatggatggagaatcagtcataggactcatcaccaacatcatggtcatgttgaaaatgatgaatcatggcatccgttgcctgaaaaattgttcagaagcttggacactgtaacacgtatgttaagattcacagcaccttttccacttcttgcatatcccgtgtacctttggggtaggagtcctggcaagactggttctcactttgaccctagcagtgacttgttcgttcccaatgaaagaaaagatgttattacttccacagcttgttgggctgctatgttgggattgcttgttggattggggtttgtaatgggtccaattcaacttcttaagctttatggtgttccctatgttatattcgtcatgtggttggatttggtgacttatttgcaccatcatggccatgaagacaaattgccttggtatcgtggaaaggaatggagctaccttaggggtggtctaactactcttgatcgtgattatggattgatcaataacattcaccatgacattggaactcatgtcattcatcacctatttcctcaaattccacactatcacttagttgaggctactgaggcagctaagccagtgtttggaaaatattatagagaaccaaagaaatcatctcctcttccttttcaccttattggggaattaataaagagcttcaagactgaccattttgttagtgacaagggggatgttgtgtactatcaaactgactctgagattaatggctcgtccaaatcagagtgaagattaaaattcttttttatatagacaagagagacttatacacaattcttattgctctaaagattgtcttgagtttcttacttagagttgaatccgtcattaataaagggatagatggacggatcatataatttcaattgtaactacatgatataatgtttaggttatatgtagtttatcattcttgaacagtgaatcctctgtataaattgattatattgaagtggtaccttgagtcatgatcaaattgttaatgtatttgatcagaactgaaagacctcgattaaatagtaatttaaaataaattgttttatagaatgttgcggtgttttcttaccagttaccatcccctatttaatttatatactccctattttattcttcaaaaaaaaaaaaaaagg

SEQ ID NO: 53627 - protein, 453 aa, Glycine max
MATWVLSECSLKPLAPVIPRPRTGAVLSSTSKVGFLETNKVLEGSKFQPLRCNLRERNWGLKVSVPLRIASIEEEEQKSVDVINGSNGVEHEKLPEFDPGAPPPFNLADIRAAIPKHCWVKDPLKSMSYVVRDVIAVFGLASAAAYLNNWLVWPLYWAAQGTMFWALFVLGHDCGHGSFSNNPKLNSVVGHLLHSSILVPYHGWRISHRTHHQHHGHVENDESWHPLPEKLFRSLDTVTRMLRFTAPFPLLAYPVYLWGRSPGKTGSHFDPSSDLFVPNERKDVITSTACWAAMLGLLVGLGFVMGPIQLLKLYGVPYVIFVMWLDLVTYLHHHGHEDKLPWYRGKEWSYLRGGLTTLDRDYGLINNIHHDIGTHVIHHLFPQIPHYHLVEATEAAKPVFGKYYREPKKSSPLPFHLIGELIKSFKTDHFVSDKGDVVYYQTDSEINGSSKSE

SEQ ID NO: 53628 - DNA, 2191 bp, Suaeda salsa
  CDS (445)..(1716)
cgcgcgcctgcaggtcgacactagtggatccacaagaattcggcacgagggaaacaagtgagtagaaaacaatattcctcacatattgtttgctgtgacttcacaaaggttttttgtgtgaggagagagagaaatcaatagataaacaaacaatttccattataaatttgtttgttttgtaacctttcattcaacttttaaattgaatcttgtggtacccttttgtggtagagatttgttcttgtgttatcacttcattcatacaaaatctccccataaaaatctcatctttttatttttattaataattcatttcatttcaaaccctaatttttcatttgtgttttgtttatctctcttaaaaaaaacccttaaaagaccctcccttttatcttggagggtctctcaaaaacaccccaaaagctcgaatttttattaagaacaatggctagttgggtgctttcagaatgtgggttaaggcctcttccaagaatctacccaaaacccagaactgggttttcctcaaatcccataaaaattaaaacttgcaaacctttctcagatctgaaatcacacaattcattgtcaatctcatgttgttcttcaaattcaaattctagagagagaaaatgggaggtgaaagtgagtgcccctttaagggtaacttcaccttctcccattgaagaagatgataacaataatattggagaatttgaccctggttctccacctccattcaaattagcagacattaaaaatgcaattccaaaacattgttgggtgaaaaatccatggagatctatgagttatgttgttagagatgttgttgttgtttttgggttagctgctgttgcttcttacttcaataattggattgtttggcctctttattggattgctcagggtactatgttttgggctctctttgttcttggtcatgattgtgggcatggaagtttctccaataatcctaagcttaacagtgtagcaggacacttgcttcactcttcaatccttgttccttatcatggatggaggattagtcataggactcaccatcaaaatcatggacatgttgagaatgatgaatcatggcacccattgcctgagaaattatacaacagtttagagatgatgacgaaaaagttgaggttcacttttccatttcccttacttgcataccccatctatttgtggactagaagtcctggaaaatcaggctcacattatcacccaggaagtgacttgttcacaccaaatgaaaagaaagatgtcttaacctctacagcttgttggtctgcaatggttgcgttgcttgcgggtttgtcttttgtcatgggtccgattccactcctgaagctctatggtgttccttatgcgatctttgtcatgtggttggacttggtgacttacttgcatcaccacggccacgaagacaaacttccttggtaccgaggcgaggaatggagttaccttcgagggggacttacgacaattgaccgtgattatggatggattaacaacattcaccatgacatcggtacccatgtcattcatcatctcttcccacaaatccctcactatcatctaattgaagcaactgaggcagcaaagccagttctcggtaaatattaccgcgaaccaaagaaatctggacctctcccattatactttaggtgttttcttagaaagtctgaagaaagatcactatgttagtgacactggagatatcgtctactatcaaaccgacccaaagctgtagtctatatcagatttaaagaactcagaagattgatctgttctgatcctctatgtgatgttcgagatcatagctaagccggtgaaagtattggaatcacaagtaggaaggatcaaattagagttgtgattagtcataactaatgcagtagtttatcccagtttgctctccctaaactgtgcagagggcataacactgatggattgaactacattgttttactgtaattgcggtacaaaactatggaaagagaaggggttagggaagcagaaatcaagcataatatatattcaacatatatatttatatgaataaaaacatgtttattgtttttccttctttaaaaaaaaaaaaaaaaaaactcgagagtacttctagagcggccgcgggcccatcgattttccacccgggtggggtaccaggtaagtgtac

SEQ ID NO: 53629 - protein, 423 aa, Suaeda salsa
MASWVLSECGLRPLPRIYPKPRTGFSSNPIKIKTCKPFSDLKSHNSLSISCCSSNSNSRERKWEVKVSAPLRVTSPSPIEEDDNNNIGEFDPGSPPPFKLADIKNAIPKHCWVKNPWRSMSYVVRDVVVVFGLAAVASYFNNWIVWPLYWIAQGTMFWALFVLGHDCGHGSFSNNPKLNSVAGHLLHSSILVPYHGWRISHRTHHQNHGHVENDESWHPLPEKLYNSLEMMTKKLRFTFPFPLLAYPIYLWTRSPGKSGSHYHPGSDLFTPNEKKDVLTSTACWSAMVALLAGLSFVMGPIPLLKLYGVPYAIFVMWLDLVTYLHHHGHEDKLPWYRGEEWSYLRGGLTTIDRDYGWINNIHHDIGTHVIHHLFPQIPHYHLIEATEAAKPVLGKYYREPKKSGPLPLYFRCFLRKSEERSLC

SEQ ID NO: 53630 - DNA, 1332 bp, Zea mays
  CDS (1)..(1332)
atggcccggctcgtgctctccgagtgctcgggcctcgcgcccgtccgccgcctgcgcgccggccggggcgccattgcggcgcggtcaccccccgcgctctccgcggcgccgcgccgtcgtcccgcgtccgcgtccatccaccgcgactgggcgctccgcgtctccgcgcccacccgcctcgcctccgccgccgtcgaggaggacaagccgagcgccgcgccggggcaggaggagggcgcggcggccggcggggagttcgacccgggggcgccgccgccgttcgggctggccgagatccgcgccgccatccccaagcactgctgggtcaaggacccctggcgctccatgagctacgtgctgcgcgacgtcgccgtcgtcctgggcctcgccgcagcggccgcgcgcctcgacagctggctcgtctggccgctctactgggccgcgcagggcaccatgttctgggcgctcttcgtcctcggccacgactgtggacacgggagcttctcgaacaaccccaagttaaacagcgtcgtcggccacatactccattcctccattcttgtgccataccacggatggaggattagccacaggacgcaccatcaaaaccacggtcacgttgagaaggacgagtcctggcacccgctaccagagaggctgtacaaaagcctggactttatgactaggaaactgcggttcaccatgccgttccccttgctcgcgttcccgttatacttgtttgcgaggagtccagggaagtcaggatcacacttcaacccaggcagtgatctgttccaacctactgaaaagaatgacatcataacatcgacggcgtcctggctggccatggttggtgttctggccggtctcacctttctgatgggtcctgttccgatgctaaagctctacggagtcccatacttggtatttgttgcttggctggatatggtcacatacttgcaccatcatggccacgaagacaagcttccctggtaccgtggaaaggagtggagttatctgcgtggaggactgacgacgctcgaccgggactacggatggatcaacaacatccatcacgacatcggaactcatgtcatccatcacctcttccctcagatcccgcattaccatctcatcgaggcgaccgaggcagcaaagccggttcttggcaagtactacaaagagccgaagaagtcgggtgctctgccgtggcacctattccgggtgctggcacagagcttgaagcaagaccactatgtcagtgataccggagatgtggtctactaccaagctgagtcgaaaacgagcacctctgcacaaaaatccgattga

SEQ ID NO: 53631 - protein, 443 aa, Zea mays
MARLVLSECSGLAPVRRLRAGRGAIAARSPPALSAAPRRRPASASIHRDWALRVSAPTRLASAAVEEDKPSAAPGQEEGAAAGGEFDPGAPPPFGLAEIRAAIPKHCWVKDPWRSMSYVLRDVAVVLGLAAAAARLDSWLVWPLYWAAQGTMFWALFVLGHDCGHGSFSNNPKLNSVVGHILHSSILVPYHGWRISHRTHHQNHGHVEKDESWHPLPERLYKSLDFMTRKLRFTMPFPLLAFPLYLFARSPGKSGSHFNPGSDLFQPTEKNDIITSTASWLAMVGVLAGLTFLMGPVPMLKLYGVPYLVFVAWLDMVTYLHHHGHEDKLPWYRGKEWSYLRGGLTTLDRDYGWINNIHHDIGTHVIHHLFPQIPHYHLIEATEAAKPVLGKYYKEPKKSGALPWHLFRVLAQSLKQDHYVSDTGDVVYYQAESKTSTSAQKSD

SEQ ID NO: 53632 - DNA, 1341 bp, Zea mays
  CDS (1)..(1341)
atggaatcggaggcggccaggctccctcctcctccctgcaaatcctgcagacaccaccgctcgtttttctctccgggacaggagaaaaggggagagagaggtgaggcgcggtgtccgcccgatctgctctgccccgacgcagctgttacgacctcctcagtctcagtcaggagcaagatgggtgccggcggcaggatgaccgagaaggagcgggagaagcaggagcagctcgcccgtgctaccggtggcgccgcgatgcagcggtcgccggtggagaagcctccgttcactctgggtcagatcaagaaggccatcccgccacactgcttcgagcgctcggtgctcaagtccttctcgtacgtggtccacgacctggtgatcgccgcggcgctcctctacttcgcgctggccatcataccggcgctcccaagcccgctccgctacgcggcctggccgctgtactggatcgcgcaggggtgcgtgtgcaccggcgtgtgggtcatcgcgcacgagtgcggccaccacgccttctcggactactcgctcctggacgacgtggtcggcctggtgctgcactcgtcgctcatggtgccctacttctcgtggaagtacagccaccggcgccaccactccaacacggggtccctggagcgcgacgaggtgttcgtgcccaagaagaaggaggcgctgccgtggtacaccccgtacgtgtacaacaacccggtcggccgggtggtgcacatcgtggtgcagctcaccctcgggtggccgctgtacctggcgaccaacgcgtcggggcggccgtacccgcgcttcgcctgccacttcgacccctacggccccatctacaacgaccgggagcgcgcccagatcttcgtctcggacgccggcgtcgtggccgtggcgttcgggctgtacaagctggcggcggcgttcggggtctggtgggtggtgcgcgtgtacgccgtgccgctgctgatcgtgaacgcgtggctggtgctcatcacctacctgcagcacacccacccgtcgctcccccactacgactcgagcgagtgggactggctgcgcggcgcgctggccaccatggaccgcgactacggcatcctcaaccgcgtgttccacaacatcacggacacgcacgtcgcgcaccacctcttctccaccatgccgcactaccacgccatggaggccaccaaggcgatcaggcccatcctcggcgactactaccacttcgacccgacccctgttgccaaggcgacctggcgcgaggccagggagtgcatctacgtcgagcccgaggaccgcaagggcgtcttctggtacaacaagaagttctga

SEQ ID NO: 53633 - protein, 446 aa, Zea mays
MESEAARLPPPPCKSCRHHRSFFSPGQEKRGERGEARCPPDLLCPDAAVTTSSVSVRSKMGAGGRMTEKEREKQEQLARATGGAAMQRSPVEKPPFTLGQIKKAIPPHCFERSVLKSFSYVVHDLVIAAALLYFALAIIPALPSPLRYAAWPLYWIAQGCVCTGVWVIAHECGHHAFSDYSLLDDVVGLVLHSSLMVPYFSWKYSHRRHHSNTGSLERDEVFVPKKKEALPWYTPYVYNNPVGRVVHIVVQLTLGWPLYLATNASGRPYPRFACHFDPYGPIYNDRERAQIFVSDAGVVAVAFGLYKLAAAFGVWWVVRVYAVPLLIVNAWLVLITYLQHTHPSLPHYDSSEWDWLRGALATMDRDYGILNRVFHNITDTHVAHHLFSTMPHYHAMEATKAIRPILGDYYHFDPTPVAKATWREARECIYVEPEDRKGVFWYNKKF

SEQ ID NO: 53634 - DNA, 1299 bp, Brassica napus
  CDS (1)..(1299)
atggtgagctgtgttttatcaaaatgtggtatcagacctctccctaggttctaccctaaacccacaaactcttttgcctctaacccatcacccactctcaaactcaacccgctacattctctcaactcccgaagtgtgttcttgcctagaacaagaaactgggcgttgaatgtggccacaccattaacaactctcgagactccaccggaggaagaagaagacgcgagtaggttcgaccttggtgcgcctcctcctttcaacttggctgacataagagcagccattcccaagcattgttgggtcaagaatccatggaggtctatgagttacgttgtgagagatgtagctatcgtttttggattggctgctgtagctgcttacttcaatagctggcttctctggcctctctactggtttgctcaaggaaccatgttctgggctctctttgttcttggccatgactgtggacatggtagcttctccaatgatccgaggttgaacagtgtagctggtcatcttcttcattcctcaattctagtcccttaccatggctggagaattagccacagaactcaccaccagaaccatgggcatgttgagaatgatgaatcttggcatcctttgcctgaaagcctctacaagaaactggaaaagactactctaaattttaggttcacactgccattcccaatgctcgcataccctttctacttgtggggaagaagtccagggaaaaatggttctcattttgatccagacagtgacttgtttcttcccaaggagaagaaagatgttgtgacatcaactgcatcttggactgcaatggctgctttgcttgtctgtctcaactttgtcatgggtccaatccaaatgctcaaactatatggcattccttactggatatttgtaatgtggttggactttgtgacttacttgcatcaccatggccatgaagacaagctcccttggtaccgtggaaaggaatggagttacctgagaggagggctcacaacactggaccgtgattatggatggatcaataacatccaccatgacattggaactcatgtgatacatcatcttttcccgcagatcccacattatcatctagtggaagcaacagaagcagctaaaccaataataggaaagtactacagagaaccgaaaaactctggacctttgccacttcacttattgggaagcctcataaaaagtatgaaacaagaccatttcgtaagcgatacaggagacgtcgtgtactatgaggcagatccaaaactcagtggacaaagaacttga

SEQ ID NO: 53635 - protein, 432 aa, Brassica napus
MVSCVLSKCGIRPLPRFYPKPTNSFASNPSPTLKLNPLHSLNSRSVFLPRTRNWALNVATPLTTLETPPEEEEDASRFDLGAPPPFNLADIRAAIPKHCWVKNPWRSMSYVVRDVAIVFGLAAVAAYFNSWLLWPLYWFAQGTMFWALFVLGHDCGHGSFSNDPRLNSVAGHLLHSSILVPYHGWRISHRTHHQNHGHVENDESWHPLPESLYKKLEKTTLNFRFTLPFPMLAYPFYLWGRSPGKNGSHFDPDSDLFLPKEKKDVVTSTASWTAMAALLVCLNFVMGPIQMLKLYGIPYWIFVMWLDFVTYLHHHGHEDKLPWYRGKEWSYLRGGLTTLDRDYGWINNIHHDIGTHVIHHLFPQIPHYHLVEATEAAKPIIGKYYREPKNSGPLPLHLLGSLIKSMKQDHFVSDTGDVVYYEADPKLSGQRT

SEQ ID NO: 53636 - DNA, 1314 bp, Brassica napus
  CDS (1)..(1314)
atggcgaacttggtcttgtcagaatgtggaataagacctctcccgagaatctacgccacacccagatccactcccctctctaccaacaaacccacctccttcaaattcagacaatccccttcttctccccggtttcgtctgaactctcgaaactgggcgttgaatgtaaccacacctctaacagtcgactcctcatcatctcctccaatcgaggaagaacccaaaacgcagagattcgacccaggcgctcctcctccgttcaacctagctgacatcagagcggcgatacctaagcattgctgggttaagaatccatggaagtctatgagttacgtcgtcagagacgtagccatcgtgttcgcactagctgctggagctgcttacctcaacaattggcttgtttggcctctctattggattgctcaaggaaccatgttctgggctctctttgttcttggccatgactgtggacatggaagcttctcaaatgatccgaggttgaacagtgtggtgggtcaccttcttcattcctctattctagtcccttaccatggctggagaattagccacagaactcaccaccagaaccatggacatgttgagaacgatgaatcttggcatcctatgtctgagaaaatctacaagagtttggacaaacccactcggttctttagatttacattgcctctcgtgatgctcgcttaccctttctacttgtgggcaagaagtccagggaagaagggttctcattaccatccagacagcgacttgttccttcctaaagagagaaacgatgttctcacttctaccgcttgttggactgcaatggctgttctgcttgtctgtctcaacttcgtgatgggtccaatgcaaatgctcaaactttatgtcattccttactggataaatgtaatgtggttggactttgtgacttacctgcatcaccatggtcatgaagataagctcccttggtaccgtgggaaggaatggagttacttgagaggaggacttacaacattggaccgggactacggattgatcaacaacatccatcacgacattggaactcatgtgatacatcatcttttccctcagatcccacattatcatctagtagaagcaacagaagcagctaaaccagtattagggaagtattatagggagcctgataagtctggacctttgccattacatttactgggaatcttagcaaaaagtattaaagaagatcattttgtgagcgatgaaggagatgttgtatactatgaagcagaccctaatctctatggagagatcaaggtaacagcagagtaa

SEQ ID NO: 53637 - protein, 437 aa, Brassica napus
MANLVLSECGIRPLPRIYATPRSTPLSTNKPTSFKFRQSPSSPRFRLNSRNWALNVTTPLTVDSSSSPPIEEEPKTQRFDPGAPPPFNLADIRAAIPKHCWVKNPWKSMSYVVRDVAIVFALAAGAAYLNNWLVWPLYWIAQGTMFWALFVLGHDCGHGSFSNDPRLNSVVGHLLHSSILVPYHGWRISHRTHHQNHGHVENDESWHPMSEKIYKSLDKPTRFFRFTLPLVMLAYPFYLWARSPGKKGSHYHPDSDLFLPKERNDVLTSTACWTAMAVLLVCLNFVMGPMQMLKLYVIPYWINVMWLDFVTYLHHHGHEDKLPWYRGKEWSYLRGGLTTLDRDYGLINNIHHDIGTHVIHHLFPQIPHYHLVEATEAAKPVLGKYYREPDKSGPLPLHLLGILAKSIKEDHFVSDEGDVVYYEADPNLYGEIKVTAE

SEQ ID NO: 53638 - DNA, 1290 bp, Brassica napus
  CDS (1)..(1290)
atggcgaacttggtcttatccgaatgtggcataagacctctccccagaatctacaccacacccagatccactttcctctccaacaccaccttcaaactcaaaccatcacctgcgtttcgtctgaatgggttctccactaagaactgggcgttgaatgtcaccacgcctctaacagttgactcatctcctccaacctcagaagaacacgaaacgcagaggttcgacccaggcgcccctcctccgttcaacttagctgatatcagagcagctattcctaagcattgttgggtgaagaacccatggaagtctatgagttatgttgtgagagatgttgccattgtgtttgcattggctgctggagctgcttacctcaacagctggcttgtttggcctctctattggcttgctcaaggaaccatgttctgggctctctttgttcttggccatgactgtggacatggtagcttctcaaatgatccaaggttaaacagtgtggttggtcaccttcttcattcctcaatcctggtcccgtaccatggctggagaattagccacaggactcaccaccagaaccatggacatgttgagaacgatgaatcatggcatcctatgtctgagaaaatcttcaagactttggataaaccaactcggttctttagatttacactgcctctcgtgatgctcgcgtaccctttctacttgtgggcacgaagtccggggaagaagggttctcattaccatccggacagcgacttgttcctccctaaagagaagaatgatgttcttacttctactgcttgttggactgcaatggctgctttgcttgtctgtctcaactttgtgatgggtccaatgcaaatgctcaaactctatggaattccttactggataaatgtaatgtggttggactttgtgacttacctgcatcaccatggtcatgaagataagctcccttggtaccgtgggaaggaatggagttacttgagaggaggacttacaacattggatcgtgactacggagtgatcaataacattcatcacgacattggaactcatgtgatacatcatcttttcccacagatcccacattatcatctagtagaagcaacagaagcagctaaaccagtattagggaagtattacagggagcctaataagtctggacctttgccattacatttacttggaatcttagcaaaaagcatgaaagaagatcattatgtgagcgacgaaggagatgttgtatactataaagcagatcctaatctatatggagaggtcaaagtttaa

SEQ ID NO: 53639 - protein, 429 aa, Brassica napus
MANLVLSECGIRPLPRIYTTPRSTFLSNTTFKLKPSPAFRLNGFSTKNWALNVTTPLTVDSSPPTSEEHETQRFDPGAPPPFNLADIRAAIPKHCWVKNPWKSMSYVVRDVAIVFALAAGAAYLNSWLVWPLYWLAQGTMFWALFVLGHDCGHGSFSNDPRLNSVVGHLLHSSILVPYHGWRISHRTHHQNHGHVENDESWHPMSEKIFKTLDKPTRFFRFTLPLVMLAYPFYLWARSPGKKGSHYHPDSDLFLPKEKNDVLTSTACWTAMAALLVCLNFVMGPMQMLKLYGIPYWINVMWLDFVTYLHHHGHEDKLPWYRGKEWSYLRGGLTTLDRDYGVINNIHHDIGTHVIHHLFPQIPHYHLVEATEAAKPVLGKYYREPNKSGPLPLHLLGILAKSMKEDHYVSDEGDVVYYKADPNLYGEVKV

SEQ ID NO: 53640 - DNA, 1152 bp, Brassica juncea; BPR 559
  CDS (1)..(1152)
atggttgttgctatggaccagcgcaccaatgtgaacggagatgccggtgcccggaaggaagaagggtttgatccgagcgcacaaccgccgtttaagatcggggacataagggctgcgattcctaagcattgttgggtgaaaagtcctttgagatctatgagctacgtagccagagacatttgtgccgtcgcggctttggccattgccgccgtgcattttgatagctggttcctctgtcctctctattgggtcgcccaaggaacccttttctgggccatcttcgtcctcggccacgactgtggacacgggagtttctcagacattcctctgctgaatagtgtggttggccgtattcttcattccttcatcctcgttccttaccatggttggagaataagccatcggacacaccaccagaaccatggccatgttgaaaacgacgagtcttgggttccgttaccagaaaggttatacaagaatttaccccacagtactcggatgctcagatacactgtccctctgcccatgctcgcttacccgatctatctgtggtacagaagtcctggaaaagaagggtcacattttaacccatacagtggtttatttgctccaagcgagagaaagcttattgcaacttcgactacttgctggtccataatgttggcaattcttatctgtctttccttcctcgttggtccagtcacagttctcaaagtatacggtgttccttacattatctttgtgatgtggctggacgctgtcacttacttgcatcaccatggtcatgatgagaagttgccttggtacagaggcgaggaatggagttacttacgtggaggattaacaactattgatagagattacggaattttcaacaacattcatcacgacattggaactcacgtgatccatcatcttttcccacaaatccctcactatcacttggtcgatgctacaaaagcagctaaacatgtgttgggaagatactacagagaaccaaagacgtcaggagcaataccgatccacttggtggagagtttagcagcaagtattaagaaagatcattacgtcagtgacactggtgacattgtcttctacgggactgatccagatctctacgtttatgcttctgacaaatctaaaatcaattaa

SEQ ID NO: 53641 - protein, 383 aa, Brassica juncea; BPR 559
MVVAMDQRTNVNGDAGARKEEGFDPSAQPPFKIGDIRAAIPKHCWVKSPLRSMSYVARDICAVAALAIAAVHFDSWFLCPLYWVAQGTLFWAIFVLGHDCGHGSFSDIPLLNSVVGRILHSFILVPYHGWRISHRTHHQNHGHVENDESWVPLPERLYKNLPHSTRMLRYTVPLPMLAYPIYLWYRSPGKEGSHFNPYSGLFAPSERKLIATSTTCWSIMLAILICLSFLVGPVTVLKVYGVPYIIFVMWLDAVTYLHHHGHDEKLPWYRGEEWSYLRGGLTTIDRDYGIFNNIHHDIGTHVIHHLFPQIPHYHLVDATKAAKHVLGRYYREPKTSGAIPIHLVESLAASIKKDHYVSDTGDIVFYGTDPDLYVYASDKSKIN

SEQ ID NO: 53642 - DNA, 1491 bp, Glycine max; cv. Resnick
  CDS (115)..(1278)
taggcacctagctagtagctacaatatcagcacttctctctattgataaacaattggctgtaatgccgcagtagaggacgatcacaacatttcgtgctggatactttttgttttatgggtctagcaaaggaaacaataatgggaggtggaggccgtgtggccaaagttgaaattcagcagaagaagcctctctcaagggttccaaacacaaagccaccattcactgttggccaactcaagaaagccattccaccgcactgctttcagcgttccctcctcacttcattgtcctatgttgtttatgacctttcattggctttcattttctacattgccaccacctacttccacctcctccctcaccccttttccctcattgcatggccaatctattgggttctccaaggttgcattcttactggcgtgtgggtgattgctcacgagtgtggtcaccatgccttcagcaagtacccatgggttgatgatgttatgggtttgaccgttcactcagcacttttagtcccttatttctcatggaaaataagccatcgccgccaccactccaacacgggttcccttgaccgtgatgaagtgtttgtcccaaaaccaaaatccaaagttgcatggtacaccaagtacctgaacaaccctctaggaagggctgcttctcttctcatcacactcacaatagggtggcctatgtatttagccttcaatgtctctggcagaccctatgatggttttgcaagccactaccacccttatgctcccatatattctaaccgtgagaggcttctgatctatgtctctgatgttgctttgttttctgtgacttactctctctaccgtgttgcaactatgaaagggttggtttggctgctatgtgtttatggggtgccattgctcattgtgaacggttttcttgtgactatcacatatttgcagcacacacactttgccttgcctcattacgattcatcagaatgggactggctgaagggagctttggcaactatggacagagattatgggattctgaacaaggtgtttcatcacataactgatactcatgtggctcaccatctcttctctacaatgccacattaccatgcaatggaggcaaccaatgcaatcaagccaatattgggtgagtactaccaatttgatgacacaccattttacaaggcactgtggagagaagcgagagagtgcctctatgtggagccagatgaaggaacatccgagaagggcgtgtattggtacaggaacaagtattgatggaccaagcaatgggccatagtgggagttatggaagttttgtcacttatcacttaattagtagaatgttataaataagtggatttgccgcgtaatgacttgtgtgcattgtgaaacagcttgtagcgatccatggttataatgtaaaaatatgtggaaaggggtctggttaaaaaaaaaaaaaaaaaagcggccgttttaaaggaaacaagg

SEQ ID NO: 53643 - protein, 387 aa, Glycine max; cv. Resnick
MGLAKETIMGGGGRVAKVEIQQKKPLSRVPNTKPPFTVGQLKKAIPPHCFQRSLLTSLSYVVYDLSLAFIFYIATTYFHLLPHPFSLIAWPIYWVLQGCILTGVWVIAHECGHHAFSKYPWVDDVMGLTVHSALLVPYFSWKISHRRHHSNTGSLDRDEVFVPKPKSKVAWYTKYLNNPLGRAASLLITLTIGWPMYLAFNVSGRPYDGFASHYHPYAPIYSNRERLLIYVSDVALFSVTYSLYRVATMKGLVWLLCVYGVPLLIVNGFLVTITYLQHTHFALPHYDSSEWDWLKGALATMDRDYGILNKVFHHITDTHVAHHLFSTMPHYHAMEATNAIKPILGEYYQFDDTPFYKALWREARECLYVEPDEGTSEKGVYWYRNKY

SEQ ID NO: 53644 - DNA, 1749 bp, Triticum aestivum
  CDS (165)..(1328)
cgcgtccgcggctcctcccccccgcacaaaccactcgttcgtcccgtcaacaagaggagcagaggcgccggagagggaagagggtgcgcgcgctcgcgtgtgtggtgtccgccggcccgatctgccctgctcccgccgcctcgaccaccacccctatcagcatcatgggtgccggcggcaggatgacggagaaggagcgggagaagcaggagcagctcggccgcgccaacggcggcgcagcctaccagcgctcgccgacggacaagccgccgttcacgctgggtcagatcaagaaggcaatcccgcctcactgcttccagcgctcgatcatcaagtccttctcctacgtggtccatgacctggtcatcgtcgcggccctgctgtacgcggcgctggtttggatccctaccctcccgaccgtgctgcagctgggcgcctggccgctctactggatcgtgcagggctgcgtcatgaccggcgtctgggtcatcgcccacgagtgcggccaccacgccttctccgactactcgctgctcgacgacaccgtcggcctggtgctccactcgtggctgctcgtcccctacttctcgtggaagtacagccaccgtcgccaccactccaacaccgggtcgctggagcgtgatgaggtgttcgtccccaagcagaaggaggcgctggcgtggtacaccccttacatctacaacaaccccgtcggccgtctggtgcacatcgtcgtgcagctcaccctcgggtggccgctgtacctggcgctcaacgcctcaggccgcccgtacccgcggttcgcctgccacttcgacccctacggcccgatctacaacgaccgggagcgagcccagattttcatctcagacgtcggagtgctggccgtgtcattggctctgctgaagctcgtgtcgtcgttcgggttctggtgggtggtgcgggtctacggcgtgccgctgctgatcgtgaacgcttggctggtcctgatcacctacctgcagcacacccacccggcgctgccgcactacgactcgacggagtgggactggctgcgcggggcgctcgccaccatggaccgcgactacggcatcctcaaccgcgtgttccacaacatcacggacacgcacgtggcgcaccacctcttctccaccatgccgcactaccacgccatggaggccaccaaggcgatcaagcccatcctcggcgagtactaccagttcgaccccacccccgtcgccaaggccacatggcgcgaggccaaggagtgcatctacgtcgagcccgaggaccgcaagggggtcttctggtacagcaacaagttctagccgccaagatccatcaactgtgctggagaaagaactcagagaagagatcctaccaagtaattccatccatctacctacagtccatatggttagtctttagatagcagagggcatttgggcacaaaagaagactactattaccgtgccaatgctagaagagctgagtggtgcaaggaagagtagcgtgtccgtgactttggtcagttccgtctttactttttctctgcgttctagtcgtcggcttaggtttggccggcggtcatcgttggtgtccgtggccgtggacatggccgcgtgtgttgtgtgtgcgtctgtcattgcattggcgtcatctccccccgtccgtgtcatgttgttgtagaccatttcgtgtttatggcggaataactgatcgtcgaaggaagggcaacttttttgagta

SEQ ID NO: 53645 - protein, 387 aa, Triticum aestivum
MGAGGRMTEKEREKQEQLGRANGGAAYQRSPTDKPPFTLGQIKKAIPPHCFQRSIIKSFSYVVHDLVIVAALLYAALVWIPTLPTVLQLGAWPLYWIVQGCVMTGVWVIAHECGHHAFSDYSLLDDTVGLVLHSWLLVPYFSWKYSHRRHHSNTGSLERDEVFVPKQKEALAWYTPYIYNNPVGRLVHIVVQLTLGWPLYLALNASGRPYPRFACHFDPYGPIYNDRERAQIFISDVGVLAVSLALLKLVSSFGFWWVVRVYGVPLLIVNAWLVLITYLQHTHPALPHYDSTEWDWLRGALATMDRDYGILNRVFHNITDTHVAHHLFSTMPHYHAMEATKAIKPILGEYYQFDPTPVAKATWREAKECIYVEPEDRKGVFWYSNKF

SEQ ID NO: 53646 - DNA, 1242 bp, Oryza sativa (japonica cultivar-group)
  CDS (1)..(1242)
atggcccggctgctactctccggcgtcgcgccgctccccctcctcccctgccgccgtcgcgccattgcatttgcgctcccacttgggaatgtccgcctccgcctccgtgtggccgcacccaccagccgcgtggccaccgtggaggaggacgacaatgaaaataatgctcctcctcctccttgtgaggacttcgacccgggcgcggcgcccccgtttggtctggccgacatccgcgccgctatccccaagcactgttgggtgaaggacccctggcgatccatggggtacgtgctgcgcgacgtggtggtggtgttcgccctcgctgccgccgccgcgcgcctccacagctgcctcgcctggccgctctactgggcggcgcagggaaccatgttctgggcgctcttcgtcctcggccacgactgcgggcacgggagcttctccaacaactcgaggctcaacagcgtgatgggccacatactccactcctccatcctcgtaccctaccatggctggaggattagccacaggacgcatcatcagaaccatggccatgtcgacaaggatgagtcctggcatcccctccccgagcggctgtacaggagccttaacagagccacccggatgctccgcttctccatacccttccccatgctcgcctacccattctacctgtggtctcggagcccaggaaagtctggttcgcatttccatcccagcagcgacctgttccagcccaacgaaaggaacgatgtgctgacatccacagcgtgctgggtggccatggctgccctcctcgcaggcctcaccttcctcatgggacccctcctcatgctcaacctctactttgtcccttactggatttttgttatgtggctggacttcgtcacctacttgcaccatcacggccacaacgacaagctgccctggtaccgtggcaaggaatggagctatttgcggggaggactgacgacagtggacagggactatgggtggatcaacaacatccaccacgacatcgggacacatgtcattcaccatcttttcccccaaatcccgcattaccatctaattgaggcgacggaagcagcaaagggtgtgatggggaaatactacagggagccggacaagtctgggccttttcccttacacctgtttggagcgctgtcccggagcttgaaacgcgaccactatgtcagcgacaccggagatgtggtctactaccagaccgaccctgctaactaa

SEQ ID NO: 53647 - protein, 413 aa, Oryza sativa (japonica cultivar-group)
MARLLLSGVAPLPLLPCRRRAIAFALPLGNVRLRLRVAAPTSRVATVEEDDNENNAPPPPCEDFDPGAAPPFGLADIRAAIPKHCWVKDPWRSMGYVLRDVVVVFALAAAAARLHSCLAWPLYWAAQGTMFWALFVLGHDCGHGSFSNNSRLNSVMGHILHSSILVPYHGWRISHRTHHQNHGHVDKDESWHPLPERLYRSLNRATRMLRFSIPFPMLAYPFYLWSRSPGKSGSHFHPSSDLFQPNERNDVLTSTACWVAMAALLAGLTFLMGPLLMLNLYFVPYWIFVMWLDFVTYLHHHGHNDKLPWYRGKEWSYLRGGLTTVDRDYGWINNIHHDIGTHVIHHLFPQIPHYHLIEATEAAKGVMGKYYREPDKSGPFPLHLFGALSRSLKRDHYVSDTGDVVYYQTDPAN

SEQ ID NO: 53648 - DNA, 1080 bp, Nostoc sp. PCC 7120
  CDS (1)..(1080): transl_table=11
gtgcaatcaactacaatcccctccgataattctcctagctttggccaatcagagaataccactacactgccatttactcttcaggatttaaaagcggctattccggctgagtgttttcaacccaatgtcagcaaatcactattctacttttttcgtgatgttctgattgtcggtttgttatacgcagtcgcccattacctagattcttggtatttttggccaattttctggttaatccaaggaacgatgttttgggctttgtttgtggttggacatgactgcggacaccaatctttttctaagcataaatggctcaatgatttaattgggcatctgactcacaccttcatattagtcccttatcacggttggcgtattagtcacagaactcatcataaaaatactggcaatatcgataatgatgaaagctggtatcctgtgactcaatcgcaatacaaggaaatgccattagggcaaaagataggccgttattacgtatttctactggcttatccagtgtatttgtttaagcgttctcctaataaggaaggctctcattttttacctagtagctctcttttcaagccatcagaaaaatgggatgttatcaccagtaccgtactgtggagttgtatggttggtttgttaggtttcctaacttatcaatggggctggatgtggttgttaaaatactatgctgcaccatacatagtgtttgtaatttggcttgatttagtcacattcctacaccacactgaagctgatcttccctggtatcgtggcgaagattggactttcctaaaaggtgcaatttccagtattgaccgcaattatggtttagtcaatcacatccatcatgatattggtactcatgtagcacaccacattttcttgaatattcctcactataatttgctgaaggctaccgaggcaattaaaccagtcatgggtgagtattaccgcaagtcagaagaacctatttggaagtcattgtggcgttcttgcgtgagttgccattttgtccccgatacaggcgggaaagtttactacacttctaacaatcaagtagtgaataagtag

SEQ ID NO: 53649 - protein, 359 aa, Nostoc sp. PCC 7120
MQSTTIPSDNSPSFGQSENTTTLPFTLQDLKAAIPAECFQPNVSKSLFYFFRDVLIVGLLYAVAHYLDSWYFWPIFWLIQGTMFWALFVVGHDCGHQSFSKHKWLNDLIGHLTHTFILVPYHGWRISHRTHHKNTGNIDNDESWYPVTQSQYKEMPLGQKIGRYYVFLLAYPVYLFKRSPNKEGSHFLPSSSLFKPSEKWDVITSTVLWSCMVGLLGFLTYQWGWMWLLKYYAAPYIVFVIWLDLVTFLHHTEADLPWYRGEDWTFLKGAISSIDRNYGLVNHIHHDIGTHVAHHIFLNIPHYNLLKATEAIKPVMGEYYRKSEEPIWKSLWRSCVSCHFVPDTGGKVYYTSNNQVVNK

SEQ ID NO: 53650 - DNA, 1080 bp, Anabaena variabilis ATCC 29413
  CDS (1)..(1080): transl_table=11
gtgcaatcaactacaatcccctccgataattctcctagctttgaccaatcagagaatacaactacgctgccatttactcttcaggatttaaaagcagctattccggctgaatgttttcaaccaaacgtgggcaaatcactgttttacttttttcgtgatgtagtgattgttagctcactatacgcagttgctcattacctagattcttggtatttctggccaattttctggttaatgcaaggaacgatgttttgggctttgtttgtggttggacatgactgcggacaccaatctttttctaagcataaatggctcaatgatttagttgggcatctgactcacaccttcatattagtcccttatcacggttggcgtattagtcacagaactcatcacaaaaatactggcaatatcgataatgatgaaagctggtatcctgtgactgagtcgcaatacaaggaaatgccattagggcaaaagataggccgttattacgtctttctactggcttatccagtgtatttgtttaagcgttctcctaataaggaaggctctcattttttacctagtagccctcttttcaagccatcagaaaaatgggatgtcatcaccagcactgtactgtggacttgtatggttgcttcgttaggtttcctaacttatcaatggggctggatgtggttgttaaaatactacgctgcaccatatatcgtgtttgtaatctggcttgatttagtcacattcctacaccacactgaggcagatatcccctggtatcgtggcgaagattggactttcctcaaaggtgcaatttctagcattgaccgcaattatggtttagtcaatcatatccatcatgatatcggcactcatgtagcacaccacattttcttgaatatccctcactataatttgctgaaggctaccgaggctattaaaccagtcatgggtgaatattaccgcaagtcagaagaacctatttggaagtcattgtggcgttcttgcgtgagttgccattttgtccccgatactggtgggaaagtttactacacttctaacaatcaagtagtgaataagtag

SEQ ID NO: 53651 - protein, 359 aa, Anabaena variabilis ATCC 29413
MQSTTIPSDNSPSFDQSENTTTLPFTLQDLKAAIPAECFQPNVGKSLFYFFRDVVIVSSLYAVAHYLDSWYFWPIFWLMQGTMFWALFVVGHDCGHQSFSKHKWLNDLVGHLTHTFILVPYHGWRISHRTHHKNTGNIDNDESWYPVTESQYKEMPLGQKIGRYYVFLLAYPVYLFKRSPNKEGSHFLPSSPLFKPSEKWDVITSTVLWTCMVASLGFLTYQWGWMWLLKYYAAPYIVFVIWLDLVTFLHHTEADIPWYRGEDWTFLKGAISSIDRNYGLVNHIHHDIGTHVAHHIFLNIPHYNLLKATEAIKPVMGEYYRKSEEPIWKSLWRSCVSCHFVPDTGGKVYYTSNNQVVNK

SEQ ID NO: 53652 - DNA, 1074 bp, Trichodesmium erythraeum IMS101
  CDS (1)..(1074): transl_table=11
gtgcaatcaaatactgttcttgatcaaacaaatgatacaaagtccatagagttgccctttactcttcaagaggtgaaagcagctattcctgcccactgttttaaatcttccctctggaggtctcttagctacttctttctggatattggcattatcgcaggtctatatggtattgcttacagtttagattcatggttcttttttcccttcttctggttaatgcaaggaactatgttttgggctttatttgtagtcgggcatgactgcggtcatggttctttctcaaaatacaaatgggttaataatttagttggacacttgtgtcatactcctattctcgtgccattccatggttggcgtattagtcataggactcatcatgctaatacaggaaatattgaaactgatgaaagttggtacccagtttctgagagcaagtacaatatgatgctctggtatgaaaagctatttcgcttctatttattgttattagcttatcctctctacttatttaagcgatcgcctaaccgcgaaggttcccactttgtccccaacagtcctttattccgtccccatgaaaaatcggatgttttaactagttcagcactgtggatgttaatggtaggttttctcggttgtctaacttatcaatttggttgggtctttctagtaaaatattatctagttccttatattatatttgttatctggctagatttagtaactttcctacatcatactgactcagatattccttggtatcgtggaaaggactggtattttctcaagggcgcgttatcaagtattgaccgcgactatggtttcattaactctattcatcatgacattggtactcatgttgctcatcacatattcctaaatatgcctcattatcatttgaagacagcaacggaggcaattaaacctatcctgggtgaatattatcacaagtcaagcgaaccaatatggaagagttttattaattcttacatgaattgtcattttgtctcagatacaggttctcaaatatattatcgatcagcttggaaaaagccttcagaggaattgagctga

SEQ ID NO: 53653 - protein, 357 aa, Trichodesmium erythraeum IMS101
MQSNTVLDQTNDTKSIELPFTLQEVKAAIPAHCFKSSLWRSLSYFFLDIGIIAGLYGIAYSLDSWFFFPFFWLMQGTMFWALFVVGHDCGHGSFSKYKWVNNLVGHLCHTPILVPFHGWRISHRTHHANTGNIETDESWYPVSESKYNMMLWYEKLFRFYLLLLAYPLYLFKRSPNREGSHFVPNSPLFRPHEKSDVLTSSALWMLMVGFLGCLTYQFGWVFLVKYYLVPYIIFVIWLDLVTFLHHTDSDIPWYRGKDWYFLKGALSSIDRDYGFINSIHHDIGTHVAHHIFLNMPHYHLKTATEAIKPILGEYYHKSSEPIWKSFINSYMNCHFVSDTGSQIYYRSAWKKPSEELS

SEQ ID NO: 53654 - DNA, 1050 bp, Crocosphaera watsonii WH 8501
  CDS (1)..(1050): transl_table=11
atgcagcaaccaatgactgtcaataggccagaacccaaagtggtcgaccttccctttagcttaaaagatgttaaagaggcgattcctccccattgttttgagtcctctgccataagatccttagcttattttttttgggatatttttgtaatatctgttctttatgttatcgctgattatctagattcttggtttttttggcctattttttgggtcatgcaaggaactatgttttgggcgttatttgtggtaggacatgattgtggccatggttctttttcccgctacaaatggttaaataatcttatgggtcatctttcccatacccctattttagtcccgtttcatggttggcgtattagtcatcgcacccatcataaaaatacaggtaatctcgacacagacgaaagttggtatcctgttacggagtctaaatatgatgagatggactggttagaaaaatttgcccgttttaaactggttttatttctctatcctctttatctatttaagcgttccccaggcagaaaaggaactcattttgatcccaaaagtgatctatttcgtccctctgaaaaatgggatgttttaaccagtacaatttgctgtagtttaatggtggctttcttaggcgttttgacctatcagttcggctttttgtggttacttaaatattatttgggtccctatattgtctttgtagtttggttagatttagtaacattcttacaccacactgatcccgatgttccctggtatcggggtagagattggtactttttgaaaggggctttatccacagtggatcatgattacggatttatcaataatatccatcataatatcggaacccatgtggctcaccatatctttctgaccatgcctcattatcatctaaaaacagcaacggaagccattaagcctgttttaggtgaatattatcgtaagtcagattactccattttagaggcgtttattcggggttacaacatttgtcatgtggttcccgatgaaggaggaaaagtttactgtgagccgagagagttgtaa

SEQ ID NO: 53655 - protein, 349 aa, Crocosphaera watsonii WH 8501
MQQPMTVNRPEPKVVDLPFSLKDVKEAIPPHCFESSAIRSLAYFFWDIFVISVLYVIADYLDSWFFWPIFWVMQGTMFWALFVVGHDCGHGSFSRYKWLNNLMGHLSHTPILVPFHGWRISHRTHHKNTGNLDTDESWYPVTESKYDEMDWLEKFARFKLVLFLYPLYLFKRSPGRKGTHFDPKSDLFRPSEKWDVLTSTICCSLMVAFLGVLTYQFGFLWLLKYYLGPYIVFVVWLDLVTFLHHTDPDVPWYRGRDWYFLKGALSTVDHDYGFINNIHHNIGTHVAHHIFLTMPHYHLKTATEAIKPVLGEYYRKSDYSILEAFIRGYNICHVVPDEGGKVYCEPREL

SEQ ID NO: 53656 - DNA, 1383 bp, Descurainia sophia
  CDS (3)..(1352)
gaatggcgaacttggtcttatcagaatgtgggataagagctctccccagaatctacaccacacccagatccagtttcgtctctaacaccaccaccttcagtttcagaccatcatcttcttcgtcttcttccaacacaaagtctctcgcttttcgcctgaattctcgaaacgggttcttcgcgaagaattggggattgaatgtgagcacaccgttaacgacaccaatagttgaggagtctccattggaggaagaacacgaagatacgcaaagattcgacccaggtgcgcgtcctcccttcaatttagccgatatcagagctgctatacctaagcattgttgggttaagaatccatggaagtctatgagttatgtcgtgagagatgtcaccatcgtcttcgcattggctgctggtgctgcttacctcaacaattggctcgtttggcctctctattggctcgctcaaggaaccatgttttgggctctctttgttcttggtcatgactgtggacacggtagcttctcaaatgatccgaggttgaacagtgtggtgggtcatcttcttcattcctcaattctggtcccttaccatggctggagaattagccacagaactcaccaccagaaccatggacatgttgaaaacgacgagtcttggcatcctatgtctgagaaaatctacaggggtttggacaaaccgaccagattctttagatttacactgcctctcgtgatgctcgcataccctttttacttgtgggctcgaagtccggggaaaaagggttctcattaccatccggacagcgatttgttcctccctaaagagaaaaaggatgtcctcacttctactgcttgttggactgcgatggctgctctgcttgtctgtctcaacttcaccatcggtccaattcaaatgctcaaactctacggaatcccttattggataaatgtaatgtggttggactttgtgacctacctgcatcaccacggccatgaagataagctcccttggtaccgtgggaaggaatggagttacctgagaggaggacttacaacattggatcgtgactacgggttgatcaataacatccatcacgacattggaactcatgtgatacatcatcttttcccgcagatcccacattaccatctagtagaagcaacagaagcggctaaaccagtattagggaagtattacagagagcctgataagtctggtcctttgccattacatttactggaaattctagcaaaaagtattaaagaagatcattacgtgagcgacgaaggagatgttgtatactataaagcagatcccaatctctacggagaggtcaaagtgagagcagattgaaatgaagcaggcagagatagaagagagaagc

SEQ ID NO: 53657 - protein, 449 aa, Descurainia sophia
MANLVLSECGIRALPRIYTTPRSSFVSNTTTFSFRPSSSSSSSNTKSLAFRLNSRNGFFAKNWGLNVSTPLTTPIVEESPLEEEHEDTQRFDPGARPPFNLADIRAAIPKHCWVKNPWKSMSYVVRDVTIVFALAAGAAYLNNWLVWPLYWLAQGTMFWALFVLGHDCGHGSFSNDPRLNSVVGHLLHSSILVPYHGWRISHRTHHQNHGHVENDESWHPMSEKIYRGLDKPTRFFRFTLPLVMLAYPFYLWARSPGKKGSHYHPDSDLFLPKEKKDVLTSTACWTAMAALLVCLNFTIGPIQMLKLYGIPYWINVMWLDFVTYLHHHGHEDKLPWYRGKEWSYLRGGLTTLDRDYGLINNIHHDIGTHVIHHLFPQIPHYHLVEATEAAKPVLGKYYREPDKSGPLPLHLLEILAKSIKEDHYVSDEGDVVYYKADPNLYGEVKVRAD

SEQ ID NO: 53658 - DNA, 1360 bp, Chlamydomonas reinhardtii
  CDS (32)..(1288)
cctcaccagatacttagtaacaaacagaaagatgcagtgcctgtctcgctccagcctgcgggctcccaccctcagcacccgcgctcgcgcggcgcctgtcctccggcgctccgtggtgaaggtcgccaacgtcgctgctatccctgaggcgccccagcaggaccgcttcaagcgcaacgcggatggcacctacgacctgtccgcgcctcctccgttcactctgcaagacctgcgcaacgccatccctgctcactgctgggagaagaacaccttccgctcgatggctcacctggcgctggacgtcggcatcgtgttcggcctggctgccgtggcgttcaccgtgaaccagtggtggatgtggcccctgtactgggttgctcagggtaccatgttctgggctctgtttgtggtcggccacgactgcggccaccagtctttctcaaacaacaaggcactgaacgacttcatcggccacctgacccactcgtccatcctggtgccctaccacggctggcgcatcagccaccgcactcaccacgccaaccacggccacgttgagaacgacgagtcgtggcaccccgtgaccaagaagctgtacgaccacctggagcccatggcccgcgtcggccgcctgtcgatgccctgggcgctgttcgccttccccttctacctgtggaagcgcagccccggcaaggagggctcgcactacgaccccgagtgcgacctgttcaccgccgctgagcgcaaccaggtgctgaccaccaacgcctacatgctgggcatggtggcggtgctggccgcccgcaccatcaagctgggccccctggccatgttcaacctgtacctgatcccctactggatcaacgtggtgtggctggacattgtgaactacctgcaccatcacggctcgcacgaccagaacgagaagatgccctggtaccgcggcgaggagtggagctacctgcgcggtggcctgaccaccatcgaccgtgactacggcatcttcaacaagatccaccacgacatcggcacccacgtcgtgcaccacctgttcccccagattccccactacaaccttgaggaggctaccgaggccgtcaagccggtgatgggcccctactaccgcgagcccatgaagagccccggccccctgcccacccacctggtggagcccctgatccgctcgttcaccaacgaccactacgtggccgacagtggcgacatcgtctactaccagaaggaccccaacttcccctcggtgggcaaggcggttgccggcaaggcctaaaccgccccctggcgatacctcgtccggagctagcgggcagcggtggacctgccgcgttatggtagtccatct

SEQ ID NO: 53659 - protein, 418 aa, Chlamydomonas reinhardtii
MQCLSRSSLRAPTLSTRARAAPVLRRSVVKVANVAAIPEAPQQDRFKRNADGTYDLSAPPPFTLQDLRNAIPAHCWEKNTFRSMAHLALDVGIVFGLAAVAFTVNQWWMWPLYWVAQGTMFWALFVVGHDCGHQSFSNNKALNDFIGHLTHSSILVPYHGWRISHRTHHANHGHVENDESWHPVTKKLYDHLEPMARVGRLSMPWALFAFPFYLWKRSPGKEGSHYDPECDLFTAAERNQVLTTNAYMLGMVAVLAARTIKLGPLAMFNLYLIPYWINVVWLDIVNYLHHHGSHDQNEKMPWYRGEEWSYLRGGLTTIDRDYGIFNKIHHDIGTHVVHHLFPQIPHYNLEEATEAVKPVMGPYYREPMKSPGPLPTHLVEPLIRSFTNDHYVADSGDIVYYQKDPNFPSVGKAVAGKA

SEQ ID NO: 53660 - DNA, 1401 bp, Aspergillus niger
  CDS (1)..(1401)
atgtcttccacagctctccccaagcgcgttgcgctgcaccgcaatgctacggactcgtccgtccccagctcggtcaccccctccccgctggacagccctcgccagtccccttcgaccacttccctgtcgtcgttggcgtcggaggcagaggccagcggcaagatgctggatacctatggcaacgagttcaagatcccggattataccatcaagcagatccgtgatgccattcccgctcattgctatgagcgcaaagctctcaccagcttgtactatgtcttccgggatgtcttctggctcgcgaccatcttctatgtcttccacaactacgtgacccctgagaccgtcccttacaagcccgcaagagtcgtgctgtgggctctttacaccatcgtgcagggtctgttcggtaccggtgtctgggttttggctcacgagtgcggccaccaggctttctctccgtccaaggttctcaacgacactgttggttggatctgccattccgccctgctggtgccctacttctcctggaagatctcccacggaaagcaccacaaggccaccggtaacattgctcgcgacatggtgttcgtgcccaagacccgggaccagtatgcctctcgcgtcggcaaggctatgcacgaactcaatgagttgatggaggaaactcccatcgccactgccctcaacctccttctccagcagctcttcggttggcccatgtacctgctcaccaacgtcaccggtcacaacaaccatgaacgtcagcctgagggtcgtggaaagggcaagcagaacggctacttcggcggtgtcaaccacttcaacccatctagccctctgtacgaggccaaggatgcgaagctgattgtcctgagtgacatcggtcttgccattgtcgggagcattctgtacttggtcggctccaagtacggctggatgaaccttctggtttggtacggtatcccctacctctgggtgaaccactggctggtcgccatcacctacctccagcacaccgatcccactctcccccactaccagcctgatgtctggaacttcgcccgcggtgccgccgccaccatcgaccgtgacttcggcttcgtcggccgtcacatcttccacggtatcattgagacccacgttctccaccactatgtcagcaccatccccttctacaacgccgatgaggccagcgaggccatcaagaaggtcatgggatctcactaccggaccgaagcccacactggctggaccggattcttcaaggctctctggactagtgcccgtgtgtgccactgggttgagcccactgagggcgccaagggtgagagctctggagtgctcttctaccgtaacacgaacggcattggagttcctcctgccaagcttgaaaaatag

SEQ ID NO: 53661 - protein, 466 aa, Aspergillus niger
MSSTALPKRVALHRNATDSSVPSSVTPSPLDSPRQSPSTTSLSSLASEAEASGKMLDTYGNEFKIPDYTIKQIRDAIPAHCYERKALTSLYYVFRDVFWLATIFYVFHNYVTPETVPYKPARVVLWALYTIVQGLFGTGVWVLAHECGHQAFSPSKVLNDTVGWICHSALLVPYFSWKISHGKHHKATGNIARDMVFVPKTRDQYASRVGKAMHELNELMEETPIATALNLLLQQLFGWPMYLLTNVTGHNNHERQPEGRGKGKQNGYFGGVNHFNPSSPLYEAKDAKLIVLSDIGLAIVGSILYLVGSKYGWMNLLVWYGIPYLWVNHWLVAITYLQHTDPTLPHYQPDVWNFARGAAATIDRDFGFVGRHIFHGIIETHVLHHYVSTIPFYNADEASEAIKKVMGSHYRTEAHTGWTGFFKALWTSARVCHWVEPTEGAKGESSGVLFYRNTNGIGVPPAKLEK

SEQ ID NO: 53662 - DNA, 1797 bp, Perilla frutescens
  CDS (222)..(1538)
ggcacgagagaaaatccaaatcaacaagttgggattcttggaagccataaatttgaggagagaatcccttgtattatctactaacttaagcatatacatacatattctgcaaacccctcaagtccacacactattctctctctttctctctcattctagtgagagaaccccaataaaggtgaaatcttgattactttcagagttggggctctctctctgaaatggcgagttgggtgttatcagaatgtggtttaaggccacttccaagaatataccccaagccaagaactggccagtatctctccaattccaacccctcaaagttgagactctcaagaacaggtttttcaagtgattcctcattcagtttggttggtagagagagaaactggggtttgaaggtgagtgctccactgagatttcaggaggtggaggaagagagtgaagagagagggagtgtaatagtaaatggtgttgatgaattcgaccctggtgcaccaccaccattcaagctgtctgatattcgggcagccattcctaaacattgttgggttaaggatccatggaggtctatgagctatgttgtaagagatgttgttgttgtttttggattggctgccgctgcagcctatttcaacaactgggctgtttggcctatctactggttcgctcagtcaactatgttttgggctctgtttgttcttggacatgattgtggacatgggagcttttctaatgatcccaagttgaatagtgttgctggtcacctgcttcactcttccattcttgttccttatcatggatggagaattagtcacaggacacaccatcagaaccatggacatgttgaaaatgatgaatcatggcatccaatacctgagaagatatacaggactttggattttgccaccaagaagttgaggttcactttgcctttccccatgctggcttatcccttctatctgtggggaagaagtcctggcaagaaaggctctcatttccatccagacagtgatttgttcgttccaaacgagaggaaagatgttatcacctcaactgtttgttggacagcaatggttgcaatacttgcaggactatcttttgttatgggtcctgttcagttgcttaaactctatggcataccttatattggatttgtggcatggcttgatttagttacctacttacaccaccatggccacgatgagaagcttccttggtaccgaggaaaggaatggagttacctgagaggggggctcacgacacttgatcgcgattatggatggataaacaacatccaccatgacatagggacgcatgttatacatcacctcttcccacaaataccacactaccatttgatagaagcaactgcagcagctaagccagttctaggaaaatattacaaggagcctaagaaatcaggcccctttccattctacttgttgggagtcctccaaaaaagcatgaaaaaggatcactatgtgagtgacacgggcgatatcgtttactaccagaccgatcctgagctgaattgaactcaagaatgataagagtttgaatgttgttatcagtatatgtaaaagctgtctctaattgagttctcgagacctctaaggatcgcgttcagctgcagaattgatatatatatttttttctcttcaacgatggagaggcgatactagagattacagaatattgatgtgtatttgtatgaggatgtactgatgctataatgtatcttgataattaatgagagggaaagccagattattctcaaaaaaaaaaaaaaaaaaa

SEQ ID NO: 53663 - protein, 438 aa, Perilla frutescens
MASWVLSECGLRPLPRIYPKPRTGQYLSNSNPSKLRLSRTGFSSDSSFSLVGRERNWGLKVSAPLRFQEVEEESEERGSVIVNGVDEFDPGAPPPFKLSDIRAAIPKHCWVKDPWRSMSYVVRDVVVVFGLAAAAAYFNNWAVWPIYWFAQSTMFWALFVLGHDCGHGSFSNDPKLNSVAGHLLHSSILVPYHGWRISHRTHHQNHGHVENDESWHPIPEKIYRTLDFATKKLRFTLPFPMLAYPFYLWGRSPGKKGSHFHPDSDLFVPNERKDVITSTVCWTAMVAILAGLSFVMGPVQLLKLYGIPYIGFVAWLDLVTYLHHHGHDEKLPWYRGKEWSYLRGGLTTLDRDYGWINNIHHDIGTHVIHHLFPQIPHYHLIEATAAAKPVLGKYYKEPKKSGPFPFYLLGVLQKSMKKDHYVSDTGDIVYYQTDPELN

SEQ ID NO: 53664 - DNA, 1356 bp, Arachis hypogaea
  CDS (80)..(1219)
gcgagattcatcataggagaagcactcacttctcttctctctgttggaattgctttcacggagctttaacaacacaacaatgggagctggagggcgtgtcactaagattgaagctcaaaagaagcctctttcaagggttccacattcaaaccctccattcagtgttggccaactcaagaaagcaattccaccacattgctttgaacgttctcttttcatatcattctcctatgttgtctatgatctcttagtggcctacttactcttctacattgccaccacttatttccacaagcttccatacccattttccttccttgcttggccaatctattgggccatccaaggctgcattctcactggtgtttgggtgattgctcatgagtgtggccaccatgccttcagcaagtaccaacttgttgatgacatggttggtttgacccttcactcttgtctattagttccttatttctcatggaaaatcagccaccgccgccaccactccaacaccggttccctcgaccgcaacgaagtgtttgtcccaaaaccaaaatcaaaggtatcatggtataacaagtacatgaacaatccaccagggagggctatctccctcttcatcacactcacactaggatggcccttgtacttggccttcaatgtttctggcagaccctatgatagatttgcaagccactatgacccttatgctcccatatactctaacagggaaaggcttctaatttatgtctcagattcatctgtctttgctgtaacatatctgctatatcacatagcaactctgaaaggtttgggttgggtggtatgtgtttatggggtgccattgctcattgtgaatgggtttctagttaccataacctatttgcagcacacacatgcatcattgcctcactatgattcatccgaatgggactggttaagaggagcattggcaacagtggacagagattatgggatactgaataaggcatttcatcatataactgatacgcatgtggctcatcatttgttctcaacaatgcctcattaccatgcaatggaagcaaccaatgcaataaagccaatattgggtgattactaccaatttgatggcaccccattttacaaagcattgtggagagaagccaaagagtgcctctatgtggagccagatgatggagcttctaagaagggtgtttattggtacaagaacaagttctgatgcatagtcagagttgaaaacgtttgtgttaaattagaaacttaagtactttagtaacttgtaatggtcatcaacaataataaacaatgtgtgtgtggatttgccatgtaatgtactactactactactactagttt

SEQ ID NO: 53665 - protein, 379 aa, Arachis hypogaea
MGAGGRVTKIEAQKKPLSRVPHSNPPFSVGQLKKAIPPHCFERSLFISFSYVVYDLLVAYLLFYIATTYFHKLPYPFSFLAWPIYWAIQGCILTGVWVIAHECGHHAFSKYQLVDDMVGLTLHSCLLVPYFSWKISHRRHHSNTGSLDRNEVFVPKPKSKVSWYNKYMNNPPGRAISLFITLTLGWPLYLAFNVSGRPYDRFASHYDPYAPIYSNRERLLIYVSDSSVFAVTYLLYHIATLKGLGWVVCVYGVPLLIVNGFLVTITYLQHTHASLPHYDSSEWDWLRGALATVDRDYGILNKAFHHITDTHVAHHLFSTMPHYHAMEATNAIKPILGDYYQFDGTPFYKALWREAKECLYVEPDDGASKKGVYWYKNKF

SEQ ID NO: 53666 - DNA, 1332 bp, Zea mays
  CDS (1)..(1332)
atggcccggctcgtgctctccgagtgctcgggcctcgcgcccgtccgccgcctgcgcgccggccggggcgccattgcggcgcggtcaccccccgcgctctccgcggcgccgcgccgtcgtcccgcgtccgcgtccatccaccgcgactgggcgctccgcgtctccgcgcccacccgcctcgcctccgccgccgtcgaggaggacaagccgagcgccgcgccggggcaggaggagggcgcggcggccggcggggagttcgacccgggggcgccgccgccgttcgggctggccgagatccgcgccgccatccccaagcactgctgggtcaaggacccctggcgctccatgagctacgtgctgcgcgacgtcgccgtcgtcctgggcctcgccgcagcggccgcgcgcctcgacagctggctcgtctggccgctctactgggccgcgcagggcaccatgttctgggcgctcttcgtcctcggccacgactgtggacacgggagcttctcgaacaaccccaagttaaacagcgtcgtcggccacatactccattcctccattcttgtgccataccacggatggaggattagccacaggacgcaccatcaaaaccacggtcacgttgagaaggacgagtcctggcacccgctaccagagaggctgtacaaaagcctggactttatgactaggaaactgcggttcaccatgccgttccccttgctcgcgttcccgttatacttgtttgcgaggagtccagggaagtcaggatcacacttcaacccaggcagtgatctgttccaacctactgaaaagaatgatatcataacatccacggcgtcctggctggccatggttggtgttctggccggtctcacctttctgatgggtcctgttccgatgctaaagctctacggagtcccatacttggtatttgttgcttggctagatatggtcacatacttgcaccatcatggccacgaagacaagcttccctggtaccgtggaaaggagtggagttatctgcgtggaggactgacgacgctcgaccgggactacggatggatcaacaacatccatcacgacatcggaactcatgtcatccatcacctcttccctcagatcccgcattaccatctcatcgaggcgaccgaggcagcaaagccggttcttggcaagtactacaaagagccgaagaactcgggtgctctgccgtggcatctattccgggtgctggcacagagcttgaagcaagaccactatgtcagtcacaccggagatgtggtctactaccaagctgagtcgaaaacgagcacctctgcacaaaaatccgattga

SEQ ID NO: 53667 - protein, 443 aa, Zea mays
MARLVLSECSGLAPVRRLRAGRGAIAARSPPALSAAPRRRPASASIHRDWALRVSAPTRLASAAVEEDKPSAAPGQEEGAAAGGEFDPGAPPPFGLAEIRAAIPKHCWVKDPWRSMSYVLRDVAVVLGLAAAAARLDSWLVWPLYWAAQGTMFWALFVLGHDCGHGSFSNNPKLNSVVGHILHSSILVPYHGWRISHRTHHQNHGHVEKDESWHPLPERLYKSLDFMTRKLRFTMPFPLLAFPLYLFARSPGKSGSHFNPGSDLFQPTEKNDIITSTASWLAMVGVLAGLTFLMGPVPMLKLYGVPYLVFVAWLDMVTYLHHHGHEDKLPWYRGKEWSYLRGGLTTLDRDYGWINNIHHDIGTHVIHHLFPQIPHYHLIEATEAAKPVLGKYYKEPKNSGALPWHLFRVLAQSLKQDHYVSHTGDVVYYQAESKTSTSAQKSD

SEQ ID NO: 53668 - DNA, 1422 bp, Gossypium hirsutum
  CDS (98)..(1249)
taaaaaaaaaaggcatttctttcatcttaaagagacagcgaggaagccacgaagataatagagtgattttcaatctccattttaagggtgtggaacaatgggtgctggaggcagaatgtcggttccaacgagtccaaaaaaacccgaattcaactcactgaagcgagttccatactcaaagccacccttcactctgagtgaaatcaagaaagccatcccaccacactgtttccagcgctccgttttacgctcattctcatatctcctttacgactttatattggcctctcttttttaccatgtggccaccaattacttccctaaccttcctcaggctctctccaacgtggcttggcctctttattgggccatgcaaggttgcattttgaccggcgtttgggtcatagcccatgaatgtggccaccatgctttcagtgattatcaatggcttgacgacaccgtgggccttatcctccactcttctctcttagttccatatttctcttggaaatatagccaccggcgtcaccattctaacaccggttccctcgaaagggatgaagtgttcgttcccaagaaaaaatctggtttaagatggtgggccaaacacttcaacaatccaccgggtcggtttctgtcaatcaccattcaacttacccttggttggccgctttacttagctttcaacgttgccggccggccttacgacaggttcgcttgccactatgacccttacggccccatattttccgaccgggaacgactccaaatctatatctctgacgccggcgtcctcgctgtcgcctatgcgctctaccgtctcgtgttggccaaaggggtaggttgggttattagcgtttatggggtgccattattggtggttaacgccttcttagtaatgatcacgtatttgcaacacactcacccatctttgccgcactatgattcctcggagtgggactggatgagaggagctttatcaactgtggacagagattatgggattttaaacaaggttttccataacataaccgacactcatgtggctcatcatttgttttcgacaatgcctcactatcatgccatggtggccaccaaggcgataaagcccatattgggggaatactatcagttcgatgggatgcctgtctataaggcgatatggagggaggcgaaggagtgtctctacgttgaaccagatgagggcgacaaggataaaggtgtgttttggtttagaaacaagctttaaatatttgcattttaccttaggcatgttctagtcgttgatgttttaaggatattttagccgacatacttggttttcctttttgggactttttagctttgtatttgcagacaataatcttgttcactattaaataatggtagaaataaatacacagcatggattggcaataaaaa

SEQ ID NO: 53669 - protein, 383 aa, Gossypium hirsutum
MGAGGRMSVPTSPKKPEFNSLKRVPYSKPPFTLSEIKKAIPPHCFQRSVLRSFSYLLYDFILASLFYHVATNYFPNLPQALSNVAWPLYWAMQGCILTGVWVIAHECGHHAFSDYQWLDDTVGLILHSSLLVPYFSWKYSHRRHHSNTGSLERDEVFVPKKKSGLRWWAKHFNNPPGRFLSITIQLTLGWPLYLAFNVAGRPYDRFACHYDPYGPIFSDRERLQIYISDAGVLAVAYALYRLVLAKGVGWVISVYGVPLLVVNAFLVMITYLQHTHPSLPHYDSSEWDWMRGALSTVDRDYGILNKVFHNITDTHVAHHLFSTMPHYHAMVATKAIKPILGEYYQFDGMPVYKAIWREAKECLYVEPDEGDKDKGVFWFRNKL

SEQ ID NO: 53670 - DNA, 1356 bp, Crepis palaestina
  CDS (80)..(1219)
ctccgaacggccctttcgctattcagattttaagagagaaagaggaggaagtccaaagcttcattaaggtcattgaacaatgggtgccggtgggagaatgcaagatccgtcaaatgacaaaactaccaccgaacgcgtcccataccaaaaaccgccatttacagtcggcgaactgaaaaaagcgatcccaccccattgcttcaatcgatccgtaatccgctcattctcatacgtcgtttacgacctcacaatcgcctccatcttctactacatcgcgacaaattacatccataccctcccccaaccactcacctacttcgcctggcccatatactgggccctacaaggctgcgtcctcaccggcgtctgggtcatcgcccacgaatgcggccaccatgcattctccgaccaccaatggctcgacgacaccgtcggcctaatcctccactccttcctcctcgttccgtacttctcatggaaatacagccaccgccgccaccattccaacaccggatctatcgaacacgacgaagtcttcgtccctaaactcaaatccgacctccgatcaaccgcgaaatacctaaacaaccctccggggagaatcctaacccttttggtaaccctaaccctaggctggccgttatacctaatgttcaacgtctcaggccgttactacgaccgattcgcttgccatttcgacccaaacagtccgatctactccaaccgtgaacgcgcacaaatcttcatctccgacgccggaatcttcgccgttctgtacggacttttccgtctagcaacaatcaaaggtctcggttgggttctggcaatgtacggtggtccgttacttgtggtgaacggtttccttgttttgattacctttttacagcatacacacgcgtcgttaccccattatgactccaccgaatgggactggttacgtggggctttagccaccatagatcgtgactacgggattctgaacaaggttttccataacattacagatacgcatgtgactcatcatttgttttcgactatgcctcattaccatgcgatggaggcgacgaaagcgataaagccgattttgggggattattatcagtttgatgggacgtcggtttttaaggccatgtatagggagacgaaggagtgcatttatgttgataaggatgcagaggtgaaagatggggtttactggtaccggaataagattgagtaagatgtaagagagtggtgaatggtagttaatgttattttagcgtatgttttggttttgatgccgtttgaatggacatggaaattgtagtcggatgaataagttatgtaatcggacttggtttttgtaaaaaaaaaaaa

SEQ ID NO: 53671 - protein, 379 aa, Crepis palaestina
MGAGGRMQDPSNDKTTTERVPYQKPPFTVGELKKAIPPHCFNRSVIRSFSYVVYDLTIASIFYYIATNYIHTLPQPLTYFAWPIYWALQGCVLTGVWVIAHECGHHAFSDHQWLDDTVGLILHSFLLVPYFSWKYSHRRHHSNTGSIEHDEVFVPKLKSDLRSTAKYLNNPPGRILTLLVTLTLGWPLYLMFNVSGRYYDRFACHFDPNSPIYSNRERAQIFISDAGIFAVLYGLFRLATIKGLGWVLAMYGGPLLVVNGFLVLITFLQHTHASLPHYDSTEWDWLRGALATIDRDYGILNKVFHNITDTHVTHHLFSTMPHYHAMEATKAIKPILGDYYQFDGTSVFKAMYRETKECIYVDKDAEVKDGVYWYRNKIE

SEQ ID NO: 53672 - DNA, 1590 bp, Triticum aestivum
  CDS (132)..(1283)
gatcggaggagaggtgtatctctgcccggccacccaagccttgcccctcccgaatctctctttcctcccctaccattgccttgccccccgctccccctcccccacgcacacgcacagatccatccgcggccatggcccccgcaatgaggccggagcaggaggcgagctgcaaggccaccgaggaccaccgctccgagttcgacgccgccaagccgccgcccttccgcatcggcgacgtccgcgccgccgtgccggcccactgctggccgcaagagccccctgcgtccctctcctacgtcgcccgcgacgtcgccgtcgtggcggcgctggccgccgccgcgtggcgggccgacagctgggccctctggccgctctactgggccgtccagggtaccatgttctgggcgctcttcgtcctcggacacgactgtggtcacgggagcttctcggacagcggcacgctcaacagcgtcgtcggccacctgctgcacacatttattctcgtcccgtacaatggctggaggatcagccacagaacgcaccatcagaaccatggccacatcgacagggacgagtcatggcacccgatcactgagaaggtgtaccagaaattggaaccacggacaaagacactgcgcttctcagtaccgttcccactgctggctttccctgtttacctctggtacagaagcccgggcaaggagggctcacacttcaatccgagcagcgatctgtttactcccaaggagaggcgtgatgtgatcatctccaccacctgctggttcacgatgattgcgctgctcatcggcatggcgtgtgtctttggcctggtaccggtgctcaagctgtacggggttccatatattgtgaatgtcatgtggcttgatttggtgacgtatcttcaccaccatggtcaccaggacctcccatggtaccgcggcgaggaatggagctacctccgtggtggcctgacgaccgtggatcgggactatggatggatcaataacatccaccatgacattggcacccatgtcatccaccacctcttcccccaaatacctcactaccacctggtagaagcaaccaaggctgcaaggccagtactgggcagatactaccgggagccagagaagtcaggcccgcttccaatgcacctcatcaccgtcctcctcaagagcttgagagtcgatcactttgtcagcgacgtgggagatgtcgtcttctaccaaaccgaccccagcttgagcggcgacaagtggaccggaaccgacaagcagaagtgagagactggaaactgaagttactactgttcaaggaagaatgcatgatagagatagagacatcgatagcctgctgagaataagcagagggtgcttccagctgaaacccaaagcatggaagctccgcagccaacaaacaggatgcgttgattggttcatcatgagacgagattcagatcatttattagatctagcattctcccattgcggttgtaactagcagatgttgtttcaactttattacaaattttgaatggaatgcggaacagtgtaacagattgattaattattatccaaatcgatattctgg

SEQ ID NO: 53673 - protein, 383 aa, Triticum aestivum
MAPAMRPEQEASCKATEDHRSEFDAAKPPPFRIGDVRAAVPAHCWPQEPPASLSYVARDVAVVAALAAAAWRADSWALWPLYWAVQGTMFWALFVLGHDCGHGSFSDSGTLNSVVGHLLHTFILVPYNGWRISHRTHHQNHGHIDRDESWHPITEKVYQKLEPRTKTLRFSVPFPLLAFPVYLWYRSPGKEGSHFNPSSDLFTPKERRDVIISTTCWFTMIALLIGMACVFGLVPVLKLYGVPYIVNVMWLDLVTYLHHHGHQDLPWYRGEEWSYLRGGLTTVDRDYGWINNIHHDIGTHVIHHLFPQIPHYHLVEATKAARPVLGRYYREPEKSGPLPMHLITVLLKSLRVDHFVSDVGDVVFYQTDPSLSGDKWTGTDKQK

SEQ ID NO: 53674 - DNA, 1546 bp, Solanum tuberosum
  CDS (1)..(1296)
atggcaagttgggttctatcagaatgtggtcttagaccactaccaagaatatacccaaagcccagaatagggtcttcttccgtttgcgccaccaatttaaatctgagaagaatttcaccttcacctatacgaacagatcggaattgttgggcattgagggtaagtgcaccgcttaggatccaaattgccggagaagaagaggaacaaacaacaaacaatggggatgagtttgacccaggggcatcaccacccttcaagctttctgatattaaggcagctattcctaagcattgttgggtcaaaaatccatggacatccatgagttatgttgttagagatgtagctattgtgtttgggttagcggctgctgctgcttatttcaacaattggcttgtttggcctctttattggtttgctcagagtacaatgttttgggctctctttgttctgggtcatgattgcggacatggaagcttttcaaataaccataacttgaatagcgttgctggacatatccttcattcttcaattcttgttccttatcatggatggagaataagccacagaactcatcatcagaaccatggacatgttgagaatgatgaatcatggcatcctttatctgagaagctttacaatagtttggatgatatcacaaagaaatttaggttcactctaccctttcccttgctggcatatcctttctatctgtggggtagaagcccgggaaagaaaggttctcactttgatccaagcagtgatttgtttgtcgcaagtgaaaagaaagacgtgatcacttcaactgtctgctggacggcaatggctgcattgcttgtgggattgtcctttgtcatgggtcctctccaagttcttaagctttatggcatcccctattggggctttgtcatgtggctggatatagttacctatttgcatcaccatggccatgaagataaagttccttggtacagaggagaggaatggagttatctgagaggagggcttacaacgcttgatcgtgactatggatggattaacaacatccaccatgacatagggactcatgtgatacatcatctcttccctcaaatcccacactatcatttggtagaagcaacggaagctgctaaaccagtgttagggaaatattataaggagccaaagaagtcagggcctctaccattttacttgttgggatatctgataaaaagcatgaaggaggatcactttgtgagtgacacagggaatgtagtatattatcaaactgatcccaacctttatgggtctgagaaatagcaaaaccctgttagctgattctttaagtgattgtgatacggtacggggtaggtaagttcaaccaacatattcgtgatgaccaacagcacaaagtaaagttagctacctgccattagaaaagaacaagtttcaattattgtcttctcccggaatagaacccaaccggttctttcatataatagacataaaacctaagactttactttatttacaaaaagatacttcagtcccaaaaaaaaaaaaaaaaaaa

SEQ ID NO: 53675 - protein, 431 aa, Solanum tuberosum
MASWVLSECGLRPLPRIYPKPRIGSSSVCATNLNLRRISPSPIRTDRNCWALRVSAPLRIQIAGEEEEQTTNNGDEFDPGASPPFKLSDIKAAIPKHCWVKNPWTSMSYVVRDVAIVFGLAAAAAYFNNWLVWPLYWFAQSTMFWALFVLGHDCGHGSFSNNHNLNSVAGHILHSSILVPYHGWRISHRTHHQNHGHVENDESWHPLSEKLYNSLDDITKKFRFTLPFPLLAYPFYLWGRSPGKKGSHFDPSSDLFVASEKKDVITSTVCWTAMAALLVGLSFVMGPLQVLKLYGIPYWGFVMWLDIVTYLHHHGHEDKVPWYRGEEWSYLRGGLTTLDRDYGWINNIHHDIGTHVIHHLFPQIPHYHLVEATEAAKPVLGKYYKEPKKSGPLPFYLLGYLIKSMKEDHFVSDTGNVVYYQTDPNLYGSEK

SEQ ID NO: 53676 - DNA, 1606 bp, Nicotiana tabacum
  CDS (28)..(1353)
gaaaatctctctcctctttatccttcaatggcaagttgggttttatcagaatgtggtcttagaccactcccaagaatctaccctaagcccagaactggggcagccacttctgcctcctctcacattaagttgagaatttcacgtacagatctgagtggttctgcaatttctttgtctaatactaataaagagaggaattgggcattgagggtaagtgcaccacttaggatccaaactgtcggagaagaagaaagtgagagaacaaataatagtggtggtgagttttttgacccaggggcacccccaccatttaagttgtctgatattaaggcagctattcctaagcattgttgggtcaagaatccgtggaaatctatgagttatgttgtgagggatgttgctattgtatttggattggcagctgcggctgcttatttcaacaattgggttgtttggcctttgtattggtttgctcagagtactatgttttgggctctctttgttcttggtcatgattgtggacatggaagtttttcaaataaccacaagttgaatagtgtcgttggacatatccttcattcttcaattcttgttccttaccatggatggagaataagtcataggacacatcatcagaaccatggacatgttgagaatgatgagtcatggcatcctatacctgagaagatttacaatagtttggatcttgccacaaagaaattaaggttcactctaccctttcccttgttggcataccctttctatctgtggagtagaagccctggaaagaaagggtctcactttgatccaaacagtgatttgtttgttccaagtgagaagaaagatgtgatgacttcaactctgtgttggacagcaatggctgcattgctagtgggattgtcctttgtgatgggtcctttccaagtgcttaagctctatggcatcccctattggggctttgtcatgtggcttgacttagttacctacttgcatcaccatggtcatgatgataaacttccttggtacagaggagaggaatggagttatcttagaggagggcttacaacgcttgatcgcgattatggatggatcaacaacatccaccatgacataggaacacatgtgatacatcatttattccctcaaattccacactatcatttggtggaagcaactgaagctgctaagccagtgttagggaagtattataaggagccaaagaagtcagggcctctaccattttacttgttaggagttctcataaagagtatgaagcaggatcactatgtgagtgacactggtgatatagtatattaccgaactgatccccaactctcagggtttcagaaatagaatcctatactacaatttaaaagcaggtgattctttttcactaacactatggccattcaagtttgtaatcacaaatacaaagtaaagttagctcccattaaagaatggagaaggcatataaagtctgtagatgagcagcttcaattgttgccatattgtaataattgagtggagaaagaaattgtcttcaggaaccttataagccttttgtagggttggccaagaaagttatgttatttgtattcttgattat

SEQ ID NO: 53677 - protein, 441 aa, Nicotiana tabacum
MASWVLSECGLRPLPRIYPKPRTGAATSASSHIKLRISRTDLSGSAISLSNTNKERNWALRVSAPLRIQTVGEEESERTNNSGGEFFDPGAPPPFKLSDIKAAIPKHCWVKNPWKSMSYVVRDVAIVFGLAAAAAYFNNWVVWPLYWFAQSTMFWALFVLGHDCGHGSFSNNHKLNSVVGHILHSSILVPYHGWRISHRTHHQNHGHVENDESWHPIPEKIYNSLDLATKKLRFTLPFPLLAYPFYLWSRSPGKKGSHFDPNSDLFVPSEKKDVMTSTLCWTAMAALLVGLSFVMGPFQVLKLYGIPYWGFVMWLDLVTYLHHHGHDDKLPWYRGEEWSYLRGGLTTLDRDYGWINNIHHDIGTHVIHHLFPQIPHYHLVEATEAAKPVLGKYYKEPKKSGPLPFYLLGVLIKSMKQDHYVSDTGDIVYYRTDPQLSGFQK

SEQ ID NO: 53678 - DNA, 1556 bp, Petroselinum crispum
  CDS (96)..(1412)
aaaacattcctggacttcatttttacaactctttatagttcatactctctttattatcctcctcttctttgttttttttgagttctgagtcacctatggcaagttgggtgatttcagaatgtgggctaaggccacttccaagaatctatgccaggcccagaagtggagcttcatgtttcaactccaagaatcctgtgaagaatcttagattcttggatgagaatgtgaagatttcaatgacaggctcaaggaactggggattgagagtgagtgtgccaatgagtgttccaagtgtaagtgaagaggaggagagatttgagagtttggttgaagaagagaatgagtttgaccctggggctgcaccaccttttaagttgtctgatgttagagctgctattcctaagcattgttgggttaaggatcctgtgagatctatgagctatgttttgagagatgttttgattgtttttggattggcggttgctgcatcttttgttaataattgggctgtctggcctctttattggattgctcagggaactatgttttgggctctttttgttcttggccatgattgtggtcatggaagcttttcgaatgatgcaaagctcaatagtgttgttggacatattcttcactcttcaattcttgtgccatatcatggatggagaatcagccatagaactcatcatcagaaccatggacatgttgagaatgatgaatcttggcatccgttatcagagaagctatttaacagtttggatgatttaacaaggaaatttaggttcactttgccattccctatgcttgcttatcctttttatctgtggggtcgaagtcctgggaagaaggggtcacattacgatccgagcagtgatttgtttgtgcctaatgaaagaaaagatgtgatcacctcgacggtttgttggacagcgatggctgcactgcttgttggtttaaactttgttatgggtcctgtaaaaatgcttatgctctatggaattccctattggatttttgtaatgtggttggattttgtgacatacttgcatcaccatggtcacgatgacaaacttccatggtaccgtggcaaggaatggagttatctgagaggtggccttacaacacttgatcgtgattacggatggatcaataacatccaccatgacataggaactcatgttgtccatcatttgttccctcagatcccacattaccacctaatagaagctacggaagctgcaaagccggtgtttgggaagtactacagggaaccaaagaagtctggaccagttccatttcacttgttggcaacactctggaagagtttcaagaaggatcattttgttagtgatacaggggatgttgtgtactaccaagcacatcctgaaattgccaagacccaaaagtgaaagaaactctgtacattttataatataaatattgcaagcctgctatataggctgctgattctttaagaccagtttttgatctttgataattgacagttaacaatgataatacatcattcgtaaggagtggaaactgataattcc

SEQ ID NO: 53679 - protein, 438 aa, Petroselinum crispum
MASWVISECGLRPLPRIYARPRSGASCFNSKNPVKNLRFLDENVKISMTGSRNWGLRVSVPMSVPSVSEEEERFESLVEEENEFDPGAAPPFKLSDVRAAIPKHCWVKDPVRSMSYVLRDVLIVFGLAVAASFVNNWAVWPLYWIAQGTMFWALFVLGHDCGHGSFSNDAKLNSVVGHILHSSILVPYHGWRISHRTHHQNHGHVENDESWHPLSEKLFNSLDDLTRKFRFTLPFPMLAYPFYLWGRSPGKKGSHYDPSSDLFVPNERKDVITSTVCWTAMAALLVGLNFVMGPVKMLMLYGIPYWIFVMWLDFVTYLHHHGHDDKLPWYRGKEWSYLRGGLTTLDRDYGWINNIHHDIGTHVVHHLFPQIPHYHLIEATEAAKPVFGKYYREPKKSGPVPFHLLATLWKSFKKDHFVSDTGDVVYYQAHPEIAKTQK

SEQ ID NO: 53680 - DNA, 1368 bp, Jatropha curcas
  CDS (1)..(1368)
atggctactagctgggttttgtctgaatgtggcctaagacctcttcctagaatatacttacaaaccagagctggcgttacaacaaaaagttgcaatcttttcaagcttaaacaattgccagtctcagaaagttacaatcttgatccttctttcaatatttcaagttgctctaaacaaagaaattgggcattaaatgttgctgctccagttaataatttcagaactgtgagtgcccaagaggatgataaagaaagagagggtgttaatgaagaggtgaagggtgaagaagaattctttgaccctggttctccaccaccttttaagctagctgacataagagcagccatacccaaacattgttgggttaaagatccatggagatctatgagttatgttgtgagagatgtggctgtggtttttggattggctgctattgctgctttttttaacaattgggttgtttggcctctttattggttttctcaagggaccatgttctgggctctctttgttcttggccatgattgtggacatgggagcttctcaagtaatccaaagttaaatagtgtggtgggtcatctccttcattcttcaatccttgttccttaccatggatggagaatcagccacagaactcatcatcaaaatcatggccatgttgaaaatgatgaatcatggcatccattgtctgagaaaatcttcaaaagtttagacaacctcactaagatgttaaggttcactttgccattcccattgcttgcttaccctttctatctgtggggcagaagccctggaaaaaaaggatctcattttcatccagacagtgatttgtttgtcccaaatgagagaaaagatattattacctcaactgcttgttggagtgcaatggctgcattgcttgtgggcttaaattttatactgggtcctattcaaatgcttaaactctatggcatcccttactggatctttgttatgtggttggaccttgtgacctacttgcatcaccatggtcatgaggataagcttccctggtatcgcggaaaggaatggagttatctgagaggagggcttacaaccgttgatcgcgattatggatggatcaacaacatccaccatgatattggtactcatgtgattcatcatctcttccctcaaattccacactatcacttaattgaagcaactgaagcagctaaacctgtgatagggaaatactaccgggagccaagaacatctggacctcttccctttcacttactaggaagtctagtgagaagcatgaaagaagatcactatgtgagtgatactggagatattgtatactatcaaaaagatcctaatccatggggtggtaagaaaacagaataa

SEQ ID NO: 53681 - protein, 455 aa, Jatropha curcas
MATSWVLSECGLRPLPRIYLQTRAGVTTKSCNLFKLKQLPVSESYNLDPSFNISSCSKQRNWALNVAAPVNNFRTVSAQEDDKEREGVNEEVKGEEEFFDPGSPPPFKLADIRAAIPKHCWVKDPWRSMSYVVRDVAVVFGLAAIAAFFNNWVVWPLYWFSQGTMFWALFVLGHDCGHGSFSSNPKLNSVVGHLLHSSILVPYHGWRISHRTHHQNHGHVENDESWHPLSEKIFKSLDNLTKMLRFTLPFPLLAYPFYLWGRSPGKKGSHFHPDSDLFVPNERKDIITSTACWSAMAALLVGLNFILGPIQMLKLYGIPYWIFVMWLDLVTYLHHHGHEDKLPWYRGKEWSYLRGGLTTVDRDYGWINNIHHDIGTHVIHHLFPQIPHYHLIEATEAAKPVIGKYYREPRTSGPLPFHLLGSLVRSMKEDHYVSDTGDIVYYQKDPNPWGGKKTE

SEQ ID NO: 53682 - DNA, 1023 bp, Eustoma grandiflorum
  CDS (1)..(1023)
atgggcagcaccaatggcttcagcaattgggtggatgctcatgaggcagacttcgatccaagtctgcctcctccgttcaagatggctgagattcgctcggctatcccgaaccattgctgggtgaaggatccatggcgttcacttagctacgtcgcacgcgacgtcgtggtggttgctgggctagtagccatggcagtttacttcaacagctggttgttctggccagtttactgggctgcccagggaactatgttttgggcactatttgtccttggacatgactgtgggcatgggagtttttcggacaactcattgttgaacagtgtggtcggacatgtcctgcattcttccattcttgtaccttaccatggatggagaatcagtcacagaagtcaccacaataatcatgggaatgttgaaaaagacgagacatgggtgccgctgccagaaaagctatacagaaagctggactactccaccaaatttctcagatacaagattcccttcccaatgttcgcatacccgatgtatctgtggtacagaagtccagggaaaacgggctctcacttcaacccttacagcgatttgtttcgaccgaatgagagaaaacaaattatttttgtcatgtggttggacttcgtcacttatttgcatcatcatggtcatgaaaataagcttccctggtaccgcggcaaggaatggagttacttgagagggggccttacaacagttgatagggactatggttggtttaacaacattcaccatgacattggcacccatgtcatccaccatctctttccccagatccctcattatcacttaatcgaagccaccagagcagctaaaccggtgttagggaagtattacagagaggcgcagaaatcggggccggtcccaattcatttgcttaaggaattggttaaaagcatgaaggaagatcattatgttagtgataatggagatgttgtttactaccaaaccgactccaagctttttgctcctatcatcaaggatgattag

SEQ ID NO: 53683 - protein, 340 aa, Eustoma grandiflorum
MGSTNGFSNWVDAHEADFDPSLPPPFKMAEIRSAIPNHCWVKDPWRSLSYVARDVVVVAGLVAMAVYFNSWLFWPVYWAAQGTMFWALFVLGHDCGHGSFSDNSLLNSVVGHVLHSSILVPYHGWRISHRSHHNNHGNVEKDETWVPLPEKLYRKLDYSTKFLRYKIPFPMFAYPMYLWYRSPGKTGSHFNPYSDLFRPNERKQIIFVMWLDFVTYLHHHGHENKLPWYRGKEWSYLRGGLTTVDRDYGWFNNIHHDIGTHVIHHLFPQIPHYHLIEATRAAKPVLGKYYREAQKSGPVPIHLLKELVKSMKEDHYVSDNGDVVYYQTDSKLFAPIIKDD

SEQ ID NO: 53684 - DNA, 1929 bp, Olea europaea
  CDS (337)..(1647)
cacgagggaatatgaaagtgggaagaaagagaggccacataaaccaacaaatcaaaatttgtactcgaaaccatatgctataaagaactgaagcctgaacatattgacaatcaacgagaaacacaagttggggttcttgaacctaaaacttgaggagacaatccattgcgttatcaacttgcccaatccatattccagctaatatacatacattcttgccgatacatacagatatatctacttatttttgttggatagttttagcttccacaaaattttcttctctcactgctgtgagagcctttaaagctgaaatctgggtagcccgcggatccaatggccagttgggtgctctcagaatgtgggctcaagccacttccaagattctatgcaaagccaagaactggccaagctttcttgaattctaacccctccaaagttcggatttcaagaacaagtggaaatgattattcgttttctttgtcaagtgggtttagggagagaaattggggtttgaaggtgagtgcaccattgagggttcagccagtggaagaaaataaagaagagggaaaaattctcaatggggacgaatcttttgaccctggtgctccacccccgtttaaattgtctgatattaaagcagcaattcctaaacattgttgggttaaggatccttggaagtctatgtcctatgttgttagggatgttgtggtagtttttggattagcagctgtggctcgttattttaacaactgggttttttggcctttgtattggtttgctcaggggactatgttctgggctctttttgttcttggtcacgactgtgggcatggaagtttttcaaacaatccaaagctgaacagtgtagcaggacatcttcttcattcttcaattcttgtcccttaccatggatggagaattagccacaggactcatcatcagaaccatggccatgtcgagaacgacgaatcgtggcatccattatctgagaagatttacaagaatttggataatgtcaccaagaaattgaggttcacattgcctttccccttgctagcataccctatctatctgtggagtcgaagccctgggaaaacaggctctcattaccacccagacagtgatttgtttgttccaaatgagagaaaagatgtgattacctcaacagtttgttggacagcaatggttgcaattcttgcagggttatctttcattatgggtcctgttcaattgcttaaactctatggcattccttacgcgattttcgtgatgtggctggacttagttacctacttacatcaccatggccatgatgagaaacttccttggtacaggggaaaggaatggagttatcttcgaggggggcttacgacacttgatcgtgactatggatgggtcaataacatccatcatgacataggaacccatgtcatacatcacctctaccctcaaatcccacactaccatttagtagaagcaaccgaagcagctaagccggtgctaggaaagtactatagggagccaaagaaatcagggcctcttccattgtatttgctgggagttcttataagaagcatgagaaaggatcactatgtgagtgactctggagatattgtttattatcaaactgattctcagctatagagatctcggaaactagtcactttaagtttgactatttatatatgatttgtgaattagccaaatggtggctaaataattgatgcatatctgactcttaactctcttagccaaaaattgatgccaggatcctagttttctgctaagaagaatgatttttcctccattgatggagttacatagatagatattactaatatacagttcacatgcctacttgtactcgatgtaaactagcactttaccgaggtagaaatattgttttcaaaaaaaaaaaaaaaaaaa

SEQ ID NO: 53685 - protein, 436 aa, Olea europaea
MASWVLSECGLKPLPRFYAKPRTGQAFLNSNPSKVRISRTSGNDYSFSLSSGFRERNWGLKVSAPLRVQPVEENKEEGKILNGDESFDPGAPPPFKLSDIKAAIPKHCWVKDPWKSMSYVVRDVVVVFGLAAVARYFNNWVFWPLYWFAQGTMFWALFVLGHDCGHGSFSNNPKLNSVAGHLLHSSILVPYHGWRISHRTHHQNHGHVENDESWHPLSEKIYKNLDNVTKKLRFTLPFPLLAYPIYLWSRSPGKTGSHYHPDSDLFVPNERKDVITSTVCWTAMVAILAGLSFIMGPVQLLKLYGIPYAIFVMWLDLVTYLHHHGHDEKLPWYRGKEWSYLRGGLTTLDRDYGWVNNIHHDIGTHVIHHLYPQIPHYHLVEATEAAKPVLGKYYREPKKSGPLPLYLLGVLIRSMRKDHYVSDSGDIVYYQTDSQL

SEQ ID NO: 53686 - DNA, 1441 bp, Olea europaea
  CDS (75)..(1262)
ggtaccagcgctggctctgcccccaactcttcataaataaccaactccgccatttctttggacgaggagacgccatggctataggtttgagccattcatactcattaccttctgcagacaaaaataatgaagatgagctaatgaagaaggtatgcttttcgccactggaaaatggaaatgaggtcgtaaatggcgatgaaattgacttcgacccgagtgaacctccaccgtttaagattggcgatattagagcagcaattcctgagcattgttgggttaaagatccatggcggtcttgctcttatgttgttagagatattgctgtggctcttggtttggtgggaatggctttacatttcaatagttggattcattggccagtgtattggttcgcccagggaacaattttctgggcaatttttgttcttggccatgactgtggccatgggagcttctccgacaatcccaatctcaataatattgtgggacatatcttgcattcttccattctcgtaccctaccatggctggagaatcagccacaggactcaccatcaaaatcatggacatgttgaaaatgatgaatcatgggtaccgttgcctgagaagatctacaagaaactggatatgtcaaccaaattcctgagatacaaagtcccttttcccctgtttgcataccccctgtatctgtggcctaggagtccagggaaaaagggttcacacttcaatccttatagtgatttgttcaaaagcagtgagaggaaacttgtgctcacttcaacagtctgctgggctgcaatggttgcttttctcttttgcctatccttcagattcggaccactccttttgctaaagctctacggggttccctatgtgatattcgtcatgtggttggacttagtcacttacttgcaccatcatggtcatgagaaaaagcttccatggtaccgtggcaaggaatggagttacttaaggggtggcctaaccaccgtggatcgtgattatggatggtttaacaaaatccaccatgatattggcactcatgttatacaccatctctttcctcagatcccacattatcacttagaagaggcgacaagtgcagccaaacaagtcatggggatgtattacagagagcccataaaatcaggaccagttccttatcatttgttacaaaatttggtaagaagcgttaaagaagaccactttgttagtgatagtggagatatagtgtattatcagaaggatgcacaactctcttaggattctcttccaccaagatgagtcactacagactcctccataggctcttaagaatattctgaaatacagtgttttttaacgtaatttctcgtctgttaccttttctgctctttcttttgtaaccggatcttgaaataatataaataacctgtcagtgtttttcaaaaaaaaaaaaaaaa

SEQ ID NO: 53687 - protein, 395 aa, Olea europaea
MAIGLSHSYSLPSADKNNEDELMKKVCFSPLENGNEVVNGDEIDFDPSEPPPFKIGDIRAAIPEHCWVKDPWRSCSYVVRDIAVALGLVGMALHFNSWIHWPVYWFAQGTIFWAIFVLGHDCGHGSFSDNPNLNNIVGHILHSSILVPYHGWRISHRTHHQNHGHVENDESWVPLPEKIYKKLDMSTKFLRYKVPFPLFAYPLYLWPRSPGKKGSHFNPYSDLFKSSERKLVLTSTVCWAAMVAFLFCLSFRFGPLLLLKLYGVPYVIFVMWLDLVTYLHHHGHEKKLPWYRGKEWSYLRGGLTTVDRDYGWFNKIHHDIGTHVIHHLFPQIPHYHLEEATSAAKQVMGMYYREPIKSGPVPYHLLQNLVRSVKEDHFVSDSGDIVYYQKDAQLS

SEQ ID NO: 53688 - DNA, 1308 bp, Cyclamen persicum
  CDS (1)..(1308)
atggcgcgtggggtgttgtcggagtgcggattaaagcccctctccagaatctaccctcgacccagatcaggttttgggccgattacgcctaacccagctcgaattcgggtggcgaaccccgatttccgcaaacccggaacctcttttgccccgagggggagaaactggggcctcggggtgagtgccccatcaagattccaatttgttgatgagaggggcacggctggggataattttgacccgggttcgccgccgccgttcaaattggcggatgttagggcggcgataccgaagcattgctgggtgaaggacccgtggaagtcgatgggatacgtggcgagggacgtggcggtggttctgggcttggcggcggcagcagcatatttggacaattgggctttttggcccatttattggtttgctcagtcgaccatgttttgggcgctctttgttttggggcatgattgtgggcatgggagcttttcgaataatcacaagttgaatagtgtggttgggcatatccttcactcttcaatacttgtgccttaccatggatggaggattagccatagaactcaccatcagaatcacggtcatgttgagaatgacgaatcgtggcatcccttgtccgaaaagatttacaattcattggacaaagctacacaaatattgagattcactttgcctttccctttgctagcttatcctatttatttgtggggtagaagtcctggtaagaaaggatctcattacgatcctagtagcgatttgtttgtgcctagtgaaagaaaagatgttatcacctcgacggtttgttggagcgcaatggttgcactgctcgtgggcctatcctttgtcatgggcccaatccaattgctcaaactatatatcgttccctatgtgggttttgtgatgtggctcgatttggtgacttatttgcaccaccatggtcatgaggacaaacttccttggtatcgtggggaggaatggagttatttgcgaggaggattaacaacgattgatcgcgactatggttggattaacaacattcaccatgatattggaacccatgttatacaccatctattccctcagatcccacactatcacttaattgaagcaactgaagctgctaaacccgtgctaggggagtactacagggagccgaagaaatcttggccactcccaattcacttgatcggaaccttaatagatagcatgaagagggatcactatgtcagcgatactggggatgttgtctactaccaaacagatactaagctcttcgactctccaaaagcagaataa

SEQ ID NO: 53689 - protein, 435 aa, Cyclamen persicum
MARGVLSECGLKPLSRIYPRPRSGFGPITPNPARIRVANPDFRKPGTSFAPRGRNWGLGVSAPSRFQFVDERGTAGDNFDPGSPPPFKLADVRAAIPKHCWVKDPWKSMGYVARDVAVVLGLAAAAAYLDNWAFWPIYWFAQSTMFWALFVLGHDCGHGSFSNNHKLNSVVGHILHSSILVPYHGWRISHRTHHQNHGHVENDESWHPLSEKIYNSLDKATQILRFTLPFPLLAYPIYLWGRSPGKKGSHYDPSSDLFVPSERKDVITSTVCWSAMVALLVGLSFVMGPIQLLKLYIVPYVGFVMWLDLVTYLHHHGHEDKLPWYRGEEWSYLRGGLTTIDRDYGWINNIHHDIGTHVIHHLFPQIPHYHLIEATEAAKPVLGEYYREPKKSWPLPIHLIGTLIDSMKRDHYVSDTGDVVYYQTDTKLFDSPKAE

SEQ ID NO: 53690 - DNA, 1755 bp, Oryza sativa
  CDS (117)..(1496)
accaccactacccgcacagcaaggcccatccgcgaacgcagagcagaaaaatcagaaaggaaatccgtgtaagccgtcaggggcagcggctgctaccgtcggtggcggcggaggcgatggcacggctcgtcctctccgagtgctgcggcctcacgccgctccgcctgcgcgggcgcggcgccattgcgctgccggcgccttccagcctcgccggggggccgcgccgccccgtgtccgccgccgccgcggggggagccatccaccgcgagtgggcgctccgcgtttctccgcccccacccgcctcacctccgtcgtcgaggaggataataaaggggaggaggtggtggaggaggaggccaggggttcgttggcggcggccgaagccggcggcgggggaggtaggaggggacggagacgggttcgaccccggggcgccgccgccgttcgggctcgcggagatccgcgcggccatccccaagcactgctgggtgaaggacccctggaggtccatgagctacgtgctgcgcgacgtcgtcgtggtgctcggcctcgccgccgccgccgcgcgcgtcgacagctggctcgtctggccgctctactgggccgcgcagggcaccatgttctgggcgctcttcgtgctgggtcacgactgtggccatgggagcttctcaagcaacgccaagttgaacagcgtggttggacacatactccactcctccatccttgtcccataccacggctggaggattagccacaggacgcaccaccagaaccacggtcacgtcgagaaagacgagtcctggcaaccgctgtctgagaggctgtacaatagcctggactatatgacgaagaaattgaggttcaccatgccgtttcccatgctggcattcccattatacttgtttgcaaggagtccagggaaaaaaggttcacacttcaacccaagcagtgatctgttccaaccaaatgagaagaaggatgtgataacatcaactgcatcctggctggcaatggttgggattcttgctggtctgacctttgtgatggggcccctcaaaatgttaaagctctatgctgttccatacgtgatatttgttatgtggcttgattttgtcacatacttgcaccatcatggccatgaggacaagcttccttggtaccgtggaaaggagtggagctatctgcgaggaggattgacaacacttgatcgggactacgggtggatcaacaacgtacaccatgacattggaacccatgtcattcatcatcttttcccacaaatcccacattaccatcttgttgaggcgactgaggcagcaaaaccagtgctgggaaaatactacaaagagccagagaaatcagctcccctcccattccacttacttggtgtgctagcaaagagcttaaacagcgaccactatgttagtgacgccggagacgtagtgtactaccaaactgacttgaaaactagttcttctgcacaaagctcggattgacagaacattagtctctagcttatttttcgatttctcaggagcctgggcttaacatctgaccagcctcctgggcgttgagcctagaatttcaaagcattatcattgtaaaggagcatacatgtgtaattctttcgaatgattgaagacggagatcacctctgatgtaacaaacatgtgattctttcgacaagatatataatacagtaaagagcgagaaaaattgcttactaaaaaaaaaaaaaaaaaaaaaaaaaaaaaa

SEQ ID NO: 53691 - protein, 459 aa, Oryza sativa
MARLVLSECCGLTPLRLRGRGAIALPAPSSLAGGPRRPVSAAAAGGAIHREWALRVSPPPPASPPSSRRIIKGRRWWRRRPGVRWRRPKPAAGEVGGDGDGFDPGAPPPFGLAEIRAAIPKHCWVKDPWRSMSYVLRDVVVVLGLAAAAARVDSWLVWPLYWAAQGTMFWALFVLGHDCGHGSFSSNAKLNSVVGHILHSSILVPYHGWRISHRTHHQNHGHVEKDESWQPLSERLYNSLDYMTKKLRFTMPFPMLAFPLYLFARSPGKKGSHFNPSSDLFQPNEKKDVITSTASWLAMVGILAGLTFVMGPLKMLKLYAVPYVIFVMWLDFVTYLHHHGHEDKLPWYRGKEWSYLRGGLTTLDRDYGWINNVHHDIGTHVIHHLFPQIPHYHLVEATEAAKPVLGKYYKEPEKSAPLPFHLLGVLAKSLNSDHYVSDAGDVVYYQTDLKTSSSAQSSD

SEQ ID NO: 53692 - DNA, 1137 bp, Linum usitatissimum
  CDS (1)..(1137)
atgggtgcaggtggaagaatgccagtgcctccatcatccaaacctatgaagaggtctccttactcaaagccaccattcacgctcggtgagctcaagaaggccatccctccacactgcttcaaacgctcaatcccccgatcgttcgcctacgtggcgcacgacctcaccattgcagcaatcttctactacatcgccaccacttacttccacctcctccctagccctctcaactacctcgcctggccggtctactgggcctgccagggctgcatcctcactggagtatgggtgttggctcacgaatgcggtcaccatgccttcagcgactaccagtggctcgacgacatggatggcttcgtcctccattcgtccctccttgttccttacttctcctggaagcacagccaccgccgccaccattccaacacgggatcgcttgatcgtgatgaggtgtttgtccccaagcagaaggccgaaatcgggtggtactccaagtaccttaacaacccacctggccgtgtgatcacattggccgtcacattaacgctcggttggcctctgtacttggcattcaacgtctccgggagaccatatgaccggttcgcatgccattttgaccctcacggtccgatttacaatgatcgcgagcgtatggagatatacctatccgacgcagggatattcaccgtgtgctacatcctatacagactcgtcctcacgaaaggactcgtttgggtcgtgtccatatacggagtcccactattgatagtgaatggattcctagtcctcatcactttcttgcagcacacgcatccttctcttccgcactacaagtcctccgaatgggactggatgcgaggcgccctctcgaccgtggatcgagactacgggttactcaacaccgtgttccacaacatcaccgatacacatgtcgcgcaccatctcttctccacgatgcctcattaccacgcgatggaggctaccaaggcgatcaagccggttctcggggagtattaccagttcgatgggactccctttgtgaaggccatgtggagggaggcaaaggagtgcatctatgtcgagccggatgaaggcgaccccagccaaggcgtgttctggtacaacaataagttatga

SEQ ID NO: 53693 - protein, 378 aa, Linum usitatissimum
MGAGGRMPVPPSSKPMKRSPYSKPPFTLGELKKAIPPHCFKRSIPRSFAYVAHDLTIAAIFYYIATTYFHLLPSPLNYLAWPVYWACQGCILTGVWVLAHECGHHAFSDYQWLDDMDGFVLHSSLLVPYFSWKHSHRRHHSNTGSLDRDEVFVPKQKAEIGWYSKYLNNPPGRVITLAVTLTLGWPLYLAFNVSGRPYDRFACHFDPHGPIYNDRERMEIYLSDAGIFTVCYILYRLVLTKGLVWVVSIYGVPLLIVNGFLVLITFLQHTHPSLPHYKSSEWDWMRGALSTVDRDYGLLNTVFHNITDTHVAHHLFSTMPHYHAMEATKAIKPVLGEYYQFDGTPFVKAMWREAKECIYVEPDEGDPSQGVFWYNNKL

SEQ ID NO: 53694 - DNA, 1328 bp, Linum usitatissimum
  CDS (31)..(1206)
ttcaaaactgtggctctgcaggaccaaactatgagccctccaaactcaatgagtcccaccaccaacggcaatggtgtggctatgaatggggcgaagaagcagctcgatttcgacccgagtgctgccccccctttcaagattgcagacatccgtgctgcaattccgccgcattgctgggtgaagaacccctggaggtcgctcagctacgtcctgagagacctccttgtcatcctcagcttcgccgttgcggcggcaaagctggacagctggactttctggcctctttactgggttgctcaaggaaccatgttctgggcagtctttgttcttggacatgattgtggccatgggagcttctcagacatctggttgttgaacaatgtgatgggacatatactccattcctcaatcctcgtaccttaccatggatggagaattagccacaagacccatcaccagaatcacggcaatgtggagaaagatgaatcctgggttcctctaccggagaaagtgtacaagagcttggataccagcactaagttcatgaggttcaccattcctctcccaatgtttgcttatcctatctacttgtggacgagaagtccggggaagaaagggtcgcatttcaacccatacagcgacctattcgcaccaaacgagagggcagcggtcttgatttcaacattgtgctggacagccatggccttactcctctgctactcatcgttcatatacggcttcgctccggtcctcaaaatctacggcgtaccttatctgatattcgtggcatggctcgacatggtgacctaccttcatcaccacgggtacgagcagaagctgccgtggtacagaggcaaagaatggagctacctacgtggagggctgacgaccgttgatcgagattacggggtcatcaacaacatccaccatgacattggcacccatgtcattcaccatctcttccctcaaatgccacactatcaccttgtggaagcgactcaggcagcgaagcacgtgctggggaagtactacagagagccgaagaaatcagggcctttcccattccacttgtttgggtacttggtaaggagcctgggcgaggatcactacgttagcgacacaggcgacgtcgttttctatcagtctgacccacatattcccaagttccgtaccagcagtgccaccaccaagtccaaatccagctgatgatatttggctctgatatatgcaggctgtttatcttgtcctttgttcgtttctttctcccagaaacaaattctctgtttctatgtttctctgtctctcccgcccccagctttctttctgag

SEQ ID NO: 53695 - protein, 391 aa, Linum usitatissimum
MSPPNSMSPTTNGNGVAMNGAKKQLDFDPSAAPPFKIADIRAAIPPHCWVKNPWRSLSYVLRDLLVILSFAVAAAKLDSWTFWPLYWVAQGTMFWAVFVLGHDCGHGSFSDIWLLNNVMGHILHSSILVPYHGWRISHKTHHQNHGNVEKDESWVPLPEKVYKSLDTSTKFMRFTIPLPMFAYPIYLWTRSPGKKGSHFNPYSDLFAPNERAAVLISTLCWTAMALLLCYSSFIYGFAPVLKIYGVPYLIFVAWLDMVTYLHHHGYEQKLPWYRGKEWSYLRGGLTTVDRDYGVINNIHHDIGTHVIHHLFPQMPHYHLVEATQAAKHVLGKYYREPKKSGPFPFHLFGYLVRSLGEDHYVSDTGDVVFYQSDPHIPKFRTSSATTKSKSS

SEQ ID NO: 53696 - DNA, 1475 bp, Linum usitatissimum
  CDS (73)..(1251)
caaaaatatatattgggtttgtttggtgcagattacagtgacttcaaaactgtggctctgcacgaccaaactatgagccctccaaactcaatgagtcccgccaccaacggcagcaccaatggtgtggctatcaatggggcgaagaagctactcgatttcgacccgagtgctgctccccctttcaagattgcagacatccgtgctgcaatcccgccgcattgttgggtgaagaacccctggaggtcactcagctacgtcctgagagacctcctggtcatcctcagcttcgccgttgcggcgacaaagctggacagctggactgtctggcctctctactggattgctcaaggaaccatgttctgggcagtctttgttcttggacatgattgtggccatgggagcttctcagacagttggttgttgaacaacgtgatgggacatatactccattcctcaatcctcgtaccttaccatggatggagaattagccacaagacccatcaccagaatcacggcaatgtggagaaagatgaatcctgggttccactgccggagaaggtgtacaagagcttggataccggcaccaagttcatgaggttcaccatccctctcccaatgtttgcgtatcctatctacttgtggaggagaagtccggggaagaaagggtcgcatttcaacccatacagtgacctgttcgcaccgaacgagaggacatcggtcatgatttcgacattgtgctggacagccatggccttactcctctgctactcatcgttcatctacggcttccttccggtcttcaaaatctacggcgtcccttatctaatattcgtggcgtggctcgacatggtgacctaccttcaccaccacgggtacgagcagaagctgccgtggtacagaggcaaagagtggagctacctacgtggagggctgacgaccgtcgatcgagattacggggtcatcaacaacatccaccatgacattggcacccatgttattcaccatctcttccctcaaatgccacactatcacctagtcgaagcgactcaggcagcgaagcacgtgctggggaagtactacagagaaccgaagaaatcagggcctttcccattccacttgtttgggtacttggtgaggagcctgggcgaggatcactacgttagcgatacaggcgacgtcgttttctatcaatctgacccacatattcccaagttccctaccagtgccaccaccaagtccaaatctagctgatgatattggctctgatctgatgtatgctgcaggctgttttattttgtcctttgttcgtttctttctgccagaaacaaattctctgtttctatgtttctctgtctctcccaccccagctttctttctgagtatatcgtataaagtttcaagtgattgtaagagcagaaaagaaaagaagaagaagaataataaagaggattggcaacaaaaaaaaaaaaaaaaaa

SEQ ID NO: 53697 - protein, 392 aa, Linum usitatissimum
MSPPNSMSPATNGSTNGVAINGAKKLLDFDPSAAPPFKIADIRAAIPPHCWVKNPWRSLSYVLRDLLVILSFAVAATKLDSWTVWPLYWIAQGTMFWAVFVLGHDCGHGSFSDSWLLNNVMGHILHSSILVPYHGWRISHKTHHQNHGNVEKDESWVPLPEKVYKSLDTGTKFMRFTIPLPMFAYPIYLWRRSPGKKGSHFNPYSDLFAPNERTSVMISTLCWTAMALLLCYSSFIYGFLPVFKIYGVPYLIFVAWLDMVTYLHHHGYEQKLPWYRGKEWSYLRGGLTTVDRDYGVINNIHHDIGTHVIHHLFPQMPHYHLVEATQAAKHVLGKYYREPKKSGPFPFHLFGYLVRSLGEDHYVSDTGDVVFYQSDPHIPKFPTSATTKSKSS

SEQ ID NO: 53698 - DNA, 1517 bp, Limnanthes douglasii
  CDS (56)..(1366)
ctcggagccacagagaattcaaattctctgtccaaagctcaaaactgggtcttcaatggcgagctgggtcttatcacaatatgccctaaaccctcttcctcatattttccgcacaccaagaacctcaatcacatcacacaagctcacagtttcgcacacaaacaacagagccacaccggatctaacaaaactctctttaatcaagtttagagaaagaaaattagggcttagagtaagtgctccgtttcaaatcgcctccacaacacctgaagaggaagacgaagtagcagaattcgaccccggctcaccaccgcctttcaagctagccgatattagagctgcgataccgaaacattgttgggttaagaatcagtggaggtctatgagctatgtagtgagagatgttgttattgttttagggttagctgcggcggcggttgcggctaatagctgggctgtttggcctctgtattgggtcgcacaaggaactatgttttgggctctgtttgttcttggacacgactgtggacatggaagtttctctaacaatcataagctaaatagcgtggttgggcatcttttacattcttcaatccttgtgccttatcatggatggagaattaggcacagaactcatcaccaaaaccatggtcatgttgagaacgatgaatcatggcacccgatgtccgaaaaattattcaggagcttggataaaatcgcattaacttttcgtttcaaagctccctttcccatgcttgcttaccctttctatctgtgggaaagaagtccaggcaaaactggttctcactatcacccagacagtgacttatttgtcccaagtgagaagaaagatgttattacctctactatctgttggacaacaatggttggcttgcttattggcttgtcctttgttatgggaccaattcaaatcctcaagctttatgtagttccatattggatttttgttatgtggctggatttcgttacatatttggatcaccatggacatgaagataaacttccttggtatcgaggagaggaatggagttacttgcgaggagggttaacaacacttgatcgtgattacgggttaatcaacaacatccatcatgatatcggaacccatgttatacaccatctttttcctcaaatccctcattaccatttagtagaggcaactcaggctgctaagccgatatttggaaaatactacaaggagcctgctaaatctaagcctctgccgtttcaccttatcgatgttttgttaaaaagcttgaaaagagaccactttgttccagacaccggagatattgtttattaccagagtgatcctcagattagtggctctttgaaaccagagtaagacttcaggtggtgaaatctcatataagtaaattgttcttgacaacatatttgctgagttgaggttctaattgggaggcgaaattcatgttgtaacattgggggtgaaatgtaaatgctttattcttgagggaaagataaatacttagtat

SEQ ID NO: 53699 - protein, 436 aa, Limnanthes douglasii
MASWVLSQYALNPLPHIFRTPRTSITSHKLTVSHTNNRATPDLTKLSLIKFRERKLGLRVSAPFQIASTTPEEEDEVAEFDPGSPPPFKLADIRAAIPKHCWVKNQWRSMSYVVRDVVIVLGLAAAAVAANSWAVWPLYWVAQGTMFWALFVLGHDCGHGSFSNNHKLNSVVGHLLHSSILVPYHGWRIRHRTHHQNHGHVENDESWHPMSEKLFRSLDKIALTFRFKAPFPMLAYPFYLWERSPGKTGSHYHPDSDLFVPSEKKDVITSTICWTTMVGLLIGLSFVMGPIQILKLYVVPYWIFVMWLDFVTYLDHHGHEDKLPWYRGEEWSYLRGGLTTLDRDYGLINNIHHDIGTHVIHHLFPQIPHYHLVEATQAAKPIFGKYYKEPAKSKPLPFHLIDVLLKSLKRDHFVPDTGDIVYYQSDPQISGSLKPE

SEQ ID NO: 53700 - DNA, 1440 bp, Ricinus communis
  CDS (187)..(1350)
gccaccttaagcgagcgccgcacacgaagcctcctttcacacttggtgacctcaaatcaaacaccacaccttataacttagtcttaagagagagagagagagagaggagacatttctcttctctgagataagcacttctcttccagacatcgaagcctcaggaaagtgcttaaaaagagcttaagaatgggaggtggtggtcgcatgtctactgtcataaccagcaacaacagtgagaagaaaggaggaagcagccaccttaagcgagcgccgcacacgaagcctcctttcacacttggtgacctcaagagagccatcccaccccattgctttgaacgctcttttgtgcgctcattctcctatgttgcctatgatgtctgcttaagttttcttttctactcgatcgccaccaacttcttcccttacatctcttctccgctctcgtatgtcgcttggctggtttactggctcttccaaggctgcattctcactggtctttgggtcatcggccatgaatgtggccatcatgcttttagtgagtatcagctggctgatgacattgttggcctaattgtccattctgcacttctggttccatatttttcatggaaatatagccatcgccgccaccattctaacataggatctctcgagcgagacgaagtgttcgtcccgaaatcaaagtcgaaaatttcatggtattctaagtactcaaacaacccgccaggtcgagttttgacacttgctgccacgctcctccttggctggcctttatacttagctttcaatgtctctggtagaccttacgatcgctttgcttgccattatgatccctatggcccaatattttccgaaagagaaaggcttcagatttacattgctgacctcggaatctttgccacaacgtttgtgctttatcaggctacaatggcaaaagggttggcttgggtaatgcgtatctatggggtgccattgcttattgttaactgtttccttgttatgatcacatacttgcagcacactcacccagctattccacgctatggctcatcggaatgggattggctccggggagcaatggtgactgtcgatagagattatggggtgttgaataaagtattccataacattgcagacactcatgtagctcatcatctctttgctacagtgccacattaccatgcaatggaggccactaaagcaatcaagcctataatgggtgagtattaccggtatgatggtaccccattttacaaggcattgtggagggaggcaaaggagtgcttgttcgtcgagccagatgaaggagctcctacacaaggcgttttctggtaccggaacaagtattaaaaaagtgtcatgtagcctgtttctttaagagaagtaattagaacaagaaggaatgtgtgtgtagtgtaatgtgttctaataaagaaggca

SEQ ID NO: 53701 - protein, 387 aa, Ricinus communis
MGGGGRMSTVITSNNSEKKGGSSHLKRAPHTKPPFTLGDLKRAIPPHCFERSFVRSFSYVAYDVCLSFLFYSIATNFFPYISSPLSYVAWLVYWLFQGCILTGLWVIGHECGHHAFSEYQLADDIVGLIVHSALLVPYFSWKYSHRRHHSNIGSLERDEVFVPKSKSKISWYSKYSNNPPGRVLTLAATLLLGWPLYLAFNVSGRPYDRFACHYDPYGPIFSERERLQIYIADLGIFATTFVLYQATMAKGLAWVMRIYGVPLLIVNCFLVMITYLQHTHPAIPRYGSSEWDWLRGAMVTVDRDYGVLNKVFHNIADTHVAHHLFATVPHYHAMEATKAIKPIMGEYYRYDGTPFYKALWREAKECLFVEPDEGAPTQGVFWYRNKY

SEQ ID NO: 53702 - DNA, 1151 bp, Arachis hypogaea
  CDS (1)..(1140)
atgggagctggagggcgtgtcactaagattgaagctcaaaagaagcctctttcaagggttccacattcaaaccctccattcagtgttggccaactcaagaaagcaattccaccacattgctttgaacgttctcttttcatatcattctcctatgttgtctatgatctcttagtggcctacttactcttctacattgccaccacttatttccacaagcttccatacccattttccttccttgcttggccaatctattgggccatccaaggctgcattctcactggtgtttgggtgattgctcatgagtgtggccaccatgccttcagcaagtaccaacttgttgatgacatggttggtttgacccttcactcttgtctattagttccttatttctcatggaaaatcagccaccgccgccatcactccaacaccggttccctcgaccgcgacgaagtgtttgtcccaaagccaaaatcaaaggtatcatggtataacaagtacatgaacaatccaccagggagggctatctccctcttcatcacactcacactaggatggcccttgtacttggccttcaatgtttctggcagaccctatgatagatttgcaagccactatgacccttatgctcccatatactctaacagggaaaggcttctaatttatgtctcagattcatctgtctttgctgtaacatatctgctatatcacatagcaactctgaaaggtttgggttgggtggtatgtgtttatggggtgccattgctcattgtgaatgggtttctagttaccataacctatttgcagcacacacatgcatcgttgcctcactatgattcatccgaatgggactggttaagaggagcattggcaacagtggacagagattatgggatactgaataaggcatttcatcatataactgatacgcatgtggctcatcatttgttctcaacaatgcctcattaccatgcaatggaagcaaccaatgcaataaagccaatattgggtgattactaccaatttgatgacaccccattttacaaagcattgtggagagaagccaaagagtgcctctatgtggagccagatgatggagcttctaagaagggtgtttattggtacaagaacaagttctgaggtctagaaat

SEQ ID NO: 53703 - protein, 379 aa, Arachis hypogaea
MGAGGRVTKIEAQKKPLSRVPHSNPPFSVGQLKKAIPPHCFERSLFISFSYVVYDLLVAYLLFYIATTYFHKLPYPFSFLAWPIYWAIQGCILTGVWVIAHECGHHAFSKYQLVDDMVGLTLHSCLLVPYFSWKISHRRHHSNTGSLDRDEVFVPKPKSKVSWYNKYMNNPPGRAISLFITLTLGWPLYLAFNVSGRPYDRFASHYDPYAPIYSNRERLLIYVSDSSVFAVTYLLYHIATLKGLGWVVCVYGVPLLIVNGFLVTITYLQHTHASLPHYDSSEWDWLRGALATVDRDYGILNKAFHHITDTHVAHHLFSTMPHYHAMEATNAIKPILGDYYQFDDTPFYKALWREAKECLYVEPDDGASKKGVYWYKNKF

SEQ ID NO: 53704 - DNA, 1150 bp, Arachis hypogaea
  CDS (1)..(1140)
atgggagctggagggcgtgtcactaagattgaagctcaaaagaagcctctttcaagggttccacattcaaaccctccattcagtgttggccaactcaagaaagcaattccaccacattgctttgaacgttctcttttcatatcattctcctatgttgtctatgatctcttagtggcctacttacccttctacattgccaccacttatttccaccagcttccatacccattttccttccttgcttggccaatctattgggccatccaaggctgtattctcaccggtgtttgggtgattgctcatgagtgtggccaccatgccttcagcaagtaccaacttgttgatgacatggttggtttgacccttcactcttgtctattagttccttatttctcatggaaaatcagccaccgccgccaccactccaacacaggttccctcgaccgcgacgaagtgtttgtcccgaaaccaaaatcaaaggtatcatggtataacaagtacataaacaatccaccagggagggctatttcccttttcatcacactcacactaggatggcccttgtacttggccttcaatgtttctggcagaccctatgatagatttgcaagccactatgacccttatgctcccatatactctaacagggaaaggcttctaatttatgtctcagattcatctgtctttgctgtaacatatctgctatatcacatagcaactctgaaaggtttgggttgggtggtatgtgtttatggggtgccattgctcattgtgaatgggtttctagttaccataacctatttgcagcacacacatgcatcattgcctcactatgattcatccgaatgggactggttaagaggagcattggcaacagtggacagagattatgggatactgaataaggcatttcatcatataactgatacgcatgtggctcatcatttgttctcaacaatgcctcattaccatgcaatggaagcaaccaatgcaataaagccaatattgggtgattactaccaatttgatggcaccccattttacaaagcattgtggagagaagccaaagagtgcctctatgtggagccagatgatggagcttctaagaagggtgtttattggtacaagaacaagttctgaggtctagaat

SEQ ID NO: 53705 - protein, 379 aa, Arachis hypogaea
MGAGGRVTKIEAQKKPLSRVPHSNPPFSVGQLKKAIPPHCFERSLFISFSYVVYDLLVAYLPFYIATTYFHQLPYPFSFLAWPIYWAIQGCILTGVWVIAHECGHHAFSKYQLVDDMVGLTLHSCLLVPYFSWKISHRRHHSNTGSLDRDEVFVPKPKSKVSWYNKYINNPPGRAISLFITLTLGWPLYLAFNVSGRPYDRFASHYDPYAPIYSNRERLLIYVSDSSVFAVTYLLYHIATLKGLGWVVCVYGVPLLIVNGFLVTITYLQHTHASLPHYDSSEWDWLRGALATVDRDYGILNKAFHHITDTHVAHHLFSTMPHYHAMEATNAIKPILGDYYQFDGTPFYKALWREAKECLYVEPDDGASKKGVYWYKNKF

SEQ ID NO: 53706 - DNA, 1170 bp, Rhizopus oryzae
  CDS (1)..(1170)
atggcaaccaagagaaatatcagttccaatgaaccagaaaataagcctgttatcgacgaagcagtagcaagaaactgggagattcctgattttaccatcaaagaaattcgtgatgctattccttctcactgcttccgtcgagacacattcagatcattcacttatgttattcatgattttgctattatcgccgtcttgggttatttagctacttacattgatcaagttcattctgctgctcttcgcttgcttttatggtccttgtattggactgctcaaggtattgttggtactggtgtttgggttgttggtcacgaatgtggacatcaagctttcagtccatccaaggccgtcaataacagtgtcggctttgtccttcatacactcttattagttccttatcactcttggagattctctcactctaggcatcataaagctactggtcacatgtcaaaagaccaagttttccttcccaagacaagagaaaaggttggtttaccacctcgcgacaaagaccctcaagctgatggtcctcatgatgttcttgacgaaacacctattgttgtactttaccgtatgtttcttatgttcttgtttggctggccattataccttttcaccaatgtcaccggtcaagattaccctggctgggcctctcacttcaacccatcctgcgacatttacgaagagggccaatattgggatgtcgtcagttcctctgttggtgttgttggcatggtaggtcttttaggttactgtggtcaaatctttggttccttaaacatgatcaaatactatgttattccttacttgtgtgttaacttttggcttgtcttgattacttatttgcaacacactgaccccaaattgcctcactaccgcgagaatgtctggaacttccaacgtggtgctgctcttaccgttgaccgttcttacggtgcccttattaattatttccaccatcacatttccgacacccacgtcgcccaccacttcttttctactatgcctcactatcatgctgaagaagctactgttcatatcaagaaagctcttggtaagcattaccactgtgataatactcctattcccatcgctctttggaaagtttggaagagctgtagatttgttgaaagtgaaggagatgttgtgttttacaaaaattaa

SEQ ID NO: 53707 - protein, 389 aa, Rhizopus oryzae
MATKRNISSNEPENKPVIDEAVARNWEIPDFTIKEIRDAIPSHCFRRDTFRSFTYVIHDFAIIAVLGYLATYIDQVHSAALRLLLWSLYWTAQGIVGTGVWVVGHECGHQAFSPSKAVNNSVGFVLHTLLLVPYHSWRFSHSRHHKATGHMSKDQVFLPKTREKVGLPPRDKDPQADGPHDVLDETPIVVLYRMFLMFLFGWPLYLFTNVTGQDYPGWASHFNPSCDIYEEGQYWDVVSSSVGVVGMVGLLGYCGQIFGSLNMIKYYVIPYLCVNFWLVLITYLQHTDPKLPHYRENVWNFQRGAALTVDRSYGALINYFHHHISDTHVAHHFFSTMPHYHAEEATVHIKKALGKHYHCDNTPIPIALWKVWKSCRFVESEGDVVFYKN

SEQ ID NO: 53708 - DNA, 1681 bp, Helianthus annuus
  CDS (117)..(1448)
gattcggcaattggccaatctgtctccggttctctataaatacatctagccagccatctagggtttagtgggacgagagaacagcaccagcaccagcaccattctggtctctcacaatggcaggattggtgctatcagggtgcgctattaaacccttttcccaatctttacccatacccacaaaaaggttcatcaccaacccatcaaatatcaatcttttacaccctaaagatccaatcttttcaccaaactttcatgggttctcaagatgggcagtcaaagttagtgccccactaaggattccatcaatagatcaacaagatttagatttagatttagagagagaaagaatcagtagtttagatgtacaagaagaagagatatttgatgcaggggcaccaccgccattcaaactggctgatattagggctgctataccaaaacgttgttgggtgaaggatccatggaggtcaatgagttatgttgtaagggatgttgctattgttcttgggttagcagcagctgcagctcatctcaacaattggcttgtttggccactttattgggctgctcaaggaactatgttttgggccctttttgtgcttggtcatgactgtggccatggaagcttctccaacaatgcgaagcttaatagtgtggttggccatcttctacattcttcaattcttgtaccgtatcacggatggagaatcagtcatagaacgcatcaccaaaaccatggacatgttgaaaatgatgaatcatggcacccgttaaccgagaaaacattcaagagtttggattggataacacgaacactacgcttcaccctcccttttccaatgcttgcttatccattttacctatggaatagatctcccggaaagagtggttcacactttgatccgagcagcgatttatttgttcccgctgagcaaaaagacgtgatcacttcaacgatttgttggacaacaatgcttgctttgcttttcggtttgaactttgttgttggtccagtgcaaatgctaaaactatacggcattccatatttgataaatgttatgtggttggattttgttacttacttgcatcaccatggtcatgaagataaacttccttggtatcgtggaaaggaatggagttatctaaggggaggattgaccaccattgaccgtgattacggttggattaataatatccatcacgacattggaacacatgtcattcaccatctctttccccagatcccacactatcatttaattgaggcgacggaggctgcaaaacctgtgctcgggaaatactatcgtgaaccaaaaaagtcatcgcctataccttttcatctactcggtgaactagttagaagcttgaaaaaagaccattatgttagcgacactggagacgtgttatactaccaaactgacgataaacttagcaaagaaaagtagatgcattgaattttgcttgagatgagcaacattctttttgaagaacaattgtttgataaatgaagagattatttgacagatatcaatagggtttactgatgataaagagttttttcattcagtttatctgtatttgtttattgaaccttaccattctttcatgtatacatttaattaatagaaagaaagtaagtcattttgttcaaaaaaaaaaaaaaaaaaaaaaaaaaaaa

SEQ ID NO: 53709 - protein, 443 aa, Helianthus annuus
MAGLVLSGCAIKPFSQSLPIPTKRFITNPSNINLLHPKDPIFSPNFHGFSRWAVKVSAPLRIPSIDQQDLDLDLERERISSLDVQEEEIFDAGAPPPFKLADIRAAIPKRCWVKDPWRSMSYVVRDVAIVLGLAAAAAHLNNWLVWPLYWAAQGTMFWALFVLGHDCGHGSFSNNAKLNSVVGHLLHSSILVPYHGWRISHRTHHQNHGHVENDESWHPLTEKTFKSLDWITRTLRFTLPFPMLAYPFYLWNRSPGKSGSHFDPSSDLFVPAEQKDVITSTICWTTMLALLFGLNFVVGPVQMLKLYGIPYLINVMWLDFVTYLHHHGHEDKLPWYRGKEWSYLRGGLTTIDRDYGWINNIHHDIGTHVIHHLFPQIPHYHLIEATEAAKPVLGKYYREPKKSSPIPFHLLGELVRSLKKDHYVSDTGDVLYYQTDDKLSKEK

SEQ ID NO: 53710 - DNA, 1494 bp, Sorghum bicolor
  CDS (65)..(1234)
  misc_feature (862)..(862): s is g or c
acgacgccgccaccaccgcaaaagcagcaaaaccttagcttgttcaccaccacaaccgccagccatggcggcgacggatcatgaggttgaggaggcggtggcgaaggcgagagaggacgacaagagccggcggcaggtggacggcttcgacgctgggaaggcgccgccgttccgcattggcgacgtgcgggcggcggtgccggagcactgctggcgcaagagcccctggcggtcgctgtggtacgtggtacgggacgtggcggtggtggtggcgctgggagcggcggcggcggccatggatagctgggcggtgtggccgctctactgggcggtgcaggggaccatgttctgggcgttcttcgtcttgggacacgactgtggtcatgggagcttctcggacaacgcgacgcttaacagcgtggttggtcatctcctccactccttcatcctcatcccctaccatggatggaggatcagccacagaacacatcatcagaaccacggccacgtcgacagggacgagtcatggcacccgctgacggagcggcggtaccggcgattgcctcctcgcgcaaagaagctaagattcacgccccccttcccgctgctcttattccccctctacctgttctacaggagccctggcaagaggggctctcactttcttcccagcagcccactgttcagccccaaggacaagggcgacgtcatactctcgaccacctgctggtgcatcatgctcgccttcctcctcgccatgtcgtgcgcgttcggcccactccaggtgctcaagatgtacggcgttccatacctggtgtctgtgatgtggcttgacttggtgacttacctgcaccaccatggscaccaggagcgcctcccctggtaccgcggcgaggaatggagctacctccgcggcgggctgacgacggtggacagagactacggctggatcaacagcatccaccacgacatcggcacccatgtcatccaccacctcttcccgcagatcccgcactaccatctcgtcgaagctaccaaggcagccaagccggtgctggggcgatactaccgggagccacacaagtcagggccgctgccacttcacctccttggcgtgctcctcaggagcctcagagtcgaccacttcgtcagcgaccatggcgatgttgtctactaccaaactgaccatcacctcaacgacactactactgatgatgctcataagcaaaaatgacttgcatcattgctgggagggatccattccatgcctgcgctttgccagctgggaataatgatagatgcccgtacgtacgtctcgatatgcatacggttgatgttggtgttgaatacctcgcgctctcgtgttcgtatacggagtagtaggtgaagtcagttggtgcaatgtattccatctgttcgtggcctatatattatgcaaaaaaataatgtcagaataattaaatcacatgtgtgagattgaaaaaaaaaaaaaaa

SEQ ID NO: 53711 - protein, 389 aa, Sorghum bicolor
MAATDHEVEEAVAKAREDDKSRRQVDGFDAGKAPPFRIGDVRAAVPEHCWRKSPWRSLWYVVRDVAVVVALGAAAAAMDSWAVWPLYWAVQGTMFWAFFVLGHDCGHGSFSDNATLNSVVGHLLHSFILIPYHGWRISHRTHHQNHGHVDRDESWHPLTERRYRRLPPRAKKLRFTPPFPLLLFPLYLFYRSPGKRGSHFLPSSPLFSPKDKGDVILSTTCWCIMLAFLLAMSCAFGPLQVLKMYGVPYLVSVMWLDLVTYLHHHGHQERLPWYRGEEWSYLRGGLTTVDRDYGWINSIHHDIGTHVIHHLFPQIPHYHLVEATKAAKPVLGRYYREPHKSGPLPLHLLGVLLRSLRVDHFVSDHGDVVYYQTDHHLNDTTTDDAHKQK

SEQ ID NO: 53712 - DNA, 1320 bp, Glycine max
  CDS (32)..(1177)
aacagagaaagaaaggaacatttgagcaaaaatggttcaagcacagcctctacaacatgttggtaatggtgcagggaaagaagatctagcttataattttggtccaagtgctccaccacccttcaagattgcagatatcagagcagcaattccaaagcattgctgggagaagaacacattgagatctctgagttacgttctgagggatgtgttgatagtttctgcattggtagctgcagcaattggcttcaatagctggctcttctggccaccctattggtctgcacaaggcacaatgttttgggcactttttgttcttggacatgattgtggtcatggaagtttttcaaacagtcctttgttgaacagcattgtgggccacatcttgcactcttcaattcttgtaccataccatggatggagaattagccacaggactcaccatcagaaccatggccatgttgagaaggatgaatcatgggttccgctttcagagaaagtttacaagaatctagacaacatgacaagaatgatgagattcactcttcctttccccatctttgcataccccttttatttgtggagcagaagcccaggaaaagaaggctctcaattcaacccttacagcaacttgttctcccctggtgagagaagagatgtgataacttcaactctttgttggggcatcatgctttctctgcttctctatctttccctcacattgggtccactttttatgttcaagctttatggggttccttatttgatcttcgtcgtgtggctggatttcgtcacatacttgcatcatcatggttacaagcagaaactaccttggtaccgtggccaggaatggacttatctaaggggtggtcttacaaccgtagatcgtgactatggttggatcaacaacattcaccatgacattggcacccatgttatccatcaccttttccctcagattccacattatcatttggttgaagcgactaaagcagctaaggcagtgctaggaaagtattatcgtgagcctcagaaatcagggccattgccacttcatcttatcaagtacttgctacacagcataagtcaggatcacttcgttagtgactatggtgacattgtgtactaccaaactgattctcagttccacaaagattcttggaccaagtccaactaaagttttgatgctactacattgacctattttctcatatgttacctaatcaaatcaattaggtgacatgcataagctttcataaattatgctagaaatgtacttactgttcaaagcatgctatgctagaaaagaatctatttttc

SEQ ID NO: 53713 - protein, 381 aa, Glycine max
MVQAQPLQHVGNGAGKEDLAYNFGPSAPPPFKIADIRAAIPKHCWEKNTLRSLSYVLRDVLIVSALVAAAIGFNSWLFWPPYWSAQGTMFWALFVLGHDCGHGSFSNSPLLNSIVGHILHSSILVPYHGWRISHRTHHQNHGHVEKDESWVPLSEKVYKNLDNMTRMMRFTLPFPIFAYPFYLWSRSPGKEGSQFNPYSNLFSPGERRDVITSTLCWGIMLSLLLYLSLTLGPLFMFKLYGVPYLIFVVWLDFVTYLHHHGYKQKLPWYRGQEWTYLRGGLTTVDRDYGWINNIHHDIGTHVIHHLFPQIPHYHLVEATKAAKAVLGKYYREPQKSGPLPLHLIKYLLHSISQDHFVSDYGDIVYYQTDSQFHKDSWTKSN

SEQ ID NO: 53714 - DNA, 1154 bp, Brassica napus
  CDS (14)..(1150)
  misc_feature (577)..(577): n is a, g, c or t
ctctttctcggcgatggttgtcgctatggaccagcgtagcaatgcgaacggagacgaaaggtttgatccgagcgcacaaccaccgttcaagatcggagatataagggcggccattcctaagcattgttgggtaaagagtcctttgagatccatgagctatgtcgccagagacattttcgccgtcgtggctcttgccgtcgccgccgtgtattttgatagctggttcttttggcctctttattgggccgcccaaggaaccctgttctgggctatcttcgtactcggccacgactgtggacatgggagcttctcagacattcctcttctgaatactgcggttggtcatattcttcattccttcattctcgttccataccatggttggagaataagccatcggacacaccaccagaaccatggccatgttgaaaacgacgagtcttgggttccgttgccagaaaaattatacaagaatttgtcccacagtacacggatgctcagatacactgtccctctccccatgctcgcttaccctctctatctgtgggtacagaagtccctggtaaagaagggtccncattataacccatacagtagtttatttgccccaagcgagagaaagcttattgcaacttcaactacttgctggtcgatcatgttggccactcttgtttatctatcattcctcgttggtccagtcacagttctaaaagtctatggtgttccttacattatctttgtaatgtggttggacgctgtcacgtacttgcatcatcatggtcacgatgataagttgccttggtacagaggcaaggaatggagttatttacgtggaggattaacaactattgatagagattacgggatcttcaacaacattcatcacgatattggaactcacgtgatccatcatcttttcccacaaacccctcactatcacttggttgatgccacgaaatctgctaaacatgtgttgggaagatactacagagaaccaaagacgtcaggagcaataccgatccacttggtggaaagtttggtggcaagtattaggaaagatcattacgtcagtgacactggtgatattgtcttctacgagacagatccagatctctacgtttatgcttctgacaaatccaaaatcaactaacctt

SEQ ID NO: 53715 - protein, 378 aa, Brassica napus
MVVAMDQRSNANGDERFDPSAQPPFKIGDIRAAIPKHCWVKSPLRSMSYVARDIFAVVALAVAAVYFDSWFFWPLYWAAQGTLFWAIFVLGHDCGHGSFSDIPLLNTAVGHILHSFILVPYHGWRISHRTHHQNHGHVENDESWVPLPEKLYKNLSHSTRMLRYTVPLPMLAYPLYLWVQKSLVKKGPHYNPYSSLFAPSERKLIATSTTCWSIMLATLVYLSFLVGPVTVLKVYGVPYIIFVMWLDAVTYLHHHGHDDKLPWYRGKEWSYLRGGLTTIDRDYGIFNNIHHDIGTHVIHHLFPQTPHYHLVDATKSAKHVLGRYYREPKTSGAIPIHLVESLVASIRKDHYVSDTGDIVFYETDPDLYVYASDKSKIN

SEQ ID NO: 53716 - DNA, 1178 bp, Brassica napus
  CDS (10)..(1161)
tctccagcgatggttgttgctatggaccagcgcagcaatgttaacggagattccggtgcccggaaggaagaagggtttgatccaagcgaacaaccaccgtttaagatcggagatatcagggcggcgattcctaagcattgttgggtgaagagtcctttgagatctatgagctacgtcgccagagacattttcgccgtcgcggctctggccatggccgccgtgtattttgatagctggttcctctggccactctactgggttgcccaaggaacccttttctgggccatcttcgttcttggccacgactgtggacatgggagtttttcagacattcctctgctgaacagtgtggttggtcacattcttcattcattcatcctcgttccttaccatggttggagaataagccatcggacacaccaccagaaccatggccatgttgaaaacgacgagtcttgggttccgttgccagaaaagttgtacaagaacttgccccatagtactcggatgctcagatacactgttcctctgcccatgctcgcttacccgatctatctgtggcacagaagtcctggaaaagaagggtcacattttaacccatacagtagtttatttgctccaagcgagaggaagcttattgcaacttcaacaacttgctggtccataatgttggccactcttgtttatctatcgttcctcgttggaccagtcacagttctcaaagtctatggcgttccttacattatctttgtgatgtggttggacgctgtcacgtacttgcatcatcatggtcacgatgagaagttgccttggtacagaggcaaggaatggagttatttacgtggaggattaacaactattgatagagattacggaatcttcaacaacatccatcacgacattggaactcacgtgatccatcatcttttcccacaaatccctcactatcacttggtcgatgccacgagagcagctaaacatgtgttaggaagatactacagagtgccgaagacgtcaggggcaataccgattcacttggtggagagtttggtcgcaagtattaaaaaagatcattacgtcagtgacactggtgatattgtcttctacgagacagatccagatctctacgtttatgcttctgacaaatctaaaatcaattaacttttcttcctagctct

SEQ ID NO: 53717 - protein, 383 aa, Brassica napus
MVVAMDQRSNVNGDSGARKEEGFDPSEQPPFKIGDIRAAIPKHCWVKSPLRSMSYVARDIFAVAALAMAAVYFDSWFLWPLYWVAQGTLFWAIFVLGHDCGHGSFSDIPLLNSVVGHILHSFILVPYHGWRISHRTHHQNHGHVENDESWVPLPEKLYKNLPHSTRMLRYTVPLPMLAYPIYLWHRSPGKEGSHFNPYSSLFAPSERKLIATSTTCWSIMLATLVYLSFLVGPVTVLKVYGVPYIIFVMWLDAVTYLHHHGHDEKLPWYRGKEWSYLRGGLTTIDRDYGIFNNIHHDIGTHVIHHLFPQIPHYHLVDATRAAKHVLGRYYRVPKTSGAIPIHLVESLVASIKKDHYVSDTGDIVFYETDPDLYVYASDKSKIN

SEQ ID NO: 53718 - DNA, 1333 bp, Brassica napus
  CDS (2)..(1321)
aatggcgaacttggtcttatcagaatgtggagtaagacctctccccagaatctacgccacacccagatccagtttcctctctaccaacaaacccacctccttcaaattcaggcaatccccttcctcctcatctctcaaccttcgtctgaattctcggaactgggcgttgaatgtgagcacacctctaacagtcgactcctcatcatctcctccaatcgaggaagaacccaaaacgcagagattcgacccaggcgcccctcctccgttcaacctagcggacatcagagcagctatacccaagcattgctgggttaagaatccatggaagtctatgagttacgtcgtcagagacgtcgccatcgtgttcgcgttggctgctggagctgcttacctcaacaattggctcgtttggcctctctattggattgctcaaggaatcatgttctgggctctcttcgttcttggccatgactgtggacatggtagcttctcaaatgacccgaggttgaacagtgtggtgggtcaccttcttcattcctctattctagtcccttaccatggctggagaattagccacagaactcaccaccagaaccatggacatgttgagaacgacgaatcttggcatcctatgtctgagaaaatctacaagggtttagacaaaccgactcggttctttagatttacactgcctcttgtgatgctcgcttaccctttctacttgtgggcaagaagtccggggaagaagggttctcattaccatccagacagcgacttgttccttcctaaagagagaaatgatgttctcacttctaccgcttggtggactgcaatggctgctctgcttgtctgtctcaacttcgtgatgggtccaatgcaaatgctgaaactttatgtgattccttactggataaatgttatgtggttggactttgtgacttacctgcatcaccatggtcatgacgataagctcccttggtaccgtgggaaggaatggagttacttgagaggaggacttacaacattggaccgtgactacggattgatcaacaacatccatcacgacgttggaactcatgtgatacatcatcttttccctcagatcccacattatcatctagtagaagcaacagaagcagctaaaccagtattagggaagtattatagggagcctgataagtctggacctttgccattgcatttactgggaatcttagcaaaaagtattaaagaagatcattttgtgagcgatgaaggagatgttgtatactatgaagcagaccctgatctctatggacagatcaaggtaacagcagattgaaatgaagcaggc

SEQ ID NO: 53719 - protein, 439 aa, Brassica napus
MANLVLSECGVRPLPRIYATPRSSFLSTNKPTSFKFRQSPSSSSLNLRLNSRNWALNVSTPLTVDSSSSPPIEEEPKTQRFDPGAPPPFNLADIRAAIPKHCWVKNPWKSMSYVVRDVAIVFALAAGAAYLNNWLVWPLYWIAQGIMFWALFVLGHDCGHGSFSNDPRLNSVVGHLLHSSILVPYHGWRISHRTHHQNHGHVENDESWHPMSEKIYKGLDKPTRFFRFTLPLVMLAYPFYLWARSPGKKGSHYHPDSDLFLPKERNDVLTSTAWWTAMAALLVCLNFVMGPMQMLKLYVIPYWINVMWLDFVTYLHHHGHDDKLPWYRGKEWSYLRGGLTTLDRDYGLINNIHHDVGTHVIHHLFPQIPHYHLVEATEAAKPVLGKYYREPDKSGPLPLHLLGILAKSIKEDHFVSDEGDVVYYEADPDLYGQIKVTAD

SEQ ID NO: 53720 - DNA, 1341 bp, Cryptococcus curvatus
  CDS (1)..(1341)
atgtctgccgccaccctgcgccagcgtaacgtcgacaagccaggtgctgccgacaaggccgagctcctccgtgaagccgaggacctcgagctcaccgagggccagaagtttgtcgggcccaactttaccgtcaagcagctcttggacgccattcccgcccactgctacaagcgctcggcgttcaagtcgtcgctttacgtcctccaggactttgtcctcctcgccgccctcgtctacggcgcctaccacattgactccttcttgagccgcttcaaccttggctcggttgcccacaccgccgccaagatcggcctctggttcacctaccaggtccttgccggcatggtcggtaccggtatctgggttatcgcccacgaatgcggccaccaggcctactccgagtccaagacgatcaacaacgccgtcggctgggtcctccactcgatccttcttgtgccttaccactcgtggcgcatctcgcacggccgtcaccacgccgccaccggccaccttacccgtgacgaggtctttgttccccgcacccgcgagcagctcggcatccaggcccccaagactgaggaggagaagaagggcatcaacgtccccgcttggcgccaggctgagcttcgtgaggccctcgaggagtcgcctatcggtgcgctctacggtgccatcctccaccagctcttcggctggcccatgtacctcatccgcaacgcgtccggccagctctggtaccccaagatgaccaaccacttccagccgtcgtcgatcatcttcaagccctcgcacttctggcagatcattgcttcggacattggtgttgttctcaccgccgccgccctcggcgtctttgtctactaccgtggctttgccgagatggctcgcatctacctcatcccctacctctgggtgaaccactggcttgtcttcatcaccttcctgcagcacaccgaccccgttctcccccactactcggagaagacttggacctttgcccgtggcgccctggcgaccattgaccgcaactgcctcggccccgtcggcccctacctcttccacggcatcaccgagacgcacgtcgcgcaccacacctcgtcgcgcatcccccactacaacgcgtgggaggcgaccgaggccctcaagaagttcctcggcccccactaccactacaaccccgagaacatgttcgtgtccttctggaaggcccaccgctactgcaagttcatcgaggcgggcgaagacgtcgccttctaccgcaacgccgctggtgtcgcgcagaaggtcggcatcatcgaggagaacggcgcggtgtccgactcgggcgtcgagcacaagtaa

SEQ ID NO: 53721 - protein, 446 aa, Cryptococcus curvatus
MSAATLRQRNVDKPGAADKAELLREAEDLELTEGQKFVGPNFTVKQLLDAIPAHCYKRSAFKSSLYVLQDFVLLAALVYGAYHIDSFLSRFNLGSVAHTAAKIGLWFTYQVLAGMVGTGIWVIAHECGHQAYSESKTINNAVGWVLHSILLVPYHSWRISHGRHHAATGHLTRDEVFVPRTREQLGIQAPKTEEEKKGINVPAWRQAELREALEESPIGALYGAILHQLFGWPMYLIRNASGQLWYPKMTNHFQPSSIIFKPSHFWQIIASDIGVVLTAAALGVFVYYRGFAEMARIYLIPYLWVNHWLVFITFLQHTDPVLPHYSEKTWTFARGALATIDRNCLGPVGPYLFHGITETHVAHHTSSRIPHYNAWEATEALKKFLGPHYHYNPENMFVSFWKAHRYCKFIEAGEDVAFYRNAAGVAQKVGIIEENGAVSDSGVEHK

SEQ ID NO: 53722 - DNA, 1320 bp, Malus domestica
  CDS (1)..(1320)
atggcgacttgggtcctctcagaatgcaccctaaaacctctccctaaattctactcacatcccagaaacgccctcccctcaaaaccgtccaccctccggccattccccaatgtgaggagcaccaatcttttggggttcagaggggcaaaatggtcactcaatgtgagtgcgccattgcgtgtcccatccgtggatggggaagacaatggcaaagtgagcactaatggggttggagacggtggtgaatttgaccccggtgcccctccccccttcaagttgggtgacatcagagctgccattcctaagcattgctgggttaaggacccttggaaatctatgagctatgtggtcagagatgtggctgtggtttttgggatggcggcgcttgcatcttaccttaacaattgggctgtttggcctctctactggtttgctcagggcaccatgttctgggctctctttgttcttggacatgattgtggccacggaagtttctcgaataatccaaagctgaatagcgtggtcggtcatcttcttcattcttcaatccttgtcccataccatggatggagaattagccacagaactcatcatcagaaccatggacacgtcgaaaatgacgagtcttggcatccgttgcctgagaaaatttacaagagtttggataagatgactcagatatttaggttcaccctaccattccccatgcttgcttatcctttctatctgtggaatcgaagtccgggaaagagtggctctcattatgatccaaacagcgaattgtttctcccaaatgaaaggaaagacatcattacttccactgcctgttgggcagcaatggctgcgctgctagtcggtctgtctttcacaatgggacctgtccaagtgcttaagctctacggcgttccatactggatgtttgtcttgtggttggacttagtgacttacttacatcaccatggccacgaggacaagcttccatggtatcgtgggaaggaatggagttatctaagaggaggactgacaaccattgatcgcgactacggatggatcaacaacatccatcatgatatcggaactcatgtcatacatcatctcttccctcaaatcccacattacaacttaatagaagcaacggaggcagctaagcctgtgctcgggaagtactacagagaaccgaaaaaatcagggcctctcccacttcacctactgggagtccttgtaagaagctttaaacgcgatcattacgtgagtgacactggggatgttgtatattatcaaaccgataaggaacttgccgggtcagcggtatcagaatga

SEQ ID NO: 53723 - protein, 439 aa, Malus domestica
MATWVLSECTLKPLPKFYSHPRNALPSKPSTLRPFPNVRSTNLLGFRGAKWSLNVSAPLRVPSVDGEDNGKVSTNGVGDGGEFDPGAPPPFKLGDIRAAIPKHCWVKDPWKSMSYVVRDVAVVFGMAALASYLNNWAVWPLYWFAQGTMFWALFVLGHDCGHGSFSNNPKLNSVVGHLLHSSILVPYHGWRISHRTHHQNHGHVENDESWHPLPEKIYKSLDKMTQIFRFTLPFPMLAYPFYLWNRSPGKSGSHYDPNSELFLPNERKDIITSTACWAAMAALLVGLSFTMGPVQVLKLYGVPYWMFVLWLDLVTYLHHHGHEDKLPWYRGKEWSYLRGGLTTIDRDYGWINNIHHDIGTHVIHHLFPQIPHYNLIEATEAAKPVLGKYYREPKKSGPLPLHLLGVLVRSFKRDHYVSDTGDVVYYQTDKELAGSAVSE

SEQ ID NO: 53724 - DNA, 1159 bp, Euphorbia lagascae
  CDS (7)..(1155)
gaaacaatgggagctggagggagaatgtctcatgtccctaagagcaagagccaagttaaggagctcaaaagagttccttacacaaaaccaccattcactcttggccaactcaagcaagccgtcccttctcattgcttcaaacgctctcttctccgctccttctcctatgttttccatgatctcgctctttcttttctctttttctacattgccaccacctactttcatcgcttcccgtcttggctcgccttttttgcctggcccgtctactgggttttccagggctgcattctcacaggtgtttgggtcattgcccatgaatgtggacaccatgcttttagtgatcatcaatgggttgatgacactgttggcttacttctccattccgcgcttctagtcccttacttttcatggaagatcagccatcgttgtcatcactccaataccggatccatggagcgagacgaagtgtttgtccccaaacctaagtctagaatctcatggtactcaaagtacttgaacaatccacccggcagagctttatcactagcgggtacccttcttattgggtggccgttatacttagcgttcaacgtctccggtcggccgtacgatcgatttgcttgtcattatgatccttatggtccaatattctctgaaagggaaaggcttcagatttacatttctgatattgggatgtttgtcacaacttatattctataccaggctgccgctgtgaaagggtttgcttggctagtatgtacttatggcattccattgttgattgtgaattcattccttgtgacgatcacatacttgcagcacacccatccgtctcttccccactatgactcagtcgaatgggactggctacgaggagctttgtcgacggtggatagagattacggtgtactaaacaaggttttccacaacattacggacacacatatagcgcatcatttgttttctacaatgccacattatcatgctttggaagcaaccaaagcaataaagccgattctcggggagtattacagttatgatggtactccagtttataaagcactgtggagggaagctaaagaatgcttgtttgttgaggcagacgagggagcaaataagcaaggtgttttctggtataggaacaagtattaattaa

SEQ ID NO: 53725 - protein, 382 aa, Euphorbia lagascae
MGAGGRMSHVPKSKSQVKELKRVPYTKPPFTLGQLKQAVPSHCFKRSLLRSFSYVFHDLALSFLFFYIATTYFHRFPSWLAFFAWPVYWVFQGCILTGVWVIAHECGHHAFSDHQWVDDTVGLLLHSALLVPYFSWKISHRCHHSNTGSMERDEVFVPKPKSRISWYSKYLNNPPGRALSLAGTLLIGWPLYLAFNVSGRPYDRFACHYDPYGPIFSERERLQIYISDIGMFVTTYILYQAAAVKGFAWLVCTYGIPLLIVNSFLVTITYLQHTHPSLPHYDSVEWDWLRGALSTVDRDYGVLNKVFHNITDTHIAHHLFSTMPHYHALEATKAIKPILGEYYSYDGTPVYKALWREAKECLFVEADEGANKQGVFWYRNKY

SEQ ID NO: 53726 - DNA, 1308 bp, Solanum lycopersicum
  CDS (1)..(1308)
atggcaagttgggttctatcagaatgtggtttaagaccactaccaaaaatatacccaaagcctacaataggtttttcttcttccgtttctgtttccgccaccagtttgaatttgagaagaatttcaccttcacctatacgaacagatcggaattgttgggcattgagggtaagtgcaccgcttaggatccaaattgccggagaagaagaggaacaaacaacaaacaatggggatgagttttttgacccaggggcaccacccccttttaagctttctgatattaaggcagctattcctaagcattgttgggtcaaaaatccatggacgtccatgagttatgttgttagagatgtagctattgtgtttgggctggcggctgctgctgcttatttcaacaattggcttgtttggcctctttattggtttgctcagagtacaatgttttgggctctctttgttctaggtcatgattgtggacatggaagcttttcaaataaccatagcttgaatagcgttgctggacatattcttcattcttcgattcttgttccttatcatggatggagaataagccacagaactcatcatcagaaccatggacatgttgagaatgatgaatcatggcatcctttatctgagaagctttacaatagtttggatgatatcacaaagaaatttaggttcactctaccctttcccttgctggcatatcctttctatctgtggggtagaagtccgggaaagaaaggttctcactttgatccaaacagtgatttgtttgtggcaagtgagaagaaagatgtgatcacttcaactgtctgctggacggcaatggctgcattgcttgtaggattgtcctttgtcatgggtcctcttcaaatgcttaagctttatggcatcccctattggggctttgtcatatggctggatttagttacctatttgcatcaccatggccatgaagataaagttccttggtacagaggagaggaatggagttatctgagaggagggcttacaacacttgatcgtgactatggatggattaacaacatccaccatgacatagggactcatgtgatacatcatctcttccctcaaatcccacactatcatttggtagaagcaactgaagctgctaaaccagtgttagggaaatattataaggagccaaagaagtcagggcctctaccattttacttgttgggatatctgataagaagcatgaaggaggatcactttgtgagtgacacagggaatgtagtatattatgaaactgatcccaacctttatgggtctaagaaatag

SEQ ID NO: 53727 - protein, 435 aa, Solanum lycopersicum
MASWVLSECGLRPLPKIYPKPTIGFSSSVSVSATSLNLRRISPSPIRTDRNCWALRVSAPLRIQIAGEEEEQTTNNGDEFFDPGAPPPFKLSDIKAAIPKHCWVKNPWTSMSYVVRDVAIVFGLAAAAAYFNNWLVWPLYWFAQSTMFWALFVLGHDCGHGSFSNNHSLNSVAGHILHSSILVPYHGWRISHRTHHQNHGHVENDESWHPLSEKLYNSLDDITKKFRFTLPFPLLAYPFYLWGRSPGKKGSHFDPNSDLFVASEKKDVITSTVCWTAMAALLVGLSFVMGPLQMLKLYGIPYWGFVIWLDLVTYLHHHGHEDKVPWYRGEEWSYLRGGLTTLDRDYGWINNIHHDIGTHVIHHLFPQIPHYHLVEATEAAKPVLGKYYKEPKKSGPLPFYLLGYLIRSMKEDHFVSDTGNVVYYETDPNLYGSKK

SEQ ID NO: 53728 - DNA, 1401 bp, Punica granatum
  CDS (75)..(1238)
gagagttcagagctgggaagaggcttcgatatccctccgaggtccggagaaggtgagctctcagggacgacgcgatgggagccggtggaagaatgacggtcccgaacaagtgggaaggcgagggagacgagaagagccagaagccggtccaaagggttccctccgcaaagccaccattcacactaagcgagatcaagaaggccatcccgccacattgcttcaaacgctccctcctcaagtccttctcttatgtcctctatgacctcactttggtggccatcttctattacgttgctaccacttacatcgacgccctcccgggtccactacgctacgcggcctggcccgtgtactgggccctgcaggggtgcgtgctcacgggtgtctgggtcatagcccacgagtgcgggcaccatgcgtttagcgactaccagtgggtggacgactgtgtcggcctggtactgcactcagcgctcctcgttccgtacttctcctggaagtacagccaccgccggcaccactccaacacgggctcgctggagcgtgacgaggttttcgtccccaagcccaagtccaagatgccgtggttctccaagtacctgaacaacccgccaggccgagtcatgacgctgattgtgaccctgaccctgggctggccgttgtacttggcattgaacgtctctggcaggccctatgacaggttcgcttgccactttgacccgtatggcccgatctacaccgacagggagcgtctccagatctacatttctgatgtagggatcatggccgccacgtacacgctgtacaagatcgcagcagcccgtggcctggcctggttggtttgtgtatatggtgtccctctcctgatcgtgaacgcattcctggtcacgatcacctacctccagcacacccacccggcccttccccactatgactcgtcggaatgggactggctcaggggggcactggcaacagcggaccgagactacgggatcctcaacaaggtcttccacaacataaccgacacgcatgtcgcccaccacctcttctccaccatgccgcactaccacgcgatggaggctaccaaagcgatcaagccgatactgggagactactaccagttcgacgggactccggtatacaaagcgatgtggagagaggctagggagtgcctgtacgtggagcccgacgacggggccaacagtaagggggttttctggtacaagaagaacctctgatcaccatttaccacattgctggtcgcaagttaatttcaaggtcataccgaacaaaacgaattagaatctttagctttagggtgtcctctctctctctcttgagcgagcgaataaactagtacttgatcggacgtttgcgccaacgtgaacagttcgtatcgtg

SEQ ID NO: 53729 - protein, 387 aa, Punica granatum
MGAGGRMTVPNKWEGEGDEKSQKPVQRVPSAKPPFTLSEIKKAIPPHCFKRSLLKSFSYVLYDLTLVAIFYYVATTYIDALPGPLRYAAWPVYWALQGCVLTGVWVIAHECGHHAFSDYQWVDDCVGLVLHSALLVPYFSWKYSHRRHHSNTGSLERDEVFVPKPKSKMPWFSKYLNNPPGRVMTLIVTLTLGWPLYLALNVSGRPYDRFACHFDPYGPIYTDRERLQIYISDVGIMAATYTLYKIAAARGLAWLVCVYGVPLLIVNAFLVTITYLQHTHPALPHYDSSEWDWLRGALATADRDYGILNKVFHNITDTHVAHHLFSTMPHYHAMEATKAIKPILGDYYQFDGTPVYKAMWREARECLYVEPDDGANSKGVFWYKKNL

SEQ ID NO: 53730 - DNA, 1180 bp, Glycine max
  CDS (4)..(1146)
gcaatggttaaagacacaaagcctttagcctatgccgccaataatggataccaacaaaagggttcttcttttgattttgatcctagcgctcctccaccgtttaagattgcagaaatcagagcttcaataccaaaacattgctgggtcaagaatccatggagatccctcagttatgttctcagggatgtgcttgtaattgctgcattggtggctgcagcaattcacttcgacaactggcttctctggctaatctattgccccattcaaggcacaatgttctgggctctctttgttcttggacatgattgtggccatggaagcttttcagatagccctttgctgaatagcctggtgggacacatcttgcattcctcaattcttgtgccataccatggatggagaattagccacagaactcaccatcaaaaccatggacacattgagaaggatgagtcatgggttccattaacagagaagatttacaagaatctagacagcatgacaagactcattagattcactgtgccatttccattgtttgtgtatccaatttatttgttttcaagaagccccggaaaggaaggctctcacttcaatccctacagcaatctgtttccacccagtgagagaaaaggaatagcaatatcaacactgtgttgggctaccatgttttctctgcttatctatctctcattcataactagtccacttctagtgctcaagctctatggaattccatattggatatttgttatgtggctggactttgtcacatacttgcatcaccatggtcaccaccagaaactgccttggtaccgcggcaaggaatggagttatttaagaggtggcctcaccactgtggatcgtgactatggttggatcaataacattcaccatgacattggcacccatgttatccaccatcttttcccccaaattcctcattatcacctcgttgaagcgacacaagcagcaaaaccagttcttggagattactaccgtgagccagaaagatctgcgccattaccatttcatctaataaagtatttaattcagagtatgagacaagaccacttcgtaagtgacactggagatgttgtttattatcagactgattctctgctcctccactcgcaacgagactgagtttcaaactttttgggttattatttattggatt

SEQ ID NO: 53731 - protein, 380 aa, Glycine max
MVKDTKPLAYAANNGYQQKGSSFDFDPSAPPPFKIAEIRASIPKHCWVKNPWRSLSYVLRDVLVIAALVAAAIHFDNWLLWLIYCPIQGTMFWALFVLGHDCGHGSFSDSPLLNSLVGHILHSSILVPYHGWRISHRTHHQNHGHIEKDESWVPLTEKIYKNLDSMTRLIRFTVPFPLFVYPIYLFSRSPGKEGSHFNPYSNLFPPSERKGIAISTLCWATMFSLLIYLSFITSPLLVLKLYGIPYWIFVMWLDFVTYLHHHGHHQKLPWYRGKEWSYLRGGLTTVDRDYGWINNIHHDIGTHVIHHLFPQIPHYHLVEATQAAKPVLGDYYREPERSAPLPFHLIKYLIQSMRQDHFVSDTGDVVYYQTDSLLLHSQRD

SEQ ID NO: 53732 - DNA, 1242 bp, Glycine max
  CDS (56)..(1186)
caccacgtatccctgaaaagagagaaaaacacactaagccaaagccaaagcagcaatggttaaagacacaaagcctttagcctatgctgctaataatggataccaaaaggaagcttttgatcccagtgctcctccaccgtttaagattgcagaaatcagagttgcaataccaaaacattgctgggtcaagagtccatggagatccctcagttatgttctcagggatgtgcttgtaattgctgcattgatggctgctgcaagtcacttcaacaactggcttctctggctaatctattggcccattcaaggaacaatgttctgggctctgtttgttcttggacatgattgtggccatggaagcttttcagacagcccttttctaaatagcctggtgggacacatcttgcattcctcaattcttgtgccataccatggatggagaattagccacagaactcaccatcaaaatcatggacacattgagaaggatgaatcctgggttccattaaccgagaagatttacaagaatctagacaacatgacaagacttgttagattcactgtgccatttccattgtttgtgtatccaatttatttgttctcaagaagccccggaaaggaaggttctcacttcaatccctacagcaatctgttcccacccagtgagagaaagggaatagcaatatcaacactgtgttgggttaccatgttttctatgcttatctatctctccttcataactagtccagttctattgctcaagctctatggaattccatattggatatttgttatgtggctggactttgtcacatacttgcatcaccatggtcatcatcagaaactgccttggtatcgcggcaaggaatggagttatttaagaggtggtctcacaactgtggatcgtgactatggttggatcaataacattcaccatgacattggcacccatgttattcaccatcttttccctcaaattcctcattatcacctcgtcgaagcgacacaagcagcaaaatcagttcttggagagtattaccgtgagccagaaagatctgcaccattaccatttcatctaataaagtatttaattcagagtatgagacaagaccacttcgtaagtgacactggagatgtggtttattatcagactgattctctgcaccttcactcgcaccgagactgagtttcaatttttgggttatttattggattctagctactcaaatatcattgaccctt

SEQ ID NO: 53733 - protein, 376 aa, Glycine max
MVKDTKPLAYAANNGYQKEAFDPSAPPPFKIAEIRVAIPKHCWVKSPWRSLSYVLRDVLVIAALMAAASHFNNWLLWLIYWPIQGTMFWALFVLGHDCGHGSFSDSPFLNSLVGHILHSSILVPYHGWRISHRTHHQNHGHIEKDESWVPLTEKIYKNLDNMTRLVRFTVPFPLFVYPIYLFSRSPGKEGSHFNPYSNLFPPSERKGIAISTLCWVTMFSMLIYLSFITSPVLLLKLYGIPYWIFVMWLDFVTYLHHHGHHQKLPWYRGKEWSYLRGGLTTVDRDYGWINNIHHDIGTHVIHHLFPQIPHYHLVEATQAAKSVLGEYYREPERSAPLPFHLIKYLIQSMRQDHFVSDTGDVVYYQTDSLHLHSHRD

SEQ ID NO: 53734 - DNA, 1683 bp, Solanum lycopersicum
  CDS (156)..(1463)
agcctctctctgtggaataaggagagacacacatcttcttacccttttaaaagagaaaataatagtataatttcaatttcaaaactctttatatctatctacattcacacttcacctaacccaacatctcatctctcttcttctccctaactaaaatggcaagttgggttctatcagaatgtggtttaggaccactaccaaaaatatacccaaagcctacaataggtttttcttcttccgtttctgtttccgccaccagtttgaatttgagaagaatttcaccttcacctatacgaacagatcggaattgttgggcattgagggtaagtgcaccgcttaggatccaaattgccggagaagaagaggaacaaacaacaaacaatggggatgagttttttgacccaggggcaccacccccttttaagctttctgatattaaggcagctattcctaagcattgttgggtcaaaaatccatggacgtccatgagttatgttgttagagatgtagctattgtgtttgggctggcggctgctgctgcttatttcaacaattggcttgtttggcctctttattggtttgctcagagtacaatgttttgggctctctttgctctaggtcatgattgtggacatggaagcttttcaaataaccatagcttgaatagcgttgctggacatattcttcattcttcgattcctgttccttatcatggatggagaataagccacagaactcatcatcagaaccatggacatgttgagaatgatgaatcatggcatcctttatctgagaagctttacaatagtttggatgatatcacaaagaaatttaggttcactctaccctttcccttgctggcatatcctttctatctgtggggtagaagtccgggaaagaaaggttctcactttgatccaaacagtgatttgtttgtggcaagtgagaagaaagatgtgatcacttcaactgtctgctggacggcaatggctgcattgcttgtaggattgtcctttgtcatgggtcctcttcaaatgcttaagctttatggcatcccctattggggctttgtcatatggctggatttagttacctatttgcatcaccatggccatgaagataaagttccttggtacagaggagaggaatggagttatctgagaggagggcttacaacacttgatcgtgactatggatggattaacaacatccaccatgacatagggactcatgtgatacatcatctcttccctcaaatcccacactatcatttggtagaagcaactgaagctgctaaaccagtgttagggaaatattataaggagccaaagaagtcagggcctctaccattttacttgttgggatatctgataagaagcatgaaggaggatcactttgtgagtgacacagggaatgtagtatattatgaaactgatcccaacctttatgggtctaagaaatagcaaaaccctgttagctgattattttttcactaacactatctatggccattcaagttggttactactagttgagcacagagtaaagttagaagatgggggaaggcatatagtttcaattattgtcttcaggaccttttgttgggttggccaagaaagtatattatttgtattctggattctgaaatgttttatttataaaaaatatacttcagttcccacc

SEQ ID NO: 53735 - protein, 435 aa, Solanum lycopersicum
MASWVLSECGLGPLPKIYPKPTIGFSSSVSVSATSLNLRRISPSPIRTDRNCWALRVSAPLRIQIAGEEEEQTTNNGDEFFDPGAPPPFKLSDIKAAIPKHCWVKNPWTSMSYVVRDVAIVFGLAAAAAYFNNWLVWPLYWFAQSTMFWALFALGHDCGHGSFSNNHSLNSVAGHILHSSIPVPYHGWRISHRTHHQNHGHVENDESWHPLSEKLYNSLDDITKKFRFTLPFPLLAYPFYLWGRSPGKKGSHFDPNSDLFVASEKKDVITSTVCWTAMAALLVGLSFVMGPLQMLKLYGIPYWGFVIWLDLVTYLHHHGHEDKVPWYRGEEWSYLRGGLTTLDRDYGWINNIHHDIGTHVIHHLFPQIPHYHLVEATEAAKPVLGKYYKEPKKSGPLPFYLLGYLIRSMKEDHFVSDTGNVVYYETDPNLYGSKK

SEQ ID NO: 53736 - DNA, 1588 bp, Betula verrucosa
  CDS (182)..(1342)
ggagcatccaaagacagattcttgtgtgtttctctctactctcacgtgcacatcaatccccttgatagcttcttgtaaaatataacagccttgtaaccctttcacctctcacagagttgagcaagcctcctgtccacattctcaattaggtctgcagaaaaaagattggcatatccctccaatgaaagaaccagtgcttgaagaaatggagaatgcaggagggtttggtaatgggtttcatggggttgttgaaaaagatgatttcgacccaagtgcgccgcctccgtttaagattgctgagatccgagccgccattcccaagcactgctgggcaaagaatccgtggaggtctctcagttatgctctcagggatgtttttgtggttattgcattggcagcagctgcaatctacttcaaagcttggatcttttggccactttactgggctgctcagggaacaatgttctgggctctatttgttctcggacatgattgtggccatggaagcttttctgacaatcccgagctgaataatttggtgggacatgtcttgcattctgcaattcttgttccctaccatggatggagaattagccacagaactcaccaccagaaccatgggaatgtcgagaatgacgagtcatgggttccgctgactgagaagttatacaagagtttgggatacagcacccgattgctgagattcacagttccttttcccctgtttgcatatcctatttacttgtggagtcgaagtccaggaaaggaaggttcccatttcaacccatatagcaacctgttcagccccaatgaaaggaaagatgtgataacttcaaccttatgctggtctctaatggctgctctgcttatctattcatcctgtgcaataggccccatccaaatgctaaagctttatggtgttcctcacttgatttttgtaatgtggctggaccttgtgacttacttacaccaccatggctatgagcagaagcttccttggtaccgtggcaaggaatggagttatctaaggggagggctcacaacagttgatcgagattatggatggtttaacaacatccaccatgatattggcacccatgttatacatcatctcttccctcaaatcccacactatcatctagtggaagcgactaatgcagctaaaccagtgcttggaaagtactatcgcgagccaaagagatctgggccatttccaattcacttgatcaagaatctagtaagaagcatttcagaagaccactatgtcaatgacaatggagacatcgtctactatcagactgaccctgagttgtataaatcttccaataccaagtctgactgattctttcagaaacaggaggatgaagttttggcagttgtttgattactctgtttctagttcagaattggtcaattgatgtctatgataagctagggagacttcaatttgtttcttttattttccaaaattatgagatcctattcttttctccacaaggtagaaaaggattttgtgttatgatgaaaatttcaaatagttgtattttgatgataaagcatacctttctctaaaaaaaaaaaaaaaaaa

SEQ ID NO: 53737 - protein, 386 aa, Betula verrucosa
MKEPVLEEMENAGGFGNGFHGVVEKDDFDPSAPPPFKIAEIRAAIPKHCWAKNPWRSLSYALRDVFVVIALAAAAIYFKAWIFWPLYWAAQGTMFWALFVLGHDCGHGSFSDNPELNNLVGHVLHSAILVPYHGWRISHRTHHQNHGNVENDESWVPLTEKLYKSLGYSTRLLRFTVPFPLFAYPIYLWSRSPGKEGSHFNPYSNLFSPNERKDVITSTLCWSLMAALLIYSSCAIGPIQMLKLYGVPHLIFVMWLDLVTYLHHHGYEQKLPWYRGKEWSYLRGGLTTVDRDYGWFNNIHHDIGTHVIHHLFPQIPHYHLVEATNAAKPVLGKYYREPKRSGPFPIHLIKNLVRSISEDHYVNDNGDIVYYQTDPELYKSSNTKSD

SEQ ID NO: 53738 - DNA, 1703 bp, Betula verrucosa
  CDS (61)..(1395)
tctctgtggccataaagacccggagctgagattgtttcatcttctgcatccgggcctcgaatggcgagctgggtcgtctcagaatgtgggctaaagcctctgcctagaatattaaaccctcgactcagagatggagtagcatcaagcactacctttccttccaagataaggccgccaccaatctgtaaaagccactgtgttggttcttctttgagactatcaagcgggcttagaggaaacaggtggtgggcactaaatgtgagtgcgccattcagggtcccgtctgtgggagaggaaggtgaaaatagagagagagttaatggcgttgaagatgatggagaatttgaccccggttcacctcctccttttcggttgaccgatatccgagctgccattccaaagcattgttgggttaaagacccttggaaatcgatgagctatgttgtgagagatgttgtggtggtttttgggttggcagctattgcggcttacttcaacaattggattgtttggcctctgtactggattgctcagggcaccatgttctgggctctctttgttcttggccacgactgtggtcatgggagcttctctagtaatcttaatctcaatagtgttgtggggcatctccttcattcttcaatccttgtcccctaccatggatggagaattagccaccggactcatcatcaaaaccatggacacgtcgagaatgatgaatcatggcatccattgtctgagaagatgtacaagaaattggattatgtcacccgatcattgaggttcaccttgccttttccaatgctggcttaccctttctatttgtgggttcgaagtcctggaaagaagggctctcattaccaccccaacagcgatttgtttgtcccaaatgaaagaaaagatgttatcacctcaactgcttgttggactgcaatggctgcactacttgtgtacttatcctttgcaatgggtcctgtccaactccttaaactctatggcattccttactggatatttgtagtgtggctggatgtagtcacttacttgcatcaccacggccacgaggacaaacttccttggtatcgtggaaaggaatggagttatctgagaggaggacttacaactcttgaccgtgactatggagtaatcaacaacatccaccacgatattgggacccatgtgatacatcacctattccctcaaatcccgcattaccacttagtagaagcaacggaggcagctaggccagtgtttgggaagtattacagggagccgaagaagtccggtcctctcccatttcacctattgggaacccttataagaagcatgaaacaagatcgctatgtgagcgacgccggagatgttgtatattaccaatcagacaaaactatttgaacctgaggaatcaaaatgaaggcgtgaaggttttcaagtttagcaagtgaagcctatcaacccatggatttttctgtcacttctgactattgtttgtctttgtatcatcagtcatcattcctataattcatctttgttccgcattggcgcagcagactctccatgaatgttaaagagggtttgcataggtgaatgcagcctatccattgtaccatggacataaatatcacagtatgataaaattctgaaaaaataaaaaaagaaagggaaaaggcattctttttcctgggaaaaaaaaaaaaaaaaaa

SEQ ID NO: 53739 - protein, 444 aa, Betula verrucosa
MASWVVSECGLKPLPRILNPRLRDGVASSTTFPSKIRPPPICKSHCVGSSLRLSSGLRGNRWWALNVSAPFRVPSVGEEGENRERVNGVEDDGEFDPGSPPPFRLTDIRAAIPKHCWVKDPWKSMSYVVRDVVVVFGLAAIAAYFNNWIVWPLYWIAQGTMFWALFVLGHDCGHGSFSSNLNLNSVVGHLLHSSILVPYHGWRISHRTHHQNHGHVENDESWHPLSEKMYKKLDYVTRSLRFTLPFPMLAYPFYLWVRSPGKKGSHYHPNSDLFVPNERKDVITSTACWTAMAALLVYLSFAMGPVQLLKLYGIPYWIFVVWLDVVTYLHHHGHEDKLPWYRGKEWSYLRGGLTTLDRDYGVINNIHHDIGTHVIHHLFPQIPHYHLVEATEAARPVFGKYYREPKKSGPLPFHLLGTLIRSMKQDRYVSDAGDVVYYQSDKTI

SEQ ID NO: 53740 - DNA, 1889 bp, Betula verrucosa
  CDS (305)..(1672)
tgagagattgcagaaacgaatttgctaagagagattctctgttttcacagaagagagagaaatagtgagaaagtgagagaaaacttgaggtcgttgttgaaagacagagtgcagacctaagaaaaaggaggatctatattttatttgtgttgtcattagatattttgcttccagacttgtcctcttttttgctttacaaattctttccttgcccctctccccactaactttctttctctctctctctgtgacgtgagagagacctaaagcagaaaccccggtgttagctcgttctgggtcatcaatggcgagctgggtcttatcagaatgtggcttaaagcctcttcctcaagtttttcctagacccagagccggacccatctcatacaagccctcgaagattagatttttgcactcgaacgaaaccgggacagatctaaaatttcattcaaaaagagtttcaagtgggtgtttgagagagagaaactgggggctaaaagtgagtgctccatggagggttgcttctgttgaaggagaggaggagcgagaagagagaatcaatggggttaatgggttcaaagaagaagaagaaccggggttcgacccaggggcgccgccaccgttcaatttgtctaacattcgagccgccattccaaagcattgttgggtaaaggacccgtggaggtccgtgagctatgtggtgagagatgttgtggttgtttttgcgttggctgcagccgcggtttatctcaacaagtggttcgtttggcctctgtattgggctgctcaggggaccatgttctgggctctatttgttcttggccatgattgtggccatggaagcttttcaaataatcataagttaaacagtgtggtggggcatcttcttcattcctcaatccttgtaccctatcatggatggagaattagccataggactcatcatcaaaaccatgggcatgtcgagaatgatgaatcatggcacccgttgcctgaaagaatttacaagaatttggacaaccttacaaagtcctttcgatttaatgctccttttccattgtttgcttaccccttctacctgtggggaagaagtcctgggaaaactggttcccattttgatccaaacagcgacttgtttgtccccaatgagaggaaagatgtgatcacttccactgtatgttggacggcaatggctgctctgcttgtggggttaggctttgtaatgggtcctggtcaattgcttaaactctatggcgttccatattgggtttttgttatgtggctggacttggtcacttacctgcatcaccatggtcatggagacaaattaccatggtatcgtggaaaggaatggagttatctgaggggagggcttacaacaattgatcgggactacggattgattaacaatattcaccatgatattggaacgcatgtcatacatcatctttttcctcaaataccacactaccacttaattgaagcgactgaggcagccaagccagttcttggaaaatattaccgggagccacagaaatcattgcctctgccgtttcacctgattggaagtttgataagaagcttgaaacaggaccactatgttagtgactctggggatgttgtatactaccgaactgaccctaagattagtgggtcatctaagttgaagtaaagtttcaaatgattctttcatcacaacaaagaaaggttctcgagttattttaccaagggagaactaattactgacaaatatgattgtagctgcttcttctagctcataagctaatatatatggatgtggtaatgtcaacaatagtgctgtaatagggaaggaaagatgcgtatttattcttcttggagagaaaatattctcgtcggcagatatataa

SEQ ID NO: 53741 - protein, 455 aa, Betula verrucosa
MASWVLSECGLKPLPQVFPRPRAGPISYKPSKIRFLHSNETGTDLKFHSKRVSSGCLRERNWGLKVSAPWRVASVEGEEEREERINGVNGFKEEEEPGFDPGAPPPFNLSNIRAAIPKHCWVKDPWRSVSYVVRDVVVVFALAAAAVYLNKWFVWPLYWAAQGTMFWALFVLGHDCGHGSFSNNHKLNSVVGHLLHSSILVPYHGWRISHRTHHQNHGHVENDESWHPLPERIYKNLDNLTKSFRFNAPFPLFAYPFYLWGRSPGKTGSHFDPNSDLFVPNERKDVITSTVCWTAMAALLVGLGFVMGPGQLLKLYGVPYWVFVMWLDLVTYLHHHGHGDKLPWYRGKEWSYLRGGLTTIDRDYGLINNIHHDIGTHVIHHLFPQIPHYHLIEATEAAKPVLGKYYREPQKSLPLPFHLIGSLIRSLKQDHYVSDSGDVVYYRTDPKISGSSKLK

SEQ ID NO: 53742 - DNA, 1250 bp, Persea americana
  CDS (37)..(1185)
cctcttcatccaggcaccaaggaaagcaagtgagacatgggtgctggcggtcgcatgtccgtggtcaccccttcagtgaagaaagatgtgctggagcgcgtgcccatcgccaaacctccattcactttcggccagctgaagaaggccataccaccacactgtttcaaccgctccatcccacgttccatgtcctacgttgtctccgacctcaccatctcatccatcctctactaccttgccaccacctacattcccctcctaccctctcccctcagctacttcatcgcctggcccctatactgggccctacagggctgtgtcctcactggcgtctgggtcattgcccacgagtgcggccatcatgccttcagtgactacagttggctcgacgacaccgtgggcctcatcctccactcgttcctcctcgtcccctacttctcctggaagtacagccaccgacgccaccactccaacaccggcagcctcaccagtgatgaggtcttcgttcctaagcccaagtcgcagatgccttggttttcaaagtaccttaacaaccccccaggccgcttcctcaccctcgccttctccctcaccctcggctggcccctttacctcgccttcaacgtctcgggccgcaagtatgaccgtttcgcctgccacttcgacccctatggccccatctacagcgaccgagagcggctgcagatactcatctctgacttgggcgtcttggccgtcttgtgcggtctctttcggctcgtggcggtgtgcgggctggggtgggttgtgtgcgtgtatggtgtgccgctgctgatcgtgaatgggttcctggtgctgatcacttttctgcagcacacgcacccctccctgccgcattatgattctgaggagtgggactggctgaggggtgctcttgcgaccgtggacagggattatggggtgttgaacaaggtgtttcacaacattacggatacgcatgtggctcaccacctcttctcgaccatgccacactaccatgctatggaggcgaccaaggccattcggcctatacttggtgactattatcattctgatgggacgcccgtgtacaaggccatgtatagggaggccaaggagtgtgtctacgtcgagcctgatgagggttctggtgttaagggagtgttctggtaccgcaacaagttttgattgagcaagaagcattgggtttcttgcttagccttcattttacaacaaaaaaaaaaaaaaaaaaa

SEQ ID NO: 53743 - protein, 382 aa, Persea americana
MGAGGRMSVVTPSVKKDVLERVPIAKPPFTFGQLKKAIPPHCFNRSIPRSMSYVVSDLTISSILYYLATTYIPLLPSPLSYFIAWPLYWALQGCVLTGVWVIAHECGHHAFSDYSWLDDTVGLILHSFLLVPYFSWKYSHRRHHSNTGSLTSDEVFVPKPKSQMPWFSKYLNNPPGRFLTLAFSLTLGWPLYLAFNVSGRKYDRFACHFDPYGPIYSDRERLQILISDLGVLAVLCGLFRLVAVCGLGWVVCVYGVPLLIVNGFLVLITFLQHTHPSLPHYDSEEWDWLRGALATVDRDYGVLNKVFHNITDTHVAHHLFSTMPHYHAMEATKAIRPILGDYYHSDGTPVYKAMYREAKECVYVEPDEGSGVKGVFWYRNKF

SEQ ID NO: 53744 - DNA, 1149 bp, Spinacia oleracea
  CDS (1)..(1149)
atgggtgcaggtgggagatctattcctccatcggcgagaaaggagaaatctgatgcattgaacagagtaccatacgaaaaaccaccattcacactagggcagataaaaaaagccatcccacctcattgcttcaaacgctctgtgctacgctctttctcctatgtggtttatgatttcaccattgcgttcctcctctactatgttgctactaactacatccacctccttccaaagcctttcaactacttggcttggcctgtgtatggatttgtccaaggctgtgttcttaccggtgtttgggttatagcccatgaatgtggccaccatgccttcagtgattaccagtggctcgatgacactgttggcttagtcctccactcgttccttcttgtgccatatttctcatggaaatacagtcacaggcgccatcactcaaacactggttcaatggagaaagatgaagtttttgtaccccaaagaaaggaaaatatgtcatggttttccaagtatcttagcaacccacctggacgaatcctgacccttgttgtgacgctaacccttggctggcctttgtatcttctgtttaatgtatcgggtaggaaatatgagcgttttgcttgccattatgacccatcctctccaatctactcggaccgtgagaggcttcaaatattcatttctgatgttgggatttcgatagtggcttttgggctttatcaccttgcagctgccaaaggaatttcatgggtgttgtgtgtatatgggggtccattgcttgttgtgaacggatttcttgtcctgattaccttccttcagcacacacacccttcattgccccattacgatacatctgaatgggattggttgagaggtgcattggctaccgcggaccgagactacgggattttgaacaaggtgttccacaacattactgatactcacgtggctcaccatctcatctcgaccatgccccattatcatgctatggaggcaaccaaggctataaagccaatattgggcaaatattatcggttggattcaactccagtattcaaggcaatgtggagggaggccaaagaatgtatgtatgtggaggctgatgaagacgaccagaacaaaggtgtgctctggtacagaaacaagctttaa

SEQ ID NO: 53745 - protein, 382 aa, Spinacia oleracea
MGAGGRSIPPSARKEKSDALNRVPYEKPPFTLGQIKKAIPPHCFKRSVLRSFSYVVYDFTIAFLLYYVATNYIHLLPKPFNYLAWPVYGFVQGCVLTGVWVIAHECGHHAFSDYQWLDDTVGLVLHSFLLVPYFSWKYSHRRHHSNTGSMEKDEVFVPQRKENMSWFSKYLSNPPGRILTLVVTLTLGWPLYLLFNVSGRKYERFACHYDPSSPIYSDRERLQIFISDVGISIVAFGLYHLAAAKGISWVLCVYGGPLLVVNGFLVLITFLQHTHPSLPHYDTSEWDWLRGALATADRDYGILNKVFHNITDTHVAHHLISTMPHYHAMEATKAIKPILGKYYRLDSTPVFKAMWREAKECMYVEADEDDQNKGVLWYRNKL

SEQ ID NO: 53746 - DNA, 1350 bp, Prunus persica
  CDS (1)..(1350)
atggcaagttgggttctctcagaatgtggcctaaaacctctccctagagtctaccctcaagctaggaacggcctaacatcaaagaccgccatttttgccaatgctaggccattaccagtctgcaaaagcaatatttttggctcttctttgagggcctcgaatgggattcgagggacaaattgggcactgaatgtgagtgctccattgagggttccatctgtggatggaggagataatggaagagtgagtgtcaatggggttgaagatggtagtgatttcgaccctggtgctccacctccttttaatttggctgatattagagcagccattccaaagcatttgtgggttaaagacccctggagatccatgagctacgttgtgagagatgttgctgtggttcttgggttggcggctgttgcagcctactttaacaattgggttgtttggcctctttactggtttgctcaggggaccatgttctgggctctctttgttcttggccatgactgtggtcatggaagtttctctaataacccaaagttaagtagcgtggtgggtcatttacttcattcttcaatccttgtcccataccatggatggagaataagtcacagaactcatcatcagaaccatggacatgtagaaaatgatgagtcttggcatccgttatctgagaaagtttacaagactttggataaggctactcaaatgttgaggttcaccttgccattccctatgcttgcttaccctttctatctgtggggtcgaagtcccggaaagagtggctctcattttgatccaaacagcgacttgtttgtcccaaatgaaaggaaagatatcattacctccactgcctgttggacagcaatggctgggctgctagtcggtctgtctttcgtaatgggtcctgtccaaatgcttaagctctatggcgttccatactggttgttcgtcatgtggttggacttggtcacttacttgcatcaccatggccatgaggacaaactcccatggtatcgtggaaaggaatggagttatctaagaggaggattgacaacccttgatcgagactacggattgatcaacaacatccatcatgacattggaacccatgtcatacatcacctgttccctcaaattccacactataacttagtagaagcaacggaggcagctaagcctgtgcttgggaagtactacagagagccaaagaaatctgggcctctcccacttcacttattgggagttcttataagaagcatgaaacgtgatcattacgtcagtgatactggggatgttgtatattatcaaactgataagaaacttcctgggtctgtgacatcagaatga

SEQ ID NO: 53747 - protein, 449 aa, Prunus persica
MASWVLSECGLKPLPRVYPQARNGLTSKTAIFANARPLPVCKSNIFGSSLRASNGIRGTNWALNVSAPLRVPSVDGGDNGRVSVNGVEDGSDFDPGAPPPFNLADIRAAIPKHLWVKDPWRSMSYVVRDVAVVLGLAAVAAYFNNWVVWPLYWFAQGTMFWALFVLGHDCGHGSFSNNPKLSSVVGHLLHSSILVPYHGWRISHRTHHQNHGHVENDESWHPLSEKVYKTLDKATQMLRFTLPFPMLAYPFYLWGRSPGKSGSHFDPNSDLFVPNERKDIITSTACWTAMAGLLVGLSFVMGPVQMLKLYGVPYWLFVMWLDLVTYLHHHGHEDKLPWYRGKEWSYLRGGLTTLDRDYGLINNIHHDIGTHVIHHLFPQIPHYNLVEATEAAKPVLGKYYREPKKSGPLPLHLLGVLIRSMKRDHYVSDTGDVVYYQTDKKLPGSVTSE

SEQ ID NO: 53748 - DNA, 1155 bp, Brassica campestris
  CDS (1)..(1155)
atgggtgcaggtggaagaatgcaagtgtctcctccctccaaaaagtctgaaaccgacaacatcaagcgcgtaccctgcgagacaccgcccttcactgtcggagaactcaagaaagcaatcccaccgcactgtttcaaacgctcgatccctcgctctttctcctacctcatctgggacatcatcatagcctcctgcttctactacgtcgccaccacttacttccctctcctccctcaccctctctcctacttcgcctggcctctctactgggcctgccaaggctgcgtcctaaccggcgtctgggtcatagcccacgagtgcggccaccacgccttcagcgactaccagtggctggacgacaccgtcggcctcatcttccactccttcctcctcgtcccttacttctcctggaagtacagtcatcgacgccaccattccaacactggctccctcgagagagacgaagtgtttgtccccaagaagaagtcagacatcaagtggtacggcaagtacctcaacaaccctttgggacgcaccgtgatgttaacggttcagttcactctcggctggcctttgtacttagccttcaacgtctcggggagaccttacgacggcggcttcgcttgccatttccaccccaacgctcccatctacaacgaccgtgagcgtctccagatatacatctccgacgctggcatcctcgccgtctgctacggtctctaccgctacgctgctgtccaaggagttgcctcgatggtctgcttctacggagttcctcttctgattgtcaacgggttcttagttttgatcacttacttgcagcacacgcatccttccctgcctcactatgactcgtctgagtgggattggttgaggggagctttggccaccgttgacagagactacggaatcttgaacaaggtcttccacaatatcacggacacgcacgtggcgcatcacctgttctcgaccatgccgcattatcacgcgatggaagctacgaaggcgataaagccgatactgggagagtattatcagttcgatgggacgccggtggttaaggcgatgtggagggaggcgaaggagtgtatctatgtggaaccggacaggcaaggtgagaagaaaggtgtgttctggtacaacaataagttatga

SEQ ID NO: 53749 - protein, 384 aa, Brassica campestris
MGAGGRMQVSPPSKKSETDNIKRVPCETPPFTVGELKKAIPPHCFKRSIPRSFSYLIWDIIIASCFYYVATTYFPLLPHPLSYFAWPLYWACQGCVLTGVWVIAHECGHHAFSDYQWLDDTVGLIFHSFLLVPYFSWKYSHRRHHSNTGSLERDEVFVPKKKSDIKWYGKYLNNPLGRTVMLTVQFTLGWPLYLAFNVSGRPYDGGFACHFHPNAPIYNDRERLQIYISDAGILAVCYGLYRYAAVQGVASMVCFYGVPLLIVNGFLVLITYLQHTHPSLPHYDSSEWDWLRGALATVDRDYGILNKVFHNITDTHVAHHLFSTMPHYHAMEATKAIKPILGEYYQFDGTPVVKAMWREAKECIYVEPDRQGEKKGVFWYNNKL

SEQ ID NO: 53750 - DNA, 1613 bp, Perilla frutescens
  CDS (111)..(1283)
tctctctccaaacactttcctctctctctctatatatatgccaacctcatgtattccatttgttctaactgaaactcgctagtttattgattcaaaccctccccaaaagaatggccgtttcttccggtgcccgcctctcgaagagtggcgctgatggagaggttttcgacggccaacaacaatacgaaggaatcggaaagcgtgcggccgacaaattcgaccccgccgcgccgccgcccttcaagatcgccgacatccgagcggccataccggcgcattgctgggtgaagagtccgtggcgctcattgagctacgtcgtttgggacgtcgccgccgtatctgcgcgtcccgccgccgtttacatcaacagctgggcgttttggccggtttactggattgctcagggcaccatgttttgggcccttttcgttctcgggcatgattgtgggcacgggagtttttcagacaataccacgctgaataacgttgtgggacatgtgcttcactcatcaattcttgtaccgtatcatggatggcgaatcagccatagaactcaccaccaaaaccatggacatgtcgagaaggacgagtcgtgggtgccgttgcctgagaatttgtacaagaagttggatttttccaccaaattcttgagatacaaaatcccattccccatgtttgcatatcctttatatttgtggtatagaagtccgggaaaaactggatctcacttcaacccttacagcgatttgtttaaaccaaatgagaggggcttgatagtgacttcaacaatgtgctgggctgcaatgggtgttttcctccactatgccaccaccattgttggtccaaacatgatgttcaagctctacggcgtaccatatttgatattcgtgatgtggttggacacggtaacatacttacaccaccacggttatgacaagaaactcccttggtaccgcagcaaggaatggatttatttacgaggaggattgacgaccgtagatcaagattatggattttttaataaaattcaccacgatattggcacccatgttatacaccatctattccctcagatcccacattaccacttagtggaggcgacaagggaggcgaaaagggtgctggggaattactacagggagcccagaaaatctgggccagttccactgcacttaattcctgccttgttgaaaagtcttggtagagatcattatgttagtgataatggagacatagtttattatcacacagtagatgagctctttccttccaaaaagatttagtgatggactcttgattgccaaattagatttaatttacagtagtcctttgtgccacaatatttttgtttaggccaggaaatattgtgtgcacaaattaaataactctagtgagtttttttttttggatcaagtgtttgttaccttttcttttttttctttttcctgtcgataaatgtaatgtcgcttaaataaacttatttttggtttttgtgggttattttcgttgacctttgaagttttcgtgttgtattgatcaagagaacgtactcggtgcgtttttgttccattggtttagccgaaatagcattcgataaaaaaaaaaaaaaaaaa

SEQ ID NO: 53751 - protein, 390 aa, Perilla frutescens
MAVSSGARLSKSGADGEVFDGQQQYEGIGKRAADKFDPAAPPPFKIADIRAAIPAHCWVKSPWRSLSYVVWDVAAVSARPAAVYINSWAFWPVYWIAQGTMFWALFVLGHDCGHGSFSDNTTLNNVVGHVLHSSILVPYHGWRISHRTHHQNHGHVEKDESWVPLPENLYKKLDFSTKFLRYKIPFPMFAYPLYLWYRSPGKTGSHFNPYSDLFKPNERGLIVTSTMCWAAMGVFLHYATTIVGPNMMFKLYGVPYLIFVMWLDTVTYLHHHGYDKKLPWYRSKEWIYLRGGLTTVDQDYGFFNKIHHDIGTHVIHHLFPQIPHYHLVEATREAKRVLGNYYREPRKSGPVPLHLIPALLKSLGRDHYVSDNGDIVYYHTVDELFPSKKI

SEQ ID NO: 53752 - DNA, 1291 bp, Helianthus annuus
  CDS (15)..(1166)
caggttagtgaaccatgggtgccggcgggcggatgtcgaacccggtcaacggtgaaaaaaaacccaaccctgacccactccaacgcgtcccataccaaaaacctccgttcacggttggggacgtcaaaaaagccatcccgccccattgtttcaaccggtctgtcatccgttcattctcatatgtcgtgtatgacctcaccattgcctccatcttttattacctcgcgaacaactacatcgcgctcctccctagcccgctcgcctatgtggcgtggcccgtttattggatttgtcaaggttgtgttttaaccggtgtttgggtcatagcccatgaatgtggtcatcacgcgtttagtgactaccaatggctcgatgacaccgtgggccttgttctacattccgcacttttagtgccttacttttcgtggaaatatagtcatcgtcgccatcactccaacacgggctcaatcgagcacgatgaagtgtttgtcccgaaactaaagtccggtgtcaggtcaaccgctagattgctaaacaacccacctggtcgaatcctcaccctactcgtcaccctaaccatgggctggcctttatacctcatgttcaacgtttcgggccggtattatgaccgattcgcgtgccatttcgacccaaacagtccgatctactccaaccgcgaacgggcccagattttcatttctgacgcggggattttaaccgttttgttcgtactcttccgtgttgcaatgaccaaagggctcacgtgggtgttaacaatgtacgccgggccgttgcttgttgtcaacgggttcctagtcctgatcacattcttgcaacatacccacccgtcactacctcactacgactcaaccgaatgggactggctgcgtggggccctagccaccattgaccgagactacggggttctaaacaaggtgttccataacattaccgatactcacgtggcacaccatttgttctcgacaatgcctcattatcacgcgatggaagccacaaaggtgatcaagccgatcttgggagagtactatcagtttgacgggacttcgatttttaaggctatgtatagggaaacaaaggagtgcatttatgttgataaagatgaggaggttaaggatggtgtttactggtaccgtaacaagatatgattcgacaaatttgagtattaagagaagggcgaaattgtcttccttttgatgttatttaggttatgtttggtctttttatgtcagtttaatgaagttgtaataagtgttgtacctgaactattgtg

SEQ ID NO: 53753 - protein, 383 aa, Helianthus annuus
MGAGGRMSNPVNGEKKPNPDPLQRVPYQKPPFTVGDVKKAIPPHCFNRSVIRSFSYVVYDLTIASIFYYLANNYIALLPSPLAYVAWPVYWICQGCVLTGVWVIAHECGHHAFSDYQWLDDTVGLVLHSALLVPYFSWKYSHRRHHSNTGSIEHDEVFVPKLKSGVRSTARLLNNPPGRILTLLVTLTMGWPLYLMFNVSGRYYDRFACHFDPNSPIYSNRERAQIFISDAGILTVLFVLFRVAMTKGLTWVLTMYAGPLLVVNGFLVLITFLQHTHPSLPHYDSTEWDWLRGALATIDRDYGVLNKVFHNITDTHVAHHLFSTMPHYHAMEATKVIKPILGEYYQFDGTSIFKAMYRETKECIYVDKDEEVKDGVYWYRNKI

SEQ ID NO: 53754 - DNA, 1988 bp, Chlorella vulgaris
  CDS (28)..(1284)
tcctttagcttgacttgattgagcaagatggtggccgccctgaccacccagctcgtctgcagcgccgccatcgtgcggtctgcacggccctcgggcctcagccgggctctgcctctgcgccgccgggtcaccctgcgggtcgccaacattgctgcgcccgccgaggacatgctggtgggccagccggcagtggtgccaccattcgagggtggcaagcgcctggccaatgcaccgccctttactctccaagacatgcgcgatgccattccggcagagtgctttgagaaggacacattccgctccgcagcacacctggcacttgacgtcggcattgtggcggccctggccattggtgcctacacgattggcaacccgctggtctggcccctctactggttcctccagggcaccatgttctgggccctctttgtggtgggacacgactgcggccaccagtcttggtccaacaacaagaccctgaacgactttgtgggcaacattgtgcactcgtccatcatggtgccctaccacggctggcgcatctcccaccgcactcaccacgctaaccacggccacgtggagaatgacgagtcctggcacccgattgtcaagtccaactatgagaagcttgacaagtgggcgaagctgggccgcctgctgttccccttccccctgttcgcctaccccttctacctgctcaaccgctctcccggcaagaacggctcccactacgatcccaagagcgacttgttcaccgccagcgagggcccactggttgagaccagcaacaagttccagtgcgcgtggatcggcttcctggccggctgcaccgtggcgctgggtcccctggccatgctcaacctctatgtgctgccttactgggtgtttgtggtgtggctggatgtggtgacctacctgcaccaccacggcccctctgacccagaggaggaggtgccctggtaccgtggtgaggagtggagctacttccgcggggggctgtccaccattgaccgtgactacggcatcttcaacaagctgcaccacgacattggcacgcacgtggtgcaccacctgttcccccagatcccccactaccatctgcagaaggccacagaggcggtgaagcccatcatgggagactactaccgcgagcctgagaagtcgcccggccccatccccacccatctgtttgagccgctgcgccgctcctttgcgcgcgaccactttgtggacaacaccggcgacatcgtgttctatcagcaggacaagaacctgaagctctgagcagggagggccttctttctcttccgggtcgagtcgagctgccagccgcatcaagtgcatcgccgctcttcaagtgcaccccggttgcctgctctcaagcgccggtgcgtgccagccatcatcatatggtgttgcgctgtgacgctgcagcacaagattgctgtttgagccgcgagcatcccagcctcggccctggaaactgtgccacgcctagagcgtgctcagcctagccatagcaccctgtagcctccttatcccgccccgcacgccaccttttcattcaccgcagcattttattgccgtgtgccgccacctcctcactgcggtgtgtcgtcggtcccctctccccccggccgtctccttgttcaccctcccgctctctagcgctgcaattgatcgcattcgtttgcttccagcggctgtgtgtacggtctctgtgagtgtcgggcgcgcctgcaccaacgcagtgtgcagcccatatccctatcctcccccccgaaatggcaacgcattgatctcgtgtcgttccttcgtattctttctccccttcgccgccaccgtcccttgccctcgtacaaagcagacgcacgcccgcacatccacacccccaccgtcgccaccgctcttggcgctgtcaatggctgccctgccaccgcgtgactgcagtgccaatgcttgtgccctcagacccttgtaaatcaacg

SEQ ID NO: 53755 - protein, 418 aa, Chlorella vulgaris
MVAALTTQLVCSAAIVRSARPSGLSRALPLRRRVTLRVANIAAPAEDMLVGQPAVVPPFEGGKRLANAPPFTLQDMRDAIPAECFEKDTFRSAAHLALDVGIVAALAIGAYTIGNPLVWPLYWFLQGTMFWALFVVGHDCGHQSWSNNKTLNDFVGNIVHSSIMVPYHGWRISHRTHHANHGHVENDESWHPIVKSNYEKLDKWAKLGRLLFPFPLFAYPFYLLNRSPGKNGSHYDPKSDLFTASEGPLVETSNKFQCAWIGFLAGCTVALGPLAMLNLYVLPYWVFVVWLDVVTYLHHHGPSDPEEEVPWYRGEEWSYFRGGLSTIDRDYGIFNKLHHDIGTHVVHHLFPQIPHYHLQKATEAVKPIMGDYYREPEKSPGPIPTHLFEPLRRSFARDHFVDNTGDIVFYQQDKNLKL

SEQ ID NO: 53756 - DNA, 1402 bp, Arabidopsis thaliana
  CDS (1)..(1308)
atggcgagctcggttttatcagaatgtggttttagacctctccccagattctaccctaaacacacaacctcttttgcctctaaccctaaacccactttcaaattcaatccaccacttaaacctccttcttctcttctcaattcccgatatggattctactctaaaaccaggaactgggcattgaatgtggcaacacctttaacaactcttcagtctccatccgaggaagacacggagagattcgacccagttgcgcctcctcccttcaatttggcggatataagagcagccatacctaagcattgttgggttaagaatccatggatgtctatgagttatgttgtcagagatgttgctatcgtctttggattggctgctgttgctgcttacttcaacaattggcttctctggcctctctactggttcgctcaaggaaccatgttctgggctctctttgtccttggccatgactgcggacatggtagcttctcgaatgatccgaggctgaacagtgtggctggtcatcttcttcattcctcaattctggtcccttaccatggctggaggattagccacagaactcaccaccagaaccatggtcatgtcgagaatgacgaatcatggcatcctttgcctgaaagcatctacaagaatttggaaaagacgactcaaatgtttaggtttacactgccttttccaatgctcgcataccctttctacttgtggaacagaagtccagggaaacaaggttctcattatcatccggacagtgacttgtttcttccaaaagagaagaaagatgttctgacatcaactgcctgttggactgcaatggctgctttgcttgtttgtctcaactttgtcatgggtccaatccagatgctcaaactatatggcatcccttattggatatttgtaatgtggttggacttcgtcacttacttgcaccaccatggacatgaagacaagctcccttggtatcgtggaaaggaatggagttacctgagaggagggctcacaacattagatcgtgactacggatggatcaataacatccaccacgatattggaactcatgtgatacatcatcttttcccgcagatcccacattatcatctagtagaagcaacagaagcagctaaaccagtactaggaaagtactacagagaaccgaaaaactctggacctctgccacttcacttactgggaagcctcataaagagtatgaaacaagaccatttcgtaagcgatacaggagatgtcgtgtactatgaggcagatccaaaactcaatggacaaagaacatgaggacatactgcagtgaaccaggcagacaagttacataaattcatcttggcccattcattatgttctttttgttttggtgtaaagccttttcgag

SEQ ID NO: 53757 - protein, 435 aa, Arabidopsis thaliana
MASSVLSECGFRPLPRFYPKHTTSFASNPKPTFKFNPPLKPPSSLLNSRYGFYSKTRNWALNVATPLTTLQSPSEEDTERFDPVAPPPFNLADIRAAIPKHCWVKNPWMSMSYVVRDVAIVFGLAAVAAYFNNWLLWPLYWFAQGTMFWALFVLGHDCGHGSFSNDPRLNSVAGHLLHSSILVPYHGWRISHRTHHQNHGHVENDESWHPLPESIYKNLEKTTQMFRFTLPFPMLAYPFYLWNRSPGKQGSHYHPDSDLFLPKEKKDVLTSTACWTAMAALLVCLNFVMGPIQMLKLYGIPYWIFVMWLDFVTYLHHHGHEDKLPWYRGKEWSYLRGGLTTLDRDYGWINNIHHDIGTHVIHHLFPQIPHYHLVEATEAAKPVLGKYYREPKNSGPLPLHLLGSLIKSMKQDHFVSDTGDVVYYEADPKLNGQRT

SEQ ID NO: 53758 - DNA, 1341 bp, Arabidopsis thaliana
  CDS (1)..(1341)
atggcgaacttggtcttatcagaatgtggtatacgacctctccccagaatctacacaacacccagatccaatttcctctccaacaacaacaaattcagaccatcactttcttcttcttcttacaaaacatcatcatctcctctgtcttttggtctgaattcacgagatgggttcacgaggaattgggcgttgaatgtgagcacaccattaacgacaccaatatttgaggagtctccattggaggaagataataaacagagattcgatccaggtgcgcctcctccgttcaatttagctgatattagagcagctatacctaagcattgttgggttaagaatccatggaagtctttgagttatgtcgtcagagacgtcgctatcgtctttgcattggctgctggagctgcttacctcaacaattggattgtttggcctctctattggctcgctcaaggaaccatgttttgggctctctttgttcttggtcatgactgtggacatggtagtttctcaaatgatccgaagttgaacagtgtggtcggtcatcttcttcattcctcaattctggtcccataccatggcaggagaattagtcacagaactcaccaccagaaccatggacatgttgagaatgacgaatcttggcatcctatgtctgagaaaatctacaatactttggacaagccgactagattctttagatttacactgcctctcgtgatgcttgcataccctttctacttgtgggctcgaagtccggggaaaaagggttctcattaccatccagacagtgacttgttcctccctaaagagagaaaggatgtcctcacttctactgcttgttggactgcaatggctgctctgcttgtttgtctcaacttcacaatcggtccaattcaaatgctcaaactttatggaattccttactggataaatgtaatgtggttggactttgtgacttacctgcatcaccatggtcatgaagataagcttccttggtaccgtggcaaggagtggagttacctgagaggaggacttacaacattggatcgtgactacggattgatcaataacatccatcatgatattggaactcatgtgatacatcatcttttcccgcagatcccacattatcatctagtagaagcaacagaagcagctaaaccagtattagggaagtattacagggagcctgataagtctggaccgttgccgttacatttactggaaattctagcgaaaagtataaaagaagatcattacgtgagcgacgaaggagaagttgtatactataaagcagatccaaatctctatggagaggtcaaagtaagagcagattga

SEQ ID NO: 53759 - protein, 446 aa, Arabidopsis thaliana
MANLVLSECGIRPLPRIYTTPRSNFLSNNNKFRPSLSSSSYKTSSSPLSFGLNSRDGFTRNWALNVSTPLTTPIFEESPLEEDNKQRFDPGAPPPFNLADIRAAIPKHCWVKNPWKSLSYVVRDVAIVFALAAGAAYLNNWIVWPLYWLAQGTMFWALFVLGHDCGHGSFSNDPKLNSVVGHLLHSSILVPYHGRRISHRTHHQNHGHVENDESWHPMSEKIYNTLDKPTRFFRFTLPLVMLAYPFYLWARSPGKKGSHYHPDSDLFLPKERKDVLTSTACWTAMAALLVCLNFTIGPIQMLKLYGIPYWINVMWLDFVTYLHHHGHEDKLPWYRGKEWSYLRGGLTTLDRDYGLINNIHHDIGTHVIHHLFPQIPHYHLVEATEAAKPVLGKYYREPDKSGPLPLHLLEILAKSIKEDHYVSDEGEVVYYKADPNLYGEVKVRAD

SEQ ID NO: 53760 - DNA, 1152 bp, Daucus carota
  CDS (1)..(1152)
atgggtgcaggtgggcgtatgtctgctccctccaatgtcaaaaaaacagaaacagaagcgcttcgacgtgctcctcatgagaaacctccattcaccataggtgatcttaagaaagccattcctgctcattgcttcgaaaaatctctaatcacttcttttcgatatctcattcaagatctcctcatggcctatgctctctactatgttgctactaattacatagaccagtatttaccccatccaatcaactacttgggctgggcagcctacattgctatacagggctgtgtcctcaccggggcttgggtcgttggccacgagtgtgatcatgatgccttcagtgactatggctggatcaatgaccttgttggccttgttgtccactcttctctcatggtcccttatttctcttggaaaattagccaccgtcgtcaccatgccaacactcaatcccttgagaatgatgaggtttatgtcccgaggttcaagtccaacatcaggaattactacaaaattctcaataatccaccgggacgtgtcattgtctggcttatcacactcctcataggcttcccaatatacttgatgttcaatgtttcgggacacaagtatgagaggtggacttcacactatgatccccatagccctctttacacagaacgtgaacgcaaacagatcattgtctctgattttgcaattcttgctgttctctacgggttatacaatctagtattagccaaaggatttgcctgggttttctgtgtctatggaggtccattgctagttgtgaatggatggttcaccttgatcacaatcctcaatcacactcatccctctttgccttactacgattcatcagaatgggattggttgaggggagctctttgtaccgtagacagagactacgggattttgaacaaggtattccacaatgtatgcaatgctcatgtctgtcaccacatattctccatgatcccacattaccacggactcgaagccacagaggccatgaagcctttactcggagattactatcaatatgatgggactccaattctcaaggcaatgtacagagaaatgaaggaatgcatttacgtggagaaggatgaaggcgagactaaaggagtctactggtccagaaaggatatttag

SEQ ID NO: 53761 - protein, 383 aa, Daucus carota
MGAGGRMSAPSNVKKTETEALRRAPHEKPPFTIGDLKKAIPAHCFEKSLITSFRYLIQDLLMAYALYYVATNYIDQYLPHPINYLGWAAYIAIQGCVLTGAWVVGHECDHDAFSDYGWINDLVGLVVHSSLMVPYFSWKISHRRHHANTQSLENDEVYVPRFKSNIRNYYKILNNPPGRVIVWLITLLIGFPIYLMFNVSGHKYERWTSHYDPHSPLYTERERKQIIVSDFAILAVLYGLYNLVLAKGFAWVFCVYGGPLLVVNGWFTLITILNHTHPSLPYYDSSEWDWLRGALCTVDRDYGILNKVFHNVCNAHVCHHIFSMIPHYHGLEATEAMKPLLGDYYQYDGTPILKAMYREMKECIYVEKDEGETKGVYWSRKDI

SEQ ID NO: 53762 - DNA, 1152 bp, Calendula officinalis
  CDS (1)..(1152)
atgggtgcaggcggtcgaatgcaagatcccaccaacggtggcaacaaaaccgagcccgaaccaatccaacgggtcccacatgaaaaacccccattcacagttggagacatcaagaaagcgatcccacctcattgtttcaaccgatcggtaattcgttcattttcatacgtcttttacgacctcacaatcgcgtcaatcttgtactacattgccaacaattacatctctaccctccctagcccgctcgcctacgtggcatggcccgtttactgggccgtccaagggtgcgtcttaaccggggtgtgggtcatagcccacgaatgtggccatcatgcttttagcgaccaccaatggctcgatgacaccgtgggtctcgtcttgcactcgttcctactcgtgccctacttttcgtggaaatatagccaccgtaggcaccactcgaacacgggctcgatcgagcacgatgaggttttcgtcccgaagttgaaatcgggcgtccggtcaaccgcccggtacctaaacaacccaccgggccgaatcttgaccctactcgtaaccctaaccctcggttggcctctatacctcacgttcaacgtttcgggccgttactacgaccggttcgcgtgccatttcgacccgaatagcccgatctactcgaagcgcgaacgggctcaaatcttcatatccgacgccgggatcttagccgtagtcttcgtactcttccgactcgcaatgaccaaagggctcacgtgggtcctaaccatgtacggtggcccgttactcgtggtcaacggtttcctagtcttgatcacattcctacaacacactcacccttcgctcccgcactatgactcaaccgaatgggattggttacgtggggccctcaccacaatcgaccgtgattacgggatcctaaacaaagtgttccataacataaccgacactcacgtggcccaccatttgttctctacaatgcctcattaccatgcaatggaagccacgaaggtgatcaaaccgattttgggcgattattatcagtttgacgggacctcgatttttaaggcgatgtatcgggaaacaaaggagtgcatttatgttgataaggatgaggaggtgaaagatggtgtttattggtatcgtaataagatttaa

SEQ ID NO: 53763 - protein, 383 aa, Calendula officinalis
MGAGGRMQDPTNGGNKTEPEPIQRVPHEKPPFTVGDIKKAIPPHCFNRSVIRSFSYVFYDLTIASILYYIANNYISTLPSPLAYVAWPVYWAVQGCVLTGVWVIAHECGHHAFSDHQWLDDTVGLVLHSFLLVPYFSWKYSHRRHHSNTGSIEHDEVFVPKLKSGVRSTARYLNNPPGRILTLLVTLTLGWPLYLTFNVSGRYYDRFACHFDPNSPIYSKRERAQIFISDAGILAVVFVLFRLAMTKGLTWVLTMYGGPLLVVNGFLVLITFLQHTHPSLPHYDSTEWDWLRGALTTIDRDYGILNKVFHNITDTHVAHHLFSTMPHYHAMEATKVIKPILGDYYQFDGTSIFKAMYRETKECIYVDKDEEVKDGVYWYRNKI

SEQ ID NO: 53764 - DNA, 2248 bp, Picea abies
  CDS (436)..(1785)
aattcggcacgaggagagagagagagagagagagagagagagagagagagagagagagagatcgtgccgaatcggcacgagcggagaggtggggaggcggagagggtacattcaaagaggaaagcgtgtattgtatgactgagatgatctgaagaggaatcttcaaatcgtttcattcaaactgtacggccccctatcttacccggatcttgccctttatattaccttgagcccggctttcagttcatgttatatccgagcggttccttgcgtttggcatcgatcacagctaattgaaaagctgcagtttgagcccaatttatcttctgggactggtgttttgcttggatttgatctgggtttcatttttttatctgagagcgagagaacccaattcatccataggtaggcaatatttgaggatccattgcagtaatggcgttggtattgtctgattgctgtgttttgaaaacgttgccttctcttaaaatgggttcaaaacacaagcccatggttcctcaagcagctgtccctgctactgtggggctgagacccttgccctcattgtgtctggggagatcttttcccaagcataagggtgctggtactttcccttacggtcccttgcgcagaggaccaaggctaggaggggagactggtgttgcagtgcctcttaggcctactttggtttcagataatgagaatggtgaagcaggctttgatccgagcgcgcctcctccgttcaccttggcagaaattcgagcagccattccgaagcattgctgggggaagaatacttggaagtctataagctatgttgtgagggatgtggctgttgtgattgggctggccgctgcagctagttattttaacaattgggtgttttggcccatttattgggttgctcagggaaccatgttttgggcgctttttgtgctgggacatgattgtggacatggaagcttttctagcaaccacaaactcaacagtgtgattgggcatttgactcattcttcaatcctagtaccttatcatggctggagaatcagtcatagaacacatcatcagaatcacggacatgtagagaatgacgaatcatggcatcctatgtctaaaaagttatataacagtttggatgaaacaaccaggaagttacggtttaatatcccatgggccctgcttgcatatcctttctacctgtggggtagaactcccggaaagaaaggttctcattttcatcctgacagcgatctatttgttccgagtgagaagaaggatgtcattacatcaacagcatgctggagcgcaatggtggctttgctagctggacttacagtgtttatgggtcctgcatggataataaagttctatgttattccctactggatttttgtaatgtggttagatcttgtgacatatcttcatcaccatggttatgacgagaaggttccatggtacagaggcaaggaatggagttatctcagaggagggcttacaaccattgatcgagactatggcttgattaacaatatccatcatgatattggaacccatgttgtgcatcacttgtttcctcaaatacctcactaccacctagtggaagcgactgaagcagtaaagcctgtgcttggaaagtactatcgggagccgaagcagtccggtcctctgccattgcacttgctggaccctctagtgaagagcatgtcacaagatcattatgttaatgatgagggagagattgtgtattatcaagcagaccctgacatcaaaaagtctagaagatgaaatcaatctgaaaatagatggaatattctttaacatatagcatctttcaggagctatttttcggacatgtttctctactcataaaatgctgaaagctgttgtatgattcggcctttttattttaggtttagattcaaaggtcttaattattatttttcgataattcatgtctcacaaccttgagccactccaaaagtatttggaaaacagagtggctcaagttgtttattggtgcttttcccaaagaacttggggaagtatacattggttagaaactcaacaaatatcccctacaatgtattggcgagtactccagtaccgaaaaggcttggaaaatctttggagatttgagatcttaaatttttttatatgtactatatacacatctttcttcagatatatgtattatttatttatcaatgaataatgctgttctttttttcaaaaaaaaaaaaaaaaaaaa

SEQ ID NO: 53765 - protein, 449 aa, Picea abies
MALVLSDCCVLKTLPSLKMGSKHKPMVPQAAVPATVGLRPLPSLCLGRSFPKHKGAGTFPYGPLRRGPRLGGETGVAVPLRPTLVSDNENGEAGFDPSAPPPFTLAEIRAAIPKHCWGKNTWKSISYVVRDVAVVIGLAAAASYFNNWVFWPIYWVAQGTMFWALFVLGHDCGHGSFSSNHKLNSVIGHLTHSSILVPYHGWRISHRTHHQNHGHVENDESWHPMSKKLYNSLDETTRKLRFNIPWALLAYPFYLWGRTPGKKGSHFHPDSDLFVPSEKKDVITSTACWSAMVALLAGLTVFMGPAWIIKFYVIPYWIFVMWLDLVTYLHHHGYDEKVPWYRGKEWSYLRGGLTTIDRDYGLINNIHHDIGTHVVHHLFPQIPHYHLVEATEAVKPVLGKYYREPKQSGPLPLHLLDPLVKSMSQDHYVNDEGEIVYYQADPDIKKSRR

SEQ ID NO: 53766 - DNA, 1400 bp, Petroselinum crispum
  CDS (57)..(1208)
gaattcggcacgaggaaaaggagagtagcatttgtctattcattgtagaaacaaaaatgggtgcaggtggacgaatgtccgctccctctaatggcaagaaaactgaagcagaagcactcagacgcgctcctcatgagaaaccaccattcaccattggtgaccttaagaaagccattcctgctcattgcttcgaaaaatcacttgtcacttcttttcggtacctcattcaagatctcattatggcctatgctctcttctatgtagctactaattacatagaccaataccttccacatcctctcaactacctgggttgggctgcctacattgctgtccaggggtgtgtcttaaccggagcttgggttgtcggtcatgaatgtgatcatgacgccttcagcgattatggttgggttaatgaccttgttggccttgttgtccactcttctctcatggtgccgtacttctcttggaaaattagccacagacgtcaccacgccaacactcaatcacttgagaatgacgaggtttatgtccccagattcaagtccagtatcaggaactactacaaaattatgaacaacccacctggccgtgtccttgtctggcttatcacactcctcataggcttccctttatacttgatgttcaacgtctccggacacaagtatgagaggtggacttcacactacgatccccatagccctctttacacagaacgtgaacgtaaacagatcattgtttctgatattgcaattcttgctgttctctacgggttatacaatctcgtactagccaaaggatttgcgtgggttttctgtttctatggaggtccactcctagttgttaatggatggttcaccttgatcacaatcctcaaccacactcatccttctttgccttactacgactcaagcgaatgggattggttgaggggagctctatgcaccgttgacagagactacggtattttgaacaaggtgttccataatgtgtgcaatgctcatgtttgtcaccatattttctccatgatcccacattatcatggactagaggcaactgaagctatgaagccaatactcggaaactattatcaatatgacggcactccgattcttaaggccatgtacagggaaatgaaggaatgcatttacgtcgaaaaagatgcaggtgagactaaaggagtgtattggtacagaaaggaattctaaatccatcaccttacagacctgagaagagtaacgtagtttatgttccaactgtcttacatttctagttctttttctttgttgaagtagatctgtaccttgtactacaaagatgaaggaccgaatggttattctgtgtaaaaaaaaaaaaaaaaaaaaaaaaaaaaaaaaaaaaaaaaaaaaaaaaaaaaaaaa

SEQ ID NO: 53767 - protein, 383 aa, Petroselinum crispum
MGAGGRMSAPSNGKKTEAEALRRAPHEKPPFTIGDLKKAIPAHCFEKSLVTSFRYLIQDLIMAYALFYVATNYIDQYLPHPLNYLGWAAYIAVQGCVLTGAWVVGHECDHDAFSDYGWVNDLVGLVVHSSLMVPYFSWKISHRRHHANTQSLENDEVYVPRFKSSIRNYYKIMNNPPGRVLVWLITLLIGFPLYLMFNVSGHKYERWTSHYDPHSPLYTERERKQIIVSDIAILAVLYGLYNLVLAKGFAWVFCFYGGPLLVVNGWFTLITILNHTHPSLPYYDSSEWDWLRGALCTVDRDYGILNKVFHNVCNAHVCHHIFSMIPHYHGLEATEAMKPILGNYYQYDGTPILKAMYREMKECIYVEKDAGETKGVYWYRKEF

SEQ ID NO: 53768 - DNA, 1216 bp, Glycine max
  CDS (30)..(1172)
cagagaaagaaagaaacatttgagcaaaaatggttcaagcacagcctctacaacatgttggtaatggtgcagggaaagaagatcaagcttattttgatccaagtgctccaccacccttcaagattgcaaatatcagagcagcaattccaaaacattgctgggagaagaacacattgagatctctgagttatgttctgagggatgtgttggtagtgactgcattggtagctgcagcaatcggcttcaatagctggttcttctggccactctattggcctgcacaaggcacaatgttttgggcactttttgttcttggacatgattgtggtcatggaagcttttcaaacagtcctttgttgaacagcattgtgggccacatcttgcactcttcaattcttgtaccataccatggatggagaattagccacaggactcaccatcagaaccatggccatgttgagaaggatgaatcatgggttccgcttacagagaaagtttacaagaatctagacaacatgacaagaatgatgagattcactcttcctttccccatctttgcataccccttttatttgtggagcagaagccctggaaaagaaggctctcatttcaacccttacagcaacttgttctctcctggtgagagaagagatgtgctaacttcaactctgtgttggggcatcatgctttctgtgcttctctatctttccctcacaatgggtccactttttatgctcaagctctatggggttccctatttgatcttcgtcatgtggctggatttcgtcacgtacttgcatcatcatggttacaagcagaaactgccttggtaccgtggccaggaatggagttatctaaggggtggtcttacaacagtagatcgcgactatggttggatcaacaacattcaccatgacattggcacccatgttatccatcaccttttccctcaaattccacattatcatttaatcgaagcgactaaagcagcaaaggcagtgctaggaaagtattatcgtgagcctcagaaatctgggccattgccacttcatctaataaagtacttgctccacagcataagtcaggatcacttcgttagcgactctggcgacattgtgtactaccagactgattcccagctccacaaagattcttggacccagtccaactaaagtttttgatgctacatttacctattttcactcttaaatactat
